United States Patent Application Publication US 2017/0009304 A1 - sequence listing, part 20

SEQ ID NO: 409939 - DNA, 100 bp, Homo sapiens
tgtgtctcctgtatttgttggagcccatttctggtacatcaggaacgtctctatcaagaatacaatttcagcaaggctgagggccatctgaaacagatgg

SEQ ID NO: 409940 - DNA, 100 bp, Homo sapiens
gctgcgcaggacttctcctggcggcgctgcggatccagggggtcggctgccaggtacagctccgacagttagttaatatgtgcatcaacccagatccaga

SEQ ID NO: 409941 - DNA, 98 bp, Homo sapiens
cccgtttctggctccgggctgagcttcctggagaagaggaagaaatgtagacaaccaatttcctgggcaagctgctccacctggattcccagtgtatc

SEQ ID NO: 409942 - DNA, 82 bp, Homo sapiens
tcggtcctccacctgtccgctacgctcgccggggctgcggccgcccgagatgaaggatttgggggcagagcacttggcaggt

SEQ ID NO: 409943 - DNA, 101 bp, Homo sapiens
tggtgcagaaataccagtccccagtgagggtgtacaaatacccctttgaattaattatggctgaaccagagtgagggtactcgaacagtgactgccatctg

SEQ ID NO: 409944 - DNA, 76 bp, Homo sapiens
aaaagaaagcatactgcgagccctgctacattgaacttgtaatagctggcatcgttgagaatgaatggaaaagaac

SEQ ID NO: 409945 - DNA, 83 bp, Homo sapiens
ggttggggaagtgggggagctggcagaactcttgagcggtggtgccccccccgggcacggggccatgtacaacgggatcgggc

SEQ ID NO: 409946 - DNA, 83 bp, Homo sapiens
ggaaactgctgaaaacagcctcaagaaaccagtaacagattgtgttatttcacctgtggacatctctacagcaatgagtgaac

SEQ ID NO: 409947 - DNA, 74 bp, Homo sapiens
ggatcttccggagctgccgtgcatacctgtgtgaaagcaaccttccacgtctgggaggggctgaacgtggtgaa

SEQ ID NO: 409948 - DNA, 83 bp, Homo sapiens
cgcggctccggccctggccccgatggctctgtgcaacggagactccaaggctactgcagcactggggtgtcagttgttggtcc

SEQ ID NO: 409949 - DNA, 74 bp, Homo sapiens
gtgggaagaatcacgccttctacagactgcagccactgcggcccaggtacgagtggctgctttacagaatctgg

SEQ ID NO: 409950 - DNA, 100 bp, Homo sapiens
cgggaacgagcgagtcgccgctgcagccctagtgactgcggcctgcatcccggtgatctgtgaaaatggttcgctattcacttgacccggagaaccccac

SEQ ID NO: 409951 - DNA, 75 bp, Homo sapiens
ctgccgtcgccgccgccaccatgcccaagagaaaggtactggctgtgatcgaacttctcaaccctcagagactta

SEQ ID NO: 409952 - DNA, 100 bp, Homo sapiens
gcaccgcggcatgaatgtgcccttcaagcgcctgtctgctgctggagccagttctgcttctcggcaaggagcgatttgctggtgtagacatccgtgtccg

SEQ ID NO: 409953 - DNA, 76 bp, Homo sapiens
tcttccaaggaaccaaggcggccctggctgggggaaccactatgatcaatgcgctggctccctccctccgaggcta

SEQ ID NO: 409954 - DNA, 100 bp, Homo sapiens
gctggggctggaggttgaccagttcctggaagacgtgcggctacaggagcgcacgagcggctttcttggactccgtactgttggtgtaaccaaggcctgg

SEQ ID NO: 409955 - DNA, 76 bp, Homo sapiens
ctgagatccatctgcaccacggtgctggatccactagttcctggactatgggaactgatgactcgcccaatgtcac

SEQ ID NO: 409956 - DNA, 82 bp, Homo sapiens
ctgagatctatgatcccacatctggaatctggaatgaaatcttccaagtccaaggatgtggtaaaggacatgttcagttttg

SEQ ID NO: 409957 - DNA, 75 bp, Homo sapiens
gatgccggagcaatggcaagtgggacaggccccaaattgtctgcaccaaacacagccagctaaaggtgtggatga

SEQ ID NO: 409958 - DNA, 75 bp, Homo sapiens
acacgggcctccgaagagctgccgcgacgcccggcccgcagggcagagctgacatcgcgctgatcggattggccg

SEQ ID NO: 409959 - DNA, 100 bp, Homo sapiens
atcaaaagcattgatgatacctcaaacttcgatgagtttccagaatctgatattcttaagccaacagcccacccggagagagctgccctgctgttcgtgt

SEQ ID NO: 409960 - DNA, 100 bp, Homo sapiens
tatcatttctgatctgtctgaatgtttaattaatcaggaatgtgaagaaattctacagaaaaggcgacggcggattgacagaagtatgattggagagccc

SEQ ID NO: 409961 - DNA, 100 bp, Homo sapiens
tacatggacctgcctttctcctcctccccaagtcgcagtgccactgcaagcccacaggtttcccaaaccactccttatgatccagtgaatattcaagaga

SEQ ID NO: 409962 - DNA, 100 bp, Homo sapiens
cctgggcaggtgtcttcctcgagaggcaggcaggggatcccggacatgagctttgatccaaaccttctccacaacaatggacataatgggtaccctaatg

SEQ ID NO: 409963 - DNA, 82 bp, Homo sapiens
aagagttgtggcgaggcagatcctgccccgtggccgcggccgtctctccacaggtcctggctaccctgggaagagacaagaa

SEQ ID NO: 409964 - DNA, 50 bp, Homo sapiens
gcctcctgaggagctgggattacagggcatcttctctgcattcagtttca

SEQ ID NO: 409965 - DNA, 51 bp, Homo sapiens
cgggtgtgaacctaatcgcagaggcgttgcttgagtccatggttgatgctg

SEQ ID NO: 409966 - DNA, 75 bp, Homo sapiens
accaacttgcgcaaaaacaacagacagccctatgctgtcagtgaattagcaggccaagcaatggggctggacaca

SEQ ID NO: 409967 - DNA, 107 bp, Homo sapiens
ccgaaacctccatagtcaccacttcacttcacctctttctggaaaccagaaattgtatgctgctatgcatgaacctgatggagtggccggagtcagtgcaattagaa

SEQ ID NO: 409968 - DNA, 145 bp, Homo sapiens
ctcgttcggtggtttcttgtgaggacgcggcagcccgtggagtcggctgagggaaaagcgaggcaaggcaggcggtgccggtggtggtgtgcacattgagccccggtatagacagttcccccagctgaccagatcccaggtgttc

SEQ ID NO: 409969 - DNA, 96 bp, Homo sapiens
ccctccggagggccatcggcaagagccgcccctactttgagctcaaggcccagttcagccagatcctggaggagtgagatgtggatgttgcttttg

SEQ ID NO: 409970 - DNA, 84 bp, Homo sapiens
ctttgctattgccatgcagatgttcagtttagctcatcgtcctgtcagactagatcatcatggaatatggtgaggaagtattag

SEQ ID NO: 409971 - DNA, 101 bp, Homo sapiens
agatcatccatgtgagtgaccatgcagcaaaagaaggagggtcctctcagtgattaagagattcagttgtggaaattctttttgaacaagataatgaagag

SEQ ID NO: 409972 - DNA, 100 bp, Homo sapiens
atcctataattgaaaaacagtaaagatggaaaaccagttattgaatatcaagaggaggagttgttgggtatgtccagaaatcttgatgcatgtatctgaa

SEQ ID NO: 409973 - DNA, 85 bp, Homo sapiens
tgttcgaggtggagaagatcctggacatgaagaccgaggggctgtctcctatatataatctggttccagtgaaaatgaaaaatgc

SEQ ID NO: 409974 - DNA, 82 bp, Homo sapiens
ggaggctgagccggccgcgggcgcgaccggaggcagtttccctgaaacctgggctcttgaagacgcatcactggagcagatg

SEQ ID NO: 409975 - DNA, 100 bp, Homo sapiens
cgcctccagcttgccaccaaagacctgcgactttgctcaggtgaccctggcaaagatgagagtgcacatttcgtcctgcctgaaggtccaggagcagatg

SEQ ID NO: 409976 - DNA, 82 bp, Homo sapiens
tttcaggcctggcacgtagtagagaagtgttttcatcgaagttagaagaggaggatgcctgccattctccactacctgtcaa

SEQ ID NO: 409977 - DNA, 100 bp, Homo sapiens
gcaataccgcagagagcgagagcacgaattccagagcaagcagcaggcgggctgggacctgacggtgaagatgctggcgggcaacgaattccaggtgtcc

SEQ ID NO: 409978 - DNA, 101 bp, Homo sapiens
gagagagatagacggagatctctggagcagacctcaaggcatgcatatcattctgtttcaactccccctgtttaccctcctaaaaatgttgccgacctgaa

SEQ ID NO: 409979 - DNA, 75 bp, Homo sapiens
taccctgactacagctggagcgcccagaggcgagccctggtggaggaagagtttgactgcaaccctggagtacgt

SEQ ID NO: 409980 - DNA, 100 bp, Homo sapiens
gtcccggagtcgccgctgggcctgtccgctggcgtcatgttctgggaagtcatcagtgatgagcatggcatcgaccccagcggcaactacgtgggcgact

SEQ ID NO: 409981 - DNA, 75 bp, Homo sapiens
gcgccgctctccgagctcgatccgctgctcgcacgggagccagctgggtggtccttccaaccctcctgctaccat

SEQ ID NO: 409982 - DNA, 88 bp, Homo sapiens
gtttcccaatcgccacgctttccccgccttcgtcaacgcctgggaactttcagaaaatgaagtggttggatcttatttctctgtgaag

SEQ ID NO: 409983 - DNA, 92 bp, Homo sapiens
gtggaacgcaagggaaaacaaatttgtaaatattttcttgaaaggaaatgtattaagattgcccccgaggaattagcacttgttcacaactt

SEQ ID NO: 409984 - DNA, 51 bp, Homo sapiens
cgcaagccgtccccggccacgcgggacggagagaagaagaaggaggttcct

SEQ ID NO: 409985 - DNA, 50 bp, Homo sapiens
cggagactttggggcctaactagggagaccaaattttgaggaaggtggac

SEQ ID NO: 409986 - DNA, 100 bp, Homo sapiens
gggaagacgactgtggtgaccagacagatgaaatggcatcttgtgtgctgggcctaaaggagataacatttatgaatggagatcaactatacttggtcca

SEQ ID NO: 409987 - DNA, 83 bp, Homo sapiens
tgaaggtccaggagtacccgaccctcaagacttcccaagtaagaagcggaagaggagccgctggaaccaagacacaatggaac

SEQ ID NO: 409988 - DNA, 100 bp, Homo sapiens
caaacctggcaaggatggtgcagattttggcagattatggctttgtccccacccagcactgatgatattataaagagcttcagtttcagcgactcacccg

SEQ ID NO: 409989 - DNA, 75 bp, Homo sapiens
ctacaggaagctgctggaaggcgaggagagcaggatttaaaaactggaacggtgaaggtgacagcagtcggttgg

SEQ ID NO: 409990 - DNA, 80 bp, Homo sapiens
ccactgttcctggaggaatccgagaagagcagagcggagggagccccagacacggttcccatgatcagtggtgaaatata

SEQ ID NO: 409991 - DNA, 124 bp, Homo sapiens
attgatgaaattaaagatgcatgctgatggcgataagtcattaccacagattgctcttaaacttggtgtgactgctaatgatgtaaagaatgtcattatctggggaaaccattcctcgactcag

SEQ ID NO: 409992 - DNA, 90 bp, Homo sapiens
ctctgccttctcaggcagatacatcagataccttgtttatccatcttcagctccactctgagggagctgggacagatgatcataccctca

SEQ ID NO: 409993 - DNA, 100 bp, Homo sapiens
cagaaccaggcgtccaggacgccgctgaccaccctcaacacggatatcagcatcctgtccttgcagatttctcgaatgctggcagccaaaaccgttttgg

SEQ ID NO: 409994 - DNA, 99 bp, Homo sapiens
aagaggccagatgcagatctgaagacctattttactgataagaaaacacatctttacacactaaccaagacaatgcaaactccagtgaacattcccgtg

SEQ ID NO: 409995 - DNA, 82 bp, Homo sapiens
tttctggaagaagaagaagagcatgatcggcatgtccaccaaggcaggtttggtgcacctcgatttggaggaagtagggcag

SEQ ID NO: 409996 - DNA, 50 bp, Homo sapiens
ctggtcaggatgcacattttggaagcaacctttcccctggatctcacaaa

SEQ ID NO: 409997 - DNA, 98 bp, Homo sapiens
ccgcaggaagcaagcagctgggagaccagagaaaatggatgatgaagaccccattatgggtaccatcacctcggttgttggcatggaggggaagatga

SEQ ID NO: 409998 - DNA, 98 bp, Homo sapiens
gacaactccgcagcaaacaactccgcaaacgaaaaagaacgacatgatgcaatcttcaggaaagtaagaggaacattagcagtgttgtggctgcattt

SEQ ID NO: 409999 - DNA, 100 bp, Homo sapiens
ctgtaacctcttcggtccgcgacgatcctctagagcactgtgtgtctccccggacgcgagcccgctcccctgaaactggatgaattgcctccattgtctc

SEQ ID NO: 410000 - DNA, 96 bp, Homo sapiens
gcggtgcagcgaatcaagcgggagttcaaggaggtgctgaagagcgaggaggcttaagcaggtaaagcagtcactgtgaagaaaataacattttaa

SEQ ID NO: 410001 - DNA, 98 bp, Homo sapiens
actgacagaagcatccatatttgtacacataaccatcaatgaaatctatggaaaggttcaaaccttgtactactcagctgatcacaagctgcttgatg

SEQ ID NO: 410002 - DNA, 101 bp, Homo sapiens
gacctgctccttcctcatcgtgcttgtcaacaaggcgctgctgaccacctacgggcaaatctgagtagcctccaagaggcacacaagcagaggatgggctg

SEQ ID NO: 410003 - DNA, 100 bp, Homo sapiens
gccgttctgcggagaaaaggcatgctgggggcctcgccgaaccgcccagactcttcagggaaaagtttctggcccccaaagacaaaccaagtggagacac

SEQ ID NO: 410004 - DNA, 100 bp, Homo sapiens
agactgtgtgtatatcgagagtcggaggccaaacacaccgtatttcatctgtagcattcaagacttcaaactgaacagctggaagctttgagaagcatga

SEQ ID NO: 410005 - DNA, 102 bp, Homo sapiens
catgcctctccccagcacacacaaacaggttgaaggggcccggccaggactcggggaagggtggcctgagagcagcgatgacctctggggtcactgtcccag

SEQ ID NO: 410006 - DNA, 90 bp, Homo sapiens
atttgaaagaaaaagctctttcatttatgaggcaaggtgaccttggagaaggtgctgggaattacagtgtctggaggcagaggacttgcc

SEQ ID NO: 410007 - DNA, 98 bp, Homo sapiens
aattcagctttttgtgctgccagcaagaaatgatcagtagcaccagtgtttatggggccacctacagatgctcctgcagtggacacagcagaacaagt

SEQ ID NO: 410008 - DNA, 100 bp, Homo sapiens
aggagaggaggatagcagcagaagagaagaagaagcaggatgaactgaaacggattgccagagaattggcagaaggcgccaagcccatctttgtgtgctt

SEQ ID NO: 410009 - DNA, 82 bp, Homo sapiens
cgcagtatcatgctggccaagaagatcatcattaaggacggaggcacgatgcgagccacccctctggctgctcctgcgggtt

SEQ ID NO: 410010 - DNA, 50 bp, Homo sapiens
aacagggaaactgaggaccagagaggatatctccggagcatttggataat

SEQ ID NO: 410011 - DNA, 100 bp, Homo sapiens
aaagcgtgctccacaaatatttacagtcggaggagtactcggtgaaatcctgtcctgaagactgtaaggttttcctttggaatatggataaatacaccat

SEQ ID NO: 410012 - DNA, 100 bp, Homo sapiens
gggaactcaaacagcagatgcagattgcttccaagtatgatcatcaggcagaagaagatcttcgcaattggatagaagaggtgacaggcatgagcattgg

SEQ ID NO: 410013 - DNA, 100 bp, Homo sapiens
ttgtgttggatcattttgaaaaacagtattccaaagaactcggagatgcctggaatacagtaagtgtcgagttatagcagtgctggattgggagctgtca

SEQ ID NO: 410014 - DNA, 82 bp, Homo sapiens
cttcgggaacccgaggcggaccgggcgacgagaaaccgaaccctcaccaaacagatctgcttgcacatccacttgcacgtag

SEQ ID NO: 410015 - DNA, 98 bp, Homo sapiens
gaagagcgagccagcgcccggagcaagcggagctcccccaagagccggaaagatttggtgcttccagatgtgagttatcaggtggaatccagtgagga

SEQ ID NO: 410016 - DNA, 83 bp, Homo sapiens
gttcccacgctggcgcccggcgaccgggtggggctgcggtgactcagctattctcctccgggccattgggagccaaattcggg

SEQ ID NO: 410017 - DNA, 100 bp, Homo sapiens
gagaaatggagcaaaaacattccaccattcaacaaaaggtgatgaatggtgctatccttcaacaagtgtttgtggtggattatgttgttcagtcccaaat

SEQ ID NO: 410018 - DNA, 74 bp, Homo sapiens
aaagcctcagggataatccacaggctggatctccagaactgttctctggaggaccctggtccaaactttcatca

SEQ ID NO: 410019 - DNA, 100 bp, Homo sapiens
tgcaagacatgacacaaagctgctagcagaaaatcaaaacgctgattaaaagaagcacgcaataagagctaactgccatcaagagccatcagtatgtctt

SEQ ID NO: 410020 - DNA, 100 bp, Homo sapiens
cgcgctgctggctgccctgctggccgcgccgggagcggcgctggccccaaggcgctgccctgcgcagggccactgcagaacaaattagacttgcacagat

SEQ ID NO: 410021 - DNA, 83 bp, Homo sapiens
cggaagatcgtcgccacctggatgctggagctacgagagtacaaggtagtgggtcgctgcctgcccacccccaaatgccacac

SEQ ID NO: 410022 - DNA, 82 bp, Homo sapiens
ctgcaggttacaagcagcagatcccaccttcagtcctggctctgacaagccctccaggaacaagatcactcaaggtgaagga

SEQ ID NO: 410023 - DNA, 100 bp, Homo sapiens
atgtttccagccccggcgggagcggcggcaagaaaaatgccagccagaagaggcgttcgctgcgcgtgcacattccggaaattgacaatggcccttcagc

SEQ ID NO: 410024 - DNA, 90 bp, Homo sapiens
tgctgactgactgggagaagaccaagcctgtcacggtattgttgcagcatctggcagtgagactgaggatgaggacagcatggacattcc

SEQ ID NO: 410025 - DNA, 100 bp, Homo sapiens
agtttgacaagctatgccttgagctcctcaatgtgggtgtagagtctaaactcatccttaaaggggtcatactgctgctgtttgtgatatagggtctgcc

SEQ ID NO: 410026 - DNA, 75 bp, Homo sapiens
tctcagtactttgtgctcagcccaggcaggtggatagaagtgcggcccctctcatagtatgcccataagtcaggg

SEQ ID NO: 410027 - DNA, 96 bp, Homo sapiens
gaagacatcccgctggatgaaaaggaagcagctcagtggcttcataaactgtaccaggagaaggtttggcatagaaatggtaccccttgttcaaaa

SEQ ID NO: 410028 - DNA, 52 bp, Homo sapiens
gcgtggagtgacggtgccaccgcggcgcgattgacttctaaagaatcttggt

SEQ ID NO: 410029 - DNA, 75 bp, Homo sapiens
tgaggaattacgaaaggtgctagttaagaactgccattggatgtccagaatcccctgtagttgataatgttggga

SEQ ID NO: 410030 - DNA, 50 bp, Homo sapiens
ctcgccggggctgcggccgcccgagaacacagatatgtagaactcttctt

SEQ ID NO: 410031 - DNA, 100 bp, Homo sapiens
cagtatcaacggagtctccggggatggtcttcacaataccctcttcaatcccttctgactggttatcagtgcagtggtaatgatgaacacacttcttatg

SEQ ID NO: 410032 - DNA, 100 bp, Homo sapiens
attatatccggaagaccctggaccctacctacatcctgagctacatggccccctggtttagggaggttgaagactgggatagtttccaagctattttgga

SEQ ID NO: 410033 - DNA, 82 bp, Homo sapiens
gttagtggttctgatgacaacactttaaaagtttggtcagcagtcacaggcaaaactgcaaaattcaaaatggggctcaagg

SEQ ID NO: 410034 - DNA, 50 bp, Homo sapiens
atgctcattacatcgatgttgccaggatttggtcaacactggactcagcg

SEQ ID NO: 410035 - DNA, 74 bp, Homo sapiens
ctgattggaaactctttgggaaagccactcgaaaagttctgggaggtgatcagtgatgaacatggcatcgaccc

SEQ ID NO: 410036 - DNA, 117 bp, Homo sapiens
cttgcactaagccttacaatacctctgtccataatagctgacatgtgtatgcaaaaggtttaagaattgtttaagctgcatcaatggagcacatacagggagcttggaagacgatca

SEQ ID NO: 410037 - DNA, 116 bp, Homo sapiens
tagaatcaactgagagagatgcttaaaaatcaccagttactttaatgagacctgatcccaaccttgaagaaagtcctaaaagaaaaaatattacatatgaggaattaaggaataag

SEQ ID NO: 410038 - DNA, 75 bp, Homo sapiens
gctgtagctgccctttccgtttccagggttccgaccaggttttagctaaagaagatactgaggcagctattcaat

SEQ ID NO: 410039 - DNA, 75 bp, Homo sapiens
agcccctgaagaagttggtgaggaggaagcactcaattgaacaagtgcaggaaccagctggctgcctcagcactg

SEQ ID NO: 410040 - DNA, 75 bp, Homo sapiens
aaaatactatttgacacagtggatctctgtgccacatgggaggtacaggggcccgtgctggttgaggacacttgt

SEQ ID NO: 410041 - DNA, 90 bp, Homo sapiens
acacgctgtggcatcctgagtgctttgtgtgccgggtagatgatgagctggagatcaaggcctactatgcaggccacgtgctgggggcag

SEQ ID NO: 410042 - DNA, 100 bp, Homo sapiens
cagagagggcctgggagcttgctgcagcttcaggcaaaatggcaatacctgtgctttggaagtttctggagaagtatccttcagctgaggtagcaagaac

SEQ ID NO: 410043 - DNA, 90 bp, Homo sapiens
tttgacctcttcgatgtgcgagactttggaaaggacactcatgaggaccatgatacttccactgagaatacagacgagtccaaccatgac

SEQ ID NO: 410044 - DNA, 90 bp, Homo sapiens
agaaaaacctcagcgacctgatcgacctgctgtaaaatttggccgaatgtcaaaaaagcagagagacagcttgtatgcagaagtacagaa

SEQ ID NO: 410045 - DNA, 75 bp, Homo sapiens
gcgcaggggaggcagaagtcatgacaggcgaggtgggttctgagtgttttaactcaaatgggtgatgaaaaggac

SEQ ID NO: 410046 - DNA, 90 bp, Homo sapiens
aggagtcctgcttatcacaatggtggaggcaatgcccagagctgtggcagccaccttgcagccgtgaagcaccagtgggaatgacagtca

SEQ ID NO: 410047 - DNA, 133 bp, Homo sapiens
cttcgcagtgtaggagatggagagactgtggagtttgatgttgttgaaggagaaaagtctcccaacgagcgtgcccgcttgtacttcctgctggcctggtttcatgcgatcatccaagaacgcttacgatacg

SEQ ID NO: 410048 - DNA, 76 bp, Homo sapiens
cttcctgcttaagccagcacagaagtgtctggagtggttgattcacagtgcatttgcccagtataacatggatcag

SEQ ID NO: 410049 - DNA, 90 bp, Homo sapiens
aaggctgtccgcggcaattcgcgcctcccagccccgccttctcttccagatcttcgggactgatcgaaagctgctttgcgtcgcagttgg

SEQ ID NO: 410050 - DNA, 94 bp, Homo sapiens
cctctccagggagtgctctgttcacggctccatcgctgttaagtggtgaaaccagaacaatatctcactttcattatactacctggccagattt

SEQ ID NO: 410051 - DNA, 90 bp, Homo sapiens
aagacctggtgaaggtggaacggggctcccaggacctccactaatcaccagaacaaaatgtgcaggtactaccaactgagcagtcaccac

SEQ ID NO: 410052 - DNA, 96 bp, Homo sapiens
gatctgcacttcgcattttggcattgacatttaattttagggtcctttatatagaagggagagtaggagttcattcaaaagtgcctgcagtctgag

SEQ ID NO: 410053 - DNA, 86 bp, Homo sapiens
tgtcccagatatagccgttggtacaaaggaaggtgctcgggtcttcggggcactgggtcccatcggtccctcctcacctgggctca

SEQ ID NO: 410054 - DNA, 98 bp, Homo sapiens
caaggaaaaactggagagcttcatcaaaaatagtgatagctttgataactcttcaccaccaggagtgttccttgagaaggactatgagatttaccggg

SEQ ID NO: 410055 - DNA, 95 bp, Homo sapiens
tgattcattacggccttcatcttgatgccactaagctgctacttcaagctttggccatcaatagctctgagatggccgccaagaacgagtcatgt

SEQ ID NO: 410056 - DNA, 100 bp, Homo sapiens
gcatcttcaaagaaaacagaatgtccagaatgcagagaaaaatgggaaggtttccccaaagtcagtattctcctcagatgatggaccatttggattgtgc

SEQ ID NO: 410057 - DNA, 76 bp, Homo sapiens
tatagaacatttcttttatcacagaatagccaggccagaagaaggaaggcctgtggtgagtgggacaggaaatgac

SEQ ID NO: 410058 - DNA, 99 bp, Homo sapiens
tgagccctgtgagctggaggaaaggttcgccctggtgctgggagttgaccacatttggccatttcccagaagggccccaccccaagggtgagtggccaa

SEQ ID NO: 410059 - DNA, 100 bp, Homo sapiens
tcgggaaacttcctctgaaagttcatgcatgggagatctcagaccagttgttacagatccggcaggatgtggagtcatgctattttgctgcacagaccat

SEQ ID NO: 410060 - DNA, 100 bp, Homo sapiens
atctcggaaggcctcagaaaaagccttaaagttttagaaagagcgttttcgctacgtaaagcacattcgataaaggatatggaaaatactttgcagctgg

SEQ ID NO: 410061 - DNA, 83 bp, Homo sapiens
cgcgagcgtctgggcgggtggtaggccctggagggacaggaaagccagaaatggacttcgtgagactcgctcgactgttcgcc

SEQ ID NO: 410062 - DNA, 83 bp, Homo sapiens
gctgcgcggcccccgcgcatgattcccaacttcttctggagcctggggatcggtcacactggtgcgtggtggcatactgggag

SEQ ID NO: 410063 - DNA, 83 bp, Homo sapiens
gcttgtcctggctcttgccctcatcctggttctggaatcctcagttcaaggtcacggtctagatcacattctcgatccagagg

SEQ ID NO: 410064 - DNA, 90 bp, Homo sapiens
aacttcttttgtcaactttacagatatctgtaaactggcaattgaaggaacagactaaaaatcgtgtcctggaaggaaactacaggtact

SEQ ID NO: 410065 - DNA, 90 bp, Homo sapiens
tgaacatcgaatcatggaatcccttgcatggctctcagtgctacagaatattttagaaacagaaaatgaatattctaaagaacttcagac

SEQ ID NO: 410066 - DNA, 73 bp, Homo sapiens
aaatgcagtcccctcatgccaagggagagacaaaggcagcgctgccctcgggggagtattggccctggcggaa

SEQ ID NO: 410067 - DNA, 83 bp, Homo sapiens
ttagtggaagattatccaaactatatgatcataaatctagacaagctttccagccatccagcccatctcctcttcagccccag

SEQ ID NO: 410068 - DNA, 82 bp, Homo sapiens
tgtaggaaggaacttggttccccctccctcagcttccgccccaaaagcctcattgatgctactcacagagacgtggatgtgc

SEQ ID NO: 410069 - DNA, 75 bp, Homo sapiens
gctttggttaaacgaatcaaagagctgctgcagaagaatattttgcctgctggaacctgctgtatctactcaaga

SEQ ID NO: 410070 - DNA, 100 bp, Homo sapiens
agacatttctttgtggtttatctaaaaaccaaagaatatcctccgaatcctaaatctagagctccaaggatgctggtcattaagaaaggtaatacaaaag

SEQ ID NO: 410071 - DNA, 90 bp, Homo sapiens
gaccctggagcctcagttggaagcagccgatccagcctgcggagcctgtggggcaggttcaggcgtgaacggcctggaggagcccagcat

SEQ ID NO: 410072 - DNA, 100 bp, Homo sapiens
agagatgtggggggattctcgacctgctaacagaactggaccttttcgtatgtgcagaagcttataatcctgatgaagaagaagatgatgcagagtccag

SEQ ID NO: 410073 - DNA, 82 bp, Homo sapiens
ctgagccccgacgcccctgacagggccacgcacctgatcgccgcgcgagctgctgtccccgccctactccggaccgccccaa

SEQ ID NO: 410074 - DNA, 75 bp, Homo sapiens
catgcccatccgcaaggacgacgaggtccagatctcagtcctggctttctctgtctgcttcatcttcactatcac

SEQ ID NO: 410075 - DNA, 100 bp, Homo sapiens
tgagagagagctattagagattgtgaagaagaatttcgatctccgccctggggtcattgtcagaaatggaagcaactgtcgagattgcagcggaatatga

SEQ ID NO: 410076 - DNA, 82 bp, Homo sapiens
cccgcccccaggtggctacccaccagctgcaccaggtgatggaactgtactggaacaatgggagaagctggtagcttatagg

SEQ ID NO: 410077 - DNA, 100 bp, Homo sapiens
ctgtcatgaacatgattctagaagcacagctggcagagatggaggaggagctacgttatgcacccctgtctttccgaaaccccatgatgtctaagcttcg

SEQ ID NO: 410078 - DNA, 100 bp, Homo sapiens
agaagcagtaaacagttgggaaatgcagtcactacctgagtataaggataaaaagggatattcaccccttgagaccatcatgcagacatcagagactggg

SEQ ID NO: 410079 - DNA, 97 bp, Homo sapiens
tctggccccgagatcagaatgccggctctgacgcccgctctgcggcttcggtgtttgaacaggccacagtccaggagcgcttacattcaggagctcc

SEQ ID NO: 410080 - DNA, 82 bp, Homo sapiens
agaagaagaagttgcgaaggatccccaacggggaggccaacgtgaagaaagagtcacaccccaaagcctctttattcttttc

SEQ ID NO: 410081 - DNA, 75 bp, Homo sapiens
gaatttccatgtcaacatagtccaggacttggaccctctgtggaacacccgagtacctagcccccgaagtcattc

SEQ ID NO: 410082 - DNA, 90 bp, Homo sapiens
aatatggaactactttatgaacaagagcagcccgacggccatggaggctgaagagacgatggaatgccttcaggagttccctgaacatca

SEQ ID NO: 410083 - DNA, 102 bp, Homo sapiens
gccctggctcgccgtcccctacacggatgaggcccggcggtcgcgcctcaaccggctgtacggaatccaaggggtgagcccctccagactccgaataggaga

SEQ ID NO: 410084 - DNA, 75 bp, Homo sapiens
agtggagcgtgtcctgaaggagttccaccaggccgggaagcccatcgggtgagcgagtgctgtgctttcatgggc

SEQ ID NO: 410085 - DNA, 90 bp, Homo sapiens
cggcggcggcggccgaaccaaccgagtcggatcctgaccctaaaacctagtggcagcaaatgcacacattcctccagactacctccttaa

SEQ ID NO: 410086 - DNA, 101 bp, Homo sapiens
tcagttatattccatctactgtctttttcttcaatgggcagcatatgaaagtggattatgggaaggtgtcttgctgcaggtaactaatgaagaagtggtca

SEQ ID NO: 410087 - DNA, 106 bp, Homo sapiens
gccggaacaccattcttcgccaggccaggaatagatggacagagacgtatgtgcgttggtctcctaagggcacctacctggctacctttcatcaaagaggcattgc

SEQ ID NO: 410088 - DNA, 100 bp, Homo sapiens
ggcgactagcggcggcgggagcggcgccgagaggccgtgcgggacgcgggcgccaggaccggccgaacgcagaggatgctggaggtcagcagattggctt

SEQ ID NO: 410089 - DNA, 75 bp, Homo sapiens
gaaaactctagaagtctggatgtcggtgggcctctgagatatgccgtttacgggacgaaaatgaccttcaaagac

SEQ ID NO: 410090 - DNA, 74 bp, Homo sapiens
gcggttcccagcgcgatgtcaactgctcggttatggacatggctccttactatgaagccttgtgcaaatccctc

SEQ ID NO: 410091 - DNA, 90 bp, Homo sapiens
cgcggtggtcaagcgggccacgcacctcgtcaccaaggccaagggtgatattcatgaggatttttgcagcgtttgcagaaaaagtggcca

SEQ ID NO: 410092 - DNA, 83 bp, Homo sapiens
ggtgcaggcgctgcgccgcaacgccgagcgcaccgacatctgcctgctcaaagggacgactggagtgagcactggcctgggag

SEQ ID NO: 410093 - DNA, 100 bp, Homo sapiens
cgaaactctggcagctgcctcggtggggatgagatcttcctactgtgtgacaaggtgcagaaagctacaggcacgttcaaggccaaggcccttccctgcc

SEQ ID NO: 410094 - DNA, 87 bp, Homo sapiens
gcatccccgcggacgccacagcgcttggagaccatcctgggcctcacaggagcgaccatgggaagcctcatctgcttcatctgcccg

SEQ ID NO: 410095 - DNA, 100 bp, Homo sapiens
ttcttaccgcagatactatattgaatacgctgcagaacatttctgaaggattggtcgtgtaccccaaaatccagctccaggtcccacaggggctcttctt

SEQ ID NO: 410096 - DNA, 123 bp, Homo sapiens
tcctggctgatgcaaagtggattttgcacaactgcatcatttataatggggataagccagaccccccagctggcacaccttgtgcctctgacattcggagctcctcactgaccctgtcctggt

SEQ ID NO: 410097 - DNA, 75 bp, Homo sapiens
tggagcagtactacgtgggagagctccgcggggagcagcaggatggatgtggagaaaggcaagattgaagacaca

SEQ ID NO: 410098 - DNA, 99 bp, Homo sapiens
gttcgccgctggtggctccgggttcttcccactagtaaaagcagccaaatgatcaccttcacctttgctaatggaggcgtggccaccatgcgcaccagt

SEQ ID NO: 410099 - DNA, 100 bp, Homo sapiens
gaaaatcaaaacaagctctttatgagaatggcatctaaggtctcttttattcaaaaccttgtattttgtgtggaaagagtttaccgtgtgcctgactttg

SEQ ID NO: 410100 - DNA, 98 bp, Homo sapiens
ctgggggcgagctgagcacctgtagtcaatcacacgcagttccagggtcacccccgagaggacaacaggcatctggaagtgctctctcgccactctgg

SEQ ID NO: 410101 - DNA, 100 bp, Homo sapiens
gtggatgcggccaactccaatgggcctttccagcccgtggtccttctccatattcgaggtttggcagttctctaccagtggaccaatcttttcatccccg

SEQ ID NO: 410102 - DNA, 75 bp, Homo sapiens
tgccagggtccctgaagagggaagacacgcggaaacaggccatctggctgctgtgcacaggcgctcgtgaggctg

SEQ ID NO: 410103 - DNA, 99 bp, Homo sapiens
gtaccgactgcttttggaataaaaagattcccaggatgtgagcaacacgggaccggagaagatggtataaactggtccatcagtgacaaagacattgag

SEQ ID NO: 410104 - DNA, 102 bp, Homo sapiens
agtgaacttttgatgaggttgaaggacaacagggatctacagaaattcctgcaagattgtcaagagatcgagaagatagagtgggacacatggacctgtgtc

SEQ ID NO: 410105 - DNA, 98 bp, Homo sapiens
cagacatgtggagctgtggagtcatcctcttcgccctgctcgtggccaatgagtgccaggagcgccctgttgagtgtaagttctgcaaactggacatg

SEQ ID NO: 410106 - DNA, 50 bp, Homo sapiens
tgccctgcagagtggtttacaagctgcttttcacagatgccaaccagttc

SEQ ID NO: 410107 - DNA, 143 bp, Homo sapiens
gagccatggcgtccgagcggctccctaacaggcccgcctgtctgctcgtggccagcggcgccgccgaagagctgagctcaatgtgcagcaatggatgacgacagcctggatgagcttgtggcccggagcccagggccggatgg

SEQ ID NO: 410108 - DNA, 100 bp, Homo sapiens
gaatgaatttggaatcttcccttgaagagctatccgtggtcctgaaccagttatgtgtgttgcatgagaaaacgccagtaagtgacagagtcaccaaatg

SEQ ID NO: 410109 - DNA, 75 bp, Homo sapiens
aataacaggcggagggtcggcctgatgttctaatcatgtcagataaagatgatattgagactccactgctaactg

SEQ ID NO: 410110 - DNA, 75 bp, Homo sapiens
cactttcatcacatggatcctcatccagtttgcatttagactttgagaatcactacaagaaaaactccttgtggt

SEQ ID NO: 410111 - DNA, 83 bp, Homo sapiens
catcctgccgtccttctccactttcgccagcccgtgccgcgagcgcggcctgcaggagctgtgagccgtgagctttgaggcgg

SEQ ID NO: 410112 - DNA, 50 bp, Homo sapiens
caagccttcaaggagcccaggggtctagtgacggagcccgcgcgcggcgc

SEQ ID NO: 410113 - DNA, 90 bp, Homo sapiens
tggcgattcagccctggtattcctgcctatcctcgaacctgcactgtggacttttcgggacaaagtggccttcatcacaggaggcggctc

SEQ ID NO: 410114 - DNA, 75 bp, Homo sapiens
gacccccaggcactcctggagggtgtgaagtcctgagaaacatctttgtcctcacctgcatcatcatcgtctgtt

SEQ ID NO: 410115 - DNA, 75 bp, Homo sapiens
cggggatggacctccagatttccttactgattataagcgccatggctatggctagtgttaaattgcttgccggtg

SEQ ID NO: 410116 - DNA, 100 bp, Homo sapiens
tcggatacgatagaaaatgtaaaggccaagatccaggataaggaagatgctggcatatatgttctattctgttccttactttgtgactgcactgtatggc

SEQ ID NO: 410117 - DNA, 90 bp, Homo sapiens
ggcgctgagtggtttttcggatcatgtctggtggctccgcggattataacaggctctgtgtgctccgggatggagcaggtgtgcagaggg

SEQ ID NO: 410118 - DNA, 100 bp, Homo sapiens
gaagcggccccagcactcccagctgcgcagggcctgccaggtggcgctcggtgaaaggtgtagcagtcactcggcctacacccacagcatcgaccttgtg

SEQ ID NO: 410119 - DNA, 75 bp, Homo sapiens
cgggcagcagtggcggcagcgcccgagagagacagcccacctgaggatattgaccataaggactcatatctcatt

SEQ ID NO: 410120 - DNA, 50 bp, Homo sapiens
tagccagtgtagccccagtatttactgtgcctctgcagtccttgtccctg

SEQ ID NO: 410121 - DNA, 50 bp, Homo sapiens
caagctcatggcctgccactgcgtgcactcagatgccactgcatcatcag

SEQ ID NO: 410122 - DNA, 98 bp, Homo sapiens
aggaggcctcctgaccttggctggcgcaaaggctgccctggatgggactcctggtatttttagaaagccaaggaattgagttaaatccaccagagaag

SEQ ID NO: 410123 - DNA, 75 bp, Homo sapiens
cagcgagctgcaattgcccagaaaaagggagagcttatggatggagaccaaacatccagatctggagtgccggca

SEQ ID NO: 410124 - DNA, 100 bp, Homo sapiens
ctcagggtaaccagaactagagctgctcaaagaaaaactgactagctttatcgtcatctgggaaattgttaaaaatgcaaattcgcaagtttgagagcca

SEQ ID NO: 410125 - DNA, 100 bp, Homo sapiens
ggggaaatgacagcttggaccatgggcgcccgcggtctggacaagcgaggaagtttctttaaggtggtgaaaactattggcttgagggaagtttggttct

SEQ ID NO: 410126 - DNA, 98 bp, Homo sapiens
aaaaacatcttgatctggagaaaaactggatgttggtagaaaaagcaagagtttgttatatagcagcactggcttactcgggtgctcttaccttctag

SEQ ID NO: 410127 - DNA, 100 bp, Homo sapiens
gcaacgggaccctgtgccccaactctacttccctctgctccttcccaggccactcgctctggtgggaccctcgtgcttgtggggctgggctctgagatga

SEQ ID NO: 410128 - DNA, 75 bp, Homo sapiens
aactgactttgcagccacggagaggttggtaacaaggaagatgctgagaaggaagtagctatttctaccttctca

SEQ ID NO: 410129 - DNA, 96 bp, Homo sapiens
aattaagaatgggtctgtgatgtcacatctaggagcatctacccatggacagacatgtcttcccatggaggtataggactttcactaaccttggac

SEQ ID NO: 410130 - DNA, 98 bp, Homo sapiens
ctgccatgggtatccatggtgacaagagtcaacaagagcgtgactgggttctaaatgcatcaacgagatcctcgattgaatgaaattttatttccatt

SEQ ID NO: 410131 - DNA, 87 bp, Homo sapiens
tgcctccgccggctacagcgggaagagcgttggaatcgaagcctcttaaaatggcagatgacttggacttcgagacaggagatgcag

SEQ ID NO: 410132 - DNA, 75 bp, Homo sapiens
aaaagctgccaagttgaaaatggacgagtaatcgcctgctttgattcattgaaaatattaataaggcagcggaaa

SEQ ID NO: 410133 - DNA, 82 bp, Homo sapiens
cggcgagagtgggcgagaacgtccactgcgggccggcgaaagctggcccactgctcagtggagcgtggaggacgaggaggag

SEQ ID NO: 410134 - DNA, 101 bp, Homo sapiens
gagaagcgaagggcaatcattccttctcacttggcctatggaaaacggggatttccaccatctgtcccagaaatggaatctatttggaatttgcagaagca

SEQ ID NO: 410135 - DNA, 74 bp, Homo sapiens
cagcccaaaccaggagattgcgagggagcgatgcggtgcagcgcgttcaaaaggtgatgacctatcaacagcca

SEQ ID NO: 410136 - DNA, 100 bp, Homo sapiens
ctgggagccgaagccagactgggcacacaccggcagccacagctccgaagctggcaagaaggaactgagcatggaatgtggcctcaacaatcgcatccgg

SEQ ID NO: 410137 - DNA, 98 bp, Homo sapiens
tcccgctgcctggctccgtgtccgacccctggaagctgatgctgctggacgccactttccggggtgcacagcaagtgcattagtgccagcagtagttc

SEQ ID NO: 410138 - DNA, 100 bp, Homo sapiens
cccacgagtgccaggtgccgcgagcgccgagttccgcgcattggaaagaagcgaccgcggcggctgaacattctagtatgccagtagaaaaaaatatcac

SEQ ID NO: 410139 - DNA, 90 bp, Homo sapiens
ccaagaccgtgctggtctttctcaacctcatcttctgggtgcagcggaactgctgcctgacgctctgcaacttcagcatccccgaggagc

SEQ ID NO: 410140 - DNA, 89 bp, Homo sapiens
cccctttccttactggatcctcaaaccagaagaaaacctgaatctctgaggctgagtcatcactagagagtgggaagggcagcagcagc

SEQ ID NO: 410141 - DNA, 100 bp, Homo sapiens
agacgatctgcacttcgcattttggcattgacatttaattttagggtcctttatatagaagggagagtagggtcctggatatgcccacccaagaactggg

SEQ ID NO: 410142 - DNA, 71 bp, Homo sapiens
aaagtgctcctgcggctgtatggagcgattttgcagatggctgattcaccccaagagtggccgttcctacc

SEQ ID NO: 410143 - DNA, 96 bp, Homo sapiens
atcacataccctggaggaaggaatgttgcacggaggacggaggagctggaagacttcccgctgcccacggtgcagcgcagccagacggtcctcaac

SEQ ID NO: 410144 - DNA, 83 bp, Homo sapiens
tgtactccttgtctttgcaaacaaacaggcttctggagttacagtgaatgatgaagtcatcaaagtttttaatgatatgaaag

SEQ ID NO: 410145 - DNA, 100 bp, Homo sapiens
gcacggcctcttgcgctacgccctggatgagatggtgggcaccatgtccttgaagcttcaggcaagcaatgtaaccaacaagaatgaccccaagtccatc

SEQ ID NO: 410146 - DNA, 110 bp, Homo sapiens
tgggccaaggaaaaatcgagcagaaagaatgtctttcaggaagatcattaccattagaatatttgaccgtgaggaatatgagaaagagtgcagtttctcccttgtgcttg

SEQ ID NO: 410147 - DNA, 100 bp, Homo sapiens
ggcctccccagccatgtggaactgtacttggatgcattttacaggttagcctcacttgagctgttgtcctgcaagtaaagtgtatttttggtgattgaaa

SEQ ID NO: 410148 - DNA, 75 bp, Homo sapiens
cgaatctccggccgaagagcggcggcggcagcggcgattatgatgcatcattatcacagaagaaattcgtgtcta

SEQ ID NO: 410149 - DNA, 124 bp, Homo sapiens
gcccacggggacggattggttgttttttcctgtatgaagcggttggcaccactgaagtgaccgaatgagcattgcagtgtcgagatggctatgaaccctgtgtaaatgaaggaatgtgtgttac

SEQ ID NO: 410150 - DNA, 80 bp, Homo sapiens
gcggaggacctacgccggcctggccgcggcgagtcctttgcacatgttggcaacacacgcatccgcatcggcctccctgc

SEQ ID NO: 410151 - DNA, 74 bp, Homo sapiens
tgcatctcctcggcccctggctcctgctcctggatgactgtccaagtgcctccaaagtgtacaaagcatcagat

SEQ ID NO: 410152 - DNA, 90 bp, Homo sapiens
cgggagtaggagactcagaatcgaatctcttctccctccccttcttggtaaagtcagtgataaatcttttgtttgctgcatatactggag

SEQ ID NO: 410153 - DNA, 100 bp, Homo sapiens
tggcgctcggcgttccttgtctgcctcgctttctccttggccaccctggtccagcgagatttccattttgacagtgccagcagaggaaccaggaactttt

SEQ ID NO: 410154 - DNA, 82 bp, Homo sapiens
ggacagccgcgcgctgagggtctcggggcgggcgccgcgggacctctccgggccatgggcttcccaggtggcttcccctctt

SEQ ID NO: 410155 - DNA, 100 bp, Homo sapiens
accagcccaaaagtgctcaacttcctccagaaactttggcgacaatgttggcctgtctgcaagcttgtgcaggccgagaccgacccgcccgcccgcggcc

SEQ ID NO: 410156 - DNA, 82 bp, Homo sapiens
ggcgagtccggtctcaaaatggagctgttcatcaaagaaaaagggttcttttggtcacccaccactggccccatggctgccg

SEQ ID NO: 410157 - DNA, 74 bp, Homo sapiens
tggtgttatcaacttaaaagatgccacctctaagggttatgtggtccgaatcagtggtgggaacgacaaacaag

SEQ ID NO: 410158 - DNA, 82 bp, Homo sapiens
ggccagttgggtaccgggaggggcgaaggcgggcggcagaggcgatcaggaagccagcagacctgcagaacttggctcccgg

SEQ ID NO: 410159 - DNA, 83 bp, Homo sapiens
ccagacaatgccggtggaggaatttgtggctggctggatctctggtcctaggcctacttacaagcctccagtctcaaattatc

SEQ ID NO: 410160 - DNA, 94 bp, Homo sapiens
tccgggattcccagccatggcagattcctccgggcagcagggtcttgagagctgatgacaataacatgggcaatggctgctctcagaagctggc

SEQ ID NO: 410161 - DNA, 74 bp, Homo sapiens
aactcctgggcctcccagtgcacagaggcaagaatatcacggcatgggcatgagtagcttgaaactgctgaagt

SEQ ID NO: 410162 - DNA, 100 bp, Homo sapiens
acaagccattaaacagtgagatcagagagctgttgaaactactgtcaaaacccaatgtgaaggattactacagcatcccatttcccacacccactactcc

SEQ ID NO: 410163 - DNA, 82 bp, Homo sapiens
tggagccggagctgggcgcggattcgccgaggcaccgaggcactcagaggaggtctgcagcccagagggcaccttctgcaaa

SEQ ID NO: 410164 - DNA, 82 bp, Homo sapiens
atcttaaagagaccagttagcagatgcttggcccgccagctcatcctgcagtatggcttgaccctcagtgatctggatcgac

SEQ ID NO: 410165 - DNA, 101 bp, Homo sapiens
gtcgcgtacgggcttcccgagctgacgtggcttgaattgggaggggggcagctggagcctcaggcggcagcgcttctaggtcttccgaccccgaactccac

SEQ ID NO: 410166 - DNA, 75 bp, Homo sapiens
tggtcacagtggagaaggaactgtacacttgggtgcctccagggtcgtatagacctccccctcctatgggcaaac

SEQ ID NO: 410167 - DNA, 106 bp, Homo sapiens
ctcagcctcccaagtagttgggattacaggggaagacggaatctatcactgtggtgaagctgctgagctgctttgatgacctggtggcagcaggcacagcctctgg

SEQ ID NO: 410168 - DNA, 82 bp, Homo sapiens
ccacacgagagccgcaccaacgccgacatcatcgaggttttgggatttgagattgacgcggtgaactctgtccagttttcaa

SEQ ID NO: 410169 - DNA, 100 bp, Homo sapiens
cgcagtggtcgcttcttctccttgatgccgaaagttcagtataaatcgaactgtaaaccatccacatttgcatatcctgcccctctggaagtaccaaaag

SEQ ID NO: 410170 - DNA, 90 bp, Homo sapiens
cgcgtctctctgctgcggcgcggggaccgctgtgctctcggggcctagaagacagttcccaggaggccgaggacgaggcatcggggctgg

SEQ ID NO: 410171 - DNA, 100 bp, Homo sapiens
atcgaatagatggatcacaaaacttcaatgaaacgtgggagaactacaaatatggttttgggaggcttgatggatgccaggccaaggtggagcaagcggt

SEQ ID NO: 410172 - DNA, 100 bp, Homo sapiens
agggtgtccccgcactgctgtcccccgagctgctctacgcgctggcgcggatggggcacggggacgagatcgaggtgcagcagtctccccactgcacgac

SEQ ID NO: 410173 - DNA, 101 bp, Homo sapiens
tgcccctgggaaaccagagagtcggagggagtccatctggagcggccaattacatggacacagaacagtatgaagaagcagtacgagactatgaaaaagta

SEQ ID NO: 410174 - DNA, 76 bp, Homo sapiens
cagcaacagcagcagcaaagggagatcatgaatcagacagataaaaatcaacaagaaatcccatcataccttaatg

SEQ ID NO: 410175 - DNA, 80 bp, Homo sapiens
gtcttttccagattcaaattcagggaggaagaaagggaagattttgatactagcattgagagcaaagacacagagcaaaa

SEQ ID NO: 410176 - DNA, 73 bp, Homo sapiens
ggacttctctgcacagcatccctgtgacagggcgaacctttcctacacacccatacttctctgcccagcttgg

SEQ ID NO: 410177 - DNA, 75 bp, Homo sapiens
cctacttcctctgtatagagcaactgttgaactcagctgcctgtagttcccagtgacctgacagcagaggagcgt

SEQ ID NO: 410178 - DNA, 98 bp, Homo sapiens
aggtcttcaattagctgctgttatctgtacaaatgggagaaggcgcagttgtgtagcagttgagtaatgctggttagctgttaaggtggcgtgttgca

SEQ ID NO: 410179 - DNA, 100 bp, Homo sapiens
gcaactcgacctttggaagcctctatgttgtgactccacttgataagacccctttgctgatgcaagtaagggtgatgacctgcttcctgctggcactgag

SEQ ID NO: 410180 - DNA, 74 bp, Homo sapiens
ccgacacttacatgccatggccttctacgttgtgaaaatgaaatcaatgtggactgaacataaatcacctgatg

SEQ ID NO: 410181 - DNA, 98 bp, Homo sapiens
ctggtcttccctgaccccgcggccggacgacccaagcccgctgagcaggatgagggttttgacacaagggcgcatatcttcaaagcacctagtacctc

SEQ ID NO: 410182 - DNA, 75 bp, Homo sapiens
agccaagaaatttccaactggagattattgaagacaatcccttagggtctctttgcagaggaatattggacctca

SEQ ID NO: 410183 - DNA, 75 bp, Homo sapiens
ccttccaggttgttatctgcaggtgtggcaggttgcagaggacagtggttggatggcaagcatgtggtgtttggc

SEQ ID NO: 410184 - DNA, 90 bp, Homo sapiens
caggagagacacgctgggccgaccccagagcggcgctggacagacctctgtgagtgaaagccttcagagggaagctgctaagaagcaggc

SEQ ID NO: 410185 - DNA, 75 bp, Homo sapiens
gcctaaactctcatctccggccctctcggcgtccgccagcgatggcacagctcactccatcactcgatgagataa

SEQ ID NO: 410186 - DNA, 75 bp, Homo sapiens
tgaagacctagtagaagaggtggaccctgatgctcccataagacagaaaatgccccttgatgatctggatagaga

SEQ ID NO: 410187 - DNA, 100 bp, Homo sapiens
gttcgagatcagccagccgaccgaggtcacccaacctgcctgcagtttaccctgaacatgaccgaggctgtcaagacctacaagtggcagtgcatagagt

SEQ ID NO: 410188 - DNA, 100 bp, Homo sapiens
ttgcctgacagactaagagcaaagctacttccattccagaaagatggcatcatttttgccctcaaaagaaatggcaggaaaatatatgcagatgatgaac

SEQ ID NO: 410189 - DNA, 98 bp, Homo sapiens
aagattcagaacatgaaaatgatgatgacaccaatcaaaatagcaaaattactcagtgggaagacccaagactgcagaacccagctattactggtccg

SEQ ID NO: 410190 - DNA, 98 bp, Homo sapiens
tgtctacaccatcaaggaggaaggcctggttcttcaagctgttttggaaagaagtgaggtttagacttctccatgttaaccatgagcgtgacactttc

SEQ ID NO: 410191 - DNA, 97 bp, Homo sapiens
gccgggggtcgcgcactccaagcggcagcccactggagtcccagtcgccacgacaggcggcagccagaaaaggcaaggttgtgcttatttggctctt

SEQ ID NO: 410192 - DNA, 101 bp, Homo sapiens
aaatctaaatcgctgtggtttccgaggctcttcatacctgggtattccgttcaatccatcaaaggtacaggtttgcagattccgccagcagcacagcaagc

SEQ ID NO: 410193 - DNA, 90 bp, Homo sapiens
atcagacagcattggggccagcaacttcacaggagccaaaaagtgtctagtcaacttaattgagaaggtcccgctccccgaggcgcaggt

SEQ ID NO: 410194 - DNA, 51 bp, Homo sapiens
caagaatccactgttgctactgaaagggaaaaaatggtaatccagtggcag

SEQ ID NO: 410195 - DNA, 101 bp, Homo sapiens
agtacacagacgagcatggggaagatgaccctaattttcagtgcaaattcaaaggtctctggagtaaggaaaaatatctatgtatgccctaggaagattca

SEQ ID NO: 410196 - DNA, 100 bp, Homo sapiens
cttggaatcaaagataaatccaaatactgcatatcagaaacaacagcaaatgatggctcagacattcattctgctgtgctctccacaattagaaaactag

SEQ ID NO: 410197 - DNA, 51 bp, Homo sapiens
gacaagaccaagtactaccttcaagctctagaggacaaaatcccagtcctt

SEQ ID NO: 410198 - DNA, 100 bp, Homo sapiens
aatgaatcatgattttcaagctcttgcattagaatctcggggaatgggagaggcaactcatgcagcaattccagaaccccgacttcccacccgaagtaga

SEQ ID NO: 410199 - DNA, 96 bp, Homo sapiens
agaggaaaggcttcaatgaagggctgtgggagatccagaacaacccccacgccagctacagcgcccctccggtggagattctggacgcaaagacaa

SEQ ID NO: 410200 - DNA, 98 bp, Homo sapiens
aacaacagcctcgccagaaaaggttatcactgtgaatataagatgcggacaggaaggaaacctgatggctgtgctatttgcttcaaacattccaaatt

SEQ ID NO: 410201 - DNA, 75 bp, Homo sapiens
ctccatccgcttcgggcgcttcttgattccaggcgtgaattccaagaagaaccaaatgtattttgactggggtcc

SEQ ID NO: 410202 - DNA, 75 bp, Homo sapiens
ccggatctggtaacatggcaaaagatgctttacaggaagtatggtgctggcatctgcttggcttctagagagtct

SEQ ID NO: 410203 - DNA, 82 bp, Homo sapiens
aagtataccccacagcacatgcattgcggagcagccttttggggtaccactgatgaaattatgaccaggtgggcccgagtta

SEQ ID NO: 410204 - DNA, 75 bp, Homo sapiens
ccacagcagagactagcagcggggccacctccacaaccaccaccacaaggtgctgtccctggacaccaacatcac

SEQ ID NO: 410205 - DNA, 96 bp, Homo sapiens
cgccagcgtcggtccctgggcaggtgtggaggcacagttgaatgctgttgatgctttgattgactccatgagcttggcaaagaaagatgagaagac

SEQ ID NO: 410206 - DNA, 96 bp, Homo sapiens
tatgactcctgctatcgagcagcgactcattctccaatatttgacccctctaggagaatatcaggagataggagcatgctgctatgtggaatgttc

SEQ ID NO: 410207 - DNA, 100 bp, Homo sapiens
ttcatccattatgctggctgttatgtacgcaggaggtgatggcagttttggatcagtttaccgagcagcctatgaaggagaagaagtggctgtgaagatt

SEQ ID NO: 410208 - DNA, 82 bp, Homo sapiens
ttacatacgagaatggcttgtgaaatcatgcctctgcaaagggtgatcagcccatgacctaaacctccagacaaaataaaac

SEQ ID NO: 410209 - DNA, 97 bp, Homo sapiens
agcaaaacgactcagaggaacaaacagatagccatgggaagaaagaaattcaacatggatcccaaaaagagatcgagatggtgatcatggagcgtag

SEQ ID NO: 410210 - DNA, 100 bp, Homo sapiens
gaaaggcatgaagatgcacagaaatcttattgccagcagttttgaagatgactcccgtgtagcctcaccgttagaccagaacggaagcttcaatgttgtt

SEQ ID NO: 410211 - DNA, 75 bp, Homo sapiens
tggaagatgtaaagcaatatttcgagcagtttggcaaggaccatagctgtctgcagtgcaggaagccaactatta

SEQ ID NO: 410212 - DNA, 51 bp, Homo sapiens
cgcggtgaggcggcgacgggctccgggtttttcgttggaatatacgttgca

SEQ ID NO: 410213 - DNA, 100 bp, Homo sapiens
gaacaatattgatgatgtagtaagtactatactggcaattgctggagaagattttgcaattgttgcttctgatactcgattgagtgaagggttttcaatt

SEQ ID NO: 410214 - DNA, 83 bp, Homo sapiens
gttgtgcgaaccccgggcagcccgggaaatctccaagtcagaaagactgcttttcaggaagccttggacgctgcaggtgataa

SEQ ID NO: 410215 - DNA, 88 bp, Homo sapiens
ctgcacttcgcattttggcattgacatttaattttagggtcctttatatagaagggagagtaggtggcaagtgcaggcagctgtcccg

SEQ ID NO: 410216 - DNA, 74 bp, Homo sapiens
ggggctgagaggagtcttctggtgcagtcttattttgaaaagctgagatctgtatctgtggacctgaatgttga

SEQ ID NO: 410217 - DNA, 102 bp, Homo sapiens
ggctcgcggcgagcggacggggtcgagtcagtgcgttcgcgcgagatgtgaagttcatttccaatccgccctccatggtggcagcggggagcgtggtggccg

SEQ ID NO: 410218 - DNA, 83 bp, Homo sapiens
agagtgtgagaaaaaaataaactcctatttgtttatggcaaggtgaagcatatatgcgtttaagcaaactccccgaagcagag

SEQ ID NO: 410219 - DNA, 75 bp, Homo sapiens
tcagggctacggtgccccgccacagttcaaccatgctcgacagctgaccaaggccatgatgcgaaaggccacggc

SEQ ID NO: 410220 - DNA, 100 bp, Homo sapiens
gaagaaatgaagaattggaggaacagtgtgtccagcatgggagagtacatgagacgatgaagcaaagggaggacatgtatgcccaggactctatagagct

SEQ ID NO: 410221 - DNA, 100 bp, Homo sapiens
cgggaccataagggcttaactcatatatttaacccccctccaaaaaggtctgacatttcaggaggtggagaacttctttactttcctaaagaacattaat

SEQ ID NO: 410222 - DNA, 98 bp, Homo sapiens
atgcacctgcgcatgtttgaggtggccagagatcacctacaccaaacagtcaataagcacaagccatggatcgagacttcatatcatggagtcataac

SEQ ID NO: 410223 - DNA, 96 bp, Homo sapiens
cttcctgttggtggtggtcagctttttgtccctgtgtgtcatcctgcctgtcaacctctcaggggacttgctggggttcaactcggtggccaccgc

SEQ ID NO: 410224 - DNA, 100 bp, Homo sapiens
ctcccagggccaggcgccgctcagaacggaaacattggcaaatttggagcgacagatctatgcttttgagggaagctacctggaagacactcagatgtat

SEQ ID NO: 410225 - DNA, 100 bp, Homo sapiens
ccggagttgcgtcgccttagtcctcctggctgccgccgtcagctgtgccgtcgcgcagcacgcgccgccggtacagcagggaagaactggaaactcagag

SEQ ID NO: 410226 - DNA, 100 bp, Homo sapiens
gtcattttactgtcaagacatttcttcggcattctgcaacagtctttaaaccagaggagttacgccaggccctcatgccaaccctagaagcactgtatcg

SEQ ID NO: 410227 - DNA, 74 bp, Homo sapiens
caagctgtttcctaccaggtcacacactgttgcagcgcagggagattggccacttccacgaaaagaaagacctg

SEQ ID NO: 410228 - DNA, 100 bp, Homo sapiens
gaaggagaagcccatgaagagatggtggattctcactgagttttgactagcggaagaaaagaagacaatagatgtgcatcttcaaatgcagcatcctgtg

SEQ ID NO: 410229 - DNA, 100 bp, Homo sapiens
acaggaagagtcagacctcgaattagcaaaggaaacttttgaaaatgtggacacagacttgccaggcagcctggggcagagtgaagagaagcccgtgcct

SEQ ID NO: 410230 - DNA, 82 bp, Homo sapiens
cttattcagagaaggaaggatcttctcatgcacagaggcaacaaatggcaactttctgagtctccaattgagaaacatggca

SEQ ID NO: 410231 - DNA, 83 bp, Homo sapiens
cacctgcctggcagtccagggcatggagagccaacaaatggaattttcttgagcatgtttctaatcgttttgccattggaatc

SEQ ID NO: 410232 - DNA, 74 bp, Homo sapiens
agaagtacctcagacaatggtttattaagacaaccgcttatgcaaagatgctttttcacggatgcctctcatga

SEQ ID NO: 410233 - DNA, 100 bp, Homo sapiens
tctaatggaaggtggaagaagagaccatcacacaatgacggtgttatggggaacacaggaaactggcgatggaatatgagaggagccctctggaaagaaa

SEQ ID NO: 410234 - DNA, 50 bp, Homo sapiens
gtctttgttccctgcagccctcccacggtctgtagcatctctgtctgttg

SEQ ID NO: 410235 - DNA, 82 bp, Homo sapiens
cctcaaggccatgatcaaaacctcaagaaatcctggggctccaaggacactccagccaaggctctgatgaggcagcggggca

SEQ ID NO: 410236 - DNA, 96 bp, Homo sapiens
gagcttgatttgtttttggcatactacgtgcaggagcaagtgtgcaaagatccaccttacaaagtagaagaatctgggtatgctggtttcattttg

SEQ ID NO: 410237 - DNA, 100 bp, Homo sapiens
ctgggagaatgtaactgaaagatacatggcttgcaaaaagtaaaccacgatcgttatgctgagggtcggcgctttgcctgatgaccctacctctctgaca

SEQ ID NO: 410238 - DNA, 130 bp, Homo sapiens
tacacactggtgtctcctgcggaagggcagctgggcacgccttccagaccgagatatgattctataacagactcttccagaaatgatatgaagaggaaatttgccctgacaatggaatttgttgaagaat

SEQ ID NO: 410239 - DNA, 75 bp, Homo sapiens
tgtgaagcaccggcgggacggcaagcagggccatgcagctcccatcctctacgcggtctgggctgaagctggttt

SEQ ID NO: 410240 - DNA, 100 bp, Homo sapiens
gccgatactgagcttcttcctatttgccatgggcctctaagaaatatgtctccaaagaacttgccaaagagattcgtgtcaaagcagaaccatttataaa

SEQ ID NO: 410241 - DNA, 75 bp, Homo sapiens
cgttgccatgaggaaagaattctccgaggctactgaaagcattaaaatgctggtgacattgtgtcaatctgatac

SEQ ID NO: 410242 - DNA, 50 bp, Homo sapiens
atttgtaaaggagccggagccccagctcaaaagccaaaagtctctgagaa

SEQ ID NO: 410243 - DNA, 83 bp, Homo sapiens
ggagaatccgccgggcccagcttgcccactacaattttcagtttgagcttactcacatagcatattggtatatcaaaatgaaa

SEQ ID NO: 410244 - DNA, 133 bp, Homo sapiens
tggaaaagcagttgctcgaagaactcgagcgacagagacaagctgagcttgccgcacaaaaagctagagagatggtgatggaaagtggggactggctggttggtggagaccttcaggtgctggagaaaataag

SEQ ID NO: 410245 - DNA, 75 bp, Homo sapiens
cccaatttttgcattccaggaggttcagcgtcttccatttctttcaagctcaaatctttcactggatgttttgag

SEQ ID NO: 410246 - DNA, 90 bp, Homo sapiens
tccgagcatgcattgccattatctgtgaactagagtgcctggaagagctgggatgtctggttgagtcctatggcatgaatgtttgccaac

SEQ ID NO: 410247 - DNA, 50 bp, Homo sapiens
gaaaatcatattatagatggagtaaagacagaccccgtgcggctgacaca

SEQ ID NO: 410248 - DNA, 51 bp, Homo sapiens
acctcaggccctgcttgacagtggtttttcgttggaatatacgttgcacat

SEQ ID NO: 410249 - DNA, 74 bp, Homo sapiens
cgcgactcggcggcggcgtctttttttcagagtcaagtggtgagatcaaagacttttcaccaaaaaatgtcatt

SEQ ID NO: 410250 - DNA, 82 bp, Homo sapiens
acttcaaggtgaagacagtctaccgtcacgagaagcgggtgaaactgcagatctggtgataaaaagttgattgcagaaggac

SEQ ID NO: 410251 - DNA, 50 bp, Homo sapiens
agccctgcctctccctgggctctgacagtcttgcactgtttcctaggctg

SEQ ID NO: 410252 - DNA, 75 bp, Homo sapiens
ggcagtccacccaccgccgccgcctcccagtgtaagctggagctacagggcgtcaagggtggggtggaccatgca

SEQ ID NO: 410253 - DNA, 80 bp, Homo sapiens
aactcttcaccaaagaattgatcacatcatgaaagttggttgaatctggcgatgtggaacccatggatatggagggctga

SEQ ID NO: 410254 - DNA, 100 bp, Homo sapiens
taggggagagccccacagagctattccagcagcactgtgtgtcttggcttcggagcattcagcaggtgttacagctatgtcttctcattacactgaagac

SEQ ID NO: 410255 - DNA, 101 bp, Homo sapiens
tttccatcaaaccctgagagctttattaccagacatgatctttcagacccctgtaaaagagcccaacagtgaaaatgtagatatcagcagtggaggaggcg

SEQ ID NO: 410256 - DNA, 105 bp, Homo sapiens
gaggacacgaggcggcgggctggagacatggaccgcggcgagcaaggtccttttggaataaatcatgggattgagcttcattcagatgtggtggaatatgccaag

SEQ ID NO: 410257 - DNA, 126 bp, Homo sapiens
ttccatatattttgattctgagcgtcaaacttgttatgcagcatataacaggatgaagagactcggcacagccttgagtgcatccaggccaatcagatctttcccaggaagcagctgatccgggag

SEQ ID NO: 410258 - DNA, 88 bp, Homo sapiens
tgcacagggtatcagccgaaccaagtactgggagattgaagaaggtattgttgtaatggaagatgattctccagtggaggctgtgagc

SEQ ID NO: 410259 - DNA, 50 bp, Homo sapiens
tcgacctaaagcctgactggggcaagtttaattggttggggtcagataag

SEQ ID NO: 410260 - DNA, 83 bp, Homo sapiens
ctgcaaatacagagactcggattaaagattgttcagattccattctgtggggaaattgactgtgaggactggatcaaaaagac

SEQ ID NO: 410261 - DNA, 98 bp, Homo sapiens
ggaagcctggaacgcaaggaccggagggcgtgggctgggacgcccctaccttggtctttcaggcctacaacacagcagtcccctcaggatgagcagga

SEQ ID NO: 410262 - DNA, 75 bp, Homo sapiens
gatcttttaccagctaaatttggagacgagctcatctgcgcctttgtttagaacgcttaaaagttctgattccac

SEQ ID NO: 410263 - DNA, 98 bp, Homo sapiens
aaattgctgaagaactcgcaagctcctacgaaagaaagctcatcgagtgtcttcaataggccgtgtttaagaggcgtcttacactccctgttgccagt

SEQ ID NO: 410264 - DNA, 98 bp, Homo sapiens
tcattgctccttcaggacatgggtcagaaagcaacattgaatgcagaagaaatggcggacttctacaaggaatttttaagtaaaaattttcagaagca

SEQ ID NO: 410265 - DNA, 100 bp, Homo sapiens
aaacaactggaatatttagcaaggattcaaggctttcaggtgtcacccacacatcatccggtgggcacaggagagcagagacagcatgcgcacacggtcc

SEQ ID NO: 410266 - DNA, 74 bp, Homo sapiens
cgcgaatatcgtcatcgttagaaggtgcctgattattacaaaataattaaaaatccaatggatttgtcaaccat

SEQ ID NO: 410267 - DNA, 100 bp, Homo sapiens
taaaggagcaagatggctaggggggtcttgctcctcagaacaaaccagaattgcagaaggtgatggaaaaaagaaaacgagaccaagtaataaagcagaa

SEQ ID NO: 410268 - DNA, 74 bp, Homo sapiens
gaaacgtcggcaggaacttgctcgactgagagactcaggggtcttgttcctcgccttctaggtgacatcctttc

SEQ ID NO: 410269 - DNA, 100 bp, Homo sapiens
agggtgggccctccatcatcgtgtcattgcccatgaccagcgttggggatgccagcaggccgtgcaaacggggattcagcgtccgatcctttggaacagg

SEQ ID NO: 410270 - DNA, 75 bp, Homo sapiens
ccatgatccacccacagctcctcacccccgtgccgtccctcgtgttcacggtggtctttgggaagaagcttcctg

SEQ ID NO: 410271 - DNA, 100 bp, Homo sapiens
ccaacggcagtgagatccataagcacgtgcatttcagcagcagcttcacctccatcgcctcggagtgttggaggctgtagcctttgaccaggcatgggac

SEQ ID NO: 410272 - DNA, 95 bp, Homo sapiens
gcggcggcggcgttgacaatgattgaagataaaactttccaagtccttggtaatctttacagcgagggagactgcacttacctgaaatgttctgt

SEQ ID NO: 410273 - DNA, 82 bp, Homo sapiens
ctgacggcgactgcgggaggccagaagtttgcctgcaatggtactgtaattgagcatccggaatatggagaagtaattcagc

SEQ ID NO: 410274 - DNA, 88 bp, Homo sapiens
tttcagacatgctgaatggaggtgatgaagtctacgctaactgtatggtgattgatcaggtgaggccgcaggcggtgctctgggtccg

SEQ ID NO: 410275 - DNA, 75 bp, Homo sapiens
agacggggaaagcggaaggaatgtcgcgtgacaatgcagatcttcgtgaagactctgactggtaagaccatcacc

SEQ ID NO: 410276 - DNA, 75 bp, Homo sapiens
cgttatcttccgactgatccagctggtggtcctggtctacgtcatcggtacggcaagaagaagctgaaatacctg

SEQ ID NO: 410277 - DNA, 100 bp, Homo sapiens
gctaaaaaatttgatctgctaaaatatattcagttccagaagtcaacgaaaggttccgttgtccttgaccacgtattccatcacgtaaaccttgtggaga

SEQ ID NO: 410278 - DNA, 99 bp, Homo sapiens
gggcccgtgaccgctgcttcctcctcatcttccgcctctggcagaatgcactgcttgaaaagatcctgcgctatgagaatgaggtgttgcagctggagg

SEQ ID NO: 410279 - DNA, 97 bp, Homo sapiens
aggttctcagaccggaaacacccagaccagtggacattggttctggaggatttggtgatgtcgtctctgcaccaccttgtcactgcagtgggaacca

SEQ ID NO: 410280 - DNA, 75 bp, Homo sapiens
ttggaaacatctttaccctgttcattgggccagagatcttcctcagaactgtgatcctaacattcccctagttgc

SEQ ID NO: 410281 - DNA, 96 bp, Homo sapiens
atttctccagatgccaacattgacctcacaaccgagcaaattgaagagacgttaaaatacttccgcctactgaacttgacgcactggtatttggcc

SEQ ID NO: 410282 - DNA, 90 bp, Homo sapiens
cagacgacaagcacacactatggcgctgaaacggattaataaggtggagtctttcattttggatcaggatgatttggaaaatccaatgct

SEQ ID NO: 410283 - DNA, 100 bp, Homo sapiens
ataagctggctgtccttcctcggctccgtagcctgacactccatgggaaccccatggaggaagagaaagggtatagatcccaaagagaagattgatattg

SEQ ID NO: 410284 - DNA, 100 bp, Homo sapiens
atacgccaaggcggaagaattttgccactcactacctgtgtgacctcgggatgtagagaatgagctagcagtacaagttagtatgaagcatgagattgaa

SEQ ID NO: 410285 - DNA, 100 bp, Homo sapiens
gctggactggagcagaaccccaggactgcgcccccgggagcgggcgcccagaggaagcagtacaggttttgattaagcactcagctgatgtcaatgcaag

SEQ ID NO: 410286 - DNA, 75 bp, Homo sapiens
aacagttttgcctcagcccttcgtgttttccctgatgaatttcacctccagactttgaatccttttcttcgggcc

SEQ ID NO: 410287 - DNA, 75 bp, Homo sapiens
atgaaaagtgaagaaagtgatcataggagaaaaccatttcagatatttggtttccaggcaggactgacgtctttg

SEQ ID NO: 410288 - DNA, 83 bp, Homo sapiens
aacaccctgcaatctttcagacaggttggtggcactaaggctggtgtagtccggtttcttggggagaccgactttgccaaggg

SEQ ID NO: 410289 - DNA, 78 bp, Homo sapiens
gaatgaagaccacaataaaagagacctctacttagctcagcaattcttaccttatgcagaatcctgatacactatcag

SEQ ID NO: 410290 - DNA, 82 bp, Homo sapiens
ggaaaacagagaaagaagtgataggagggctctgtagggcgaccattgacgaggtggagacggacgtggtggagattgaggc

SEQ ID NO: 410291 - DNA, 90 bp, Homo sapiens
ggtcttcctgctggggctcatgtttgaggttgatgataattagaagcatgctttccactgaacttcccgacaacatttgttatgcagaat

SEQ ID NO: 410292 - DNA, 100 bp, Homo sapiens
actatatgcccaaggacgaccgcgaggcccagagaaagcagatgagcgtcccactttcaaaattcttctgagcaatattctagatgtcatggatgaagaa

SEQ ID NO: 410293 - DNA, 82 bp, Homo sapiens
ggaccatccaccagcactcctttaaagtgggcactgcaaaagtgtgtactaatggtcacttgatgtgcgctggctgttttat

SEQ ID NO: 410294 - DNA, 100 bp, Homo sapiens
cggaggcggagtcggcgccgagaacatgatgccagaattccagaaaagttcagttcgaatcaagaaccctacaagagtagaagaaattatctgtggtctt

SEQ ID NO: 410295 - DNA, 100 bp, Homo sapiens
gtagaccagtttatgatggaaaaagaagtctttacaccgccaatccacttcctgtggcaactacagggaatccaaaggactgcatgacacaccataggat

SEQ ID NO: 410296 - DNA, 75 bp, Homo sapiens
cggaggctgggagccgcggcggcctggggccaagcagatagaacttcagttcactattggcgaagccattaccag

SEQ ID NO: 410297 - DNA, 75 bp, Homo sapiens
ggcggaccgcttctcccgcttcaacgaagaccgagactttcagggttacacatcattttggaatgactgtatatc

SEQ ID NO: 410298 - DNA, 75 bp, Homo sapiens
cctccaccagtggcacagtgaagataccaggtacttaagagattatggcatcagaaacccacaatgttaaaaaac

SEQ ID NO: 410299 - DNA, 90 bp, Homo sapiens
gcactgctcatcttggccatcactatacacaacgttccaggagggccaaacatgtgggctattacctctgaagaacgtactaagcatgac

SEQ ID NO: 410300 - DNA, 75 bp, Homo sapiens
accctgctttttctggtgtcctgaacctggaagttgtgctttttaagcacttttccagccattaactccaggctc

SEQ ID NO: 410301 - DNA, 50 bp, Homo sapiens
ggcatcatccgctatgcaattggggtgccatacacagaggctgcctcttt

SEQ ID NO: 410302 - DNA, 83 bp, Homo sapiens
gaacagacatgctgagtgattcagataatagagcaacaataagccctttacacttggcttaaccgggccgccctgcacctcta

SEQ ID NO: 410303 - DNA, 74 bp, Homo sapiens
atggagatggtcaacaaagtgtttgaggtggtatcaacatcctacagaagaagaattaagaattcttgcaggga

SEQ ID NO: 410304 - DNA, 75 bp, Homo sapiens
atagatacgattagcaccaggatcgtgtctcattttgaacccagacgaagttatacggaagcgtctcctcattga

SEQ ID NO: 410305 - DNA, 74 bp, Homo sapiens
ccaatgtgatggtgacagtggccaagtccttcgaggcaccaataaaatattttccgcagatttccagtggcccc

SEQ ID NO: 410306 - DNA, 75 bp, Homo sapiens
tgatgatgaagaggatgatgatgaagaatgcagaggccaggatgtgggcccagccctgtgccaggaggctggctg

SEQ ID NO: 410307 - DNA, 96 bp, Homo sapiens
ccggaagcggagcgcgagccagtgcgtgacgtcgggtccgagaggccgccaggcagccaggtgtcttcctgcccccgtccccagcagtggcaaacg

SEQ ID NO: 410308 - DNA, 111 bp, Homo sapiens
tatctgtcttcggtggactccttcggcagtccacccaccgccgccgcctcccagaccttcctggagcagtcgaaaacccgatttaacaagaactacaaggggatgagtcta

SEQ ID NO: 410309 - DNA, 100 bp, Homo sapiens
ccagaagcctttcgcggagaaaaggctgacatgcccgtcctatatgacaggaatactctgaagatagtaactccgagccaaatgtggatttggaaaatca

SEQ ID NO: 410310 - DNA, 101 bp, Homo sapiens
gggatggcaaagacgacatccggtgcgccgaggctgctcacaaaagttttagctaaagaagatactgaggcagctattcaatcaatattatacaaagaaaa

SEQ ID NO: 410311 - DNA, 87 bp, Homo sapiens
tgatatcacagaggaaactctgcattctcgcttcctggagggccttccacgtgctggatgctcaggtttgggccaccccatccagct

SEQ ID NO: 410312 - DNA, 87 bp, Homo sapiens
caaataagctatatactttggttacctatgtacctgttaccactttcaaaagcatctggccatctgaagaggttttggcttactact

SEQ ID NO: 410313 - DNA, 74 bp, Homo sapiens
gagaaggccgccgggcccgggcatggtggtctggggcaacgcggaaggtaaacattataccagtgattgccaaa

SEQ ID NO: 410314 - DNA, 100 bp, Homo sapiens
ggtggtgccgcgctcctggccccgcgcgggcggacggcggaggcgcctcccagttgacaacacttactacaaagaggcagaaaaagaaaatcttgtggaa

SEQ ID NO: 410315 - DNA, 75 bp, Homo sapiens
agctctgctaattgggccaaatgctcctttaatttttgaacgagacacatcgttcatgtacatgatcgccggact

SEQ ID NO: 410316 - DNA, 75 bp, Homo sapiens
gatcaactcctgaaagaacactctgaacttcagattgtcaaagaattccaaagaattgatgtgaatgtgtatttt

SEQ ID NO: 410317 - DNA, 100 bp, Homo sapiens
ggacaagcacagtcttcggaaggcagagactccccctaatgggccagattgtggctatggctcctttcaccagcagtactggcttgacggaaagatcatt

SEQ ID NO: 410318 - DNA, 100 bp, Homo sapiens
cactgagtgaggctggggacctcactgagaagtattttgctctgcgaaacatcatccagaagtacaagttgtgcaaagtgaggaagattactgtgggagt

SEQ ID NO: 410319 - DNA, 75 bp, Homo sapiens
aaagacgttcaacgacttactggggagagaaagaaaaggaacgggagctgagagagtcatgtgctgttcctgggg

SEQ ID NO: 410320 - DNA, 100 bp, Homo sapiens
gcctgacttctagcactcctgagtttgagccctatgagcagtggaacctaggattctcgggattcgaagatggctgcacagtcagcgccgaaagttgtgc

SEQ ID NO: 410321 - DNA, 97 bp, Homo sapiens
gacgagtacatcgcaaggatggttcaaccccaccaacaactgaacgctttggtcaggctgctacaatggaaggaattggggcaattggtggaactcc

SEQ ID NO: 410322 - DNA, 75 bp, Homo sapiens
ccgcgccgccgctgccgccgccgcgcgcggagtgcctggaagagctgggatgtctggttgagtcctatggcatga

SEQ ID NO: 410323 - DNA, 98 bp, Homo sapiens
ggtggtggtgtcttcctgtctcaacgatacctattttctagtgctgagatcctgagacaatggtgcaatggatgagcttcatagtctggatccaagaa

SEQ ID NO: 410324 - DNA, 83 bp, Homo sapiens
gcgtagagtcgctggagcgggcggagctgtgcgagagcctcctcacttggcggcgtcttcgacatcttcggaacattgctgcc

SEQ ID NO: 410325 - DNA, 100 bp, Homo sapiens
gggaccgcggggaccatggcggagccgcctcggattcttctaacagagaaaatgccattgaggatgaagaggaggaggaggaggaagatgatgatgagga

SEQ ID NO: 410326 - DNA, 100 bp, Homo sapiens
gccaagcagacaggccagtggatcggaatggtggagaacttcaaccaggcactcaaggatgcaaagaagggacctaacccgctcatgagacgcaatagtg

SEQ ID NO: 410327 - DNA, 85 bp, Homo sapiens
gtcgagatgcttgtgatggtcatgagattggaagggacagtaataccccacttttattcgctataatttgcaagaaagagaaaat

SEQ ID NO: 410328 - DNA, 75 bp, Homo sapiens
atagtagttctggtaccagctatcatgaacaggcagagctgcaaccctcttgtcctctttgaagcagaaattgaa

SEQ ID NO: 410329 - DNA, 88 bp, Homo sapiens
agttgcagatcagcttgaagaactatgatccccagaaggacaagcgcttctcgggcaccgtcagataccccagaatcttccatgctcc

SEQ ID NO: 410330 - DNA, 96 bp, Homo sapiens
cgcgtccaggcctgacagctctgcggctcgggccctgagtggaggcgctccatttgggaacattaatggctgcccacggctacttctttccaatct

SEQ ID NO: 410331 - DNA, 100 bp, Homo sapiens
ctgggtctggagacgccgtggcagcctgaacggagtgtgcgacggattgggagacctgcgaccgcatcaagcagtccgccagcggaaccaagcggcgcgt

SEQ ID NO: 410332 - DNA, 83 bp, Homo sapiens
ccgtgccgcgtctccgcgttcccagcccgggtccccgcgttcacagccccagcgcaggcttcaacggaccacaccaaaatgcc

SEQ ID NO: 410333 - DNA, 87 bp, Homo sapiens
gggatcaggcgcggcggcacccccaggccaggggcacctctggtggggcagaaggtggcgggacaggcttcattgggacagccctaa

SEQ ID NO: 410334 - DNA, 83 bp, Homo sapiens
cgtgcctttgaccttctgccatgattgtgaggcctccccagccacgtgaaactaaagatggatactatgatgctgaatgtgcg

SEQ ID NO: 410335 - DNA, 100 bp, Homo sapiens
tcagaaatgcgcagagcaaacatctttcaaagattgtaaaccatggctgtgtggatacaagctcagcagctccaaggagaagcccttcatcagatgcaag

SEQ ID NO: 410336 - DNA, 50 bp, Homo sapiens
tgagacctactgatgtccctgatacaggtcacagggattatggacccaga

SEQ ID NO: 410337 - DNA, 51 bp, Homo sapiens
tacctaaatgcactctttcgaaagaaagctggaagatgagctggtgtcact

SEQ ID NO: 410338 - DNA, 100 bp, Homo sapiens
cgcgaatatcgtcatcgttagaagctcctgcccctcctaaagctgaagccaaagcgaaggctttaaaggccaagaaggcagtgttgaaaggtgtccacag

SEQ ID NO: 410339 - DNA, 90 bp, Homo sapiens
ccccttcactggtaatgtgtccattcgagggcggatcctctctggttgaaatcacaaagattagacacctttttagataggtgttcttca

SEQ ID NO: 410340 - DNA, 82 bp, Homo sapiens
cggagctgcgctggggccggaggcgggcgaggaaggaagccatcttcgacaagagcacagggaaggttgttttgaagacgtt

SEQ ID NO: 410341 - DNA, 83 bp, Homo sapiens
cagcgggtgaggctgcaacacgaggctgccgttcagcacccgtcgagcgtgaaaggtgtagcagtcactcggcctacacccac

SEQ ID NO: 410342 - DNA, 83 bp, Homo sapiens
accagcttgtagaaatcattaacagacccaacacaccaaagacgttgttagagaatacaggaactgtggctgcaccatctgtc

SEQ ID NO: 410343 - DNA, 75 bp, Homo sapiens
ccggtgtctggcggatgcggtcgtgaagatagttcgcacagctcgaggggagtgcgggggcagcaccgcgcgtgg

SEQ ID NO: 410344 - DNA, 82 bp, Homo sapiens
gcgcagggcctgcagcgggagctggacggcgagcgcgagcggcgcgagaaaccaggcccagacatgtccgtccttgtaagtt

SEQ ID NO: 410345 - DNA, 82 bp, Homo sapiens
tggagcctcagttggaagcagccgatccagcctgcggagcctgtggggcaggagggagccatggatttgctgcgggagctga

SEQ ID NO: 410346 - DNA, 51 bp, Homo sapiens
aaacatgttcgagttctgggatattctggggagcaggtcctggtggatgtg

SEQ ID NO: 410347 - DNA, 100 bp, Homo sapiens
ggttcggctggaaggaaccgctctcgcttcgtcctacacttgcgcaaatgtctccgattcaaccctatgaaaagataaaggccaggggcttgcctgataa

SEQ ID NO: 410348 - DNA, 90 bp, Homo sapiens
ctgaagatgattacacggcattaatctcccaaaatattctagaaggggaaaagctacttcaagatgttcctcctgctgatcaagagaagc

SEQ ID NO: 410349 - DNA, 82 bp, Homo sapiens
ccgtaacctgcgcgctgccctagggcccggccgacccgcggcccgtaagactttgaccccgacgcaggcttcagtgattgcc

SEQ ID NO: 410350 - DNA, 90 bp, Homo sapiens
ctcgggtcgttgtggtgcgctgtcttcccgcttgcgtcagggacctgcccgactcagtgggtcccagtcctatgaggatatgagaggaat

SEQ ID NO: 410351 - DNA, 75 bp, Homo sapiens
cggtggtaggatgcatcttcatggttattgagggcaagaagagctccttaataagcatttatagtcagtttttgg

SEQ ID NO: 410352 - DNA, 84 bp, Homo sapiens
gccgccgccgccgctgccgctgccgctgccgcacctccgtagctgactcgagttgtctgctggttctcagcttgaagaagattc

SEQ ID NO: 410353 - DNA, 74 bp, Homo sapiens
tctgcacacagaaatgtgccctgaactggacggacataccagtggccatggtagagacagggtttcaccgtgtt

SEQ ID NO: 410354 - DNA, 139 bp, Homo sapiens
ccgggatcgtgaccgagaccgtgaccgagagcgtgaccgagagcgcgaatatcgtcatcgttagaaggtcagaatggcggcagtggagcatcgtcattcttcaggattgccctactggccctacctcacagctgaaact

SEQ ID NO: 410355 - DNA, 75 bp, Homo sapiens
accacatagacatttacgcggatgtcggcgaagagttcaaccagtgtgaaaaactcaaattactgtcttccatca

SEQ ID NO: 410356 - DNA, 50 bp, Homo sapiens
gaccgggagctggacctccggggtgaaagaactcttttcttctttgggag

SEQ ID NO: 410357 - DNA, 117 bp, Homo sapiens
cgtgaaggtgcagctccctgcatatctgaagcggctcccagtccctgaaagcattaccgggttcgctaggctcacagctggaagaagagttgaaggcacgaattgaattgtgggaac

SEQ ID NO: 410358 - DNA, 51 bp, Homo sapiens
gccgggtcgctgcggccgaggctccggcccattgcagatgcaaaggctcct

SEQ ID NO: 410359 - DNA, 101 bp, Homo sapiens
cgcgccccgggctcggccgacccggcggggatctaggggtgggcgacttcgcgggaccgtggcgcatggtgtaatggataggtaacagagaagacctcgtc

SEQ ID NO: 410360 - DNA, 100 bp, Homo sapiens
ccaacactgcatggagcggatccagcctttactgttccaggatacagatctcctgattcaggtgtccagtgccttttgaactgaccgcaagccctcctgg

SEQ ID NO: 410361 - DNA, 80 bp, Homo sapiens
aaaaaaccttcaggcggcccatgggatgaccagtgtcccagtgaaggaacgagtgaaggtgtctcagaactggagactgg

SEQ ID NO: 410362 - DNA, 100 bp, Homo sapiens
tttcttaaatggcccacatcaggacagctgttccttggccatcccaaagctattctgggggcaacagaggttcctgattatgtcactgtaataaagcaac

SEQ ID NO: 410363 - DNA, 48 bp, Homo sapiens
gttttccagcaggacgttcagcaggcatcctctggtatcacgattcca

SEQ ID NO: 410364 - DNA, 74 bp, Homo sapiens
gagcgcgaatatcgtcatcgttagaagggtctacatcaactattacgacatgaacgcggccaatgtgggctgga

SEQ ID NO: 410365 - DNA, 83 bp, Homo sapiens
aaaacgtctgcccggcgtagcgggaacccagcatgattttcaggaggctgaggggatctggcggtggagcgctaggatcagac

SEQ ID NO: 410366 - DNA, 75 bp, Homo sapiens
ggcctgacagctctgcggctcgggccctgagaactgataaatttcaaacggaagagagtggcagcatttagaaag

SEQ ID NO: 410367 - DNA, 50 bp, Homo sapiens
cacagagttagagagagggatggtgcctctacggcagacacatgcaggcc

SEQ ID NO: 410368 - DNA, 90 bp, Homo sapiens
cagacttgcatatatttgactgcaagtgtctgctttttcaacgtgggagaaggagttgcacaagatagtttttgatccccggtacttact

SEQ ID NO: 410369 - DNA, 108 bp, Homo sapiens
ctgcgctatgccctgctgtagtcacaggagctgtagagaggaccccggtacatctgaaagccgggaaatgacacgatgaggcgagtggtacgacagagcaagtttcgg

SEQ ID NO: 410370 - DNA, 100 bp, Homo sapiens
ccaacattcccaacagccaccaccaccaccagatggtgcaggtgatggtcctaccagtgtgtctgttgaggtcacccgtcctaaagtgacctccctgaaa

SEQ ID NO: 410371 - DNA, 100 bp, Homo sapiens
ccattccagcactggactcatggaggctgagcatttattcagattcccagaaaatctaagctggcagttcataggaatatcagagacgacgaaggcttca

SEQ ID NO: 410372 - DNA, 75 bp, Homo sapiens
atgtggataaccaacggaggaaaagctaattggaaatggaggatcaacactttgtgcccttcaatgtttggaaaa

SEQ ID NO: 410373 - DNA, 51 bp, Homo sapiens
ttttagaaaggccttatggtgtacaaaggtcctaggcctacttacaagcct

SEQ ID NO: 410374 - DNA, 75 bp, Homo sapiens
gcaagcgcggggaaccaaggagacgctcctggcactgcagtgagcaatgaggagctgcggggaagtactccagag

SEQ ID NO: 410375 - DNA, 100 bp, Homo sapiens
gttaactggagccaggctgagcgtcggcgccggggttcggtggcctctagtgagatctggaggtatcattgcccagtgcctaagatcttttatgttcagc

SEQ ID NO: 410376 - DNA, 72 bp, Homo sapiens
cagaacctgaagtgtctgagtgctgctgaagaaaagggagctgcagtccatggctgaccaggagcaggtgtc

SEQ ID NO: 410377 - DNA, 74 bp, Homo sapiens
cttggatccgcgggacaagaaaattcatgcggcagcttccgatgatttaagggacgtgccaggagctgttggtg

SEQ ID NO: 410378 - DNA, 125 bp, Homo sapiens
gtgcatgttagtgctcaagagcctcattatctaccacccgagatgccccaaggttgtaaagaagaaagttctaccctttctgtcaaaatgaagtgtgattttaattgtaaccatgttcattccgg

SEQ ID NO: 410379 - DNA, 100 bp, Homo sapiens
agatgacctgctggtggcctctgctgagtgtccaagcgatgatgaggacctggaggagtgtgagcccagtactgggcggcgactggcggcgcgatggacc

SEQ ID NO: 410380 - DNA, 100 bp, Homo sapiens
cagccatctacatcagctcgtgcccgtcttattgatcctggctttggaatatataagggcccgctcaccacgcagtatctgtggcaccgcttcagcgccg

SEQ ID NO: 410381 - DNA, 90 bp, Homo sapiens
catttctccgccaattcaccttgactctgagctagaaagaccctctgttaaaggctatgacttctgccaggtcctgcagtggtttgccga

SEQ ID NO: 410382 - DNA, 101 bp, Homo sapiens
acatcagcttgtaggagacagagttgctgatagtccaactccaccgccaccacctccaccagatgacattcccatgtttgatgactctccacctcccccac

SEQ ID NO: 410383 - DNA, 75 bp, Homo sapiens
agatcaccgtgacatccgaggtgcctttctccaaaagcatcccagccatcactcttccacctgctccttagagaa

SEQ ID NO: 410384 - DNA, 100 bp, Homo sapiens
acaaaggcaatgcttatcatttaatgcataaaaactgcaatcatttttcttcagctttatcagaggttcaaggtgtttgcagactatgaagcctacatgc

SEQ ID NO: 410385 - DNA, 100 bp, Homo sapiens
tcctattcggccatcttggctcctccagaataaacctattttttgaggtggaggaagctaaacaagaattacaggaagttgttgaattcttgaaaaatcc

SEQ ID NO: 410386 - DNA, 100 bp, Homo sapiens
acgccatcaaagaagggaaaaccagctgaggtgtccgtaaagattccagagaagcctgtgaacaaagtctatgtacagacatggagcactcagaatcttt

SEQ ID NO: 410387 - DNA, 87 bp, Homo sapiens
aggccattgtgcaactggtgaatgagcgacagccccaggcccgggttgtggtgctggttggatggcaagcatgtggtgtttggcaaa

SEQ ID NO: 410388 - DNA, 93 bp, Homo sapiens
gccgcaccaagaaccaaccctgccagcacctggaccttggacattcagacttcagaatggtctacatgttcaagtgcgtgtggcggtgctaca

SEQ ID NO: 410389 - DNA, 90 bp, Homo sapiens
cttgtttgagaaccccgatcagaatgccaaatgtgtttgcatgctggggatcatagacggtatttctatgtaaacgaacagtcgggcgag

SEQ ID NO: 410390 - DNA, 100 bp, Homo sapiens
caaaagaagagaagcagaattatacctagaagtctactaatggacagttagtcacccacctacatgttgaggaagctgaatatggtgggcatgatcagat

SEQ ID NO: 410391 - DNA, 99 bp, Homo sapiens
tggaagatgcagccgcgccaggggacgaccgaggcggcacacaggatgccatggacaatattaccaggcagaaccaattctacgatacccaagtcatca

SEQ ID NO: 410392 - DNA, 83 bp, Homo sapiens
tgagaagcgacgttgctggtaatagaaggccagcatccttcagaaaaagcatccccgaggaggaagacgaatcgttaaacatc

SEQ ID NO: 410393 - DNA, 98 bp, Homo sapiens
gaacctgcggcctgacccagagccacttctcaccgagatgattcatgaagccagattacctgtccctaatactgagcagaagctggtgaatgaaacag

SEQ ID NO: 410394 - DNA, 80 bp, Homo sapiens
actccatccaacacttcgtttactccgggccatccaggagagcctcctcaccagcacagaaggcctgtgccccagcgccc

SEQ ID NO: 410395 - DNA, 100 bp, Homo sapiens
cggacacctccacatcgccttttgccacctttccctttatttccggagatttgctgttgctgagtctgattgtaatttagcagttgccttgaatagaagt

SEQ ID NO: 410396 - DNA, 106 bp, Homo sapiens
gaacttcctgatctctctcgctgtgagacatgtctgagactcctgctcagtgtagcattaaggtgatggcttggacaacagtgtagcttcccccagcacaggtgac

SEQ ID NO: 410397 - DNA, 75 bp, Homo sapiens
gggacgtgatgctggagaattataggaacctggtctccctgggtcagcgcattgtgaataggctgagaacttcat

SEQ ID NO: 410398 - DNA, 88 bp, Homo sapiens
gtgcagcgcaaccacgagacggccttccaagctgcaggtacccccagcactttagccctgtgtggccagcgccccatgcgcaagcgtc

SEQ ID NO: 410399 - DNA, 101 bp, Homo sapiens
cgcggccaggcgattcggtgaagcgattcctgcaggcgttggttcccctctttgacctggtaaaatgtccagtgatcgagctttgaggaagcagcaacagt

SEQ ID NO: 410400 - DNA, 75 bp, Homo sapiens
gcgctgctggctgcgctctgcccggcgagtcgggctctggaggaaaagaaaggggtcgggccccggctcagtggt

SEQ ID NO: 410401 - DNA, 88 bp, Homo sapiens
ccctgccagctgcgccgggacgacaacaagggaggtgtcacagttttccatttagatcaacaacttcaagttcttaccatggaaaatt

SEQ ID NO: 410402 - DNA, 92 bp, Homo sapiens
ctgcaaccgcaacatcgaccagaccatgctctccatcctgctcttcttccacagacaatgcagatcttcgtgaagactctgactggtaagac

SEQ ID NO: 410403 - DNA, 75 bp, Homo sapiens
gattcgcagtggtcgcttcttctccttgtgatgatgatgatgattttgatgatgaggaagctgaagaaaaagcgc

SEQ ID NO: 410404 - DNA, 75 bp, Homo sapiens
gtgattgtgatgtttgcctggtctatagttgctgactttggtttctgtgcccagatcacccctgagcagagcaaa

SEQ ID NO: 410405 - DNA, 97 bp, Homo sapiens
ctgatgaaggtcttccccaaccagagggggcccgcaacatctccaaccagctgagcattggcacggacatctcggcccaacacccggagctgcggac

SEQ ID NO: 410406 - DNA, 100 bp, Homo sapiens
gttccagttgcacatttcctgcaaggactccaaagtggtgagcgctaccttgatgaagcagacagagataaggagcgttacatgaaggaactggaacagt

SEQ ID NO: 410407 - DNA, 100 bp, Homo sapiens
gcggaacctgcggggcagaggcggcggccgcagcggcgcagctgatagcaggaacagatggcaggagagctggctgacaaaaaggaccgtgatgcatcac

SEQ ID NO: 410408 - DNA, 100 bp, Homo sapiens
aacaagtgtctgtgcacaggagtcagagagggggaaccgccgtcccaacatcacaaaaaggactatcgtgctgtcattgagaaaattccagaggacgaca

SEQ ID NO: 410409 - DNA, 74 bp, Homo sapiens
ctctaaggggagaaggaatgtgtgaccatttccaacgatatgtgaaagaggccaaagaagcaactaagaatgga

SEQ ID NO: 410410 - DNA, 100 bp, Homo sapiens
ctgggccacctccacgactcataccccacagaccactatcacctcgatcagcccagggccttgctgccgccatgactgaggaatcagaggagacagtcct

SEQ ID NO: 410411 - DNA, 98 bp, Homo sapiens
cagtgagagtggagtccggggtcctggtcggggtggtctgtctgctcctggcatgccctgccacagccactggtcctaaaggggatccaggtcagact

SEQ ID NO: 410412 - DNA, 98 bp, Homo sapiens
atgaagaccacaataaaagagacctctacttagctcagcaattcttaccttgttttacagacatttcaccagaggaattgaggcttgaataccataac

SEQ ID NO: 410413 - DNA, 98 bp, Homo sapiens
gtgcttttcgcaagaacaagactctcggctatggagtccccatgttgagaaagtctattcgtgtgaccaggagaggcagagtgccctggaagaggccc

SEQ ID NO: 410414 - DNA, 96 bp, Homo sapiens
gatcctgccatgcaggcaggccctgagcacgctgctgtgtgagcagcagaaaccagcctggacaccaagtctgtgtcagaaggccacctcaagagg

SEQ ID NO: 410415 - DNA, 51 bp, Homo sapiens
atgaagagctgccagatccaacaggtgacagaccatgccaccactgccctg

SEQ ID NO: 410416 - DNA, 74 bp, Homo sapiens
cggaactttgattacaaggaatttcatatactgagagaagccttataaatgcacctgggatggctgctcctgga

SEQ ID NO: 410417 - DNA, 48 bp, Homo sapiens
agcccttgggccgcgtctcctttgagggcttgacgcgccggaaagtcc

SEQ ID NO: 410418 - DNA, 74 bp, Homo sapiens
ccctggctaccatggaccatcctgctggtcagcactgcggctgaactgtaaaaagctactactggagaacaata

SEQ ID NO: 410419 - DNA, 74 bp, Homo sapiens
cagaacagttggatcttgctcagtctctgtcagaggaagatcccttgtttctagcatggacaatccagataatg

SEQ ID NO: 410420 - DNA, 75 bp, Homo sapiens
ctggagacggcctgggtgctggcgaagcggaggccggagacagggtctccctgtcacccaggctggagttcagta

SEQ ID NO: 410421 - DNA, 110 bp, Homo sapiens
aagcagttgtccaagtatgaatctcaactttcaacaaatgaggagaaagtagatacagatgatcaacacctacatctggacagtcagtatctacttgctcctcaaagaac

SEQ ID NO: 410422 - DNA, 74 bp, Homo sapiens
gattccaagtaactcttatttgcaaagccttctagacaagctcagtggaatctgaagggcccaccccatggagg

SEQ ID NO: 410423 - DNA, 100 bp, Homo sapiens
tggctctcatcccagacttggccatggaaacctggcttctcctggctgtcagcctggtgctcctctatctcattggcatcaacaaaagtcagaattcccg

SEQ ID NO: 410424 - DNA, 100 bp, Homo sapiens
cacggagggacttctgcagagagagtgcgcagaaggattccgggagcacagttccgccgagccctggagggacaggaaagccagaaatggacttcgtgag

SEQ ID NO: 410425 - DNA, 75 bp, Homo sapiens
gttccgatttttatcaaacttcttaattctgaacatgaagatgttcaggaacagctgcaagctttcttcctggtg

SEQ ID NO: 410426 - DNA, 75 bp, Homo sapiens
ccccgccgccgccgcccccgccgccagatgccatggacaatattaccaggcagaaccaattctacgatacccaag

SEQ ID NO: 410427 - DNA, 50 bp, Homo sapiens
cctcccaagtagcttggattacaggaaaacaaaaagtcctttctcctgat

SEQ ID NO: 410428 - DNA, 100 bp, Homo sapiens
aagagtgctggggcctggaggctgtaatacaaaagctgcgcgtcccttaatttcctcggcggaatttaagggacgctgtgaagcaatcatggatgcaatg

SEQ ID NO: 410429 - DNA, 75 bp, Homo sapiens
ctcgccgtcactgttgtataaatgctggagcattggatttgctaaaggagcttaagaatattcctatgaccctgg

SEQ ID NO: 410430 - DNA, 74 bp, Homo sapiens
gactgcagcctcgtgcggacgctcgtgcacagatacgcgacattgactacagcaccgtgctcctcggcatgctg

SEQ ID NO: 410431 - DNA, 90 bp, Homo sapiens
gcagctgctagcaggctgtcataacaatgaccacctggtagagaaataccgcattcttatcacaaagactattgcagatatcatccgaac

SEQ ID NO: 410432 - DNA, 50 bp, Homo sapiens
cagtccggacctcctcacgagcccaaatgtgaatttggacattggctctg

SEQ ID NO: 410433 - DNA, 90 bp, Homo sapiens
cgccgacccgcgccctgctccctctcagcacctgggcggacgctttgctgcaagataacatcgctgatgctgtagcttgtgcaaagaggg

SEQ ID NO: 410434 - DNA, 100 bp, Homo sapiens
caaggagctggacctctacctggcctacttcgtgcgtgagcgaggctgtgggtgagcgtggaggatgctcagatgcacaccgtcaccatctggctcacag

SEQ ID NO: 410435 - DNA, 100 bp, Homo sapiens
caggacccgggctttctgctgtacagacttctcgtgggcagcctcccctcggaactcgggcatcatggcctcagcaagagtgagccatggagctacgtgt

SEQ ID NO: 410436 - DNA, 90 bp, Homo sapiens
gaagggccgaagccccgccagcccagctaaagcagacggctcgcactgcgacccgaaggctctgacgcccgctctgcggcttcggtgttt

SEQ ID NO: 410437 - DNA, 75 bp, Homo sapiens
gccgcgtagcttccatccgccagctgccatgagcgagcgcctccgtcccagatcaagtcccagcagagcgaggtg

SEQ ID NO: 410438 - DNA, 75 bp, Homo sapiens
aaatggctggtataattataggcaccagagattggtacaagcgcaattttgccatcaccttcttcatgggaaaag

SEQ ID NO: 410439 - DNA, 52 bp, Homo sapiens
taggaagccggagacagcagggtgacagacatggcccatgaacatggacatg

SEQ ID NO: 410440 - DNA, 49 bp, Homo sapiens
aaatggagcccttcaccaatgttcacacaaaagatgttggacaatttct

SEQ ID NO: 410441 - DNA, 82 bp, Homo sapiens
cggtgtgcctcggcagccttgcgctgctctaatggtccggacttccgtgtgtccccgttctccgtgtcctgctgtccgctga

SEQ ID NO: 410442 - DNA, 50 bp, Homo sapiens
tatgcggaggacagctctgatgaggagcagtcctgcgttaactgcggccg

SEQ ID NO: 410443 - DNA, 83 bp, Homo sapiens
ccctcaaggacaacctcggcctgagacaccggaggaccggatcacacaaaccctgaactggctggtgaggatgacatcagaaa

SEQ ID NO: 410444 - DNA, 101 bp, Homo sapiens
ctaatctcaccagtaaggtgtgtagccaaaccagctgttccctgttaagtgaacagagtatctgtcaggcaagagctgctgtgatggtttatgatgatgcc

SEQ ID NO: 410445 - DNA, 75 bp, Homo sapiens
cgggaacacagagagcgaagccagtactttgaatactctgctcaacatgaaattcggcacaacatccagaaggaa

SEQ ID NO: 410446 - DNA, 75 bp, Homo sapiens
ggcaccaacgacgtgggcgccctgaagcatgctgacgtggggaccattgcaatttagagatgtggccatagaatt

SEQ ID NO: 410447 - DNA, 75 bp, Homo sapiens
gtcctgccgaccgtgtgcgctccttatattcccccgcagaggtatctgaaaaggtttaaagtgatgaagatcaaa

SEQ ID NO: 410448 - DNA, 101 bp, Homo sapiens
ggagaactatagtaacttggtgtcactggacacgatgaggcgagtggtacgacagagcaagtttcggcatgtatttgggcaagcggtgaaaaatgaccagt

SEQ ID NO: 410449 - DNA, 95 bp, Homo sapiens
ctcccggaccttctcatctttcaaatggtcatcatctgccttatgtgtgtgcacagcttggagagagcagacagtgatctgacacaaacacagct

SEQ ID NO: 410450 - DNA, 95 bp, Homo sapiens
caatgcccagcccttactacatggaacttacgaagctcctgttaaatcaagttctcttggaacggttgattgtaaataggccacatccttggggt

SEQ ID NO: 410451 - DNA, 100 bp, Homo sapiens
tgattttgaaacgattaaattgattagcaatggagcctatggctgtgaatgtggattcttcccacacagaatatacattgtcctctttgactagtgacac

SEQ ID NO: 410452 - DNA, 50 bp, Homo sapiens
acataagatcgtagccagacccccaggacgactgggtttggattcagaag

SEQ ID NO: 410453 - DNA, 100 bp, Homo sapiens
tagaaggtggggatgagggaaatggtgagagcaatacccagaggtaaaagctgcagacttcgctaggcagaaggagaatgcagttgaaactaattttgtg

SEQ ID NO: 410454 - DNA, 87 bp, Homo sapiens
agttctatgaacctcaagatagagatgatctctatttttacattgccacatacctagccttcttagattcttcaaccttgcagctgt

SEQ ID NO: 410455 - DNA, 99 bp, Homo sapiens
cagaacacacccacctcctacaagtgctcctgcaagcctggctaccaaggggaaggcaggcagtgtgagggctggagtgcagcggcgcgatctcggctc

SEQ ID NO: 410456 - DNA, 51 bp, Homo sapiens
ggaaaacctggcgaccctaagtcagaaaaacgttgacctcttggcgagaat

SEQ ID NO: 410457 - DNA, 101 bp, Homo sapiens
aaaattgcccttcgggaaatccgaatgctcaagagtaatcaagtcagaggattatatgacttttatctgcctagagaagaactatggatctacaacatgga

SEQ ID NO: 410458 - DNA, 85 bp, Homo sapiens
aacttcgagatggattccaacatcctgctagacttgttaagaaaatcctgagcgagcagctctgtactttgtttctggcgtgtgc

SEQ ID NO: 410459 - DNA, 50 bp, Homo sapiens
ggacaaagtgcttgctctgatccagcttcttggacacttaatgattgttg

SEQ ID NO: 410460 - DNA, 97 bp, Homo sapiens
cggccaagtcagccacctggacggacacattggcgtgagacctgggagtacgttgtgccaaatcattgccacttgccacatgagtgtaaatgatggc

SEQ ID NO: 410461 - DNA, 98 bp, Homo sapiens
cgtgtcaccagtttatcacagggaaagtcctggagggcaactccaacaacattgccaccgtggacatctccgcaggcttcgtgggcttagacacctac

SEQ ID NO: 410462 - DNA, 90 bp, Homo sapiens
gcgctatgcctgcggcggagactgcatcaggctctcgtgtgatccagctttgcttcctgagcccaatcacgtcatgctgaaccacctata

SEQ ID NO: 410463 - DNA, 119 bp, Homo sapiens
cggtccttgcgtccttccggctccgtcgtggaagcaggactgcgccgcgtcttcctcaagcttcggaaccaaaaagaagcttcccagagccggggccaggagccccaagcgccctctag

SEQ ID NO: 410464 - DNA, 75 bp, Homo sapiens
ctggagtctggctaacttgtcttccactaaagagttggacctgtcaggcaggcagaagtcctgaaggctgacatg

SEQ ID NO: 410465 - DNA, 87 bp, Homo sapiens
ccgcctccctgggagctccgcacggactcctgggagagttggctctcaaggttctgatttagattcatcagcaactcctataaacac

SEQ ID NO: 410466 - DNA, 51 bp, Homo sapiens
ggcagtagcagcttatgaggatgataacaacgaacttgatgcaagtgatag

SEQ ID NO: 410467 - DNA, 78 bp, Homo sapiens
gacggggaccagcagctgtcgccgccgctctcagggggcttgtacatgacagctggaatagcctccagttgaggggct

SEQ ID NO: 410468 - DNA, 75 bp, Homo sapiens
ccagcgccaccgggcagcagcggcgccgtgctcgctccaggcatctccttggaaacaatgccatctttgaatgtg

SEQ ID NO: 410469 - DNA, 100 bp, Homo sapiens
gcttcggagagagaaatgctgggcttatgtccctgatgccaaaaatgcacctactctttcctctaactctggtgaggtcattctggagtgacatgatgga

SEQ ID NO: 410470 - DNA, 75 bp, Homo sapiens
gatatcgtgtctggagcagtggagcccaaagacccctggagacatggttttaaaatcaaagatgggaaaatcgga

SEQ ID NO: 410471 - DNA, 97 bp, Homo sapiens
gaaccccaggactgcgcccccgggagcgggcgcccagaggaatgctcatcaaatttaacaacgctgttcagacggtcctgcttcaccggcgtgtttg

SEQ ID NO: 410472 - DNA, 51 bp, Homo sapiens
ctaatccagtggaaatcaggagagaaaacatagctctgctggcagaaacag

SEQ ID NO: 410473 - DNA, 51 bp, Homo sapiens
gctcccgggctggactcaggcttctcaggtcgcaatggaagaagagatcgc

SEQ ID NO: 410474 - DNA, 135 bp, Homo sapiens
gacgccgccgaagaagcatcgttaaagtctctcttcaccctgccgtcatgtctaagtcagagaagttcagttctgcaagcaagtatgctgctctctctgttgatggtgaagatgaaaatgagggagaagattatg

SEQ ID NO: 410475 - DNA, 114 bp, Homo sapiens
gtatacagatctgcagctcatcaatgctgaggagcagacgagtggccaggcttctggggctgactcaactggtgctggagaatctggtaaaagcaccattgtgaagcagatgag

SEQ ID NO: 410476 - DNA, 90 bp, Homo sapiens
gttgtaggtagcggtaccttgagtggcaacaggttaaagctgaagctcaacaaagatatagtgatctctgtgggcatttataatctggtc

SEQ ID NO: 410477 - DNA, 100 bp, Homo sapiens
ggggaactcctgctgcccactcagcatcttcatgatacagttaagaggaatcttgacagcgccacttcccctcagaatggcgatcaacagaatggctacg

SEQ ID NO: 410478 - DNA, 75 bp, Homo sapiens
ggaaacttgcagcaaagccattcgggttggagtaattgatacagtggaaggtcttgatgcccaggttgtaaatgg

SEQ ID NO: 410479 - DNA, 108 bp, Homo sapiens
ccagagcctggagtctgcgaaggccgggacccggttccccggcccacagtgggggtgtgcaaacccgagagaactgggatttaagaggggtgcagatcccggaatgcc

SEQ ID NO: 410480 - DNA, 80 bp, Homo sapiens
agatccttcagcaaaagctgtccttacaggtgatgcagaagatggggaagaatatgatgacccttttgctgggcctccag

SEQ ID NO: 410481 - DNA, 75 bp, Homo sapiens
agtggaaagctctatgcggagtacgtctgggtcacctaggcctgcaggcttgctactccagaaaaagcttcataa

SEQ ID NO: 410482 - DNA, 83 bp, Homo sapiens
agagagaggtggacagatctgagagatactgagtgttctaagaacggaagcatctgggctggatggaatttagcatcaagcag

SEQ ID NO: 410483 - DNA, 100 bp, Homo sapiens
ccagcatttagagctgtttatgaagcactgagaaattgttctggacttggtgcctctttctgttatatgctttcctatttagttgggagaccagttgtat

SEQ ID NO: 410484 - DNA, 89 bp, Homo sapiens
acttgtacctgtctggattattcattattacatgaagtatcatgtttctgatgtgtctagtccgaatgaagcaggaaggccggagtggg

SEQ ID NO: 410485 - DNA, 101 bp, Homo sapiens
cggtgcaagaggcgcaaacaagccaatcccaggaggaaaaacggaggtggtccaggccacgctggtggtcctggccttggccatggtgcccatcctgctgc

SEQ ID NO: 410486 - DNA, 82 bp, Homo sapiens
tgtggcagcattttttccagaacacaaaaggtcaagtcatcagcccacaaagtagcagtagtggcacggatctgacgggtga

SEQ ID NO: 410487 - DNA, 75 bp, Homo sapiens
tcaccaggggagatggcacaggaggaaagaaccggaggctgaagcaggccaaagaagaagctcaggctgaaattg

SEQ ID NO: 410488 - DNA, 82 bp, Homo sapiens
aacatttgtaatggtggctcgtgattctgaaaataaaggccatggacctggctcaggcaggcagcacagtggaatctaagat

SEQ ID NO: 410489 - DNA, 83 bp, Homo sapiens
ggattccaagtaactcttatttggccagaaaattagtccagaaggaaaagctaaaattcagcttcagctggtcctacatgcag

SEQ ID NO: 410490 - DNA, 100 bp, Homo sapiens
gtcatttctcccttgttggtttgggatttgaagaacacgataaacgtcttgtacccggaggtggagcaacagaaattgaattagccaaacagatcacatc

SEQ ID NO: 410491 - DNA, 51 bp, Homo sapiens
atctcttctgcacagattgttggatgttggttcctgcaaacaagaactgac

SEQ ID NO: 410492 - DNA, 90 bp, Homo sapiens
caaagataaaactcctgcccctcttcaacacctggacaccttgttagatggaacctacaagcagttgacgaaggatcagagattggtgta

SEQ ID NO: 410493 - DNA, 74 bp, Homo sapiens
gccgcgcagccctcggagcacggaacaagatcactcaaggtgaaggataatctactaataccagcactttgaat

SEQ ID NO: 410494 - DNA, 100 bp, Homo sapiens
ggcagcggcggcccaggccagcattcccgcagttatgcctccgcctcgttgccctgaaagccgcagcgacagcgaaaagggctaagattcggccatgagc

SEQ ID NO: 410495 - DNA, 107 bp, Homo sapiens
tctgattgagctctgggaaggcctgacagtggatgacgtacagaagagtactgggtgtgattttgcagtgagagaacgccgagccgtcgccgcagcctccgccgccg

SEQ ID NO: 410496 - DNA, 98 bp, Homo sapiens
tggaccacagcacccatcctgactgtgccttaaagtcggaggtggggaagacagggctccagctaccacaggacgggctctgggtatagccgttccag

SEQ ID NO: 410497 - DNA, 100 bp, Homo sapiens
cagtcagtgcccttcagttaaagaccaccaggagcacacttgttgtgtgtagtggtgtagccactacagggacagcctggacccatgggcacaaagaagc

SEQ ID NO: 410498 - DNA, 100 bp, Homo sapiens
ttactactgcacagctgacaatggctttggtccccagcgcagtgaagtggtgagcctttttgtcactggtctctaattaacagaagatggcaaagcccag

SEQ ID NO: 410499 - DNA, 74 bp, Homo sapiens
gaggatgacgacagcgtcctcagcacccccaagccgaagctgcggattttttatcaagcagaaatgcatcgaac

SEQ ID NO: 410500 - DNA, 83 bp, Homo sapiens
cgaggactctctgcgtctctggagacaagggcactacacgcacttcagaatgaagagttacaatgcagatcttcgtgaagact

SEQ ID NO: 410501 - DNA, 117 bp, Homo sapiens
ctgctgagaaagtacttcattgaagccagtcccttgcccagcagttatccgggaaaaacagacatgaaagatcagatgtcaacttcatctgtgcaggcattagctgaaagaaaaaat

SEQ ID NO: 410502 - DNA, 75 bp, Homo sapiens
gtcgtggaggtggccgtggaggcagaggtggcatgggctttgtgtccctggtgatgttggaacattaatgatgga

SEQ ID NO: 410503 - DNA, 82 bp, Homo sapiens
ccaaggcgccaggcaggacgacagcagcagcagcacgtctccttcagccgcttacaaacacgcagatggcaagaagattgat

SEQ ID NO: 410504 - DNA, 87 bp, Homo sapiens
agcagaccccacaaggattccggtctactttgagggcccccagcttgctctataagttaaataggattgcgaatcaggtggccattc

SEQ ID NO: 410505 - DNA, 83 bp, Homo sapiens
tatgtccgaagcaaggatttccgggactacctcatgaggaagcatgagtgggaaaagcatgggacctgcgccgcccaggtgga

SEQ ID NO: 410506 - DNA, 82 bp, Homo sapiens
gttttcatcatctaagtgaaaggtgaatgtttgaattttggaataaaaactcttgaggaaattaagtcaaagaaaatgaagg

SEQ ID NO: 410507 - DNA, 74 bp, Homo sapiens
cttcatgctgtgcagcaagaacccggacaaccgcatccagggtggctacgagaacgtgccgactattgacatcc

SEQ ID NO: 410508 - DNA, 76 bp, Homo sapiens
cactgggaccaagaccagcctgagcatgaagggagagaaggtacccaaagggaaaaagggaaaagctgatgctggc

SEQ ID NO: 410509 - DNA, 82 bp, Homo sapiens
gtagagaggaccccgggacatctgaaagccaggaaatgatttatcagcaagactgttgaacgcataactgcccaagatgcct

SEQ ID NO: 410510 - DNA, 75 bp, Homo sapiens
gctctgaaacagaaaccacctctgccatcctcgcctcagtcaaagaacaggacctcttggcatgggaagcactac

SEQ ID NO: 410511 - DNA, 100 bp, Homo sapiens
gctctgcctccggggacaagaaactagagcaaataaccgttttgaaattttaccggtattgtaagaacaagccgtacccaaagtctcgcttctgccgagg

SEQ ID NO: 410512 - DNA, 99 bp, Homo sapiens
cgcgctcccgcggagccggagccgcagaggctcccgggctggactcaggcttctcagaggactaccccaatggcacctggctgggcgacgagaacaacc

SEQ ID NO: 410513 - DNA, 98 bp, Homo sapiens
accactcatttgcaacttatatcgccagtccagcagctaaggatattttgtgcagattgtctaaagccccaggaaaaatggtggaaaattcaccgtcg

SEQ ID NO: 410514 - DNA, 97 bp, Homo sapiens
ggctgccccgcaggatcatcaagcatttaaatcaaacggtattgagatggattgggttatgaaacataatggtccaaatgacgctagtgatgggaca

SEQ ID NO: 410515 - DNA, 50 bp, Homo sapiens
caccagtcagactgtgtggcttttgaggtcttgatcttagcagtcaaatc

SEQ ID NO: 410516 - DNA, 51 bp, Homo sapiens
ggcatggtcctcaagaagttcctaaaagtatgattatatgggatctgaaat

SEQ ID NO: 410517 - DNA, 100 bp, Homo sapiens
gcagcaggcgaggaggaagatggcgggacggctgccggcctgtgtggtggactgtggcacggggatcaaaatacttgctggatggtggactcagagacca

SEQ ID NO: 410518 - DNA, 101 bp, Homo sapiens
tccgtgcagcccaacttccagcaggacaagctcaacgggacccaggtggagtctgtacagctcaaagtcaacatagcccgaaaacagcccatgctggatgc

SEQ ID NO: 410519 - DNA, 101 bp, Homo sapiens
aggaccgccggccgggggacgagctcggagcagcagccagctgcaggtggagctggagcaagaataccaagacaaattcaaaagactgcccctcgagattt

SEQ ID NO: 410520 - DNA, 88 bp, Homo sapiens
ccggcttgaggggctgcgtgaggcgcggaggcaggaagaaaacaggcagattttggcgcggcaaaagtcaaactcacagtcggactcc

SEQ ID NO: 410521 - DNA, 51 bp, Homo sapiens
gcagctggctggcttcagtggaccacacttttcaggattagaagaggctgt

SEQ ID NO: 410522 - DNA, 82 bp, Homo sapiens
caggaatctgatggaacccctgaaaacaaccctctggcaggtgccgaccaacccccaggatggcggaagctcaccaggccgt

SEQ ID NO: 410523 - DNA, 100 bp, Homo sapiens
ctgtgagacatgtctgagactcctgctcagtgtagcattaaggtttggtgcacctcgatttggaggaagtagggcagggcccttatctggaaagaagttt

SEQ ID NO: 410524 - DNA, 50 bp, Homo sapiens
ccgatcaagcctgacttctagccaaggaccaagaatcgccttcagccctg

SEQ ID NO: 410525 - DNA, 100 bp, Homo sapiens
acggagtgaccaagagcaggtttgagactattgggaagaagttacctgcaactacagcaactccagactcatcaaaaacagaaatggacagcaggacaaa

SEQ ID NO: 410526 - DNA, 75 bp, Homo sapiens
aaaggagaacttcttaagaagagtggtcttggtatggtgactcctgtgaacgatcttagaggatctgattctatt

SEQ ID NO: 410527 - DNA, 75 bp, Homo sapiens
ggcaaaagcacaaggattctcgctgtgacagagacaacaccgagtatgagaagtgggtgacatcaccatcctggt

SEQ ID NO: 410528 - DNA, 98 bp, Homo sapiens
gagactggagcagagccgctgggcgccggagccgaggcgagcgccgcgcgcaccactgggccaattcctgtccccccagcagcatggcatcgtgtgct

SEQ ID NO: 410529 - DNA, 98 bp, Homo sapiens
aagaagtctggaagaagaggaagaggaaagaaaaggagtcagggatggcccttactcagtttggcctgtcactgctcctcatcctcctgagccgtggt

SEQ ID NO: 410530 - DNA, 83 bp, Homo sapiens
gcaagtgtgtgaagaagaagctgagcgttgtcgccgccgctatggggacttcccaagtaagaagcggaagaggagccgctgga

SEQ ID NO: 410531 - DNA, 90 bp, Homo sapiens
ttattattggagataataaaactcagtaccacatggggtatttcagaacttcagatggtggcaaagtggttggcaccatagaagtcagtg

SEQ ID NO: 410532 - DNA, 100 bp, Homo sapiens
tgtgtttaacaaagccacgaataacctataatggttcaagggcagacggggtttttgaggaggattcgcaaattgacatagccacagtacaggatatgct

SEQ ID NO: 410533 - DNA, 74 bp, Homo sapiens
gttttattgcatgtggatgcaggacaagccactcctccagtctgaagacctgattttgtgtcagttgacggtcc

SEQ ID NO: 410534 - DNA, 82 bp, Homo sapiens
gtctgaggccccgctccccgaaacgtgaccatgtggattcaacagcttttaggactcagacctgcctagagctggaacgtta

SEQ ID NO: 410535 - DNA, 100 bp, Homo sapiens
ccgggctgactttgctgacatcagcatcctcagcgatttctgacccaggggggtcctgaggacaccgtgagccagccaggcctggccgctgggcctgacc

SEQ ID NO: 410536 - DNA, 100 bp, Homo sapiens
gtgctgtcccagagacaacgagatgaactgccgagacgcatccagagctttcgtgaccggggactgttctgaagcaggcctcgtggatgacgtatccgac

SEQ ID NO: 410537 - DNA, 89 bp, Homo sapiens
cccggcacacgcgcagccccggcctctcggcctctgccggagaaacaggtcaaaatgcagatcttcgtgaaaacccttaccggcaagac

SEQ ID NO: 410538 - DNA, 88 bp, Homo sapiens
aaaaacacaaatgaattctataagaccattccccggttttattatagggacaaccctccatatgataagggagccttcagaatcgaaa

SEQ ID NO: 410539 - DNA, 82 bp, Homo sapiens
gttttccggagggattccatcatagttcaaatctgaacatcaatgatgtactagggaactactcattgactcttgttgatgc

SEQ ID NO: 410540 - DNA, 75 bp, Homo sapiens
cctcttgggactgggctcgatttgaggcagcctgcttctgcaaagtggtacgatcgaagggactatgtcttcatt

SEQ ID NO: 410541 - DNA, 88 bp, Homo sapiens
gtgacagggatgatgaagaagacctgctggatgaatttcagaggcaggaaagtgtccggtcccagcataaaggtatccagttatatga

SEQ ID NO: 410542 - DNA, 71 bp, Homo sapiens
ctgaccctctgagccacagcagcaacagcagctcagagtatttaaaccatgtcagagctgcctcaccacag

SEQ ID NO: 410543 - DNA, 83 bp, Homo sapiens
tcgcggcgacggcggcggtggcggcttggacgactcggagagccggtttttctatatgagtggagaagacagctgttaccagg

SEQ ID NO: 410544 - DNA, 100 bp, Homo sapiens
ccgaggcgaaggggccaaccatgggaaaggagagtggatgggactcagttaatatgatcctctgttgaagcaagaagacaaactgtatggtggagaaaga

SEQ ID NO: 410545 - DNA, 90 bp, Homo sapiens
cttgcaaagactctccagaccttagggaacaagaggcatcactcagtccttctgggacagcttcccttacataccgagcatcaaatatta

SEQ ID NO: 410546 - DNA, 98 bp, Homo sapiens
tgtttcgttataactgcctggaaggttagcgtcaaagaagttgagaaatgctgagccgattatcaggattagcaaatgttgttttgcatgaattatca

SEQ ID NO: 410547 - DNA, 87 bp, Homo sapiens
ggaacgatgccggccgtgagcctcccgcccaaggagaatgcgctcttcaagcggatcttgcgtggagattggtgaaagcgtgagagg

SEQ ID NO: 410548 - DNA, 75 bp, Homo sapiens
tcttcattaatgagaagacattcataaccaggttactccgttcctccgtgttagggtttgcgtgcaagatgggag

SEQ ID NO: 410549 - DNA, 90 bp, Homo sapiens
aggacatctgggggccacaaatgctccttctcctggagacgcaactcaagggagtgcatccgccccaacccttttccccctcgtctcctg

SEQ ID NO: 410550 - DNA, 90 bp, Homo sapiens
tttgtgtggagcacacattgaatgggccaaggaaaaatcgagcagaaagaatgtctttcagtaacaaatgtggcaattattttggatcta

SEQ ID NO: 410551 - DNA, 100 bp, Homo sapiens
ataatttgggaaccattgccaagtctggtactaaagcattcatggaggctcttcagcatacagtgaagttgttctctgaagttcctcatctgccttaagt

SEQ ID NO: 410552 - DNA, 96 bp, Homo sapiens
aaaacctgtaaccctcccgatgctggtccgatggttgtgcactgcagacgtgaagccctccaatatgctagtaaacacaagaggacaggttaagct

SEQ ID NO: 410553 - DNA, 80 bp, Homo sapiens
aggcgtgagccaccgtgcctggctgaaggagttgaagaatgctgaaatagctttaagaacccagaagacaccacctggac

SEQ ID NO: 410554 - DNA, 99 bp, Homo sapiens
ccggtggttgctgttgcttggcctggtgggcccagtcctcggtgcggcgcggccagaaagaagagattttatcgacatcgaaagtaaatttgccctaag

SEQ ID NO: 410555 - DNA, 83 bp, Homo sapiens
tggacaaaggaacaggtatctcagttctgtagaaatcctgtcaaagaatatgaagaaaaacagagaaagattctgcaatagag

SEQ ID NO: 410556 - DNA, 100 bp, Homo sapiens
gaacagccagtgcatttggttcccgatggccctgtgggagaacagccatatcagcgggaacaagattggctgggagaagacgggaagccactcagagcct

SEQ ID NO: 410557 - DNA, 101 bp, Homo sapiens
gcaacctgcccatggtgcagctgtgggccgcccacgcccatgaagttccagggtctccctccactgctgtagtaacccgggtccggggcctcggtggtgct

SEQ ID NO: 410558 - DNA, 50 bp, Homo sapiens
atccgtcagatccacaaatttgaggagaatcaggaaacccaggcccaacg

SEQ ID NO: 410559 - DNA, 74 bp, Homo sapiens
cattggaccctcctcccaactgtagacttgtggaagaaagcaaactgatcccactcatttttgaagtaactctg

SEQ ID NO: 410560 - DNA, 80 bp, Homo sapiens
gccagaaggaagacaatgctggtcgtggagggcccccaagacccaacagagggatgccgcaaatgaacactcagcaagtg

SEQ ID NO: 410561 - DNA, 83 bp, Homo sapiens
acgacgcggacatggtcatgagctttgtgaacctggccctggtacctgacagtgtaaagaaggagctcctacaaagaataaga

SEQ ID NO: 410562 - DNA, 100 bp, Homo sapiens
gatcaggatttttggcctaccctccaaagaaaagggttatatcctgtgttgtgacctcatggtttaagtgggaataaagatgagtataagcagtgatgag

SEQ ID NO: 410563 - DNA, 89 bp, Homo sapiens
gacggattcatttagagctgcggaacaggacgccctctgatacccaacatgagtgaagtttcctgcaagaaacgggacgactatttgga

SEQ ID NO: 410564 - DNA, 127 bp, Homo sapiens
tgcgaagtccacccagcgttccggaggtgagggcgccgcgccaggccgggcggcaggagacccggtgagcctccattgataaaaggttggcttccttatcttggagtggtcctgaacttacgaaaag

SEQ ID NO: 410565 - DNA, 100 bp, Homo sapiens
cccgaacggggggagattctgctcacggaactgcagaaaacaacagttttgttggcatgtgaagctccagtttcctcaaagtcaagctgagtacatagaa

SEQ ID NO: 410566 - DNA, 100 bp, Homo sapiens
gctgctgacgccagcaccacctcgcccaagcctcggaagagcatggtgaagagactcagcctgtgtacacttaaagcgttctgggaatatgaatcccttc

SEQ ID NO: 410567 - DNA, 78 bp, Homo sapiens
gcctgtgtccctgaccatggctccctgcagtaccctttaacgaattttccagttcatatgaagaggtgatctctcaaa

SEQ ID NO: 410568 - DNA, 80 bp, Homo sapiens
tcaaagagctggtgcgaaaagatctgcaaaattttctcaagatctatgttagcgttcctggatccaagaaggtcatcctt

SEQ ID NO: 410569 - DNA, 75 bp, Homo sapiens
atattaagccatcaaatgtggaacctatggaaaagttgtggtcagaaatgagaagacatgaaatgttgagggagg

SEQ ID NO: 410570 - DNA, 90 bp, Homo sapiens
ggaggtcatgaaggacctgagcctgacgcgggccgcgcggttgatattcactgatggactccaaagaatcattaactcctggtagagaag

SEQ ID NO: 410571 - DNA, 80 bp, Homo sapiens
gtccgcgcagcccagcgcagccatgctactatgtgggcatgtgccttgcggcttcagaaaagcggctccacgccctcagc

SEQ ID NO: 410572 - DNA, 50 bp, Homo sapiens
cccgaggccaggagccaggggcccagaagtaacaacatgctgtaccccaa

SEQ ID NO: 410573 - DNA, 75 bp, Homo sapiens
gacccctttgacctcttcgatgtgcgagactttggaaagggtcatgtaggtacaacagcaaccaagaagatcgat

SEQ ID NO: 410574 - DNA, 75 bp, Homo sapiens
gaagagaactactcctttttacctttggttcacaacatcatcaaatgcactgccccccaggtgttgagtaccagc

SEQ ID NO: 410575 - DNA, 100 bp, Homo sapiens
agaatccatgttgaccaaatgcaccagcacagaagtggaattgaatctgctctaaaggagaccaagattcgcattctcaagtctccacaagaggtaaaac

SEQ ID NO: 410576 - DNA, 100 bp, Homo sapiens
tcatcagattttgcattggatattcgcatgcctggggttacacctaaacagagcccacctgaatgaccttgaaaatattattccatttcttggaattggc

SEQ ID NO: 410577 - DNA, 100 bp, Homo sapiens
gaaagacatcacggtggaggacatgaacaggggaaaattggagttgtcttcaacattggcacagttgacatctccatcaaagaggagagaacccctgtaa

SEQ ID NO: 410578 - DNA, 88 bp, Homo sapiens
cttaagctctcggaggagtggcagagtacgatctgaaggaggggcttctggttagcccaggtgcaaattgagcatgacccagaattag

SEQ ID NO: 410579 - DNA, 100 bp, Homo sapiens
cagctcctcaagtgcaacaagtcccacttccgaaaccacaagtttgccgatgccctgtctctgcccctggtggtcatcgtccatggcaaccaagacaaca

SEQ ID NO: 410580 - DNA, 98 bp, Homo sapiens
aagaggctgcccagaaagcagttaacagtgccaccggtgttccaactgtttaaagacgagcctgtggagtgggagacacctgacctttctcaagctga

SEQ ID NO: 410581 - DNA, 100 bp, Homo sapiens
ttgctgacgtgtcatttctaagtactttctcctactccataaagacttcaagaaacccagcgtttgctggcagaaccagttcctggcatcaaagccgaac

SEQ ID NO: 410582 - DNA, 80 bp, Homo sapiens
cgggtggccgccctgttccccgcgctgcggcctggcggcttccaggcgcactaccgcgctcaccatggatgatgatatcg

SEQ ID NO: 410583 - DNA, 98 bp, Homo sapiens
tcagaggcctgggcgcagctctggactctgcgtataacagcctgccttgctctgccaggaaccatgagtgaggcccgcagggacagcacgagcagcct

SEQ ID NO: 410584 - DNA, 74 bp, Homo sapiens
catgccctgaaaaagtatcgtcgagaagcctatcatcgctcgcatgtggaagactctcaccttcttcgtcgcgc

SEQ ID NO: 410585 - DNA, 89 bp, Homo sapiens
gcagggctctcccacacttcgcgccgccaatggcaagttggagggagagatgcaaataccagggcaaaggtcgttggagccagcagaag

SEQ ID NO: 410586 - DNA, 90 bp, Homo sapiens
cacctccctcttggggtcgtcgccctcgagatgattatcgtaggaggagtcctccacctcgtcgcaggcttcacttttggatctgaaaga

SEQ ID NO: 410587 - DNA, 101 bp, Homo sapiens
cgatcctctccgtgggagccagcgagcctctctccctgatcttacgtgctcaagggaaaccctatattcagcccaagagggaaatcccagcagaggagcag

SEQ ID NO: 410588 - DNA, 74 bp, Homo sapiens
atcagctacattatgtacacaggtatattgaagcaagtcaaagattacattaaacagtgtagcaaatgccagga

SEQ ID NO: 410589 - DNA, 75 bp, Homo sapiens
gaggatcgcccaatccacatgcttttccaggtcagtactcctgcatttgtaccaacgaaaactcacgtgctgctt

SEQ ID NO: 410590 - DNA, 100 bp, Homo sapiens
caggcctcggacgaggaggacgcgcccgccaccgacatctactttgtggtctttgggaagaagcttcctgcctttgccaccatccccatccaccagctgc

SEQ ID NO: 410591 - DNA, 50 bp, Homo sapiens
aagccatcgactccagtccagacaagagatcgtattggctgctatgtgac

SEQ ID NO: 410592 - DNA, 75 bp, Homo sapiens
tactctgatgtcaatcttgagggctaggtgttacacataatattgcattacttcgagaggtgataatcaactcac

SEQ ID NO: 410593 - DNA, 75 bp, Homo sapiens
ctggagcgtgactgtgatccccggtgcggttggtgttcgaggaagagacattgttgttcttggtgtggagaagaa

SEQ ID NO: 410594 - DNA, 75 bp, Homo sapiens
gaagaatggcagtgctcaaactcaccgaccaggtttaagaaaatctacgaagaaacgcagtgagtctccacctgc

SEQ ID NO: 410595 - DNA, 90 bp, Homo sapiens
accgactggaccgggaaggagcatcccaggacctaccagaatctgaagaagctcattcacacagaagacccatttaatgatgaacatcag

SEQ ID NO: 410596 - DNA, 94 bp, Homo sapiens
gatcaagcaaaaatgcccactttatgaagccaacggacaagctagtgatcagcagctggactgtgccttggacctaatgaggcgcctgcctccc

SEQ ID NO: 410597 - DNA, 74 bp, Homo sapiens
attgacatttaattttagggtcctttatatagaagggagagtagggtagtccaggaaggggatgttctatgtgt

SEQ ID NO: 410598 - DNA, 50 bp, Homo sapiens
ccaaaagacagctccagttttacagcaaacccgctggttcagaaccaaca

SEQ ID NO: 410599 - DNA, 100 bp, Homo sapiens
cataggtcgtcatgcttatggggatcaagtggtctcatggattataaccatttggatatttggttcactaacaattttcttactggccagagttcttggt

SEQ ID NO: 410600 - DNA, 50 bp, Homo sapiens
tggaaagccaaccagtcctcataatgaattggattatgaacgcattcata

SEQ ID NO: 410601 - DNA, 90 bp, Homo sapiens
aagaaagctggtaatagatgtctgacaaactaaagaaagacttgtgttacgctccaaacaggcatgcgaggtgcctttggaaagccccag

SEQ ID NO: 410602 - DNA, 100 bp, Homo sapiens
caattgccttttcaaaaggaaaacccttcaggcaaccttgctacaaaaattatacttgggaagtgccatttgaggagatctcagagctgcagtggctggg

SEQ ID NO: 410603 - DNA, 100 bp, Homo sapiens
cttctgaggaagctggaagctgcagccacaatgtgcctttgcaggggagcctgagagccacaggtggtgaaaacaggaatgagaacgaggagtcaacctc

SEQ ID NO: 410604 - DNA, 101 bp, Homo sapiens
tttttgaagtttgaatctgagaagctgcagattgaaaaggaacgcttacaggctaggtcctttcacaaaactgttcctgtgaaagcatttcctgcttttct

SEQ ID NO: 410605 - DNA, 100 bp, Homo sapiens
aatacaaatcacacgcataatggatgaaaggaaccgacaggatacagttgatatattagttggatggcatatagatcatactcagaaaccttcgctcacg

SEQ ID NO: 410606 - DNA, 100 bp, Homo sapiens
ccgttcgaagagtcgtgagggggtgacgggttaagattcggagagagaggtgctagtggctggacttgacctggaaagttggattggatgctgctggcaa

SEQ ID NO: 410607 - DNA, 100 bp, Homo sapiens
gctgtgctggccaatggtgtgatgaattccttgcaggctcaggggagagagaaagcccagaaagaaagctactccagggtcctatggatatttcagagaa

SEQ ID NO: 410608 - DNA, 90 bp, Homo sapiens
ctacaacatgacaagtgaattcgaggagatgctgcaggtcggaaacctgatatttggtttccaggcaggactgacgtctttggattgcag

SEQ ID NO: 410609 - DNA, 100 bp, Homo sapiens
tcattgagaaaagtggttaccaggccctgccctgggttcgctacatcacccagagtggcggctcggacatcatcatgcagctggacgacgtggttagcag

SEQ ID NO: 410610 - DNA, 88 bp, Homo sapiens
gagaacatccagaaatccctggctggagcctccaagactgcagagaatgccaccagtggggaaacattagaagaaaatgaagctgggg

SEQ ID NO: 410611 - DNA, 100 bp, Homo sapiens
cagaaccctccgcagagtaaaggttatcaccaatctagtgaaaatgttgaagtccagagacacgaggagaaatttttgtcctccaaaccactggctgtca

SEQ ID NO: 410612 - DNA, 50 bp, Homo sapiens
gtacctttatgaaccagtgtatcccaagatcatccttccttgtgggttag

SEQ ID NO: 410613 - DNA, 100 bp, Homo sapiens
gcggcgacgaacatggagaacccccagcttggagcgcaagctacagcctccgcttggcgtcccgatgctctccaccagcggccccgtacatcaccaggca

SEQ ID NO: 410614 - DNA, 100 bp, Homo sapiens
tgatccagaacttgcagcaacaatagcacttttccttgttgacaatcaccacgaggtgtacctctggcaaggctggtggcccatcgagaacaagatcact

SEQ ID NO: 410615 - DNA, 100 bp, Homo sapiens
gaaatctcgaaggggacctcatgtccctgtgggacacaatgcccccaaggacttatcaaactggtttcaaagcacagagctcaagtaatttacaccagaa

SEQ ID NO: 410616 - DNA, 75 bp, Homo sapiens
gctgcctcggcggagcagaggaaccacacgctgatcatgggtaagaaggtggatggctctgtaaatgcctatgcc

SEQ ID NO: 410617 - DNA, 82 bp, Homo sapiens
cggcgagcgcgagcggcgcgagaaagagcccaggtgcggcccggagcccactgaagtcttcactgtcggacccaagaccttt

SEQ ID NO: 410618 - DNA, 117 bp, Homo sapiens
tgaggcagaagttcctagaagggtttgatgcctttttggaattactaaaatgtatgcaggcacgcacagaggctgggctgcggtccagatgcgtttgctccatgaattggtctacgc

SEQ ID NO: 410619 - DNA, 90 bp, Homo sapiens
cgacggccacaggggcggcgacggcgcagtgcgaagcgaaacagggcgcaccctacgacgcgcacaccaccggcatgaccggcgccatca

SEQ ID NO: 410620 - DNA, 73 bp, Homo sapiens
ccaagaaggttatctcctcagccaacagagctgtggttgggcaggcatccctcatcgacctcctggtttccaa

SEQ ID NO: 410621 - DNA, 80 bp, Homo sapiens
catgaggtgagacgcaaccctgactctgctgccctgagacctggccaggagtgagcggagctggagtttgttcagatcat

SEQ ID NO: 410622 - DNA, 75 bp, Homo sapiens
cagagaccggcttcaatatcttcacccagcatggtctgggaggggctgaacgtggtgaagacaggccgagtgatg

SEQ ID NO: 410623 - DNA, 75 bp, Homo sapiens
cgctggcagccgcggatctcaccgccgctcagggcattgaagttgatatcgatgtggagcacggagggaaaagaa

SEQ ID NO: 410624 - DNA, 75 bp, Homo sapiens
gtcgccccccaccctgcagccaggactcgatggagatacttgagcgttctctaaagctgctatttgaaacgagag

SEQ ID NO: 410625 - DNA, 75 bp, Homo sapiens
aaacagcatgacgtgaggccgtggatgcaggcattaaggttacctgtgcatgacagatgagtggttctctgagta

SEQ ID NO: 410626 - DNA, 100 bp, Homo sapiens
tgaactagaaaatcatcagattgccgattccatggagtttggattcctgcccaatccagtagctgttaaaccatggcgggtgaaaaagttgagaagccag

SEQ ID NO: 410627 - DNA, 87 bp, Homo sapiens
aatttcgatattgaagtgtcaaaatccatagatggaaaagatggttcactactgtgatagacaaagtggcaaagagtgtgtgacctg

SEQ ID NO: 410628 - DNA, 96 bp, Homo sapiens
caacttactagtttgttgcaaaataatgtaaacgtcaatgcacaaaatggatttggaaggactgcgctgcagctctacattaatcatactcctcca

SEQ ID NO: 410629 - DNA, 100 bp, Homo sapiens
agaggagaagaggaaacacaagaagaaacgcctggtgcagagccccaattcctacttcatggatgtgaaatgcccaggctgcaggccaacttcaccatcc

SEQ ID NO: 410630 - DNA, 74 bp, Homo sapiens
aaaggaatagtgagaagagcaattccctggataaggggactcctctccaggtttctctaaggagattgcagcag

SEQ ID NO: 410631 - DNA, 97 bp, Homo sapiens
ccatccagctccaagaaagtcacctttgggctgaacagaaacatgactgccggatctgtgccagttcagaagcaggcgagcctcttccctgatgaaa

SEQ ID NO: 410632 - DNA, 101 bp, Homo sapiens
agatgcagtacgccacggggccgctgctcaagttccagatttgatcctgtttgaccaaactcagagatcaattaaggcacagcttcagaactttgttaaag

SEQ ID NO: 410633 - DNA, 101 bp, Homo sapiens
gagatggcgagcgcccggattggggatgagtatgcggaggacagctctgatgaggaggccctgtttgtgctcttcgtcctggcctacatccacatcgtctt

SEQ ID NO: 410634 - DNA, 83 bp, Homo sapiens
cgtcaaaatccgaaagattcgggccagagacgacaacccgggcctccgagtcagagcaccataacatggtgtgggaagtgaag

SEQ ID NO: 410635 - DNA, 101 bp, Homo sapiens
atgttctcgatgccaatctctgcttgaaaggagaagacttggattctcaggtgtctgacttccagcaactgctggcctgtgccagggtgcaagctgagcac

SEQ ID NO: 410636 - DNA, 75 bp, Homo sapiens
agagaagatgaagaaacccagcttgatatgttggtatcacacctgtgtatcataatatgtttgctttaatgagtg

SEQ ID NO: 410637 - DNA, 100 bp, Homo sapiens
gcaacagtaacgaaaaacagggctcatgacgtatcccagactttactcaaggcaacactggacagtgttgtagaagaatgtgtcagctttgtgggagtgg

SEQ ID NO: 410638 - DNA, 97 bp, Homo sapiens
cgccgatatcttcgccatcgccagcatcgccaacccggactggatcaacaccggggagtctgcggattactgatctctcattacccaactatctgat

SEQ ID NO: 410639 - DNA, 91 bp, Homo sapiens
gtcattagcgtgaaaaccacaagcaggtccaaagagagactgggacgatgccggagtgtgaaggagtttgagaagctgaaccgcattggag

SEQ ID NO: 410640 - DNA, 100 bp, Homo sapiens
ggggacctgcatgtgtgtgcgcgcgaaggagcggaagaatggcagtgctcaaactcaccgaccagtctacatcagcatcagcatctgcgtcaccatttca

SEQ ID NO: 410641 - DNA, 100 bp, Homo sapiens
tggatggtactgatgttagtgtggacttgccaggattaaagcctgtggtttccacagaagcaccacctatcatatttgccacaccaactaaactgacctc

SEQ ID NO: 410642 - DNA, 100 bp, Homo sapiens
gctccatccatgaccacagtggaccagctcgagtctcaagtggacaatggcaagtatatcgcgtcaacacagcgacctgacgggacctggcgcaagcagc

SEQ ID NO: 410643 - DNA, 50 bp, Homo sapiens
aaagggatgatgcaagtacgtttactgttttgcacagtaataagttgact

SEQ ID NO: 410644 - DNA, 49 bp, Homo sapiens
cgactcctttgttactcactgtgttcggaccgttccccagcacacccca

SEQ ID NO: 410645 - DNA, 75 bp, Homo sapiens
cgccgcgcgaccaggaggcggcggcgccgccggctttgaacctaaaggcagacccagaagagctttttacaaaac

SEQ ID NO: 410646 - DNA, 102 bp, Homo sapiens
ctctctccgatactttctcccaaggtactttgaactcaagtaaacaaaagggaagattttctcgttgatactggagactgcacaacaatggggccacgaaag

SEQ ID NO: 410647 - DNA, 75 bp, Homo sapiens
caagtctcgagagtggaaacaactctcactatcaccttttgccatgatagcatttctttcattggacagttcctt

SEQ ID NO: 410648 - DNA, 98 bp, Homo sapiens
gggggagccccgcgcgcggcgtcgggagcatttcctgaagacgtagtcatgcagcacgtcagcagctcccagagcagccagcgccatgtccagtggcc

SEQ ID NO: 410649 - DNA, 100 bp, Homo sapiens
tgatgtggcaggtgtagaagaagcaaaccaagggtttcctgctgttcagcttgctgatgcacaggaagctcttcgtgtggtgaagatcttacagaacctt

SEQ ID NO: 410650 - DNA, 75 bp, Homo sapiens
ctgaagatgggcattatgcaagaacagattatgcaggacctggttccagcccactcttctccctgctgcctgggt

SEQ ID NO: 410651 - DNA, 82 bp, Homo sapiens
ttggcgtgtccctgcagcgaaggatcctggttggtgtcccgacccaggctaagcttgagcatggctgagcaggagcccacag

SEQ ID NO: 410652 - DNA, 73 bp, Homo sapiens
ggagacacctcaatctctgaccgtaaatccaaggtatccagatggttcccatcagctggtgtgagatgcagtg

SEQ ID NO: 410653 - DNA, 87 bp, Homo sapiens
ccgctgccgtcgccgccgccaccatgcccaagagaaagggacaagaatccttcaagaaacaggaaaaaactcctaaaacaccaaaag

SEQ ID NO: 410654 - DNA, 100 bp, Homo sapiens
cggaggagtacccccacctgaagccagcccgctaccgccgtggcttcatccacaatggcatcatggaatgctccaaaatgggaagaagtttgattcatcc

SEQ ID NO: 410655 - DNA, 75 bp, Homo sapiens
agaagtttctaggaaaggccggacaccagcactgtgggaccagctcttggaaggaaggatcaaactacaaaaagc

SEQ ID NO: 410656 - DNA, 75 bp, Homo sapiens
tgctgatttccttgttggagtcttcaccactatgagcactggttatattctgggcactaaatgaaggcgtttcta

SEQ ID NO: 410657 - DNA, 100 bp, Homo sapiens
acgtcccaccaaaattggacgtcgctctttgtctcgttccatttctcagtcatctactgacagctacagctcagtacttgattctaaagctcgaaaggcc

SEQ ID NO: 410658 - DNA, 87 bp, Homo sapiens
gagggcctgggagcttgctgcagcttcaggactttccttatcccagttgattgtgcagaatacactgcctgtcgcttgtcttctatt

SEQ ID NO: 410659 - DNA, 98 bp, Homo sapiens
gatgatgttgacttggggatccaaaggcacaggtggaagcagggaaaggcctggagatgaggaagctggttctctcggggttcttggccagcgaagag

SEQ ID NO: 410660 - DNA, 75 bp, Homo sapiens
gtacatgaagttccctttcctgccaatattgcctcagagagttgtgatcacatgccctcaggacttccctcattg

SEQ ID NO: 410661 - DNA, 75 bp, Homo sapiens
ggcgaaactgcttccttcttcaaggagataaagtggaatgcagtagccctctgggcctgggatattgtggttgat

SEQ ID NO: 410662 - DNA, 100 bp, Homo sapiens
atccgccctggctccgctgcacgagctccacgcccgtaccccggcgtcacgctcagatacttgccagaactaatacagctgatgaaatacctgacctttt

SEQ ID NO: 410663 - DNA, 98 bp, Homo sapiens
tcagaatgaccctgtaccctatgtaagtgccatctgggattgacagctcagcctgaactctatcttctgaacaccatggacgctgactcacttgtgtc

SEQ ID NO: 410664 - DNA, 75 bp, Homo sapiens
ctgcgcatccccgcggacgccacagcgctatcaatgtccgagttaccaccatggatgcagagctggagtttgcaa

SEQ ID NO: 410665 - DNA, 78 bp, Homo sapiens
gtactgagcctgttggaggaactggcccggaaacaggaggaccagttggaattgatcacaccttttcagttgtacttc

SEQ ID NO: 410666 - DNA, 96 bp, Homo sapiens
ggcggacgcgcccgggacgcgcggcggcaccgggaggccgggccgagcgttttgggaggtcatcagtgatgagcatgggattgaccccactggcag

SEQ ID NO: 410667 - DNA, 100 bp, Homo sapiens
gccaggaccctctagatcgagcagatttcaatgctgttgagtatatcaataccctgttcccaaccgagcaaatatttagcttcctgtggtatactgatga

SEQ ID NO: 410668 - DNA, 90 bp, Homo sapiens
agtactgagcctgttggaggaactggcccggaaacaggaggacagcacgtgcccccggagctgtgggagcccttctataccgaccagtac

SEQ ID NO: 410669 - DNA, 100 bp, Homo sapiens
caccgacctcccgttagcccctgagagccgggtggaccctgaggtccttcacagcctgcagagcgagtcaccccctggctcccagacagccacacctggt

SEQ ID NO: 410670 - DNA, 100 bp, Homo sapiens
atactcactgtgtaagaagatagaacagtgtgactacccacctcttccttcagatcactattcagaagaaaatttcgctaaggagtttgtgatcagtgat

SEQ ID NO: 410671 - DNA, 83 bp, Homo sapiens
ccatggcataaggaactctatcccaggaatacagctttgcattaggtgcagcggaactgctgcctgacgctctgcaacttcag

SEQ ID NO: 410672 - DNA, 97 bp, Homo sapiens
ctttaggtgcttttatattcatctcaaaaacaaaattctgaactcaggacttggcaagagtgtttctcaggagctatcagaaactatcctcaccatg

SEQ ID NO: 410673 - DNA, 50 bp, Homo sapiens
gttgctggccaatccactgaagcctgtggcagctgggggtcgattacttt

SEQ ID NO: 410674 - DNA, 75 bp, Homo sapiens
gcgctactctctctttctggcctggaggctatccagcaaattcggaactatccgggcagatttgattgaacagat

SEQ ID NO: 410675 - DNA, 99 bp, Homo sapiens
tcgcctctgtgaacatcaccaccaaccaggcagcgttgacagaaggctacgttggggccctgcacgagaatagacacggcagcgcagtgcagatccgca

SEQ ID NO: 410676 - DNA, 74 bp, Homo sapiens
ggaagtgaaaagagatctgttttcagttggtgacaaagttcctgctgatataaggttaacttccatcaaatcta

SEQ ID NO: 410677 - DNA, 100 bp, Homo sapiens
tttatggaaaacaagttataatcaatctgattttaccaaatgttgcaagaactctggagttcttatggtagtaaaatgccggaaagaaaattctgcattg

SEQ ID NO: 410678 - DNA, 51 bp, Homo sapiens
agcacagacaccgctttgccgataggaacggtgctggaccacctggtcggg

SEQ ID NO: 410679 - DNA, 100 bp, Homo sapiens
cacagcgagtccctcatcgtggcagagcgtattgcgggcatggaccctgtcgtgcagggagtacatcaagacctggcggccacgctacttcctcctcaag

SEQ ID NO: 410680 - DNA, 75 bp, Homo sapiens
cggaaacgccgaggaacccggctgaggcggcagttaattggccttggtcctcacagctccaaaaagaaacaggat

SEQ ID NO: 410681 - DNA, 98 bp, Homo sapiens
ctcacactgtacttccagggagacaccgattataagaagagaaactcagcgctggggaagaagtgtcaaaaacggtatttcgctgcctggcacaagct

SEQ ID NO: 410682 - DNA, 99 bp, Homo sapiens
acccggccgaggcggtgctgcaagagaaggcactcaagtttatggtggagccgccaccaaaatgcagattttcgtgaaaacccttacggggaagaccat

SEQ ID NO: 410683 - DNA, 89 bp, Homo sapiens
gatctgctgtggaagaacgtccgggagaggcggctggcaggagccaaaaacctgtatatcatctccgtgaaggggatcaagggacggct

SEQ ID NO: 410684 - DNA, 83 bp, Homo sapiens
tggtccttaaaaccgaagaggaggacgatgtgtatatctcatgattgatatggagaaactagtcatgggccaaaggtcaagat

SEQ ID NO: 410685 - DNA, 75 bp, Homo sapiens
cgcggggctggggttagcctggggcagaaggcggattaagaccctccatgcccagattattgagaaggatgccat

SEQ ID NO: 410686 - DNA, 80 bp, Homo sapiens
gatgtgtggcgactgtgtggagaaggaatatcccaaccgggcccagcttcccgatcagtggagacgttgaaggagatgat

SEQ ID NO: 410687 - DNA, 100 bp, Homo sapiens
gctggggcagaagagatccgatagctatgttctgctggagcattctgtgaagaaggcagtacattttgggttaccgtgcagaaataccataccatcaatg

SEQ ID NO: 410688 - DNA, 100 bp, Homo sapiens
ggtggactcggcgatggagctgttatttttagatacttttaaacacccgagcgctgagtggacaacagatgaagacttaactgaagcagttcattctttg

SEQ ID NO: 410689 - DNA, 50 bp, Homo sapiens
tcgaggtggagtcggagctgggacgagtcactttgtggcatgtatgacag

SEQ ID NO: 410690 - DNA, 100 bp, Homo sapiens
cctggagcctcagttggaagcagccgatccagcctgcggagcctgtggggcagacatgattcctatggcaatcagttctccacccaaggcaccccttctg

SEQ ID NO: 410691 - DNA, 80 bp, Homo sapiens
gcccagacgggccggcccagagctcccgggtcgtctttcgtgtggccgcgagtggaggccatagtggagtttgactacca

SEQ ID NO: 410692 - DNA, 76 bp, Homo sapiens
catcttcaaacaggcagacctgttatcctaaactagtggatatcaaagtattgcagagtgccttagcagccatccg

SEQ ID NO: 410693 - DNA, 82 bp, Homo sapiens
gctgccagtcccctgccccgggcaaagcccatctggtccgccgagcagggcgtgatggtgggcatgggtcagaaggattcct

SEQ ID NO: 410694 - DNA, 50 bp, Homo sapiens
gaaggacccacggcgtctgttcgaagaccctgctctcagcggcccacgag

SEQ ID NO: 410695 - DNA, 98 bp, Homo sapiens
tggtggaagtgacagcagatttgctggatacgtgacatcaattgctgcaactgaacttgaagattgaactaaatgttgctgctgttgatacaaacctc

SEQ ID NO: 410696 - DNA, 83 bp, Homo sapiens
cgcgagtggacgggcattgacaggctgcgcctggataaattctacatggttatggaaacaaaggacatgctttacatcgtcac

SEQ ID NO: 410697 - DNA, 83 bp, Homo sapiens
attcagtgaatcccaactgttatgccaaagctctctgatgtaaaggatggagtaaatcaagcagcacctgcatttggatttgg

SEQ ID NO: 410698 - DNA, 75 bp, Homo sapiens
ggttatgtccccacttcatatgtcgaagtctgtttggacaaaaatgccaaagtgattcgcctttgccagtctcat

SEQ ID NO: 410699 - DNA, 75 bp, Homo sapiens
tggaattcagaacgtcagcacctgcaggttcatgatcagggccaaagcggtcagtgagaaggaagtggactctgg

SEQ ID NO: 410700 - DNA, 75 bp, Homo sapiens
taatccgcgaatgctccgatgtgcagcccaagctctgggcccgctacgctgtgagtaccagagtgcccactggtt

SEQ ID NO: 410701 - DNA, 76 bp, Homo sapiens
ctgactcgcctcaagcacctgcgcatcgtcatcggatgtggagagcatcttgtgcgcaccatactggctagagaat

SEQ ID NO: 410702 - DNA, 100 bp, Homo sapiens
gagaaattagatctgggtgactgtgatctgtttcttgcagaacataaattattaggaaacattaaaaatgtggccaagacagctaacaaggaccacttgg

SEQ ID NO: 410703 - DNA, 97 bp, Homo sapiens
gtggatcaaagctgtcagcatctgcattaaaatatctgttatggaggttttgatgactatggtggctataataattacggctatgggaatgatggct

SEQ ID NO: 410704 - DNA, 90 bp, Homo sapiens
cgaaaatgacccaaattactaaggcagccatcaaagctattaaggtacggttcctggagcagcagaacaagatgctggagaccaagtgga

SEQ ID NO: 410705 - DNA, 50 bp, Homo sapiens
atcaaaggaaagatggatccagacaagtgcaagcagctaatgactcagtc

SEQ ID NO: 410706 - DNA, 101 bp, Homo sapiens
accattgttagtgaacgtggacaaagctgttgtctcagggagcacagaagtggcaagtgcaggcagctgtcccggttatgccggaatcgttgcaggtgagt

SEQ ID NO: 410707 - DNA, 80 bp, Homo sapiens
cgctatcctgccaactctatcgtggtcgtaggaggctgtcctgtctgcagcaaattgtggctactaatttgccccctgaa

SEQ ID NO: 410708 - DNA, 78 bp, Homo sapiens
ggcaggacgcacttgtcttagcagttctcgctgaccgcgctagctggactattggaaatgcacttcatgcaatgaaat

SEQ ID NO: 410709 - DNA, 95 bp, Homo sapiens
ccttgttcccccaaatgtctgactctgactctcggactgagaaacgcaaggtgtcgtgaaaactacccctaaaagccaaaatgggaaaggaaaag

SEQ ID NO: 410710 - DNA, 80 bp, Homo sapiens
acaagtttgcagatcgggagcgcaaggtcgccctcaaggccatgatcaaaacgggccgggctagagcgacatcatggtat

SEQ ID NO: 410711 - DNA, 98 bp, Homo sapiens
cgactgccgagggtctcagcgggatctggagtcagggccggcacagtcttcactaccgtagaagaccttggctccaagatactcctcacctgctcctt

SEQ ID NO: 410712 - DNA, 83 bp, Homo sapiens
ggacgaactgcacgtgtacaacacgggctgagtttgagaaagctgcagaggaggttaggcaccttaagaccaagccatcggat

SEQ ID NO: 410713 - DNA, 144 bp, Homo sapiens
cttgctccacttgggggccgtgtactccctggtgctcatccccaaagccaagccactcactctgctctgggtaaaatgtttattggaggcttgagctgggatacaagcaaaaaagatctgacagagtacttgtctcgatttggg

SEQ ID NO: 410714 - DNA, 75 bp, Homo sapiens
agggaaccctggtcaccgtctcctcaggtgtggatgaggtcaccattgtcaacattttgaccaaccgcagcaatg

SEQ ID NO: 410715 - DNA, 97 bp, Homo sapiens
tgtaatgtcagcagaacaggagaaggatcccatttcgctgaagagagttcgaggaaacccagcgtttgctggcagaaccagttcctggcatcaaagc

SEQ ID NO: 410716 - DNA, 83 bp, Homo sapiens
cctgccagcacctggaccttggacattcagacttcagaatggccccagaggtgatccgaatgcaggataacaacccattcagt

SEQ ID NO: 410717 - DNA, 75 bp, Homo sapiens
cgaggcagaagttataatcggcggtccaggcaaggggagagccagttgcgcagagccctgcaaccagcagtccag

SEQ ID NO: 410718 - DNA, 100 bp, Homo sapiens
cagcagatatgcctgctaacatggataagcatgccctgaaaaagtatcgtcgagaagcctatcatcggtacagtatatcagaagtatgagccgatctttt

SEQ ID NO: 410719 - DNA, 75 bp, Homo sapiens
aaatgagctgaagaccattcacagatccccgtcgaggtcaagatcaagatccaggtctatttcacgaccaagaag

SEQ ID NO: 410720 - DNA, 114 bp, Homo sapiens
agaagggttgggcatgcggtatgcattcattggacccctggaaaccatgcatctcaatgcagaagctccctgtgctgtcaggaatctacaggacttggctcgtatttacattcg

SEQ ID NO: 410721 - DNA, 97 bp, Homo sapiens
tgggcctgcccactcccacgcccttcaccaatgccgtccagctgctgctgacgctgaagttaagtgggcagaccaacatccacctcagcaaaaactt

SEQ ID NO: 410722 - DNA, 98 bp, Homo sapiens
ctcgagggaccatggccgatcctcgcgtgagacagatcaagatcaagaccggcgtggtgaagcggactaccgaccagactcccggaaatcatgttggt

SEQ ID NO: 410723 - DNA, 125 bp, Homo sapiens
cacccccactgaaaaagatgagtatgcctgccgtgtgaaccatgtgactttgtcacagcccaagatagttaagtggggcctgtctccactaactctggaccctaaaacagctcacccaaatctgg

SEQ ID NO: 410724 - DNA, 75 bp, Homo sapiens
tatatagcaaaagatttgatgaaagtacttcagggagtcaacggtgagtctggcatggacatggggatagtgaat

SEQ ID NO: 410725 - DNA, 98 bp, Homo sapiens
aggattgagacccggaaggcttcaaaggctgtcgcaaggaggaaggatcatccagcagctcgtcaacggcatcatcacgcccgccaccatccccagcc

SEQ ID NO: 410726 - DNA, 101 bp, Homo sapiens
accatcgccctcttcaccatctatgtcctctggacgctggtcatggaggcggagcagaccaagaccaggagcgagctggtgcataaggagacggcagccag

SEQ ID NO: 410727 - DNA, 100 bp, Homo sapiens
attccagtgggcccgacagcgcaacaggtatgatctcgtgaaaccttgagagaaactgaatgacgaatgaaactattgttcctgtttcacacagaagaaa

SEQ ID NO: 410728 - DNA, 99 bp, Homo sapiens
agcgggcagcaggatggtggtggatgcggccaactccaatgggcctttccagcccgtggtccttctccatattcgagatctattaatgagatgaagcgg

SEQ ID NO: 410729 - DNA, 82 bp, Homo sapiens
tcagttggaagcagccgatccagcctgcggagcctgtggggcaggatgacgtagctttgccaaagacttagaagctaagcag

SEQ ID NO: 410730 - DNA, 80 bp, Homo sapiens
ccgagcgcggccctgcaggcgatgtcgccgaaaccgggctgcaggcgggtcaaaatgcagatcttcgtgaaaacccttac

SEQ ID NO: 410731 - DNA, 100 bp, Homo sapiens
aagctggtggaagcgctgtgcgccgcgggccaccgcgccgaactgctccggttcccgggttcaactccttccacccggacacgcgcaagccgatgcacag

SEQ ID NO: 410732 - DNA, 50 bp, Homo sapiens
gaggatgtgaaacttaaatttgaagaggcttccaactgaatatgagagga

SEQ ID NO: 410733 - DNA, 83 bp, Homo sapiens
atgtccgctatccagaacctccactctttcggttgcatcataaatacaaaggactgaagttataaaagagaaaagagaagttt

SEQ ID NO: 410734 - DNA, 50 bp, Homo sapiens
atccagtcggttcgtggagaggagagtcaagtccatcatctccagaacca

SEQ ID NO: 410735 - DNA, 75 bp, Homo sapiens
ccgacatcaagagctgcgagatccaacagttggaggtccccctccccactaagtgcctctttgcatagcaccagt

SEQ ID NO: 410736 - DNA, 101 bp, Homo sapiens
gcagaaggtctctggagacatcttcagcaggctaaaacactgtcttatgaaccattatcttcagcaactgtttccactgggagccttttaagttatgaaaa

SEQ ID NO: 410737 - DNA, 90 bp, Homo sapiens
cgtggttggaatgtatctggctcagaactatgatgcctctctctggaacgcctacccaactccatcgcctcccgcttccgcctgacagag

SEQ ID NO: 410738 - DNA, 82 bp, Homo sapiens
cacgcaaccccagatccatttacactttacagtggagccatcgaagcccccacccacaggctgacagaggcaccgttcacca

SEQ ID NO: 410739 - DNA, 90 bp, Homo sapiens
cttcaaagccgacggcctgtccggcactgctgaagggcggcgactggcggcgcgatggacctgaccgggctcctgctggacgaagaaggc

SEQ ID NO: 410740 - DNA, 75 bp, Homo sapiens
cactcaacggagctgtggccgtgaagatgcgcgccttccagcgatctgaagataaaggttggggacaggcacatc

SEQ ID NO: 410741 - DNA, 75 bp, Homo sapiens
cctgcccccttttcctggtgcatgtgaagttatcaaaaacagctctaagcgaaagacatgaggcctcagcctgaa

SEQ ID NO: 410742 - DNA, 96 bp, Homo sapiens
tctacaactgggaggtggccatcttcggaccccccaacaccctctacgaaggcggctacttcaagacggagtctcgctctgccacccagactggag

SEQ ID NO: 410743 - DNA, 95 bp, Homo sapiens
atcggcctctgcgggcagctgtgatgtaccctcgcccttcaaccatcgaccaggatgccagccagtgccagcccagcccagacttcagccatgat

SEQ ID NO: 410744 - DNA, 80 bp, Homo sapiens
gccgatccagcctgcggagcctgtggggcagagtcctgtgtatggaaactcacatgagtcagctcagtctagaagggtag

SEQ ID NO: 410745 - DNA, 82 bp, Homo sapiens
tttgccattggggtgcagcagctgcaccccaccttgatccagcggacttacgggagcttactccacgggaacagcctctaga

SEQ ID NO: 410746 - DNA, 83 bp, Homo sapiens
cgcgaagccggggcggagcacgcgagctatgaccaggatggagcagagcccagcgccaattccgtgtcagcccacaacctgct

SEQ ID NO: 410747 - DNA, 98 bp, Homo sapiens
tcggtttgcacagctagaggccgcgcagcagcaaaggatgagcggaaccttggaaaagaatccacgccagtacaagatcccagactggttcttgaaca

SEQ ID NO: 410748 - DNA, 100 bp, Homo sapiens
agctttcttactctccaagctcacagtctgaagatgatgagaaactgaaaaagaggaaggagcgatttgggattgtcacaagttcagctggaactggaac

SEQ ID NO: 410749 - DNA, 135 bp, Homo sapiens
agagctatgtcgaaagaggccttcgggtgattgagatggagagggagggcaaaggtcgtatttccacttcaacagagttgtggaaagtaaaaatgtagccctaccaaaaggaactattgtactggcttctccagg

SEQ ID NO: 410750 - DNA, 96 bp, Homo sapiens
cagagaagaatgtgattgcagcattaaattcccgaactggggagatctgcatctgtagaggcattgacatggagaagcggctgtaccacatcctca

SEQ ID NO: 410751 - DNA, 98 bp, Homo sapiens
catgataatttccccagagcgtcttgatccttttgcagatggcatacttaccccataccttctggatcaccttattggatgctttttatcaaagcctg

SEQ ID NO: 410752 - DNA, 96 bp, Homo sapiens
tgaaaagtcgcagcgagctggagccgccggaggtgacatcagttgcaaggggatgaccgagcgcattcacagcatcaaccttcacaacttcagcaa

SEQ ID NO: 410753 - DNA, 83 bp, Homo sapiens
gtttgagcggctgcagagagagagagaagagaggagattgcagcagcgaaccaatcccaaggctccctggggaagggaatgca

SEQ ID NO: 410754 - DNA, 98 bp, Homo sapiens
tcagttcctgcggggaacttcaccagtgacccagtcagtgcccttcagttaaagaccaccaggagcacacttaaactgccaagttttggaccttatct

SEQ ID NO: 410755 - DNA, 82 bp, Homo sapiens
ctggagctgggtcagtccgccgctcaccccgcggccgcaccttcccgccttctcagtgcacagccagagaacaacacatcac

SEQ ID NO: 410756 - DNA, 100 bp, Homo sapiens
gtcaccactggacctccaaggaagccacgtgcagacatctacaaccttcgatctcctgacgaggaagacaaaggcgctttggctaagctggtggaagcta

SEQ ID NO: 410757 - DNA, 100 bp, Homo sapiens
gatttcagaaactgttggagtttatatacacaggaactttaaatcttgacaggaagttggtgaaccatctaaagaagagaaggctgtggccaagtatctt

SEQ ID NO: 410758 - DNA, 75 bp, Homo sapiens
cgagcgcaccagcgaccacaagatcgtcttctttaaagggcggaccccggaggcctgagcggcacctgcccccag

SEQ ID NO: 410759 - DNA, 51 bp, Homo sapiens
ctgctttcagtagccccattgctatggagttactagtagagaaagcaatca

SEQ ID NO: 410760 - DNA, 100 bp, Homo sapiens
gaaacgatggcgcgaggccgcagagctaaatgggggcctctccagggagtgctctgttcacggctccatcgctgttagcatgaatgctttacagttgcag

SEQ ID NO: 410761 - DNA, 119 bp, Homo sapiens
tgaagaccccgaaggaaaaggaggaattcgccgtgcccgagaatagctccgtccagcagactgaaatcgccaagagattgaatacgatttgtgcacaagtcatcccatttctgtctcag

SEQ ID NO: 410762 - DNA, 100 bp, Homo sapiens
ttacaggtgtgcaccaccacgcccaggtgtcagttgtacccgaggcgttctcagcagcagcaagtacctgtggtggatttccaggctgaactgaggcagg

SEQ ID NO: 410763 - DNA, 83 bp, Homo sapiens
gcagcgtggatgagcctcggggacactgtgccgaatgaagtgtcacatcccggtggctggacatgccctcttgggcttggcag

SEQ ID NO: 410764 - DNA, 89 bp, Homo sapiens
cgagatcttgggcaccgagagggactacgtgggcaccttgcgcttcttgcagtcggagtaaaagtccctcgcaatttccgactgttgga

SEQ ID NO: 410765 - DNA, 98 bp, Homo sapiens
tcggaaacttaaagaaatatttaacaaagctttggttgatccagcctatgaaagagacaaccagcaccaagatgaagcagaaggagatccaggtaata

SEQ ID NO: 410766 - DNA, 80 bp, Homo sapiens
tggtctgcagtgagcccttggattctagccagcacgactgaaggaggttcatcaatgccagaagacgaattcttcagcca

SEQ ID NO: 410767 - DNA, 100 bp, Homo sapiens
tgtcctctgggtacggctcgcgggagtgttggttaccatggtgaagctggcagccaaatgcatcctggcaggttttacacatccataagtagaccttttt

SEQ ID NO: 410768 - DNA, 97 bp, Homo sapiens
aacccaaacaacaaccaagccagtttaatgtcccacagtgttttgttcgccccacggaggccaagaaagccgcagatgaggccaagatgagatttgc

SEQ ID NO: 410769 - DNA, 75 bp, Homo sapiens
caattttctgtcttacttgttcacctcatcatgaagatttagtagccattgggtgtttgatcagtatgtaaagac

SEQ ID NO: 410770 - DNA, 100 bp, Homo sapiens
tcatgatggttcctgctgacctggaaacatcttaaatggaagggtaatacctgcctggagaatggatctttcttactgaactttacaggctgtgcagtgt

SEQ ID NO: 410771 - DNA, 83 bp, Homo sapiens
atggcctcaatatgtgccgccagtgtttccgtcagtacgcgaaggatatcggtttcattaagacctttccagctcacccccag

SEQ ID NO: 410772 - DNA, 75 bp, Homo sapiens
gaagagctgcagctcctcctgtgcggtttttcagaagaagtgaagtcaagatgaagaaccatttgcttttctggg

SEQ ID NO: 410773 - DNA, 90 bp, Homo sapiens
agaccttcgagcaccccaacgtggtcaggtgctggagaatctggtaaaagcaccattgtgaagcagatgaggatcctgcatgttaatggg

SEQ ID NO: 410774 - DNA, 90 bp, Homo sapiens
gttccccgcctcctgcgactcgtttgtgggaaggaccatgaaaaagctgaatttgaggtacatgaagtatatgctgtggatgttctcgtc

SEQ ID NO: 410775 - DNA, 75 bp, Homo sapiens
gacaggataaactgttacgcatatatgacttgaacaaacctgaagcaggtagcacagagtgaagctgaaaagaaa

SEQ ID NO: 410776 - DNA, 98 bp, Homo sapiens
gcggggaacgactgcggcgcgctgctggacgaagagctctcctccttcttcctcaactatctcgctgacacgcaggtcataactccatgcaggaagct

SEQ ID NO: 410777 - DNA, 100 bp, Homo sapiens
cagaaatttccaaacatgcaaagaatctcatctgtgctttcttaacagataggtatgtgagactctgtgaagtagtcgaccacgttttcccgttgctgaa

SEQ ID NO: 410778 - DNA, 81 bp, Homo sapiens
tccccaccgtgcagcggggcatcatcaagatggtgtatgcaacagcgttattgcaacaggctaacgaaaacagacaaaatt

SEQ ID NO: 410779 - DNA, 75 bp, Homo sapiens
agcagaatgtgatttgcttgaagatatgagattgtatgcaggcccagaggtagatatatggagcagtggggttat

SEQ ID NO: 410780 - DNA, 100 bp, Homo sapiens
caaaatcagtgattctacatctcaagctcatattttgaagtgtttacgggaggtgcaagcgaagatgcagtgctaccttatttttcatttttattttttg

SEQ ID NO: 410781 - DNA, 51 bp, Homo sapiens
gaagctgcggccgcacctggccaagaagcccctgaatgtgacagtgatccg

SEQ ID NO: 410782 - DNA, 83 bp, Homo sapiens
tcctcaagcagaacactgctgggagtcctaaaacctgcgacaggaagatgtacttgaaggatataatggaacaatatttgcat

SEQ ID NO: 410783 - DNA, 100 bp, Homo sapiens
gccgctggccccggggatccgaagaggaagggcggtccgggctccacacttagcttcactatctgatcaacgtgatggatgccctgggcctgcagccgtc

SEQ ID NO: 410784 - DNA, 122 bp, Homo sapiens
tggagcttggtttcgggatctcggtgctgcagacggcgagacctcctgcacaggtttggtgcacctcgatttggaggaagtagggcagggcccttatctggaaagaagtttggaaaccctgg

SEQ ID NO: 410785 - DNA, 82 bp, Homo sapiens
cgttcttgaagttagtgagaccaaaaacccaccaattctggacacattgggattaaaggtcctgggggcaccatggtttcgg

SEQ ID NO: 410786 - DNA, 100 bp, Homo sapiens
cgaatatgaggccgcgctgaccatctacgatacccacatcagacactcctctaatttacaaagcagtgcccagctggtttgtgcgagtggagaacatggt

SEQ ID NO: 410787 - DNA, 100 bp, Homo sapiens
atgaagcaacatgagatggtggatgaacccacagaatgcagtaatagtggccttgtcttcaaaatcatgggatgtagagactgcaacagaattgcttctg

SEQ ID NO: 410788 - DNA, 100 bp, Homo sapiens
caaattcatcctcatggactgcatggcagtggctctgccaatgatcctgtgagtattcaggaatcactgttgcccctggggatccttgtcctggagtggc

SEQ ID NO: 410789 - DNA, 82 bp, Homo sapiens
caggcccgccagacttaagggacctggtcaccacgctcgacaatgcagatcttcgtgaagactctgactggtaagaccatca

SEQ ID NO: 410790 - DNA, 75 bp, Homo sapiens
tcccaatcccccactctttccgccctaatggaggtctccagtttcgattgtccccttggggcggaaagaagccaa

SEQ ID NO: 410791 - DNA, 75 bp, Homo sapiens
cctgtttctactcttgcgccccctgctggtttcctgccctgtctgattgtcaccagacctgcaatctatggagca

SEQ ID NO: 410792 - DNA, 98 bp, Homo sapiens
tggaacacctcgccaaagcagagaaatagtgcactacatcctccaggaggtggtgatgggtgggatggtgttggaaacaaacatgaatgaaatcgtgg

SEQ ID NO: 410793 - DNA, 96 bp, Homo sapiens
ttaaatacccgaccttgctgcaccagagaaagaagcagcgattcctcagtaaacacatctctcaccgcggaggtcatcatcagatttgaaatattt

SEQ ID NO: 410794 - DNA, 95 bp, Homo sapiens
caggggacccctgacccaggttacggaccggaagtgctccagaactcaaggccggaaggtggtggtcgtacgctgtgaaggcatcaacatttctg

SEQ ID NO: 410795 - DNA, 50 bp, Homo sapiens
ctggtcttgaactcctaacctcaggtgatccacccacctcggcctcccaa

SEQ ID NO: 410796 - DNA, 98 bp, Homo sapiens
ctctggtcttcgatgcacaggagtggccgttatggaacgcaggactgagcagggggaggaacatttaagctgatggaagtggaagtggaagttgctgt

SEQ ID NO: 410797 - DNA, 76 bp, Homo sapiens
aggaggaagagctgaatgactcaagtctggacctgggacccactgcagcctctcctctcaggctggagcgcagtgg

SEQ ID NO: 410798 - DNA, 119 bp, Homo sapiens
ggaggagttccgagaccagtgggggggtgaagactgggagctcctggacagtctggcctctgtggagctgagcgagcagtcactacaggagcttcaggctgtgaagagagcaaagccgg

SEQ ID NO: 410799 - DNA, 98 bp, Homo sapiens
gaaaagatccctggaatatgaagggacacagtacggtagtcaaacccccaggccaggagtggtggctcacacctgtaatcccagctctgggaggccaa

SEQ ID NO: 410800 - DNA, 75 bp, Homo sapiens
ttcctgattaaacccactctccacagtttccaatacttatctacaggaatcgccatgaccccagctctgagggag

SEQ ID NO: 410801 - DNA, 101 bp, Homo sapiens
aggaagggactttaatcactgaccatcccaatatacaggtgcaatggatgagcttcatagtctggatccaagaaggcaagagttattggaagctagattta

SEQ ID NO: 410802 - DNA, 100 bp, Homo sapiens
gggcttccccatgatgatcctgccatgcaggcaggccctgagcacgctgctgtgtgagcagcaggtttggtgcacctcgatttggaggaagtagggcagg

SEQ ID NO: 410803 - DNA, 100 bp, Homo sapiens
gagaagggccctcttctccctgaagcagatatttcaggaaattatgatgtgatgaccccaatggttgatatacttatgaaactttttcgaaatatggtga

SEQ ID NO: 410804 - DNA, 90 bp, Homo sapiens
caccgatgtctggtgtatctgggggatttgttgtctcgactgcattgtgagagtgaatctttcaagatggatctaatcttagatgtaaac

SEQ ID NO: 410805 - DNA, 75 bp, Homo sapiens
cctctcccgcgggcaccgaggactccgctcctgcccaggcgaggattaaatccaccacacagggtgaaatctatc

SEQ ID NO: 410806 - DNA, 78 bp, Homo sapiens
acgacaggagcatcccaggaaggggttcccagaagtcagaatccaagatggtccttatcttgcttccctgccattgga

SEQ ID NO: 410807 - DNA, 83 bp, Homo sapiens
tggggagatggaggggccggggctgggctcgcagggtgatcagcccatgacctaaacctccagacaaaataaaacggaaaatt

SEQ ID NO: 410808 - DNA, 76 bp, Homo sapiens
gcgggaggcgcggcgagggcgccagatccaggatgagaagactgataaaagaagaagctagctgaacagctgtaaa

SEQ ID NO: 410809 - DNA, 75 bp, Homo sapiens
aacctcaagatgtggatttaccttatcccctcaacaacttttcagtggcaaggccgttgctccagggagaactgc

SEQ ID NO: 410810 - DNA, 100 bp, Homo sapiens
agttgacagtggaggcaaggagtgagctgagcctcactctgtcacccaggttggagtacagtggaacagtctcagctcactgcaacttccgtcttccagg

SEQ ID NO: 410811 - DNA, 100 bp, Homo sapiens
tggaatgttcttaacccagaagtagctgaatgtgttactccattgctgaggagtggtggtatggtcaggaaaaagactacaatgtactagtcatggatct

SEQ ID NO: 410812 - DNA, 75 bp, Homo sapiens
ggccctcgtgtaaattcatgcaaattccttcgacaatcctgagtggttttatcggcatgtggaagcacacagtct

SEQ ID NO: 410813 - DNA, 75 bp, Homo sapiens
aaacaactacctgctgaaattgggcgtgattgactacattttctattccaagactcatatgaacgtgcttggtgt

SEQ ID NO: 410814 - DNA, 75 bp, Homo sapiens
tatattgcagttggacatgagaaccgtgcaaatttctgatctagagaggtacttggaaggctccatcgcccctga

SEQ ID NO: 410815 - DNA, 88 bp, Homo sapiens
gaggacgcgggctctgaggatgagctggaggaggggattatggcatcgtcaaagcattgtggtgtcttttttactgctgcttgctgtg

SEQ ID NO: 410816 - DNA, 75 bp, Homo sapiens
caaggctgcaaacaaggaggcaacccaggaggcttttatgaagcgggccatggtggtgaaggcatttgtggtcct

SEQ ID NO: 410817 - DNA, 100 bp, Homo sapiens
ctccgggtgtccggccgtgtcccgaggaagtgcaagacccggtttggaagaggacagttgccctttattctggcggcagatagcagcaggtgaaaaagtg

SEQ ID NO: 410818 - DNA, 100 bp, Homo sapiens
aagtttttaagactctcaggcttactgtggatctggattctaaggcaacacttccttgaagaaacaagcttacaggttccagcaacagatagaaatgctt

SEQ ID NO: 410819 - DNA, 90 bp, Homo sapiens
ggcgatcaacatcaccaacggcgaggcagcctcctgtcagtgagtctcattggagaacgttgctgcaagacatgttaactatgcagcaga

SEQ ID NO: 410820 - DNA, 50 bp, Homo sapiens
cagccagcaccgcacgccctgcaagggagcctacagggagcccttcgagc

SEQ ID NO: 410821 - DNA, 75 bp, Homo sapiens
cggcgctgagaggggctgcggccggagcgggcggctgagacaaaggcgacgcctgaacccccgccaacaaacaaa

SEQ ID NO: 410822 - DNA, 100 bp, Homo sapiens
cggcgggacagctcgacgcgcaggatggctgtgactttgtctgccgttctaaacctcgaaatgtgcctgcagcatatcgtggtgtgggggatgaccagct

SEQ ID NO: 410823 - DNA, 75 bp, Homo sapiens
atggcgtggagatatggcgcaactgcggcgcatgggccaaggttgctcgggtgattggtttactggcttcgcaca

SEQ ID NO: 410824 - DNA, 90 bp, Homo sapiens
gaaggagaaccagaaacatatctattatatcacaggtggagccgccaccaaaatgcagattttcgtgaaaacccttacggggaagaccat

SEQ ID NO: 410825 - DNA, 82 bp, Homo sapiens
gaagcaggacccgaagcctaaattccaggagggattatctgaaccttcttctattgcaaaacatgaagatagtttgcttaag

SEQ ID NO: 410826 - DNA, 98 bp, Homo sapiens
tgcggcgcctgggcgctctgagacaccattcgcttttcacccaagatgatttgatgtcttataaaactctgatgaaccatgatggctacacagacatt

SEQ ID NO: 410827 - DNA, 100 bp, Homo sapiens
tagctccaatgaatttgaggaagaattagtgtctccatcgtcatcagaaactgaaggcaactttgtctatcgcacagtgtgtcccggcatggatatccgg

SEQ ID NO: 410828 - DNA, 98 bp, Homo sapiens
gcggggctcccgggagcggcccttagcgaccccgcccgggccccctcaggagaatgaagtttctagattagaagacataatgcagcatttaaaatcaa

SEQ ID NO: 410829 - DNA, 89 bp, Homo sapiens
ggtgaaccaggaaagccaggagaacaaggcttgatgaaacagacatcgtggtcttcagcatctcatccacagcaccaatggaattctca

SEQ ID NO: 410830 - DNA, 100 bp, Homo sapiens
gcttttccaggaatgaaagacattcaggatcaacttgaacgaatatttctggtacgcatagctgctaaattcatcactcatgcacccccaggggaattta

SEQ ID NO: 410831 - DNA, 93 bp, Homo sapiens
ctgcctttccagcccaagcagctttccctcaacagacagctttttctcaacagcccaatggaaataatgaagatgtttcattttcaagaccag

SEQ ID NO: 410832 - DNA, 100 bp, Homo sapiens
acactcacaatgagccagtgcggcagttggctattttctgtccccatgtggcactccaaacaacgttctccaccttcatctatggaagataaatcagatg

SEQ ID NO: 410833 - DNA, 75 bp, Homo sapiens
agctgccaaattggataagacactgcaggaccgtataatagacgctggccccaaaggaaactactctcgatttat

SEQ ID NO: 410834 - DNA, 100 bp, Homo sapiens
accgatcttcttgtgtcaccatgctattatgcatagaaaggcctgcactgcccaaagtcttggaaacttgctggatatgatgtaccgggagccagcacga

SEQ ID NO: 410835 - DNA, 100 bp, Homo sapiens
gtccagcagatggcggatgccctgcagtacctgcagaaggtctctggagacatcttcagcaggtgaacctgttctctgacccaccccagcccaaccacag

SEQ ID NO: 410836 - DNA, 51 bp, Homo sapiens
cagcgaccccaagcaataccgggtttgatttctttgaagccagtgcaaagg

SEQ ID NO: 410837 - DNA, 75 bp, Homo sapiens
caaaagcccatgagaagctagacaataagaaggaatgtttagaaggtatcaaacagctactgaaacaagggtcag

SEQ ID NO: 410838 - DNA, 100 bp, Homo sapiens
atagtccatcgaagaagagtccttggaacaagcaactggctattgaaaaggttctggaggacacgtgccggcggcaggacttcaacccctgtgaatatga

SEQ ID NO: 410839 - DNA, 101 bp, Homo sapiens
ctggagccgaggcgcaggtggcgctgggctgaaggtgatgtggccgccctcaaccgacgcatccagctcgttgaggaggagttggacagggctcaggaacg

SEQ ID NO: 410840 - DNA, 100 bp, Homo sapiens
gtgagcgagaaagccgttgcctccagcaccacttctaatggtgtgatgaatgcagactctgctaccattttggctgtttggatcctcctttgaaaaagtc

SEQ ID NO: 410841 - DNA, 100 bp, Homo sapiens
gagcagcgagcccgaagcaaaagtcctccacactaagcggctttaccgacgttatgaagaggacatgtactggaggagaatggaggaagaacaacatcat

SEQ ID NO: 410842 - DNA, 99 bp, Homo sapiens
ttcgctttcctgaaaaaagaagtggtggggaaagacctgctgaaagggtcgctcctcttcacaggctttggtatcaggatggtgctggcctcataaaat

SEQ ID NO: 410843 - DNA, 82 bp, Homo sapiens
atggacgccgtgtcaccttggaagtccagcgcagtgcccactaaacacgccaaggttgattcttcaccacactgaaaccatt

SEQ ID NO: 410844 - DNA, 83 bp, Homo sapiens
cgcgcgcagggcctgcagcgggagctggacggcgagcgcgagcggcgcgagaaatcctattttgtaacggattatgatccaac

SEQ ID NO: 410845 - DNA, 100 bp, Homo sapiens
gtcatctctttcatatctcaaaaccatggctcagaagaagcctgagaagatgatgcacagatagagaggcaccaggacttgagaggcaccaggacttggg

SEQ ID NO: 410846 - DNA, 82 bp, Homo sapiens
atcgagcgcccctccgagctggggttggacgctgccagtttgcacagcagcaggtttggtgcacctcgatttggaggaagta

SEQ ID NO: 410847 - DNA, 73 bp, Homo sapiens
agaatacctcaaacgtctaccattacagtgggatgatatcgctgatttagtagaagctaaaaagttgcttaag

SEQ ID NO: 410848 - DNA, 96 bp, Homo sapiens
attccagaccaaaattgaaaaaatggttgacctcacccagtaatatggacaagttaggccctccacttcgaacgggaagacttgtgcaaaggttgt

SEQ ID NO: 410849 - DNA, 50 bp, Homo sapiens
gaaagccagatggctgaacatcagagcctgcattgattctaatgaagatg

SEQ ID NO: 410850 - DNA, 101 bp, Homo sapiens
gctttcacagtttgcgggactcagtcccatcactccaaggagagaaggtatttaaaccatgtcagagctgcctcaccacaggaccttgctggaggctatac

SEQ ID NO: 410851 - DNA, 100 bp, Homo sapiens
agttcttcagtctacaaaggactcttctaaaaggatatgtgttgctaatacccatctttactggcatcctaaaggaatagccaggccagaagaaggaagg

SEQ ID NO: 410852 - DNA, 115 bp, Homo sapiens
agatgatgagaaataaggacaaaagccaagaggaggacagttcgctacacagcaatgcatcgagaaatgcactcggtgatggaaagagagccactattctgaagaacacttggcc

SEQ ID NO: 410853 - DNA, 100 bp, Homo sapiens
acctgtgatgttaaattcaaaaactacctcatccccaagtcccttcagcggctgcacagggagcatggtcttgggagtggtacttgaaagaacagaaggc

SEQ ID NO: 410854 - DNA, 100 bp, Homo sapiens
attgtgaactaaggccccctgcccccttttcctggtgcatgtgaagttatcaaaaacagattctcgctgaagtctgttaattctactttttgagtactta

SEQ ID NO: 410855 - DNA, 76 bp, Homo sapiens
tctgccttcagagaagtctgatgaagatgatgataaaattcccactggaaattcgttgtatgaatcttattacaag

SEQ ID NO: 410856 - DNA, 52 bp, Homo sapiens
acgtgcacaacatcacccgcaaggacacagaacgtgaacatgagccgcccta

SEQ ID NO: 410857 - DNA, 75 bp, Homo sapiens
gccgccgcccctcaccagacagatcgctgtcaaaaccctaggctcttgtcaggatggtgaagctgttcatcggaa

SEQ ID NO: 410858 - DNA, 100 bp, Homo sapiens
gatgaaaacctttgtgatgatccacttccacttaatgaatgcatgtcctcctcacattcttccaccagagaagaggccccctgagccccccggacctcca

SEQ ID NO: 410859 - DNA, 100 bp, Homo sapiens
ctacgcctcctacgtttacctgtccatggattaaagcaaggagagccaatcatgactggcaaaacacagaccagcaacgtcaccaataagaatgacccca

SEQ ID NO: 410860 - DNA, 82 bp, Homo sapiens
tgaaaagtgccataaactgaaaaaccaaacatgagggtagcaggtttccctaggacttctgcatgcccatgccacacatatc

SEQ ID NO: 410861 - DNA, 96 bp, Homo sapiens
ctagaagtctggatgtcggtgggcctctgagatatgccgtttacgggtcggaagtctatgcgtcagtctacagctgagcatacacgacaaacgttc

SEQ ID NO: 410862 - DNA, 82 bp, Homo sapiens
tccagcaaggtcggcagagcaaggggcttacgcagaaggacctggccacgcacatgattaagtaccggtacatcccgttcac

SEQ ID NO: 410863 - DNA, 82 bp, Homo sapiens
gtgcagcagctgcaccccaccttgatccagcggacttacggattttgcaagaacgaggctcaaggatgtgagggacacagta

SEQ ID NO: 410864 - DNA, 83 bp, Homo sapiens
tcgcgcccgggaggaaggaacgaggcaaggagctaaagcagcgtgcgttcagccctggggagggtgtgaagacagagaatgac

SEQ ID NO: 410865 - DNA, 75 bp, Homo sapiens
agtggggcgacgaggctgacggcggccaggacctacaagaacagtgaggagcttcggtctcgtattgtgtctgga

SEQ ID NO: 410866 - DNA, 83 bp, Homo sapiens
ctatttgtagtcatgtacagaacatgatcaagggtgttacactggttgatgctatgaaactgggagtaaaggaaatgaagaag

SEQ ID NO: 410867 - DNA, 75 bp, Homo sapiens
gtctccaaaatgagtcgcatcttcaacccccatctactccagcgggaggaagaagaggcctttgccagcagtcag

SEQ ID NO: 410868 - DNA, 82 bp, Homo sapiens
ctgaagacgtctgcgtgagaatagagaccaccgagttccagggtctccctccactgctgtagtaacccgggtccggggcctc

SEQ ID NO: 410869 - DNA, 98 bp, Homo sapiens
gcggcgggagcggcgccgagaggccgtgcgggacgcgggcgccaggaccggccgaacgcagagaccccttatccctctggacagaatgcaggtccaac

SEQ ID NO: 410870 - DNA, 100 bp, Homo sapiens
agacccaggaggagcgcgcacagctcctgcagcccacgctggagatcaaccccaggccaacccatggccagcacagacatgatggaataaagactgagca

SEQ ID NO: 410871 - DNA, 82 bp, Homo sapiens
agattgtttcggctgtgcactattgtcaccagaaaaatattgtacacagggacctgaaggcccgttcctcccgccgtcagcc

SEQ ID NO: 410872 - DNA, 97 bp, Homo sapiens
gaacatgccaggagagcaatgcaaaaggtcttgttcagcgttgcgtaatcatccagaaagatgacaatggatttgggctgacggtcagtggagacaa

SEQ ID NO: 410873 - DNA, 100 bp, Homo sapiens
ccggtttccagggggttcctggtgctcgaggctggcggcgaggaaggctttaaacctggccagcggaaagttttatttacctgtttcaagaggaatgata

SEQ ID NO: 410874 - DNA, 75 bp, Homo sapiens
cggatcgcgtggagtgacggtcacaccgcggcggaccagatggcctttgaggatgtggctgtgtacttctcccag

SEQ ID NO: 410875 - DNA, 83 bp, Homo sapiens
tgaacagctatgcatgctgcttttgatgtctgacaacgtggatcgttgttttgaaacaatacctaaaggggcaggacctggat

SEQ ID NO: 410876 - DNA, 90 bp, Homo sapiens
ccaagggctgttgaaggcagcgaggaagagcggccagttaaacctgtcgggtagaaacctcagtgaagggcaaagcccaacaccttcccc

SEQ ID NO: 410877 - DNA, 75 bp, Homo sapiens
ggtcgtcggtggggtcggagctgggcgcggagcccctcacagtgcagaaagatgaggtctatcttaatctggtgc

SEQ ID NO: 410878 - DNA, 98 bp, Homo sapiens
actggtaagatttctgcatatctgtttaatcccatggaatcaatcaaattaaatcatcatgactacattgattccccatcgctgaaggacagaattca

SEQ ID NO: 410879 - DNA, 88 bp, Homo sapiens
gaaaatttcctgccgattatataaaatactgggagtttgcaggtggagccgccaccaaaatgcagattttcgtgaaaacccttacggg

SEQ ID NO: 410880 - DNA, 75 bp, Homo sapiens
actcactgagctggaagtcattcaacgggaattgaataggtacacctgagagcctggcagaaaaagaacggcagc

SEQ ID NO: 410881 - DNA, 82 bp, Homo sapiens
ctggccggggaggaggccccccaggagaaggcggaggacaagcccagcaccgatcattgagaagcagccaggccacattcgg

SEQ ID NO: 410882 - DNA, 75 bp, Homo sapiens
cccgcgcccgggaccgacccctctgctcgcggccgcgcctttgaggaggttgctcaaagaagtacagtctttaaa

SEQ ID NO: 410883 - DNA, 83 bp, Homo sapiens
cctgcagcgggagctggacggcgagcgcgagcggcgcgagaaagtcccaggtctccccgctgcgctgcttgaggctcagccat

SEQ ID NO: 410884 - DNA, 82 bp, Homo sapiens
tgataacaccctgtaacagctgagtcagggaagtcaaagatgcatccctgagttcttcctagcaggcaagcagccgtgcacc

SEQ ID NO: 410885 - DNA, 100 bp, Homo sapiens
gactcttggtacatgaggaagaaacccggaaggggaagaggaaagcaaaggcgtcaggaatggttcttcctcaggaagcaatgaggctccccaagaacac

SEQ ID NO: 410886 - DNA, 100 bp, Homo sapiens
cgccgggattctgacctgacttgtttgcagaaaatcttggcatatacagaagggctgcatggaaaatggctgttcacagagatacgatcaatcttttctc

SEQ ID NO: 410887 - DNA, 75 bp, Homo sapiens
gctacaggcacatcttaaagttcacacagcactgagtgatcagcagctggactgtgccttggacctaatgaggcg

SEQ ID NO: 410888 - DNA, 100 bp, Homo sapiens
cccgggttcgccgagccgcaggagagacacgctgggccgaccccagagaggcgctggacagaattcagtttgcctgttctgtatgcaagttccgtagctt

SEQ ID NO: 410889 - DNA, 80 bp, Homo sapiens
agaaattcgacttcagtaatttgagtagtaggcccagcagtgagaaactttcacaatctgtaatagatggtgtgactgtt

SEQ ID NO: 410890 - DNA, 75 bp, Homo sapiens
gaaccgccgccccggccggacctcgaccctgagctctatctcagtgtacacggccagatcagaaaagggagctca

SEQ ID NO: 410891 - DNA, 125 bp, Homo sapiens
gtccgaccgggctagctttggcgaggggacggagccggatcaggagccgccgccgccatatcagtgccctgcaggagtcattaaatcaaaacttcatgctgatcatcacccaccgagaagtccag

SEQ ID NO: 410892 - DNA, 100 bp, Homo sapiens
caagattctctcctgaagtcccaggtttgcagctaaaactgtgcacagtgggtcattgatgctagtcacagtggaactgaaggaaggctctacagcccag

SEQ ID NO: 410893 - DNA, 75 bp, Homo sapiens
cagcaggactactggctgatagatgtaagagatgacagtgtgcttcacctgactttctactacctcatgaacctc

SEQ ID NO: 410894 - DNA, 75 bp, Homo sapiens
gcagctttcgccagatcctgcctcgcttccgaagtgctgaccatgaccgtcatgttgtcataggaacaactggag

SEQ ID NO: 410895 - DNA, 100 bp, Homo sapiens
tcgacctgctaacagaactggaccttttcggcagactcagtgggatcctcctacttgggaaagcccaggagatgatgccagccttgagcatgaagctgag

SEQ ID NO: 410896 - DNA, 75 bp, Homo sapiens
atggaacccctgctctggcctacctggcggtctccataggacgtctgtgtttgaccgcctcggcgccgagaccaa

SEQ ID NO: 410897 - DNA, 75 bp, Homo sapiens
cagatgttcctgtggaccccagtccagttgtctgggttcatgtctaagcttgttccagctatccagaatgcccac

SEQ ID NO: 410898 - DNA, 97 bp, Homo sapiens
tagaacttgcaagaagatgggcattaagacagttgccatccacagtgatgttgatgctagttctggtgttcctgaaaagccccatagtgattgagtc

SEQ ID NO: 410899 - DNA, 85 bp, Homo sapiens
ttttagggtcctttatatagaagggagagtagggacagagcagaatgggctgatatagatccggtgccgcagaatgatggcccca

SEQ ID NO: 410900 - DNA, 75 bp, Homo sapiens
ctgggctggaggcggcggagcgcgagagcttcgagcggactcaggtattgttgcagcatctggcagtgagactga

SEQ ID NO: 410901 - DNA, 75 bp, Homo sapiens
aggccacgccggccgcgcgcgccagcaagaagatcctgctgcccgagcccaggctaagtcctatcagccatggaa

SEQ ID NO: 410902 - DNA, 90 bp, Homo sapiens
gtagtcggacctttcccgctggcgcgcagcctcagctaggaaactaaatatattttgccaactttggaaaaagaattattcttggcagag

SEQ ID NO: 410903 - DNA, 75 bp, Homo sapiens
ttgcgccgtacattcgagagtttgaggaccctgcccaagggccagctggagtccattgtggagaacatccgcatc

SEQ ID NO: 410904 - DNA, 83 bp, Homo sapiens
atgcctttcaagtgcatgcagctcactgatttcatcctcaagtttccgcacaggaagatgagaatgtgcctactgctcctgat

SEQ ID NO: 410905 - DNA, 87 bp, Homo sapiens
gtggggaggccttcgactggctgcttggggagattgagtccaagttcaaccaagccattgaaagattcgaagaatctcggggatcag

SEQ ID NO: 410906 - DNA, 75 bp, Homo sapiens
agatgggcagacggattcatttagagctgcggaacaggacgccctctgatatggcatccacagcgtcacggcctt

SEQ ID NO: 410907 - DNA, 89 bp, Homo sapiens
ccagaagctccatatacttcccatgataaacttaaggagttggaaaaacaacattgatccataaagccagtgaggttttaaaatcctct

SEQ ID NO: 410908 - DNA, 87 bp, Homo sapiens
gggagaagagaatgagaaactgtggagctttaccaaaaaggcctcgcacattcagttggacaggttttatgggaattagaaacctta

SEQ ID NO: 410909 - DNA, 75 bp, Homo sapiens
cggcgagggcgaggatccggagtgtctgggagaagaggctgggaggcggcagaatgcagccagaggagggcacag

SEQ ID NO: 410910 - DNA, 74 bp, Homo sapiens
tcgcgccaaggagaccaggaagcgagcactcagcaggaatgatgagaagacagcagctgattacaagattttag

SEQ ID NO: 410911 - DNA, 117 bp, Homo sapiens
ccgggatcgtgaccgagaccgtgaccgagagcgtgaccgagagcgcgaatatcgtcatcgttagaagagcccccctccatgcgcctgaaggcccgacccagcagccctggcttttcc

SEQ ID NO: 410912 - DNA, 93 bp, Homo sapiens
aaccattgacgccatgtcgggttattcgagtgaccgagaccgcggccgggaccgaggcgagcagctgatgcagctgtacagtgcgcgccagcg

SEQ ID NO: 410913 - DNA, 99 bp, Homo sapiens
gcgggcgccaggaccggccgaacgcagaggaaaggccgagggggacggcaagatgcacatcaccctctgtgacttcatcgtgccctgggacaccctgag

SEQ ID NO: 410914 - DNA, 90 bp, Homo sapiens
ctagccgacaaggaggtgaagcggccccagcactcccagctgcgcagggcctgccaggtggcgctcgggtcatgtaggtacaacagcaac

SEQ ID NO: 410915 - DNA, 87 bp, Homo sapiens
ctctgctgcaccgacctcgacgtcttgcctgtgtcccacttgttcgcggcctatagatggtcatcatgggccagtgctactacaacg

SEQ ID NO: 410916 - DNA, 100 bp, Homo sapiens
cttctcagaggacgccttcaacaccaccttcatctccaccatcgtgaacacttgtcctgctccttcacctttttcttgcatggagacagcaatgtttgta

SEQ ID NO: 410917 - DNA, 99 bp, Homo sapiens
cgaccgagggactgggagtcgttagtgagggtatacagggagctaccctgtgtttctgagaccctttgtgacatctcacattttttccaagaagatgat

SEQ ID NO: 410918 - DNA, 75 bp, Homo sapiens
cctcagtggttaacttttttgctgcaatcacaaagttcaacagagtttggaaaagatttctaaactggagcagga

SEQ ID NO: 410919 - DNA, 74 bp, Homo sapiens
gccaccacccactccggacacaggtgagccaccagctgggcagcatcatggacctcttcaccaccagcctggcc

SEQ ID NO: 410920 - DNA, 75 bp, Homo sapiens
cggacaacctcagaggacaacgaagtgttcggagggtgcatctgcccggaagactcagactcctgcagcccagcc

SEQ ID NO: 410921 - DNA, 100 bp, Homo sapiens
aaggcctggcccggcggctcagccccatcatgctggtcattgctgtgcgtgtgaaggaagagcatctagacgtggcctcgcccgacaaggcttcaagtcc

SEQ ID NO: 410922 - DNA, 74 bp, Homo sapiens
ataagagaccaaactatggggaaatccctgttcaagggaaagcaggcaggatgggagagtcgccgatagaacca

SEQ ID NO: 410923 - DNA, 88 bp, Homo sapiens
aaattggttactgggtctcctctcaagaaatctcaagatattaaagttactgctgttaaaaagcaccttctagccaccatggcaacct

SEQ ID NO: 410924 - DNA, 75 bp, Homo sapiens
gtcatctttgcagtgtagcattttcaggtatgttgagtctaaaaaggacagagtcacagtagtcttcagcacagt

SEQ ID NO: 410925 - DNA, 82 bp, Homo sapiens
ttccaaggaagaatttcctctgaagcaccggtgtttgaaggcgtctacaacaattccagaatgctgcatttccttacagctg

SEQ ID NO: 410926 - DNA, 78 bp, Homo sapiens
actggtgctgtctgggcttcatagcattcgcctactccgtgaaggagcatcagatccatgctgctgctgactcggagc

SEQ ID NO: 410927 - DNA, 111 bp, Homo sapiens
aggagttcgtctcttacgtctgcggaagtgcagctgcctcagttcttagcgcagaaggacagaataacgggctcccagattcacaagccccaccaagaggatcaccccagg

SEQ ID NO: 410928 - DNA, 75 bp, Homo sapiens
atttctgcagctctgtgtgaaggaggttccccaatacaactcatgagggtttcaatgtcaccctccacaccaccc

SEQ ID NO: 410929 - DNA, 100 bp, Homo sapiens
attccctggatgaaggccgtcaccttaccttaaaccttttaagcaaggaaattgaactaagaaatggagaggtcccgatcacacagcaagaatccaaaaa

SEQ ID NO: 410930 - DNA, 90 bp, Homo sapiens
gtgcccagcaagagattaaagatgcagtacgccacggggccgctgctcaagttccagatttggtttctttacctccagaaagaagaatat

SEQ ID NO: 410931 - DNA, 87 bp, Homo sapiens
acctggttgtgcaacaggcaggcacaaacaagactgatgttgtctgtgcatctgagaagaagtcactggcaagtcgttcaaatgttg

SEQ ID NO: 410932 - DNA, 99 bp, Homo sapiens
gtacttggattcagcaaggaaccttccgttgagtcagcagatactggagttatttgaaacatgtcagcagcaaataagtgatttaaagaagaaagaact

SEQ ID NO: 410933 - DNA, 80 bp, Homo sapiens
atacttaactactgaatgtgaagatgtcctcttagtgcttggcagattagtactttattcaagcggagaaatgttgctac

SEQ ID NO: 410934 - DNA, 50 bp, Homo sapiens
caacaccacaataatccacagccaaggctcctggatttggatttggaatt

SEQ ID NO: 410935 - DNA, 75 bp, Homo sapiens
ggatgttatctggtggatgttataggccccttcacagatgtagtcactacaaatcttaaattgcgaaatccatcg

SEQ ID NO: 410936 - DNA, 83 bp, Homo sapiens
accgtcggtgggtcggggatcggtcgcctgagaggcttgggcactgtttaaaggaaagttccgagaaggcatcgacaagccgg

SEQ ID NO: 410937 - DNA, 100 bp, Homo sapiens
ttttgacattaaccattataccaaggttcaacaagcttatcgacttcttggaaaaacacagccctggttgttgctatgaaacagctatgacaagacattt

SEQ ID NO: 410938 - DNA, 96 bp, Homo sapiens
gtggatgatgccaaagttttattaggtcacaatccaaggtccggctcctccgcgtcccagggccggacggagggatgaggcagggggggcccgggc

SEQ ID NO: 410939 - DNA, 100 bp, Homo sapiens
aggtcaatgggaccagtgaagacattaaatctgaaggtggaggatgcgctatcttatcttgaccaggtgaagctgcagtttggtagtcagcctcaggtct

SEQ ID NO: 410940 - DNA, 75 bp, Homo sapiens
gcagaagttagcgcttctctctcgccgcctgtcttggttagatggctctggattaggattctcactggaataccc

SEQ ID NO: 410941 - DNA, 75 bp, Homo sapiens
cttgctcaacaagggcctgccgcttgggacccagacatggagctgcgggaagaagcctggtctccggggccgctg

SEQ ID NO: 410942 - DNA, 99 bp, Homo sapiens
gaaagcaagaaagaaacaaaagttcacctctgcgaagcaattcacagaagctgtgagtccttcagtgctacccccttcagctttgccactggacctgct

SEQ ID NO: 410943 - DNA, 75 bp, Homo sapiens
ccggctccctatctgggaaacaaagttcctatatgatagtggactcttcagatcacgaccctggagaaaaagcca

SEQ ID NO: 410944 - DNA, 100 bp, Homo sapiens
tctgcagagagctgggctttgggagtgccaaagaggcagtcactggctcccgactggggcaagggtcacggcgctgtgggaggacagcagcaacgggcag

SEQ ID NO: 410945 - DNA, 101 bp, Homo sapiens
cgcctctccgtgtggatctggcagtcggtcatccacctgctgcagatggggcaggtgtggaggaaagtcgtggaaggcgctgacgctgtcccagaagaggc

SEQ ID NO: 410946 - DNA, 100 bp, Homo sapiens
ggcaaggagctaaagcagcgtgcgttcagccctgggtgccggtggtggtgtgcacattgagccccggtatagacagttcccccagctgaccagatcccag

SEQ ID NO: 410947 - DNA, 98 bp, Homo sapiens
gaagcttcatggctgggcaccaggccctgactaccaggtattctctactgccgctgatggtcaaacgcaagtggaaattaaagtgtgtcagggtgaaa

SEQ ID NO: 410948 - DNA, 98 bp, Homo sapiens
accacttgcttaagtcctccaggagggcgatggaggagccggcattccaaccaggctcacggatgccaaggcatcaccaacatgagcttccccttgtc

SEQ ID NO: 410949 - DNA, 83 bp, Homo sapiens
agccatttcggtgtagaagtggcagcacggcaggtcggcactgggaatctgaagaggtgtctgtggccagagtaaagccagag

SEQ ID NO: 410950 - DNA, 88 bp, Homo sapiens
tcaatatctgtcttcggtggactccttcggcagtccacccaccgccgccgcctcccagattcttcgctgctgctgccttaccgccgag

SEQ ID NO: 410951 - DNA, 75 bp, Homo sapiens
tgaagcgcttgcagacgcactgctacaaggtccatgaccatggacacatactggattcaaagagatatgccgtta

SEQ ID NO: 410952 - DNA, 108 bp, Homo sapiens
caccaaacattcacactgatgccaggtgggccaagaaaaagggaatgtcctgcctctgaggcacgggatgacatcctgaatggctctcaccctgtctccttcgagaaa

SEQ ID NO: 410953 - DNA, 100 bp, Homo sapiens
ccaagccaccccccacaatagggtatcatttttacgggccttctggagatgcttccgaactgtgggcaaaaatggcgcttagaccatgctcagcctccaa

SEQ ID NO: 410954 - DNA, 84 bp, Homo sapiens
tccttacccgacctcagatgctcccttctgctcctggaaaaatgccagctgtgggacaaggagtgcaggccgcacaacctcggc

SEQ ID NO: 410955 - DNA, 99 bp, Homo sapiens
gatacaaccatcaatgagatcgaagacactttccggaaaatgcaacatggcagcagcaatggaaacagaacagctgggtgttgagatatttgaaactgc

SEQ ID NO: 410956 - DNA, 100 bp, Homo sapiens
gcaagtatggactggagacccacatggagacccattcagataacccactaaggttccagcaacagatagaaatgctttaagttcactctggggaaagctg

SEQ ID NO: 410957 - DNA, 83 bp, Homo sapiens
ctatcattatgaattggatatcaagccagagaagtgcccgaggagagttaacaggtatgccattttgaagactgagacgttgg

SEQ ID NO: 410958 - DNA, 108 bp, Homo sapiens
ctcaatatctgtcttcggtggactccttcggcagtccacccaccgccgccgcctcccaggccgccatggcatcagatgaaggcaaactttttgttggagggctgagtt

SEQ ID NO: 410959 - DNA, 88 bp, Homo sapiens
ggcccagctcaagaacggcagccttgactccccagggaagcaggtcaaggctgagctggcccggaagaagcgcgaggagcggcggcgg

SEQ ID NO: 410960 - DNA, 100 bp, Homo sapiens
cagctggtgactccgtgtatacttacttcagtgctgttgctggacagatgatgtctttctacctaaagatattgacctagacagtgtggatatggatgag

SEQ ID NO: 410961 - DNA, 98 bp, Homo sapiens
ttccgtctgtgtgttcgagtggacaaaatggcgaagatcgccaagactcacgaaggtggcagaactggtgaagccattgtagatgctgcgctgagtgc

SEQ ID NO: 410962 - DNA, 75 bp, Homo sapiens
actcgcctcagctgagcctgggaatgaaatggcttgggccataagaactgtttgttcgaccttttgaggaactgt

SEQ ID NO: 410963 - DNA, 50 bp, Homo sapiens
ccgagctcccgtctgccttgcaggttaccccacagcctatccagcagctg

SEQ ID NO: 410964 - DNA, 100 bp, Homo sapiens
aaactcctggcctcaagtgatcctctcgtctcagcctctcaaactgctgggattacagccgagcctcttgaagccattcttacagatgatgaaccagacc

SEQ ID NO: 410965 - DNA, 100 bp, Homo sapiens
ctcctgggatcggcccaaggccagttctccgcagtttcaccagtgatcattaaagaatgggcagcttacaaaggaaagtctcctcaaaccccggaactgg

SEQ ID NO: 410966 - DNA, 74 bp, Homo sapiens
aggaggacgccgcgctcttcaaggctgcctgctgtttcccggggagatcatgaaacgaggtcgccttcccagca

SEQ ID NO: 410967 - DNA, 75 bp, Homo sapiens
ggacatcagcgccatccccgagcagcggtggaagctgcgtccgtctccaagagagtatgaagagagtgcgtctgt

SEQ ID NO: 410968 - DNA, 106 bp, Homo sapiens
ggcggatctggaggagcagttgtctgatgaagagaaggctaggcagctggaagagaaagaccgagtgctaaagaagcaggatgcattctacaaagaacagctggct

SEQ ID NO: 410969 - DNA, 100 bp, Homo sapiens
ggggctgaaatccatcttcatcctaccgctccgcccctttgggacatccggaagaaagcagccatccagacatttcagaacacgtaccaggtgttagctg

SEQ ID NO: 410970 - DNA, 100 bp, Homo sapiens
gcctggatcagccacaaatgtacccccagtacacttactactatcctcattatctccaaaccaaggtaagaatgattgatgttggctgatattggagtgc

SEQ ID NO: 410971 - DNA, 100 bp, Homo sapiens
ggacgctccgtggatgaggctctgcggctggtccaggccttccagtacacagacgagcatggggaagactgcaagtttaactgtcacaaacgctgcgcca

SEQ ID NO: 410972 - DNA, 83 bp, Homo sapiens
agtgcaaagagaaaaggggcattatcccgctggatgcacactgctgcgtggagatgagagtccggagtgttgtcatgtgaagc

SEQ ID NO: 410973 - DNA, 131 bp, Homo sapiens
ctgttatggatgatttcgcagcttttgtagagaagtgctgcaaggctgacgataaggagacctgctttgccgaggagtacactaagaagctcaacacccagtgaggcgcccgccgccgccccccttcccgg

SEQ ID NO: 410974 - DNA, 75 bp, Homo sapiens
taatgagcatgttgacagcatcgatgctagacagacatgcacgatctgattttctggagagatgtgaagaagact

SEQ ID NO: 410975 - DNA, 90 bp, Homo sapiens
attgactgcagccctcataaaactgtcaagaagactggaatggatgtatatggctacctactggcacgagaagggcggctagaggatgtt

SEQ ID NO: 410976 - DNA, 51 bp, Homo sapiens
gctgcggcgcggggaccgctgtgctctcgacggcaactctgtaccctggtg

SEQ ID NO: 410977 - DNA, 74 bp, Homo sapiens
tgaagcaagcacgaaaaatgctaacaacagcttcacgtgaagagtgaatctaccaagaacgttggcaatgaaaa

SEQ ID NO: 410978 - DNA, 98 bp, Homo sapiens
tgatacctctcagcatttgagggccttttctcttcctgcttcatctctaaaggtccttctaggagagaggtgaaagatgagaactggactgatgacca

SEQ ID NO: 410979 - DNA, 75 bp, Homo sapiens
aaggattccaagtaactcttatttgtggattaccgtttattccatatctggataatttgccgaacttcaatagat

SEQ ID NO: 410980 - DNA, 82 bp, Homo sapiens
gggaggcacggagggtggcgaggcaggtttctgagtcccttcaacatgatcctgggaggaatcgtggtggtgctggtgttca

SEQ ID NO: 410981 - DNA, 51 bp, Homo sapiens
ctatagacgttaatatgagaagtggcacaagaatggctcaactctccaaat

SEQ ID NO: 410982 - DNA, 51 bp, Homo sapiens
tcgcagttggaagcccatggggcaggtggggaacgccaagcacaacgtgca

SEQ ID NO: 410983 - DNA, 100 bp, Homo sapiens
gcaattacaagaaaattgggatttcctgatgtcattatgccaggtcatatgcaaacacagagctctccttttgctcggggaaatgtatttggtgagcctc

SEQ ID NO: 410984 - DNA, 110 bp, Homo sapiens
cttcactcgagagatgaggacactgaaattcagagaggggaagtgatttgcctcagcttgtactgttattcacatcgaactcctttgatgtgatcagtgatgatgctttt

SEQ ID NO: 410985 - DNA, 100 bp, Homo sapiens
aacgagaagacccgcaaggttaccacagtgaagaaattcttcagtgcatcttccagggtcggatcaaagaaggttggagaaggaggagcagatacacagt

SEQ ID NO: 410986 - DNA, 83 bp, Homo sapiens
ggcctcctctccgccctagcgctgaggcaaacctgcccttgctgcagcgggagctcctgcactgtgcacgcctggccaagcag

SEQ ID NO: 410987 - DNA, 100 bp, Homo sapiens
cagccttggtgctcaggtgccagatgcaaagagacgaccaccggataattctttttatgtgcgaacatgtaacaagaatccaaagaaaacaaaatggtgg

SEQ ID NO: 410988 - DNA, 75 bp, Homo sapiens
ggggctccagggccgccccgcccgcaggtgctatgctgtgggccccgctcagtgatcaccagcagcttgcaaaac

SEQ ID NO: 410989 - DNA, 101 bp, Homo sapiens
gtcgcccgaatgcaggaagaccgtgatgggagctgcagcacagtcgggggtgtaggttatggggattcccaaatgctggaaaatcctctttgctaagttgt

SEQ ID NO: 410990 - DNA, 51 bp, Homo sapiens
aaggtgaacccggaaaaccaggacccagagccaagaagacgctggagggag

SEQ ID NO: 410991 - DNA, 90 bp, Homo sapiens
gtgtgaccaagaaccatgcctggtggatccagacatgatcaaagccatcaaccagggcaactatgggggccagctggagatcagcagcct

SEQ ID NO: 410992 - DNA, 51 bp, Homo sapiens
aggcctccccagccacgtggaactactctccagaaagagcaacagtaatgg

SEQ ID NO: 410993 - DNA, 98 bp, Homo sapiens
taactgcaaagatgctgtccgtgcgcgttgctgcggccgtggtccgcgcccttcctcggcgggccggactgagagctgtctagaactcgagaatcatg

SEQ ID NO: 410994 - DNA, 100 bp, Homo sapiens
gtacccgggacccgcccgcccgcgggaggactacaaagctgatgaagacccagcattattccagtcagtcaagaccaagagaggccctttgggacccaac

SEQ ID NO: 410995 - DNA, 49 bp, Homo sapiens
gcagctgctggcctctgggccgcttttgcgagaattgaagcaccctaat

SEQ ID NO: 410996 - DNA, 50 bp, Homo sapiens
atttaaacaggttcattttggaaaagggtatgcagaagttggctagtcaa

SEQ ID NO: 410997 - DNA, 80 bp, Homo sapiens
ggtgtcatccagccttagcaaaccagagaacattcagaagattctcggccttgccccttcacgagccgccaccaagcagg

SEQ ID NO: 410998 - DNA, 51 bp, Homo sapiens
aaggaaatcccagagagagacagcaggtggataggcatgtagacctgctag

SEQ ID NO: 410999 - DNA, 73 bp, Homo sapiens
ctgcagtccctcgtccagccacccccaggaatgtgatgagcagccaggaagttgtagatttcattcaatcaaa

SEQ ID NO: 411000 - DNA, 100 bp, Homo sapiens
ggccttccagaggaggacgaggacctggggcagatcttcaccatccgcaggtgcccctccacggacccaggttcaagaacatgaagactcgggtgactca

SEQ ID NO: 411001 - DNA, 75 bp, Homo sapiens
cagcagcagagatgataacatgtttcaggttcgagaacttgtcttggacaattgcaaatcaaatgatggaaaaat

SEQ ID NO: 411002 - DNA, 51 bp, Homo sapiens
accggctcacggaaaatgtctataaggtgttaagccccacctacaagcaga

SEQ ID NO: 411003 - DNA, 75 bp, Homo sapiens
cgtcagaatcaccatggccagctatccttaccggcagattgtaaaccatggctgtgtggatacaagctcagcagc

SEQ ID NO: 411004 - DNA, 100 bp, Homo sapiens
gacagagcgcctgcgaccccagtcggtgctccggggaggtcacctgacgaggaggccggaaggtggtggtcgtacgctgtgaaggcatcaacatttctgg

SEQ ID NO: 411005 - DNA, 100 bp, Homo sapiens
ctgtgtgctgcagaacccccagaccatcatgggtgagcccctccagactccgaataggagatcaagagtttgattcattgcctgctttactggaattcta

SEQ ID NO: 411006 - DNA, 98 bp, Homo sapiens
agggtgtgtgctgaatgactcaaggattttttggaacccttaggagaaatcttgagagtggacagcaattgtgaagatcgccagagagttctgtgttt

SEQ ID NO: 411007 - DNA, 100 bp, Homo sapiens
attaaaaaactggagaatgacaccatttctaagcaacttacattagaacagagagtgaatctgtccttcgattttccattttatggccacttcctacgtg

SEQ ID NO: 411008 - DNA, 115 bp, Homo sapiens
caactattcaacatggaggcggaggtcgataagctggaactgatggactttgcctcccgggccaaactggcagttcaaaaactagtacagaaagttggattttttggaattttgg

SEQ ID NO: 411009 - DNA, 100 bp, Homo sapiens
ccgccaacgcggtcatctcgcagaacgccatcaaccagctctttacaacaaatacccagatgctgtggccacatggctaaaccctgacccatctcagaag

SEQ ID NO: 411010 - DNA, 75 bp, Homo sapiens
gaaaaaggaaaactatttctgagcataagaagttgtagggtatctagaagagcagaagacagagaatggaaaaga

SEQ ID NO: 411011 - DNA, 100 bp, Homo sapiens
ccaactcgtctaaatgttattaggaatgacaatgacagttgggactacactaaaccatatttgggaagacgaggacgtggtgggtcctctggtgcgaaat

SEQ ID NO: 411012 - DNA, 97 bp, Homo sapiens
gtcttcctgcccaacaaacagaggacagtgggatccagcaccggctcctcctccggcaaccacggtgggagcggcggaggaaatggacataaacccg

SEQ ID NO: 411013 - DNA, 80 bp, Homo sapiens
aacaaagtcctcaatgccttgaaaccagaaaaagatgtggatggttggaagcaagaattggataagacttctcaggcgtc

SEQ ID NO: 411014 - DNA, 75 bp, Homo sapiens
ctttggtcctggtgataactatgacagctgtcaaagatgccacagatgactattataaggatgcatttatgaaag

SEQ ID NO: 411015 - DNA, 101 bp, Homo sapiens
cctcggagcaggcagagcagccgagccaggcatcagaacacaccatgatggctgtgacctaagaccctcaggaagccccggggtcatggcccagaagcacc

SEQ ID NO: 411016 - DNA, 100 bp, Homo sapiens
acttagacttccggaaggactttggcgaggtactaaggctcgtacgtctgcatcgattatcttacgtggggcaaatgatttcatgtgtgatgagatggag

SEQ ID NO: 411017 - DNA, 75 bp, Homo sapiens
gagggaagagaaagtctttatttacagcttcatggagacctggtcagggtactagatggaaacttgagaaaggac

SEQ ID NO: 411018 - DNA, 102 bp, Homo sapiens
gtcgacggtccccactttcccctgagcctcagcacctgcttgtttggaagaaagttcaggagccctggaaaggagaaggaataagacggcaggaggaagaga

SEQ ID NO: 411019 - DNA, 100 bp, Homo sapiens
cttttgggcaaggatcagacacaaaggttagaggctggacgtaaagaaagaagtgatgcactcaattctgcaatagataaaatgaccaagaagaccaggg

SEQ ID NO: 411020 - DNA, 76 bp, Homo sapiens
agtggctatcatactggctattatatggctgacttatccttgtataatgaattccgattgtggaaggatgagccca

SEQ ID NO: 411021 - DNA, 100 bp, Homo sapiens
ctgatgcaagcgaagaaccttttccctaatacgtacctcattgtgggaggttcttctgtgtggcagttcagaatgatggatcaagctagatcagcattct

SEQ ID NO: 411022 - DNA, 99 bp, Homo sapiens
ccagacgctaccacactctgggacagtgggagatttggaacagctttgagaagagcaaggagagcgacttgcagttgtggaggtacagtgtgaacggct

SEQ ID NO: 411023 - DNA, 100 bp, Homo sapiens
atttggtaccaggattactgacaatcatgactactgggaaagggtgttttgaatgctgtatcaaatgcctggggggcattccctatgcctctctgattgc

SEQ ID NO: 411024 - DNA, 99 bp, Homo sapiens
aattctaatctttcacagacacaggtcgtgatgtctcgggagtcggatgttgaggctcagcagtctcatggcagcagtgcctgttcacagccccatggc

SEQ ID NO: 411025 - DNA, 73 bp, Homo sapiens
ctggagtactcttattttgaaaaggagaaatacgaatgtgctttaaagcgagcaagtattaaaattgtgactc

SEQ ID NO: 411026 - DNA, 96 bp, Homo sapiens
ctgtgtttccgacctcatctccaggacagtgggaagagtggctggaggaattcagtttcttgggggtggttgatttgctgagatatttttcctggg

SEQ ID NO: 411027 - DNA, 83 bp, Homo sapiens
cttcggccgcatccccatgcgcttctcggtgctggatttttagactctgaggagcagttggagctaatccacattatggaaat

SEQ ID NO: 411028 - DNA, 75 bp, Homo sapiens
gaagaactcactgcagagcgagtctggaaacctcccactgtggctgcataagttgaagatcctctttgtaacttc

SEQ ID NO: 411029 - DNA, 100 bp, Homo sapiens
gcagtgggcaggaagaacccatcgggcagctacacatcttgaaagagaagctcttcctgtgaggaaggcagcaacaactcatctccagtggattttgtaa

SEQ ID NO: 411030 - DNA, 75 bp, Homo sapiens
caaaccctgagagctttattaccagacatgatctttcaggggtgagcccctccagactccgaataggagatcaag

SEQ ID NO: 411031 - DNA, 90 bp, Homo sapiens
ggggagacgctgctgttttctaactgggccatcactgcagacatcctcatggcatccccaatggattggacaattgccctaaagtcccca

SEQ ID NO: 411032 - DNA, 75 bp, Homo sapiens
ctttggaaatgtgtgcttcctggtgctgtgattgtctccacgccccaggacatcgcattgatggatgcacacaag

SEQ ID NO: 411033 - DNA, 100 bp, Homo sapiens
gtcaagacaacgacacatagctgggtgtcaggctgagggttagtgagcagctctggttgaagaagtgtattttgcgcagaaggaacgtgatgaagctgtt

SEQ ID NO: 411034 - DNA, 100 bp, Homo sapiens
gtgctcgcgctactctctctttctggcctggaggctatccagcgatcttagtaagagccctaagaccatgaaaaagctgctgcccaagcgcaaacctgaa

SEQ ID NO: 411035 - DNA, 75 bp, Homo sapiens
ccgctgaagaggaatcaattttgggagagcttatggatggagaccaaacatccagatctggagtgccggcacagg

SEQ ID NO: 411036 - DNA, 50 bp, Homo sapiens
gaggagatcgcttgagacgaacgccgtggtccttcagcatatctctgtgc

SEQ ID NO: 411037 - DNA, 90 bp, Homo sapiens
gggacaacagtgacgaagagaactgtctcctggtgaccgagcacccgcctccgggcatcttcaactaaaacaagtgttcatagtcggttg

SEQ ID NO: 411038 - DNA, 90 bp, Homo sapiens
atttcttctttgacgttgtttacatccacaatggcactgaggagaaggaggaggagatgagttggaagctcatgatggagcagtccaaga

SEQ ID NO: 411039 - DNA, 151 bp, Homo sapiens
ccaagcgggagcttggtgtccggcgtcccgggggcgcagggaaggagggcgtccgagtcaacaaccgcttcgagctggtactccaaagattcaggtttactcacgtcatccagcagagaatggaaagtcaaatttcctgaattgctatgtg

SEQ ID NO: 411040 - DNA, 51 bp, Homo sapiens
tcctacgtttacctgtccatggcatccgtgtcattctggaccttactccca

SEQ ID NO: 411041 - DNA, 75 bp, Homo sapiens
ccgggacggagatggagccgtggtccttcccaatgaggaactagaggctgctatccagccagatactagcctggt

SEQ ID NO: 411042 - DNA, 75 bp, Homo sapiens
tggaatagtgctgtcttccttgaccctgcccaacatctctgacctgtgtttgagagatgtgcccccagtccctac

SEQ ID NO: 411043 - DNA, 102 bp, Homo sapiens
cgtccagcagatggcggatgccctgcagtacctgcagaaggtctctggagacatcttcagcaggtgtcgtgaaaactacccctaaaagccaaaatgggaaag

SEQ ID NO: 411044 - DNA, 83 bp, Homo sapiens
accggctgttcgaggccttgactgtaggtggtctttgggaagaagcttcctgcctttgccaccatccccatccaccagctgca

SEQ ID NO: 411045 - DNA, 112 bp, Homo sapiens
aatgtcctgatgagctcattgagagaaccatgatggtcaattgccatgcacacttctgggcagccttaagtgccttgaaacaattttctgaacaaggactggatccaatcga

SEQ ID NO: 411046 - DNA, 96 bp, Homo sapiens
actttgggaggccgaggtgggcggatcacgaggtcagggccaaaactggaaccaaggatttaataactattatgatcaaggatatggaaattacaa

SEQ ID NO: 411047 - DNA, 96 bp, Homo sapiens
aagctgtcctggctcagatggctcggtcatcacggtattaaaggtggaagaaggtccatatctttttctgtgggtgcttcaagtgttgttggaagt

SEQ ID NO: 411048 - DNA, 82 bp, Homo sapiens
agatccagaaaagaggcaaagcaagcgagaagtcgcgggcccagcccacagcaggtccgtagttcgtggtccttcgccggtg

SEQ ID NO: 411049 - DNA, 109 bp, Homo sapiens
catttaattttagggtcctttatatagaagggagagtaggaccctgatgcttggtgtgacctgagtaaatttgacctccctgaggaaccatctgcagaggacagtatca

SEQ ID NO: 411050 - DNA, 75 bp, Homo sapiens
agttatgtggaattcagctgctcaaacaccagatgtccaacctaaacatgtgaaggaagctttccggttactgaa

SEQ ID NO: 411051 - DNA, 75 bp, Homo sapiens
gtagctgtgccagttcatgtggccaaaattctaacttttcctgagaaggagccagcaccgctctttgaccttgcc

SEQ ID NO: 411052 - DNA, 74 bp, Homo sapiens
gtgggcaaactaagccgattttccggaaaaagatttccagaagctgttctgtcaataacaaagtctcaaagaaa

SEQ ID NO: 411053 - DNA, 74 bp, Homo sapiens
ctgagaaggcggactccagacagcgaccccagatgaaggtacagacagtgtttgtgtgttcctgttgtggctaa

SEQ ID NO: 411054 - DNA, 75 bp, Homo sapiens
caatgacttacgccaagaagaagccataagtgtgatccttggtgacaggtggaagaaaatgaagaatgaagagag

SEQ ID NO: 411055 - DNA, 100 bp, Homo sapiens
cttccgccaggcggtgatgaagaatccccccgaaaggaccccccaggatgcatcatctgcagacatcagaaaagcatatcgtaagctttcactaacttta

SEQ ID NO: 411056 - DNA, 50 bp, Homo sapiens
aaggagagcctactgagcagcctgagtggacaaatttacatgtattggag

SEQ ID NO: 411057 - DNA, 100 bp, Homo sapiens
ccgtttgtgttttgtgatggaatatgttaatgggggcgaggtggagccgccaccaaaatgcagattttcgtgaaaacccttacggggaagaccatcaccc

SEQ ID NO: 411058 - DNA, 83 bp, Homo sapiens
gtgcgcccggcgccgttctacacaggaacacagcgcttttcaagcttcctgcctgacacagctcacttcaagaagtgcacaat

SEQ ID NO: 411059 - DNA, 100 bp, Homo sapiens
ggggacccagaccctggagcctcagttggaagcagccgatccagcctgcggagcctgtggggcaggatgttcacggaagaccagggtgtagatgacaggc

SEQ ID NO: 411060 - DNA, 83 bp, Homo sapiens
ctgctccagctgttcgaaggtgatccaggcttgaacatgacaagcagatttgggagtccaaggcccagacagaggtccagctt

SEQ ID NO: 411061 - DNA, 75 bp, Homo sapiens
aggagcttaagtggcttttgatgcatttccaagtagaataagctgcattaatactacattgtcaaagacaaagac

SEQ ID NO: 411062 - DNA, 100 bp, Homo sapiens
atgccccatactgtactccagagcagtacaaggagtgtgcagatcctgctctggagacgagttgtactgctgtcacaggaaatggacgctggattacaag

SEQ ID NO: 411063 - DNA, 134 bp, Homo sapiens
attggaggccgtgggcacgctctttactccatgtgtgggacattcattgcggaataacatcggaggagaaggagattacctggggcaattgatgttatcggtcagactataactatcagccgagtagaaggcag

SEQ ID NO: 411064 - DNA, 83 bp, Homo sapiens
caacgggcagtttgtcgaacgatgttggactcatagtcactgccagaaagccttgccaacattccactaacccccgagactca

SEQ ID NO: 411065 - DNA, 97 bp, Homo sapiens
acgtgcgggaagagaagatcatcgagcatttcaaacggagtggaaatgaagaagatcactgacacccacacgccgtctggcctcaccgtgaacctga

SEQ ID NO: 411066 - DNA, 75 bp, Homo sapiens
aaaataaactgcttgaacatcctttgactggttagccagttgacacaccacccctgccttatcatgccacagaag

SEQ ID NO: 411067 - DNA, 90 bp, Homo sapiens
tgtatgaacgggttttgttagccctacatgatcgagccatcaagttctctggagaccttcttcgactccctggtgacacaagcaaacatc

SEQ ID NO: 411068 - DNA, 98 bp, Homo sapiens
acaaagtcaagagacagcgattggacagaatttgtgaagcacaacagacgtgcacacggtggcctccctgctgaagctgtacctgcgggagctccccg

SEQ ID NO: 411069 - DNA, 97 bp, Homo sapiens
gaagtgcagaggtttttttctgcagctgctggagtgtaataagtgccgaaacagctatcaccctgagtgcctgggaccaaactaccccaccaaaccc

SEQ ID NO: 411070 - DNA, 82 bp, Homo sapiens
ggtgtctgagcatttcctcctgacggctgtacttgagcagtcacctggcacagattcaggcttcttcaggagaaagcaagta

SEQ ID NO: 411071 - DNA, 75 bp, Homo sapiens
gggacaacaaaagcctcctacaagagtcctaccaaaagtacatcaggaacgtctctatcaagaatacaatttcag

SEQ ID NO: 411072 - DNA, 100 bp, Homo sapiens
ctgagaccatggatatatcggttaatggatctgggccctgcacatataccatctctggctccagggaatgtgagccaagccctataccaagtcctgtttt

SEQ ID NO: 411073 - DNA, 100 bp, Homo sapiens
tgtggattggtggagtttgggagcattaatgtatgacatgctgactggagcactgcaagctttcttcctggtggcagatgacatcatggattcatccctt

SEQ ID NO: 411074 - DNA, 100 bp, Homo sapiens
cttatcagaagctcatcctacagttaattcatggggctcgaatggttcgtgaactctttgaaatggccagaacaaaaaaagcctgccttatcttctttga

SEQ ID NO: 411075 - DNA, 48 bp, Homo sapiens
gtcctcatcgggcttatgttcgaggcagtatttggcagtcgtattcag

SEQ ID NO: 411076 - DNA, 74 bp, Homo sapiens
tggtgtctcacctttaactctccttatgctgggtgaaaacaaagaaactgaaggctcagaagaggatgataaag

SEQ ID NO: 411077 - DNA, 82 bp, Homo sapiens
cccccggccctgtggaggaactcctgccagggccatccaggtgaccgtgtccaacccctaccacgtggtgatcctcttccag

SEQ ID NO: 411078 - DNA, 100 bp, Homo sapiens
taccacgtcagagacagcacctcaacctggttcagcagttcagggagctcacatttctcatattgctcaacaggggacatcacccagaagggctatgaaa

SEQ ID NO: 411079 - DNA, 76 bp, Homo sapiens
gtgctgtctccgcttttctttcaccttcacagagaaacttgaactggatcgatttatgctgtatgctcacgggcct

SEQ ID NO: 411080 - DNA, 75 bp, Homo sapiens
gcccgctggccgggctggctgcggccgccctgggccgggccccaccggacgcttcggaaccaaaaagaagcttcc

SEQ ID NO: 411081 - DNA, 75 bp, Homo sapiens
gctcaatagcaagaatgtgtgcccttaatgaacctttggattatgagactcgcccagcgcaaagcctcatcattg

SEQ ID NO: 411082 - DNA, 83 bp, Homo sapiens
ctgatgacacagccctcagcgagagtgccaaccaggccttcctggtaaggctggcctctctgcagtcagaggtctgagctctg

SEQ ID NO: 411083 - DNA, 82 bp, Homo sapiens
cccagcaagaggagcagtccagcggcatgaccattttcttcagcctccttgtcctagggaaggagagctgcttcgagaggat

SEQ ID NO: 411084 - DNA, 115 bp, Homo sapiens
tcctgaaccagctcgtcctggagcacctgcagctggcgcctctgcagtgggggaaatcgtggaacacatggtccagcactttaaaacacagatctttggggatcggaagcccgtg

SEQ ID NO: 411085 - DNA, 100 bp, Homo sapiens
agctgaggctgaggagaggggagcttggggggcgcctgctgccaagggatgatcttgaagaccttatagttaattgggatgagagcaaaagcattggtga

SEQ ID NO: 411086 - DNA, 75 bp, Homo sapiens
gtcatcacgggagaatctcgactcgcattactctactgactggcagagacaggagaggtagatgtccacgcccac

SEQ ID NO: 411087 - DNA, 100 bp, Homo sapiens
agagaatgtgttggtgctcaccaagtctgtggtctcaaccccggtagacctggaggtgaagctgcggatcgcccaagggggccgaaggccagagaccagg

SEQ ID NO: 411088 - DNA, 131 bp, Homo sapiens
aagagtcggacaagtaagtggatcacacgcgccggctgctgctactactaccactttgggctgatggcaactgctgatatgcattcaagatggttacctttccctgctgacagaaactggtgaagttcgtg

SEQ ID NO: 411089 - DNA, 100 bp, Homo sapiens
aataggttcgccgaagagagagcctctcattttgaaaagacatgtttttcttcaagcaacaaaggtggtagaggaaattcctcaactttctcaacgagtc

SEQ ID NO: 411090 - DNA, 98 bp, Homo sapiens
tgctggcttccttgcttctcaacttacagatgggacttcacctatagatcatgtgctggagaatctggtaaaagcaccattgtgaagcagatgaggat

SEQ ID NO: 411091 - DNA, 75 bp, Homo sapiens
ctgcgcgagctgcgggcgcgcgagttcagccgcctggcaggttcgagaacttgtcttggacaattgcaaatcaaa

SEQ ID NO: 411092 - DNA, 82 bp, Homo sapiens
cggagttccgcgtccgaggtgtgaagtaagactttgaccccgacgcaggcttcagtgattgccgcggatcagaagcctgagc

SEQ ID NO: 411093 - DNA, 51 bp, Homo sapiens
cccagacaagatggacaccgcggaggaagggaaacccccatcagcacctcc

SEQ ID NO: 411094 - DNA, 50 bp, Homo sapiens
gactgctggaaggagcacgaggaagcagaaaaggggaagatagtgatgta

SEQ ID NO: 411095 - DNA, 101 bp, Homo sapiens
gaacagtttgtgtttgaagccttggtgatatacatggagagtctggccttagcacatgcagatgagaagtccttagtttttgagacagtgtccttgagttc

SEQ ID NO: 411096 - DNA, 75 bp, Homo sapiens
aggattgcacggaggagctctttgacttcttgcatgcgagggaccattgcgcaaaatttggtttctctaatatta

SEQ ID NO: 411097 - DNA, 88 bp, Homo sapiens
cacttttgcaagggcgaggtcagccccaaactaccgatttgggtctcgctgtgctagaatattccgtctagttttgcagaagaaacac

SEQ ID NO: 411098 - DNA, 83 bp, Homo sapiens
agcagagcggagggagccccagacacgattcaattagcagagcctcacagacaatggccaaatgtgtcaaagctgtcacagag

SEQ ID NO: 411099 - DNA, 98 bp, Homo sapiens
cggatattcaactcctttgtttacactgagaaaatctcaaatggagaaagtgaagtacagcagtttgtgaagaaatatgggaacctttttagcttgga

SEQ ID NO: 411100 - DNA, 74 bp, Homo sapiens
gatgaacaaaactgcaccttggaaattgagagctcatttgacattgtgcagcaaagaaatggttatggagaagc

SEQ ID NO: 411101 - DNA, 76 bp, Homo sapiens
ctgtcattgccatccagtccagaaccagaagatggtgataaagtatataagactctcctttccaattcctcggaaa

SEQ ID NO: 411102 - DNA, 90 bp, Homo sapiens
ggacaggaagggggctaagaagagccagggcctgtggagtgactactcagactctgtgggtgtggttggaagtccagagatagttgtgct

SEQ ID NO: 411103 - DNA, 83 bp, Homo sapiens
ctgggggacgcgggcgcgtcaggtgaagactgggggccgcaggcgcgctagacaatgcagatcttcgtgaagactctgactgg

SEQ ID NO: 411104 - DNA, 74 bp, Homo sapiens
gtgaaagccatccagattgatacctggctacaggtcacagaagatgtgaattcaagtatcaagacatttttttg

SEQ ID NO: 411105 - DNA, 83 bp, Homo sapiens
ccgcgccgcgcctcagctctgcaaattgtggctactaatttgccccctgaagatcaagatggctctggggatgactctgacaa

SEQ ID NO: 411106 - DNA, 101 bp, Homo sapiens
atttaaacaagagatttccacagaaggacacagagtctgggatctaataattcagtcattttggatggactaaaaagaagacagaattttctgcaaaatgt

SEQ ID NO: 411107 - DNA, 100 bp, Homo sapiens
ccgcggggcggaggcactcgcgcgggggagagaagaagaaggaggttcctgctgtgccagaaacccttaagaaaaagcgaaggaatttcgcagagctgaa

SEQ ID NO: 411108 - DNA, 90 bp, Homo sapiens
cggttggtagagggtttgagtccgcatcgccacagctgaaggctgcgagggactaagagcagatttttcagtactaccagctctccaata

SEQ ID NO: 411109 - DNA, 74 bp, Homo sapiens
agaaaaaggatcaagtgactgctcaggaaattttccaagacaatctcagcaggagaagattgacagcattgcag

SEQ ID NO: 411110 - DNA, 100 bp, Homo sapiens
caagaagtgttcggagagatggaagcgcttttcctgtattatcgggccaaatggcagtggcaaatccaatgttattgattctatgctttttgtgtttggc

SEQ ID NO: 411111 - DNA, 83 bp, Homo sapiens
aagaaggcaacgacgttccatctgtggaaggacctaccaaccaggtcatgcaagacaagataatctgccttccgaaaagagtg

SEQ ID NO: 411112 - DNA, 100 bp, Homo sapiens
atgaagttataaggttccccatggatctgactgcagccatgagcagcaatgagtgcttcaagtgtggacgatctggccactgggcccgggaatgtcctac

SEQ ID NO: 411113 - DNA, 82 bp, Homo sapiens
ttggactgagtcctgcaggacacagcttcctggacaagatcgacgtgatcaagcaggctgactatgtgccgagcgatcaggt

SEQ ID NO: 411114 - DNA, 82 bp, Homo sapiens
ggaatcctctccatctggttcgaagtctcagcggtattctggtgcttatggtgcctcagatgttaagacatcccacctgaaa

SEQ ID NO: 411115 - DNA, 75 bp, Homo sapiens
ggccagcctgacctccccaaggagatggcctctctgtacgcaaacatgcagatctttgtgaagaccctcactggc

SEQ ID NO: 411116 - DNA, 75 bp, Homo sapiens
tcagcactgactttcagctatggaatcgtgacctgaccaacggtgcagatgggatgctggccacaagctccaatg

SEQ ID NO: 411117 - DNA, 139 bp, Homo sapiens
acaagcggtgccatgaatttgtcacattctcctgccctggcgctgacaagggtccagcctccgatgtgattcgcaaggggtggctcaccatcagcaacattggcatcatgaaaggcggctcgaagggatactggttcgt

SEQ ID NO: 411118 - DNA, 100 bp, Homo sapiens
agctggtcatgcaacaacagcaccagcagttcctggagaagcagaagcagcagcagctacagctgggcaagatcctggtgtggcacacacggacagagaa

SEQ ID NO: 411119 - DNA, 83 bp, Homo sapiens
cgcgcactcgcctcagctgagcctggttctgttcagccagacaagatggaacattgtgtctgcaggaacctggagtattccca

SEQ ID NO: 411120 - DNA, 90 bp, Homo sapiens
ctgacaccttcaatccttaaactggccattgaagggttgcaggtaagattggggaagatgccaggtgatagaatccaccctgcctctgac

SEQ ID NO: 411121 - DNA, 100 bp, Homo sapiens
gcatcctgagtagctaagactatagctattcaggattatgaaactgctcaggaacacaatgaaaatgatcagcagattcgagaaggtctagagaaagcac

SEQ ID NO: 411122 - DNA, 96 bp, Homo sapiens
ggacctttacctgtggaggcaacactggccaagaagaggaaagcccttgaaggtagtggacccagatcatcccctcgcagcacttgttcgtaaggc

SEQ ID NO: 411123 - DNA, 83 bp, Homo sapiens
ctgagcgagctgtcagagcccggggacggcgaggccctcatgtaccacacggaggaattttgttgtcagagaataaaaggagg

SEQ ID NO: 411124 - DNA, 83 bp, Homo sapiens
gtcggaaccgacagcctcctccgagaaggacaatgcagatcttcgtgaagactctgactggtaagaccatcaccctcgaggtt

SEQ ID NO: 411125 - DNA, 97 bp, Homo sapiens
cacagccagggtacctgctgacaagcctgtacgcatcgcctttagcctcaatgacgcctcagttatatcaacatgccccctttcctgttgctggaag

SEQ ID NO: 411126 - DNA, 105 bp, Homo sapiens
gcgatatttctaggggtgtacttgttggggtcaggccctgaccctctattctgcaccctgtgagccaccgagactgaaccaaacccaggaagcggcgccaccaac

SEQ ID NO: 411127 - DNA, 98 bp, Homo sapiens
ttcgttcaaggctatgccctgcaactgcaccagttacagatgaagtacaacttgccttcctggtgtgaccgagtcctctggaagtcttatcccctggt

SEQ ID NO: 411128 - DNA, 75 bp, Homo sapiens
ctgagctggcagtacctgaccactctctcccagattcacatgcatgggaacaactacaaacaaagcttgcttcag

SEQ ID NO: 411129 - DNA, 90 bp, Homo sapiens
ggaaggaggccgagccgggatctcaggtcctcgggggcggcggccacgccaaggacgggtctccaattgagaaacatggcactgtttttc

SEQ ID NO: 411130 - DNA, 83 bp, Homo sapiens
gctgccaagaaatctcccaaaatctccagagctagcaaatcacccaaactcccaagacatctttccaggaacagcgtgaggag

SEQ ID NO: 411131 - DNA, 75 bp, Homo sapiens
agcggattctccgcgaggtgtgcagagtgctgagaccggacagtcattttgtttactcattcagccctgttgcag

SEQ ID NO: 411132 - DNA, 100 bp, Homo sapiens
cgccctggatgagtgggccggctgcttcggcatcaagcagaactccccccaggtacagtgccttcgagcctacaagccccgagagaatgatgaattggca

SEQ ID NO: 411133 - DNA, 90 bp, Homo sapiens
accgaccagaactcggacggctactggcgcctgaagctggcccagtttgactacgggaggaagtgctcggaggtcgctcggctgacggag

SEQ ID NO: 411134 - DNA, 119 bp, Homo sapiens
acgggcattgtcgtgtcagcttttggactccctattgtatttgccagagcacatctggacctcggacagtgatccaccctaaagcaagaattattgcggaagccgggccaatagtgatt

SEQ ID NO: 411135 - DNA, 120 bp, Homo sapiens
gaaaatggcggacgggaaggcgggagacgagaagcctgaaaagtcgcagcgagctggagccgccggagcactattcctgatcagagaactccagttgcttcaacacacagtatcagtagt

SEQ ID NO: 411136 - DNA, 75 bp, Homo sapiens
aaattcttccctctttatgtttttcaagggacggatacaacgactagaggttcaggcccctcctgttgttgctgc

SEQ ID NO: 411137 - DNA, 75 bp, Homo sapiens
gtttgagaaaaggcctaagaattttggcattgctcatgatggagcagtccaagaagtcctccctcatggtggccc

SEQ ID NO: 411138 - DNA, 75 bp, Homo sapiens
cctacttggaggaagagctggccaaggccacctttgatgccatttctaagacctacagctacctgacccccgacc

SEQ ID NO: 411139 - DNA, 97 bp, Homo sapiens
ctcatgtctgcttatgcggtggctcgctgctcagaacagggttggattatctcaagatgcccaggatcaaatgagaaagatgctttgccaaaaagaa

SEQ ID NO: 411140 - DNA, 74 bp, Homo sapiens
gctcggccgatgaagtgcagaggtttttttctggagctccagcaccacctccagccttcagtgactgtctggag

SEQ ID NO: 411141 - DNA, 75 bp, Homo sapiens
gccaggctggccccgagcggaactggagaaagctgagggtgaaacaccattcaaagtcgtagtcaaatctctttc

SEQ ID NO: 411142 - DNA, 83 bp, Homo sapiens
caggactgcgccgcgtcttcctcaagcacttgacccctgacaagatctaccacgtcacagtgatgccctgctatgacaaaaag

SEQ ID NO: 411143 - DNA, 96 bp, Homo sapiens
aaatcagaagagagaatatagtaaaaatacgcagtacagtcccaggcctttcgggaagacttggaatgccttattcaagaacagatgaagaaaggc

SEQ ID NO: 411144 - DNA, 75 bp, Homo sapiens
tggagtcaaagcagttccttcaccgagacctggttatcaatactctggctgaccatcatcatcgtgggactgact

SEQ ID NO: 411145 - DNA, 97 bp, Homo sapiens
acgagatggtattatcaatgcgaagataaagaatgttgccttaggaggaacccggtttggggccatgctggacatgctgacggaccgctgctccacc

SEQ ID NO: 411146 - DNA, 75 bp, Homo sapiens
cagacccggcgcccagcggtagccctccttgcgcctccgattcccagaatgccgaactggggaggaggcaagaaa

SEQ ID NO: 411147 - DNA, 100 bp, Homo sapiens
aaggagctggtgcctgtgcaagttgttgagggagtgaccttcacaatggcatcataggattcagtgaggagtcccagagtggactagaactcagggaagg

SEQ ID NO: 411148 - DNA, 90 bp, Homo sapiens
ccgagtggaagctcttcatctacaacccgaccaccggagaattcctggggcgcaccgccaagagctgggaggtgtgctctgaacaagccg

SEQ ID NO: 411149 - DNA, 100 bp, Homo sapiens
gccgcgggagcctcgtggctgcgtcaccgccgcccccccagacaagatggacaccgcggaggaaggggcggatgtccacgcgagggacccccgccgtggg

SEQ ID NO: 411150 - DNA, 75 bp, Homo sapiens
accttcgagtgcatcgaggacctgtctgaagaattaaacaaccaccatgtcgagcaaaaaggcaaagaccaagac

SEQ ID NO: 411151 - DNA, 82 bp, Homo sapiens
ggagcagagagctggcgagcaaggtttacccaaggtccagcctagcccctaggcaccatgtcggacagtgatctaggtgagg

SEQ ID NO: 411152 - DNA, 101 bp, Homo sapiens
agggaatggtgcaggcaggcgctgagaaggacgcgcagtccatctctctcaggtggtcttcgagggatagcacgaggtggtctgacaggactaacacttac

SEQ ID NO: 411153 - DNA, 75 bp, Homo sapiens
gctggaaagccatatgatttacagctgccactgcagagccccgccatggaagacacgccgttggtgatatcgaag

SEQ ID NO: 411154 - DNA, 82 bp, Homo sapiens
gcgcagtccacgcaggagatccatgagaagcacttgcacctcctgcgccgccgccccccatccaaggatatgccttcaagcc

SEQ ID NO: 411155 - DNA, 100 bp, Homo sapiens
tggaatacaagatggttgccgggtcatgttaattgggaaaaaggctgaagccgacgtagcttctctgaacagacgcatccagctggttgaggaagagttg

SEQ ID NO: 411156 - DNA, 104 bp, Homo sapiens
ttggaagcaatgtttgaacaaactcgaagaacagctgtggaaagaagttgcaaaacactggcccaagaagatgaaaggattgttcttgttgacaacaaatgtaa

SEQ ID NO: 411157 - DNA, 100 bp, Homo sapiens
ggcggcgttggcggcttgtgcagcaatggccaagtcagaacttcgagcagccattgatcggtatgtgcaagagaagattgtgctagcagctcaggcaatt

SEQ ID NO: 411158 - DNA, 75 bp, Homo sapiens
cggagcccgcagaacctccacagtcaagaggacggaccaagaatcgccttcagccctgtctggtgcatccttggc

SEQ ID NO: 411159 - DNA, 149 bp, Homo sapiens
ctccgttgctgaccgccgactgtcaatggagctggaaaacatcgtggccaacacggtcttgctgaaagccagggaagatctttaatctcatgaagtacgacagctacagccgcttcttaaagtctgacttgtttttaaaacacaagcga

SEQ ID NO: 411160 - DNA, 50 bp, Homo sapiens
ccccactcctgggccgtccctgaagctggccagctcagcgtccctggaag

SEQ ID NO: 411161 - DNA, 82 bp, Homo sapiens
cggatcgcggcgggagagcgggtagcgggctcagctggccggggctcagcagccattgtttgatgtcctgtgactgagaaac

SEQ ID NO: 411162 - DNA, 100 bp, Homo sapiens
ctgaaaataaatagggaagatggagacaccctctgggggtcctctctgagtcaaatccagtgctctgccttccagggacactgctcttccccaggagaga

SEQ ID NO: 411163 - DNA, 75 bp, Homo sapiens
gccttgaaagagataaaagcggaagtttgccacacggttgatgccgccttacctttggacatcctaacctatgaa

SEQ ID NO: 411164 - DNA, 100 bp, Homo sapiens
tgtgtcatcctccacagctccagggaaggcactcaaaagtggggggcaggaaagtgttcagactgcatcacagtgcttccgatacaagcgacaaaaatcg

SEQ ID NO: 411165 - DNA, 74 bp, Homo sapiens
gcattttctggtgtggccttcaccggtgccaaggagaggagaaggcagagcccccccaggctatgaatgccctg

SEQ ID NO: 411166 - DNA, 87 bp, Homo sapiens
taaaactccagcgagatccgggccgtgaacgaaagcagtgacggaggagcttgtaccaccggatttggtgctatggagaaatttttg

SEQ ID NO: 411167 - DNA, 90 bp, Homo sapiens
gcactgctcctgctggccgcctggacggctcgggcgctggaggcaattaagttggaatatgcaaggttggttaagttggcccaagaagac

SEQ ID NO: 411168 - DNA, 78 bp, Homo sapiens
aaacatccaagaaaaatgtccttaaagcaattgagcaggctgatctactgcaggagggcaattgaaggaacagactaa

SEQ ID NO: 411169 - DNA, 75 bp, Homo sapiens
taacgtgcccatgcagctgcggatctacgagatcgaggacaggacgcgggttcttgttaaacctttgggagaccg

SEQ ID NO: 411170 - DNA, 100 bp, Homo sapiens
gggacggcgcttgcagccaggcagtgaaggacgatgagaccttcgagatctccattcccttcgatgaggcaccccacctagacccacagatcttttacag

SEQ ID NO: 411171 - DNA, 121 bp, Homo sapiens
cctgagacgtctggatacctcgttaggatcagctcgcacagaggttgtctgcaagcaggaaaaggggaagatagtgatgtactcagtataaatgcagatgcttatgacagcgacatagaag

SEQ ID NO: 411172 - DNA, 75 bp, Homo sapiens
gccctgcagtacctgcagaaggtctctggagacatcttcagcagccgcaaggaggaagccgtgcgtggactagag

SEQ ID NO: 411173 - DNA, 80 bp, Homo sapiens
aactggaggaaaaatgtcagggctcagcccagaaattgctgcagggtgaagaagctgaaggagacctttgcttttattca

SEQ ID NO: 411174 - DNA, 75 bp, Homo sapiens
cgacgctggagtggggagaagcatcatggttcaacgttccccctaaaggactcaaaacgtctaatccaatggtta

SEQ ID NO: 411175 - DNA, 102 bp, Homo sapiens
ccccggcggccgcggtaatgctggtggtctgcatcaccaccggatcaacttcgacaaatagcatggattccgtgaaggaacaacacctaaacccaagagggc

SEQ ID NO: 411176 - DNA, 90 bp, Homo sapiens
tgggaagcaaaggccatggcagtaatagcgtgtttatctgacacggacgtgctccatctcgaaaagcgagaaaggcctccagaccaccaa

SEQ ID NO: 411177 - DNA, 98 bp, Homo sapiens
tcaggaccatgatggctcagtttcccacagctatgaatgctcagaattctgcaaatgcagattttgcaaactttgatgcatttggacagtctagtggt

SEQ ID NO: 411178 - DNA, 75 bp, Homo sapiens
cttcctgctagtcctggtggatctgcagtacgaagataacactggaatgggcttctccccagaattttacttcag

SEQ ID NO: 411179 - DNA, 100 bp, Homo sapiens
gtgatggttgcacaacaatatcaatttattttataccactgaaccgtgcacttcaaaatggttaagatggtgcaagaattgtttatccgtgattatggag

SEQ ID NO: 411180 - DNA, 100 bp, Homo sapiens
ggacccggcctgggagaagcagcagagaaagccccgactatctgagatcggccaagatgactgaggtgatgatgaacacccagcccatggaggagatcgg

SEQ ID NO: 411181 - DNA, 96 bp, Homo sapiens
gagacatctaccaccagacctgggccagatactttgtgaatcatctggggacctggagaatgatgagcaggcagccagtgccatctctgagctggt

SEQ ID NO: 411182 - DNA, 75 bp, Homo sapiens
gctggcggtcccgggtgctgctgcctcccgcgacgatgcccctcaacgttagcttcaccaacaggaactatgacc

SEQ ID NO: 411183 - DNA, 82 bp, Homo sapiens
gtagctaagacttcgcgacacccttgaagctgagaaatggaaattgagaggctgactgagcgactagaagaaaaagagaggg

SEQ ID NO: 411184 - DNA, 101 bp, Homo sapiens
cactgcctctttcagcaatatgaagggacacagcagtctctgaatttcatgctctcctctttgatgtgaagaaaatgaaaagctgaacagttgtggaactg

SEQ ID NO: 411185 - DNA, 90 bp, Homo sapiens
gctgttgctgccctggggaacaaagtcgtggaaagcctaagagcacaggatccttctgaagatagagccacgaaccccctgaacaaggag

SEQ ID NO: 411186 - DNA, 75 bp, Homo sapiens
gcagatcgccggcaccacgagagcccggcccgcctgtgtggacgtaagactttgaccccgacgcaggcttcagtg

SEQ ID NO: 411187 - DNA, 100 bp, Homo sapiens
gttcacaggaggcagaagctccaggagcagttgctggtgctgctgaagtccctagggaaccaccaattcttcccagctatgacagagactccactttcaa

SEQ ID NO: 411188 - DNA, 75 bp, Homo sapiens
gcccggctccgcgcgcctggcggctacatggagagtgtcagcactcctgtaggaggcctgctgatggcatttcag

SEQ ID NO: 411189 - DNA, 48 bp, Homo sapiens
tacatcttgcatcctcaagcgaaccctcggcctcaggaaagtcggaca

SEQ ID NO: 411190 - DNA, 100 bp, Homo sapiens
gctgccagaagggctgagggcttctgcagatgctaagaaggacccagatgatgtggtaccagttggccaaagaagagcctggtgttggtgcatgtgcttt

SEQ ID NO: 411191 - DNA, 82 bp, Homo sapiens
aggcccgggctcgagtcccccagccaggttcggactaaggatcaccgctttgaaagtgtcagtcaccttatcagctaccaca

SEQ ID NO: 411192 - DNA, 121 bp, Homo sapiens
attttttggagcttccatcctggttcttccaaagtgcccggacccaaaacaggaaatctcagtgaccagctgctggaggtggtcggcttggaaggagccatggagatggggcaaatataca

SEQ ID NO: 411193 - DNA, 73 bp, Homo sapiens
acgatggcgaacctcccaccaaaaagcccaggtatgtgtatgtgtggcactgcccccagggaccaggcctaga

SEQ ID NO: 411194 - DNA, 96 bp, Homo sapiens
acacgcccactaaagcccagaagaatgtggctaccagcgaagataaggagacaaggaggcatccagctcctggtggacctgttggatcatcggatg

SEQ ID NO: 411195 - DNA, 50 bp, Homo sapiens
ttcaacactgaactgcaactgtggcaggtccagcccagaatcaaatgcag

SEQ ID NO: 411196 - DNA, 100 bp, Homo sapiens
tttgccctgaacatcatgaattcccaagaaggagtggagaacatgcagctgaccctgaacctgcagacggagaacaaaggcagcgttgtctcaggcggag

SEQ ID NO: 411197 - DNA, 90 bp, Homo sapiens
ctggaacttcatcatcatctacttcacaggaattgccatttggatcccgggtgcaaggggcacaagtttgcacacagtggcctggcttgc

SEQ ID NO: 411198 - DNA, 82 bp, Homo sapiens
cggggagcgaccgggagcggcggcagcggcggcgcggaggcggctgaggtgcgagccgcggatctgaaaagaacaattgctg

SEQ ID NO: 411199 - DNA, 100 bp, Homo sapiens
ggaaacttcactaagttcagggtgacaagggaggaagtacagaggaaaagcaggtgatattctcagtggagaccaggacaaggaacagaaagacccttac

SEQ ID NO: 411200 - DNA, 82 bp, Homo sapiens
gggccggagggcccacaacccgcagagacttctactggctgcgctcctttctggccggagtttttgaaatcatgaatcctgt

SEQ ID NO: 411201 - DNA, 100 bp, Homo sapiens
gggcccgcaggtcgcagggcggcctgcagctgggccgcggccgaggaggcagcgcgacctccgcacgggatttgtggaactgactatatttcccacagtt

SEQ ID NO: 411202 - DNA, 51 bp, Homo sapiens
atcaaatgtggaacctatggaaaagggaagtgttcgccagttactacatga

SEQ ID NO: 411203 - DNA, 90 bp, Homo sapiens
gtggaagaagtcaggtcctctaagttgttgccaagaaggacaacaacctcggctatttgggagtgggtagagacgggggttcaccatgtt

SEQ ID NO: 411204 - DNA, 82 bp, Homo sapiens
gcaaattcagatgcaaagccgtggccaacgggaaggggacggaaaatatagtcgcggtgatgataagcaacctgaaaggcat

SEQ ID NO: 411205 - DNA, 100 bp, Homo sapiens
ggcggcggcgcccgcagccagcaaggactgagcagggggaggaacatttaagctgatggaagtggaagtggaagttgctgtacattggcagcaaggcctc

SEQ ID NO: 411206 - DNA, 74 bp, Homo sapiens
ttcgatgttcccatcttcactgaagagttcttggaccaaaacaaaggcttcgattctgcgacccgggatcctga

SEQ ID NO: 411207 - DNA, 100 bp, Homo sapiens
tggcctcccggaggtactactttgagttgctgcacaagcaggacgaccgcggctcggaccacgtggaagtgggcggctgtgactccctgacgcagatcca

SEQ ID NO: 411208 - DNA, 132 bp, Homo sapiens
cccagctggaaccaagaaggttgtgtcccccttcctctgggtgtccttgtctcctgctatcaggtacaggtttgcagattccgccagcagcacagcaagctctacagatgagtggctctttggcatttggtg

SEQ ID NO: 411209 - DNA, 83 bp, Homo sapiens
ttctacacagccacccggagttccttagttgaaaggtgcgccctgctgtgacaggaatatattaaaggaatctgtgaacctga

SEQ ID NO: 411210 - DNA, 100 bp, Homo sapiens
caggtgctcactgtgctgaaaacagtctctttgttgggtcatacttacctggttgcttgcgcatctagtaatgttggatcatattctggatgttttgaat

SEQ ID NO: 411211 - DNA, 83 bp, Homo sapiens
gaggatgcagtgaaagaaacttcctcagtaaagcgactctcacagaaggaggaagaggaggacacttttattgaagaacaaca

SEQ ID NO: 411212 - DNA, 98 bp, Homo sapiens
ggaacgtggaaagcgcatacaggaccctaaacagattggtgctgaagacatggacggcttccaggcagacacggaggaggaggaagaggaggagggcg

SEQ ID NO: 411213 - DNA, 95 bp, Homo sapiens
ggaatgtggtgacctcacctatccatctccctcaaggcagcttttggattacagtttaaagacaatttctgtgatcaagttgtcatttggaagat

SEQ ID NO: 411214 - DNA, 100 bp, Homo sapiens
atggcccaatcatccagtaaatcccctgagttgctggctcgatactgtgactccttgttgaagaaaagcttttcatgcaacacccaacacttataagcgg

SEQ ID NO: 411215 - DNA, 98 bp, Homo sapiens
ctcggctgaaaagaagaagccagtgtttgagaaaagcttcgtgctgaagaataagttcatgaaaaaattgccacgtgatgcagaagcttccaacgtgc

SEQ ID NO: 411216 - DNA, 100 bp, Homo sapiens
ttgctactatgggaaccgaggggagcctgatcctatcgttttgacgccagggccatgaagcccccaggaggagaatcgagcaatctttttggaagtccag

SEQ ID NO: 411217 - DNA, 75 bp, Homo sapiens
agagagaggaccaagacaaaattcagaagctcccgatgtccagaattagggtcgactgatagatcatgtgaaaaa

SEQ ID NO: 411218 - DNA, 82 bp, Homo sapiens
gcgaagaggctggactcggattcgttgcctgagtcaccttcaggccattcagaggaggaaagagaggggaatatgaagtcag

SEQ ID NO: 411219 - DNA, 75 bp, Homo sapiens
catcgcgacgctgctcaaaacctcgctccggaaaggggacacctgcgaccgtggcagccatgtattacagctact

SEQ ID NO: 411220 - DNA, 82 bp, Homo sapiens
cggtggggactgcacgtagcccggcgctcggcatggctctcctggtgctcgggattaaagcctgtggtttccacagaagcac

SEQ ID NO: 411221 - DNA, 51 bp, Homo sapiens
catggcttcagcaagaggccacaagatgttatcctgacagacacatttatt

SEQ ID NO: 411222 - DNA, 83 bp, Homo sapiens
agaaactgttggagtttatatacacaggaactttaaatcttgacaggattaaactgcaaatatctcatgaagctgctgcctgt

SEQ ID NO: 411223 - DNA, 83 bp, Homo sapiens
tctcttcacccgcaccatgatcgttatgaatgatcagttcactagagaaaaaatccttattgcgagataacgtggacctattg

SEQ ID NO: 411224 - DNA, 96 bp, Homo sapiens
tccttgccaggccttcaaccactatctcagtgcaatgggacatggatttgattgacatactttggaggcaagatatagatcttggagtaagtcgag

SEQ ID NO: 411225 - DNA, 73 bp, Homo sapiens
agacttatgctggaactgggttttagcaaggaagagtttaaagaacgctgtactcagtgtgctgctgtctcat

SEQ ID NO: 411226 - DNA, 100 bp, Homo sapiens
tagacttcatcagagctattgcaaggtgataacccccgtgaggacaggccatggctacgtatacgagtacccatccagataccaaaaggacgtctatgat

SEQ ID NO: 411227 - DNA, 75 bp, Homo sapiens
gcggatcgggtggagtgtaggtcatatcgccgcgcaatccaagtcctgggcactgtcaaatggttcaacgtccgg

SEQ ID NO: 411228 - DNA, 98 bp, Homo sapiens
ctatggcaacatcaggtgactgtcccagaagtgaatcgcagtgctattaccacagctactggcactccatggtctatgtgccacagatgcagcagcag

SEQ ID NO: 411229 - DNA, 100 bp, Homo sapiens
cctttccactggagttgcttcacttagctctacaatcaacccatgtgggagaaactctggaaaccttgacaatggcaacagtgtgtctcttcagcgcaca

SEQ ID NO: 411230 - DNA, 74 bp, Homo sapiens
aggagagcctgggcaagactggagaggactacaaatccctccaggatatcattgccatcctgggtatggatgaa

SEQ ID NO: 411231 - DNA, 95 bp, Homo sapiens
gaattcagaaggatatcgacgtcgtgatccagaagtccagagctgaggactgcctgtttgcaggctaccggctctctgaccagttccacgacatc

SEQ ID NO: 411232 - DNA, 75 bp, Homo sapiens
gtttatatggtcagacaacaggaaaggttcctccggtttaggctcagctagcagcatccaggcagctgttcggca

SEQ ID NO: 411233 - DNA, 98 bp, Homo sapiens
gaaagttgagtctctcctgcgccgagccttcggggcgatgtgtagtgccttccatagggctgagtctgggaccgaggaatttatgcaaatattctcat

SEQ ID NO: 411234 - DNA, 83 bp, Homo sapiens
ttgagtcatttccttcgtacccacagtgcttcatgagagggggatatgagactttctactcggaatatcctgagtgttgcgtg

SEQ ID NO: 411235 - DNA, 50 bp, Homo sapiens
acagagacagcagcatgactggaatctggtgaacagtaacaaactttggt

SEQ ID NO: 411236 - DNA, 75 bp, Homo sapiens
gcagaaaaaagatcacaagcaactctggatgggattgcaaaatgcttcccatcgacggtcagtgcgcacgttgta

SEQ ID NO: 411237 - DNA, 75 bp, Homo sapiens
aaattggctaggtgtaaaaaggcagccgagtgaagacatttccacctggacacctgaccatgtgcctgccctgag

SEQ ID NO: 411238 - DNA, 75 bp, Homo sapiens
aaggttgggcattgggtggaggagcagaatttactacagcatgtgatttcagggagtggtacgggtatcactttc

SEQ ID NO: 411239 - DNA, 88 bp, Homo sapiens
ctgctgctcctgctggtggccacagcttggcatgaattttccagttcatatgaagaggtgatctctcaaataaatacgtcattacctg

SEQ ID NO: 411240 - DNA, 102 bp, Homo sapiens
tgaagtttcttgcaaaccacactaacatattactggcatcttcaatctgctgaagaaaaggtgactggtctcatgagccctgaagaatgaactcagaggagg

SEQ ID NO: 411241 - DNA, 100 bp, Homo sapiens
gacactgttggttcagtaccaggaccctgctgcagtttcctttgtcacaactttatattcagagcaccaatcaaattaagcaagcctggggaacttcgtg

SEQ ID NO: 411242 - DNA, 75 bp, Homo sapiens
caagaattcctctttgactctgactggagaggctctcaccacacacttgttcatgggcgcagcaaagaagaggga

SEQ ID NO: 411243 - DNA, 100 bp, Homo sapiens
cgcggcggcttcaacctctaccccacagagcaggtgttgccaatgctgcggttcgtgcagaagcggggaaactcaacggtgtacgagtggaggacaggga

SEQ ID NO: 411244 - DNA, 90 bp, Homo sapiens
atgatgtacctctgccagcaggttgggagatggcaaagacatcttctggtcagagatacttcttaaagtttcccctcaaaaaacctataa

SEQ ID NO: 411245 - DNA, 100 bp, Homo sapiens
tacattcggggtgccagaaggaaagcatagaatggtgagcgaactgcggggagccggtgggagctcattcagactgcacttctcaacaaatttacacgac

SEQ ID NO: 411246 - DNA, 100 bp, Homo sapiens
caatgtcctgcagatgctggatatccaggcatcccagctacgaaggatggaatcttcaatcaatcatatttcacaagaggccatgatggatttcttcaac

SEQ ID NO: 411247 - DNA, 97 bp, Homo sapiens
gcctcggagaacaaagcttgtctttgatgacagaaactcagccaagaatgtttaaagcagctggcaatcaagaagcagcagcacattgacaacataa

SEQ ID NO: 411248 - DNA, 100 bp, Homo sapiens
ctctggacaaagacgcttattatcggcgagtgaagagactgtacagcaattggcggatttcaacactacacttgcacaatgtctttgaaaccaagagtag

SEQ ID NO: 411249 - DNA, 73 bp, Homo sapiens
tggagaggaatgggacccccagaaggctgaggagaagcggaagctgaaggagcagacgcctccgcctagacct

SEQ ID NO: 411250 - DNA, 50 bp, Homo sapiens
tgcacaaaagtgttgtgcatttaatgatggcacaagagactatagtcccc

SEQ ID NO: 411251 - DNA, 82 bp, Homo sapiens
gctaaagcagcgtgcgttcagccctgggtggtgatcgccgctcgggaatgcgggcgtgaagggtccgagttgccgcccagcg

SEQ ID NO: 411252 - DNA, 80 bp, Homo sapiens
ccctaccgaattacaagatcaggtttgtgttgctagttaagctagcttgtattgttgtggcttccttcgttctctgctgg

SEQ ID NO: 411253 - DNA, 75 bp, Homo sapiens
ccatgtgctgaaatgtttgacgacactgatggtttgctcaaactggaggattataaggatcgcctgaaaagtgga

SEQ ID NO: 411254 - DNA, 100 bp, Homo sapiens
caacaagtgtctttggttataaattatgatctacctaccaatcgtgaaaactatattcacaggatttccatttaaacagggttaatttggaagaatcttc

SEQ ID NO: 411255 - DNA, 90 bp, Homo sapiens
agaaaagaaatgaaccagtattcttaaattgatttcaagtttgaacaagaatacagttgagttttgccaaatttgacagttcacgcaagc

SEQ ID NO: 411256 - DNA, 101 bp, Homo sapiens
aaattacatattccagtaatggtggatgaagttgttcattgtttgtcaccacaaaaaggacaggcctgcgtgttggatgaacttgacatggagctagcctt

SEQ ID NO: 411257 - DNA, 82 bp, Homo sapiens
cggctcctgccctctcgctttccctctcgcgtctctggctgcagcagcccctgtcaaagggaacaggaagcagtccacggag

SEQ ID NO: 411258 - DNA, 100 bp, Homo sapiens
ggaaactgttgtgcctcttcatattggcgatcctgttgtttggtctcttcccatggcgatgtccatctgccaccgtggcactggtattgctttgagtgca

SEQ ID NO: 411259 - DNA, 74 bp, Homo sapiens
aggaatgtgattcttcatcttccaaggatccagatgaagaaatggccaaaatcgacaggacggcgagggaccag

SEQ ID NO: 411260 - DNA, 100 bp, Homo sapiens
cgaacctgggactcggcgaatgcggattcgatcattcacatcgcaatggctgccatccggaagaaactggtgattgttggtgatggagcctgtggaaaga

SEQ ID NO: 411261 - DNA, 71 bp, Homo sapiens
ggaagtcgcctggtgtgaactgcaggctcttgtcaggatggtgaagctgttcatcggaaacctgccccggg

SEQ ID NO: 411262 - DNA, 100 bp, Homo sapiens
taaggccccctgcccccttttcctggtgcatgtgaagttatcaaaaacagtttttgaaatcatgaatcctgtttatagtcctggatcttctggggttccc

SEQ ID NO: 411263 - DNA, 51 bp, Homo sapiens
tgagccgatccaatgatccacagatgaaactaattctgaagcaagccctta

SEQ ID NO: 411264 - DNA, 100 bp, Homo sapiens
cagatatgaccatgtatttgtggcttaaactcttggcatttggctttgcctttctggacacagaagtatttgtgacaggagatagtgttttaggtgctgg

SEQ ID NO: 411265 - DNA, 152 bp, Homo sapiens
gtcggcgtaaagcacccgggcgcagccggagccggtgccgcagctgcgatggccgtggccgtggggagaccgtctatgaaggatttgggggcagagcacttggcaggtcatgaaggggtccaacttctcgggttgttgaacgtctacctgga

SEQ ID NO: 411266 - DNA, 75 bp, Homo sapiens
gcgggctcccggaggactgcagctttggggccatttggatcacacgatgttttttcaagattttagaccctttct

SEQ ID NO: 411267 - DNA, 95 bp, Homo sapiens
gagcaaagactccagtaacactcaagcaaagaagagttgagcacaatcagaacacttcagttatggaagatcaaaatgaagatgagtccccaaag

SEQ ID NO: 411268 - DNA, 100 bp, Homo sapiens
aaaaagctgcggagcccactgtggatcttttaggacttgagctgcggtgcaaccctgggcagtttgcgtgtcgcagcggcaccatccagtgcatccccct

SEQ ID NO: 411269 - DNA, 50 bp, Homo sapiens
gaactggatgtcagcaagaatgaaaagagtctcatcgtggaaggcaagag

SEQ ID NO: 411270 - DNA, 75 bp, Homo sapiens
agattttaaaaaaatcccatgaggagaaggcattctaatttagctgctgtgacttactcgaagcctcgattggcc

SEQ ID NO: 411271 - DNA, 100 bp, Homo sapiens
gggattcgcggcccggagctcgggaccggtctaaagacattgccctcacagagtgaaatgatggcagaaatatctaaagctcaagaggaaattgacaaaa

SEQ ID NO: 411272 - DNA, 98 bp, Homo sapiens
cctgatcgagcgcatcgaggatttggcgctgcagaaccagatccgggagcacgtcatctccatcgaggatttgataatgggctgcattaaaagtaaag

SEQ ID NO: 411273 - DNA, 74 bp, Homo sapiens
ctggagagcttcatcaaaaatagtgatagctttgataatcctgtgcctcctgattgctgagtgttcacctggac

SEQ ID NO: 411274 - DNA, 100 bp, Homo sapiens
tcagcaccaacactgcagaagacttctatttctctctggagccctctcaggaaaatcaggaaaatgtttccaacctggtgattgaggacacagagctgaa

SEQ ID NO: 411275 - DNA, 82 bp, Homo sapiens
gggatcccggccaccagcaattgtccgatgaaggatttgggggcagagcacttggcaggtcatgaaggggtccaacttctcg

SEQ ID NO: 411276 - DNA, 100 bp, Homo sapiens
ccccttagaagcctagaaatgctccctgtgctgtcaggaatctacaggacttggctcgtatttacattcgacgcacacttagaaatttcataaatgatga

SEQ ID NO: 411277 - DNA, 73 bp, Homo sapiens
atgcggctgcgctccataaaggcagacgacaaggacttcgggatatgggaacgtggagacaagaccaaccaag

SEQ ID NO: 411278 - DNA, 83 bp, Homo sapiens
tacgcgtacgtggtggagctctgcgtgtgtttctgcaaatgcgtgaatgagccggatgccagcctctgtcccctggagcccag

SEQ ID NO: 411279 - DNA, 74 bp, Homo sapiens
aataagaaacctgtttaaaaacattccttttgtccttctgttgatcacttatgaactgataaatttcaaacgga

SEQ ID NO: 411280 - DNA, 100 bp, Homo sapiens
cacggcgtccccccactgaagctctgcaagaacctcaaccgggaggctcaacagtccagctgggagctccccgacctccaggagggcaagatccaagcca

SEQ ID NO: 411281 - DNA, 100 bp, Homo sapiens
ggcggatggtgggactctccggccctgtgcagtaagtggcaatgcattgaggatacatctggcaagcttcgaattcacaagtgtaaaggacccagtgacc

SEQ ID NO: 411282 - DNA, 75 bp, Homo sapiens
tccggactctgggtgttttgctaccgtgaccgtttagatggcgtgatcaacatgagcatccccattgtactgccc

SEQ ID NO: 411283 - DNA, 89 bp, Homo sapiens
ggactgggaaagaccttgatcccaacaatgttatcattgacaatggcaccagcatgatatcattgatcattcctcccaaagaccagatt

SEQ ID NO: 411284 - DNA, 98 bp, Homo sapiens
atgttgttaccctcggacgtagcccggcttgtattggtttaagaaaacccctcctaagatcccttataaggccatcgcacttgccactgtgctgtttt

SEQ ID NO: 411285 - DNA, 80 bp, Homo sapiens
gcatcctcatataattaaactatggcattggagtcaagagagattataaacaggccttgaagtattttaatttagcttct

SEQ ID NO: 411286 - DNA, 73 bp, Homo sapiens
agctgcccactctagaggagctgaaagtagatgagtgtcactgcaaagataaaagccattgaagcaaaactga

SEQ ID NO: 411287 - DNA, 125 bp, Homo sapiens
accatgccgctcctaagcctgcacagccgcggcggcagcagcagtgagagtattaaaggtggaagaaggtccatatctttttctgtgggtgcttcaagtgttgttggaagtggaggcagcagtga

SEQ ID NO: 411288 - DNA, 104 bp, Homo sapiens
tcgacaggactggaaacctacattccttagtaatgaagagtttacacaattaatgttagagaaaatatttacaccagcagctccagttcataccaataaagaag

SEQ ID NO: 411289 - DNA, 100 bp, Homo sapiens
ggtcttgtcttccagacccggaggaccgaagcttccggacgacgaggaaccgcccaacatggcctcggagggcctgcttccgcgaggccaacatcccaac

SEQ ID NO: 411290 - DNA, 133 bp, Homo sapiens
ttccggcgaggggggagcctcagcaggattgctgtgtgaaaaccgagctgctgggagaaggattttttatcaagcagaaatgcatcgaacaacgagaatcaagatcactgagctaaatccccacctgatgtgt

SEQ ID NO: 411291 - DNA, 80 bp, Homo sapiens
gtggccaagtttccagaaaacagaaatcgaaacagatacagagatgtaagcccatttcctggtccagaactttacacaga

SEQ ID NO: 411292 - DNA, 76 bp, Homo sapiens
gacgaggaaagaggaggaaaacaaaagctgctacttatggaagatacaaaggattgtatccagccttcagtcatca

SEQ ID NO: 411293 - DNA, 100 bp, Homo sapiens
cagataccctcgtgattagaggtcttttgctggaggttgactgtgctgtctgaatgtacctgaaacatgggagcccagttaaaatgatggagagttatat

SEQ ID NO: 411294 - DNA, 75 bp, Homo sapiens
cctgctcagtcggccaagaagccctgcccagattagaaatgatatttgccaaatttgatgaagtgcaaagttcag

SEQ ID NO: 411295 - DNA, 88 bp, Homo sapiens
aagatggcagccaccacgggctcggacccaagaaactcgagagatcttacatttccactataccacatggcctgactttggagtccct

SEQ ID NO: 411296 - DNA, 78 bp, Homo sapiens
gacctgcgggagggccgacagctacagcagcatgacttcacttcccaggaccatcagcacgtgcccatcgacatccag

SEQ ID NO: 411297 - DNA, 90 bp, Homo sapiens
cgaaagcctggtccacgccgtggccggagccgtggtgcagcggaactgctgcctgacgctctgcaacttcagcatccccgaggagctgga

SEQ ID NO: 411298 - DNA, 132 bp, Homo sapiens
tgacaacttgacttctctggggactctgaacttccctggtcgaacagttttttctaatggctattcaaggtcagaagagatcaattctacagaaatttccagtggttctgttgaggctttatggaattcagc

SEQ ID NO: 411299 - DNA, 83 bp, Homo sapiens
ggtagccgagggcggaggcgacactctcagatgttccaacagtatccgaggatgacatatcctcctctacatggtcccatgag

SEQ ID NO: 411300 - DNA, 82 bp, Homo sapiens
ctgtaaagtcatcacctcctgggatcagatgtgcattgaggagcagcaccctgaggaggaactgatcaagactaagcaggat

SEQ ID NO: 411301 - DNA, 83 bp, Homo sapiens
ccgcgcgcagggcctgcagcgggagctggacggcgagcgcgagcggcgcgagaaagactggagactgatgcatgagggggcta

SEQ ID NO: 411302 - DNA, 98 bp, Homo sapiens
agccaaattcaaaaaggataaggagatcatagcagagtacgatactcaggtcaaagagtcttggaaattcacagagagaatatgaaaagcaggttgtc

SEQ ID NO: 411303 - DNA, 90 bp, Homo sapiens
ggagaactctcctgcccttttaggagtgcaaaaaggtgtttgatttcaccaccatagacttgacatctgagactgatgaaattccagata

SEQ ID NO: 411304 - DNA, 90 bp, Homo sapiens
aaaatcttatgattatgaggcatgggcaaaacttgatgtgagaaaagaaaccttgtttattccctgtgaaaatgagaagatttctaaaca

SEQ ID NO: 411305 - DNA, 87 bp, Homo sapiens
aagattggacagcaggtcgacagtggtggaggtggatacagcagtcggagaacatctggcagagacaaatacggaccacctgttcgt

SEQ ID NO: 411306 - DNA, 75 bp, Homo sapiens
cagcggaaccggacccagtccctgagccgcccctacacccacagccctggcctcccacgactacatcctgaagat

SEQ ID NO: 411307 - DNA, 75 bp, Homo sapiens
ttgacaatacaggaaatgtttagtgcttcatgttggcggaaccattgtattgttgcttagtgaagatcaccacag

SEQ ID NO: 411308 - DNA, 100 bp, Homo sapiens
ggaccaaaatgtcaaatttaggaaattgatgggtattaagagtgaagatgtctggctggaagcagccaggttgcagcctggggacacagccaaggccgtg

SEQ ID NO: 411309 - DNA, 103 bp, Homo sapiens
gttaaggattccaagtaactcttatttgcccgaccctgcccgccctggactggcagctgccgtcccactcaggcccgtatgagcttcggattgaggtgcagcc

SEQ ID NO: 411310 - DNA, 87 bp, Homo sapiens
tttgccgccaccatgcccaaaacgtgccggtggtggtgtgcacattgagccccggtatagacagttcccccagctgaccagatccca

SEQ ID NO: 411311 - DNA, 80 bp, Homo sapiens
cctggagttaatgtccaacctagggtctgcggagacccgatccgagtgtactaatggtcacttgatgtgcgctggctgtt

SEQ ID NO: 411312 - DNA, 100 bp, Homo sapiens
gcaaccccagatccatttacactttacagaggaaagagggttttcattcccttctgaatgttaggagggaaggcattttccatccttgaccagcttgtag

SEQ ID NO: 411313 - DNA, 75 bp, Homo sapiens
gtgaagactgatatcttcgtcaccagtttcggacccgtttcagaccatgatatgacatgaagaggagcatcggcg

SEQ ID NO: 411314 - DNA, 97 bp, Homo sapiens
ctgtggaccctcgtgagcgacccggacaccgacgcgctcatctgctggagcccggacctgaaggagaagaaggagaaggtggaggagaaggcaagcc

SEQ ID NO: 411315 - DNA, 100 bp, Homo sapiens
acaccagcggcagcatgcatctgatgctctctctccagtccttgctgaagagactttccgttacatgacccatggacacagaggctgatttacagttccg

SEQ ID NO: 411316 - DNA, 96 bp, Homo sapiens
aggtgcggcattatttatcccagtggattgaaagccaagcatgttgtggaagatatcaataagcgcagagagccgctccccagcctggaggctgtg

SEQ ID NO: 411317 - DNA, 100 bp, Homo sapiens
atggcgaggtcggacgcgtcttctttcaggctgaggataacgaaggaggcccaacttcattcaataaggagcctgacggatttatcccagacggtagaac

SEQ ID NO: 411318 - DNA, 75 bp, Homo sapiens
ttcgagtgaccgagaccgcggccgggaccgaggattacctaaaaccagatccatggatgatcttctttctgcctg

SEQ ID NO: 411319 - DNA, 90 bp, Homo sapiens
gtctccgatgggctccaccaccccagccagctgcattccaagttagagaatgaccaggatgatcctttcaaaaataaagccttgttattt

SEQ ID NO: 411320 - DNA, 98 bp, Homo sapiens
ccggatacaggagggacgtgcaccagatgcgagccacccctctggctgctcctgcgggttccctgtccaggaagaagcggttggagttggatgacaac

SEQ ID NO: 411321 - DNA, 100 bp, Homo sapiens
gggctgtcgcccgaatgcaggaagaccgtgatgggagctgcagcacagtcgggggtgtaggttatggggatgtgcactgggaactacacctttgttcctt

SEQ ID NO: 411322 - DNA, 100 bp, Homo sapiens
gaaaaaatcccaaggtctgcaaaggtagttccaatttgccagcagaatgagtacagaaagagactcagaaacgacatttgacgaggattctcagcctaat

SEQ ID NO: 411323 - DNA, 100 bp, Homo sapiens
gtcttttatatttcctcaaatactgtgaatggtctgaggcgcaggttgacaatggtctccaggatggtctctaccatgctatctggcctactgttttggc

SEQ ID NO: 411324 - DNA, 87 bp, Homo sapiens
tccctcagcttccgccccaaaagtacctggagtagaacagaaaaattattatgtctgtgttcccttgggactcattggaaattgtac

SEQ ID NO: 411325 - DNA, 106 bp, Homo sapiens
cccttccccacgacggggcgcctctgcaactcacaaaaatccattcctcgctgccgaagaattaacaggatgctctccaatgaatccctccatcctcctgccttca

SEQ ID NO: 411326 - DNA, 75 bp, Homo sapiens
ctttgcaccctgcttggagacggacttgcttccgatgaacagactagccactttgcattgactggaaacaatggc

SEQ ID NO: 411327 - DNA, 100 bp, Homo sapiens
agctaccacctctttaataaccatgcttaatgcaaaagaccttctacaggacctgaagagtccaatgtgctgattgctgctaacagtcagggtacaatta

SEQ ID NO: 411328 - DNA, 49 bp, Homo sapiens
aagtgaagctgctgctactcgtggttggagaaaaggaaaagatagataa

SEQ ID NO: 411329 - DNA, 96 bp, Homo sapiens
ctggactcgctgggcgagagcatcagccgcctgacggcgccctcggaattatccagactgccttgccactagatgaatggaagacaatgatttgaa

SEQ ID NO: 411330 - DNA, 96 bp, Homo sapiens
tcgtctaccgtctcgctatagccgtttgagggaagaaggaggaaaattacccggtatcgttagagataacaacgaacttgatgcaagtgataggtt

SEQ ID NO: 411331 - DNA, 100 bp, Homo sapiens
tttcacggacaacctcagaggacaacgaagtgttcgaacctgcacttgttgccaagtcttccatcttactagatgtgaaaccttgggatgatgagacaga

SEQ ID NO: 411332 - DNA, 90 bp, Homo sapiens
caacaccctctggctcagtgggcagcttgtgctccagacagtcccaggtgctctgtgggtaccttggtagctacagcaagctgggtagca

SEQ ID NO: 411333 - DNA, 95 bp, Homo sapiens
gcacattggagttggaatgtatcagtacagtgctgtggataccaatccactttctctgtatgtcatgcatccattctggaacactatagtaaagg

SEQ ID NO: 411334 - DNA, 100 bp, Homo sapiens
ctgagagcaagagtggatgaggccatggaactcattattgcacatggacgcttgaagtacaatcttgttgtgtgtttattccaaatgatagcctgccttc

SEQ ID NO: 411335 - DNA, 96 bp, Homo sapiens
agtactccaagaagatggttcagttgactattgcaaagatacctatatcatggcaatactaatccagaattggcttttgaaagtgccaagatcctc

SEQ ID NO: 411336 - DNA, 100 bp, Homo sapiens
gaggccgacttcaaggatcttgagactcaaccccatatggatgtggctttgtttgagatgaatcagtcggattcaaaagaagtggacagttcagaagaga

SEQ ID NO: 411337 - DNA, 51 bp, Homo sapiens
gttggggcgcccagctgccaacaccaagtccaagtggtaagaagttcagaa

SEQ ID NO: 411338 - DNA, 89 bp, Homo sapiens
ctcatgcacagttgcaaagagggctacgtgaaagatctgaaagaagaagctcattcacacagaagacccatttaatgatgaacatcagg

SEQ ID NO: 411339 - DNA, 50 bp, Homo sapiens
attcagagtatatataccattaggtccaaattaactgtgctacagatgac

SEQ ID NO: 411340 - DNA, 100 bp, Homo sapiens
cagaaccgtggacagcaacatttcccacaggacacgaagtttgtcggcccttgccttggcagagctgagacttccttgccgtccaggaagggatttcgac

SEQ ID NO: 411341 - DNA, 51 bp, Homo sapiens
gtggcaaccagatcggtgccaaggttcgtgctggccgtgggcagcgccgtc

SEQ ID NO: 411342 - DNA, 90 bp, Homo sapiens
ctgctttgaagacttagcagaggattacctgagctggaattggaagcaattgataaccaatttggacaaccaggaacaggcgatcagatt

SEQ ID NO: 411343 - DNA, 96 bp, Homo sapiens
atggaacaaaccttacctttattggagacaaaaccgtgtcatggagaaactccagctgggcccagagattctgcagcgggaaaatccaaggcttat

SEQ ID NO: 411344 - DNA, 75 bp, Homo sapiens
ctacagattgcatgatacaagaccaaggtgtaaaaccagtaagtgtacagcttaattctatgctttgtcctgcac

SEQ ID NO: 411345 - DNA, 98 bp, Homo sapiens
gcggcggcggcggaggatgagcctgcagagcgcgcagtacctccgagatgaggtctcactctgtcacacaagttggagtgcagtggtatgatcctggc

SEQ ID NO: 411346 - DNA, 100 bp, Homo sapiens
ggaaatgatacaattacctgcacgacacatggaaattggactaaattaccagaatgcagggccaaagtggaacaggtgaagttcgatgccacatccatgc

SEQ ID NO: 411347 - DNA, 75 bp, Homo sapiens
gtgggcagatgtgaccaagagcctgcattaagaaagatccagattacctgaagctgtggttggacacttttgttt

SEQ ID NO: 411348 - DNA, 50 bp, Homo sapiens
ggcgaaggtcgtattgaatggtgttgtagatggagtcttgccctgttgcc

SEQ ID NO: 411349 - DNA, 73 bp, Homo sapiens
tcagctcttccttatgttcctgaaggtgggctctgttgtgtctgttggctggctccggtccaagaaggctgtt

SEQ ID NO: 411350 - DNA, 51 bp, Homo sapiens
cataggcctttaatggtgcagacagagggagaagtgaaatgacaacctcac

SEQ ID NO: 411351 - DNA, 51 bp, Homo sapiens
cctcgaagtccctcttttccactgagtggcattctgcatttctgtggcttc

SEQ ID NO: 411352 - DNA, 100 bp, Homo sapiens
gcgagaagcagcgggggggcaggcgatcgaagttccagctcaaccaagataaaatgaatttttccacactgagaaacattcagggtctatttgctccgct

SEQ ID NO: 411353 - DNA, 100 bp, Homo sapiens
ggcgtcttggcccgggcagcagtggcggcagcgcccgagagaggggtgagcccctccagactccgaataggagatcaagagtttgattcattgcctgctt

SEQ ID NO: 411354 - DNA, 83 bp, Homo sapiens
aatacaaatcacacgcataatggatgaaaggaaccgacaggaagccaagttgtctgaaacaatttcagcttccaatgcctgga

SEQ ID NO: 411355 - DNA, 134 bp, Homo sapiens
cagtgcctagtgtctgtgccgcctaccaggcagagcctgaggaagctgaagcagaggtttcccaggcctttccatctatccggagtgacctaccagagacaggacagtttgaccagcaagcttctgatcactct

SEQ ID NO: 411356 - DNA, 93 bp, Homo sapiens
caaaagttcatctccttctgcatccttaactgagaatgagttacatcatgctgatgacagcttcctggtcctcaccacagatggaattaactt

SEQ ID NO: 411357 - DNA, 100 bp, Homo sapiens
tgaagatcttgaaaatttgacaacttacggttttcgtggagaagccttggggtcaatttgttgtatagctgaggatgttcacggaagaccagggtgtaga

SEQ ID NO: 411358 - DNA, 78 bp, Homo sapiens
gggaacctggagggcctcaatgatggcggcgacttccctagggagctgctcaaggttcatgatcaagagggcccaagg

SEQ ID NO: 411359 - DNA, 51 bp, Homo sapiens
tgaagaactgagctctatctggtttgtccagaggggttgcgtttatccggt

SEQ ID NO: 411360 - DNA, 110 bp, Homo sapiens
cccagaccagctcggctacctggtactgagtgaaggtgcagtgctggcgaacattgatgatggcacctcagatcgcccctacagccatgctctggtggctggaattgacc

SEQ ID NO: 411361 - DNA, 75 bp, Homo sapiens
aaagctggtaatagatgtctgacaaactaaagaaagacttgtgttacggtgttttgaatgctgtatcaaatgcct

SEQ ID NO: 411362 - DNA, 100 bp, Homo sapiens
gcagaattgagcaggatatgttagaaaagaggaaaatacagcgtgaattagcaaaaagggctgaacaggtaaaataccatgaagattttgaaaaaacaaa

SEQ ID NO: 411363 - DNA, 51 bp, Homo sapiens
atattgcacacctcatatgggaggggtgtctgatgccatcaagtgttgcag

SEQ ID NO: 411364 - DNA, 75 bp, Homo sapiens
cgtcactggccctggtggggattgacagccacgggaaggcttgggcactgtttaaaggaaagttccgagaaggca

SEQ ID NO: 411365 - DNA, 88 bp, Homo sapiens
gcagagaatatgatacagatgtattcaaatggatcttcaaaggaatgtttacccttgcggaagttgcatcacttaatgacattcagcc

SEQ ID NO: 411366 - DNA, 100 bp, Homo sapiens
agaaccggtacctggatggcatgattcaaccctatgaaaagataaaggccaggggcttgcctgataatatatcttccgtgttgaacaaactagtggtggt

SEQ ID NO: 411367 - DNA, 76 bp, Homo sapiens
tgtggataacgggaggtgaatttccatgtcaacatagtcctgaagtcacctgcaccggtgcccgtgacgtacgagc

SEQ ID NO: 411368 - DNA, 100 bp, Homo sapiens
aatttctttgagaaaagatctaaatgaagatgaccatcatcatgaagcatgtactggcattgaaaacattgacgaagctattacattgcttgaacaaaat

SEQ ID NO: 411369 - DNA, 50 bp, Homo sapiens
acatgaaggactatttccccatctcgagctggggttctcttcttcctgac

SEQ ID NO: 411370 - DNA, 75 bp, Homo sapiens
gagcaagcataagctgccaaaccaagggtctccgtctctccaccgggggcttcatccttccagggaggagaagag

SEQ ID NO: 411371 - DNA, 98 bp, Homo sapiens
gattgtgggatgcctgtgtcatgacctcgaccacaggggaaccaacaatgccttccaagctaagacatggatttgattgacatactttggaggcaaga

SEQ ID NO: 411372 - DNA, 88 bp, Homo sapiens
ggacttcaactgaccttcctcagactgagaactgtttccagtatatacatcaagtcactgaggaaatcatcgagttccccatcctaaa

SEQ ID NO: 411373 - DNA, 105 bp, Homo sapiens
tcagggatgagtcatgtggtggtgaaaaatgaccctgaactggaccagcaggcctccccatggccacccatggaccagtcggcattcacttcctcccttctgcgg

SEQ ID NO: 411374 - DNA, 101 bp, Homo sapiens
gtcccgggaacgcagtggctccccccactccagcaggcgctgcagcagctccctggggggtctaaaattcccaggactccacagctttgcaccagataagc

SEQ ID NO: 411375 - DNA, 87 bp, Homo sapiens
gggcacggcggccgagctgcggcagagcgtgtctgaggtggtgcgcggctccgtgctcctgatttggaggttgatatgtggaagaat

SEQ ID NO: 411376 - DNA, 75 bp, Homo sapiens
ttgttaaggattccaagtaactcttatttggctggcagtgatggtgaaagcataggaaactgccccttttcccag

SEQ ID NO: 411377 - DNA, 100 bp, Homo sapiens
caccagccatggactgctacacggcgaactggaacccactcggggactctgccttttaccggcaccacactgtaactcgaggcatcaccaaaggcgtgaa

SEQ ID NO: 411378 - DNA, 97 bp, Homo sapiens
cgagtctctgcgaacattccttttaacctatgtcttacaaaggcccaagggcaagattcttgccaagagaattaatgtgcgtattgagcacattaag

SEQ ID NO: 411379 - DNA, 74 bp, Homo sapiens
ggggcgagcctggaggattgtcactccaacctcttttcgctgcgaccgtggcagccatgtattacagctactac

SEQ ID NO: 411380 - DNA, 100 bp, Homo sapiens
tgaagtggaaggcgcttttcaccgcggccatcctgcaggcacagttgccgattacagaatgccgggacattctgcttcctgtcatcaccaaagagctgaa

SEQ ID NO: 411381 - DNA, 100 bp, Homo sapiens
cgaaggggggctttatatggctgtatttgacttggcaattcctgctgaacaaataatttttcatggcggttacagatgtagagctaaaacgactgaagga

SEQ ID NO: 411382 - DNA, 75 bp, Homo sapiens
ccaggcctgacagctctgcggctcgggccctgagagggtctcgctgttggagttggatttggggctatagaaaag

SEQ ID NO: 411383 - DNA, 90 bp, Homo sapiens
caccaaccccttcgcggacccagtggatgtaaaccccttccagaaatacatgctacaggatttaactatcagaatgaagatgaaaaagtc

SEQ ID NO: 411384 - DNA, 96 bp, Homo sapiens
aagctgtctgggccaaaggaataagacggcggagactggctgagtggaaagcaactaaactgaagaataaattcggagaagttttggagatctcag

SEQ ID NO: 411385 - DNA, 51 bp, Homo sapiens
ccgagaagactatcgacagattgccaagtgcagcctgacttctgagcaggt

SEQ ID NO: 411386 - DNA, 75 bp, Homo sapiens
acttggttttacttttgcaagcttggccacctatgaaaagtgaatatgtgtgctggtggatgtgccctgtaccac

SEQ ID NO: 411387 - DNA, 100 bp, Homo sapiens
gcaaggctgacgataaggagacctgctttgccgaggagggctccccagaccccgacagcacaggggcgctggtggaggaggaggatcctttcttcaaagt

SEQ ID NO: 411388 - DNA, 73 bp, Homo sapiens
acgctgcgggcccgggccatggccgccgccgatgccgaggagtggagtcaacatatcaatggagcaagtcaca

SEQ ID NO: 411389 - DNA, 94 bp, Homo sapiens
gactaagaacgcattgccgccggtcctgaccaccgtgaacggacagtcccccccaggtactccaaagattcaggtttactcacgtcatccagca

SEQ ID NO: 411390 - DNA, 88 bp, Homo sapiens
catcaaggccttcagaaacatccctggaagagagaagggcacagttacctaagtatcaacgtaatcttcctcggccaggacaggcccc

SEQ ID NO: 411391 - DNA, 75 bp, Homo sapiens
aacatgtactacagccagtcttctatgtttccacatcggtcagaaaaagatcagataatcaccagaatgggagtg

SEQ ID NO: 411392 - DNA, 58 bp, Homo sapiens
gcttggttctgacccagctgaggaggaggaagccaagaatctggtgagcgaagccatc

SEQ ID NO: 411393 - DNA, 91 bp, Homo sapiens
cctgcagcgggagctggacggcgagcgcgagcggcgcgagaaaactttgtgcccattgacctagacgagtggtgggcgcagcagttcctgg

SEQ ID NO: 411394 - DNA, 88 bp, Homo sapiens
tacaatgaaacagctccaatgctggagcaggctgtgattctaggattgaaaaagaggaaatgattccaaagcaggacatttctgaaga

SEQ ID NO: 411395 - DNA, 73 bp, Homo sapiens
gaagatgatgaggatgacgatgacgatgaggaagatggaatttgcaggtgaagacacttctgatttgtttttg

SEQ ID NO: 411396 - DNA, 100 bp, Homo sapiens
ggaaaactgggtcgagcggtttcttttggctcacaattatcctagagtgaggacttgtgtgagcatctatggtgagacatttccagatgagaacttcaag

SEQ ID NO: 411397 - DNA, 88 bp, Homo sapiens
gctgcctggaggcggccgcactcgggtcccgcggcagtgctggtggccatggttcccgtagccagaaggagttgcccacagagccccc

SEQ ID NO: 411398 - DNA, 82 bp, Homo sapiens
caactgagagagatgcttaaaaatcaccagttactttaatgagggacggcaaaacagaacagaaaggcggagataaaaagag

SEQ ID NO: 411399 - DNA, 73 bp, Homo sapiens
cctggatacggtcactttctacaagctggagccagacggactgctggtgtgggtcctggcaggcgccctgggg

SEQ ID NO: 411400 - DNA, 100 bp, Homo sapiens
ctcacttcgtcccactgtggttaggggtcttgggcgtctttggtactggcttttttaggggtctgcctggggattacccttgctgtggatagaagcaact

SEQ ID NO: 411401 - DNA, 98 bp, Homo sapiens
tgggaacccaggccccgccgaggcggccaggtatatttgaaggctcccatgattctgaatggagtctgtgttatctggaaaggctggattgatctcca

SEQ ID NO: 411402 - DNA, 124 bp, Homo sapiens
cgtatgctgccgtggatctgatcagctgaggcctgagacacaggaccaggtaattcatttgcacacctgttagcaagaaacagaagttgaaggactggaacaagtgaactaggaaagagggaac

SEQ ID NO: 411403 - DNA, 90 bp, Homo sapiens
cctcatatgaaagagaaaggtgcccttaaacaaaacaagaaaaactgttcttgaaaaccacctgctatttagtcattgacaagtttggat

SEQ ID NO: 411404 - DNA, 76 bp, Homo sapiens
aggaatgaacatgtatttaaccaagttccaacaaaagaatgctgccgcaggtcacaaggcacttaaagcattgttg

SEQ ID NO: 411405 - DNA, 101 bp, Homo sapiens
gttccgcaacgagcgggccatccggtttgttgtgatggtgacccccgaggaccttaaggccaacgcagccttcatctcctcgtcctccaggcagcacaagc

SEQ ID NO: 411406 - DNA, 90 bp, Homo sapiens
gtatgaggcaagcgcagggggacggggaccagcagctgtcgccgccgctctcagagaaagtctattcgtgtgaccaggagaggcagagtg

SEQ ID NO: 411407 - DNA, 50 bp, Homo sapiens
gctggagagggagatcaaggcgatggcccactgcgtgaccttggttcagc

SEQ ID NO: 411408 - DNA, 98 bp, Homo sapiens
aaataatagacaaaactcagctaaatcctaccagtctacaaaagagagtaaaacttgtctcggcacagagtcaagtaaagaaagccaacatacagtgg

SEQ ID NO: 411409 - DNA, 100 bp, Homo sapiens
tttccaaagtttgcagaaaagaatatgagatttacctgctactgaagttgatgcatccaatataggatttggaaaaatcttccccaaacctaatttggac

SEQ ID NO: 411410 - DNA, 75 bp, Homo sapiens
gctcggggccaaggatgacttcgattacattgcagtgaaggagaagtatgccaagtacctgcctcacagtgcagg

SEQ ID NO: 411411 - DNA, 100 bp, Homo sapiens
acaacccctcaaagacagtgatgttgagcacatgccaaaatttaattcaatttcaattagtggataccatatgcaggaagcaggggctgatgccattctg

SEQ ID NO: 411412 - DNA, 123 bp, Homo sapiens
gaagacgtcgctggtgctgcgctactgcgagaacaagtttaacgacaagcacatcaccactctgcagtgggaatgtaagacggacttagatattgcatacaaatttggaaaaactgtggtgag

SEQ ID NO: 411413 - DNA, 100 bp, Homo sapiens
ctcctgggctcgagcgatcctcccacctcagtctcctgagtagctatgactacggatactgggtcgtcaggatggagttttgcaagactgggtcattgac

SEQ ID NO: 411414 - DNA, 83 bp, Homo sapiens
ggtctggctgggcaagcactacaagaagaataccctctaccatctgctttggtcagggtgccgctcgaggatttaaaagcaac

SEQ ID NO: 411415 - DNA, 75 bp, Homo sapiens
gaggaaacggagcgctgccctgcagcccgagcccatcaaggtgtacggacagctttctgaaacaaagactcattt

SEQ ID NO: 411416 - DNA, 100 bp, Homo sapiens
cctgagggaacatatggagagcaacttgttcctgagctgtgcaaccaatcagagtccagtggagaaggacagcctttcctgcctcagggaagaagagaga

SEQ ID NO: 411417 - DNA, 74 bp, Homo sapiens
gaagacagatcatgggactgataaattgccaaaccaaacaggaagcttacttttctctacctagccaatgatgt

SEQ ID NO: 411418 - DNA, 90 bp, Homo sapiens
tcagccctgaagaaaagggaaaacttgctgcggttgctcaaggtgatctgtgaaaatggttcgctattcacttgacccggagaaccccac

SEQ ID NO: 411419 - DNA, 90 bp, Homo sapiens
gtcaaccgcggaagtcttactcaatatggagtctcccagcgatatcctggatgagaagcagatctgtgaatgtgatgttcatgcttgcca

SEQ ID NO: 411420 - DNA, 73 bp, Homo sapiens
aaagtcaacccggagcgtgaggacagtgagactcgaacagattggattcagcatcaaaatacatctactcata

SEQ ID NO: 411421 - DNA, 100 bp, Homo sapiens
tcttgctttttactccttgttcatttgtctgttggtacagaccactttatggagctttcagggcgtctctggccgagcctctttttgtggaaaacgacag

SEQ ID NO: 411422 - DNA, 90 bp, Homo sapiens
attcaagtgaagcaaaagcctttcatgattataaattccgggtagatatgcctggctcaggcagtgcattcatccccaccatcaacgcca

SEQ ID NO: 411423 - DNA, 100 bp, Homo sapiens
tgatggatccatttctcctattgaggagtcaacgatcttgactggttcttatgataagacttctcggatctggtccttggaaggaaagtcaataatgaca

SEQ ID NO: 411424 - DNA, 100 bp, Homo sapiens
gcccatgccgcttgctccggagaagagccctaatttgtttagaactgtaatatgcacagttaaaacaacttgtcctctcaggaccttttgcagttagggt

SEQ ID NO: 411425 - DNA, 100 bp, Homo sapiens
gggaaaaggagaactcctgactgattagcattcacaccagttaaacacagtgggaatatcacttttgatgagattgtcaacattgctcgacagatgcggc

SEQ ID NO: 411426 - DNA, 100 bp, Homo sapiens
ctcaatttcaactctaactttaactttgcattggttggacaccttttaaaagtccacagatcctggtccctacaaataagcctgctcatgtgagataaga

SEQ ID NO: 411427 - DNA, 101 bp, Homo sapiens
aacaaatcttgttatgaagatgccatggcaatgacaggctcaacaccttgctcatccatgagtaaccacacaaaggaaagggtgacaatgaccaaagtgac

SEQ ID NO: 411428 - DNA, 100 bp, Homo sapiens
gagagctgaccaaacactaaggacctcagaatatattattcaagcttacaaatatggtgcatttgagaagatcccagagtttatcgcttttaggaacagg

SEQ ID NO: 411429 - DNA, 75 bp, Homo sapiens
gagctgcggaacaggacgccctctgatgatgggaaggccattgtgactatgtggtgattacagttgtcttactac

SEQ ID NO: 411430 - DNA, 100 bp, Homo sapiens
tggaggacacggccaagaggagtgtgtatgcctgtggcatcaaagccgaggtggtggggaagccttctcctgagtttttcaagtctgccctgcaagcgat

SEQ ID NO: 411431 - DNA, 90 bp, Homo sapiens
ggaggaggaagaagaggaggaggaagaggagctcatgggcatttcacccatatctccaaaagaggcaaaggttcctgtggccaaaatttc

SEQ ID NO: 411432 - DNA, 96 bp, Homo sapiens
aaggaagcttgcgtccacaagatattacgtcaacagcagccccttgaagacagtttcatttgtcccagcttttggagaaaatgaggctcagaggaa

SEQ ID NO: 411433 - DNA, 83 bp, Homo sapiens
tgatattgtacgatttctggtacagttagatgactacaggaagaagaggaaaggctatgaagatgatgattacgtctcaaaga

SEQ ID NO: 411434 - DNA, 51 bp, Homo sapiens
tgaacaatgaggtcatgatgaaggatctcccagccatccagccccggctag

SEQ ID NO: 411435 - DNA, 128 bp, Homo sapiens
caacatggcgcagtctattaacatcacggagctgaatctgccgcagctagaaatgctcaagaaccagctggaccagttaccgtgcagacggtctacgtgcagcaccccatcacctttttggaccgccc

SEQ ID NO: 411436 - DNA, 75 bp, Homo sapiens
gcagcagatggaggcgcatgcggggaaggccagcagcagcatgatctccagcaccctgccggtggcactactgag

SEQ ID NO: 411437 - DNA, 100 bp, Homo sapiens
aggcgtgcgcggacggtgtgcggcattgatctggtagccttgctccagaagcctgttcctcacagtcaagcctcagaagccaactcctttgaaacttccc

SEQ ID NO: 411438 - DNA, 98 bp, Homo sapiens
gtcttgcagccattgaaaagtgtggagaagctgctttaaatcccctcatatggaaaatttgaaatgcagaggggaaacagtagcaaaggagatcagtg

SEQ ID NO: 411439 - DNA, 90 bp, Homo sapiens
cagacacagactatgcagatgggaggtttcagcagagcagctttaccatttgggctggtgaggcgagaattatcctgtgaaggttattct

SEQ ID NO: 411440 - DNA, 100 bp, Homo sapiens
tgatgaagaagatccttcaaaattaaaagaggagcagcatggcatttcagtcactggtttgcagagtccagggcccttatattctcaagaccgaatcctt

SEQ ID NO: 411441 - DNA, 75 bp, Homo sapiens
tcctggcctatggcgagaaaggctatggtgaagtcatgggcattgggcgttcatttgaggaggccttccagaagg

SEQ ID NO: 411442 - DNA, 82 bp, Homo sapiens
tatcatgctggtggctctacccagaattcaattaaagtggctcagtgtaaacaggaacatcgataagtagtgtaaaaacttg

SEQ ID NO: 411443 - DNA, 100 bp, Homo sapiens
tggcgccactgccttggcagaagcttttagggtgacatctgttcccgagctgttcctgactgcagtgaagctcacccatgatgacacaggagccaggtat

SEQ ID NO: 411444 - DNA, 100 bp, Homo sapiens
ggactctccccgcctctccagcttcacccagcaccaccggcccgtcatcgccgtgcacagcgttgtggaagatatcaataagcgcagagagccgctcccc

SEQ ID NO: 411445 - DNA, 90 bp, Homo sapiens
gaaattagccggacccaggatgaagaggttggagatgggaccacatcagtaattattcttgttagttgaatccatggacatgaaacccac

SEQ ID NO: 411446 - DNA, 83 bp, Homo sapiens
ggcagaaatagcgaccatggcgaggggtattccctcagcggatactacacccatccatttcaaggctatgagcacagacagct

SEQ ID NO: 411447 - DNA, 90 bp, Homo sapiens
cggccctgtgactgcagccatggccacaggcttagctgttaacgggaaaggctctagaccaagatagaacagcccttcagaaagtgaaga

SEQ ID NO: 411448 - DNA, 76 bp, Homo sapiens
aggagacaggacctttttcaacttgacaaatagataacgaaggaggcccaacttcattcaataaggagcctgacgg

SEQ ID NO: 411449 - DNA, 98 bp, Homo sapiens
cgacagctgcggttggcgggcaccataggccgaagcacccggtaagactttgaccccgacgcaggcttcagtgattgccgcggatcagaagcctgagc

SEQ ID NO: 411450 - DNA, 131 bp, Homo sapiens
cggtcgagtgtggcctgtgtggactcgcatcttgcccgaagccgggcggaggagagctcaagctaaggaacttccagcaccattacttgatgataaatgtaaaaaggaatttgatgaagatgtatacaatc

SEQ ID NO: 411451 - DNA, 100 bp, Homo sapiens
ctgatttagatgaagaaatgattgtgttattaaaacggcgagatgtagctgaaaatctgaacaaaaaattgcagttttgtggagacagggtttcaccatc

SEQ ID NO: 411452 - DNA, 50 bp, Homo sapiens
cctacatcaaattggaaaagcttggagagtcaccaggagactaaagtcca

SEQ ID NO: 411453 - DNA, 100 bp, Homo sapiens
agtctcaagagatcctccagcctcagcctccctgggagttctgggaaatcgttcattcatttacagatgaacagaaaagactcttcttgcagtttacaac

SEQ ID NO: 411454 - DNA, 100 bp, Homo sapiens
tatgtggctaaagtggactgcacggcccactccgacgtgtgctccgcccagggggtgcgaggataccccacatggctgtttcaaatattagatatggagc

SEQ ID NO: 411455 - DNA, 90 bp, Homo sapiens
cctcagcctggtgagggtgatgttcgggaggaggccttgtccacaggaatgaccatacctgaagaagacgctgatgtgggacaaggcagt

SEQ ID NO: 411456 - DNA, 95 bp, Homo sapiens
ggatttcagtgacatcatggttaccattagatctcacatgcttactccttttgtggaggagaacttagtttcaggcagagcggcttgggtaaatc

SEQ ID NO: 411457 - DNA, 75 bp, Homo sapiens
agaaaatacaaatcacacgcataatggatgaaaggaaccgacaggtgccaagactggctagaggccctgcactgg

SEQ ID NO: 411458 - DNA, 71 bp, Homo sapiens
ggtgcgctgggggccggggcgcgtcgcagatgcagggacaaagtccacctgctccaaccagaggaatttcc

SEQ ID NO: 411459 - DNA, 75 bp, Homo sapiens
agcttcatctttcaagataacccgtggaattgaagcagttggtggcaaattaagtttccagagatgaatgatatg

SEQ ID NO: 411460 - DNA, 100 bp, Homo sapiens
cgtcattagcgtgaaaaccacaagcaggtccaaagagagagtggtgggcgccaaggttgtgacaaatgcccggagtcctggagctcgctgttacggtttt

SEQ ID NO: 411461 - DNA, 82 bp, Homo sapiens
tgctgcccctgctgtcgctcctggtcggcgcgtggctcaagctaggaactgtggctgcaccatctgtcttcatcttcccgcc

SEQ ID NO: 411462 - DNA, 124 bp, Homo sapiens
agctgttcgacttcgatgatttactgaaatttgatgacctagatggaacacatgctctgatgaaggagcttcaagagcagggggagatcagaatcgtccagctgggcttcgacttggatgccca

SEQ ID NO: 411463 - DNA, 75 bp, Homo sapiens
gatcgtcaagtctcccagcgaccccaagcaataccgtgcccagcatgggcagctcttcaccaatggggatcattg

SEQ ID NO: 411464 - DNA, 105 bp, Homo sapiens
ctttccatcaccttcatggaccaacataactttagtccaagatgtttctgctttgggacaaccatacatctaattccttaaagtagttttatatgtaaaacttgc

SEQ ID NO: 411465 - DNA, 100 bp, Homo sapiens
agataaactttctgatggcagtttttcctggttgcagcctgggttccttgtaacagggtttacccaaggtccagcctagcccctaggcaccatgtcggac

SEQ ID NO: 411466 - DNA, 90 bp, Homo sapiens
ggagaaaagacagcaatggaccgagtcgaggggagctgcagcgggagtcagacttcatggccagtgtagacagcagctggatctcctggg

SEQ ID NO: 411467 - DNA, 89 bp, Homo sapiens
acatgcttgtctgtgccaacatcaacttcaactacgagagtacaaggtagtgggtcgctgcctgcccacccccaaatgccacacgccgc

SEQ ID NO: 411468 - DNA, 75 bp, Homo sapiens
gctcgcagcgcatccccgcgcacaggccccttcccagctgcctgcctgccctagccagctcccaggtgaagagac

SEQ ID NO: 411469 - DNA, 100 bp, Homo sapiens
ggtagatggagagatgttacagaacataaagacagggctccatgcagtggaccgatgggcctctacagactggaaggaaaggaggtgagctggcctcagc

SEQ ID NO: 411470 - DNA, 99 bp, Homo sapiens
gcgtgcaggcgccctgcatgattcctggccgcgtgctttctactgtcaataccagcaaatatgcagaaagctatcggatccaaacctatgctgaatata

SEQ ID NO: 411471 - DNA, 75 bp, Homo sapiens
gtgacccaaggagagtgctacccggtgtactggaaccatggggtcgaggatttggtcttttgggttccatttttg

SEQ ID NO: 411472 - DNA, 100 bp, Homo sapiens
gggaagttcaagatcaaagtgccagcagattcagtgtcatgtgaggacgtgcttcctgcttcatagataagagagtgatggtgtgcaacaaacaacctac

SEQ ID NO: 411473 - DNA, 82 bp, Homo sapiens
tgttctcatcgtccctgccaactttccaagtctggggatggccagggcacacgtgtttcacgttgacaggtttgcttgggac

SEQ ID NO: 411474 - DNA, 90 bp, Homo sapiens
tacagctccaaatattctttccagcttttctgggagaagaggctacaaggacttagtgcatcagatgtaacagaacaaattataaaaacc

SEQ ID NO: 411475 - DNA, 75 bp, Homo sapiens
ttggattaatatgtctctgttcagatgacttcctgaagccacagatcatcacccagccagaaaccaccatggcta

SEQ ID NO: 411476 - DNA, 51 bp, Homo sapiens
gagatggtgcagaagatggaggagtgatgtccttgcattgcccatttttaa

SEQ ID NO: 411477 - DNA, 100 bp, Homo sapiens
cgagccgacaccatgcgatccaaggcgagggcgaggaagctagccaaaaccctgggcgctgcctatggcacagccaagagcggtaccggcattgcggcca

SEQ ID NO: 411478 - DNA, 100 bp, Homo sapiens
tccactttcgccagcccgtgccgcgagcgcggcctgcaggagatcagtcgcatcgaatacattcattcaaagaacttcatccaccgggatgtgaagccag

SEQ ID NO: 411479 - DNA, 50 bp, Homo sapiens
gagctggagctggagctgtcggaagctatgaaatgaagggcaaatcagat

SEQ ID NO: 411480 - DNA, 83 bp, Homo sapiens
ctgaggcggccgcggggcccgagcgcagtggccctcagattctcagcttgattctaaggaactttcagctggttctcaatttg

SEQ ID NO: 411481 - DNA, 88 bp, Homo sapiens
tttgcccagtataacatggatcagttcacgcctgtgaagatagaaggatatgaagatcaggccccctcccaccacctcctccagtaag

SEQ ID NO: 411482 - DNA, 96 bp, Homo sapiens
tccatggccagtgaggaagtcttgaagaatagagccataaagaaagcaaagcgcagaaatgttggatttgaagctataactactcctgccatggcg

SEQ ID NO: 411483 - DNA, 75 bp, Homo sapiens
gtggatcctacatgtgccatagggtgctaactgccaaagaaaggaaaactcaaattgatgatagaaacaaattga

SEQ ID NO: 411484 - DNA, 50 bp, Homo sapiens
aggcgaatggccgaatctctccgggaggacatgtatgcccaggactctat

SEQ ID NO: 411485 - DNA, 100 bp, Homo sapiens
tctacaaagaagcttgtgaaggacaggtttgtcaagggctatttaatgagttactagaaaatgggatttctgtgtggcctggttatttggaaactatgca

SEQ ID NO: 411486 - DNA, 90 bp, Homo sapiens
gcccagacggctcacctgtgcgggatggaacaaaaggtccctcgtctgagctggctcactcgcccaccaacagcgggaagaagctctttg

SEQ ID NO: 411487 - DNA, 152 bp, Homo sapiens
ctttcctgtgaaacctgaaacaaggtgatctggggaaccaaagactctgggactcttggtgccaacagagttactctggaagccaaaagatgggacaaccctgccctaggccttcacattcactctctactaactcactgactcacccagag

SEQ ID NO: 411488 - DNA, 83 bp, Homo sapiens
aatatggaaaacatatattggagctacatggatgtcagttgctccgattaaaaatgtttcgagaagatcatgggtcgtggatg

SEQ ID NO: 411489 - DNA, 102 bp, Homo sapiens
gtggacaccagcacccccagacctgacccttggggaagggagcgcatgaacctgaaggtgcccatctacttctccacggggctgaccgagaaggccaaccac

SEQ ID NO: 411490 - DNA, 90 bp, Homo sapiens
gtggtctggagaccatggagaccctcacggagctgggcgacgagctgaccctgggagacatcgacgccgcttacaaacacgcagatggca

SEQ ID NO: 411491 - DNA, 90 bp, Homo sapiens
ctacggcaccatgtacatgaagacacggcttttccaggtggcctggattcctccgtgtccttcgtgtctcaggtccttgggaaagcctgt

SEQ ID NO: 411492 - DNA, 75 bp, Homo sapiens
cttggagctggtgctttgcgtgctggtcagcatccggaacaacaggcttctgaatgcttatgatgaacatcaaac

SEQ ID NO: 411493 - DNA, 83 bp, Homo sapiens
gtggacacacaagcaccccaataacctcaaggagagtcgcggttgctgatcgtggtgcttgagtagagccgtggttggtgaca

SEQ ID NO: 411494 - DNA, 98 bp, Homo sapiens
ccatccacttatccagacccaatggaacatcagcaatgcttctgaaatcccatgctgttggcccccaggaaatccgagagcgagccacagtcttgcag

SEQ ID NO: 411495 - DNA, 75 bp, Homo sapiens
tgcatctcttgtcgcaggttagacttggaatggatcttactaaggaccctgatgctcccataagacagaaaatgc

SEQ ID NO: 411496 - DNA, 75 bp, Homo sapiens
tgccgctgatggagtgcgtgcagatggatcacagtcaccttctatatagcaccatccccaggatgcaggagccgg

SEQ ID NO: 411497 - DNA, 74 bp, Homo sapiens
cgatattgaagtgtcaaaatccatagatggaaaagatgaactcttcatcttggcttatacctatactgcctgat

SEQ ID NO: 411498 - DNA, 74 bp, Homo sapiens
gcgtgaccgagagcgcgaatatcgtcatcgttagaagaaacctgctaatattttagttatgggtgaaggtcctg

SEQ ID NO: 411499 - DNA, 98 bp, Homo sapiens
ttgtttataatttgggcatttggggtagtaagcattaataatgtctttcatctttgagtggatctacaatggcttcagcagtgtgctccagttcctag

SEQ ID NO: 411500 - DNA, 90 bp, Homo sapiens
cagaaaattttctagttttggggagacaattacaaacatgttttatcaatgcagctaaggttcatgattacaaagaaggaaccccagaag

SEQ ID NO: 411501 - DNA, 98 bp, Homo sapiens
tgtagctgaagcaagcacgaaaaatgctaacaacagcttcacgcttggtgatccagctatttttcctgccgtaattgtggaacatgttcctggtgctg

SEQ ID NO: 411502 - DNA, 100 bp, Homo sapiens
tggcggacggcgtggaccacatagacatttacgcggatgtcggcgaagagttcaaccagagatctaaaattgcagtgtttgataaaatgtggacctacat

SEQ ID NO: 411503 - DNA, 120 bp, Homo sapiens
ctgcgctcgctcctggagaccaacgaaatcccctcgcttatcctgtgggggccgccgggctgcggcaagagtttcttaatgtcacgagcgttcacctgttcaaggagagatgggacacta

SEQ ID NO: 411504 - DNA, 80 bp, Homo sapiens
ccctgcacagccgtcaccctcaactttcccttcagccccagtggacaggaaagctaaggcctcagcgatgccggactccc

SEQ ID NO: 411505 - DNA, 98 bp, Homo sapiens
gatccgctggcgctagtctgaccctccgccaggcaaaaggaagcaaattgtggctactaatttgccccctgaagatcaagatggctctggggatgact

SEQ ID NO: 411506 - DNA, 101 bp, Homo sapiens
acgaaattcttaattcccctgaccgtgcctgcaggccactgagaatgcaaaggaggaagtgaggcgaattctggggctgctggatgcttacttgaagacga

SEQ ID NO: 411507 - DNA, 50 bp, Homo sapiens
cttagataacagccatcctattgaagatcacctgcttcgggagaaagctc

SEQ ID NO: 411508 - DNA, 100 bp, Homo sapiens
tgagctgggcgagaggtgccaagggagcttctgtcccgaggaccaggggatgcgaagggacaactacacctttgcccaacctgggattcaaatgaaagtg

SEQ ID NO: 411509 - DNA, 76 bp, Homo sapiens
cgcatcttctcctttgacggcaaggacgtcctgaggcaccccacctggtccagatacttcgtctgcttcggatcct

SEQ ID NO: 411510 - DNA, 74 bp, Homo sapiens
acgggaagatcctggaggtggatctgaagaacggttccaagatgagatgggattctccaacatggaagatgatg

SEQ ID NO: 411511 - DNA, 100 bp, Homo sapiens
gcggtgaccaagacgctgcgggagcccggcgccggagcccaagcatcctgaggttagcattacacttctcccagtggagcccatgacttctgatcaggac

SEQ ID NO: 411512 - DNA, 50 bp, Homo sapiens
agaatacctttacagaggttaaaattgggtaattttgggagtgtggagat

SEQ ID NO: 411513 - DNA, 100 bp, Homo sapiens
ggcgctggaggagcgaggcagctgtactaggactgggaacgggtttggcagttctctaccagtggaccaatcttttcatccccgtgtacctcaccatcag

SEQ ID NO: 411514 - DNA, 100 bp, Homo sapiens
cggccatggtccaaccttgaagccgctttggcagagatcacggagatggtggcacagctccacggtacgatgatcaagatggagaatttccagaagctgc

SEQ ID NO: 411515 - DNA, 100 bp, Homo sapiens
cgtaggtctgttcgatatggagattttcagtattgtgagcaagcaaaatcagtaattgtggcagtgcgctggacacgcagatgcgcttgggagccagcgg

SEQ ID NO: 411516 - DNA, 75 bp, Homo sapiens
gggacccgcttcgcgttatcatcctggtcgcagggtgctgtatctcaccttcctgggagccccctgctacgcccc

SEQ ID NO: 411517 - DNA, 82 bp, Homo sapiens
acttgaacttaatacagcaagaaagaccatcaagtttaccaattgatctggagccagaaggaagagtgtatgtgatcatcga

SEQ ID NO: 411518 - DNA, 100 bp, Homo sapiens
ttgccagagggacttccgcaacaaaccctatcctgtccgagcaaagattacctattaccagaacacactgacagtgagcaaggcagaggggattctcctt

SEQ ID NO: 411519 - DNA, 50 bp, Homo sapiens
gcagcatccaaccaaaatcccgaatggtgaggttctggagaattgatgag

SEQ ID NO: 411520 - DNA, 91 bp, Homo sapiens
caccaacttcctcttcttcgggcccctgggattcagcttcttcttcaacatgctcttcgtccctgaaaagcaaaggcctcatctccatggc

SEQ ID NO: 411521 - DNA, 97 bp, Homo sapiens
cagaccatcaagctcaacatcgcaattgaaaaggctgtggtgtctcagcgcctgacagaatctccgtgtgctttggtggccagccagtacggatggt

SEQ ID NO: 411522 - DNA, 82 bp, Homo sapiens
acgtggtcaagtacgagagtggccctgacggaggggaggaactgagcgggctttggacaccatgaactttgatgtgattaag

SEQ ID NO: 411523 - DNA, 100 bp, Homo sapiens
tcgaccttcaatccagttccaaggactccacgggcttttctgggagaagaggctacaaggacttagtgcatcagatgtaacagaacaaattataaaaacc

SEQ ID NO: 411524 - DNA, 101 bp, Homo sapiens
tgttctctgtgttctcagaagacgttctgtatttcagcttcctgctatgtgccctctttgttcctaaagagttcaagctgaagaagatgtggaaaagtccc

SEQ ID NO: 411525 - DNA, 113 bp, Homo sapiens
gacccagaccctggagcctcagttggaagcagccgatccagcctgcggagcctgtggggcagagttacactgttagaccttatgatagccaagataacgagtgatgagccact

SEQ ID NO: 411526 - DNA, 87 bp, Homo sapiens
cctcgcctcctctcctaggtgccggccgggagggcggccgcagcagctctctctccagatcggattcaaccgcacatcatgacagat

SEQ ID NO: 411527 - DNA, 75 bp, Homo sapiens
ctcatggatgttcttcttcgagtatttgtagaaggcatcagaagagctaacaattgctggaatgacctttacaac

SEQ ID NO: 411528 - DNA, 50 bp, Homo sapiens
aaactattggataaacttcagaatccagctatgggacacagcaggacaag

SEQ ID NO: 411529 - DNA, 100 bp, Homo sapiens
aggagatttcattacttcacctgaaataagtcaaatctttggggaggaccctgatgctcccataagacagaaaatgccccttgatgatctggatagagaa

SEQ ID NO: 411530 - DNA, 96 bp, Homo sapiens
ctcactggggctgacaccttccgttctgagtggagtgacttgttgagtgacctccagaaagcaggtacatgtcccttgctgtgtgtgaacttgacc

SEQ ID NO: 411531 - DNA, 99 bp, Homo sapiens
gggatcctggagcactgcgtgatgtaccccatcgactgcgtcaagtctccttatatacatttgacaaagccaaacagtgtattggcacaatgaccatcg

SEQ ID NO: 411532 - DNA, 88 bp, Homo sapiens
tcttttggaggaggaggatgaatttgatagagagatatgggagtcctccacaaagagatccaaactggaacggtgagcggctaaacaa

SEQ ID NO: 411533 - DNA, 98 bp, Homo sapiens
aacattttgctccaaaagggatccttggccctgcgcaggctgttcggctcttgaatcccagcgatgaaaccaggaactcactttcccgggatgccgag

SEQ ID NO: 411534 - DNA, 100 bp, Homo sapiens
ccccgatctcctcgtaaatctcgacagccttcaggagatatcaatgatgtcaaacggctgaaacctggctacttagaagctactgtggactggtttagaa

SEQ ID NO: 411535 - DNA, 100 bp, Homo sapiens
ttgaagcagaagctggtgcccttggtgcggaccgtgtgcgtccgaagcccgaggcagaggaaccggctcccagatgctatgctgatggtggcagagaggc

SEQ ID NO: 411536 - DNA, 100 bp, Homo sapiens
cgccgtcccaacatcacaaaaaggtgaccgggttattgatgtgggatctgaatggcgaactttcagcaatgacaaagcaacaaaagatccatctcgagtt

SEQ ID NO: 411537 - DNA, 97 bp, Homo sapiens
cgtcaccgaaatccagggcatcccgggcgcggccagtggtgtcttcctggtttacatcatcctcggccgggttttcctgctctctgcagttttcttg

SEQ ID NO: 411538 - DNA, 100 bp, Homo sapiens
ctgagatttccttcgtccctgacatcatctctgtgcactgataataaccctgcagggtatcagctctgtgataacagcgtgggggtgctcttcaatgact

SEQ ID NO: 411539 - DNA, 82 bp, Homo sapiens
gcaacttcgcggtggtgaagctggcgcggcatcgagtcaccaaaacgcagggaaatcctcattgacgattcaatttgttgaa

SEQ ID NO: 411540 - DNA, 50 bp, Homo sapiens
gacagactcagatccaagtcaacagtgtgctggagttaatcttattctag

SEQ ID NO: 411541 - DNA, 105 bp, Homo sapiens
ccggagtggggtgtcggcgcctcattcgggtggagctgagccggagacagggaaagcaggcaggatgggagagtcgccgatagaaccacctcttccctgcctcct

SEQ ID NO: 411542 - DNA, 75 bp, Homo sapiens
ggccgcgagtgcatcttccaccaccctcatcacatgtgtggattctgggattctcagagtctggcatgacaagga

SEQ ID NO: 411543 - DNA, 75 bp, Homo sapiens
aaataatcatgattggagatggtgccacagatatggaagcctgtcctcctgctcaaattcaacacccaacagctt

SEQ ID NO: 411544 - DNA, 100 bp, Homo sapiens
ggcacttgtgagaagcgccgggacgccgagtatggcgccagcccggagcaggttgcagagttcaaggaggccttctccctctttgacaaggatggagatg

SEQ ID NO: 411545 - DNA, 74 bp, Homo sapiens
gagagcgcgaatatcgtcatcgttagaagaatcgctgttctggcatccatttgcgttactcaggcatttatgat

SEQ ID NO: 411546 - DNA, 74 bp, Homo sapiens
gctgaggaaagcaggaggaggtggcggcggcgggaagatcgcacgtaccgggtgccgaaggaggtccgcgtgga

SEQ ID NO: 411547 - DNA, 100 bp, Homo sapiens
ccggaagagacgagtgcggtaacaccgttcacagagctagccggacgtcctccgactcaagggtgtccatcgcgcttccttcactgccttgatcatgtcg

SEQ ID NO: 411548 - DNA, 74 bp, Homo sapiens
gcgggccgtgtctccggcatcatgtgtggtaagaatgattgatgttggctgatattggagtgctcattcacatg

SEQ ID NO: 411549 - DNA, 101 bp, Homo sapiens
ggttgggctccttggtaccatgtgggaagcgctgtgaagagttgttgccttccaagatatacccaaattcccagttccaggatgaagaggaagccggctta

SEQ ID NO: 411550 - DNA, 83 bp, Homo sapiens
cggatgccctgcagtacctgcagaaggtctctggagacatcttcagcagcttacaaaacactacacagcaaaataatgatctg

SEQ ID NO: 411551 - DNA, 100 bp, Homo sapiens
gtcaacagactgagcgcgtccaggcctgacagctctgcggctcgggccctgaggtattctttaggtgatgctagaaggcctcttcatgaaacagcagttt

SEQ ID NO: 411552 - DNA, 100 bp, Homo sapiens
agagcaggttccccccacagtgctacgccacccagtaccaggactacagcctgtcgtcagcccacaaggtgtcagagccccggagctatgtggagtctgt

SEQ ID NO: 411553 - DNA, 100 bp, Homo sapiens
atgggacagtacgacttcgtggactaccatttggttgcagcaaagaggaaatagttcagttctttcaagggttggatgggctgtctgagcgctgtgccca

SEQ ID NO: 411554 - DNA, 97 bp, Homo sapiens
gctctgcctcttccagtaacattgaggattactgtgttttgtgagagctcgctaggcgccctaagcaacagagctatcagttgagggatttgcagtt

SEQ ID NO: 411555 - DNA, 100 bp, Homo sapiens
cgaggccctgcggagctgcttcgccgctgcgtacaaaattggacagctgtacatgatcagcaaacacagccatgaacagagtgaccggggagaaggggtg

SEQ ID NO: 411556 - DNA, 136 bp, Homo sapiens
gagaagatcacctactccatcaaggtcatcgaggccaacaacccattccaggctgtgcaggaagggtgataaaagaaaatgtggctgaagttacccgaagttcagcttgcagtgtaattcagaagagttaagacca

SEQ ID NO: 411557 - DNA, 107 bp, Homo sapiens
gacgatgagttcattattaagacagtccaacataaagaggcggaatttctgcagaagctgcttccaggatactacatgcaagatgtacagaaattttctgacaatga

SEQ ID NO: 411558 - DNA, 74 bp, Homo sapiens
acttttaaatgcaaaacactcagagaaatcaccaccttctacagccttaccaataattctaggatcgtaggact

SEQ ID NO: 411559 - DNA, 100 bp, Homo sapiens
acactggaaacaaacagtatttctactggaaaaaccattttcagttaaagcaggtgtgaaacgatctgcagcggagatgtacgggtcagtaacagaacac

SEQ ID NO: 411560 - DNA, 87 bp, Homo sapiens
tttggaaatgtcatccgatggcacaatcagcgagaaccctctgcccacagtggagattgccatccggaacacgggcgatgcggacca

SEQ ID NO: 411561 - DNA, 83 bp, Homo sapiens
agcgacgacgcggaggcagagaagggaacgcccggcccagccccactgtgaaccagaagagctgactgactggtctatggatg

SEQ ID NO: 411562 - DNA, 78 bp, Homo sapiens
cggccacggtgatgagccgggcctggcggacgcggcgccatcgcagtcagtggccataatataattgtgataatgtaa

SEQ ID NO: 411563 - DNA, 50 bp, Homo sapiens
tgagatgtttctggaatatcaaaatcgtagctgatcgtctgttttcatct

SEQ ID NO: 411564 - DNA, 90 bp, Homo sapiens
ctggatacctgccctggcagcatggctcagactgcatgacagctgtgcaagttcattcgcaaacgtcctagaagtggaactgctgggtca

SEQ ID NO: 411565 - DNA, 86 bp, Homo sapiens
gcaacgagtcttcgccagcccaaaggcgactcgacaccgtcccagctgaagagaggtgacttaagagattaaaattaatttggttg

SEQ ID NO: 411566 - DNA, 90 bp, Homo sapiens
gcgtttccgccagagcagcgtggggaacatcttcttgtctgctggataccactacgtctgcctgcggaacgaggccaaccaaccgctgtg

SEQ ID NO: 411567 - DNA, 75 bp, Homo sapiens
cgggcagccaaggcaggcgagaagaccatctctgtggtcctacaggttgctgatcagctctgtgccaagtatagc

SEQ ID NO: 411568 - DNA, 100 bp, Homo sapiens
agggctgcagcccaggagcctcaaggcggcccggcgggcgactggacggccggacaggctcagatccacctacttggaaacatagtgatctgggtttcgg

SEQ ID NO: 411569 - DNA, 106 bp, Homo sapiens
gggacagcacctcatcccctggatgggggaccacaagatcctcatcgacagggcgtgatggtgggcatgggtcagaaggattcctatgtgggcgacgaggcccaga

SEQ ID NO: 411570 - DNA, 100 bp, Homo sapiens
tccccagaacggggttgcagaaatacccgtctacatcagaagcagtggacttgaaaatactggaaatctgtccggatccaaattattttgcaagccagat

SEQ ID NO: 411571 - DNA, 74 bp, Homo sapiens
acatggaggccgtgaagaccttcaatagcgaggaggagccattggatgaaagctcagtgaagaaaatgatcctc

SEQ ID NO: 411572 - DNA, 80 bp, Homo sapiens
agaagatgagaccgggggaggcgacgctaagttgctgatcgtggcggatgcttgaagcccacatgcagagctacaagggc

SEQ ID NO: 411573 - DNA, 75 bp, Homo sapiens
ggcgcgtcaggccgcgacgagggcgctgaggaccaagaatcgccttcagccctgtctggtgcatccttggcagaa

SEQ ID NO: 411574 - DNA, 75 bp, Homo sapiens
gcaaggctatgtttgacagcgattttaagcaagctgtgtcaaggaaagggctttatttgtgaattttgccagaat

SEQ ID NO: 411575 - DNA, 98 bp, Homo sapiens
ttgcctcaagtttctttcaccgcagtgggctaccataaacacatcaccttgatttttaatcccacgttagctgctatcaccaaattaagggcaaaagg

SEQ ID NO: 411576 - DNA, 100 bp, Homo sapiens
caaaaacctcagcctggaggccattcagctgtgcgaccgggacgtgcaaggatgatgctgaaaggaataacaaggcttatctctaggatccataaggtga

SEQ ID NO: 411577 - DNA, 75 bp, Homo sapiens
aaatccagaagtacaagcagtctggtgcaatggatgagcttcatagtctggatccaagaaggcaagagttattgg

SEQ ID NO: 411578 - DNA, 82 bp, Homo sapiens
ggagcagaaggactcggacacagggacctcaggatggaaaccagcagcctgcaccgcccgagaaggtcggctgggtccggaa

SEQ ID NO: 411579 - DNA, 100 bp, Homo sapiens
gagctggacagcctggatgggcggaaggacccccagcggtgcacgctgctggtcagccagttccgctcctgtcagatccatttcactgggcttggcttcc

SEQ ID NO: 411580 - DNA, 82 bp, Homo sapiens
taatttgaaccatgtttggattgaagccgcctctgtattacttaccaggccatgcggaccctcagttggaagcacaccctgg

SEQ ID NO: 411581 - DNA, 100 bp, Homo sapiens
cggccggcggcggagacggcgcgcggcgcttcgggagccagcgggtgctggtggagccggacgcgggcgcagattttgcaagaacgaggctcaaggatgt

SEQ ID NO: 411582 - DNA, 75 bp, Homo sapiens
cctggtgtcacctatcagtaaaaggaacctagaaagattgtacaatgaatggtgattctcgtgctgcggtggtga

SEQ ID NO: 411583 - DNA, 98 bp, Homo sapiens
cggctcagccctggagcagcacattgccagtgtccgggaggccctgggggtggagtctcactactcaagccgtgtggttttgccatgttctgttcagg

SEQ ID NO: 411584 - DNA, 75 bp, Homo sapiens
aggctccgggctgaagattgcttctcttctctcctccaaggtcaaaatgcagatcttcgtgaaaacccttaccgg

SEQ ID NO: 411585 - DNA, 75 bp, Homo sapiens
cttaacttttccaatgtggaatcctgggccttcattgatcccagccatcatgtccatagagaagatctgggcccg

SEQ ID NO: 411586 - DNA, 74 bp, Homo sapiens
atgtgggccctgcacgagctcaaaggacactatgcaatcacccgaaaggcagtcatggatcaggtaatgcagtt

SEQ ID NO: 411587 - DNA, 100 bp, Homo sapiens
atctgctctaaaccttatagcctgcttatgggggaagagtgtgaacatggctacgcctcttcattcccgtccatgccgagcccccgactgcagcattcaa

SEQ ID NO: 411588 - DNA, 103 bp, Homo sapiens
ctgtggggcctccgcgccgcggccgttagtcatgtcggagtgtgaacatggctacgcctcttcattcccgtccatgccgagcccccgactgcagcattcaaag

SEQ ID NO: 411589 - DNA, 120 bp, Homo sapiens
cacaggtcacagtaaggccaaaaatgtgcatactcacagagttagagagagggatggtggattttttatcaagcagaaatgcatcgaacaacgagaatcaagatcactgagctaaatccc

SEQ ID NO: 411590 - DNA, 100 bp, Homo sapiens
agggccaaggctctaggaagtgggatttctggaaataatgcaaagagagctggaccattcatccttggtctccaggaaaagttgggctttcaacattcaa

SEQ ID NO: 411591 - DNA, 98 bp, Homo sapiens
cctgcacgagatggacatccgctatgacaacatgcacatcccaggaaacccagaagttctgtgaacaagtccatgctgccatcaaggcatttattgca

SEQ ID NO: 411592 - DNA, 88 bp, Homo sapiens
ggaaaacgcttagagattgaacattcggtgcccaaaaaacaaaggtgctggagaatctggtaaaagcaccattgtgaagcagatgagg

SEQ ID NO: 411593 - DNA, 100 bp, Homo sapiens
catcctggaagctgggaaatggcttataccagccagtttgtatcccttgtgatgtttgcccttatgatgtgtgatgatcggatctccatgcaagaaagac

SEQ ID NO: 411594 - DNA, 100 bp, Homo sapiens
ctggaagatgacgacgaggacgccagttactccacggaaagcagcttcagcagcactccaggcacgtgacacaagctgacctcaagagctccacgttttg

SEQ ID NO: 411595 - DNA, 100 bp, Homo sapiens
tgtgatgttggagaactatagcaatctggttttcttgggtacatcgagtgaaagcattcctcaaactgccacacaaccagccatttctccaccaccaaag

SEQ ID NO: 411596 - DNA, 50 bp, Homo sapiens
tgtccctccgctatgaccttactaatgtccctcttccagtggaaagccca

SEQ ID NO: 411597 - DNA, 85 bp, Homo sapiens
ggagaatctgtgacggtcacaatggataatgttgcctgctataactgcggtagaggtggccacattgccaaggactgcaaggagc

SEQ ID NO: 411598 - DNA, 75 bp, Homo sapiens
gatgaacgaaatgtcccttaacaagaggagttgaagccaaacagccaaattctgccattaggaagtgtgtaaggg

SEQ ID NO: 411599 - DNA, 82 bp, Homo sapiens
ccatgaccctgaaggtccaggagtacccgaccctcaagttacagaatgtctgaaggggacagtgtgggagaatccgtccatg

SEQ ID NO: 411600 - DNA, 83 bp, Homo sapiens
cgcccgggaactgctgacgcttgatgagaaggacccacggcgtctgttcgaaggtgagaagccctaccactgcaactgggacg

SEQ ID NO: 411601 - DNA, 100 bp, Homo sapiens
agaagagtgagagagagctattagagattgtgaagaagaatttcgatctccgccctggggtcattgtcagagagctggcggtcaccatggcaatgcggga

SEQ ID NO: 411602 - DNA, 74 bp, Homo sapiens
cgacgagcgctgcactaacgcaggatccggctgccgaaggtcctcgccagtaccttctccaggcaaattccgtt

SEQ ID NO: 411603 - DNA, 100 bp, Homo sapiens
gactgctgtcagatagcacttgccttccccatattattcagagcccgggtactatgaagatggggcttttggaattcgcattgagaatgttgtccttgtg

SEQ ID NO: 411604 - DNA, 96 bp, Homo sapiens
tacagaaacaaaatgtcaacaaattgatgggtgagaaaactgatgcttggagatgtgatcactgcccagggtcacccaatgataacatgcatgcat

SEQ ID NO: 411605 - DNA, 82 bp, Homo sapiens
tttgcgacggaaatgtgtcatcgaaagccagacagaatgttgctgcgggatgtaaaagctcttaccctccactatgaccgct

SEQ ID NO: 411606 - DNA, 100 bp, Homo sapiens
ttcttggctgcctcgttgagtcttctctgcatcccagccatcacctggatttacctgttttctgggagcttcgaaggcagacctgttatcctaaactagg

SEQ ID NO: 411607 - DNA, 75 bp, Homo sapiens
ccaggcggagaaccggcggctgcacgagctgcggtgtgatgaatgcagactctgctaccattttggctgtttgga

SEQ ID NO: 411608 - DNA, 50 bp, Homo sapiens
cttgtccaagacgtactggtggcgagtttatgtgaagaaccagctcagtg

SEQ ID NO: 411609 - DNA, 83 bp, Homo sapiens
gggcgagcagcagttgagcgagcccgaggacatggagatggaaggtggaaaggagactatggaaccaggatccagcagtactt

SEQ ID NO: 411610 - DNA, 75 bp, Homo sapiens
gtggagctgctgaatcctgcccgcgtgaaccacatgcccagcacggcaaatccagtttgctgatgacatgcagga

SEQ ID NO: 411611 - DNA, 100 bp, Homo sapiens
atttacttgaaatgaaaggagattccaacctacttcagagataaggtctcactacgttgcccaggctggcctcaaactcctgggctcaaacaatcctcct

SEQ ID NO: 411612 - DNA, 75 bp, Homo sapiens
ctccatttggcctgaagcctcgatcaggcgcagttgtgtagcagttgagtaatgctggttagctgttaaggtggc

SEQ ID NO: 411613 - DNA, 82 bp, Homo sapiens
gtctccaggaggagcccagggccctctgccgcaagaaacagtggatttcagtcataatcggttgtctaactggaacatcagc

SEQ ID NO: 411614 - DNA, 74 bp, Homo sapiens
ctcaacacggatatcagcatcctgtccttgcagatcgtcagtatttaaacagatcacatcatgcgtgagtacaa

SEQ ID NO: 411615 - DNA, 100 bp, Homo sapiens
ttattgagtgccagcccggttcccggacagacaaggcgcctctgtcgaagagccttctgctggtccccagtgccctctccctcctgctcgccctcctcct

SEQ ID NO: 411616 - DNA, 82 bp, Homo sapiens
cgcggggaccgctgtgctctcggtgacttaagagattaaaattaatttggttgctgttggttctgaacaaataatgagttct

SEQ ID NO: 411617 - DNA, 100 bp, Homo sapiens
ggatcgatgtttcaatattggaagcgctttgatttacagcagctgcagctcccacatgtgtttgtgaattgtgttgaatgctttacattgaggctgcttt

SEQ ID NO: 411618 - DNA, 113 bp, Homo sapiens
acatcaaaactgttcggacttccccgttagaactcgcgtttccacttcagagatctgcaataagagctaactgccatcaagagccatcagtatgtcttcaagctgcatgccca

SEQ ID NO: 411619 - DNA, 100 bp, Homo sapiens
catggtatatttgcagccagtactctatatgaacaatccgtctggatcacggatgtaggaagtggatgacgacagatatgagcaggcgagtgacgtccgg

SEQ ID NO: 411620 - DNA, 83 bp, Homo sapiens
ggacagtgaggagctgggtggtcccagcctggagctgtgccagcctgacatgggattttttatcaagcagaaatgcatcgaac

SEQ ID NO: 411621 - DNA, 75 bp, Homo sapiens
ggaaaacaagctcagggcttccactgattctacattatggaaggatcagaatgttctctctccagtcaactgctg

SEQ ID NO: 411622 - DNA, 50 bp, Homo sapiens
tactctgatgtcaatcttgagggctagagttgatctctctaatgtattag

SEQ ID NO: 411623 - DNA, 82 bp, Homo sapiens
aactttatttcctcccagaagacactccccagggcagaaatagcgaccatggcgaggtcagtatgggaatcctttaaataaa

SEQ ID NO: 411624 - DNA, 95 bp, Homo sapiens
tggggaccatgcagagctacatggatgcctcccttatctccctcattgaggattttgggagccttggagaggccatcctcttcctgcagcagctt

SEQ ID NO: 411625 - DNA, 96 bp, Homo sapiens
cgtggggagacagcgccgggagaggccggcagccccgggacacccccgcaagcgagcaggtttcagcaagcagatggtggaaattcttcacaaaca

SEQ ID NO: 411626 - DNA, 100 bp, Homo sapiens
gggggttatggtgggaggagccgatactgagcttcttcctatttgccatggatgcagaatcctgatacactatcagcaatgtcaaaccctagagcaatgc

SEQ ID NO: 411627 - DNA, 76 bp, Homo sapiens
acgagagtatatgcgatgagtttggtgtatgtggaatttgatgatcttgaatgggataaacgagagtgggttaaag

SEQ ID NO: 411628 - DNA, 83 bp, Homo sapiens
acgagatccactggatcatcgtgcagtccctgaaggctgtggcggtttgtctacagattttgagcgttcgaagttgacccctg

SEQ ID NO: 411629 - DNA, 75 bp, Homo sapiens
aagcctttctttctgatagaaagctgtttaaaccttctttggactaaatgctcttccttcagaggattatccggg

SEQ ID NO: 411630 - DNA, 100 bp, Homo sapiens
tgggggccacaccatttgccgtggccaggctagagggagactgccagactcgggaggaggcagtggcgctcggcgtgggtctgtgcaacaatggcttcat

SEQ ID NO: 411631 - DNA, 98 bp, Homo sapiens
aagagattcagtatcactcgctcccttgatgatcttgaggttgaaatcacaaagattagacacctttttagataggtgttcttcagcaccactgacaa

SEQ ID NO: 411632 - DNA, 90 bp, Homo sapiens
gcccgaacaccgcgccttcggaagcccgttcggcctggaggagccgcagtgggtcccggacaaggagatgtgaatcccgatggagcggcc

SEQ ID NO: 411633 - DNA, 97 bp, Homo sapiens
catcttgacgaggctgcggtgtctgctgctattctccgagcttcgcaatgccaaggccacctttgatgccatttctaagacctacagctacctgacc

SEQ ID NO: 411634 - DNA, 83 bp, Homo sapiens
tgcagagctagttcctctccagctcagccgcgtaggcgtccgacctccgatcatgaacgggcccctgcacccgcggcccctgg

SEQ ID NO: 411635 - DNA, 100 bp, Homo sapiens
acataccacctccaggatcaggatgcagagctgtgttggggtggaagaggaggaggcgcccgacatcgacatataccactgcccaaactgtgagaaaacc

SEQ ID NO: 411636 - DNA, 50 bp, Homo sapiens
gcatccctttaatagaaactcaaggacgcactctctgagatattttcgcc

SEQ ID NO: 411637 - DNA, 100 bp, Homo sapiens
cgcgatgggggcgcaggaccggccgcagtgccacttcgacatcgagatcaaccgggagccgggttgttgactatatactgccacccttggtgtccttggt

SEQ ID NO: 411638 - DNA, 100 bp, Homo sapiens
gcggtcgccaggtctcagggccgggggtacccgaggttatgatgtgattgctcaagcccaatctgggactgggaaaacggccacatttgccatatcgatt

SEQ ID NO: 411639 - DNA, 97 bp, Homo sapiens
ggcctgcgtccgagtctccgccgctgcgggcccgctccgacgcggaagctggtttaggtgaatttcgaattcgtgacctgaatgatgaaattaacaa

SEQ ID NO: 411640 - DNA, 97 bp, Homo sapiens
atgtaccctcagtacgccacctactattacccccagtatctgcaagccaaggatgtgatggagctgcttgaagaagatctcacatgccctatttgtt

SEQ ID NO: 411641 - DNA, 75 bp, Homo sapiens
ctattgaccaccgaattccaaattctcagaggcttgacccatcttatcaccgtcttctctggcactcagtatttg

SEQ ID NO: 411642 - DNA, 74 bp, Homo sapiens
aggaaacctttccaacacagatgtccaagctgccaatctacccatggtgttggaatgaatggaaataatgcagc

SEQ ID NO: 411643 - DNA, 101 bp, Homo sapiens
aaggagggcggcgggactgcactcgagtgtccagacctgctcgatggatgttttgctctgagcaaatgcaggaccgtggcgggccccgtggggggatccct

SEQ ID NO: 411644 - DNA, 98 bp, Homo sapiens
gatgataaagcatgtcagggaacttgctgagcaactattcaaaaatgttgttggaggaagagtcttccaagagggctgaactagaaaagtggcacttg

SEQ ID NO: 411645 - DNA, 90 bp, Homo sapiens
cgatgctcgcagcaacccagagcccacaggctataattggagcacaaccacctggccgtgtttgcagcggtccacccgccggcccccagc

SEQ ID NO: 411646 - DNA, 97 bp, Homo sapiens
tctttgaattggtggaacttgttggaaatggaacatacgggcaagtttataagttggttcgactatgcaatgagggcgcccggaagatggaaaggac

SEQ ID NO: 411647 - DNA, 75 bp, Homo sapiens
gaagggaaccaacccactttctcggcgccgcggctcttttctaaaagtgactcatgcccgttgcacagcagccgg

SEQ ID NO: 411648 - DNA, 100 bp, Homo sapiens
gggaccccgtgtcatcgcccaggccgagcacgaatgcaatgagagccactatggaacaccatgccaacagaggtgtttacccccctattcaagttcatgt

SEQ ID NO: 411649 - DNA, 76 bp, Homo sapiens
tcagccttcctgcataccctggaccagcagaaacctagagtgagtgaagatagtccaagtcctaagagacagcgcc

SEQ ID NO: 411650 - DNA, 100 bp, Homo sapiens
ctacaacctcagggggaacaaaagcatctccatgagtgtggctgggtcacgacaaggtgcggttcctcatctgagaggctctccgtgcaggcgatggggc

SEQ ID NO: 411651 - DNA, 75 bp, Homo sapiens
agcaccatggggaagcgggacaatcgggtgcccctggaggaacgcgcatagatgatggtgacaagaccaagatga

SEQ ID NO: 411652 - DNA, 74 bp, Homo sapiens
cctgacctctctgatgagatggatcgtgtgtgttttaatagaaaagttgtcactttccaaaatgccctttagag

SEQ ID NO: 411653 - DNA, 100 bp, Homo sapiens
ccgccagggactggggtgagcggcccagttcctctgtgacgagggtgcaggtatctctggggactacatcgatcgcgtggacgagcccttgtcctgctct

SEQ ID NO: 411654 - DNA, 74 bp, Homo sapiens
ccccgggcacgacctctcggacacggtgcaggcaggaatactcccccagttgcaagaggcgcaggaccgtggaa

SEQ ID NO: 411655 - DNA, 75 bp, Homo sapiens
gtctgcgagccaggattcccggtggtcaagtaccccctgcacgccatcatggagatcaaggagtacctgattgac

SEQ ID NO: 411656 - DNA, 74 bp, Homo sapiens
tggagtgcgtgggggaccggctgttggcgggtcgcgtggggcaggcagtggcgctgcgggccaaggccttcggc

SEQ ID NO: 411657 - DNA, 74 bp, Homo sapiens
gctcccttccccgcgcagccccgcacggcccgggcccacggcgaactttctgaccaagtatacaactacccaga

SEQ ID NO: 411658 - DNA, 100 bp, Homo sapiens
ccccactaacggggacttcacctttgtctcctcagcagacgcggaaggtatggcccatctcctgtacgcttggagcgacctttggctacgtggctggcct

SEQ ID NO: 411659 - DNA, 85 bp, Homo sapiens
tttgcacaagggcagtcaccatgaaaggttatcctgaatacatgtctaacaattttccttgcaacgttagctgttgtttttcact

SEQ ID NO: 411660 - DNA, 96 bp, Homo sapiens
cctcctgtcaagcgagaaagaacatcctctttaacccagttcccaccctcacagtcaggacctgaaggagaagaaggagaaggtggaggagaaggc

SEQ ID NO: 411661 - DNA, 89 bp, Homo sapiens
gagaaagtaacaagaatcattcttgcagcatttcgtactttgagaatcactacaagaaaaactccttgtggtgaaggttctaagacgtg

SEQ ID NO: 411662 - DNA, 100 bp, Homo sapiens
gctgtcccccagcagaggtgtccctggatacagatggcaggatggtggctggcaaagtgttgatggcaaagcaagaaattgttgaatgtgtagcctcagc

SEQ ID NO: 411663 - DNA, 50 bp, Homo sapiens
agaaaagcccccaaaagcagctattcaggctgatcagctgaccgaagaac

SEQ ID NO: 411664 - DNA, 49 bp, Homo sapiens
gccgcattttttaaccctagatctcggttggtgacatcgtgaaagtcac

SEQ ID NO: 411665 - DNA, 85 bp, Homo sapiens
cggagcggattattggagctacagactccagtggagagctcatgttcctgatgaaatggtgtgatgaatgcagactctgctacca

SEQ ID NO: 411666 - DNA, 100 bp, Homo sapiens
caagatgtaggacatctccatcaattcaggaggctccctccgggttacccccactccagaggttggtcaaagaaaaagtgatgtatgaaaaagaggcaaa

SEQ ID NO: 411667 - DNA, 75 bp, Homo sapiens
ccggtacatctgaaagccgggaaatggacaactacacctttgcccaacctgggattcaaatgaaagtgaaaatgt

SEQ ID NO: 411668 - DNA, 100 bp, Homo sapiens
aataccaatgaatttcccaatattggatcctgggtcagaatgaaggaacgatttccgtagttgaaggagaaacattgtatgtcatagaggaagacaaagg

SEQ ID NO: 411669 - DNA, 101 bp, Homo sapiens
cccgtcgtcgtctgccttcgcttcacggcgccgagccgcggtccgacttgccttgcgccatggactggcagccagacgagcagggcctgcagcaggtcctg

SEQ ID NO: 411670 - DNA, 73 bp, Homo sapiens
tcacggcttcctaaacacctcttatcaccggcaagaggtttctaccatgaatgaaatgaagagttattctcaa

SEQ ID NO: 411671 - DNA, 75 bp, Homo sapiens
cgagtcgagcctcctgcggcgccgcgggctccaggtccacccagatcaagacctactcatgggacaatgcccagg

SEQ ID NO: 411672 - DNA, 100 bp, Homo sapiens
ctgacgcttgatgagaaggacccacggcgtctgttcgaagtgctcttaaagttccgtacagataaaggaagagatcccagttctgatacatatgaggaag

SEQ ID NO: 411673 - DNA, 90 bp, Homo sapiens
tctacctcaacttctgctgcctgggcttcatcgccttggcctactccctcaaagtggtctttgggaagaagcttcctgcctttgccacca

SEQ ID NO: 411674 - DNA, 98 bp, Homo sapiens
tatgaataatgactttcctccaagagcacattgcctggtaagatggaccgccgggagagcctgcccacctccccaccctggacgccgggcgcgtcccg

SEQ ID NO: 411675 - DNA, 75 bp, Homo sapiens
gcacagaaggtgccttgctcctcctggaaatgctgaaggccaccatgagccaggaggataagatcaatgccctca

SEQ ID NO: 411676 - DNA, 49 bp, Homo sapiens
gggcggccaggggccgactgtgaaggacataagcagatgttcaacccaa

SEQ ID NO: 411677 - DNA, 51 bp, Homo sapiens
cacacctccagaatcaggtgtctgaaaactactggtcagaagttatatgta

SEQ ID NO: 411678 - DNA, 100 bp, Homo sapiens
cttggcatgggctacaaggaaaacggtatataatgtttacatggcagggaggcagctgtgttctaagcggtaccgggagtttgctatcctacaccagaac

SEQ ID NO: 411679 - DNA, 96 bp, Homo sapiens
gatcctgttagccaacaaaaaagacttggaggaggcagaggtgagaactcaacagaggcaaaagcagtagattctaacaatcagtcgaagtcccca

SEQ ID NO: 411680 - DNA, 100 bp, Homo sapiens
gtcgcagcgagctggagccgccggagtgtggaaattggtgaaagtgtacgtggagaggatgtctacattgttcagagtggttgtggcgaaatcaatgaca

SEQ ID NO: 411681 - DNA, 75 bp, Homo sapiens
aagtacagagatgccaagaacaggaaacggaccaatgtctgtaattatatccagatcgagagacagaagattctg

SEQ ID NO: 411682 - DNA, 87 bp, Homo sapiens
ggcggcggccaggtccctgctgaatcacacgccgccatccgggaggcccagggaaggaatggtttgcagtgtatgtggaacttaatc

SEQ ID NO: 411683 - DNA, 50 bp, Homo sapiens
aaggaacagacccctgtagcgggacaactgtcatctgggaagtaacaacg

SEQ ID NO: 411684 - DNA, 90 bp, Homo sapiens
tccacgggaagcctacacgcccaaggtcctggctataagtcaccatggcacagcaagctgccgataagtatctctatgtggataaaaact

SEQ ID NO: 411685 - DNA, 100 bp, Homo sapiens
caccctggtggcctttccctccagctctgtctatcctaccaaggccaagaagacgctggagggaggctgttaggagggactctgagcttcacacctgtct

SEQ ID NO: 411686 - DNA, 75 bp, Homo sapiens
agactcacctgcaagtactagctctgataacttgggttctttacaaatgtgggcgctatctccaactgtctttgc

SEQ ID NO: 411687 - DNA, 98 bp, Homo sapiens
cgggtttgccgccagaacacaggtgtcctgatggcaaatttcaagggccacgcgcttccagggagtttcttcctgatcattgggctgtgttggtcagt

SEQ ID NO: 411688 - DNA, 75 bp, Homo sapiens
cgaaggagtctgtttttcaacccaggaagctgtttgatgaagacaatccagtacacaagtctggaaccagataca

SEQ ID NO: 411689 - DNA, 110 bp, Homo sapiens
gagaggaggtggaccagaacttttggaactagtgccggcggctctccaccccccagatttggagcaagaggtggtggtggccttcccccgaagaaatttggtaatcctgg

SEQ ID NO: 411690 - DNA, 107 bp, Homo sapiens
ctgggtcagtccgccgctcaccccgcggccgcaccttcccgccttctcaggtcgcgtggggcaggcagtggcgctgcgggccaaggccttcggcttcaacgtgctct

SEQ ID NO: 411691 - DNA, 82 bp, Homo sapiens
cgcgcagtgctgccaacgccccggtggagaagctgagggagaggatcctccacagtggtatcctgctgcgtgcccctccagg

SEQ ID NO: 411692 - DNA, 50 bp, Homo sapiens
ttcagggacgtagccatccagaggctatggaaagggcaaatggaatggag

SEQ ID NO: 411693 - DNA, 82 bp, Homo sapiens
gaacgcattgccgccggtcctgaccaccgtgaacggacagtcccccccaggttgaaatcacaaagattagacacctttttag

SEQ ID NO: 411694 - DNA, 100 bp, Homo sapiens
caactgcaacatcagtgacagtaacccctgctattcaagatctctggcagtggaggaagtctctttaagaaaatagtttaaacaatttgttaaaaaattt

SEQ ID NO: 411695 - DNA, 75 bp, Homo sapiens
ctattggaggaaaacacaccaagatttgcctgcaatggataacccagtgtttttggaattacttagattggatag

SEQ ID NO: 411696 - DNA, 76 bp, Homo sapiens
acaacagcgaggaagaagaggacgacgacgacgaggaagaggaggtttctgaggatgaatctggttatagatggac

SEQ ID NO: 411697 - DNA, 50 bp, Homo sapiens
cgcaggacctgcagcatcccagagagtctcactctgtttcccaggctgga

SEQ ID NO: 411698 - DNA, 90 bp, Homo sapiens
ggtttgtactatcctcggtgctgtggtgcagagctagttcctctccagctcagccgcgtagtgtatgggtttcgacagaccatgatgaaa

SEQ ID NO: 411699 - DNA, 74 bp, Homo sapiens
ggacctgcagcagctgagaaaggagctcggggactcccccaaagacaagtttgatgaaggccggaacaactttg

SEQ ID NO: 411700 - DNA, 51 bp, Homo sapiens
ggctctaggaaacatatgttacgatagccacggagtctcgctctgtcaccc

SEQ ID NO: 411701 - DNA, 80 bp, Homo sapiens
atctgctgggacatgcctgaacacactcaccgggcacacggaatgggtcaccaaggaatccctgggccactggagtcaag

SEQ ID NO: 411702 - DNA, 83 bp, Homo sapiens
cggagagcgagagcgcgaaggaaatctggccgccgccgccgcgagcgctcccgtttaagctatgaagaaggacatccctcaca

SEQ ID NO: 411703 - DNA, 83 bp, Homo sapiens
tgggcgctccggtggcggcggaggtttttagaacttcagccataaaaatgggcagaattttccttgatcatatcggtggtacc

SEQ ID NO: 411704 - DNA, 100 bp, Homo sapiens
gaccagagaaggaatcctttctttaaagaagagtcaagggtccagagaaggaggagaagttgagacaggcggtcaagcaggtgctgaagtgtgatgtgac

SEQ ID NO: 411705 - DNA, 93 bp, Homo sapiens
gcggccgggagccatggagcgcggccctggggcccgggggcgcgggccggggtgatgccatggacaatattaccaggcagaaccaattctacg

SEQ ID NO: 411706 - DNA, 82 bp, Homo sapiens
gtgggagacggcaagggttggatttttcaaaagagtaaaccagattgaagactatgatgtgatagctagcatgataggagcc

SEQ ID NO: 411707 - DNA, 50 bp, Homo sapiens
tggagagccccagacagtcgcttgaagagttgcctttccccatcttcctg

SEQ ID NO: 411708 - DNA, 100 bp, Homo sapiens
gtgaacagacacgggtgaatgctgctaaaaacaagactggggctgctcccatcattgatgtggtgcgatcggtttatgatgataaagactacaggagaat

SEQ ID NO: 411709 - DNA, 90 bp, Homo sapiens
catgaagaaggggctggatccgtgggtcagagaacacaggaccagtttgccatcccaaggccgaagaaagctcctgctgcttctgtaccc

SEQ ID NO: 411710 - DNA, 138 bp, Homo sapiens
cgaggacttcttcttcaccgccaggacctccttcttcaggagagcgccccagggcaagccccgctccggccaacaagatttaggtcctgaatatgaaggtatatttaacacttcattgcagtggatcttagaaaatgg

SEQ ID NO: 411711 - DNA, 83 bp, Homo sapiens
cgacgaggatatcgtgtctggagcagtggagcccaaagacccctggagacatgccctcccaggcccaatacttcaaagcatcc

SEQ ID NO: 411712 - DNA, 98 bp, Homo sapiens
gagttgatggatataatcgctgaaaacgtgctcaggacgcaaagtaccacatgcagcgctgcattgactctggcctctgggtccccaactctaaggcc

SEQ ID NO: 411713 - DNA, 75 bp, Homo sapiens
ggcccggacccatgcagcttgggcccgcatcatcgcttgttcggcagccttaagtgccttgaaacaattttctga

SEQ ID NO: 411714 - DNA, 83 bp, Homo sapiens
tggcggggactactggtgcctgcgctgaaaaagagttttcttgaagtacaactaaggacaggtcaccactaggcactaacatc

SEQ ID NO: 411715 - DNA, 75 bp, Homo sapiens
tatgtgcctgtaaaagaatacccagatgagatgagtatgatgtatgtgccatttgtttggatgagtatgaagatg

SEQ ID NO: 411716 - DNA, 99 bp, Homo sapiens
ctcaatatctgtcttcggtggactccttcggcagtccacccaccgccgccgcctcccaggatgccggctccaggagcagcagtggaggtcgggaacgcc

SEQ ID NO: 411717 - DNA, 90 bp, Homo sapiens
acgttccagaagcggcagaagcttacctccgagggtgccgccaagctcctgctagacaccttgttctaagctggtctatgtccatcacct

SEQ ID NO: 411718 - DNA, 75 bp, Homo sapiens
cgccaaggtccgcaagagagcatctgagaaagagctcatgattgccggaagagctggggttctcttcttcctgac

SEQ ID NO: 411719 - DNA, 100 bp, Homo sapiens
ggaaaaactgagaatcagagagggctagtgatctctcagacacttggtcggtagcctccacaaatgggaagtgttcctgtaatgacgcaaccaaccttaa

SEQ ID NO: 411720 - DNA, 105 bp, Homo sapiens
ttcggagaagcagtggtgggttccatgtgatggtggagtaggaggcaggtctccgcggtacatcaggaacgtctctatcaagaatacaatttcagcaaggctgag

SEQ ID NO: 411721 - DNA, 50 bp, Homo sapiens
tactggctgagggcagagactctcccggcgtgccgctggtgacggggtac

SEQ ID NO: 411722 - DNA, 97 bp, Homo sapiens
tgagcggcggctcggcgcaagcctgacgagcaggagccgagctcagcaggtccgggtgctggagaatctggtaaaagcaccattgtgaagcagatga

SEQ ID NO: 411723 - DNA, 75 bp, Homo sapiens
tcgcgtttccacttcagagatctgtactatactggcaattgctggagaagattttgcaattgttgcttctgatac

SEQ ID NO: 411724 - DNA, 100 bp, Homo sapiens
ggtctgtggagtggctggaggaggatgaacactatgattaccaccaggagattgcaagacttcccaagtaagaagcggaagaggagccgctggaaccaag

SEQ ID NO: 411725 - DNA, 90 bp, Homo sapiens
ttccagagcctgagggaagtgggcaatgccatcctcttctgcctcctcatagagcaagctctggacttctccaggcctcggccgccccag

SEQ ID NO: 411726 - DNA, 83 bp, Homo sapiens
cgggccaggaagcgcatccaggaggaagggaaaaggccgaggcatcagcgtgtgaagaccgcaaagacgatcccgagtacagt

SEQ ID NO: 411727 - DNA, 96 bp, Homo sapiens
ggccttgacctatgaccccaccacagctcttcagaatggttgtgttagcagtgcctgggcctgggcctcagagggaatgaaatccacagcggacct

SEQ ID NO: 411728 - DNA, 99 bp, Homo sapiens
ccgtaacacagaagtaaccagactgccatggtagacatgggagagacgaggaagctgagaaaggcggagacagcagccaatcgcatctgcaaggtgttg

SEQ ID NO: 411729 - DNA, 83 bp, Homo sapiens
cctacccatccgccaggagccctcttccttcagacaatgcagatcttcgtgaagactctgactggtaagaccatcaccctcga

SEQ ID NO: 411730 - DNA, 100 bp, Homo sapiens
gcagcggcaacagcagcagcagcggctccggcagcggtagcacgagtgcgggcagcagcagccccggggcccggagagggttgtctcctcacagactatg

SEQ ID NO: 411731 - DNA, 100 bp, Homo sapiens
aagaggccgagccgtgtcgaagatgatttcaggtatgctgctgaaagtgggaatcctctacattggtgggcagctggtgaccagtggggctgtaagcagt

SEQ ID NO: 411732 - DNA, 75 bp, Homo sapiens
gtcaacctagaccaatggacagcagaacagatacagattgattataccggaacagagccttccagtccctgtaat

SEQ ID NO: 411733 - DNA, 82 bp, Homo sapiens
gaggccgacttcttgtatgcatactccacagcacctggaaataatgcaaaaggtgtcccaaggctcctgaccagtgaacaaa

SEQ ID NO: 411734 - DNA, 97 bp, Homo sapiens
taagctcttcagggaggaattcaactctacaggtgtatccagcagctccaaagagacagcaaccagcaagaatgggccatagtgacgatggtggttt

SEQ ID NO: 411735 - DNA, 100 bp, Homo sapiens
gtttggcagctgagtattggagccaggagcctgccatgagaatcatagtgaaagattcgttttcattgcagagtggtatgatccaaatgcttcacttctt

SEQ ID NO: 411736 - DNA, 98 bp, Homo sapiens
gtcgtgtacagcgggaccccgtggaaacggaggaactacaaccagggagtcgtggggaaactggagcacccatcctaactgatgatgttagcctgcag

SEQ ID NO: 411737 - DNA, 75 bp, Homo sapiens
gaaaataatgggaaggaagaagtatccaagtattttaataagcggaaaacctactttgctcacgatgcccttcag

SEQ ID NO: 411738 - DNA, 100 bp, Homo sapiens
cgcagatgagaagacagcatctctgtgtcagctacagcctccgcttggcgtcccgatgctctccaccagcggccccgtacatcaccaggcagtataggaa

SEQ ID NO: 411739 - DNA, 100 bp, Homo sapiens
aatatgtgacctgtatcctaatggtgtatttcccaaaggacaagaatgcgaatacccacccacacaagatgggactagcccgagccaagtcagttcccac

SEQ ID NO: 411740 - DNA, 100 bp, Homo sapiens
caagtggactccgagtccagggcagagcctcagttaggcggagctggagtttgttcagatcatcatcatcgtggtggtgatgatggtgatggtggtggtg

SEQ ID NO: 411741 - DNA, 90 bp, Homo sapiens
taacaataattttgaaaatgctttgtgcagaaaggaatcaaaagaatatttagaatgcaggatggagagtgtcatcatgctggatgaagc

SEQ ID NO: 411742 - DNA, 75 bp, Homo sapiens
ctcctattctgattgctacagatgtggcctccagagggctagatgcacgaaggagagagagtgagaagtctctag

SEQ ID NO: 411743 - DNA, 74 bp, Homo sapiens
atggagcaacaggatcagagcatgaaggaaggggttcagaatttaacattacgcagccagaagttgggtgtatt

SEQ ID NO: 411744 - DNA, 75 bp, Homo sapiens
gagaactgctaacctagggctactgttgattttgactatcttcttagtggccgtgtgtcccggcatggatatccg

SEQ ID NO: 411745 - DNA, 75 bp, Homo sapiens
cgagatgtagttcctgagcatgaggctcccagcagtgagtactacgacatttctgccaaaagtaactacaacttt

SEQ ID NO: 411746 - DNA, 89 bp, Homo sapiens
gaaaacaaagcatgccaatcttttagacattccattggaagtattatcagaaaatccacccagcttcaccattactgtgacgtctgagg

SEQ ID NO: 411747 - DNA, 100 bp, Homo sapiens
tgcctcagcctccccagtagctgggattacagtgtgttaacagggcacaaccattatgtgatgtgtgctcagttccaccccacagaagacttggtagtat

SEQ ID NO: 411748 - DNA, 90 bp, Homo sapiens
cctggagaagcagatggaaaaggcccgctacaacttcatccgaagcatggccgcctacagcctcctgctgttcctgctgcagatcaagga

SEQ ID NO: 411749 - DNA, 75 bp, Homo sapiens
aatggactccctggctgctggagagttgaatgccagccaccagccatgggtccctgcggatgtgatggcccagct

SEQ ID NO: 411750 - DNA, 90 bp, Homo sapiens
cagccatggagttctacttagaggacaaccctccatatgataagggagccttcagaatcgaaatcaactttccagcagagtacccattca

SEQ ID NO: 411751 - DNA, 100 bp, Homo sapiens
actctccattccagaaccatggcccaatttgtccgtaaccttgtggagaagaccccggcgctggtgaacggaacagattataccattctctcggcccggt

SEQ ID NO: 411752 - DNA, 75 bp, Homo sapiens
tcggcagtccacccaccgccgccgcctcccaggcttgttagcagtggcacaagatcttacagaggatgaagaaac

SEQ ID NO: 411753 - DNA, 75 bp, Homo sapiens
gtactgtccatcaaacatcttccaccacagcttagaggttcttttgaagtaaccagtgatcttttttgcttaccc

SEQ ID NO: 411754 - DNA, 106 bp, Homo sapiens
tgccttcgaaacatctgcaagtttttagtcttgctcatcccactcttccttttactagcaaaccagtccagctacgggggcccagccagccagcagctgagtgggg

SEQ ID NO: 411755 - DNA, 98 bp, Homo sapiens
ctttgacttggacatgactgaagaggaggtgcagatggcactttccaaagtggatgcctccggggagtacctccctgcacttggctattcaaaacggg

SEQ ID NO: 411756 - DNA, 87 bp, Homo sapiens
taaaacaggatcagtaaagaaggaaaaagcagtaaagccagaggaagtgatgtcttggcattgcccattttcaagcaggaagattcc

SEQ ID NO: 411757 - DNA, 76 bp, Homo sapiens
ggcatttctattttagaaagcagttcgtctattatcctcccagtccacaacgctgaaccgtggctggacgaatgtt

SEQ ID NO: 411758 - DNA, 74 bp, Homo sapiens
gtacctgtgaaggaaatcaaggatgggcgtgttttgggcgtgctagaggtgtcacgctccattggggacgggca

SEQ ID NO: 411759 - DNA, 88 bp, Homo sapiens
tggatggagaccaaacatccagatctggagtgccggcacaggccctctttggattccagtacgatgcatcagaccataccatggcgtg

SEQ ID NO: 411760 - DNA, 100 bp, Homo sapiens
agcacgattacagggatgagcatttggactttatccagtcacacctgcggaggttctgccttcagtattatggcgatgagatcgccattgagctgcggag

SEQ ID NO: 411761 - DNA, 75 bp, Homo sapiens
cagtgaggccaacgccgtgttcgacatcctggccgtgctgcagtggtggtcctgctccatgatgtccgtgatgtg

SEQ ID NO: 411762 - DNA, 75 bp, Homo sapiens
tcaaggcaggcacggtggatgaggactcgtcaggctccgaggagaagcagaatttgcccgcatcatgagcattgt

SEQ ID NO: 411763 - DNA, 90 bp, Homo sapiens
ttggaagcagccgatccagcctgcggagcctgtggggcagtcaactgcttggaccagcatgttcggaagtcccccgagagcgttgctttg

SEQ ID NO: 411764 - DNA, 101 bp, Homo sapiens
ggagaaccaccgcatcaagagcttcaagaacaagggccgcgatgtggaaagaaaagaaaccttgtttattccctgtgaaaatgagaagatttctaaacagc

SEQ ID NO: 411765 - DNA, 98 bp, Homo sapiens
tccgggccgggcggcctccggggctgccagagcagcagggatcctgaagagcatggtcgtgggctgggtgaaggagatcacccagtaccacaacatct

SEQ ID NO: 411766 - DNA, 98 bp, Homo sapiens
tcgctgccaggcacaagtgtcccgccgcatctccttcagcgcgagccaccgattgtacaggtggcgacctgcacatgacccagtttttccgaggcaat

SEQ ID NO: 411767 - DNA, 100 bp, Homo sapiens
cgggtcccgcgccccgagaccgccgtcgctcggacgctcctgctcggctgggtcttcgcccaggtggccggcgcttcagatgctgcacttaaaaggatgc

SEQ ID NO: 411768 - DNA, 83 bp, Homo sapiens
tctctcgccacagcggcctcggcctccccttggattcagacgccgattcgcccaggatatccgtgattgttcaggacccttaa

SEQ ID NO: 411769 - DNA, 98 bp, Homo sapiens
ctgtgacctgcatgtactgggggattcgcagggaggatgtcgggacaccccggaagctgggaaatggattaaactgcaaatatctcatgaagctgctg

SEQ ID NO: 411770 - DNA, 83 bp, Homo sapiens
cttagctgtgctcgcgctactctctctttctggcctggaggctatccagcgcctccaccatggacagaggccaggccctgccc

SEQ ID NO: 411771 - DNA, 75 bp, Homo sapiens
gtcagtcggaactacctctcccagcctcgcctcagttgatgataattagaagcatgctttccactgaacttcccg

SEQ ID NO: 411772 - DNA, 98 bp, Homo sapiens
aacttggccaggctggccccgagcggaactggagaaagctgaggatcaacaggcggtccttcgggtcggagtggacatcggatggtggcctggaagag

SEQ ID NO: 411773 - DNA, 100 bp, Homo sapiens
cacctctagtggacccctcagtatatggatacggagtacaaaaacggcccttggatgatggaggcactacctggcagcaccatctaaacctgtatcatct

SEQ ID NO: 411774 - DNA, 100 bp, Homo sapiens
agcaaataccatgcacttattgattaagtaccaaaaacttctgtggacagttgatgacaacaagaaactaggagaatgggtaggcctttgtaaaattgac

SEQ ID NO: 411775 - DNA, 75 bp, Homo sapiens
tcttcctggaagaagggggatgtgagcgtgcaggagcatgaaagtgccggtggtggtgtgcacattgagccccgg

SEQ ID NO: 411776 - DNA, 50 bp, Homo sapiens
ccgacagccaggcccgggagaagttggtggttctgtcagatgaaagcaaa

SEQ ID NO: 411777 - DNA, 88 bp, Homo sapiens
catgagcgacagcggcgagcagaactacggcgagcgggatttgcagatttacagaatggctgcacattaatggaaagagaagcataaa

SEQ ID NO: 411778 - DNA, 100 bp, Homo sapiens
gaagattcgaaaagccacttgaagaaaagggtgaaggaggcgaattttcagttgatagtggtgggggaaaagtagctccagctcaaccatctgaggaagg

SEQ ID NO: 411779 - DNA, 98 bp, Homo sapiens
aattttattcaagcaaattttaagaaacgagaatgtgtcttctttaccaaagattccaaggccacgagcagtttttgcaagaaaggatcaaagtgaac

SEQ ID NO: 411780 - DNA, 75 bp, Homo sapiens
cacccaggtgtaccccaagctgtacttgtcacctcgaattgagcaagctgcttatcatccagactttccaacagt

SEQ ID NO: 411781 - DNA, 82 bp, Homo sapiens
agcccgcgcacagctgctcccttcgccttcgccctttccacctcgcggcagttcggaggccccgtgtgggccgcggcccggc

SEQ ID NO: 411782 - DNA, 75 bp, Homo sapiens
cgattgcgggggcctgggctaggtcagatttcatttcagtgtaaaggtaaatggaatcctctccacagagatctt

SEQ ID NO: 411783 - DNA, 80 bp, Homo sapiens
cttcgtatgcagggtacattgaagaccttaagaagtttctaaaacgagtggttaatgtgttgctaacaactccactctgg

SEQ ID NO: 411784 - DNA, 99 bp, Homo sapiens
gtgctgatggacaccgtctccatgcccgagttcatggccaacctcaggctcagacaatgcagatcttcgtgaagactctgactggtaagaccatcaccc

SEQ ID NO: 411785 - DNA, 96 bp, Homo sapiens
caggaccaccaaaaataactttggctggccgggggccatcaagtataagaccacaggaccacgtgattcataaagaactactgtcaaaactagggc

SEQ ID NO: 411786 - DNA, 50 bp, Homo sapiens
tctgagactgtcattgcttttataagatgacttggaagactccatgatcg

SEQ ID NO: 411787 - DNA, 100 bp, Homo sapiens
gggggacccgcccgccatggccaccaagagcccataggcagcatgtcatccatggaagtgaacgtggacatgctggagcagatggacctgatggacatat

SEQ ID NO: 411788 - DNA, 74 bp, Homo sapiens
ctgcccatggacacattcactgtggcaagagttaaaggtcctgaagatacacatcaatttttctttggatcagc

SEQ ID NO: 411789 - DNA, 50 bp, Homo sapiens
ccggcgtgttcatgcccccgggacgttggacctctcgaacaaccagctga

SEQ ID NO: 411790 - DNA, 100 bp, Homo sapiens
ctccaagaaaaaaaccacaaatgtttttctgttttgcctgaatacatgatttaaacaagagatttccacagaaggctctgttccatgggaaattcataga

SEQ ID NO: 411791 - DNA, 83 bp, Homo sapiens
catggacatgagccccctgaggccccagaactatcttttcgatgtccagctcgccgctgtccaagaaacgtcgcgtgtccggg

SEQ ID NO: 411792 - DNA, 82 bp, Homo sapiens
tcaagtaatggtgcaaagcctgaagtccctgagctgcggaagaaatctcgccgagagtacctggctaagcgggagcgagaga

SEQ ID NO: 411793 - DNA, 50 bp, Homo sapiens
tgatttttgtaataaacagagtgacagggggaaactcggccgatatcctc

SEQ ID NO: 411794 - DNA, 83 bp, Homo sapiens
ctacagtcgtttttagaaggagcactgacagcgaggtctgtagcatctctgtctgttggagaaggcacaggtgtcagagcacc

SEQ ID NO: 411795 - DNA, 98 bp, Homo sapiens
ttggctgaggaactgctgttgtgaaccttttgccctggtgggattattgcagatcgggagcggtgccgagaaaaatttccttactagatgacatttca

SEQ ID NO: 411796 - DNA, 100 bp, Homo sapiens
cgcccgtctggcggttcagcgcgaccacgaaggccgctactccgaggcggtgttttattacaagcttttgttaggagtgataaacccaaactgttcagag

SEQ ID NO: 411797 - DNA, 89 bp, Homo sapiens
gcaaggtacattgagcaggctacagtccactccagcatggaactcgaatcatttatgacagaaagtttctgttggatcgtcgcaattct

SEQ ID NO: 411798 - DNA, 75 bp, Homo sapiens
gtgtacctcctgctccggcagcctcctatttgatggctttgcagatggactaggagttgctgaagctatttcata

SEQ ID NO: 411799 - DNA, 74 bp, Homo sapiens
aaagatcagatagcagagctgaatcatgaggtcatgcaagacaagataatctgccttccgaaaagagtgcagcc

SEQ ID NO: 411800 - DNA, 75 bp, Homo sapiens
tgacccacctgcatgtgaagtctacagaacccaaagccgcccctcagcccgtacaacaaataacactgtgactcc

SEQ ID NO: 411801 - DNA, 74 bp, Homo sapiens
actgggagggcaacgagcacaacaggagctacgaggagttgtaatcagttcaagaagttccctcagatgacctc

SEQ ID NO: 411802 - DNA, 100 bp, Homo sapiens
tctccgggaacaaggaacagggttacatgagcctcaaggagaaccagtgcactgccagaagatcgtccacagggacatcaagccatccaacctgctcctg

SEQ ID NO: 411803 - DNA, 100 bp, Homo sapiens
gttttggaactgtcaggtacctcaaagcgtaaagcaatgttgatcccagggatgatgtatttggatatcctcaacaatttgaagataaaccagcattaag

SEQ ID NO: 411804 - DNA, 100 bp, Homo sapiens
cactcccctcgctgcccgggcccggagcgcagcgcggccgcacagttcctattatccttgccgtaaataaatgtgacaaagctgaggctgatcctgagaa

SEQ ID NO: 411805 - DNA, 90 bp, Homo sapiens
cctggcattgccttttgttgaggtgaccaagaatatggcccaggtgaccaaagccctggacaaggccctgagcaccatggacctgcagaa

SEQ ID NO: 411806 - DNA, 99 bp, Homo sapiens
accatgaagacttgaacttaatacagcaagaaagaccatcaagtttaccaaaaccagcaaatatcctagtaatgggagaaggtcctgagagggggagag

SEQ ID NO: 411807 - DNA, 75 bp, Homo sapiens
gaaagttcttgtcaataccaaggtatcactaccattaaagttaacattcgtaatgccaattccctgggaggaggc

SEQ ID NO: 411808 - DNA, 100 bp, Homo sapiens
caaaagtgctcaacttcctccagaaactttggcgacaatgttggcctgtctgcaagcttgtgcaggggcctactgcagtgcatgaaggtggtatggactc

SEQ ID NO: 411809 - DNA, 75 bp, Homo sapiens
ggaagagagccaatgaaaggttggagttactacttcagaaacgcaaagaggtccttggtaaatcctgcaagccaa

SEQ ID NO: 411810 - DNA, 100 bp, Homo sapiens
gagattgttacacaaattgatgcacaaaataagctggaaaaatctgagattgcagccttcttcgctgagtctctgcccagtgtgggagggcagatcattc

SEQ ID NO: 411811 - DNA, 100 bp, Homo sapiens
cgacgaggccttccagcgctatcgtgacctgcttttcggttccgggtcttggccccgtccttacctcacagggtactggaagatgaaagagactatacaa

SEQ ID NO: 411812 - DNA, 97 bp, Homo sapiens
gctgactgatggccagattcaagccatgttaaggcgctggtttgtggaagtggaaggaacagtgaagggaccgagtggggtcaatcttctggtgctg

SEQ ID NO: 411813 - DNA, 101 bp, Homo sapiens
gagtctccgcggtggaggtctgcgttgctcttgcttttcctcgctggggtgtacggtcatgtttactggtgaaaatattcctgttcatcctcatgtttata

SEQ ID NO: 411814 - DNA, 100 bp, Homo sapiens
aggcacacgttactcagcccctgcgaacctgtatgtgcgaggtagtggtacagcagtttacaacaacaacatgtacgtcaacatgtacaacaccgggaat

SEQ ID NO: 411815 - DNA, 74 bp, Homo sapiens
atcgccctcccagcagcagccacacagtatcaaaatgtaatcttggttctcctgaagatttcctctccaaagcc

SEQ ID NO: 411816 - DNA, 75 bp, Homo sapiens
ccttactggacagtcaaatcagagagaagaagaaggaggttcctgctgtgccagaaacccttaagaaaaagcgaa

SEQ ID NO: 411817 - DNA, 75 bp, Homo sapiens
agctctgaaatagaagatcttgcaaggtccaagccttatgcatttgatcgggtgttccagtcaagcacatctcaa

SEQ ID NO: 411818 - DNA, 100 bp, Homo sapiens
ggattcgtcccattctcgtcctcatggtggacaagaaactggtggtggttttcggaggcacagcagccggaagtagaagtgacccatgagaccctgcaaa

SEQ ID NO: 411819 - DNA, 101 bp, Homo sapiens
ccggcgtcgccgccatggacctaggtggaagcagggaaaggcctggagatgaggaagctggttctctcggggttcttggccagcgaagagatctacattaa

SEQ ID NO: 411820 - DNA, 99 bp, Homo sapiens
atgacgtatttgagttgaagcagttttctcagctgcctgctaacatagctgtttgcagttctaaggttaccagcaagcgagttcatcatacaagattca

SEQ ID NO: 411821 - DNA, 100 bp, Homo sapiens
aagcctgttcattttaacgttacctggagatattagcggaggatgaagaggatactatagcagctgaggaacagttggaaggggaggtggatcatgccat

SEQ ID NO: 411822 - DNA, 90 bp, Homo sapiens
tccaagatgtataattcctagtgtgataaaaagagctgggatgcctaaggacttggaaaacagtgtgggtgaacttagtgaaggacaaag

SEQ ID NO: 411823 - DNA, 99 bp, Homo sapiens
atagaggaaaagagtaagaattggctgagttcacatatgggctccatcaataactagcggccaggtgagattagatcggtttgggcttggccagccagg

SEQ ID NO: 411824 - DNA, 98 bp, Homo sapiens
tacaggcgctgacggccacccctccaggtggatttgacatggaagtgaaaggttggggtggagaagatgttcatctttatcgaaaatacttacatggt

SEQ ID NO: 411825 - DNA, 100 bp, Homo sapiens
ggcgaggagctcattgtcgaggtccttgaagatgtcccgctgaccatgcacaattttcctgtcttagaagtgatctgctcccgaatgcgctacatctcct

SEQ ID NO: 411826 - DNA, 51 bp, Homo sapiens
agtggacaaagatttccttgataaatgaagtaaagaaggtcttagacaaat

SEQ ID NO: 411827 - DNA, 98 bp, Homo sapiens
gagagctttctggatgatgtaaaccttattctggccaacagtgttaagtataatggtattaatattaaccgaggcctcctatgcttgggaaatgtaat

SEQ ID NO: 411828 - DNA, 75 bp, Homo sapiens
ggccaaaaatgtgcatactcacagagttagagagagggatggtggaagctgaatatggtgggcatgatcagatag

SEQ ID NO: 411829 - DNA, 50 bp, Homo sapiens
cctggctgtcgaccgttgccttctgcagagcaacaagatatggatttgga

SEQ ID NO: 411830 - DNA, 100 bp, Homo sapiens
ggcggccgcttgagatcggcgctttgagaactgagcgcatgtggagttcggaggaaaagggctcagcttcttctcagcctgttgataaccatgttagccc

SEQ ID NO: 411831 - DNA, 144 bp, Homo sapiens
cacatgaaataaacaaggggcatccaaatcttgcggcaacgcccccgggacatgcatcgtcccctggactctctcaaagtgatcagcagctggactgtgccttggacctaatgaggcgcctgcctccccagcaaatcgagaaaa

SEQ ID NO: 411832 - DNA, 82 bp, Homo sapiens
agagaaacccactgaagacgtctgcgtgagaatagagaccaccgaggcgcctgtgtctggcagagctggtgtgagacgagac

SEQ ID NO: 411833 - DNA, 99 bp, Homo sapiens
cgccttcagccctgtctggtgcatccttggcagaaagtgaggaggaaaacacccccattgaggaaatcagtggtgcttcaggatattgtgaatttggtc

SEQ ID NO: 411834 - DNA, 88 bp, Homo sapiens
tatccaccagccctgctgcccatggtggccccagatgcccaggagagataatagaagctgtcaccactgactaaagaagagaaaactg

SEQ ID NO: 411835 - DNA, 100 bp, Homo sapiens
ggctctgtggaaagttcagcatacctcactgttcaaggtggactcccattattgtcccagttgtttagaaaatatgccatcggctgaagccaaactaaaa

SEQ ID NO: 411836 - DNA, 74 bp, Homo sapiens
agtgggggtgtgcaaacccgagagaactggtacgttaaaggaccttgacacctctgacagaaaagaggatgttc

SEQ ID NO: 411837 - DNA, 100 bp, Homo sapiens
gtgtttgcacttctccagggcaagggaaagatcacagcatccttcatcaaaaagccatttgaccgtggagaagtagaatcaatggaagatgatactaatg

SEQ ID NO: 411838 - DNA, 100 bp, Homo sapiens
tcctactgggagtccagttgttaaacttcaggatgccttggccagtaatccatcggaagactgtgtgaaaaatgtgagtggaacacaccgtcccaacaac

SEQ ID NO: 411839 - DNA, 100 bp, Homo sapiens
ctccgccatgcaaggctggcgcgtctccatggaggaaatgttcaggctggagactatgtgctaatccatgcaggactgagtggtgtgggcacagctgcta

SEQ ID NO: 411840 - DNA, 82 bp, Homo sapiens
tgttgggaccatcctaaaatgaccgaactctttcaatcccttgttggagtgcttagtgcagttggtgagagcgggagccaca

SEQ ID NO: 411841 - DNA, 75 bp, Homo sapiens
actggggccagggaaccctggtcaccgtctcctcaggtgtttttcatgcaccatctcactgagacctcaacaaag

SEQ ID NO: 411842 - DNA, 100 bp, Homo sapiens
aagtttgagtgttgctggaacggttcggatagctgggattctgtccctgaccgtcttcacagtccaggtgatcttgactactgctttacagagaattgga

SEQ ID NO: 411843 - DNA, 100 bp, Homo sapiens
gaagccgatctctctctcgttcaaggaagcgcaggctgagctaatagatcagttaaagcccggaggaagattgatattgcctgttggtcctgcaggcgga

SEQ ID NO: 411844 - DNA, 85 bp, Homo sapiens
cctttgttgctgctgcacattaggttgcagtatgtggccagttatttgcctcagtaaaagaggttcagcaccacccccttctcca

SEQ ID NO: 411845 - DNA, 98 bp, Homo sapiens
tcagtcggtgctatgatataatacctgaaactttactgactctgcagacagtgggcccatcccatgcccgaacctacactgtggctgtttatttcaag

SEQ ID NO: 411846 - DNA, 75 bp, Homo sapiens
cacggggctggtgggcatagtggctgccctgctggggtatttgaagtataccatacaactgttttgaaaatccag

SEQ ID NO: 411847 - DNA, 97 bp, Homo sapiens
gaccgagagcgtgaccgagagcgcgaatatcgtcatcgttagaagttggagaatctaatgctggacaaagatggccacataaaaattacagattttg

SEQ ID NO: 411848 - DNA, 98 bp, Homo sapiens
gaggaccctgtacagagatgtgatgctggagaactacagccacctcgtctcagtggattctgaaggaagatttccattaggtaatttgtttaatcagt

SEQ ID NO: 411849 - DNA, 50 bp, Homo sapiens
accaaaccatcccacggctccaagaaaattggcaacttctccatcgtgcg

SEQ ID NO: 411850 - DNA, 76 bp, Homo sapiens
tatctcaggagctcttctctgctggcttggtggatggtcacgatgtagttatagcaagtctggaaaagtttgaaat

SEQ ID NO: 411851 - DNA, 98 bp, Homo sapiens
accctaggcctccaccctggcaggaatcccaatttgcctccacttagtgagcggaagaatggattttttatcaagcagaaatgcatcgaacaacgaga

SEQ ID NO: 411852 - DNA, 90 bp, Homo sapiens
caggccgggcaccaaggcgcaggttaagaaggcttttttgctctgtagcctggacgtactttgaagcccctccccacgatgctgtacgtg

SEQ ID NO: 411853 - DNA, 75 bp, Homo sapiens
cgattcaagaaggacaaagagatcatagccgagtatgaaagtcaagtcaaaggtttgtaaaagaatggacttggt

SEQ ID NO: 411854 - DNA, 75 bp, Homo sapiens
gctgctcctgctctgctacctgttcctacaacagcagccagtacccctgatgccgttgacaagtatctcgagaca

SEQ ID NO: 411855 - DNA, 101 bp, Homo sapiens
ctgggatgagagtggggtatttatctataccacaagcaaccacatcaaatatgctgtcaccactggggaaaaagaccttgatgaagttctgcagacccact

SEQ ID NO: 411856 - DNA, 75 bp, Homo sapiens
tttctcactgtgatgatgaagcatggcagtgataaccttttagtaatcttgaaaagaaaatggtggaagtacatc

SEQ ID NO: 411857 - DNA, 75 bp, Homo sapiens
tttccttcgggagttgatctctaatgcttctgatgtgttacttacaaagaggtgctcagcttcaagcctccccgg

SEQ ID NO: 411858 - DNA, 80 bp, Homo sapiens
cgagaagcctgaaaagtcgcagcgagctggagccgccggaggcacctgaatggacagaagaggacctcagccaactgaca

SEQ ID NO: 411859 - DNA, 50 bp, Homo sapiens
ttttcagaggggaatgctaagagtgtgatccagctttgcttcctgagccc

SEQ ID NO: 411860 - DNA, 100 bp, Homo sapiens
gccctggacatcgatagggatgcagaggatcagaaccggtacctggatggcatgatcagtcgcatcgaatacattcattcaaagaacttcatccaccggg

SEQ ID NO: 411861 - DNA, 80 bp, Homo sapiens
gcagcatcccacggccacacctaccgagagtctgaaaagtgtcgaagagacagttttcaggaacaacaagcaattattcc

SEQ ID NO: 411862 - DNA, 100 bp, Homo sapiens
agaagcgggccgcatgcctgtgtttccgcagcgagagcgaggaggagttagaacctggcccattagatgaaacccagatcgctactatattaagagaaat

SEQ ID NO: 411863 - DNA, 50 bp, Homo sapiens
ctacatcccgcagtacaagaactggagagagaatctggacgaggctagag

SEQ ID NO: 411864 - DNA, 130 bp, Homo sapiens
cagcgacacaattgtctgtgacagtaacagtacttgggatcccccagttccaaagtgtcttaaaggaaagaccacagcaagattctttcattcgtctcctcctagcctgggggaccaggctcgaactgac

SEQ ID NO: 411865 - DNA, 75 bp, Homo sapiens
tccagcttcggaacaagagaccctgcatgaacttacgagaggtgttaaaaaaatatggtaaagatgttggtcttc

SEQ ID NO: 411866 - DNA, 90 bp, Homo sapiens
ctcccaaagtactgggattacagggtggttctcttcccaaagtggaagccaaattcatcaattatgtgaagaattgcttccggatgactg

SEQ ID NO: 411867 - DNA, 82 bp, Homo sapiens
ggaggtcggcggccccaaaaagatcctgaaggagctagacgagtgctacgagcgcttcagtcgcgagacagacggggcgcag

SEQ ID NO: 411868 - DNA, 100 bp, Homo sapiens
ggaagaaatgatgatggaaatgaagtataataccaagaaagccccacttgggaaatgtttcaacgtgcgcaagcgttgcggcggcgggcagaggactact

SEQ ID NO: 411869 - DNA, 82 bp, Homo sapiens
tccagcacctacgtcccgctgccgtcgccgccgccaccatgcccaagagaaagcgggctgacgcacgaggcacacaggaagg

SEQ ID NO: 411870 - DNA, 100 bp, Homo sapiens
gagaagagcgccaggcgccgcggggcactgaacctaccagatgtatttgggttggtcgtcctcccattggaactgaaactacggatcttccgacttctgg

SEQ ID NO: 411871 - DNA, 96 bp, Homo sapiens
ccacatgagaggattacctttccaagccaatgcccaagacattataaacaccctggtgggcagcagtgggaccattctgaccacaatgcctgtaat

SEQ ID NO: 411872 - DNA, 118 bp, Homo sapiens
gccgagccgccaccgcaggtcgaggacggtcggactcccgcggcgggaggagcctgttcccctgagattttaccaaatgttgcaagaactctggagttcttatggtagtaaaatgccg

SEQ ID NO: 411873 - DNA, 101 bp, Homo sapiens
cccaacaccatgccgtccgccttctctgtcagctctttccccgtcagcatcccagccgtgctcacgatgcgagccacccctctggctgctcctgcgggttc

SEQ ID NO: 411874 - DNA, 75 bp, Homo sapiens
tgggagataagaagtatgaagacatggaaggccgtcaccgatgggttgtatatactactgaaatgaatggcaaaa

SEQ ID NO: 411875 - DNA, 51 bp, Homo sapiens
gaagacggctcagaatcaccccatggctggaccgctttgagaagaccaatg

SEQ ID NO: 411876 - DNA, 100 bp, Homo sapiens
tgttggatcgggttctaaaggaaaggtgatgatgaacagtctacacagatggctgcaagttgggaagatgataaagttacagaagcatcttcaaacagtt

SEQ ID NO: 411877 - DNA, 76 bp, Homo sapiens
ttcgttgacagagctttgatagtcgtaccatatgcagaaggttttgcggctagttggctattcaagaaacctcgcc

SEQ ID NO: 411878 - DNA, 75 bp, Homo sapiens
gcaagaagcaccagttcaagtggccctcagggcatccccgttttcggagccctctggcacaaatggaagaagaaa

SEQ ID NO: 411879 - DNA, 82 bp, Homo sapiens
cgagtaagccagcggcaggaccagcgggcgggggcccacgagtgtgaacccacatccctgcccccagggccacctgcaggac

SEQ ID NO: 411880 - DNA, 83 bp, Homo sapiens
ctcacggagaagaaggcctccgaccctcaggcccagagccagcacgagacatccgctgcgagttctgtggtgagttcttcgag

SEQ ID NO: 411881 - DNA, 83 bp, Homo sapiens
tccgccgagggcgagcaggagcgagagtgtgtcgaaatcattgatcagcgattcgagaaggtttcctactttgtatttggtga

SEQ ID NO: 411882 - DNA, 88 bp, Homo sapiens
ttctataaaattgacttttgaagcaacagcctagtgtgttaattgtaacctacaaggagcctgcaaaatcatctactcagtttggatc

SEQ ID NO: 411883 - DNA, 100 bp, Homo sapiens
ggcggcggcggtggggactgcacgtagcccggcgctcggcatggctctcctggtgctcgattccttgacaaggatatcctagcggcgaaacaacaccgta

SEQ ID NO: 411884 - DNA, 142 bp, Homo sapiens
tcaatggtggcgggtcgccggagctctgatcgccgggaacccttgccgctgctgtcctgcgaccccaagcaggtgctggagaatctggtaaaagcaccattgtgaagcagatgaggatcctgcatgttaatgggtttaatgg

SEQ ID NO: 411885 - DNA, 83 bp, Homo sapiens
gcagacactgaacgaggagccagtggaagatcccagtgtctgagtgaactaacagtcctgctttcagccaccatttgcacaag

SEQ ID NO: 411886 - DNA, 100 bp, Homo sapiens
ttttgtggtagcaagtctgaagttttacaggaatctattagaaaacaaagtgtcaattatttcaagaattaccataggactctgtctactagtgacgatg

SEQ ID NO: 411887 - DNA, 75 bp, Homo sapiens
cgaacacagtagtggaagatgtaaagcaatatttcgagcagtttggcaagtcccaggggcagccactggcctccc

SEQ ID NO: 411888 - DNA, 100 bp, Homo sapiens
gaacaggcttcggcgaacacaaagagaaatggtcaatgcatggtttgctgagagagttcacaccatccctgtgtgcaaggaaggtatcagaggccacacc

SEQ ID NO: 411889 - DNA, 90 bp, Homo sapiens
gtcacggaacattggccgccccatcgagatgtccagcaaagtacagagccttcctgtgcatcggtggatctgcagggagacagctcctta

SEQ ID NO: 411890 - DNA, 50 bp, Homo sapiens
gggagcccttagcggtctggaggagtgtgaggaagaggctgtctgtgtca

SEQ ID NO: 411891 - DNA, 100 bp, Homo sapiens
cttcctgatcaactggaagacactccaatcctcagtgaagactctctggagcccttcaactctctggcaccagggtgctgccccacgtcccccaccaaag

SEQ ID NO: 411892 - DNA, 87 bp, Homo sapiens
gccggccgagggtggccctaggggcagcgagcaagacagcaagcagggtttccaggcctgaggtgcccgccctggccccaggagaat

SEQ ID NO: 411893 - DNA, 90 bp, Homo sapiens
gaacaatctttttattacagaagaagattatcaggctcatcatatgcccgaagctcagtggttacggctgtgaaatttacaatttctgac

SEQ ID NO: 411894 - DNA, 82 bp, Homo sapiens
cactcttccagccttccttcctgggccaggaatagttgctgaacaccccaggcctgctgaggtccctccttgagtctcatgt

SEQ ID NO: 411895 - DNA, 75 bp, Homo sapiens
tgacaaagccacttttgaaagtcagatgtctgtgatgaggggtcaggtctccaggaaacctagagaaaaaccgtt

SEQ ID NO: 411896 - DNA, 75 bp, Homo sapiens
cactgtacgatcttagcatcagcaggtattgtcaatatggactcgccatatggttctgtaacaccttcttcaaca

SEQ ID NO: 411897 - DNA, 87 bp, Homo sapiens
tccccaaaataaaaaaattgcaagagagagactattttcgttattacaaggtcaaaatgcagatcttcgtgaaaacccttaccggca

SEQ ID NO: 411898 - DNA, 89 bp, Homo sapiens
atcagggcaagctgtgttccatggcagggaacttttggcagagctcccactagtcaaaatgcagatcttcgtgaaaacccttaccggca

SEQ ID NO: 411899 - DNA, 106 bp, Homo sapiens
agaaaaggtgtacttgcaagaaacctcaggacttgagtaacagcaacatggttaaatggaagctgatcggcgttcacatggaatcctcctcacgtagctcagatgg

SEQ ID NO: 411900 - DNA, 96 bp, Homo sapiens
acaaactggtgcagaagagagacttcctggtggacgatgcggaggtcgagcggttaaggcctgatctacagacactggggctgtccgtcctgctgg

SEQ ID NO: 411901 - DNA, 100 bp, Homo sapiens
cactacttgcattaaaagtctgtatgggggcaaatatggccaaacagattggagcagctacttatatcgaatgctcagctttacagtcggaaaatagcgt

SEQ ID NO: 411902 - DNA, 90 bp, Homo sapiens
cttggatctccagtgggagctgccctctcgaaggcaggacagcggtggcggcagaagaatggtttattattgccagttttggcctcctca

SEQ ID NO: 411903 - DNA, 83 bp, Homo sapiens
ctgctgtaaggacccagaaatagactttaaggacttctccaggcctcggccgccccagaaggcactcccggcaaacccagtgc

SEQ ID NO: 411904 - DNA, 100 bp, Homo sapiens
ggctgaagatggctactctggagttgaggagcttcaggatggttcgtactaagacatggaccctgaagaagcactttgttggctatcctactaatagtga

SEQ ID NO: 411905 - DNA, 75 bp, Homo sapiens
gcttctctccacttctatggataaaactttcaagtggatgattcaacagccacacaaagcagcaacattttttgg

SEQ ID NO: 411906 - DNA, 76 bp, Homo sapiens
attaacaaatggttttgacactccagaagagaggtatcagaagcttaaaaagcccgacagtgatggttttttggac

SEQ ID NO: 411907 - DNA, 127 bp, Homo sapiens
gagctgcaagccggtgcagcagccttcagcttttggcagcatgaaagttagcattccagggtcacccccgagaggacaacaggcatctggaagtgctctctcgccactctgggtgctttactgtctc

SEQ ID NO: 411908 - DNA, 75 bp, Homo sapiens
gcttgcagtcgggctacggaggccgggttgccagattacgggtttgcccaaaggaccagccaaaacctcacctca

SEQ ID NO: 411909 - DNA, 90 bp, Homo sapiens
ataaacttagccttgatgaacttcatcgtaaatatggaacagacttgagccggggtagaagagcagaggatggctctgtcattgattatg

SEQ ID NO: 411910 - DNA, 100 bp, Homo sapiens
gaaaagcctctgggagcagaagggaggctccaagacctcatcaacaattaagagtgtcaatccatatctacaaggacagagactggataatgttgttgca

SEQ ID NO: 411911 - DNA, 104 bp, Homo sapiens
ctgctgcccgcgtccgaggctcgcgggcggcgggcccgggacgctgtgcagagctgcaagtccgtatcactgaggctgtggccacagccactgagcagagagag

SEQ ID NO: 411912 - DNA, 100 bp, Homo sapiens
ggagtacctgcgctatgaagacacgcttcttctggaagaccagccaacaggtgctggagaatctggtaaaagcaccattgtgaagcagatgaggatcctg

SEQ ID NO: 411913 - DNA, 50 bp, Homo sapiens
cggggatcttccaagtctggaaagtgatttccatttaaacagggttaatt

SEQ ID NO: 411914 - DNA, 90 bp, Homo sapiens
cactgggaaacatcattaaatcagacatcatttcagctttccatccatttttatttatggacatactgctagtggaaagacctatgtaac

SEQ ID NO: 411915 - DNA, 88 bp, Homo sapiens
agatgattactctcgggatgattataggcgtgatgatagagatataaagatgaagcgcagctgtataaagaagagcacctgaggaatc

SEQ ID NO: 411916 - DNA, 50 bp, Homo sapiens
tttgccaggtgtttgttaccttggccaaatcctacatccagtccctgcca

SEQ ID NO: 411917 - DNA, 95 bp, Homo sapiens
cgccatgcagccctccagccttctgccgctcgccctctgcctgctggctgcacccgcctccgcgctcgtcagtccttcagtgaatctacagacct

SEQ ID NO: 411918 - DNA, 101 bp, Homo sapiens
gtgaggcctccacagccatgtggaactgtgtggcaggtgtttccagtgccatggaccacaccttctcaacaacatcaaaagatggggaaggatcgtgttac

SEQ ID NO: 411919 - DNA, 100 bp, Homo sapiens
atatatgaagaaggcatttctattttagaaagcagttcgacttccatggagtcactgattcatcactttaagttgtatactgagggctaccaagttcctc

SEQ ID NO: 411920 - DNA, 90 bp, Homo sapiens
aatgcccagagttggagccaattaaaccaggttctctacttaaaagacaatgactactgatgaaggtgccaagaacaatgaagaaagccc

SEQ ID NO: 411921 - DNA, 75 bp, Homo sapiens
ccgcggtccccgctcttgctgttttgtaccaatggctagaagcagatcgtcatggcaagagccaaggtgctgcaa

SEQ ID NO: 411922 - DNA, 75 bp, Homo sapiens
ggcaggctcaggtgcagccgctgttcacacaaaagatgttggacaatttctacaattttgcttcatcatttgctg

SEQ ID NO: 411923 - DNA, 75 bp, Homo sapiens
cttggtcctgttaagtatctggctctgtgatgcaactgtgaaagttccttttcttaagaaatgcaaggaagcagg

SEQ ID NO: 411924 - DNA, 50 bp, Homo sapiens
actctgggtgatccagccaaagatgtgtcttgctgaatcagggctctctt

SEQ ID NO: 411925 - DNA, 75 bp, Homo sapiens
gatcttttcaatgctgcgaaagctgccaaaagtgacatgcaggaagtttcagctgatcctactgccacactcaca

SEQ ID NO: 411926 - DNA, 100 bp, Homo sapiens
ctgaacgtgcgcctcagcctgcgggagcccccggccggaccgccgggagagcctgcccacctccccaccctggacgccgggcgcgtcccggccccccagc

SEQ ID NO: 411927 - DNA, 97 bp, Homo sapiens
ctaccgctgctggaccacaaaccgctgccagaaaagtgtggaatatcaaacaaatgattaagttgacacaggaacatatagaggccctattggacaa

SEQ ID NO: 411928 - DNA, 98 bp, Homo sapiens
caggatcctctcgagtgcctctgcagggcttcaaagcattgcaaggtttggtgcacctcgatttggaggaagtagggcagggcccttatctggaaaga

SEQ ID NO: 411929 - DNA, 100 bp, Homo sapiens
cgtcccgctcgctgggagagaggtacctctccttttccctctccctttccctaagtgtactaatggtcacttgatgtgcgctggctgttttatccaccta

SEQ ID NO: 411930 - DNA, 100 bp, Homo sapiens
ccttaatatacagccagcctgtcatgagacctccaaacccctttggccctgtatcaggagcacagtgcacttgcaggaaagacatggtgaagatttcaat

SEQ ID NO: 411931 - DNA, 100 bp, Homo sapiens
ctggggactgaaaacgcttctgtgagacttgataataggtgtgatgaatgcagactctgctaccattttggctgtttggatcctcctttgaaaaagtctc

SEQ ID NO: 411932 - DNA, 75 bp, Homo sapiens
gagaaactggacagcacagacttcaccggcaccatcaaattcatgatgttgctatcaaaagttgagaaattgtca

SEQ ID NO: 411933 - DNA, 100 bp, Homo sapiens
acgacatcgtgactgacctgcgcgcccgcctcggcccgcacgccaagcacgtggtgggctatggccaccttgattctggatgaaattgaagaacataaca

SEQ ID NO: 411934 - DNA, 100 bp, Homo sapiens
caggacttcgagtctctggcagacctgacggaccaccgggcccaccgctgtcctggaggactggaatgtcacgtggaataccagcaaccccgacttcacc

SEQ ID NO: 411935 - DNA, 83 bp, Homo sapiens
aaggaaaggacactcccctaacatatttggtggataatattaatgcagctgtgatggatttgaaaaaaaagaagatccgcagt

SEQ ID NO: 411936 - DNA, 75 bp, Homo sapiens
gagcgaacgccacgccgttgggttctgggccggagaaggggcgacgttcgggcaccccccgaatggacaatcttt

SEQ ID NO: 411937 - DNA, 75 bp, Homo sapiens
ggaggctgaggaggcggcggcggagatctgggtatttcagtgtctgtagacaagatggaatcatctccatttaat

SEQ ID NO: 411938 - DNA, 75 bp, Homo sapiens
cggggacgggccgtgggcccccggaacgagtcccagaaatcctggattaaaggagtatttgacaagagagaatgt

SEQ ID NO: 411939 - DNA, 100 bp, Homo sapiens
tgcacccacgaatctgcccacccctcctgtaacccagcctgtttcacttcttggagtggagtcggttcttatacaactatgggctgaaaccatgaggcgt

SEQ ID NO: 411940 - DNA, 51 bp, Homo sapiens
cggagctgatcgtccacccagttctgctctggcttcatcatgtgcagcggc

SEQ ID NO: 411941 - DNA, 101 bp, Homo sapiens
gcagcgggagaagatggacaagagaaagctcgggcgacggccatcttcatccgtgatttagaatctagaagagaagtaaaaaaagaagaaggtgaagcttt

SEQ ID NO: 411942 - DNA, 75 bp, Homo sapiens
ccgctcccgggaaccgttcccgggccgttgatcttcggccccacacgatcagtcgcatcgaatacattcattcaa

SEQ ID NO: 411943 - DNA, 138 bp, Homo sapiens
ggtgacctgtcctttcagcttctttctcacacgcagatgaacactggacttcagaaatggggctgttgtggttccgactataaacagtacgtgtttggcggctgggcctgggcctggtggtgtatctccgacactcag

SEQ ID NO: 411944 - DNA, 82 bp, Homo sapiens
ctgatgtgtggacggatcaccaagcgagtgacacgagagctcaaggacagttggctggggaacagaccagggaattggtgga

SEQ ID NO: 411945 - DNA, 95 bp, Homo sapiens
gccaagattatcaaagcagagatgatggggaatatggtaaaccaggtatttatgaagacagagaccccctgcgagtctcaataagccgagaacaa

SEQ ID NO: 411946 - DNA, 98 bp, Homo sapiens
agacttaggtctgttagaggaagacgacgagtttgaagagttccctgccgaagacaagttggatggcttgaggactggtactaaaaggaaacgtgact

SEQ ID NO: 411947 - DNA, 99 bp, Homo sapiens
gtttaccttggcgaggcctttcaccaagtccatggttgaagccatccttgtcaatatatttggtggtatcgtcaactgtgccatcattgccaatgggat

SEQ ID NO: 411948 - DNA, 75 bp, Homo sapiens
ccgagcccgctgcttttggagacacgcttcacatacactacacgttggccacggacagagcgaaggggagaggat

SEQ ID NO: 411949 - DNA, 82 bp, Homo sapiens
ctgaggcatctgagtcaacaacggatgaaaatgaagacgacattcagtttgtcagtgtagattttcgttccgtcacccaggc

SEQ ID NO: 411950 - DNA, 90 bp, Homo sapiens
tggcccccggaaaacctaaccatgaagacttgaacttaatacagcaagaaagaccatcaagtttaccaccctacctgaacccatccttcc

SEQ ID NO: 411951 - DNA, 90 bp, Homo sapiens
cggaagatggcggccggcgaaaggagctggtgcctgtgcaagttgttgagggttctcggaccagcagtgaccttcaaagtgagcgccaat

SEQ ID NO: 411952 - DNA, 98 bp, Homo sapiens
aaacagcagatttcccaagagcagcggaaaatgatccagtcacagtgcacgatctgattttctggagagatgtgaagaagactgggtttgtctttggc

SEQ ID NO: 411953 - DNA, 75 bp, Homo sapiens
aaacttttgcccttatcagtaacacctgagactaatagggatgccaaaggaaaaatatgatcctccagatcctcg

SEQ ID NO: 411954 - DNA, 83 bp, Homo sapiens
aagaagggccttactccttcacagatcgccagagactgctgctactttgaaacgtacgatagaggccctgatggacagaggag

SEQ ID NO: 411955 - DNA, 50 bp, Homo sapiens
gttccacctgaaaactgtagtagtctccttggaggtgacatggatatggg

SEQ ID NO: 411956 - DNA, 75 bp, Homo sapiens
acggacagcatcctggaggaccagtcagaccagcgcgtcatcatcaaggagcttgaagaaatccgcaaatgtggg

SEQ ID NO: 411957 - DNA, 100 bp, Homo sapiens
gagaggcagcgccatggcggagcagacctactcgtggttcatcatgcctagtggcgtataagaagaccccgccaccggtccctccacgcaccacttcaaa

SEQ ID NO: 411958 - DNA, 100 bp, Homo sapiens
tcgggaccggctgccatcttagtctagggactgaggagtcgccgccgccccgagtcccgcggagcccagggagaatatgctggactggccactatccgag

SEQ ID NO: 411959 - DNA, 100 bp, Homo sapiens
tggaaggtgctgatgaagccttacaaaaagcaataaagtcagactcctccagcccccaaagagtgcagagacctcactagcatgaataatctttcattta

SEQ ID NO: 411960 - DNA, 74 bp, Homo sapiens
gtcagctcccctttctcgcccagcgcccccaggccgctcccggggctcacgtatgtggagaccgttacttctcg

SEQ ID NO: 411961 - DNA, 76 bp, Homo sapiens
ccagaggaccagcggttacaaagaactgaggtggtaaagaagcatatcaaggtcggattgtttgtgctgaacgaac

SEQ ID NO: 411962 - DNA, 83 bp, Homo sapiens
ctgtggactgcagcctcggcggtcagcaggtcagagtggtgctgggaacaactgggccaaggggcactacacagaaggcgcgg

SEQ ID NO: 411963 - DNA, 111 bp, Homo sapiens
gaaataccaccggaactggtcgaatgaggcacctaaaaattgtataccgcagattcaggaagaagaagtctctccacagttgtttactttccacgaagctgtttcacaaat

SEQ ID NO: 411964 - DNA, 100 bp, Homo sapiens
tgctggtgtctctctagagggccagcagctcttccagaccattcacaagactgtttggtgtataaaacagaccaagctcaagatgtaaagaagattgaga

SEQ ID NO: 411965 - DNA, 74 bp, Homo sapiens
cggagacagcccaaatatcctcggaagagcgctcccaggagaaacaactatgctaagaaggaatctgatcttaa

SEQ ID NO: 411966 - DNA, 74 bp, Homo sapiens
caaaagagcttctctccagagtagaaagagtctccgggaccattatggcagtcaagtggacgggtgggcattct

SEQ ID NO: 411967 - DNA, 83 bp, Homo sapiens
ggaggccatcctgcagatggagcaaattgtggctactaatttgccccctgaagatcaagatggctctggggatgactctgaca

SEQ ID NO: 411968 - DNA, 100 bp, Homo sapiens
cccagtgctgatcgagccgtatctcctcagaggatcaggcgtgtgtccagttctgctcacttcaagaaatctccatgtatgcacaagtaactcatcagaa

SEQ ID NO: 411969 - DNA, 127 bp, Homo sapiens
agcagatggcggatgccctgcagtacctgcagaaggtctctggagacatcttcagcaggttaattatagaaaatgccaagtaggaaatttgccgatggtgaagtggtaagaggtcgatggcctggga

SEQ ID NO: 411970 - DNA, 100 bp, Homo sapiens
cggcgcacgcaccacgacggcgccatcaccgagcgcttgatgtgcgcggagagcaatcgccgggacagctgcaagatgaaattgaaatggccaatgagca

SEQ ID NO: 411971 - DNA, 100 bp, Homo sapiens
actcgggacgctgcacctcccgcgccgcacggtggacgaggaacctagaaagattgtacaatgaatggtgattctcgtgctgcggtggtgacctcaccac

SEQ ID NO: 411972 - DNA, 100 bp, Homo sapiens
tgagtcatgtggtggtgaaaaatgaccctgaactggaccagcaggtgttgacttcaaaatcaaaactgtagagctaagaggaaagaaaattagattacag

SEQ ID NO: 411973 - DNA, 80 bp, Homo sapiens
gcgctactctctctttctggcctggaggctatccagcgaccctgctgcaggaagactatgggttcttccgcgccatcagc

SEQ ID NO: 411974 - DNA, 117 bp, Homo sapiens
cactgccaaccggctccgcagtgccgccgagcccgtggcttccacgccagcctcccgcatccagccggctggctagcttgtcactttctgcaaaggtttccctcagggagcctcctg

SEQ ID NO: 411975 - DNA, 75 bp, Homo sapiens
aacttcaagccaaacatcaagcagaatgtgatttgcttgaagatatgaggagccaccagaaatggaactattgaa

SEQ ID NO: 411976 - DNA, 100 bp, Homo sapiens
gggcgaccactaccccctgcacctcctagtctggaaaaacgactaccggcagctcgagaaggagctgcagggccagattatggtgacaagctgaacatgg

SEQ ID NO: 411977 - DNA, 98 bp, Homo sapiens
cacaagagcgaggagaagcgagaaaagatgaaacggaccctattgaggtggtgccttctgcctctgccctgatcatcaaagccctcaaggaaccacca

SEQ ID NO: 411978 - DNA, 74 bp, Homo sapiens
cgtgcagatcgcctggcagatctaccgtcaccagcagaagataaagacaatgcagatcttcgtgaagactctga

SEQ ID NO: 411979 - DNA, 75 bp, Homo sapiens
ccacagatagtgatgagatttcacatattgttaatcgtattgctcctcaggtagaggaccgaaaacactttggag

SEQ ID NO: 411980 - DNA, 100 bp, Homo sapiens
aaaaggaacgagacgtgattatgagggagtttcgttctggctctagcagagttttgattaccactgacctgctggcccaggaagtacacgagaagctccg

SEQ ID NO: 411981 - DNA, 109 bp, Homo sapiens
gtcatcctgctgctgaagatctggaagacgcgctcctgcgccgaagatggcagtgaacgtatactcaacgtcagtgaccagtgataacctaagtcgacatgacatgctg

SEQ ID NO: 411982 - DNA, 100 bp, Homo sapiens
gcttgccacagtccacatgtcccggaccttacggacatccaaaaattgcttggaactgacttcatgggtaccataagtacagagaacaagggatgctgag

SEQ ID NO: 411983 - DNA, 75 bp, Homo sapiens
gaaggcagagcgtgtggcatctccacctcaagggtgtgatgaatgcagactctgctaccattttggctgtttgga

SEQ ID NO: 411984 - DNA, 88 bp, Homo sapiens
attttcggcaaccgctgctggcagttttgccaggtgtttgttaccttgatcctaattatctcatggctaatgaacgcatgaacctcat

SEQ ID NO: 411985 - DNA, 75 bp, Homo sapiens
acagcgaatgtggaggatagactacagtgccgctggtaatccacgacttcttattctccttgaaggaaagcccag

SEQ ID NO: 411986 - DNA, 98 bp, Homo sapiens
catgaagagagagaagagggcagagccgtgcatggggctgctccccaggacctgagcaggaacctggagttttcaggcgaggccttcttgggcagctt

SEQ ID NO: 411987 - DNA, 100 bp, Homo sapiens
acggaattattgaaaaatctggatcttgctgtattggagctcatgcagtcttcagtggataataccaaaatggatgactcactggttgtgtggaaggaag

SEQ ID NO: 411988 - DNA, 87 bp, Homo sapiens
ataatgccagcctgattggactgggttatactcagacccttcgaccaggagtgaatcccagccacctgatgaacctgttcacctacg

SEQ ID NO: 411989 - DNA, 100 bp, Homo sapiens
ttggggagaacacgggacaccgcggaagccgggaaatgggaatctagagcaacagcaaagctgaggtcaaactaccgtaaggatggacaccaaggaagct

SEQ ID NO: 411990 - DNA, 80 bp, Homo sapiens
ctcagttggaagcagccgatccagcctgcggagcctgtggggcaggtattctgagagaagcctcacaaagtgtattggaa

SEQ ID NO: 411991 - DNA, 75 bp, Homo sapiens
atttcggagaggccgcaggagtcatttctggattgtattacacagagcatgaatatacttctttaggttacacgc

SEQ ID NO: 411992 - DNA, 100 bp, Homo sapiens
aaatgcaccaatcagcatgctgtgtctagctcaagtgtcacatttgaagacgagcactgaggatgaggaaccaactgaagaatatgaaaatgttggaaat

SEQ ID NO: 411993 - DNA, 100 bp, Homo sapiens
gctcggttcctcggggagctctggatggagaggccccaaggggcatctcctcaggcccacccatggccacccatggaccagtcagcttgtacttcctccc

SEQ ID NO: 411994 - DNA, 82 bp, Homo sapiens
ggggagcgaccgggagcggcggcagcggcggcgcggaggcggctgaggtgcgagccgcccccaggacgtgctgctgaggaca

SEQ ID NO: 411995 - DNA, 83 bp, Homo sapiens
ctactacatggacgtctggggcaaagggaccacggtcaccgtctcctcaggtggggctcctgtacgaagagggtgttcgcaag

SEQ ID NO: 411996 - DNA, 96 bp, Homo sapiens
gctgggaaatgaggatagcgccaaacggccggcccttcttcattgatcataacacaaagactacaacctggaattggcagagggggtcgatttggg

SEQ ID NO: 411997 - DNA, 100 bp, Homo sapiens
ctcgggcttggcgcggcggccagaggaaccccgagaaaaagcttgtggtgaaggggggcaaaaaaaagaagcaagttctgaagttcactcttgattgcac

SEQ ID NO: 411998 - DNA, 50 bp, Homo sapiens
ggtgtatctgggggatttgtgagtccaatgtgctgattgctgctaacagt

SEQ ID NO: 411999 - DNA, 83 bp, Homo sapiens
ctcttttgtctgcccctattgtaagtgcagatggaacacaacaggtgccattactgcaagtcatcctgccacgtgtcttccct

SEQ ID NO: 412000 - DNA, 74 bp, Homo sapiens
ggccattggtactggcaagactgcaacaccccaacaggtgatgagacaaaccatgcttctgccacatcaacaca

SEQ ID NO: 412001 - DNA, 92 bp, Homo sapiens
tcaatcccatgggggacacgctggcctctgcaatggactctgcggtggagctgtggaagccaggcgcacaggatgcaagcagccaggcccag

SEQ ID NO: 412002 - DNA, 100 bp, Homo sapiens
acaaggccatcgaaatgccctcacaccagacctacggagggagctggaaattcctgacgttcattgatctggtgctggagaatctggtaaaagcaccatt

SEQ ID NO: 412003 - DNA, 87 bp, Homo sapiens
aaaacttcaaagagccggatcgcaggctccctgcctactcccccaccggggatttcaggattttttatcaagcagaaatgcatcgaa

SEQ ID NO: 412004 - DNA, 75 bp, Homo sapiens
gccaatttctggttggaatggtgacaacatgctggagccaagtgctaacgctttatcctgtggataaacgcagag

SEQ ID NO: 412005 - DNA, 98 bp, Homo sapiens
ctggcattgaatgatttatagctaagactccaggacacccctgaagccgagaaatgtattctaccttgtaaatactgttatttgtatatactgtaaat

SEQ ID NO: 412006 - DNA, 104 bp, Homo sapiens
tatccttctcaaccttgtgggatgtgaaaactctgttactgaaggtgctggagaatctggtaaaagcaccattgtgaagcagatgaggatcctgcatgttaatg

SEQ ID NO: 412007 - DNA, 88 bp, Homo sapiens
ttttgccaccaatcccttcgatcaggatgttgtttgcctgagaatacagatcaacccacagaacaaagcggatttccaaggcatctcc

SEQ ID NO: 412008 - DNA, 99 bp, Homo sapiens
aggatctcgggctcggaacgagactgcacgaaacactttgtgctactctgtggggctttggaaaagcatgttaaatgtgatattagggaagatgcaaga

SEQ ID NO: 412009 - DNA, 100 bp, Homo sapiens
caacatttcctctcgggaagagatagatcatgcagagtattacctttacaaataccagagatgagactgaggtttctcaccggttcctaagcccagtcag

SEQ ID NO: 412010 - DNA, 132 bp, Homo sapiens
ccagatccgcgaggaccacatgcgcttcatttcggagctggcgcgctacagcaacagcgaggtcagtttaggggctggtgcaaaggatgagttgcacattgttgaagcagaggcaatgaattacgaaggcag

SEQ ID NO: 412011 - DNA, 80 bp, Homo sapiens
gtcagcaccaggagcagcgaggcactcatcctgcacgccggcgagtgccagcggggaacgcccttttgcttgtgactggc

SEQ ID NO: 412012 - DNA, 83 bp, Homo sapiens
aaggattccaagtaactcttatttgagtccctgtgaagcaggaagagtgagggcaggttcactgcagctcagcagcatgtctg

SEQ ID NO: 412013 - DNA, 96 bp, Homo sapiens
gcgcgcggaggctggagctggaggcgcggcgccggtgagctgagatgtcagtattgaatatggtggtgaggcgtgaccctggcaacactgaacctg

SEQ ID NO: 412014 - DNA, 96 bp, Homo sapiens
cgacctcgacgtcttgcctgtgtcccacttgttcgcggcctataggtagacgttacatccaagaggaaataatccaggcaaggaagcacaagctga

SEQ ID NO: 412015 - DNA, 97 bp, Homo sapiens
tgaggttggacgtggggaatttctcctggggctcagagttgcctttcttcctgacgtggagtgtggtgaactcagtgcattgggccaatggttcgac

SEQ ID NO: 412016 - DNA, 100 bp, Homo sapiens
ctcctaaggaagaagcctagaagaggaggaagaggaaagaaaaggagtcaggaatgcctcttaggatccctttgtggccttccacatcaacaagggcctt

SEQ ID NO: 412017 - DNA, 100 bp, Homo sapiens
atcgacaagacgatccgggtaaagttccagggaggccgcgaagccacaggtggaattaagaaatctggcaaaaagtaagctgttccttgtgcctgaggag

SEQ ID NO: 412018 - DNA, 100 bp, Homo sapiens
cgggccagcgacccgctgctcagcgtcctcatgtggggggtaaaccactcgataaactgtgtgacgttccctcacccagacacgatgccggaacagcagc

SEQ ID NO: 412019 - DNA, 75 bp, Homo sapiens
aatcatggacggacagaggatgcacttgtccaatcctcaatcctgcagccaactcttcctgccaaataaatagag

SEQ ID NO: 412020 - DNA, 75 bp, Homo sapiens
caagtgataagaccagcagaagcaggattggttgccgtggtctttactgcttttctccctgatgtgtgaaacaag

SEQ ID NO: 412021 - DNA, 75 bp, Homo sapiens
cccagctcggcccgcgggggagccccgggagccgcacggctgctgccccattggaagattactccccaggcttcc

SEQ ID NO: 412022 - DNA, 101 bp, Homo sapiens
gctgccctcctggatttggagtggtgcaagctggtgtctcttttgacaagacttcagctacctggcttgctctgtccagaattgcaggtctttgtaacagg

SEQ ID NO: 412023 - DNA, 74 bp, Homo sapiens
gagcacccaggcgactgcctcatcttcaaggtgtcagcagttgagtctttggagggccccctgctccaggtgga

SEQ ID NO: 412024 - DNA, 98 bp, Homo sapiens
gcggcgcggcgcgggctggcggtggctccacggactcgctcagcagcagcctgaaaacttgctacaagtatctcaatcagaccagtcgcagtttcgca

SEQ ID NO: 412025 - DNA, 50 bp, Homo sapiens
ttaaggacattccaggcagaggcaagggcctattccctggtggattccag

SEQ ID NO: 412026 - DNA, 101 bp, Homo sapiens
gcggaggcagaggtggaggcgctttgaaaggtaagaacaagagagttggaaagcagttagcctcacagaagatccttcagctgctgcacccacatgtcaag

SEQ ID NO: 412027 - DNA, 100 bp, Homo sapiens
ccttgtcccagcctacacagaacagagccaaatcaaaggctatcctgataacttaagtgactctctcttttccggtgatgaagaaaatgctgggactgag

SEQ ID NO: 412028 - DNA, 100 bp, Homo sapiens
gaacctctgtgcacacgatgggcctgcatctcttcccactatctgctaggaaacacgaggacatgcttcagcttatcaacaaccaagacagtgacttccc

SEQ ID NO: 412029 - DNA, 50 bp, Homo sapiens
tccagacccccgtccagtgaattctgggaggagccccagccccgcgacga

SEQ ID NO: 412030 - DNA, 80 bp, Homo sapiens
gagacagcttgctttctgtcgtggcaatgttttgaaactggcaaaatcaggtgactgggtacctggatatgtgatcgagt

SEQ ID NO: 412031 - DNA, 88 bp, Homo sapiens
ttttaacgagtattccaaatttgatggcaaggcgggtgccacgtctatgtgggcttcgtgctgtgggctgctgaatgaagtcatggga

SEQ ID NO: 412032 - DNA, 100 bp, Homo sapiens
cagaaaacagaaatcgaaacagatacagagatgtaagcccatattccgaagaggctcaatctgtaaatccttctagtgttgatgaaaatattgactctga

SEQ ID NO: 412033 - DNA, 82 bp, Homo sapiens
gtttatgagtctctgggatggattggatactgatcacagctgccaggtcacgcatgaagggagcaccgtggagaagacagtg

SEQ ID NO: 412034 - DNA, 82 bp, Homo sapiens
ttcgtggtggaggtctggaaccagctgctaagccagaagcgcgtatgccatggacaatattaccaggcagaaccaattctac

SEQ ID NO: 412035 - DNA, 90 bp, Homo sapiens
ccaaagagtgtctgacatttcttttgtgcaagatgagcctcaagtgcttctgcattacatttgcagttaacatgtttcgaacattaccac

SEQ ID NO: 412036 - DNA, 90 bp, Homo sapiens
ggttcacaataaaggtgctaagaaagagaatgtaagacaggaaaataattaaatattcttaccgaggtatgatctcgtgaaaccttgaga

SEQ ID NO: 412037 - DNA, 90 bp, Homo sapiens
gcaagcaccagccttcagggacaagaaacagggggtctcagccaagaatcaaggcttgcagggtggcccccgctccgacttcgacatggc

SEQ ID NO: 412038 - DNA, 74 bp, Homo sapiens
gatgtttcccttggtcaaaagcgcactaaatcgtctccaagagtaattctgaggaagaagaggaggaaaaagaa

SEQ ID NO: 412039 - DNA, 75 bp, Homo sapiens
acaggaagaagttggtacgggcactcttcatagttcctagacaaagaacgtggaatcttgtagaaggaagatcag

SEQ ID NO: 412040 - DNA, 75 bp, Homo sapiens
tattcttcgcagcctaaggaggaacactaagaatccagggcctgaaaacccagaatgaacttgtgtccatcccag

SEQ ID NO: 412041 - DNA, 100 bp, Homo sapiens
ctgggcagtggctacatcggaagagtcttcggcatcgggcgacagcaggtcacagtggacgaggtgttggcggaagatgccatggacaatattaccaggc

SEQ ID NO: 412042 - DNA, 91 bp, Homo sapiens
cggagatccgctacgagggcatcctctacaccatcgacaccgaaaactccaccgtagcccttgccaaagctgcccgaaaccatgttaatag

SEQ ID NO: 412043 - DNA, 82 bp, Homo sapiens
gcgcgggagcagcacttccacagccaagtgcgggagtccacggtacacggtcctcttctcgcacggcaatgccgtggacctg

SEQ ID NO: 412044 - DNA, 98 bp, Homo sapiens
aagccccaacattacagaccggtggatcctgtccttcatgcagtctctcattggcttctttgagactgaaatggcagatgaaaataaacccatctgga

SEQ ID NO: 412045 - DNA, 74 bp, Homo sapiens
ctggattctgctttcacctgtgcagccgagctcgttttgagagattggaaaggaattcctaagaagcctgaaaa

SEQ ID NO: 412046 - DNA, 85 bp, Homo sapiens
ttcctgtacagcctgcagaactggggatatgagactttctactcggaatatcctgagtgttgcgtggatgtaaaacccatttcac

SEQ ID NO: 412047 - DNA, 83 bp, Homo sapiens
gtgatgagaagctgtcggagcttcccaagcggacaaggcaaaatctcagcaagttcggacctctagtacaataaggcgaacct

SEQ ID NO: 412048 - DNA, 99 bp, Homo sapiens
ctagcaggaatgcttactgttgcgtggttcgttattaacagataacaacgaacttgatgcaagtgataggtttgccaaggtcagacctctcatcatccg

SEQ ID NO: 412049 - DNA, 100 bp, Homo sapiens
ctgagccagtggtcagtcaaattattgacaaactgaagcacattaaccagcctgcagcagaatcacctggcgaggaggtgcctgttgaaaaagataagaa

SEQ ID NO: 412050 - DNA, 75 bp, Homo sapiens
tattagatattcgacattcttctataatggtttggttgggatgttccagtaattctgagaaattcagaagagacc

SEQ ID NO: 412051 - DNA, 75 bp, Homo sapiens
aagaaagtcagggggactgcaaaggccaatgttggtgctggcaaaaagcttccaatcagaagactatacaacctc

SEQ ID NO: 412052 - DNA, 51 bp, Homo sapiens
gtgaagctgcagaccttcgcgagattgggtttcaccatattgcccaggctg

SEQ ID NO: 412053 - DNA, 88 bp, Homo sapiens
ctcctcctccagcacccttgcctactccccgcgggacgaggaggacagcatggtgactcgaaaagccctgtttcctggtgactctgag

SEQ ID NO: 412054 - DNA, 100 bp, Homo sapiens
aagaagagaagcagaattatacctagaagtctactaatggacagttagtcacccacctacatgttgaggtatgggctacgtgagttcgtggtgattgccc

SEQ ID NO: 412055 - DNA, 75 bp, Homo sapiens
agcgcctacccgagtgtgcgaagctagccaagagccagaggccaagaagagtaagacggccgcaaagaaaaatga

SEQ ID NO: 412056 - DNA, 48 bp, Homo sapiens
atctgaagggaaagctccagatactagattccttttaagattgggcag

SEQ ID NO: 412057 - DNA, 95 bp, Homo sapiens
ccgagccagccgctgttttgccggaggagcccctcaggccggggatatgagactttctactcggaatatcctgagtgttgcgtggatgtaaaacc

SEQ ID NO: 412058 - DNA, 51 bp, Homo sapiens
cctgaacggagtgtgcgacggattgggagggaagaaggaggggccggcgtc

SEQ ID NO: 412059 - DNA, 82 bp, Homo sapiens
gaggaccacctttttggcaatctatgggtcctgcagttctgagcttgggttccctttgcctggacaccaaccaagcccccaa

SEQ ID NO: 412060 - DNA, 90 bp, Homo sapiens
aacggacgggccaacgccgtggccagctccactgagagaaccccagattgtttgctacatgaggagaacttctcggtgaggtgccctaag

SEQ ID NO: 412061 - DNA, 50 bp, Homo sapiens
acgtgcacccagaggaccaggcggcggaccatgcagtgctggaggccgag

SEQ ID NO: 412062 - DNA, 149 bp, Homo sapiens
gacaagaacatccccgccgggctgcagtccatgaaccaggcgttgcagaggcgcttcgccaagggggtgcagtacaacactccagtcagcccggtcaagcatgacagcaactcaaactcggcaaacttccaagacgtggaggacatgcc

SEQ ID NO: 412063 - DNA, 50 bp, Homo sapiens
ttcaaaacaagtggctgattgagggagcatttcctgaagacgtagtcatg

SEQ ID NO: 412064 - DNA, 82 bp, Homo sapiens
cagccttgggcctcgcgccggctatggccgtgccctggggctgagccctcagaaactagatgatggccatttaaacaactct

SEQ ID NO: 412065 - DNA, 120 bp, Homo sapiens
tgcagttgttacgtgataatctgacactatggacttcagacatgcagggtgacggtgaagtgtgaccagtattggcctagcagaggcacagaaacccacggactcgttcaagtaacgctg

SEQ ID NO: 412066 - DNA, 100 bp, Homo sapiens
atcaccttctgtggaaaggaagctgcacaggaagccgtgaaactggatgatgatgctgaagctatccttgctgcagacttcgaaattggtcactttttac

SEQ ID NO: 412067 - DNA, 75 bp, Homo sapiens
ggcagagctggttactgcggaggctgtgcggtttcttgcagaacataaattattaggaaacattaaaaatgtggc

SEQ ID NO: 412068 - DNA, 75 bp, Homo sapiens
tgaacatcgaggagcggaattcctgggtcacagggaattgaatgatctggcacgggaccctccagcacagtgttc

SEQ ID NO: 412069 - DNA, 100 bp, Homo sapiens
gagaggcgcagccagaggagccgccgcagtagctcccccgcctcccgggctgagggacgccatggagttggtgctggtcttcctctgcagcctgctggcc

SEQ ID NO: 412070 - DNA, 100 bp, Homo sapiens
ggagatccggagggcctcgggcaaagaagccctgcagaacatcaacgaccagaaccttctgagatgttcttggtcacctgatggaagcaaaatagcagct

SEQ ID NO: 412071 - DNA, 100 bp, Homo sapiens
aggaaaactgatcacatggagagaactgcaagtgtccttcgacgggaggtgccttagctggaccaattattgtggagccacatgtcacagcagtatgggg

SEQ ID NO: 412072 - DNA, 100 bp, Homo sapiens
ggcgcttcctgcgcatcgtctgcaagaccgcgaggcgagacctcttatgctgcccagtacaagtatggcaagaaccgggtagaagcagatgccaagcggc

SEQ ID NO: 412073 - DNA, 76 bp, Homo sapiens
ttctcggtttatgtgctcttccaggaagtatatattcaagcccaggactgtatagtaaaacaatgacccccactta

SEQ ID NO: 412074 - DNA, 98 bp, Homo sapiens
tgaccgtgtcttacatcagttcagagaggatgagacaggagcctatctgattgacagggaccccacctactttggtcctatcctcaactacctccgcc

SEQ ID NO: 412075 - DNA, 101 bp, Homo sapiens
gtggactggctcttattgctgaaagactacccatgctatatccagaagtaattcaacaggtgcctatctcctcactctcaaggacactttctttgatcgag

SEQ ID NO: 412076 - DNA, 100 bp, Homo sapiens
gatggtggtgtgtgaccttgggaaccctatggtgtctggaacaaatgtgggaaggatacgagcaagataaagcagcgagggatttaagtctggcaacagt

SEQ ID NO: 412077 - DNA, 100 bp, Homo sapiens
gccagcttgaagaaagcatctcacagctccgacactattgcgagccatacacaacctggtgtcagtggaggccatagtggagtttgactaccaggcccag

SEQ ID NO: 412078 - DNA, 100 bp, Homo sapiens
agcccgaccacgacggccccagggaggatgacgaacccaacctggtgcccggcccgcaggacactcatgaggaccatgatacttccactgagaatacaga

SEQ ID NO: 412079 - DNA, 75 bp, Homo sapiens
ctctcaaccacaataacaggcggagggtcggcgtagaaaaggcgacggcggattgacagaagtatgattggagag

SEQ ID NO: 412080 - DNA, 103 bp, Homo sapiens
tactacatcttcggtgacctctgcggcagagttcagccaccccgtggagagcctggcgctgactgtggaagaggtgatggacgtgcgccgtgtgctggtgaag

SEQ ID NO: 412081 - DNA, 82 bp, Homo sapiens
tcagttggaagcagccgatccagcctgcggagcctgtggggcagaaggggaaactgaggcccaaggaaattgagtatctctg

SEQ ID NO: 412082 - DNA, 50 bp, Homo sapiens
gcaaatcatatcttggatcagagtctgaagatgatgagaaactgaaaaag

SEQ ID NO: 412083 - DNA, 50 bp, Homo sapiens
tttttatataagcttagtaacaaagcaggcatccagggcattgtggatgc

SEQ ID NO: 412084 - DNA, 83 bp, Homo sapiens
ctttttgttcaagataaagtgattttttgcctttgttgattaactggacaaattcagctggcataaccttgacaacagattgc

SEQ ID NO: 412085 - DNA, 101 bp, Homo sapiens
atttccttcgtccctgacatcatctctgtgcactgataataaccctgcagctgagtgccacgtgctgacgtcactaagatcaatacagcaaactctgaaag

SEQ ID NO: 412086 - DNA, 98 bp, Homo sapiens
gaaagagcaccgaagaagcttcgaggatctgagcaccatttaccgtggagagatgtgcttttttgattctgaggatcctgcaaattcccttcgtggag

SEQ ID NO: 412087 - DNA, 74 bp, Homo sapiens
aagtgcttgatatcacagaggaaactctgcattctcgcttcctggagtttaattggttggggtcagataagaag

SEQ ID NO: 412088 - DNA, 100 bp, Homo sapiens
atgacttctgccttcaagctggatttcctcccggacatgatggtcgagggccgcctgctcgttcctgacagaatgaagaaggcgtcgtgaaggagataga

SEQ ID NO: 412089 - DNA, 100 bp, Homo sapiens
tctcatactacaattgccaaatacgcacaataccaggcttcctccttccaggaatcattgagagtgttgacttcaaaatcaaaactgtagagctaagagg

SEQ ID NO: 412090 - DNA, 74 bp, Homo sapiens
caggacacagagactttatcaaaaacatgattacagggacatctcaggctcttctggagctggagatgaactcg

SEQ ID NO: 412091 - DNA, 100 bp, Homo sapiens
acaagagtgcttatcccagctaagctccagggcaagaaactatattcagtctttgactcagatgccgaagatgaactttgcgaatgtatttattggtgcc

SEQ ID NO: 412092 - DNA, 50 bp, Homo sapiens
cccggaactcctccattgccagtgatatggatcgcttacacctgagacga

SEQ ID NO: 412093 - DNA, 100 bp, Homo sapiens
cgcctcacacgcttcctctccagagtgatcaagtgtgacccggggccaaaccagtgctcctgccacctctctggctgccccctagagcctgcccatccca

SEQ ID NO: 412094 - DNA, 74 bp, Homo sapiens
ccttctttgcaatgacgcgattgtttcaatctaatgatgttcattttccagacactgaaagagcagaatggcta

SEQ ID NO: 412095 - DNA, 83 bp, Homo sapiens
ttttgatttattaaatttaaatagattagtaactggcatagacaactatgggcaggttgtaaagctctctgaaatagtgacct

SEQ ID NO: 412096 - DNA, 75 bp, Homo sapiens
ggtcaacctgcgcccccagatgtcccaggattactacagcatcccatttcccacacccactactccgctgactgg

SEQ ID NO: 412097 - DNA, 83 bp, Homo sapiens
aaaaccaacgcctggctcggagcagcagcctctgaggctcttgtcaggatggtgaagctgttcatcggaaacctgccccggga

SEQ ID NO: 412098 - DNA, 75 bp, Homo sapiens
ctactgaggaccagcagcataagcaggaactgcacaagctcatggcccgggttatatggaaaagattaaaccaat

SEQ ID NO: 412099 - DNA, 98 bp, Homo sapiens
atagtgcccccagccagtacctgggtgttccccaccttgggcatcatgcaccacaacaaacaggaaccatgtaagaagtctgactgccctgctggaga

SEQ ID NO: 412100 - DNA, 115 bp, Homo sapiens
cgcaggagcagccgcagtagatctcgaagtatctcaaaaagtcgctcccgccagttcggccaccctcggcctgcccagcagtgccctggatgtgtcttgctttccccgggagcca

SEQ ID NO: 412101 - DNA, 100 bp, Homo sapiens
gcactttccgtctttcttctctgggcgcccaccaacaatggatggcaactccctgctctcggtaccaagaactgataaatttcaaacggaagagagtggc

SEQ ID NO: 412102 - DNA, 100 bp, Homo sapiens
gtacttgtctgttgggggcttgtgttgatcaggagtgaattcacagtctaccatgaattggaagttcaaggagcagggacaagttacaggaatgttctcc

SEQ ID NO: 412103 - DNA, 100 bp, Homo sapiens
cgcggacccagtggatgtaaaccccttccaggctgaggcagctaaattagttccaatgggtttcaccactgcaactgaattccaccaaaggcggtcagag

SEQ ID NO: 412104 - DNA, 97 bp, Homo sapiens
ctcgtccaactggtccctcagtcacacatgccagagattgctcaggaagcaatggaggaattggcagactacacggtttatggaagttgaagtagca

SEQ ID NO: 412105 - DNA, 75 bp, Homo sapiens
aaaaccttctggccccagggcagtgtgcagcctggattttctttgctaagctgagatctgtatctgtggacctga

SEQ ID NO: 412106 - DNA, 90 bp, Homo sapiens
cagtcgcctggaagaaagatatgatgacctcaaggaagagatgacccttatggtgggtgtgaccgagtgttatgagtgtcatcctaagcc

SEQ ID NO: 412107 - DNA, 75 bp, Homo sapiens
cttggactgagtcctgcaggacacaggaaactttaccctcccagaggtagctgagtgctttgatgaaataaccta

SEQ ID NO: 412108 - DNA, 74 bp, Homo sapiens
cgatattatcattgtgttagatcagaaggaccatgctgtttttactcgggatgaccaacccggaggtgattcag

SEQ ID NO: 412109 - DNA, 50 bp, Homo sapiens
cgccatcgttgctgccttcttcgtcaaggatttaagtgccctgtatgctc

SEQ ID NO: 412110 - DNA, 100 bp, Homo sapiens
aaaacatttgatttttggaaggatatagttgctgctatacaacacaattataaaatgtcagcttttaagggtaatatatgctttaaacactaaaaatgat

SEQ ID NO: 412111 - DNA, 100 bp, Homo sapiens
ggcgggggccgtgccctcggaggcggcgtgggcggcagagagcggggcggcggcaggcgtccgacctccgatcatgaacgggcccctgcacccgcggccc

SEQ ID NO: 412112 - DNA, 98 bp, Homo sapiens
ggcttcccggctgccaggctacagaactcgcctcgccactcctgagacatggacaacgccggttttgatacttatagaggactcccttcaatttccaa

SEQ ID NO: 412113 - DNA, 97 bp, Homo sapiens
actgctgctcagcgccaggcatcagctgggaagctggcgtgggcaggccagctgtacctggcctggagctccaggaagagcagcgaagaggcacaaa

SEQ ID NO: 412114 - DNA, 82 bp, Homo sapiens
cgacggggcgctgcctggcccaggcgcacacggaagtggtgagaagccctaccactgcaactgggacggctgcggctggaag

SEQ ID NO: 412115 - DNA, 82 bp, Homo sapiens
cctggatgagggggaagggcctcaaagccagaagatcccagatgcagtgactggttactacctgaaccgtgctggctttgag

SEQ ID NO: 412116 - DNA, 98 bp, Homo sapiens
ctgccatccttgcctcgctcactgcacgccagaacctgaggagagaatggcatgccagtctgaaccggacggcttttctcatttccacttgtacgtgt

SEQ ID NO: 412117 - DNA, 50 bp, Homo sapiens
atgcggagctccttcgctattctgagaggcagttgtgaaaaacttcagga

SEQ ID NO: 412118 - DNA, 75 bp, Homo sapiens
gccgcagaggaggagcgcagcccggcctcggtatatttgcttacttaaactaccatgttcctcgaacgagacgag

SEQ ID NO: 412119 - DNA, 75 bp, Homo sapiens
cgactgccagcaggggtgagctcttcctcttctggaacctctataaaggccctcgggaccaaggatcacgtcatg

SEQ ID NO: 412120 - DNA, 88 bp, Homo sapiens
cttgaacttcgtgagtttcgctctaaactgcccttgaaatgaagctggacttggaggctctgtgtgctccgggatggagcaggtgtgc

SEQ ID NO: 412121 - DNA, 50 bp, Homo sapiens
ccaatgccaagtgtgtgacctgtgactaatagggatgccaaaggaaaaat

SEQ ID NO: 412122 - DNA, 80 bp, Homo sapiens
cagagaaagcctgctctcttgcaaagacaggagttaaatacctgtgcatcccagcagcggattcaccatctcaaaacctg

SEQ ID NO: 412123 - DNA, 83 bp, Homo sapiens
cgctagggaagatcgcaccgcggacgcccgctgagcttggcgcacgggccgaccaggcggacctacgtgggcgccatgcccgg

SEQ ID NO: 412124 - DNA, 101 bp, Homo sapiens
cttcagctcatctttggcaggaaggcgaggcttccgcccggcacaggggacccaacatgagtgaagtttcctgcaagaaacgggacgactatttggaatgg

SEQ ID NO: 412125 - DNA, 78 bp, Homo sapiens
cgtttggtctcctgccgtgcccggagcatcagatccatgctgctgctgactcggagccccacagcttggcacaggctc

SEQ ID NO: 412126 - DNA, 82 bp, Homo sapiens
cagggagacaccgattataagaagagaaactcagcgctggggaagaaggattggagaatccatgttgaccaaatgcaccagc

SEQ ID NO: 412127 - DNA, 82 bp, Homo sapiens
tcctctcccgagtttttcatccccccgaatccaagcccaacttcacccctctcgccatcttggcccatgttctcggcgccat

SEQ ID NO: 412128 - DNA, 75 bp, Homo sapiens
accccaccagctgcccagcccccattggcgagtttgagaaggtgtgctcagtgaaggaacggcatgccagtgaaa

SEQ ID NO: 412129 - DNA, 98 bp, Homo sapiens
tcccaatgaaacgggcagccatggccctccacagcccgcagttcgttcccacatgcagggcagcacaaggagaatgggcgtcatgactgatgtccacc

SEQ ID NO: 412130 - DNA, 90 bp, Homo sapiens
ggaccatctagtctcaggaaaacaagctcagaacgctcgccgattctaccattatgtttctgtagaaaatgtttcctgactgcaatgagg

SEQ ID NO: 412131 - DNA, 100 bp, Homo sapiens
tggtggttccaatgagacagggcacaccaaactccatctgcttcggaaccaaaaagaagcttcccagagccggggccaggagccccaagcgccctctagc

SEQ ID NO: 412132 - DNA, 75 bp, Homo sapiens
gggaggtggagcacctgaagagatgccagcagccctccagaatacccatcatatagcccctgaggtggcatggtg

SEQ ID NO: 412133 - DNA, 89 bp, Homo sapiens
aagtgagcagtccagaaagcggcttatcgaacagagccgggagttcaagaagaacactccagagctgccccagagcacatcagctatgt

SEQ ID NO: 412134 - DNA, 88 bp, Homo sapiens
tgaggagaacgactgggttcgcctgcccagcaaatgcgaagaattttccagttcatatgaagaggtgatctctcaaataaatacgtca

SEQ ID NO: 412135 - DNA, 100 bp, Homo sapiens
ctaggtcgatggtcggcggcgcccggatgggcagctgagtagccggatcgagctgggagatgtgacaccacacaatattaaacagttgaaaagattgaat

SEQ ID NO: 412136 - DNA, 100 bp, Homo sapiens
tggatgaccagcgcgaccttatctccaacaatgagcaactgcccatgctgggccggcgccctggggccccggagagatttcaggtatgctgctgaaagtg

SEQ ID NO: 412137 - DNA, 100 bp, Homo sapiens
ctataatgtcatcagcctcgagtttagccacaccaggctggagaatatggtgcagaggccctccacggacagattgattcactttggagctgtaagtact

SEQ ID NO: 412138 - DNA, 82 bp, Homo sapiens
gctcggacgccagcggacacgcgggcgagaccatgtcgcctgaagaatggacgtatctagtggttcttcttatctccatccc

SEQ ID NO: 412139 - DNA, 50 bp, Homo sapiens
tcctctctgagtcaaatccagtggaagtttatctcgacaatgctagttgc

SEQ ID NO: 412140 - DNA, 97 bp, Homo sapiens
cgtagcaataaacccattcatagagcttattgccagatcaaggtcttctgtgacaaagtcttatggaagtgtatttaaagcaatacacaaggaatcc

SEQ ID NO: 412141 - DNA, 83 bp, Homo sapiens
cctgtgactggggattccgacagatcagtgagtcaaccactgcacaggcccgaagggcagagacaatgcagatcttcgtgaag

SEQ ID NO: 412142 - DNA, 90 bp, Homo sapiens
gacctgtgaagcaactgaagaaaatgtttgaagcaacaagattgcttgcaacaattgttatgcttagttaaacatgaagtttctggagag

SEQ ID NO: 412143 - DNA, 75 bp, Homo sapiens
cgccatgggcaattgccacacggtggggcccaacgaggcgctggtggtttcagggctcagtgctgtcagagaggg

SEQ ID NO: 412144 - DNA, 83 bp, Homo sapiens
tgacaaccttggaacagaacaagaggacaggaggtgtcgttccagatcaatgtccgagttaccaccatggatgcagagctgga

SEQ ID NO: 412145 - DNA, 83 bp, Homo sapiens
cccggatcgtggcctctcgagagcaaggaaacccggggatggcgtggagttctttgcccacatgcgcctcatgctgaagaagg

SEQ ID NO: 412146 - DNA, 100 bp, Homo sapiens
ggccacctcaactggggtcagaaggacctctaccgagatgtgatgttggagaactacaggaacatggtcttgctgggggatcatcgtcttgctcttcttt

SEQ ID NO: 412147 - DNA, 75 bp, Homo sapiens
atatactggtaatatagctaagattccacctgctcctacgaagcccgactttgatggtcctcgagagaagatgca

SEQ ID NO: 412148 - DNA, 100 bp, Homo sapiens
attatccttcagtggggctattggactgacttttcttatgctgggatgtgccttagaggattatggattagtgatgatgaaccaggttatgaccttgatt

SEQ ID NO: 412149 - DNA, 103 bp, Homo sapiens
accaaccagtccctgtgggagatgcccgtgctggggcagcacgatgtgattgaggcgggcaaggatgactatgtgaaggcactgcccgggcaactgaagcctt

SEQ ID NO: 412150 - DNA, 82 bp, Homo sapiens
gccaggcggatctcagaaggccagttcaaaggcaaagcgaaggctggagctaggagaaagcggtcatcagtacctctcagat

SEQ ID NO: 412151 - DNA, 128 bp, Homo sapiens
tgcaagcaagtcaccaaggaaggctgtgagcagttcatagccgagatgtctgagccagcaccgctctttgaccttgccatgcttgccttagatagtccagagagtggctggacagaggaagatggtcc

SEQ ID NO: 412152 - DNA, 90 bp, Homo sapiens
gggaacaaaatacaaatcatggagccgctggggtcccttttgcctcagatactattttgaagctccagtgatccacaagctcagaaatac

SEQ ID NO: 412153 - DNA, 100 bp, Homo sapiens
cttctcatctttgtggtcgtgtttttaaagtaggagagcctacatattcttgcaggtgagtgttgtgcaagattctgtcaacatttctggccagaatacc

SEQ ID NO: 412154 - DNA, 80 bp, Homo sapiens
gcacttggaatagtagcaggcggcggcggcggaacgccaggcagataaggagggttcctgcccccaggtgaacattaact

SEQ ID NO: 412155 - DNA, 97 bp, Homo sapiens
caggcagccagccaggaagggaggcagaagcatgctaagaacaacagtcaggccaagccttctgcctgtgatgatgactgtccaagtgcctccaaag

SEQ ID NO: 412156 - DNA, 100 bp, Homo sapiens
tggtacatgaactcttttccagtgtccttcaggagatctgtgatgagaagggacttcctcgcccgaagagcgcgggcacagcaacgcagatgcggcaaag

SEQ ID NO: 412157 - DNA, 98 bp, Homo sapiens
gcggcggccgaggacggggacagcgacgacgcggaggcagagaagggaacgcccggcccagccccgtggtggctaatgccgtagcggcattatctgaa

SEQ ID NO: 412158 - DNA, 74 bp, Homo sapiens
ctcccgagtagctgggaccacagggattattgtcattcaaggatatatctatggagttcacctgggatgaatgg

SEQ ID NO: 412159 - DNA, 83 bp, Homo sapiens
aagacagagggctctgatctgtgcgacagaggtcgcggagcctcgccggccgccatgtggagctgcagctggttcaacggcac

SEQ ID NO: 412160 - DNA, 50 bp, Homo sapiens
cacggagcactgcaggcgccgggtcacagccaggggctttgggccgctgt

SEQ ID NO: 412161 - DNA, 82 bp, Homo sapiens
cggccaagcagccaaccatgctcaacttcggtgcctctctccagcagactgcggctgctctttggcgtaaattgcaatcgat

SEQ ID NO: 412162 - DNA, 100 bp, Homo sapiens
ttcagatcagggtggctgttcttgggtgctgcaccaaaactccagcagtgggctttcttcaaggaatcaagtactggaaatgtttgatcatgcttatggt

SEQ ID NO: 412163 - DNA, 88 bp, Homo sapiens
cttcacctccctgctgctgctggcgtcgacagactttggcttcatgtttgaaagctcgccgggcggcaatctcggctgggaacccgac

SEQ ID NO: 412164 - DNA, 82 bp, Homo sapiens
ggactacgcccgcagccatggcaaaaagctaccacctgccagtctgaagcaccgagatgatccttcccgccagaagaaactt

SEQ ID NO: 412165 - DNA, 90 bp, Homo sapiens
cagagctggagcccacagagcctgggcctcttgtttgcctatctggggcgcctggctcacgaggttggctggaagtaccaggcagtgaca

SEQ ID NO: 412166 - DNA, 102 bp, Homo sapiens
ctgaaagaccggcatgccctattctgtgggcttccgcgaagtgtgcaactgaggaacatggctcaagaaactaatcacagccaagtgcctatgctttgttcc

SEQ ID NO: 412167 - DNA, 75 bp, Homo sapiens
cggcttcggagcgggagtgttcgttgtgccagcgactaaaaagaggtcaaaatgcagatcttcgtgaaaaccctt

SEQ ID NO: 412168 - DNA, 80 bp, Homo sapiens
cggcggcgcccgggcccacgcggaacgacggggcgagctgtcgcctggttgggcccggaaatgggacgtcgcgctttctc

SEQ ID NO: 412169 - DNA, 98 bp, Homo sapiens
tgtggcccagatgactgctctgagctttggctttggaatgtacaagtgtccggctttgctggcccagcaagcctgataagcatgaagctcttatcttt

SEQ ID NO: 412170 - DNA, 100 bp, Homo sapiens
acacaggttggggttcatgaaacgactagttccagaaatatgaaatgtgaactatgggatcactaaagtagaaggacagccccttcacaccgaactgaat

SEQ ID NO: 412171 - DNA, 75 bp, Homo sapiens
aaaggaagcgccgctagaagtttcagtgagcgggagctggcagaggttgattcttcaccacactgaaaccattag

SEQ ID NO: 412172 - DNA, 100 bp, Homo sapiens
ggatacgacccatgaaccggcgagacaacgactgaaagacctttcattcagaagctgtttcgtcctgtggctgcagatggacagttgcacacactaggag

SEQ ID NO: 412173 - DNA, 75 bp, Homo sapiens
cgtcagctcagcgccactgacaaagccccccgaaaagggcaaagatgtgaagttcatttccaatccgccctccat

SEQ ID NO: 412174 - DNA, 99 bp, Homo sapiens
gctgccgttctcagccggctctggagtgcgggcgggggcgacagggccgattccggagtggcgcgcagggaccatgtcggcggagaccgcgagcggccc

SEQ ID NO: 412175 - DNA, 92 bp, Homo sapiens
cggagcgcggtccctgtattggtctcctgctcctagagatgatatcatcaagttgaatcgaaaggaagggaagaagcagaattttccaagac

SEQ ID NO: 412176 - DNA, 139 bp, Homo sapiens
tacttctgcatgatgacagaagccgagcaggacaagtggcaggctgtgctgcaggactgcatccggcactgcaacaatgcgccgtgccgtccctgcagtgacaccgaggtgctcctagccgtctgcaccagcgacttcg

SEQ ID NO: 412177 - DNA, 90 bp, Homo sapiens
gatattgcggggacctgatggcctgagccgagctgtcggaaaaggtaacagaagatggaactcgaaatcccaatgaaaaacctacccagc

SEQ ID NO: 412178 - DNA, 100 bp, Homo sapiens
cgtgaaggcgtccgtcctgcgcatcgcagttatgaagacagtatggagtttccagaccatagtagacatttgctacagtgtctgagcgagcagagacacc

SEQ ID NO: 412179 - DNA, 90 bp, Homo sapiens
ccaggcccgcacagtttcgacgtgtccttccagcagtcgagcaccgccaagtcggccacctggacggtatgtgaagtatacacacttcat

SEQ ID NO: 412180 - DNA, 96 bp, Homo sapiens
agggcctggtgaaagaagtcctgaagcggaaaatcgagatagaacggatcttgtctgtgtccctcaggaaaatgtttataggaggccttagctggg

SEQ ID NO: 412181 - DNA, 100 bp, Homo sapiens
atattgatccagccatcatgaaggaaagaccacagcaagattctttcattcgtctcctcctagcctgggggaccaggctcgaactgaccctggacatcaa

SEQ ID NO: 412182 - DNA, 96 bp, Homo sapiens
agagattgtgaagaagaatttcgatctccgccctggggtcattgtcagaaacgatactggagtatttgtgtcagacattgtcaaaggaggaattgc

SEQ ID NO: 412183 - DNA, 100 bp, Homo sapiens
gaaacggagccagcggctgaggaggggccccagcagcccccgaaggccctatcaggacatggagtatgaaagacggcatttgacattatcacagactgac

SEQ ID NO: 412184 - DNA, 100 bp, Homo sapiens
ataagaccgcgaccagacaggcggcgccatcttcgaacttagacttccggaaggactttggcgagggcccagctgagagccagcctggaggttacccagc

SEQ ID NO: 412185 - DNA, 98 bp, Homo sapiens
ctggaactccacggagagactgtgggggcttatttggcctccccaggatggactggagcatcagtagtgcccgggtttatcacaggacagatactcaa

SEQ ID NO: 412186 - DNA, 100 bp, Homo sapiens
ggtcacccgctacgggaagcaggcctcgccacaggcctaatgggattgtttgaaaaacgtcgcttcaggaaattcctagtgtatgttgccaacttcgatg

SEQ ID NO: 412187 - DNA, 83 bp, Homo sapiens
gtcaagacatttcttcggcattctgcaacagtaatctcaggggcgatataatcaatgaggtggtcctaaagttgctcaaggct

SEQ ID NO: 412188 - DNA, 87 bp, Homo sapiens
tctgaagagggtctggaggagccttctcaagaacagagatgacagtcatgtccctttccagggacctcaaggacgactttcacagtg

SEQ ID NO: 412189 - DNA, 82 bp, Homo sapiens
gtccccttttggagatgcccttttcctttcagagtgcttgtgatttcacgtatttttgctgaactcgtaaaagagacacttg

SEQ ID NO: 412190 - DNA, 50 bp, Homo sapiens
tgcattacaagattccttacccaaggccaacggagtcttgctctgtcgcc

SEQ ID NO: 412191 - DNA, 90 bp, Homo sapiens
gtctgaggtcatcggggatgtggacgaaggggccgacctcctagattacactctctggcctttctgggtcgacacgcacgtagaccctcc

SEQ ID NO: 412192 - DNA, 88 bp, Homo sapiens
ctggggaggtcctccatgcgcagtcatgagtcgcttcaagtttatcgatgccacccagatgaacaacgcagtgcccacctctcctctg

SEQ ID NO: 412193 - DNA, 82 bp, Homo sapiens
aatagaaggattcaaatgctagcagacacggtggctactctgcctcggggacgaaagcagctagctgacgtggtggacagtg

SEQ ID NO: 412194 - DNA, 83 bp, Homo sapiens
gcggtgaactctgtccagttttcaaaccacacaggcttgggcactgtttaaaggaaagttccgagaaggcatcgacaagccgg

SEQ ID NO: 412195 - DNA, 100 bp, Homo sapiens
ttacgtccccgagtgcggcagtaccgcctccttcccagccgcgcggcttcctccagacctctcggcgcgggtatttcagagagatgggaatgatttgcac

SEQ ID NO: 412196 - DNA, 100 bp, Homo sapiens
cgcggacaagcagatcgagaccgggcccttcctcgaggcggtgtcccacctgccgcccttcttcgggaactctaatgatccaggacaaagaagttaccct

SEQ ID NO: 412197 - DNA, 100 bp, Homo sapiens
ttttactgtcaagacatttcttcggcattctgcaacagagttcacagttaccagccaagaaaacttgaaaatgagcagccgacggaaacgtgctcctcca

SEQ ID NO: 412198 - DNA, 83 bp, Homo sapiens
cccccctcagtttctgaaatgattctccagaatttctcctcataaaaaagtatggtttgaagtggtgaacatggatttttctc

SEQ ID NO: 412199 - DNA, 100 bp, Homo sapiens
agccgctggcagccgcggatctcaccgccgctcagggagcaggccgggctctcgccatgggtcactgtcgcctctgccacgggaagttttcctcgagaag

SEQ ID NO: 412200 - DNA, 75 bp, Homo sapiens
tccaactggtccctcagtcacacatgccagagattgctcaggaagcaatggaggggactcagaagaagatccttg

SEQ ID NO: 412201 - DNA, 74 bp, Homo sapiens
ctgcgtcaccgccgcccccccagacaagatggacaccgcggaggaagctgaacatactgacttgtggagtcatt

SEQ ID NO: 412202 - DNA, 130 bp, Homo sapiens
caggacctgcccagcgccaccatcgcctgtcacctggacccgcgcgtgttcgtggacggcctgtgccggatacaaggcagatccaaccatccccaccgtggtcctacgatcagtcctaccaatacctggg

SEQ ID NO: 412203 - DNA, 90 bp, Homo sapiens
cggccagacacctggaagccggaaaatggtccgcgggagagctgtggggcttggtgagtgtttcgtggcctctcgggttggtcagcaccc

SEQ ID NO: 412204 - DNA, 75 bp, Homo sapiens
tcattcccaaaatgaaaatttctccaaaaaggatgtcatgttcctggcctggagcccagtttcctccaattgcag

SEQ ID NO: 412205 - DNA, 87 bp, Homo sapiens
cggccccggagcccctcggcggcgccaccatgtactcgggagccggccccggaaaaggctgaggaggtgtatcgtctgtatcagaac

SEQ ID NO: 412206 - DNA, 75 bp, Homo sapiens
aagctccggtattattctttgatagaaatccaatagaccctgtacccaagcctgtcatcaaaattgagaagatag

SEQ ID NO: 412207 - DNA, 74 bp, Homo sapiens
cttagacaagaagatggtcacgggagtaatcagcaactcagggggacctgtacgagtctatagcctacctggtc

SEQ ID NO: 412208 - DNA, 83 bp, Homo sapiens
aaacgcggccgcttccgactcagcctcttcagcgacctgcccgagtgcagagcagagcgggcggaggaccccgggcgcgggcg

SEQ ID NO: 412209 - DNA, 100 bp, Homo sapiens
ggcagcgagatggaatcagcaagagaaaacatcgaccttcaagtaccccagagttcatggcccctgagatgtatgaggagaaatatgatgaatccgttga

SEQ ID NO: 412210 - DNA, 100 bp, Homo sapiens
gcgagcgcaacctggtagtggccgggacctcgcagctctacgtgtaccgcctcaaccgcgacgccgagacatgcgtcgggatgtccaggaaatttttcgc

SEQ ID NO: 412211 - DNA, 100 bp, Homo sapiens
gaaagatcacagcagtgttccaagttctaaagagccgtctttaaatcctgagtatgagagagaaccaaatcacaataagtctttagctgcaggtgtgtgg

SEQ ID NO: 412212 - DNA, 100 bp, Homo sapiens
cagtggatcgagcagctgaacgagtgcaagcagctgtccgagtcccaggtcaagagcctctgcgagaagatcggcttcagctccccaggaatatgattga

SEQ ID NO: 412213 - DNA, 74 bp, Homo sapiens
acggacgcgcgagacaatgaggagatgaagactggcccatttgcagagcactccaaccagctgtggaacatcag

SEQ ID NO: 412214 - DNA, 50 bp, Homo sapiens
ccaattactgctggaatcttgacaaggtcttgttctgtcgcccaggctgg

SEQ ID NO: 412215 - DNA, 74 bp, Homo sapiens
aaggcgaaactactttgataaatctaagtgttatgaatgtgggtacataccgagcatcaaatattaaggcaccc

SEQ ID NO: 412216 - DNA, 82 bp, Homo sapiens
catctcttgattcatcttcttcatcttcactaacttcatcatcatcagtgacaggatcacagaatgtgaattttgaacagat

SEQ ID NO: 412217 - DNA, 100 bp, Homo sapiens
gccgggggctcagagatccaagtgcgcgccctggcgggtccggaccaagagccagtggcagccccagctgcagcagctacgtgacatgggcatccaggac

SEQ ID NO: 412218 - DNA, 75 bp, Homo sapiens
caaaaacagttgtgacagaacatgcactccatcaggttgtgggctgcacactgcagaaagatacagctgaaaaag

SEQ ID NO: 412219 - DNA, 90 bp, Homo sapiens
cgtccatgctttatcatcaccatggagtgggtcgagtctatgctgtcttgtcaaagagagaaggtcgggtacttcaagaagaaatgaaag

SEQ ID NO: 412220 - DNA, 100 bp, Homo sapiens
tctcagtgatgagtttagtcatcttcgtccagaacagcggttggctttattgcatgcattgtgtccagatctggcaccctgacttatgaagcagttcacc

SEQ ID NO: 412221 - DNA, 90 bp, Homo sapiens
ttcaagaatcaatgaatgaaattctatttgaagaataccagtttcaagcagtattaagagtaaatggtggacccccaaaagtacaagggc

SEQ ID NO: 412222 - DNA, 51 bp, Homo sapiens
ggaccactctcgcctgctgcagtgccagaccccccaaagacacacgtgacc

SEQ ID NO: 412223 - DNA, 100 bp, Homo sapiens
ctgggccctccttcttgagatccctaaaatgaaagaagaaacaagggacctgtatagtccatgtacatcttcatgtgatcagccaggattttgattctcc

SEQ ID NO: 412224 - DNA, 82 bp, Homo sapiens
gaggacatggacctgtacagcatcaactacctgcactttggggagcctaagtcctgggaaagcaggcaggatgggagagtcg

SEQ ID NO: 412225 - DNA, 87 bp, Homo sapiens
ggtggtcgtccgcggctccggtcacgtcaccgtggaataaccagcaagtacctgtcaagaatgaagtagatcattgtgaaaatttga

SEQ ID NO: 412226 - DNA, 75 bp, Homo sapiens
gctgaagctgatgaacaggaagttgtggctgaggttcagggattaatgaaaatcaagttccatcctcagacaaga

SEQ ID NO: 412227 - DNA, 75 bp, Homo sapiens
gtgacaacgaccacgtctccaaaatgagtcgcatcttcaacccccatctgtttacccagggttgatgataaccgc

SEQ ID NO: 412228 - DNA, 95 bp, Homo sapiens
tagccacggtgtggcagctgctctgaaccaggacctggacccggacccaaagtgccatgtctttaatagatcctgcatattttgatgaaaattgg

SEQ ID NO: 412229 - DNA, 80 bp, Homo sapiens
acttgcttgggatcctttatcctggtcatcttctatttccaaagttagagcagccagcgggtacagaatggattttggaa

SEQ ID NO: 412230 - DNA, 82 bp, Homo sapiens
gccccccggcaccgcgcctgctgccgggttgcgctccgtgcacctcttgcggggccatgtttatgagtggactaagtgaaag

SEQ ID NO: 412231 - DNA, 100 bp, Homo sapiens
ggaccaccacattttacagaaagcacagtgtttccaagagctggagataagatgggtagactgctacttcccttttacacatccttcctttgagatggag

SEQ ID NO: 412232 - DNA, 75 bp, Homo sapiens
ctcgtcactcctttctttgtggtcttcatttgtgaatacatagaaaaactgattgcttatcaacgagaattcctt

SEQ ID NO: 412233 - DNA, 98 bp, Homo sapiens
tcgccgtccaccaggtccctctctctgtccccggccgccatggagcagccgccggcgcctaagaggaaatctgaaatagagtactatgctatgttggc

SEQ ID NO: 412234 - DNA, 100 bp, Homo sapiens
aaaggaaaacaagaggccccagagggaaaagaagcccaaagttttaaaggtgtggcacattggttgacctttgccagggcccccaccttcggcatactgg

SEQ ID NO: 412235 - DNA, 80 bp, Homo sapiens
agcctctccagtggatgatgaacagctgtcagtctgtctttctgttgaacaggtagttaagcccccccaaaacaagacgg

SEQ ID NO: 412236 - DNA, 96 bp, Homo sapiens
gagagcatcgactggaccaagatcgagcccagcgtcaacttcctcaagtcgcccaaagcccacagcccccatcccgtagcccttcctggatctgga

SEQ ID NO: 412237 - DNA, 78 bp, Homo sapiens
gaaaccatgcctcactgtcctaggcaagaagcctggctacagataagggaccaaaatgactgactcaaaatatttcac

SEQ ID NO: 412238 - DNA, 74 bp, Homo sapiens
tggcctcttataccccggactgcaggcctgagacctgggaggaagctggagaaaagatgccctctgaatctttg

SEQ ID NO: 412239 - DNA, 83 bp, Homo sapiens
gtactctttgccgtacccaccggagcctggcgcagcctccctctattaccagttcaaatctgaacatcaatgatgtactaggg

SEQ ID NO: 412240 - DNA, 98 bp, Homo sapiens
cgcgggcgattcgcgtagcctcagatctgactgcagccatgagcagcaatgagtgcttcaagtgtggacgatctggccactgggcccgggaatgtcct

SEQ ID NO: 412241 - DNA, 96 bp, Homo sapiens
gaaacaggaagtggcaaaactggtctgcagcaaaaaattattcctgatcaggaccaactgatggcaatagcactagagtgcatctatacctgtgaa

SEQ ID NO: 412242 - DNA, 99 bp, Homo sapiens
aagaacaagaattccacatgagaagtaaaaacagtttacagtactcagcaaaagaacatggaatgcctgaaaaggccgctggcccaacaggcaaaaatg

SEQ ID NO: 412243 - DNA, 100 bp, Homo sapiens
cagcccgaggacaagcggctcggaagatccatccaaaagctatgtgaaattacgagactttgtgcttgtgaagctttgtcaagatttgccctgtttttcc

SEQ ID NO: 412244 - DNA, 83 bp, Homo sapiens
actctctctttctggcctggaggctatccagcgccatgcggaccctcagttggaagcacaccctgggcctggtgaccatggac

SEQ ID NO: 412245 - DNA, 100 bp, Homo sapiens
ctgggtccgggaccggcgtcagggacacggggtgctgcgctgcgccgacggctccacctacaaggatcctcatgcggaagaatttgaagacaaagagtgg

SEQ ID NO: 412246 - DNA, 75 bp, Homo sapiens
atctttgtctagccccagtgcagggttggccaacggtccagatgtgctggagacagacggcctccaggaagtgcc

SEQ ID NO: 412247 - DNA, 96 bp, Homo sapiens
ccgccgtcggcagcaagaacagagagagaggtggacagatctgagagatactgaggtgcactttacaggtccccgatgaaccaagagaaccctcca

SEQ ID NO: 412248 - DNA, 100 bp, Homo sapiens
agagcgccttgggacagggggatttggaaatgtcatccgatggcacaatcaggtttattcagtcaccatgaagctgctgctgctgcacccggccttccag

SEQ ID NO: 412249 - DNA, 107 bp, Homo sapiens
ggagaggagaaactttggggcccgcgccgcgcgccggcggcaccatgaagtcagcggaggaagaggccacaagaggaagctgaatgaagaggacgccgccagcgagt

SEQ ID NO: 412250 - DNA, 75 bp, Homo sapiens
cccactggctttgtctggggacacccgacgagtgttgaagcctggaaatcccctccccttccccctccccccttt

SEQ ID NO: 412251 - DNA, 100 bp, Homo sapiens
caaagacccagtgaacaaatccgggggcaaggccaaaaagaagaagctgaagtcgttttttaaagagtatggacaaatagaatctgtacgatttcgttct

SEQ ID NO: 412252 - DNA, 74 bp, Homo sapiens
actgggctcatgggtcttgctctttacaaagagctcctggatctcccaggtatcattgaaggtgccaaggatgg

SEQ ID NO: 412253 - DNA, 101 bp, Homo sapiens
aaaaaccattcttgaaagaaataatttcactgacttcacgaatgtgagctggaacgagatgcctatgttcaggctcttgctcgcttctccctactcacagc

SEQ ID NO: 412254 - DNA, 100 bp, Homo sapiens
gtcctgcccccagatactctgcccaaccgcacggtcaccctattatcttagaagacctaggactccaaaaatgtttcccctgaaggacgctgaaatggga

SEQ ID NO: 412255 - DNA, 50 bp, Homo sapiens
agaatacagagatatggaatcaggccggctggatcctgcaggcagctgta

SEQ ID NO: 412256 - DNA, 98 bp, Homo sapiens
tgaggcggcggcggcggcggggatcgtctccggcagtgtcatggagaaactccagctgggcccagagattctgcagcgggaaaatccaaggcttattt

SEQ ID NO: 412257 - DNA, 75 bp, Homo sapiens
acagggcagctactcagcaccgacgctgacagggatggtgcctgggggggccctcagcctcttggccttgaacgg

SEQ ID NO: 412258 - DNA, 90 bp, Homo sapiens
ttcttgcgctgcatcgaagcctcagggtacagccaaagaccggagctttggagagatgaagtttaaacagtgtcctacagagaacatggc

SEQ ID NO: 412259 - DNA, 101 bp, Homo sapiens
gggggagcccagtagagaggagtataaaatccagtcctttgatgcagagacccagcagctgctgaagacagcactcaaagctctttcgacgtgtagcagca

SEQ ID NO: 412260 - DNA, 74 bp, Homo sapiens
gagcaaaggagtcagggatggctttttctcagatcgtcagtatttaaacagatcacatcatgcgtgagtacaag

SEQ ID NO: 412261 - DNA, 120 bp, Homo sapiens
cgagagggaagcgatgccacgggagatggaaccaaggagaaaccatttaaaacaggtctaaagctctggtagctgaagaacatctcacagtggacgccagggtctattcctacgctctag

SEQ ID NO: 412262 - DNA, 100 bp, Homo sapiens
gatcccttgctcccatccctgcagcatgaacaagacttgtcagcttgtgggaaagtgacatcagcgtccacccgctaaccctgccctctgcaacctgctt

SEQ ID NO: 412263 - DNA, 96 bp, Homo sapiens
ctggggccagggaaccctggtcaccgtctcctcaggtgtgaccaattcagtgaaaggaacgaatgcgattctctggacctgtttgggactgagctt

SEQ ID NO: 412264 - DNA, 50 bp, Homo sapiens
cccatccgtctcaagactgtgaaaccagcgtccagaccaaagcatttact

SEQ ID NO: 412265 - DNA, 75 bp, Homo sapiens
gaaacatgaaaacatcgtggccctgtacgacttccagaacatacggtccctaatgagcacagagaagaccaaggg

SEQ ID NO: 412266 - DNA, 90 bp, Homo sapiens
gtgttctctgtgctgagcggcgggactgagctgttgagttagagccaacatgagtgagaatgaggaaaatggggagcaggaggctgacaa

SEQ ID NO: 412267 - DNA, 98 bp, Homo sapiens
agtcattaccactcacactgtacttccagggagacaccgattataagaagagaaactcagcgctggggaagaaggagctccccacaccaagtgagaat

SEQ ID NO: 412268 - DNA, 75 bp, Homo sapiens
ccctacggagctcgccccccagcaggtgccagaccctcgttttggctggggaatgaaaccctgaaggtgccgctg

SEQ ID NO: 412269 - DNA, 75 bp, Homo sapiens
ggaaaaagcagtaaagccagaggaagtgtccttcacggttcggttcacatttcacaagccccatgaagtctatct

SEQ ID NO: 412270 - DNA, 90 bp, Homo sapiens
atttacgtcagaagaggcctgccatactacattcgcttaaattttgcagagaaagcctcgtgtgcaagctgaacacaaggaccaccatcc

SEQ ID NO: 412271 - DNA, 100 bp, Homo sapiens
tataaagctgagtgtgatgaagatgcagaaaatgttggaattcctggaaaactcaagcaattcgtatttgacttacattctggaaaactgcacagagaat

SEQ ID NO: 412272 - DNA, 100 bp, Homo sapiens
ggcggcagtcggatagacaataccacaacaacacattttgcagagggaatctggaaacccaggaaaataccaaatccagatttctttgaagatctggaac

SEQ ID NO: 412273 - DNA, 100 bp, Homo sapiens
aaatacgtctgggcagccacggccgggggcgtctttcagagcattacggcctcgggccagcggccaggagctgcctcccccagcccccgtcccgcggccc

SEQ ID NO: 412274 - DNA, 75 bp, Homo sapiens
ttcagtggtggagaatggactggacccccaggctgccatcccgattggagctggagtgagccttccaggaatttt

SEQ ID NO: 412275 - DNA, 83 bp, Homo sapiens
cttcggcttctcgctggccatgcactggcaactgcagcccgaggacaagcggctgctctgtcaacagactcaatagaaagact

SEQ ID NO: 412276 - DNA, 75 bp, Homo sapiens
ggcggaggcttcgagtgacccgggtgccgaggagcgggaagagttgctggggaccgtataatagacgctggcccc

SEQ ID NO: 412277 - DNA, 100 bp, Homo sapiens
gacatgtcctgtccgctgctgcagcagaacaagcaggtggcactacctggcagcaccatctaaacctgtatcatctgctgtggtcccagttactcaggag

SEQ ID NO: 412278 - DNA, 112 bp, Homo sapiens
acgacaggagcatcccaggaaggggttcccagaagtcagaatccaagatggagaatacttatctctggcgcacatcactatatttggctgcctctgccagtgctgaattctt

SEQ ID NO: 412279 - DNA, 90 bp, Homo sapiens
ctgctgatgtggatgctcgaaagcaggagaaggtacagattcagagacaaaaaatccggtctgactttaagaatctccagtgtttcctac

SEQ ID NO: 412280 - DNA, 100 bp, Homo sapiens
attgcatgaggatgctgaggctgtcctgtcctcgtccgtctcatcaaaggtccaatgaagcgtcaagtggcagtaaaatcaacccgaggctttgctctta

SEQ ID NO: 412281 - DNA, 82 bp, Homo sapiens
cctgacaattctgtcgtgtcccgattccctataaggagcccctgctggtgcaccagaactaccgggggccatctgcccaact

SEQ ID NO: 412282 - DNA, 100 bp, Homo sapiens
ggggaccccactcagtatcaccagtgacctgaaaaaaatgtctggatttctagagggcttgagatgctcagaatgcattgactggggggaaaagcgcaat

SEQ ID NO: 412283 - DNA, 75 bp, Homo sapiens
gagcccgaaaagaagattactctgcaacagctaaagagcttactcacatagcatattggtatatcaaaatgaaat

SEQ ID NO: 412284 - DNA, 82 bp, Homo sapiens
accgacatctgcctgctcaaaggagagaacattgaaagtattctctaagctatttgaagagagtgactaaatgcacctgggt

SEQ ID NO: 412285 - DNA, 75 bp, Homo sapiens
gaagaaatttggagtgtgcgtgcgcgccgagcggagggccctcctggacccgggagcggaccctggtggcggtga

SEQ ID NO: 412286 - DNA, 90 bp, Homo sapiens
gggagcgatgcggtgcagcgcgcatgatggaagtggttcattgcatgatattcaactgtcattgccatccagtccagaaccagaagatgg

SEQ ID NO: 412287 - DNA, 100 bp, Homo sapiens
aagatgatatttattcaccaaacaaggaatgtatcctgtcaggtataatgtcagtgaatggcaagaaagttcttcatatggatcgaaacccttactacgg

SEQ ID NO: 412288 - DNA, 96 bp, Homo sapiens
agcagagcaccctggagtctgcaaagtgttaatccaggcctaaagacaagatctgaaccaatgatgctgggttcacccacatctccaaagccagga

SEQ ID NO: 412289 - DNA, 75 bp, Homo sapiens
cttatgatgccaatttgtcccatggtagagttggctttgtgggacacagctgggcaggaagattatgatcgcctg

SEQ ID NO: 412290 - DNA, 83 bp, Homo sapiens
taggaagaggcactgctgagggggcgcgaggggaacggaggccagagctgcggaactgtggctgcaccatctgtcttcatctt

SEQ ID NO: 412291 - DNA, 100 bp, Homo sapiens
taagacctctgagctgttcctcccagctacgagctgccccagttgcccagaagattgttgccacaaggaagaagcagcagctgtccataggaccctgcaa

SEQ ID NO: 412292 - DNA, 100 bp, Homo sapiens
cggctgtggaggtgttcgggaagctgaaggtcgcaatggaagaagagatcgccgcgctggtcattgacaatggctccggcatgtgcaaagctggttttgc

SEQ ID NO: 412293 - DNA, 99 bp, Homo sapiens
gtgatgtccaggaaggaggaggaataatatttatggagcatatattatggaacacaggcactccacagaaggatgttattatcaagtcagatgcaccgg

SEQ ID NO: 412294 - DNA, 75 bp, Homo sapiens
caatgtgcctttgcaggggagcctgagagccacaggtatgggcttattttgccaaagaaaacacagcagttgcac

SEQ ID NO: 412295 - DNA, 74 bp, Homo sapiens
ggcggcggcggctccagcgtcctaagaggccccttcacagatgtagtcactacaaatcttaaattgcgaaatcc

SEQ ID NO: 412296 - DNA, 75 bp, Homo sapiens
tttgtaacggggaacgccaagaagctggaggagggttattttggagctgttggagcactccttgagctgttgaag

SEQ ID NO: 412297 - DNA, 100 bp, Homo sapiens
ttcgtttttcgccgtcatgggcgcctcggccgccatggtcttcagcggccactcttcacctccaccatgagcctggacatccagagcctggacatccagt

SEQ ID NO: 412298 - DNA, 90 bp, Homo sapiens
caccacgagagcccggcccgcctgtgtggacggaatggtcctcgtccgaagtgagaatgggcagttgttaatgattcctcagcaggcctt

SEQ ID NO: 412299 - DNA, 80 bp, Homo sapiens
gtgagcgagcagaggcttaaggtcttcagcggggcgctccaggaggcactcacaggtggagccttttgccagcttgaccg

SEQ ID NO: 412300 - DNA, 75 bp, Homo sapiens
ggaagcagccgatccagcctgcggagcctgtggggcagttctgaatgcagtgatggggaatggtctgcttctttg

SEQ ID NO: 412301 - DNA, 100 bp, Homo sapiens
ggagagcccagtataccatctaacagaattaaaacagacggtgctgggtttcgtgcacctgaagttgccagaggaaatgtcatttataaccaacaggctg

SEQ ID NO: 412302 - DNA, 100 bp, Homo sapiens
cagcaatcagatttatcattcgggaactgcaagcacatgttgaccagataactgaaatggcagcagtaatgaggaaagccattgaaattgacgagcaaca

SEQ ID NO: 412303 - DNA, 75 bp, Homo sapiens
cttcatcacagacaacagcctggtggcagcggcgctgtaccatggaaagttcatcgacacgggcttcaccctccc

SEQ ID NO: 412304 - DNA, 75 bp, Homo sapiens
ctcattgccatcattgtcatgggccttgttaaactgtgccagggacagagcgggatgccaccagcttgtccaaag

SEQ ID NO: 412305 - DNA, 97 bp, Homo sapiens
aggtgagacagaagccaaacaggaggaggaagtggagggtgccctacgagacgctgaacaaacgctttcgcgccgctcagaagaacattgaccggga

SEQ ID NO: 412306 - DNA, 88 bp, Homo sapiens
cggcgtgggcggcggcaacggggcactgacctgggtgcatatagcactttctacattgtgggtttaatattatcaatgcagatacctt

SEQ ID NO: 412307 - DNA, 95 bp, Homo sapiens
accagcctcttctgaaacactgggggcggcgactggcggcgcgatggacctgaccgggctcctgctggacgaagaaggcaccttctccctcgccg

SEQ ID NO: 412308 - DNA, 74 bp, Homo sapiens
ccactgatgacgatgatgcactcgatttagcatgtagactgctggggcaatcaatggatgaaagtggattacca

SEQ ID NO: 412309 - DNA, 75 bp, Homo sapiens
gggaattggttccactgtgtttcgagcgattctgctccctgatggctcggagatcccgctccctcctattctgct

SEQ ID NO: 412310 - DNA, 88 bp, Homo sapiens
atatgttcatgaaatttgtaagtgaagatcttcatcggtgtgcacttttaacagggcagagcggcttgggtaaatccaccttaatcaa

SEQ ID NO: 412311 - DNA, 75 bp, Homo sapiens
gccatccagcaagacttcgtgatttttaacagagaaaaagaactattgtcgagtgatgcgatgaaagaatataac

SEQ ID NO: 412312 - DNA, 88 bp, Homo sapiens
aagatgaacacagtattgaaatgcatttgccttatacagctaaagccatggaaaggtcacggtctagatcacattctcgatccagagg

SEQ ID NO: 412313 - DNA, 73 bp, Homo sapiens
gggagtggacatcagccccaaacaggacgaaggcgtgctgaagtctgttcgagaagtcacaggctacgtgtta

SEQ ID NO: 412314 - DNA, 100 bp, Homo sapiens
ctgtcctttcaggaaggagccattatttatgtcatcaagaagaatgacgatggtgacaaaacacgacagccttcttcaagcccctccagtattatccgac

SEQ ID NO: 412315 - DNA, 100 bp, Homo sapiens
ggacaagaatgctagacttaaaggtcaagagcaatctgaatccaaatgcaaaggagtttgttcctggggtgaagtacggaaatatttgagtagacggggc

SEQ ID NO: 412316 - DNA, 100 bp, Homo sapiens
acagttattaatggactgcttggaaatatagtttgcattgagactccttgcattccgccagatacacaaagttctaggcatggatccattaccgcaaatg

SEQ ID NO: 412317 - DNA, 100 bp, Homo sapiens
taaggaatgcaattctgccaccatgatggaaggttcccgtgtcagtggctatgatgacacctcaagttatcactccccagcaaatgcagcagatcctcca

SEQ ID NO: 412318 - DNA, 119 bp, Homo sapiens
agactttttgatattcagagccttggaagtcaacactgtcagaaacccctcctggagtttccccaaagccatggacagccctagtcttcgtgagcttcaacagcctctgctggagggca

SEQ ID NO: 412319 - DNA, 100 bp, Homo sapiens
acaaaagccaagaggaggacagttcgctacacagcaatgcatcgaggttacacggtgtgggcacacaacctcattgccattgctcgtcttcggggctctg

SEQ ID NO: 412320 - DNA, 50 bp, Homo sapiens
tatattagttcagttaccactaccaggttctcttattcaagtaccttccg

SEQ ID NO: 412321 - DNA, 83 bp, Homo sapiens
ctttgaaggttttttattaatcaagcggtcaggataccggtgacaaccatgagtggaaaaaactaattatggttcagcactgg

SEQ ID NO: 412322 - DNA, 50 bp, Homo sapiens
ctaaatcttaccccaaagggcaagcaggagcagcctcagaacaaagtgag

SEQ ID NO: 412323 - DNA, 109 bp, Homo sapiens
ggacgaggtgtcggcgcgggagcagcacttccacagccaagtgcgggagtccacggacccattccaacaatctcgtaaaacatggtggattactatgaagttctaggcg

SEQ ID NO: 412324 - DNA, 100 bp, Homo sapiens
cttccattgaacttcccagcactcgaaagggaccgaaatggagagcaaaggttcaagcactgtcttcctgttggccctgacaatcatagccagcacctgg

SEQ ID NO: 412325 - DNA, 100 bp, Homo sapiens
gagctactttctgactgcccgcctggcactgaagccgagctcaaagggaaatgtttcaacgtgcgcaagcgttgcggcggcgggcagaggactactacag

SEQ ID NO: 412326 - DNA, 100 bp, Homo sapiens
tttctgggacaagtgttttgtacattgggagagatcgttggttcacagggaagtcgcctggaaaaaccaatagtagatggggtctcactgtgttgcctag

SEQ ID NO: 412327 - DNA, 83 bp, Homo sapiens
ttcgggacagctctctagaaactcgctctaaagacggaaccgccacagcactcaagatgataatgaagataattcaaatgatg

SEQ ID NO: 412328 - DNA, 74 bp, Homo sapiens
caagcaggaggtgatccgaggctgggaagaaggggttgcccagctcctgacccctgaggattaccagcgatttc

SEQ ID NO: 412329 - DNA, 121 bp, Homo sapiens
cagctccacgctaaggagggtgctggagtgagtcccccacttatcactcaggcagcctggcatcctcgctacaacctcattgttgtgggccgatacccagatcctaatttcaaaagttgta

SEQ ID NO: 412330 - DNA, 89 bp, Homo sapiens
tcctacgatgaggccatcctgcacctcgtagtggcaggaggaacatatgcagcagaaaaaagaggaggaagaagttcttaaagaagtaa

SEQ ID NO: 412331 - DNA, 98 bp, Homo sapiens
agactatgatgttgtaaaagttattggaagaggtgcttttggtgaagtgcagttgcatttgacattgtgcagcaaagaaatggttatggagaagccca

SEQ ID NO: 412332 - DNA, 100 bp, Homo sapiens
tcgcttgacccctgctgcaattggattctgcagaaggagagtacagtgcactctgtagctatctatctttacctacaaatttgttcctgctcttccagga

SEQ ID NO: 412333 - DNA, 74 bp, Homo sapiens
ccaaatgggagtatgacgaaagccatgtgatcactgcccttcgagtgaagaagacaccatcgatttgtgtgaac

SEQ ID NO: 412334 - DNA, 100 bp, Homo sapiens
tgcggactcggagaagccctcgagcatccccacagagttttccgtctgatgaaggttggccatttgcaaagtatcttggagcttgtggaagaatggtggc

SEQ ID NO: 412335 - DNA, 88 bp, Homo sapiens
tggaaatgtctactgcacagttgcaccactgagaaggacagaacaccttccaccatgaccacctcagcaagttcccacttaaataaag

SEQ ID NO: 412336 - DNA, 83 bp, Homo sapiens
aaaaataaactgcttgaacatcctttgactggttagccagatgccgctcctacgaggactgctgtggctccaggtgctgtgtg

SEQ ID NO: 412337 - DNA, 98 bp, Homo sapiens
gcacagctagaaggttggctttcacaagtacagtctacaaaaagacctgctagagccattattgccccgcctgctccttttcttcagaggatttgtta

SEQ ID NO: 412338 - DNA, 74 bp, Homo sapiens
gcatggagaccagatggcaaacatggagatacacgtgaattagagcgaacaaaacaatatgtaaatgaagcttt

SEQ ID NO: 412339 - DNA, 90 bp, Homo sapiens
caacacagcctggaccaccacagccaccccagcagaggccttatggatatgaccagatggtgagaacaagaccaagattggaaagccagc

SEQ ID NO: 412340 - DNA, 73 bp, Homo sapiens
agagactgcatcagagccactgtctgagctggacgattctactgttgccagggaattggccatcacagactct

SEQ ID NO: 412341 - DNA, 100 bp, Homo sapiens
ggggtcacagtctctgaagtgaaaatggtcaaagatcttgtggcatcgttgaagccaggaacccagttgcctttccccatcttcctggttctgctccttc

SEQ ID NO: 412342 - DNA, 75 bp, Homo sapiens
ccgagaccgcggccgggaccgaggaattcaattcgtcataatctgtccctacacagcaagttcattcgtgtgcag

SEQ ID NO: 412343 - DNA, 83 bp, Homo sapiens
gattgaggacgttcccttcacggagaaagattttgagagcaggacatcgagactttacatggctctgttcacgtcacgctgtg

SEQ ID NO: 412344 - DNA, 100 bp, Homo sapiens
gttcacgcggtcccgccggatcccgaagacgagggcctggaggaaacaggtgtcatggagaaactccagctgggcccagagattctgcagcgggaaaatc

SEQ ID NO: 412345 - DNA, 90 bp, Homo sapiens
atgagacccaaactgctcatacagaattacgcatttccacttctaatggtcaagtttacccatgggggaactggttccagccaaaccgca

SEQ ID NO: 412346 - DNA, 110 bp, Homo sapiens
gacgcggacagcgggctggagcctgacgagctggcgggatcaattttccccttgaaataaagtcacttccaagggaatccatgctcactgtaaaactgtttgggattgcc

SEQ ID NO: 412347 - DNA, 100 bp, Homo sapiens
agcctggctactcacagttgaagcctgattgcaggcagatgtttggagcatgggcatactgttatatgttcttatgtgtggatttctaccatttgatgat

SEQ ID NO: 412348 - DNA, 100 bp, Homo sapiens
gccgtgtctcagtccacccaaggtctcctcggatcgcctggagaggcactcggacctgggaccagttactctccacaagaaaattcacacaaccacagtg

SEQ ID NO: 412349 - DNA, 82 bp, Homo sapiens
gaagatggtttgaaggaccattatgatattaagactgcaaaattcaaaatggggctcaaggtattcgtttcatctacaccag

SEQ ID NO: 412350 - DNA, 108 bp, Homo sapiens
ctagcaccggccacgacttgggggacaagatcatggcgctgaagatggagctggatcccctaacaacagtgagagagcaatgcgagcagttggagaaatgtgtaaagg

SEQ ID NO: 412351 - DNA, 75 bp, Homo sapiens
cccgtgatgggaggcagcagagagcacagactatgtccaagccttatgcatttgatcgggtgttccagtcaagca

SEQ ID NO: 412352 - DNA, 100 bp, Homo sapiens
gaagattttgacagtcgtagatacaaatttttggatgatgatggatccatttctcctattgaggagtcaaccttttgttaggagtgataaacccaaactg

SEQ ID NO: 412353 - DNA, 100 bp, Homo sapiens
gcatggagtccagatgacaactatcttgttgcttgtggcccagatgactgctctgagctttggctttggaatgtacaaatctacggaatccagaggcagc

SEQ ID NO: 412354 - DNA, 80 bp, Homo sapiens
tctgcaaggtccgcttcaccagactgattcttgctattccaaatcctcttccacgttgacagcccttcagatatttcaac

SEQ ID NO: 412355 - DNA, 115 bp, Homo sapiens
acatgcgggagagagaatgagccagagggacacgctggtgcatctgtttgccggagggatgaaacgaggaggaagagatagtgaccgtaattcatcagaagaaggaactgcagag

SEQ ID NO: 412356 - DNA, 98 bp, Homo sapiens
gcgccgggcctcaggctccttcctactgtccgagggccaccaggccgccgggggcctgctgcgcccggcctcgccgctcctgctatttgccaaccgcc

SEQ ID NO: 412357 - DNA, 75 bp, Homo sapiens
gctggtcaccggggtctgcctgggcagaagctcctcctggggtagagacagatcttattgatgttggattcacag

SEQ ID NO: 412358 - DNA, 82 bp, Homo sapiens
attatgaagccaaagttgctatggtccgtttattaatggttagtcgaatggctaaaccagaggaagtattggttgtagagaa

SEQ ID NO: 412359 - DNA, 100 bp, Homo sapiens
tatctgtcagtgctgtgtgacagcatcgcaacgggatctgcagaacctgaactcgcaaatccagtttgctgatgacatgcaggagttcaccaaattcccc

SEQ ID NO: 412360 - DNA, 73 bp, Homo sapiens
agcaatcctcccacctcagccttccgagtagctagaactacagcgggacgaccctgggacagtctccactggg

SEQ ID NO: 412361 - DNA, 85 bp, Homo sapiens
gccaggcagagtgccgactccttcacagccgtgaggaactcttcaggctccagaatgtggggctgccttccaggaggatgatgtc

SEQ ID NO: 412362 - DNA, 74 bp, Homo sapiens
cagcctcaaacaggagctggagcagctcaaagaggtccatggctaatgaaacacagaaggttggtgccatccat

SEQ ID NO: 412363 - DNA, 90 bp, Homo sapiens
cgttgaagatgtcggccttctgagccgactgcggtggtcaagaggaccctcggatttttgctgtccaggcacctcgcccttcgcttcatg

SEQ ID NO: 412364 - DNA, 98 bp, Homo sapiens
gtggggtgctgaatggcaatggcacaaagttctctcgatcagggcatacatctttcttcgacaaagggagacgttctcttccagatggctgaagtcca

SEQ ID NO: 412365 - DNA, 100 bp, Homo sapiens
ccatggaggatccttaccaaatgtgagccagctgcggagcagtgcgtcagagtttcaggcaccatcatgactccaagcggaggagatccgatgaatttag

SEQ ID NO: 412366 - DNA, 83 bp, Homo sapiens
ctctgtccagttttcaaaccacacagttggaatcgaagcctcttaaaatggcagatgacttggacttcgagacaggagatgca

SEQ ID NO: 412367 - DNA, 75 bp, Homo sapiens
aactcatgcaccatgaaaagctgctgttttgcaggagatcgtgaccagtcacaacacctgctgcccggaaagcac

SEQ ID NO: 412368 - DNA, 100 bp, Homo sapiens
ctcagggtcatgaccttgagccatgtggtgggcccatctggggcagggaagagcacaattttgcgcctgctgtttcgcttctacgacatcagctctggct

SEQ ID NO: 412369 - DNA, 74 bp, Homo sapiens
tcggacccatcgccgcttctagaccctactgcggtctcggatattgccgggtcgctgaaaattttgttccccct

SEQ ID NO: 412370 - DNA, 100 bp, Homo sapiens
cccaaatcaatgcggagttcgtgacccaggggctttgttatgcacctaaagccatattggaagctccagaagaaagagcaccccccggaagtcagcaggg

SEQ ID NO: 412371 - DNA, 90 bp, Homo sapiens
caggctcagatcagtggccgaggccccagagatctttcagcagagatgacagaagacgagacacccaagaaaacaactcccattctcaga

SEQ ID NO: 412372 - DNA, 80 bp, Homo sapiens
gagaaaaggcaacatcctgtcacaggccatgctctggcaaaaacggcggcgactggcggcgcgatggacctgaccgggct

SEQ ID NO: 412373 - DNA, 75 bp, Homo sapiens
aaaacatttcagggcaagccaattatggagtccatgaagaatatcagctgccatattacgacttagtgccctctg

SEQ ID NO: 412374 - DNA, 99 bp, Homo sapiens
gttggaccttcgagcctagctgctcgcacaggactcggccacctgcccttcctgcaccgactggccaggggcagatgccattgccacaggtcactatgc

SEQ ID NO: 412375 - DNA, 100 bp, Homo sapiens
tgcttaaaacataaggatgtttcagttcctccatttaacaggccaagatgttcataaatataaagagcatcttatggatgtgttcaaccttaatagtaac

SEQ ID NO: 412376 - DNA, 98 bp, Homo sapiens
tgtggtgctgcccgagaaggtggacgtgctggtgtctgagtggatggggacctgcctgctgaaaatgcatccgatgcagatttatggctcctgaacag

SEQ ID NO: 412377 - DNA, 74 bp, Homo sapiens
taataataacataaatgcagctacagctgtggctctacaggttacccacagtacctggtggtagggaaccacct

SEQ ID NO: 412378 - DNA, 90 bp, Homo sapiens
ccagatcaacgtcctccgggaccggagtcagaaccctccgcagagtaaagatgaagaagatgactttatgtgtaagaaggcggcctctaa

SEQ ID NO: 412379 - DNA, 100 bp, Homo sapiens
cctgatactgctgtattaaaactctgtgactttggaagatttccacaagacggcaccctatgtcgtcactggcagcgtagatcaaacagtaaaagtgtgg

SEQ ID NO: 412380 - DNA, 90 bp, Homo sapiens
gcatcctgcagtattgccaagaagttccagcaacagatagaaatgctttaagttcactctggggaaagctggcctctgaaatcttaatgc

SEQ ID NO: 412381 - DNA, 74 bp, Homo sapiens
ctcgcctcgactccaaatggttgaaaacagatatacaggattctcaaagttggattggtggaaacaatgaacca

SEQ ID NO: 412382 - DNA, 82 bp, Homo sapiens
aggggaccaagtcagagcatctgcccaaagttcaggtatgaacatgctaatgatgataagagcagtttgaaatcagatcccg

SEQ ID NO: 412383 - DNA, 75 bp, Homo sapiens
ttctcatggatgttcttcttcgagtatttgtagaagggcctgctatgagagaggcgaggaagtcagtgtagtgcc

SEQ ID NO: 412384 - DNA, 51 bp, Homo sapiens
gcccgggctacgctcctccatcacgtggaaatttggtgagcggcctccacc

SEQ ID NO: 412385 - DNA, 115 bp, Homo sapiens
tgccgcaccaggctcatcctgtccatcgtgtgcctgatgatcacgcagctggctggcttcagtggaccagcatgttatttgaaagcaattgagacgcaaccgaactttgcagtag

SEQ ID NO: 412386 - DNA, 100 bp, Homo sapiens
ctcagaagagcttagggcattggggatccccttcttgagtcgtggggctggcttcttcatctgggttgacttgagaaagagtctcactctgttgcccagg

SEQ ID NO: 412387 - DNA, 82 bp, Homo sapiens
gcgaggaggcgcgggaggtgttcgagaacgaccccgagacgtaattcgccaaaatgacgaacacaaagggaaagaggagagg

SEQ ID NO: 412388 - DNA, 100 bp, Homo sapiens
cttctttgtcttttgcagatgatcgccgggtgtcgatccttttccctccagtcagcaatcccacagagtattgatgaggaaactgaagtttggagcgatc

SEQ ID NO: 412389 - DNA, 82 bp, Homo sapiens
ccctggtcttgctcggccgatgaagtgcagaggtttttttctggtgccttacagcattgtgggctggctggagaaaaacaag

SEQ ID NO: 412390 - DNA, 100 bp, Homo sapiens
agccaccaaggctctgttgaccagagttcaagccgtggaccccgacattgttccaatggaaaatccgtcacgtgggcccagaatgagaagagcagccggg

SEQ ID NO: 412391 - DNA, 98 bp, Homo sapiens
tttgtgaaacgtgtttcaagaccaaaaaacacaataccaggcatacatttggcagaataaatgaaccagaattcactcgtgaagtaacagacacacag

SEQ ID NO: 412392 - DNA, 100 bp, Homo sapiens
atccaccactggaacgccaaccggctggacctgttcgagatcagccagccgaccgagcctgattacatcaaccccagagccgtgcagctgggctcccttc

SEQ ID NO: 412393 - DNA, 82 bp, Homo sapiens
gcaggcccagacgacgcgcgcgcaccgcggcgagtcctttgcacatgttggcaacacacgcatccgcatcggcctccctgcc

SEQ ID NO: 412394 - DNA, 83 bp, Homo sapiens
ttccaagatgtctcctttgcctacccaaaccgcccagatgtcttagtgctacaggtgatcagcttgaaattcagctaaccgag

SEQ ID NO: 412395 - DNA, 97 bp, Homo sapiens
catcatcgtgtcattgcccatgaccagcgttggggatgccagcaggccgtgctattcctctacacagccgactagttatgatcagagcagttactct

SEQ ID NO: 412396 - DNA, 75 bp, Homo sapiens
gcgggagtcggggatagtgtcatcggttcgtggcctgaagcacgaggacaaacgtggaggtagcggatctcacaa

SEQ ID NO: 412397 - DNA, 75 bp, Homo sapiens
ctactgctagtcgctgcaacactcctctacagtttgagaaattccgggatttctttaatcaaaatgaaaccagtg

SEQ ID NO: 412398 - DNA, 74 bp, Homo sapiens
gggaggccaagaccgctgtgtggaggtagccgcagcgccagcaccaggttggtcaaagaaaaagtgatgtatga

SEQ ID NO: 412399 - DNA, 83 bp, Homo sapiens
cacttttccagctcgagccctcacgaggccgtgggtacgaccggaagccgcagtctctgcgatatgataccagctattttgtg

SEQ ID NO: 412400 - DNA, 75 bp, Homo sapiens
cagaggtggcttgctattgatgctaatgctcgacgagaagtcaagaactatcttccaatcagaagactatacaac

SEQ ID NO: 412401 - DNA, 75 bp, Homo sapiens
cccgaatacttcagaagtggggaaatgttacggcagtcccagtcctactgcacagacacagagtgtcttcaggaa

SEQ ID NO: 412402 - DNA, 98 bp, Homo sapiens
cgaaagctttcctaggccaaaaagaggttcatatccagctttcagagtggcaccgtgcaatttttcttccacaggcctggcttgcatacatgaatcga

SEQ ID NO: 412403 - DNA, 97 bp, Homo sapiens
ctccatcgaagaatgccctctatggagttcatgatcaagtgttgcccacaccaaatgcttcatccagagtcatagtacatgtggatctggattgctt

SEQ ID NO: 412404 - DNA, 100 bp, Homo sapiens
cctcgggctgcgggagccgggctaggacgccgagcggtgactccccgccgctcccgggggccgtgacggctaatggaggttggcaggatgctactacccc

SEQ ID NO: 412405 - DNA, 100 bp, Homo sapiens
tggaagacctattatcagatcaaccaccaaagtgggaaacattgaaatcaagaccaaagagaaccctgtacagtaagaaatatggtgtggacctcatcag

SEQ ID NO: 412406 - DNA, 75 bp, Homo sapiens
gaaacccaaacctgtaaaaccagtgacgttttccacaggcatcaaaatggtaaatactacatagccacgatggcc

SEQ ID NO: 412407 - DNA, 100 bp, Homo sapiens
ccgctctaagccgccgcgcagcctgcgttttctccggtacaggttgaggctactaaggtggcagaaagagcactctattattggaataatgaatacatca

SEQ ID NO: 412408 - DNA, 83 bp, Homo sapiens
cttttacttctcacttggacaagaactcaagagcagaatctccgaataccctctaccatctgctttggtcagggtgccgctcg

SEQ ID NO: 412409 - DNA, 60 bp, Homo sapiens
agagcgcagccatcggtgcgctgcaggagttgtcacagcagaaatgtttagacatatgca

SEQ ID NO: 412410 - DNA, 83 bp, Homo sapiens
cggtgcagctgctggtcaccctgagcttcctgcggagcgtcgtcgaggcgcaggctggcgcccatgcggctctacacgctctc

SEQ ID NO: 412411 - DNA, 98 bp, Homo sapiens
cagatagaatgcaaatagttgtgattctctcagaattttttaataccacatggcaggaggcaaattgtgcaattgggacccctgattttagcaggatg

SEQ ID NO: 412412 - DNA, 105 bp, Homo sapiens
ctttgagcttgatgtcctggaggaagcatataccacagaacattggctggtcaggatatacaaggtcactattgtggggatcatcagacatgcagagaaggctcc

SEQ ID NO: 412413 - DNA, 100 bp, Homo sapiens
ggcatctatgccagtgagaggcccaagtccctaggagacctgtcttctggttacctggatgatactaagcaggaaacagctaatgggcccacctcctgtc

SEQ ID NO: 412414 - DNA, 100 bp, Homo sapiens
tcccggctctcgtcagcctcccgccggccgtctccttaacaccgaacaccgaggatgaaattttgaacagatcaccaagaaacagaaagccacgaagaga

SEQ ID NO: 412415 - DNA, 73 bp, Homo sapiens
aaaacaacttcgagggcagagtttgatctgtggatgaaatgaatcatgattttcaagctcttgcattagaatc

SEQ ID NO: 412416 - DNA, 98 bp, Homo sapiens
ctactaaaaagagaggtgcctttatctgatgatgatgaaagttacacagggaagacatgtaaggaatttgcataagacagttatgcaaaatggagctg

SEQ ID NO: 412417 - DNA, 75 bp, Homo sapiens
tggagcccattttagaggcatctgttctatcttcccatcataaaaaacctggaagctccgaccccaggagccagc

SEQ ID NO: 412418 - DNA, 100 bp, Homo sapiens
tcagatgctgagaaatccagggtcacagtcttctcaagtcttaggattgcagcaacacgctcggctgcccaaacccaaggcgaagaccttgccagagttc

SEQ ID NO: 412419 - DNA, 75 bp, Homo sapiens
ctgacccacaaacaagctcaaggccataggaaaaggatacagagtagagtttcatgaacctgaaacttggtggaa

SEQ ID NO: 412420 - DNA, 95 bp, Homo sapiens
ctcaaggtgtggcatctggttggagtttcaatatgtaggatccactaccagggttttcgtgagattaagaagggacatggatttgattgacatac

SEQ ID NO: 412421 - DNA, 125 bp, Homo sapiens
gttgggtcggttcctgctattccggcgcctccactccgtcccccgcgggtctgctctgtgtgccatggacggactgtgccctgtccacggtgcctcctgcatgtcctgctgccctgagctgtccc

SEQ ID NO: 412422 - DNA, 101 bp, Homo sapiens
ttcttcgttgccatgaggaaagaattctccgagttgttgacctcctgtactggagagacattaagaagactggagtggtgtttggtgccagcctattcctg

SEQ ID NO: 412423 - DNA, 101 bp, Homo sapiens
ttggtcgcattatgtttcagctcttctcagacatatgtccaaaaacatgcaaaaacttcctttgcttgtgctcaggtgccgtgagcgatgtggagatgcag

SEQ ID NO: 412424 - DNA, 100 bp, Homo sapiens
gtgttcctgagctgccaacgatacctgaggggggttgttttgatgaaagtgaaagggaaaatgaccgagttgcaatggttaacggagtttcaatggataa

SEQ ID NO: 412425 - DNA, 82 bp, Homo sapiens
cccaaatgtctgactctgactctcggactgagaaacgcaaggagccttcacgtaaatgggtccagtcatgcctcccagtaag

SEQ ID NO: 412426 - DNA, 100 bp, Homo sapiens
gtcagttccttgtggagccggagctgggcgcggattcgccgaggcaccgaggcactcagaggaggtgtgatgaatgcagactctgctaccattttggctg

SEQ ID NO: 412427 - DNA, 95 bp, Homo sapiens
tggccttttgtccctttgcctcatcccaggttgccttggaaaatgccaacgccgtgtctgaaggaacatctggattatgagattatccagtctct

SEQ ID NO: 412428 - DNA, 100 bp, Homo sapiens
gccgtccccgctgctgtgcattggttagggcctagtcaaaattttgaagctgagtcaattcaagataatgcgcatatggcagagggcacaggtttctatc

SEQ ID NO: 412429 - DNA, 100 bp, Homo sapiens
gtggcggcggcgaggccgggactcgggcttagggcctgctgtggaggcagcggcggacgccgagctaagcatgtttgccagctctgagcctgtgccagga

SEQ ID NO: 412430 - DNA, 49 bp, Homo sapiens
ggcggaagaccaagatcatcgagatgaattaaacaaccaccatgtcgag

SEQ ID NO: 412431 - DNA, 75 bp, Homo sapiens
gacaaagatggggttgtcctctttaagaagctcactgaaaactgaagctaatttggaagttttgaagtcaattcc

SEQ ID NO: 412432 - DNA, 101 bp, Homo sapiens
gagattccaggaggaagtactggcgaagtgctccatggtggaaccgtcccaaaatgtcccttgctcagaagaaggatcgggtagctcaaaagaaggcaagc

SEQ ID NO: 412433 - DNA, 100 bp, Homo sapiens
taaagtgggttgaattgccatggctgctggaagaagtctcaaaaagctcccgactagattttcagctgaactctcatctctcaacactggcaaatattca

SEQ ID NO: 412434 - DNA, 82 bp, Homo sapiens
ccgtcgcccaggagtcatcggacgccagaatctggttaatttggagtggcccctggagtcagtttcctacaccatccgaggc

SEQ ID NO: 412435 - DNA, 50 bp, Homo sapiens
aaagagttatatgaaatcaatcctccagttcaaaccttgtactactcagc

SEQ ID NO: 412436 - DNA, 80 bp, Homo sapiens
gctgggagctgtagaccagagctgttcctattcggccatcttggctcctccctcgggtaaatgggaagttggtagctctg

SEQ ID NO: 412437 - DNA, 100 bp, Homo sapiens
gtgcgattcgctgacgagaccctgcaggacacaacgctccgctactgggagcgcagacgctcaggaccagttgctcttctgtgatgactgcgatcgtggc

SEQ ID NO: 412438 - DNA, 51 bp, Homo sapiens
cagatggcagccagtcagtggtggagctggtaggtgagtgctgtcctcggc

SEQ ID NO: 412439 - DNA, 74 bp, Homo sapiens
ggcgggctgtggggcctccgcgccgcggccgttagtcatgtcgggagccagaaaacttcggctccatgttggaa

SEQ ID NO: 412440 - DNA, 100 bp, Homo sapiens
ggcctatgacagcagtgccgactggttctccctgggctgcatgcttttcaaacttctgagagggatgaagagactcggcacagccttgagtgcatccagg

SEQ ID NO: 412441 - DNA, 100 bp, Homo sapiens
ttttccgggtggggatctctgaaattactcagttttttcaagggggaacatggcaaaggtgttcagtttcatccttgttaccaccgctctgacaatgggc

SEQ ID NO: 412442 - DNA, 50 bp, Homo sapiens
ctcgctccggaaaggggacacctgccgcgacaattccccaagcctgaagg

SEQ ID NO: 412443 - DNA, 80 bp, Homo sapiens
ctactccagcagccttggtattacagggtcttcatgcactctgtcaagctgagggttatgtggtccgaatcagtggtggg

SEQ ID NO: 412444 - DNA, 75 bp, Homo sapiens
gaaaaagatggtgttattcagaccaaagtgaaacatcgtactccaatgggcatggactggaactcccaatacccc

SEQ ID NO: 412445 - DNA, 100 bp, Homo sapiens
aagcaggcgaacccgcggcgcaataacgagattccccagtgcgctggctgcaaccagcacatcctggacaagttcatcctgaaggtcctggacagacact

SEQ ID NO: 412446 - DNA, 100 bp, Homo sapiens
ggcccgcgggggagccccgggagccgcacgatgcttctggatgttcaatgctagcacctttacagactggagcagctcgattttcttcgtatttactttc

SEQ ID NO: 412447 - DNA, 50 bp, Homo sapiens
gctgaacagggatctccacgggagttgatccccctcatattgtgtacagc

SEQ ID NO: 412448 - DNA, 98 bp, Homo sapiens
ctctatatgaacaatccgtctggatcacggatgtaggaagtggttttggcccgaaccgcgacttcaacaaaaaataagagaagaaaggaatattttct

SEQ ID NO: 412449 - DNA, 74 bp, Homo sapiens
tggaaactgctcacctatgtcatggaggaagagaaatggtggagtcaatgaagaaagtagcagggatggatgtg

SEQ ID NO: 412450 - DNA, 100 bp, Homo sapiens
gcgcccgccagctgctccggagatacgagatcgagatggtgatcatggagcgtagcaagctctcagagctggccgccagcacctccgtgcaggagcagaa

SEQ ID NO: 412451 - DNA, 75 bp, Homo sapiens
tctcgatgccaatctctgcttgaaaggagaagacttggattctcaggattggccatttgatgatggagctccacc

SEQ ID NO: 412452 - DNA, 100 bp, Homo sapiens
ttcggctgcgcgagcggagggaggcgggtgctggagaatctggtaaaagcaccattgtgaagcagatgaggatcctgcatgttaatgggtttaatggaga

SEQ ID NO: 412453 - DNA, 83 bp, Homo sapiens
agaacaggcaagaagtggtccagccggcgaaggcaatcttgctgccaatgatctctccccgtcccgaatagccagactacaga

SEQ ID NO: 412454 - DNA, 100 bp, Homo sapiens
gtggagagcctgccggccgtctgtcccagtgatggatgcacctggaaggggaccctgaaagaatacgaggcagttccggcgaggggggagcctcagcagg

SEQ ID NO: 412455 - DNA, 123 bp, Homo sapiens
gtattgcaatcatggtgcagaaataccagtccccagtgagggtgtacaaatacccctttgaattaattatggctggcacacgtgtttcacgttgacaggtttgcttgggacgctagtaaccat

SEQ ID NO: 412456 - DNA, 78 bp, Homo sapiens
taccgcaaagccatcttcatcttcatcagtgcctggccctgcggggagcggagcggcagaagctgatgcgagcagacc

SEQ ID NO: 412457 - DNA, 75 bp, Homo sapiens
gaaaagttagcaatgatggaaagtggggtgagagactatagcaagcaggatgggactgaggaagacccacaggca

SEQ ID NO: 412458 - DNA, 100 bp, Homo sapiens
gcgggcggccgccaccgagcgtgctgagcaaccgcagcctccgcggccgagagtgcagcgagccagggagctggagagcagagaggcagagctaagacgc

SEQ ID NO: 412459 - DNA, 72 bp, Homo sapiens
catgctttcaaggacctcatggagatggaagggagtcaaggatgttgccatgtatgtgccatctctgcccta

SEQ ID NO: 412460 - DNA, 100 bp, Homo sapiens
ttatggctttccaagttgtgagggtaaattcaattggcgcctgcctagggtagttaaaagacgagtgaatgctctcaaaaacctgcaagttaaatgtgca

SEQ ID NO: 412461 - DNA, 82 bp, Homo sapiens
gcctccacgagtccctccagcctccctaaacacaacgagaatgctgaaatttctgtctttgaagtaaatatacgctttgttg

SEQ ID NO: 412462 - DNA, 98 bp, Homo sapiens
tcaacgtgaagatgatgaggatgaagacctttatgatgatccacttctacttattaaataatgttttactgtgcctggctaactatagtcgagggggt

SEQ ID NO: 412463 - DNA, 90 bp, Homo sapiens
aaggatacagcctgtgcacatcctgacttctgtgagctcattgcgcgggactagggagggattaatgaaaatcaagttccatcctcagac

SEQ ID NO: 412464 - DNA, 76 bp, Homo sapiens
ttcagggagaaatgatgaagctatcagaagaaaatcggcacctgagagtgttggagagcacaatggctgaacaagt

SEQ ID NO: 412465 - DNA, 95 bp, Homo sapiens
gcacccacacgggcgagaagccctacgagtgcaacatctgcaaggtccgcttcaccaggtacaatgccagggagtactacgaccacctgcccgag

SEQ ID NO: 412466 - DNA, 74 bp, Homo sapiens
aagcggggaagtgggacaagatggtttacatctcgaacggtgagcgagtgctgtgctttcatgggcctcttctt

SEQ ID NO: 412467 - DNA, 115 bp, Homo sapiens
cactgaactgctagtactgaaggctcatcatgatattgtacgatttctggtacagttagatgactacagggaacaacctatcttcagcactcgagctcatgtcttccaaattgac

SEQ ID NO: 412468 - DNA, 120 bp, Homo sapiens
gagatgggaaggcacagggagaagggataaccctacacccagaccccaggctgtaccttcacagtcctggtgcacacgagagaagccgccactcgcaacatggagaagatccaggtcatc

SEQ ID NO: 412469 - DNA, 97 bp, Homo sapiens
cagcaagactatgaatctctgttccaaatgctttgctggagctatcgaaaaaccttgaactgagtactaacagtttccaacgacagttgcttgctga

SEQ ID NO: 412470 - DNA, 75 bp, Homo sapiens
tccaagagcagcaccagctctctagcagaaggatcatagacggtatttctatgtaaacgaacagtcgggcgagtc

SEQ ID NO: 412471 - DNA, 100 bp, Homo sapiens
tgtgaagttcagggataaagtcaggatttcgaactcaacaatgaactaaagatgaatgtcctaaatttgctagaagaagttttgcgagacccagaccttc

SEQ ID NO: 412472 - DNA, 98 bp, Homo sapiens
cactgtacagggatgtgatgctggagaactgcaggaacctggcctcactaggtggtgttatcaaggagaagaaattcctgccttgaccagatgtgtgg

SEQ ID NO: 412473 - DNA, 101 bp, Homo sapiens
tgaatgacaggcttactgaatatcctcttataattaatgcaataaaacgcttccatctttatccagagaaaggatctatgtttatgaaaataaaaaggaag

SEQ ID NO: 412474 - DNA, 100 bp, Homo sapiens
aagtcacaaagggaggagctggactccatcctcttcctttttgaaaaccttctgaggaaaggaggccatacagaaattgaacctcagcacttctgtcaag

SEQ ID NO: 412475 - DNA, 96 bp, Homo sapiens
ccccgtgcttcccgctcgatcgatccagccctatcagatccccatcacagtcactcgtgagaagaggctggaccaggagaagggacagacgcagcg

SEQ ID NO: 412476 - DNA, 115 bp, Homo sapiens
ggaggaaccggctccttgcgtcccgcctccctgggagctccgcacggacacgatgaggcgagtggtacgacagagcaagtttcggcatgtatttgggcaagcggtgaaaaatgac

SEQ ID NO: 412477 - DNA, 83 bp, Homo sapiens
catgactgctctccacggtagattctcccgatcacaaaccattatccagagtgagacctacagagttgaaacagtgaaacctg

SEQ ID NO: 412478 - DNA, 99 bp, Homo sapiens
cgcaccgcggacgcccgctgagcttggcgcacgggccgaccaggatcatccagcagctcgtcaacggcatcatcacgcccgccaccatccccagcctgg

SEQ ID NO: 412479 - DNA, 90 bp, Homo sapiens
tttacccagaaatacccaccagtaaagtttttatcagaaaaggatcggaaaagaattttggtggagacagaaatccagcgcgtctcggag

SEQ ID NO: 412480 - DNA, 74 bp, Homo sapiens
ggcctggactgtgggctggtgtgtggaactggtgtgtgtcctgggcctgcacctggccaaggagctgtgtgagg

SEQ ID NO: 412481 - DNA, 90 bp, Homo sapiens
tcttggtctgcctccagctcttggaggcagcagtggtcaagtgtttggatggactggtgaactaggacctggaatttactggttaattcc

SEQ ID NO: 412482 - DNA, 95 bp, Homo sapiens
ttgtccctgtttcgccacagttcctaccttatgagctcggttttcttatgcttataagagtggaacaggattcaagatgaccaacgaagaacctc

SEQ ID NO: 412483 - DNA, 90 bp, Homo sapiens
agcaatcctccctccttggccttccaaagtgcagattcacagttaatagaaggatctctatagttggatttggcttgtatggatctattc

SEQ ID NO: 412484 - DNA, 83 bp, Homo sapiens
gagctcctgaggtacggcgtcgggacaatgcagatcttcgtgaagactctgactggtaagaccatcaccctcgaggttgagcc

SEQ ID NO: 412485 - DNA, 75 bp, Homo sapiens
gggagagggtgaccgacatcccaactagatatgcacccaatgtccagggagcgtgcaaaatttgtcaaaagtggc

SEQ ID NO: 412486 - DNA, 82 bp, Homo sapiens
cgtgccgcgagcgcggcctgcaggagccctccagaatacccatcatatagcccctgaggtggcatggtgatgtctccatgag

SEQ ID NO: 412487 - DNA, 131 bp, Homo sapiens
gggaaaataatccagagatttccacagaaggactgggatgatacaccttttccacagggaattgagttgctgggatctagcaattgggaggcagcagacttgggtaatgaagagagaaaacaaaagttctt

SEQ ID NO: 412488 - DNA, 147 bp, Homo sapiens
ccagcgccaccatccacgccagccgcaccatgccgctcctaagcctgcacagccgcggcggcagcagcagtgagagactgcaaaattcaaaatggggctcaaggtattcgtttcatctacaccagagaaggcagaccaagtggcgag

SEQ ID NO: 412489 - DNA, 87 bp, Homo sapiens
attccaagtaactcttatttggaaactctgctcttaaagacaaagaagatcagtttgggagaacaccacttatgtattgcgtgttgg

SEQ ID NO: 412490 - DNA, 73 bp, Homo sapiens
tcctccaaaaccaccaaggacccgcaggccctgactgcagagatcgtgaagaccatccgggacatcattgcct

SEQ ID NO: 412491 - DNA, 75 bp, Homo sapiens
aggcaggaggacgtggaggaccattatgagatgggggaggagctgggcaggcccagctgagagccagcctggagg

SEQ ID NO: 412492 - DNA, 98 bp, Homo sapiens
aaaccacccaagtctgcaatcttaccagggaggccaagcgaccacccaaagaagatggccgccaagaacgagtcatgtttgacaaaattacatctcga

SEQ ID NO: 412493 - DNA, 75 bp, Homo sapiens
agcactccaatttgtatgccatatcaggatccacctctgatgttcagtgaagactaccagaaaagtctgctagag

SEQ ID NO: 412494 - DNA, 82 bp, Homo sapiens
agatgctcccttctgctcctggagttcaaagaaggacgcagagccagccacacagccccacaggtcctctttagccacaggg

SEQ ID NO: 412495 - DNA, 90 bp, Homo sapiens
ctgcccaaggggccggacacgctctgcttcgacaaggacgagttcatgaagagcattagtttggatgaattcaagtcattttgccatttt

SEQ ID NO: 412496 - DNA, 100 bp, Homo sapiens
cccaggtgtaagcgcagaaagcaggcgaacccgcggcgcaataacggttttaccaattcttgagattctgtatcatgttgaagaaaggaattcacaccat

SEQ ID NO: 412497 - DNA, 82 bp, Homo sapiens
ggaattctaatttgaaccatgtttggattgaagccgcctctgtattacttaccaggtggcatgtctgtgacccagtgctcca

SEQ ID NO: 412498 - DNA, 100 bp, Homo sapiens
ctgggagctactgatgcttcttcctacatgtcctaatatgttgatggcattccagaatatctcagatgagcagaccaaactgcagctggaatacccagta

SEQ ID NO: 412499 - DNA, 89 bp, Homo sapiens
agcgggactttattaccgctttaccaggtaatactgcattgcatgattgtgcagaatctggaagtttggacatcatgaagatgcttctt

SEQ ID NO: 412500 - DNA, 50 bp, Homo sapiens
cagcatcgcaccccaagaaaccagacaacacaggcagttctacataccgg

SEQ ID NO: 412501 - DNA, 90 bp, Homo sapiens
cttgccaaaatcaacacattttattcaggacatacagtgggagaagttattaaattaggtcctaatggatctccaagaagagcctggggg

SEQ ID NO: 412502 - DNA, 89 bp, Homo sapiens
gagagattcctctgccatggagtcctacgatgtgatcgccaaccagcctgtcgtgatcgacaacgtggaaatggcagtgaacaagcgca

SEQ ID NO: 412503 - DNA, 75 bp, Homo sapiens
gtgcaagtgtggtagctattgacaacaaaatcgagcaagctatgaacatacatatgatagttgagaaagacacat

SEQ ID NO: 412504 - DNA, 100 bp, Homo sapiens
agtttcccacttgattacccgttaagtcccccaaagatgagatttacctgtgagatgtttcatcccaacaatacgaggaggaaagctcatgatcacttac

SEQ ID NO: 412505 - DNA, 99 bp, Homo sapiens
gccagccatcctgggaccccaggcgtgcaggttctctttgaggagtgatgaggtcctcaccgtcatcaaagccaaagcccaatggccagcctggcagcc

SEQ ID NO: 412506 - DNA, 82 bp, Homo sapiens
aagaaggaagtgcctatccaccgtgttgcagatatatctgggttcctcagcactttgtttgcccccttaaactttgtcatgg

SEQ ID NO: 412507 - DNA, 87 bp, Homo sapiens
acaacggatgaaaatgaagacgacattcagtttgtcagtgaagcagacagtatgagcatgaccagtggagaaggtactagtcaacct

SEQ ID NO: 412508 - DNA, 51 bp, Homo sapiens
gtgctggtgtccgtggcgtgcctggaatgtggaggctgtggacccacgagg

SEQ ID NO: 412509 - DNA, 100 bp, Homo sapiens
tcatccgcatcaacaagatgttgtcctgtgctggggctgacaggtttgaagaagaactgaccagcaagtggttatatctttttgaaggcagtggagtccc

SEQ ID NO: 412510 - DNA, 83 bp, Homo sapiens
tccccagggaatgccacagcatcctccagcacctcaggatcagttcttaagagcagccccggtaactggaggaatgggagccg

SEQ ID NO: 412511 - DNA, 89 bp, Homo sapiens
cgcggagccgagccggaactgcggcagtctctccctgccaggctcttcatccaagtggaaggaggcaaaaccggaagaccttatggatt

SEQ ID NO: 412512 - DNA, 75 bp, Homo sapiens
cgagcgagcggaggagatggctggcacctgggaacgctatggatgtttgggtcattgctgtgattgttattgcca

SEQ ID NO: 412513 - DNA, 90 bp, Homo sapiens
catgatcaatgtgaagagattccagaaaacactatatgatattaacctggctgcagagccaaaagtgaaccgaggaaaagcaggtgtgaa

SEQ ID NO: 412514 - DNA, 100 bp, Homo sapiens
tatgtgttcgtgatgcgctgcatcgcctacccctttaatgccaagcagcccaccgacatggctcgccggcagcagaaggactgcatcaaaacatgtaaac

SEQ ID NO: 412515 - DNA, 108 bp, Homo sapiens
tgttgggtttagaaacgcatgaccgaaaatcagaagacaaacttgccaaagctacaagagacagctgtaacccagacttacggtggcaactcaaatggagagccatgt

SEQ ID NO: 412516 - DNA, 74 bp, Homo sapiens
tggccacttgcttgggatcctttatcctggtcatcttctatttccaaaccttcatcccgcgtggagtctacccc

SEQ ID NO: 412517 - DNA, 87 bp, Homo sapiens
gcctattgctacaacggcatgtgccagtattatgatgctcaatgtcaagtcatctttggctcaagtggacccccaaaagtacaaggg

SEQ ID NO: 412518 - DNA, 80 bp, Homo sapiens
ggtcaaacctgaaagaccccagttatggatgggagacattgcctaagatactgagccatatcgccccagcattttgcatg

SEQ ID NO: 412519 - DNA, 49 bp, Homo sapiens
cggggctccagtggagagttcttacgtccgctctttgtgacgtggaaga

SEQ ID NO: 412520 - DNA, 100 bp, Homo sapiens
gtcggtcgtccgctggacaagcacgagggcgcgctcgagacgctcctgagggagaagttgtggaatatgtggatgacctcttggaactggaggagaccag

SEQ ID NO: 412521 - DNA, 75 bp, Homo sapiens
tgcagagagaacggttgcaaaactggaaaagacaattgatgacctggaagaaggatcccgcaaacgtggattacg

SEQ ID NO: 412522 - DNA, 75 bp, Homo sapiens
tttcattatgtcttcaacctcagggacctctccaatattttccaggtgtgctgatgtatcgggactaccccctgg

SEQ ID NO: 412523 - DNA, 83 bp, Homo sapiens
cgccgcctccgcccagggccacctaaggagcggaccccgcatcttcgccgtctggaaaggctatgactttgcagccgtcctgg

SEQ ID NO: 412524 - DNA, 75 bp, Homo sapiens
tctcgccatggctctcagcgatgctgacgtgcaaaagcagatatggaatatatgaacgctgtcgagaattggtgg

SEQ ID NO: 412525 - DNA, 100 bp, Homo sapiens
cctaaatcttcaacataataagatatttgtgaaccaaggtgacctaccagttgaagattccgtgtactgctttatgcactgttttaatgttaaaccggac

SEQ ID NO: 412526 - DNA, 98 bp, Homo sapiens
cacattttgcctctggttggtggaaaggtgctccagctgctgctcctgcccctgcctcagtcccacagatatcccagccccccttcttgttggatggg

SEQ ID NO: 412527 - DNA, 82 bp, Homo sapiens
acgcccaatgtgctctgggacctggttgacaggataggacaatgcagatcttcgtgaagactctgactggtaagaccatcac

SEQ ID NO: 412528 - DNA, 75 bp, Homo sapiens
gaggaggttgcccagaagaaaaagattacaggctgtgccagccctggaaaaacagttacaattgttgttcgtggt

SEQ ID NO: 412529 - DNA, 90 bp, Homo sapiens
ggagttctgaatgtcagcatctgcaagaatgatatggatcagaaactttcgaagttggtagaagagctcacaacttcaggagaaccccga

SEQ ID NO: 412530 - DNA, 100 bp, Homo sapiens
cttagaagctaccgagttaccctaagaaagtgaaaatgcctcgtgtaaaagcagctcaagctggaagacagagctctgcaaagagacatcttgcagaaca

SEQ ID NO: 412531 - DNA, 100 bp, Homo sapiens
gattgtaggtggtgtccagctccagactgtggccgattacaaggagagctttaatacgattggaaacattgaagagattgcatataatgctgtttccttt

SEQ ID NO: 412532 - DNA, 101 bp, Homo sapiens
gttaaaaactttatgattcagggtggggacttcagtgaagactgtgatagatgccaacattttcccagccctcattagtattttacaaactgctgaatttc

SEQ ID NO: 412533 - DNA, 97 bp, Homo sapiens
tgccttggaaaatgccaacgccgtgtctgaagctgcactgggtgttcaacagccatcactccttggagcatctcctaccatttatacacagcaaact

SEQ ID NO: 412534 - DNA, 90 bp, Homo sapiens
gagtggctcacttgcatgtatttggaacaaaaaaaggagatgcctggcagccccgctctctgcagaacgtcaaggtcgtgggaaataaaa

SEQ ID NO: 412535 - DNA, 83 bp, Homo sapiens
cgcgctggcgctgagcctgcagccggccctgccggtgaccatggaggaagaagatgagtctcgagggaagacagaggagtcgg

SEQ ID NO: 412536 - DNA, 100 bp, Homo sapiens
ctccatcaagggtcctgagctgctcaccatgtggtttggggagtctgaggccaatgtcagagaaatctttgacaagaaatgtaatcttggttctcctgaa

SEQ ID NO: 412537 - DNA, 50 bp, Homo sapiens
tgatggtgaggtgggcacttctttgtgaaagcataacccctactgtagaa

SEQ ID NO: 412538 - DNA, 82 bp, Homo sapiens
agattttctctcaaactacgagatgtccctaagtgccagctctcccctaaaagttccagctcatctcgcctggcctccccct

SEQ ID NO: 412539 - DNA, 108 bp, Homo sapiens
gtacgcagacgccggccatgtgtgccacctgtgccatccaaactgcacctacgggatgctttcattggatttggaggaaatgtgatcaggcaacaagtcaaggataac

SEQ ID NO: 412540 - DNA, 88 bp, Homo sapiens
caaggtcatcagcacaggatatgccttgtcagatctgctacttgaactaccctaactcgaccaaatacacgctgatcgatgagcagga

SEQ ID NO: 412541 - DNA, 100 bp, Homo sapiens
ggcgcctgaaggagttgttgtctcggcagcgcccgcggagacgtgaagaggtaagaatgattgatgttggctgatattggagtgctcattcacatgaagt

SEQ ID NO: 412542 - DNA, 82 bp, Homo sapiens
agcacccccagacctgacccttggggaaggcacctgcggaactcgagtcatgcaggagcttttgtgatcgtgacggaagaag

SEQ ID NO: 412543 - DNA, 80 bp, Homo sapiens
acttcattcagaagatcaggtacacaaatgcacgcgacaggaaccagcttcgggctcagaatcaggttctgaaaaaaggt

SEQ ID NO: 412544 - DNA, 75 bp, Homo sapiens
ctggggcagtatcaacggagtctccgggtacgagctcaactggaggcagtcctgtgcggaaatctgaagaaaaaa

SEQ ID NO: 412545 - DNA, 80 bp, Homo sapiens
cccggtacccctggagttcacacattggtgggagctgaatgccatgaccaccaacagcaatatcagtcgccccatcgtct

SEQ ID NO: 412546 - DNA, 100 bp, Homo sapiens
acagtcatggatctggaagctgagggcacgtgtttgcggttcagccctttgatgaccgcagcaggaacaagcacatcatgattgacttggggactggcaa

SEQ ID NO: 412547 - DNA, 98 bp, Homo sapiens
ggggcgcctgcgggacggtgaggccctgctgaggactccggtagaggaccgaaaacactttggagctgtagaagctaaaccagaattgtccctagaag

SEQ ID NO: 412548 - DNA, 83 bp, Homo sapiens
gttcacaggtgtttctgcggcagtgctgcaacctgagcgtgagcgagagtccccgagaccctctagggttcaaggtgtctgat

SEQ ID NO: 412549 - DNA, 51 bp, Homo sapiens
gctgcttcccaataaggaaacaaacaagttgaaatcatcgcagaaggataa

SEQ ID NO: 412550 - DNA, 96 bp, Homo sapiens
acttggattgcctgacccaggccacaccaaaacctacagttgtctggtacagaaaccagatgctcatctcagagggccactttgggaaggttgagc

SEQ ID NO: 412551 - DNA, 87 bp, Homo sapiens
cgccccgcgcggcccgcccggatcgtggcctctcgagagcaagattctgaaggaagatttccattaggtaatttgtttaatcagtgc

SEQ ID NO: 412552 - DNA, 75 bp, Homo sapiens
gacccttcacctttgatcccctgacctgcattaccttggaggagatcgacgtgtggaccgaggagcggaagggca

SEQ ID NO: 412553 - DNA, 75 bp, Homo sapiens
ctggcattgggtcttcgggagtttcttgtgcaagatggttgcctgcctgattcgagttccatctgaagtggttaa

SEQ ID NO: 412554 - DNA, 80 bp, Homo sapiens
ggaagcttcaggtggagacagcccgaaggcccctagcagtcttcttgatgctttggaacaacatttagcttccttggaag

SEQ ID NO: 412555 - DNA, 100 bp, Homo sapiens
acttgtggagttgtcacttttttaagtaatatgtttatgggagtacttttattttttctcacattttatcatacaggtggattggtgatagaaaagcagt

SEQ ID NO: 412556 - DNA, 75 bp, Homo sapiens
ttttgaagacaatcgtcacttatacaggatcttcatcatctgggccatcagcagttggttccgccgagggccggc

SEQ ID NO: 412557 - DNA, 75 bp, Homo sapiens
ccctctccgccccccaggaggggcgagagggagccgcagctgatgtcagtagtgagttgaaactcttggaggaag

SEQ ID NO: 412558 - DNA, 75 bp, Homo sapiens
tgcagtggcgcctaaagtctgagagagggaagtcgcctctgtgctcctgcacaacgtcaccctggcgctggagct

SEQ ID NO: 412559 - DNA, 75 bp, Homo sapiens
gtcgtggtggggggcggcatctcaggtgtacttctctgaagtaagatgatttgtcaaaaattctgtgtggttttg

SEQ ID NO: 412560 - DNA, 83 bp, Homo sapiens
atttcagaaactgttggagtttatatacacaggaactttaaatcttgacaggtcgagcctcttaggcagagtttaacacatgg

SEQ ID NO: 412561 - DNA, 74 bp, Homo sapiens
ggcgaacgcggagagcacgccatgaaggcctcgggcacgtgacagctatattgtgcgtgtcaaggctgtggtta

SEQ ID NO: 412562 - DNA, 87 bp, Homo sapiens
ggagatgaacccaacctagtgggtgtaatacatcatgaactgcagggagaatacttatctctggcgcacatcactatatttggctgc

SEQ ID NO: 412563 - DNA, 100 bp, Homo sapiens
ggcacttggagtccggacatctgaaacttggagaataaaggcagccccgttgatgactgaaaatgacaaagcatccacctaacagacgaggaatcagctt

SEQ ID NO: 412564 - DNA, 82 bp, Homo sapiens
cagaccaaaattgaaaaaatggttgacctcacccagtttttcagaagaagtgaagtcaagatgaagaaccatttgcttttct

SEQ ID NO: 412565 - DNA, 98 bp, Homo sapiens
ggcggcgcggaggcggctgaggtgcgagccggcaggtgacagcagggacatgtctcgggagatgcaggatgtagacctcgctgaggtgaagcctttgg

SEQ ID NO: 412566 - DNA, 102 bp, Homo sapiens
ctgctggaggacgagggccagctgacggagatggtgcagaagatggaggagggctctgccagcagacagccttggcacacaggcacaagggctggagcccag

SEQ ID NO: 412567 - DNA, 100 bp, Homo sapiens
atggtaactgttggaaaaaccattcttgaaagaaataatttcactgacttcacgaatgtgaggacttttcccatgctaaacagctctttgctgcttgttt

SEQ ID NO: 412568 - DNA, 98 bp, Homo sapiens
ctagaaaagaagtctaactatgaagtattagagctcccaggccagtgccagtacttgggcttgccagtggcggattacttcaagcagtggattaatct

SEQ ID NO: 412569 - DNA, 128 bp, Homo sapiens
tttaccatcaccacccaccctgagagcaaccagggcatcctgacaaccaggaaggttggatggcaagcatgtggtgtttggcaaagtgaaagaaggcatgaatattgtggaggccatggagcgctttg

SEQ ID NO: 412570 - DNA, 103 bp, Homo sapiens
aggattccaagtaactcttatttgggagaaacaaaggcagcgctgccctcgggggagcattggccctggcggaacgcagcagccgcgaaggatccagccagag

SEQ ID NO: 412571 - DNA, 83 bp, Homo sapiens
aaggaacgaggcaaggagctaaagcagcgtgcgttcagccctggggagaacgtatttaccgggcagtcaaagatctattccta

SEQ ID NO: 412572 - DNA, 96 bp, Homo sapiens
agaattatttggtcttgtgattggagtcctgacagcaagtatttcttcactgggagtcgagacaaaaagttcccccaaacaggactcttcctttga

SEQ ID NO: 412573 - DNA, 75 bp, Homo sapiens
ctgcattcagttttgagatttgtcatcaaacaaactgcacccttgttgtgattccaaagaatccctatcctgcct

SEQ ID NO: 412574 - DNA, 100 bp, Homo sapiens
ccaaaatccacacccttatcacagcccagtgccaatggagtccagacggaaggacttgactatgacaggctgaagcagatcttgcttctgaaatatctac

SEQ ID NO: 412575 - DNA, 100 bp, Homo sapiens
caaaaagagtaacggaaatccttgggtttgaagatgatgttgtgattgagtttatattcaaccagctggaagtgaaggcagacctgttatcctaaactag

SEQ ID NO: 412576 - DNA, 74 bp, Homo sapiens
gatccctggaatatgaagagacacagtatggtagccacacccccagaccatgaaatggaggctcagggggtgaa

SEQ ID NO: 412577 - DNA, 121 bp, Homo sapiens
ttctgcttacccgaggccgctgctgtgcggagacccccgggtgaagccaccgtcatcatgtctgaccagagtaaagctaaaacattttgagaaatttcaggatacagcagaagcattagca

SEQ ID NO: 412578 - DNA, 76 bp, Homo sapiens
cacagcccgacgaaaggatgccaaatatgctgagtttgtgtgtgaacggacactgaaatattttctaggaattgcg

SEQ ID NO: 412579 - DNA, 101 bp, Homo sapiens
gtttgagtccgcatcgccacagctgaaggctgcgagggactaagagcagagtgagccctattcccagaggcaggtggtgctgaccctgtaacccaaaggag

SEQ ID NO: 412580 - DNA, 100 bp, Homo sapiens
acagtcaatccaatgtctactgctatgcagaatgaacggtccttgaatgggcaagagggcacatgaagtacggcgtcctccacattcacggcctctacac

SEQ ID NO: 412581 - DNA, 99 bp, Homo sapiens
ctgctcactgctgttggcaccaccacccgagactccttaaccgagatcaacctgtctgggaatgaaagctactggttgattttaaagtgcctgggcctc

SEQ ID NO: 412582 - DNA, 100 bp, Homo sapiens
atacaatgcagttccttaaaagctgcttccagtgggaatccacattaagaagtacaatagcattcgcggttgtttacattcagagctctatcaataagag

SEQ ID NO: 412583 - DNA, 100 bp, Homo sapiens
gaagtcatactcacagaaaagaaaggctggggcttgagagctgccaaagaccttccttcgtgctgttggcagcagcggtctgcacaaaagcaggaaaggc

SEQ ID NO: 412584 - DNA, 98 bp, Homo sapiens
agccccacaacatggcctcctccgcctcctcctctcccgcgggcaccgaggactccgctcctgcccaggatcagtttgacaacttagaaaaacacaca

SEQ ID NO: 412585 - DNA, 127 bp, Homo sapiens
gctgaagcctttaaatgcagcatctgcgatgtgaggaaaggcacctccaccagacatggaaggtctttaatgtaactttaaatggttcaccaaaggatgctctaatggatgacagcgatactcctac

SEQ ID NO: 412586 - DNA, 83 bp, Homo sapiens
caaccattgacgccatgtcgggttattcgagtgaccgagaccgcggccgggaccgaggccttagccccgtgggccccacggag

SEQ ID NO: 412587 - DNA, 99 bp, Homo sapiens
ttagtatgtaaaagatgttttggaaatctgaaatagagtactatgctatgttggctaaaactggtgtccatcactacagtggcaataatattgaactgg

SEQ ID NO: 412588 - DNA, 50 bp, Homo sapiens
ggaagctggaactcctagtacaggtgtgggaaccgctgagcagaacaccc

SEQ ID NO: 412589 - DNA, 104 bp, Homo sapiens
gaagtaggggtgcacctcagcactatcccaagactgctggcaacaggaaaaccgtcttcagatacagtccctaagcccaagagagccccaaaacagaagaaagt

SEQ ID NO: 412590 - DNA, 75 bp, Homo sapiens
tccagcctgcggagcctgtggggcagctctctatcaatatcagctcacatcattgaaaagataattttgaagaca

SEQ ID NO: 412591 - DNA, 100 bp, Homo sapiens
ggaatgcccaacagagggaactacaaccaggtgagggttcagagtatggtgccagtggagaagatgcgctcagcaggatccagaggctgatggcggaggg

SEQ ID NO: 412592 - DNA, 82 bp, Homo sapiens
caaggtgatccagcaaggtcggcagagcaaggggcttacgcagaaggacctggccacgtgatgaacggcagcagccactcac

SEQ ID NO: 412593 - DNA, 51 bp, Homo sapiens
ggaaggaggggcggcagcttctccgacaaggcatttcatccttcatgaagc

SEQ ID NO: 412594 - DNA, 75 bp, Homo sapiens
tcatggaattgccgaatctcagttacgctacatacaacagaccaccgctgaaacttcacttctacacagaggctt

SEQ ID NO: 412595 - DNA, 100 bp, Homo sapiens
cagagaccatgtttgacaagacgcggctgccgtacgtggccctcgatgtgctctgcgtgttgctgggatctaagcattgaagaacagtcagagtgtgctc

SEQ ID NO: 412596 - DNA, 80 bp, Homo sapiens
gaaggatataagttttacccacctaaagtggagttgtttttcaaggaagagccaatgttttccacccataatcctttctg

SEQ ID NO: 412597 - DNA, 100 bp, Homo sapiens
gatcttccgagacaggacggatatccagtgccttatcccatgtgccattgaccaggatcaagtcttccataccagggaccaggccaaaaccagactgcca

SEQ ID NO: 412598 - DNA, 75 bp, Homo sapiens
ctgaaaaggaaaaggagagtattgccagagcaagagctggatctcgtctttctagtttcgctcttgttgtccagg

SEQ ID NO: 412599 - DNA, 99 bp, Homo sapiens
agcacttcctattccactggattgggaaagaccatggcaggtgaatggctatgtggtgaaccttttctgggcatttgacacccacaagcaagagaggag

SEQ ID NO: 412600 - DNA, 75 bp, Homo sapiens
cagagattgaactcagctatgcaaagcaactcaggaacttgtaatagctggcatcgttgagaatgaatggaaaag

SEQ ID NO: 412601 - DNA, 100 bp, Homo sapiens
cgaaggtgaagccacggaagataaggaacctgttttgttcactggaacaatgaggaaaaacctggatccctttaatgagcacacggatgaggaactgtgg

SEQ ID NO: 412602 - DNA, 80 bp, Homo sapiens
ggatctcgggctcggaacgagactgcacgtgttttccaagcagtgaagcacttgccgtgttgaactgaatgcactactgg

SEQ ID NO: 412603 - DNA, 90 bp, Homo sapiens
acttgaaactaatcctgatattaagccatcaaatgtggaacctatggaaaagattgagaggatccagaatccagatctctggaatagcta

SEQ ID NO: 412604 - DNA, 101 bp, Homo sapiens
tcttgctagatcggaacagcacgagcacgtagcaggtctccttgcaagacttcgaaagaatttcgaggatgtcagatgtaaatgtatctgccctccctata

SEQ ID NO: 412605 - DNA, 82 bp, Homo sapiens
atcgttaaacatctgaaagggtcagatgaagttggagcccttgtttttgacattggatcctatactgtgagagctggttatg

SEQ ID NO: 412606 - DNA, 75 bp, Homo sapiens
gaaaaacaagaattacagcagccaacctatgttgccctgagttacataaatagacaactgtggaccccaaaaaaa

SEQ ID NO: 412607 - DNA, 82 bp, Homo sapiens
gcctttgccgatccgccgcccgtccacacccgccgccaggcctcgggccagcggccaggagctgcctcccccagcccccgtc

SEQ ID NO: 412608 - DNA, 82 bp, Homo sapiens
ccgggttccccggctcgcggggcccggcgaagggcaggtgagcgagtgctgtgctttcatgggcctcttctttatgaagcaa

SEQ ID NO: 412609 - DNA, 100 bp, Homo sapiens
atagatccagcaactggaaaacttatggacaaatctttctctattagggtcccagggctggtggttgctttgggtctacagctacgtcttacccgcctcc

SEQ ID NO: 412610 - DNA, 75 bp, Homo sapiens
tcgggagcaggaaagccagtgttgtggaccctagcacagaggatcctaagcacttcaagtcagagaagacaggac

SEQ ID NO: 412611 - DNA, 95 bp, Homo sapiens
ttggaatgtatctggctcagaactatgatgtatcattggaacatttcaagatcatcaaatcaaattccacagggattggtgaccaaccagaaggc

SEQ ID NO: 412612 - DNA, 75 bp, Homo sapiens
aggggcctctccaccttttgctgtcgtttttcgttggaatatacgttgcacatttatggcgattctgagtgtgag

SEQ ID NO: 412613 - DNA, 100 bp, Homo sapiens
gggcggaagaccaagatcatcgagatgctctattaccaggttttaaacttcgccatgatcgtgtcttctgcactcatgatatggaaaggcttgatcgtgc

SEQ ID NO: 412614 - DNA, 87 bp, Homo sapiens
ggcgtacgccctcatggggaaaatctccccggtgactttcagaggagaggagacgccgtgagcgggacgaccagatgtaccgagagc

SEQ ID NO: 412615 - DNA, 100 bp, Homo sapiens
agatggctctgctgtagtacagatattttccagcagatgccaccgctgagatgctagaagaatggcgacctttaatgtgcccttttgatgtaaccatgca

SEQ ID NO: 412616 - DNA, 99 bp, Homo sapiens
gtagttgggaaggatgttttcaaacagtctcaggtggccaatatgttctacattgtagtgattatggctcttgtattacttagttttggtgttcccaga

SEQ ID NO: 412617 - DNA, 101 bp, Homo sapiens
aaagtcccagatacactcaggaagtgtttctcagaggatggctcttgctcacccgagcctcacaaagataatcgctcaggaagtgtttcagccaatccggg

SEQ ID NO: 412618 - DNA, 74 bp, Homo sapiens
gacctccaaggaagccacgtgcagacatctacaaccttcgatctcctgacgagagcgaagggaactgcggcaca

SEQ ID NO: 412619 - DNA, 82 bp, Homo sapiens
tggtgtaccaggcgaagctggccgagcaggctgagcgatacgacgtgtaaatgagcaaagatggatcaggaaggtgggggag

SEQ ID NO: 412620 - DNA, 75 bp, Homo sapiens
gctcgacgtgctgtgcttactggtcgatcctcgttgcctgctaaccaacggcaagctgccactgtgggcaaagcg

SEQ ID NO: 412621 - DNA, 82 bp, Homo sapiens
ggcgagtttccgatttaaagctgagctgcgaggaaaatggcggcgggagcagcccctgtcaaagggaacaggaagcagtcca

SEQ ID NO: 412622 - DNA, 75 bp, Homo sapiens
aattggatatcaagccagagaagtgcccgaggagagttaacagatctttgtagaatttgatggctgtaactggaa

SEQ ID NO: 412623 - DNA, 82 bp, Homo sapiens
agagactcatccccgccctgtgggagaagcacagtccacagactcccaggctggaatggtgtcctcatatcgaggaagagga

SEQ ID NO: 412624 - DNA, 75 bp, Homo sapiens
tgccggcccggcggctgctgctgctgctgacgctgctgctgcccggcctcggggctgctctttggcgtaaattgc

SEQ ID NO: 412625 - DNA, 75 bp, Homo sapiens
gggctggagacatggaccgcggcgagcaagagtacaggggctcaggtccaggtggcaggggatatgctacccaac

SEQ ID NO: 412626 - DNA, 100 bp, Homo sapiens
ggtcagggacctacggcacctgctggaccacctcgccttctccatcgaagcagggaagtgggagcctcgagccctcggcagctgtcgattcggcagaccg

SEQ ID NO: 412627 - DNA, 100 bp, Homo sapiens
ctcagaacagttggatcttgctcagtctctgtcagaggaagatcccttggaagtgtggcccccggctgtcagcagaggctgcagagaaactgaagaaccg

SEQ ID NO: 412628 - DNA, 73 bp, Homo sapiens
tggctttcctggatctgaggatgtgaaacttaaatttgaagagagtacaggggctcaggtccaggtggcaggg

SEQ ID NO: 412629 - DNA, 75 bp, Homo sapiens
aaaaacctttggacagtccaatgtcaacattgcccagcaagtggagggcctgaggctatggcaggaggagcagga

SEQ ID NO: 412630 - DNA, 96 bp, Homo sapiens
ctgccgtctcagcctgggcgtcgctgaagctgtgtctgcggggaggcagcggaaggcggcaggtacatgtcccagagcaagcacacggaggcccgg

SEQ ID NO: 412631 - DNA, 87 bp, Homo sapiens
gagctgcagcactccagccactgctgtctccttagctgctcacatatggatactttcacagttcagataatgaaggttctggaagca

SEQ ID NO: 412632 - DNA, 75 bp, Homo sapiens
ctgaaggtgcgagaagaagtcagaaatctacagttactcacacaaggtggtattaaagataatcaaacattatca

SEQ ID NO: 412633 - DNA, 82 bp, Homo sapiens
cttagttggagctttgtctatcttcttccttaggaaaccaaggatggcattccctgtggatatgctggaaaattgcagccat

SEQ ID NO: 412634 - DNA, 73 bp, Homo sapiens
aacacatctttacacactaagaacaaaacataaccctttcatttgtactgcctccttccacacgagtgcccct

SEQ ID NO: 412635 - DNA, 98 bp, Homo sapiens
accagcatgcaatatcggacccttttagaagcagaaatgttagcaattcgctcaattgaaggccagtatggcacactacaagcatatgtgactccaag

SEQ ID NO: 412636 - DNA, 75 bp, Homo sapiens
gaatttaattttagtgctcggttatgaagattatttggctctcacagctggagtgcggtggcgtgatcttggctc

SEQ ID NO: 412637 - DNA, 88 bp, Homo sapiens
cagtggtcgcttcttctccttgaaatggcacctcgaaaggggaaggaaaagaaggaagaacaggtcatcagcctcggacctcaggtgg

SEQ ID NO: 412638 - DNA, 75 bp, Homo sapiens
caattatggcatcctggccgatgccacggagcaagtgggccagacaatgtttctcatgctccagtgatgtttgag

SEQ ID NO: 412639 - DNA, 116 bp, Homo sapiens
gcccgcgagacgctcaagaactcggctctgagcgcgcagctgcgcgaggccgctactcaggtggctgcagtccgagaagggatgtcctggattgttcctgtgccgctgctgtccct

SEQ ID NO: 412640 - DNA, 75 bp, Homo sapiens
cccagagcagacaccgcagccaccgcggatgcaaaggtcggcactcttcaccctcccgagccctgcccgtctcgg

SEQ ID NO: 412641 - DNA, 76 bp, Homo sapiens
gcctggagcaggcagcatcctcaaatggaagaatggtgaacacagaaatcgaggtgcaagctcaaaaagagatggg

SEQ ID NO: 412642 - DNA, 73 bp, Homo sapiens
atcatcatgaaggacgtgcccgactggaagaacttggtcctgatgtctgaccatggagatgtgagcctcccgc

SEQ ID NO: 412643 - DNA, 73 bp, Homo sapiens
aggctgctcctggcagccttgatcagcgtcagcctctctgggaccttggatgttacatcctgtccactgcaga

SEQ ID NO: 412644 - DNA, 75 bp, Homo sapiens
agaagaatatgaattttgcctgcggatttgctaacactcgacaatcctaggagacacctggatttcattagcatc

SEQ ID NO: 412645 - DNA, 51 bp, Homo sapiens
gaaggacaggcagagctaaacaagagttggagtctcactctgttatccagg

SEQ ID NO: 412646 - DNA, 100 bp, Homo sapiens
aggaggtgcagatggcactttccaaagtggatgcctccggggagcttaacagagcgttccaaaaagaggactctccagctactttttattgcatcagtat

SEQ ID NO: 412647 - DNA, 83 bp, Homo sapiens
ccctgaccatggctccctgcagtaccctttaacgaaccaaacttgttttctcatgatgcagttgtgagagaaatgcctacagg

SEQ ID NO: 412648 - DNA, 75 bp, Homo sapiens
acaaatatacaacaaggccattttctcaaacgagagtcagcctttaacgctgtgattgggttattatacccctgc

SEQ ID NO: 412649 - DNA, 100 bp, Homo sapiens
aggctgccactgtggagcagttcgttttgaagtttgggcctcagcagacttgcatatatttgactgcaagtcacgaacgagatcacgccggtgctgtcgt

SEQ ID NO: 412650 - DNA, 75 bp, Homo sapiens
cggtctacaccgacttcgacggcccctgtcccagctggccctgccccaggtactggggctgatcctgaacctgcc

SEQ ID NO: 412651 - DNA, 50 bp, Homo sapiens
ctggcagactctgctccatgagaggcgaacctcttcccggccgctctggt

SEQ ID NO: 412652 - DNA, 78 bp, Homo sapiens
cagaacatacacttacatctctagataacagtctgcactttcacccgtttcaggctagagtgcaatggcgtgatctcg

SEQ ID NO: 412653 - DNA, 83 bp, Homo sapiens
gaggagggacgtgaacggagtgaccaagagcaggtttgaggatttacttcatttgggtcactaggtcacgggggcctcacttc

SEQ ID NO: 412654 - DNA, 51 bp, Homo sapiens
taaatgccgagaaggccagtacggtggcacaagaatggctcaactctccaa

SEQ ID NO: 412655 - DNA, 99 bp, Homo sapiens
cacggagaccgggctggagccggacgagctgtcggcccaggacccagggatctcccccagccagagtctgtgtgcggaaagttccagaggcctcagtgc

SEQ ID NO: 412656 - DNA, 50 bp, Homo sapiens
gaagctctaagtacactcgtcttgaatagtttttccagaaaggaggagtc

SEQ ID NO: 412657 - DNA, 97 bp, Homo sapiens
agaagctgcagcggaggaaggcgaggtctccagtccccagatttctgtgcatcctctctcatgcaaagaaggctggaagacaaacttgtgaagctag

SEQ ID NO: 412658 - DNA, 75 bp, Homo sapiens
atgtggggggattctcgacctgctaacagaactggaccttttcgctggaaaacctcatgctggacaaagatggcc

SEQ ID NO: 412659 - DNA, 82 bp, Homo sapiens
ggagacggacgttgagagaacgaggaggaaggagagaaaatggcgtccacgggtgcgcgcggagccatggttatcatgtcgg

SEQ ID NO: 412660 - DNA, 100 bp, Homo sapiens
ggaagaccagagagagggtttggaggcagcccctaagggcccttcgcgggagagcgtcgtgcacgcgggccagaggcgaaatgcactcggtgatggaaag

SEQ ID NO: 412661 - DNA, 75 bp, Homo sapiens
cagaaatccaggagattgttgataagggaagtcgagacaacatgagtgtgattttgatctgttttccaaatgcac

SEQ ID NO: 412662 - DNA, 100 bp, Homo sapiens
gaccacttaagcaaacttaatataccagacactgcaactgattcttcagaaaagtgtgggcctcctccacctattagcaatggtgataccacctcctttc

SEQ ID NO: 412663 - DNA, 80 bp, Homo sapiens
cggcgtcatctgtgagaacacctgcaaaaaaatccccgggcagtgcggcaggcggaggaggttcggggtctggagcatct

SEQ ID NO: 412664 - DNA, 100 bp, Homo sapiens
gccagaagggctacgccagcggcgtcgagaggaccatcctgggtgctggccctgtgctggaggttttgcacactagggaccaagaagccctcggggacac

SEQ ID NO: 412665 - DNA, 100 bp, Homo sapiens
gtgtagtagcagagttttgggatgggaaaatcgtgttggttctgccacatgatccaagctttgctatcaaaaagcagggagaagaggatgatgagcatgc

SEQ ID NO: 412666 - DNA, 99 bp, Homo sapiens
cctagaggagtggatcctggagcagctcacgcgcctctacgactgccaggaagaggagcaggacttggatggtgagaaggggccatcatcggaagggcc

SEQ ID NO: 412667 - DNA, 51 bp, Homo sapiens
cttctggggcaggggccagggccaggattttctacaaggaatatgtcttac

SEQ ID NO: 412668 - DNA, 100 bp, Homo sapiens
atcgttggaacgagaaaagggccatgttcggagtgtatgacaacatcgggatcctgggtctgctccagctcagccacctgctgaagggacagaagggact

SEQ ID NO: 412669 - DNA, 100 bp, Homo sapiens
ggggacccagctcttcttgcagccactggaagctgatcacctggagtgaagacctcacacctgatgccactgctgaagctgcggcacgcccacatctctg

SEQ ID NO: 412670 - DNA, 78 bp, Homo sapiens
gggaatcctatgcttggtaatactggtgatagctgtggtcctgggtaccatggtacgtagagaaatcgacactcttaa

SEQ ID NO: 412671 - DNA, 100 bp, Homo sapiens
caacaccaacaagaatgaggagcaggacatcttcatttacagagcaacttgatgaaggtacacccaatagagaggaaaaaccatatggcatagttgaaaa

SEQ ID NO: 412672 - DNA, 75 bp, Homo sapiens
gccatcgcactctggaacaacatgtacgaggatgtcgtccaggaaagattgtgcagatgactgaagcagaagttc

SEQ ID NO: 412673 - DNA, 100 bp, Homo sapiens
gaaatactacgagactgtctcagcccatccctacaatgacaaaggagagcatgcttccagctggagctgagtccaagcacacagccactcctgcacacgc

SEQ ID NO: 412674 - DNA, 100 bp, Homo sapiens
cctgctgctgtatgacacagcacctcgaggcaaggaaataagaaaactgcctctgatccaagcagagaagtttggagactgccagggaccatgttttgcc

SEQ ID NO: 412675 - DNA, 100 bp, Homo sapiens
tggatcgcactgaacctaagccacaacccgagcacgagtacacgagacaggattgagaaaggagagattcaaattgtgacttcagattcaaaggcaatta

SEQ ID NO: 412676 - DNA, 100 bp, Homo sapiens
catggggcaggagtgcatcaagtgccacatcaacgtgtatccacacaagcaggttaatttcacctaccagtttttgaaaaagaagttctatatatttagc

SEQ ID NO: 412677 - DNA, 82 bp, Homo sapiens
gccgcgtctgggccaggagaaaagatgagcgggatcgtgtgcagaagaaaaccttcaccaagtgggtcaacaagcacctcat

SEQ ID NO: 412678 - DNA, 75 bp, Homo sapiens
gaagctttacttcgagctcatggtctgcggatcaatggagagctaatcactgcctacccacaagtggtggtagtc

SEQ ID NO: 412679 - DNA, 100 bp, Homo sapiens
ctccgacccccgcgagctctgtagctgcctctatgatctggagacggcctcctgttccaccttcacccgggcgctcgagctcttcctagagtcgctgttg

SEQ ID NO: 412680 - DNA, 100 bp, Homo sapiens
gtgcctcctcttctgggctgtgctggtcacagccacactctgcaccgctaggccgtccccgaccttgcctgaacaaggggctaagtgatggatcttgtac

SEQ ID NO: 412681 - DNA, 75 bp, Homo sapiens
gtgaaattgactaaatacatgtttggagtttgagaatcagaagactcgcttgggcattcagttggattttgaaaa

SEQ ID NO: 412682 - DNA, 74 bp, Homo sapiens
cacgcagtgctttgcaacgctaattagactcatgccacttgagtgtttgccagctctgagcctgtgccaggatt

SEQ ID NO: 412683 - DNA, 75 bp, Homo sapiens
gtggagttgaagaaaagaaatcattagaaattctcctaaaagatgaccgtctggcaaaagctggcaggctgacag

SEQ ID NO: 412684 - DNA, 98 bp, Homo sapiens
tgccaaaccaggttgcatttcctgaaggggaagagcaagatgcagtcagtggagtacgaggatgtcgtccaggaaagattgtgcagatgactgaagca

SEQ ID NO: 412685 - DNA, 82 bp, Homo sapiens
tgagcgcggctgcccaggttgacctttctgcgggagaacatccatgatagcagtcttctgtaaatcgaacttttcaagaatt

SEQ ID NO: 412686 - DNA, 74 bp, Homo sapiens
gtttgacaccaagcctctcattgttcacctatttgatggctttgcagatggactaggagttgctgaagctattt

SEQ ID NO: 412687 - DNA, 98 bp, Homo sapiens
aaaaacgtgcgcatgatgcaggcccaggaagccgtaagcaggatcaaggaaacctgccatatgaatataaaatagtgattgctgggaatcatgaactg

SEQ ID NO: 412688 - DNA, 101 bp, Homo sapiens
ccgagctcggggaccggcctctgcaggtcggggagcgctcggactacgcgggatttcgcgcgtgtgtgtgtcagaatgtcacaggtagactaatggttggc

SEQ ID NO: 412689 - DNA, 102 bp, Homo sapiens
ccccatctccggcggagagaccgtccgaggtaattgtctgccacgagtgcacattctgaaaacaggacagtcattttgtttactcattcagccctgttgcag

SEQ ID NO: 412690 - DNA, 90 bp, Homo sapiens
gatgccgggggagcggggccttccacaccccctccgtgggtgtgtggtgagtgtggccagagactgctgctactttgaaacgtacgatag

SEQ ID NO: 412691 - DNA, 75 bp, Homo sapiens
attggaatgttctccctgcagcagtcagcccaaaggaagggtctgcggaagagggagctgctgaaggagctgcta

SEQ ID NO: 412692 - DNA, 75 bp, Homo sapiens
cctgccccgggcaaagcccatctggtccgccgagcagaacctatctacaagacctcttgtgctttgactattcat

SEQ ID NO: 412693 - DNA, 74 bp, Homo sapiens
gtggagtgtagagatatagttggcaacctcactgagttagaatcagaggtacatgtcccagagcaagcacacgg

SEQ ID NO: 412694 - DNA, 90 bp, Homo sapiens
ccaggcccttgcgctgtggaaccagctcttcacccagatcttcggggtcggtgtgaagactgctgaccggtggtaccgggaaggactgcg

SEQ ID NO: 412695 - DNA, 97 bp, Homo sapiens
gaaagaattagggtccttgccccttcccttatctacttcagaacagtctatgactttgaaagaagccatcaagtcttcactcatcatcctcaaacaa

SEQ ID NO: 412696 - DNA, 99 bp, Homo sapiens
atgccggttatctctgtgaatctcagggcagcaggatgggtgtggaagcagtgatggcacttttggaggggaccccagataccccagcctgtgtagtga

SEQ ID NO: 412697 - DNA, 100 bp, Homo sapiens
gccctccacaaggtgatcatggttggcagcggaggcgttggcaagtcagccctgacgcttcagttcatgtatgacgaggattctgagaaacgaacccctc

SEQ ID NO: 412698 - DNA, 83 bp, Homo sapiens
ccccaagcggccggagcggcgccatggaggagggggcgccgcggcaggtcctcagccctcgctctcgctggcggagcagcacc

SEQ ID NO: 412699 - DNA, 100 bp, Homo sapiens
gaagaactgaagataggcaacaagatgatgagggcgcggcagtatccttggggcactgtgcagggtattatagctgcaaatgtccttgtattctgtttat

SEQ ID NO: 412700 - DNA, 95 bp, Homo sapiens
tgtcagccttcccagtagctggaactacaggtattttgaccaacgtgatttagctgatgagccatcttgatgtagctgatctctcagggatagaa

SEQ ID NO: 412701 - DNA, 89 bp, Homo sapiens
ggaccagacacacaggacctggaaggccagagccctccacagagcctgccttcaacccccaaagcagagagagcaggagattcggatgg

SEQ ID NO: 412702 - DNA, 82 bp, Homo sapiens
acagaacccaaaagttctgatgttcggaagatggccgccctgctcccccaatgaaaggccagcttcgaagaaaagctgaaag

SEQ ID NO: 412703 - DNA, 100 bp, Homo sapiens
tggaatgaggaaaagtgaacttttcgaggcatttgacttgtttgatgttcgtgactttggaaagggttaccatccattgacccatcaggcagctccccat

SEQ ID NO: 412704 - DNA, 74 bp, Homo sapiens
ccgagagcgcgaatatcgtcatcgttagaagggtccccagccccaccccagccccaaaggaggctgttcgagag

SEQ ID NO: 412705 - DNA, 87 bp, Homo sapiens
caacaacctggcggtgctcgagtgcctgcaggatgtgagggagtctgatgatttgaagaagagaagagagcctcacatctccacttt

SEQ ID NO: 412706 - DNA, 75 bp, Homo sapiens
caagtacccgtccatcatagtcaactgcgtggaagagaagaacagcacattagttccagaagaaagatggaaatt

SEQ ID NO: 412707 - DNA, 100 bp, Homo sapiens
tctcccggccctctcgcgctgcactgtctctccgacgcaagactgtcccggcccggatgggttgaggcagctgcttcacaacaggatcacagtctttctg

SEQ ID NO: 412708 - DNA, 75 bp, Homo sapiens
ctgtatgattaggccacaatcttcaatgagtaaacatattcctcacccagtcagcttgaagagtttcaaatggac

SEQ ID NO: 412709 - DNA, 98 bp, Homo sapiens
cgcgactcggcggcggcgtcttttcctatccctcggccagatcctgtgcataataatgaagaaacacatgatcaagtgctgaaaaccagattggaaga

SEQ ID NO: 412710 - DNA, 95 bp, Homo sapiens
catcaaagtgcgcccacagcagcaaccttggagcaggcagattgaagagggcagtaaagccgcggcggtcgacaagttactggctggagatgaga

SEQ ID NO: 412711 - DNA, 100 bp, Homo sapiens
ggaaaggcgacctgggggagccgcccccgacacggcccacgacatcacagtcatctgcccttgggaggccttcaaccacctggagctgcacgagctggcc

SEQ ID NO: 412712 - DNA, 95 bp, Homo sapiens
aatgtcatccgatggcacaatcagaggtacttggaaggctccatcgcccctgaagacaaaggaagctgctcattgctgcctgggcctccatttgc

SEQ ID NO: 412713 - DNA, 49 bp, Homo sapiens
gaaatgaattgggacatggtacaggaaggcgtggaagtgcgagtggcca

SEQ ID NO: 412714 - DNA, 100 bp, Homo sapiens
gagagaatgaaatgcttatattacttatatgctagtttggatccaaatgctgtaaagaaacatgatgaaagtattgagggggcatcagaattgggtgtac

SEQ ID NO: 412715 - DNA, 100 bp, Homo sapiens
gtctgaactgaagaagcttgggctcacttccacaaatgtgaatctggattgggaaagtcgacattaatcaactcattattcctcacagatttgtattctc

SEQ ID NO: 412716 - DNA, 100 bp, Homo sapiens
gggcccatatatgccagggttatccagaagcgagtccccaatgcctacgacaagacagccttggctttggagcagcaaagtggggcaccaaggccctgtg

SEQ ID NO: 412717 - DNA, 83 bp, Homo sapiens
ctcctttgtgccttttatatcatggcaaaggccaagattgaaaaatgtggatcggagtagtgctcagcatttggaagttactg

SEQ ID NO: 412718 - DNA, 100 bp, Homo sapiens
ggtcattaacccttggctatatggcagaagcgtttggtgttggtgtggaattcattgatcagggccctcctcgccaaagacagcctagagaggacggcaa

SEQ ID NO: 412719 - DNA, 74 bp, Homo sapiens
ctgccgctcctgccggcagctccaaccatgggaggccgcgtctttctcggcatagaatgtcaagctaaccaggc

SEQ ID NO: 412720 - DNA, 75 bp, Homo sapiens
gtgaaatgtgaggcgtgtcaccagtttatcacagggaaagtcctggaggacacaactcagatgggaagttcatcg

SEQ ID NO: 412721 - DNA, 76 bp, Homo sapiens
tgtgcacacgatgggcctgcatctcttcccactatctgctaggaaacacgagggaacaagatcatggtgttggccg

SEQ ID NO: 412722 - DNA, 83 bp, Homo sapiens
cttgaacagggctgacaacatttttccttttccggtttcccttgggggctttgaaataacaccaccagtggtcttaaggttga

SEQ ID NO: 412723 - DNA, 98 bp, Homo sapiens
gagaacacagatgaaaaacttcgcaatgaaaccaggcgggtaaacatggtggacagaaagtcagcctcttgtgatgtacaggtggatcatctgaatct

SEQ ID NO: 412724 - DNA, 89 bp, Homo sapiens
ctcaaccagatgaggaagtacaactttgaggtgaccaagaatatggcccaggtgaccaaagccctggacaaggccctgagcaccatgga

SEQ ID NO: 412725 - DNA, 91 bp, Homo sapiens
aggtcgccctcaaggccatgatcaaaacgttatggaaacaaaggacatgctttacatcgtcactgaatttgctaaaaatggagaaatgttt

SEQ ID NO: 412726 - DNA, 80 bp, Homo sapiens
tgaagctcaagttgctactcgggacgctgcacctcccgcgccgcacggtggacgagaggctgggaggcggcagaatgcag

SEQ ID NO: 412727 - DNA, 50 bp, Homo sapiens
atcagaaccggtacctggatggcatggaccttttaccaatttgaggctgc

SEQ ID NO: 412728 - DNA, 100 bp, Homo sapiens
gacaggagcagaaatatattttgtggtgccaccaagagagttcagcaaatccactccatgaagatggacctacagctaaaaaattaaagactgagcaagg

SEQ ID NO: 412729 - DNA, 100 bp, Homo sapiens
tattgtaaggagtgcaccatccaggagaaggacacagcaaggccatcgtggacgggaacctgaagctgatcctgggcctcatctggaccctgatcctgca

SEQ ID NO: 412730 - DNA, 100 bp, Homo sapiens
actcactgcagttggcaagaaaactctgtgactccatgagatgggaaattacaccagcagtcaaggtagcaagtggatcctctatccttcagagactctg

SEQ ID NO: 412731 - DNA, 119 bp, Homo sapiens
gagctgtcctttgttttggattacataaaccagtcacccaagtgcattgcctttggaaacgagttttgcacagtaataagttgactcacacagacttaaagcctgaaaacatcttattt

SEQ ID NO: 412732 - DNA, 82 bp, Homo sapiens
agcacgaattccgccggcgttggactattagaagacacattagtgcagaagcttccaggctgtagagccctgcttcccttct

SEQ ID NO: 412733 - DNA, 80 bp, Homo sapiens
gagttgttccgaagagcaaaccccaactcaaccgatgctactatcattcacgatggccatgaggagaagatggaaaatgg

SEQ ID NO: 412734 - DNA, 88 bp, Homo sapiens
aggccgtccagcagatggcggatgccctgcagtacctgcagaaggtctctggagacatcttcagcagatggtttcacccaaatatcac

SEQ ID NO: 412735 - DNA, 82 bp, Homo sapiens
gccagcccgtgccgcgagcgcggcctgcaggagacggccgaagccctgcagcccacgctacagccggagatgcagctcgagc

SEQ ID NO: 412736 - DNA, 100 bp, Homo sapiens
atacgttagccagtttacttagatcactactcttggaatcaaagataaatccaaatactgcatatcagaaacaacaggcaagtagttgtttatctttaat

SEQ ID NO: 412737 - DNA, 115 bp, Homo sapiens
tttctgcacaggaatatcgagagcgtcatgaacccgagctatagagaaaggagatgaggagccttcacgtaaatgggtccagtcatgcctcccagtaagaagccagaaagctcag

SEQ ID NO: 412738 - DNA, 75 bp, Homo sapiens
gtgagggtgtacaaatacccctttgaattaattatggctgataaagctgaaggttcaaacaagtggtggaaggag

SEQ ID NO: 412739 - DNA, 75 bp, Homo sapiens
cctttgcacgacgctgccaacaacgggcactacaaggtgaccaagaatatggcccaggtgaccaaagccctggac

SEQ ID NO: 412740 - DNA, 75 bp, Homo sapiens
ctcaccgagaaccgcgtcctgcagaactccaggcaccccttcctcacagccaatagcttcaccgtctcctctgtc

SEQ ID NO: 412741 - DNA, 74 bp, Homo sapiens
gtgtgattagcttcgcagtctggaaagctttaggagttcacagtgtggtgaaggcatttgtgatcctggcctcg

SEQ ID NO: 412742 - DNA, 75 bp, Homo sapiens
tcatcaaaaatgaagctctctttgacagtggtctccacccagctgttaaatcactgtgtgcccagtattctgcag

SEQ ID NO: 412743 - DNA, 98 bp, Homo sapiens
atcgagttgagtacttggatagacttatacctcagaagtggtgaaaatacagcatcagttttacaaaaagatcactatcttgattcatcttggagaac

SEQ ID NO: 412744 - DNA, 96 bp, Homo sapiens
cccaggggaccagaggaactcagccctgattgcgattctacaagggggttgctcctctctggatgagacagataccatacaccatgatgaagttcg

SEQ ID NO: 412745 - DNA, 85 bp, Homo sapiens
ggctcaagaaatttgcctcgaaaaccaagtgtgggccatgtttgaggattgccccagcattcagttctatgagtaataaatatcc

SEQ ID NO: 412746 - DNA, 83 bp, Homo sapiens
cagctggtggaggcgatagacgagtatcagatgtgaaaggaaagcaagccaggatggatatttacgacactcaaaccttgggg

SEQ ID NO: 412747 - DNA, 90 bp, Homo sapiens
cggtcatagacagcaccatacaatcagccgattccacgactcttctttgcgggagaacatacgatccgtaactacccagccacagtgcat

SEQ ID NO: 412748 - DNA, 83 bp, Homo sapiens
cgcctgtgtggcaagagtagaaggagcatcgatgcagatatctaacagtgatacgccttcaccaccacctggtttgtcaaaat

SEQ ID NO: 412749 - DNA, 75 bp, Homo sapiens
attgtcttaggaccataccatgacaaggtcaccgaggaggagcccagctccaaccacacggtcatgatccaggag

SEQ ID NO: 412750 - DNA, 74 bp, Homo sapiens
gccgcagcacgagctcaaattccgaggttaatccctatatcctgaagaagaacatgatcctcatgacaaatcat

SEQ ID NO: 412751 - DNA, 101 bp, Homo sapiens
cgctgatgaagacaaggactcacagtggctgcaagcctgattacatcaaccccagagccgtgcagctgggctcccttctcgtccgcggcctcaccactctg

SEQ ID NO: 412752 - DNA, 75 bp, Homo sapiens
gagaagatggcggtctccacaggcaacagatcccctaatttgtggctgaaagatgttctcaaggaagaaggtgtc

SEQ ID NO: 412753 - DNA, 82 bp, Homo sapiens
ttaattttagggtcctttatatagaagggagagtagggagtgcatccgccccaacccttttccccctcgtctcctgtgagaa

SEQ ID NO: 412754 - DNA, 101 bp, Homo sapiens
cactcgcgctgtacgggccgccactggacgcagaaactggcaagatgtttacctggggccgagcagactatggtcagctagggaggaagttggagacttat

SEQ ID NO: 412755 - DNA, 75 bp, Homo sapiens
tcgtgatccagaagtccagagctgaggactgcctgtttgcaggtagatttcgggcagacaacttgaacaagctga

SEQ ID NO: 412756 - DNA, 75 bp, Homo sapiens
gacgaccggtggctgtggcgacatgtcgacctgacgctctacacgacagttgatattcataaagagaaagttgca

SEQ ID NO: 412757 - DNA, 100 bp, Homo sapiens
acagccccacagaagaaaaagctccaagacacaccttcagaacccatggaaaaggacccagcagagccagaaacagggtttgccgctgtctctgctattc

SEQ ID NO: 412758 - DNA, 100 bp, Homo sapiens
cctgacagatttgtggtttgtgtcagtcagcttgcattcagtcgtgatcttttagcaagtcagaatgaagatttggttgattcttcaccacactgaaacc

SEQ ID NO: 412759 - DNA, 100 bp, Homo sapiens
gaaaaatcgagcagaaagaatgtctttcagaatatcaacacctttgagaacagaatgttaatgcttgatgggatgccggcagtcagagtcaaaacagagc

SEQ ID NO: 412760 - DNA, 100 bp, Homo sapiens
gaaggcgatcaaggccaagtatccgccagtcaataggaagtacgagtgtgagaaaggaatgtagaagctgtaagaaatgcaaaagatgagcgtgttcggg

SEQ ID NO: 412761 - DNA, 76 bp, Homo sapiens
tacctcttcttacctgatggtaatgccaaggtgcaaacagctgcacagcaagtggcagaggataaatttgtttttg

SEQ ID NO: 412762 - DNA, 90 bp, Homo sapiens
aattcacctgtggttacggactgtgtatcccaaagatattcagggcaattgaaggaacagactaaaaatcgtgtcctggaaggaaactac

SEQ ID NO: 412763 - DNA, 100 bp, Homo sapiens
atgaaaatggagagttctacctacgagtcactgggaagatggatgagaaccagtttgtggctgtgaccagcaccaatgcagccaaagtcttcaaccttta

SEQ ID NO: 412764 - DNA, 75 bp, Homo sapiens
caagtaaagatggtgatgggatattttctcctgaactgtataatgatgactgcacaagataccaaatcagaagag

SEQ ID NO: 412765 - DNA, 76 bp, Homo sapiens
cgaagcgcgagagtcagcgagcggcggcaatgccaccgtagataagttggaggacttcatcaacaacattaacagt

SEQ ID NO: 412766 - DNA, 90 bp, Homo sapiens
gcagcttcaaggtgacatcaccacctatggagtgaaggtacctgagcgcaggaaccatggtcttcattgctgcctcagcattagcggaag

SEQ ID NO: 412767 - DNA, 98 bp, Homo sapiens
aagagattcagtatcactcgctcccttgatgatcttgaggctgctgacagtgatgatgaagatttggatgacttatttgtgggacctgttgggaactc

SEQ ID NO: 412768 - DNA, 100 bp, Homo sapiens
agccagaccatgctggccggggtgcagtaccccagctccatcaacctcacgctgcacctggggggtcagctttggtgtacaactacgaaggccatctctg

SEQ ID NO: 412769 - DNA, 100 bp, Homo sapiens
aggaagttcttctttctcagagctacgttaaaatgtataacaaagctgtcaagctgctggtgcaactattatctcagccactggagcctctgcactgcca

SEQ ID NO: 412770 - DNA, 83 bp, Homo sapiens
agggcaaggaaagcagcatagagaatgagatagccgtcctgagaaagacagagcgggatgccaccagcttgtccaaagggaag

SEQ ID NO: 412771 - DNA, 96 bp, Homo sapiens
ctgaaagctgctgagtgtcctgcagcagatgtttggtcagctggctgtgtactggcagagctcctcttgggccagcccatcttccctggggacagt

SEQ ID NO: 412772 - DNA, 112 bp, Homo sapiens
cgcgtcggtgtccgcgtcgaggagccggggcagggcacgatggcggactgggctcgggatctgcagcctcctccgtggtggcatcgccgagcgtgggggcatccgcgtcggc

SEQ ID NO: 412773 - DNA, 82 bp, Homo sapiens
cagggcccagaacagacacacttagttttgttcttcgtgaacatgaaattggagagcctgacaaccccagacctgattgtat

SEQ ID NO: 412774 - DNA, 75 bp, Homo sapiens
gcagaattcacaagatccaatcccttgtccttaaaaggtgcttttgaagatgatgatatcacgcacgttgaagga

SEQ ID NO: 412775 - DNA, 98 bp, Homo sapiens
agccacggttctgggacctggaggaaagatcctagggaatgagtagcgacagtgacattgaatgtgacactgagaatgaggagcaggaagagcatacc

SEQ ID NO: 412776 - DNA, 80 bp, Homo sapiens
gcgcccgggaggaaggaacgaggcaaggagctaaagcagcgtgcgttcagccctgggggagaggaggtgggcaggaggaa

SEQ ID NO: 412777 - DNA, 122 bp, Homo sapiens
cccagatggctcctggtttgcttggtctcaaggacactgcatcgtcaaactgatcccctggccgttggaggagcagtttccagggaccttgacccagcccctctcagcagacgcttcatgat

SEQ ID NO: 412778 - DNA, 75 bp, Homo sapiens
ccgtctcgtgggcgccgcagcctcccggggccctacggccgcccgccaccaggtctcacgctgttgcatgtgtca

SEQ ID NO: 412779 - DNA, 74 bp, Homo sapiens
tgtgaacctggcccgggacctgcagtgccccaagaagatcttgatcatggatgtgattgaggtggtgcccgagc

SEQ ID NO: 412780 - DNA, 101 bp, Homo sapiens
atccaccggcactgccaagatcaggcctggtactgtggcgctccgtgaaattagacgttatcagaagtccactgaacttctgattcgcaaacttcccttcc

SEQ ID NO: 412781 - DNA, 75 bp, Homo sapiens
cggagagcgagagcgcgaaggaaatctggccgccgccgccgcgagcgctcccgtgacaccacagccaaagcccta

SEQ ID NO: 412782 - DNA, 75 bp, Homo sapiens
aggcactcagctaaaagtggaactcatgtaaacaggaacatcgataagtagtgtaaaaacttgcacaatgaaatc

SEQ ID NO: 412783 - DNA, 88 bp, Homo sapiens
cagtctgcattcactgaatgccttcttgctgccaattaaaactgtaggtgtgcaggaaaattgcctaagaattatgacccaaaagtta

SEQ ID NO: 412784 - DNA, 100 bp, Homo sapiens
tattgtggaagaagcatccattaaggccaagcaatggggctggacacaaggtcggtggcccaaaaagagtgctgaatttttgctgcacatgcttaaaaac

SEQ ID NO: 412785 - DNA, 100 bp, Homo sapiens
aatacagtgacagcacaggtcacagtaaggccaaaaatgtgcatactcacagagttagagagagggatggtggtatttgtaggcaaaataccaagggatt

SEQ ID NO: 412786 - DNA, 90 bp, Homo sapiens
acgtctgcggaagtgcagctgcctcagttcttagcgcagcaggtagttccaatttgccagcagaatgagtacagaaagagactcagaaac

SEQ ID NO: 412787 - DNA, 90 bp, Homo sapiens
ctcagaacagactgtcacagtggaggaagaatcattgaaaaatggctctgctacaggtggtggaaataaagtttattcttttcagaatag

SEQ ID NO: 412788 - DNA, 75 bp, Homo sapiens
acgagagaaggaaattagtgatgatgaggcgtaaaactgaggaagaacgtcagaagaaagaagatgagagagcac

SEQ ID NO: 412789 - DNA, 75 bp, Homo sapiens
cctgttggaggaactggcccggaaacaggaggaccaagagtgagccatggagctacgtgtggggaacaagtaccg

SEQ ID NO: 412790 - DNA, 102 bp, Homo sapiens
ttaatttttctaaagagtcttgttatttcttctttgagaaaaacctgaaagatgtctcacgtcatcacgtagacataaccaagaaacttcacccaaatcaag

SEQ ID NO: 412791 - DNA, 75 bp, Homo sapiens
tgctgtctatggatctgctctaaaccttatagcctgcttatgggggaaggtggtctgtttttctggggggccacc

SEQ ID NO: 412792 - DNA, 100 bp, Homo sapiens
ctggttagtgtgctctgagggagggtccgagccagccgctgttttgccggaggagcccctcaggccgtgggccatgcacagacacagctcatgtctcatt

SEQ ID NO: 412793 - DNA, 100 bp, Homo sapiens
agaccttctgctaccagaaaaccttctccaccagaatccagctcacgctggagacggtggctcagggagtaaaggaaggccagttgagcaaacagaagtg

SEQ ID NO: 412794 - DNA, 98 bp, Homo sapiens
ctacgagctggctttaatcctgaaagccatgcagcggggtgatttcacctggaacagcatgtcaggccgcagtgtacggctgaggtcagtccccatcc

SEQ ID NO: 412795 - DNA, 75 bp, Homo sapiens
cctcggcccgcagtgagcagctggaggaactgttcagtcagaacacagatatgtagaactcttcttgaattctac

SEQ ID NO: 412796 - DNA, 51 bp, Homo sapiens
gcgctgccgccgctctgaggagttaaagtcaattggtgtcaacactggttt

SEQ ID NO: 412797 - DNA, 75 bp, Homo sapiens
cgggaaaagtttcttatcacacgtcggagacatgacagtgcacagctagttcttgtgcaggtaacagagctggaa

SEQ ID NO: 412798 - DNA, 100 bp, Homo sapiens
ccaggcttccttgtacccacaggtgaaaaatattacaccaccaccttcactgtcagatccacttaaagagctttttcgacaacaggaagttgtaaggatg

SEQ ID NO: 412799 - DNA, 82 bp, Homo sapiens
gcggcggcgccgggtggtggttaaaccatgttaaggaggattttacagaggtttttggctttcacccccaaccagtgaccaa

SEQ ID NO: 412800 - DNA, 97 bp, Homo sapiens
ttcgttttcaggagcatctccagtattctaccttgtaaatactgttatttgtatatactgtaaatgatgacatcggtgggcactaaccgagcccggg

SEQ ID NO: 412801 - DNA, 50 bp, Homo sapiens
gaaatctcaaagccatgtctcaggaaagatgagtccaaggagcccatcgt

SEQ ID NO: 412802 - DNA, 83 bp, Homo sapiens
ctttctcgagaagcaggtggaaacatgagcattcagtttcttggtacagtggagtccaaaactacttacctggaagaccttcc

SEQ ID NO: 412803 - DNA, 100 bp, Homo sapiens
agctgggcctgacagagaaggctcactcaaggatcagttggctttagcaattgttaccccaacaagccgaagcttactaaggcagccagatatttcctgc

SEQ ID NO: 412804 - DNA, 75 bp, Homo sapiens
cgggaggcacagacaccaaaagcttcatcttggtgagaaaagaaatgaaggggatactcagggcagagttctgaa

SEQ ID NO: 412805 - DNA, 100 bp, Homo sapiens
ccactttccccggagctgggccgcgaacacctcactattgatggtgtagcgctttaggggaagcttattgcaggagtgaccaggacactacctcctagaa

SEQ ID NO: 412806 - DNA, 51 bp, Homo sapiens
ttcaccagttgaaaaattggaggtcacaaggcacttaaagcattgttgagg

SEQ ID NO: 412807 - DNA, 105 bp, Homo sapiens
ggattgcatccacattccagagagcatcatcaagtgctgcgacaagagactttggacaaaaattgacttgagtaggtgtaaggccattgtgccccaggccctcag

SEQ ID NO: 412808 - DNA, 75 bp, Homo sapiens
attctctcccaggccacaagacatttcctgctcggaaccttgtttactaattgagtggacgcttctcttgtgagc

SEQ ID NO: 412809 - DNA, 98 bp, Homo sapiens
agtagaaaaagttcttgggacaaacttcatttgtgaagctgtggtctaccaatctagacaactcagtggcaagcattgaggcaaaggctaatgtgtgc

SEQ ID NO: 412810 - DNA, 98 bp, Homo sapiens
ccactccatgttggccatcagtggtcacctagacagcgacgatgataggattttggcattagagaagctcggtgctgtcttcaatcaagtagccttcc

SEQ ID NO: 412811 - DNA, 87 bp, Homo sapiens
catctccaacaccgcctcctacctgaggctctgggcgcttagcctggctcacgcacgtaattttcggatgattggggatgacttagt

SEQ ID NO: 412812 - DNA, 75 bp, Homo sapiens
caggccccatcccttcccagaaagaagaggaaatgactgagtcccaggttacattgattacccacctagtacaac

SEQ ID NO: 412813 - DNA, 90 bp, Homo sapiens
tgattgcaaccacaggaaaaatgaacaagagaactgggcaacccatgatccacatctacctggacaaggaaacaggaaagcccaaaggcg

SEQ ID NO: 412814 - DNA, 97 bp, Homo sapiens
ctggccgagagccgcggctccgtgtttctggaaagtgacagcagctttctgagaccaagatcttcactgcctctaatgtgtcttcagtgcctctgcc

SEQ ID NO: 412815 - DNA, 90 bp, Homo sapiens
gtccggaacaacaactccagccgatttatgactcaaggagaactacatctagtgctgtaacggaaactggccctcctgcaatgccaaggt

SEQ ID NO: 412816 - DNA, 88 bp, Homo sapiens
gttcgagactgtagtagaattggcattccttacagctcccaagaacatacaacctcctcttcagtgtcaaaaaagccacggttagacc

SEQ ID NO: 412817 - DNA, 101 bp, Homo sapiens
gttttgtggaattgggagcctaattgatttcattcttatttcaatgcaggtggagcatgaccccgcccatggtgaacgcctactactcgcccaccaagaat

SEQ ID NO: 412818 - DNA, 88 bp, Homo sapiens
aaatgaagttaagataagaagtaatctggaatcagaaagcactacgctaagaccttaaaggctttgatccaggagagaaatactttca

SEQ ID NO: 412819 - DNA, 50 bp, Homo sapiens
aacagcctatgtgggcttccacggagataaagccaccaatccttccaacc

SEQ ID NO: 412820 - DNA, 50 bp, Homo sapiens
gtggcaaacctttcttgagctcagttcccagtgacctgacagcagaggag

SEQ ID NO: 412821 - DNA, 98 bp, Homo sapiens
tcctacctattaaaaggaccatacgagtcctagatgtcaataaccagtccttcagagaacaagagtgttgttacagatcttataacagtcggtttaaa

SEQ ID NO: 412822 - DNA, 85 bp, Homo sapiens
agagtctgggggagctcatcggcactctgaacgcggccaaggtgccggccgacaccggtttggaaggtttgcagttgctgctctt

SEQ ID NO: 412823 - DNA, 90 bp, Homo sapiens
acgacctcggtcgagcatgttcaccagggcccaggacaaggaagatggggagccaaagaccaagcatctcagagaagaggaggaagaagg

SEQ ID NO: 412824 - DNA, 91 bp, Homo sapiens
tcgtgggcgagctgggcgacggcgccttcggcaaggtttacaagacaatgcagatcttcgtgaagactctgactggtaagaccatcaccct

SEQ ID NO: 412825 - DNA, 132 bp, Homo sapiens
caggattctggaaccgtggagacaccgagaaaccatgagtgtaaggttaccccagagtatagacagatcatgacaagatgtttaagatgagtgaaaagatattactcctgtgtgttggagaggctggagaca

SEQ ID NO: 412826 - DNA, 82 bp, Homo sapiens
ccctgaccattcgggagagcattctcatcagcaacggctcaaggtgtgccacggaccacaatgtggacaacaccacagagat

SEQ ID NO: 412827 - DNA, 100 bp, Homo sapiens
gctcaaaggatttgagaagtatcgagcacagcttgataccaaaagagcgattggttacatgggaacaagtgcctttgtccgaaaaatctatactaatgtg

SEQ ID NO: 412828 - DNA, 100 bp, Homo sapiens
ttcgtgctgctcgacgtgctgtgcttactggtcgtgagaaagatcagtctaaagaaaaggagaagaaagtgaaaaaaacaattccttcctgggctaccct

SEQ ID NO: 412829 - DNA, 75 bp, Homo sapiens
aggggacggagccggatcaggagccgccgccgccatatcagggggatatgagactttctactcggaatatcctga

SEQ ID NO: 412830 - DNA, 99 bp, Homo sapiens
tttttctcttccttcgctaacgcctcccggctctcgtcagcctcccgccggccgtctccttaacaccgaacaccccatccgggtgacctgcataggttc

SEQ ID NO: 412831 - DNA, 80 bp, Homo sapiens
acttattcttcaactctacattcttctggagcatggacaagcgaatttcagtcagtttgatattcactgatggactccaa

SEQ ID NO: 412832 - DNA, 100 bp, Homo sapiens
gtgggagtcgaagcgagggtctgaagttcacgactactagaaggggaggggagtggaaaggctctcagtgaaaaaggtcaaggtgaagatgttcttaaag

SEQ ID NO: 412833 - DNA, 100 bp, Homo sapiens
gttagggcggcggatggaggtcagcggtggtgctcgctgcgtgccacatcatctcacagttcaaccaaggcttctacgactgtgtcatagcaactgatgc

SEQ ID NO: 412834 - DNA, 100 bp, Homo sapiens
tgatgatttagttgattctctgaagattgagaggatccagaatccagatctctggaatagctaccaggcaaagaaaaaaactatggatgccaagaatggc

SEQ ID NO: 412835 - DNA, 100 bp, Homo sapiens
aaatgtggaacctatggaaaaggaggaagaacgtgcaaaacgtgaggagctagagcgaatactggaagagaataaccgaaaaattgcagaagcacaagcc

SEQ ID NO: 412836 - DNA, 80 bp, Homo sapiens
ttgtcagcagttagagagatatatgggccacatgcagtttctctcaggtcgaatgagtgatttgagtgtaattggtcatc

SEQ ID NO: 412837 - DNA, 75 bp, Homo sapiens
caagaccattcttcaagtttgcaaaggaggcaagatccaaatggagatggagactgtttcagaatcaggaacaca

SEQ ID NO: 412838 - DNA, 83 bp, Homo sapiens
ccacattgagagcaaaatctacaagatgatgcagggaggaggattttttatcaagcagaaatgcatcgaacaacgagaatcaa

SEQ ID NO: 412839 - DNA, 100 bp, Homo sapiens
cgggaggtgaatttccatgtcaacatagtcctggggctgataggatgtcttcatttggtgattttgttgcattgtccgatgtttgtgatgtaccaactgc

SEQ ID NO: 412840 - DNA, 50 bp, Homo sapiens
tctcgctaacaactgcccagctttgagggtacactctcctacaaaaccag

SEQ ID NO: 412841 - DNA, 100 bp, Homo sapiens
cctgctgatgtcagtgttatatcctccaggaatactggccagggtgtccgcaatgttgccagtgtctgtctgcagattggctacccaactgttgcatcag

SEQ ID NO: 412842 - DNA, 100 bp, Homo sapiens
ccgggtcttccagaaggctgtagaccagagtatcgagaaggaatccaggtaaaaatggcttgtctaatagctgcattttgttagataaatgtccacctcc

SEQ ID NO: 412843 - DNA, 100 bp, Homo sapiens
tacgcccaccagcacggcatccctgacgagacctgcaacaactaccaggccaaggaccaggggcacactacaaagagtatcttgtgagcctcatcaatgc

SEQ ID NO: 412844 - DNA, 83 bp, Homo sapiens
caccggagaattcctggggcgcaccgccaagagctggggcttgggcactgtttaaaggaaagttccgagaaggcatcgacaag

SEQ ID NO: 412845 - DNA, 100 bp, Homo sapiens
tgcctgtgccaccagaaggaagtgaggccaatgaagaactgcggcagaaatttgagtttttcagaagaagtgaagtcaagatgaagaaccatttgctttt

SEQ ID NO: 412846 - DNA, 95 bp, Homo sapiens
aggcctcccggctcgacaagttcaagcagctgcttgccggccccaacacggaccttgacaatgcagatcttcgtgaagactctgactggtaagac

SEQ ID NO: 412847 - DNA, 51 bp, Homo sapiens
gtgaactctctgaggaaaaacgatcaagaaatgtggtggttttgtagcttg

SEQ ID NO: 412848 - DNA, 100 bp, Homo sapiens
gaccagcccttgcctgcccgacggctctcctctgactgcagcgtcactcaggagtttgggctttgcaaaactgagaacaaagccaagtcgggcaaacaga

SEQ ID NO: 412849 - DNA, 75 bp, Homo sapiens
aaactgcatctgctggaaaaagttgaatactgagtctgtatcaggttaacctcaccctacagatgaagataatag

SEQ ID NO: 412850 - DNA, 100 bp, Homo sapiens
aatggtcgaaaaaatggtgaaagaggacaagatagaagctgaggctgaaatgatgaggagtctgatgaggaagctgtgaagaaaaccaacaaatgtgtac

SEQ ID NO: 412851 - DNA, 97 bp, Homo sapiens
ctgagcgacccagcccgcgagcgagggcctcggcttcacaggatggggctgccagtgtcctgggcccctcctgccctctgggttctagggtgctgcg

SEQ ID NO: 412852 - DNA, 100 bp, Homo sapiens
cagggacgtgatgttggagaactacaggaacctgctttctctcgatgaggataacatccctccagaagatggtttatcaggtagaagatgtgtgtgaaga

SEQ ID NO: 412853 - DNA, 90 bp, Homo sapiens
tttgtccctttgcctcatcccaggttgccttggaaaatgccaacgccgtgtctgaagaaggacagaataacgggctcccagattcacaag

SEQ ID NO: 412854 - DNA, 100 bp, Homo sapiens
ctctggtgatctggactgactgtgatagagaaggcgaaaacatcgggtttgagattatccacgtgtgtaaggctgatccaggatgagaagactgataaaa

SEQ ID NO: 412855 - DNA, 83 bp, Homo sapiens
tcatcctggttctggaatcctcagttcaagatcatgtatcagttggaggacttggagacagcttctatgagtatttgctgaag

SEQ ID NO: 412856 - DNA, 100 bp, Homo sapiens
ctggctgactggatccacagcagtgggggctggccaccttttgtggtgacattggatgaggtagagctgatccactttgagcgggtccagtttcacctga

SEQ ID NO: 412857 - DNA, 50 bp, Homo sapiens
gcaggaatttggagagtactttacagcttgcgcgatctctggcctcttca

SEQ ID NO: 412858 - DNA, 73 bp, Homo sapiens
aaatgctgtttgtattccagagactagccaggtgactttatacacactttgggagatgcacatatttacctga

SEQ ID NO: 412859 - DNA, 74 bp, Homo sapiens
gagaccgtgaccgagagcgtgaccgagagcgcgaatatcgtcatcgttagaagcaccggaagcagtactcagaa

SEQ ID NO: 412860 - DNA, 82 bp, Homo sapiens
ttccaatgagacagggcacaccaaactccatctggtaaggggcctggataccaagaagtgactgctcatctaatccataaag

SEQ ID NO: 412861 - DNA, 82 bp, Homo sapiens
gcaagatgtggcagaagaacaagaagttgagaccgagaatgtggaaacagtacgaggatgtcgtccaggaaagattgtgcag

SEQ ID NO: 412862 - DNA, 75 bp, Homo sapiens
gtactgcaaggaacaaaatgtttgtaaattctccttttaccaaggctctgccgacttccagttctggaacaagat

SEQ ID NO: 412863 - DNA, 75 bp, Homo sapiens
tgggactggttgaccaactggtggaacccctgggtttccactgtatccaaaaggaggggagaagttgcagtttga

SEQ ID NO: 412864 - DNA, 83 bp, Homo sapiens
catgtggatacctacggagcacgagaaatacggcgtggattttgcaagaacgaggctcaaggatgtgagggacacagtattga

SEQ ID NO: 412865 - DNA, 80 bp, Homo sapiens
agttctggttctgaaagacatctcacatatattcaaaagatcttcaggatggaggtcgagcctcttaggcagagtttaac

SEQ ID NO: 412866 - DNA, 77 bp, Homo sapiens
cggcaagtaacatgactaaaaagaagcgggagaatctgggcgtcgctctagagagtctcgctctgttgtccaggctg

SEQ ID NO: 412867 - DNA, 75 bp, Homo sapiens
cgagagtgaacgattcaacccgggggagctcaggtcagagtttaccagcagggattcacagagctccgacaagca

SEQ ID NO: 412868 - DNA, 75 bp, Homo sapiens
ggcttctgagacggcggcagcagcggcattcagatgcctgaggaagtgcaccatggagaggaggaggtggagact

SEQ ID NO: 412869 - DNA, 100 bp, Homo sapiens
ctctcaggcaccagtgccattaacgagctggcgaagatgggcgacccggatctcctggaagtgttggcggaggaagacattagatcagcaacagttcttc

SEQ ID NO: 412870 - DNA, 50 bp, Homo sapiens
aggaactgcaggagcaagtggcgctgatttataagattggccagggctac

SEQ ID NO: 412871 - DNA, 75 bp, Homo sapiens
ctggctttggagcctgagctcgaggcccggctggcgcacctgggcgtgcaggaggataagatcaatgccctcatt

SEQ ID NO: 412872 - DNA, 82 bp, Homo sapiens
ggaagactatgagacacacaaatctaaaaggcgcgagagaatggatgatagtagtgtttaactatagatcaacacatcatct

SEQ ID NO: 412873 - DNA, 82 bp, Homo sapiens
tgcgcgaccgggagctggacctccgggtttgcctgagaatacagatcaacccacagaacaaagcggatttccaaggcatctc

SEQ ID NO: 412874 - DNA, 80 bp, Homo sapiens
ccaggtgtaagcgcagaaagcaggcgaacccgcggcgcaataacggtttttggattcaaagcataaaaaccattacaaga

SEQ ID NO: 412875 - DNA, 75 bp, Homo sapiens
ttgtctgcccctattgtaagtgcagatggaacacaacagggttacagagatgtacttccagctgaaagaaatgaa

SEQ ID NO: 412876 - DNA, 100 bp, Homo sapiens
ccccacctcaacaaccagcagctaatcacattttctcacaggcagtagaagatggtgaaagaaacaacttactacgatgttttgggggtcaaacccaatg

SEQ ID NO: 412877 - DNA, 90 bp, Homo sapiens
ctttgggttcgtgagatttcatgaagatggcgccaggacgaaggccctactgggcaaggttatgaatactgatggcactgggagacgagt

SEQ ID NO: 412878 - DNA, 131 bp, Homo sapiens
gacaacttctggcagaaacagaggactaattttggcagttctaaatttgaatttgaggtgaatgaaaactttgccattgatttgatagcagagcagcccgtgagcgaggtggagactcgggtgatagcgtg

SEQ ID NO: 412879 - DNA, 90 bp, Homo sapiens
ggagcggctccgcgccgcagtccccaggatacccagagttatattgacgaatgtcctgggaacggagttaggaagaaaatacataaggac

SEQ ID NO: 412880 - DNA, 75 bp, Homo sapiens
ggtccagcggtcacctacccccagcaccacctccagcccctgcgcctcgctgaactagatgcagagcacgcccag

SEQ ID NO: 412881 - DNA, 75 bp, Homo sapiens
aaggattccaagtaactcttatttgaattgccattgccttcagaaagtgttgatattattatttctgacattcca

SEQ ID NO: 412882 - DNA, 100 bp, Homo sapiens
cttgaagaaagacagatcctgtgtcacccggcaactcagaaacatcaggtccaagggacctgatgcccagaaccctggacgggcagatcaccatggagaa

SEQ ID NO: 412883 - DNA, 83 bp, Homo sapiens
cggcgcggtcgcagccctcagcccacttaggataatggcgacagctgaggaaatcatgaccaccccaggaaaagagaactttc

SEQ ID NO: 412884 - DNA, 100 bp, Homo sapiens
cggttcagcaagtatgttctcagaagctatacactcattatctgatacttgtaatcaggataaaagaatcagagtgtctcaacccttgacaagaggacca

SEQ ID NO: 412885 - DNA, 82 bp, Homo sapiens
gggatgtggacgaaggggccgacctcctagttgattatggaagattcccacaagagtaccacgtcagagacagcacctcaac

SEQ ID NO: 412886 - DNA, 98 bp, Homo sapiens
cagatgctctctggtggggcacaatacttggtgcttgaaaaactgaagaaggaagacgctgaccgaattcatatattcagttcttttttctataaacg

SEQ ID NO: 412887 - DNA, 75 bp, Homo sapiens
tgggagcctagaatgcatcagtgcccttgtggcgaatggggctcacgtcgaccggccaagctcgctgaggccttc

SEQ ID NO: 412888 - DNA, 75 bp, Homo sapiens
gtaaaaattttcagaagcacatgtattataacagcgggacgaccctgggacagtctccactggggcagatccagc

SEQ ID NO: 412889 - DNA, 101 bp, Homo sapiens
ggatcacagtttgtgatggaaggagtgaagaacctggttttgaaacagcaaggaactctaatgatccaggacaaagaagttaccctggagtatgtatcaag

SEQ ID NO: 412890 - DNA, 100 bp, Homo sapiens
attcttcaactctacattcttctggagcatggacaagcgaatttcagtcagtgtatcagcatagtgttgagtgggcagcagagctgatgcgtagacaggg

SEQ ID NO: 412891 - DNA, 83 bp, Homo sapiens
cgccaaggagatcgtctctctcatcgaggcccaaaccgccaaggtgctgcgacaagagactttggacaaaaattgacttgagt

SEQ ID NO: 412892 - DNA, 100 bp, Homo sapiens
gctggggaaggcgattggcatcgatctctccatcccttccgaggcccgacttcgggccggtgcataaacttctcccgagttccatctcagtaaaagggaa

SEQ ID NO: 412893 - DNA, 100 bp, Homo sapiens
tggtggaatatgccaaggaaaaactggagagcttcatcaaaaatagtgatagctttgataagtccagctcttctatgaactaactgatatcatgaataag

SEQ ID NO: 412894 - DNA, 99 bp, Homo sapiens
ttttctcctatttcagcagttggccacaacttcattgctgggaaaagacatgggatgtagagctggaaagatctgcagaatcctgggctgaaagttgct

SEQ ID NO: 412895 - DNA, 100 bp, Homo sapiens
caatgtaattgattatattgatacaatatggaaaatactcaagccaggtggaatttggataaatctaggtgttcctccaagaaaagctggttatattgaa

SEQ ID NO: 412896 - DNA, 75 bp, Homo sapiens
tctgagggagggtccgagccagccgctgttttgccggaggagcccctcaggccaataactgaagtgaagtgatgg

SEQ ID NO: 412897 - DNA, 74 bp, Homo sapiens
tcaacaagactttcatattctctgacctggactacatgggatgatatcatcaagttgaatcgaaaggaagggaa

SEQ ID NO: 412898 - DNA, 50 bp, Homo sapiens
cccatctgtaacgaggtgttgagacgagttcaaatctgaacatcaatgat

SEQ ID NO: 412899 - DNA, 80 bp, Homo sapiens
cgacagcacagacagaatccctgctaccaatatgaggccccaggattcctggcgaggtcctcctccccttttccagcagc

SEQ ID NO: 412900 - DNA, 51 bp, Homo sapiens
catccccgtgtggctgaatcatgcaatggtttctttacctccagaaagaag

SEQ ID NO: 412901 - DNA, 75 bp, Homo sapiens
ggactccaaaatcgttatagctgtcataaagctacagcctccgcttggcgtcccgatgctctccaccagcggccc

SEQ ID NO: 412902 - DNA, 88 bp, Homo sapiens
ggagagtaggtgctacggctgcgctgtcaagttcaccctcttcaagaaggaggcgctttgctctgtccaccaagattcctgacaccaa

SEQ ID NO: 412903 - DNA, 100 bp, Homo sapiens
ggaaaagccaggattcggtgctggaccctgcagagcgtgctgtggtcagagtcgctggaacctagaaagattgtacaatgaatggtgattctcgtgctgc

SEQ ID NO: 412904 - DNA, 50 bp, Homo sapiens
gggaccccttagaagcctagaaatggattgccccctgtgggtcactttct

SEQ ID NO: 412905 - DNA, 82 bp, Homo sapiens
gctcggcccgcgggggagccccgggagccgcacgtgacaaccatgagtggaaaaaactaattatggttcagcactggcctga

SEQ ID NO: 412906 - DNA, 75 bp, Homo sapiens
tagagaatgagatagccgtcctgagaaacgtcttcctccacttgatgaaggtggacccagactccacctggttcc

SEQ ID NO: 412907 - DNA, 100 bp, Homo sapiens
ggtgatgaaggggataacttctatgtgattgatcaaggagagacggatcaatgtaacacacacccgtttgacaatgaggtaaaagataaggaatacaagc

SEQ ID NO: 412908 - DNA, 80 bp, Homo sapiens
tgccgctgccgctgccgcacctccgtagctgactcggtgaccaagaatatggcccaggtgaccaaagccctggacaaggc

SEQ ID NO: 412909 - DNA, 126 bp, Homo sapiens
cagccagtcagcttgccgccggcggccaagcagccaaccatgctcaacttcggtgcctctctccagcagactgcgacaatgcagatcttcgtgaagactctgactggtaagaccatcaccctcgag

SEQ ID NO: 412910 - DNA, 82 bp, Homo sapiens
gggctatctggtatctgtagatggctacatgaacatgcagaacatcatcaagaaggtgatcgggcagaagtttgtgtacaag

SEQ ID NO: 412911 - DNA, 74 bp, Homo sapiens
aaaaggctccttcagtgagcaaggcatcaacgagtttctcaggctccactttgaggctctgatgaacattccag

SEQ ID NO: 412912 - DNA, 100 bp, Homo sapiens
gctggaactgggggacagtgaaatttggtgctttgtgtccctggtgatgttggaacattaatgatggaacatggccaaacttcagtcatgatcctgaagc

SEQ ID NO: 412913 - DNA, 82 bp, Homo sapiens
ctgccattgtcaaagagaagggaaccgtatacttcaaggttttaaaatcaaagatgggaaaatcggagaaaattgcccttcc

SEQ ID NO: 412914 - DNA, 82 bp, Homo sapiens
gtaacgttgtctgtaatcgtgtctccagtagtagctgcagtgactgtaggcattggaggtgatccttttaatggaacagatt

SEQ ID NO: 412915 - DNA, 100 bp, Homo sapiens
cgacatggctgagatcaccaatatccgacctagctttgacaatgcagatcttcgtgaagactctgactggtaagaccatcaccctcgaggttgagcccag

SEQ ID NO: 412916 - DNA, 74 bp, Homo sapiens
tttatagaagtgaagtgattaagaattccttggctcctgcttacattcgggagtgtgcgagattgcactatttg

SEQ ID NO: 412917 - DNA, 101 bp, Homo sapiens
caatgagaccacagatctctcctttttagataaataccagctgcatatctatgtgagactgaattttcctcttagacttcagctaaaactgtgtattgcat

SEQ ID NO: 412918 - DNA, 99 bp, Homo sapiens
ctaccaaaaagcattagatacttacaaagatactcacagaaaatttccagaaaatgtcgaattgatgcagccaacacgaacggttgtcatgtgtaacac

SEQ ID NO: 412919 - DNA, 139 bp, Homo sapiens
tataccaggtctcctcaaaagagcatatgcagcctttcaaggaaaacatggaacaatttattattcaagctgtgagtacccaggaagctgcaccgtgtggcctggagctgtctatctgtccttccagccacctgtctgt

SEQ ID NO: 412920 - DNA, 75 bp, Homo sapiens
ctcttctatgctgtgttcagtcggagccagtaaagcacaagaggtggaaacatacagaagaagcaaggaaattac

SEQ ID NO: 412921 - DNA, 100 bp, Homo sapiens
gtatcatgagagatatagcccacttagaaatcacagtaaccaaggagcagtgaacagcagctactacagtagtggaagccgtgcatctatgggcgtgaac

SEQ ID NO: 412922 - DNA, 100 bp, Homo sapiens
aagtgatgacattgggggattatggaagtttactggcttccgttacaagatgaggtctgtgtatgctcacttccccatcaacgttgttatccaggagaat

SEQ ID NO: 412923 - DNA, 51 bp, Homo sapiens
gaagagagatatgccaccagcatttattaattttaatcgcttggatctacc

SEQ ID NO: 412924 - DNA, 75 bp, Homo sapiens
gcctgcgaccccagtcggtgctccggggaggtcacctgacgaggaggtgaccattgtgaggtagatattttgttc

SEQ ID NO: 412925 - DNA, 100 bp, Homo sapiens
gggcctggaaggggaagaattcgggaaaagcaacgtggggcattccagcgagcccacagcctcggtgccccccgagtcggacgtgtaccggatgctccac

SEQ ID NO: 412926 - DNA, 100 bp, Homo sapiens
gaaatatggacagacttcttagacttggaggaggtatgcctggactgggccagggctctctaaatacgtacagattctgcgataatgtgtggacttttgt

SEQ ID NO: 412927 - DNA, 100 bp, Homo sapiens
gctgaagctggatgcactggagatagcatgtgaggtccgggagatccttgaggaatcagagatcattgatttcttcctgggggcctctctcaaggatgag

SEQ ID NO: 412928 - DNA, 100 bp, Homo sapiens
ggagcactggggcctggaccagcctcttctgaaacactggggccccttcacagatgtagtcactacaaatcttaaattgcgaaatccatcggatagaaaa

SEQ ID NO: 412929 - DNA, 98 bp, Homo sapiens
gaacaggacctgaaagagtattttagtacctttggagaagttcttatggtgcagttgaccactgaaaaacacacatactatctgactgcagattctcc

SEQ ID NO: 412930 - DNA, 50 bp, Homo sapiens
ctgaagcccgagtttgataagcagacatgttggtttgctgcgtattaaag

SEQ ID NO: 412931 - DNA, 100 bp, Homo sapiens
tccttacaggagacccctaattgaccaggttgcccacattcccaaatcagatgctttgtactttgatgactgcatgcagcttttggcgcagacattcccg

SEQ ID NO: 412932 - DNA, 75 bp, Homo sapiens
aggaggagattctgaagataaggagccagagactgctgctactttgaaacgtacgatagaggccctgatggacag

SEQ ID NO: 412933 - DNA, 74 bp, Homo sapiens
gatgactctcgtgaacatagctttaataggatctcacattcttgaaggtggcattgaagagcactaagatcgga

SEQ ID NO: 412934 - DNA, 101 bp, Homo sapiens
gggggcgctggcgggcgttggcgtaggagggccgttgctccagggagaactgcaaatatcttcatccacccccacatttaaaaacgcagttggagataaat

SEQ ID NO: 412935 - DNA, 100 bp, Homo sapiens
agggaatacaaaatggatttgtatgtgttgagactggcagaagatggaccagcaataaggaatgggaggatgagggaggccagatgctccagtgcctgat

SEQ ID NO: 412936 - DNA, 100 bp, Homo sapiens
ccgctccgcagccccgggcacggcggaggcagcggagccctgggccatcgctaagaaacctttccagcttggacctacgtcatatcactgaactggataa

SEQ ID NO: 412937 - DNA, 130 bp, Homo sapiens
tattattgctactattgtgtgtttttctagttaagtcccaaggtgtcaacgacaatgaggagggggaatcctagcaggacacagccttggatcaggacagagacttgggggccatcctgcccctccaacc

SEQ ID NO: 412938 - DNA, 80 bp, Homo sapiens
cgtgcacgagaccggctacttctcggcgctgccgtctctggaggagtactggcaacagtgttctaagaacggaagcatct

SEQ ID NO: 412939 - DNA, 97 bp, Homo sapiens
cagcgccccgcagggcgatggacggccgaaccccgcgcccgcaggacgccccagccaggaggaatgccagctcctgagcaggcctcattggtggagg

SEQ ID NO: 412940 - DNA, 50 bp, Homo sapiens
ggaaatgtgtcatcgaaagccaggtcaaaatgcagatcttcgtgaaaacc

SEQ ID NO: 412941 - DNA, 80 bp, Homo sapiens
cgacgtggcgcgctggttcccgggccacatggccaaggatgccatggacaatattaccaggcagaaccaattctacgata

SEQ ID NO: 412942 - DNA, 100 bp, Homo sapiens
gtctttcgggccgctttccaggaagcagcaggatgcgccgctccactgtcggtagcaacaagcccagctgcagctccagcaggtggcgctgcagcagcag

SEQ ID NO: 412943 - DNA, 98 bp, Homo sapiens
ctgttccccggggagaatgaggtggagcagctggcctgcatcatggagccttctcttggagtcaagaagcctaccaaagccctgctctttgtactctt

SEQ ID NO: 412944 - DNA, 51 bp, Homo sapiens
gaggagaagctgcaggagaaaggtaaatattgcagattttcaagagaatca

SEQ ID NO: 412945 - DNA, 51 bp, Homo sapiens
gtactccagggaaacctcccagggcactgtttgaagaagcaaacatggtag

SEQ ID NO: 412946 - DNA, 100 bp, Homo sapiens
gccatacccaataaccaggtgcttggcaaaatcgagcgggccattggtccggcctctttggcctacccccgttggctccgctgccccaggtcgatgagtc

SEQ ID NO: 412947 - DNA, 88 bp, Homo sapiens
gggtccgagcggatggcgactgcagccagcccggactttccttatcccagttgattgtgcagaatacactgcctgtcgcttgtcttct

SEQ ID NO: 412948 - DNA, 91 bp, Homo sapiens
caaacgttctgtactgtccaagtcagttcctgggtacaaggtgaccaagaatatggcccaggtgaccaaagccctggacaaggccctgagc

SEQ ID NO: 412949 - DNA, 100 bp, Homo sapiens
acgcagtacatcgcaggggccaactgtgcccaccagctccccatcgcagaggccatgctgacctacaagcagaagagaatgaagactattctcagcaatc

SEQ ID NO: 412950 - DNA, 75 bp, Homo sapiens
gtgcttacctgagattcgatatattgcaggttctggctccttggcagcaatggctgtatttgaagataagtttag

SEQ ID NO: 412951 - DNA, 100 bp, Homo sapiens
aacagaatcaacccagaacggagagctccctcctagaaaaggaagaagaatttggtgttgatgattcttattctgaacaaggagcacaagacagtccgac

SEQ ID NO: 412952 - DNA, 113 bp, Homo sapiens
cgcagggcctgcagcgggagctggacggcgagcgcgagcggcgcgagaaaaacgggctcatgtcggggctgatgcagatgctgctgctgaaggtgtctgcacacatcaccgag

SEQ ID NO: 412953 - DNA, 87 bp, Homo sapiens
gcgaagctggccaaagcctgcccagacggctcacctgtgcgggatggaacaaaaggatcaaccaatgggaggctgggagatgatcag

SEQ ID NO: 412954 - DNA, 100 bp, Homo sapiens
ctgaagtcaaagtcaaaggaattgatcctgtgataaatcagattattgataaactgaagcatgttgttcagttgaaggagaagagccaggcgtgcggagg

SEQ ID NO: 412955 - DNA, 100 bp, Homo sapiens
gtcaattccagggagataactttcgtatcacaaaagcagatgctgctgaattctggagaaagttttttggagacaagcataatcaccagcaacacccggg

SEQ ID NO: 412956 - DNA, 75 bp, Homo sapiens
atgatctttgggatagcagattgtttgcctactccagggtatttgaagtataccatacaactgttttgaaaatcc

SEQ ID NO: 412957 - DNA, 100 bp, Homo sapiens
ctcagacatgaatactgtgacactgaccaccaggccaacttaacatcagcagatatcctgtctcagatgaagaggaagctgccacttttgctagagagca

SEQ ID NO: 412958 - DNA, 100 bp, Homo sapiens
gctttacaggcgctgcaaactggaggaaatgggctttacagatgtgggcccagaaaacaagccagtcagaggcatttcatccttcatgaagccattcagg

SEQ ID NO: 412959 - DNA, 100 bp, Homo sapiens
gcatcatccacgagttcgacccgtgcatcaacaacagcaacttgtgattggcggtgaccggatattcagttgcacatccccacatcaatgcactgccaat

SEQ ID NO: 412960 - DNA, 100 bp, Homo sapiens
gatgctgctcagtgtaatatcttccccccagcttcatctgtcctctgaggacagtggccttagagctattgagaatttgatgcaaaagaaggggaaattt

SEQ ID NO: 412961 - DNA, 96 bp, Homo sapiens
gcttgattggacagatgacttggagatgttcactggacagatggcgttcaggaagtggcttatattcactcaaaccagaatgtaattggatcgagc

SEQ ID NO: 412962 - DNA, 75 bp, Homo sapiens
cccgcatcagccgcttggccaactttggggaattacctctggactacaaatttacaagattctcttcaagcaatt

SEQ ID NO: 412963 - DNA, 121 bp, Homo sapiens
cgacccttcgcacttccacgcggtgaacgtggcgcagcccgttcgcttcagcatatggtgactacgaccccagtgttcacaagcggggatttttggcccaagaggaattgcttccaaaaag

SEQ ID NO: 412964 - DNA, 116 bp, Homo sapiens
ctgagccgacactgggggcagtccgcgagccccgcactctctcgatgagtcggagaagtccctaattcgccaaaatgacgaacacaaagggaaagaggagaggcacccgatatatg

SEQ ID NO: 412965 - DNA, 100 bp, Homo sapiens
ttcaaagattctttgtagcagacactgcaaatgaagctctcgaggctgctaagagactaagtactccaaagattcaggtttactcacgtcatccagcaga

SEQ ID NO: 412966 - DNA, 75 bp, Homo sapiens
cgacgcaagactgtcccggcccgggacatagatctgattgacatcctttggcgacaggatattgatctgggggct

SEQ ID NO: 412967 - DNA, 100 bp, Homo sapiens
agaggatggcgtgcgaggtcgccgcggggctggccgccatgcacaagctgcacttcctgcacaggaatttggataaagagagggcagtgctactacaacg

SEQ ID NO: 412968 - DNA, 96 bp, Homo sapiens
gagccgacctgcagcaaataattgtcagtctaacagaatcctgtcggagttgtagccatgccctagatcgatctggaatagaaaacgtcaactctg

SEQ ID NO: 412969 - DNA, 87 bp, Homo sapiens
agtttccgatttaaagctgagctgcgaggaaaatggcggcgggaggcatcctgacatcgaggcccaggagagaggagtccggtgtct

SEQ ID NO: 412970 - DNA, 82 bp, Homo sapiens
aagcaaaagtttgatgagattttttcagcaacaagctacttcagctctcagctgctgctgtggacaaaggatgcagtgtggg

SEQ ID NO: 412971 - DNA, 97 bp, Homo sapiens
tgaaggacgccgttcagaagatagggctgtgctgaagtttgctgctgccactggagccactccaattgctggccgcttcactcctggaaccttcact

SEQ ID NO: 412972 - DNA, 100 bp, Homo sapiens
cttgcctgggctctccgggaatccaggacctccgggacgaaagctggactacaagcaacaacaaagcattctggattccctgtgaggatggataatgctg

SEQ ID NO: 412973 - DNA, 87 bp, Homo sapiens
gtgatgattctagtacgggatcaagagttcatgcaaacggggattcagcgtccgatcctttggaacagggactcacgtgaagcttcc

SEQ ID NO: 412974 - DNA, 100 bp, Homo sapiens
tcgaacagagccgggagttcaagaagaacactccagagaagacctatggagcattcatgatctagaagcaagataccaggaaagccaagctggaaattca

SEQ ID NO: 412975 - DNA, 90 bp, Homo sapiens
ccaaagaagttgagaaaatgggagcagttttcatggatgcccctgtttctggtgggagagcttatggatggagaccaaacatccagatct

SEQ ID NO: 412976 - DNA, 92 bp, Homo sapiens
caccctaaccaggaggcacactccttgttcctggacatccacccgctcgtgccttcagtctcttgcctcggcacctgggtggcttaccgccc

SEQ ID NO: 412977 - DNA, 96 bp, Homo sapiens
ggggaagtttacacatgtggtttgaacaccaaggggcaactgggccatgagagggaaggaaacaagccagaaaatatttacaccagcagctccagt

SEQ ID NO: 412978 - DNA, 75 bp, Homo sapiens
taagtaccaccgaactcgatctgggggagccagggatgaacgatatcgatcagatgtgaactatgaagactttac

SEQ ID NO: 412979 - DNA, 100 bp, Homo sapiens
tcaatattcttccttgccaggtgcctgtctggaaggccagatacacacaacagcatcacctgggggcctcctacctcctgcgacctggggctgggcactg

SEQ ID NO: 412980 - DNA, 100 bp, Homo sapiens
attccttctcagaacttatgcataccgtatgagggtgctggttgatgctcgagagaagcttcatattccctggggagacaactcaaaccaacaacatgga

SEQ ID NO: 412981 - DNA, 50 bp, Homo sapiens
ggaaaatccgcaagaccatcatgcaggtgtagagaggagagagagtgaac

SEQ ID NO: 412982 - DNA, 100 bp, Homo sapiens
caagttctgaagttcactcttgattgcacccaccctgtagaagatggaatcatggatgctgccaattttttggaggacaacagcacacctgaaccaaagg

SEQ ID NO: 412983 - DNA, 90 bp, Homo sapiens
gcgagggtacctgtcctaccccagcaacgtgtttgacgggctcctcaccgttgtcctgctgatgtgaagttcatttccaatccgccctcc

SEQ ID NO: 412984 - DNA, 87 bp, Homo sapiens
tcagatgggatctttccggatcaatccagatggcagccagtcagtggtggagaagcagtgttgccacaaactatatggtggtcaaga

SEQ ID NO: 412985 - DNA, 74 bp, Homo sapiens
tggagaactacagaaacctggtctccctaggcctcatgcattgtgcgtcagcagcaatgtttatggtgaaaaat

SEQ ID NO: 412986 - DNA, 83 bp, Homo sapiens
acacgagcatggcatggccccgcaggtcttcacccaggccctggagtgcatgcgcagattctcacctgctacacacccctcag

SEQ ID NO: 412987 - DNA, 100 bp, Homo sapiens
cggggagtggtgcctcatggaaagcgaccccggggtcttcaccgagctcattaaaggattcggcatttggctttatgtcccgagttgccctacaagcaga

SEQ ID NO: 412988 - DNA, 100 bp, Homo sapiens
agagaattatgcacctgacagcatctattacctttgccttggaatacaggagtagtttatgccaacgtgacttcattcatacagatgaaccaaggatcgg

SEQ ID NO: 412989 - DNA, 75 bp, Homo sapiens
agaaatatgctgtatttaaaaacccccaggtgaccattgtgaggtagatattttgttctaattttccagatgagg

SEQ ID NO: 412990 - DNA, 100 bp, Homo sapiens
atgtgcgcggagagcaatcgccgggacagctgcaagtgccggtggtggtgtgcacattgagccccggtatagacagttcccccagctgaccagatcccag

SEQ ID NO: 412991 - DNA, 114 bp, Homo sapiens
cgaaggtgaagagttgtcccagctcggcccgcgggggagccccgggagccgcacgggggatatgagactttctactcggaatatcctgagtgttgcgtggatgtaaaacccatt

SEQ ID NO: 412992 - DNA, 75 bp, Homo sapiens
agccctgaagcagaagggcatcaccgtgaagcagaagagcaaactgtcatcaggagcttaaataggacagatttt

SEQ ID NO: 412993 - DNA, 75 bp, Homo sapiens
gaaaacaaaagctgctacttatggaagatacaaagggcacagcacagccgcctcacacgcccagcagcttgttgg

SEQ ID NO: 412994 - DNA, 75 bp, Homo sapiens
cacgatccagaggctcggtggatcaatgggaacaagctaccctctgagtcagcactggacttgaagataaatcct

SEQ ID NO: 412995 - DNA, 100 bp, Homo sapiens
ctcagggctgttgactccaaagctgacaagcagatgattttcagactgcccaactattggcacttgtattggaattgttaacattttgtgtggagcacca

SEQ ID NO: 412996 - DNA, 101 bp, Homo sapiens
gggctcccctccttcaggaacggtacagctctgccggggggggaaaaagtggtaccattttgggcgttcttgagcttcagaatgcaaccagacatgtcctt

SEQ ID NO: 412997 - DNA, 88 bp, Homo sapiens
atacgaaatgagacttttgaagtgcctttgatttctggatgtgaatcccgatggagcggcccgaggaaggcaagcagtcgccgccgcc

SEQ ID NO: 412998 - DNA, 75 bp, Homo sapiens
gggcactgagcaccgccaccatggggaaggggtatgaagtgtaacagaacagactttaccacctgaaactgctgc

SEQ ID NO: 412999 - DNA, 82 bp, Homo sapiens
agcaatacgtttccattgtgatcccaccttctgggcaaagaatgtagtcaatttaggctttatcctgtggataaacgcagag

SEQ ID NO: 413000 - DNA, 108 bp, Homo sapiens
gcctcagcctccggagtagctgggactacagaacgccagcctgcaggccgccatcactgatgctgagcagcgtggggagctggccctcaaggacgctcaggccaaggt

SEQ ID NO: 413001 - DNA, 83 bp, Homo sapiens
ggctatggagaaggtggcctcggcagtcctgtttccctgtaaggactgccctacatttggcctgtgccactggccaaccggaa

SEQ ID NO: 413002 - DNA, 75 bp, Homo sapiens
ccaaagcctgcccagacggctcacctgtgcgggatggaacaaaaggtaaaggccgaggggcaaagaaaaggaaag

SEQ ID NO: 413003 - DNA, 100 bp, Homo sapiens
ggaggacctcacttccccggggtgtaataatgttaactgaggtctcctaaaaacccagaacagaagatcattaagagagtgattgctcttgaaggagata

SEQ ID NO: 413004 - DNA, 83 bp, Homo sapiens
attcaacgcatccccagcttaccgcccagtacgcagactctggactgtgcagagtgtggggccttcaggactggcccactggc

SEQ ID NO: 413005 - DNA, 97 bp, Homo sapiens
ggctcacctgtgcgggatggaacaaaagccaaggccacctttgatgccatttctaagacctacagctacctgacccccgacctctggaaggagactg

SEQ ID NO: 413006 - DNA, 100 bp, Homo sapiens
aaaggagaaaaattactttacccagttgcaccaccagagctccaaaatggatcaaaatgtttgttttggatgaagcagatgaaatgttgagccgtggttt

SEQ ID NO: 413007 - DNA, 95 bp, Homo sapiens
caaccgtctccagccttggtctgagtggactgtcctgcagcactggaagacggttggatttcgtgcatcattcgggggtgtttttcttgcaaacc

SEQ ID NO: 413008 - DNA, 100 bp, Homo sapiens
ctacgagcgagtgtctggagcccgaatgcatgctgcttatatccggccaggaggagtgcaccagcacctggaatctcgactccgagccttgggcctttcc

SEQ ID NO: 413009 - DNA, 82 bp, Homo sapiens
ctttgacttggtgttgaaagtgaaatgtcatgcctctgaaaatgaagtggaagatagatgataagcctgtaaaaattgacaa

SEQ ID NO: 413010 - DNA, 100 bp, Homo sapiens
atttccttactggagcaagggaaagagtcctgcatggtttcaagggacgtaccaggaggatggtgcccagagtatcctgagctccagctggaccctaaat

SEQ ID NO: 413011 - DNA, 83 bp, Homo sapiens
gtgaaaacttctgagaaacttggagagtggaatgagaaagtgacccagtcagacctgttaaataggattgcgaatcaggtggc

SEQ ID NO: 413012 - DNA, 78 bp, Homo sapiens
gaacgccagggaccctgtgcaggcctgctcctccgtttgcaagccgaaaatgagagcacacctattcagcaactcctg

SEQ ID NO: 413013 - DNA, 88 bp, Homo sapiens
atctgcacagcttccaaagacaagaaagtgagagtcattgatcccaggaaacaagagattgttgctactcctgaggaagaagagattt

SEQ ID NO: 413014 - DNA, 114 bp, Homo sapiens
tcatcatgaccttccagaattacgggcaagcgctgttcaaacccatgaaggcaccgcgtccgtgctgcagcgccggtcccccaatgaggagtacgtggaggtggggcgcctggg

SEQ ID NO: 413015 - DNA, 49 bp, Homo sapiens
tgttgctgcagattgccaaaggtgtcaaattgagaaccaggtagatccc

SEQ ID NO: 413016 - DNA, 76 bp, Homo sapiens
ggcagcagtcaatcctccagaacctatgctggtggaacagcctcggccaccaagagcacaaagttatcattgttgg

SEQ ID NO: 413017 - DNA, 100 bp, Homo sapiens
gcaggccgttgttggtcgagctggcgggtcccgcgggccaggccgtggagaggcccagaaatctaaagatctttgttctataactgtaagtggagaagag

SEQ ID NO: 413018 - DNA, 83 bp, Homo sapiens
tttcttcccaatgatgcttcctacttcctttccgtgcataagaagccgaatgcttcaaggttactgactttttatgatgtttg

SEQ ID NO: 413019 - DNA, 75 bp, Homo sapiens
cccgcgtgcgccttgctcgcccgcagccccgagaccgcagggagtaccctgacttctaccggaagctctacggcc

SEQ ID NO: 413020 - DNA, 89 bp, Homo sapiens
ctggatatgcccgttcagtttacagttcattttttgcttggtttggaaaaatttcattagaggagagtatgacctgcggcgctgggaga

SEQ ID NO: 413021 - DNA, 90 bp, Homo sapiens
gggagcctcagcaggattgctgtgtgaaaaccgagctgctgggagaaggttcattttccagacactgaaagagcagaatggctaaataag

SEQ ID NO: 413022 - DNA, 100 bp, Homo sapiens
gctcctggcgctgctggctgcgctctgcccggcgagtcgggctctggaggaaaagaaaggtaggtgatgctctgatgctgctgcctcttatgaattgacg

SEQ ID NO: 413023 - DNA, 100 bp, Homo sapiens
agacttggaggaggtatgcctggactgggccaggatttctctctgatcaaacggacagttcaggactcagaatctaaggatgaatgttcaccgtggcagt

SEQ ID NO: 413024 - DNA, 76 bp, Homo sapiens
ttcttgaacagacagaaggatgtaaaggatggaaaatacagccaggaccaggactaaaacctccagaggaacggac

SEQ ID NO: 413025 - DNA, 100 bp, Homo sapiens
ccgattcctcctccttggtcgccgcgtccttggctggcgtgctaaccttgccgcgggccgagccctgcctcgccatggaccaggactatgagcggcgcct

SEQ ID NO: 413026 - DNA, 143 bp, Homo sapiens
agggagacatgaaaaagatgagcaggaatgttttgctacaaatggaggaggaggaggacgacgacgatggggatatcggaaacccttttccaaagagaaatgaagaagaaaactgtatgtaccctaaatatgggagataagaa

SEQ ID NO: 413027 - DNA, 101 bp, Homo sapiens
gtggaggaggtggcaggcctcggcggttgcacactgggccacagaggatccagcaaggatgaagaaatggagcagcacagacttgggggcagctgcggacc

SEQ ID NO: 413028 - DNA, 75 bp, Homo sapiens
aaagaaagaaatccagagaggaaggaagttgaacaatccatttcacagatgaagaaacagactcagtgagcacgt

SEQ ID NO: 413029 - DNA, 50 bp, Homo sapiens
cctcccgagtatctgggattacaggtgccatgtttcagaacagagtaaga

SEQ ID NO: 413030 - DNA, 100 bp, Homo sapiens
gatgatatccttctcaaccttgtgggatgtgaaaactctgttactgaagggtttctattgcctgggctggagtgtagtggcatgatcatggctcactata

SEQ ID NO: 413031 - DNA, 50 bp, Homo sapiens
caaggacgttctcaagtggggcgatgagtactatactggcaattgctgga

SEQ ID NO: 413032 - DNA, 78 bp, Homo sapiens
ctgcagcgaaggatcctggttgacctccgggagagcctggaggagatccttcccaagctgcaggctgagaacatccgc

SEQ ID NO: 413033 - DNA, 100 bp, Homo sapiens
aagcagctcaatgagaaaatctccctgctccgcagcgacatcaccaagctggaggtggacgccatcgtcaacgccggaaaatgtttataggaggccttag

SEQ ID NO: 413034 - DNA, 74 bp, Homo sapiens
gcctaacctcccggaccccaagttcgagagcaaagcacttgcacctcctgcgccgccgccccccatccaaggat

SEQ ID NO: 413035 - DNA, 100 bp, Homo sapiens
gtttgtggaatgaactgcttttgggaagcggcttttaggtttaccgacaagactgtgaaactttcgggatggtggtgaaaatgctgattgaaaaagatcc

SEQ ID NO: 413036 - DNA, 90 bp, Homo sapiens
ctccatggcctcaacacgtccctaacttgtggggatctgaaacttgtggaaaagccgtctcctttgactcttgctcctcatgacttcgca

SEQ ID NO: 413037 - DNA, 100 bp, Homo sapiens
gtcaaattgtcaaccttggggcaggcatggataccaccttctggagattaaagatgatgaagaacgagagcttcaaatggatcctgcagactatggaaag

SEQ ID NO: 413038 - DNA, 82 bp, Homo sapiens
gtaatgagagcccggaaccactctttgtgccgcagcttcgcagattcttctgctgatcgacattgagcagtcctacatcaac

SEQ ID NO: 413039 - DNA, 100 bp, Homo sapiens
aggacctggcctgaagacatttcctctcctcccctctggatttctcagagatccatatcatagattttgacgatgaaaacaacattataaataaaaatgt

SEQ ID NO: 413040 - DNA, 73 bp, Homo sapiens
caagtcctggctgaagccacggctgggacaggaagccacaacttacagccagctggcccaccccatccagcag

SEQ ID NO: 413041 - DNA, 74 bp, Homo sapiens
cggcaaggacttcgagcagcctctcgccatttcccggttaaacacagtgggaatatcacttttgatgagattgt

SEQ ID NO: 413042 - DNA, 100 bp, Homo sapiens
ggcgtgtatgggatcttcaactcagtcctgtttgacaacatctgccctacccccatcctgcagaagctgtatgcaggagctattcttgaagtttgtggat

SEQ ID NO: 413043 - DNA, 75 bp, Homo sapiens
gcaagttgatgcgtcttccatttgcaaggttggtcaaagaaaaagtgatgtatgaaaaagaggcaaaacaacaag

SEQ ID NO: 413044 - DNA, 83 bp, Homo sapiens
cctaagcctgcacagccgcggcggcagcagcagtgagaggtgagcatgggtttatgcgtcttaggcattattgtgatggcgag

SEQ ID NO: 413045 - DNA, 50 bp, Homo sapiens
ggataccctgaagtcgggaaatgatggatgagatcaaagggaaagaccgt

SEQ ID NO: 413046 - DNA, 98 bp, Homo sapiens
acggctcctgggaggtcatcgaaggctaccgggcccagcacagccagcaccgcacgccctgcaagggaggtagcattcttttcaagtggatgaccatg

SEQ ID NO: 413047 - DNA, 100 bp, Homo sapiens
cgaaaggaagcaagcagttcagaagagccaaggaataaacatgcaatgaacccaaaagggaccctgatgctcccataagacagaaaatgccccttgatga

SEQ ID NO: 413048 - DNA, 100 bp, Homo sapiens
agtggttaattaatgaaaatgaaaaaagtgatgccagcataatagagatgggggactcaaggagatttcaccaccacccatcctcggcctgtggtcaaag

SEQ ID NO: 413049 - DNA, 74 bp, Homo sapiens
gacactgtgccaaaggctcctaaacatttaaaagcagcaggacccagtgctccataaaggataatagtttccag

SEQ ID NO: 413050 - DNA, 82 bp, Homo sapiens
gagaaacaggcgccgcgggctccgcgcccggccggacccgggcccgagccacacccactcgcccgggtctatggccacggtc

SEQ ID NO: 413051 - DNA, 75 bp, Homo sapiens
ttggaatcctcctatacgaaattgtcacctatgggaaaattccctacccagcttcagcgagaacccagacctttc

SEQ ID NO: 413052 - DNA, 100 bp, Homo sapiens
cccgactctttgggccgttatctcacgtcgcaatggaagaagagatcgccgcgctggtcattgacaatggctccggcatgtgcaaagctggttttgctgg

SEQ ID NO: 413053 - DNA, 75 bp, Homo sapiens
attcctccgctagagataacagtgacagaggaacaaaggagactcttatggagcttggtttgatccgcaaacctg

SEQ ID NO: 413054 - DNA, 90 bp, Homo sapiens
ttggatgcgaaggagctgcagcatccaggtcacgagaagagaatgccttctagatgcaaaatcacctccaaaccagaccacttttcttga

SEQ ID NO: 413055 - DNA, 90 bp, Homo sapiens
ggagcacagagaaagagaatgatgaagagaaaggcccggagactattttatggaaagaactcttcttatgtccatgggggattggattca

SEQ ID NO: 413056 - DNA, 97 bp, Homo sapiens
gtgatctggacaaaggaacaggtatctcagggcactgtgtttagtcttgagtcagaggaggaggaataccctggaatcactgcagaagatagcaatg

SEQ ID NO: 413057 - DNA, 100 bp, Homo sapiens
tgtactcccattaacttcacaaccaagtgcagacgctcgatcgagggcacccagaaactgctcaacaaagacctggcagagctcatcaacaagatgcggc

SEQ ID NO: 413058 - DNA, 100 bp, Homo sapiens
tttaaccagcatggctacttcatattttggaaagcagtttttaagacaaaattcaattcgtcataatctgtccctacacagcaagttcattcgtgtgcag

SEQ ID NO: 413059 - DNA, 75 bp, Homo sapiens
gcgctgttgagttctgcagttgatcatggaccatgctcgacagctgaccaaggccatgatgcgaaaggccacggc

SEQ ID NO: 413060 - DNA, 90 bp, Homo sapiens
caatgagaaaacctggacagaacttcatgtgtctgtggcagtcttgtaaaaagttttgacctgtagcagagaaccaattctggagaacag

SEQ ID NO: 413061 - DNA, 83 bp, Homo sapiens
gtctcgggggccgctctgggatcccggccaccagcaattgtccgagaaccatggagtctggcagtaccgccgccagtgaggag

SEQ ID NO: 413062 - DNA, 100 bp, Homo sapiens
cttccggaaagctctgttgactttggcagatttggatatgtcaagtgaccagatagctgccaatctgcaagcagttattaatgaagtttgtaggcacaga

SEQ ID NO: 413063 - DNA, 90 bp, Homo sapiens
cattttcttttttggaactcatgagacgtcccgcggcagtgctggtggccatggttcccgtagccagaaggagttgcccacagagccccc

SEQ ID NO: 413064 - DNA, 73 bp, Homo sapiens
ccacacagtgcacccccattgaatttgacagcaaaggacttctgtaacgataagagttatatttcagaagaga

SEQ ID NO: 413065 - DNA, 100 bp, Homo sapiens
ctgcagatgaaaaagaccgattatttcttcctggaggttcagaagaggatggagatgaagatgaggaagctgagtcagctacgggcaagcgggcagctga

SEQ ID NO: 413066 - DNA, 100 bp, Homo sapiens
aagtcattgccattaatgtggatgatcctgatgcagccaattataatggtaaagtccatggttccctggcccgtgctggaaaagtgagaggtcagactcc

SEQ ID NO: 413067 - DNA, 100 bp, Homo sapiens
cagatgggatctttccggatcaatccagatggcagccagtcagtggtggaggatgcacattcacaaggtgaggtggtatcatgcttggagaaaggcctgg

SEQ ID NO: 413068 - DNA, 100 bp, Homo sapiens
ctgttcacaatgtgtggcatcaagaagctggcaaaacgattcgagaatggatgagagaggctcttgtcaggatggtgaagctgttcatcggaaacctgcc

SEQ ID NO: 413069 - DNA, 83 bp, Homo sapiens
aagaagactatcagccactaatgaagttgggaactcagaccgtaccttgcaacaaggatcaaaaccattcaagtgcaagatat

SEQ ID NO: 413070 - DNA, 98 bp, Homo sapiens
gctgaggccgaggcggagaaggggcttcctgagcgtcccagtacactgacagaggactcaccgcttaaggctgtgcagatgctgtgggtaaacctcat

SEQ ID NO: 413071 - DNA, 74 bp, Homo sapiens
gggatcaaagagcaaacagattcagtggcctgcattgggacacttagtcggtctggatgaaccagcttcgggag

SEQ ID NO: 413072 - DNA, 100 bp, Homo sapiens
tgccttctgaaaggtggaatcctactcagaatgtgagtcatccgtccttggctcaggatttggagagcttgcaccaccaaaaatggcaaacatcaccagc

SEQ ID NO: 413073 - DNA, 100 bp, Homo sapiens
agttgcagctgattaaggactatcgggagaaagtggagtccgagctgagatccatctgcaccacggtgctgagaagcttgattctttgctctcagactac

SEQ ID NO: 413074 - DNA, 100 bp, Homo sapiens
cctgaagcagcgggcggaacagagcatctctgaagagcccggctgggaggaggaggaagaggatggagatgaagatgaggaagctgagtcagctacgggc

SEQ ID NO: 413075 - DNA, 98 bp, Homo sapiens
tgaaatgagtgaggaaaaacgagccaaacttcgtgaaattgagggaagcgtgacagcaatgacagtgttttttcccctggatacagctagacttcgac

SEQ ID NO: 413076 - DNA, 100 bp, Homo sapiens
ttgctgtccactgcacagttcgaggggccaaggcagaagaaatcttggagaagggtctaaagaaccagacgtcctgggtcctctccagcatggcagccct

SEQ ID NO: 413077 - DNA, 82 bp, Homo sapiens
cccgaaattcgccccgattaaagactgtgttgcattatcaggtcagcccaaggccaaccccactgtcactctgttcccgccc

SEQ ID NO: 413078 - DNA, 74 bp, Homo sapiens
ccggagtcagtcattttactgtcaagacatttcttcggcattctgcaacagggcggcgactggcggcgcgatgg

SEQ ID NO: 413079 - DNA, 97 bp, Homo sapiens
tcaagattcacctaatcaaaagaaaagaacaaatgggcttcagccagcaaagcagcagaattctttgatgctgatgagtgctattcaaaaaggaagg

SEQ ID NO: 413080 - DNA, 75 bp, Homo sapiens
acactactgctgaccatatgcccaatcaatgaagtgaagaaaaagcttgagatccatccgtcctgagggcaagaa

SEQ ID NO: 413081 - DNA, 113 bp, Homo sapiens
atcaagcaggttttaaatcaagatttaacattccaacacataaaaattatttatccaacagctcctcccaggagaagctaaaacttacttatgaggaaaagtgtgaaattgag

SEQ ID NO: 413082 - DNA, 82 bp, Homo sapiens
ggggatggggcgcccaaggcaccagccctggatctcccaatggccttccaatccttaaactgccaatcgccccacccgttcc

SEQ ID NO: 413083 - DNA, 74 bp, Homo sapiens
cggaccccagaggcggaagtaaaagcgaactacagtggatgggtgcagttcaggttacaacattaaagcctgaa

SEQ ID NO: 413084 - DNA, 100 bp, Homo sapiens
cagcccccaagctggttcccgctgtagcaaacgtccgcggcctctcagtaagcaagctgtgtgggaagtgcagccccactgacgtggacatcctgcagcc

SEQ ID NO: 413085 - DNA, 100 bp, Homo sapiens
acgcagaacccgggagtaggagactcagaatcgaatctcttctccctccccttcttggacgagattgaggagctgcgggccgagatgctggagatgcggg

SEQ ID NO: 413086 - DNA, 51 bp, Homo sapiens
cggcccactgcgctggacaccttctctggggctttgttatgcacctaaagc

SEQ ID NO: 413087 - DNA, 76 bp, Homo sapiens
caaagcgcagaaatgttggatttgaatcgaggggagctgcagcgggagtcagacttcatggccagtgtagacagca

SEQ ID NO: 413088 - DNA, 50 bp, Homo sapiens
ccacagctatcccctgaggcccgacccagtggtggtgaccgcggtggctt

SEQ ID NO: 413089 - DNA, 50 bp, Homo sapiens
ccgagctatagagaaaggagatgagaacccagcgggtgccgcttctccac

SEQ ID NO: 413090 - DNA, 75 bp, Homo sapiens
ccaaacaagcttcattgttttcagctaacagtaaccccaggaaaatgttggggcttttcaggaagcataataaga

SEQ ID NO: 413091 - DNA, 75 bp, Homo sapiens
gactgcccaggacttcggaactagacgagaaggcataaatattccagcagaccagccaattactaaacttaagaa

SEQ ID NO: 413092 - DNA, 110 bp, Homo sapiens
caacagcagcaccctggagatactcttaaaagatgatgatgatgattcagactctgatggtgatggcaaagatgaggagcttttctctggaatgtatatagatttcatgg

SEQ ID NO: 413093 - DNA, 75 bp, Homo sapiens
gtgctgatgaagtcctctataaggactgcacatgtgaggagttctgccccgagtgctcggtggagttcaccctcg

SEQ ID NO: 413094 - DNA, 87 bp, Homo sapiens
agctgaacctggtgttttagaggataccttggtcccagagtcatcatgaaggccagattacctgtccctaatactgagcagaagctg

SEQ ID NO: 413095 - DNA, 83 bp, Homo sapiens
ggcggcccaggcacggagaggcggcgagaccgcaggggcaagctctgtgtgattgattggaagacatcagagaaaccaaagcc

SEQ ID NO: 413096 - DNA, 82 bp, Homo sapiens
gtagaagtctaactggaaaacccaaacttttcattattcaggttgaaaggattgttgacaaaaggaaaaataaaaaagggaa

SEQ ID NO: 413097 - DNA, 74 bp, Homo sapiens
aacagttggatcttgctcagtctctgtcagaggaagatcccttgtgagggccccaaggctgttgcagctcctcg

SEQ ID NO: 413098 - DNA, 51 bp, Homo sapiens
gagctggaacctgaggagagagtgttctagaacagatcagacattttgtaa

SEQ ID NO: 413099 - DNA, 75 bp, Homo sapiens
tgcagttacctcctggcagggggctgccagaaacgctccttctcgattattggtagaacgtcatgacatgaatac

SEQ ID NO: 413100 - DNA, 98 bp, Homo sapiens
gaagaccagcccttgcctgcccgacggctctcctctgactgcagcgtcactcagacttcatcacctgattcttccaatgagaattccgtagcaactcc

SEQ ID NO: 413101 - DNA, 83 bp, Homo sapiens
agtggtcgcttcttctccttggtgctggaaacatgcatgaagagctgcggcaagcggttccacgacgaagtgggcaagttccg

SEQ ID NO: 413102 - DNA, 82 bp, Homo sapiens
ggatctcgggctcggaacgagactgcacgatgcatttgctaaaaagtgaaacatcagtagcaaatggcagtcagtcagaaag

SEQ ID NO: 413103 - DNA, 100 bp, Homo sapiens
aggtgttgtgaatttcccatatgatgatgcagacagtccagaagacatgcacagctggattaaggagattggcgcagctgtccaggccctcaagtgccac

SEQ ID NO: 413104 - DNA, 83 bp, Homo sapiens
ctcgctcaagtgatctttgataagaatgattcagattttgaagctaaagttaagcaggaaacttttcagtacacacttttcag

SEQ ID NO: 413105 - DNA, 98 bp, Homo sapiens
agcggccgagccatcccaattaaacagatccgagtgaagcctgacaggaccggtgtggtcacggatggtgtgaagcactccatgaaccccttctgtga

SEQ ID NO: 413106 - DNA, 96 bp, Homo sapiens
cggccgacatggcggcagcggtggcggctgcgctggcgcggcttttggcggcctttctgctcctcgcggcccagacgggaggcgtgggcagcttcg

SEQ ID NO: 413107 - DNA, 100 bp, Homo sapiens
caaaacctcgctccggaaaggggacacctgggacatgagagatggctttagaagaaaaagtttctactcttcccattatgcgagagagcggtctccttat

SEQ ID NO: 413108 - DNA, 88 bp, Homo sapiens
ctctggtgagaaggtggtgaggcttcccgtcatattccaggttcgagaacttgtcttggacaattgcaaatcaaatgatggaaaaatt

SEQ ID NO: 413109 - DNA, 90 bp, Homo sapiens
cagagagcaggaggctcctgggacccaatggcctctggatgaaacgtcaggaatttactacacaggtttttgatgagaagtactttctgg

SEQ ID NO: 413110 - DNA, 100 bp, Homo sapiens
ggcgcagaaaactggtgtctttcagcttaaggaccgagggctgaccgaggttccatgcaggtgatgaacaagacccggcgcatcatggagcagggcgggg

SEQ ID NO: 413111 - DNA, 100 bp, Homo sapiens
cgccacctactattacccccagtatctgcaagccaaggagtcggatggtcagggctgccctttctgtcgttgtgaaataaaaggaactgagcccataatc

SEQ ID NO: 413112 - DNA, 75 bp, Homo sapiens
gtttcttactcgggagctggctgaagatggctactctggagttgagcaaaagcgaaagcttcggatctacatttc

SEQ ID NO: 413113 - DNA, 118 bp, Homo sapiens
gggcatccactgccaaaatgcagctcttacagaaatgtgtcttgttgcatttggtaatttagcagaacttggagttattcctgatgaagctaaagctttgtctctgttggcaccagct

SEQ ID NO: 413114 - DNA, 96 bp, Homo sapiens
aaagaagcagagaaggatgatcagaaggggacccccagcccttggaggagagacggcagcctcagatgcggacctgtccgtcaccgaagccagcag

SEQ ID NO: 413115 - DNA, 101 bp, Homo sapiens
ggccggcggcgcgggcccggcggcggcggcagcggggtccgggtccggagcgccacagtcatcatcagatttgaaatatttaaagtggatacaaaactatt

SEQ ID NO: 413116 - DNA, 90 bp, Homo sapiens
ggctcttcgggtaaagatggcggagcgcgggtacagcttttcgctgactacattcagcttacgaggaaatatttcagtaaaagcagttaa

SEQ ID NO: 413117 - DNA, 100 bp, Homo sapiens
ttcagaagagccaaggaataaacatgcaatgaacccaaaagggtggcccacaaactctttaacaacttgaaataaatgtgtggacttaattcaccccagt

SEQ ID NO: 413118 - DNA, 100 bp, Homo sapiens
gagcctcctgcaacacctgcggcctcactgggacccccaggaggtgaccctgcaggagaagaatttggattggtttcctcggatgcgagccatgtccctc

SEQ ID NO: 413119 - DNA, 100 bp, Homo sapiens
tggagggagtggacatcagccccaaacaggacgaaggcgtgctgaaggaactgtggctgcaccatctgtcttcatcttcccgccatctgatgagcagttg

SEQ ID NO: 413120 - DNA, 75 bp, Homo sapiens
cgcagagcgaggagtcgggatttggtcgcgagcggcgacggccaagtcctgtatctgccatgtctgtggcgtcca

SEQ ID NO: 413121 - DNA, 75 bp, Homo sapiens
tgcctgaaaatgcactcggatgccgccgctgtcacaggtgccgaacccacggccaggcttccgtggccagcagcc

SEQ ID NO: 413122 - DNA, 75 bp, Homo sapiens
cacacccaggaaaagactcaggacggacaagcacagtcttcggaaggtcccagctgtccaatcacctcgcaggag

SEQ ID NO: 413123 - DNA, 75 bp, Homo sapiens
tgggtaaggacatgaagacagttcctgtcataccttttaaagatggaggtgacacgagcagtgatgaggataaag

SEQ ID NO: 413124 - DNA, 76 bp, Homo sapiens
gcgactacgtcgggccgctgtggcctggatcagtacaagttctgctacgaggtggccctggaatacttgaattctg

SEQ ID NO: 413125 - DNA, 76 bp, Homo sapiens
aactggatgtttatcctagcgtcaacccaccaaagatttggggaacatgctggagtgcaatggtgcggtctcggct

SEQ ID NO: 413126 - DNA, 50 bp, Homo sapiens
gtggagatatggcgcaactgcggcgcgttggaagaccacagacatggaag

SEQ ID NO: 413127 - DNA, 98 bp, Homo sapiens
cgcacacagaaccctggccaggatcatgaagggcgattgaaaagacatgcacatgatggtgtccaagccagaacagtgggtaaagccaatggctgtag

SEQ ID NO: 413128 - DNA, 72 bp, Homo sapiens
tcatgccaggggttggcttaccagaacttgtaaacccaggattacattgcagtgaaggagaagtatgccaag

SEQ ID NO: 413129 - DNA, 98 bp, Homo sapiens
tcggtggcggaggctgaggagaaggaggagcgggccgtggaggcttcgccgcctaggcagttgcagtggtgcagaatggctgacctcagtcttgcaga

SEQ ID NO: 413130 - DNA, 73 bp, Homo sapiens
gctctcctgatactaacagttttacgatttaaaacttcgccagaatttgcatcatgacggtgatgtcagctct

SEQ ID NO: 413131 - DNA, 75 bp, Homo sapiens
agaaatccagcaacttcgaacccagtgggttgtatcccctgcagaaaaagctaaatatgatgaaatcttcctgaa

SEQ ID NO: 413132 - DNA, 100 bp, Homo sapiens
cgcggagcaggaggacctgctgaggctgcggggcccattgcaggccgaagcactctcagtcaatgagtcgcacctctggattaatcgaattacagctgct

SEQ ID NO: 413133 - DNA, 100 bp, Homo sapiens
tcagcgtgccgggcgcccggagcaaggcatgaacaaccgggaggtgctggagcaggtggagcgaggctacaggatgccctgcccgcaggactgccccatc

SEQ ID NO: 413134 - DNA, 98 bp, Homo sapiens
aatgatagatacatcagtgtgggaagccaagcagatacaaatttgaatataacctgccgctttgcaggtgtattccacgtggagaaaaatggtcgcta

SEQ ID NO: 413135 - DNA, 104 bp, Homo sapiens
catcaagtgctcgcccagcctgcacgtcgacgacaggtcatattgaacattccagatacctatcattactcgatgctgttgataacagcaagatggctttgaac

SEQ ID NO: 413136 - DNA, 98 bp, Homo sapiens
cttggtccagtctggctgcagcaaaaagcaggtggagtggctgaaacttctcagcaggcgcatctacactagtgacctgaggagagaaaccctaaccc

SEQ ID NO: 413137 - DNA, 100 bp, Homo sapiens
cctggaagagcagagtgaggacgaggacagagaagccaagaggaagaaggaggaggaagtaaaatctctttgtggcttggaagcctctcaggttcctgca

SEQ ID NO: 413138 - DNA, 100 bp, Homo sapiens
cagcaacagtggcaatgagaccagtggaagcagcaccatcggggagacaagcaagttgcctgcggacacgctgggcctctgtcctgatgctgctgagctc

SEQ ID NO: 413139 - DNA, 100 bp, Homo sapiens
ggaagcacgcgaggctgcccggagtccggataagccgggcgggagcccctcggccagttaccggtattgtaagaacaagccgtacccaaagtctcgcttc

SEQ ID NO: 413140 - DNA, 117 bp, Homo sapiens
gtcctctacctgaaaactgggagatggcctatactgaaaatggagaagtctattttatagaatgatgatgtgcctgcagatatggttgcagaagaatcaggtcctggtgcacaaaat

SEQ ID NO: 413141 - DNA, 75 bp, Homo sapiens
tcctgttccactcgggaggggctttaggaaggaggcgaagtcaggtatctttaggtggtgttgatcttacagtcc

SEQ ID NO: 413142 - DNA, 100 bp, Homo sapiens
gttttcctcttgatcgggaactcctgcttctccttgcctcgaaatggaccccaactgctcctgctcgcctgtcttcacctcctcctcgtcctcttcgagc

SEQ ID NO: 413143 - DNA, 82 bp, Homo sapiens
cgcagtttctcacgacgggccgagcctgccactgagtagctcggagaggaggaaggagaagtcccgggatgctgcgcggtgc

SEQ ID NO: 413144 - DNA, 90 bp, Homo sapiens
tttatggagcatatattatggaacacagagcatctttccttgaagaagtacattattgacattgtggttgaaagtacagctccagcagaa

SEQ ID NO: 413145 - DNA, 100 bp, Homo sapiens
gatgttgatactgaagaccgccagaaaaggaaacctgagtcagatgtcgtggagggcccccaagacccaacagagggatgccgcaaatgaacactcagca

SEQ ID NO: 413146 - DNA, 82 bp, Homo sapiens
ctctcctctgatggcaggacctgccaagcaattctgtggtgttcttggtcacacatttatggagtttctgaagggcagtgga

SEQ ID NO: 413147 - DNA, 100 bp, Homo sapiens
ggtgcccgctgtgcgtgtggacttctacaatgcagacgagctcaagacaggccgacggtcgcaaggtcctacggtcaagcatccgggagtttctatgcag

SEQ ID NO: 413148 - DNA, 100 bp, Homo sapiens
atgtgagcactgggggtggtgccagtttggagctcctggaagctttataaaaagctcaatactcatgtggccttagttggtatggaaatctggactgaca

SEQ ID NO: 413149 - DNA, 74 bp, Homo sapiens
catcaggatgaatgatgacccaagtatggaaatgcggtggtgctagaatttgttatattttccatgagactttt

SEQ ID NO: 413150 - DNA, 96 bp, Homo sapiens
agggaaggcgcgagtgaggaaaggaggtactgtaggctgtgattctaggattgaaaaagaggaaatgattccaaagcaggacatttctgaagaatt

SEQ ID NO: 413151 - DNA, 90 bp, Homo sapiens
cgaccatcaaatccgtgtcggagtccttacagcctgaagagttgagagaaatcattgagaagacaagagagatggagcagaacaatggcc

SEQ ID NO: 413152 - DNA, 83 bp, Homo sapiens
ctagtctgaccctccgccaggcaaaaggaaggccgagacgcatccagagctttcgtgaccggggactgttctgaagcaggcct

SEQ ID NO: 413153 - DNA, 100 bp, Homo sapiens
gcggctggcgccgctgcgcgcatgggcctgttcctggcccgcagccgccacctacccagtgaccatgataggaaatttggtgagcggcctccacctaaac

SEQ ID NO: 413154 - DNA, 97 bp, Homo sapiens
cgacccctctgagaagctggagctggtgacaggcgggtcgagtctgaagaatccggcgatgaagaagggaagaaacacagcagtggcatcgtggccg

SEQ ID NO: 413155 - DNA, 75 bp, Homo sapiens
cagcggtagccctccttgcgcctccgattcccaggcagaggtggaggagacactgaagcgactgcagagccagaa

SEQ ID NO: 413156 - DNA, 75 bp, Homo sapiens
ggccgagcaggaggcgccatcatggaggactacaaccacatccatgggggcaagtggacagtgagtaacctgcgg

SEQ ID NO: 413157 - DNA, 75 bp, Homo sapiens
tttttaaagggcagaaatgcctgaaggtgaagactttggaccaggcaaaagatgctctctgtgtgggtatgtgtg

SEQ ID NO: 413158 - DNA, 100 bp, Homo sapiens
agaaagcgcctgttcaactttgtcctctctcaggcaccgtataaacttgagttcagacttcctgattactcctgatttctactgggacagagaaaacctg

SEQ ID NO: 413159 - DNA, 85 bp, Homo sapiens
taatctgttggattctaatgcagttcatcacatcattcatgattttcaggcaatagagcatatgttctacaggagaagcatggtt

SEQ ID NO: 413160 - DNA, 100 bp, Homo sapiens
aattctcactctgtagtattagaaatataagccaagttcttgagaagaagagaaacaactgttttgttggagtggagtcaacatatcaatggagcaagtc

SEQ ID NO: 413161 - DNA, 100 bp, Homo sapiens
tgaagctgtagcgtatggtgctgctgtccaggctggtgtgctctctggtgatcaagatacaggtttctctattagaataccgtaagagacaacgtgaagc

SEQ ID NO: 413162 - DNA, 100 bp, Homo sapiens
ttcgagtctctggcagacctgacggaccaccgggcccaccgctgtcctggagctgctgacgacccagcgggtgagctgcgcccacatctacagtgcccta

SEQ ID NO: 413163 - DNA, 100 bp, Homo sapiens
ctaccagccctgggcagcgagctgcaaaagttccatgtatgatggcttggctgacaattacaactatgggaccaccagcaggagcagctactactccaag

SEQ ID NO: 413164 - DNA, 89 bp, Homo sapiens
ttcgggcctagcggagccgggactggaggtgcactttacaggtccccgatgaaccaagagaaccctccaccatatccaggccctggtcc

SEQ ID NO: 413165 - DNA, 100 bp, Homo sapiens
agcccagccaagcactgtcagggctgaagccgacgtagcttctctgaacagacgcatccagctggttgaggaagagttggatcgtgcccaggagcgtctg

SEQ ID NO: 413166 - DNA, 83 bp, Homo sapiens
gctggtgcagtagctaccgcctgacaggccacggcgtatgcctccgaggacggggtcctgaccgaggccatgatggacacccg

SEQ ID NO: 413167 - DNA, 74 bp, Homo sapiens
actggcaaccaaaggttgcaccaacaaccgcttggaatgctgcaacaatgacttccttgccgtccaggaaggga

SEQ ID NO: 413168 - DNA, 83 bp, Homo sapiens
ccagcctgcggagcctgtggggcaggaatagctattcagtcagacagaaccacttatcacgttttgcagtatctcctgaggaa

SEQ ID NO: 413169 - DNA, 74 bp, Homo sapiens
ctgctgtgaaaggagcagtacaaagaaagaatgtacagacattgagagcagtggagatggggtttcaccatgtt

SEQ ID NO: 413170 - DNA, 75 bp, Homo sapiens
cagattcgcagtggtcgcttcttctccttgttagagatgtttatgattacttccgagctgtcctgcagcgtgatg

SEQ ID NO: 413171 - DNA, 82 bp, Homo sapiens
gcgagtaagccagcggcaggaccagcgggcgggggcccacgagtggtgatgatgtccagcaactctgtgaagcaggagaaga

SEQ ID NO: 413172 - DNA, 76 bp, Homo sapiens
agataaattacaacacggatgtggattatatgcgtcaggcaggagaagtgacttatgcagatgctcacaagggacg

SEQ ID NO: 413173 - DNA, 90 bp, Homo sapiens
aaaagtggtgcgcataggcaagtcatttatgaaggagtgtagacctggctcaagacccaagagtgaagcagcaagtgtgaagaagcagaa

SEQ ID NO: 413174 - DNA, 97 bp, Homo sapiens
gggagggcgcgcggccgagcggaggcggagtcggcgccgagaacatggtcatgtccatcctgttgcatggggatgctgcatttgctggccagggcat

SEQ ID NO: 413175 - DNA, 75 bp, Homo sapiens
gttatgaacaatatggaatcctttcagtaccactctgaagaatctcaggtacctttgtgcatcgactcctccaat

SEQ ID NO: 413176 - DNA, 99 bp, Homo sapiens
caagagccagccggcccacagccagagccatgcaagcgcagttctcttcggacaggacatacttccactatatggtgacaccagccagagaccatcaga

SEQ ID NO: 413177 - DNA, 100 bp, Homo sapiens
attaccggaatgcaaagactgccatcgcaaattcatggatgtgtctcagctaaagaaacatctgcgaacacacacagggaagtgccagacacagcttcag

SEQ ID NO: 413178 - DNA, 50 bp, Homo sapiens
aacatctcttctgaactcaagaccaggtcaaaatgcagatcttcgtgaaa

SEQ ID NO: 413179 - DNA, 100 bp, Homo sapiens
gcgagctgagcgcctccagcgagaagttgagggagaaaggcgggcccgggaacagccggactactttagttctgtggccacagtggtgtatcttcgcaaa

SEQ ID NO: 413180 - DNA, 100 bp, Homo sapiens
tggtggaagaggacgggccttctgagaagagccaggacccacctgctctggcaagatccactcctggctcaaacagggctgttcgtggtcagttatattt

SEQ ID NO: 413181 - DNA, 49 bp, Homo sapiens
cctgcatggattgggagatactgggtcttgggcgtctttggtactggct

SEQ ID NO: 413182 - DNA, 74 bp, Homo sapiens
aagctgactactaaggagaataagatacctttgtctggatatggaggaacaagcaatcttattttggaaggcgt

SEQ ID NO: 413183 - DNA, 82 bp, Homo sapiens
agccaccaaccacactaacgagattcaagattatttgcaacagctcacgggagcaagaacgttcctctgtgacgagggtgca

SEQ ID NO: 413184 - DNA, 100 bp, Homo sapiens
atgtcttgactctgcttatgatccccggatctgccgacagtgagcagtagccaacatgtcagggtgggagtcatattacaaaaccgagggcgatgaagaa

SEQ ID NO: 413185 - DNA, 73 bp, Homo sapiens
gaagccgagttcaacatcctcctggccaccgactcctacaaggatgattttgcgaataatcgagaatttatca

SEQ ID NO: 413186 - DNA, 58 bp, Homo sapiens
cacttcgacccggaagtttacctagacaaggatacttttgtggaactctatgggaaca

SEQ ID NO: 413187 - DNA, 83 bp, Homo sapiens
caatatctgtcttcggtggactccttcggcagtccacccaccgccgccgcctcccagagggagacgctgttgcggcagctgga

SEQ ID NO: 413188 - DNA, 74 bp, Homo sapiens
gccactagcccatcgtccgccaactgcaggaaacccagcgtttgctggcagaaccagttcctggcatcaaagcc

SEQ ID NO: 413189 - DNA, 100 bp, Homo sapiens
gatgaagatgcccacctgatagggtttttgtggcaaataagtttattcagtcaccatgaagctgctgctgctgcacccggccttccagagctgcctcctg

SEQ ID NO: 413190 - DNA, 91 bp, Homo sapiens
aggagtcatgagcgacagcggcgagcagaactacggcgagcggagagaagaagaaggaggttcctgctgtgccagaaacccttaagaaaaa

SEQ ID NO: 413191 - DNA, 98 bp, Homo sapiens
ctggctcatcattgacctgccgggaatacaaacagaagcttgcacgagtaacccaggtccgcaaggaactgaaatcccatattcagagcttgccagac

SEQ ID NO: 413192 - DNA, 75 bp, Homo sapiens
cttggattcgtgaacagaccacagtggaccacttctgggccaagaagtatgatgcgtttttggcctcagagtctc

SEQ ID NO: 413193 - DNA, 98 bp, Homo sapiens
tggaacatgacggtgcagtggtggctggcgcagtatatctacaagagcgcacctgcccgttcctatgtcctgcggagcaggccgggctctcgccatgg

SEQ ID NO: 413194 - DNA, 74 bp, Homo sapiens
cacgacactctgaagcagcgacggcacagcgggaagaatgatatgaagagcattttaagaggtgcagcctctgg

SEQ ID NO: 413195 - DNA, 121 bp, Homo sapiens
ggcgtcacctccttctgccccaccctggtcacttccccaccggaggtttatcacaagatctattaatgagatgaagcggttggaagaaatgtcaaatatgtttcagagctctggagtccag

SEQ ID NO: 413196 - DNA, 116 bp, Homo sapiens
gtcttctcgggcttctcgccccggccgcggccgggtcctcagctgacatagcccagagatacaggataagcaaatacccaaccctcaaattgtttcgtaatgggatgatgatgaag

SEQ ID NO: 413197 - DNA, 128 bp, Homo sapiens
gtggactacagcgccacggtggatcagcgcctacccgagtgtgcgaagctagccaaggtggaatatgtgatcaagtgtgacatgtcagctctgcagaagattctgtatcgccatatgcaagccaaggg

SEQ ID NO: 413198 - DNA, 100 bp, Homo sapiens
tgttgatctgttcaccactcatttgcaacttatatcgccagtccagcagctaaggatattttgtgcaggtgccgacgccaccgccgagcccatgatcctg

SEQ ID NO: 413199 - DNA, 74 bp, Homo sapiens
ttcacactgcagaactgggttctggactttgggcgtcccattgccatggtggtgcaggaggcaaaggtgtctgg

SEQ ID NO: 413200 - DNA, 103 bp, Homo sapiens
ggccttagctgtgctcgcgctactctctctttctggcctggaggctatccagcggccgcgatgggcctcttggaacattggtgtgttcatctgcattcgatgt

SEQ ID NO: 413201 - DNA, 101 bp, Homo sapiens
tggaatgcaccacagccatctcacatttccaagtacattctcaggtggagacctgagcttggtttgatccgcaaacctgcctcgttcatgaccagcatctg

SEQ ID NO: 413202 - DNA, 100 bp, Homo sapiens
caagagagagacaagcccgaggcctgacttctagcactcctgagtttgagccctatgagcagtggaacctaggattagctaatcatcagctggataaaga

SEQ ID NO: 413203 - DNA, 83 bp, Homo sapiens
atttggatgtgggatccggttccttggtgtcatccagccttagcaaaccagagcaaattgtggctactaatttgccccctgaa

SEQ ID NO: 413204 - DNA, 100 bp, Homo sapiens
gggaggaaaaggccaagagtagctggtttggcttgagagaagccaaggacccgactcagaaacccagagacgtctcagagaggctgtgcagctgctggag

SEQ ID NO: 413205 - DNA, 74 bp, Homo sapiens
tgaataagtgttttaagaaagtggacaaagagaggagtcagaactcggttgcctttgaggatgtggctgtgaac

SEQ ID NO: 413206 - DNA, 75 bp, Homo sapiens
cagcacaggcggcgttttctccttcggaacgggagcgtctagcctgtacaggtcagaaaagagtgaaagatgctc

SEQ ID NO: 413207 - DNA, 50 bp, Homo sapiens
agaaaatggccagggggaaggaaaggtggagcgaatcaaggagcgtgtgg

SEQ ID NO: 413208 - DNA, 82 bp, Homo sapiens
aagcaaacaaaaagtatgatggattacagcaacagttgtcttcagtagaaaggagtaatcaagtcagaggattatatgactt

SEQ ID NO: 413209 - DNA, 74 bp, Homo sapiens
gagcctcccaaacaagggaaggagaaggccaagaaggcagagcagattggaagagtaggaagattaggtcaaaa

SEQ ID NO: 413210 - DNA, 75 bp, Homo sapiens
ggaaaagccaacctggccctgaagaactacagtgtggattggaacgagttactatgctgtttctgggattgcata

SEQ ID NO: 413211 - DNA, 83 bp, Homo sapiens
gtcgcgtgtctaggtgagtcgcggtgggtcctcgcttgcagttcagcgaccacggaagctcttcgtgggcggtcttgactgga

SEQ ID NO: 413212 - DNA, 50 bp, Homo sapiens
cagcccatcctctctaaccaagtctcaggcctcaaggccggaacagtccg

SEQ ID NO: 413213 - DNA, 50 bp, Homo sapiens
ctgcttcaagcggcagccagacaaggttattcaagaagcccaagcgaaag

SEQ ID NO: 413214 - DNA, 95 bp, Homo sapiens
cgggtccgtgcgcccagcgtcccagggcccaggccgagcagccaccacaagggcccgggccaccaggaagagcctgctgcatgtcccctatggag

SEQ ID NO: 413215 - DNA, 75 bp, Homo sapiens
cgcgccgagggctggaggatgcgttccctggggtccgggttgaaggtcgaggagctggaaggcgagcggagtcgg

SEQ ID NO: 413216 - DNA, 50 bp, Homo sapiens
gctcccggggtccccggccggccaagcagagcctgccttctggtacaaga

SEQ ID NO: 413217 - DNA, 90 bp, Homo sapiens
cttccccagctctgcagccacatactatccgtttgttcaggaaccaccagtgacagagactccagttcagttgtagaatggactcaggcc

SEQ ID NO: 413218 - DNA, 75 bp, Homo sapiens
gccggcctcctctacgcgctggtacagctcgcaggttcacaactacatgatgccacccctcgaccgaagctggag

SEQ ID NO: 413219 - DNA, 75 bp, Homo sapiens
cccaggttcaagcgattctcccgcctcagcctcctgagtagcaattacaggtaatttcatctgtgccaaagcctc

SEQ ID NO: 413220 - DNA, 100 bp, Homo sapiens
gtgagacatgcacagacagatctggcatctccactggacactggtcagagagtcgaatgatcttggatgcctttgcccagcagtgcagtcgagttcttag

SEQ ID NO: 413221 - DNA, 75 bp, Homo sapiens
gtgctgaggcacacccagggccggcggtaccagcgagctctgtgtaaatgatcaagcgtgctttccttatcgagg

SEQ ID NO: 413222 - DNA, 90 bp, Homo sapiens
atcttgaaaggaagtatgctgttctctatcagcctctatttgataagggatacattggcctgcaggtcccagttcacatgtagtcccctg

SEQ ID NO: 413223 - DNA, 100 bp, Homo sapiens
gtttttgcctcttcttagaaaatccaaagggaggctggtgaatgtcagcagcatgggagtttacttcacctcgcagtggtatcttctgagtaaaccatca

SEQ ID NO: 413224 - DNA, 75 bp, Homo sapiens
tggcaaaacagcagtgaccgagatcgtcaacaggccgccatggcatcagatgaaggcaaactttttgttggaggg

SEQ ID NO: 413225 - DNA, 75 bp, Homo sapiens
ggactgagtcctgcaggacacaggaacgtcaaggtcgtgggaaataaaaggcagttctacacagactgcagcaac

SEQ ID NO: 413226 - DNA, 87 bp, Homo sapiens
ggactggatgctacaaactgtttgaggataactgacttaaaatctggtgagaaagatcagtctaaagaaaaggagaagaaagtgaaa

SEQ ID NO: 413227 - DNA, 100 bp, Homo sapiens
ggaggacgaggactacgtgccgtcggagtaacttcttacagaacttcctctctctagcattgccaaaaggaggaaataaacatctaagtaatctgactat

SEQ ID NO: 413228 - DNA, 75 bp, Homo sapiens
gggcctgaaactcatgaatctggaggcaagtgaggcctatctggttggcctttttgaagacaccaacctgtgtgc

SEQ ID NO: 413229 - DNA, 100 bp, Homo sapiens
ccgaggtgactgaggagagaggcgcctcctcgctcccgccaccgccggacttcaatgcccagtccccagctcgccagctagagacggggtttcgccgtgt

SEQ ID NO: 413230 - DNA, 101 bp, Homo sapiens
taccgagctgctagccgagagattttactaccaagccctgtcagtagctcctcagattggcatccgtgtcattctggaccttactcccaactaccggggtg

SEQ ID NO: 413231 - DNA, 100 bp, Homo sapiens
gagttatcactagtgcttggtgggtgtaccatcatcagaacagagaatgtcagtatccaataggatgccagtggaattccctgacgattccatccatgcg

SEQ ID NO: 413232 - DNA, 108 bp, Homo sapiens
cgactcttctgacctccgcgcgacgtacccgccgccgccgttggctggagggacttgccatgaggtgttgaagccttgtttcactgagttggagagactggacctaaa

SEQ ID NO: 413233 - DNA, 75 bp, Homo sapiens
ttgcatcagtttttgtcggagtcagaggttcaaggaactggtgctcctatgtggtgacccgcaccatctcatgcc

SEQ ID NO: 413234 - DNA, 90 bp, Homo sapiens
gtctagtcaacttaattgagaagatcacacgccgctatgcagagttctcctccgctcttgtcagtatcaaccagacaattcctaatgaac

SEQ ID NO: 413235 - DNA, 50 bp, Homo sapiens
ccgaatgaaacagagtcaagatctctacgtcaaaagctacctcctcccgg

SEQ ID NO: 413236 - DNA, 100 bp, Homo sapiens
agagtcttggtctcaatgtccacaacatgaccccagctacctccccaataggtgcatcagggcaccgaggaagagaaccaatggcagaggccacatgtgc

SEQ ID NO: 413237 - DNA, 100 bp, Homo sapiens
cggccgttgaaaaatggcgactgtggcagagttgaaggctggtgctgatgtatggacagccgtatcgtgttaccttagagcttgagctgccagagtcccc

SEQ ID NO: 413238 - DNA, 90 bp, Homo sapiens
ccgagttcaaagagttgaagagtaacccccaccgggacttctataacgtgagaaagttagtgattggcaactttggcctcagctggaatc

SEQ ID NO: 413239 - DNA, 131 bp, Homo sapiens
ttccttcccaatggcaactatgtttggatgttggatctacactttctcaagcactgtgatcttcaaatagccatgggaccacaccaccaccaccacaaccaataggccaggaaccaccagagctccggcaa

SEQ ID NO: 413240 - DNA, 75 bp, Homo sapiens
acgcctcatggagcccatctaccttgtggagatccagggactgaccacagcccatgagcagttcaaggccaccct

SEQ ID NO: 413241 - DNA, 101 bp, Homo sapiens
actctgcccctttctcctgggaaacaaaggtctataacttgacccaggagttcttccggcacgataaaccagtcaatgctgaaagtcaaaatagcgtgggg

SEQ ID NO: 413242 - DNA, 74 bp, Homo sapiens
ttacgagcacggcctcttgcgctacgccctggatgagatggctgtccccttttctgggactattcaaggaggtc

SEQ ID NO: 413243 - DNA, 73 bp, Homo sapiens
acccactgcagagtgctgaagacggggtagccacgagattcatgatgttgctatcaaaagttgagaaattgtc

SEQ ID NO: 413244 - DNA, 83 bp, Homo sapiens
tctccttcgacttggagtctttgtccaggacggttgtggcagcactgcctgaaggtatgagaccagattctaatctttatggt

SEQ ID NO: 413245 - DNA, 74 bp, Homo sapiens
cttactcgggagctggctgaagatggctactctggagttgagacccctttgctgatgcaagtaagggtgatgac

SEQ ID NO: 413246 - DNA, 98 bp, Homo sapiens
ctaaatcattacatggaacagatattaaatgtatcacatgaagttacaaacctcatggggcattcagaatgggaccacaaacgagggccaagaggatc

SEQ ID NO: 413247 - DNA, 90 bp, Homo sapiens
actttcactgtgtcttcagaaagatccttccaaaagatatttgatcaagttccttgcaaagcttgctcagaccagcgatgtgaataaaat

SEQ ID NO: 413248 - DNA, 74 bp, Homo sapiens
cagatgttaagacattcttggaagccttaccggttgttgatcattatgaaaatcctagaaacgtggggtccctt

SEQ ID NO: 413249 - DNA, 100 bp, Homo sapiens
ttcagcatggctcatattctacttcattcagaagatcaggtacacaaatgcacgcgacaggaaccaggacagaataacgggctcccagattcacaagccc

SEQ ID NO: 413250 - DNA, 100 bp, Homo sapiens
ccaagttctctggactcagatcctctgactgacttccttttggtagtactgcgtgatgttgttcaggcttatcctgaagttcgcattgttcttatgtctg

SEQ ID NO: 413251 - DNA, 82 bp, Homo sapiens
ctctaagatctgaatgttgtgaccactaatttgagccgagactgtctgaagctgggcccacctgctgagggagaagtcgtcc

SEQ ID NO: 413252 - DNA, 75 bp, Homo sapiens
ggagatcaactcctctctgttaatggagtgggctactacaaagttctgggaaagggaaagctcccaaagcagcct

SEQ ID NO: 413253 - DNA, 100 bp, Homo sapiens
tgatgtagcagaggatctttgttccatgctgaggggggatttcagatttcatgaatgtatcctgtcaggtataatgtcagtgaatggcaagaaagttctt

SEQ ID NO: 413254 - DNA, 83 bp, Homo sapiens
cccgggctccgggaaaactacactggccaggtcgcgtggggcaggcagtggcgctgcgggccaaggccttcggcttcaacgtg

SEQ ID NO: 413255 - DNA, 100 bp, Homo sapiens
gaagagcttgcgaaagatgtttggaaacgggcgtgcacgttcgggggtcattgttcttccctgcgtttcagaagaggagccccgccgaggcatgagggcc

SEQ ID NO: 413256 - DNA, 100 bp, Homo sapiens
gggaagagaagcctagatatctggaaagagcatctacggtgagcgcttccccgatgagaacttcaaactgaagcactacgggcctggctgggtgagcatg

SEQ ID NO: 413257 - DNA, 100 bp, Homo sapiens
gcgaatcaagcgggagttcaaggaggtgctgaagagcgaggagcaatacgtatctaaaaacgtcatctccagtgagcatattgttgagagagaagcagag

SEQ ID NO: 413258 - DNA, 83 bp, Homo sapiens
atgccaccaccgacttatactgagaagcatccgaaatcatgaagagcatcggtgaggccatccagtatctgcattcaatcaac

SEQ ID NO: 413259 - DNA, 100 bp, Homo sapiens
gggaagttcctttttgaagtagttccagatatgcaatatgatgaggatgatgatgaaatcaccccggatttgtggcaagaagcatgctggattgtaatca

SEQ ID NO: 413260 - DNA, 90 bp, Homo sapiens
tgtggtacagtttaaagatatggactccagttatgcaaaaagagacacatcaccttcactttgggatatggaatttgataagcagttagc

SEQ ID NO: 413261 - DNA, 50 bp, Homo sapiens
cagcctcagtgatgtccatgagggatagctgggagtatggccaccctgct

SEQ ID NO: 413262 - DNA, 103 bp, Homo sapiens
gccgcgtggctggaagacatggccactccagtcggtgttgagcacggcgagcagtctcaggcctttagtgatgatgttccagaaagctgagtctgatctggat

SEQ ID NO: 413263 - DNA, 83 bp, Homo sapiens
atggacagcatcatcttcccaaagagtgtcaatccatatctacaaggacagagactggataatgttgttgcaaagaagtctgt

SEQ ID NO: 413264 - DNA, 75 bp, Homo sapiens
tcgccgtcctgcggaaccgctggctgtcagacagcttcaaggagacgtggctccgggtgctgccctgtaagcacg

SEQ ID NO: 413265 - DNA, 100 bp, Homo sapiens
ctgctgggtgctgctgcgcttgtcaccatcatcaccgtgcccgtggttctgctgaacaaaggcagaaaatatatgcagatgatgaacattcttaagccaa

SEQ ID NO: 413266 - DNA, 100 bp, Homo sapiens
ggctcaggaacagggacagcacctcatcccctggatgggggaccacaagatcctcatcgacagggccaggaaggaatactgggagaatcttcggatagcc

SEQ ID NO: 413267 - DNA, 90 bp, Homo sapiens
ggaaaattacccggtatcgttagaggtgctggagaatctggtaaaagcaccattgtgaagcagatgaggatcctgcatgttaatgggttt

SEQ ID NO: 413268 - DNA, 74 bp, Homo sapiens
tctcagcaaacggtcctgcacaacagtttgtgatggacgcctctgaccccacccagctctctgcatcctgtgtg

SEQ ID NO: 413269 - DNA, 75 bp, Homo sapiens
aggggaggggagtggaaaggctctcagtgaaaaaggctatggagttactagtagagaaagcaatcagcagtgctt

SEQ ID NO: 413270 - DNA, 75 bp, Homo sapiens
ggcagtacaagcttacgtctctgctcttcagtacaatcctgtcacccaattgacaggtttctcagatcctgtata

SEQ ID NO: 413271 - DNA, 46 bp, Homo sapiens
gaccggcgccgggagatcctggtgatgatgatgatgattttgatga

SEQ ID NO: 413272 - DNA, 101 bp, Homo sapiens
acttccttggtggcttggaataagctataagggaattggccaatatgatatacaagacaaggtgaagcctcggaagtggaatgcagtagccctctgggcct

SEQ ID NO: 413273 - DNA, 50 bp, Homo sapiens
gcctcctgagtagctggtattacaggaacctgaagaaagatctagctcag

SEQ ID NO: 413274 - DNA, 101 bp, Homo sapiens
tttactgttgcgttttgcagacaacactttctcaggctgaccccgcactacatctacccaccagccatcgtgcagcccagcgtggtgatcccagccgcccc

SEQ ID NO: 413275 - DNA, 90 bp, Homo sapiens
gaaagctgaggcccagagaagcgaagcgactgtgtctgtccaagaccacgcggatacaatgtctctttgctatatgaccttgaaaatctt

SEQ ID NO: 413276 - DNA, 82 bp, Homo sapiens
ccgagcgcgagtgtgtaggtgacaggacagcggccaggcccgcccctcccctcggtactccaaagattcaggtttactcacg

SEQ ID NO: 413277 - DNA, 75 bp, Homo sapiens
cccgcaacagccccttcgtcccaagtggtggtgaagtttattaagaaggagaaggtcttggaggattgttggatt

SEQ ID NO: 413278 - DNA, 83 bp, Homo sapiens
cggggcgctccaggaggcactcacagtgggaggctggatcttttccaatccagatggagtgtgcacagcaggaaactccaatt

SEQ ID NO: 413279 - DNA, 50 bp, Homo sapiens
ccgctatccagaacctccactctttcgtttccaacatggctagatccatc

SEQ ID NO: 413280 - DNA, 151 bp, Homo sapiens
cgggaaggacgtgctcccgtggttgcgggcgcagcgggcagtgtcggaggccagcggggccggaagcggcggcgcaggttttgacaagcttgcatcatgcgtgagtataagctagtcgttcttggctcaggaggcgttggaaagtctgctt

SEQ ID NO: 413281 - DNA, 100 bp, Homo sapiens
accaggatggagataaaggaactcaaagaatttgggacatagaaaacatcagtcttgaacttctcttcaagaacccgggctgcaaaggaaatctcctttg

SEQ ID NO: 413282 - DNA, 97 bp, Homo sapiens
tgattggcgggaaaaagaggccaaagatctgacagaactggttcagcggagaataacatatcttcaggtactccaaagattcaggtttactcacgtc

SEQ ID NO: 413283 - DNA, 100 bp, Homo sapiens
gtcgtgatccagaagtccagagctgaggactgcctgtttgcagacaaagaaacagccttggtataatagcacgttagcatcaagacgaaaacgacttact

SEQ ID NO: 413284 - DNA, 104 bp, Homo sapiens
gtgccatccaccctggcagaggagtttacctacaaccccttcatgagagtgagattctacttcaaagaaatcctgccacccgatgattaaacagtgaataaaat

SEQ ID NO: 413285 - DNA, 82 bp, Homo sapiens
cgccgagctcgttggagcttgaacccattgtcacccctccggtttactcctggcttgggggcattaggaagcactggaggct

SEQ ID NO: 413286 - DNA, 50 bp, Homo sapiens
gttaaatcttgcacttcttctgagtgagcatccatgagtatgttttctga

SEQ ID NO: 413287 - DNA, 100 bp, Homo sapiens
cggccggggcagcgctcctggcgctgctggctgcgctctgcccggcgagtcgggctctggaggaaaagaaagtttggaaattttagcattcaggtgccag

SEQ ID NO: 413288 - DNA, 146 bp, Homo sapiens
gagcacgcggtcaccatgccctgcacgtgggtgatggcatgtgcttatgccccatcgggatgtgccattgcttgtggttctgtggctcctgatggatctgagaagatggacgtggaggatgaaaatctgtctgattattttgaact

SEQ ID NO: 413289 - DNA, 83 bp, Homo sapiens
cctattggaggaaaacacaccaagcttccgacttcgactccttaccttaaaagatgctggagtcatatgtaactccaatttta

SEQ ID NO: 413290 - DNA, 75 bp, Homo sapiens
cgcgggtctgtcatcatgtcgcgttacgggcggtacggaggaggaagagcctaggctggatgtcttgatcaataa

SEQ ID NO: 413291 - DNA, 75 bp, Homo sapiens
agtgtatctctgcgtatgaagcaggtggaagaactgagacctacaaattgccgcaccggctcatcgagaaaaaga

SEQ ID NO: 413292 - DNA, 75 bp, Homo sapiens
cgggaagaacaaagacttagactcgagtttattaaccacttaacctctcagaactgaacaaagacaacattgttc

SEQ ID NO: 413293 - DNA, 51 bp, Homo sapiens
cagagtcttgctctgttgtccaggctgaggcaggagaatctcttgaacctg

SEQ ID NO: 413294 - DNA, 83 bp, Homo sapiens
acgaggacatcatcaaggtggaggtgcagcagcccatgctgtcgcctggttgggcccggaaatgggacgtcgcgctttctcag

SEQ ID NO: 413295 - DNA, 75 bp, Homo sapiens
tctacaaccttcgatctcctgacgactgtcttgtcgacggtctcactgatgcctcttctgcattcaaagttcctc

SEQ ID NO: 413296 - DNA, 75 bp, Homo sapiens
acttgtcaacttcctcttcagtcatcagtacaagttggatggcttgaggactggtactaaaaggaaacgtgactg

SEQ ID NO: 413297 - DNA, 100 bp, Homo sapiens
cagctctgcggctcgggccctgaggttccagcaacagatagaaatgctttaagttcactctggggaaagctggcctctgaaatcttaatgcagaattggg

SEQ ID NO: 413298 - DNA, 100 bp, Homo sapiens
agcatctacttcacagaccagtgtccagttaattgtgtttgtggcaatcatgctacataaggttgaagaagcctcagcggaggcgatacggcctcctcgc

SEQ ID NO: 413299 - DNA, 82 bp, Homo sapiens
caccaactatgaagactctcagggcgcgatttaagaagacagagtgcctttgctaccctagaagaggaggcttgtacagaac

SEQ ID NO: 413300 - DNA, 90 bp, Homo sapiens
aggtaggctgcgttgaggatctttgctcttccatccgcctttgatcgtcttcctcttcagccatccagggcggcgactggcggcgcgatg

SEQ ID NO: 413301 - DNA, 100 bp, Homo sapiens
aggagattggtgcagagatggcattacgaacctttggccacttggtatcggtgatgagctacagtgccaaatttgcttcctgtttctatggccctttccg

SEQ ID NO: 413302 - DNA, 100 bp, Homo sapiens
gctgtaccgccagttcaccaccaccgtgcaggtcgtcatcttcataggctcgctgctcggtactccaaagattcaggtttactcacgtcatccagcagag

SEQ ID NO: 413303 - DNA, 90 bp, Homo sapiens
gcgggaggcagggggacgacaaggagggcatgatcaacctcgtcatgtcctacgcgtaagcgatacgaatcccagcttcgggatcttgag

SEQ ID NO: 413304 - DNA, 82 bp, Homo sapiens
gggctggaaattgcgctggaccgtcgccttgctcctcgccgcggcggggactgcagcttcctgggtctgcaggtccagccgg

SEQ ID NO: 413305 - DNA, 100 bp, Homo sapiens
aaaccgggaggaaagaagacaagagagaacgcaaacagtttgaagctgaggattttccagctgtctgttaccaggcaatcacgaagaagttgaaaatatg

SEQ ID NO: 413306 - DNA, 51 bp, Homo sapiens
ctgtcattcacaaccccctgaaagcatgatatcatcaagttgaatcgaaag

SEQ ID NO: 413307 - DNA, 83 bp, Homo sapiens
tttcaagacaccaagtgagaggccaaccagcaagagtgagccatggagctacgtgtggggaacaagtaccgcctgggacggaa

SEQ ID NO: 413308 - DNA, 100 bp, Homo sapiens
cacatcctggagctgcccggagttccgctcctgcgggcttagcaggaaagggtgcctaagaatggctattcaagtggacaagttcaactttgagagtttc

SEQ ID NO: 413309 - DNA, 82 bp, Homo sapiens
ctcccgccgcggcggccggcgatagcccggcgctcatgacaggtagcagcaattgcagagacagatgaatctgcagaatcag

SEQ ID NO: 413310 - DNA, 75 bp, Homo sapiens
tgcatccagtttctgcgcccagcaaactttgggggctcaaatgcaaggtggttttggatgtggcaaccagttgcc

SEQ ID NO: 413311 - DNA, 82 bp, Homo sapiens
gctttttatttttccccaattcagcagagaatattttcaaggggggagaatggggtactaagagaaaagcacgaagctgtgg

SEQ ID NO: 413312 - DNA, 98 bp, Homo sapiens
agacgaccatcatcatcactgtcatggacaaggacaagctcagccgcaatgacgtcatcggcaaggcgctccaggcccctgcctgtcacgagaacatg

SEQ ID NO: 413313 - DNA, 100 bp, Homo sapiens
gtgtccatcattgagtgtgacatgaacaacctgtctccagagaagattttccacgtcattgtggccccttgttatgacaagaagctggaggctcttcagg

SEQ ID NO: 413314 - DNA, 88 bp, Homo sapiens
attttgtgactattgaagctagtcttaaacagaaaggaaaggcagcaacaggtggaagctgttgagttggaggctaaagaagttctca

SEQ ID NO: 413315 - DNA, 73 bp, Homo sapiens
agcaagagcaagatcaccgtgacatccgaggtgcctttctccaaaagattttaccaaatgttgcaagaactct

SEQ ID NO: 413316 - DNA, 75 bp, Homo sapiens
aagactggacccaccagggtatagcaaagctctaccattccatcaatgaaattaaacaaccaccatgtcgagcaa

SEQ ID NO: 413317 - DNA, 100 bp, Homo sapiens
tgttcttcaaaacatggtgaaaacatgcaactctgaagaatcaggggcaagagacagctgtgctagaagaatggaggattataataaatttgaaaaacca

SEQ ID NO: 413318 - DNA, 50 bp, Homo sapiens
caggcatcatccgctatgcaattggggattttgtgtggatgagggctcgg

SEQ ID NO: 413319 - DNA, 101 bp, Homo sapiens
agaggagcagcatggcatttcagtcactggtttgcagagtccaggaagctgcagtaaaggaagatgaagaagaagtttcagataagggcagtgattctgaa

SEQ ID NO: 413320 - DNA, 100 bp, Homo sapiens
acaaccaatgcgagcctgcctcttaaccgaataagacgagttggaagaagacctgatcaacaacttcagggtgaagggaaaataattgatagaagaccag

SEQ ID NO: 413321 - DNA, 75 bp, Homo sapiens
atagcctttgccatcactgccattaagatgctgagggttggaaaagcaaaagcagatgtgtggcccaaaactgct

SEQ ID NO: 413322 - DNA, 113 bp, Homo sapiens
ataaagtgattttttgcctttgttgattaactggacaaattcaggttcaaaccttgtactactcagctgatcacaagctgcttgatgggaacctactagatggacaggctgag

SEQ ID NO: 413323 - DNA, 90 bp, Homo sapiens
aaagaagcaaaagcaatgaaggagcagatgtgcccttccgagaggccccggcgtactccaaccgccggcggcggccccccaacacgctgg

SEQ ID NO: 413324 - DNA, 82 bp, Homo sapiens
cacctgcacctcagagtaaagctgctggacaacaccatggaaatatttgacattgagcttagagctttcacagacaacagag

SEQ ID NO: 413325 - DNA, 100 bp, Homo sapiens
cggaacaccattcttcgccaggccaggaattgctcaagtaaagctctttgtgacagggcttttcagcttaaatcaagatattcctgctttcaaggaacat

SEQ ID NO: 413326 - DNA, 75 bp, Homo sapiens
ccagcttcggaacaagagaccctggtgctgctagctgaggaggggatagctcctctttcttctgcaggaccaggg

SEQ ID NO: 413327 - DNA, 82 bp, Homo sapiens
cttccccacgcaaccccagatccatttacactttacaagcataatggcagcgtctgaggttgctggtgttgtggccaatgcc

SEQ ID NO: 413328 - DNA, 100 bp, Homo sapiens
ctacttaaaagcaaaagagttaattaagtattactaattggtgatactagatcaatgaagggactacatggaaggttgtcttggcactgaacggagaaag

SEQ ID NO: 413329 - DNA, 80 bp, Homo sapiens
atctccagcgccggcctcctcagtgcgaagaagctgcagccgcacctggccaaggcaatccaggagtggctgaaggaggg

SEQ ID NO: 413330 - DNA, 97 bp, Homo sapiens
gctcctgggaggtcatcgaaggctaccgggcccagcacagccagcaccgcacgccctgcaagggaggtctcagccaatttcttctccagtcatcctc

SEQ ID NO: 413331 - DNA, 100 bp, Homo sapiens
ctcctggaagcttaacttcttatccatcccatctcttggacagatgatgccagttaattactttgaatatttgcttgctgaaaatggtcgattaagcaat

SEQ ID NO: 413332 - DNA, 98 bp, Homo sapiens
gaagcagaagctgataaaagggagtcgcagctctgacttcggcagtctgtccaaccttcaggtcactcagcctacagttgggatgaatttcaaaacgc

SEQ ID NO: 413333 - DNA, 100 bp, Homo sapiens
caagaatctcagagttcctcaaagttgcagagctgccagagaaactacgcataggctggaataacaagatggtgaaaactgctggcttatgcagcactgg

SEQ ID NO: 413334 - DNA, 75 bp, Homo sapiens
aattaaaacactggaagaagatgaagaggaactttttaaaatgtgccaagtcctgccctgccaacttcttggcag

SEQ ID NO: 413335 - DNA, 75 bp, Homo sapiens
ggagtactggcccttggagctcgcaggaacgaatgcaggaatttgggaactgagctgtgcaagtgctgaagaagg

SEQ ID NO: 413336 - DNA, 115 bp, Homo sapiens
agaagggcctcataatggagttgggggctgaggagtggcccaggcccagggcgtggccaaactcatggacagccacggcaaacaggattccagaggagaaccagccacccagcaa

SEQ ID NO: 413337 - DNA, 90 bp, Homo sapiens
aaaaatggcgattctgcaaccaagcacctgaaacagcaggatggggaaggccaacgcattgacatccagatgaagaaccggatggacggc

SEQ ID NO: 413338 - DNA, 99 bp, Homo sapiens
cttggtctcaaagggaacttggaaatgacattggcatccagattatccactgcaagaattcggtcaacagtggatgaaaaagaacaaaaacaacttctt

SEQ ID NO: 413339 - DNA, 50 bp, Homo sapiens
aactcattttctggggaataggggctccaaatgtgaagtacaagtgaaaa

SEQ ID NO: 413340 - DNA, 90 bp, Homo sapiens
catcctggagggtgagctggagagggcagaggagcgtgcggaggtgtctgaactgcattgatctggagaacattgtgtactacaaggacg

SEQ ID NO: 413341 - DNA, 100 bp, Homo sapiens
tttcatccacaaatcaaatctggatggaacaaatcgatttttgcagctcaagtggcagtcctcctttccagcccatcaaaagccacgtaaccattccaac

SEQ ID NO: 413342 - DNA, 100 bp, Homo sapiens
gctctgagcactatgactagctctgtccagggagatgcacttatttacatggaaccagagaaacaagtgatgtccaggtcgtcagatgaatgtgttgtgg

SEQ ID NO: 413343 - DNA, 102 bp, Homo sapiens
gttcccccaaatgtctgactctgactctcggactgagaaacgcaagaagctccaccatgaggcgaggtggatggaggaagcgagctgaaaatgatggctggg

SEQ ID NO: 413344 - DNA, 83 bp, Homo sapiens
caattccaccaagttctccctctttgctggaggcatgctgcgcacaactacgggattggcgccgccgcctgcgtgtactttgg

SEQ ID NO: 413345 - DNA, 100 bp, Homo sapiens
ctgacgggtaccttctacatgtgcaaagcaggtagtgggcagcagtcagtgacaggtgtaacctctgtggatgacagcaacagttactggaggatacggg

SEQ ID NO: 413346 - DNA, 100 bp, Homo sapiens
taaaggaacggggcctaaaaaacattcgcattggaattgaagctctagaggacaaaatcccagtccttggcacaaactcaggaaatggaagccggagtct

SEQ ID NO: 413347 - DNA, 75 bp, Homo sapiens
agaactggctaggcaaataagctttaagcaattctgtggtgttcttggtcacacatttatggagtttctgaaggg

SEQ ID NO: 413348 - DNA, 100 bp, Homo sapiens
tttcttctcaccatttctggccaaaactacaaacaagacttcgcagaagagaagctgaatttggacgacagccagtgggaggacatccacgttgtcaccg

SEQ ID NO: 413349 - DNA, 115 bp, Homo sapiens
gagtagcgacccggggggagcgcggggcgacgctggctgcagggacccggtgacagcgtgagaggttcgcagatctgaagatgatgagaaactgaaaaagaggaaggagcgattt

SEQ ID NO: 413350 - DNA, 50 bp, Homo sapiens
cgcagtggtcgcttcttctccttggtgcagcttcaagcttaggaccaccc

SEQ ID NO: 413351 - DNA, 74 bp, Homo sapiens
tgaaggtggcccctgtgctgttattgcacctgttcagaatggctttaagtgtcattgtatgtccgaatctcatc

SEQ ID NO: 413352 - DNA, 100 bp, Homo sapiens
aaggaggaggagtgcatcagcaggctggcccaggacaagggagaggtgaagcccctgcctgacttctcacgagtccctggtctgacattgcccagtggag

SEQ ID NO: 413353 - DNA, 90 bp, Homo sapiens
gaaatagcacatgcagtacttgggcatgctgaacagcatatgccatatatgagctggctgtggcttcatttcccaagaagcaggagtgac

SEQ ID NO: 413354 - DNA, 98 bp, Homo sapiens
ccttcgggtcgggcgtctccgccggctactgccgcttcagttctcccggtgtggccacgagtcggctcgactgtgggatccaccctggcctagaagga

SEQ ID NO: 413355 - DNA, 90 bp, Homo sapiens
ggtctgttgtaccccactgctggggtggtggttccaatgagacagggcacaccaaactccatctgtcttccgtgtgtgctaagatcgtgc

SEQ ID NO: 413356 - DNA, 82 bp, Homo sapiens
ttttttctgttcagtgacatctgcttacaaaacactacacagcaaaataatgatctgctagactgctaacccgagcatccag

SEQ ID NO: 413357 - DNA, 75 bp, Homo sapiens
ctgtctaggagagcatttgtatgttatggtgaatgccaaatttgaaggctttcatgagaaggacaagaagccata

SEQ ID NO: 413358 - DNA, 75 bp, Homo sapiens
aggcagcatgcggaaggcattgctgggagcctgaaaactgtgaatgttgaaaacgaggcccactgcgactttgtg

SEQ ID NO: 413359 - DNA, 98 bp, Homo sapiens
aaacttcgtactttctatgagaagcgtatggccacagaagttgctgctgacgctctgggtgaagaatggaaggaattgccccccactgcctggatgag

SEQ ID NO: 413360 - DNA, 82 bp, Homo sapiens
gagtacgtgctgcatgtctacgggaatccctgtgctgatcgtggggcatcatatcctgtatgggaaaatcatccacctggag

SEQ ID NO: 413361 - DNA, 75 bp, Homo sapiens
gctgtgtcctgcaccgctcatgctcgcccggctttggggtcaagcagattggaagagatgatctagagagcttcc

SEQ ID NO: 413362 - DNA, 75 bp, Homo sapiens
gccagggaaccctggtcaccgtctcctcagtatctagtcctcagactattgtggagttattcttccaagaagttg

SEQ ID NO: 413363 - DNA, 78 bp, Homo sapiens
caagtgctcttatggacttggtacaaggagtatatcatgaaaattctacttcaaaggcctttgtggaggcccagaata

SEQ ID NO: 413364 - DNA, 83 bp, Homo sapiens
ccgctcagcaagctccacatccccgtgctctaatggtaccaagtgacaggttggctttactgtgactcggggacgccagagct

SEQ ID NO: 413365 - DNA, 100 bp, Homo sapiens
gcagtcggtcgtccgctggacaagcacgagggcgcgctcgagacgctcctgaggtttaagaattgtttaagctgcatcaatggagcacatacagggagct

SEQ ID NO: 413366 - DNA, 96 bp, Homo sapiens
tcctgtctctcgagttggaggcatcttgacttagttgctgggagcctgggaatgtcactagtgcatctgggtctcagatggcaagcggcatcagcc

SEQ ID NO: 413367 - DNA, 50 bp, Homo sapiens
aactctttccagcttgtgtctggtactccaaagattcaggtttactcacg

SEQ ID NO: 413368 - DNA, 75 bp, Homo sapiens
gctcaccaactacaaagccttcagccagttcatgagagttcctatcagactgagattgggcagaccctggacctc

SEQ ID NO: 413369 - DNA, 75 bp, Homo sapiens
ataaggacaaaagccaagaggaggacagttcgctacacagcaatgcatcgaggttactataacaacagtaccaag

SEQ ID NO: 413370 - DNA, 100 bp, Homo sapiens
ctatgcagtatttctttggcatcactgcagctagtaatttgccttctggattatatcttaatgcaattcagacaatgtgtccacacattcttcgctattt

SEQ ID NO: 413371 - DNA, 97 bp, Homo sapiens
tcgccgccatgacgaccgcgtccacctcgcaggtttgcttctctggcggtcttcagaatcaacatccacacttccgtgattatctgcgtgcattttg

SEQ ID NO: 413372 - DNA, 82 bp, Homo sapiens
ccgctcctaagcctgcacagccgcggcggcagcagcagtgagagtccagaatgacagggtccagaaactggcgagccacgag

SEQ ID NO: 413373 - DNA, 100 bp, Homo sapiens
ttaaaggagtcttcaggggacccctgtgcaagaacggatctccctctccgacttgcacacctacccctgtggagcgtgcaccctataagggagaagtcgc

SEQ ID NO: 413374 - DNA, 60 bp, Homo sapiens
cccaccgtgcagcggggcatcatcaagatggtatggcacagtcacaagggtgggtgaaaa

SEQ ID NO: 413375 - DNA, 100 bp, Homo sapiens
ctggaatttgattaactcattcaaggttacccagttgttacatggacacagaacagtatgaagaagcagtacgagactatgaaaaagtataccagacaga

SEQ ID NO: 413376 - DNA, 75 bp, Homo sapiens
tctgttctgccctggctgcctcagccctaccagcactggtcatgtctaaaggtccttctctggcctcaattcccg

SEQ ID NO: 413377 - DNA, 90 bp, Homo sapiens
cggcgccgtcttcaacctcgagtactcgcccgacgggtctctagcatcaattcacgctttgccaaagtacacatcctgtatgtggggtcc

SEQ ID NO: 413378 - DNA, 73 bp, Homo sapiens
cgagcccttgggccgcgtctcctttgaggtggagccgccaccaaaatgcagattttcgtgaaaacccttacgg

SEQ ID NO: 413379 - DNA, 82 bp, Homo sapiens
ctgactgcctatgaatttgctaaacttaaaagcaagctggttctctgggatataaataaggaattgaatgatctggcacggg

SEQ ID NO: 413380 - DNA, 100 bp, Homo sapiens
gacctctacaactgggaggtggccatcttcggaccccccaacaccctctacgaaggcggctacttcaagattaattagctctcaggactgctgtgtccag

SEQ ID NO: 413381 - DNA, 90 bp, Homo sapiens
cagttggcaatgcaacagtctcattttcccatgacgcatggcaacaccggattcagtggatgaagtcgtcttcttcggtgaccacttccg

SEQ ID NO: 413382 - DNA, 100 bp, Homo sapiens
ccagccgtccccagaacgcagatcagaggtagtcggacctttcccgctggcgcgcagcctcagctagcaaattgttttctcaagcaaaaccccatttgtg

SEQ ID NO: 413383 - DNA, 74 bp, Homo sapiens
cccgggcgagcgggtgcgtctgccgcagagtcggcacctgaaggacatggagatcctgaggaggatgaaggggc

SEQ ID NO: 413384 - DNA, 126 bp, Homo sapiens
cggagatctctctcatctcgctcggctgcgggaaatcgggctgaagcgactgagtccgcgatggagacaatgcagatcttcgtgaagactctgactggtaagaccatcaccctcgaggttgagccc

SEQ ID NO: 413385 - DNA, 101 bp, Homo sapiens
aagaaatatacggcattatgaaattacaaaacaagatattaaagtggcaatgtgtgctgacaaggtcagaatgaaggaacgatttccgtagttgaaggaga

SEQ ID NO: 413386 - DNA, 75 bp, Homo sapiens
cctggacagtcagtttcttttcaaaggcttcctggactgggtccccaagaagatgcagcgggtgggctgtgtgga

SEQ ID NO: 413387 - DNA, 98 bp, Homo sapiens
tgctcccctcgtcgcagtttccagcccgacgagcttgttttgtcccggactcgggtccgccttagtaagcgccgggccaaggctggggttcagtcagg

SEQ ID NO: 413388 - DNA, 100 bp, Homo sapiens
tgcgcgggctgcgcaccaagtgcgctgtgtccaacgacctcacccagcaggagatacggaccctggagcttcggaaccaaaaagaagcttcccagagccg

SEQ ID NO: 413389 - DNA, 125 bp, Homo sapiens
agaaaagtcaggaccaaatgacagaggatctgtccctgtttctagggaacaacacaattcgattcaccgtatgttccagggtcacccccgagaggacaacaggcatctggaagtgctctctcgcc

SEQ ID NO: 413390 - DNA, 96 bp, Homo sapiens
ccagcagcgggcagtagccatcaataggttgttgtctatggccatccggctgtccttagagcaagccctgcctcctgagccaaaggaagaaaatgc

SEQ ID NO: 413391 - DNA, 83 bp, Homo sapiens
cccaagtttggtggtcgcaatataaagaagcagtgctgcaaatgtggccccatggtattggatgctttaatcaagattaagaa

SEQ ID NO: 413392 - DNA, 75 bp, Homo sapiens
gaagcgtcgaaaaggtcttgattctgagaatgaatttgtggctgcttcaacccccaactccactgctggtgcagc

SEQ ID NO: 413393 - DNA, 123 bp, Homo sapiens
cgtgccagctatgacaccggctctcatccagcttctgccatttacaggaaaggccgagggggacggcaagatgcacatcaccctctgtgacttcatcgtgccctgggacaccctgagcaccac

SEQ ID NO: 413394 - DNA, 83 bp, Homo sapiens
tttaggttccttttctccggcaggctcctaagcctaggagagcccgaactggagcccaccttgggacaccttgactccaagcc

SEQ ID NO: 413395 - DNA, 98 bp, Homo sapiens
taccaagtagttcaaaagtatttgtttcagattattaatggaattggattttgtcacagtcacaatgcccaacagacttgtgaagaatgtagcacatt

SEQ ID NO: 413396 - DNA, 83 bp, Homo sapiens
cagagaaagtcctcgctcgtcaccagcaagcttgcggggtataccgctgggccgaccactcaagcacggtgctgcagcggctg

SEQ ID NO: 413397 - DNA, 100 bp, Homo sapiens
tgcatttcctcgtcgagcgcaacccaagattgaaaaggaagatcaggccaaccccaaagaagaagtgaccaaggaggagtttaaactgaatgaacaacct

SEQ ID NO: 413398 - DNA, 90 bp, Homo sapiens
catggctggctacgaatacgtgagcccggagcagctggctggctttgataagtacaagggtatgttagagcccaccaaggaaccactgaa

SEQ ID NO: 413399 - DNA, 98 bp, Homo sapiens
gaaacaacctggcccatgagatgatagctgtggaagagatcagggaagatgtgccttggagaggaagcatgtcttaaatctggaaatgatatgaagag

SEQ ID NO: 413400 - DNA, 87 bp, Homo sapiens
cgggcgccgcgaggtcgtgttcccgaacagtggaagcatcagttcacagcagtaatgcacactgtacagataagacaattgaagctg

SEQ ID NO: 413401 - DNA, 60 bp, Homo sapiens
agtcttcctcttgatccatatgtttcaggaacccttaacattcagggatgtggccataga

SEQ ID NO: 413402 - DNA, 100 bp, Homo sapiens
gtggttcacccgctgccgggcaccgaggaccagctcaatgacagaatatgacagatacctagcatctagcaaaataatggcagctgcttaccttgacccc

SEQ ID NO: 413403 - DNA, 100 bp, Homo sapiens
cccgcgagcacagagcctcgcctttgccgatccgccgcccgtccacacccgccgccagcttttcctccgcaaccatgtctgacaaacccgatatggctga

SEQ ID NO: 413404 - DNA, 96 bp, Homo sapiens
ccttcaacaaccccaccacggagttccggtacaagctcctgcgggccggcggggggagtacatcaagacctggcggccacgctacttcctcctcaa

SEQ ID NO: 413405 - DNA, 74 bp, Homo sapiens
tggtcatcaatgttactcaggtagaggttaacaggaagatctcgagggccctggctgaacttcaccttttggct

SEQ ID NO: 413406 - DNA, 100 bp, Homo sapiens
cagcctcaacccagaggaatcgttactctttcagaaaactggtggtcagtacttgaacctccactattcctcaagatagtagaactttttaaggaagttg

SEQ ID NO: 413407 - DNA, 75 bp, Homo sapiens
acatgctgccgagctctggaaaaaccccacaggttacatccactaccagcctgcccaggaccggctgcaacccca

SEQ ID NO: 413408 - DNA, 98 bp, Homo sapiens
taaagaagtaaagatcctatatcatctactgaaatctttaaagggtggagccatcgaagcccccacccacaggctgacagaggcaccgttcaccagag

SEQ ID NO: 413409 - DNA, 75 bp, Homo sapiens
gctggcgctagtctgaccctccgccaggcaaaaggaagctctgcttatgataatgtcaacaaagttcgagtagct

SEQ ID NO: 413410 - DNA, 75 bp, Homo sapiens
ttcagaagcagaagacaagttcacagcctggccgcgtcgtcaatatcagcagcatgctgggccgcatggccaacc

SEQ ID NO: 413411 - DNA, 105 bp, Homo sapiens
atcaaatggcacttcattggccacctacagaaacaaaatgtcaacaaattgatgggtggataagattgtggaccagctgcagcagttaatgcaggtgtatgactt

SEQ ID NO: 413412 - DNA, 80 bp, Homo sapiens
gagacttttctcagatgttggatatttgcttggaaaaacgtgtgggtacgaccttgatatttggagttcttacaacatgg

SEQ ID NO: 413413 - DNA, 124 bp, Homo sapiens
accttccggcggccgaagacactgcgactccggagacagcccaaatatcctcggaagagcgctcccaggagaaacaaaataacctgaagcccccacaagcaaaaaggaagatacaacatgttac

SEQ ID NO: 413414 - DNA, 100 bp, Homo sapiens
gatgaagaagggagttcagaggacctgctggagctgtcagacgttgacagtgagtcctcagacattaggatgcttaaatggcagaggccaagcccagact

SEQ ID NO: 413415 - DNA, 82 bp, Homo sapiens
aggaacgaggcaaggagctaaagcagcgtgcgttcagccctggggaccaccccaggacaattcaggggaagctttaaaggaa

SEQ ID NO: 413416 - DNA, 80 bp, Homo sapiens
ctagggctggagcctctccagcctcccgcgaaggtattaatctctggagaagacacatccacagttagcactttcttcag

SEQ ID NO: 413417 - DNA, 100 bp, Homo sapiens
cagcaagaaagaccatcaagtttaccaccatccagtccaatggatcagatgggcaagatgagacctcagccatatggcgggactaacccatactcgcagc

SEQ ID NO: 413418 - DNA, 82 bp, Homo sapiens
gagagtatgaggtggcagagggaattggttccactgtgtttcgagcgattctgtatgtggagggatcttttgagaaatacct

SEQ ID NO: 413419 - DNA, 73 bp, Homo sapiens
ggtcggtcccggggtcacccgctacgggaagcaggcctcgccacagaggaatgcagtagcatggatagttgat

SEQ ID NO: 413420 - DNA, 100 bp, Homo sapiens
ttcggtggactccttcggcagtccacccaccgccgccgcctcccaggtgatgtccttgcaaatatcaatggtgtgagcacagaaggttttacctacaaac

SEQ ID NO: 413421 - DNA, 100 bp, Homo sapiens
agtcatcccacccacggctctcaacagcatcgactccgatggtacaggtttgcagattccgccagcagcacagcaagctctacagatgagtggctctttg

SEQ ID NO: 413422 - DNA, 74 bp, Homo sapiens
ccaggccgtggtcagccgcttcgacgagcagtagctgctgctggtggtgacaatgtcaaataacggcctagaca

SEQ ID NO: 413423 - DNA, 75 bp, Homo sapiens
ctccatcacccaccaacaacaccacaataatccacagccaagtaattcgccaaaatgacgaacacaaagggaaag

SEQ ID NO: 413424 - DNA, 85 bp, Homo sapiens
agtgcggcagtaccgcctccttcccagccgcgcggcttcctccagacctctcggcgcgggcactgaacttcccagccctgccgtg

SEQ ID NO: 413425 - DNA, 75 bp, Homo sapiens
caaaactttgggcttgcaacttttgttaccaaaggaatcaggtacgaactatggctcgagatttatacgatgacc

SEQ ID NO: 413426 - DNA, 101 bp, Homo sapiens
ccctcagcacatggtgggggccacaccatttgccgtggccaggctagagacctgcctagagctggaacgttacctccagagcgagccctgctatgtttcag

SEQ ID NO: 413427 - DNA, 133 bp, Homo sapiens
tctgcacttcgcattttggcattgacatttaattttagggtcctttatatagaagggagagtagtggattgtattacacagagcatgaatatacttctttaggttacacgcatggggagatactctggaggaa

SEQ ID NO: 413428 - DNA, 82 bp, Homo sapiens
caggcgcggagccgggccggcaggagcgcctggaccatgctgctgagcgcctactggcacggcctccacccgggctactacc

SEQ ID NO: 413429 - DNA, 97 bp, Homo sapiens
ggtgtcctggtgcacccccagtgggtgctcacagctgcccattgcctaaagaagacagtcattttgtttactcattcagccctgttgcaggtcccaa

SEQ ID NO: 413430 - DNA, 97 bp, Homo sapiens
gtacctgcagaaggtctctggagacatcttcagcaggactgaccagggccaagtggcgctcggcgggcactacatggcggagggtgaagggtacttc

SEQ ID NO: 413431 - DNA, 90 bp, Homo sapiens
caagacccttgtgctcgttgtcgccgcggtcctgctgttgtgaataaccctataccttccaatttgaaatcagaagcaaaaaaggctgcc

SEQ ID NO: 413432 - DNA, 95 bp, Homo sapiens
cattgcagaaaacaaaggattatgaggaagatgtacgaatccaaaatgcaatcaatatagctcagatctctgacatctacattagtggagaatca

SEQ ID NO: 413433 - DNA, 100 bp, Homo sapiens
agcccaagaaacatctcaccaatttcaaatccgtcaagtccatcatctccagaaccagctagtcttcctgcagaagatattagtgcaaactccaatggcc

SEQ ID NO: 413434 - DNA, 80 bp, Homo sapiens
tctgcccaggccaagggacctgcctgtgaagaacccttactctcctgggctggcgcttgtttgatgacagcacagtgaca

SEQ ID NO: 413435 - DNA, 82 bp, Homo sapiens
tcatcctgccttgtgctcacagcttttgtcagaagtgtattgataaatggatcaggagaaggtctggggaaaataatccaga

SEQ ID NO: 413436 - DNA, 90 bp, Homo sapiens
ttggaaagacccaggagaagccgcccaaagaactgctcctttagcggcagagttttccgagtgaccttcttgatgctggctgtttctctc

SEQ ID NO: 413437 - DNA, 82 bp, Homo sapiens
catgagagtcgaattggagaacttgttggagtgctggtgaatcatttcaagaggaatccatgggaaagagctatgatgggag

SEQ ID NO: 413438 - DNA, 76 bp, Homo sapiens
tttgtaaattgagctctgcacgctggggagtttgttggggcatctccttggaaacaatgccatctttgaatgtgag

SEQ ID NO: 413439 - DNA, 100 bp, Homo sapiens
gtagcggcagtggcggcgcgtaggaggcggagctatgaagacatgattggtgaggaggtgccatcggatcaatactactgggctcctttggcccagcatg

SEQ ID NO: 413440 - DNA, 100 bp, Homo sapiens
ccacctagagccttggatccaggagaacggcggctggcggagctggagtttgttcagatcatcatcatcgtggtggtgatgatggtgatggtggtggtga

SEQ ID NO: 413441 - DNA, 83 bp, Homo sapiens
aggagctcatcgggcagattagcgacatccgagtgcagaacctgcaagttccagggtctccctccactgctgtagtaacccgg

SEQ ID NO: 413442 - DNA, 100 bp, Homo sapiens
ggctcctagggcagcgcctagagcacaggtagcagcaattgcagagacagatgaatctgcagaatcagaaggtgtaattgattctcataaacgtagagaa

SEQ ID NO: 413443 - DNA, 100 bp, Homo sapiens
ccgggaacgcttggcactccaaaaatttcacgaagtatcccaaaaagttctaccccctggagattgactatggccagcacaccaaatgaaaagctgttgg

SEQ ID NO: 413444 - DNA, 75 bp, Homo sapiens
ggcgtattggcggctactctttaaaaaggtcaaaggaagagatgtttctgaaactggggcctgactggttcctgc

SEQ ID NO: 413445 - DNA, 100 bp, Homo sapiens
caaggattctcgctgtgacagagacaacaccgagtatgagaattgctgatatgtgttcaagatgagtgggatgggagaaaatacctctgacccctccagg

SEQ ID NO: 413446 - DNA, 100 bp, Homo sapiens
ttctttgtgtaggttgttcaacagtgttgtgccagcctacaggaggaaaggccagactcacagaagaccaaactgcagctggaatacccagtacagttct

SEQ ID NO: 413447 - DNA, 75 bp, Homo sapiens
gaagcggccaccgactactgtcagcagctgtgccagattctgatgctcacagtaccacctcaagtgcctccccag

SEQ ID NO: 413448 - DNA, 99 bp, Homo sapiens
tgataagtgccgtatcttatgccatgccttaactagtgatttcctcatctatggtacagatataacaacgaacttgatgcaagtgataggtttgccaag

SEQ ID NO: 413449 - DNA, 83 bp, Homo sapiens
tgaaaatcaacgacaacttgagcacagggtaacaagatgctcaactatagtgctcccagtgcagggggttgcctgctggacag

SEQ ID NO: 413450 - DNA, 101 bp, Homo sapiens
ctccatcttccctactatgatggtgtgtatgatggcctggcgacccattcaggcacttatggccatttcagccagcagcaattccatttccgtgagggcgt

SEQ ID NO: 413451 - DNA, 83 bp, Homo sapiens
ccccgttcctggagattctgattgagggtttccaggcctgaggtgcccgccctggccccaggagaatgaaccagccgcagagg

SEQ ID NO: 413452 - DNA, 83 bp, Homo sapiens
ggctccagccgctgtcgcctcgatctcctcgtctcccgctccgccctcccttttccctgacagatgcaccatcaggaatggaa

SEQ ID NO: 413453 - DNA, 75 bp, Homo sapiens
acggtggctactctgcctcggggacgaaagcagaaaacccgcctagtgccaagcaaccctccaagatgctagtta

SEQ ID NO: 413454 - DNA, 50 bp, Homo sapiens
ccctgatttacctcaggagtttgaaagttatttgaaggattgaaggcatt

SEQ ID NO: 413455 - DNA, 111 bp, Homo sapiens
cagaacccggccctcaccgccctcaccacccctatccagacggctgcccttcaagtaccaggtgtgggccgaagatatgctcatgtggtgttgaggaaagcagacattgac

SEQ ID NO: 413456 - DNA, 73 bp, Homo sapiens
aacaactgtggcatgggcattggcggcggcaagggtgatctggaccctctggcatctctcaaatcgctgactt

SEQ ID NO: 413457 - DNA, 96 bp, Homo sapiens
agatgatgaaccacagcatgagctccgggtccggatccctgcgaaccaatcagaaacgctccctctacgtcagacccctgagccccttccagtgct

SEQ ID NO: 413458 - DNA, 100 bp, Homo sapiens
ccggaacgggccagcgctgcaagaggcctacgtgcgggtggtcaccgagaagtccccgaccgactgactgtgccctgtccacggtgcctcctgcatgtcc

SEQ ID NO: 413459 - DNA, 100 bp, Homo sapiens
cttctcagacccgggagcgtccgggacgcggagcccggagctggggcgacgaggcgattgcgggggcctgggctagagggagaaccgaagattacaggag

SEQ ID NO: 413460 - DNA, 75 bp, Homo sapiens
aagtggaaataaactgaaagatatcagcaccttggaacctttggatggtcatccagaggataagccaacgcacat

SEQ ID NO: 413461 - DNA, 83 bp, Homo sapiens
ctgcaacgggctcatcaactcctacgaggacaaaagcaacgacttcgtatggtcaaaatgcagatcttcgtgaaaacccttac

SEQ ID NO: 413462 - DNA, 89 bp, Homo sapiens
ttgtccctcagtggagaacaaggcgtgatcctaatgtcacaggtcaatatccaacacagccaacctaccctgtgcagcctcctgggaat

SEQ ID NO: 413463 - DNA, 76 bp, Homo sapiens
gagggcctggtacaagggaatgtcacaagcacactggtggaggccattgtcttgccaatgaaccacaaggagaagt

SEQ ID NO: 413464 - DNA, 96 bp, Homo sapiens
gcgggtgcgtctgccgcagagtcggcacctgaaggacatggagtcgtccagcatgctctgcccaccccacgccgaggtgcactgaccatgagcctc

SEQ ID NO: 413465 - DNA, 100 bp, Homo sapiens
gggcacccagagataggagatgctattgcccggctcaaggaggaggagatgttaaagtaacccatcttgcaggacgacattgaagattggtcttctgttg

SEQ ID NO: 413466 - DNA, 75 bp, Homo sapiens
cggcttcggagcgggagtgttcgttgtgccagcgactaaaaagagccagtaatgttaaagtagagactcagagtg

SEQ ID NO: 413467 - DNA, 51 bp, Homo sapiens
cttctgcactgtttacaggcacagtttttcagttatgggacaaaaatatta

SEQ ID NO: 413468 - DNA, 95 bp, Homo sapiens
aagtccatgccaggaggtcgtctgcagtcagtgcacgatctgattttctggagagatgtgaagaagactgggtttgtctttggcaccacgctgat

SEQ ID NO: 413469 - DNA, 100 bp, Homo sapiens
acagtacaaggtgatgaagactatccctctatacaatgattttttatcaagcagaaatgcatcgaacaacgagaatcaagatcactgagctaaatcccca

SEQ ID NO: 413470 - DNA, 100 bp, Homo sapiens
ccgaggacatctgggctgcgtgctgtgttgtcacaaagaagaagctcattcacacagaagacccatttaatgatgaacatcaggagaggcaagaggtgga

SEQ ID NO: 413471 - DNA, 90 bp, Homo sapiens
agggactcacagctgatgacctgctgctcgtgctgatctcagtcaaacgcttcagagaaccaaagcatgaaagacgtccgtggaggatat

SEQ ID NO: 413472 - DNA, 100 bp, Homo sapiens
gagctgaccctgggagacatcgacgccaaaagaatgcaatggtgtaaagattccagttgatgccagtaaacctaatccaaatgatgtggagtttgataat

SEQ ID NO: 413473 - DNA, 75 bp, Homo sapiens
gacttccctttggatgtagcaaggaagaaattgttcagttcttctcaggcgtcacctcctcctgtcgcctggccc

SEQ ID NO: 413474 - DNA, 87 bp, Homo sapiens
tcccccgcgtccctgcgaccgccgcggcgaagatgacaacaactctggaacaagctattaaaagtgcccatgagtgttatgacgatg

SEQ ID NO: 413475 - DNA, 73 bp, Homo sapiens
gcggtgagatcgtcagcgctgactccatgcaggtttttcgttggaatatacgttgcacatttatggcgattct

SEQ ID NO: 413476 - DNA, 75 bp, Homo sapiens
ggcaaagggaccacggtcaccgtctcctcagcaatggctgccatccggaagaaactggtgattgttggtgatgga

SEQ ID NO: 413477 - DNA, 75 bp, Homo sapiens
tgggaccttcgcctttcggaccccaaaggcccgggaccgtggcgcttcgagagattcgtcgttatcagaagtcga

SEQ ID NO: 413478 - DNA, 100 bp, Homo sapiens
ctcaagtgtccatcttgcagtccttgtttggagagggagcgcttgtgagtgccttggctgatgacaccttacacttatggaatttacgtcagaagaggcc

SEQ ID NO: 413479 - DNA, 75 bp, Homo sapiens
cagtccacccaccgccgccgcctcccagaaagaagcttccggttctgaggtcctggaggtgccatttccctctct

SEQ ID NO: 413480 - DNA, 75 bp, Homo sapiens
ttcatctacaacccgcgcttctggccgcgggaaggagagttaatgaaggagttcccccttctgagtatgttcaat

SEQ ID NO: 413481 - DNA, 108 bp, Homo sapiens
ccctgtgaatgtgtttgctctcatgaacatgcaatgagaagactgatcaatctggtagctacagcaagctgggtagcaggcagatccaaaggatatcatgaagtttcc

SEQ ID NO: 413482 - DNA, 50 bp, Homo sapiens
cccgcgcccaacaccttctatgtagccccagtggacaggaaagctaaggc

SEQ ID NO: 413483 - DNA, 75 bp, Homo sapiens
aaggtttgaaaagcagctggcctgcaagaatcagcttaaaatggctcgtttcaccattgtggatgggaagatggg

SEQ ID NO: 413484 - DNA, 74 bp, Homo sapiens
aaatggagatgttgttgggcagcattcatttcctggcagtgaggaaaccatttattacagtagtttcaccaaag

SEQ ID NO: 413485 - DNA, 97 bp, Homo sapiens
agagcgagctgagtggttgtgtggtcgcgtctcggaaaccggtagcgcttgcagcatgttcaacttcctcaattgctttgcctcactcttctatatt

SEQ ID NO: 413486 - DNA, 98 bp, Homo sapiens
tacgttctctagtccatgctggtgtcccagcctcctacctgctgattcctgcagcctcctatgtgctcccagaggctgaccaactgactgaagagcag

SEQ ID NO: 413487 - DNA, 90 bp, Homo sapiens
ctggagagaaatcctacaagtgtgtgattacagcaacataaaggcagcatatgaggccatgaagaatgtggcctgtctgatcaacgagcg

SEQ ID NO: 413488 - DNA, 82 bp, Homo sapiens
gaagctccagatggcgtcttccgtgggcaacgtggccgacagcacaggtactccaaagattcaggtttactcacgtcatcca

SEQ ID NO: 413489 - DNA, 100 bp, Homo sapiens
acacccatcaaaacattttgaggaaaatccagctataatttctgacttaacagcagattgctgttccccgcaatgatgaatgggcacggtttggccgaac

SEQ ID NO: 413490 - DNA, 75 bp, Homo sapiens
cttttgtgcaagatgagcctcaagtgcttctgcattacattgatcatggccttgccaggttggtgacagtatatt

SEQ ID NO: 413491 - DNA, 75 bp, Homo sapiens
gaaccacagtttatcatcccttccttttctgtagaaaatgtttcctgactgcaatgagggaaagcggagcacatt

SEQ ID NO: 413492 - DNA, 75 bp, Homo sapiens
ggcgcctccctgcgactcctggaccaccgggcgctggtctgctcccagccgattcttcgctgctgctgccttacc

SEQ ID NO: 413493 - DNA, 88 bp, Homo sapiens
attcttttcaatacatcctaaaacagaataactgaagtgaagtgatggactccgatttggagagtagtaagacgtgaaaggaatacac

SEQ ID NO: 413494 - DNA, 100 bp, Homo sapiens
gagctgggccgtgactacaggacctgtctgacgatagtccaaaaactgaagaagatggtggataagcccacccaggcccggctggacattttgaagattc

SEQ ID NO: 413495 - DNA, 98 bp, Homo sapiens
ggctttcaaagataattcgcagtgatgtgaaactggcctcccaagccctgataaagtggagactgctgcacggactctggaaccatgaacatatttga

SEQ ID NO: 413496 - DNA, 83 bp, Homo sapiens
ccgaggccagcaagacgctgcccgccatcgaggatcccatgacagattctgttgtcacgtctccttacagagtttgagcggtg

SEQ ID NO: 413497 - DNA, 82 bp, Homo sapiens
cggcttcaggaggcccaagacaccacagaagccctccgagcccagcaaaagacgatgccacattgtcaggaaaacgaatgca

SEQ ID NO: 413498 - DNA, 100 bp, Homo sapiens
tagaaaatggcagtagttcttcagatgtgttggggatgtcctttgcactgaccctgaactgccagattgacaaaaccagccagaccatagggctatgatc

SEQ ID NO: 413499 - DNA, 50 bp, Homo sapiens
gctcctcaacatgagcagattggtaaggctgggccagtaataaaggtgaa

SEQ ID NO: 413500 - DNA, 99 bp, Homo sapiens
gaggagtcttctggtgcagtcttattttgaaaagggcgacctgaggtctggagtgtatcctctcaagggagcaagtggatccctggggcagagaggaag

SEQ ID NO: 413501 - DNA, 82 bp, Homo sapiens
ctggcgccgggtcccgcggggaaacttctaagtgccagatgatggaggagcgtgccaacctgatgcacatgatgaaactcag

SEQ ID NO: 413502 - DNA, 101 bp, Homo sapiens
ggaagatgatcatggatgacagcaaacgcaaggcgaagacatttttacaggaaggaatgcctacttctgcacgatgtgatgatttagaagccttaaaaaag

SEQ ID NO: 413503 - DNA, 75 bp, Homo sapiens
gagctttggataatgcttttgcaagttgtacgagaagggaagttctcgggatctttggtttcatggccaccttcc

SEQ ID NO: 413504 - DNA, 75 bp, Homo sapiens
cctctccgagtgctgctcctgtcattgtggccatggacgtcctgacacagctctccctgaggagcagccacattc

SEQ ID NO: 413505 - DNA, 73 bp, Homo sapiens
ttcgagagttcttccaaagtcgcccaggcaccttctccatgcattgcaagagtatctcccatattcatgttgc

SEQ ID NO: 413506 - DNA, 100 bp, Homo sapiens
tcaagtatacagaatataatgaacctcatgaaagcagaaccaactcggatattgttgagttggctggggaacagaccagggaattggtggatttggagaa

SEQ ID NO: 413507 - DNA, 51 bp, Homo sapiens
cttggcttctcccagcatagccccaggctatcaacccttcaaactagatgt

SEQ ID NO: 413508 - DNA, 75 bp, Homo sapiens
ttccaatgctccagaagcagcggctggaatttgcgttttatgtcattgaacagcatgatgccttcttctgtagag

SEQ ID NO: 413509 - DNA, 73 bp, Homo sapiens
tcagttacaatctgcccttggaactggaaaacctgagagagaagaagaaggaggttcctgctgtgccagaaac

SEQ ID NO: 413510 - DNA, 99 bp, Homo sapiens
agcaagatcaccgtgacatccgaggtgcctttctccaaaagacatagggcctgattacattccaacagaggaagaaaggagagtcttcgcagaatgcaa

SEQ ID NO: 413511 - DNA, 75 bp, Homo sapiens
acgacctcttaaaaccatcaagcggctgccaaagctcaaggctcggacatcatcatgcagctggacgacgtggtt

SEQ ID NO: 413512 - DNA, 76 bp, Homo sapiens
cgcagtgctgccaacgccccggtggagaagctgaggagagactctgtggactccaagtcttctgcctcctcctctc

SEQ ID NO: 413513 - DNA, 83 bp, Homo sapiens
tcatgatacagttgataaaattgttggtgaaggaaatacaggtgctgcagaatcttctttttctcaggaggtttctagagaac

SEQ ID NO: 413514 - DNA, 73 bp, Homo sapiens
aaaaatcagttaatgacaacaaacgtctggttgaaacagcaaaccagtccagctacgggggcccagccagcca

SEQ ID NO: 413515 - DNA, 98 bp, Homo sapiens
agcctgagcaagcgccacagaagcctcgtctcctggaggaaaatgcaccaccacctccaccaccatcaaggggagggccacctcctcctcctccccct

SEQ ID NO: 413516 - DNA, 82 bp, Homo sapiens
tgagacggtgtcccgccgaaaggtttgaaagagaagatagtgaggagctttgaagtctccccagatgggtccttcttgctca

SEQ ID NO: 413517 - DNA, 83 bp, Homo sapiens
cggcggcgcgcagcgtgtcaggcggagagacccgccgccaggtttttagaacttcagccataaaaatgggcagaattttcctt

SEQ ID NO: 413518 - DNA, 74 bp, Homo sapiens
ctggattacaggccaaattagcaatattaaaggtggaagaaggtccatatctttttctgtgggtgcttcaagtg

SEQ ID NO: 413519 - DNA, 120 bp, Homo sapiens
tttgctgcagctcttcaggtccatcaatgacatgatgagcagcatgtcagaccagaccgtccgggtgaagcttcctgcctgacacagctcacttcaagaagtgcacaatgtcagaacgtg

SEQ ID NO: 413520 - DNA, 90 bp, Homo sapiens
ctgtgtcacccggcaactcagaaacatcaggtccaagtgtgtcccggcatggatatccggaacaacctcactaggttgcatgagctggag

SEQ ID NO: 413521 - DNA, 100 bp, Homo sapiens
ctttgatctcgttggtggggctgggggatgagagctgcaccgcgcgggacaagtcgccggcggcgcccgacggagcagtgtttcagctgaaccatccgtt

SEQ ID NO: 413522 - DNA, 100 bp, Homo sapiens
tcaatgatggcgagtgctttgtgatcgaaaccctgaccggatcccataaacactgtcgtgtcccttttgatgagaagaataagcctcattctgattcaac

SEQ ID NO: 413523 - DNA, 100 bp, Homo sapiens
gccaaacatcaagcagaatgtgatttgcttgaagatatgaggcgaacagctgcttggagaactacaagtgaagaaaagaaagcattagatcaggcaagtg

SEQ ID NO: 413524 - DNA, 74 bp, Homo sapiens
gcgccgagctttgatttgtttattgagtgccagcccggttcccggacaggacggggaggtttactgcatcgacg

SEQ ID NO: 413525 - DNA, 75 bp, Homo sapiens
tccaagccgactgatgactggagaggatggctactatttcaccaatctggtagatcagaagataacttgtctgca

SEQ ID NO: 413526 - DNA, 51 bp, Homo sapiens
ggaggagtctcagagctgtcagaaaggtagtatttatgaagattcatgtgc

SEQ ID NO: 413527 - DNA, 100 bp, Homo sapiens
gtggactgtaagcatgagtgaattctggttgtgtttcaactgctgtattgcagaacagcctcagcctgtgaactggcacaaaggttaatctcaagatgcc

SEQ ID NO: 413528 - DNA, 90 bp, Homo sapiens
gtagactggagcccagagcctgcttacttgtcagatgctaatactggagaccgtggacagaccaataatgctgcttctgcatcagcttcc

SEQ ID NO: 413529 - DNA, 74 bp, Homo sapiens
agcagaatggaatgggccttagcattgttgcagcaaagcgggagatacagatgacccaccaagaattactcaga

SEQ ID NO: 413530 - DNA, 95 bp, Homo sapiens
tcgcgggggtggaggacatcgacatccaggcgaactcggcctatcgctaccctccgaagtccgctgtcccctttcctccaacccaacggcttact

SEQ ID NO: 413531 - DNA, 97 bp, Homo sapiens
gggaggtaagaggtttgggactgccccggcaactccagggtgtctggtccacgacctatcctaggcgccatgggttctccaaaaaatgtggaatcct

SEQ ID NO: 413532 - DNA, 100 bp, Homo sapiens
aattatcacttctggcagatgaggtttgatttttgccaagcatcagaaggaaagcgcccatctgaaaatcttggtcaggtactattcggggaaagaattg

SEQ ID NO: 413533 - DNA, 100 bp, Homo sapiens
ttcaataccatccttaccaccagaagctatccacaacttcgcagaggtattgatgaagatgaccctactgctgatgataccagtgctgctgtaactgaag

SEQ ID NO: 413534 - DNA, 97 bp, Homo sapiens
aagctatctgaagacattgacctgctgaaatccaggatagagagtgagaacaccttccaccatgaccacctcagcaagttcccacttaaataaaggc

SEQ ID NO: 413535 - DNA, 82 bp, Homo sapiens
aaaacttctgggaaactacgggagaaccttcttcacggagatacaactcgtcaacgaatcaaattcagtgatgacagagtat

SEQ ID NO: 413536 - DNA, 118 bp, Homo sapiens
acgacgtgaaggagcagatttacaaactggccaagaagggccttactccttcacagatcgagtattgggaaagggtcgttgtggtgcatagacccagagtatagacaaaatctaattc

SEQ ID NO: 413537 - DNA, 75 bp, Homo sapiens
ccacgcatccatccagatgaacgtggccgagtgtggacgaatgtggaacctcgctctgtggctgtgttcccttgg

SEQ ID NO: 413538 - DNA, 100 bp, Homo sapiens
ctggagaggaccaacaaattcatcaaagacgtaatcaaagacggcaacgcgcttatcagcgctatgagaatctgggttctgcccgcacacattcctcgcc

SEQ ID NO: 413539 - DNA, 100 bp, Homo sapiens
cgggcggcggcggcgggcccggcggcgggccgaggagccgggcgcaatggagcggaagaggggacggcaaaacagaacagaaaggcggagataaaaagag

SEQ ID NO: 413540 - DNA, 96 bp, Homo sapiens
cagcaaatactcagaaacatccttccagaaggagcgaactgaagaggttctacacaattgattatcttgacaatggtaataataaaatggcaattc

SEQ ID NO: 413541 - DNA, 88 bp, Homo sapiens
gaggcggccgccgctgcaccttcaccgcgtacccgggacccgcccgcccgcgggagggtaggaaaatgtctgtgtgcaccgacaatgt

SEQ ID NO: 413542 - DNA, 99 bp, Homo sapiens
attgttgtgtatgagaagaggaagaggccagatgaggttcctgacgctgatgccattaataatgctgcaggctttggtttcagagggtatgacgaaaat

SEQ ID NO: 413543 - DNA, 51 bp, Homo sapiens
gtttgtggaactccattgtttaatgatacatttgatattgcctggaatggc

SEQ ID NO: 413544 - DNA, 97 bp, Homo sapiens
ttacatctcccccaaacgcactgcctcgaagaagttcacgactctttactagtgacagctccacaaccaagctacgagttccagggagctctgtcct

SEQ ID NO: 413545 - DNA, 89 bp, Homo sapiens
acctgcgggtattggatgattcgtagctgagactccgctacacccctgaagtggggaaatgctgtccagaccaaaacgaagaagacgtt

SEQ ID NO: 413546 - DNA, 100 bp, Homo sapiens
ccctcatggggaaaatctccccggtgactttcaggtgaaatgacaatggatgctctgttggctcgattgaaacttctgaatccagatgaccttagagaag

SEQ ID NO: 413547 - DNA, 83 bp, Homo sapiens
cttgcctgtgtcccacttgttcgcggcctatagaatagcctaacatggcagaccagagacagcgctcactgtctacctctggg

SEQ ID NO: 413548 - DNA, 98 bp, Homo sapiens
ctaactgcaccagtagcttttctgagaatacttgctgaaaaggaagttttctggaatggtttcagccgacttttcagctcctcaagtaacacgactaa

SEQ ID NO: 413549 - DNA, 80 bp, Homo sapiens
gattcacctgtccagcatccgaccaccgaggctggagggggagaacacccaggtcccccggcagagggcagtagagatgg

SEQ ID NO: 413550 - DNA, 74 bp, Homo sapiens
cttggactgagtcctgcaggacacaggtcagatgatgatgatgcggagagtaggagctccagggtgactcaact

SEQ ID NO: 413551 - DNA, 74 bp, Homo sapiens
actcaacacctccctacaaggaccttcctcccaagccagggagaacaccgactgagacctcaaaccctggctcc

SEQ ID NO: 413552 - DNA, 82 bp, Homo sapiens
cggtctggtggtggctggttactaccatgccaatgcagctgtgaacgatcagaggatgttcttgaggagagaatttccctgg

SEQ ID NO: 413553 - DNA, 100 bp, Homo sapiens
ataggctgcgctaccggaatgtcatccagcgagtgattagagatggagtttcactgtgtcagccaggatggtctcgatctcctgacctcgtgatccgccc

SEQ ID NO: 413554 - DNA, 100 bp, Homo sapiens
ttattgggcctggcttgtaatcataacttgaaaggggtttctctggatctcagcaactgtgaggagaggagttcattacttcggaagtggtacaatttaa

SEQ ID NO: 413555 - DNA, 71 bp, Homo sapiens
cttcgatgtgcgagactttggaaaggtcagatgtaccaacagtaccagcaacaggccggctatggtgcaca

SEQ ID NO: 413556 - DNA, 100 bp, Homo sapiens
ttcagggatgccacctcccacctcagggcccccttcagccatgactcctccctacccgcagtttgaggttgaggaacaggttagcaccactgagagagtg

SEQ ID NO: 413557 - DNA, 95 bp, Homo sapiens
tccactgtatttggagaagaatggaaagagaagactgatagagacttcgttaaggtgctggatagtttactagtccagtatggagtggtggagag

SEQ ID NO: 413558 - DNA, 107 bp, Homo sapiens
ctgaagtcggtgtctgctgcgttcacggcaggattcggttagaaaaagcttgtggtgaaggggggcaaaaaaaagaagcaagttctgaagttcactcttgattgcac

SEQ ID NO: 413559 - DNA, 75 bp, Homo sapiens
tttctgctcacctggagaagggatggaaatacttcaacaagataatatcgtctactgcattatttttggctgcaa

SEQ ID NO: 413560 - DNA, 100 bp, Homo sapiens
ggctgactggggacctgtcccacctggcggccatcgtcatcctgctgctgaagatctggaagacgcgctcctgcgccgatgtgaagttcatttccaatcc

SEQ ID NO: 413561 - DNA, 74 bp, Homo sapiens
gtcatctccggcgcttctagggctggttcccgtcatcttcgggagccgtggagacgaagttatacggaagcgtc

SEQ ID NO: 413562 - DNA, 83 bp, Homo sapiens
gaagaaaccactggatggagaatatttcacccttcagagccactccatccccaaattcaagattagaaagatccctgactgct

SEQ ID NO: 413563 - DNA, 101 bp, Homo sapiens
ccagacaagatggacaccgcggaggaagatccccaagtaagcccttggcacggaaattaatggattgggaagtagtaagcagaaattcaatatctgatgac

SEQ ID NO: 413564 - DNA, 90 bp, Homo sapiens
gtgctcttggggagcccaggccaagccatccattcttgggtcctttggaggcgtcttcactcgaggacagctgggcctgatagacatcat

SEQ ID NO: 413565 - DNA, 80 bp, Homo sapiens
tttgatatctggggccaagggacaatggtcaccgtctcttcagtccgacaaagcggctctccagcaagaaggtggcaagg

SEQ ID NO: 413566 - DNA, 74 bp, Homo sapiens
ccaaaaactatgaatggagacatgaggacccatcctcatgccaacaaactacccttgaaggattctttcactta

SEQ ID NO: 413567 - DNA, 100 bp, Homo sapiens
cctatctgtacttcacacagttcaaggcagaggtgcggggcgctgagattgagtacgccatggcctacgcgcagttgtgtagcagttgagtaatgctggt

SEQ ID NO: 413568 - DNA, 75 bp, Homo sapiens
attactataaagctctttgctccagatcctgaaaataaaggcacaggtaaactgaaggaacttaatggaactgca

SEQ ID NO: 413569 - DNA, 83 bp, Homo sapiens
cccaaatcccggaaactccagcgtgtctccagccgtggtttttagaacttcagccataaaaatgggcagaattttccttgatc

SEQ ID NO: 413570 - DNA, 82 bp, Homo sapiens
tgggggttctggagagcggggtgtgggcaattctgtggtgttcttggtcacacatttatggagtttctgaagggcagtggag

SEQ ID NO: 413571 - DNA, 83 bp, Homo sapiens
cgaatgaagaagactatggcatcacaagtgtcgttgatacccaaagatcagtattactgtggtgttctctatttcactgggag

SEQ ID NO: 413572 - DNA, 100 bp, Homo sapiens
gatcctttctattcaggataacacaagtcccttgccggtcattcctgtcccaatcagctgctctactactgatgacattaaagatgccttcattacccag

SEQ ID NO: 413573 - DNA, 80 bp, Homo sapiens
ctttaccaaacttattaataggaataccactattccaaccaagaagagccaggtttcatcagagcaagaaaaagaacaag

SEQ ID NO: 413574 - DNA, 100 bp, Homo sapiens
tttaaatttatgaactcgaaatgaagcggaaagcagatatgcgcgtcagcatactttggcggtgtacctgaagtggaagcactgcgagacgccaggcgtg

SEQ ID NO: 413575 - DNA, 50 bp, Homo sapiens
cacacagacttttgatggacaggagtttggaagagacttttggatgtggg

SEQ ID NO: 413576 - DNA, 80 bp, Homo sapiens
atgacggctgtggcctttgataggtggtgtgtgccaggtgctccgactaccgggccgaactgaaatacgacgacaacagg

SEQ ID NO: 413577 - DNA, 100 bp, Homo sapiens
ctccctcgccggcttccaggacttcacgatgaactgcctctcctcctccctgcctggggagcccagtggccagggaggggagtggtggagccagtcgctg

SEQ ID NO: 413578 - DNA, 99 bp, Homo sapiens
ctaccggatatcccacgtgtggcagagtgcagggatttcccaacccaaggagatctgtgcgctggttgggttctgtgatgaggtgaaagagatgcccat

SEQ ID NO: 413579 - DNA, 100 bp, Homo sapiens
tcctgacccttgacccccacaatgtggactacctattggacttaattcagtgcacaaatgagatgaatgtgaacatcccacagttggcagacagtttatt

SEQ ID NO: 413580 - DNA, 99 bp, Homo sapiens
agctcctgccgcccgccgctggcttcaagtgcaagatgctgaagaaggaagaagcaattccatggcctggaactttagcaattgttcattcctatattg

SEQ ID NO: 413581 - DNA, 50 bp, Homo sapiens
caaacacctatgacgcccagtatgagagtggtggacttgctttgtgaaga

SEQ ID NO: 413582 - DNA, 97 bp, Homo sapiens
gccaagctcctggccctggccctgatcatcctgctgggcttcgtccagatcgggaagggagcaggccgggctctcgccatgggtcactgtcgcctct

SEQ ID NO: 413583 - DNA, 75 bp, Homo sapiens
gctcctgggcatcccgctggaccagggccatgctggataaggagctggctgcctctgtgaacatcctactcaagg

SEQ ID NO: 413584 - DNA, 95 bp, Homo sapiens
aaaaatcacgggctgtccaggaactgtcggaacagaaccaaaggctattggatcagctcagcaggctctggattaatcgaattacagctgctagc

SEQ ID NO: 413585 - DNA, 90 bp, Homo sapiens
gcggcggcggcggcggcggcggcggcggcggagcagtgttatagttttgccgctggactcttccctcccttcccccaccccatcaggatg

SEQ ID NO: 413586 - DNA, 90 bp, Homo sapiens
caccgggatcgtgaccgagaccgtgaccgagagcgtgaccgagagcgcgaatatcgtcatcgttagaagattggtggaacgagaatgcct

SEQ ID NO: 413587 - DNA, 75 bp, Homo sapiens
ccgggattcgcggcccggagctcgggaccggtaaaaatgtctccatcgtatcatcagtccaaaggggatcccact

SEQ ID NO: 413588 - DNA, 75 bp, Homo sapiens
gcctccggcgcagcccggaaatgtccggcaagatcgagaaagcaggtagttatgcttgtcctagcttggaaattg

SEQ ID NO: 413589 - DNA, 80 bp, Homo sapiens
cgtacgccctcatggggaaaatctccccggtgactttcagacaggggcaagtgtccgagtggtgaatcagctacttacag

SEQ ID NO: 413590 - DNA, 85 bp, Homo sapiens
gaaagaagccggacaccatgatcctaacacggtctgggggtggtggcatctcccctaaaggaagtggtccctctgtggcaagtga

SEQ ID NO: 413591 - DNA, 74 bp, Homo sapiens
tgaccctgccggagcctccgctgccagcgacatgttcaaggtgtttgatgcgatcatgaatttcaagaaagagg

SEQ ID NO: 413592 - DNA, 98 bp, Homo sapiens
tgcccgggccgggagctgggcagttgaagattcctgtctctggatccaaatcagagggccttctctacgtccactcatccagaggtggcccctttcag

SEQ ID NO: 413593 - DNA, 82 bp, Homo sapiens
ctggactcatggaggctgagcatttattcaggtttttcgttggaatatacgttgcacatttatggcgattctgagtgtgagg

SEQ ID NO: 413594 - DNA, 82 bp, Homo sapiens
cagattggacacgggaacatcattacaagacagacagtctccagggaggacgtatttaaaagacccaactcagcccatctta

SEQ ID NO: 413595 - DNA, 100 bp, Homo sapiens
tctacctgtcgtttgtcatgcttttggctgccctgagctggcagtacctgaccactctctcccaggtgtcccgacccaggctaagcttgagcatggctga

SEQ ID NO: 413596 - DNA, 100 bp, Homo sapiens
agagcacattggatccgagcagttaccaaggttcgactccagctgcaggagggaggaaataatgctggccatacagttgttgtggattctgtggaatatg

SEQ ID NO: 413597 - DNA, 100 bp, Homo sapiens
cctgcggcacgccttcacctacaaggtctatgctgacaagaggctggacgcacaagggtctcctatggacagaagtgcgggcaaggagctttgttcctcc

SEQ ID NO: 413598 - DNA, 88 bp, Homo sapiens
ttggatttgccagggcatgtagctctccaggcttgcaagcgattaccaggaaatggaagttccagtattaccgaaaatctctctaccg

SEQ ID NO: 413599 - DNA, 100 bp, Homo sapiens
gcatggtgcatgactgcgcagatgtcatcagggccaagttcgtggggacaccagaagtcaaccagaccaccttataccagcgttatgagatcaagatgac

SEQ ID NO: 413600 - DNA, 82 bp, Homo sapiens
ccgggcccacgcggaacgacggggcgagaagccatgcagtgacacccgctaagacttgttggtagccatgtcggagccccac

SEQ ID NO: 413601 - DNA, 100 bp, Homo sapiens
atgaagccccttcgctggccactggttatggtgcatacttggctcagtgttcctctgaacaacagggagaatatctctgatcccacctcaccattgagaa

SEQ ID NO: 413602 - DNA, 100 bp, Homo sapiens
gacagctgtgaagtgtgaggttctttgtctgctggcagctaggggcgacgaggcgggacgtcatggaagtgtctcctctgagcctccggcctccataaga

SEQ ID NO: 413603 - DNA, 82 bp, Homo sapiens
acgcacgggatccagagcgccgcgcacttcgtcatgttcttcgcgccctggtctctaattaacagaagatggcaaagcccag

SEQ ID NO: 413604 - DNA, 75 bp, Homo sapiens
ccattcagtcctcaatctccttttccttggctacccgtttactcctggcttgggggcattaggaagcactggagg

SEQ ID NO: 413605 - DNA, 87 bp, Homo sapiens
cagaaacatcaggaatttgataaccatatcaactcctatgatcatgcacacaagcaggactcagtggcttttgaggatgtgtctgtg

SEQ ID NO: 413606 - DNA, 100 bp, Homo sapiens
tttgaccatcagtctgtgacctgccccttctctttactagccggatcgagctgggagatgtgacaccacacaatattaaacagttgaaaagattgaatca

SEQ ID NO: 413607 - DNA, 50 bp, Homo sapiens
gcatcgcagccttctacttgtcccatgagttttgggaggttatcagtgac

SEQ ID NO: 413608 - DNA, 82 bp, Homo sapiens
ttcccgctggcgcgcagcctcagctagtttggtgccctggttgtcagatgttggaaagcagtaggacggaacatactcttcg

SEQ ID NO: 413609 - DNA, 78 bp, Homo sapiens
aaacagcttcatgaactccaagccaaaatcacagctttgagtgagaaacaggtctcttgtggctcagagcataatttg

SEQ ID NO: 413610 - DNA, 100 bp, Homo sapiens
aatgaagaagaatatctggttattatcaggttcacgccaacagtacctcattgctctttggcgactcttattgatgagtactggcagaatcacccagaac

SEQ ID NO: 413611 - DNA, 100 bp, Homo sapiens
cagcaatccatgcgcctggctaacctcctgatgctcctgtcccacgtcaggcatgcgagacctgaaggaaaagattatgcccttcattggctagtgctgg

SEQ ID NO: 413612 - DNA, 50 bp, Homo sapiens
ggtgtggggcggtcccggccccgcagatgaggacggggacttggttgcct

SEQ ID NO: 413613 - DNA, 76 bp, Homo sapiens
acctaactacggaaaacctgatcccaaaattattgaaaacactcgaaggggtctcattctgtcgcacaggttggcg

SEQ ID NO: 413614 - DNA, 101 bp, Homo sapiens
gctgcacgtcctcgaacgcgaggccaacagccccgcttgagaattacattgtggaaaacatgaagtcggagatggcccagatacagcagaatgcagttcag

SEQ ID NO: 413615 - DNA, 90 bp, Homo sapiens
tctcacaactgctcgcgtgacgaccgcattcgtggcagatggattaattgcctctgaaggagccataagtcccgatttcttcaatgatta

SEQ ID NO: 413616 - DNA, 100 bp, Homo sapiens
tcattgaataagtgttttaagaaagtggacaaagagaggagtcagggtcaaagtcagagtggtggtcatggtcctggaggtggcaagaaggatgacaagg

SEQ ID NO: 413617 - DNA, 116 bp, Homo sapiens
aaagactgaagggaagccatggtgaatgcacagcaacttctgtttttcgttggaatatacgttgcacatttatggcgattctgagtgtgagggcagacttctgccaggctcagcac

SEQ ID NO: 413618 - DNA, 100 bp, Homo sapiens
ggatcctgcacaggcagacgcgggccagcctcagcaccgacagccgacgcgcagatagcagagccatccttggggtcaaaatgcagatcttcgtgaaaac

SEQ ID NO: 413619 - DNA, 100 bp, Homo sapiens
aacagctgagtgatctctgtggacttaattcagaacaaatccttctagcagaagtacatggttccaacataaaggaaaatcgtgaagtcgatagaaatga

SEQ ID NO: 413620 - DNA, 74 bp, Homo sapiens
cgctaacaactgcccagctttgagcaattaccagctctggctgggtcgccacaacttgtttgacgacgaaaaca

SEQ ID NO: 413621 - DNA, 90 bp, Homo sapiens
atattaaaccagacaagtgtcctaggagagtgaacagggtggcattgtgtgtcccagagtgccggagcgagtcccagaagagaggcgagg

SEQ ID NO: 413622 - DNA, 100 bp, Homo sapiens
ccagggcaagccccgctccggccaacaaatttgtagccaaaccgtgcgccatagccctcaacattcaggccaatggaccacaaattgctccgcccaatgc

SEQ ID NO: 413623 - DNA, 75 bp, Homo sapiens
aagtccaagtcaaacgcagaaggactgcctcactgagcaaccaagagtgatgatgaacagtctacacagatggct

SEQ ID NO: 413624 - DNA, 100 bp, Homo sapiens
caatcagatcagtcttggctccctcagaagcatcgtgaaaagcctccttctggttccaaatggcgtttagagaaaatggcagacgatattgatattgaag

SEQ ID NO: 413625 - DNA, 90 bp, Homo sapiens
caccttctaagagtttggcgagtcagtgactgaagcgcccgtccattccaagggacgtccagatcggtgacatcgtcacagtgggcgagt

SEQ ID NO: 413626 - DNA, 90 bp, Homo sapiens
ctctcagccggccgggatggctaccacggccgagctcttcgaggaaaggcagcaacaggtggaagctgttgagttggaggctaaagaagt

SEQ ID NO: 413627 - DNA, 99 bp, Homo sapiens
caggacaccccgaaagccggaaaacgaatcccaaggactgcagcaaagccaaaaagctggtgtgtaatatcaacaaaggctgtggctatggctgtcagc

SEQ ID NO: 413628 - DNA, 100 bp, Homo sapiens
caacaatgtcccggacctggagctcaaccccatccgatccaaaattgttcgtgccttcttcgacaacaggtgcctaatggataagaacttcgttaggatt

SEQ ID NO: 413629 - DNA, 96 bp, Homo sapiens
gcgtcccgctcgctgggagagaggtacctctccttttccctctccctttccctaagaaaaggcgacggcggattgacagaagtatgattggagagc

SEQ ID NO: 413630 - DNA, 90 bp, Homo sapiens
ccagcgccgcgagccctacaagttcctgcagttcgcttacttcaaggtagagttggctttgtgggacacagctgggcaggaagattatga

SEQ ID NO: 413631 - DNA, 96 bp, Homo sapiens
gttcctgctgctctgcctgctccacaagcggcgccgcgccctcggcctgcacggatggcaggatggtggctggcaaagtgttgatggcaaagcaag

SEQ ID NO: 413632 - DNA, 100 bp, Homo sapiens
gctttccggagtagagcccttggagtgctcaacaggaaccttggattatattttacaacgctgtcagttggctctgcagaatgtctgtgacgatgtggac

SEQ ID NO: 413633 - DNA, 75 bp, Homo sapiens
gccgccgcgggtccgtgcgcccagcgtcccagggcccaggccgagcagattcttctgatgtagagcgactggaaa

SEQ ID NO: 413634 - DNA, 101 bp, Homo sapiens
gatctgggttccgctgattcctttcgtaaccgcaccacacccgaggagtgggctttgccaccaggaaagtggctggcatggccaaacctaacatgatcatc

SEQ ID NO: 413635 - DNA, 75 bp, Homo sapiens
aggcaacgacgttccatctgtggaaggacctaccaaccaggcatcacccaagagaaaatcaacgagatgcgggtg

SEQ ID NO: 413636 - DNA, 150 bp, Homo sapiens
cgccacttcatgttccagtgcctcgagcgctcaggatggaggaagactcgatccgcctgcctgcgcacctgcgccagctacagatgcatgcatattgtgaaaacccagatatagtgctgtgtggaaacaagagtgatctggaggaccaga

SEQ ID NO: 413637 - DNA, 96 bp, Homo sapiens
acccctttcctgtaacagaattacaggtgtcatggagaaactccagctgggcccagagattctgcagcgggaaaatccaaggcttatttatgccag

SEQ ID NO: 413638 - DNA, 100 bp, Homo sapiens
tgaaagcgccccggaatgacctgtcgcctgccagctctgtttttgaatcagagccgacaggcacttgaattgaaaatggaaaaccctactgctggtggtg

SEQ ID NO: 413639 - DNA, 90 bp, Homo sapiens
taatgatgatgctcagtttgatgcgtcacactacgacagtgagaaaggagatctaaattgaactcaacattttacattccatcttttctg

SEQ ID NO: 413640 - DNA, 49 bp, Homo sapiens
tcccacctcagcttcctgagtagcacacaggtgcagcccttgtacagaa

SEQ ID NO: 413641 - DNA, 98 bp, Homo sapiens
actggttaacaatgaaagcaagcaggaagtttcctatattgggataaccaggttgtctgcattcaaaagagcattctattaaagctaccttaatttgg

SEQ ID NO: 413642 - DNA, 75 bp, Homo sapiens
accgggaagatttacacagatggaaccagaaaagatacgaggctctaggagagtgttccattggcaagctacaat

SEQ ID NO: 413643 - DNA, 97 bp, Homo sapiens
gctggccatggcgaggggtgcacggcggccacctgagtggcgcggcggtgtcaggatttttttcccaggaagccatcccgtcagaggggttcaagtg

SEQ ID NO: 413644 - DNA, 120 bp, Homo sapiens
cgggaaggagcgccctggcggagaagactcgaacggctcccacagccgggcgttgggggaaagattccaactccacagagtgaccagagagaggacgtggctgaagacaccaaagatggg

SEQ ID NO: 413645 - DNA, 96 bp, Homo sapiens
gtttcccgcctgagcgcaactagcggcgggtcgtgggcacctccagtacggcaagaagaagctgaaatacctgccctacaatcaccagcacgaata

SEQ ID NO: 413646 - DNA, 100 bp, Homo sapiens
gggatgacagttgaaggactgaaacagtttattgctgctcaggcctcctcacagattcctgtcccttctgtgtcctggactccggatacctcaactctca

SEQ ID NO: 413647 - DNA, 98 bp, Homo sapiens
aagcacacagtgcgcggggagcgttcctacaggtattgttgcagcatctggcagtgagactgaggatgaggacagcatggacattcccttggaccttt

SEQ ID NO: 413648 - DNA, 97 bp, Homo sapiens
actactacgttgacactgctgtgcgccacgtgttgctcagacagggtgttcaggcgcttcgtggaggttggccgggtggcctatgtctcctttggac

SEQ ID NO: 413649 - DNA, 82 bp, Homo sapiens
gtctcgctctgggtctccaggcccgcgaccgtccgccagtcgtcccgaggtgagtgtggctgtgaagtgcctgaagcccgat

SEQ ID NO: 413650 - DNA, 83 bp, Homo sapiens
cagcgctggacacccagcctccagacaatgcagatcttcgtgaagactctgactggtaagaccatcaccctcgaggttgagcc

SEQ ID NO: 413651 - DNA, 100 bp, Homo sapiens
gacaaagcagttactgctatgggaattctgaatacaattgatacacttcttagtgtagttgaagatcataaagaggcccagtttgatatctctgtggcca

SEQ ID NO: 413652 - DNA, 90 bp, Homo sapiens
agtgtagatgacttcagttcagctttaaagatgagacgtgcaggtaccatcaggaagcagcgggataagctgataaaggaaggaaagtac

SEQ ID NO: 413653 - DNA, 82 bp, Homo sapiens
cttggcgcggcggccagaggaaccccgagaacatacatatgatagttgagaaagacacatattctgatcatgaagaaataaa

SEQ ID NO: 413654 - DNA, 74 bp, Homo sapiens
ttttcccatggagaacacacaaccagttcctgcccagcccaaagcgggaggctctggcagctactggccagctc

SEQ ID NO: 413655 - DNA, 75 bp, Homo sapiens
gggaggcagcagtggcagtccatcgaggggaccaaactctccatcacccaggaccctctttcccagctgcccgct

SEQ ID NO: 413656 - DNA, 74 bp, Homo sapiens
ttttttgcctcctggagggtcgtgctggaaggtggctatggcggttccagcagcagcagtagctatggcagtgg

SEQ ID NO: 413657 - DNA, 87 bp, Homo sapiens
cagcgtcgctggcagccgctgtacttgataattcctgagaacttcagtgttttcagtttgatccgggaaatgcggacacagaggcct

SEQ ID NO: 413658 - DNA, 100 bp, Homo sapiens
ctccatgcggtctaacctctatcggatctgctatagcccctggggccaggaattctccatctgcaactactggcatgataagtatgctgtgcgcttcatc

SEQ ID NO: 413659 - DNA, 75 bp, Homo sapiens
ggcagtcaccagcattgcctcgaccacactcacctctctctgctcatgcagcaggcgggtgaaaatgaaagccgg

SEQ ID NO: 413660 - DNA, 73 bp, Homo sapiens
ggagcggcacctacgtcctgatcgacatggttctcaacaagatggccaaagcactgagctagcctctccttgc

SEQ ID NO: 413661 - DNA, 100 bp, Homo sapiens
ccagaggctgctcggcttccagctcaatcctgccggttgcgccttcttcctggacatgaccaactgtcaaaccggcacgatgtccaggcaccagaaccag

SEQ ID NO: 413662 - DNA, 100 bp, Homo sapiens
atgtgcccctctactcctcctcatctgtccccaccacaatcaatacgattggaaccagcacaagtacaagtcaaatttgtcaagatgtccacaatcccga

SEQ ID NO: 413663 - DNA, 98 bp, Homo sapiens
ttatccaccaacatcctgctggtcaacctgctggtcgccatgtttggaccatcatcaaagaggggatgctgaccaaacagaacaattcattccagcga

SEQ ID NO: 413664 - DNA, 74 bp, Homo sapiens
gaagatggctactctggagttgaggtactatgcctgcttgtgtgggcacgaggagctggtactctaccttctgg

SEQ ID NO: 413665 - DNA, 99 bp, Homo sapiens
tggaggaggtgaccgcgtccctgggctgggacctagatagtctggatcccggggaagaggaggcggcggagacagaaccaagttgtattgttagacaca

SEQ ID NO: 413666 - DNA, 75 bp, Homo sapiens
gcaccgtcaccgaggcgccgcgcacagtcaagaaggttaatgttcgtgaagaaattgaagagttttttccaagaa

SEQ ID NO: 413667 - DNA, 75 bp, Homo sapiens
cagattcagaaggagcaggattaccaaaggatttttacataccgttgctcaaaagagggctgcaagaagaaagag

SEQ ID NO: 413668 - DNA, 100 bp, Homo sapiens
cggcgcgtgagcggcactgatttgtccctggggcggcagcgcggacccgcccggagatgagaaatgcactcggtgatggaaagagagccactattctgaa

SEQ ID NO: 413669 - DNA, 97 bp, Homo sapiens
cgccatggagcccgactcggtgattgaggacaagaccatcgagctcatgacaatgcagatcttcgtgaagactctgactggtaagaccatcaccctc

SEQ ID NO: 413670 - DNA, 100 bp, Homo sapiens
gctcggcccgcgggggagccccgggagccgcacgagtcgttcaccagacaggtgttatggaagctgctgaaggttgtgaaattcggagaagtgatttctt

SEQ ID NO: 413671 - DNA, 101 bp, Homo sapiens
gttgcgggagaagatccaccacttggatgacatgctcaagagccagcagcggaaagtccggcaaatgatagagcaggaaccacgtgaatgttgagggggcg

SEQ ID NO: 413672 - DNA, 133 bp, Homo sapiens
atgaggactttgtggaggtccctgagaaggaggggtatgagccacacatccccgaccacttgcggcctgagtatggtgatgatccaatgccctttgacattaaagctgagatgacactgaagacaaatttttt

SEQ ID NO: 413673 - DNA, 88 bp, Homo sapiens
taaaacttcaccaagacctaaaaaaccccaacaacagctcccttagctgaagtgagtagtgaatatagtatggacaaggcaatggttg

SEQ ID NO: 413674 - DNA, 50 bp, Homo sapiens
gttgcccaggctggagtccagtggtgtgatctcagctcaccgcaacctct

SEQ ID NO: 413675 - DNA, 80 bp, Homo sapiens
gtcccctgccggggccgccctactctggggcttcctgctccagctggcctgtctccactaactctggaccctaaaacagc

SEQ ID NO: 413676 - DNA, 51 bp, Homo sapiens
aattgaatcaagctgcaaagtaactagagcatactccttccatgttagcgc

SEQ ID NO: 413677 - DNA, 78 bp, Homo sapiens
gaaggaacttgtacaaacaggacctgcctaattaccttcaaacctgatgaagaaaccaaggctttgtgactaactcaa

SEQ ID NO: 413678 - DNA, 83 bp, Homo sapiens
gggacttccagacactggaaaactggatgctgcagacactgaacgaggagccagtggactcagaattcatgattgaagaaatg

SEQ ID NO: 413679 - DNA, 83 bp, Homo sapiens
cccggcgccgtccagcccggagggacctggtgttggtaaatcatgcttattgctacagtttacagacaagaggtttcagccag

SEQ ID NO: 413680 - DNA, 100 bp, Homo sapiens
cagcgccggttccttgcggtcaagatgctgcaaaacgtgactccccacaataaatgatgataattccgaagaaggcttccacactattcattcaggaagg

SEQ ID NO: 413681 - DNA, 90 bp, Homo sapiens
aaagtgcgattgtggaagctgctcgggccctagcacaaaacacagatcttaaagaacgcttacgcagaatccatgccgagtctctgctcc

SEQ ID NO: 413682 - DNA, 97 bp, Homo sapiens
ggcacctggacttggcttccctcaagtctatccgagagtttgcagcaaagatcattgaaggtgctgagaaggtactgctgcatgcatttgatggtcg

SEQ ID NO: 413683 - DNA, 100 bp, Homo sapiens
ccctcagaatttaaacttaaggaaagagtgggaaagtgaggaacgtactcaggaaaagtggggatttccaatgtgccactatttaaaggaagagagatgg

SEQ ID NO: 413684 - DNA, 75 bp, Homo sapiens
gtttaccaaaagagaggcaccgctggaacactaatgaggaattaaacatgggccagcgatgttcagatactagag

SEQ ID NO: 413685 - DNA, 100 bp, Homo sapiens
ggaaacatggcggcggcgggtgttgtgagcgggaaggtggacccaagagccatatcagtgctagcaaaatggcagaattcatatagcatcaaagttgtcc

SEQ ID NO: 413686 - DNA, 83 bp, Homo sapiens
ggatcccgccccgcccggagccccggcccccacaggttgacatcatggacatatgtgagtccatcctggagaggaagcggcat

SEQ ID NO: 413687 - DNA, 75 bp, Homo sapiens
ctcagttggaagcagccgatccagcctgcggagcctgtggggcagtgaaactggaacgccaagctgaagaagaac

SEQ ID NO: 413688 - DNA, 101 bp, Homo sapiens
ccgggcctcccgccgcttagcctgatgctggaaggacgaagtggcggcatgattttgtgcacggatggataaaagtacctgtgactcatgaaacacaggaa

SEQ ID NO: 413689 - DNA, 83 bp, Homo sapiens
tgggaacaccagtttctagctgtcctgttgatattcactgatggactccaaagaatcattaactcctggtagagaagaaaacc

SEQ ID NO: 413690 - DNA, 100 bp, Homo sapiens
ggtgcctggccctctagccccgctaccggactacatgtcggaggagaagctgcaggagaaagctgactggaaataccggcatgcaggattgatggcctta

SEQ ID NO: 413691 - DNA, 101 bp, Homo sapiens
cagctttggcctgtgagaaagcttttgtggctggtttactgttaggaaaaggagtgctcgccctacgcagcccacctctacgacgccgaaaacacccagac

SEQ ID NO: 413692 - DNA, 101 bp, Homo sapiens
tgatgcagaagctactcaaatgcagtcggcttgtcctggctcttgccctcatcctggttctggaatcctcagttcaagcttgagaatgccagactgtcatc

SEQ ID NO: 413693 - DNA, 75 bp, Homo sapiens
aattgcctttgggactctgaaggctgaagatagtcatttttacttgaaggaagctgcttctacttgggagtggca

SEQ ID NO: 413694 - DNA, 75 bp, Homo sapiens
agaaatgatgaattacattccaggaaaattgcctaagaattatgacccaaaagttaccccagatccagaaagatg

SEQ ID NO: 413695 - DNA, 92 bp, Homo sapiens
ccaacatggcggaacgcaggagacacaagaagcggatccaggctatgactttgcagccgtcctggagtggttcgcggagcgtgtggaccgca

SEQ ID NO: 413696 - DNA, 100 bp, Homo sapiens
acatacaggagacaccaaagaagagaaagacaaggatgaccaggaatgggaaagccccagattggtttttcagcagcagatgctgtaacaggactgaaat

SEQ ID NO: 413697 - DNA, 100 bp, Homo sapiens
gcggtggcgatgctcttcttggaaaaccagatccagaaactggaggagtcccgctcgaagctaggactgactgcattgcacagatgatggatatttacgt

SEQ ID NO: 413698 - DNA, 98 bp, Homo sapiens
cagcgccgaggccttcaagtgcatgatgtgcgatgtgcggaagggcacctccacccgggctggttgatatgtgaagagccaacctgtcgcaatcgaac

SEQ ID NO: 413699 - DNA, 76 bp, Homo sapiens
gaagacctggaagacagatctggagttcatgatcaagtgttgcccacaccaaatgcttcatccagagtcatagtac

SEQ ID NO: 413700 - DNA, 98 bp, Homo sapiens
ccaccaaattctcagcctgataaggagaggacatgtactcccaggattccatagatctccttgctaactcaggactacagtttcagaagcatgaagag

SEQ ID NO: 413701 - DNA, 101 bp, Homo sapiens
cccaggttgcttggctgattatgttgaaatatatgacagttacgatgatgtccatggctttgtgggaagatggtcagtaggacagaaggtaacattgatga

SEQ ID NO: 413702 - DNA, 100 bp, Homo sapiens
ccgagccgctgtcggcgggaagcggcgatcctgccaccgggaggtgtggaagagccgggtaggaagcagtcaattatagatttcttcaaaccagcttcaa

SEQ ID NO: 413703 - DNA, 110 bp, Homo sapiens
ggccgtgttgctgatcgcctgggtggttgttggcgtgtccctgcagcgaaggatcctgcaattctgtggtgttcttggtcacacatttatggagtttctgaagggcagtg

SEQ ID NO: 413704 - DNA, 83 bp, Homo sapiens
ggacgggccatacccaataaccaggtgcttggcaaaatcgagcgggccattgggaaagcaggcaggatgggagagtcgccgat

SEQ ID NO: 413705 - DNA, 74 bp, Homo sapiens
ctgactgccccgcatcaccggagcgtcccagctgcgaggagaatagcctaacatggcagaccagagacagcgct

SEQ ID NO: 413706 - DNA, 80 bp, Homo sapiens
atcttccgacaacgacgagggcagcggaggggcgacaaagttccctctcccagcctgtgctgactcagccatcttcccat

SEQ ID NO: 413707 - DNA, 107 bp, Homo sapiens
gagagagccactcccgcccacgtcccatttcgcccctcgcgtccggagtccccgtggccagacaatgcagatcttcgtgaagactctgactggtaagaccatcaccc

SEQ ID NO: 413708 - DNA, 100 bp, Homo sapiens
agcttcggagaagcagtggtgggttccatgtgatggtggagtaggaggcaggtctccgcgataagaccatcatcatgtggaaactgaccagggatgagac

SEQ ID NO: 413709 - DNA, 50 bp, Homo sapiens
ctcccaaagcgctgggattacaggggccctggtgaaaacagatgaacaag

SEQ ID NO: 413710 - DNA, 77 bp, Homo sapiens
cggagtcagtcattttactgtcaagacatttcttcggcattctgcaacaggtagctacagcaagctgggtagcaggc

SEQ ID NO: 413711 - DNA, 75 bp, Homo sapiens
aacagcagatttcccaagagcagcggaaaatgatccagtcacagccacaataactttgtagccatcctggatctg

SEQ ID NO: 413712 - DNA, 88 bp, Homo sapiens
cagtacagaagaacatggttttatatcacaacaattgaagttccagattcttccattttgaaaaaggacagagcgggatgccaccagc

SEQ ID NO: 413713 - DNA, 74 bp, Homo sapiens
gtttctataggattttattgcacaaaggcaacggtgactttcaaagttactggagttggctataatcaatttgg

SEQ ID NO: 413714 - DNA, 75 bp, Homo sapiens
cactgaatctggatggcgtccgttgccttcatgtgaaggtggttttacgcacgacgagctgctgaaggtgtggaa

SEQ ID NO: 413715 - DNA, 75 bp, Homo sapiens
ggtgcaggtgtctcttctcgccctggcggggaaggccaggtcagagcagcccaccatgggatggggagggggtgg

SEQ ID NO: 413716 - DNA, 97 bp, Homo sapiens
ggattttcaggaaatggtgtcacaatttgtgaaggttctaagctggtctatgtccatcaccttcttggagaaggagcctttgcccaggtgtacgaag

SEQ ID NO: 413717 - DNA, 100 bp, Homo sapiens
gcggtgccggcgccggagacgatgccgttgtggattttcggaaaagacatatgaatggagctcagaagaggaggagccagtgaaaaaggcaggaccagtc

SEQ ID NO: 413718 - DNA, 75 bp, Homo sapiens
caagtcccgcggtttcctgaagagacagggctttatcagacctaaacaaggatgggaagatggatcagcaagagt

SEQ ID NO: 413719 - DNA, 90 bp, Homo sapiens
agattgcaaggtgaataaagaagtggagcgtgtcctgaaggagttccaccaggccgggaagcccatcggagtcttgctctgtcgcccagg

SEQ ID NO: 413720 - DNA, 83 bp, Homo sapiens
agacggagaagacgagggggcgtctgaggaggaagacctggaagacagatctggcagaaaatctatttcaggaacttcaggaa

SEQ ID NO: 413721 - DNA, 75 bp, Homo sapiens
tttctatgcccctctatgcagtcatgtatcctgtgtttaatgaggtttggaaggtttgcagttgctgctcttcag

SEQ ID NO: 413722 - DNA, 60 bp, Homo sapiens
ttgcggagtacagaatagccatcacccactctggtggttattaacttggtgatgcttttg

SEQ ID NO: 413723 - DNA, 82 bp, Homo sapiens
actgcagcctggagctacccccggccagcggtccggccaaggacgctgaggaactgtggctgcaccatctgtcttcatcttc

SEQ ID NO: 413724 - DNA, 75 bp, Homo sapiens
ttccgatttaaagctgagctgcgaggaaaatggcggcgggagaagcctaaagaaactgttccaactcttgctcca

SEQ ID NO: 413725 - DNA, 144 bp, Homo sapiens
cttccttcggccaggtggggaccatgactgcgttctggtgctgttgctcatgcctcgtctcatttgcaagtatgccatcctgatgacgatggtgctcaccatcttcatcaagtatgtgctgcactccgtggacctccagagtga

SEQ ID NO: 413726 - DNA, 75 bp, Homo sapiens
aacatcatgatccgagagagtgggcagtgtcgagatgtgagaaccagagaagttggaatccaagaaattcatcac

SEQ ID NO: 413727 - DNA, 124 bp, Homo sapiens
ggccacttcggctgtgtcaatgccattgaattctccaacaatggaggccagtggctggtctcaggcatcccgggcccaaatcctagacaaagccacagaatatatccagtatatgcgaaggaaa

SEQ ID NO: 413728 - DNA, 80 bp, Homo sapiens
actcctggtgaccagcattcaagacctgcctagagctggaacgttacctccagagcgagccctgctatgtttcagcctca

SEQ ID NO: 413729 - DNA, 78 bp, Homo sapiens
agacacatgctaacaggatctacaggatgatcaaacttggtctgggctctgcagaaggctttaaccaagcagataagg

SEQ ID NO: 413730 - DNA, 74 bp, Homo sapiens
accaatgcaccatcaccaaccaagtctcctctcggaaggtgctttgtaccgttacatttgattcattagaatct

SEQ ID NO: 413731 - DNA, 100 bp, Homo sapiens
cagctggataatgtccaccccgagccgattcaagaaggacaaagagatcatagccgagtatgaaagtcaagtcaaaggtgttttagaggcagctaataat

SEQ ID NO: 413732 - DNA, 74 bp, Homo sapiens
aacaggatgtgggaagagcacacagattcctcaggacaatcatctatctctccttggtgtatgtgcttggccat

SEQ ID NO: 413733 - DNA, 100 bp, Homo sapiens
ctggacaccagcaatgagaggacccgcgtgggcaccctgcaggtggtcagacatgtcatcaactcagctgcaaccttggccatggaccagccggctggcc

SEQ ID NO: 413734 - DNA, 75 bp, Homo sapiens
aaaagaaaagaacaaatgggcttcagccagcaaagcagcagaattctttgatgacggggtttcaccatgttggcc

SEQ ID NO: 413735 - DNA, 100 bp, Homo sapiens
gggttcctccctcctccgagagaccgccgaggtgcgggctgtgagagggggagcgtggagcctccgaggccgaggtgaaagaaaagatgttgtcccggtt

SEQ ID NO: 413736 - DNA, 125 bp, Homo sapiens
cggccggccggagcccgcgggggcggcggggcgggggcccagggcaggcgcggagccgggccggcaggtgctggagaatctggtaaaagcaccattgtgaagcagatgaggatcctgcatgttaa

SEQ ID NO: 413737 - DNA, 100 bp, Homo sapiens
tataaacagaaaattattcgtggtttctgtcacttgtgtgatggtcagattcacagttaatagaaggatctctatagttggatttggcttgtatggatct

SEQ ID NO: 413738 - DNA, 75 bp, Homo sapiens
aatgctgtcagtcccctaaaaagtattgtcgggccattctcttagtgatgggctggaggaagtccaaaaagcaga

SEQ ID NO: 413739 - DNA, 90 bp, Homo sapiens
cttacgaggaggtgatccgagaggagagcgcggccgactgactcagtgactatctcttcacgctagccagatatgcagccatgaaggagg

SEQ ID NO: 413740 - DNA, 74 bp, Homo sapiens
gggccaaagagggtcgacctgcaaacttgcaaggttttgccagatcgaagtcatcctaaactgctgatgagtgg

SEQ ID NO: 413741 - DNA, 90 bp, Homo sapiens
cgcttgggagtcctcagcagggggatcattcacagtgaggacagacacaggtgacaatctccaatagacttgtgtcttcaccttgctgca

SEQ ID NO: 413742 - DNA, 74 bp, Homo sapiens
actggatgaagaagcgcggccttcacacatcccagccggtgactgcagtgagctatgaaacccacgtagtcgaa

SEQ ID NO: 413743 - DNA, 80 bp, Homo sapiens
ggatcggattcctcagctacgaggaggcgctgaggagagaacccttaggagaaatcttgagagtggacagcaattgtgaa

SEQ ID NO: 413744 - DNA, 51 bp, Homo sapiens
agcggcgttggaggccaccgtttccagatccaggaggctgcaagccagggc

SEQ ID NO: 413745 - DNA, 88 bp, Homo sapiens
ccttccacaccccctccgtgggtgtgtgatgaaggtcaccgtgtccaaagggggcgaccgggacagtgacgacgacagcgtcctcgaa

SEQ ID NO: 413746 - DNA, 100 bp, Homo sapiens
aaagcgagtttcttgaagagtcatctgctaaactccactagagtcatctctacagttttcctttggaatatggataaatacaccatgatacggaaactag

SEQ ID NO: 413747 - DNA, 100 bp, Homo sapiens
ggatatcagagggagaaatccaacgacctttctatccagatctgacaaagttcccaaagatgtcacttgtgacctcattgtaggatgtgatggagcctat

SEQ ID NO: 413748 - DNA, 74 bp, Homo sapiens
tgctggaaggagactggatgatagaattagtaatgtgggccatggagtcaggccacctcctctgggctctgctg

SEQ ID NO: 413749 - DNA, 101 bp, Homo sapiens
ggcacggcggaggcagcggagccctgggccatcgcacccttacccttctgaagaacagaaaaagcagttggcacaagacacgggactcaccatccttcaag

SEQ ID NO: 413750 - DNA, 100 bp, Homo sapiens
tttgactcacgttcttggagttgctggtgttctatactggaagaggcatgccagaggtagagcaggccccttcacagatgtagtcactacaaatcttaaa

SEQ ID NO: 413751 - DNA, 83 bp, Homo sapiens
agcacagttcctgggaaggtggagccaccagcctctccttgtttggtgccctggttgtcagatgttggaaagcagtaggacgg

SEQ ID NO: 413752 - DNA, 75 bp, Homo sapiens
accttggagtaattcgtcgacagtcttgcagcccgtgggagtgataccaggagcaacacagagctcagcagcggc

SEQ ID NO: 413753 - DNA, 90 bp, Homo sapiens
gctgggtcattttgaagcaaattatatacacattagatcattgcattttgggaggctggatcttttccaatccagatggagtgtgcacag

SEQ ID NO: 413754 - DNA, 100 bp, Homo sapiens
ccacagcattcctgaaatacatccaggaaagacatggagattctcttaaaaagatcggcttcaccaccgaccctcggatggcccgctcctccccctaccc

SEQ ID NO: 413755 - DNA, 125 bp, Homo sapiens
cttcaggctgcatgtgaaaatcagccagccctccttacccatcagctccagaggaattacatgaatgacagtcttcgaaccaatgtgtttgttcgatttcaaccagagactatagcatgtgcttg

SEQ ID NO: 413756 - DNA, 76 bp, Homo sapiens
cggccgaaccccgcgcccgcaggacgccccagccaggtgcttttgaagatgatgatatcacgcacgttgaaggaag

SEQ ID NO: 413757 - DNA, 80 bp, Homo sapiens
tcctggaggcctgggaagccaacgaccacacgcagagaacgtatttaccgggcagtcaaagatctattcctacatgagcc

SEQ ID NO: 413758 - DNA, 87 bp, Homo sapiens
gagggggtggagttcgatgtgctgcctgcctttgatgccctgggttgttcctcaaagtcattcaagctgtactcgccgaaggagccc

SEQ ID NO: 413759 - DNA, 83 bp, Homo sapiens
cttccagaagggcctgaaggatggaactatcttatgcacgctctacagattctcccctgcccctggagaaggaggagcaggtc

SEQ ID NO: 413760 - DNA, 126 bp, Homo sapiens
accaaactggaggatgcctatgtattccctggggatggcgcatcacacaccaaagggagattttgcagctgctgccggcaacctacaaacctgcctggcagttttgggccgggcactgcccacctc

SEQ ID NO: 413761 - DNA, 83 bp, Homo sapiens
ccgccgctcaccccgcggccgcaccttcccgccttctcagctgagcgggctttggacaccatgaactttgatgtgattaaggg

SEQ ID NO: 413762 - DNA, 100 bp, Homo sapiens
gaagaagaagaagcggcctcgcaactcttataaatgtggtactgaacgacacctgggtctccttcccttcctggtctgaggactccacgttcgtcagctc

SEQ ID NO: 413763 - DNA, 83 bp, Homo sapiens
gccagaggcagaaaacggacggaagaaaaggtctggccgtcttgctctgttgcccaggctggagtgcagtggtgccatcatgc

SEQ ID NO: 413764 - DNA, 75 bp, Homo sapiens
caatgaaaccaggcgggtaaacatggtggacagaaagtcagcctcttgtggtgtggaaacaggaagagaactaga

SEQ ID NO: 413765 - DNA, 75 bp, Homo sapiens
taatctatgactatgccattgtgctattcaaggtgctggagaatctggtaaaagcaccattgtgaagcagatgag

SEQ ID NO: 413766 - DNA, 73 bp, Homo sapiens
cacatcctgctgtccagtcagacctcggataacaatgccctgacacctgagggtgagaaggactggcagaaat

SEQ ID NO: 413767 - DNA, 75 bp, Homo sapiens
ttatttttcagcgtgaacaagagttcccattctgtgatggggctcacacaaaacataacgaagagactggagaca

SEQ ID NO: 413768 - DNA, 90 bp, Homo sapiens
cagccaccctggttcaggaacaaagatcgaccttcagaagatgcccttggggaagctgagcaaaaggcagatccaggccgcatactccat

SEQ ID NO: 413769 - DNA, 101 bp, Homo sapiens
gggggcatcgcgtaccttcctcacccccctcccttgcccactccgctcgggaggccgagaggaaacggtactccaaagattcaggtttactcacgtcatcc

SEQ ID NO: 413770 - DNA, 95 bp, Homo sapiens
gaaaactccagtgattttcaatcaaacattgcataggaggtgggccccactatggtgggcgatgaacagtcggatccagagctgatgcagcatct

SEQ ID NO: 413771 - DNA, 74 bp, Homo sapiens
cgatgtgcggaagggcacctccacccgcatgttggcagataaattgaacatgactccagaagaagctgaaaggt

SEQ ID NO: 413772 - DNA, 101 bp, Homo sapiens
ccgggacccccctgcggggacccggaactgctcattcttggaatcccagaacaggccttaagtcttctccacatggccatcgagcccatcttggctgacgg

SEQ ID NO: 413773 - DNA, 75 bp, Homo sapiens
tttgccgcagttcatcttcctccctgtgtactttccatttgccttcctgggggaactgatcacagccgcacatga

SEQ ID NO: 413774 - DNA, 97 bp, Homo sapiens
tccctctcttcgcggagcggcgccgcgtagcttccatccgccagctgccatgagcgagcgcctccgtcccaggttgttaaaggccttacttatttgt

SEQ ID NO: 413775 - DNA, 98 bp, Homo sapiens
gatctctacagagatgtgatgttggagaactacaagaatctcattatactagctccctgccgtggcctttaatgtgaacaacctgcccttcacagagc

SEQ ID NO: 413776 - DNA, 48 bp, Homo sapiens
attcaaagcacacttttctggccttgtatactacatcctttgaagaca

SEQ ID NO: 413777 - DNA, 75 bp, Homo sapiens
ccccgtcctcttgtcctcctcagcctcgcccgcggcgccatggctcacgtcggctcccgcaagcgctcgaggagt

SEQ ID NO: 413778 - DNA, 83 bp, Homo sapiens
atgtctggtggctccgcggattataacaggtgcagattcactttataggaacagcttcagcttcagtgatgaaaaactgaatt

SEQ ID NO: 413779 - DNA, 80 bp, Homo sapiens
agagtgctgatgtgaaaaataccacgacaaaaccaccctagacttgtttacactgggcatgtaaacgaaaccatggtcag

SEQ ID NO: 413780 - DNA, 83 bp, Homo sapiens
gctcagccccgacaatgtggtccggaaacaggcagagatgggggactcaaggagatttcaccaccacccatcctcggcctgtg

SEQ ID NO: 413781 - DNA, 90 bp, Homo sapiens
atcaaatgtgagcctatggatcaagtggcggagcgagggctactgcacagctagcagagtcgtggcgaggaggacagcacctgcatcgag

SEQ ID NO: 413782 - DNA, 90 bp, Homo sapiens
ccgaattacatctgtccagccacctacaggcctccaggaatggctaaaaatgtttcagcccatctgcacaggggaactgaggagaaacag

SEQ ID NO: 413783 - DNA, 100 bp, Homo sapiens
aagctgccgcccatcgtatcggcgggcgccggcgcgaccgcggtatgcagtggaactgatgaagaccctgatgataaaaacgcaccctttcggcaacggc

SEQ ID NO: 413784 - DNA, 73 bp, Homo sapiens
gacagcggtccggacgccgcccgaacatggactccgccggccaaggtatcctgtggtctgaggccatcttcct

SEQ ID NO: 413785 - DNA, 89 bp, Homo sapiens
aagaatattattagcacaagagcaccatactttgagggagcattgggctcaggatctgaacaaagtccgtgagcggatgacaaagttca

SEQ ID NO: 413786 - DNA, 74 bp, Homo sapiens
cacagagaagatccgcgaggttgtctgctgggaactgtgtcaatctgacagaagcactgtcgctctatgaagaa

SEQ ID NO: 413787 - DNA, 75 bp, Homo sapiens
ttattctgcaatgtagacaatgtgatagttctaatacccgatttacaattacattgaactacaaggatcccctca

SEQ ID NO: 413788 - DNA, 100 bp, Homo sapiens
ggaggggaatttccttgtgcctccattcccgggaggggggagcggcgttggaggccaccgtttccaggtaacttgggtttttactcctgtaacaactgaa

SEQ ID NO: 413789 - DNA, 100 bp, Homo sapiens
tcagagcttcagtgaccaccacgagtggttctacccaggcaataacccctacactgggacccccgactggttgtatgcaggggattactttgagcggaat

SEQ ID NO: 413790 - DNA, 90 bp, Homo sapiens
ctcctgagtagctgagactacaggaatcctttctggcactcaagagttttcaattcaatcctgatgaatgaatcattatttgataccagc

SEQ ID NO: 413791 - DNA, 100 bp, Homo sapiens
caaatatgaatgagattgttacacaaattgatgcacaaaataagctggaaaaatctgagctggcatattccaggccatgtgtctcctgatctgtgccgag

SEQ ID NO: 413792 - DNA, 82 bp, Homo sapiens
aaattcatcccagaaatctaagaggaatcagtgtctgtccctgaagggtcattaaatcagctatgttcttcagaagaaccag

SEQ ID NO: 413793 - DNA, 100 bp, Homo sapiens
tgtaactataagcagcttcggaaaggagccaatgaggatacattatggtgccgagtggtaacatgggagtgtttgatccaacagaaatacacaatcgagg

SEQ ID NO: 413794 - DNA, 100 bp, Homo sapiens
ccgtggccttagctgtgctcgcgctactctctctttctggcctggaggctatccagccttctaagtgccagatgatggaggagcgtgccaacctgatgca

SEQ ID NO: 413795 - DNA, 100 bp, Homo sapiens
ccacgctgtccgtccgcagtaccgacgcctgcagggtcggcactcttcaccctcccgagccctgcccgtctcggccccatgcccccaccagtcagccccg

SEQ ID NO: 413796 - DNA, 76 bp, Homo sapiens
cccaaaatcagtgattctacatctcaagctcatattttgaagtgtttacgggcagcgtctatcccagactaccggg

SEQ ID NO: 413797 - DNA, 90 bp, Homo sapiens
gtctgggaaaatcgctgtgatatcaggagggctctaactccgtgaggaccccagcattatttctataattgtttgtgagaaggactgaat

SEQ ID NO: 413798 - DNA, 49 bp, Homo sapiens
aaacatcaaacggcatacaaatggtccagctcttctatgaactaactga

SEQ ID NO: 413799 - DNA, 75 bp, Homo sapiens
ggcatggcggagaaggatgacaccggagtttgacgaagaggtggtttttgagttcaggagcatcccaggaggaac

SEQ ID NO: 413800 - DNA, 98 bp, Homo sapiens
ggggcggcagtgagctcggccggcaaccgagggacccgcgtccagatatgaggccccaggattcctggcgaggtcctcctccccttttccagcagcaa

SEQ ID NO: 413801 - DNA, 97 bp, Homo sapiens
cagtgagcgagatgctgcagatgccgttaaacaaatcctggaggcagttgctaacattctagtatgccagtagaaaaaaatatcactttagaaaggc

SEQ ID NO: 413802 - DNA, 50 bp, Homo sapiens
ctcatggaggctgagcatttattcagggacccccatcaaccgaatcccca

SEQ ID NO: 413803 - DNA, 96 bp, Homo sapiens
cgtggcggcctcccgcgtctacaagtccaagaggaacatcattctgggcgcagggatcctgttcgtggcagcaggagatgcgctctgtgctgcgga

SEQ ID NO: 413804 - DNA, 100 bp, Homo sapiens
aacagtggtggtggagacgggccccacatcagctccaaggtcagggtgattaagctgtcaggtggggtgtatgcaacagcgttattgcaacaggctaacg

SEQ ID NO: 413805 - DNA, 99 bp, Homo sapiens
caagacaaagaagttggagatggaactacttcagtgatgaccactgagcagtttacaggagatcatactcagcactttttggatggaggtgagatgaag

SEQ ID NO: 413806 - DNA, 100 bp, Homo sapiens
acaacagtttggcgtgcaacatggggcttgagaaagggtcaacagcgacctcatttacattacagctaagaaagatggcactcatgtggtggaaaatgtg

SEQ ID NO: 413807 - DNA, 100 bp, Homo sapiens
ttagcagctgtctacactgtgggacacaacttgatcaaggtggcagtagagaagagcatcacagaagttgctcaggagctgacagagctggtggaacatc

SEQ ID NO: 413808 - DNA, 101 bp, Homo sapiens
gctaaagaggtagcaagaaagaaaattagagtgaatgtagttgcaccaggacccgtgcatctcttccgactctcgggcaagtgcttcagcctggtggagtc

SEQ ID NO: 413809 - DNA, 101 bp, Homo sapiens
aatggacccaatgaacatctgggatgacatcatcacaaatcggtacaaacccgtagtgctgatgaaccaatgacaacatttgttgtctgtaatgaatgtgg

SEQ ID NO: 413810 - DNA, 83 bp, Homo sapiens
tcagggggctggcgcatgcgtgtctccctggccagaatgaactctggaagcccagccagggacaatgcaccttcacagagatt

SEQ ID NO: 413811 - DNA, 100 bp, Homo sapiens
ggaattcaagagctgaaggacaaacactggttcagaagcacgagttctctgtggacatgacctgtggaggctgtgctgaagctgtctctcgggtcctcaa

SEQ ID NO: 413812 - DNA, 101 bp, Homo sapiens
agccagcaccaagatgctggacagagcgagatgcgagaacacttttggctaaaaatctcccttacaaagtcactcaggatgaattgaaagaagtgtttgaa

SEQ ID NO: 413813 - DNA, 50 bp, Homo sapiens
aatttatggtcgcctttttgaatgaggcatttccggagagttcttttgaa

SEQ ID NO: 413814 - DNA, 78 bp, Homo sapiens
aacttcgttgcttgcttgcctgtgcgcgcgtgcgcggacatggcctcaaacgacaaatttacatgtattggagaccag

SEQ ID NO: 413815 - DNA, 90 bp, Homo sapiens
cagaggagaagctggcagctctctgtaagaaatatgctgatcttattctgtttctggcgtctgcatacgcaagtccccaactcgctgagg

SEQ ID NO: 413816 - DNA, 90 bp, Homo sapiens
agagaaggctcactcaaggatcagttggctttagcaattggagagaagatgactgaggaggaggtggagaccgttctggcaggacacgag

SEQ ID NO: 413817 - DNA, 50 bp, Homo sapiens
agacaagaggaatggttacacagacaagtgtggttaactacattgaccag

SEQ ID NO: 413818 - DNA, 132 bp, Homo sapiens
ctgaatgccagtgcatcttgggggaaagggctccagtgttatctggaccagttccttcattttcagggaggctcctcgggccggggcacagctctcaagggtggctgtgattctgaacttgtcatcttcctc

SEQ ID NO: 413819 - DNA, 75 bp, Homo sapiens
tgattgtcgtttttacccggccaaagtcactgctgttaacaaggatgagattcagttgtggaaattctttttgaa

SEQ ID NO: 413820 - DNA, 75 bp, Homo sapiens
accatcgagcagtctttgctggccacgcgcgtaggcagcatcgccgaattgagagatcatgaatcagacagataa

SEQ ID NO: 413821 - DNA, 104 bp, Homo sapiens
ccatgttgtggaaaataaccgataatgtcaagtacgaagaggactgcgaggttttaaaatcaaagatgggaaaatcggagaaaattgcccttccccatggccag

SEQ ID NO: 413822 - DNA, 76 bp, Homo sapiens
aaatggctgatgatttgctggcagctgctgacaaggacctggaagaacagctagacgaggaggaaggggctcggca

SEQ ID NO: 413823 - DNA, 99 bp, Homo sapiens
ggacagagccgcccatgacagggggacacctcctgaattaaagctatagagagtcccaacaaagaagatgatacccagtggctgacctactgggtagtg

SEQ ID NO: 413824 - DNA, 109 bp, Homo sapiens
ctcatttgaagcaccatcagacacctgaccctcatcaagaagagaaccattctccagacaaatcttcctattttcaagctgaaagaatctactgttagaagaagataca

SEQ ID NO: 413825 - DNA, 75 bp, Homo sapiens
aaaaattacagcacatctcagtgaatttgcaagtgattgaatagggaaaacctgctttctgcaaacaactgaaaa

SEQ ID NO: 413826 - DNA, 98 bp, Homo sapiens
tttccttcgtccctgacatcatctctgtgcactgataataaccctgcagatgtcaccgggtgcgcatcaatgtacctccacacagagggcttctctgg

SEQ ID NO: 413827 - DNA, 75 bp, Homo sapiens
tgaaatgtcatgcctctgaaaatgaagtgatggaatggggagaagatattaaagcagtttcaaaagatgaagcag

SEQ ID NO: 413828 - DNA, 75 bp, Homo sapiens
cttcaacgaagaccgagactttcaggcaggtcttgacgagccctgcccgggccgacgcatgcggaggatggaaac

SEQ ID NO: 413829 - DNA, 100 bp, Homo sapiens
caagacccttgtgctcgttgtcgccgcggtcctgctgttgagacagggtcttgccttgtcgcctaggctggagtgcagtgttgagatcatagtttactgc

SEQ ID NO: 413830 - DNA, 100 bp, Homo sapiens
aaagaagtggagcgtgtcctgaaggagttccaccaggccgggaagcccatcggagtggagcctttcaggctggcatggagagcttaaggggcaactgaag

SEQ ID NO: 413831 - DNA, 100 bp, Homo sapiens
gtctgcgaaggccgggacccggttccccggcccacagtgggggtgtgcaaacccgagagaactgggaagtggttacctggaaggaaaggagctgcagaac

SEQ ID NO: 413832 - DNA, 90 bp, Homo sapiens
agatcttcatgtgtctcttctaagctgaataaagctgttttggaactgtcaggtacctcaaagcacattcagtcccctgaagctgaatat

SEQ ID NO: 413833 - DNA, 96 bp, Homo sapiens
agaaacgtcgtgatttggagtattaagtctttcccgttctttccaaatggcaatgcatttgccactggctcagacgacgccacctgcaggctgttt

SEQ ID NO: 413834 - DNA, 74 bp, Homo sapiens
gccggacgtcggcaacggagaaggtgctggagaatctggtaaaagcaccattgtgaagcagatgaggatcctgc

SEQ ID NO: 413835 - DNA, 73 bp, Homo sapiens
tttgatgattctgagcctgttcagaaagtccttagcaacaggttgcttttgaaatcagaaagtcagtgcaggg

SEQ ID NO: 413836 - DNA, 98 bp, Homo sapiens
tgctgtgggacctattgttcagttacaagagaaactttatgtgcctgtaaaagaatacccagatcatttaaatcaaacggtattgagatggattgggt

SEQ ID NO: 413837 - DNA, 83 bp, Homo sapiens
ctgtcttcggtggactccttcggcagtccacccaccgccgccgcctcccaggaggcaagtgaggcctatctggttggcctttt

SEQ ID NO: 413838 - DNA, 87 bp, Homo sapiens
gacatcgacccccgccggactgcagtgacaacgcccaagggggaggtgcacttactggacttccccaatattgtcatcaaaggatcg

SEQ ID NO: 413839 - DNA, 95 bp, Homo sapiens
agaagcaacttttattgctagaatggcccaatatagctttgacaagattctcaaagttggattggtggaaacaatgaaccattgacaggctttac

SEQ ID NO: 413840 - DNA, 97 bp, Homo sapiens
agttctgcagccagtgcggagagaggctgcctcctgcagcccccatagcagttcctgggcttcccgatggactcgagtttttactatgtgagcatcc

SEQ ID NO: 413841 - DNA, 100 bp, Homo sapiens
aaagagctccacattcaggggaaccgcctcaccgttctgcccccagaactaggggctttgttatgcacctaaagccatattggaagctccagaagaaaga

SEQ ID NO: 413842 - DNA, 83 bp, Homo sapiens
gagttggtcccggcggagatccagtgggaagagccggcggctgcccgggcgccaggcacctcattgagaagtcagtgcgtaag

SEQ ID NO: 413843 - DNA, 50 bp, Homo sapiens
ctgctgtcaatggtgttgtccaggtctccctctgttgtccaaggctggag

SEQ ID NO: 413844 - DNA, 88 bp, Homo sapiens
gcaatgcttcctctggttttacattggttcttcattgaatggtactcggggaaaaagaggtccgtgacgagaagttattaccgaggcg

SEQ ID NO: 413845 - DNA, 100 bp, Homo sapiens
aggaggacttcgagctgattcagcgcatcggcagcggcacctacggcgacgtctacaaggttctgaagcaaaaacacctggatgattgcctgcgacatgt

SEQ ID NO: 413846 - DNA, 100 bp, Homo sapiens
gcggccggaggaggagtaggtgcgggtgaagatggcggcagccgaggccgcgaactgcatcatggaggagcctcctcaacaagcccaagagtgagatgac

SEQ ID NO: 413847 - DNA, 74 bp, Homo sapiens
ggagcacagaggctcagaagcaagtccaggcgcttgaagaggctcagaaagctatccaacaactctttggcaaa

SEQ ID NO: 413848 - DNA, 75 bp, Homo sapiens
ggaagtattgacggaaagcttgaattacctacatggtgactctgacatcattagaagcatgccagaacagactgg

SEQ ID NO: 413849 - DNA, 51 bp, Homo sapiens
catcctggaagctgggaaatgagcccacccacctttgggttcctgttggac

SEQ ID NO: 413850 - DNA, 80 bp, Homo sapiens
gagcctcagttggaagcagccgatccagcctgcggagcctgtggggcagccaaaactggacaagccaaggcatctgtagc

SEQ ID NO: 413851 - DNA, 100 bp, Homo sapiens
ttacttcagagccccggcttattgtggcagatattgatgggagcactttctggagtcaccctttcaatagtttatgtcatcccaaacagctagaggagtt

SEQ ID NO: 413852 - DNA, 82 bp, Homo sapiens
atttaaaggagcagccctggtgtcacctatcagtaaaaggttatttggaaatagcggtgcttgcagcgcttgcggacagtcg

SEQ ID NO: 413853 - DNA, 100 bp, Homo sapiens
aagccaacaatgcctttgaccagtatcgagacctgtgaaatgacaatggatgctctgttggctcgattgaaacttctgaatccagatgaccttagagaag

SEQ ID NO: 413854 - DNA, 73 bp, Homo sapiens
gtctattgttgtcagtggagagagtggtgctggaaagtatgccaagtacatggaaaaccatagcattgaagga

SEQ ID NO: 413855 - DNA, 83 bp, Homo sapiens
cctgaacggagtgtgcgacggattgggagataacgaaggaggcccaacttcattcaataaggagcctgacggatttatcccag

SEQ ID NO: 413856 - DNA, 83 bp, Homo sapiens
acctggtcttcactgacgcctctccccaggatgggtgatctacaatgaccagaaagtgtgtgcctccgagaagccgcccaagg

SEQ ID NO: 413857 - DNA, 51 bp, Homo sapiens
ctgatgaactccaagggggagtatcaggcacagttggcgggcagctcccag

SEQ ID NO: 413858 - DNA, 101 bp, Homo sapiens
gtgcacctagggggcggctaccccgtggggaattgtcttagaagaaagaaggcaagccaccattttacccacgtaaatatatgaatatatttctgacattg

SEQ ID NO: 413859 - DNA, 101 bp, Homo sapiens
tgctggcaagtctgaaggtcaatgaatccctgttgttactatccatgccagcaccagggcatctgtgtccgcttcggccttgaccgctaccagtgtgactg

SEQ ID NO: 413860 - DNA, 100 bp, Homo sapiens
cggcttcctagtgagtcggcggctgatttagaaggaggttcaggctacggtgagccgaagggatttggacatttggtgccatcttcagaagatccaggag

SEQ ID NO: 413861 - DNA, 96 bp, Homo sapiens
cgcctcctcgcagcagcgccatgttctggcataaagcatgcttccattgcgagacctgcaagatgacactgaacatgaagaactacaagggctacg

SEQ ID NO: 413862 - DNA, 50 bp, Homo sapiens
gcgtcatcgagtgtgacgtggtgaaaggtcctgaacgaggctgtgggggc

SEQ ID NO: 413863 - DNA, 100 bp, Homo sapiens
gaaggatatgtgccccaggaggaggtcccagttttttggctttcacccccaaccagtgaccaaagacttgaccactcaaagtccagctccccagaacact

SEQ ID NO: 413864 - DNA, 50 bp, Homo sapiens
cagccatggccctccacagcccgcagtgggctgagggccatgtcagtttt

SEQ ID NO: 413865 - DNA, 98 bp, Homo sapiens
gtgatccacgcattggcattttgtgaaagcttatatgatccatatcggaattggagacatagaatttcaggtgtctgctgcacagagctttacatccc

SEQ ID NO: 413866 - DNA, 137 bp, Homo sapiens
cagcagtgaccttcaaagtgagcgccaatgtccaaaacgtgaccactgaggatgtggagaaggccacaggtgctggagaatctggtaaaagcaccattgtgaagcagatgaggatcctgcatgttaatgggtttaat

SEQ ID NO: 413867 - DNA, 100 bp, Homo sapiens
attgccaacgccaccgccacgctacacacaggacccttgaacatctgtgaagaaatgactattctgcatggaggcttcttgctggccgagcagctgttcc

SEQ ID NO: 413868 - DNA, 50 bp, Homo sapiens
aagttcctccaggtttgccatcttcacttccaatcagaagactatacaac

SEQ ID NO: 413869 - DNA, 78 bp, Homo sapiens
tacacttcttagtgtagttgaagatcataaagagttatcaggaactgttgccgttattacatcagatgggagaatgat

SEQ ID NO: 413870 - DNA, 88 bp, Homo sapiens
gcgcgcggtagcgtcccgggtcccctagcagggctctagagaccacgtgaagtctcctcgcattgttgtccagacatgataactaaat

SEQ ID NO: 413871 - DNA, 76 bp, Homo sapiens
gtaatcagtctttgacaagtgatgagaagctgtcggagcttcccaaggttccagcaacagatagaaatgctttaag

SEQ ID NO: 413872 - DNA, 51 bp, Homo sapiens
cagtaatagcgtgtttatctgacacggacgacgcaaagtaccacatgcagc

SEQ ID NO: 413873 - DNA, 50 bp, Homo sapiens
gaggcaccaaggacctccaagacaggttatgaagttcatggaatggaaaa

SEQ ID NO: 413874 - DNA, 100 bp, Homo sapiens
actactgaaccactgctgttaggaagctacaacccaaaagaaaagccccacagatgctgagagctggtgatcctcaggtactcttccaacccaagaggag

SEQ ID NO: 413875 - DNA, 83 bp, Homo sapiens
cagatgaaacatcagtctaccagctttgggctgatgctgacatcagtcagacatggctgtgatgccacatgctggggtccggg

SEQ ID NO: 413876 - DNA, 90 bp, Homo sapiens
ccagatagcacctgaggacagaacatatcaggagttgtatcccgcattttgtattcacaacggaggctccgaccttgagcggctccccac

SEQ ID NO: 413877 - DNA, 74 bp, Homo sapiens
ggcggccgggccctcgagacggggacgctgagatctgtatctgtggacctgaatgttgatccctcgcttcagat

SEQ ID NO: 413878 - DNA, 108 bp, Homo sapiens
cctgattcaagtgttggcggatggaagggaggagactcctgaccctcagaatgcatgaagaggaaccacctcagaatatgaaaccacaatcaggaaacgataagccat

SEQ ID NO: 413879 - DNA, 90 bp, Homo sapiens
ggactggctgatactacatattccagatgataactgcgacctccacttcaaggtggcccgagatcggagtagtggctatccgctcacaat

SEQ ID NO: 413880 - DNA, 99 bp, Homo sapiens
ctggaacaagcggagtggcctgcagttttacatgtggcacccataaaagatgaggctgagaacacggaaagcttctcagcagtcaaatcaaatccaaac

SEQ ID NO: 413881 - DNA, 100 bp, Homo sapiens
gtttgatcagcttttgcaagcagatatctaactgattttgagccaattcaatgcctgggacgtggtggctttggagttgtttttgaagctaaaaacaaag

SEQ ID NO: 413882 - DNA, 52 bp, Homo sapiens
gcatatgtctcctcttgctgcccaaggcccccctcccactgcaagtccagga

SEQ ID NO: 413883 - DNA, 100 bp, Homo sapiens
cagcgtcgtcgcttcactgtggctcatacatggtgcctcatctccagacatggagcccagctatgggggaggtctctttgacatggtaaaaggaggtgca

SEQ ID NO: 413884 - DNA, 95 bp, Homo sapiens
tccagaggaggtgaaaacgcctgaagaaggtgttccattgcctaaagaggagaacatttctgctcccttgatctccagctccccagtgaaggcag

SEQ ID NO: 413885 - DNA, 100 bp, Homo sapiens
gtccctggagcatcctccgctggagctggagcttgacagggctgttgataatcaggtgtatgtggccacagcctctcctgcccgggatgacaaagcctcc

SEQ ID NO: 413886 - DNA, 80 bp, Homo sapiens
ataataacattcagcaagcacatagtggagcaaatggtggctttcattggtaggagagaagtttgctgaggaatgccttc

SEQ ID NO: 413887 - DNA, 75 bp, Homo sapiens
cttttgtagtaggtggaggaatttattttctgggtcagctgatcatcctggccaatggtgggccccaggccctcg

SEQ ID NO: 413888 - DNA, 75 bp, Homo sapiens
agactagacctcgtaattacattctctcggccagcgcctccgcggtatgtgaggagcagcgctgtgaggaggaag

SEQ ID NO: 413889 - DNA, 80 bp, Homo sapiens
tccacagaggataaatttcaacctccggggccacaatagcgagggtggtgattccactgaagcaactgccaaaccaaaga

SEQ ID NO: 413890 - DNA, 97 bp, Homo sapiens
ggaaagcggcgagtaagatggaagatgaggaggtcgctgagagctgggaagaggcggcagacagcggggtgagcacctgcggatctgtccccagggc

SEQ ID NO: 413891 - DNA, 97 bp, Homo sapiens
cccaggtggggaaggatggtgtcctccgggacggagatggagccgtggtccttcccaatgaggattatatgcgtcaggcaggagaagtgacttatgc

SEQ ID NO: 413892 - DNA, 100 bp, Homo sapiens
acagatgtggaaagtgaatgtgcggaaaatgccttcaaatcaggggacggcaaaacagaacagaaaggcggagataaaaagaggggtgttaaaagaccac

SEQ ID NO: 413893 - DNA, 74 bp, Homo sapiens
cctcccaaagtgctgtgattacagacaacacaggcagttctacataccggccaccccctcggacccgggaggtg

SEQ ID NO: 413894 - DNA, 80 bp, Homo sapiens
tgatcctggccagcctgctcatcgcctactgcaggcatttttctggctggtctccctgctcctggcctctgtggtctggt

SEQ ID NO: 413895 - DNA, 101 bp, Homo sapiens
cgggagaagcatgggaaggaggccgagccgggatctcaggtcctcgggggcggcggccacgccaaggacgggcatgttatgttacccagagaactttccaa

SEQ ID NO: 413896 - DNA, 100 bp, Homo sapiens
tgaaacgtaactggttccctgaccagagaactattgtcgagtgatgcgatgaaagaatataacagggctcgagtctacctggatgaaaactacaaatccc

SEQ ID NO: 413897 - DNA, 74 bp, Homo sapiens
taaaccaagagtcacaaactgaaatgccatcaaggggccaagcagggtctcgctctgtcacccaagctggagtg

SEQ ID NO: 413898 - DNA, 100 bp, Homo sapiens
ctgccccgccggagcagcatcatcaagggccagatattcgaagcttacaacatggcagctttgtggaaattaccttgtattttcatctgtgagaataatc

SEQ ID NO: 413899 - DNA, 96 bp, Homo sapiens
ctgcaatctgccattgagaactggctctgtggatattattgtaacagatttgccatttggaaaaagattcatgatgttgctatcaaaagttgagaa

SEQ ID NO: 413900 - DNA, 98 bp, Homo sapiens
ccaaatgcagcttgagaacgtgtcggtggcgctcgagttcctggaccgcgagagcatcaaactggtgtccatcgctgggttaacaactttggccatga

SEQ ID NO: 413901 - DNA, 90 bp, Homo sapiens
ccaccctataccgatgctccacctgcctactcagaggccaaggcagaggcttcctcaggagaccatcccactgacacagagatgaaggag

SEQ ID NO: 413902 - DNA, 83 bp, Homo sapiens
tgtcctgtctctcctcatgctagtagctgccttctgctctccagcgctctcagcaccaaagtggagactgctgcacggactct

SEQ ID NO: 413903 - DNA, 83 bp, Homo sapiens
tccaaccagacaggcctctgggcacccggctcaccgtcactctgacccagcatggggtggcctggaggccaagcagatgtggc

SEQ ID NO: 413904 - DNA, 82 bp, Homo sapiens
cgtcagcctcccgccggccgtctccttaacaccgaacaccgaaataatgcaaaaggtgtcccaaggctcctgaccagtgaac

SEQ ID NO: 413905 - DNA, 74 bp, Homo sapiens
gcagcacaatgaactgctagacctcccagatactataggtacgtcttattcaggttatgaagcagcagtgtatt

SEQ ID NO: 413906 - DNA, 100 bp, Homo sapiens
gattcagtatcactcgctcccttgatgatcttgagctggtcagtgagaaggtcggaggggccgaggggaccaagctggatgatgacttcaaagagatgga

SEQ ID NO: 413907 - DNA, 98 bp, Homo sapiens
gttcgcggtgcagatgacctgtcagagctgtgtggacgcggtgcgcaaatccctgcaaggggtggcaggcagagtgtctctggcacagtttgccttgg

SEQ ID NO: 413908 - DNA, 100 bp, Homo sapiens
gcaattctaggggcttatagctccaataatggaatgacgcaaacatgcagatctttgtgaagaccctcactggcaaaaccatcacccttgaggtcgagcc

SEQ ID NO: 413909 - DNA, 100 bp, Homo sapiens
ggtcacctacccccagcaccacctccagcccctgcgcctcgaaaactgcatcagcagtttgaaatgtataaagagcaggtaaagaagatgggagaagaat

SEQ ID NO: 413910 - DNA, 98 bp, Homo sapiens
gagcgcaaggaggagcaggccgaggccatatccgagcgggtgatcgtcttggacaaaggagaaatccaggagtacggcgccccatcggacctcctgca

SEQ ID NO: 413911 - DNA, 100 bp, Homo sapiens
ccctggtacaagaaggaggatcgcccatcaaatacaacaaagatggcagtgttgccattgccagtaagccaagagagggtgttcctgaaaagaaggtact

SEQ ID NO: 413912 - DNA, 71 bp, Homo sapiens
ctctgcaaaccaaacaaaggcgaccctcgaaaggtggagccgccaccaaaatgcagattttcgtgaaaacc

SEQ ID NO: 413913 - DNA, 88 bp, Homo sapiens
agattcgcagtggtcgcttcttctccttgtactttacctcgtgtgggcctttattcctgaatcttggctaaactctttaggtttaacc

SEQ ID NO: 413914 - DNA, 101 bp, Homo sapiens
cctggaggctgctaacctcttccaggaggaagttaagtcttcagagcctactgaggatgtggagcccaaagaggctgaagatgatgatacaggacccgagg

SEQ ID NO: 413915 - DNA, 98 bp, Homo sapiens
acggattaatatttctccctgtcttactcagttacataggtgtcatggagaaactccagctgggcccagagattctgcagcgggaaaatccaaggctt

SEQ ID NO: 413916 - DNA, 90 bp, Homo sapiens
ctggcccggaaacaggaggacaaccgggctgtgggtcggcccaaggggaagctgggcccggcctccgcggtgaagttggccgccaaccgg

SEQ ID NO: 413917 - DNA, 101 bp, Homo sapiens
ttggaggccaggtttactggagtaggtgttagtaagacagcaccagttgcccttgaagcagaaaacagaggtgaaatgaaactagctctccagtatgtccc

SEQ ID NO: 413918 - DNA, 98 bp, Homo sapiens
ggcatggatatctctactcgctccaaaggtccctaatattaaggagctttgtggatgatactatgcatcttctagagaagcagtcctcaacctttttg

SEQ ID NO: 413919 - DNA, 96 bp, Homo sapiens
aatgccgtgaaagtgacgccttcgctcaacgaggacctgcaggtggaagtgatgaaggagctggtgagcaggctgctgcacctgcacttcaaggat

SEQ ID NO: 413920 - DNA, 100 bp, Homo sapiens
cctcggtacctgcagcccggcggggagcagctggccatcaatgaggtgccttatgcccgctcagaggcccacctcacagagctgctggaggagatatgtg

SEQ ID NO: 413921 - DNA, 121 bp, Homo sapiens
gtccaacatgctagcacaggacagccacctgctgtcgggccagctgcccacgaaccaaggtgggaagctggcagtgcttggttcatgtcacatgttcagtgatcaatatttggacaaagaa

SEQ ID NO: 413922 - DNA, 50 bp, Homo sapiens
gctcaacacggcacttccacaggccggcgaccaccaggggcctgaggatg

SEQ ID NO: 413923 - DNA, 82 bp, Homo sapiens
cagagaacagctctttgcatccggagagtggacaagaaattgattatggaagattcccacaagagtaccacgtcagagacag

SEQ ID NO: 413924 - DNA, 75 bp, Homo sapiens
aaacatgcagattatatcgcatcctatggctcaaagaaagatgattatatcctcacagccaccgtggacaatgcc

SEQ ID NO: 413925 - DNA, 90 bp, Homo sapiens
gtccagtgatgtcagctggcccaaaagtgggtgcagtggaccccatcatggagaagttcaacacatccagcctacgaccagcacctgtgg

SEQ ID NO: 413926 - DNA, 90 bp, Homo sapiens
attatctgcaaattctagcaatgtaattcagttgatcattgatgcatacaatagacctcatccttcaacagctgaatcaaaggctccaac

SEQ ID NO: 413927 - DNA, 96 bp, Homo sapiens
atgccttcaatactacctttatttccaccatagattgctcgctgtaagcagctcatctgtgaccccagctacgtaaaagatcgggtagaaaaagtg

SEQ ID NO: 413928 - DNA, 82 bp, Homo sapiens
gttactgtgtcttctgaagaaaatgtgtgtgacatagaagcagaagtgtcagaacactccacaggtataacccatcttcctc

SEQ ID NO: 413929 - DNA, 100 bp, Homo sapiens
gaggacgaggagagacagaagaagctggaggccggcaaagccaaggcgaggattaaatccaccacacagggtgaaatctatctccatgacaacattcaca

SEQ ID NO: 413930 - DNA, 100 bp, Homo sapiens
agagaaactatgggacacagatatgttgaagggtggttctcttcccaaagtggaagccaaattcatcaattatgtgaagaattgcttccggatgactgac

SEQ ID NO: 413931 - DNA, 132 bp, Homo sapiens
gggaaccttctctctttcgctctttggactaatgggagttgcttttggaatgaatttggaatcttcccttgaagaggagaggagttcattacttcggaagtggtacaatttaatgatacaaaataaggatga

SEQ ID NO: 413932 - DNA, 100 bp, Homo sapiens
cgccaaggcccctccggccagggccgggagccgggccggcctagccagttctaatacccgatttacaattacattgaactacaaggatcccctcactgga

SEQ ID NO: 413933 - DNA, 96 bp, Homo sapiens
aggacccatccagataatccaggataaattcctcctctcaagaacctgtggacaaagtggctgccatgagagagttccgggtgttgcacactgccc

SEQ ID NO: 413934 - DNA, 90 bp, Homo sapiens
ccggtttggcactgctcctgctggccgcctggacggctcgggcgctggaggcttcaacggaccacaccaaaatgccatctcaaatggaac

SEQ ID NO: 413935 - DNA, 98 bp, Homo sapiens
caatatggtaatgaagtatttctggccaagcttattgctcaggcatgcgtcttacctccagtattagtgcctcgtcataatgaattcaatccacaaca

SEQ ID NO: 413936 - DNA, 100 bp, Homo sapiens
caaacaaggcttttgggaagaatttgaggaagaagatggactgcggatgaggaagacagtgcagagcaacagccccatttcagcattagccccaactggg

SEQ ID NO: 413937 - DNA, 75 bp, Homo sapiens
aaactacagccaccacacacaagtgaagtgcgccacaagcaaaccagctttctttgcagagaagcttcatcaagc

SEQ ID NO: 413938 - DNA, 83 bp, Homo sapiens
gcctgtccccgggggcgccatggcgaccggagcgaacgccacgccgttggatggagaaggaggagacaacccgggagctgctg

SEQ ID NO: 413939 - DNA, 83 bp, Homo sapiens
acagcaaagcaccgatgtcctgctagaacgtcctggcagagacaaattaaatgccttacgaagacataaggaaaagctggaag

SEQ ID NO: 413940 - DNA, 75 bp, Homo sapiens
caggaacagaagcagatgctgggggggagccaaaagggtcatcatctctgccccctctgctgatgcccccatgtt

SEQ ID NO: 413941 - DNA, 75 bp, Homo sapiens
agggccgagcaacagtgtagtggcgtattccacatagcaaacaggctgcctctaagaatcaaacttcactcttgg

SEQ ID NO: 413942 - DNA, 71 bp, Homo sapiens
accatcctgatgatcatttctgggcgatgccagtccctccactccagaggagaacgaaaccacgacaacca

SEQ ID NO: 413943 - DNA, 100 bp, Homo sapiens
ttcaatgacctccccaactcgttgtttgcgtgcaatgttcaccagtcagtgtttgaaggagaagagagcaagataaacaggggtcacatgacgacagaag

SEQ ID NO: 413944 - DNA, 75 bp, Homo sapiens
gaatatcgtaagcgcacgtttaaacatctcaaggaagatgagaatgtgcctactgctcctgatcctccaagtcaa

SEQ ID NO: 413945 - DNA, 82 bp, Homo sapiens
gctcgcgcctctcgatgggcagctcgcacttgctcaacaagggcctgccgcttgacagaagccctgggggatgcggaggaag

SEQ ID NO: 413946 - DNA, 75 bp, Homo sapiens
agagtcctgaccacaatggggaggacaacttcgcccgggacttcatggagttcaaagaaggacgcagagccagcc

SEQ ID NO: 413947 - DNA, 83 bp, Homo sapiens
cagcgctctcgtcttctgcggctctcggtgccctctccttttcgtttccggaaacatgaacactatggctatgcatcctccaa

SEQ ID NO: 413948 - DNA, 87 bp, Homo sapiens
cccgttggccgcgcggcgccgcgctcggcggccgccattgcaggtcatgctttcagaacgaaaaggcacagatgagctctatgctgt

SEQ ID NO: 413949 - DNA, 83 bp, Homo sapiens
gtgaagtaggaccgaattcctgtgccgaagaggcctgcagtgggagagcagggtttggtgcacctcgatttggaggaagtagg

SEQ ID NO: 413950 - DNA, 97 bp, Homo sapiens
cttgagcgccctctactcagcatggatatccaggtgctgagccaggagcagcagcctttcttttacaagtccttccactttctctctgaggcagaaa

SEQ ID NO: 413951 - DNA, 74 bp, Homo sapiens
tggaagccatgaggccaaaggcagttgtattgaatcctcactatggatgggctcattgaggacattaagcatcg

SEQ ID NO: 413952 - DNA, 75 bp, Homo sapiens
gcccttctggaaggaggcaacaccaccatccagaaaaaagcttggccagaccacaagcgggaatgcaaatgcctt

SEQ ID NO: 413953 - DNA, 100 bp, Homo sapiens
acttcgagctgaagcacctctccagcggggacctgctccgggacaacatgctgcggggcacaggtgtcatggagaaactccagctgggcccagagattct

SEQ ID NO: 413954 - DNA, 113 bp, Homo sapiens
gccgtccttctccactttcgccagcccgtgccgcgagcgcggcctgcaggaggcttgggcactgtttaaaggaaagttccgagaaggcatcgacaagccggaccctcccacct

SEQ ID NO: 413955 - DNA, 100 bp, Homo sapiens
gcaaggatggtgcagattttggcagattatggctttgtccccacccagcactgatgatattataaagtgagactgctgctcctcgggccattttgaccgg

SEQ ID NO: 413956 - DNA, 51 bp, Homo sapiens
gaaagaagttgcaaaacactggatctctctactttagttagaagatgcccc

SEQ ID NO: 413957 - DNA, 87 bp, Homo sapiens
aaagtaaatgctgtcttttcccaaaagacaggctcttcacctgaaggtgaatctggattgggaaagtcgacattaatcaactcatta

SEQ ID NO: 413958 - DNA, 96 bp, Homo sapiens
cactttgaaatccttggaaccaactatggagaagagcttggcagaggtgttcgaaaacccccttacccaggaatggaacaacctccacaccatcct

SEQ ID NO: 413959 - DNA, 82 bp, Homo sapiens
caaggacacggtctacaccgacttcgacgacctcctgccccccgaggtctgcagtctcctgaacccagcagccatctacgcc

SEQ ID NO: 413960 - DNA, 104 bp, Homo sapiens
tcagtcttcccgcgtccgccgattcctcctccttggtcgccgcgtccttggctggcgtggagtaccctgacttctaccggaagctctacggcctcttggacccc

SEQ ID NO: 413961 - DNA, 75 bp, Homo sapiens
caccatgaagaagtcttactcagtgcactggtgattgctgcggtgtttgaccgagacataaactgcagaagagca

SEQ ID NO: 413962 - DNA, 100 bp, Homo sapiens
ggctgcggcgcacgccttgcccgcccagcactgagattatgaggctctggcctccactggccactcactcgtgaccctttccaccacggcggagccttcc

SEQ ID NO: 413963 - DNA, 75 bp, Homo sapiens
ggtagttgctccaaaacctaagtacaacccatacaaacaacctggaggtgaggtgcaaacatccttttggatgat

SEQ ID NO: 413964 - DNA, 100 bp, Homo sapiens
ccgacacttagggaaaatagaacctacgctgaaattttgggggcaggttctcttgctagttggttgaatctggcgatgtggaacccatggatatggaggg

SEQ ID NO: 413965 - DNA, 83 bp, Homo sapiens
gggaaagatctaccttctggaagctactactacgtggtgcttggaaagctctgcttatgataatgtcaacaaagttcgagtag

SEQ ID NO: 413966 - DNA, 98 bp, Homo sapiens
gacgaggctgcggtgtctgctgctattctccgagcttcgcaatgatgtgactgccatcatcttcgtggtggccagcagcagctacaacatggtcatcc

SEQ ID NO: 413967 - DNA, 100 bp, Homo sapiens
ttggtccgcatcgacagtgctccaggacttggtgacttcctccagcttcacataatctactggaagagacccaaagaaaagatgaagaaatgggatctct

SEQ ID NO: 413968 - DNA, 50 bp, Homo sapiens
ctctcagcctccgcctggtctctgaacttggtcctgatgtctgaccatgg

SEQ ID NO: 413969 - DNA, 98 bp, Homo sapiens
gaacctgtagcaacatggcagaatatccaggctgctggcacccaaaaattctaatgccacctgtcgtcttatcatctgattgcagacaaatggaatcc

SEQ ID NO: 413970 - DNA, 90 bp, Homo sapiens
gtgcaaggcaccaacttgggcaaaatatatgccatgaaagtcctaaggaagggaatcatcgcagaagagaacaagaacctgcagccccag

SEQ ID NO: 413971 - DNA, 100 bp, Homo sapiens
cagtccccagcagctggcagaagaagcaacacgcaaacgagagctgaggctaatgaaaaacaggtgaccaagaatatggcccaggtgaccaaagccctgg

SEQ ID NO: 413972 - DNA, 98 bp, Homo sapiens
tccaaggagtataatgaatttgctgaagtatttctgaaggcatttgctgttggtgtccagcaagtgaaaaaccatacatatgtggtatttgtgggaaa

SEQ ID NO: 413973 - DNA, 83 bp, Homo sapiens
cgagaagctccagatggcgtcttccgtgggcaacgtggccgacagcacaggcccacctgccgtttgctgtcattggcagcaca

SEQ ID NO: 413974 - DNA, 101 bp, Homo sapiens
aaaacaatagctcaaggaaacctttccaacacagatgtccaagctgccaatgactgaagcaaggctgtgtgacattccatgttggagaaaaaaagaaaaaa

SEQ ID NO: 413975 - DNA, 50 bp, Homo sapiens
cttggtcccagagtcatcatgaagccccatctgctttgatatgattgaag

SEQ ID NO: 413976 - DNA, 75 bp, Homo sapiens
ccagctccgctctcttcggctgccccaatccccggcagctctctcaggctaaggcagctggataagcacagccag

SEQ ID NO: 413977 - DNA, 100 bp, Homo sapiens
acctgctgctggatgatgggcaggacaataacactcagatcgagcggcaacctttggcactgcatccatgagcatgcccacaggattcggcactcctgct

SEQ ID NO: 413978 - DNA, 113 bp, Homo sapiens
cggagccgttgggtcggttcctgctattccggcgcctccactccgtcccccgcgggtctgctctgtgtgccatggacggcgggctgacgcacgaggcacacaggaaggaggtg

SEQ ID NO: 413979 - DNA, 100 bp, Homo sapiens
gggcggagggggcccgaaggacttcggcgcgggactcaagtacaactcccggcacgaggaagatgaagtcctcagtacattctgaagaagatgattttgt

SEQ ID NO: 413980 - DNA, 74 bp, Homo sapiens
tggacgccgcgatcgtggggcccgcgaggcgggcagccggggcgtccaggcgacattgactacagcaccgtgct

SEQ ID NO: 413981 - DNA, 100 bp, Homo sapiens
ccaagtgcattgcctttggaaacgaggagcagttggttctggtggaattatcaggaattattgattcagacttcctctcaaaatgtgaaaataaatgcaa

SEQ ID NO: 413982 - DNA, 83 bp, Homo sapiens
caccaagaaccaaccctgccagcacctggaccttggacattcagacttcagaatgcaatgccaagtgagtacacctatgtgaa

SEQ ID NO: 413983 - DNA, 116 bp, Homo sapiens
caattgttcagttgcaaaaagaaactggagccaccatcaagctgtctaagtccaaagatttttacccaggtctcgctctgccacccaggctaggagtgcagtagagtgactacagt

SEQ ID NO: 413984 - DNA, 74 bp, Homo sapiens
aaacagtttgaagctgaggattttatataaagatgaagcgcagctgtataaagaagagcacctgaggaatcggc

SEQ ID NO: 413985 - DNA, 100 bp, Homo sapiens
gccgtcccagttcgcaatgagaaagatttggtgcttccagatgtgagttatcaggtggaatccagtgaggaggatcagtctcagactatggatcctcaag

SEQ ID NO: 413986 - DNA, 82 bp, Homo sapiens
ccagaaatcaactttgtggggctgctcatcgggcccaggtcagagatgtcatcatcgctgcaagcgttgcaggaatgggctt

SEQ ID NO: 413987 - DNA, 82 bp, Homo sapiens
gtcaataaaagagagctcacagaagatggacttgaaaaaaactttgctgccaatactctggctggcaagcagatgaattaac

SEQ ID NO: 413988 - DNA, 73 bp, Homo sapiens
agctgaagcttccatggtgatcgcagtcccaacatggccaacacagtcaatgctgctctgaagcctttggaaa

SEQ ID NO: 413989 - DNA, 101 bp, Homo sapiens
cggttggatgtcgcgtcggagtttcgaaagaactgccaccttggctgggaggttgtacagcgggcgtcccaacagtggctcaagagaggacagcaaggggc

SEQ ID NO: 413990 - DNA, 98 bp, Homo sapiens
gcgaagttctgcgctggtcggcggagtagcaagtggccatggggagcctcagcggtctgcgcctggcagcaggtgggaaaggtttttattcctggact

SEQ ID NO: 413991 - DNA, 83 bp, Homo sapiens
ttttatggtagcagagctggatccaaggaacactcttctggtggcactaacttagacaggatcgccccaggacattcgacatg

SEQ ID NO: 413992 - DNA, 100 bp, Homo sapiens
aggcgacgcaccatcacctattttgactcgcagcgtaccctaaaccgccgctgccctaaggtgctgggtaggccaggtttcagcatcgcagacaagaagc

SEQ ID NO: 413993 - DNA, 83 bp, Homo sapiens
cgcaaagagagggcggcgctggaacagttgcagggtcacagaaacatcggtttacaggtacatacattacacccctatttcta

SEQ ID NO: 413994 - DNA, 101 bp, Homo sapiens
gctgtccctgctggaggagcgcttccggaaactggcgatggaatatgagaggagccctctggaaagaaaaggacagaccctgtgctttcatgaaagtgaag

SEQ ID NO: 413995 - DNA, 82 bp, Homo sapiens
gctcctggagcagttgtatgtgtagaaagtgaaatcagaggagatgtaactatcgtttaatcccatggaatcaatcaaatta

SEQ ID NO: 413996 - DNA, 75 bp, Homo sapiens
aaagggactaggctcatagtaacttcgcctgtcctcctccgcctcctcctctctgcatgcgcgtcagagcccgtg

SEQ ID NO: 413997 - DNA, 83 bp, Homo sapiens
gaaataaggacaaaagccaagaggaggacagttcgctacacagcaatgcatcgagccagagactgctgctactttgaaacgta

SEQ ID NO: 413998 - DNA, 74 bp, Homo sapiens
gaagtgcagaggtttttttctgggccttctccagaagcaaaaggagttggaaagtagtctcctgcctttagctg

SEQ ID NO: 413999 - DNA, 100 bp, Homo sapiens
caaggggctactcctgcgctgctacacgcagtgctcaaagatccagacagcaatccatacagcttacttgataatacagaatcagatcagactgcagaca

SEQ ID NO: 414000 - DNA, 90 bp, Homo sapiens
accaagaaggttgggaaagcaccaaaatctgcatgtggtgtgtgcccaggcagacttcgagggtgctccaagggtataccattcctaaag

SEQ ID NO: 414001 - DNA, 98 bp, Homo sapiens
tggatgatcatgttgttgccgtgtgtgctggaaacaaaatattcatgctggatattgagagagcagtcatgatggcctgcactccacacaatgcaaca

SEQ ID NO: 414002 - DNA, 98 bp, Homo sapiens
ctcatcgcgattgcactcatcaaagaagccagcaggtgggcgacatgaccaacagaaagccacagcgcctcatcactcagttccactttaccagctgg

SEQ ID NO: 414003 - DNA, 100 bp, Homo sapiens
cgagtctattgccattgcccaagttccacctcttgaaggttttgtaatgaatcgagtgcaaggtgattattttgaaactctactctataagatatttgtt

SEQ ID NO: 414004 - DNA, 82 bp, Homo sapiens
caccttctttcttcagccgaggccgccgccgcctctccttgctgcagccatggagttgttgatcattatgaaaatcctagaa

SEQ ID NO: 414005 - DNA, 100 bp, Homo sapiens
acaggtatgacaagtccaatattttgtgggacaaggaacacatttatgatgagcagccccccaatgtcgaggagtgggaaagaccacagcaagattcttt

SEQ ID NO: 414006 - DNA, 100 bp, Homo sapiens
agtggttatagccagtccacggacacttcaggctatggccagagcagctattcttcttatggccagagccagaacaaaactgttcaggttccattatcaa

SEQ ID NO: 414007 - DNA, 99 bp, Homo sapiens
ggccacctcaaggataatcactaaattctgccgaaaggactgaggaacggtgcctggaaaagaaaatttttactactggagatgtcaacaaagatggga

SEQ ID NO: 414008 - DNA, 74 bp, Homo sapiens
acatcagggaatcaaaactgaacccttcctggatatggtgtaccacgcgctggacagcccggatgatgattacc

SEQ ID NO: 414009 - DNA, 50 bp, Homo sapiens
gagacgtggctgcaggccattgaggaagctgttgcagctaattgcaaaat

SEQ ID NO: 414010 - DNA, 118 bp, Homo sapiens
agcttgcggaggtgcggctgcaggccgttgttggtcgagctggcgggtcccgcgggccaggccgtggaggtactccaaagattcaggtttactcacgtcatccagcagagaatggaaa

SEQ ID NO: 414011 - DNA, 80 bp, Homo sapiens
tgggtgtcgcgggccggccccgcggggagcgcccccggcgcgatgcccttcaggaaagccctcccaggcccaatacttca

SEQ ID NO: 414012 - DNA, 75 bp, Homo sapiens
ggcggattatgtgataccagctcaggaaatctgaaatagagtactatgctatgttggctaaaactggtgtccatc

SEQ ID NO: 414013 - DNA, 82 bp, Homo sapiens
tgggaataaaaagtattgtaacagctgaagtgtcttcaatgcctgcttattgtaaaccatggctgtgtggatacaagctcag

SEQ ID NO: 414014 - DNA, 71 bp, Homo sapiens
cacaaaagaatcctcaagttcctccagctttttctactcccgagcccggagaggacccacgcgtgacccgg

SEQ ID NO: 414015 - DNA, 100 bp, Homo sapiens
gcttatgccaagaggaacagcagtgtaaatgactcagagcatgtctgttcgatcctggcttccctcctgcggaacctgagagggcagcagcggacccggc

SEQ ID NO: 414016 - DNA, 87 bp, Homo sapiens
tcatcaaaaatagtgatagctttgataattttacagctcccagcacagtaggaaagagaaatttgagtcctagtcaagaggaagctg

SEQ ID NO: 414017 - DNA, 87 bp, Homo sapiens
atgctagaattacctggaacttcatcatcatctacttcacaggaattgccatttttaccgaagtgcatgtttgggattttgttgaag

SEQ ID NO: 414018 - DNA, 100 bp, Homo sapiens
ctttatcctggtcatcttctatttccaaagtatgttgcacccaggcagtataactccaactgtggaactgaatgggcttgctatgaaaaggggagagcct

SEQ ID NO: 414019 - DNA, 82 bp, Homo sapiens
aggaacgaggcaaggagctaaagcagcgtgcgttcagccctggggaatcaaagatcaactcccactgaggacaaatggacct

SEQ ID NO: 414020 - DNA, 80 bp, Homo sapiens
tttggaggccctgatggaggggacggaggcaacggtggacacgtcattctgagagaaccagaggaagagatcattgccga

SEQ ID NO: 414021 - DNA, 83 bp, Homo sapiens
gagtcctttgaacggcaactgtgctttagaaccaagcgttctgcctctttgatcatggggaatttcagaggtcatgccctccc

SEQ ID NO: 414022 - DNA, 82 bp, Homo sapiens
tttgctgctgaattcaagttggtcgaccagtccggacctcctcacgagcccaagcataaacttggaggaggcagtggagaga

SEQ ID NO: 414023 - DNA, 51 bp, Homo sapiens
ccacgtcgggtcagatccgacagaaggacacattggcgtgagacctgggag

SEQ ID NO: 414024 - DNA, 100 bp, Homo sapiens
gcgaaatgatgggatagcgttgcaaatccttaaaagagtcttaacgaacaaaatccagtctcatagcagaggagaatataatgtttacagcaccttccag

SEQ ID NO: 414025 - DNA, 48 bp, Homo sapiens
aagggaacaacacccttgatggaggagatgttaaagtaacccatcttg

SEQ ID NO: 414026 - DNA, 98 bp, Homo sapiens
cagatgtggggaatgccatcacacctgcggaacctgcgtggggtgggtattctgctccctccttctctccttggcagggctccttccaggggatccca

SEQ ID NO: 414027 - DNA, 83 bp, Homo sapiens
cagcttcaggagtactggcggaggggctggacgttccacgccaaagaagagccgaatgcacataaggtcgccagcccaccctc

SEQ ID NO: 414028 - DNA, 75 bp, Homo sapiens
ccccggcgatgcgggccccgcccgtcgcctcaggaggaaacaccaattggaagcctccgctcaactgtaagattt

SEQ ID NO: 414029 - DNA, 75 bp, Homo sapiens
atacacctctgattttaatcagttctgcgtttgaaaggaaacccgttactgtaaaatggggaaaggagaaatttg

SEQ ID NO: 414030 - DNA, 100 bp, Homo sapiens
catggccgagctgggcttggagatccccgcctatagcagatctgcagcctcatgagagggggcattgctgagcgagggggcgtccgtgtgggccaccgca

SEQ ID NO: 414031 - DNA, 98 bp, Homo sapiens
cagcatatatgtcaactctaccatgtgctagagacagccaacaaaatattcatggttcttgagacgttggaacttgccaggaatccagcaatgatgca

SEQ ID NO: 414032 - DNA, 100 bp, Homo sapiens
acaaactgatgttctacggaaaggtgttacagttcgagtgcctcaaacaaccacatatgttgtaaacaatggactaaccctgggatcaacaggacctcag

SEQ ID NO: 414033 - DNA, 90 bp, Homo sapiens
gggccttgatgggctacaatgaccaggcggaccttgccaagtatatctgtgaaaatcaagattcgatctccagtaaactgaaggaatgct

SEQ ID NO: 414034 - DNA, 100 bp, Homo sapiens
ctatacgaagaactaacagctcggagcaggagaggacgggactgccaagagacatgttagaaggacaaatctatgaagactccatcgtcttgcagtcggt

SEQ ID NO: 414035 - DNA, 100 bp, Homo sapiens
cggcactgcaaggcgtaggacagcccacaggtgtcatggagaaactccagctgggcccagagattctgcagcgggaaaatccaaggcttatttatgccag

SEQ ID NO: 414036 - DNA, 75 bp, Homo sapiens
gagaattcctcaatgactgccctctaaaggaagaggcacctcagatgtatccatatcctgtatccaattcagtgc

SEQ ID NO: 414037 - DNA, 75 bp, Homo sapiens
cccaggctcaagcagtcctaccatgtcagccttcccagtagctgggaccacagggtgaatcgaaacgcatcaccc

SEQ ID NO: 414038 - DNA, 96 bp, Homo sapiens
gggattggaccgacgcagccatggctatggagttactagtagagaaagcaatcagcagtgcttctagccctcagagccctggggatgcactgagaa

SEQ ID NO: 414039 - DNA, 98 bp, Homo sapiens
acaaatgttcttaatggcatctagaatggttgaaatcacaaagattagacacctttttagataggtgttcttcagcaccactgacaacacggttctga

SEQ ID NO: 414040 - DNA, 87 bp, Homo sapiens
tacagcaagatggttcatcttttgccctagagcaattgaagctccttgctctgctatggcttaccatcatgacagcagacggatatt

SEQ ID NO: 414041 - DNA, 82 bp, Homo sapiens
ctccggatattacctgtggagaccctcctgagacgttctgtgcaatggacaaaactttcggtttgaagaataagaaaggagc

SEQ ID NO: 414042 - DNA, 97 bp, Homo sapiens
cacaacctggacaggcagcaaggtgcttttaagccctgtgaatatttactgggaagctggatgattcgtcttactgtgtggttcattttcttggttg

SEQ ID NO: 414043 - DNA, 101 bp, Homo sapiens
gacaggctgtggggtttctcagataactgggcccctgcgctcaggaggccttcaccctctgctctgggtaaagggtgtccagggtggtcgagccaaacgct

SEQ ID NO: 414044 - DNA, 100 bp, Homo sapiens
taaagaagattacaacagactgagaagagaagtggagcaccaggagactgcctatggtacacttgctgaaggaccagttggctgctgaggctgcggcgcg

SEQ ID NO: 414045 - DNA, 82 bp, Homo sapiens
ctgtccaccatcatccttttgggcttgatcatcgcctaccacacacgtgaagtccaggctgatcagctgaccgaagaacaga

SEQ ID NO: 414046 - DNA, 97 bp, Homo sapiens
tggactgcagcttgagaagaggtggggaaattccaacagaatgggtttcctgaaacggatttgcaggaattcctgaaggaatgcagtagcaaagaag

SEQ ID NO: 414047 - DNA, 100 bp, Homo sapiens
ggaagagggagtcaccactggacctccaaggaagccacgtgcagacatctacaaccttcgatctcctgacgacacaaacatttcactgaagatattcaaa

SEQ ID NO: 414048 - DNA, 75 bp, Homo sapiens
ttctgcaccagcgccttgatcgagtacttgaggtggaagttaaacgagctgagcctcgggacagcaagagccaag

SEQ ID NO: 414049 - DNA, 100 bp, Homo sapiens
ggttctgctgcttctgggccctacgcgcggcttgcgcgtagttacttttggtgacgctgtccagttcccacaatgtatcattccttatctgaaactagac

SEQ ID NO: 414050 - DNA, 48 bp, Homo sapiens
ggcgatccaaaaattcagtggaagatatcagacaccccgaagaacttt

SEQ ID NO: 414051 - DNA, 99 bp, Homo sapiens
ctgtcaccatggcaacgtggacctggtgcggctgctcctggcacacccagcctgcgacagcagcctgactgacaagtgattcgcctttgccagtctcat

SEQ ID NO: 414052 - DNA, 100 bp, Homo sapiens
cagccctgtcccactcactctttcccctgccgctcctgccggcagctccaaccatgggaggccgcgtctttctcgatggagtcatcagaacccactgtga

SEQ ID NO: 414053 - DNA, 100 bp, Homo sapiens
cgactagcggcggcgggagcggcgccgagaggccgtgcgggacgcgggcgccaggaccggccgaacgcagaggacatgaaagctatgtgaccttctgcca

SEQ ID NO: 414054 - DNA, 75 bp, Homo sapiens
tgctgctggggcctcccggggccggtaaagggacccagtacgaggatgtcgtccaggaaagattgtgcagatgac

SEQ ID NO: 414055 - DNA, 100 bp, Homo sapiens
aaggagcagtagatgatgatgtagcagaaggtcttgatgactgtttgcagcagtatattaagaactttgagagggagaagatcagtggggaccagctgct

SEQ ID NO: 414056 - DNA, 82 bp, Homo sapiens
aagtggaattttggagatattcaaagttctggagagtcttggcttctgggaggaagtcagagggattatctcaggatcagag

SEQ ID NO: 414057 - DNA, 100 bp, Homo sapiens
gaaggcccggtgcgattgcatgaggatgctgaggctgtcctgtcctcgtccgtctcatcaaagcccagatggctacctgtatgagcgtgaggccatcctg

SEQ ID NO: 414058 - DNA, 74 bp, Homo sapiens
ttccatcatggcgtcaatgcagactgcttttcaggaagccttggacgctgcaggtgataaacttgtagtagttg

SEQ ID NO: 414059 - DNA, 75 bp, Homo sapiens
ttggcagagcttgacccaggcactagttttgccagtcagtcagatgatgatcaggtgaatgtaatgggttttcac

SEQ ID NO: 414060 - DNA, 87 bp, Homo sapiens
gacagaccaagagaataaggaccctaggttctgtccggaagcagattctaaaaccatgttgcagtgcttgaagcaaaataaaaacag

SEQ ID NO: 414061 - DNA, 98 bp, Homo sapiens
cttcactcgagagatgaggacactgaaattcagagaggggaagtgatttgcctcagcttgtactgagctgtgactgatgagaattaaaggccatggat

SEQ ID NO: 414062 - DNA, 100 bp, Homo sapiens
tgagacctgcctgaatggcgggaagtgtgaagcggccaatggcacggaggcctgcgtggcagcgggtggcatgagacgtgggaacatgggccacctcaca

SEQ ID NO: 414063 - DNA, 50 bp, Homo sapiens
acagaccattgcaatggaaatggctctgggcatcaccagcggccccaggg

SEQ ID NO: 414064 - DNA, 83 bp, Homo sapiens
caacttcggtgcctctctccagcagactgcggtgtttcccattaaacactaccaggacaaaatcaggccttacatccagctgc

SEQ ID NO: 414065 - DNA, 75 bp, Homo sapiens
tattcctcgggagaatattaaaggatttagtgatgcagaaattaggcgccagaagtcattggatctgtgtcactt

SEQ ID NO: 414066 - DNA, 88 bp, Homo sapiens
gttccgcgccgggcgtggacggtgtggggcggtcccggccccgcagttcaggacctcaaggggctcggctatgagaaggggaagcctg

SEQ ID NO: 414067 - DNA, 101 bp, Homo sapiens
cactggagaaaaacggccaagaggcagacctaggaaatgggtatgcatcttctattgatgatattttggaagatgaagaacattatgcagatcagttaaaa

SEQ ID NO: 414068 - DNA, 100 bp, Homo sapiens
atgccccgagcattgtgggcctcatcatcttcctcctgtgcaccctcttcatcagagaaattttctagagtcctggtggagcagcagcaggaccgagccc

SEQ ID NO: 414069 - DNA, 76 bp, Homo sapiens
cagtcatttaccaccaatgggaacatgcacagacccctgaatggttggacagtgattcctgccaaaagtgtgatca

SEQ ID NO: 414070 - DNA, 73 bp, Homo sapiens
ctacatcccatctcaatcagaattactagattttctctcaaactacgaggtgcagctgctagcaaggaaaatt

SEQ ID NO: 414071 - DNA, 87 bp, Homo sapiens
cggcaccaacggcaccaactattcgcggagctggaatgactggcaacccagacaaagccacagacccaagcatgtcggaacaggatt

SEQ ID NO: 414072 - DNA, 97 bp, Homo sapiens
aagactgtcgacctaaagcctgactggggcaagtctctggcatctctatcccctatgaggcaccacgtaagacctcctgcccttagctctcttgctc

SEQ ID NO: 414073 - DNA, 101 bp, Homo sapiens
taaccgctgacacaattaaacactgcagtgatcagaatcaagctttgcgactctgtctgggtagcactagtgttggaggtcagtatggcgctatctctgcc

SEQ ID NO: 414074 - DNA, 75 bp, Homo sapiens
tcaccaaactgaagatgccttctcagtcagttgagtgtgccacctgggcttgaaggcatgaaggaacaggacctg

SEQ ID NO: 414075 - DNA, 82 bp, Homo sapiens
gaggccgagggcggcgacaagaaccgctgcggataaccgtctggtccttgtgcacaaaatccgtgtcttacatcaaataccc

SEQ ID NO: 414076 - DNA, 51 bp, Homo sapiens
ctcggaaaccggtagcgcttgcagcatggaggcatacacggaatacctgag

SEQ ID NO: 414077 - DNA, 103 bp, Homo sapiens
cggtgaatggctctgtccccgttgtacggtatgacaacgaatttggctacagcaacagggtggtggacctcatggcccacatggcctccaaggagtaagaccc

SEQ ID NO: 414078 - DNA, 88 bp, Homo sapiens
atggagtgtgaaacagatgaacaaaaacagggctctgatgagaacatgtcagaatgtttctcatcccagtttccccagcctcctgtga

SEQ ID NO: 414079 - DNA, 82 bp, Homo sapiens
cccagctctccctgcagatcggcgatgtggtgcgaatacaggagacgtgtggagaacacttcagttatggaagatcaaaatg

SEQ ID NO: 414080 - DNA, 96 bp, Homo sapiens
tgtgtgcatctggctgttagaagaattcatgctcatccggggtcctgacttgtcctgggcaagccaagtccattgcttctgctcctgggaagtgcc

SEQ ID NO: 414081 - DNA, 96 bp, Homo sapiens
cccctaaactggaccatccggaagctgtgccacgcagcctttcttccatctgtcagacttctgaaggacaggcgacactaacaggtgaagatctcg

SEQ ID NO: 414082 - DNA, 99 bp, Homo sapiens
taccgctgctctgtggggacctacaacagctcgggtgcctaccggttcagctctgagggggcgcagtcctcgggttaaagcacgaattgggagctctca

SEQ ID NO: 414083 - DNA, 98 bp, Homo sapiens
gagaagtatccaatagggatattgtagaaactgtctttaacctgttctgtggctcctgatggatctgagaagatggacgtggaggatgaaaatctgtc

SEQ ID NO: 414084 - DNA, 95 bp, Homo sapiens
tttggaaagacccaggagaagccgcccaaagaactggtgactagcatgcagatacccatgctctgactttctgcccctccactgacatggcccac

SEQ ID NO: 414085 - DNA, 50 bp, Homo sapiens
ctggcctgcggcgcctgggcgctctgaggcagcctggcatcctcgctaca

SEQ ID NO: 414086 - DNA, 75 bp, Homo sapiens
tcaagcgattctcccgcctcagcctcagaagttgctggaattacagggacactggcccagggagagctgaatgag

SEQ ID NO: 414087 - DNA, 80 bp, Homo sapiens
ctactggtcccatagcagaaagctggtgttacacacagattgtcttcaaatttacagcaccatttcagtttgtcatctgt

SEQ ID NO: 414088 - DNA, 100 bp, Homo sapiens
ccaacgatggcgagggcgccttccatggagacgcaggtcttattagtaggtaagaaacagctgctcctccacctccaccccagccccatggagcttgctt

SEQ ID NO: 414089 - DNA, 83 bp, Homo sapiens
gatcctggttccatgccgcagtaggacagcaggcccaagtctgcacatcccagcttctcagatgaccaagatggtgctgcaga

SEQ ID NO: 414090 - DNA, 50 bp, Homo sapiens
agataccgaattcttatcacaaaggggtattccctcagcggatactacac

SEQ ID NO: 414091 - DNA, 90 bp, Homo sapiens
gatcaacaagaagctgaacacccacaaccggaatgagcctgaatacatgtcacaccatgtctgaccggaaggcagtgatcaagaacgcag

SEQ ID NO: 414092 - DNA, 50 bp, Homo sapiens
ccggctgttcggacggaatacttagctccagaacctgggtatcaacccag

SEQ ID NO: 414093 - DNA, 82 bp, Homo sapiens
ctcggggcctcctcctgtccccaaagagacggtggactctttcctcgacctggccaggttgcagtgcacgaggggattaact

SEQ ID NO: 414094 - DNA, 83 bp, Homo sapiens
gcgccgtccgtgcccgcgggacctgacagccgggtcagagagttttgcggcctccaggtggtggatccaatttttcattaggt

SEQ ID NO: 414095 - DNA, 99 bp, Homo sapiens
ctcatggcatcaagtggcatccatcataaggaggaggaagccaagaatctggtgagcgaagccatcgcagctggcatcttcaacgacctgggctccgga

SEQ ID NO: 414096 - DNA, 90 bp, Homo sapiens
gaggaggaggatgaagaacttgacctcaataaaggtttccattaactttggaccatgcttcaagtatcctccgaaggatctcacttaccg

SEQ ID NO: 414097 - DNA, 50 bp, Homo sapiens
atgcaccagcacgcctggctaactgcatatctatgtgagactgaattttc

SEQ ID NO: 414098 - DNA, 97 bp, Homo sapiens
aaaatcttccccaaaataaaaaaattgcaagagagagactattttcgttattacaaggactccccctttggcttgagttttgtacggtttcatagcc

SEQ ID NO: 414099 - DNA, 74 bp, Homo sapiens
tcagctgcagacttgattagcctgcctaccactgtagagggacttcagaagggtttggagaacattgattaagg

SEQ ID NO: 414100 - DNA, 98 bp, Homo sapiens
ccaagatgtctgacatggaggatgatttcatgtgcgatgatgaggaggactacgacctgacttaattcagtgcacaaatgagatgaatgtgaacatcc

SEQ ID NO: 414101 - DNA, 51 bp, Homo sapiens
ctctgctcttcagtacaatcctgtgacagatcagtcagtgaaagcatttgc

SEQ ID NO: 414102 - DNA, 82 bp, Homo sapiens
accaacgggaagggccggcccgcctccctggccggggcgcagttcggaggttcaggttcattttccagacactgaaagagca

SEQ ID NO: 414103 - DNA, 74 bp, Homo sapiens
gggatggcagctgctgatttgtcccatgtgaatattggtggaagtgttcattggctcaaaccagcatgtgtatg

SEQ ID NO: 414104 - DNA, 106 bp, Homo sapiens
cgactgggaccgggacctgctgctggacccggcctgggagaagcagcagcgcaaggatgatcggctgaatgtaacagaggaactaacgtccaacgacaagacgagg

SEQ ID NO: 414105 - DNA, 100 bp, Homo sapiens
actgcttattgataacagctaaggtattcctggaagcagagtaaataaagctcatggcccaccagctagaaaggtgcttttgaagatgatgatatcacgc

SEQ ID NO: 414106 - DNA, 100 bp, Homo sapiens
cccatgcccatgcccatgcctatgccatctgcaaatacgcctttctcatatccactgccaaagggaccagagtacttcttgcaagcagagctgacaagca

SEQ ID NO: 414107 - DNA, 72 bp, Homo sapiens
caaaagtcagccttcagtgaggaggttaacatcaagatgccacctccagttcgtactacagttgtctccgca

SEQ ID NO: 414108 - DNA, 109 bp, Homo sapiens
agagcaacttccagtcctgcaagctccattcatgatgccagtatggacagaatagcttatgatgcttatccccacccaccacttccgaaacattgagcggaaaccagaa

SEQ ID NO: 414109 - DNA, 80 bp, Homo sapiens
tttggagaatgatatcaaaccatagagatggagtttcaccgtgttgcccaggctggtgtcgaactcctgagctcaggcga

SEQ ID NO: 414110 - DNA, 90 bp, Homo sapiens
gaggccgtccagcagatggcggatgccctgcagtacctgcagaaggtctctggagacatcttcagcaggaaattacctgatgttccaaac

SEQ ID NO: 414111 - DNA, 90 bp, Homo sapiens
ttgccagagcagactactaaagctttacctgtgaggattcggggaaactgcaaggcttatttcaggcagcattggagctcagcacaagca

SEQ ID NO: 414112 - DNA, 88 bp, Homo sapiens
aggcacttcttggatatcatcgaccctcgcacactctttgtcactgagttaagtgggcagaccaacatccacctcagcaaaaacttct

SEQ ID NO: 414113 - DNA, 96 bp, Homo sapiens
tgggcagcgctcgcgccccgccgctgagccgccggggagccgtccagtcttcgaatcccagtcacatgtgccaatttaacgaacggtggaaagtca

SEQ ID NO: 414114 - DNA, 90 bp, Homo sapiens
gccctgcatgtggagctgccgtctcagcaggaccgtagcatcctgagacattttgaattgacacttctcaagatttgactggatcagagt

SEQ ID NO: 414115 - DNA, 51 bp, Homo sapiens
aattgtccagaagacttggctcaggtgagtgtggtccaagattcagtaaac

SEQ ID NO: 414116 - DNA, 100 bp, Homo sapiens
gcggaacggtcgtggagaagaagagctgctgatgaggactgggacaggttcttgggtgtctctggggagtccctgggccagaccttcctccagactccag

SEQ ID NO: 414117 - DNA, 90 bp, Homo sapiens
gccatagagagtctccgggtccctggaaaggtaaaagagaacctgctttcatgcaagatgctgctgcactgcaaacgggatgagcttcgg

SEQ ID NO: 414118 - DNA, 83 bp, Homo sapiens
cgccagccgcaccatgccgctcctaagcctgcacagccgcggcggcagcagcagtgagagaagtcggccagagcagcatgtgg

SEQ ID NO: 414119 - DNA, 82 bp, Homo sapiens
ttaatgtttacggcgaagtctactcaacgtttccaaggagaagatggggagccccgaggatgacctgattgggattccattc

SEQ ID NO: 414120 - DNA, 82 bp, Homo sapiens
accagcgcagccaatcaggcgtcgttgctacctgctgtgtgggtatccccccttctactccaaccacggccttgccatctct

SEQ ID NO: 414121 - DNA, 90 bp, Homo sapiens
gcggagggctctccccgagttcttcaacggcaagaacaagtccaagactccagagattaggagagaagtttgctgaggaatgccttcaag

SEQ ID NO: 414122 - DNA, 82 bp, Homo sapiens
cagcttgcccttcgagccaaatatgatgcttcctggtgtgtttagtggttggtgccattccaattttctgtgctgaaatcat

SEQ ID NO: 414123 - DNA, 75 bp, Homo sapiens
gaacaaatctgcatattttgctgaaaagctctataaatcgatgaaggccacacgtgtctacacttagcctctatc

SEQ ID NO: 414124 - DNA, 100 bp, Homo sapiens
cggggccacgctgcgggcccgggccatggccgccgccgatgccgaggttatcccatcatcaggtagcaagttgaaacgaccaacaccaacttttcattct

SEQ ID NO: 414125 - DNA, 100 bp, Homo sapiens
ggaaagcatgtgcagatgcaactctctctcagatctatgggagtcgtcagattatactggagaaagaggaaacagaagagctaaaacggtttgatgatcc

SEQ ID NO: 414126 - DNA, 100 bp, Homo sapiens
gagcgatgaggagtccagctggacaacgttgtcccaagacagtgcctcacccagctccccggatgaaacaggtccggtttatcactaaaatatggcatcc

SEQ ID NO: 414127 - DNA, 100 bp, Homo sapiens
cagtactgtaggaggatgggtatctactcgcgcatcaggcatgaagaagaatatctatggcaatatcgaggacctgaggtgctgatactcaaagaaggtt

SEQ ID NO: 414128 - DNA, 87 bp, Homo sapiens
agagccaaggaataaacatgcaatgaacccaaaagggcacgtggaggagttcagccccagagctgtctacaccagtggtaaagcgtc

SEQ ID NO: 414129 - DNA, 100 bp, Homo sapiens
ccgggagaagaaccagcccgaggtggacatgagtgaccggggcatctccaacatgctggatgtcaacggcctctcttagaccatgctcagcctccaagca

SEQ ID NO: 414130 - DNA, 74 bp, Homo sapiens
ggccatggtcactgctgactccaagtactgctacggcccccaaggcaggctggaccgctttgagaagaccaatg

SEQ ID NO: 414131 - DNA, 117 bp, Homo sapiens
gtgaatcccctgtttgagaaaaggcctaagaattttggcattggagtacttcttgcaagcagagctgacaagcaacgtcttaaaaacaggcgtggtgcgctgctgcgtgggacagtg

SEQ ID NO: 414132 - DNA, 80 bp, Homo sapiens
tagtgctaggccacttcatagcttcggggatggtcaatcagttttccacctatttccctggatattttgatggtcagtac

SEQ ID NO: 414133 - DNA, 75 bp, Homo sapiens
gggcgtgaactgtcagatgaagaagtgatgagattgtggggaacctgggtgaaggcacctttggcaaggtggtgg

SEQ ID NO: 414134 - DNA, 49 bp, Homo sapiens
tcaccagtgagctggagaagttccaggggcccatcctgatggagctgca

SEQ ID NO: 414135 - DNA, 50 bp, Homo sapiens
tgacagatgtccagtactactgggatacagtttatgtaacttgatggaag

SEQ ID NO: 414136 - DNA, 82 bp, Homo sapiens
agaaacagtggtgcgcggagaggagagagactgatgagtgccgactgaaccagaacatctgtggccacggagagtgcgtgcc

SEQ ID NO: 414137 - DNA, 89 bp, Homo sapiens
aacagcagcaatcaccacccaaggtatcacacctgtgtatcataatatgtttgctttaatgagtgaaacagaaaggatctggtatccac

SEQ ID NO: 414138 - DNA, 100 bp, Homo sapiens
tacatcccgtcctttcgctatgaagagagcgacctggagcggggatacacggtgacggccacccacggactctgtcacttgctgggattcacacacggca

SEQ ID NO: 414139 - DNA, 114 bp, Homo sapiens
catctacatctcccacaggaagtgtcacacagcagtcaagtatgtcccaaacgtctggccgttgctccagggagaactgcaaatatcttcatccacccccacatttaaaaacgc

SEQ ID NO: 414140 - DNA, 83 bp, Homo sapiens
atcaccttcctcttcctgctggaacacttgaaaaggtcgcaatggaagaagagatcgccgcgctggtcattgacaatggctcc

SEQ ID NO: 414141 - DNA, 87 bp, Homo sapiens
ccttgttctatggtactcggaccatggagccatacagatgtggttgccctgcttggctttccttatgcctccagtggagaaaacaca

SEQ ID NO: 414142 - DNA, 75 bp, Homo sapiens
cggggttctgcgactggagcgcccgctattttgcccagcccgtcatgaagacaagttggatggcttgaggactgg

SEQ ID NO: 414143 - DNA, 87 bp, Homo sapiens
aagcaggagccatgacttttcagtcatggcaaaaccccaaaagatgccgcgtcagttcgagccacgcatccaataccagcagcctgt

SEQ ID NO: 414144 - DNA, 100 bp, Homo sapiens
ccggctgctgaagatgaagatggctgggctgaacgccatccagacatgtggaaatggaggcccagaaagatgaaatcatctgccccagctgtaataggac

SEQ ID NO: 414145 - DNA, 51 bp, Homo sapiens
tcttgtagcagcgcctcctcggcctccgaccagggagaccttccatcctcc

SEQ ID NO: 414146 - DNA, 98 bp, Homo sapiens
ggatgttcagcttcgaaggcgacttcaagacgcggcccaaggtgtcccttggcggcgcgagcaggaagacaatgcagatcttcgtgaagactctgact

SEQ ID NO: 414147 - DNA, 100 bp, Homo sapiens
ccggcgagcccggtccccgccggcaccatgctcatgatggagcagtccaagaagtcctccctcatggtggcccgcagtattctcaacaacaagctcatca

SEQ ID NO: 414148 - DNA, 50 bp, Homo sapiens
agaagacagagggttttcttttgagaaatgtctttcctccaggacccaag

SEQ ID NO: 414149 - DNA, 51 bp, Homo sapiens
gtcggaggaggtgtcccacatcctcaggacctcagcagccatgtcgaagcc

SEQ ID NO: 414150 - DNA, 88 bp, Homo sapiens
tgaatactgagaaacaactgcaatactttaaggaagatgatccctatgatcttgaagatgtttctgcacagaaatgagggaaatacaa

SEQ ID NO: 414151 - DNA, 150 bp, Homo sapiens
ggagcacggcgcagccagctcctgtaagtgactggaaccaggaacagaggacagtgagtcgctctcgtccctccaggaatctctctttgaagcaatctgaaagcttgctgacaaaaaatgatgtgcatgaacctcacctcttccataacc

SEQ ID NO: 414152 - DNA, 100 bp, Homo sapiens
aaccctactgcatcatgatggacttttactgagaatcttgctgaagagctcaactaccgtcagagggctcagaagctttcggaaattcacaaggatcaac

SEQ ID NO: 414153 - DNA, 75 bp, Homo sapiens
caacaggcgagacctggagatggacctgtgatctgggcataagattctcaacatgttgactaagaacccaccatt

SEQ ID NO: 414154 - DNA, 82 bp, Homo sapiens
caaaagagaggcaccgctggaacactaatgaggtctggctgtccatcagatcatcaccatcaccgtctccctcatcatggtc

SEQ ID NO: 414155 - DNA, 100 bp, Homo sapiens
gtggtggcataggttatgaagctaatcctggcgttccaccagcaaccatgagtggttccatgatgggaagtgacatggttggagctgaaggagtgcccag

SEQ ID NO: 414156 - DNA, 76 bp, Homo sapiens
caatagcaatagctttatagcagctccggttacctgttttaaacatgtgatgatgaacagtctacacagatggctg

SEQ ID NO: 414157 - DNA, 100 bp, Homo sapiens
acagcaacgggtcacaattctatatcacactgcaagcaactccttatctagatagaaaatttgtggcttttggatatttgattgatgtagaaggcgtgag

SEQ ID NO: 414158 - DNA, 51 bp, Homo sapiens
cggtccctctctccacggtaagggacctagaggatcaagacataatgggag

SEQ ID NO: 414159 - DNA, 100 bp, Homo sapiens
caaatttttgaaatagttcatgaaccaaatcatcaggaaatactacgagactgtctcagcccatccctacaagtcgttccaggggtagaggaggcatgaa

SEQ ID NO: 414160 - DNA, 90 bp, Homo sapiens
ttattggcaggctgccatgacaaccaggcaatgctggatagataccgaattcttatcacaaaggtcaatgatgccttccttcatgtgata

SEQ ID NO: 414161 - DNA, 100 bp, Homo sapiens
tgctttaaacttaaagacctctttggacccgaaattgtaaggtttgatctgtggatgaaatgaatcatgattttcaagctcttgcattagaatctcgggg

SEQ ID NO: 414162 - DNA, 74 bp, Homo sapiens
atcgacaagtccgggagctgggcggccatttaccaggacctcagcagccatgtcgaagccccatagtgaagccg

SEQ ID NO: 414163 - DNA, 51 bp, Homo sapiens
caccaacaggatacattgaaaggtcagaagagatcaattctacagaaattt

SEQ ID NO: 414164 - DNA, 100 bp, Homo sapiens
gggccggccgggcccagagctcctgtctctcaggttctcctgaaaagaaagctgaacattcatctataaatcaagaaaatggcactgcaaaccctatcaa

SEQ ID NO: 414165 - DNA, 75 bp, Homo sapiens
tgaggacaaccacctgagcaatactgatcaggtcatccagctgatgaacgcgatcttcagcaagaagaactttga

SEQ ID NO: 414166 - DNA, 98 bp, Homo sapiens
ccggctcctccagctaccggcccaaggccatctacctggacatcgatggacgcattcagaagtctttcccagggaactccgatgaagtgttccaacaa

SEQ ID NO: 414167 - DNA, 90 bp, Homo sapiens
ccatgacatcgccgccgtctcctatgttcgggatgacgctgcacacctggtggtcctgaagacaggtggatccaaccgaagagaaagggg

SEQ ID NO: 414168 - DNA, 50 bp, Homo sapiens
aggccaggaagccttcaagaaactcaaggtttctattgcctgggctggag

SEQ ID NO: 414169 - DNA, 83 bp, Homo sapiens
aaggactcagtgatctgccttaagggcagtcaatggtcagatattgaagagttctgcaatcaagttgattcaagtcagttgag

SEQ ID NO: 414170 - DNA, 100 bp, Homo sapiens
cagaaagatggcatcatttttgccctcaaaagaaatggcaggttaacgtccctaaaacccgccggactttctgtaagaagtgtggcaagcaccaacccca

SEQ ID NO: 414171 - DNA, 76 bp, Homo sapiens
gcggatggccccaggtgtaagcgcagaaagcaggcgaacccgcggcgcaataacgatatcagttttagagaatgtg

SEQ ID NO: 414172 - DNA, 98 bp, Homo sapiens
ctgtacaagtggaccaactatctgagcgctggtagcagtgtttgatgagcaggatccacatcacggaggtgatggcaccagtgccagttccacgggta

SEQ ID NO: 414173 - DNA, 50 bp, Homo sapiens
cgagaattccgcagcccacacgtaatcaagatgattaccaactggttcga

SEQ ID NO: 414174 - DNA, 88 bp, Homo sapiens
ccagtacatcaagttcatcagcgagactctgcggcgcatggaggaggaggaggaatatattaaaggaatctgtgaacctgaactagaa

SEQ ID NO: 414175 - DNA, 134 bp, Homo sapiens
ccaaaactcatcgaacagctggagcaaggcgacgaaccttggagagaggagaacgaacatcttctggacctttgtccagctgtaggcattcagatgaaacttgaatttttccaaaggaagttctggactgccag

SEQ ID NO: 414176 - DNA, 93 bp, Homo sapiens
ccccatctctccatatcacatgtcaactacttcctagaccagctcagcaaagacccaaatatcgtcatagccaagatggatgccacagccaat

SEQ ID NO: 414177 - DNA, 100 bp, Homo sapiens
cctctcaaaatgtgaaaataaatgcaaggttttgtaggagagaagtttgctgaggaatgccttcaagcacaaagtgatgaatgactgccttcaagtctca

SEQ ID NO: 414178 - DNA, 101 bp, Homo sapiens
tcacaagttcctcatctgggacactgctggtcaggaacggcatgctacaagtgaaaactgatgagaaactgaatgtgtctgatgagaatacagcaagttgc

SEQ ID NO: 414179 - DNA, 100 bp, Homo sapiens
ggtgtattgagtgattttgtggagggcagaagtaggaagtctttgggacaaaactgtatttaccttgctggagaagaagcaggcgctccctccattccag

SEQ ID NO: 414180 - DNA, 100 bp, Homo sapiens
tggatgccgtgatctccagcgccggcctcctcagtgcgaagaagctgcagccgcacctggccaaggtatgtggaccagcattcgcccatctcaaggttgg

SEQ ID NO: 414181 - DNA, 82 bp, Homo sapiens
aagaccagtccatttggggaaatccttcggatggtgaactcattagaaagccattgctgctgagattgttctaaagggacaa

SEQ ID NO: 414182 - DNA, 75 bp, Homo sapiens
atgatgaaattcagtttgatgacattggagatgatgatgaagatattgatgacaatgtgacagtgatgataacat

SEQ ID NO: 414183 - DNA, 75 bp, Homo sapiens
agaacgtcaacaccaagtgcatcaccatccccagagctttcagcagaggccaaggcagcattgcttgaatttgaa

SEQ ID NO: 414184 - DNA, 85 bp, Homo sapiens
tggttcagcaaactcttcagcggattcgacaatcaggtcctcttcctgatggatgggaacaagccatgactcaggatggagaaat

SEQ ID NO: 414185 - DNA, 75 bp, Homo sapiens
tctgcagtccctcgtccagccacccccagatgatggatggcccaggagagaatgatcctgatttgaaacctgcag

SEQ ID NO: 414186 - DNA, 74 bp, Homo sapiens
gacacacgccggaggagccgggaagcaggagctggccaacagctcggatgcgaccctcccagaccggccgctct

SEQ ID NO: 414187 - DNA, 74 bp, Homo sapiens
tggatattctcaaggaaccacacatgtattaagatttgtgttctctgtcttcatcagaagaagaaagatttatt

SEQ ID NO: 414188 - DNA, 83 bp, Homo sapiens
ctggagcctcagttggaagcagccgatccagcctgcggagcctgtggggcagtgagttggactatggatcaggtactgtgctc

SEQ ID NO: 414189 - DNA, 90 bp, Homo sapiens
cctgaccaacgtcatccataacctgggtccccagacttccaagcagattgaggagaggagctccgagagtcaaccctccagcctgtaagg

SEQ ID NO: 414190 - DNA, 101 bp, Homo sapiens
cggctgcacacggtcaactccaggcacgaggccagcctgaagttgtacaaggaaatgaatggggtgctgaaaggaatgctctcagaatggttttcctccgg

SEQ ID NO: 414191 - DNA, 74 bp, Homo sapiens
cgcccccaatttcccagctgctaaaggaagaggaaggatcctcatgcggaagaatttgaagacaaagagtggac

SEQ ID NO: 414192 - DNA, 142 bp, Homo sapiens
tgtctggctacctcgtggacaagtttgcagatcgggagcgcaaggtcgccctcaaggccatgatcaaaacgaaagaccacagcaagattctttcattcgtctcctcctagcctgggggaccaggctcgaactgaccctggac

SEQ ID NO: 414193 - DNA, 100 bp, Homo sapiens
tctccaattctgttgttgcctccatgcgccaatccaaaccgaaagccagaaggacggttcactgggaaacatcgatgacctggcgcagcagtatgcagat

SEQ ID NO: 414194 - DNA, 101 bp, Homo sapiens
agacggccatgttcgtgaacggcgcttcccttggtgcacctgtggccgccatgtttgagcgaggtctcctctgagcctccggcctccataagacccaaaac

SEQ ID NO: 414195 - DNA, 100 bp, Homo sapiens
gggaacaggtaccggctgggccggaagatcggcagcggctccttcggagacatctatctcgggttgccattaggggactcctgaggtcctatctccaggc

SEQ ID NO: 414196 - DNA, 80 bp, Homo sapiens
cgatccagcctgcggagcctgtggggcagatacagatcacttggattcagtcgagtttgctttgctccgtgggaactgca

SEQ ID NO: 414197 - DNA, 75 bp, Homo sapiens
cgcctccattgtttgaccacaacaagggccggattctcacccagatctacaactcttgaaaaagaagttcctgtc

SEQ ID NO: 414198 - DNA, 100 bp, Homo sapiens
cccaaggaacagtgccaagttagatgccgattacccacttcgagtcctttattgtggagtctacaaataagaaacctcgaaaatctccaggtgagaagag

SEQ ID NO: 414199 - DNA, 83 bp, Homo sapiens
gttgaagcctcgacccacccagatgcactggttggcacagacaatgcagatcttcgtgaagactctgactggtaagaccatca

SEQ ID NO: 414200 - DNA, 100 bp, Homo sapiens
cgccgcgcacaaccgcacgtgcagcatcatggcagaacaggatgtggaaaacgatcttttggattacgatgaagaggaagagccccaggctcctcaagag

SEQ ID NO: 414201 - DNA, 100 bp, Homo sapiens
ctcccccggctccatcgacctcaaggacatcaacttccggccgcagatgtcccagggttggaagcccagcgaggctagaggccagtcccaaagtttccag

SEQ ID NO: 414202 - DNA, 82 bp, Homo sapiens
ctgagaacaggaccccccgcccccgtgatttgaagatattaaagctagaaattggaactagaaaatcaaaagaattcaaggc

SEQ ID NO: 414203 - DNA, 90 bp, Homo sapiens
ctcgcgtgagacagatcaagatcaagaccggcgtggtgaagcggttcctgttgctagagcaagtattctttggctaattggagaaaactg

SEQ ID NO: 414204 - DNA, 100 bp, Homo sapiens
agcagggaaagagagcgccaggtgcttagcagtaatctcaaaagtcctgctagtgatcaacaactaatggaagacaaaaccagcaggtttacctgcaaag

SEQ ID NO: 414205 - DNA, 100 bp, Homo sapiens
cgccaccgccggacttcaatgcccagtccccagctcgccagcggaactgtctgggacctttgctcatctgtgtcagcaagttgacgtcacccgggagaac

SEQ ID NO: 414206 - DNA, 100 bp, Homo sapiens
cctccgtgcggagaccactgttcaaggccacagcttcacttaaaggacaagaagcgatttgaaaaagctaaccaggattcaggtcccggtttgagtcttg

SEQ ID NO: 414207 - DNA, 100 bp, Homo sapiens
ataaattgcagaagttacttattcttttaagaggtctgcctggttctgggaaaacaacattgtctcgtaaacctatgatggacttgttgatattcctttg

SEQ ID NO: 414208 - DNA, 100 bp, Homo sapiens
cgcaaatctggaagcggatcgcgtggagtgacggtcacaccgcggcggaacttgctactaccagcaccatgccctaccaatatccagcactgaccccgga

SEQ ID NO: 414209 - DNA, 100 bp, Homo sapiens
ggtttgactgtgtatactctacaatctaagaaggatttcagcaaatttggagcagggtatcctttgtgtggctgatcagtgtcacggcttaagagaacta

SEQ ID NO: 414210 - DNA, 100 bp, Homo sapiens
acataacctatgcacttgtggaatgagagaaccgaggaacgaagaaacagacattcaacatgattgcatttgaagtcccttttcccaagtcttgaaggaa

SEQ ID NO: 414211 - DNA, 90 bp, Homo sapiens
ttccttaggactgatggagaagatcaaagagttgctgcctgactggatgacgcggcatggcaagaactgcaccgcaggggccgtctacac

SEQ ID NO: 414212 - DNA, 86 bp, Homo sapiens
ccaccttcaagggagtcgaccccaacagcaggaatagctcccgacaatgcagatcttcgtgaagactctgactggtaagaccatca

SEQ ID NO: 414213 - DNA, 88 bp, Homo sapiens
gagaagaaccggaagctctttgaccttctggatgtccttgagttcaaccagttttttgctccactcaagcctgttagaatcaccatgg

SEQ ID NO: 414214 - DNA, 73 bp, Homo sapiens
ccatctttcgggctgccgagggtgttcttgacgattaatcaacaggcttttgacctttatgaacaaagatatg

SEQ ID NO: 414215 - DNA, 96 bp, Homo sapiens
catctgtgccatcatcgtggtagttattgtaagaacgtcaaggtcgtgggaaataaaaggcagttctacacagactgcagcaacggttgcatctgc

SEQ ID NO: 414216 - DNA, 83 bp, Homo sapiens
accattgacgccatgtcgggttattcgagtgaccgagaccgcggccgggaccgaggcactccttgctcaagacccctccccag

SEQ ID NO: 414217 - DNA, 50 bp, Homo sapiens
cgcggtgcgcaccgtttgcgacttggtcaaagctcagattcacagttgca

SEQ ID NO: 414218 - DNA, 100 bp, Homo sapiens
gaagaaatggcggacttctacaaggaatttttaagtaaaaattttcagaagcacatgtattataacagagcaattgtatgatggctatgatgaagagtat

SEQ ID NO: 414219 - DNA, 95 bp, Homo sapiens
cccgcgcccccgcggctggagggtgagctggtggagttgagatctataatggagatcgtaaaataaaggtttccaacaccctggaaagccggctg

SEQ ID NO: 414220 - DNA, 75 bp, Homo sapiens
gtctggagacgccgtggcagcctgaacggagtgtgcgacggattgggagaatctgtgcggagaccctgggagaag

SEQ ID NO: 414221 - DNA, 73 bp, Homo sapiens
cggcggcaccatgaagtcagcggaggaagcaagctgaacagctgggaagagaagaccagcagcgactgcaccg

SEQ ID NO: 414222 - DNA, 98 bp, Homo sapiens
cttgcgaccacagccagagcctcagcaggagcctgttctcatcaccatggcaacagcctcctgacaaggtgatccgggcgggccccgcaggaatttta

SEQ ID NO: 414223 - DNA, 75 bp, Homo sapiens
tctgcctaagaagaccgagagtcaccacaaggccaagggcaagtgatttgacagcaaagccttctagacaagctc

SEQ ID NO: 414224 - DNA, 75 bp, Homo sapiens
ctgcaacacaagatcaagaactccatctgcttcagtatcagacacagcacagcagccatctgaagagcaaagcaa

SEQ ID NO: 414225 - DNA, 80 bp, Homo sapiens
agccgtgctctacctctatccgcagtcccagctatctgacttcatgtgaaagatggctaatgcagaagtgagtgtcccag

SEQ ID NO: 414226 - DNA, 75 bp, Homo sapiens
ccagatcgcgcgcctggacaacgtatggaaatttcatcgataagctaagactcttcaccaggggaggatccggtg

SEQ ID NO: 414227 - DNA, 100 bp, Homo sapiens
ggctctttgaagttgggttcaggagtgtagaattggcaaagttattgccagcttcctggaaaatgtttataggaggccttagctgggacactacaaagaa

SEQ ID NO: 414228 - DNA, 142 bp, Homo sapiens
gctgattccgcagcagtgacccccccctcccggagaggctcgtgtggttttggctcatggctctcaccttgctcacggtagctgtagccatacctaatagacctcctgatgctgtacttacagataccacctctcttaatca

SEQ ID NO: 414229 - DNA, 90 bp, Homo sapiens
cgccgcgcggagcccacgaaggggacagcgcagccggcccagagctcgggtctccggggaccgaggtttgaaagagaagatagtgaggag

SEQ ID NO: 414230 - DNA, 101 bp, Homo sapiens
ttcagctgccgggcagcggtggcagaggatctccgccgcaggggatagtggtcctagaagaatgtcagcttccaaaagatattttgaaaaaacaaatgcaa

SEQ ID NO: 414231 - DNA, 50 bp, Homo sapiens
cggaagggcaggcacatgggcataggtgtcatggagaaactccagctggg

SEQ ID NO: 414232 - DNA, 80 bp, Homo sapiens
gctctgcgccgatctatgcacgcagatgctggagaagtccccttatgaccaggctcaggccacagggtcaccacatacat

SEQ ID NO: 414233 - DNA, 98 bp, Homo sapiens
tttctgaagactattgtggaagaagcatccattaaggtcaagccgaaagggacggcaaagaagtatggtgtggccaggggatggcttggtaccagaca

SEQ ID NO: 414234 - DNA, 98 bp, Homo sapiens
aatcctacctaggtaatgtgtagttctcaatgcatcatgtcaggcagcttatgatgccaatttgtcccatggttagcatggcctcattgaaagaacta

SEQ ID NO: 414235 - DNA, 90 bp, Homo sapiens
aggaagtactggcgaagtgctccatgctgttcgggggtcttgtctggattttggttgcctcctccaatgttcctctacctctactacaag

SEQ ID NO: 414236 - DNA, 75 bp, Homo sapiens
tcctggaggcttcccccgttgcgaagcaatggctgccatccggaagaaactggtgattgttggtgatggagcctg

SEQ ID NO: 414237 - DNA, 77 bp, Homo sapiens
tacaagctcacaatcaccattacaagcatttaggtaaaaagcaggacatctggtatgttattgacctcctgaccgga

SEQ ID NO: 414238 - DNA, 100 bp, Homo sapiens
tcacacagctgcttccattggccagtatgaagtggtgaaggagtgtgtgcagcgagacgtggatgacgatggggaagatgtccatcctgtgcagggtgca

SEQ ID NO: 414239 - DNA, 80 bp, Homo sapiens
cagctgcagtagcggcagcagccccagcctcaaggccagtctgcgggccaggcatcgacatccgcaacgactatcagcag

SEQ ID NO: 414240 - DNA, 88 bp, Homo sapiens
aaacagaatttcgtgaacagccttttatctccaagcggaaagaaaggtcctatggcagcgtatacaaagctattcataaagagaccgg

SEQ ID NO: 414241 - DNA, 98 bp, Homo sapiens
gctgcctatcttgagttctgcaaaagctcaggttaatccaggccagacggttttgctgtctcagcctactgtggtacaacttcaagcacctggagttc

SEQ ID NO: 414242 - DNA, 82 bp, Homo sapiens
ctggggccagggaaccctggtcaccgtctcctcaggaggccatgtcgggtgaggacgctgaggtccgggcagtctctgaaga

SEQ ID NO: 414243 - DNA, 100 bp, Homo sapiens
gcaacgttgctggtgacagcaaaaatgacccaccaatggaagcagctggcttcactgctcaggtccgaggcggtggagcggctgagcgtgctgcggacca

SEQ ID NO: 414244 - DNA, 51 bp, Homo sapiens
gtgaggagctaatccctgaatatctgagttgtgagaactgctttattggat

SEQ ID NO: 414245 - DNA, 60 bp, Homo sapiens
gcatagagaatgagatagccgtcctgagaaataccttggccatgtagaagttgatgaatc

SEQ ID NO: 414246 - DNA, 75 bp, Homo sapiens
caacgatcggaactcggacacgaccatcatcaaagaggggatgctgaccaaacagaacaattcattccagcgatc

SEQ ID NO: 414247 - DNA, 100 bp, Homo sapiens
gccttttggtaatgctgtttctgcttaagttggcaagacactccaagtttggcatgaaagacaagttggatggcttgaggactggtactaaaaggaaacg

SEQ ID NO: 414248 - DNA, 50 bp, Homo sapiens
gttccatgatgggaagtgacatggcacacaagtctctgaattttgtctca

SEQ ID NO: 414249 - DNA, 98 bp, Homo sapiens
taaggattccaagtaactcttatttggtactaggttttgacaagcttgcatcatgcgtgagtataagctagtcgttcttggctcaggaggcgttggaa

SEQ ID NO: 414250 - DNA, 82 bp, Homo sapiens
tgaagggcctgccgcccctgggggattagccagaagcaggcaaatcctgatcctaactgttgtcttggagtatttgggctga

SEQ ID NO: 414251 - DNA, 80 bp, Homo sapiens
tcgaattgacataaaacagttgatagcaaagaagataaagttgacagcagaggcagagtactgccaaatctgtcgaaagg

SEQ ID NO: 414252 - DNA, 82 bp, Homo sapiens
cagccctcgctggaccagaccatggccgcggccttcggtctcctccgggctggggctgagcaagccctcggagtgaccgtgg

SEQ ID NO: 414253 - DNA, 99 bp, Homo sapiens
tggccacgcgtcggactggtctgtctgagggagatggtgacaagctcaaggcctgcgagatagaagaagtcagagatgccatggaaaatgaaatgagaa

SEQ ID NO: 414254 - DNA, 75 bp, Homo sapiens
gccagagttgtttatgctagtgcaactgaatccaattctcagttttgaactacctatgaatttggcaaactggtt

SEQ ID NO: 414255 - DNA, 146 bp, Homo sapiens
ctccagaagcatgggaacatctgggtgtgccctgtgtccgaccatgtctgcacaagattcttctttgtctctccagggcacaccgtattcagctctgagcggtctttgctagtgaggccaaggagccaccctgagccaaaagggga

SEQ ID NO: 414256 - DNA, 100 bp, Homo sapiens
cgcgaagctggccaaagcctgcccagacggctcacctgtgcgggatggaacaaaaggtagcagtagctgatgtgcagtttggccccatgagatttcatca

SEQ ID NO: 414257 - DNA, 100 bp, Homo sapiens
cgccgccatcctcggcgcgactcgcttctttcggttctacctgggagaatccaccgccatccgccaccatgtggctacatctttgactatgattactacc

SEQ ID NO: 414258 - DNA, 80 bp, Homo sapiens
ctgtgacgggcgtgggggcctcaagctgtcccaggacatggacacctgtgagggtttccaggcctgaggtgcccgccctg

SEQ ID NO: 414259 - DNA, 74 bp, Homo sapiens
tgaagttcttcagcttctcagccccccagatagttttgaggcagctgtgccatcaaatagccacattgtttcgg

SEQ ID NO: 414260 - DNA, 72 bp, Homo sapiens
actgccatcccctccgcatcatggggtctgtggaccaaggaatgacatctttgtgttcctgttaagcacacg

SEQ ID NO: 414261 - DNA, 82 bp, Homo sapiens
gacgaggtggccgagaagtgccagaaactgttcctggacttcttggaggaggtttggaaatcccttgtctccaggttgctgg

SEQ ID NO: 414262 - DNA, 98 bp, Homo sapiens
tacaatgtggctgtcggcagagctggtagagttgctctaggtcgtaaccagcctttgaaaaaggagaaaccaaaatggaaaagcgattatcctatgac

SEQ ID NO: 414263 - DNA, 137 bp, Homo sapiens
gaagaaggcggtggtggcgggtggaggttcgagcgctgttctcgctccggagccgctgcacatttcgaatacagattctgttcatcttgctctgaaattaaataattctgaactcatggggagaaaactcagagtca

SEQ ID NO: 414264 - DNA, 105 bp, Homo sapiens
tgctgcagcccgcgcacagctgctcccttcgccttcgccctttccacctcgcggcagttcggctctttattgagaaactaccaaaacatcgagattacaaatctg

SEQ ID NO: 414265 - DNA, 90 bp, Homo sapiens
ctgttgcagggttttgtttatataactcaagttgtttggctaaattcttcaggtggtattaaagataatcaaacattatcaagaagaagg

SEQ ID NO: 414266 - DNA, 82 bp, Homo sapiens
gctgcaaccatgtgcaaattcaccaggtcagccgtcagatccaggagcatgagcaggactctgcgctgcgggagcagctgag

SEQ ID NO: 414267 - DNA, 100 bp, Homo sapiens
ctgcagatcccgagaccctccctagatcaccatcagcagagttctctcctgctgctcctcctggaccggccagccttgcagctgtatgatccaggagctc

SEQ ID NO: 414268 - DNA, 74 bp, Homo sapiens
ctcatttctcctatcaaggtgaaaagtgagattcagactcagggccaattcctgtccccccagcagcatggcat

SEQ ID NO: 414269 - DNA, 98 bp, Homo sapiens
cttgggacagggggatttggaaatgtcatccgatggcacaatcagcaaatcgcagtcttctccaggctgacaaggcgaagggcatggcttcgaagtgc

SEQ ID NO: 414270 - DNA, 74 bp, Homo sapiens
tggacgcttgcatggcgcttgagcctccttccctggacacatcccggactgtggaccccttcatcctagacgtc

SEQ ID NO: 414271 - DNA, 51 bp, Homo sapiens
gggactgggagtcgttagtgagatgatatcatcaagttgaatcgaaaggaa

SEQ ID NO: 414272 - DNA, 121 bp, Homo sapiens
gtcatcacggacgagaactggagagaactgctggaaggagactggatgatagaattgattctgatcttcgaagtgcacttcttttggaacaggcagcacattgctttataaacatgaaaag

SEQ ID NO: 414273 - DNA, 108 bp, Homo sapiens
ctactacagtgactccatcttcttcctctcggtcgccatgcatcagatcatgcccaaagacaatgcagatcttcgtgaagactctgactggtaagaccatcaccctcg

SEQ ID NO: 414274 - DNA, 82 bp, Homo sapiens
gcttggcagatgccagtggatccatacaactgctccgcctggtggaatctgaggctatggtgaactaaacggtaatgctgga

SEQ ID NO: 414275 - DNA, 75 bp, Homo sapiens
attcagtgtaatcctaatctcatgggtatccactgttgggggagaagaaacatgttccaaatcaagtatagatat

SEQ ID NO: 414276 - DNA, 75 bp, Homo sapiens
aagaggatctgttgcaggaggctcaggccttggcagagcggcttttttccaggactgcatttcagagcaggacct

SEQ ID NO: 414277 - DNA, 75 bp, Homo sapiens
gagcaagaccatcatgctgcgcggccttcccatcaccatcacagagagcgatacacagcaggatgccaatgcctc

SEQ ID NO: 414278 - DNA, 83 bp, Homo sapiens
cttcgccaccacgcactgggtcgtcacggaggacgggaaaatccagcagcagtggtgggatcagcaagttgatttttatactg

SEQ ID NO: 414279 - DNA, 76 bp, Homo sapiens
gttggggtctctgggagctctgcaggtactccaaagattcaggtttactcacgtcatccagcagagaatggaaagt

SEQ ID NO: 414280 - DNA, 100 bp, Homo sapiens
gcgagctccccgacgaggagcgcggcgagatctacgtgccagaacaccttccaccatgaccacctcagcaagttcccacttaaataaaggcatcaagcag

SEQ ID NO: 414281 - DNA, 74 bp, Homo sapiens
cccctacggctgcaaggacgctctgcgccagcagctccgctcggcgcgagaggaacctgcaaatagtcgtctac

SEQ ID NO: 414282 - DNA, 150 bp, Homo sapiens
gattttccgccttggctatgagcactgggccctgtatataggagatggctacgtgatccatctggctcctccaagttaccatgccagcaatgattccttttgagtttctgacagaagatagtggttttcatccaaataagtcaactactc

SEQ ID NO: 414283 - DNA, 90 bp, Homo sapiens
ggttccttgacttcaaagtcctaccccaggaagctgaagaggagcgatgtgctggaggcgctgctgccgctgaagggcctagaggagcgt

SEQ ID NO: 414284 - DNA, 74 bp, Homo sapiens
aggtttctccagggaaagaaacagatgagctttttggtgcggtccaggtgactcctctgagctctggctatgcc

SEQ ID NO: 414285 - DNA, 146 bp, Homo sapiens
ttcgggccgagatgtctcgctccgtggccttagctgtgctcgcgctactctctctttctggcctggaggctatccagcgctgcctgctgtttcccggggagatcatgaaacgaggtcgccttcccagcagcagtgaggattctgac

SEQ ID NO: 414286 - DNA, 75 bp, Homo sapiens
ggtggacgagatctactttaaggcacttgcagttacattcaccacatttgtaacggagccattgaagcatattgg

SEQ ID NO: 414287 - DNA, 75 bp, Homo sapiens
atctgacccccctgtgttattctttcatttcttacgtacagatacattccaccgttgatctgggggaaaagtgga

SEQ ID NO: 414288 - DNA, 100 bp, Homo sapiens
tgatagtattggcatttataatactgaactatggacctatgaggttgtacctacaacagatcatatagatacagaaaaattgaaagccagagaacagatt

SEQ ID NO: 414289 - DNA, 100 bp, Homo sapiens
atcggcagagacaccttctggcccgaggagaaggcagagcccccccaggctatgaatgccctgatgcggttgaaccagctgaagccagggctgcagtaca

SEQ ID NO: 414290 - DNA, 100 bp, Homo sapiens
tggaagttcatccagagaactcacaacgatactgggggctgctctcacatactcactttgcagtgagctttctcttaagtgtgccaagctgccatccaac

SEQ ID NO: 414291 - DNA, 97 bp, Homo sapiens
gagggtctgctggccactgtcactgagatacttgagagggaccatgcccggctgaagccccgtctcgtgtggaagaatgtcatctccagtgtctgct

SEQ ID NO: 414292 - DNA, 50 bp, Homo sapiens
agcaatgccgactgcctacaacactgactctatcaagaagaatatctaat

SEQ ID NO: 414293 - DNA, 88 bp, Homo sapiens
atgaccatcagaaagacggcaagacctacagacctgaaggctgaaattgacaagttggccactgagtatatgagtagtgcccgcagcc

SEQ ID NO: 414294 - DNA, 100 bp, Homo sapiens
atgttccaggacacctgccatcatggagggttatccagcacctggaggatacctgctaccttgccgcagaatggaattcggcattgttcctacacagctt

SEQ ID NO: 414295 - DNA, 83 bp, Homo sapiens
cccagctgcagctgtggctgcagtttgaggctctgaacaaggtaaagaacaagcacctttggagatgagtatgcatccagcgg

SEQ ID NO: 414296 - DNA, 123 bp, Homo sapiens
tctaaaaagccctcagtaccagagacagaagcagatggattcgtccttttagacatcgctattgcggttccgaggcagtgggaagagatgcggcccctggacatcgtcgagctggcggaaccg

SEQ ID NO: 414297 - DNA, 90 bp, Homo sapiens
ccgggcggttcccagcatggccccttcacaggtgtgcctaccgcatgttgccgctgctgtttctgctgggacgtctgactccagttcctt

SEQ ID NO: 414298 - DNA, 82 bp, Homo sapiens
gtcgccgccacctcctctgatctacgaaagtcatgttacccaacaccggcgtcgagggcgaggcccccagcagtgagactgg

SEQ ID NO: 414299 - DNA, 75 bp, Homo sapiens
ccatggtctacaagactctcttcgctctttgcatcttaactgcagatgccatggacaatattaccaggcagaacc

SEQ ID NO: 414300 - DNA, 96 bp, Homo sapiens
taaatcctcaaaaaatcttcttggttctgctacaacaatagcgtttatggcagcatttagcggacacagaagcacatctgaaagtggagagagacg

SEQ ID NO: 414301 - DNA, 87 bp, Homo sapiens
acggtgctgagacaactagacatggaattggtttcagtcaaacgacaggactggacctacagagacatctgggattttctgcgtcag

SEQ ID NO: 414302 - DNA, 89 bp, Homo sapiens
gggagctagtggaagttactgccgcgccaccgagtccggaccggagactttggggcctaactaggatgagacttcagcactcaagtttg

SEQ ID NO: 414303 - DNA, 100 bp, Homo sapiens
tggagcctagagaagcagctccagttcttccaggtttggtgcacctcgatttggaggaagtagggcagggcccttatctggaaagaagtttggaaaccct

SEQ ID NO: 414304 - DNA, 75 bp, Homo sapiens
agccagagaacagccctccatcttgcagcccagaaggaacatcgtgatcaattagccactgccaaagatccctgc

SEQ ID NO: 414305 - DNA, 100 bp, Homo sapiens
tccagtgcagcgcggagtgggcgatgccagcgtgccagttggtgagtttgtaagtgatgcccttctcgttcctgacaagtgcaaattcttacaccaggag

SEQ ID NO: 414306 - DNA, 88 bp, Homo sapiens
aaacactaggcgacatattggaaaagaccctcatcaaaaagatgacataaataaaaaggcatttgataagttcaaaaaagaacatgga

SEQ ID NO: 414307 - DNA, 113 bp, Homo sapiens
tgccagcacctttcggcttctgagacggcggcagcagcggcattcaggaatgaatctgaagtctgctgcagtaaaacacagaaggctttaaaatgttttcttgcataaaattc

SEQ ID NO: 414308 - DNA, 50 bp, Homo sapiens
ggatggagtgcctccaaaggttgctgaggcaagccaaattagagctgaga

SEQ ID NO: 414309 - DNA, 73 bp, Homo sapiens
tgataacctcctaaggagagcagcctgtcaagaagctcaggcttttatcttgagaacatggtgtctggagtta

SEQ ID NO: 414310 - DNA, 75 bp, Homo sapiens
cccttatttatccagaagattgatcatcatatgggttgataaaggctccagtgtataaacgggtaatgcctgatg

SEQ ID NO: 414311 - DNA, 74 bp, Homo sapiens
gttactgaccgggaaactgggtcctccaaagggtggtgatctttgtgaagtctgtgcagcggtgcattgccttg

SEQ ID NO: 414312 - DNA, 74 bp, Homo sapiens
ggttcagactcttggagccagaagctacatgacccctaaacggctcaaagatttggaaagagacagcttaacag

SEQ ID NO: 414313 - DNA, 75 bp, Homo sapiens
cccgagtggttccatggtgcaatctcaagagactgctacaggagctgagagaccctaccctcactttccgtctgc

SEQ ID NO: 414314 - DNA, 100 bp, Homo sapiens
cgaccacccggagcccgctccgccggccttgcgcggcgcgcccagggaaggcatttccagcccgcccacccagtaagactttgaccccgacgcaggcttc

SEQ ID NO: 414315 - DNA, 100 bp, Homo sapiens
gcggccgcgacgctatggcgcactggagtaccctgttcctggcaatgtctttggtggacttgggaaagaggttgctagaagcagcaagaaaaggccaaga

SEQ ID NO: 414316 - DNA, 90 bp, Homo sapiens
tgcgaagaagctgcagccgcacctggccaagggagctgccgttatactgttctggggggttgcggtttttctgggacaacaagtttgacc

SEQ ID NO: 414317 - DNA, 75 bp, Homo sapiens
ccgcgccgcatggaggccggctgaggagcgccgctgcctcgcctcgaataccctctaccatctgctttggtcagg

SEQ ID NO: 414318 - DNA, 91 bp, Homo sapiens
ggcgggccggggtcaccacgcctgccccagggaaccgcacaggttatacattggctcttcaaagacgttcacctcatcagagaaatccctg

SEQ ID NO: 414319 - DNA, 97 bp, Homo sapiens
ctactacctggtgcagggcctgattgaggactgccagctggcgctgcaggaacagatggagtcggataactgttcaggaggagatgatgactggacc

SEQ ID NO: 414320 - DNA, 75 bp, Homo sapiens
tgatgactctcgtgaacatagctttaataggggtgcaatatgtgacttctgtgaagcttgggtttgccatggtag

SEQ ID NO: 414321 - DNA, 82 bp, Homo sapiens
aatcttaccctcctgggaactgagagaggtcactctgtgagactgctgggtcagaaaaaggataatggaaggcggcttgggg

SEQ ID NO: 414322 - DNA, 50 bp, Homo sapiens
ttgacaatggagttgagtataagttcattcggctcctaaagaagtagcag

SEQ ID NO: 414323 - DNA, 75 bp, Homo sapiens
ctgcggctgtcacagactgctgaagagatggcggccaatctaacagattgtagaaggcatgaaacaaaaaatgtg

SEQ ID NO: 414324 - DNA, 100 bp, Homo sapiens
ctcagttgatcttccagcctcaccggattcccccactctttcctcagaagctcaataaattgattgcacaagaaggaccttcctttctgcaaatgcgaat

SEQ ID NO: 414325 - DNA, 75 bp, Homo sapiens
aggccatcaaatgcagaattcacaagatccaatcccttgtccttaaaagggacaaaagtggctctcaatccagca

SEQ ID NO: 414326 - DNA, 101 bp, Homo sapiens
ctgaggagctgcgtctccgctggagggcagcggagacagccgaaactactgtcagaggatgtaggaatggacatcccctttgaagagggcgtgctgagtcc

SEQ ID NO: 414327 - DNA, 82 bp, Homo sapiens
gggccaactgcctcgggctcttgatgtgatggaaagatgaatgggagggctgattttcgagagccgaatgcagaggttccaa

SEQ ID NO: 414328 - DNA, 100 bp, Homo sapiens
tcgacagctacacaaatctggaacgggtggccgattactgcgagaacaactacatacaggatcaccccttctgtgtcattctctgaggaaaacaagttct

SEQ ID NO: 414329 - DNA, 73 bp, Homo sapiens
acagctgtggaaagaagttgcaaaacactggttaaacacagtgggaatatcacttttgatgagattgtcaaca

SEQ ID NO: 414330 - DNA, 74 bp, Homo sapiens
ggagaatggcagacgacaataagctcttcagggaggaattcaacgtgttggggatgtcctttgcactgaccctg

SEQ ID NO: 414331 - DNA, 50 bp, Homo sapiens
gcctcctgagtagctgggactgtagggccgagatggacgaaaaaatgtgg

SEQ ID NO: 414332 - DNA, 98 bp, Homo sapiens
agaccctctcgcccctgaaggcgataaccggagcgcctcacgaagacgtccaggtgtggcccgtgggcacgtttttgcaaccggttcgttgatacctg

SEQ ID NO: 414333 - DNA, 88 bp, Homo sapiens
gaatcttggtgtttggacataggaggcacattgcaagcaacccgtgccttgatggtggttggcatcctcctgggagtgatagcaatct

SEQ ID NO: 414334 - DNA, 75 bp, Homo sapiens
aagatatgtgcctggatgcagctcacctccgtcgggaagacgtctctgattacgaggttcatgtacgacagcttc

SEQ ID NO: 414335 - DNA, 87 bp, Homo sapiens
ccgggccgaacagcatgacgtccgctttggagaactacatcaaccaaatggtgatttctttgctaacatggtagtagatgctgtact

SEQ ID NO: 414336 - DNA, 50 bp, Homo sapiens
ccgcaaacaggatgcttcagagaaggtgcctcgagtctttattggtaaag

SEQ ID NO: 414337 - DNA, 100 bp, Homo sapiens
accagagacgtatggcaactttgacagccagtctcctgaaggtgcacctgcagctgcatggcttcagtgtcttcattgatgtggagaagctggaagcagg

SEQ ID NO: 414338 - DNA, 75 bp, Homo sapiens
ccctgagctgcgtgagaacccgcccatgaagccagatttctcccaggaattgaatgatctggcacgggaccctcc

SEQ ID NO: 414339 - DNA, 75 bp, Homo sapiens
gctgttccaatcgctcctgtttgtcttctgctttggcccaggaaccgtggagcatgcaacacatcccggcactgt

SEQ ID NO: 414340 - DNA, 83 bp, Homo sapiens
caagtcaaacgcagaaggactgcctcactgagcaaccaagagtgctgttggcagcagcggtctgcacaaaagcaggaaaggct

SEQ ID NO: 414341 - DNA, 98 bp, Homo sapiens
aggccaaccgcttcgcctatgctgccctctgtggcatctccctgtcccagttatttcctgaacccgaacacagggataagaagcatgtagactgggtc

SEQ ID NO: 414342 - DNA, 100 bp, Homo sapiens
gcgtggttctgagcacacggttaatttcaaagcttttcccatggaggatgataatgaagataattcaaatgatgggacccagccatccaaaaggaggcga

SEQ ID NO: 414343 - DNA, 51 bp, Homo sapiens
gaagcaggatggatcttgcgagatataaagatgaagcgcagctgtataaag

SEQ ID NO: 414344 - DNA, 75 bp, Homo sapiens
ggattctcgacctgctaacagaactggaccttttcggaaaatgttggggcttttcaggaagcataataagattcc

SEQ ID NO: 414345 - DNA, 97 bp, Homo sapiens
tatagaaatggctgaaggaaaacctccttatgctgatatacatccaatgagggtaacaaacctgaatttggcaactggcatcataaacagaagcagt

SEQ ID NO: 414346 - DNA, 100 bp, Homo sapiens
atagcttctgacagtggagacactggcattggaacttcctgttctgatagcgtggaaggtatctctgcattagccagattggacatatgtaaagggacat

SEQ ID NO: 414347 - DNA, 75 bp, Homo sapiens
cccagctggaaaatctcagtaagaatgatgtagaacttcatggaggaacacggagtgacccaaaccgaacatatg

SEQ ID NO: 414348 - DNA, 75 bp, Homo sapiens
cgagcggggcgcgcgagttcgagcccagagccgacacgcagcaacaagtgggcccaagccagtgacctggaaaaa

SEQ ID NO: 414349 - DNA, 100 bp, Homo sapiens
ggaagggaagctgatcatgggcattggtcaccgagtgaagtcgcaatctgaagaggatgtaagtcagtttgattccaagtttacacgtcagacacctgtc

SEQ ID NO: 414350 - DNA, 100 bp, Homo sapiens
agcaggaaattctggtgactggtatcaaggttgtcgatctgctagctccctatgccaagggtggcaaaattgcagatgcgtagcatttgctgcatgggtt

SEQ ID NO: 414351 - DNA, 96 bp, Homo sapiens
tcacaatcagccctacagcgtccgcatccctgagacttcagattttcctgtccttgatcccagctggactgctcaagaagaaatggcccttttaga

SEQ ID NO: 414352 - DNA, 100 bp, Homo sapiens
gcggcgtcttctcgcgcggatggtgaagctgaatttggtacgctggaccctcggacagaggcgagcaccgtcaggagcgcagagatcggccctactagat

SEQ ID NO: 414353 - DNA, 101 bp, Homo sapiens
caaagccccaagtgccgcagacttgtctgagatttggaatggagtatgtccgaagacttttctcctttggctggagaaatcatcatggataatctgcagac

SEQ ID NO: 414354 - DNA, 75 bp, Homo sapiens
agtcggaccagcttttcaaacaatacaggtactccaaagattcaggtttactcacgtcatccagcagagaatgga

SEQ ID NO: 414355 - DNA, 106 bp, Homo sapiens
agttctgttactccactgactctctcttttcctgataacatggccagcaagaaagtaattacagtgtttggagcaacagaacatacatatgatagttgagaaagac

SEQ ID NO: 414356 - DNA, 88 bp, Homo sapiens
taaacgtgggtttcttactaaggacgagctgatcaagtatatgactgaagaaggaatgtatcctgtcaggtataatgtcagtgaatgg

SEQ ID NO: 414357 - DNA, 75 bp, Homo sapiens
caagtgttggcggatggaagggaggagactcctgaccctcagaatgcaacacagtcactcctggcggcaaaccaa

SEQ ID NO: 414358 - DNA, 50 bp, Homo sapiens
tcagaggacaacgaagtgttcgtcactcaagactgcttgcaactgattgc

SEQ ID NO: 414359 - DNA, 88 bp, Homo sapiens
acagtttcctgccaggcgccatcatcggcatagcccgggagatgcagccagtttacagagataatcattcaggtcttcgtgagctaag

SEQ ID NO: 414360 - DNA, 98 bp, Homo sapiens
cgcaggatgggatccggctcctccagctaccggcccaaggccatctacctggacatcgatggacgcattcagaagaacccttaggagaaatcttgaga

SEQ ID NO: 414361 - DNA, 80 bp, Homo sapiens
acccagtgaacaaatccgggggcaaggccaaaaagaagattcttggtgccaccattgagaactccaggattgtcctgcag

SEQ ID NO: 414362 - DNA, 50 bp, Homo sapiens
ccagctcggagctacctgctgatcaacctgggctggctgagttatggggc

SEQ ID NO: 414363 - DNA, 100 bp, Homo sapiens
gaaaaacgactaccggcagctcgagaaggagctgcagggccaggttatgaaggacagaatctggcaaagatcctcaaggatttagagatgagtaaagtgg

SEQ ID NO: 414364 - DNA, 107 bp, Homo sapiens
aagcctcagtgatcttggtgccatagagagtctccgggtccctggaaagggccgttgctccagggagaactgcaaatatcttcatccacccccacatttaaaaacgc

SEQ ID NO: 414365 - DNA, 98 bp, Homo sapiens
ttttgggaatgtgtgttttcatgtgaaagaggggaatgaaatcacggatgataccatcggggaccttaagaagctgattgcagcccaaactggtaccc

SEQ ID NO: 414366 - DNA, 100 bp, Homo sapiens
agagggcctttggaaacttcttggaggttttcaggaaacttgcagcaaagccattcgggttggagtaattgatagagccacgaaccccctgaacaaggag

SEQ ID NO: 414367 - DNA, 88 bp, Homo sapiens
gtcggctcagccgggcagtttgaggagctgctgcgcctcaaagccaaataaagtggagaattttcatgaagaacatgaaaagaatagt

SEQ ID NO: 414368 - DNA, 101 bp, Homo sapiens
accggggccgaggcgaaccgaggggcctgtgcggccgcccggcccggccgcggatcaggtctataagggagaattccaactacctgactttcttaaagaaa

SEQ ID NO: 414369 - DNA, 75 bp, Homo sapiens
ctccgccagatcatcggtcaggccaagaagcatccgagcctggagatggagctgaagatgctgaagtctcagtcc

SEQ ID NO: 414370 - DNA, 71 bp, Homo sapiens
tcagcttcgcaagtctgctctcaggatggccctttgtatcaggagcagtgaggagaatgaataccttccaa

SEQ ID NO: 414371 - DNA, 100 bp, Homo sapiens
tggaccaggaattggaggagatacccattttgactcagatgagccatggacactaggaaatcctaatcatgatgatgatgtcggagcaattccaataaag

SEQ ID NO: 414372 - DNA, 50 bp, Homo sapiens
ccaagcccctcttcaggagtaagatgagacgtgcaggtaccatcaggaag

SEQ ID NO: 414373 - DNA, 51 bp, Homo sapiens
ggtgtccctttgaaagtatctcctacagaaataaggatctggcatgtcaac

SEQ ID NO: 414374 - DNA, 98 bp, Homo sapiens
cccagcagggccagcaggggcagatggcaagtggagacagcaatctcaacttcagacaacgactgaaagacctttcattcagaagctgtttcgtcctg

SEQ ID NO: 414375 - DNA, 100 bp, Homo sapiens
cgcgcttcctcgaaggccccagcccggctcagtcggccgagagcgagggaggagccccccgacccagctgggagtgtccactcgccttccaccagcatgg

SEQ ID NO: 414376 - DNA, 83 bp, Homo sapiens
cccgcgccggaagagccacgccgtaagactttgaccccgacgcaggcttcagtgattgccgcggatcagaagcctgagcactt

SEQ ID NO: 414377 - DNA, 99 bp, Homo sapiens
aggcgtcagcgggggaacagctagcggcaaggttatgaagacagtatggagtttccagaccatagtagacatttgctacagtgtctgagcgagcagaga

SEQ ID NO: 414378 - DNA, 83 bp, Homo sapiens
atgcatccgctggtcgctgccggaaatggccaggaaacggggtctctgggggatccagtgacgtgcccaaccacagagaccag

SEQ ID NO: 414379 - DNA, 75 bp, Homo sapiens
ctgtttatttagaagacacagactaacaattttagatgaagtgatgagagcctatttacaacagctaaggcaaga

SEQ ID NO: 414380 - DNA, 100 bp, Homo sapiens
ggagaacatccgcgtggttcgttgtggcggcagcgagttgaactttaggagagctgtgttctctgcagattctaaagccccggagctatgtggagtctgt

SEQ ID NO: 414381 - DNA, 100 bp, Homo sapiens
acggagctaagagatatctgcaatgatgtactggtatgaaaatgaaagtcttcagaatggaaggaagtcaactgaatttccaagaaaaatacgtgaacag

SEQ ID NO: 414382 - DNA, 100 bp, Homo sapiens
accttaaccctcaagccgaagccttcagtgggactcccccagcagatacattctcagtgtctgatgatttgtgagcctcaagtgactactctgtggaatc

SEQ ID NO: 414383 - DNA, 100 bp, Homo sapiens
gatgattcttcctgtgcttatcatgattgctctcccctcccctagtatggaagacgtgccaaatactggtgtaagcaaacctagagtttctgacgctgtc

SEQ ID NO: 414384 - DNA, 121 bp, Homo sapiens
ggcccactcctctgaccctgtggagatgcggaggctcaactaccagaccccaggtcatttaggaaatcgtaaatcatgtgaagatgggactcttggtatttgtgcgcaatctgctgctagc

SEQ ID NO: 414385 - DNA, 75 bp, Homo sapiens
attaagattctgcttaatgctggggcagaaattaattcaaggttggcaaaagcagcttttgatgatgcaattgca

SEQ ID NO: 414386 - DNA, 96 bp, Homo sapiens
gcccccaagccgcggccatggacctggcggatccggcctgccctggcccagctcaacacctgatttcgggacccagacagcgtggtcctctgcctc

SEQ ID NO: 414387 - DNA, 100 bp, Homo sapiens
accacaaatgtttttctgttttgcctgaatacatgatttaaacaagagatttccacagaaggtttaaagaccattgtgggggccctgatccagtcggtaa

SEQ ID NO: 414388 - DNA, 75 bp, Homo sapiens
ggcgagtcctcggtgtcggtggccggcagtcatctcgcggccgttcagttcagcggaccaggagaggagaaattg

SEQ ID NO: 414389 - DNA, 100 bp, Homo sapiens
tcagcccggcctacctcttcctctggcccgaagccttcctttatcgctttcaggtccttggatgtggctgtgttgcccaagctattctcagtcgaggacg

SEQ ID NO: 414390 - DNA, 83 bp, Homo sapiens
aaagagctggtggcctcaggtgaaaagtgagaagccctaccactgcaactgggacggctgcggctggaagtttgcgcgctcag

SEQ ID NO: 414391 - DNA, 50 bp, Homo sapiens
cttacctttattggagacaaaaccggggtgctcaaaggatttaaaggaga

SEQ ID NO: 414392 - DNA, 75 bp, Homo sapiens
gaaaaagccgtacaaaaaataagcaaaagcgtcccaggaggcccaggcgctgtcgggacaggccaagcgggccga

SEQ ID NO: 414393 - DNA, 142 bp, Homo sapiens
tgaacttgtccccatgcgtttttacttggtaccgtacattttctcagttggcatttgatggagaaaaactcagattatgctgggagacgaagctgccttgttagagcagaaggaacttctgagtaattggtatcatttccta

SEQ ID NO: 414394 - DNA, 100 bp, Homo sapiens
gtaaatttgcacatccttcgaaaagctgccaagttgaaaatggacgagtaatcgcctgctttgattcattgaaagcctaaagatattggaagacctaagg

SEQ ID NO: 414395 - DNA, 100 bp, Homo sapiens
gcgatcagatcgatctaagatggcgactgtcgaaccgcttttagtttggatgctgaacagcctgattatgatttggattctgaagatgaagtatttgtga

SEQ ID NO: 414396 - DNA, 75 bp, Homo sapiens
cgactatgcagagacatgagatggtagccaacccctcagttgcacgtgcattatttaatcacatagacaagtcag

SEQ ID NO: 414397 - DNA, 134 bp, Homo sapiens
gattggaggtgtcagtgttaaaggaacctctacaacgaaggtgaagccacggaagataagtggaatgcagtagccctctgggcctgggatattgtggttgataactgtgccatctgcaggaaccacattatgga

SEQ ID NO: 414398 - DNA, 83 bp, Homo sapiens
cagctgaagagcctgctgatgtcagtgggacccattcagggtgttcctgaaaagccccatagtgattgagtcttcaaaaccac

SEQ ID NO: 414399 - DNA, 50 bp, Homo sapiens
agcacatttgggaagccacattttgcagtgctggtcaagatgtccaagga

SEQ ID NO: 414400 - DNA, 100 bp, Homo sapiens
ttctgattgctacagatgtggcctccagagggctaggggagactgtggccgctttctgtctaaccgagccctcaagcgggtcagatgcagcctccatccg

SEQ ID NO: 414401 - DNA, 82 bp, Homo sapiens
aaaatgaagacattgcaggtttcattcacaagcacgtagacagactatgctcttttctgccacccaaactcgaaaagttgaa

SEQ ID NO: 414402 - DNA, 49 bp, Homo sapiens
ccactgtccaacatggcaatgagaggaacgaagggcatcctacgactat

SEQ ID NO: 414403 - DNA, 98 bp, Homo sapiens
cttgatctatatccatagattggaatattggtgggccagcaatcctcagacgcctcacttaggacaagcctagaatatcctgcagtggtagagtttgc

SEQ ID NO: 414404 - DNA, 100 bp, Homo sapiens
atgacttcaaagcctattcaaaaataaaggtggacaatcacctttttaacaaaatgttgtaccatctttgggtaggcagacttccctgacgacatcagtg

SEQ ID NO: 414405 - DNA, 100 bp, Homo sapiens
gcgatggactattccctggctgcagccctcactcttcatggtcactggtactactgagcgagtgtgcttgatccagggaacggttgaagcactgaatgca

SEQ ID NO: 414406 - DNA, 100 bp, Homo sapiens
tactgcaaatgtctttcgtggaagacataaggcatagaatgtcaagctaaccaggcgtccgctacttcagaagagtgtactgtcgcatggggagtctgta

SEQ ID NO: 414407 - DNA, 51 bp, Homo sapiens
tggactgcatcaggccgcgtctcctcaggatttgcttgtaaatgcatcacg

SEQ ID NO: 414408 - DNA, 105 bp, Homo sapiens
ccacgagcactgagcgcctcctgagagccagccctgacgtgaactcattttatctgccacgacccagaaggccgagtacagatgctgccccaggcggtgtgcctg

SEQ ID NO: 414409 - DNA, 50 bp, Homo sapiens
gtgtggagaagctgctttaaatcatccagttttggatgaaccaatagcag

SEQ ID NO: 414410 - DNA, 100 bp, Homo sapiens
cgctcccagggctcgtcgcagtttcgcagccagggcagccaggcagagctgcacccgctgccccagctcaaagaattagacctttacgagaagcacagtt

SEQ ID NO: 414411 - DNA, 88 bp, Homo sapiens
gagaagatgcacgattgccattcaggtgctggagaatctggtaaaagcaccattgtgaagcagatgaggatcctgcatgttaatgggt

SEQ ID NO: 414412 - DNA, 100 bp, Homo sapiens
tatacactggaacagaatcaacccagaacggatagctccctcctggaaaagacttaattcagtgcacaaatgagatgaatgtgaacatcccacagttggc

SEQ ID NO: 414413 - DNA, 100 bp, Homo sapiens
cctggaggactattcggcagagtacatcattcagcaaggtggctgggtggaaccgtcccaaaatgtcccttgctcagaagaaggatcgggtagctcaaaa

SEQ ID NO: 414414 - DNA, 89 bp, Homo sapiens
gctgtgggcgctgctggcgctctggctgtgctgcgcgacccccgcgcatgcagccctagcaaaccaagagtgagccaccttggaagtag

SEQ ID NO: 414415 - DNA, 75 bp, Homo sapiens
tgtttgtggatcgctgtgatcgtcacttgcgtgttcctgccatccagtaggatcagctgtccttcctgccaactc

SEQ ID NO: 414416 - DNA, 112 bp, Homo sapiens
tgctgggcctccagtcaccctcgtcttgcattttcccgcgtgcgtgtgtgagtggacaatgcagatcttcgtgaagactctgactggtaagaccatcaccctcgaggttgag

SEQ ID NO: 414417 - DNA, 117 bp, Homo sapiens
aacggattccagcatggacgtcttccacctggagggcatgactacatctgtcatgctgccactgcagagccccgccatggaagacacgccgttggtgatatcgaagcagaagacgga

SEQ ID NO: 414418 - DNA, 75 bp, Homo sapiens
gaggacaatgatgaggccttaggtcctgcatactgatgaaactactgatgtcagctggtctgaaggaccctacca

SEQ ID NO: 414419 - DNA, 83 bp, Homo sapiens
cgtccgttcatccgcggaaccaagctgagcgccgtgccgtccctgcagtgacaccgaggtgctcctagccgtctgcaccagcg

SEQ ID NO: 414420 - DNA, 83 bp, Homo sapiens
aatccaaccttctgttgaattttcagggcggatttgtgaatctcacatttaccaaggttttgggatttgagattgacgcggtg

SEQ ID NO: 414421 - DNA, 74 bp, Homo sapiens
cgacagtggggacacagccattggtacatcatgctcagatattgcggagggtacagagccagatggactccttc

SEQ ID NO: 414422 - DNA, 83 bp, Homo sapiens
cacaggtgctaaagagagcagtaccctgatggagtcccttgcaggcaccatgactcctgtgaggatgcagcactccctggcag

SEQ ID NO: 414423 - DNA, 82 bp, Homo sapiens
cacagttggagaaaatcggcagctgagacggccttggccggctggacggcagtctggaaacgaccaatgagatcttggactc

SEQ ID NO: 414424 - DNA, 83 bp, Homo sapiens
ccggatcctgaggaggcagctgcggtggcagctgctgagttctcggtgaaggtgcagcagtaccgcgtcgccatgactgccaa

SEQ ID NO: 414425 - DNA, 100 bp, Homo sapiens
tgcccagctgcggtgcttgtacttgcggcgcggcggccgtccggctcatcacctcctcactcgcctccgcgcagagaggatgtagctgagctgattcggg

SEQ ID NO: 414426 - DNA, 100 bp, Homo sapiens
cctaggccaagctcatggcccagcagggccagcaggggcagatggcaagtggagacagcaatctcaacttcaggtggacgttggaaaaaaggctgaagct

SEQ ID NO: 414427 - DNA, 75 bp, Homo sapiens
gggagcaatgctgacctcggtttcctggacccattccgactcaggtggctggtcattgaccgcaaggtttacaac

SEQ ID NO: 414428 - DNA, 80 bp, Homo sapiens
gcgggcaggtggcggcgcggcgcgggctggcggtggctccacgcaaagtgcctgcattcgtgaggatgattgctcccgag

SEQ ID NO: 414429 - DNA, 75 bp, Homo sapiens
gggaaggcaggactgacgcagactggcggcaacccgcgatctctagagaacagcctggatgaagaagtgaccatc

SEQ ID NO: 414430 - DNA, 83 bp, Homo sapiens
caggagaactggtcgccatcaagaaagtattgcaggacaagagatttaagtgctgaagctgctgaaagatggcagaagaagtg

SEQ ID NO: 414431 - DNA, 100 bp, Homo sapiens
gcttctggcacagtggcaagagtagagccaaatattaaatggtttgtttggtgccctggttgtcagatgttggaaagcagtaggacggaacatactcttc

SEQ ID NO: 414432 - DNA, 83 bp, Homo sapiens
ctcaacagtttgtggcaagacaagctcagaactgagaagctgtcaccacagtttttcaggatgccacattctaaaacaactct

SEQ ID NO: 414433 - DNA, 100 bp, Homo sapiens
cagcaacctgacaattctgtcgtgtcccgtgaataaccctataccttccaatttgaaatcagaagcaaaaaaggctgccaaaatattaagagaattcaca

SEQ ID NO: 414434 - DNA, 75 bp, Homo sapiens
ctcaatgtcaagtcatctttggctcaaaggacagttatgggatggatgggaaggttaatcagccccgtctcactg

SEQ ID NO: 414435 - DNA, 100 bp, Homo sapiens
tgaacagctaaaggatgtgaccattttggcagctactaaccgtccagataggatagacaagctgttccatttcctccaagtcaccggcttacagcaaaag

SEQ ID NO: 414436 - DNA, 75 bp, Homo sapiens
ggaccagcgggcgggggcccacgaattgaccgactcatcagtcacggggccgacatcctgaagcctgtaatgctc

SEQ ID NO: 414437 - DNA, 100 bp, Homo sapiens
agacagtgaactgagggtatgggacatagcttatctgcaagaggatatgaacgagactgccaaacaagaagatattttggaatccacaacagatgctgca

SEQ ID NO: 414438 - DNA, 82 bp, Homo sapiens
gggaagccgaggcggagaagccgcgcgcgcctcagaagctcccggacgcccaggacatggatttgattgacatactttggag

SEQ ID NO: 414439 - DNA, 100 bp, Homo sapiens
gaatcttctggagtactcttattttgaaaagaaggcagacggtaacaagtactccttgctggattgaacttcatctgaatggacctctacagtggttgga

SEQ ID NO: 414440 - DNA, 73 bp, Homo sapiens
ggaatttgtgcaatgtttagccaacccaaattaccttaattaacggaaagatgctgaaggatgggagaccgtt

SEQ ID NO: 414441 - DNA, 89 bp, Homo sapiens
gccttggtgacatacaaaggaagggaggcgaaccctcctggtgtactggcccttttggatgaagaatgctggttccctaaagccacaga

SEQ ID NO: 414442 - DNA, 100 bp, Homo sapiens
tgtcaagggggcaagtggataccctggggctgagaggaatcttctggagtactcttattttgaaaaggaaatggtgttcacactggccctgaatcaaggg

SEQ ID NO: 414443 - DNA, 75 bp, Homo sapiens
ggctcaggttgtggtagaggcggaggctcaggcagcttgaggtgctatacttggtagatcagaaactcaggagtg

SEQ ID NO: 414444 - DNA, 100 bp, Homo sapiens
ccccaaccgcactgaggataaggaggagaacaggaagagcacgatgggctggacaggaagcacggcagcatctactcggcttctgaggcgtcctcaggaa

SEQ ID NO: 414445 - DNA, 103 bp, Homo sapiens
aaacccaggaagctttggatcagacttttgtgttgcagttcgggttttaaaatcaaagatgggaaaatcggagaaaattgcccttccccatggccagcttgtt

SEQ ID NO: 414446 - DNA, 75 bp, Homo sapiens
cagagagttctacagttactccaacattaccaggtggacccaagagccatatcagtgctagcaaaatggcagaat

SEQ ID NO: 414447 - DNA, 83 bp, Homo sapiens
tcaaaatgctgtggctcttcttccagagaatgacacaggtgaaaggatatccgacatgaagccagtgacttcccatgtagagt

SEQ ID NO: 414448 - DNA, 100 bp, Homo sapiens
ctgaaagagctattgaaaaaatgaatggaatgctcctaaatgatcgcaaagtggtttatttttatcccaaaccccttcctcccaggttaccagtggcact

SEQ ID NO: 414449 - DNA, 98 bp, Homo sapiens
cgggagggagtgcctggccaggccggcctgtctgccgcgatggatgacagtaaggactctgtctactagtgacgatgtcgaagacagggaaaatgaaa

SEQ ID NO: 414450 - DNA, 75 bp, Homo sapiens
aaagggggtgcgcagcctcgagtttgagagctacccggagctccaagacagggaggtggggctggtgtccgagca

SEQ ID NO: 414451 - DNA, 75 bp, Homo sapiens
cagtgaagtggtgagcctttttgtcactgactggtattgctcgagttccacttgctggagctgccgggggcccag

SEQ ID NO: 414452 - DNA, 100 bp, Homo sapiens
ggacatcctggaagctgggaaatggcactgcaacatggtgctggagaacgtgaaggagatgtggactgaggtacccaagagtggcaagggcaagaagaag

SEQ ID NO: 414453 - DNA, 108 bp, Homo sapiens
agatgacaaaacttcaagccaaacatcaagcagaatgtgatttgcttgaagatatgaggacacagccgagtatgtcgcctatgttgccaaagaccctgtgaatcagag

SEQ ID NO: 414454 - DNA, 86 bp, Homo sapiens
cccctggtgcacacaccctcgtattctcctgcccttccccaggtcagcccaaggccaaccccactgtcactctgttcccgccctcc

SEQ ID NO: 414455 - DNA, 75 bp, Homo sapiens
aaactgttcggacttccccgttagaactcgcgtttccacttcagagatctgcagttggaattgatcacacctttt

SEQ ID NO: 414456 - DNA, 100 bp, Homo sapiens
ctttttaaatttatgaactcgaaatgaagcggaaagcagatatgcgcgtcagcatactttggcggatgttagtaggcaggaagaggcggagggagagctc

SEQ ID NO: 414457 - DNA, 100 bp, Homo sapiens
cagaacttgatctgggcctggaaggggaagaattcgggaaaagcaacgtggggcattccagattgcttccaagtatgatcatcaggcagaagaagatctt

SEQ ID NO: 414458 - DNA, 82 bp, Homo sapiens
acgggaccatcattcctttccggaagcacacagtgcgcggggagcgttcctacagaggttccatgacgagcctggagtccag

SEQ ID NO: 414459 - DNA, 100 bp, Homo sapiens
agaggatccacgagtacaagcggcagctgctcaactgcctgcacgtcgtcaccctgtacaatcgtggttggttttggacacagagaccagagagatcgtg

SEQ ID NO: 414460 - DNA, 101 bp, Homo sapiens
ttggggtggctctttgctaagtgctgctgttgcttcccgtgtagaggatgacccctccggcgaaggtgtcctgccctcggcccgcggcccagccaccttcc

SEQ ID NO: 414461 - DNA, 100 bp, Homo sapiens
actcaaaggcctgggaaaactgatgacaaaggcacgcggaataaaagatgctacagaaatcatctttgagatgtcaaaagacgaaagaaaagatttctac

SEQ ID NO: 414462 - DNA, 83 bp, Homo sapiens
gtcagcctgacatggccattatggccgtcaacacctttgtgaaggtagctcgtaagctggtcatcctggagggtgagctggag

SEQ ID NO: 414463 - DNA, 83 bp, Homo sapiens
cagcaccgcagccttgggcctcgcgccggctatggccgtgccctggggctgagccctcaggttcattttccagacactgaaag

SEQ ID NO: 414464 - DNA, 75 bp, Homo sapiens
ccggccaccagcaattgtccggatcctgttcccagtgggttttctgcaggggaagttctgattcccttagctgac

SEQ ID NO: 414465 - DNA, 96 bp, Homo sapiens
tccgattggagctcgcggaacactcgcctgtccccgccggcttcggcttcagcgccgcgggcttaccactcttctctcatggatcctgataccaaa

SEQ ID NO: 414466 - DNA, 90 bp, Homo sapiens
ctgtgtgtcaacgacctggcggtggggctgcggcgcctgggactgcaccgcaccgagggcgagctccagccccctgcctgggatgcgcca

SEQ ID NO: 414467 - DNA, 141 bp, Homo sapiens
ctgatgtggtgcttttgaaccactggaaagtgaggaattttgaagtacaccgtggtgacattgtatcattggtgccggagcctcaacagaaagctcctttagttcctcctcctccaccgccaccaccaccaccaccgccac

SEQ ID NO: 414468 - DNA, 73 bp, Homo sapiens
atcatcccgtcagagctgaggtacttcgtgaaggtgaggaagaggatggagatgaagatgaggaagctgagtc

SEQ ID NO: 414469 - DNA, 82 bp, Homo sapiens
gcccggccgcgacgcccgggacccagattgcgggttcagggtggcccagttgaaatccttcccttcctctaccttggaagtg

SEQ ID NO: 414470 - DNA, 100 bp, Homo sapiens
ggttattctcgttcaagttaatccaggtgagactttcacaataagagcagaggatggaacacttcagtgcattcaagatcttaagaagcatacagctgat

SEQ ID NO: 414471 - DNA, 74 bp, Homo sapiens
agaccacacactgggaaacatcattaaatcggcagccgaattgaaattgaagcagtagctatccaaggaccact

SEQ ID NO: 414472 - DNA, 75 bp, Homo sapiens
cgacactctgaagcagcgacggcacagcgggaagaatggtatgtcctctaccctctggatctgtacaacgacagc

SEQ ID NO: 414473 - DNA, 100 bp, Homo sapiens
tggttttatgcatctttatccaatcaagtgcccttggacaaagcctgaaaccagctcttcacagaggtcctccaggatcaaggggaccactgattccacc

SEQ ID NO: 414474 - DNA, 83 bp, Homo sapiens
gagcagacaccatcctgtgtctagggtccagcctgaaggttacttttcacatagaaccatatagcaatcgagatgatcaaaac

SEQ ID NO: 414475 - DNA, 89 bp, Homo sapiens
gaagctgtccgggacagactcggagcaggagttcaaagaaggacgcagagccagccacacagccccacaggtcctctttagccacaggg

SEQ ID NO: 414476 - DNA, 75 bp, Homo sapiens
cggaattttggagaaaagcttttggggaaaagtgcagcatgtggtgtctcagaactgtgacgggctccacctgag

SEQ ID NO: 414477 - DNA, 74 bp, Homo sapiens
agaggtttaaccataggatagagaaaccaggatgtgtgctgtgtttggtggaatttattgtcttcgccattcag

SEQ ID NO: 414478 - DNA, 100 bp, Homo sapiens
cccaggcctatgccaatcagcatttcacattcctcatggttggttcaaagataactgttcccaggaaaaaaaggaggaaatcctggaaaatgaaaagccc

SEQ ID NO: 414479 - DNA, 100 bp, Homo sapiens
tcacaatcaagaaatgcagaaacgtaaagaaatgcaattgaggcaagtgtcgtggacttcgtactgctaggaagctccgtagtcaccgacgagaccagaa

SEQ ID NO: 414480 - DNA, 100 bp, Homo sapiens
tgaggcacaatgcctatgtcgcggcgtggcggtttgaccagaagctgggaagatgagaatgtgcctactgctcctgatcctccaagtcaacatttacgtg

SEQ ID NO: 414481 - DNA, 75 bp, Homo sapiens
agaaaatctcatcatggaaatcacagcacctgattcccaaggcaagacaggaagacaactgttagttttgtggct

SEQ ID NO: 414482 - DNA, 96 bp, Homo sapiens
gccgcggagcgccagctcaatgaaggcgtctctggccgagcctctttttgtggaaaacgacagcagcagcagtggcctggaagacgccaccgctaa

SEQ ID NO: 414483 - DNA, 90 bp, Homo sapiens
gacgccgccgccgccgcctccagggtgggcgcctttcgccgtggacgccgaccgtccgggacgaggtaccaaagcagtcagactcacagc

SEQ ID NO: 414484 - DNA, 98 bp, Homo sapiens
caccatgccgctcctaagcctgcacagccgcggcggcagcagcagtgagagaggctgggaggcggcagaatgcagccagaggagggcacaggctggct

SEQ ID NO: 414485 - DNA, 83 bp, Homo sapiens
cgccgaggcaccgaggcactcagaggaggaagccagttgagggaagttctccatgaatgtacgtcacaatgatgatgaccgac

SEQ ID NO: 414486 - DNA, 95 bp, Homo sapiens
gaactccaagctcttcctgaacgaagtggccaagaaggagaagcagctgcggaaaatgctagaaggcatgctgcagacagacctttccgtccttc

SEQ ID NO: 414487 - DNA, 100 bp, Homo sapiens
gcactgaagaaagcaggactgagtcttaaggacatggatttggtagaggtgaatgaaaactttgccattgatttgatagcagagcagcccgtgagcgagg

SEQ ID NO: 414488 - DNA, 83 bp, Homo sapiens
cagagtcggttcagtctgtggattactactgtgatactgacacttcctccatggcccatctatcgccggcatcctctcaagtg

SEQ ID NO: 414489 - DNA, 123 bp, Homo sapiens
gccataaccaagtagagtctatcttcctatcagctattgacatgtatggacatcaattttgcattgagaacctgcagccttcaggcaacgtttgggtgactcatgaagaaatggaaaatcttg

SEQ ID NO: 414490 - DNA, 100 bp, Homo sapiens
cccgctgaagctctaccggaatggcatcatgatgttcgacgggcccttccagcccttctacgatccctccacacagaaacctgctcctccaaagccagag

SEQ ID NO: 414491 - DNA, 111 bp, Homo sapiens
gcgcagggcctgcagcgggagctggacggcgagcgcgagcggcgcgagaaattcaaatctgaacatcaatgatgtactagggaactactcattgactcttgttgatgcatt

SEQ ID NO: 414492 - DNA, 75 bp, Homo sapiens
cagccctgtgtgacaccaagataagtaacgttctaagctggtctatgtccatcaccttcttggagaaggagcctt

SEQ ID NO: 414493 - DNA, 96 bp, Homo sapiens
ctggtgtctgagtggatggggacctgcctgctggctgctttgtaccgcctcagtggagactggaatcccttacacattgatcctaactttgctagt

SEQ ID NO: 414494 - DNA, 100 bp, Homo sapiens
cagcggggtccgggtccggagcgccacaacatccacgacagcgatggcagttccagcagcagccaccagagcctcaagagcacagccaaatgggcggcat

SEQ ID NO: 414495 - DNA, 113 bp, Homo sapiens
gcagaggaggagggagggagggaaggagcgcggagcccggcccggaagctaggttgtggcagcactgcctgaaggtatgagaccagattctaatctttatggttttccatggg

SEQ ID NO: 414496 - DNA, 90 bp, Homo sapiens
caaggagtcatatatccttcatatgatccatcttagtgaagaattaggatacaggttacagcaactccatgtaaagatgatggtgatgca

SEQ ID NO: 414497 - DNA, 75 bp, Homo sapiens
gcatgggcaaactctgagatttcccagatgccgctcctacgaggactgctgtggctccaggtgctgtgtgcgggc

SEQ ID NO: 414498 - DNA, 100 bp, Homo sapiens
gctgtcttggggactcttcttcctgtaccctccagtagacattaccctccaaggaagtcctggctgagcaaggttggaagccctagttctcgcattgacc

SEQ ID NO: 414499 - DNA, 75 bp, Homo sapiens
gaggacatcgacatccaggcgaactcggcctatcgctaccctccgaagtccggatcttctgcaggacaactggtc

SEQ ID NO: 414500 - DNA, 96 bp, Homo sapiens
gcaacagttttcttcagcgcccaggatgcagccggctaaggttcatctgcagaagccagcggacgcctctgttcaacttgtgggttacctggctca

SEQ ID NO: 414501 - DNA, 82 bp, Homo sapiens
acgaggacacgaccttcctgcccttcacgctccaggagctaggacctgaaggagaagaaggagaaggtggaggagaaggcaa

SEQ ID NO: 414502 - DNA, 83 bp, Homo sapiens
agaaatttgtgctcaaaacccccaagcgggagatacagatgacccaccaagaattactcagaaccctgtgatcaatgggaatg

SEQ ID NO: 414503 - DNA, 131 bp, Homo sapiens
agactggtagcaaagcccccacgcccagccaggagcaccgccgaggactccagcacaccgagggtgtgtagaccacactccaaaactgaaactgtggatggcagccatgaaggaagatcccacagtctcag

SEQ ID NO: 414504 - DNA, 100 bp, Homo sapiens
taaattttttgctgatggagagctggaatctatgggattttcagctcgatacaatttcacacctgaaccaatttagaacttgaattgattcatcgaggag

SEQ ID NO: 414505 - DNA, 100 bp, Homo sapiens
tgaaggataaaagccgatggcatgtctgtgtttcactgatggcaagactgtggcccccatgcccccagcacaggaccataagcgattactggagggagat

SEQ ID NO: 414506 - DNA, 51 bp, Homo sapiens
cgcttcgagtctattgccattgcccaaggtttctgctttgggacaaccata

SEQ ID NO: 414507 - DNA, 101 bp, Homo sapiens
gaaagattcagacaagaaaggcaaggaaacatcttttgacaagatgtcacctgaaagtggtcacagccgcatctttgaagaggaaagtctagacagtgact

SEQ ID NO: 414508 - DNA, 102 bp, Homo sapiens
gtgagaccgaaatagactctgaagtaatatctggactttgaaattatgcttgctctgtcaaggcacagcctattgtctcctttgctcagtgtgacatcattc

SEQ ID NO: 414509 - DNA, 75 bp, Homo sapiens
cttgggtttagcaaaagttcatctccttctgcatccttaactgagaatgagcgggacgaccctgggacagtctcc

SEQ ID NO: 414510 - DNA, 102 bp, Homo sapiens
agtttgtgacttgaagtggatacatatttcagagtcaagtggtgagatcaaagacttttcaccaaaaaatgtcatttatgatgactcatcccagtatttgat

SEQ ID NO: 414511 - DNA, 90 bp, Homo sapiens
accgtgaccgagagcgtgaccgagagcgcgaatatcgtcatcgttagaagaatcatattctaagaactcagccactcaggtatccaccat

SEQ ID NO: 414512 - DNA, 87 bp, Homo sapiens
ccttcctctcgctgtcctggtacgcggcactcagcggccagaaagctgtgagccgtgagctttgaggcggtgggatgtgtcagcaga

SEQ ID NO: 414513 - DNA, 49 bp, Homo sapiens
cttgaaccaggtcatgctccaaatgcatttgacattatcacagactgac

SEQ ID NO: 414514 - DNA, 100 bp, Homo sapiens
cgcaccgactggaccgggaaggagcatcccaggacctaccagaatctgtacaagttgtgcaaagtgaggaagattactgtgggagtgaagggaatccctc

SEQ ID NO: 414515 - DNA, 101 bp, Homo sapiens
ccgggacccggtgtctgctcctgtcgccttcgcctcctaatccctagccactatggctgaccccgcactacatctacccaccagccatcgtgcagcccagc

SEQ ID NO: 414516 - DNA, 100 bp, Homo sapiens
ccaccgtgcaggagaaggctgctgcgctgaacctctcggctctccacagccccgcgcacaggcctccgggtaagaatgattgatgttggctgatattgga

SEQ ID NO: 414517 - DNA, 83 bp, Homo sapiens
aaggacatcaacttccggccgcagatgtcccaggtgagaagccctaccactgcaactgggacggctgcggctggaagtttgcg

SEQ ID NO: 414518 - DNA, 88 bp, Homo sapiens
ctgggctggaggcggcggagcgcgagagcttcgagcggactcaggctgattcaccccaagagtggccgttcctaccacgaggagttca

SEQ ID NO: 414519 - DNA, 87 bp, Homo sapiens
tcagcctcatgagtagctgggactacagatatggccgcgtggaaagtgtcaaaattcttcccaagaggggatctgaaggaggagtgg

SEQ ID NO: 414520 - DNA, 75 bp, Homo sapiens
atttacagagcaacttgatgaaggtacacccaatagagagcttggtgtaaaaattgccaaagcagttgcctgcca

SEQ ID NO: 414521 - DNA, 95 bp, Homo sapiens
gctacctgcaagctctatttttaccagatgctcttggctgtgcaggccataggaaaaggatacagagtagagtttcatgaacctgaaacttggtg

SEQ ID NO: 414522 - DNA, 90 bp, Homo sapiens
acagactgtggtgcctacccccatcactgcttccctcagccataacaggttatttcttatgagggtcatggatatcccctatctaaactt

SEQ ID NO: 414523 - DNA, 100 bp, Homo sapiens
gcggagccggaggaagctgatggtcatcttttccaagtggccatggctaccgggcaggtgttgttccagcggttcttttataccaagtccttcgtgaagc

SEQ ID NO: 414524 - DNA, 101 bp, Homo sapiens
cgagagatggtcaggtctggagctcgaccgggccaggagtccaggcatgataaagaaaagatagaaaagaaagagaaacgggacagttcaggaggaaagga

SEQ ID NO: 414525 - DNA, 75 bp, Homo sapiens
tgactactctcacacggttaaatatacacccacccaacaggaggtatatcgaattccaaagaaaagtcaaactga

SEQ ID NO: 414526 - DNA, 128 bp, Homo sapiens
ggttggcccagctccttggggtttccggctgcagggcggtaaggatttcaacatgcctctgacaatctctagtaataactgaagtgaagtgatggactccgatttggagagtagtaagacgtgaaagg

SEQ ID NO: 414527 - DNA, 93 bp, Homo sapiens
cccgcttctcgtagtcctgggagcacagcagaagtgagccttcacgtaaatgggtccagtcatgcctcccagtaagaagccagaaagctcagg

SEQ ID NO: 414528 - DNA, 82 bp, Homo sapiens
ctgctctccaggaacctacggtcccgactgtctcgggtgtcgtagtcattcttcagcacaattcttaattggagaccaagaa

SEQ ID NO: 414529 - DNA, 87 bp, Homo sapiens
cctgctgagtggacccgggtggcctctgaaaaatggaaccaaattctctgaggactaaagtcccagctttcttatctgatttgggga

SEQ ID NO: 414530 - DNA, 97 bp, Homo sapiens
caacctcgtcagcagcgaggaaggaaacagcggcgcagttgtgtagcagttgagtaatgctggttagctgttaaggtggcgtgttgcagtgcagagt

SEQ ID NO: 414531 - DNA, 100 bp, Homo sapiens
tgacaaattatgctgcagcatattgtactggcctgctgctggcccgcagggaaattggccttgcctctctgggtgcacctgatgaatacattgaaaagct

SEQ ID NO: 414532 - DNA, 75 bp, Homo sapiens
gctgggtgcagatgcagtgtggctctggatagcaccttatggacagtgttctaagaacggaagcatctgggctgg

SEQ ID NO: 414533 - DNA, 90 bp, Homo sapiens
gtttgtactatcctcggtgctgtggtgcagagctagttcctctccagctcagccgcgtaggccgaatacatcaagcaatggtaacatctt

SEQ ID NO: 414534 - DNA, 82 bp, Homo sapiens
cacgcattctagactcccgaagagcaaattgtggctactaatttgccccctgaagatcaagatggctctggggatgactctg

SEQ ID NO: 414535 - DNA, 83 bp, Homo sapiens
cccgcggccgcggttcggacccgccggcgacatggccagctccggagagaccccccagttcccttcaggatgatggaggatgc

SEQ ID NO: 414536 - DNA, 50 bp, Homo sapiens
cgggagctgggcggccatttaccaggtgctggggagtcagggaagagcac

SEQ ID NO: 414537 - DNA, 100 bp, Homo sapiens
gcagcgggatccaaactcccctctgtactcggtgaagtcttttgaagagcttcggcttaaacatatagatggtagtctggctctgtcctcaccaatattt

SEQ ID NO: 414538 - DNA, 83 bp, Homo sapiens
gtcggagaagaccttcaagcagcgccgcaccttcggtttggtgcacctcgatttggaggaagtagggcagggcccttatctgg

SEQ ID NO: 414539 - DNA, 75 bp, Homo sapiens
cagcattgagaaaattgtagagattgatgctcacataggttctgccattacaggaccagtagcaaaggagtgtgc

SEQ ID NO: 414540 - DNA, 50 bp, Homo sapiens
cctcgcgcgtgaggatctatctcagctgtgtaaatgagtatggaagatta

SEQ ID NO: 414541 - DNA, 97 bp, Homo sapiens
ggccacatcaactcggcgccttgggaaccgctcgagcctaccagaaattgcaggtgctgcagtgtctgaaatttccgggcctttctcaacagaggat

SEQ ID NO: 414542 - DNA, 74 bp, Homo sapiens
ggcggcctctcaagtccagcttgggccccagtgcagagagcccacggccatccagtgcctacaatggggacctc

SEQ ID NO: 414543 - DNA, 100 bp, Homo sapiens
gagaggagcggccggagtcagcgatggtgcccggcgaggagaaccaactggtcccgaaagaggtgttaaaatcatcacacaacaggttcaaccaagtaaa

SEQ ID NO: 414544 - DNA, 85 bp, Homo sapiens
gccatctttagttcgtctttcctagagagatggtcatccagactcagagctctctctacagagaggaaattctccactgtgcaca

SEQ ID NO: 414545 - DNA, 97 bp, Homo sapiens
ggctatgtggtcactccacacaccatgaatctactaaagcagcacctggagattactggtgggcaggattactacagcatcccatttcccacaccca

SEQ ID NO: 414546 - DNA, 100 bp, Homo sapiens
agagacccctggatctgagcaatggaaatttcaggaattaagtcaaccacgttctcataccagcctgaagtggtatgtgtgcaacagagagaaattatgc

SEQ ID NO: 414547 - DNA, 98 bp, Homo sapiens
ttgcacattattatggagcatcattaatgagacattccataagtggaccaatctcaacatccaaacccctgacagccctgtcagataagagaccaaac

SEQ ID NO: 414548 - DNA, 90 bp, Homo sapiens
ttcgcagtggtcgcttcttctccttgggcgagagatggtggggcccacgctgcccggatacccaccccacatccccaccagcggacaggg

SEQ ID NO: 414549 - DNA, 90 bp, Homo sapiens
acgatctgcacttcgcattttggcattgacatttaattttagggtcctttatatagaagggagagtagaacctgtctgagaaactctctg

SEQ ID NO: 414550 - DNA, 95 bp, Homo sapiens
ccccgcctccctgagccacatgcagctccaccacctcgaccccaagactttcaagtgcagagccatagacacctggatttcattagcatcatgac

SEQ ID NO: 414551 - DNA, 83 bp, Homo sapiens
ttgtcaagatcagcaacactatttctgagtactgggatttaatgaatttgtctgaaaaacatgataagataccagaaatctgg

SEQ ID NO: 414552 - DNA, 101 bp, Homo sapiens
acactccaggagttggtggtgaccccgcccagttggcccagaggatctcttctaacatccagaagatcacacagtgttgctggccagctaaactatgtgga

SEQ ID NO: 414553 - DNA, 100 bp, Homo sapiens
ggatctgaagaaatacttggattctatccctcctggtcagtacatggattcttcacttgttaaggcccaaggatgtgaccttctcttggattttcctgat

SEQ ID NO: 414554 - DNA, 81 bp, Homo sapiens
gaggaggcgccggaccggggggaattgtgagaagctggagaataattttgatgacatcaagcacacgactcttggtgagcg

SEQ ID NO: 414555 - DNA, 82 bp, Homo sapiens
gaccaagagggtgttcgactgctagagccgagcgaagcgttgagaacttgttgcttagtaaccaagggaccattaagctgtg

SEQ ID NO: 414556 - DNA, 82 bp, Homo sapiens
tccttgcatgtctcttcatggaggcattttttactgtctacagaaacttattgtaattcatttttcctcactccagtagtaa

SEQ ID NO: 414557 - DNA, 83 bp, Homo sapiens
gtggatctcccaaagaaacacggcagccaatcctttctttaagttgttgactatgctaatggagtttgctggtggacctccag

SEQ ID NO: 414558 - DNA, 75 bp, Homo sapiens
agcagaacgtgagggtgtaacttacaaaaagttacacagaatataagttgctgatttcccaggtttcggatcgtt

SEQ ID NO: 414559 - DNA, 75 bp, Homo sapiens
gagactttcacaataagagcagaggatggaacacttcagtgcattcaagacaagttggatggcttgaggactggt

SEQ ID NO: 414560 - DNA, 100 bp, Homo sapiens
ccggaggacgccgtgcagcacgatcaaccacctcagaagagccagattccacttctgtggccaggacttttacattatggctggtccgattgttttaccc

SEQ ID NO: 414561 - DNA, 83 bp, Homo sapiens
cccgtgacctgaaggctgtcaagtatgtggagtgttctgcacttacacagacaatgcagatcttcgtgaagactctgactggt

SEQ ID NO: 414562 - DNA, 74 bp, Homo sapiens
gaacgggacagggcagttcttgcacgtttctggtgaaccaggctgttaagtgcaccagaaaaataaatttagaa

SEQ ID NO: 414563 - DNA, 98 bp, Homo sapiens
cctctgcccaaagaaagaaggaggtgaattgggacgaagaaaaggaatgttttgaaagcctcagtaaagaatgcgctatgttctattccatccggaag

SEQ ID NO: 414564 - DNA, 74 bp, Homo sapiens
ggccgctctgcgggactctgaggaaaagctcgcaccaggtggaccccaagttcctgaggaacatgcgctttgcc

SEQ ID NO: 414565 - DNA, 75 bp, Homo sapiens
aaagacatagttcctggtgatattgtagaaattgctgctgatgttctaatcatgtcagataaagatgatattgag

SEQ ID NO: 414566 - DNA, 96 bp, Homo sapiens
gccagatggctctgcttccttcctgcaagtggtaagcatccgtggcattcaagacgaagatccccctgacgcccagctcctgaggctggataacat

SEQ ID NO: 414567 - DNA, 96 bp, Homo sapiens
tgccctggtcttgctcggccgatgaagtgcagaggtttttttctgagaattttctctacatgtgcacccatttaaaggactcggcttcaagggaag

SEQ ID NO: 414568 - DNA, 82 bp, Homo sapiens
ctctcaccgcgcatgtttggagcctggagcattggtaagcgtcacactgccaaagtgagagctgctggagaactcataatcc

SEQ ID NO: 414569 - DNA, 100 bp, Homo sapiens
gagggaattccggtcagggtcaagtcgtgttctgatcactactgacttgttgatgcaaacgacgctcatcaaacagagacctcctcctcccaagtcaagg

SEQ ID NO: 414570 - DNA, 101 bp, Homo sapiens
agcgcagaaaactcctccagcagatccggcttgcccagaaagagaagacagccatggaagaaacgctaatggactccactacagcgactgctgagctgggc

SEQ ID NO: 414571 - DNA, 100 bp, Homo sapiens
tccgtcgctcggagggtggaagccggggtctcgcgggccgcgggccgcatgattggtgctgaagacatggacggcttccaggcagacacggaggaggagg

SEQ ID NO: 414572 - DNA, 87 bp, Homo sapiens
gggaccttgtggatgatatcttcactgtcacagaggatgaaattaagattcttagatatggcagaggtattgcccccatctggattt

SEQ ID NO: 414573 - DNA, 101 bp, Homo sapiens
tcctgttggaaaaggcaatcactagggaagcacagatgtggaaagtgaatgtgcggaaaatgccttcaaatcagcttcacgagaagtttgaccttctaaag

SEQ ID NO: 414574 - DNA, 82 bp, Homo sapiens
agaacgtggtcctgtatattattgaggatattagaaatggctactccccagtcaattttcatctttgcaatctgcattttaa

SEQ ID NO: 414575 - DNA, 82 bp, Homo sapiens
ttccttctcacttggcctatggaaaacggggatttccaccatctgtcccagccatggattgcaaagatagaccagcttttcc

SEQ ID NO: 414576 - DNA, 96 bp, Homo sapiens
gctgaataaagctgttttggaactgtcaggtacctcaaagcgtaagaaggtgggagtcaatcattttgacaagtctcctgaaaggaacagctagca

SEQ ID NO: 414577 - DNA, 74 bp, Homo sapiens
tcggcccgggccgctcaggtgcaggtgaaaggaaagcaagccaggatggatatttacgacactcaaaccttggg

SEQ ID NO: 414578 - DNA, 88 bp, Homo sapiens
aatggaagaacaaaatctggcctgaaataaaagttaagatccttctattctacgtaatattttatggctgcctggctggcatcttcat

SEQ ID NO: 414579 - DNA, 82 bp, Homo sapiens
gtacttggacctgaaccttgctccgagagggagtcctcgcggacgtcagccaagtggccataaaatgcagtaaaaacaaatc

SEQ ID NO: 414580 - DNA, 90 bp, Homo sapiens
gggccacatcctcatcaagttcgtcccctgtcctgccatctgctctgaggctttctcgcttgtctctcaagagctggcggtcaccatggc

SEQ ID NO: 414581 - DNA, 101 bp, Homo sapiens
gcgtgcaggagggtcgtggtctggctgtggcggaggagcataagaagggacaccatgtggcggatctttactggatcgctgctggtagaggagaagtcaag

SEQ ID NO: 414582 - DNA, 75 bp, Homo sapiens
cagaagaggaactattggacagagaatttgaccttctaagatcaattactccacaggatccgctgaacataggat

SEQ ID NO: 414583 - DNA, 100 bp, Homo sapiens
atcaggtgatggataggagcaaccctgtaaaaccagccttagactatttttcaaacatatcaccttttgccatgatagcatttctttcattggacagttc

SEQ ID NO: 414584 - DNA, 75 bp, Homo sapiens
gagaggacagaggtgcctggggcaacctccaccttgacggttccagtttgattcatccagattcctcaaatactc

SEQ ID NO: 414585 - DNA, 121 bp, Homo sapiens
caaatctgtctgcactccaattctaccaggatggctctcttcgctggtggcaaactggtggcctccatgaaccagcgccgtgtggatttctaccttgcctccatcgaagacatgctggtgg

SEQ ID NO: 414586 - DNA, 100 bp, Homo sapiens
aggtttccaggatcaaaactaacctttcaggaattcaactgaaaaaggtgcaggagcagcgggagcaggaggccaagcgggagccagtggggaatgacgt

SEQ ID NO: 414587 - DNA, 100 bp, Homo sapiens
gcttcaggctctcagggggcatagacttcaaccagcctttggtcatcaccaggggatgcaagacttcaattaccttagcagcaactgttttgagatcacc

SEQ ID NO: 414588 - DNA, 100 bp, Homo sapiens
ccagagccccgcgtttcagccctagggaaggaactgtggctgcaccatctgtcttcatcttcccgccatctgatgagcagttgaaatctggaactgcctc

SEQ ID NO: 414589 - DNA, 82 bp, Homo sapiens
agctgtgctcgcgctactctctctttctggcctggaggctatccagcgccatgaagtacttgtcatacctgctgtaccctct

SEQ ID NO: 414590 - DNA, 100 bp, Homo sapiens
gtaatttaggacgtggaatcataagcgaaacagcacactgtttgaataaagagcgaaactgactttacagtgtacatttatcagaaatgtaaaacatgac

SEQ ID NO: 414591 - DNA, 75 bp, Homo sapiens
agtctcttaccttgtgtttgatgaagcagatcgaatgtttgacatgggatttggagtggaggcagcacagacagt

SEQ ID NO: 414592 - DNA, 100 bp, Homo sapiens
ctgtaatgttaagacatgtacctgaacatgattggttcgagtgagtaaaaactaccgatcagtcatcagagcatgtatggaggaaatgcaccaggttgca

SEQ ID NO: 414593 - DNA, 75 bp, Homo sapiens
ctgagaatctgggacctcaacaggtttcagactgaaattcaaacagtgaataaacagttcccatgtgagccattc

SEQ ID NO: 414594 - DNA, 100 bp, Homo sapiens
cggagcctggcgggcgtgggaacccaggccccgccgaggcggccagggcttcagtttccacctggctgcggtcctgctgtccctggcttttatcacttac

SEQ ID NO: 414595 - DNA, 82 bp, Homo sapiens
acggctccccgtcgtcctggtgctgcagcgcattttgaaagcgaagcagaagccgtagaatcagcggcgagcctgttgaaag

SEQ ID NO: 414596 - DNA, 73 bp, Homo sapiens
tctagtctccctcagctgttgagcagggtgataaaagaaaatgtggctgaagttacccgaagttcagcttgca

SEQ ID NO: 414597 - DNA, 74 bp, Homo sapiens
tgcctacagaaccgtcccaaaatatggcaaagaaacctattctgaggatggtggccgatcctgataaccctttg

SEQ ID NO: 414598 - DNA, 100 bp, Homo sapiens
cctgccttgttcccggtcttaggggggtggatatcatccagtgaaaattggagacctcttcaatggccggtatcatgttattagaaagcttggatggggg

SEQ ID NO: 414599 - DNA, 100 bp, Homo sapiens
ccccggcaccgccgcgcgccacccgctaggatgccggtggccccagcgccctcagccgacggagtcaaaccggcacgatgtccaggcaccagaaccagaa

SEQ ID NO: 414600 - DNA, 88 bp, Homo sapiens
aagcccgctgccttgtggaggagttgagaaaaaccaatgggaattgacataggggatagcttaactattccagatgaattcacggaag

SEQ ID NO: 414601 - DNA, 98 bp, Homo sapiens
gcggcggcggcggcggctgcggcccaatatagactcattgcttccagctgttcgtggaccaatactagatgccagcaatagagaaatcactgcagttc

SEQ ID NO: 414602 - DNA, 90 bp, Homo sapiens
agagcatctggagctaattgtgaaaaatagtgcaacctacaatgggccaccactgtacgttacaaagggcggaacctgcggatcaaagcg

SEQ ID NO: 414603 - DNA, 75 bp, Homo sapiens
gaagcctgtgcccaagctcatcgagaagtgctggaccgaggacgaagtgcactgccagtgaaagatgtagaagat

SEQ ID NO: 414604 - DNA, 75 bp, Homo sapiens
gtccttaaaaccgaagaggaggacgggagtgcatccgccccaacccttttccccctcgtctcctgtgagaattcc

SEQ ID NO: 414605 - DNA, 100 bp, Homo sapiens
ggcaatgaaacagcccaacaggaaaaggaagcttaatatggattccaaagagcgtttggatcaggacggacgcttgggtacaggcatccttcacctgcta

SEQ ID NO: 414606 - DNA, 99 bp, Homo sapiens
attacctggaacttcatcatcatctacttcacaggaattgccatttgcctggcgtttccttgaccatgcaggcattttccgaagaggaaaggaagcagt

SEQ ID NO: 414607 - DNA, 88 bp, Homo sapiens
cggtagcgaaggccgccgaacctgcctggctagccggcgacttgagtgacgaattggtttatcttggaagctaaagggcattgctcat

SEQ ID NO: 414608 - DNA, 100 bp, Homo sapiens
gctccctcggtcgcgagtatctccgtttcctggatgtgaacgtctctaaggacatctccatgcggctgcataaggagctcgaggtggtggagaagaaacg

SEQ ID NO: 414609 - DNA, 123 bp, Homo sapiens
gtggaggcaggctgcggcagacggcgacagtggcggcggcgccatggcagggcttgcaggttatgaagacagtatggagtttccagaccatagtagacatttgctacagtgtctgagcgagca

SEQ ID NO: 414610 - DNA, 51 bp, Homo sapiens
caccgcgttctcgcacgcgtcatgatcccaagacaaaagcgtggttgaagg

SEQ ID NO: 414611 - DNA, 90 bp, Homo sapiens
ttcacggtcatgaactatgacccggatgtggtgctgaagcaggtactgggcctaatcgctacgtgcctctttggctatgatgcctatgtc

SEQ ID NO: 414612 - DNA, 75 bp, Homo sapiens
caggtgttactcggggtgcgccagtggaagcgggaggcagttgcagctttcaggcgggagcatccaatcaacttc

SEQ ID NO: 414613 - DNA, 96 bp, Homo sapiens
aatcaagctaagcgcctactagagcagggtttggagactcaggttacaaatgctgctgccaactgtcctggccaaatgactctgcatcacaaacct

SEQ ID NO: 414614 - DNA, 100 bp, Homo sapiens
gtagtgagtctctacttttatggaatcctgcaaagtgatgcctcaggtgagaattatgaagatgatgacctagtaaattctgatgaggttatgaagaaac

SEQ ID NO: 414615 - DNA, 80 bp, Homo sapiens
gggtggcgcccaggacgactccccgggctcagcttggctgcctgcctccttctatgcagctgactttgcctgtagcctca

SEQ ID NO: 414616 - DNA, 98 bp, Homo sapiens
taccagtaaataccatcttgtacgagcaatattggagtcaatagctttcaggcgattgtggaaaaatgtgacagactcgctgagagaatctgaaattg

SEQ ID NO: 414617 - DNA, 100 bp, Homo sapiens
aagaagcgcaagtcgcccttcgccgcggccgtggggcaggagaagcccgtgtttgaacccggtctgatgctacaggacttggtttcagctaagctgattt

SEQ ID NO: 414618 - DNA, 100 bp, Homo sapiens
gacatcttcaaggaccccaaggtgctccagtcctactattatgccgtgtccgacttctctgtgggcggcagatttccacaagacggcaccctatgtcgtc

SEQ ID NO: 414619 - DNA, 90 bp, Homo sapiens
gccccagagctcaatgggggaccacagcatgcacttccttccagcagctacacaggaaacagatattgatgacagatatggagatttgga

SEQ ID NO: 414620 - DNA, 75 bp, Homo sapiens
ggacatttctgaagcgagcgtcttcgatggccctcctccagagttctgcaagtcgaaaaacccagaaaaagaaaa

SEQ ID NO: 414621 - DNA, 101 bp, Homo sapiens
gggccgttacgtgtgcgttcagctgctgcagaccttgaacatcctctttgagaacatcagtcacgagacctcactttgtgagccctattcccagaggcagg

SEQ ID NO: 414622 - DNA, 96 bp, Homo sapiens
catgaatggagcaaaatggcggatcatgtgcagcactattcctgatcagagaactccagttgcttcaacacacagtatcagtagtgcagccacccc

SEQ ID NO: 414623 - DNA, 100 bp, Homo sapiens
ttgttaatctacaaagatgcaccagcattcaatgaaaaggccatcagcatcagcaaagccatcaacacccaggaggcccccgtgaaggagaagcacgccc

SEQ ID NO: 414624 - DNA, 117 bp, Homo sapiens
aggtctcgcggtttccccgccgcccacccggacgccgacgaaagccagcgagctcctcagcctcagacaatgcagatcttcgtgaagactctgactggtaagaccatcaccctcgag

SEQ ID NO: 414625 - DNA, 100 bp, Homo sapiens
cagagaccggttcaaggtctctaagaaggtgcccaagatcccactccatgtcaggtttccaatacttatctacaggaatcgccatgaccccagctctgag

SEQ ID NO: 414626 - DNA, 75 bp, Homo sapiens
ctcctcggagtccttggggacggagcagcgcgtcgtggggcgagcggcagtttatcgatggtcgactggcaaaac

SEQ ID NO: 414627 - DNA, 100 bp, Homo sapiens
catgccccggcagctcagcgcggcggccgcgctcttcgcgtccctggccggacctgctgaagctcacacccgtggaccacccagactgcctgccgctaca

SEQ ID NO: 414628 - DNA, 110 bp, Homo sapiens
gtttctggccacgtgcttcaacgctctgctgcccgctgtgagggaaaagacttaattcagtgcacaaatgagatgaatgtgaacatcccacagttggcagacagtttatt

SEQ ID NO: 414629 - DNA, 75 bp, Homo sapiens
aatggggaggacaacttcgcccgggacttcatggtttagatcctgataagcatcttgggaaaaccctggatcaaa

SEQ ID NO: 414630 - DNA, 83 bp, Homo sapiens
gggacgcggagcccggagctggggcgacgaggcgattgcgggggcctgggctagctggcaaacgcccttctggaaaaggaagt

SEQ ID NO: 414631 - DNA, 100 bp, Homo sapiens
tcggacacctacgacccctacttggacgtcgcgctggagatccgggttataagcacatgtccttggccctgaataggactggcagaagcattgtgtactc

SEQ ID NO: 414632 - DNA, 76 bp, Homo sapiens
ttaattgctatcaatgcgaatgatcctgaagcctcaaagtttcatggacattcatcttcaaagaaatctgaagatt

SEQ ID NO: 414633 - DNA, 96 bp, Homo sapiens
cagctcgcccagcgtccgccgcgcctcggccaagcctctgaagagccaatccattcaggatgggaaaccacgcaggcaaacgagaattaaatgccg

SEQ ID NO: 414634 - DNA, 83 bp, Homo sapiens
gggaatcgcaaggctcttccctgaccattttctactgtccctgcgcgagtaacatatcagcagacgacatgctgtataccgag

SEQ ID NO: 414635 - DNA, 56 bp, Homo sapiens
cagtgaccgaaggctccgctcacgcccggcagagaatgtggatttaaatgggataa

SEQ ID NO: 414636 - DNA, 82 bp, Homo sapiens
ccagaccctggagcctcagttggaagcagccgatccagcctgcggagcctgtggggcagatgaacacaatgacgtacagaag

SEQ ID NO: 414637 - DNA, 75 bp, Homo sapiens
ccatggcctgctcagcctcagcgtattctgacaagtccctgtacacccagctgtgcttttaccggtacatttttg

SEQ ID NO: 414638 - DNA, 74 bp, Homo sapiens
tttatatcctgacactatgaatgctacttggatgcctcttaaggtggagccgccaccaaaatgcagattttcgt

SEQ ID NO: 414639 - DNA, 100 bp, Homo sapiens
ccaactcagaggacgaggcctccttcaagtccgaggtggaatccgcaggctggaggctcccaggggaggcaaacgcctggccctgccctgccccacgccg

SEQ ID NO: 414640 - DNA, 51 bp, Homo sapiens
aaaaaggatacttgaaaaccctcagacccggagtggcgttggatggaagcg

SEQ ID NO: 414641 - DNA, 82 bp, Homo sapiens
cgaggttcgagtgttgcagagcctgcggggcaagatctgtcaaaatgcagatcttcgtgaaaacccttaccggcaagaccat

SEQ ID NO: 414642 - DNA, 100 bp, Homo sapiens
ttactggagcgaggaaaagagccctggatgattttgagggaagaaacacagttcacagctctacattaatcatactcctccaccactgtccaagagtaag

SEQ ID NO: 414643 - DNA, 135 bp, Homo sapiens
tcccggacggcagccacagcgtccgactcgactcggagggtttctgtgagagacaaattgcttgttaaaggctagcatcccattctctgtggttggatccaatcagttgattgaagccaaaggaaagaaggtcag

SEQ ID NO: 414644 - DNA, 98 bp, Homo sapiens
tcggacgtggtcctcgtccgcttcggcctgtccatcgctcagctcattgacgtggctcttgtcaggatggtgaagctgttcatcggaaacctgccccg

SEQ ID NO: 414645 - DNA, 83 bp, Homo sapiens
ggagaggtttgttccctgacaactttgtaagagtgaaatgacaatggatgctctgttggctcgattgaaacttctgaatccag

SEQ ID NO: 414646 - DNA, 88 bp, Homo sapiens
ataacccctccagcggcaaagccaggctctccccaggttttaaaatcaaagatgggaaaatcggagaaaattgcccttccccatggcc

SEQ ID NO: 414647 - DNA, 90 bp, Homo sapiens
cgcgcttcgaagccgagaaagcccgctgggaggccgagcgcgccgagttacagttacatcttccggcccagctgtactcgcctggggcag

SEQ ID NO: 414648 - DNA, 98 bp, Homo sapiens
cgtgggctgggacgcccctaccttggtctttcaggggtgaggtggctttgaccccgggttgcccggccagcacgaccgaggaggtggctggacagctg

SEQ ID NO: 414649 - DNA, 75 bp, Homo sapiens
ttcttccagcttctgctgtccttctttgtggagagcaagtttcaggaaaatgccagtgaagggaaggcccctgca

SEQ ID NO: 414650 - DNA, 87 bp, Homo sapiens
gaccaactgactgaagagcagattgcaggtcttccccagggaggtcctgaactacacagctgagaacatctgtaagtgggccttaga

SEQ ID NO: 414651 - DNA, 75 bp, Homo sapiens
ctttctgacaatgcagcttctcttgcagtgcaggtggagcagttctggaggttttatagccacatggtacgtcct

SEQ ID NO: 414652 - DNA, 83 bp, Homo sapiens
ccctcaacaaacaccagcgctttggtgtggacgaatgtggaacctcgctctgtggctgtgttcccttggcactccttagtccc

SEQ ID NO: 414653 - DNA, 90 bp, Homo sapiens
caggaggcccccgtgaaggagaagcacgcccggcattccagcacaagaaccctgaagatcctactgaggtgcctggtggatttttaagtg

SEQ ID NO: 414654 - DNA, 82 bp, Homo sapiens
tccacattgagagcaaaatctacaagatgatgcagggaggagagaaaagatatttcagtgagttgaaaggaaatgtgtttcg

SEQ ID NO: 414655 - DNA, 78 bp, Homo sapiens
ggcccaagtccttggctgctgagtggtgacagtagcccagcccgccggccaggacctatatccagactttgcctgaca

SEQ ID NO: 414656 - DNA, 100 bp, Homo sapiens
gcagaatcgaatgcaaccttctttaatataagtgctgcaagtttaacttcaaaatacttccaagatgagatgggattctccaacatggaagatgatggcc

SEQ ID NO: 414657 - DNA, 74 bp, Homo sapiens
aattttgctactgtcagatggattgactatggaaaagttgccaaattggaatatcagaagctctttcctgacat

SEQ ID NO: 414658 - DNA, 97 bp, Homo sapiens
gaggctgttcccacccccaggctccgcgttcccgccggccccagctccagccccgcagcccaccgcggggatctgatgagcttctttcttctggcat

SEQ ID NO: 414659 - DNA, 98 bp, Homo sapiens
cgcgacgtcgtgtcgagttcccaaaaagctccgcaggggctgtagggagatgccttcaattaagttgcagagttctgatggagagatatttgaagttg

SEQ ID NO: 414660 - DNA, 90 bp, Homo sapiens
ggggaatttccttgtgcctccattcccgggaggggggagcggcgttggaggccaccgtttccaggcaggtcccttatgatgaaatctctg

SEQ ID NO: 414661 - DNA, 83 bp, Homo sapiens
cttgcagaaatcacattggaccctcctcccaactgtagactgcctctttaagctatgtcccatgaaccgctactctgcccaaa

SEQ ID NO: 414662 - DNA, 82 bp, Homo sapiens
tcctccaaatccaaagaacttagccttactgtgtcagggaaaagggaggcaaggtcctggtccactgtgaggctgggatctc

SEQ ID NO: 414663 - DNA, 89 bp, Homo sapiens
ctgctctgacgtgctgaagaaatttgtgtggagcgaggaaaggtgtgctgtgcctgaggccaggtccaggtgcaggtacagcagtctcc

SEQ ID NO: 414664 - DNA, 75 bp, Homo sapiens
cggcggtacccgggtggttaaacttcgcaaaatggtattttacatggagctggactttctcagcttcccaaacag

SEQ ID NO: 414665 - DNA, 50 bp, Homo sapiens
tacgcttgtgtgataaaactgggattactcttgtctctgctgctcctggg

SEQ ID NO: 414666 - DNA, 83 bp, Homo sapiens
cgttggtcctgtgcggtcacttagccaagatcccaccaaatattttggttgtgagctgggagcacagacccagtttgatgtta

SEQ ID NO: 414667 - DNA, 88 bp, Homo sapiens
gcaggggggatatccacagttcgatcaagctggtctcttgtggctcagcgccgtgcggaggttgaagcgtacctgcggaggtcgcacc

SEQ ID NO: 414668 - DNA, 98 bp, Homo sapiens
tcctgccgcctcccgggagtgccgtgcgccgcagcccgggcccaggccccggcagcgcctgggacaagatccagtttgctgaccagaagcaagaattc

SEQ ID NO: 414669 - DNA, 75 bp, Homo sapiens
tcatcattaaggacggaggcacggatgaacgtgaagccagagaaaatgtgaagagagagcaagatgaggcctatc

SEQ ID NO: 414670 - DNA, 76 bp, Homo sapiens
aaaaagccgaaataccctcccaacaaaggttgaggcctctggtgtctacgcagccagcaaagaaggtggccacggg

SEQ ID NO: 414671 - DNA, 139 bp, Homo sapiens
ggacataccactatatcagataagcttgacattacagccaagatggtgctgtcccagagacaacgagatgaactgggtgagcccctccagactccgaataggagatcaagagtttgattcattgcctgctttactggaa

SEQ ID NO: 414672 - DNA, 53 bp, Homo sapiens
gaccccctggagctggtggtgacaggagcctacagcaaacccaccctctcagc

SEQ ID NO: 414673 - DNA, 75 bp, Homo sapiens
ctgacagaagaggtgctctgaaggcacagacttggaagcaccagattccacctgctcctacgaagcccgactttg

SEQ ID NO: 414674 - DNA, 73 bp, Homo sapiens
gatattttcaacaaaggatttgactcctcagacccctgcacaattgagagaaaagcccgaagaattagcgtga

SEQ ID NO: 414675 - DNA, 98 bp, Homo sapiens
ctttcctccgcttcagaaggtttttcagactgagagcctaagcatactggggaatgacagaggaagaggaagacaaacttctggcactgaaagacttc

SEQ ID NO: 414676 - DNA, 114 bp, Homo sapiens
atttttatggacaacgaccacaggaatctggaattttattaaacatggtatttgatgagagggcagctaactttgaaaaccattcaggaaagcttggtgctacggccgagaagg

SEQ ID NO: 414677 - DNA, 96 bp, Homo sapiens
gccatcctcactcaggactccctgcagatgttcctgccccaggtacctgaaagaattccgcacagagcagtgcccactctttgtgcaacacaaatg

SEQ ID NO: 414678 - DNA, 51 bp, Homo sapiens
caccgattctactttgaaaatggtgtgaacataggtgaagtcctagataaa

SEQ ID NO: 414679 - DNA, 73 bp, Homo sapiens
accatcttcccctgcaaggagtgtggcaaagtctccaaaaagcctagggaaatgaaaggaaagaaaagcaaaa

SEQ ID NO: 414680 - DNA, 98 bp, Homo sapiens
tttgtcctcatccctgacctcaagtggaaccaacagcaggctggaagctcctggccatgttggctctggtcctggtcgtcatggtgtggtattccatc

SEQ ID NO: 414681 - DNA, 76 bp, Homo sapiens
cagaactgtcctttcctggctggggatgggcaggcaggaaggcagactggtgagccccagcttacagctgcactgc

SEQ ID NO: 414682 - DNA, 100 bp, Homo sapiens
caccgggatggagaaggaggaggaatcgaaacaagtgttgaaaatgttaaaggctgtgctgaagaagagccgagagggaggaaagggaggcaagaaggaa

SEQ ID NO: 414683 - DNA, 74 bp, Homo sapiens
tctgcagtgaaaagaaattgcgtggttgtatcagagtaagatggacggtagctttgattgtgattgtggtgagc

SEQ ID NO: 414684 - DNA, 75 bp, Homo sapiens
cggcaaaaaaataaaaaaaaagccaaaaagataaaagcccggatgaacttcagctgtgatgcagatccatccgcc

SEQ ID NO: 414685 - DNA, 83 bp, Homo sapiens
ggaattgctactgctgcctctgtcactcctggtgaccagcattcaagaagccgggagcatcctgatctgccgctgtggtgcca

SEQ ID NO: 414686 - DNA, 74 bp, Homo sapiens
gaaggacaaggaattacataacatcaaacgtggtactatactggcaattgctggagaagattttgcaattgttg

SEQ ID NO: 414687 - DNA, 100 bp, Homo sapiens
tattggcattcccattgctgtgcctacaccttcgccacccactattggaccagcccaggagttctgtttccgaagaaagagccagatgattctagagatg

SEQ ID NO: 414688 - DNA, 88 bp, Homo sapiens
catgaagattcaataacagttgcatttgaaaacaatcttatgatgtaatcagcgcgatttcacttcctgaatttcgatgaattctaag

SEQ ID NO: 414689 - DNA, 82 bp, Homo sapiens
gatgtaattaatcaaacttggacagctctctatggagcgtgaggatcatccccggagaggacgggaggatcggcagcacagg

SEQ ID NO: 414690 - DNA, 87 bp, Homo sapiens
caactctccattctaataacatctccattctccaggaactgtacgaaaggtggcaaatggtaggatccaaagccttgaggccaccat

SEQ ID NO: 414691 - DNA, 82 bp, Homo sapiens
gctgttcctgctgctgcctatcttgagttctgcaaaagctcaggttaatccaggcttaccttacaaatttgaagtacagcag

SEQ ID NO: 414692 - DNA, 82 bp, Homo sapiens
tggaaattgccttattggaaaaacatttcttaccaacagccaactcagtttataaatccagaaacacctggctatgttggat

SEQ ID NO: 414693 - DNA, 100 bp, Homo sapiens
aagagacccggtttctaatccctgctctgtcactaacaagctgcgtgatcttcgaatcaggaaacccaggcccaacggcaggtggatgcaagaagaaatg

SEQ ID NO: 414694 - DNA, 90 bp, Homo sapiens
agaagcgggcggcgcgggggagatgataggaaccaaggctttagccttctcaactcattgactggaacaaaccatagcattgggtcagca

SEQ ID NO: 414695 - DNA, 75 bp, Homo sapiens
gtggccagtgttaaccccagaatcaccagggcaagtgtccagagaatggctgggatgaaagtacacttgaactct

SEQ ID NO: 414696 - DNA, 96 bp, Homo sapiens
gccgccgccgccgctgccgctgccgctgccgcacctccgtagctgactcggtgaaaggtgtagcagtcactcggcctacacccacagcatcgacct

SEQ ID NO: 414697 - DNA, 73 bp, Homo sapiens
tgatccgtgtatatattgcatcttcctctggctctacagcggtacctttaaaacagggcagaagccttatgga

SEQ ID NO: 414698 - DNA, 74 bp, Homo sapiens
ctcactgcaacctctacctcccagaccgatttgggatgttgcccctggatgagcctgctattcttgttagtgaa

SEQ ID NO: 414699 - DNA, 110 bp, Homo sapiens
gatatttgtgctgtcagctgttcatcctgataagatgcaccttgtcttacaaaacatttacaaggatgctcgtcagaagttccgctctgttctggttgaagcaacggtga

SEQ ID NO: 414700 - DNA, 95 bp, Homo sapiens
ggtggcgagctgaggtggaggcaggctgcggcagacggcgacagtggcggcggcgccatggcagggcttgcagtctgcgggccaggcatcgacat

SEQ ID NO: 414701 - DNA, 82 bp, Homo sapiens
cctggagctgctggcggcttacgaggaggtgatccgagaggagagcgcggccgactgaccatggtgaatccgggcagcagct

SEQ ID NO: 414702 - DNA, 100 bp, Homo sapiens
cggacatgctcagggctgcggccgcccgaagaggagagagcgcgggcctctaggaaggtttgcctgcaatgagatttcattctctacatttaaaggacat

SEQ ID NO: 414703 - DNA, 126 bp, Homo sapiens
caacctcggagcttatactcctcccagtgacgggtctggagtgcgtgggggaccggctgttggcggatgtgaagttcatttccaatccgccctccatggtggcagcggggagcgtggtggccgcag

SEQ ID NO: 414704 - DNA, 74 bp, Homo sapiens
gtgggactatatagatggcatcttaataaaggttcatgcatgggagatctcagaccagttgttacagatccggc

SEQ ID NO: 414705 - DNA, 102 bp, Homo sapiens
atcgttgtgttgtacagccagaaaccggggaccttaacaatccacctaagaaattcagagattctggggagcaggtcctggtggatgtggagaccaagagca

SEQ ID NO: 414706 - DNA, 74 bp, Homo sapiens
atccaagatggcagattcaatctttttaagatggtagtgaaaacctttatggatatggatcaggactcagaaga

SEQ ID NO: 414707 - DNA, 100 bp, Homo sapiens
caggacccgcttctctgaaaggctctccttgcagctgcttagacgctggatttttttcgggtagtggaaaaccaggaagcctcagttttggagaggaaga

SEQ ID NO: 414708 - DNA, 75 bp, Homo sapiens
cagagaagggaacgcccggcccagccccagggcagtgatgactgttcagaaatgtgtgatggagaagagccccag

SEQ ID NO: 414709 - DNA, 100 bp, Homo sapiens
gcgatggccgggatcctggagcactcggtcatgtacccggtggactcggtgaagggattaaagcctgtggtttccacagaagcaccacctatcatatttg

SEQ ID NO: 414710 - DNA, 75 bp, Homo sapiens
ggtggaggttcgagcgctgttctcgctccggagccgctgcacatttcggacaggcgacactaacaggtgaagatc

SEQ ID NO: 414711 - DNA, 75 bp, Homo sapiens
gaagatcttcaaatgggcattcacaagtgatatcctgagagaagatgggaaagggctgcaaggttgtggtttgtg

SEQ ID NO: 414712 - DNA, 75 bp, Homo sapiens
tctctttctggcctggaggctatccagcatgagccccgctagggccgccccgcgctgagagcccagccccgccgc

SEQ ID NO: 414713 - DNA, 100 bp, Homo sapiens
ggtggatgatggatggatattagcatactgccatgttcggaattgaattcgaatttccggcaaatcatatttccagaagcacttcgatgtttaatgaaag

SEQ ID NO: 414714 - DNA, 75 bp, Homo sapiens
ctcgaacccggcaccttccggaaagtgaagtcactgcttttgctgtcttggatcaagaccagaaagaaattattg

SEQ ID NO: 414715 - DNA, 139 bp, Homo sapiens
agggaaaggcaaaggcaaaggcggctcgggagattcagccgtgaagcaagtgcagatagatggccttgtgaccaccatgtcggtgaggttgcggttcctgtcccctggggacacaggggccgtgggggtcgtgggccgg

SEQ ID NO: 414716 - DNA, 100 bp, Homo sapiens
aaccttgggtgatttgttctgtatcagaagacaatatcatgcaagtgtggcaaatggcaagaagagaggcggaggcgatccttccaggattacactgggc

SEQ ID NO: 414717 - DNA, 75 bp, Homo sapiens
ggcctcctgtgatgggccttcgcactcccagaactacctgaagaagcaggtcacacccctcttcattcacttcag

SEQ ID NO: 414718 - DNA, 74 bp, Homo sapiens
tctggcgacgcccgccgcctcactgtttctagccttcaggacgatgccccgaattcccaccctgaagaacctag

SEQ ID NO: 414719 - DNA, 101 bp, Homo sapiens
caggggaccaagctggagatcaaacgtggagctcatgaaggacttcagcatttgggtccttttggcaacatccccaacatcgtggcagagttgactggaga

SEQ ID NO: 414720 - DNA, 98 bp, Homo sapiens
atactttgaagatcgtcatgggctataaggaagaccagatggatgagaaactaatggaacctctgaaatatgctgaacaacttcctgtagctcagata

SEQ ID NO: 414721 - DNA, 99 bp, Homo sapiens
agacagacagctcagaagttccatagaacgggttattaacatatttcagagcaacctctttcaggctttaatagtggtgcttcatgccccacctccaac

SEQ ID NO: 414722 - DNA, 100 bp, Homo sapiens
ctgtatgattaggccacaatcttcaatgagtaaacatattcctggttgtgagtcccggcccagcccctccacccccctgcccccccgatgcgaccatggg

SEQ ID NO: 414723 - DNA, 49 bp, Homo sapiens
atgccatgtcaactttgttcggaaggtccagtggcattgcagagcacgg

SEQ ID NO: 414724 - DNA, 100 bp, Homo sapiens
tctgttgtctcggtagaaggccagagtcacacacggtcctaagagctgggcaccaggaagcgaaggctggaactgtggaaggtgcatcagtgaagaaatg

SEQ ID NO: 414725 - DNA, 90 bp, Homo sapiens
caagtgctcagaagggcaacatcccagaaagcttccaaatggaatggggcgagtccttgctcaagatgtatatgcaaaagacaatttacc

SEQ ID NO: 414726 - DNA, 98 bp, Homo sapiens
aagacagacaagtaattgttgaaagctcacagcctttgtcctgaagtccttcgcacaggctcgcagctttatcttcgtggacccccgggagctggctg

SEQ ID NO: 414727 - DNA, 75 bp, Homo sapiens
ggcccatcgactacaaacggaacttgccgcgtcgaggactgtcggttaaacacagtgggaatatcacttttgatg

SEQ ID NO: 414728 - DNA, 100 bp, Homo sapiens
acccgagccgtcccagaaaccaaagggcaggcacggcagcaaacgcctgagattgtatctgctgtacagtattgtcatcaaaagtacattgttcaccgtg

SEQ ID NO: 414729 - DNA, 78 bp, Homo sapiens
aataaacatgcaatgaacccaaaaggacgttggaacttgccaggaatccagcaatgatgcaggagatgatgaggaacc

SEQ ID NO: 414730 - DNA, 75 bp, Homo sapiens
aagtggtatcatgagagatatagcccacttagaaatcacagcagcttggatcttaaaagcaagagcgctaacaga

SEQ ID NO: 414731 - DNA, 75 bp, Homo sapiens
tccgtcattgagacttattcatgctgtcagaggtgttgctaacaaccacaagcagaatttgatgacggtggcaaa

SEQ ID NO: 414732 - DNA, 83 bp, Homo sapiens
cgctactcgcttgcctacccgccggcccgcgggtctacttcctcaaagccgcggcgagtcctttgcacatgttggcaacacac

SEQ ID NO: 414733 - DNA, 49 bp, Homo sapiens
gatctcctcgtcacataacacatccttattggtgcggctggagtttttg

SEQ ID NO: 414734 - DNA, 82 bp, Homo sapiens
gtctactcaggctggtggaaaggtgataagaaatcggtgaaatgacaatggatgctctgttggctcgattgaaacttctgaa

SEQ ID NO: 414735 - DNA, 75 bp, Homo sapiens
gaaggtgcgtgtggggctgggtctcggagtgggagacgtggagtgcaggccaactgcattgactccacagcctca

SEQ ID NO: 414736 - DNA, 101 bp, Homo sapiens
agaacttctattttcattgcacacagattgtcaacagtggttgatgcagatgaaatcattgtcttggatcaggtattgaagcccctgggtgataatttgat

SEQ ID NO: 414737 - DNA, 75 bp, Homo sapiens
ggcagctgagacggccttggccgatgatgaggagtctgatgaggaagctgtgaagaaaaccaacaaatgtgtact

SEQ ID NO: 414738 - DNA, 100 bp, Homo sapiens
tcggtgtccccggctgaggcagcgcggccgcagcagccctgtatggcctcacaagtcttggtctacccaccatatgtttatcaaactcagtcaagtgcct

SEQ ID NO: 414739 - DNA, 75 bp, Homo sapiens
cacgatgttcttctacctgagcaagaaaatgggttgttgttgtcccagagtcgccaacgcattgtctgcctcaac

SEQ ID NO: 414740 - DNA, 101 bp, Homo sapiens
gatgatgattctagcaggttcctgagtcctcgagcgcgggaagaaaggctccaaccaggaatggagacgccattggatgttttgtccagggcagcatctct

SEQ ID NO: 414741 - DNA, 100 bp, Homo sapiens
acttcgtggtgctgaaacgtgaagatgtgtttaaagcagtacaagtccagcggagaaagcttgacgatgaaatcgctcagaagaacaatgccctgaagaa

SEQ ID NO: 414742 - DNA, 100 bp, Homo sapiens
ctgcagtcgagggcaaggactctgcgtgcattctccactgccgtctactcggccactccggtcccgacacctagcctgcaaattgaaaagtttcaaggtt

SEQ ID NO: 414743 - DNA, 51 bp, Homo sapiens
actgccgtcttctttgcctgcactaatggcacttctggatccagctgtgtg

SEQ ID NO: 414744 - DNA, 82 bp, Homo sapiens
ctctgaccgcaaacaaggagagcctactgagcagcctgagtggagtaaaggtgctagtgctggaagagaatggactgaacag

SEQ ID NO: 414745 - DNA, 100 bp, Homo sapiens
gagagccgccttcgccctcgcccagcgcccgacaccgccggccgcggcggcggccgccaccggctctagagcttggggcttccttggtcgcacccaccac

SEQ ID NO: 414746 - DNA, 75 bp, Homo sapiens
tggaaatcccagtatgttccatatgatggaatcccatttgttaatgcagctcctctggtgcaagtgtggtagcta

SEQ ID NO: 414747 - DNA, 83 bp, Homo sapiens
gctggatttttttcgggtagtggaaaaccagttcaaaagaatgctgaaccgggagctgacacacctctcagagatgagccgat

SEQ ID NO: 414748 - DNA, 90 bp, Homo sapiens
ggaaagatttcagcatctgaatgagcaggtacttcccggagcgagcggggaacgcgacgtaccccagtgcgcctcggcacaccattgctc

SEQ ID NO: 414749 - DNA, 75 bp, Homo sapiens
gtttccgttgtcggcctcccactgcaggctggggcctcagatactggtacaggcggctgcctggttgtacatgtt

SEQ ID NO: 414750 - DNA, 109 bp, Homo sapiens
ctgaagggaaaggcagaagtggggaagacttttttcaaaaggttgttcctcaaagtcattcaagctgtactcgccgaaggagcccccgaacggcaacgcctttcccccc

SEQ ID NO: 414751 - DNA, 75 bp, Homo sapiens
gcccgctttcggctcgggcctcagggtgataaaagaaaatgtggctgaagttacccgaagttcagcttgcagtgt

SEQ ID NO: 414752 - DNA, 74 bp, Homo sapiens
tggaaagacccaggagaagccgcccaaagaactggtgctgctacccccgtatgatgatgccactgtgaatggtg

SEQ ID NO: 414753 - DNA, 75 bp, Homo sapiens
gccacaggaggctgtgcgggccccgctccgcttcgaatggcacgaaagcaagagattatcaaagtcactgaacaa

SEQ ID NO: 414754 - DNA, 100 bp, Homo sapiens
aaaggaaggaatatatcctgactgattagaggtgcaatagtgagtgaaccagctatccaagtgaggaggaaaggaaagagcacccaagtgtggaccattg

SEQ ID NO: 414755 - DNA, 75 bp, Homo sapiens
ccttggagaacagcacgtccccgctgagtggtctggtgagctgtaccttctttctggcagtgaatggtctgtatt

SEQ ID NO: 414756 - DNA, 90 bp, Homo sapiens
agagattgggggagacgtgcagaaacatcctactcgacacccagcacctcccccgcaaaccgattcgtcagtgttggaccacgggatcca

SEQ ID NO: 414757 - DNA, 89 bp, Homo sapiens
caggatggctggataaactctctcctcaagggatgtcttgtattatgagcagcttaagaccaatgtgatacaacatgaccttttggtgg

SEQ ID NO: 414758 - DNA, 96 bp, Homo sapiens
cccggggccgtgcgctctcgggccactcggccgcaggttctcaacaggaggtgtgtagaagcggcggtgatgacaggcctggctctgaactgccac

SEQ ID NO: 414759 - DNA, 100 bp, Homo sapiens
ctggaacaccttcacccgcttccgcagcccgctcgtgcccggcttctggtcctggtcaatgtgacggtggactacattagaccagccagcccagccacag

SEQ ID NO: 414760 - DNA, 82 bp, Homo sapiens
cgatccagcctgcggagcctgtggggcaggttcactaagaatctttccccagacaaaatcaacctgagcaccctgaaagggg

SEQ ID NO: 414761 - DNA, 73 bp, Homo sapiens
tgtggtgtgtttgctgttcccaggcatttccctggaaatggcagctgtgacagtaaaggaagaatcagaagat

SEQ ID NO: 414762 - DNA, 100 bp, Homo sapiens
gtagtttcggaaggagacatcgaagcagggcgaggcgcagagggcgttgcggactcatgccccagtcggcagtgcggttggagaaggaggagcagataca

SEQ ID NO: 414763 - DNA, 88 bp, Homo sapiens
aaccatctcccaaacaggatgccaagaagcaaaagcaggggaagaaatctgtatttgatgaagaactcaccaacacaagcaagaaggc

SEQ ID NO: 414764 - DNA, 83 bp, Homo sapiens
aaaaaatctggagggactccaacttcaatggtatcatgaactgatcactaaatatgggaagttggagcctttggcagaagtgg

SEQ ID NO: 414765 - DNA, 102 bp, Homo sapiens
catgttcacgcacgggatccagagcgccgcgcacttcgtcatgttcttcgcgccctgaacatccagtcatggataaaaatgagctggttcagaaggccaaac

SEQ ID NO: 414766 - DNA, 100 bp, Homo sapiens
acaatggacctgttagaaggagcacagttattgaccagattccttttctggcagtagcaagagcacttggatttggtgctatggagaaatttttggtaga

SEQ ID NO: 414767 - DNA, 89 bp, Homo sapiens
gcgaagttcaggaagagtgacgtttattacccagaactctttgtctgggtcagtcaagaaccatttccaaacaaggacatggagggaag

SEQ ID NO: 414768 - DNA, 75 bp, Homo sapiens
ttccgagaagtccgcatcatgaagggcctaaaccaccccaacatcgaaaagaataaggagctgcccagtacacac

SEQ ID NO: 414769 - DNA, 51 bp, Homo sapiens
tgaggatgaaaaaagcagtcgagatgatactattcgttacttgtccttgca

SEQ ID NO: 414770 - DNA, 100 bp, Homo sapiens
ggccaggaagtcggagtttgagccccggaggcagagcggctgccatggtgcagcagtaccgcgtcgccatgactgccaaggactgctccatcatgattgc

SEQ ID NO: 414771 - DNA, 100 bp, Homo sapiens
aaagggataggagaaggatgtggactgcagtgctgcagtgccagaccctcaaactgacacaagacctacagagaaaaccctttgccaaatctgctctcag

SEQ ID NO: 414772 - DNA, 82 bp, Homo sapiens
atcggattctggaaggcctggggccccaggtggagctggtgaccaagaatatggcccaggtgaccaaagccctggacaaggc

SEQ ID NO: 414773 - DNA, 100 bp, Homo sapiens
cggcagcagtggatcaccgccctggagctggccaaggccaaggctgtccgcgtgatgaacactcattcagagggaatctggaaaaattgcaatcaaaaca

SEQ ID NO: 414774 - DNA, 74 bp, Homo sapiens
aaataaccgtccccgccagtcagaagttgaggaatcatcatgttggttggctggttactgggaaaagatatcct

SEQ ID NO: 414775 - DNA, 83 bp, Homo sapiens
cgcgcccgcggagcggcgcctgggccgcgccgacctggtcatgagcttcgttaacatggtgtggacgaatgtggaacctcgct

SEQ ID NO: 414776 - DNA, 100 bp, Homo sapiens
ggcgacgctaagttgctgatcgtggcgctgcagcatatcgtgagtgatgagatctgtgtgcaggtgactgacctttacctggcagaaaataataatgggg

SEQ ID NO: 414777 - DNA, 90 bp, Homo sapiens
caaccttgttctcaaccacttgctatctcggccatcgaggagggcacgctggaggagatcgaagaggaggtccggcagaagaaatcatca

SEQ ID NO: 414778 - DNA, 83 bp, Homo sapiens
catgactattgcaccacgcccggggggacgctcttctccaccacaccgggaggtactaggttttgacaagcttgcatcatgcg

SEQ ID NO: 414779 - DNA, 100 bp, Homo sapiens
gtcattaataaaatagcatatgatgtgcagtgtccaaagagaggtgcaacagctgcagcccggaaagaggtgataaggaacaagatccgagcaataggca

SEQ ID NO: 414780 - DNA, 89 bp, Homo sapiens
acttcgggacccacaacctttaagcagcagaggagcacgaggatcgtgggagctaagaaaaatgcactcggtgatggaaagagagccac

SEQ ID NO: 414781 - DNA, 75 bp, Homo sapiens
cgctgctggaccacaaaccgctgccagaaaagttgggtatctacagccattggttgctgttcaggtcagctttgc

SEQ ID NO: 414782 - DNA, 75 bp, Homo sapiens
cgcacacagaaccctggccaggatcatgaagggcgattgaaaagggaacagaaagaacagcttcaaaagatgaaa

SEQ ID NO: 414783 - DNA, 100 bp, Homo sapiens
cacgaggaacaaattgtacatttgcccattctcaggaagagcttgaaaaaaactccaccctttcggctctctccagcaggagatggggccggtcaactca

SEQ ID NO: 414784 - DNA, 90 bp, Homo sapiens
ctgaatacatgatttaaacaagagatttccacagaagacaccaatgggaatcccaatggggaagtcgatgctggtgcttctcaccttctt

SEQ ID NO: 414785 - DNA, 75 bp, Homo sapiens
agaaaaatgaacccaaacatagacttgcaagaatgggcactgtgccccgactgcggcctcgcctcaatgccattc

SEQ ID NO: 414786 - DNA, 82 bp, Homo sapiens
aggctttggagcggctaaaaacctgaccatggccaacctggagcgcaccttcatcgccatcaagccggacggcgtgcagcgc

SEQ ID NO: 414787 - DNA, 100 bp, Homo sapiens
attaaggatgcccctgcatactattattccgttgttacaagaggttcaaaccttgtactactcagctgatcacaagctgcttgatgggaacctactagat

SEQ ID NO: 414788 - DNA, 50 bp, Homo sapiens
agaaggagcgcaagcaccagaaggaatgctcatcaaatttaacaacgctg

SEQ ID NO: 414789 - DNA, 80 bp, Homo sapiens
ccgcagtacaagaactggagagcattccagttggcttttgagtggatacgtgcagtgagatcattgacactggaaacact

SEQ ID NO: 414790 - DNA, 90 bp, Homo sapiens
ccgccacctcctctgatctacgaaagtcatgttacccaacaccggcagcaacaactccaggcccagcatttatcacatggacatggtctc

SEQ ID NO: 414791 - DNA, 75 bp, Homo sapiens
cctgggccggcatgcttctggactatttccagatctcttacctcagctagaagctccgagttctcttactcccag

SEQ ID NO: 414792 - DNA, 82 bp, Homo sapiens
ctccactttcgccagcccgtgccgcgagcgcggcctgcaggaggctcgggacgtgtacgaggaggccatccggacagtgatg

SEQ ID NO: 414793 - DNA, 132 bp, Homo sapiens
ggaggaacgggagcgcctggtgagaatgtattttgacaagtatgttcttaagccggccacagaaggaaagcacaaacggggattcagcgtccgatcctttggaacagggactcacgtgaagcttccaggacc

SEQ ID NO: 414794 - DNA, 75 bp, Homo sapiens
gctgaccaggtcatcgcttccttcaaggtcttagcaggggacaagaaaccagactgtgatgactgggagagcggg

SEQ ID NO: 414795 - DNA, 100 bp, Homo sapiens
agccaagctggagtttacacaggcaaactgtcagaaaagagtagcctgggctgtctggaaatctgagatcagtgtgcgtgtgaccaccatggatgcagag

SEQ ID NO: 414796 - DNA, 75 bp, Homo sapiens
ctggggtccctgtggtgacttggccaaagaagactccaaaggtttggtgcacctcgatttggaggaagtagggca

SEQ ID NO: 414797 - DNA, 84 bp, Homo sapiens
aaggattccaagtaactcttatttgaatagcctaacatggcagaccagagacagcgctcactgtctacctctggggagtcattg

SEQ ID NO: 414798 - DNA, 100 bp, Homo sapiens
gaacgtcaagaactggaggtttgtgcaatttgagaccggtcggcactgtgcagagatcagagtactaagagacagaaatgactgctgtccatgcaggcaa

SEQ ID NO: 414799 - DNA, 96 bp, Homo sapiens
ttaaaccttttgtctccatctgatggcgaacgttttatgcagctggctagagatatggcaaacacagatttgcgttccaattatcttcttaatact

SEQ ID NO: 414800 - DNA, 76 bp, Homo sapiens
acttatccagacccaatggaacatcagcaatgcttctgtctgatgccaatgcaagttacttaagagcagctcgagc

SEQ ID NO: 414801 - DNA, 110 bp, Homo sapiens
gcagatttgatgctgcctggactggtgatgccccctgctggtctgcctcaggggtggaccaagctttgccgcaagaacgccgggctcctgtcactccttcctccgcctct

SEQ ID NO: 414802 - DNA, 100 bp, Homo sapiens
ggtggctgcgggaacccggaggcccaacgtggtgctgctcctcacggacgaccaggacgaagtgctcggcggcatgactggtcgaattgacaaatcttac

SEQ ID NO: 414803 - DNA, 50 bp, Homo sapiens
aaaatctttcctctaaagtcaaactggaaaaactggaaggttggttagtg

SEQ ID NO: 414804 - DNA, 51 bp, Homo sapiens
ctgcagaaggatctcagcctctctggttttggtatcaggatgatgctggcc

SEQ ID NO: 414805 - DNA, 98 bp, Homo sapiens
aaggtgcaagagtccacaaagggacctgatgaagcgaagatcaaggtgctggagaatgccgaaggtgccagaaccaccccttcagttgtggcctttac

SEQ ID NO: 414806 - DNA, 100 bp, Homo sapiens
aatcaagtaaaaacaatagctcaaggaaacctttccaacacagatgtccaagctgccaagtacttgtcttgggccttagacacaaatcaggaagaacgag

SEQ ID NO: 414807 - DNA, 75 bp, Homo sapiens
ttcctattcggccatcttggctcctccacaaatggcaccgaaagcgaaggaagctcctgctcctcctaaagccga

SEQ ID NO: 414808 - DNA, 50 bp, Homo sapiens
gccacccgttcctcatcaggctgatgaaggtttaaggctcagaaaggtag

SEQ ID NO: 414809 - DNA, 100 bp, Homo sapiens
ggtatcttaagaaggaaaatatggctgctctttgccggacagcagagtcccagactttcttgtctgcacagaaagtcccagtacaacttccattgctgag

SEQ ID NO: 414810 - DNA, 97 bp, Homo sapiens
cgggcaataagactctttaaagaaggcaaggagagaatgtatgaagaacagtcacaggacaggccttggatggtatactgtaaattcagcatatgga

SEQ ID NO: 414811 - DNA, 100 bp, Homo sapiens
gcctacaggaggaaaggccagactcacagaagaatccttcaggttcctgttccgtagatgtgagtgccatgttttgggaaagagccggttgtaaagagcc

SEQ ID NO: 414812 - DNA, 74 bp, Homo sapiens
aagacggggcggaagaccaagatcatcgagatggtacctagtcgatagtcgctggttcaaacagtggaaaaaat

SEQ ID NO: 414813 - DNA, 100 bp, Homo sapiens
cggcgggtacttatctccgacctccggctagtgggaaaggccgcgcgaccgcccgtcctccaactacagggaccgcacgagatggggttttgccatgttg

SEQ ID NO: 414814 - DNA, 50 bp, Homo sapiens
ccggaaccgcgattcggcgtgtcaggacctcgactggattttgatcctga

SEQ ID NO: 414815 - DNA, 100 bp, Homo sapiens
tgagccccacccggagttcagcgcggactcccccagcccaggactgttaaagattcactccagtcagtccagtccgcagcaggccgtcctgacgattccc

SEQ ID NO: 414816 - DNA, 100 bp, Homo sapiens
cctcaaggagctgtgcaccagcccccgagagaacgaggtgctcaaagtccaactgaagaaatatgtaggagctgtccagatgctgaaaagagaaggtcaa

SEQ ID NO: 414817 - DNA, 90 bp, Homo sapiens
tcaaggaccagcgcagagggctcttctcggtgtggcaggaggtcttccagctgcctcgagcccagagatggctcccgcaaagaagggtgg

SEQ ID NO: 414818 - DNA, 74 bp, Homo sapiens
tggagtttgcagacataggctgtggctatggtggcctgttaggagctcctccattcctgagaccacctggaatg

SEQ ID NO: 414819 - DNA, 142 bp, Homo sapiens
ccgagtttgcgactcgcggaccggcgtccccggcgcgaagaggctggactcggattcgttgcctgagcctcgaagcggaggatccctgtgtcccagccgggcatggccgacccccaccagcttttcgatgacacaagttcag

SEQ ID NO: 414820 - DNA, 100 bp, Homo sapiens
cgcgtcctgctgaccccagccggcgccgagggcttggaatctcgagcgggaaaagtgcatcatcgaggagtcgggagagcatatcatcgcgggcgccggc

SEQ ID NO: 414821 - DNA, 90 bp, Homo sapiens
aatcatcttatcagacgaaggcaaaatgtatgctgaagaagcatctgtagggaatccagaaggagcgttcatgaagatgttacaagcccg

SEQ ID NO: 414822 - DNA, 90 bp, Homo sapiens
ggccaagcgaccacccaaagaaggtctgccgcaaattccgagacgaagccacgtgcaaggacacctgccccccactcatgctctacaacc

SEQ ID NO: 414823 - DNA, 105 bp, Homo sapiens
tcgtgaacagcatcgtaggggtcagtgtcctcaccatgcccttctgcttcaaacaggtcgcaatggaagaagagatcgccgcgctggtcattgacaatggctccg

SEQ ID NO: 414824 - DNA, 103 bp, Homo sapiens
cacagatggagctccgggagtggttcgctacctttctgtttgtgcaggcggggccagcaggtcttcctcaagccggacgagccgccgccgccgccgcagccat

SEQ ID NO: 414825 - DNA, 90 bp, Homo sapiens
ctccttctcctggagacgcaactcaagtgacttttttgaacgaaccattctgtgcaacagccttgtgtggagttgtgctgtgacgggtag

SEQ ID NO: 414826 - DNA, 49 bp, Homo sapiens
cccagatgtgcaacaaagtgcgatgaaatcatgaccaccccaggaaaag

SEQ ID NO: 414827 - DNA, 75 bp, Homo sapiens
acagcacattaggctttcttccctggcacatcagattgactgagattgtgcacagttggtggatctgaaatctga

SEQ ID NO: 414828 - DNA, 50 bp, Homo sapiens
cccaggctgagagcgcccagagcaacagtcccggtgtctcgcccaatcct

SEQ ID NO: 414829 - DNA, 76 bp, Homo sapiens
atggaggagctactcctctgggaggacagagtagctacgagacaatgtgattacacctcgagacacaacaatgacc

SEQ ID NO: 414830 - DNA, 74 bp, Homo sapiens
agagataacaaaagctgctcagagtctcaatgaacttggcgcgatggctacgggcgcggatgtacgggacattc

SEQ ID NO: 414831 - DNA, 83 bp, Homo sapiens
gtgcttctgcggctgtacggagccatcttgcagctccctacaccatcatcaccttccccttcctgtttgctgtgatgttcggg

SEQ ID NO: 414832 - DNA, 99 bp, Homo sapiens
gagctgcagactcgaccactgcgccctcccctcctctccctgcaaggagcccaagagttgtggaaagtaaaaatgtagccctaccaaaaggaactattg

SEQ ID NO: 414833 - DNA, 83 bp, Homo sapiens
ctcccgcagcctgcctttccttccccctcggaaaatggttcccactgccgggcgaggaatgaattcagatatttccagagaat

SEQ ID NO: 414834 - DNA, 94 bp, Homo sapiens
tggtattgtggaaattcccagaggactttggagaccagatgcctgtgaggagccaccaacatttgaagctatggagctcattggtaaaccaaaa

SEQ ID NO: 414835 - DNA, 100 bp, Homo sapiens
tgaggatgctgtcctcctgctgcaagatgacagacatcatgaccgagggcataacgaaacacggctctagataaggaggggcagattttctgcagcaagc

SEQ ID NO: 414836 - DNA, 100 bp, Homo sapiens
gactccgattcgtgaccctcagcgccggtgcatgtcgatatttgctgttgctgagtctgattgtaatttagcagttgccttgaatagaagttatacaaag

SEQ ID NO: 414837 - DNA, 75 bp, Homo sapiens
gcagctttgcgggccctacaagatcagaaccagaggaagagatcattgccgaggactatgacgatgatcctgtgg

SEQ ID NO: 414838 - DNA, 74 bp, Homo sapiens
ttccgggaagccatagctctgcatgattacctaggaacagtacgatttggggttatcacaaataaacatcttgc

SEQ ID NO: 414839 - DNA, 83 bp, Homo sapiens
acagcagttccctatgggtcttttaaacatgagtccttcaataatgttaaacagtggctgcaggaaatagatcgttatgccag

SEQ ID NO: 414840 - DNA, 75 bp, Homo sapiens
gatctggcctcatctgttccagggaggtgggattgaaatcaaagaatcttcaggatggcagcaagtgtttacgag

SEQ ID NO: 414841 - DNA, 100 bp, Homo sapiens
tacatattccagtaatggtggatgaagttgttcattgtttgtcaccacaaaaaggacagatgtccctggtagatttgggaaagaagcttttagaagcggc

SEQ ID NO: 414842 - DNA, 74 bp, Homo sapiens
cagatcttcacagcacagttcctgggaaggtggagccaccagcctctccttgtatgggattgtgctggatgcgg

SEQ ID NO: 414843 - DNA, 75 bp, Homo sapiens
tggaaaggctctcagtgaaaaagaaactacatcaagcagcatgcttgattcaagcctattggaagggttttcaga

SEQ ID NO: 414844 - DNA, 75 bp, Homo sapiens
tgatcccttccttcatgtgccagatcccagatgcagtgactggttactacctgaaccgtgctggctttgaggcct

SEQ ID NO: 414845 - DNA, 90 bp, Homo sapiens
cgggccggagcccgcacggagcggccgggcgggacaggtttactgctagaccactagtggaaactatatttgaaaggggaatggctacat

SEQ ID NO: 414846 - DNA, 90 bp, Homo sapiens
gtctggggataccttactgctcctgcaccacggggacttctcagcagaggctcagatccggaacctgaccgtgctgacccccgaagggga

SEQ ID NO: 414847 - DNA, 89 bp, Homo sapiens
gtcctggcggcccccagccgccgcccacgcagcagggacagcagcaggtcagaatggcggcagtggagcatcgtcattcttcaggattg

SEQ ID NO: 414848 - DNA, 100 bp, Homo sapiens
aaccgtacccggctgtaccggcagatcctcaggggcaagtacagttactctggggaggagatggtaacctgcacctcaatgtgacggcggaggccttcag

SEQ ID NO: 414849 - DNA, 100 bp, Homo sapiens
atccggcttgcccagaaagagaagacagccatggaagagccccccaagatgaacccagtggtggagccactgtcctggatgctgggcacctggctgtcgg

SEQ ID NO: 414850 - DNA, 100 bp, Homo sapiens
gcgcctcttcttagttgatgatttagttgattctctgaaggagatcatgaatcagacagataaaaatcaacaagaaatcccatcataccttaatgatgaa

SEQ ID NO: 414851 - DNA, 98 bp, Homo sapiens
agcgactgagtccgcgatggagtatcaccttttgccatgatagcatttctttcattggacagttccttacaagggctccactcagtgtctgtctgtat

SEQ ID NO: 414852 - DNA, 82 bp, Homo sapiens
tggaaacaccatggctgcggcggcccagctctctctgacacaggccaagtcctgtatctgccatgtctgtggcgtccacctc

SEQ ID NO: 414853 - DNA, 100 bp, Homo sapiens
gacaaattctgtgtcaattcattgaccggatacttacagatgtaaatgttggaatttgctcgccctgatacatcgaatgatagagtttgttgtacgtgaa

SEQ ID NO: 414854 - DNA, 83 bp, Homo sapiens
gagaagggctgttgctaatgctaaaagcattggacaccttatttttgatgatgaagaacgagagcttcaaatggatcctgcag

SEQ ID NO: 414855 - DNA, 82 bp, Homo sapiens
cgagatcctggagagcctgcaggacggcgcggcagagtccccgtacgcctacagtaacggccaacgtggaacctgttgtgcc

SEQ ID NO: 414856 - DNA, 96 bp, Homo sapiens
caaagacagttcagctgagagctcagcccctgaggaagacgcaaacatgcagatctttgtgaagaccctcactggcaaaaccatcacccttgaggt

SEQ ID NO: 414857 - DNA, 84 bp, Homo sapiens
ggtgacagagtggagccatggctagaggattttttatcaagcagaaatgcatcgaacaacgagaatcaagatcactgagctaaa

SEQ ID NO: 414858 - DNA, 75 bp, Homo sapiens
gaaaaagctgccctgagacggtgtcccgccgaaaggtgctctgtggatgtgtatagttttaaacccccactgcaa

SEQ ID NO: 414859 - DNA, 100 bp, Homo sapiens
ccaccgatgcgcctggtggccagactccaagtgggaccggcggacacgcagcctcgcgatcttacagactctttcagcacctacgaaaaatttagaacag

SEQ ID NO: 414860 - DNA, 90 bp, Homo sapiens
cggagctgacggtggaggttcgcggctctaacggggctttctacaaggagaagattggctggcgaaaggatgcactgcatttgctggtgt

SEQ ID NO: 414861 - DNA, 100 bp, Homo sapiens
tacttccacttcgtgttcttcctagcttccctgtatgtgatgatgaccgtcaccaactggttcaatgtgcaggatgacagaattcgagtcgaaaggatgg

SEQ ID NO: 414862 - DNA, 100 bp, Homo sapiens
tcaattccatccaaatttagattattacaaagcacgaggagcagacctcatgaataaaagccggaaacctgtaggaagtgtcagggactctggaaagaac

SEQ ID NO: 414863 - DNA, 103 bp, Homo sapiens
ctgcaagactgtcgacctaaagcctgactggggcaaggaatcagagatcattgatttcttcctgggggcctctctcaaggatgaggttttgaagattatgcca

SEQ ID NO: 414864 - DNA, 75 bp, Homo sapiens
agaggtacgccgaggaggttgggatcttcttcactgcctctggcatggatgagattagtgggatggtttggccat

SEQ ID NO: 414865 - DNA, 75 bp, Homo sapiens
cgccgctcaccccgcggccgcaccttcccgccttctcaggcaatccggctcatccaggcctgcgtggatgtcctt

SEQ ID NO: 414866 - DNA, 100 bp, Homo sapiens
ccaacagttgctggacagtttgaggatgcagatgttgatcactgaaaatgatttatgcaagtttaagaagtcacctgcaccggtgcccgtgacgtacgag

SEQ ID NO: 414867 - DNA, 75 bp, Homo sapiens
tggaaaatgtgataaaaacaaggtggaagattcttccaaggaaccagtgcgaagtagagacggggtttcgccgtg

SEQ ID NO: 414868 - DNA, 83 bp, Homo sapiens
aggagctgctgctggcgagcccgctactgcagggacctatggcttttctggctttgcccgcccagctgctccatgccaggagg

SEQ ID NO: 414869 - DNA, 75 bp, Homo sapiens
cgcgcagcgacggagctggggccggcctgggaccatgggcgaccaagccaccctggtagaacaagtaaaaagagt

SEQ ID NO: 414870 - DNA, 51 bp, Homo sapiens
gaaaaggttaaccaagcttttggtgcatagcagcctggctggaagcattct

SEQ ID NO: 414871 - DNA, 82 bp, Homo sapiens
ccgccttctctgtcagctctttccccgtcagcatcccagccgtgctcacgactccgtgggaaggaggcttgtttaaactacg

SEQ ID NO: 414872 - DNA, 74 bp, Homo sapiens
ctcggaagagcgctcccaggagaaacaagtagctacagcaagctgggtagcaggcagatccaaaggatatcatg

SEQ ID NO: 414873 - DNA, 73 bp, Homo sapiens
aaaatgtcaacaaattgatgggtgaatatgaccatctcccagaacaggccttctatatggtgggacccattga

SEQ ID NO: 414874 - DNA, 90 bp, Homo sapiens
tcaccacagtgctgcaggctgactctgcaggtgctggagaatctggtaaaagcaccattgtgaagcagatgaggatcctgcatgttaatg

SEQ ID NO: 414875 - DNA, 50 bp, Homo sapiens
aactcagcacgagccattttgcagcatgaatgtcagcatcatcattcaaa

SEQ ID NO: 414876 - DNA, 124 bp, Homo sapiens
ggctccgaggccagagagaaaagactgcgaggtggccgcagctgtggccggagagggaggtggggaagacagggctccagctaccacaggacgggctctgggtatagccgttccagtcagggac

SEQ ID NO: 414877 - DNA, 50 bp, Homo sapiens
ggagtgctggtgaatcatttcaagagctgcggtctcctgtttgataaaag

SEQ ID NO: 414878 - DNA, 96 bp, Homo sapiens
aaagaggaagatagtcttgggacccttgcatggtgtttcaaagggtggtgaagaactaaggtacatggactatatcgcacaacaggtgctagtttt

SEQ ID NO: 414879 - DNA, 90 bp, Homo sapiens
cccgaggcgggagccatgccggagaagcgcgcgggcgcgcaggccgcggggagcacctgggaggagccgatcactttctgtgaggaagcc

SEQ ID NO: 414880 - DNA, 98 bp, Homo sapiens
tgcagattttaatttcagtgactgaattaaaaggtgtcaagaagctcagaatgcttgccagcaaagcacggacagagaaggaggagaagctgagccag

SEQ ID NO: 414881 - DNA, 51 bp, Homo sapiens
catgtctgcgagccaggattcccgccttgccaacattccactaacccccga

SEQ ID NO: 414882 - DNA, 100 bp, Homo sapiens
ccagccccgaatccagcccttccagaacctcacgctgcacccagcctcctccagcctccactactccctgcaggttcatgggcgggggtggtgagagctg

SEQ ID NO: 414883 - DNA, 50 bp, Homo sapiens
ggaacacttcagtgcattcaaggttatgaagacagtatggagtttccaga

SEQ ID NO: 414884 - DNA, 74 bp, Homo sapiens
cgcaaacggaaaggcagctccactgactaccaattcatgttacatgtaaagctgtcctcatttgtgactatgga

SEQ ID NO: 414885 - DNA, 75 bp, Homo sapiens
ctgccgtgtgaaccatgtgactttgtcacagcccaagatagttaagtggggccctcgggaccaaggatcacgtca

SEQ ID NO: 414886 - DNA, 80 bp, Homo sapiens
ctctgctcattggggcgttgaggaggtccccagccccaccccagccccaaaggaggctgttcgagagggacgtcctccgg

SEQ ID NO: 414887 - DNA, 50 bp, Homo sapiens
gcaaggtctggggattgagaggcccgagagtcccacgaactggctgggta

SEQ ID NO: 414888 - DNA, 82 bp, Homo sapiens
agaaagcaggcgaacccgcggcgcaataacggtgacagagttagtccttgataattgcctgtgtgtcaatggggaaattgaa

SEQ ID NO: 414889 - DNA, 100 bp, Homo sapiens
ccgccttatccacctactgagccagaaaattctagggaatttgcagcagctgcaaggacccttcccagtgcccttccagctgtcactgaaatggctttat

SEQ ID NO: 414890 - DNA, 90 bp, Homo sapiens
acactttggaaaagaaagcctttttgaagtcctcgcagtccgcctgagagagtagagaagaccccctcccagaaccttcctgtaaggtct

SEQ ID NO: 414891 - DNA, 100 bp, Homo sapiens
ccacagtaggaaaggccaagggcaaattgtggctctttggaaagaagccaaaggttgccaaagcttcttttcaaaggaacaatgatgccttagatgctgc

SEQ ID NO: 414892 - DNA, 89 bp, Homo sapiens
cactaccagcaggctctcaccagcgcacagttgcagcaacacgccgcgttcattccaacagtcaatgcagaccctgcaggacttgctca

SEQ ID NO: 414893 - DNA, 105 bp, Homo sapiens
gcagaggcggcggtggcgagaggtgcggcgaaggaggcagaggcacttatgcttgtcagaattcaattcgtcataatctgtccctacacagcaagttcattcgtg

SEQ ID NO: 414894 - DNA, 100 bp, Homo sapiens
tctggtggaacgagactgcaatggggacacgccaaacctgagtttctacagaaatgagatccgcttcctgcccaacgcatctgacgacaccaaaaagaag

SEQ ID NO: 414895 - DNA, 100 bp, Homo sapiens
gcggcagaagggctctgttagtgcgcctctaagatggcgacgcctttggcggtaaattcggaaatgtcctgtctcatggaagcactggaggataagcggg

SEQ ID NO: 414896 - DNA, 100 bp, Homo sapiens
tcataattgggagaagactcactggccgaatggcagcagtagatgacttgcaatttgaaggctaaactgctcttttcagatggagaaaaagtaataccca

SEQ ID NO: 414897 - DNA, 73 bp, Homo sapiens
aatttgtacactgtgccccagaaatcgaaaagtgatctgtgaaaatggttcgctattcacttgacccggagaa

SEQ ID NO: 414898 - DNA, 75 bp, Homo sapiens
gtttttctacgcattgattccatgtttgctcacagttcaacttcctcaattgctttgcctcactcttctatattg

SEQ ID NO: 414899 - DNA, 74 bp, Homo sapiens
gggcgagcctggaggattgtcactccaacctcttttcgctgaccctctttcccagctgcccgctcctcagcacc

SEQ ID NO: 414900 - DNA, 96 bp, Homo sapiens
tgtaaaaccctcagcgacatctttctgcttttcaagagttccgatttcatcactcgtgacttcactcagccggttttttgattaactcaaaaccag

SEQ ID NO: 414901 - DNA, 88 bp, Homo sapiens
agagaaaagcccccaaaagcagctattcagtatttgattttcatcaagcagctgatggtatccaggaacaacagagacaagaacaagc

SEQ ID NO: 414902 - DNA, 75 bp, Homo sapiens
actctttcttaatgcagcctgagcgcataaagtcaggcagagatggcagtgggggctcccgtggcaaaagagaag

SEQ ID NO: 414903 - DNA, 75 bp, Homo sapiens
aaaaaagaaacattttgaagaacacaattccatgaatgaactgaaggagctcttgtccctggcaaagcgaaagcg

SEQ ID NO: 414904 - DNA, 74 bp, Homo sapiens
tcagagtgtgtcgtgtgcctggaacgggaggtgaaagacccctgacaaaagacaatcatcttctgggtacattt

SEQ ID NO: 414905 - DNA, 100 bp, Homo sapiens
cagtatctaaaccatataacaagaactacgcaatgggagcgcccaacacgataacaatgaagatggtgccaaaactgctttctcctttggttaaagattg

SEQ ID NO: 414906 - DNA, 100 bp, Homo sapiens
acagacgggaaaaatagtagcaccacaggaggatgcattagcacaacaggcctttgaagaggctcggagaaggacacgcgaatttgaagatagagacagg

SEQ ID NO: 414907 - DNA, 123 bp, Homo sapiens
ccaggaggcagtggaggaagtgggggttatggtgggaggagccgatactgagcttcttcctatttgccatgggaggagatgttaaagtaacccatcttgcaggacgacattgaagattggtct

SEQ ID NO: 414908 - DNA, 96 bp, Homo sapiens
ggggctcgtctacaggagctcacattagcccccagtttccagcttcaggtgtgaaccagacccccgtggtagacattatcctcttgacttgaacca

SEQ ID NO: 414909 - DNA, 87 bp, Homo sapiens
atcaccagttactttaatgaggtgtgctgatctgcaaaccctggacacaatgcagccaattgagaggaaaagacagggctatattca

SEQ ID NO: 414910 - DNA, 100 bp, Homo sapiens
ggatgatggtgaagctaaagaaatttctacacctacccattggtctaaacttgatccaaagacaatgaagccaaaattgcctggaaaagagcagtgagag

SEQ ID NO: 414911 - DNA, 83 bp, Homo sapiens
ttgcattgactggaaacaatggcatttacagaaagagtcaacagcagtggcaacagcttgaatcatctaggacttgttcttct

SEQ ID NO: 414912 - DNA, 100 bp, Homo sapiens
ttcatctccttctgcatccttaactgagaatgagtgtactaatggtcacttgatgtgcgctggctgttttatccacctactagcagatgcccggctgaag

SEQ ID NO: 414913 - DNA, 75 bp, Homo sapiens
aaacacagaaggaaatacccagactgttactacaacctcgggcgtctggtggatattccatctattataaccaag

SEQ ID NO: 414914 - DNA, 75 bp, Homo sapiens
ggagctacttccaaattaaccaaggtggtgatcatgaactcgatcctggagcgcatgtgtgccgacgtgctgcag

SEQ ID NO: 414915 - DNA, 98 bp, Homo sapiens
ccgcggactctgtaactttttaatgtctgatgaagagtatgatgacagaactgcacgggctcatcaacagagcagacgagcagaccgtttattagctg

SEQ ID NO: 414916 - DNA, 101 bp, Homo sapiens
gaggtccagatgaaagagaagtttctggtcactccccaggattatgcgcggtgtgagcgccactttgaagggcatccaacccgcggctatccatgtggaat

SEQ ID NO: 414917 - DNA, 80 bp, Homo sapiens
acaaaaacaacacaatttgtcccggttctgtgtaatctgttagcagtagatggtgtaaatgagcctgatgtcctagcaat

SEQ ID NO: 414918 - DNA, 97 bp, Homo sapiens
ctgaccctggccttcaaccccgagccgctggtgctacagatgacatttgatccagaaatcttcttcaatgttttactgccaccaattatatttcatg

SEQ ID NO: 414919 - DNA, 100 bp, Homo sapiens
tgatttctggagacgcgagcataatccttttgcagacatctcaacgctggctctccagatggccgccaagaacgagtcatgtttgacaaaattacatctc

SEQ ID NO: 414920 - DNA, 82 bp, Homo sapiens
cagattcgcagtggtcgcttcttctccttgggctgatcccttatccaacatggttctaaccttcagtactaaagaagatgca

SEQ ID NO: 414921 - DNA, 98 bp, Homo sapiens
cctgaaaccactcaagagtcataggattagatgatccaagtcaccaagaaattactgtctcaagtgatacgattccaacaatgtctcacccatcttgg

SEQ ID NO: 414922 - DNA, 75 bp, Homo sapiens
aagagacaggaggcagcagacggacatccagcttccatgaggcaggctgaacctgcagatatgcgcccagagata

SEQ ID NO: 414923 - DNA, 50 bp, Homo sapiens
gcaaccaacctaaggtggcctcagttctaggcacagacagggtggagcag

SEQ ID NO: 414924 - DNA, 83 bp, Homo sapiens
ctgattgcccccgggtctcagcaggtggatatcatccagtgaaaattggagacctcttcaatggccggtatcatgttattaga

SEQ ID NO: 414925 - DNA, 75 bp, Homo sapiens
tcaggatggaggaagactcgatccgcctgcctgcgcacctgcgcaaacagggtgaagacaagaggcataggtgat

SEQ ID NO: 414926 - DNA, 75 bp, Homo sapiens
ctatttagcagacaagaatatcacccacggcttcctctatcctcctgatggagtctcactctgtcgcccaggctg

SEQ ID NO: 414927 - DNA, 89 bp, Homo sapiens
cctctctagtcacaagagccttggggaagacagttggaagctcagacatgtgggcgacagatgcgaaagaaacgagttccagtgccaag

SEQ ID NO: 414928 - DNA, 83 bp, Homo sapiens
attaaagatgcagtacgccacggggccgctgctcaagttccagatttgacctgcctagagctggaacgttacctccagagcga

SEQ ID NO: 414929 - DNA, 87 bp, Homo sapiens
ctacttcatcgtggtaggctatgaccacgagaagccaggttatatgtcaccacacccatctccattaggagccccagagcacgtctc

SEQ ID NO: 414930 - DNA, 75 bp, Homo sapiens
agctcttcacccggttcagtgacaacaaccaagcattagtacatcaggaacgtctctatcaagaatacaatttca

SEQ ID NO: 414931 - DNA, 101 bp, Homo sapiens
atccccgaggaggaagacgaatcgttaaacatcttaggtcagaaaatgatgcatcctgttgccagcagtaatccagctttctgtgggcctggcaagccttc

SEQ ID NO: 414932 - DNA, 100 bp, Homo sapiens
atacagcaatgggcggcccgctctgcacgcttgccagcgcggtggttcggagcgaccttggccgttggcctgaccatctttgtgctgtctgtcgtcacta

SEQ ID NO: 414933 - DNA, 82 bp, Homo sapiens
ttttcgggtagtggaaaaccaggtatgccattttgaagactgagacgttggagttttatcctagaggataaaggaaatcttt

SEQ ID NO: 414934 - DNA, 100 bp, Homo sapiens
ttttcacttcctgaccgtgggctggaggaacagaagcggaacagccacagcagcctcccaaggagtctgcaagttgaggctgggaggcggcagaatgcag

SEQ ID NO: 414935 - DNA, 75 bp, Homo sapiens
ccgatattgaagattcatttttcttttttccattcttcaggaccttcggcaaggggataaaaacattcagatggc

SEQ ID NO: 414936 - DNA, 75 bp, Homo sapiens
gcaagatcaccgtgacatccgaggtgcctttctccaaaagccaaggttcagaaattgcctctcaaggacgggaac

SEQ ID NO: 414937 - DNA, 100 bp, Homo sapiens
ccggcggtggcggcgtctctggccggccttggtgcggcgagccgagcgaggcagctctgagccgcgcggtgtggacactgccagcggctgcagccgactt

SEQ ID NO: 414938 - DNA, 100 bp, Homo sapiens
aggatgaatcccagtccctgttacggatggaacagatttggagttgaggctggtcaatggagacggtccctgctctgggacagtggaggtgaaattccag

SEQ ID NO: 414939 - DNA, 111 bp, Homo sapiens
gcaggtaaaacagaaaggggctcatactcatcttatgggagagaatcaaacttacagggttgccaccaggttatgagtgccagtgagccgccttagatagaagcatcgtca

SEQ ID NO: 414940 - DNA, 75 bp, Homo sapiens
ccaggaggacacgctgcagttggccttcatcgacttgagacaaggaaatgaggcaagttatcctttggaaatgtg

SEQ ID NO: 414941 - DNA, 84 bp, Homo sapiens
caggagttccgatcgacccggtaccaagaaggggagtgcccgcggcaggaagctatgaagcagataacccagctcctaccagag

SEQ ID NO: 414942 - DNA, 100 bp, Homo sapiens
ctggttggccctgtgatccctcaagactggtccacggagtgtatgaccacaaacagccatcaaggctcacctccacctccagtaaaagtttcttctgaac

SEQ ID NO: 414943 - DNA, 75 bp, Homo sapiens
acctccctaaactggttaatagtggcatggaagatccatttgggatctatttgtgatgactatatggcaactctt

SEQ ID NO: 414944 - DNA, 100 bp, Homo sapiens
gctgaatctgagccacagtgtgatcccagctttaaaggagatgcaggagaaaatacggcattgctagctttcctgctctgggaccctaccaaggtgcccc

SEQ ID NO: 414945 - DNA, 82 bp, Homo sapiens
gaacagttttttctaatggctattcaagactgaatctggatatggatctgaatccagcttgcgtcgacatggctcaatggtg

SEQ ID NO: 414946 - DNA, 96 bp, Homo sapiens
actcaacatacacccagaacaatgcaggtgcatctaactgtgcaagatgctgtctttgcaggtgccatgcctacaatggcaagcatcaagctgtct

SEQ ID NO: 414947 - DNA, 74 bp, Homo sapiens
cggcaccttgggttgcaatgtagctaggacgttgatggtgtgatccctcacatccacaaatctctgattggaaa

SEQ ID NO: 414948 - DNA, 82 bp, Homo sapiens
tgctggaggacgagggccagctgacggagatggtgcagaagatggaggaggttgggttaacggcatggagaacagtcacccc

SEQ ID NO: 414949 - DNA, 75 bp, Homo sapiens
aagaagaggcctgcaaagctgtacaagagatcatgcaggtgatcccaaaacgaaccaacagaccaggcatcagca

SEQ ID NO: 414950 - DNA, 88 bp, Homo sapiens
gcgtgtcctcggagcgcggtccctgtattggtctcctgctcctagagggtggcccagttgaaatccttcccttcctctaccttggaag

SEQ ID NO: 414951 - DNA, 98 bp, Homo sapiens
ccatgcccattgggagaatagcagcctggaagctccgaccccaggagccagcccatcaacctgaaccattacgccaccaagaagagcgtggcggagag

SEQ ID NO: 414952 - DNA, 102 bp, Homo sapiens
caccacgtcacgcacacgctcggcgctgcgatccgcgcatataacgggatttcagtcataatcggttgtctaactggaacatcagcttggaatcacaaacat

SEQ ID NO: 414953 - DNA, 85 bp, Homo sapiens
gagtgtgtctctagctcagataataaaggtatgtgacgcattcccagactcttcagccaactgagcatcagcttcttcacagcaa

SEQ ID NO: 414954 - DNA, 74 bp, Homo sapiens
aaatttggagtgtgcgtgcgcgccgagcgctgctgatgcaaggaatcccctgggctcccgtccactccactgct

SEQ ID NO: 414955 - DNA, 101 bp, Homo sapiens
tcagtaccaggccttattcagcatggataagaccagtgaatggaggctaagctatgtcaataaggaatttgctgtctgtccctcttacccaccaattgtca

SEQ ID NO: 414956 - DNA, 79 bp, Homo sapiens
cagccctgtgtgacaccaagataagtaactgaaaaggatttggtgaaacaggcaaagaccttaaatagtgcagcaaata

SEQ ID NO: 414957 - DNA, 90 bp, Homo sapiens
caggacccgaagcctaaattccaggaggcaattctgtggtgttcttggtcacacatttatggagtttctgaagggcagtggagattactg

SEQ ID NO: 414958 - DNA, 82 bp, Homo sapiens
ctggagatggagttcgactgcgagggcctgagacggctgcttggcaagccgggggccatcaagtataagaccacaggaccac

SEQ ID NO: 414959 - DNA, 100 bp, Homo sapiens
cgctcacaacactctaggaagctatgggagggatcgcttacacctgagacgaactacagaacagcacgtaccagaggtggaagtccaagtcaaacgcaga

SEQ ID NO: 414960 - DNA, 100 bp, Homo sapiens
gatcgtttcatcattggggaatcccaagctggtgaacagattgggaaaatgaggtacgttagtgttcgcgattttaaaggcaaagtgctaattgatatta

SEQ ID NO: 414961 - DNA, 119 bp, Homo sapiens
gacttccaatatgagaatgccaacatgtggttcaagaaccttgacaagctcatccggctggtaaatgcgcaggggtgtcacacctgctgccctacttctacctcctctacttcaccgcg

SEQ ID NO: 414962 - DNA, 132 bp, Homo sapiens
gtcggcctcctggtgctctgggtcgcgggcggcgcttgcaccttcctgttcagcatcgccgggccggtgcttccctgaactctttgcttccggaatccgggattgttgctgacatagaattagaaaacgtcc

SEQ ID NO: 414963 - DNA, 98 bp, Homo sapiens
ctgctctttgccggacagcagagtcccaggtgatggtgtttgtacatgctcgaaatgccactgtaagaacagctatgtctctaatagaaagagcaaaa

SEQ ID NO: 414964 - DNA, 88 bp, Homo sapiens
cgaccgggagcggcggcagcggcggcgcggaggcggctgaggtgcgagccggagccatgtctgaccaggacgtttggaagatcatatc

SEQ ID NO: 414965 - DNA, 100 bp, Homo sapiens
ggctgcctgacccaggagctgcaaaccacccaagtctgcaatcttaccagggaggccaagcgaccacccaaagaaggtccttttggaataaatcatggga

SEQ ID NO: 414966 - DNA, 102 bp, Homo sapiens
ttcaggatgggaaaccacgcaggcaaacgagaattaaatgccgagaaggccagtacgcatcctggtggggaagaagttttaagggaacaagctggaggtgac

SEQ ID NO: 414967 - DNA, 75 bp, Homo sapiens
tcgcgttttgccagcgataatacgcctcagagatcccactggcattgttggtggtaggcctgggcgggggcagcc

SEQ ID NO: 414968 - DNA, 100 bp, Homo sapiens
gaagggcacaaagggcgagaagggtgtgggccgaagatatgctcatgtggtgttgaggaaagcagacattgacctcaccaagagggcgggagaactcact

SEQ ID NO: 414969 - DNA, 100 bp, Homo sapiens
agaggtaaaggaacggtctgtttttgacatccctatatttacagaggaattcttgaaccatagcaaaggaggttgaaacggaacagtattacagtttttt

SEQ ID NO: 414970 - DNA, 83 bp, Homo sapiens
agtttggagccccggagtggggtgtcggcgcctcattcgggtggagctgagccggagacagggatgtttcagcagcccctgag

SEQ ID NO: 414971 - DNA, 100 bp, Homo sapiens
tgcgactccggagacagcccaaatatcctcggaagagcgctcccaggagaaacaagtatccacaaattacccattatcaaaaacaaatagttcatcaaat

SEQ ID NO: 414972 - DNA, 51 bp, Homo sapiens
aagctggttctctgggatataaataagttcagaatgaccgaagaagcatgc

SEQ ID NO: 414973 - DNA, 80 bp, Homo sapiens
gtgggaaccaaactttttcctgccccgggacagacacacaatgcagatcttcgtgaagactctgactggtaagaccatca

SEQ ID NO: 414974 - DNA, 87 bp, Homo sapiens
gtaaccctgccaaatacatcagcttgtaggagacagaggtggcacaagaatggctcaactctccaaatagagagaatttctatcagt

SEQ ID NO: 414975 - DNA, 82 bp, Homo sapiens
acttttctcagatgttggatatttgcttggaaaaacgtgtgggtacgaccttggtggatccataaagaacccagccaacccg

SEQ ID NO: 414976 - DNA, 75 bp, Homo sapiens
cgctgccgctgctgctgctgctgctgcgcctgggccagcttctttatgaaaaaggcatcagcctcagggcctcct

SEQ ID NO: 414977 - DNA, 96 bp, Homo sapiens
aaatccatgatggaagagatggtggcatctgtatatttaatgggggtcgagacacagctccgaattgattccttctttagattagcacaacaggag

SEQ ID NO: 414978 - DNA, 83 bp, Homo sapiens
gctcaaagaccacacagttaattgaaatgctacatgccgacatgaatgtcccctttccaggtggatctccttacgtagcagcc

SEQ ID NO: 414979 - DNA, 96 bp, Homo sapiens
ctgggcgttcatgatcctggccagcctgctcatcgcctactgcatcaccttcaggccattcagaggaggaaagagaggggaatatgaagtcagcca

SEQ ID NO: 414980 - DNA, 82 bp, Homo sapiens
acgaaagccagcgagctcctcagcctcagggcataattggaatatcatttggagaaagtgtcatggaagttctgcgtccaca

SEQ ID NO: 414981 - DNA, 75 bp, Homo sapiens
cctagatctgatgggggaagccaccaggattacatcatctgctgctcaaactttggaacaaataccgaatttcca

SEQ ID NO: 414982 - DNA, 75 bp, Homo sapiens
gcaattaaacacagaaggaaatacccagactgttactacaacctcgggcgtctgatcatgtttgagaccttcaac

SEQ ID NO: 414983 - DNA, 100 bp, Homo sapiens
gggtttggacaagcagatccaggagtacgtttcaggagacggcagcgaggctaccttgcatggtgtggtggacgagctggtgcggttccggcagaaggtc

SEQ ID NO: 414984 - DNA, 89 bp, Homo sapiens
tccctcccgaaatgaaggagttcacccctgaatacaaaggtgactctgacatcattagaagcatgccagaacagactggtgaaaagtaa

SEQ ID NO: 414985 - DNA, 131 bp, Homo sapiens
gcaacgtcggggacggctgcgcgggacggctctgtaggaaggaacttggttccccctccctcagcttccgccccaaaagccaccaaagtccttggcactgtcaaatggttcaacgtcagaaatggatatgg

SEQ ID NO: 414986 - DNA, 75 bp, Homo sapiens
ccgcggtccccaccgtgcagcggggcatcatcaagatggcgcttgaagaggctcagaaagctatccaacaactct

SEQ ID NO: 414987 - DNA, 98 bp, Homo sapiens
tgacagagagatgatatacccgaagctgctggataattttatcccagggtggctgaatcacggaatgctgagatctgtatctgtggacctgaatgttg

SEQ ID NO: 414988 - DNA, 83 bp, Homo sapiens
tcttcttcagcaactcagtacggggctcatgagcagacgcatgcgatgtatggtgaaaaaccatttcgctgtgatgaatgtgg

SEQ ID NO: 414989 - DNA, 50 bp, Homo sapiens
atttttagaccctctgtgccagagagtgtgaccgcaacaagggaaaacat

SEQ ID NO: 414990 - DNA, 96 bp, Homo sapiens
aggacgccgtcacggccgcgctgctcatccccaaggaggacggcgtgatcacggccagcgaggacagagccccccaagatgaacccagtggtggag

SEQ ID NO: 414991 - DNA, 75 bp, Homo sapiens
tcgcgagaacagaatttcttttggcacctcctctccgcgcgttcttgggggagtggtacgggtatcactttccgg

SEQ ID NO: 414992 - DNA, 87 bp, Homo sapiens
tgtctgcgagccaggattcccgggaaggtgctgagctactggtgcttcagtcccggccacagcatgcacgagctggtccgccagggc

SEQ ID NO: 414993 - DNA, 75 bp, Homo sapiens
ctctggagctttgggatgagcccagcgtggaggtcacatacctcaagaagcagtgcggttggtgagcagctcctg

SEQ ID NO: 414994 - DNA, 99 bp, Homo sapiens
tcccaactgttagcaatgacatcgactgggatttctgcttccatatagaccatcatgcagacatcagagactgggtcggacacaggctcgacagtgacc

SEQ ID NO: 414995 - DNA, 90 bp, Homo sapiens
ggcgtgcaacatggggcttgagaaaggtgtggaaggggagtatgtcccagtggaaggcgacgaggtcacctataaaatgtgctccatccc

SEQ ID NO: 414996 - DNA, 80 bp, Homo sapiens
attcgtctgtgtgagcggtttaatgaaagaaatccacctgaacttatagttgcaagtagaatatggaaaatgtcaactac

SEQ ID NO: 414997 - DNA, 75 bp, Homo sapiens
cacgtctgtctggtgataccaggggcagagggaccactctgacagaacttgatggagagtttggattcattgctt

SEQ ID NO: 414998 - DNA, 75 bp, Homo sapiens
ggaaaggaaaaacccacaaacatgttcacaacgggcatgaaaccagcaaatatcctagtaatgggagaaggtcct

SEQ ID NO: 414999 - DNA, 100 bp, Homo sapiens
tgtgaagtgcacagagctgcttgcctgaaaaaacaaaagattaccattgttcacaatgaagactgcttctttaaagactcgcagggcaatgacattaaag

SEQ ID NO: 415000 - DNA, 88 bp, Homo sapiens
cggtggacgagcaggaagctgcggctgagtcggcactgcaggaaaggaaaaggaaaattttggacgaagctgtggaattaagtcaaga

SEQ ID NO: 415001 - DNA, 50 bp, Homo sapiens
agaggaggagcgcagcccggcctcgactcctgtggaagaggtccctgctg

SEQ ID NO: 415002 - DNA, 75 bp, Homo sapiens
tgctgagaaatccagggtcacaggtgaccaagaatatggcccaggtgaccaaagccctggacaaggccctgagca

SEQ ID NO: 415003 - DNA, 96 bp, Homo sapiens
cagagctgaaggaacccaaacttggactgaagtgactctactaaggacagagcgggatgccaccagcttgtccaaagggaagttccaggagctcct

SEQ ID NO: 415004 - DNA, 105 bp, Homo sapiens
tggctcaggaacagggacagcacctcatcccctggatgggggaccacaagatcctcatcgacaggcgagaaccactgtctctgatcaacgtgcggaagaggaacg

SEQ ID NO: 415005 - DNA, 51 bp, Homo sapiens
tttgcatgagacgcttctggacagggagcagtatgcagaggggaagatgag

SEQ ID NO: 415006 - DNA, 100 bp, Homo sapiens
cagaaagaagaggaaatgactgagtcccagacgcaaacatgcagatctttgtgaagaccctcactggcaaaaccatcacccttgaggtcgagcccagtga

SEQ ID NO: 415007 - DNA, 122 bp, Homo sapiens
ctatatcagcatctttctttcaacgtacagaggctttgcctccactaaagaagtgctggaactactgctggacagtgccggtggtggtgtgcacattgagccccggtatagacagttccccc

SEQ ID NO: 415008 - DNA, 75 bp, Homo sapiens
tgagacagagtcttgctctgttgcccaggcatggattccgtgaaggaacaacacctaaacccaagagggcagctg

SEQ ID NO: 415009 - DNA, 82 bp, Homo sapiens
atgtgaacactcaagtgaagcaaaagccttccatgattacggcatcttctctgcattcagtttcatccaagtcattccggga

SEQ ID NO: 415010 - DNA, 98 bp, Homo sapiens
tgggagcctagaatgcatcagtgcccttgtggcgaatggggctcacgtcgagtgctgctgctgcctccactgtactcagacccaggtagcacaggatt

SEQ ID NO: 415011 - DNA, 110 bp, Homo sapiens
aagctgctgctgacagggaccccccttcagaacaacctggaggagctgttccatctcctcaacttcctgactccagagaggttcaagtttggacatggcacctttctgct

SEQ ID NO: 415012 - DNA, 100 bp, Homo sapiens
cagaagggaggctccaagacctcatcaacaattaagattacaccaccaccttcactgtcagatccacttaaagagctttttcgacaacaggaagttgtaa

SEQ ID NO: 415013 - DNA, 75 bp, Homo sapiens
ggattccatggtagctgggatgttagggctcaggactccctggaggaaaagcggaagcggcagcggtctgaacgc

SEQ ID NO: 415014 - DNA, 73 bp, Homo sapiens
tacagtgtctcgagcatatgattggggcagtgagaagcaaagtgctggagggcagcagggatgatgtgagcag

SEQ ID NO: 415015 - DNA, 90 bp, Homo sapiens
accaagaaaccaggttatccctcgaactcctagctcatttcgacagccttaacactcctatgccaccttcaccagctgtacaagtgcagg

SEQ ID NO: 415016 - DNA, 90 bp, Homo sapiens
ttcggcttgctcaaagcccggcaggagaggaggctggccgagatcaaccgggatggcccaatggaatcagctacagcagcttgacacacg

SEQ ID NO: 415017 - DNA, 98 bp, Homo sapiens
cctcgctcctcgatcgaggacgacttcaactatggcagcagcgtggcctccgccaccgtgcacatccgaatggaccttagctggatctccaaaataca

SEQ ID NO: 415018 - DNA, 100 bp, Homo sapiens
ggagcgcttgaaggagctgcgggaggagacatcacagctttcccagatcgggaggaaaaatatggaatgtgttttaccgctgactgaacacaaccaaatg

SEQ ID NO: 415019 - DNA, 82 bp, Homo sapiens
tttccccgcaagatggacggtttcgccggcagtctcggttcgagaaatggctgctactaccttaagcggtctgctacagtgt

SEQ ID NO: 415020 - DNA, 74 bp, Homo sapiens
ggaagatcgtcgccacctggatgctggagccatgccagtgacggtaacccgcaccaccatcacaaccaccacga

SEQ ID NO: 415021 - DNA, 122 bp, Homo sapiens
accaaactagagtgaagctaacaaagcgaagtggccatactcaggcctcattgctacgatttcagagtaccctggtaatagctgagcatgcaaatgattccctagcacccattactttaaat

SEQ ID NO: 415022 - DNA, 95 bp, Homo sapiens
tcatcttatgaaatggacaagaggaatatgcttttaaggctattaaccagggtggccttacatcagtagctgtcagagggaaagactgtgcagta

SEQ ID NO: 415023 - DNA, 101 bp, Homo sapiens
tggaacgtgcagaggagcgggctgagctctcagaagggtatgctccagaatgtttaatgcaatctaaattttatattgcctctgacgtctggtcttttgga

SEQ ID NO: 415024 - DNA, 100 bp, Homo sapiens
cttcggacgggaggggcaagccagccatcctgggaccccaggcgtgcaggttctctttgagggctttctgtctctggtcgtgatgagaacagtgtggagt

SEQ ID NO: 415025 - DNA, 101 bp, Homo sapiens
aaccgcgactgcccgcaccccctccgcgggggtcccccagaggtgcccctgtagacaatggccctcgtgtctgccgattcccgcattgcagaacttctcac

SEQ ID NO: 415026 - DNA, 101 bp, Homo sapiens
ggaatatgccaaggaaaaactggagagcttcatcaaaaatagtgatagctttgataagaatacggttggacagaatgaactgaagattacaagtgatcaag

SEQ ID NO: 415027 - DNA, 97 bp, Homo sapiens
acaagatggacaccgcggaggaagggaatgaaagctactggttgattttaaagtgcctgggcctcacaggtttggagatgtcccagaataaggcaca

SEQ ID NO: 415028 - DNA, 100 bp, Homo sapiens
cggcgacccctcggcgccgatgtccctgatccctggagcgacgacggccgctgcctaagctggaaagttcgtcaatggcgagcccaccaagaagaggtag

SEQ ID NO: 415029 - DNA, 100 bp, Homo sapiens
gatgccatcgtatactgtaactttaatcagttgtataaaattgacccttctactttgcagatgtgggcaaacgaattcgtgatgatcgtggttttcggct

SEQ ID NO: 415030 - DNA, 75 bp, Homo sapiens
ccctcggcctcggagcaacgagcgcagcgccggagtgtggccatctggggccgtgtggtatttgccactcaggag

SEQ ID NO: 415031 - DNA, 89 bp, Homo sapiens
cagaatgaagacttgaggcgaatggccgaatctctccggataagttctgaacgtcgaaaagaaaagtctcgagatgcagccagatctcg

SEQ ID NO: 415032 - DNA, 82 bp, Homo sapiens
tctcggggcgggcgccgcgggacctctccgggccatgggctgaccccgcactacatctacccaccagccatcgtgcagccca

SEQ ID NO: 415033 - DNA, 100 bp, Homo sapiens
ggggacccatcacctcattcagacggcagacccccaaggagtgacctatgctgagctaagcaccagcgccctgtctgaggcagcttcagacaccacccag

SEQ ID NO: 415034 - DNA, 101 bp, Homo sapiens
ccagcatcaagatgatttatggtaataagttgacattcagggacgtggccatcgaattctctcaagatgagtggaaatgcctgaactctacacagaggact

SEQ ID NO: 415035 - DNA, 100 bp, Homo sapiens
ctaagatcggaagatgagtgagcttgaccagttacggcaggaggccgagcaacttaagaaccagattcgaaatttttccctagattggtgtaaacagcca

SEQ ID NO: 415036 - DNA, 98 bp, Homo sapiens
ctttaagaaaatcagataacttgtactggagagaaatcctacaagtgtgtttcagatacaccacctccaccgccacctgtggaagaaccagtctttga

SEQ ID NO: 415037 - DNA, 98 bp, Homo sapiens
agacatcaagctctttgggaagtggagcaccgatgatgtgcagatcaatgacatttccctgcagttcgatatctcaatgcctatactggaatagtgct

SEQ ID NO: 415038 - DNA, 100 bp, Homo sapiens
ctggtcttgaagagcagcttagcgaaagaaaccctctctgagttcttgggcacgttcatcttgattagaccatttgtttgtgactatgaagggtgtggca

SEQ ID NO: 415039 - DNA, 75 bp, Homo sapiens
aacaccttgagttcagctgctctgagaagagcacctactgtgccaccatggtccagcactgtgaagccctcaacc

SEQ ID NO: 415040 - DNA, 100 bp, Homo sapiens
ccagaagtcaatccccactggcaccatcctggccatcgccaccacctctgctgtctatggcctcacctactgctattccatcgacctctcagagcgagtg

SEQ ID NO: 415041 - DNA, 82 bp, Homo sapiens
cgggcgccaccgctgccacctccgcgaggtatcatgatattagctggtttgacatcaagtcatttgtgagtcatcagatctt

SEQ ID NO: 415042 - DNA, 100 bp, Homo sapiens
ttcggtgctgcggctgtgtgttttctgagcgagccttgaaagagataaaagcggaagtttgccacacgttgctgattgttggaggttcttttggtcttcg

SEQ ID NO: 415043 - DNA, 98 bp, Homo sapiens
tccctagcagcagccgccgccagagaggcccgcccaccagttcgcccgtccccctgccccgttcacaatacttcatcacctgattcttccaatgagaa

SEQ ID NO: 415044 - DNA, 100 bp, Homo sapiens
cgacaggacgttggggcggcctggctccctcagaacatctgctcaaattaatgaccatgggggatatgaagaccccagactttgatgacctcctggcagc

SEQ ID NO: 415045 - DNA, 83 bp, Homo sapiens
ccggaagaacggtgaatttcccccgcagaaggaagaggcccagcagaagggactcgctgagccaccccccgccccactccatg

SEQ ID NO: 415046 - DNA, 50 bp, Homo sapiens
ctctcaagtagctgggactacagcagagcccacacgatgaagacccccag

SEQ ID NO: 415047 - DNA, 83 bp, Homo sapiens
gctgctcccttcgccttcgccctttccacctcgcggcagttcgatctattaatgagatgaagcggttggaagaaatgtcaaat

SEQ ID NO: 415048 - DNA, 90 bp, Homo sapiens
accgtgtgtcagaacaatcttgaatcatgaagctactaaccagagccggctctttctcggaatccgagcggctggaactcatgaacgcag

SEQ ID NO: 415049 - DNA, 85 bp, Homo sapiens
ataagctcattttaattgccagaaacaaagggcacgaccataataacatccctgacttctgtgctgcacaatgacaaagaattcc

SEQ ID NO: 415050 - DNA, 75 bp, Homo sapiens
acagtagtcgctgttggatcgggttctaaaggaaaggttctgctccagacgagcccttaccacgttgactcactc

SEQ ID NO: 415051 - DNA, 73 bp, Homo sapiens
ggctgcgccggaggcctgactctgggagcacgcagttctttcagagcacggcttcggccccatcactaccgac

SEQ ID NO: 415052 - DNA, 75 bp, Homo sapiens
acgcccagcagcagcagcaacagggctttttccgcagaagtattcagaagaatatgatttacacttgtcaccgag

SEQ ID NO: 415053 - DNA, 97 bp, Homo sapiens
ttaaggtctggtcggatggggcaggatggctgcgttgacacgtcttatttaatccacatcatagggtctccgtctctccaccgggggcttcatcctt

SEQ ID NO: 415054 - DNA, 117 bp, Homo sapiens
ttgccatcaacatggattacagataccattccccgaagatgtccatttgtgccacagatgggtgatgagagcccataggcagcatgtcatccatggaagtgaacgtggacatgctgg

SEQ ID NO: 415055 - DNA, 50 bp, Homo sapiens
cacccaggatggtgcaaacccatagccctgcctgatgtggctctgggaat

SEQ ID NO: 415056 - DNA, 75 bp, Homo sapiens
cagcatcatcaaggacttcaccaagcaggaatgggtccctattatccagcaggacattcagagccagcggaaggt

SEQ ID NO: 415057 - DNA, 100 bp, Homo sapiens
tctagtaacccgcgaaatgatgggatagcgttgcaaatccttaaaagagtcttaacgcctcactaagcagtcttttgatcacacctttcccatctccaag

SEQ ID NO: 415058 - DNA, 88 bp, Homo sapiens
cagagagagaggtggacagatctgagagatactgagccaccttctgggtgaaccctcagttcaagatccggctggatgagacggatga

SEQ ID NO: 415059 - DNA, 127 bp, Homo sapiens
ggacacccccgtgccccgaagacataaatccctgagtgcccgggaggagccttaacaagcgcacggagccctcaagatcatggaagggaagtggttgctgtgtatgttactggtgcttggaactgct

SEQ ID NO: 415060 - DNA, 83 bp, Homo sapiens
gccagtcaaaccagaccacgaatcccaagctaggccccaaggcccagaagaaatttaagcgtcttatgctgcatcggataaag

SEQ ID NO: 415061 - DNA, 98 bp, Homo sapiens
ctcgaaggaagatcagtctatgaagaagattttgaggctccttttttggaaatgtctgcagaattttttcagtgcaaaatggcaactcttaaggaaaa

SEQ ID NO: 415062 - DNA, 89 bp, Homo sapiens
cccgaaaacggaagcgcagggagaaggaagaggtgtttgaaaagggtcatgtaggtacaacagcaaccaagaagatcgatgtctacctc

SEQ ID NO: 415063 - DNA, 83 bp, Homo sapiens
cgggggtggagaggcgagcggagcccgcggggccaggccagctgcgggccgtccagcggctgtgccacttctacagcgccgtc

SEQ ID NO: 415064 - DNA, 97 bp, Homo sapiens
ctgaggttgtggaaaaggaagattactcagagattatagggagcatggtgctacagttgaaactccagcagcgccggacccgggaagaactggtgag

SEQ ID NO: 415065 - DNA, 100 bp, Homo sapiens
ccttccttggctcagtgcccttcaccactgctggctttttgctgtagctccacattcctgtgcattgagggatggaacttgctaaggaagaaaagtgtga

SEQ ID NO: 415066 - DNA, 96 bp, Homo sapiens
gtgactgctcaatggagagaaggaaagtcaatcgtaggaagaacacagtacaggtagatgacattaatgctgataagaatatctcttctgcacaga

SEQ ID NO: 415067 - DNA, 100 bp, Homo sapiens
aggaagaggaggaggaagaagaaggtgatggcagaggaagcggctgctgagattactaggaagctggagaaacaggagaagaaacgcttaaagaaggaaa

SEQ ID NO: 415068 - DNA, 101 bp, Homo sapiens
ggtctcctgggaccactcgttgctgacagtcagaaacaagagtgagccatggagctacgtgtggggaacaagtaccgcctgggacggaagatcgggagcgg

SEQ ID NO: 415069 - DNA, 83 bp, Homo sapiens
cgcagggcctgcagcgggagctggacggcgagcgcgagcggcgcgagaaagtcctggtgcttgatggtcgaggccatctcctg

SEQ ID NO: 415070 - DNA, 75 bp, Homo sapiens
cggcagtctctccctgccaggctcttcatccaagacatgcacatgatggtgtccaagccagaacagtgggtaaag

SEQ ID NO: 415071 - DNA, 75 bp, Homo sapiens
gaagctgtatcttatctatggaagataaagcatggagttggctaatggatgctgaagtggtgacacgcatctttt

SEQ ID NO: 415072 - DNA, 100 bp, Homo sapiens
atcgtccctgccaactttccaagtctggggatggccaggtattttgaaggtggcgtctcatctgtctacctctgggatctggatcatggctttgctggag

SEQ ID NO: 415073 - DNA, 75 bp, Homo sapiens
tcctactctcctactcagaaagagaggacagaaaaatggttcgtattgttcttacaaagacaaagagagatgcag

SEQ ID NO: 415074 - DNA, 96 bp, Homo sapiens
gtcccttcgcctccttcaccgccgcagaccccttcaagttctagtcatgtaagactttgaccccgacgcaggcttcagtgattgccgcggatcaga

SEQ ID NO: 415075 - DNA, 75 bp, Homo sapiens
aataacctaatcggcttcatgtcactcgccacactcacagttcagattcagaacaagaaagtggacatctctaag

SEQ ID NO: 415076 - DNA, 50 bp, Homo sapiens
gaaggcctcgctggagatcgagtaccaaatggactagaggcttttaccag

SEQ ID NO: 415077 - DNA, 96 bp, Homo sapiens
gccgccttccccaggcagtggaaccttcgggctcctctgcgctactatgactcaggtgaggacacaagctgtaaaggccacattgatctggctgaa

SEQ ID NO: 415078 - DNA, 100 bp, Homo sapiens
tggcgcacattaccattaaccagtacctgcagcagcttttctgggagaagaggctacaaggacttagtgcatcagatgtaacagaacaaattataaaaac

SEQ ID NO: 415079 - DNA, 100 bp, Homo sapiens
agtggagctccctgtacgcgcggccctagtcggctcctcaacgtggagcgatgggaggccttgagaagaagaagcaggaggccactgtctgcagctcccg

SEQ ID NO: 415080 - DNA, 83 bp, Homo sapiens
cttgaagtctcctaagtgtaaactacaagttctaggatcaatgtccgagttaccaccatggatgcagagctggagtttgcaat

SEQ ID NO: 415081 - DNA, 75 bp, Homo sapiens
aactgaggcctggaatttgattaactcattcaaggttacccagttgactaatagggatgccaaaggaaaaatatg

SEQ ID NO: 415082 - DNA, 82 bp, Homo sapiens
cctggtccgctgcctcttcggccatggaagctgccggcagccctgcggctacggagacagttgaaatggatgcagtcagaac

SEQ ID NO: 415083 - DNA, 87 bp, Homo sapiens
aagaggcagaaaaaaggaaaacaggaagaagagaaacctggggaggagaagacaatcttacatgacatatctgaagagatggattaa

SEQ ID NO: 415084 - DNA, 82 bp, Homo sapiens
gaaggttcagttggcaaaccagatatatgacttgggtaagatgatcatgcaggataaactggagaaggagcggaatgatgct

SEQ ID NO: 415085 - DNA, 83 bp, Homo sapiens
cagaaagttgatataggtggacttttttacaggtttactcctggcttgggggcattaggaagcactggaggctcttcgggaac

SEQ ID NO: 415086 - DNA, 78 bp, Homo sapiens
atgtcccatctgttacagttctgtgcataagaaggatctcaagagttcgtctaatgattgaaaatccttacgagaccc

SEQ ID NO: 415087 - DNA, 100 bp, Homo sapiens
ctgtcccggcggcaaaggcaagagcatcaactgctcagtgttgacatccctgcctgcgctggcggtcccacccccgactcccaccaaagcggcacctccc

SEQ ID NO: 415088 - DNA, 75 bp, Homo sapiens
aggtgttgggtgcagagagcgcccctcccggacagccctcctgattctggggcctcccaggatggagcacctgag

SEQ ID NO: 415089 - DNA, 83 bp, Homo sapiens
gatggcatcattcgtccttatgacagacaggaatctgagggctctgacttacttgaggcagaggcaaggctggcagcaaaacg

SEQ ID NO: 415090 - DNA, 74 bp, Homo sapiens
cccggagacagcggcacagaggtgcttctgccaggtggtgatggcacttctcaaatactggccaaagactcaca

SEQ ID NO: 415091 - DNA, 98 bp, Homo sapiens
accactgaacaatatcagaaagctgctgaagaggtggaagcaaagttcaagtaaaagagaacctgctttcatgcaagatgctgctgcactgcaaacgg

SEQ ID NO: 415092 - DNA, 80 bp, Homo sapiens
aacctgaagactctcttgtctgtcggaggatggaactttgggtctcaaaggttgtccccccggcacgctccacagctggt

SEQ ID NO: 415093 - DNA, 97 bp, Homo sapiens
gatcctcaggctgtcggaggacttgcttctgcactagacaatcgaaaacagagttcagaagggcaatttcttgatctcctggcaggggatgaagaag

SEQ ID NO: 415094 - DNA, 112 bp, Homo sapiens
ccgcgcgcagggcctgcagcgggagctggacggcgagcgcgagcggcgcgagaaactcattgctatggacagtgctatcaccctgtggcagttccttcttcagctcctgcag

SEQ ID NO: 415095 - DNA, 80 bp, Homo sapiens
ccattcctggaggccccaaatttgaacctcttgttcgagacatcaacctacacctcatctagttgaatctgaagatgtgg

SEQ ID NO: 415096 - DNA, 89 bp, Homo sapiens
cctccccagccatgtggaactgttatcaggacaccccatgggagagacttcgatgactctttagaaaaatgtgaagagtatttgagccc

SEQ ID NO: 415097 - DNA, 127 bp, Homo sapiens
tgattcatcgaggaggcaatttgtgttcaggtggtgcaagcacagctggcaaaaggtcttgtttaagttcaaaccttgtactactcagctgatcacaagctgcttgatgggaacctactagatggac

SEQ ID NO: 415098 - DNA, 82 bp, Homo sapiens
gtggctcctgctgcacatgtatgacagtgacaagcttgtgctgcattgcacctgtcctcgcggccaaggtgctcagaggcgt

SEQ ID NO: 415099 - DNA, 100 bp, Homo sapiens
gtgacccactgtggacagatgaaacgaaaataccgagtttgtaatgtgactagacggccagccagtcatcaaacacaaatttacatgtattggagaccag

SEQ ID NO: 415100 - DNA, 74 bp, Homo sapiens
ttgtggatcgctgtgatcgtcacttggtgaactggcacaaaggttaatctcaagatgccgctagtgaaaagaaa

SEQ ID NO: 415101 - DNA, 100 bp, Homo sapiens
acggcatcttcccgaggcccagaatccaccgtcaggcataaattgattattcctcgcccacatctgtgccagctctagaggacaaaatcccagtccttgg

SEQ ID NO: 415102 - DNA, 100 bp, Homo sapiens
gtttgtttctctgtatggcacagaagaatatttgcctacaacacagcagtcccctcaggatgagcaggaaaagctcttggatgaagccatacaggctgtg

SEQ ID NO: 415103 - DNA, 75 bp, Homo sapiens
tactagagccaatcacctgtcatgcctggaacagggatcgtactcatttaaattccaggttgtcatcaatggccg

SEQ ID NO: 415104 - DNA, 96 bp, Homo sapiens
ctgcagccaacccttcagcaagacgtttgatgcaaatgatttgtatcaggggcagaattttaacaaggtcctcagttccttagtgactctaaataa

SEQ ID NO: 415105 - DNA, 98 bp, Homo sapiens
agggactcgaggccctggaaggtactaggcagacctcagaggaaaagctgcttccatttcagtggagcagtagagaactgtggactattctgcttgga

SEQ ID NO: 415106 - DNA, 101 bp, Homo sapiens
cacgccgcccaggagacccctctgctgcaccacttcatggaagaacctctctatccagggcctccgctggtggctacagtggctgggcatcaacttcaccc

SEQ ID NO: 415107 - DNA, 83 bp, Homo sapiens
ggagtatctggcctccatcttcggcaccgagaaagacaactgaagagaaggcgcgggaggcagagagcaaagctcggacatta

SEQ ID NO: 415108 - DNA, 78 bp, Homo sapiens
attcgtgaagaagcccatcagtatttcttgaataccaggcactatgtcgtccgaggcccagagatgaccccttatgaa

SEQ ID NO: 415109 - DNA, 82 bp, Homo sapiens
gaagcctgtaggaaagcggaagcggcctggcaggggaaggatcgaggttgtgaccgagattcccgacgagagagactgaggg

SEQ ID NO: 415110 - DNA, 75 bp, Homo sapiens
ctgtccactcctctcccagagccagacctaactcgggataggatgggatctgcactgatgattgaaacagcaaga

SEQ ID NO: 415111 - DNA, 100 bp, Homo sapiens
cggcggcgccccagccagcctccaggcccagaacggagccgccttggcctcggggtctccctacaccaacgtggagaccatcctgggcctcacaggagcg

SEQ ID NO: 415112 - DNA, 96 bp, Homo sapiens
acaaagcctttgtaaatcatatgatgagtggttggaataaaaacagggttgaatgagttccagaaagcagggttctcaacctcgtggacagcaatc

SEQ ID NO: 415113 - DNA, 88 bp, Homo sapiens
tcggatttttgcagaaacacaatgaaaaagcttgtggtgaaggggggcaaaaaaaagaagcaagttctgaagttcactcttgattgca

SEQ ID NO: 415114 - DNA, 83 bp, Homo sapiens
acagatacaaacggagatatctttttcatggagggaagacgcttccctcctggggccaggccctgctgtcacaggacttcgag

SEQ ID NO: 415115 - DNA, 82 bp, Homo sapiens
ccgagaatagctccgtccagcagttcccagaggtccacttgggccagtggtactttatcgcaggggcagctcccaccaagga

SEQ ID NO: 415116 - DNA, 95 bp, Homo sapiens
gcctaggagctgtccgcagggaggtcatgcaagacaagataatctgccttccgaaaagagtgcagcctgctcagaaccactcttccctttcgaat

SEQ ID NO: 415117 - DNA, 75 bp, Homo sapiens
ccgagatgctgcgggcctgtcagttatcgggtgtgaccgccgccgcccagaacatgctgtttgagagcatccagg

SEQ ID NO: 415118 - DNA, 83 bp, Homo sapiens
cccacaggaccccaagcagaaggagtccgaggatcagaaggactgtacatggtgaatggaccaccacattttacagaaagcac

SEQ ID NO: 415119 - DNA, 75 bp, Homo sapiens
gtgatgttggagaactacagaaacctggtctccctagaattagacctttacgagaagcacagttttgtcttcagt

SEQ ID NO: 415120 - DNA, 76 bp, Homo sapiens
attgatggaacagagaaagcagagtgcacagaagaaaggactatcagacttggcttgaccttagagaatttgaaac

SEQ ID NO: 415121 - DNA, 74 bp, Homo sapiens
agaacagtgaaccatgtgccggctctagttctgaatctgatctccagatcatagaagaagatgctgctcttgta

SEQ ID NO: 415122 - DNA, 82 bp, Homo sapiens
gggaaccctggtcaccgtctcctcagcgctgataaagcagtttgtgtccgacgtggcctggggggagctggactacctggtg

SEQ ID NO: 415123 - DNA, 75 bp, Homo sapiens
tttacatacgagaatggcttgtgaaatcatgcctctgcaaagctgggatagatgggcagcagaagatcatgtgct

SEQ ID NO: 415124 - DNA, 50 bp, Homo sapiens
tcacctccggggtggtgcgcaaggtcctgatccggttccccatgcagagg

SEQ ID NO: 415125 - DNA, 74 bp, Homo sapiens
cgacgggcgggtggtactggtcaccggcgcgggggcaggattgagagctactcatgtaagatggcaggagacga

SEQ ID NO: 415126 - DNA, 51 bp, Homo sapiens
cgagtggccaccggagactgaagtacagagttgatctctctaatgtattag

SEQ ID NO: 415127 - DNA, 100 bp, Homo sapiens
caaaaattcttcctgggacacaacgacgacattatcagtgttttacctcaatcatatatccacacaagtgcttctcttgacatttctcgaaaatgggaga

SEQ ID NO: 415128 - DNA, 83 bp, Homo sapiens
cagaaggatatcgacgtcgtgatccagaagtccagagctgaggactgcctgtttgcaggtgatgtgtccaatctagatcccaa

SEQ ID NO: 415129 - DNA, 80 bp, Homo sapiens
ccaacatggacactgtgggcacgtttgagatggcagccgtgatgtcacagatgaggtttatataactttccaagacaagg

SEQ ID NO: 415130 - DNA, 127 bp, Homo sapiens
cgacttcggtttcagttggagttggaatttgtgcaatgtttagccaacccaaattaccttaatttatgactatgaatatgatgaaaatggtgacagagtcgttttaggaaaaggcacttatgggata

SEQ ID NO: 415131 - DNA, 135 bp, Homo sapiens
gcattgtgcaggagaagctgctgaatgactacctgaaccgcatctttcctcttctgaccatgcacccccagcagccaccggcaggaaacttccattttagaagaatacagtatcaattggactcagaagctggga

SEQ ID NO: 415132 - DNA, 100 bp, Homo sapiens
tcaatgacacttttgtccatgtcactgatctttctggcaagtattgatgaagatgaccctactgctgatgataccagtgctgctgtaactgaagaaatgc

SEQ ID NO: 415133 - DNA, 95 bp, Homo sapiens
cagcatgtatcagccgaggtggagctgcggggccctggcatgaaaggctgtgacaaaccctgtgcccacgctgcctccactgccgggagactcag

SEQ ID NO: 415134 - DNA, 98 bp, Homo sapiens
atgcagaatccaaaacatcctacagatgagcatcaggattttatggatgagcaaaaacgactaaagaagcttcgtggaaaggagaaaccaaagaaagg

SEQ ID NO: 415135 - DNA, 51 bp, Homo sapiens
acgagctgtgcgaggtgatcggaaatgtgctggaattgatgttcgtctgtg

SEQ ID NO: 415136 - DNA, 75 bp, Homo sapiens
gtaaaaatccatgtgggacggccccggggcgagcatcggaaaggtcctttgtcatccagcaaatcccaagcagca

SEQ ID NO: 415137 - DNA, 98 bp, Homo sapiens
aacttccagcagccggcggacgggattgtcgatcagtcacaacaagcataccaagaagcttttgaaatcagcaaaaaggaaatgcaaccaacacatcc

SEQ ID NO: 415138 - DNA, 80 bp, Homo sapiens
atggcatccagagagaggctctttgaactttggatgctttattgtacaaagcctccacaaatgggaagtgttcctgtaat

SEQ ID NO: 415139 - DNA, 100 bp, Homo sapiens
ctctccatcacctgctctgctcttataaggatccgacctggctcccaccatgagtgctgagcttaacgtgcctatcgacccctctgctcctgcctgccct

SEQ ID NO: 415140 - DNA, 98 bp, Homo sapiens
agactccagcagccaagatggtgaagcagatcgagagcaagggctttgttcgcgggggtcacagctctcatggctgcagctagcgtgaccccccctgg

SEQ ID NO: 415141 - DNA, 83 bp, Homo sapiens
ctaagattcaacaaactatttttgaatgaagatgtccaaaccaggttgcagagaaggtggcctccagaatcgccgagggcttc

SEQ ID NO: 415142 - DNA, 98 bp, Homo sapiens
cccagaaagtccaagctcgtgattctggatgaaattgaagaacataacatcaaaatctatcacttacctgatgcagaatcagatgaagatgaagattt

SEQ ID NO: 415143 - DNA, 83 bp, Homo sapiens
ctcgggtctcgggggccgctctgggatcccggccaccagcaattgtccgaatgtctgtaaacctgtggaggagacacagcgcc

SEQ ID NO: 415144 - DNA, 82 bp, Homo sapiens
cagccgatccagcctgcggagcctgtggggcaggagttcaaagaaggacgcagagccagccacacagccccacaggtcctct

SEQ ID NO: 415145 - DNA, 75 bp, Homo sapiens
ttgccaaggagacatccctcttaggggttggtgccatctacatccgtcgccggccccgtgtgcgtgtggaggccc

SEQ ID NO: 415146 - DNA, 82 bp, Homo sapiens
agcgtcccggccttcatcgacatcagtgaagaagatcagtgcgtaaattcacagagaaacacgaatgggtaacaacagaaaa

SEQ ID NO: 415147 - DNA, 100 bp, Homo sapiens
aaaggactccttactcaattaagtgaagcaaagcgtaaacaagcagagattgaatgcaaggctgaaggggatgctaagggagataaagcaaaggtgaagg

SEQ ID NO: 415148 - DNA, 82 bp, Homo sapiens
ccgggcaccgcggtgctgctggtcacggccaacgtgggctcgctcttcgacgacgattcactacaacattttctattgccta

SEQ ID NO: 415149 - DNA, 98 bp, Homo sapiens
tttcttccagcttctgctgtccttctttgtggagagcaagatctgccgacaccccaggccatcgagccccaggccatcgtgcagcaggtcccagcccc

SEQ ID NO: 415150 - DNA, 83 bp, Homo sapiens
gcaataagcccatcttgctgcaccaagtggaggcgctagccgcggaaccctaaggactctgcaatatgaataattccctagag

SEQ ID NO: 415151 - DNA, 100 bp, Homo sapiens
gtctttgtgtcctgagatcaaatggcacttcattggccacctacagaaacaaaatgtcaacaaattgatggggggtccactggacggggcctgagctaca

SEQ ID NO: 415152 - DNA, 100 bp, Homo sapiens
tgacttgtgcctgtctcatattcttctgcatcttcattgtgcagattctcgtgctgccaaatattgctgacagacagaacgccttggaggctgagtggag

SEQ ID NO: 415153 - DNA, 51 bp, Homo sapiens
cttcactctgggaaaaggcactgaagttggagttagccctgcgtagccagt

SEQ ID NO: 415154 - DNA, 90 bp, Homo sapiens
gaagcaactgaagaaaatgtttgaagcaacaagattgcttgcaacaattgttatgcttcagtttaagtatagtgtgcctgggccgggtgc

SEQ ID NO: 415155 - DNA, 90 bp, Homo sapiens
ccagtgtggacagcaccctggctttcaacacctacgtccacttccaaggctcccagccaacctctgataaaccctcccagcggccatcag

SEQ ID NO: 415156 - DNA, 98 bp, Homo sapiens
aatttctagctttgtaggagcatggcttggagcacttcctattccactggattgggaaagaccatggcaggtcttttatgccactctggatcaaatct

SEQ ID NO: 415157 - DNA, 117 bp, Homo sapiens
cgactaccccatgttacccacaattccactctctgccttctctgaccccaagaagaccaaaccatcccacggctccaagctggtcagtgagaaggtcggaggggccgaggggaccaa

SEQ ID NO: 415158 - DNA, 75 bp, Homo sapiens
aaacagctatggtgatgattagagacatactaatgtacatgtttgcttcagtgtccccaacagttcctgaattct

SEQ ID NO: 415159 - DNA, 75 bp, Homo sapiens
gcatggacaagcgaatttcagtcagtgcactactgcagtcttcagttaagcaacaagtagaagctattgaaaaac

SEQ ID NO: 415160 - DNA, 75 bp, Homo sapiens
ccatcgcaaacccaaagatccccgttcctggagattctgattgaggattttttatcaagcagaaatgcatcgaac

SEQ ID NO: 415161 - DNA, 100 bp, Homo sapiens
aatattacagagctttagaagaactggttttgacctgtagcagagaaccaattctggagaacagcctcacttctttgattgaatacttacataatgcatt

SEQ ID NO: 415162 - DNA, 98 bp, Homo sapiens
cgacatccctgaagccgggaaatggtgccgacttcacaaacaccttctacttgctgagctccttcccagtggagctagagtcgccaggcctggcggaa

SEQ ID NO: 415163 - DNA, 80 bp, Homo sapiens
tgtgcagccgcgaggaggcgcgggaggtgttcgagaacgaccccgagacgatgctgtgggccctgagggaaaggatcaca

SEQ ID NO: 415164 - DNA, 90 bp, Homo sapiens
tgggccgcttcctgcaagaaaacaagcagcttctgcacgacgcactggcccaggacctgcacaaggaatttgcagcaccatcaacagatg

SEQ ID NO: 415165 - DNA, 110 bp, Homo sapiens
gcgagctgagtggttgtgtggtcgcgtctcggaaaccggtagcgcttgcagcatggtgtccctggccagtgtccttccacctgtccacaagcatggggaacatcttcgcc

SEQ ID NO: 415166 - DNA, 76 bp, Homo sapiens
aaaatctcaaatggagaaagtgaagtacagcaggcagaaggagaagacagcctgaagaagatgcagctgatggagc

SEQ ID NO: 415167 - DNA, 100 bp, Homo sapiens
aagatgagcaggaatgttttgctacaaatggaggaggaggaggacgacgacgatggggatatcggtcagcccaaggctgccccctcggtcactctgttcc

SEQ ID NO: 415168 - DNA, 98 bp, Homo sapiens
ttcttcgtgaggctgctcttcgagcggtcacatttagggcaggcaaaacataagggatatagccctcctgagagtagaaaatctaattctaaggcacc

SEQ ID NO: 415169 - DNA, 98 bp, Homo sapiens
aagaaggtagaaatcatcataggtaatttatgctgccagggatgcccagatttcagtggctctctttcttcatcttcttggataccctttctctagga

SEQ ID NO: 415170 - DNA, 83 bp, Homo sapiens
cttcaactctgaaccagaaacccttgttcacaccctttccagaaattcttggctggtaaccgcgaaaccgactggagcaggag

SEQ ID NO: 415171 - DNA, 134 bp, Homo sapiens
aaatctggtgaaattgccggcaagagggagttaaggacattccaggcagaggcaagagtgctgcagcagctcccagtccagtgctaggaaacattcccccaggagatggcatgccagtaggtcctgtaccacca

SEQ ID NO: 415172 - DNA, 100 bp, Homo sapiens
ctaccatggtctccggcagcagcggcctcgccgccgcccgtctcctgtcgcgcagcttcctccggtcgacatgttaaaacgggtcagttggcagccatca

SEQ ID NO: 415173 - DNA, 100 bp, Homo sapiens
gccgggatgccgcccgcttccccatcatcgccagctgcacactcttggggctctacctctttttcaaagttatcaatactctggctgaccatcatcatcg

SEQ ID NO: 415174 - DNA, 100 bp, Homo sapiens
ccgagcggccgaggcgccgcggtcggctctgggactcgtctggcgtccctcagtcggaggcctgcaggactttggcacccgagaaggacaaggccaccaa

SEQ ID NO: 415175 - DNA, 100 bp, Homo sapiens
cgtcaagcagctgtcggccaagctcatcgccaacgggtgacgagaacaagtcagtgcgcgaccgtttcaacgcccgccagttcatctcctggctccagga

SEQ ID NO: 415176 - DNA, 98 bp, Homo sapiens
gaagaacagctgtggaaagaagttgcaaaacactggttctcctgtgcctcctgttggctctctttgcatctggcctcatccaccgagtctgtgtcacc

SEQ ID NO: 415177 - DNA, 80 bp, Homo sapiens
acccgcttccagggggacgcaacttctcagccgaggcctgcctggagccccagatcaccccttcctactacaccacttct

SEQ ID NO: 415178 - DNA, 96 bp, Homo sapiens
agcctcgtcaaccagcagagcttccaggacatcaagcccatgcgggaccagatcatccgcgtgaagcgacatggagattaagtagcttgcccaaga

SEQ ID NO: 415179 - DNA, 98 bp, Homo sapiens
cctctcttcgcctcgcctcgggacccgcggtccccgctcttgctgactgaaactgttgaggagcccatggaggaagaagaagcagccaaagaagagaa

SEQ ID NO: 415180 - DNA, 125 bp, Homo sapiens
aggctttcaaggatatgctgtattcagctcaggaccaggcaccttctgtggaaggtactaggttttgacaagcttgcatcatgcgtgagtataagctagtcgttcttggctcaggaggcgttgga

SEQ ID NO: 415181 - DNA, 97 bp, Homo sapiens
ttcccctgaacagcattctatcatggaaggaggagatgaagggcaagggccaaaatgatgaaatcatgaccaccccaggaaaagagaactttcgcct

SEQ ID NO: 415182 - DNA, 82 bp, Homo sapiens
gtcaagatctcgttccagttccagagaacgttcgagatctcgtgggtcgaaatcaaggacctgaacgcctacaagaagcaag

SEQ ID NO: 415183 - DNA, 99 bp, Homo sapiens
gtggaggcaggctgcggcagacggcgacagtggcggcggcgccatggcagggcttgcaggggacggcaaaacagaacagaaaggcggagataaaaagag

SEQ ID NO: 415184 - DNA, 50 bp, Homo sapiens
aagacatatccttacaggcagagagatatgatacaccaacttctaaaaag

SEQ ID NO: 415185 - DNA, 79 bp, Homo sapiens
ccgggccccgatggccccgaccgcgtgctggagctcttcgacccacccaaggattttttatcaagcagaaatgcatcga

SEQ ID NO: 415186 - DNA, 102 bp, Homo sapiens
tgtatctcaacaccctgagtgcggatttctgctatgatgacagaaggacagaataacgggctcccagattcacaagccccaccaagaggatcaccccaggaa

SEQ ID NO: 415187 - DNA, 100 bp, Homo sapiens
gccgaggcgcgggagggcgcagcacgggagccgtccgggggcagcagcggcagcgaggcggcgccgcaggatgagctcccagctcctccagcagccgaca

SEQ ID NO: 415188 - DNA, 90 bp, Homo sapiens
ccctgtttgagaaaaggcctaagaattttggcattggaagtcgaggctcaagaggttctcaaattgatagtcacagtagtaatagcaact

SEQ ID NO: 415189 - DNA, 100 bp, Homo sapiens
ggagagccactgacgccgggaccgggaccgccgccgccgccgccaccatggtaaatggccaagacctaaagaacctgctgcaccaggatgctgtagacct

SEQ ID NO: 415190 - DNA, 82 bp, Homo sapiens
caacctcttgaggatcgaatcttcactcccgctgtctcagcagtctacagcacggtggagcatgaccccgcccatggtgaac

SEQ ID NO: 415191 - DNA, 101 bp, Homo sapiens
ttctgcatgaacatctccagccaggaacgtgctggccaaagcgctctatgacaatgtggccgagtccccggatgagctctccttccgcaagggtgacatca

SEQ ID NO: 415192 - DNA, 82 bp, Homo sapiens
cttcatcaaaaatagtgatagctttgataatctttaacacctctgtgtgaagatgacaaccaggcacaggaaatcattaaga

SEQ ID NO: 415193 - DNA, 138 bp, Homo sapiens
gcagttgtccaagtatgaatctcaactttcaacaaatgaggagaaagtagatacagatgatcctgactatagcactagtgaaatgctggtcaacatgggaaacttgcctctggatgagttctacccagctgtgtccat

SEQ ID NO: 415194 - DNA, 100 bp, Homo sapiens
gggcatgtgtcgtctggctacgtggagcggctgaagggcatgtccctgcttgtcagggctgagagcgacggttggccgttgtccaatgtgttgctgttat

SEQ ID NO: 415195 - DNA, 100 bp, Homo sapiens
gaagtgcggtttggtttccttgtcaacggaggatgaagtgaacagctgagcagctcgcagagagcagaccccaactgtaaacttgaagacaagactgaag

SEQ ID NO: 415196 - DNA, 75 bp, Homo sapiens
gacagattcgcagtggtcgcttcttctccttgttatgccatctcagaactatgaccttccccagaagaagcagga

SEQ ID NO: 415197 - DNA, 51 bp, Homo sapiens
tgcttgtgctcctaacaacctgtctcttgatggcattcctgcgtcctttac

SEQ ID NO: 415198 - DNA, 96 bp, Homo sapiens
gattctcctatgaagacctcattccctgcgtcttgagcctccataagaagtggtcccaggtgtgacaccttcagcaggtctcagggaagatggcag

SEQ ID NO: 415199 - DNA, 83 bp, Homo sapiens
gcaactggaccattttacattcccactagcagggatgaggattttgtgggtcgggatgattttgatgatgctgaccagctgag

SEQ ID NO: 415200 - DNA, 90 bp, Homo sapiens
gaactaaagaaagctttaaaagaaaaagaaaacagattattattgcaacaaagttatgtcacgcatctgatgaagcgaattcagagaggc

SEQ ID NO: 415201 - DNA, 51 bp, Homo sapiens
gaagatgctagcaatgcgatgccggttccgagcctcactctatccctgtcc

SEQ ID NO: 415202 - DNA, 90 bp, Homo sapiens
agcagatggataggtcctcagcccaggtggtggccgaaatgttattttaacgaggaggaatgccagctcctgagcaggcctcattggtgg

SEQ ID NO: 415203 - DNA, 75 bp, Homo sapiens
ttcatcttcctccctgtgtactttccatttgccttcctggttttattagctctctgggagtgagctacatgatgt

SEQ ID NO: 415204 - DNA, 100 bp, Homo sapiens
gttgaagatatcaatggatgtcctagaagtcagtctcagatgatcagccatacctttgggctcgactagatagaaaacccaacaaacaagctgaaaaaag

SEQ ID NO: 415205 - DNA, 76 bp, Homo sapiens
cggagcgggagagcggccacaccatgcgaggactggacctacagagacatctgggattttctgcgtcagctgtttg

SEQ ID NO: 415206 - DNA, 100 bp, Homo sapiens
atgagtctgtttgggatcccgctgtggtacttctcgcagtccccgcgcgtggtcatccagggacccagacatggagctgcgggaagaagcctggtctccg

SEQ ID NO: 415207 - DNA, 75 bp, Homo sapiens
cgagctgctgctggattgaactcagagaagccggggtacagagccagatggactccttcggacaaactacagttc

SEQ ID NO: 415208 - DNA, 100 bp, Homo sapiens
gaggagactcctgaccctcagaatgagggtatattacctctctctggaattttacatgggccgaacattacagaacaccatgatcaacctcggtctgcaa

SEQ ID NO: 415209 - DNA, 51 bp, Homo sapiens
aagtttagctgctcgagatcgaggagacaaaattgcttacccagtacatat

SEQ ID NO: 415210 - DNA, 106 bp, Homo sapiens
tcaggtacctgacaatgatgagcagtttgtaccagactatcaggctgaaagttagacttttcttggtctcctggtggtaacataatcgccttctgggtgcctgaag

SEQ ID NO: 415211 - DNA, 50 bp, Homo sapiens
cgggacagtggccttcgcgctaacgaagaggaaccagactagcatttctc

SEQ ID NO: 415212 - DNA, 100 bp, Homo sapiens
gtaaggtgctgcggagcgacgcggcctgggaggataagtgtctttggtgcaacactaacaaggcttgtctggactacccagttacaagcgtcttgccacc

SEQ ID NO: 415213 - DNA, 100 bp, Homo sapiens
gccatccactctcccagagtgctccaacgggactgaaccacatgggctggccagagcacacaccaggcactgagcgtgcagcatgagaacacctaccggg

SEQ ID NO: 415214 - DNA, 75 bp, Homo sapiens
caacccagatgtgcaacaaagtgcgatgatgccatggacaatattaccaggcagaaccaattctacgatacccaa

SEQ ID NO: 415215 - DNA, 97 bp, Homo sapiens
ttgaacacaaggagatcgacggccgtcttaaggagtattgcttatgcccgtatagagggggatatgatagtctgcgcagcgtatgcacacgaactgc

SEQ ID NO: 415216 - DNA, 82 bp, Homo sapiens
cggcaggagaagatcacccggaccaaggaggaggccctggagctgatcaacgaggctgacccgcggctgattgagtccctct

SEQ ID NO: 415217 - DNA, 82 bp, Homo sapiens
cgaggctcggagaaacaggcgccgcgggctccgcgcccggccggacccgggcccgagcaattctgtggtgttcttggtcaca

SEQ ID NO: 415218 - DNA, 90 bp, Homo sapiens
tcgtctttggcgaggacggggcgccggcgccgccgcccccgggctcgcggcctgcaggcctcgaaaaagcccaagacagcagaagcagac

SEQ ID NO: 415219 - DNA, 100 bp, Homo sapiens
cagaacagttggatcttgctcagtctctgtcagaggaagatcccttgacctcccagtgccaagtgtataagcgtgtccagaattggtgggtctcactgac

SEQ ID NO: 415220 - DNA, 100 bp, Homo sapiens
ctggatccacagcagtgggggctgggtgctcgttctggctgtgaagcagctgttcccagagtttgagtttatgtggcttgtggatgaagccaagaagaac

SEQ ID NO: 415221 - DNA, 98 bp, Homo sapiens
atcccgtggtccagatcatttatagtgacaaattgccgaagacgcagatgaaattcagcatccagacgatgtgccccatcgaaggcgaagggaacatt

SEQ ID NO: 415222 - DNA, 88 bp, Homo sapiens
gcgactgtatgatcgtggatgtcccggatgctgcgggtaagatctcagagactacagcccggacctactcgcacctgaacatcgcggg

SEQ ID NO: 415223 - DNA, 83 bp, Homo sapiens
gtctgccgccgccggctctcgggagcgcaacactgcaggtctggcagtatattactttgatgcgtcggatattcctgattgac

SEQ ID NO: 415224 - DNA, 82 bp, Homo sapiens
cggcggcgccatggcagggcttgcagtaccatggggcgcaagttggaccctacgaaggagaagcgggggccaggccgaaagg

SEQ ID NO: 415225 - DNA, 100 bp, Homo sapiens
ctacaaaaccatgactgcgctggccaaggccatctccaagaacgtgctcttcgctcacctggatgacaacgagaggagtccacaggtcctggctaccctg

SEQ ID NO: 415226 - DNA, 102 bp, Homo sapiens
tgagtgaaaatacagccaagatcttggcaaagcttctccctcagtatttagaccagcactgccagtgaaagatgtagaagataaacctgaacaacaaaccag

SEQ ID NO: 415227 - DNA, 101 bp, Homo sapiens
caacggactcctcaagcagtagtagacccagatgatgtggtaccagttggccaaagaagagcctggtgttggtgcatgtgctttggactagcatttatgct

SEQ ID NO: 415228 - DNA, 83 bp, Homo sapiens
cagacaatgccggtggaggaatttgtggctggctggatctctgatgaggagcgggaaggcctcctgcaccctggagaccgtgt

SEQ ID NO: 415229 - DNA, 97 bp, Homo sapiens
gaagaagtcttgaatgactggaaactgattggaaactctttgggaaagccactcgaaaagttgttgggaaggtcttggaaattactgaactaccaga

SEQ ID NO: 415230 - DNA, 100 bp, Homo sapiens
atttgttctgcctgacttggaccctggaaaacctggccctcttcaatttctgacaaaagtctgaaaggcactttattatgcaggtggtctgtgaagccac

SEQ ID NO: 415231 - DNA, 101 bp, Homo sapiens
gcggggagcgcccccggcgcgatgcccttcaggaaaggtcagggaagtcaaagatgcatccctgagttcttcctagcaggcaagcagccgtgcaccaatga

SEQ ID NO: 415232 - DNA, 83 bp, Homo sapiens
ggacccaggagaaattcgccctcaaagttggctcaaaaacagaagttgctgagtgcaaggagaaattcgccgcctccaaggac

SEQ ID NO: 415233 - DNA, 100 bp, Homo sapiens
ggtgaatttccatgtcaacatagtcctggtctgtatgagctgttggctgctctgccagcccagctgcagccacatgtggatagccaggaagacctgacct

SEQ ID NO: 415234 - DNA, 75 bp, Homo sapiens
tgaagaattacttgacaaatcttcttaagatccgatcacataggacagtatgcaccttaagatcctgaagaaacg

SEQ ID NO: 415235 - DNA, 100 bp, Homo sapiens
gaactactccgtgacctggtacatcgccgagttctaagcagctgacacaggatgatgatactgatgcggttgagattgctatcgacaacacggcttttat

SEQ ID NO: 415236 - DNA, 98 bp, Homo sapiens
cattcagggattgtatgtgacactgcttttagcccaggtccccttcccctgagcccatctacaatagcgaggggaagcggcttaacacccgagagttc

SEQ ID NO: 415237 - DNA, 50 bp, Homo sapiens
cctactgagcagcctgagtggggaacttaggctgcggaactatgtcccgg

SEQ ID NO: 415238 - DNA, 90 bp, Homo sapiens
acagcttggctgtaggaaactcagggtgcaacagctgcagcccggaaagaggtgataaggaacaagatccgagcaataggcaaaatggcc

SEQ ID NO: 415239 - DNA, 98 bp, Homo sapiens
catcaagaacaatatcgacttccccggccacaactacaccacgcagtcgatgatgtgaagaaaggttacatcaaagcagaagaaaagtcctatcaatt

SEQ ID NO: 415240 - DNA, 98 bp, Homo sapiens
gcggctttgaccgagaggctgctggagctcgtgtttggacgcatacgtaggtaacctttccagagatgtgacagaagtccttatacttcagttgttca

SEQ ID NO: 415241 - DNA, 51 bp, Homo sapiens
tgacaaaagtatgagtggatatctctcaggatttgtacacacagatatgac

SEQ ID NO: 415242 - DNA, 50 bp, Homo sapiens
caattgcaggatgcacagattctgcagacctactccaatgaagtccattg

SEQ ID NO: 415243 - DNA, 122 bp, Homo sapiens
gactactttgctatcaaacaagaagtcgtcaccccagacaacatgtgcatggggaggaccagtcgtgagagagcgctgtacagcatggaatgtgcgttccaccccctgttcagtctcaccag

SEQ ID NO: 415244 - DNA, 90 bp, Homo sapiens
agtggtggcgctggccagactgacacccataccttttgggcttcagaatgcagtgttttcgaaggacagaataacgggctcccagattca

SEQ ID NO: 415245 - DNA, 75 bp, Homo sapiens
aaattcttttgaactagatcgagctgatagagaccctagtaacatgggggacattcagcagtttttgatcacagg

SEQ ID NO: 415246 - DNA, 88 bp, Homo sapiens
ctccaaccaaaaccgtgaatggtgtctggaggagtgagagccggcaggtgagaagccctaccactgcaactgggacggctgcggctgg

SEQ ID NO: 415247 - DNA, 80 bp, Homo sapiens
gccccggggatccgaagaggaagggcggtccgggctccacacttagcttcgcacagttggcgggcagctcccaggtctcc

SEQ ID NO: 415248 - DNA, 87 bp, Homo sapiens
tcgtctcttacgtctgcggaagtgcagctgcctcagttcttagcgcaggacctgagagtcagtatactaagactgcccaggagattg

SEQ ID NO: 415249 - DNA, 100 bp, Homo sapiens
accattactaaactattactctttctcacctgatgctcttaaaagcttagcagtgtctgcaaaaacgaatcttttcctacaacctgttaactgactggac

SEQ ID NO: 415250 - DNA, 76 bp, Homo sapiens
ttaggaagtatggattcactaacttccagtgaaggacatgaaatctgctgtgatcacgccttgcagtcattttttc

SEQ ID NO: 415251 - DNA, 100 bp, Homo sapiens
tggcctccgccaccgtgcacatccgaatggagtcatgagtggaaaattaactgttcaagaagagcagattgtagaattgattgaaaaaattggtgctgtt

SEQ ID NO: 415252 - DNA, 75 bp, Homo sapiens
gcaacaatggcttcatgcaccacggtggagccgccaccaaaatgcagattttcgtgaaaacccttacggggaaga

SEQ ID NO: 415253 - DNA, 75 bp, Homo sapiens
gtaaacttcataaccagctatccgggttcatcctacatttttgtgcaagaggcctcttctgaagagctgaaagct

SEQ ID NO: 415254 - DNA, 90 bp, Homo sapiens
accggatgagaaagccatcatgacttacgtgtctagcttctaccacgccttctctggagcccagaagtggcttctagaagagtgagtctg

SEQ ID NO: 415255 - DNA, 100 bp, Homo sapiens
ctaactccctctgctaggatatcagcactaaacatcgtgggggatctcttacggaaagtaggggttcatcaaggcttataagaagtttggtctccctctt

SEQ ID NO: 415256 - DNA, 90 bp, Homo sapiens
gatggtgttgctgagagtgttaattctgctcctctcctgggcggcggggatgggaggcagggcaatgtgagcagccaggccatcctgccc

SEQ ID NO: 415257 - DNA, 101 bp, Homo sapiens
gactgctggtgaagaaaatgctttatttttgtggcaggcatctgtgggatctgtaatagaaatgaaatggagttgttttttccttcaagtggaggttgtgg

SEQ ID NO: 415258 - DNA, 74 bp, Homo sapiens
gaggaatttgcctcttctacagatagagctgttaagagttttccgtctgatgaaggttggccatttgcaaagta

SEQ ID NO: 415259 - DNA, 82 bp, Homo sapiens
gccggcccgcgggtctacttcctcaaagttgatattcactgatggactccaaagaatcattaactcctggtagagaagaaaa

SEQ ID NO: 415260 - DNA, 75 bp, Homo sapiens
ccagcttctacctataagacttcaactcaagatgcagaatcgagagctccagatcatgagaaagctagatcactg

SEQ ID NO: 415261 - DNA, 75 bp, Homo sapiens
tccgactgtcagcactgctccacctctgattccaccaccggacacgaagatcgattgagaagttattagaatggg

SEQ ID NO: 415262 - DNA, 50 bp, Homo sapiens
ggcagtgcggcaaccaaatcggcgccaagatgcagaggccaggatgtggg

SEQ ID NO: 415263 - DNA, 50 bp, Homo sapiens
ctttgttctaaaattacctcataggacagcctaaatgcgatggccaggta

SEQ ID NO: 415264 - DNA, 100 bp, Homo sapiens
ctcccttcagctttggtccctcggggcgtctgggcagcctacgctttccggtggcacaagaatggctcaactctccaaatagagagaatttctatcagtt

SEQ ID NO: 415265 - DNA, 80 bp, Homo sapiens
tatgatgcccgggaggccatcatcccaggctccgtctatgatcggagcagccaggatgtggcaaaatctggcaaaggcag

SEQ ID NO: 415266 - DNA, 100 bp, Homo sapiens
ggcgggtggaggttcgagcgctgttctcgctccggagccgctgcacatttcgcagatatatggagtgatcactcatttcagactgatccagatttgccgc

SEQ ID NO: 415267 - DNA, 98 bp, Homo sapiens
tgggaggccggccggtgccagcacctttcggcttctgagacggcggcagcagcggcattcagagatttaccgcattgtttctcagaagcaaatgtcag

SEQ ID NO: 415268 - DNA, 127 bp, Homo sapiens
ttcatccctctctggccactatggaattctaatttgaaccatgtttggattgaagccgcctctgtattacttaccaggtactccaaagattcaggtttactcacgtcatccagcagagaatggaaag

SEQ ID NO: 415269 - DNA, 100 bp, Homo sapiens
ttcacctttgattccagtgtgaactgtcaatcataaggaccgagcacatagaattgggcagactaagacagtcagagtgttccgctttataactgataac

SEQ ID NO: 415270 - DNA, 75 bp, Homo sapiens
catcagtgagctgtccctgctggaggagcgcttccgggttttccagaagagattcaatggctcagtaagtttctt

SEQ ID NO: 415271 - DNA, 90 bp, Homo sapiens
ccaaaagctcagttttggagaggataactcccctgtgatactctcaggaccacctcagatgacacagtttatctctttgttgtaaaccac

SEQ ID NO: 415272 - DNA, 100 bp, Homo sapiens
cttgacactgcagctgcagtcaacctcttccccaatttcaatgcgattttaggtgatgggcaagtcagaaagtcagatggatataactgatatcaacact

SEQ ID NO: 415273 - DNA, 98 bp, Homo sapiens
tttgtctggattttcctgtagaactgagggcaggcaaacaagcatgcatttaggatccttatgcacgggagatatcaaacggagaagaaaagctgcac

SEQ ID NO: 415274 - DNA, 101 bp, Homo sapiens
cttctgacgaagaggaagaccctcctgccaaaaggaaatgcatctttatgtcagaaacacaaagcagcccaaccaaaggggaaatgaataagcgtctaaca

SEQ ID NO: 415275 - DNA, 95 bp, Homo sapiens
cccgcgtccgccgattcctcctccttggtcgccgcgtccttggctggcgtgcaagtgaaccggagcaaacgacttccgatccagtctgcgctgtt

SEQ ID NO: 415276 - DNA, 75 bp, Homo sapiens
ggactatgacctaggcacggctgatgacttcattgatggagtcatcagaacccactgtgaggaagtgacttctcc

SEQ ID NO: 415277 - DNA, 89 bp, Homo sapiens
cagattcgcagtggtcgcttcttctccttgtttctcaagtcaaagaaggccctgtcctagcaactagttcaggagctggtgtttttaag

SEQ ID NO: 415278 - DNA, 99 bp, Homo sapiens
ctggtttcagctcgctggcggaaggctacatgcggttagatgacagtgggattgggcacaacctttttggggagcttgatttttgaaaaggaaataaaa

SEQ ID NO: 415279 - DNA, 75 bp, Homo sapiens
acagagccgggagttcaagaagaacactccagagggccaattcctgtccccccagcagcatggcatcgtgtgctg

SEQ ID NO: 415280 - DNA, 100 bp, Homo sapiens
ctccagccgaaggagaagggggcagacggactggactgagccctggctcatggggctggccaccttccacgcgctctgcgtgctcctcacctgcttgtcc

SEQ ID NO: 415281 - DNA, 75 bp, Homo sapiens
aaaaaatttattaaaggaagcacacctaagctccaccatgcagtatgttattctcatgtatatgaagcatttggg

SEQ ID NO: 415282 - DNA, 98 bp, Homo sapiens
ggcagcccaggccgcgatgggctcgatggattccccggcctcccaggccctcccaatgagctgaaagccagtggtggcgaaatcaaaattcataaaat

SEQ ID NO: 415283 - DNA, 75 bp, Homo sapiens
tgggagactgtattcgggggcgcgagctgccccagagcccataggcagcatgtcatccatggaagtgaacgtgga

SEQ ID NO: 415284 - DNA, 80 bp, Homo sapiens
gtcttgcctgtgtcccacttgttcgcggcctatagaacaagttgaaatcatcgcagaaggataaagttcgtcagtttatg

SEQ ID NO: 415285 - DNA, 101 bp, Homo sapiens
tcttcaaccacctcgagcggctgctggacgaagcaattctgtggtgttcttggtcacacatttatggagtttctgaagggcagtggagattactgccaggc

SEQ ID NO: 415286 - DNA, 100 bp, Homo sapiens
gcccgcctgaaccgagtagaagacaagccttgaaaagatcttttgaggtcgaggaggtcgagacacccaactccaccccaccccggagggtccagactcc

SEQ ID NO: 415287 - DNA, 83 bp, Homo sapiens
gtgggtttcaagagagactactacctaataagggtagctacagcaagctgggtagcaggcagatccaaaggatatcatgaagt

SEQ ID NO: 415288 - DNA, 100 bp, Homo sapiens
ggacatgatcttctttataattctactttgagtgctgtctccatgtttgatgtatctgagcaggttggactggccatccgaagcaagattgcagatggca

SEQ ID NO: 415289 - DNA, 101 bp, Homo sapiens
ggcggagcagcaagaacagagatggcggggagagacggccaagcagcaccagcgtgcctttgggtgataagggtccgacaaagcggctctccagcaagaag

SEQ ID NO: 415290 - DNA, 75 bp, Homo sapiens
cttgcttttcctcgctggggtgtacgcggagcgtgctttggacaccatgaattttgatgttataaagggcaagcc

SEQ ID NO: 415291 - DNA, 98 bp, Homo sapiens
agccgcctttccagcatgcaggggctgctcagggctcattgtcatccccaagccaggccagttctccaggtggaactgtagtgtagcgacctcactgc

SEQ ID NO: 415292 - DNA, 74 bp, Homo sapiens
gaggaggccatcatcatgaaggacgtgcccgactggaaggtccaaagaggactggtgatctacgtgtgcttttt

SEQ ID NO: 415293 - DNA, 100 bp, Homo sapiens
aaaacaccagaactcaacctggatgaggaagagtccttgaatgaagtagggtatgatgacattggtggctgcaggaagcagctagctcagataaaggaga

SEQ ID NO: 415294 - DNA, 78 bp, Homo sapiens
tcaaggtggcctaccaggaggccaggggtgtcgccatgtctcacaccattttgctggtacagcctaccaagaggccag

SEQ ID NO: 415295 - DNA, 129 bp, Homo sapiens
aggagtcggcggctcagttgtccatgaccctgaaggtccaggagtacccgaccctcaaggtatgacctggacgcgtgtgacattcaagaaaaatacccggatttatttcaagtgaacctggaagtggag

SEQ ID NO: 415296 - DNA, 90 bp, Homo sapiens
gcttcttataagtgtttagcagcagctttgatagttctgacggagtctggcaggacaagtggcagcacctggcctcagagggcagcagtt

SEQ ID NO: 415297 - DNA, 90 bp, Homo sapiens
gcgggactgagagcgcctggaggctcgagcggagggatgccggaccagatctctgtctcggagttcatcgccgagaccaccgaggactac

SEQ ID NO: 415298 - DNA, 75 bp, Homo sapiens
agggctttgaatgcatcagaaccatgcacgttcactgattaccaaagctatgtcatccatggctgcctggagaat

SEQ ID NO: 415299 - DNA, 101 bp, Homo sapiens
gagaaagagaatgatgaagagaaaggcccggagactgtgttcatgaagtctgtgaagctggagtgggtgcaagacaacatcagggcagcccaagatctgtg

SEQ ID NO: 415300 - DNA, 74 bp, Homo sapiens
cagaaagagtcaacagcagtggcaacagccatgaagaactgtactcaagtcgcccttatggagcccttgattca

SEQ ID NO: 415301 - DNA, 96 bp, Homo sapiens
agacacgacatctagccctgaatctgcaggagttcacagggaaggaagaaaagacatcattgttactacataattcccatgcttttttccgagagc

SEQ ID NO: 415302 - DNA, 90 bp, Homo sapiens
tgcagatgcagtgtggctctggatagcaccttatggacaggtaccaggcacctgacatcgacgtgcagctgagctcggagctgacagact

SEQ ID NO: 415303 - DNA, 100 bp, Homo sapiens
gaagggcgctatttgtacttctaaatactccagtccttttccatgcactggaggagagactggtcgaattgacaaatcttaccctacagtatgtggccac

SEQ ID NO: 415304 - DNA, 75 bp, Homo sapiens
cggaacccgagctggagctgaagcgcaggctgcggggcgcggagtcgggaggttgacatcatggacatatgtgag

SEQ ID NO: 415305 - DNA, 51 bp, Homo sapiens
ctactattcaggactaatctatgtggctatggaccgccccctgcaggaaga

SEQ ID NO: 415306 - DNA, 98 bp, Homo sapiens
gacatcatcgtcttcgcctatgcctgccaggctgctgagatgaggaaggaacagagcatttacgaaaacgaaatacgaagttgccttttatgtttacc

SEQ ID NO: 415307 - DNA, 90 bp, Homo sapiens
cgcagagctacacgcggagcaggcggtggaagaagatatccccatagcgaaagaacggacacatttcaccgtccgcctgaccgaggcgaa

SEQ ID NO: 415308 - DNA, 99 bp, Homo sapiens
ggagttcttacaacatggcagacattgacaagtggcattggctgtgtaggtcaagacaagggccaggttcgaaaatgccttgacgtggtggagatctac

SEQ ID NO: 415309 - DNA, 97 bp, Homo sapiens
ctacgaaagcctggtccacgccgtggccggagccgtggccgacttaacattacctatcccatgctgttcaaactgaccaataagaattcggaccgca

SEQ ID NO: 415310 - DNA, 90 bp, Homo sapiens
aaaagtaaaacttgctgctgatgaagatgatgacgatgatgatgaagaggatgatgatgaagagtttggacatatttgactcttttcccc

SEQ ID NO: 415311 - DNA, 50 bp, Homo sapiens
cactgcttccctcagccataacagggctggtggactaggcctcaattttg

SEQ ID NO: 415312 - DNA, 134 bp, Homo sapiens
ccggggacctgcatgtgtgtgcgcgcgaaggagcggaagaatggcagtgctcaaactcaccgaccagatttatcagcaagactgttgaacgcataactgcccaagatgcctgtccctccccctccagcaccccc

SEQ ID NO: 415313 - DNA, 50 bp, Homo sapiens
gtggagtgtaggtcatatcgccgcggtcaaaatgcagatcttcgtgaaaa

SEQ ID NO: 415314 - DNA, 75 bp, Homo sapiens
gccgggcagtaccttcttcaagagaaatggagcccttctccaaggaacttgtaatagctggcatcgttgagaatg

SEQ ID NO: 415315 - DNA, 100 bp, Homo sapiens
agaccctctcctttccctttgagaccgtgaagagaaagatgcaggtaacagttaacctcttccacatgcagcatctgcaggctgcttcccttgcagacag

SEQ ID NO: 415316 - DNA, 101 bp, Homo sapiens
caacacggtgcaccggaccctgccaggcgccaggaactccgagagcttcggctgctccagaaagaagagcatcggaaccagacccagctgagtaacaagca

SEQ ID NO: 415317 - DNA, 100 bp, Homo sapiens
tgtgaaatggccccgctatatcaggtttgatttggccaactgtaacttaaatgatgagcatgtcaacaaaatgaactcagatagagttccagatgtggta

SEQ ID NO: 415318 - DNA, 100 bp, Homo sapiens
gccattccagcactggactcatggaggctgagcatttattcagaacccaatgctgggcagatacaagaaggaattggagaagctgtgaacaatattgtga

SEQ ID NO: 415319 - DNA, 83 bp, Homo sapiens
accctctcgcctcgggtctcgggggccgctctgggatcccggccaccagcaattgtccggtcctcagaatggttggaatgacc

SEQ ID NO: 415320 - DNA, 76 bp, Homo sapiens
cagacaaaattgatgtacttctgcaacaggcctctgaagaacacctgaagcagcactacattgacctgaaagaccg

SEQ ID NO: 415321 - DNA, 80 bp, Homo sapiens
ctggcaacggcggtggcgcccggagcccgagcatgatgccttcttctgtagagtgggcgctttgcagaatacgtgttgaa

SEQ ID NO: 415322 - DNA, 82 bp, Homo sapiens
aaggagcgcctggctcttctccacaaagacacgattatatctgtccaagatgcgagtctggttttatcgaggagcttccgga

SEQ ID NO: 415323 - DNA, 87 bp, Homo sapiens
gccaggacctccttcttcaggagagcgccccagggcaagccccgctccggccaacaagggagtgcagcaacaaggaatgtcccttcc

SEQ ID NO: 415324 - DNA, 129 bp, Homo sapiens
cgagtgccggcttctcccctacgcgctacacaagtggagctccttttcctccacctaccttcccgagtaagtaaggaggtctctgtaccatggctcgtacaaagcagactgcccgcaaatcgaccggtg

SEQ ID NO: 415325 - DNA, 96 bp, Homo sapiens
caagcttttctacaaagtcacattcaacgccgccacactgaagaaaattctcattttgctgcggttggatttctcacgatgtccagtgttatctcc

SEQ ID NO: 415326 - DNA, 75 bp, Homo sapiens
tgaccgctcaagagattctacatcagtttggtttcactcagaccggtgactctgacatcattagaagcatgccag

SEQ ID NO: 415327 - DNA, 75 bp, Homo sapiens
ctgactgcacttcttttttgagaaaggaaggaatatatcctgactgattagtaagcaggaaattcacaggaggtc

SEQ ID NO: 415328 - DNA, 83 bp, Homo sapiens
ggttgacgttgcctctcggcggcgcggcggcggtggacgagtacctggagtaccggaggttaatgttcgtgaagaaattgaag

SEQ ID NO: 415329 - DNA, 100 bp, Homo sapiens
gcagcctgaacggagtgtgcgacggattgggagccaggtttcccaggatgccctgaggagaaccatcttccctctggggggattaacgaaagagtttgta

SEQ ID NO: 415330 - DNA, 76 bp, Homo sapiens
tagcactcgggccggcggacagtgagggcgcgtctctggcatctctatcccctatgaggcaccacgtaagacctcc

SEQ ID NO: 415331 - DNA, 75 bp, Homo sapiens
ctacacgttgatgttccaaaggatttgaccaaacctgtggtggagccgccaccaaaatgcagattttcgtgaaaa

SEQ ID NO: 415332 - DNA, 80 bp, Homo sapiens
gggagataaagctgtgtactgccgttgttggaggtccaaaaagacggtatccaactgttgaaaaacgagccagagtcttc

SEQ ID NO: 415333 - DNA, 83 bp, Homo sapiens
cgcagcacttggagcgcagaaccggccgcgcccgaaacagtcaagtgcttgatgaagataatatattgaatgaaacaccaaaa

SEQ ID NO: 415334 - DNA, 75 bp, Homo sapiens
aagaaaccaacattcccaacagccaccaccaccaccagatggaacgcgctcatgttcaacaacgagctcatggcc

SEQ ID NO: 415335 - DNA, 100 bp, Homo sapiens
cccgggaacaggacctgcacgggcacgtccaagcggtaccagctctgcagagtgcagctgcgtgcccagatgcgcgacctggcacggggcatgttcgtct

SEQ ID NO: 415336 - DNA, 82 bp, Homo sapiens
cgcgctgcccgcactcctggtcctgctcggggctctgttcccagccgctatgtgaaacagcctttacctgatgagtttggca

SEQ ID NO: 415337 - DNA, 75 bp, Homo sapiens
ggaccttctccctgcctggacccctactattgcaacaagctcatgatggagcagtccaagaagtcctccctcatg

SEQ ID NO: 415338 - DNA, 83 bp, Homo sapiens
ctatttccaaagtatgttgcacccagagtcatcttagtgggatttggggaagcaacagggctgtgtggggtaacctgccacct

SEQ ID NO: 415339 - DNA, 98 bp, Homo sapiens
ccgaaccaatgctggacctggaggtagtgcccgaacgctctctggggaacgagcaatgggaattcacgctggacgctgcaggagatcttccaggccga

SEQ ID NO: 415340 - DNA, 100 bp, Homo sapiens
gaaacaaggcttccagtgccaaggtcaagtcatcagcccacaaagtagcagtagtggcacggatctgacgggtgacaaagcagggccatctgcacaggag

SEQ ID NO: 415341 - DNA, 98 bp, Homo sapiens
aaagctacttagagaacttaggaacttggattcaaggcagtgaggctgataaaataccagtaatgcgtggacagtggtttattgacggcacttggcag

SEQ ID NO: 415342 - DNA, 98 bp, Homo sapiens
ttgtagccatgaatgaaaatctgaaaagtcaagaacaggaatttaaagcacattgtcgagaaagctggcagttaaggaaaggagtaagtgaaattgga

SEQ ID NO: 415343 - DNA, 75 bp, Homo sapiens
gaactcaacacctccctacaaggaccttcctcccaagccaggtcacgggatggatagccggcctgccatggccat

SEQ ID NO: 415344 - DNA, 90 bp, Homo sapiens
tctggagcacctctactccctgcacatccccaactgtgacaagcatggcctgtacaacctcaaacagcggccagcctcccaactacgaga

SEQ ID NO: 415345 - DNA, 96 bp, Homo sapiens
gaatactttttctcccgaaggaagattatttcaagtggaatatgccattgaggctatcaagacatcacttagtgctcttacccagctgatgaaaaa

SEQ ID NO: 415346 - DNA, 98 bp, Homo sapiens
ctcagtcagaacctagcgaacaagttatggactctgtgggattcattatattgacgctggttaccttggtttcaaggcctacttcactgctcctcgaa

SEQ ID NO: 415347 - DNA, 100 bp, Homo sapiens
ttggattcggccatcaggaggaggctgttttggagtcagcggaagatcaccaaggccagggagtggttccaccgcactgtgaagattgactcggacctgg

SEQ ID NO: 415348 - DNA, 100 bp, Homo sapiens
ggcgcacgcaccacgacggcgccatcaccgagcgcttgatgtgcgcggagagcaatcgccgggacagctgcaaggaagtgcacggctgtctataacgtgc

SEQ ID NO: 415349 - DNA, 83 bp, Homo sapiens
aagcagcgtgcgttcagccctgggctatacacagaatgggattttacatatgctggacagaaataagagaatcaagccccggc

SEQ ID NO: 415350 - DNA, 96 bp, Homo sapiens
tgagctgcctaagaaatcatggcattcacacagcccataaagcaagacagaaaagtcgaacatcagttgtggaaatgagaaggaacccagcatgtg

SEQ ID NO: 415351 - DNA, 101 bp, Homo sapiens
tatccagtatatcacgcgcttctgcaatccaagccgactgatgactggagaggatggctactatttcaccaatctggctgacaaacgggctcatcataatg

SEQ ID NO: 415352 - DNA, 50 bp, Homo sapiens
gcagactgtcctattgcatctcaagcctttgccttctgccgggaatgtaa

SEQ ID NO: 415353 - DNA, 75 bp, Homo sapiens
cagctgccttcgagaagcaggtcctgcagctgcaggagaggagaggcagcagcatggcgagtgtcctgtcccgac

SEQ ID NO: 415354 - DNA, 100 bp, Homo sapiens
gcaagaaagaccatcaagtttaccagtcagtactcctgcatttgtaccaacgaaaactcacgtgctgcttcatcgaatgagtggaaaaggactagctgcc

SEQ ID NO: 415355 - DNA, 73 bp, Homo sapiens
cggaacacaggtccatggaacaatcacagcatttaaatcaaacggtattgagatggattgggttatgaaacat

SEQ ID NO: 415356 - DNA, 89 bp, Homo sapiens
gatttgacacatcaagggcagccaattactgaggaaaactgcccagcttgtagccagcttcctcaaaatattcagttttctccatcagc

SEQ ID NO: 415357 - DNA, 98 bp, Homo sapiens
ggctcatcaactcctacgaggacaaaagcaacgacttcgtatggttcctacaaacttgatgacttttgagtagaagcctgagaaaaaaagagaggtga

SEQ ID NO: 415358 - DNA, 86 bp, Homo sapiens
ccgccgcctctccttgctgcagccatggaggggatatgagactttctactcggaatatcctgagtgttgcgtggatgtaaaaccca

SEQ ID NO: 415359 - DNA, 87 bp, Homo sapiens
tcgacctggagctgggccaggccgtggagggaactctaatgatccaggacaaagaagttaccctggagtatgtatcaagcctggatt

SEQ ID NO: 415360 - DNA, 75 bp, Homo sapiens
cagagattcatctttcatgcagtgacatgttgataaaaaatgatgctgctctgttaaaagcgaaaatgaaacaat

SEQ ID NO: 415361 - DNA, 89 bp, Homo sapiens
ttacaatgaatggacacagtgatgaagaaagtgttagaaacagtagtggagaatcaagatggtttcacccaaatatcactggtgtggag

SEQ ID NO: 415362 - DNA, 76 bp, Homo sapiens
cgaggacctggtacaacaggatgtccagcccatgcagaatgccaccaagtatggcaacatgacagaggaccatgtg

SEQ ID NO: 415363 - DNA, 51 bp, Homo sapiens
cgttgacaaggcactgctttttcatgacgatcaggatcctcatgaccagcc

SEQ ID NO: 415364 - DNA, 75 bp, Homo sapiens
cactccagtgcctccgacgcctcctgatgggacccagacatggagctgcgggaagaagcctggtctccggggccg

SEQ ID NO: 415365 - DNA, 76 bp, Homo sapiens
ccaggaaggggttcccagaagtcagaatccaagatgaatgatttcaaaacttgaagctcaggtcaagcaagtagaa

SEQ ID NO: 415366 - DNA, 97 bp, Homo sapiens
gcccagctcagcgcccggcagccttcgacgcgatgttccgccggagcttgaatcgttttgctcggggcccccagttcccgccccagacctcttgatg

SEQ ID NO: 415367 - DNA, 102 bp, Homo sapiens
ttttttttttttttctgttcagtgacatctgaactcaagctcctgctccagcttccaggaccagaagatcgccagcatgttcgatctgacttccgagtaccg

SEQ ID NO: 415368 - DNA, 83 bp, Homo sapiens
actccagcggcggcggcggccagcagcaaattgtggctactaatttgccccctgaagatcaagatggctctggggatgactct

SEQ ID NO: 415369 - DNA, 88 bp, Homo sapiens
ggatctttgaattggtggaacttgttggaaatggaacatacgggcaagtttataaggtctaccctgaactgcagatcaccaatgtggt

SEQ ID NO: 415370 - DNA, 98 bp, Homo sapiens
cgcttcccaaaccttcagcttagagacttgattggacatatagttgagttttctcaagaccagcatggttctagtgctgttgggacattcgccagagc

SEQ ID NO: 415371 - DNA, 75 bp, Homo sapiens
atttcatgtgcgatgatgaggaggactacgacctgatggaacagattaaaagggccaataaactgtttaccaatg

SEQ ID NO: 415372 - DNA, 98 bp, Homo sapiens
cggtcctaagagctgggcaccaggaagcgaaggctggaaccacgtgaatgttgagggggcgacacacaagcaggtggtggacctgattcgagcaggcg

SEQ ID NO: 415373 - DNA, 50 bp, Homo sapiens
gacaacttcgcccgggacttcatgctactctgggcagttgaaaagtagaa

SEQ ID NO: 415374 - DNA, 75 bp, Homo sapiens
cctgacggctgtacttgagcagtcacctggcacagaggctgggaggcggcagaatgcagccagaggagggcacag

SEQ ID NO: 415375 - DNA, 75 bp, Homo sapiens
cagatcctttgacaccttcagaatcgactcaagagttacatgcatcaggtagattatgataatcatgcactttat

SEQ ID NO: 415376 - DNA, 100 bp, Homo sapiens
cacacgccgccatccgggaggcccagggaaggttctctacttaaaagacaatgactactgatgaaggtgccaagaacaatgaagaaagccccacagccac

SEQ ID NO: 415377 - DNA, 96 bp, Homo sapiens
ccaggaagggaggcagaagcatgctaagaacaacagtcaggccaagccttctgcctgtgatggacaatctctatgggaagcagaaggcaaggaccc

SEQ ID NO: 415378 - DNA, 98 bp, Homo sapiens
ggcagtaccgcctccttcccagccgcgcggcttcctccagacctctcggcgcggaaggtgacctgctgagaaaagtggtacaaatactgggaaaaacc

SEQ ID NO: 415379 - DNA, 83 bp, Homo sapiens
cgtaattacattctctcggccagcgcctccgcgatgaagcccggggcaagaactgtggtgtcttggtacattgcttggctggc

SEQ ID NO: 415380 - DNA, 82 bp, Homo sapiens
gcaaggctttgctgctgttttggctattggctctagcaggtgcaaggcaaatactctggtctaccctgatgggagagtctgc

SEQ ID NO: 415381 - DNA, 100 bp, Homo sapiens
cctgcgaacagtggcagcgcgacctggccagctgccgcgactgggaggagcgccggaacgccgaggcccagccatgtacatcttcatgtgatcagccagg

SEQ ID NO: 415382 - DNA, 100 bp, Homo sapiens
aactggtcaaagaactcatgcaagtggaacttacagcttccttgatcggactcagcattcaggccgttgctccagggagaactgcaaatatcttcatcca

SEQ ID NO: 415383 - DNA, 100 bp, Homo sapiens
gacgccattatcctctgtttctctgctgcaccgacctcgacgtcttgcctgtgtcccacttgttcgcggcctataggatgaaacgaggaggaagagatag

SEQ ID NO: 415384 - DNA, 75 bp, Homo sapiens
ccagcctgcgcggcgggaagcggcggcggcggctccagcgtcctaagaggtaagaatgattgatgttggctgata

SEQ ID NO: 415385 - DNA, 72 bp, Homo sapiens
ccagagccaagtgcgagcccagcgggagaaaatcaaggaggtgctgttgggaacacagaggaagtgactggc

SEQ ID NO: 415386 - DNA, 100 bp, Homo sapiens
taaaataattgggcagaagagaagcagtgaaggagtgcagaggcatcacctgaaagttttcggctttgtgagaaaccttaccatcaaacacgatggccag

SEQ ID NO: 415387 - DNA, 60 bp, Homo sapiens
cagtcctcgtcagcactgactttcagctatggaatcggactggggttttaaggggtgtgg

SEQ ID NO: 415388 - DNA, 50 bp, Homo sapiens
tacacgtatcctcctgcctagcgcaggttcctagaagccaaaccaaactg

SEQ ID NO: 415389 - DNA, 74 bp, Homo sapiens
agaggattttggaaacagttcaggtgccaagtcctgccctgccaacttcttggcagctgccgacgacaaactca

SEQ ID NO: 415390 - DNA, 101 bp, Homo sapiens
ctgaagcgcccgtccattccaagattttctggcatccttaaatcttgtgtcaaggattggttataatataaccagaaaccatgacggcggctgagaacgta

SEQ ID NO: 415391 - DNA, 50 bp, Homo sapiens
cagcagctccgctcggcgcgagagattgatgccaagaaggaacagctagc

SEQ ID NO: 415392 - DNA, 73 bp, Homo sapiens
gacagtctgctaaaaaatttagatataagatgtataagaagtcttaacgattccaaacagaggcattgattta

SEQ ID NO: 415393 - DNA, 50 bp, Homo sapiens
ccaagctccactgttcagatgcaaaggactctggcatctgtgaagatttc

SEQ ID NO: 415394 - DNA, 119 bp, Homo sapiens
aattcacccttgtagagtcattcctgcctttgagcggactcccttttaagccgggcccctcagatgagagctgcacccaggccagcaccagtcgctcagccaccagcagcggcaccccc

SEQ ID NO: 415395 - DNA, 100 bp, Homo sapiens
gcggctagccccttcccacaggctctctccgctcgattttgtcaccgttatgtgggaagcgaatccaattcctgacattcagacaactgacttgtaactg

SEQ ID NO: 415396 - DNA, 100 bp, Homo sapiens
ctcgatccagcaccatggggaagcgggacaatcgggtgactcagattgatggacaacttttcttaattaagcaccttttgatacttcgtgaacaaattgc

SEQ ID NO: 415397 - DNA, 98 bp, Homo sapiens
tgtcctatgaataccgcttcctggagttcacgactctgagtgctgattttaccaaatgttgcaagaactctggagttcttatggtagtaaaatgccgg

SEQ ID NO: 415398 - DNA, 90 bp, Homo sapiens
cccgatcctccgctcctgaggcccccacaatgaagcagtcggacgcgtctccccaagaaagggagtaccctgacttctaccggaagctct

SEQ ID NO: 415399 - DNA, 96 bp, Homo sapiens
ggaagctgccggcagccctgcggctacggagacagaaagttcaggagccctggaaaggagaaggaataagacggcaggaggaagagagagagaggg

SEQ ID NO: 415400 - DNA, 88 bp, Homo sapiens
tgaagttggctaacaaattgaaagatatcatcaaacgacatcaggcagttgcagtggtgcagaatggctgacctcagtcttgcagatg

SEQ ID NO: 415401 - DNA, 83 bp, Homo sapiens
agagatgagccgatcagggaaccaggtgtctgaatacatttcaaatactttcttaggaacgtcaaggtcgtgggaaataaaag

SEQ ID NO: 415402 - DNA, 100 bp, Homo sapiens
acaagatgttgtttgcattgacttggatacgaacatgttatatgtgtttggtgcacctcgatttggaggaagtagggcagggcccttatctggaaagaag

SEQ ID NO: 415403 - DNA, 100 bp, Homo sapiens
ccacaagctactgtgagttgctgcaaaataaagtccctttgctcggaagcctgtctagcagtccagaggagatgtctggagctgaagaggggagggagac

SEQ ID NO: 415404 - DNA, 75 bp, Homo sapiens
tcctgatacagcaggcgctcaccatgttccctggaggtactggtgtggcatactcggacagagaagcccaagatg

SEQ ID NO: 415405 - DNA, 98 bp, Homo sapiens
tggtcaccatggcaaccttgtccctggcccggccctccttcagtttagttgaggataccacattagagccagaaggaagacagagatgtcaatgaccc

SEQ ID NO: 415406 - DNA, 83 bp, Homo sapiens
ttacacttcgactctcaaagcaataccaggatagctgttgtttcagagaaaggctcttcgtcagattgggcagaggacgataa

SEQ ID NO: 415407 - DNA, 75 bp, Homo sapiens
aacttcttcactacctggcagcactataagtgcctgatgccgagttccgtctctcgcgtcttttcctggtcccag

SEQ ID NO: 415408 - DNA, 100 bp, Homo sapiens
gggaggacaaccagaccaaccgcctgcaggaggctctgaacctcttcaagagcatctggaacaacagctcatcgactatgggaagctgggagacactaac

SEQ ID NO: 415409 - DNA, 100 bp, Homo sapiens
acctcagctgacagagaaacagcagtgttatagttttgccgctggactcttccctcccttcccccaccccatcaggatgatatgagacttgaaagaagac

SEQ ID NO: 415410 - DNA, 100 bp, Homo sapiens
acggactcactgcagggcatcatcctgaccggctggcagaggctgaaagtcacaacatgaaaaaccaacagatggatccctttactcggcggcagtgcaa

SEQ ID NO: 415411 - DNA, 82 bp, Homo sapiens
ccggagtcgtcttcgggacgcgcctgctcttcgcctttcgctgcagtccgtcgtgaagctgtggtctaccaatctagacaac

SEQ ID NO: 415412 - DNA, 109 bp, Homo sapiens
acggcggccttcgaggaggtcatgaaggacctgagcctgacgcgggccgcgcggacaatgcagatcttcgtgaagactctgactggtaagaccatcaccctcgaggttg

SEQ ID NO: 415413 - DNA, 72 bp, Homo sapiens
ctaccataaatcatgcgttttcatcctcagaagcagtgcccttgctaccagttccgagccagccgagacctg

SEQ ID NO: 415414 - DNA, 74 bp, Homo sapiens
tttttcttgtccgggtgcggataagggacccgacactgatagctagagccggtgcaggccacgcagaacaagac

SEQ ID NO: 415415 - DNA, 100 bp, Homo sapiens
ggctgtggcagatgcaactgcaggaactcctcctcccacatctgatggagctaccaatcatcagatctcctctgcctctggggtgcgtctcaggctggcc

SEQ ID NO: 415416 - DNA, 83 bp, Homo sapiens
atgaggagcagaagtcagtccggctggcttggccggtacaggtgtgagaaagggactactgcagtcctcactgagaaaatcac

SEQ ID NO: 415417 - DNA, 83 bp, Homo sapiens
aatgccattactttacctgaagaatttcatgactttgatcagccactgcctgacttagaatgccaaacgtctgattggacgca

SEQ ID NO: 415418 - DNA, 74 bp, Homo sapiens
gacaaaagccaagaggaggacagttcgctacacagcaatgcatcgagaaaatccattcctcgctgccgaagaat

SEQ ID NO: 415419 - DNA, 100 bp, Homo sapiens
gcgcgtcctcctccccaggcccgccgcctccctgccaaggtgtgggccatgtttgaggattgccccagcattcagttctatgagtaataaatatccacag

SEQ ID NO: 415420 - DNA, 98 bp, Homo sapiens
gagaaaaaatggaaatactgtgctgtctattacatcatccagatacattttgtcaagggtgaccaagaatatggcccaggtgaccaaagccctggaca

SEQ ID NO: 415421 - DNA, 100 bp, Homo sapiens
ctcagtctgcggccaagactccgtcctgcaagggcccacttaattcatggattccacctttctctggaattttacaacagcagcagcaggctcaaattcc

SEQ ID NO: 415422 - DNA, 74 bp, Homo sapiens
gcgctgtgatgcctgcagagctgtggcttaccaggtggaccccaagttcctgaggaacatgcgctttgccaaga

SEQ ID NO: 415423 - DNA, 100 bp, Homo sapiens
acatcttcgccatcgccaacgagtgctaccgctgcctgtggaagcgccacgacaaccagtgcatcctcatcagggtactagatggaaacttgagaaagga

SEQ ID NO: 415424 - DNA, 97 bp, Homo sapiens
tggtctcaatagaggttatgcgtttgtcactttttgtacaaaagaagcagctcaggaggctgttaaactggcctgatcaaccccgtataaccaaaga

SEQ ID NO: 415425 - DNA, 83 bp, Homo sapiens
gtgaccgagaccgcggccgggaccgaggggttttggccaaattgggcgagggcacaaaataaccacttaccccttctcaccga

SEQ ID NO: 415426 - DNA, 100 bp, Homo sapiens
atttcacaggtaaagaaatggattagtgataactcaagtttcatcacctcttcctgcctgacacagctcacttcaagaagtgcacaatgtcagaacgtgg

SEQ ID NO: 415427 - DNA, 75 bp, Homo sapiens
caccgtgacaggccaagtgcaggggccagaagacaaagtcaattccatggaagtttggttggcttagtggattat

SEQ ID NO: 415428 - DNA, 90 bp, Homo sapiens
aatctagctgttcagaattttcaaaggaagcctatacagccgtagtatatcataacaggcgcagtaacagtatctccaagtcccctggcc

SEQ ID NO: 415429 - DNA, 75 bp, Homo sapiens
aaaacgccaggcggatctcagaaggccagttcaaaggtgattttacaacgagatgctgctctccatagggatgct

SEQ ID NO: 415430 - DNA, 83 bp, Homo sapiens
gacaagagcttccgcggtgtcattctgacctcgcgtgaagcctctgcgggccttcttttcgtcttatttgaagtcattgccgg

SEQ ID NO: 415431 - DNA, 100 bp, Homo sapiens
aggcgtttattaggggggcggggggaaagagccccagcaccgcccctcctggaagaaggaagagaattttccaatgagaaaagtgccctgtaagaaagat

SEQ ID NO: 415432 - DNA, 100 bp, Homo sapiens
cgtcttccctaggctatttctgccgggcgctccgcgaagatgcagctcaagccgatggagatcaaccccgaggcagttacaattcatgatacagaaaaat

SEQ ID NO: 415433 - DNA, 98 bp, Homo sapiens
gacaaccgtggcagccattacgtggctattgtctttgaaagcaacagctcctaccttggacgggaggtgaccacactccccaacacccttgtggagaa

SEQ ID NO: 415434 - DNA, 96 bp, Homo sapiens
gtttgttggtggaggaggtggcaggcctcggcggaagaaggtagataatgactataatgcccttcgagaaagactcagcaccttgcctgataaatt

SEQ ID NO: 415435 - DNA, 100 bp, Homo sapiens
caagaaagtattgcaggacaagagatttaaggagcctagtaataaacgggtcaaacccctttcccgagtcacgtcgctagcaaacctcatcccgcccgtg

SEQ ID NO: 415436 - DNA, 82 bp, Homo sapiens
gacaagccgctggcagccgcggatctcaccgccgctcagggcctgggttctgaggaaaacgcaatggtggccatggacttgg

SEQ ID NO: 415437 - DNA, 74 bp, Homo sapiens
aaacaaaaatattatggtctttgtgcacatttacatcaaggtgtcgtgaaaactacccctaaaagccaaaatgg

SEQ ID NO: 415438 - DNA, 74 bp, Homo sapiens
taaaaatctataccacaatctttgtaccagcctgttccctactatacatgtctcatgaagcaaacagcaatgca

SEQ ID NO: 415439 - DNA, 98 bp, Homo sapiens
ttttgtggacatgctgttgaagatcaaagctgtgagggctgctaagggaatccgagcccgcattttagagactttggtcatgcttcttcttcttgcgt

SEQ ID NO: 415440 - DNA, 75 bp, Homo sapiens
caactacctgcactttggggagcctaagtcctgggcagctggtggaatttttgaagaaaatggaatctcgaggcc

SEQ ID NO: 415441 - DNA, 74 bp, Homo sapiens
gtgatcggcgacttggggtccaacttctttgcccggctgttcgggtttcaggttgaaatgggcatgaagaacca

SEQ ID NO: 415442 - DNA, 101 bp, Homo sapiens
cctacacaactcatggcaccgtgcacgtggtcgtcaacaaccagtgagaaagatcagtctaaagaaaaggagaagaaagtgaaaaaaacaattccttcctg

SEQ ID NO: 415443 - DNA, 75 bp, Homo sapiens
ctctgttccaaatgctttgctgcatgctacaagtgaaaactgatgagaaactgaatgtgtctgatgagaatacag

SEQ ID NO: 415444 - DNA, 88 bp, Homo sapiens
atcctgctgggatttttgagctggtggaagtggttggaaatggcacctatggacaagtctataagatataattgaccctgcaatcctg

SEQ ID NO: 415445 - DNA, 100 bp, Homo sapiens
ccgctgttgcagtcgtccgggcctttcgtggaaggctctatcgtccgcatctcgatggagaacttcctgtaaattaaaagatcttgggaacttggttctc

SEQ ID NO: 415446 - DNA, 50 bp, Homo sapiens
aaaatggagcagacctggacgagatgcctgaaatgtgcagatgccccgtg

SEQ ID NO: 415447 - DNA, 98 bp, Homo sapiens
ggactacaggcacacgccatcacacctgggaattgaagccattttttatgaaggaagttggcagtcactttgatgattttgtgaccaatctcattgaa

SEQ ID NO: 415448 - DNA, 74 bp, Homo sapiens
ggcctccatgagccgacacatgcggcgcaagcaccccgagctatgtcagctctatcctgaagagaacttggaga

SEQ ID NO: 415449 - DNA, 80 bp, Homo sapiens
atctacaccgacaactccatccggcccgaggagctgctgcagaaaggacccaggagcgataacagtaaatcaaataagat

SEQ ID NO: 415450 - DNA, 75 bp, Homo sapiens
tttagagctgcggaacaggacgccctctgatagtgaagtcaccctgctgagaaatgaagtggcacagctgaaaca

SEQ ID NO: 415451 - DNA, 87 bp, Homo sapiens
cccagtatgatggggcatacaagtgaaaaggaaaccgaatttgcatgctctttccaagccgaagaaaaacatatcatcaggtagcac

SEQ ID NO: 415452 - DNA, 82 bp, Homo sapiens
aacgtttcccccgggatcccgaggacccacgttttcgagggcgcagagaagaaaggtcgtaatctgaaggagtggctgaggg

SEQ ID NO: 415453 - DNA, 97 bp, Homo sapiens
tggacaagatcaaggttccgacgcagatcatctgggggaaacaagaccagggccaggaaggaatactgggagaatcttcggatagcctcaggccggc

SEQ ID NO: 415454 - DNA, 100 bp, Homo sapiens
cagaactttggtctccagcatctctccagcggccacttcttgcgggagaacatcaaggccagcaccggtcactctgtgagactgctgggtcagaaaaagg

SEQ ID NO: 415455 - DNA, 100 bp, Homo sapiens
cctacctgaaagccatctcaagactcctcagatgccaccaacaaccccatccagcagttccttcaccaagtgcttaagaaaagatgcagagtctcgtaga

SEQ ID NO: 415456 - DNA, 90 bp, Homo sapiens
gccagagttgtgggccgccgtcggcagcaagaacagagagagaggtggacagatctgagagatactgagcgtctgttcctcacacacccc

SEQ ID NO: 415457 - DNA, 75 bp, Homo sapiens
cgtgcatggggctgctccccaggacctgagcaggaacctggagttttcagatggacttcagcagaaatctttatg

SEQ ID NO: 415458 - DNA, 141 bp, Homo sapiens
ctcgtttgaaaatggagagccaagaaccaacggaatcttctcagaatggcaaacagtatatcatttcagaggagaatgactgaccctgttccttgaggctgtggaggattctcagtgattccactggtcaaatgatgtgag

SEQ ID NO: 415459 - DNA, 76 bp, Homo sapiens
gcgggctggagacatggaccgcggcgagcaaggaaaaccaattctgtgtcctcggaggaccacagcccagttgggc

SEQ ID NO: 415460 - DNA, 90 bp, Homo sapiens
ccagattgtgggacaccaggtcattctgtacctctgtcatgggatgggccagaatcagctctgcgtacgtgtcctatgggggcctgctca

SEQ ID NO: 415461 - DNA, 95 bp, Homo sapiens
aagtggagcgacccccagggagggtcggacctgcctcaataccgccaagagagctgcttttgcacattttcctgaactctatgattttgccctct

SEQ ID NO: 415462 - DNA, 50 bp, Homo sapiens
agacctattatgagaggcttccatatcggccctggccaacgtcaacattg

SEQ ID NO: 415463 - DNA, 100 bp, Homo sapiens
gtgcgggagagccccttgcagaagacgccgtacgagtcccagtcggtacctccttttccacctggtgaagtacatctttgctgtggctcacagattgttc

SEQ ID NO: 415464 - DNA, 75 bp, Homo sapiens
attgctaggagggtacataatgccactttgattttgtcagaagctacatctggtaccttggctggcattatggga

SEQ ID NO: 415465 - DNA, 83 bp, Homo sapiens
ctctggaggagtactggcaacagtctctgctttctatccgtcaagatgataaagtcgtgtgcccgagaaccaaagaagtcttc

SEQ ID NO: 415466 - DNA, 100 bp, Homo sapiens
gctgaagcgactgagtccgcgatggagttggagaatattggcaactttattaaagctattcaggcttatggtatgaagccacatgacatattcgaagcaa

SEQ ID NO: 415467 - DNA, 100 bp, Homo sapiens
tatcttcaaagcacctagtacctcctaccattgtcaactgaactcacttgaaagcagtggggtccggacaaccaaaaatgaagaggagaatgaaaaggaa

SEQ ID NO: 415468 - DNA, 100 bp, Homo sapiens
ctcttggaagacttgggtccttgggtcgcagtaagtacaaatggatcctaggtgaagaaccggtggagaaacgaagaaggctccagaatgagatgacaac

SEQ ID NO: 415469 - DNA, 75 bp, Homo sapiens
tccatcaaacaattcctggacttcggtgctactttgaatgataaggatgatgactctcttcctgcagaaactggc

SEQ ID NO: 415470 - DNA, 100 bp, Homo sapiens
acgaaaggcagccgcggatcgccgcgctcagcgacaaacaataaggaagagcccaacactgctggaagtgagcatgccccatttcatgagaaccaacagc

SEQ ID NO: 415471 - DNA, 73 bp, Homo sapiens
gagaactcagcgaggattctgagttagagatgtttatgattacttccgagctgtcctgcagcgtgatgaaaga

SEQ ID NO: 415472 - DNA, 80 bp, Homo sapiens
tatagatggacaagagacgatcattctgcaagcaggcaacctgaatacaggcaggggaaatggaaggtgatgcagtcgaa

SEQ ID NO: 415473 - DNA, 73 bp, Homo sapiens
gcctgctgggagcgccgctcaaggagaactacgatgacccgcacaaaacccctgcctccccagttgtccacat

SEQ ID NO: 415474 - DNA, 95 bp, Homo sapiens
cctgaagctcaagggactgtgtccaccctcagccccagtggacaggaaagctaaggcctcagcgatgccggactccccagcggaggtgaagacgc

SEQ ID NO: 415475 - DNA, 100 bp, Homo sapiens
cagcggagccgtgtgcgccgggagcgcggaacagcttgtccacccgccggccggaccaggcctggtctccaagtcctctcctaagaagcctcgtggacgt

SEQ ID NO: 415476 - DNA, 97 bp, Homo sapiens
ctcccgagtggctgggattacagccgattcgaagacagtctcttacacctcctcctcagaacactattacatgggaagaatatatatctgctgaaaa

SEQ ID NO: 415477 - DNA, 97 bp, Homo sapiens
tcattataaagggagcaggaggaaaggctttctgtgccgggggtgatatcagagggactcggagatcatgcagcagaagcagaaaaaggcaaacgag

SEQ ID NO: 415478 - DNA, 72 bp, Homo sapiens
agatcttgaaagtgggcgagttgcgtctcagtcagtctctccacctccagttctctccccaccaaggagtcc

SEQ ID NO: 415479 - DNA, 108 bp, Homo sapiens
cgcctgtgggtccgtggttgaactttgtctccacgggagcgtcggtctcgatcttcagtttagatcttggaggcatatcaactgtggttctaaatggctatgatgtag

SEQ ID NO: 415480 - DNA, 113 bp, Homo sapiens
tgagcaggcccggggagggtggttaccgctgaggagctgcagtctctgtcaagaatttacatagtacatgacgaagttaaggataaagcttttgaactagaactcagctgggt

SEQ ID NO: 415481 - DNA, 51 bp, Homo sapiens
ctccccagcatttccacagacctgaggttggaaagaaccatgactgtattc

SEQ ID NO: 415482 - DNA, 74 bp, Homo sapiens
cttggattcagacgccgattcgcccagtggccacagatgtctttaattccaaaaacctggccgttcaggcacaa

SEQ ID NO: 415483 - DNA, 82 bp, Homo sapiens
ggactccttcggcagtccacccaccgccgccgcctcccaggagagagcaagccacatcagtgctcctggcagatccctgctt

SEQ ID NO: 415484 - DNA, 100 bp, Homo sapiens
aggacagttcgctacacagcaatgcatcgagacttaattcagtgcacaaatgagatgaatgtgaacatcccacagttggcagacagtttatttgaaagaa

SEQ ID NO: 415485 - DNA, 110 bp, Homo sapiens
ccccacctgggttctggtggacctctcggctttcctggtcagcagcgacttgggttattttggagctgttggagcactccttgagctgttgaagatcccgtgatcattac

SEQ ID NO: 415486 - DNA, 100 bp, Homo sapiens
ggagaccatggagaccctcacggagctgggcgacgagctgaccctgggagacatcgacggtcaaggtgaagatgttcttaaagggtcccagattacgtat

SEQ ID NO: 415487 - DNA, 100 bp, Homo sapiens
ctggtcttacattgctgcatcaagaaacccaagctgctgaggacttggatgttgtgggtgatggtatgcagtgtcctccttcacctttgctttttgatcc

SEQ ID NO: 415488 - DNA, 80 bp, Homo sapiens
ttggatataaccttctatgtgatgttggtgcatactatgctgcgaaactgcttcagttagagaaatagaggaagttgtcg

SEQ ID NO: 415489 - DNA, 75 bp, Homo sapiens
gtggggacacatagatttgtccaaaaggtggtgttcccactgatgaagagcaggcgactgggttggagagggaga

SEQ ID NO: 415490 - DNA, 83 bp, Homo sapiens
cgcagcccggcgggaggataaagaccaccacggttcaagggcagcaggaaagacgagatcctgggcatcgccaacaaccgact

SEQ ID NO: 415491 - DNA, 100 bp, Homo sapiens
cgccgcacccagccgcgccggcgaggacatgggcagccgcggcgcgcccaccccccgcgccggtgcagcggaactgctgcctgacgctctgcaacttcag

SEQ ID NO: 415492 - DNA, 90 bp, Homo sapiens
gcagccagtactctatatgaacaatccgtctggatcacggatgtaggaagtgaaacagaggtgcatctgttggataatagtcaaggcgtc

SEQ ID NO: 415493 - DNA, 82 bp, Homo sapiens
cagcacctcatcccctggatgggggaccacaagatcctcatcgacagatatggctcgtggacagcagaaaattcagtctcag

SEQ ID NO: 415494 - DNA, 98 bp, Homo sapiens
tctgtgggtcctctggtgttgagtggtcggcttggtgtggtgtgcggaggagctccaggcccgtcggcgcggagatctgtagaaacttccagtgtgta

SEQ ID NO: 415495 - DNA, 99 bp, Homo sapiens
cggctacatcttttcgtcgcttgccggctgtctgatgaagagcagcgagaatggcgcggttgaagctccattcataccaaagtttagaggctctggaga

SEQ ID NO: 415496 - DNA, 153 bp, Homo sapiens
tcgggccgagatgtctcgctccgtggccttagctgtgctcgcgctactctctctttctggcctggaggctatccagcgcggtaaccagcgtgagctcgcccgccagaagaatatgaaaaagcagagcgactcggttaagggaaagcgccgaga

SEQ ID NO: 415497 - DNA, 75 bp, Homo sapiens
ttcggaatgcactacaacaggaaaatcatattatagatggagtaaagccccttaacacgactcgtataaatgctg

SEQ ID NO: 415498 - DNA, 90 bp, Homo sapiens
tgctgccggctcagccagcctcacgctgctaggaaatggctccctgatctatcaggcaggaaaaatactattgtattacaaggctcggac

SEQ ID NO: 415499 - DNA, 96 bp, Homo sapiens
aattgggacaagcctttgatcaaaaaaaatgcctgtcttaaaggctgaagcgtcacattataactctgacttaaataacttgctgttctgctgcca

SEQ ID NO: 415500 - DNA, 82 bp, Homo sapiens
tgtgcgcgctggcgctgagcctgcagccggccctgccggacttgtccaaggtggatctgagcctcctcatgtgctccaggca

SEQ ID NO: 415501 - DNA, 100 bp, Homo sapiens
accggtttttagtccattgactatgcagcctaatggaaaatcctgccttgcttcgttgggcctatgcaagaacaataaatgtctatcctaatttcagacc

SEQ ID NO: 415502 - DNA, 100 bp, Homo sapiens
agcagcggtaccgttacgcggagctctcggaggaggacctgaagcagctgggttacacatcattttggaatgactgtatatcatctggattacgtggctg

SEQ ID NO: 415503 - DNA, 100 bp, Homo sapiens
agctgcagctgacttacatggaggagacgtgtcgtcactatgtggcccatgtgaagagtggagcctttcaggctggcatggagagcttaaggggcaactg

SEQ ID NO: 415504 - DNA, 100 bp, Homo sapiens
cgagacgtcttcccgccgtccccggctccaggagaccccacggttgttgatgagcgtgaattttttgagatcatgcccaattatgccaagaacatcattg

SEQ ID NO: 415505 - DNA, 83 bp, Homo sapiens
atgaaattggaattgggtttacatgagcactaagaagattttcttacattgatacctactgtgacaaaacacacatccaatga

SEQ ID NO: 415506 - DNA, 133 bp, Homo sapiens
cgggagcacactctgtgcggagactgggcggccggccgacccttcctgtcgctgacggcgactgcgggaggccagctcatgatggagcagtccaagaagtcctccctcatggtggcccgcagtattctcaaca

SEQ ID NO: 415507 - DNA, 99 bp, Homo sapiens
cagggacatcagtggagccttctcagacccacaggagcagttgcagaagctcgaggttgaactgagagaagtcactaagaacaaggagaaactgaggaa

SEQ ID NO: 415508 - DNA, 97 bp, Homo sapiens
aacagtgcagtctgcagagacttcaacatccctggcttcccgactgtgagggctaaagaattacctccaaagccattgtcaagaccacagcagtcat

SEQ ID NO: 415509 - DNA, 108 bp, Homo sapiens
gggacccggtgtctgctcctgtcgccttcgcctcctaatccctagccactatggttgatgataattagaagcatgctttccactgaacttcccgacaacatttgttat

SEQ ID NO: 415510 - DNA, 98 bp, Homo sapiens
cgcccgcagccgcagccccctgctccggaggctggtgcagggaatggcatttactttacaagaacgacaaatgcttggtcttcaaggacttctacctc

SEQ ID NO: 415511 - DNA, 100 bp, Homo sapiens
aacttctatggtatggactacgcgacctccaaggatgcccgtgagcctgttgtcggggccaggccactcttcacctccaccatgagcctggacatccaga

SEQ ID NO: 415512 - DNA, 100 bp, Homo sapiens
taaagaagaagtcaccgtttctacctggagtacgaccccagcaaagcgacctttgtgaaggtggtgccaacccccaacaatggctccacggagctcgtgg

SEQ ID NO: 415513 - DNA, 100 bp, Homo sapiens
gcgcaagcaatttctcagattattacaaaatgaacaatttgagttggatatggaagaggccattcaaaagggattaatgaaaatcaagttccatcctcag

SEQ ID NO: 415514 - DNA, 50 bp, Homo sapiens
cgtcaatcagagcgtcctgtgcgacaaagccacagacccaagcatgtcgg

SEQ ID NO: 415515 - DNA, 50 bp, Homo sapiens
ccactccagaaactttccctccttcagtacgctacttcctgaagaataag

SEQ ID NO: 415516 - DNA, 96 bp, Homo sapiens
acaaacagcccgcccgaccccgtcccgaccctggccgccccgagcggagcctggagatggtcagtaggacagaaggtaacattgatgactcgctca

SEQ ID NO: 415517 - DNA, 95 bp, Homo sapiens
tatcataatggaaaagaatatccaaccgataatagaattcactcgtgaagtaacagacacacagatgccacttgttgctcctgtcattctcccag

SEQ ID NO: 415518 - DNA, 98 bp, Homo sapiens
accccggaagggcggacacctccacatcgccttttgccacctttccctttatttccggagataatgcctctgaggtagcagttactactccaggaact

SEQ ID NO: 415519 - DNA, 87 bp, Homo sapiens
gccgcgcgcggggcgccgacacctgtggctggagggagcctagtaataaacgggtcaaacccctttcccgagtcacgtcgctagcaa

SEQ ID NO: 415520 - DNA, 97 bp, Homo sapiens
ggaagtgccaaggtcatccggtccctccacgggcggctgcagggtggagggcagcacccatgtttttcgtgtaaagtgtctggtaaagatgtgaagc

SEQ ID NO: 415521 - DNA, 98 bp, Homo sapiens
ccgcctcagcttcccaaagtgttgggattataggcgtgagccactgcacctggcacagaggcatttcatccttcatgaagccattcaggattttgaat

SEQ ID NO: 415522 - DNA, 82 bp, Homo sapiens
ctccattattcctccaatgtcaccaagctgttggatgcattgctgcatagagacggggtttcgccatgttggccaggatggt

SEQ ID NO: 415523 - DNA, 76 bp, Homo sapiens
gaaaattcaagcaaaccaatttgattatcttgtcaaactcaagtctcttgatgacgaggacgaggaggaggaggag

SEQ ID NO: 415524 - DNA, 138 bp, Homo sapiens
gaggggcttcataccagctgaagagcgacaagccgctggcagccgcggatctcaccgccgctcagggtgcccgtggttgacacgagctgtgtccccagctgttcccgtctacaatggcatcatcttcctctttgtcct

SEQ ID NO: 415525 - DNA, 100 bp, Homo sapiens
atgagtctatataaaggctttttaccatcttggctgagaatggtggctgttcctttgatgagcactacagcaactgtggttatagtgtggctctagggac

SEQ ID NO: 415526 - DNA, 75 bp, Homo sapiens
tgacgccatgtcgggttattcgagtgaccgagaccgcggccgggaccgagggaggatcccttttcccccagaaat

SEQ ID NO: 415527 - DNA, 90 bp, Homo sapiens
aagctgggcaaagtctgcaaatggaatttctctaccataacaaattctcagaatgtgaaaacctttgcatcttctgatagtctagccaag

SEQ ID NO: 415528 - DNA, 88 bp, Homo sapiens
ccagcagtatcctgcatcgggagaaaacaagtccaaggatgaatcccagtccctgttacgggtggtcttcaagctgacagagaagctg

SEQ ID NO: 415529 - DNA, 100 bp, Homo sapiens
aagccatctcttcggcggtgcgcaaggcgggcatcgcgcacctgatgttgcttcagagtgtgaagtcaaatgcatgccaacattccagttttttaagaag

SEQ ID NO: 415530 - DNA, 50 bp, Homo sapiens
cccgatcctattcccagtcgtcatgccaatgaagatgtggaaagaatgtt

SEQ ID NO: 415531 - DNA, 100 bp, Homo sapiens
caacctgttacgagttctaccttttgagctgggaaaactgtttcagttgcagactttaggcctgaaaggaacatctgctcagcaattggatgcaacattt

SEQ ID NO: 415532 - DNA, 100 bp, Homo sapiens
cagattggcacccgaattgccaaagttttggaaaagagtgtcctgccatacttcgtagctacaaaactggctaaaatccggaagccaactttggataagc

SEQ ID NO: 415533 - DNA, 83 bp, Homo sapiens
cccgaggaggaagacgaatcgttaaacatcttaggtcagctctacgaactcgacggggaccccaagaggaaggaattcctgga

SEQ ID NO: 415534 - DNA, 88 bp, Homo sapiens
cgactctccacctacagaacagcatgcaagcttaggtttgttcagaagaaatgcaattgagcggcctattgccaattcatggacatgc

SEQ ID NO: 415535 - DNA, 100 bp, Homo sapiens
aggaggtgaaagaagctgccaagatagccaaagacaagacgcaggagaaaatcgagacctcaagtaatcattcccaaattgcccccgaggaattagcact

SEQ ID NO: 415536 - DNA, 74 bp, Homo sapiens
gcaactgcgatgtctgtggactgtcttgggcagcatgcagtgctttctgggtgtccatctcttcacagtcatgg

SEQ ID NO: 415537 - DNA, 100 bp, Homo sapiens
gcctccctgggccccaggacaccggccccgagcaggtcacgaggacggagggccatgtgttgggtcagcaccatcaggccacggcatatgcctccaagga

SEQ ID NO: 415538 - DNA, 139 bp, Homo sapiens
aagattcctgtgctaagagaagaaaaactacctgtggtaggaattggaaagcatctgtgtggtatggcaacagttggttgaatctggcgatgtggaacccatggatatggagggctgactatatacaccatgttttttc

SEQ ID NO: 415539 - DNA, 131 bp, Homo sapiens
ttcttgcgctccatccgtccagataacatgtcggagtacagcaagcagatgcagagatgcgatcattatttcgaagttctagtattctggatcaccgtgaaggaagtggacctatagcctttgcccacaag

SEQ ID NO: 415540 - DNA, 74 bp, Homo sapiens
taccagcccatgcccctgaaggcctcgctggagatcgagtaccaaatgtgtcttgctgaatcagggctctctta

SEQ ID NO: 415541 - DNA, 75 bp, Homo sapiens
agaagcggaacagccacagcagcctcccaaggagtctgcaagttgctgatggtgagaccattctaaaaggcctcc

SEQ ID NO: 415542 - DNA, 99 bp, Homo sapiens
actgaatgatgaggtggtctaccctacctggctccatgaagatgccacagggatcctaaaatctgtgaccaagaatatggcccaggtgaccaaagccct

SEQ ID NO: 415543 - DNA, 100 bp, Homo sapiens
gggggacgggatgcggggcctggcggtcttcatctcggatatccgcaactagttttgccgaattgacaagcccctgtgtcacagtgaggatgagaaactc

SEQ ID NO: 415544 - DNA, 88 bp, Homo sapiens
tgaagttaacatttctagcaattcggtggcatgagaatgtatttacatctgtaagctcctgcaaaatcttccttattctgaaaagatg

SEQ ID NO: 415545 - DNA, 75 bp, Homo sapiens
gatggtgatggagattttgatgtggatgatgccaaagttttattagaaagtgaagtcactgcttttgctgtcttg

SEQ ID NO: 415546 - DNA, 90 bp, Homo sapiens
cttcctaggcctccaaccatatggccgacaggattcactttggacagatcactagcaatcaaatgcttgtgccagtgatagaaaaattaa

SEQ ID NO: 415547 - DNA, 83 bp, Homo sapiens
tctacaagactctcttcgctctttgcatcttaactgcagccttatgccagcctggaccatcttggaggcagtgtaggatcatg

SEQ ID NO: 415548 - DNA, 50 bp, Homo sapiens
ggcagcgcggccgcagcagccctaagaagcctgtgaggaggagatatgag

SEQ ID NO: 415549 - DNA, 88 bp, Homo sapiens
cgaatctctcaggctgcatcaggatgaatgatgacccaagtatggaagtatggcccatctcctgtacgcttggagcgacctttggcta

SEQ ID NO: 415550 - DNA, 75 bp, Homo sapiens
gggcggcaccctggccaggaagcggagggcgcgcgaggtgcactggtgattgctgcggtgtttgaccgagacata

SEQ ID NO: 415551 - DNA, 75 bp, Homo sapiens
atatgccgctgctggcaggccagctgctgaagaaatcaggggagaaacccctgcttggtggaagcctgatggaat

SEQ ID NO: 415552 - DNA, 75 bp, Homo sapiens
cctgccttggcgctggccggctacatcgagcttgatgtgtttgatgctgctgagcggtaccagcaggcaggcctt

SEQ ID NO: 415553 - DNA, 107 bp, Homo sapiens
gcgggatagacggggacaatgaggaggagacggagcacgccaaagggaatgtatcctgtcaggtataatgtcagtgaatggcaagaaagttcttcatatggatcgaa

SEQ ID NO: 415554 - DNA, 100 bp, Homo sapiens
tgggctctggtgcccagaagctgtgcaggaagaactcttggatataaaagaactcccccattccaaacagaggccttcatgcctttctgaaaaatatgac

SEQ ID NO: 415555 - DNA, 100 bp, Homo sapiens
tcacggtgaccttcgcttggtgtcctcctggcctcagcaacctgacaattctgtcgtgtcccggcccccgacagctgctctcgggagccgcctcccgaca

SEQ ID NO: 415556 - DNA, 82 bp, Homo sapiens
tttccttttggctattttaaaaggcgcgggtttaagtggacgccaggtgcaccggacacaggctgtgtttaaccacaccgag

SEQ ID NO: 415557 - DNA, 50 bp, Homo sapiens
tagaccttgccaagatggcacagtccaaaattgaagacattagagcagaa

SEQ ID NO: 415558 - DNA, 82 bp, Homo sapiens
caaaggggaggttacgcagcaaaccatccagaagatcaggatcctcatgaccagccaaagagaagaagaattaggaagcata

SEQ ID NO: 415559 - DNA, 83 bp, Homo sapiens
ctgccgccaagatgccggcctattttcagaggccggaaaatgccctcaaacgcgccaacgggggatatgagactttctactcg

SEQ ID NO: 415560 - DNA, 120 bp, Homo sapiens
ggggaccggcggcgctggaggagcgaggcagctgtactaggactgggaacgggtcctgcagacattcgctttgtctgggagaagaatgggcgagctctggagacctgtgtccctgtgcag

SEQ ID NO: 415561 - DNA, 75 bp, Homo sapiens
gcgtcagctcgcccgcgagttcgcggagcgcggcgccagaaaggtgtgctgggcatcaaggtgaagatcatgctg

SEQ ID NO: 415562 - DNA, 75 bp, Homo sapiens
tgagggacagtcctggtagaccagtgcccgtggccaccgagaccagcagcatggcatcgtgtgctgaaccctctg

SEQ ID NO: 415563 - DNA, 100 bp, Homo sapiens
gagagaccccccagggtgcctccgagagctgcctcacagagtttgggcttcctgtagacacccttttcctgcgcaacagagctgggcctccctttctcta

SEQ ID NO: 415564 - DNA, 102 bp, Homo sapiens
attagaagttgtccaacaggtggtactttatgctagaacccagcgcaggagtaaattgaaagaatcacttgatgtcttcggaagacatatccttcccaactc

SEQ ID NO: 415565 - DNA, 51 bp, Homo sapiens
ccttcacctgatatctgtgccagagaatggctggagtgcagtggcgctatc

SEQ ID NO: 415566 - DNA, 100 bp, Homo sapiens
aagcagtgggtggtgctgggccccccaatcctgctatcaatggcagtgcaccccgggacctgtttgacatgaagcttggggcttccttggtcgcacccac

SEQ ID NO: 415567 - DNA, 83 bp, Homo sapiens
agcttctttatcccttcatctgtggataagcaggtacctgtacttcaccaacatgcaggaccgggcagccaagatcgaacgcg

SEQ ID NO: 415568 - DNA, 80 bp, Homo sapiens
tcacccaccaacaacaccacaataatccacagccaaggtcaaaatgcagatcttcgtgaaaacccttaccggcaagacca

SEQ ID NO: 415569 - DNA, 100 bp, Homo sapiens
aaaagcctcaactaatcagggtgccatagatgtttatgtcagccaactggggaaagtggaattgaaatcccataaaggacccggtcagcccaaggagcag

SEQ ID NO: 415570 - DNA, 96 bp, Homo sapiens
gagaaggcaaggcagctgttctgaagtaccagaagccaaaggaggttgtggtggccgagtctgagctacagaaggaactaaagaaggtgaagacag

SEQ ID NO: 415571 - DNA, 97 bp, Homo sapiens
ggaagagagttggctactggctgagcgagaagaaaatcaagaagctgaatttccaggccttcgccgagctgtgcagcctgccgagtgcctgcgattg

SEQ ID NO: 415572 - DNA, 98 bp, Homo sapiens
acatttctgtcaagaaccaagaaagcttgatcttattctacatcattttttacctgtagggctcacttatctaaagaatatgaggaggctaatttcag

SEQ ID NO: 415573 - DNA, 101 bp, Homo sapiens
cctgtgtttctccattctgttggttttatgcatctttatccaatcaagtgcccttggacaaagcctgaaaccagcttccaatcagaagactatacaacctc

SEQ ID NO: 415574 - DNA, 100 bp, Homo sapiens
gtgcaggcgctgaagcgcgcgggcaaggaggggacggcaaaacagaacagaaaggcggagataaaaagaggggtgttaaaagaccacgagaagatcatgg

SEQ ID NO: 415575 - DNA, 83 bp, Homo sapiens
ctcagttggaagcagccgatccagcctgcggagcctgtggggcagaggtcattttcttctgaggaagtcattcttaaggactg

SEQ ID NO: 415576 - DNA, 100 bp, Homo sapiens
gccgggagctggtacacagcctcaggagcaccagcgaaagcagccagtctgagatattgacactacagaaaaaactgacagcttactccttgtattgatt

SEQ ID NO: 415577 - DNA, 96 bp, Homo sapiens
taatcactaaattctgccgaaaggactgaggaacggtgcctggaaaagacattgggacctgtgcaatcactgctattccttttgagaagtccaaag

SEQ ID NO: 415578 - DNA, 90 bp, Homo sapiens
caagacagagctggcctggagtccgcggctggccgcgtgagtaggaacgccacagaagtatgatcccactttcaaaggacccatttacaa

SEQ ID NO: 415579 - DNA, 85 bp, Homo sapiens
actctcatcgctctcggcctcggcctcggcctccgacacggtatgttgagtcgatgggatgatagccagagatttttgtctgacc

SEQ ID NO: 415580 - DNA, 50 bp, Homo sapiens
tcttacttcaatttgaacccatttgaggtaaggagagctgctttgagaga

SEQ ID NO: 415581 - DNA, 75 bp, Homo sapiens
acagaagttgctgctgacgctctgggtgaagaatggaagagttcaagctgaagaagatgtggaaaagtcccaatg

SEQ ID NO: 415582 - DNA, 101 bp, Homo sapiens
ctggtttatgttaccagcaatgacactacggtaatcctcccacttcttaaaagtgatctttatgaagtgattcagtccaccttagatggactgctctgcac

SEQ ID NO: 415583 - DNA, 87 bp, Homo sapiens
ggtctcctgatcatgagctccagcagaccataagggataacctttaccgccatgctgtgccttattcgccaaagtgaggacaaaagg

SEQ ID NO: 415584 - DNA, 75 bp, Homo sapiens
tattgtgaccacacagttctccatgagttggacagataccaaagaggagttcttcgtaagtacatcttaaagctg

SEQ ID NO: 415585 - DNA, 100 bp, Homo sapiens
ccgacgacgacctgtttgtggacttggggagcggtgccgagcagagagatcgacaaggcggagggcaagttctggacacactggaaccgggagaccaagc

SEQ ID NO: 415586 - DNA, 101 bp, Homo sapiens
cggagcagtatttcaatgtggagagcgatcgtcttctgatcaaaggaggtaaaattgttaatgatgaccagtcgttctatgcagacatatacatggaagat

SEQ ID NO: 415587 - DNA, 100 bp, Homo sapiens
ggaaagggacatctgctcctccaaggcagagcggctcccccctttcggtgtggatgaggtcaccattgtcaacattttgaccaaccgcagcaatgcacag

SEQ ID NO: 415588 - DNA, 74 bp, Homo sapiens
ccgcagccggggcccccgccgccgccggagcgattatgactgtaccttttaactttgtagctggaacacaagaa

SEQ ID NO: 415589 - DNA, 50 bp, Homo sapiens
ggggtcttcctcctccgccgttgacaggagaatggtgttgaacgcgtgtg

SEQ ID NO: 415590 - DNA, 82 bp, Homo sapiens
catcgcagttggaagcccatggggcagagagaagtggagatcctgatgtttctcagtgccattgtgatgatgaagaaccgca

SEQ ID NO: 415591 - DNA, 100 bp, Homo sapiens
agcgaacttgaatgtgtaaccaatagtactcttgccgctatcatacgccagctgagcagtctgacctgtgggccaaagctgaccaactcccccaccgtca

SEQ ID NO: 415592 - DNA, 75 bp, Homo sapiens
gaaagaagacagccatcatttgaaagattctggctacattggagattggttgctttctaaaactgaaggagaagc

SEQ ID NO: 415593 - DNA, 88 bp, Homo sapiens
aaaaaccggagaagagaaactaaaaggacagtagaaaaggcttttccagtttgcataatgctgaaagtttagaagagaagaatatggc

SEQ ID NO: 415594 - DNA, 75 bp, Homo sapiens
cttcagcctaatcattgcatcctatgatgccaacaagaaagctttttttctcaaggtgcaatgaaagccttccac

SEQ ID NO: 415595 - DNA, 82 bp, Homo sapiens
ctccaacgtaacctcggcgccggtgacgtccctcccgctggtcaccactccggcaccaggttttaaaatcaaagatgggaaa

SEQ ID NO: 415596 - DNA, 75 bp, Homo sapiens
cgcaaccccagatccatttacactttacaggcagctgcaatgactctccgcacggtattattgtcattgcaagca

SEQ ID NO: 415597 - DNA, 100 bp, Homo sapiens
gactaacttccatggcatggatcttacccgtgacaaaatgtgttccatggtcaaaaaatggcagctatccgtcagtccatctccaaagccctggtggcct

SEQ ID NO: 415598 - DNA, 75 bp, Homo sapiens
atgccacgagcacagccacttctacacgtcacgggaagcttgtgggctgtgccatcatccatgtcaatggagaca

SEQ ID NO: 415599 - DNA, 101 bp, Homo sapiens
ttcaaggtggggttggcatcccccacatacggtctctaattaacagaagatggcaaagcccagccacagcagctatgtccttcagcagctaaacaaccaaa

SEQ ID NO: 415600 - DNA, 49 bp, Homo sapiens
ctttatgaaacagcttgcttcctacagagcaaactgctatgcatccttc

SEQ ID NO: 415601 - DNA, 100 bp, Homo sapiens
gcgggggctgtggccagcgtgccagccactgtgacactagccaccaggaggttggagtcctatcaggaagctgtctctgaagatgaagattttatagaca

SEQ ID NO: 415602 - DNA, 50 bp, Homo sapiens
gcggacctctctgggctggctattaagcaaaagttcaaacagaccctccc

SEQ ID NO: 415603 - DNA, 74 bp, Homo sapiens
tcgggatgaggaatgagcaagcgggacaagcagatcttttgaaatatgctaagaatgagacattggagaacctg

SEQ ID NO: 415604 - DNA, 76 bp, Homo sapiens
ctcgtccaacgtcggggaagttgtctggagccgggtgtgggctgagccctgcctgattgatgctgccaaggaggag

SEQ ID NO: 415605 - DNA, 83 bp, Homo sapiens
tccagcccggcccggcagcgacatggaaggatcaaagttctgatcgtaccagtctttcttcagtgggagcccaggattctgaa

SEQ ID NO: 415606 - DNA, 100 bp, Homo sapiens
agctgggaccagcgtctcggaggcgccgcagtccaggatctgtgtgccatggaggaccacaactgtgagcagctctgtgtgaatgtgccgggctccttcg

SEQ ID NO: 415607 - DNA, 100 bp, Homo sapiens
agggaaacctgctcccaggagttgaagaaacccctcctggagtttccccaaagccatggacagccctagtcttcgtgagcttcaacagcctctgctggag

SEQ ID NO: 415608 - DNA, 100 bp, Homo sapiens
gtgggctgcaaatccaagaaggggctgtcctcgtcctccagctgttatctggaagaacatacatatgatagttgagaaagacacatattctgatcatgaa

SEQ ID NO: 415609 - DNA, 83 bp, Homo sapiens
acttatagatcttctgcactgtttacaggcacagaatcgctgttctggcatccatttgcgttactcaggcatttatgatgtgg

SEQ ID NO: 415610 - DNA, 74 bp, Homo sapiens
acaaccccagttaagctgcgctccgggagaatgtgaaaacctttgcatcttctgatagtctagccaaggtccaa

SEQ ID NO: 415611 - DNA, 75 bp, Homo sapiens
tgacggtggaggttcgcggctctaacggggctttctacaaggtacgctccatggtgagtgactttgctgttttcc

SEQ ID NO: 415612 - DNA, 97 bp, Homo sapiens
cgcctccccaactcgggtaaagctcctcggcctcggcgtgctgcgcctccgcggctgccctgcgccaggctggcgcccatgcggctctacacgctct

SEQ ID NO: 415613 - DNA, 90 bp, Homo sapiens
acatcttgaaagagaagctcttcctgtgagggtgtcgtagtcattcttcagcacaattcttaattggagaccaagaaccctgggccttta

SEQ ID NO: 415614 - DNA, 96 bp, Homo sapiens
cggcttccggatccttggtctgcgagctgggatgtttgtgtctaagttctttgggggctatgtgcctgagatggtgctcacccctgatgatcagcg

SEQ ID NO: 415615 - DNA, 82 bp, Homo sapiens
tgcccccccttccccacgcaaccccagatccatttacactttacaatatggctcgtggacagcagaaaattcagtctcagca

SEQ ID NO: 415616 - DNA, 100 bp, Homo sapiens
cagaaccagactagaaactgctggcagaactacctgggatgatcccggcggagagccgctcgttcctgctgacggacctggcgtcaggccggacctacga

SEQ ID NO: 415617 - DNA, 97 bp, Homo sapiens
cttttgaagaggaaatgaagggtattgccgctgttactgatatacctttaggtcagaatggcggcagtggagcatcgtcattcttcaggattgccct

SEQ ID NO: 415618 - DNA, 90 bp, Homo sapiens
gcgctgttcaaacccatgaattccagctattcttcagatgctctggattttgagacggagcacaaattggaccctgtatttgattctcca

SEQ ID NO: 415619 - DNA, 50 bp, Homo sapiens
acaagacttcaggtcacgctcggttgcccccaagtttcctggcagtgtgt

SEQ ID NO: 415620 - DNA, 80 bp, Homo sapiens
cagtcggcttgtcctggctcttgccctcatcctggttctggaatcctcagttcaagcaacttgagttggtggaaccaagt

SEQ ID NO: 415621 - DNA, 100 bp, Homo sapiens
cacatcatgtgacgacacccctgatggggcaggaggggcctttgcagctcagttcaactttagttggcttaccaagagtgaagcgtgacaagtactcagt

SEQ ID NO: 415622 - DNA, 129 bp, Homo sapiens
tggtatctcagttagaggaggcagaagatttctggccagtggagagaggaattcctcaagacaccattccagcctgggagcctcgatctgaaagccaagcatcacgcaaggaagagggcctgcctgaag

SEQ ID NO: 415623 - DNA, 90 bp, Homo sapiens
ctagtttggatgtggaggggaatagactccatctatccatatgaggtcctccacagcctgtgaatccccctagacctttcaagcatagtg

SEQ ID NO: 415624 - DNA, 75 bp, Homo sapiens
aaccttagcgacatcaggaagaacagggtcgaggatcgagtttgatgaaggccggaacaactttgaaggggaggt

SEQ ID NO: 415625 - DNA, 101 bp, Homo sapiens
gcggggaggaggcggtggccgtggtgcgggctctgcagcgagcgctcgatggaacctcatcccaggaatggaagttggatacactttgtgacttgtacgag

SEQ ID NO: 415626 - DNA, 110 bp, Homo sapiens
cattaagagggcactggacctgaacttgaagcatcagatcttgcctaaagagcagtggaccaaatatgaagaggtggctcgtaagttggtgatcattgaaggagacttgg

SEQ ID NO: 415627 - DNA, 80 bp, Homo sapiens
ccgtctgagcggcctaacccgcgcccgggtagaggttttaaaatcaaagatgggaaaatcggagaaaattgcccttcccc

SEQ ID NO: 415628 - DNA, 75 bp, Homo sapiens
gagtacgataccgaagcgggctgtgtgccccttctccacccagagagggtcaccatgaagttcaatcccttcgtt

SEQ ID NO: 415629 - DNA, 74 bp, Homo sapiens
tggcagcgaagaagatcgaaaattaaacctcaggtccttttggtgtgaaccatggggtggaacttcactcagat

SEQ ID NO: 415630 - DNA, 82 bp, Homo sapiens
cgcccgccaccgacatctactttgacactcatgaggaccatgatacttccactgagaatacagacgagtccaaccatgaccc

SEQ ID NO: 415631 - DNA, 75 bp, Homo sapiens
atcacaaaagagttgattgaaattatctctggtgctgcagctctggttattttggagctgttggagcactccttg

SEQ ID NO: 415632 - DNA, 75 bp, Homo sapiens
gcggaggtcgataagctggaactgatgctgtccagaccaaaacgaagaagacgttagccaaacccaatataagga

SEQ ID NO: 415633 - DNA, 76 bp, Homo sapiens
gtcaccgaggagaagtaccaggaggcgttggccaagggtcctaggcctacttacaagcctccagtctcaaattatc

SEQ ID NO: 415634 - DNA, 115 bp, Homo sapiens
tgccattccagcactggactcatggaggctgagcatttattcaggtggccggactgtgccatgctgctccagacccaaggtggcagctctcactgcggggaccctgctacttctg

SEQ ID NO: 415635 - DNA, 98 bp, Homo sapiens
ctgaaggctgtcttgatcaggaaactgaagactctctgcttttgccacagcagttcctgcagcttccttgagagacggggtttcgccatgttggccag

SEQ ID NO: 415636 - DNA, 75 bp, Homo sapiens
gcaacccacccctgattggacagtctcatcaagaaggatgaccagtgtcccagtgaaggaacgagtgaaggtgtc

SEQ ID NO: 415637 - DNA, 75 bp, Homo sapiens
caggaggtggtagagggcatggatatctctactcgctccaaagggcgaactttctgaccaagtatacaactaccc

SEQ ID NO: 415638 - DNA, 88 bp, Homo sapiens
aagatacaggagagatttatacaaccagtgttaccttggacagagagggtctaaaattcccaggactccacagctttgcaccagataa

SEQ ID NO: 415639 - DNA, 80 bp, Homo sapiens
cattgactatgcagcctaatgtgttatagttttgccgctggactcttccctcccttcccccaccccatcaggatgatatg

SEQ ID NO: 415640 - DNA, 82 bp, Homo sapiens
aagaggcaaagcaagcgagaagtcgcgggcccagcccacagcagggtctatcagccacagtctctgcaagtttccaagagca

SEQ ID NO: 415641 - DNA, 123 bp, Homo sapiens
aagacccctacgctcaaggtgttcatgcacgaaaacctctacttcaccaaccggaaggcccggattgcatttctacaaggcgaaagaaaaggtcaagagaacctgaagaaggacttagtaaga

SEQ ID NO: 415642 - DNA, 75 bp, Homo sapiens
cgtggagctggagcagatcccccagccggctgagacaggacttaaccaccaccatgtcgagcaaaagaacaaaga

SEQ ID NO: 415643 - DNA, 98 bp, Homo sapiens
aacatcccctacagccaccatcaccaccagatgattttgagaagagggggaaaaaggaagtttgtcctgtcctggatcagtttctttgtcatgtagcc

SEQ ID NO: 415644 - DNA, 76 bp, Homo sapiens
gtcaacttcctcttcagtcatcagtagccctaatttgtttagaactgtaatatgcacagttaaaacaacttgtcct

SEQ ID NO: 415645 - DNA, 100 bp, Homo sapiens
attcgcagtggtcgcttcttctccttggatcccctaacaacagtgagagagcaatgcgagcagttggagaaatgtgtaaaggcccgggagcggctagagc

SEQ ID NO: 415646 - DNA, 100 bp, Homo sapiens
gtctgatctatgacaccaagggtcgctttgctgtacatcgtattacacctgaggaggccaaggtgccagaggaggctaattatgaggcggtccccgtgga

SEQ ID NO: 415647 - DNA, 75 bp, Homo sapiens
gacccgaccgttatccagtcggttcgtggagaggagaggaactgtggaaggtgcatcagtgaagaaatggaccaa

SEQ ID NO: 415648 - DNA, 75 bp, Homo sapiens
aaaagaagcccaaagttttaaagtattggtaaaggttttcaaggtgtcatgaaaagatggggatttaaaggccag

SEQ ID NO: 415649 - DNA, 75 bp, Homo sapiens
ggggctggtgaccgagcacgtcttcttactagacaagggaggagtctgctactagtcttatcagctcttaaaaac

SEQ ID NO: 415650 - DNA, 100 bp, Homo sapiens
cccgacgtggccttcctcgtggccgcctccttcttcctcatcgtggcagctctggacacagaatgttcagcttaacaaagaaatgacacttgccagcaac

SEQ ID NO: 415651 - DNA, 75 bp, Homo sapiens
tcctactcctgggaaggaggatcgcaaaagctggttgttattgatgccttcagattgatcaatgctaatatgatg

SEQ ID NO: 415652 - DNA, 100 bp, Homo sapiens
gcacaatttccatggctgaattcaacttgctggaccatttactacctgtcattatgggagaaaagcacggggcctccattaacgcttctaacaataaggg

SEQ ID NO: 415653 - DNA, 80 bp, Homo sapiens
actgcatctcgacagcatctcgggtaacaaccgagcccctcctcgcagcctgtttgcagacaaggtcccaaagacagcag

SEQ ID NO: 415654 - DNA, 100 bp, Homo sapiens
ggaagatactattaaacagaggacaagtgaggttcagctaaaagatggcggcaaggcagcccaggcaaatgtaagaataggcgatgtggttctcagcatt

SEQ ID NO: 415655 - DNA, 74 bp, Homo sapiens
cctcaggttgctctgtcatttggtttcaaggtgcctcccttcgttgatctgaaaagtggatttcgataacaaca

SEQ ID NO: 415656 - DNA, 90 bp, Homo sapiens
tgtaattattacagcattagataatgtggaagccaggagatacgtagacagaaagtactgaaatcccaccttatgtgatgaagtgtccga

SEQ ID NO: 415657 - DNA, 100 bp, Homo sapiens
atctacgtgtgctttttcaagggagctgataaagaacttcttcccaaaatggatctttgtagaatttgatggctgtaactggaagcaacactcctgggta

SEQ ID NO: 415658 - DNA, 100 bp, Homo sapiens
tcttggaaacattatataccttggggaaagctgatcttccaggtggttcacttatttttaacactctgcagcagcagcaacagcagctctcccagtttac

SEQ ID NO: 415659 - DNA, 75 bp, Homo sapiens
aagagattcagccagcacactcctcgcgagcaaggctatcgccccattccagcggagacttatgtaggagggacc

SEQ ID NO: 415660 - DNA, 87 bp, Homo sapiens
ccgagcaaattgaagagacgttaaaatacttccgtggaatgcaagctttaggacttcacctgacagatccaagtcaacgtcttgttc

SEQ ID NO: 415661 - DNA, 100 bp, Homo sapiens
gagaagagcaactcggagttttgggggtgtgctttggatccaggtccggcacgatcaagacccaggctacatgcatcacaagtttgccatcgtggacaag

SEQ ID NO: 415662 - DNA, 100 bp, Homo sapiens
tctccatgctctgctgcttctggcctctgggcatcgcagccttctacttgtcccatgagataattctgaaataatcagcagaaacggaatggaatgccaa

SEQ ID NO: 415663 - DNA, 100 bp, Homo sapiens
gcgcccgccgctcctggcgctgctggccgcgctgctgctggccgcacgcggggctgctgcccaagaacggtggcagccgaagttaggaagcagatctccg

SEQ ID NO: 415664 - DNA, 85 bp, Homo sapiens
tccttaaccgagatcaacctgtctgctgtcctgcagggtgagtacctggggcaaaaggtggccgtgaagaatatcaagtgtgatg

SEQ ID NO: 415665 - DNA, 101 bp, Homo sapiens
gccggggatagtggagctgcccactctagaggagctgaaagtagatgaggggagagaatgtagaagatgccttccttgaggctgccaagaaaatctatcag

SEQ ID NO: 415666 - DNA, 74 bp, Homo sapiens
ctctatatgaacaatccgtctggatcacggatgtaggaagtgaaattgataaagaaggtgtgattgaaccagac

SEQ ID NO: 415667 - DNA, 51 bp, Homo sapiens
cagagcttttggaatctgaacaagggtgttttccaagcagtgaagcacttg

SEQ ID NO: 415668 - DNA, 100 bp, Homo sapiens
agtaaactcacctttgggactggaacaagacttcaggtcacgctcgcacgaaagcaagagattatcaaagtcactgaacaactgatcgaagctatcaaca

SEQ ID NO: 415669 - DNA, 113 bp, Homo sapiens
tgtttctctccctctgcccccccttccccacgcaaccccagatccatttacactttacagtttacccaaggtccagcctagcccctaggcaccatgtcggacagtgatctagg

SEQ ID NO: 415670 - DNA, 100 bp, Homo sapiens
gccagagcgaggagggcgctacgcggtgtttgaccaggaacttgatgcactggaaattgagacagtacaaaaggagacaatccatccccgaaagtcatat

SEQ ID NO: 415671 - DNA, 75 bp, Homo sapiens
ccgcaccaggtcttgtagcagcgcctcctcggtggatctcgagccagaggggaaagtatttgtggtaataaccct

SEQ ID NO: 415672 - DNA, 90 bp, Homo sapiens
gcaagtgggggaggagcgttccttgtcctccctctgcacaagatgagctgagctggacaactaaaagcacctgtagcagttctccccaac

SEQ ID NO: 415673 - DNA, 75 bp, Homo sapiens
aaaactaagcatccagaggccctgagcagctttcagcactggaggtgtacgaagccatcgacagcagagatggag

SEQ ID NO: 415674 - DNA, 100 bp, Homo sapiens
cggatgccctgcagtacctgcagaaggtctctggagacatcttcagcagagtttgctgtcatcgtggaggtccacgcagccgcacgttccaccctccacc

SEQ ID NO: 415675 - DNA, 75 bp, Homo sapiens
ggactctgaccgcaaacaaggagagcctactgagcagcctgagtggattgatgaactcccagagggcgctgtgaa

SEQ ID NO: 415676 - DNA, 83 bp, Homo sapiens
tagaaattccccccgaagaagactcccccacatctgggagtggagtcaacatatcaatggagcaagtcacagtcgtcgatgcc

SEQ ID NO: 415677 - DNA, 132 bp, Homo sapiens
ccgtgttgctgatcgcctgggtggttgttggcgtgtccctgcagcgaaggatcctgcgtccgtctccaagagagtatgaagagagtgcgtctgtagggcagggaagatggcggacaagcgcaaactccaagg

SEQ ID NO: 415678 - DNA, 76 bp, Homo sapiens
attacaacagaagatatcaaatcagcatttgccccctttggtaaaatatcggaaatatcggctcatcaaattgggg

SEQ ID NO: 415679 - DNA, 75 bp, Homo sapiens
cttttgtctacttggctgacctcctgatgcctcacttggaggaggcaaaacagattcagaatctgcagaaagcag

SEQ ID NO: 415680 - DNA, 75 bp, Homo sapiens
gaagggcatgaagacaaagctgcagaggggcattatgcttcccagagagtggtaaaatttcagccttccctttgg

SEQ ID NO: 415681 - DNA, 91 bp, Homo sapiens
gacgagggccagctgacggagatggtgcagaagatggaggagccgcggcgagtcctttgcacatgttggcaacacacgcatccgcatcggc

SEQ ID NO: 415682 - DNA, 75 bp, Homo sapiens
ctggctttaatactctgactgtggacagagcgggatgccaccagcttgtccaaagggaagttccaggagctcctg

SEQ ID NO: 415683 - DNA, 83 bp, Homo sapiens
cgccccccaagcctcctctgcctggcattcgggtggttgataatagccaacatgcccatcactcggatgcgcatgagaccctg

SEQ ID NO: 415684 - DNA, 100 bp, Homo sapiens
ttcctttccgccactgcccaaactgctgaagcagctcccgcgaggaccacccgagttcctgagttggaggtagaagaagaaacccaagttcaagagatga

SEQ ID NO: 415685 - DNA, 83 bp, Homo sapiens
tcatctacagagatctaaaacctgaaaatctcttaattgaccatcaaggctatatccagattgtcacggattctgcctctgtg

SEQ ID NO: 415686 - DNA, 51 bp, Homo sapiens
acttgcttcagcatttctcatctttctctaatacacagaattctaggaagg

SEQ ID NO: 415687 - DNA, 96 bp, Homo sapiens
gggattttcagctcgatacaatttcacacctggataagtctacttttcttccacgtaacaaccacaggatagatgacattcattttctaagaaaca

SEQ ID NO: 415688 - DNA, 83 bp, Homo sapiens
gaaagtatggacaccccttcaggaccaacctgataagtcactgcaaaagactgttgaagtagagagcattttgcccagctcac

SEQ ID NO: 415689 - DNA, 75 bp, Homo sapiens
ctggcgagtacaagaagactctgctgaagctgtctgggggagatgatgactgctggaagtgaacaagcagtggga

SEQ ID NO: 415690 - DNA, 50 bp, Homo sapiens
aaaagaaaagactaccgcactgaaaggttgaccccctgtttacagtgcca

SEQ ID NO: 415691 - DNA, 100 bp, Homo sapiens
ctacagacccagtctctgccaaatatttacaagaattctgagaagcttgaacctcccagtgggaagcagtcaagtgttagtcccaagatttttaacaaat

SEQ ID NO: 415692 - DNA, 90 bp, Homo sapiens
ctgagaggcagcagctcaaagaagcactggaagccatgcagccgagtcgtccggaaatccattgcccgtgttctcacagttattaaccag

SEQ ID NO: 415693 - DNA, 98 bp, Homo sapiens
cgttggactgatggcagcacactgttcagacttggttccttcaacctagagaaagttgaaaacccagctgaagtcattagagaacttatttgttattg

SEQ ID NO: 415694 - DNA, 75 bp, Homo sapiens
gggcggcccctggagatgattgagccgcgcacgctacagtacaaggcacttcctggacctcactactacacatgg

SEQ ID NO: 415695 - DNA, 83 bp, Homo sapiens
cctgtggagaccctcctgagacgttctgtgcaatgaatccacattcatctcaatggaaggatcctgccttaagtcaacttatt

SEQ ID NO: 415696 - DNA, 90 bp, Homo sapiens
gaagtcactggagatgttggagctcggcctgagtgaggcacaggaattgaatgatctggcacgggaccctccagcacagtgttcagcagg

SEQ ID NO: 415697 - DNA, 75 bp, Homo sapiens
gttcccatcccgccttgagccagtcaccaatgccacaggaaagagtgatcctgccatgaagcagtttctgctgta

SEQ ID NO: 415698 - DNA, 51 bp, Homo sapiens
aaagaagaaagcttctaatgggcttagcagtgtctgcaaaaacgaatcttt

SEQ ID NO: 415699 - DNA, 96 bp, Homo sapiens
gctggaagaagtcaaagcgattaatttacagatgtttcacaaagctcaggttgcaatgaggtgtcgctgcagcagcatgcacttcttggtagcaga

SEQ ID NO: 415700 - DNA, 99 bp, Homo sapiens
ccattggagcagcacttttaccatctctgaaagcagaatacaagatgggaagaatgagaagtcatggaatgacagaaacaggaccttgccctgtcactc

SEQ ID NO: 415701 - DNA, 100 bp, Homo sapiens
gagattcaggccagagttgtgggccgccgtcggcagcaagaacagagagagaggtggacagatctgagagatactgagtggcactgaaccaattttcaga

SEQ ID NO: 415702 - DNA, 82 bp, Homo sapiens
acgcggacatcgtctcctgtgtggcgatggtcttcctgctggggctcatgtttgagtctgttctctggggaggcagtaaggg

SEQ ID NO: 415703 - DNA, 100 bp, Homo sapiens
aaaggcgatcctgtggctgggaatgtgaccccacggccagaagaggacccacgctctgcacaaaagccaccatgcagacggtccgggccgccgacaccaa

SEQ ID NO: 415704 - DNA, 100 bp, Homo sapiens
ccaatatccacaacagtcgcttgaacagattggcacccgaattgccaaagttttggaaaagggtgatcagcccatgacctaaacctccagacaaaataaa

SEQ ID NO: 415705 - DNA, 101 bp, Homo sapiens
ctttcctcaaagctcagccagaagaacaaagtgggtgaaagaaagggtctgcctaccgtatgtgaacgggagctgtgtgtgtttgcttttcaaaccctggg

SEQ ID NO: 415706 - DNA, 74 bp, Homo sapiens
aagctcaggagagcccgctcttcaacaacgtcaagctacagctccctgaagaggaaggagaaggaatatgagca

SEQ ID NO: 415707 - DNA, 87 bp, Homo sapiens
ttggagtcctccagaaaggaagtgttggtctggtcatatgtgacgaggatcccctaacaacagtgagagagcaatgcgagcagttgg

SEQ ID NO: 415708 - DNA, 75 bp, Homo sapiens
gcccagacaatgccggtggaggaatttgtggctggctggatctctgcctggcatcctcgctacaacctcattgtt

SEQ ID NO: 415709 - DNA, 100 bp, Homo sapiens
tgaagatgctgttagcctttgcagtctcgacataagtttcctttcttgcctggtccagctgccgccactcctgagtaccaccgacatcctgtggctgtcc

SEQ ID NO: 415710 - DNA, 90 bp, Homo sapiens
ggaaaagtgatttacatccaacattaccagctggccgatactctttgaatgtcacatacaagcagattttgaagcagtgggaagaatatt

SEQ ID NO: 415711 - DNA, 83 bp, Homo sapiens
ctggccctggccctgatcatcctgctgggcttcgtccagatcgggaaggctcaccatggatgatgatatcgccgcgctcgtcg

SEQ ID NO: 415712 - DNA, 99 bp, Homo sapiens
ggctctgttggctgtgacatctattccatctgtgagtgactctttgacatggagagaatttcactatattcagaaatctcctgcaaagaagctgagcca

SEQ ID NO: 415713 - DNA, 82 bp, Homo sapiens
gccgcctcgggaccggctgtatgattaggccacaatcttcaatgagtaaacatattcctgaagatgatccctatgatcttga

SEQ ID NO: 415714 - DNA, 100 bp, Homo sapiens
gaggactgtaacaacactgagaacaaagaacggaagtccttccagaaggagcttgtgatgaaagtctgcaccaaatgtgggatcgaggcctcccctggcc

SEQ ID NO: 415715 - DNA, 83 bp, Homo sapiens
ttctgcaaatttgctcaaagaaagtccttggaatggcagtgttggagaaaaattaagagagtatgtattcccgtgtgccagag

SEQ ID NO: 415716 - DNA, 90 bp, Homo sapiens
gaaatgaccaacagataactgaggacaatggacctgcctgggcatagacttccttaaggtaagaatgattgatgttggctgatattggag

SEQ ID NO: 415717 - DNA, 90 bp, Homo sapiens
tagacatgccgcccttcttcccctccgaaaacgcaagatggctgtcctctctaaggaatatggttttgtgcttctaactggtgctgccag

SEQ ID NO: 415718 - DNA, 82 bp, Homo sapiens
gctcaacctcgcctatgtgggcgccgtccctcaccgcggcatcaagcagggcagcgaggtcacaggccccacctttgctgat

SEQ ID NO: 415719 - DNA, 74 bp, Homo sapiens
ccagaggtcgtggaggtggccgtggaggcagaggtggcatgggccctacctgaacccatccttccatccctcca

SEQ ID NO: 415720 - DNA, 50 bp, Homo sapiens
gcgccgggcccacgcccttctccagaatgccatgagggcgactgtggaaa

SEQ ID NO: 415721 - DNA, 96 bp, Homo sapiens
ctcaaccaatcgctgaaggatgcctgggcctcagaccagaaagtgaaggctctaaaaatagtcatccaggttcgctgtgatcctgagattcaagaa

SEQ ID NO: 415722 - DNA, 82 bp, Homo sapiens
cagcgccttgatcgagtacttgagtgcctacaccaactaatgttacaattgaatcctataacatgaaccctatcgtatattg

SEQ ID NO: 415723 - DNA, 97 bp, Homo sapiens
caattgttgagttgggctccatctttcagcagttggcacacatggttaaggaacaggaggaaaccattcagaggagtggctaagcaggttcggttac

SEQ ID NO: 415724 - DNA, 75 bp, Homo sapiens
atttcctccgttccccatggggaactgtcttgcatggaaattgatgacttgaaaaaaattaccaattcactgact

SEQ ID NO: 415725 - DNA, 130 bp, Homo sapiens
ggcctttcttatactctagaatatacaaagacaaaaggagattctgatgaagaagttattcaagatggtcagaagaggccaagtgatggaaatagtggattaatggcaaaaaagcaaaagcgtaccccaa

SEQ ID NO: 415726 - DNA, 100 bp, Homo sapiens
gattccttgcagagacagctcaacacggcacttccacaggatcacagtcaccttctatatagcaccatccccaggatgcaggagccggggcagattgtgg

SEQ ID NO: 415727 - DNA, 75 bp, Homo sapiens
cctggcctgccctccatgtcggggagctatcgtcgtcttcaaaaatactacccgccggactttgacccatcaaag

SEQ ID NO: 415728 - DNA, 97 bp, Homo sapiens
agattcgcagtggtcgcttcttctccttgcaaaagcgtgatcttgctgggtcggcacagcctgtttcatcctgaagacacaggccaggtatttcagg

SEQ ID NO: 415729 - DNA, 100 bp, Homo sapiens
ggaacaccctcactggcccgggccggcgcgggagggctgtgtgatggcctcggagcgcccggagccggagattttaggtgatgggcaagtcagaaagtca

SEQ ID NO: 415730 - DNA, 98 bp, Homo sapiens
ctgcaccgtgcggctgctggacgacagcgagtacacctgcaccatccagagtcctgatgggaaatacctagccagtggagccatagatggaatcatca

SEQ ID NO: 415731 - DNA, 75 bp, Homo sapiens
caaaggggaagttgctgcgctctgctcggtgtcgtggcctcgcagatgattgctgctaaaattgattcaattcct

SEQ ID NO: 415732 - DNA, 50 bp, Homo sapiens
cagcggagagcgagagaggggagcagatttgtcccatcagatgaaaagaa

SEQ ID NO: 415733 - DNA, 100 bp, Homo sapiens
cgaagaaacagacattcaacatgattgcatttgaaagtgcgctagatgttggaccgagtatggaatccgccatttcccctgcccgtcgccagagagcaag

SEQ ID NO: 415734 - DNA, 83 bp, Homo sapiens
gagttcgctgccagccccaagaaggagaccctcatccagctgatgcccttcttcgtaccgcaaaccaagggccaaaatttaaa

SEQ ID NO: 415735 - DNA, 75 bp, Homo sapiens
ctatcaagtgccaatgctggcccagctctccgtgttccggtgtgaagaacatgagctgcctgtggacatggaaac

SEQ ID NO: 415736 - DNA, 100 bp, Homo sapiens
taccatgtcagccttcccagtagctggaactacagatggacgtgcacatcctccggcagcagccctcagtacaacatctgcgagcagatgatccagatcc

SEQ ID NO: 415737 - DNA, 74 bp, Homo sapiens
tgaagcggctcccagtccctgaaagcattaccgggttcgctaggctcacaggtggttcagtcaggtggcaaaaa

SEQ ID NO: 415738 - DNA, 80 bp, Homo sapiens
ctcgggtggcgacttcctccccgcgccccctccccctcgccatgaaggtgagaagccctaccactgcaactgggacggct

SEQ ID NO: 415739 - DNA, 100 bp, Homo sapiens
ggaggtgctgaagagcgaggaggaagattgttgatcgaatcgacaatgatggggatggctttgtcactactgaggagctgaaaacctggatcaaacgggt

SEQ ID NO: 415740 - DNA, 100 bp, Homo sapiens
ggacagttcgctacacagcaatgcatcgagttggccagtcagtgctgaaagatgtaagcaaagtgaagaagctgaagcaatctggagagcccttcctgca

SEQ ID NO: 415741 - DNA, 88 bp, Homo sapiens
gatggaccagaatttaaaactattcatgacagtaccaaacagagactgaagttatcaggaactgttgccgttattacatcagatggga

SEQ ID NO: 415742 - DNA, 83 bp, Homo sapiens
ggactggactgtccctgctcatccattctcctgccacccccagacctcctcagctccagaattaaacaaccaccatgtcgagc

SEQ ID NO: 415743 - DNA, 49 bp, Homo sapiens
ccctgaagttgaggtgactattgaaggtcattgctagaatcgtggatgg

SEQ ID NO: 415744 - DNA, 82 bp, Homo sapiens
gtgacccaaagcccctaacaacagactcgctgggaccccctagacttggcatggaggctggattttgcaagaacgaggctca

SEQ ID NO: 415745 - DNA, 98 bp, Homo sapiens
gggcccgtactgcacatcgtggtggtcggatttcaccacaagaagggctgccagtatttaggtcagttaacgtccataccaggatacctgaatccctc

SEQ ID NO: 415746 - DNA, 90 bp, Homo sapiens
cttgcagcatgtgcacagtcagagggaggagaagagggactccagaatggctgaggagaagaagctgaagcttagcaacactgtgctgcc

SEQ ID NO: 415747 - DNA, 73 bp, Homo sapiens
gaacttctgcccagctctccttggaacggcagagtcgaaacaaacaatgagggcgaaccagtttcttacatgt

SEQ ID NO: 415748 - DNA, 100 bp, Homo sapiens
tgatacagagacgatggtcggaatcagatttgaaaatgaaagtcaacggcagcctttaacagttgagcacatgtatgaagacatcagtcaggatcatgtg

SEQ ID NO: 415749 - DNA, 75 bp, Homo sapiens
gcgagagaaacaataggacggaaacgccgaggaacccggctgaggcggcaggacaagatccagaagctttatgaa

SEQ ID NO: 415750 - DNA, 82 bp, Homo sapiens
ttggccttcgagctgtactaccataccacccaggtcagaatggcggcagtggagcatcgtcattcttcaggattgccctact

SEQ ID NO: 415751 - DNA, 90 bp, Homo sapiens
ttcttggagcaaggcattataccaaagctattggtacaggtgaacaaaggcagagtaaactgtcaccccagatgcaggtacatcaagaca

SEQ ID NO: 415752 - DNA, 98 bp, Homo sapiens
cagatgttgtcaaggtggcctaccaggaggccaggggtgtcgccatgctgtcagctgctagtgtgggtaactgtcccaccaaaaaatatatgccagct

SEQ ID NO: 415753 - DNA, 90 bp, Homo sapiens
tgcccacccctcctgtaacccagcctgtttcacttcttggcctcattgctacgatttcagagtaccctggtaatagctgagcatgcaaat

SEQ ID NO: 415754 - DNA, 50 bp, Homo sapiens
tttatgaaccagtgtatcccaagagaaatggcatgattcacgacgctggc

SEQ ID NO: 415755 - DNA, 100 bp, Homo sapiens
tagcccttgaacagctatgcatgctgcttttgatgtctgacaacgtggatcgttgttttgaaacgtaaagagaaatgtgtatgaccttacaagtatcccc

SEQ ID NO: 415756 - DNA, 127 bp, Homo sapiens
gaaaaacgctttgataccaagaattaaaaatgcttgtctacaaacatcttcccttgcgggcctactctaggtgcggtacttcactatagtttataaaagatggtccctgtcagcaaagaactgtaac

SEQ ID NO: 415757 - DNA, 75 bp, Homo sapiens
cgcggcgcgaggttagtggtagctgggtgcagacgccgtggcgctgggaggagatatcaccaaacatgatggaac

SEQ ID NO: 415758 - DNA, 73 bp, Homo sapiens
ggtgaggagcaggagttcgctcaagatccaagaaaggtccgagggtcaaaaattgcatgttcaaacaaaagga

SEQ ID NO: 415759 - DNA, 113 bp, Homo sapiens
tggccttttgtccctttgcctcatcccaggttgccttggaaaatgccaacgccgtgtctgaaggtgccgtgagcgatgtggagatgcaggaacactatgatgagttttttgag

SEQ ID NO: 415760 - DNA, 100 bp, Homo sapiens
cgcggcgatggcgctctataacccctaccgccacggcaaatgaagatgtgacacagattgtggagattctccattctggacctagtaaatggaactggct

SEQ ID NO: 415761 - DNA, 115 bp, Homo sapiens
ttcgaacttagacttccggaaggactttggcgagggatgatggcctcccagaaaatgaacatcagctgtcagtagctggaaagataaagaagcatttcaacacaggccccaagcc

SEQ ID NO: 415762 - DNA, 98 bp, Homo sapiens
ccctcccttgcatgatggaaacaccatggctgcggcggcccagctctctctgacacagtaattcgccaaaatgacgaacacaaagggaaagaggagag

SEQ ID NO: 415763 - DNA, 75 bp, Homo sapiens
actttcgccagcccgtgccgcgagcgcggcctgcaggagagtcttttattcaaaacttcagcgttctctatagtc

SEQ ID NO: 415764 - DNA, 90 bp, Homo sapiens
atcagttaaggcattggaagtactggcactcccggcagcacaccgctaaacaaagatgcattgacatagaatctacctgttactcgtatt

SEQ ID NO: 415765 - DNA, 106 bp, Homo sapiens
ggacatctgctgccggaaggggtcccgaagccccctgcaggaactctacaacccaatccagacctgcctagagctggaacgttacctccagagcgagccctgctat

SEQ ID NO: 415766 - DNA, 145 bp, Homo sapiens
tcaccctctgccgagtctcaatatctgtcttcggtggactccttcggcagtccacccaccgccgccgcctcccaggtttggtgcacctcgatttggaggaagtagggcagggcccttatctggaaagaagtttggaaaccctggg

SEQ ID NO: 415767 - DNA, 100 bp, Homo sapiens
ggacattggagacattttacagcaaattatgaccatcacagaccagagtttggatgaggcgcaggccaggccttttccctcagaggagaccacagagaat

SEQ ID NO: 415768 - DNA, 51 bp, Homo sapiens
accagacctgggccagatactttgtgaaagcctgtctccccaggaccgtgc

SEQ ID NO: 415769 - DNA, 90 bp, Homo sapiens
cagcttcgagcttgtgccaaataccacatggaaatgaattctaaggacacagaatttccaggtgttgtggtgcgaccaattggtgaattt

SEQ ID NO: 415770 - DNA, 83 bp, Homo sapiens
tctgaagttgccaggcttcccaacattcttgtctgtgagacacccgccatttcacccagtaagcgggcccggcctgcggaggt

SEQ ID NO: 415771 - DNA, 90 bp, Homo sapiens
atggaagaggagggcaagaagggcaagaagccttgaaaagatcttttgaggtcgaggaggtcgagacacccaactccaccccaccccgga

SEQ ID NO: 415772 - DNA, 75 bp, Homo sapiens
gaacgtgagcaagcccaggcacagccgacgccgcggggtctcctctgagcctccggcctccataagacccaaaac

SEQ ID NO: 415773 - DNA, 75 bp, Homo sapiens
cagcctccaattcttcctccttttagctccccagctctgatccccggggctgaggaagctgccctcgaaaccctc

SEQ ID NO: 415774 - DNA, 100 bp, Homo sapiens
ggaaactcaatctgggtgtgaattttgaaaagtgaggtacatgacctgcgagtagtccttcattctgctgacaaggagctttcttcagtgaaattggaat

SEQ ID NO: 415775 - DNA, 100 bp, Homo sapiens
caacagaatggagtggaaaacatgatgttgtttgaagttgttaaaatgggcaagagtgctatgcagaacttgtctgtgtgtccagaggaggagtccatca

SEQ ID NO: 415776 - DNA, 73 bp, Homo sapiens
cgaggaagccctcctgctcctcctcatcagcgaatccatgggcgtctctggccgagcctctttttgtggaaaa

SEQ ID NO: 415777 - DNA, 51 bp, Homo sapiens
attgtgaaaaacctaaaggataccttaggacaacttgcctttgatgatttt

SEQ ID NO: 415778 - DNA, 75 bp, Homo sapiens
cagcagcgactttggggcccgtcaccctcaggcttgggaacaatgggccgaggcattgtcatttcttttgcaagg

SEQ ID NO: 415779 - DNA, 98 bp, Homo sapiens
cgggaaccaagcgtttaatgaagacaatctcaaattcatcctcatggactgcatgcccacaggaggcgaggagtgctcccctttacctcaggaagtcc

SEQ ID NO: 415780 - DNA, 100 bp, Homo sapiens
agaatatcaagcaagtgcctcaaaagctggaacagtgcatggccagcaagcactatctcagtgccactgacatgttgagctcagagttctacagagtcac

SEQ ID NO: 415781 - DNA, 76 bp, Homo sapiens
gatggtttcacagcacgcagtggcttcgggcaaagtgtgggatgctgtctcaggagatgaattgatgaccctggct

SEQ ID NO: 415782 - DNA, 75 bp, Homo sapiens
ggaggcggctgaggtgcgagccgatctcagtgaccagctgctggaggtggtcggcttggaaggagccatggagat

SEQ ID NO: 415783 - DNA, 101 bp, Homo sapiens
tgggaggaagaaccattctgacaaagcactgggtattgtacccctccaatatgtgtttgttatgacctttacacttgatgatggaacaggagtactagaag

SEQ ID NO: 415784 - DNA, 75 bp, Homo sapiens
gaaatccgcagaagcttattaaagttaagaggcccagaaatctaaagatctttgttctataactgtaagtggaga

SEQ ID NO: 415785 - DNA, 75 bp, Homo sapiens
atcagtgcccagaacaaggaaacagcaataacaattggtcgtcttggttacgtttgtcctcaagaggtggccccc

SEQ ID NO: 415786 - DNA, 97 bp, Homo sapiens
ggatggtggaggcgagaacactgaggaggtccacgagctggagaagtccaagcgggccctagagcagcaggtggaggagatgaagacgcagctggaa

SEQ ID NO: 415787 - DNA, 105 bp, Homo sapiens
ggggaacaccaccactctcattagtgagaatggtcatgctgccgacaccctgacggccacgaacttccgagtggatatttggagttcttacaacatggcagacat

SEQ ID NO: 415788 - DNA, 82 bp, Homo sapiens
ctcgcgccggctatggccgtgccctggggctgagccctcaggtctcaccaacggctttgggggtgcgaggagcgagcaggag

SEQ ID NO: 415789 - DNA, 100 bp, Homo sapiens
cgcacctcgtcaccaaggccaagactggaatcagccattttaccaagaaagttgggtttcttttactggcaaatagtacttcaagagcacagtcttatgt

SEQ ID NO: 415790 - DNA, 83 bp, Homo sapiens
gacacggcttcccccaaggaatatacaggtcgcaatggaagaagagatcgccgcgctggtcattgacaatggctccggcatgt

SEQ ID NO: 415791 - DNA, 83 bp, Homo sapiens
aacgacgcggacatggtcatgagctttgtgaacctgggcactgccgccctgcactgtagcagatgcctaaataaagtgtggag

SEQ ID NO: 415792 - DNA, 83 bp, Homo sapiens
ctgaagctgggcatctggggcgggacacagcaggtcaggagagattcaacagcattacctcagcttattacagaagtgccaag

SEQ ID NO: 415793 - DNA, 75 bp, Homo sapiens
ggacttcccagcctccagaacttagctgcagctgaggacagccaccctttcttcgtctctgctgagcgaaggcta

SEQ ID NO: 415794 - DNA, 100 bp, Homo sapiens
ctggtggacgcggcaaacgtaaatgcaaaggacatggccggccggaagtcttctcccctgcacttcgctgcaggtcatcagactagtgctgagtcttggg

SEQ ID NO: 415795 - DNA, 100 bp, Homo sapiens
gaacatggcgaaggtggagcaggtcctgagcctcgagccgcagcacgagctcaaattccgagcaggaggatgattctggagaaggagaggatgatgcgga

SEQ ID NO: 415796 - DNA, 83 bp, Homo sapiens
ctttacacagagcagttgcatcttgtagtgagtacttcgggatgacttcagacaaaacccttcggatgtcatggttgcagtag

SEQ ID NO: 415797 - DNA, 110 bp, Homo sapiens
ctgatatctcaaaaggtgatctggacaaaggaacaggtatctcagtgtaaacaggaacatcgataagtagtgtaaaaacttgcacaatgaaatccgaagccaaggatgga

SEQ ID NO: 415798 - DNA, 114 bp, Homo sapiens
tgcagtgggcctctcctcccacccccgagctctcagccactccctagcactcacagctacctggtgttcaatgtcatccccacgctggccgacatcatcattggcatcatctac

SEQ ID NO: 415799 - DNA, 115 bp, Homo sapiens
atcgtgaccgagaccgtgaccgagagcgtgaccgagagcgcgaatatcgtcatcgttagaagcatgtagagcgcatgaagtacaggacaataaagcttcctacacatatcaccag

SEQ ID NO: 415800 - DNA, 75 bp, Homo sapiens
accaaaaagctttctgctaggggttttactgcaatcacagcaaccaaccccatttggcttataaagactcggtta

SEQ ID NO: 415801 - DNA, 99 bp, Homo sapiens
tgtcctggatcgacaccctctacagcattttacatgtggcacccataaaagatgaggctgagaacacggaaagcttctcagcagtcaaatcaaatccaa

SEQ ID NO: 415802 - DNA, 100 bp, Homo sapiens
ggggaactgctggggaaggcgattggcatcgatctctccatcccttccgaggcccgacttcggtactccaaagattcaggtttactcacgtcatccagca

SEQ ID NO: 415803 - DNA, 100 bp, Homo sapiens
acggggatgtgatggatgtcttcatccccaagccattcagggcctttgcctttgttacatttgcagatgatcaggtggagttggcatgaacttaacagca

SEQ ID NO: 415804 - DNA, 75 bp, Homo sapiens
aaaggtgaacaaagtgggccagctccgcgtgctcctcgccttcagacggtgtttctcaaaggactgggatgtcac

SEQ ID NO: 415805 - DNA, 101 bp, Homo sapiens
ccgagatgccgggggagcggggccttccacaccccctccgtgggtgtgtggaaatcagggatcctcttatgcagtggcttgggaaacatgtggactccgag

SEQ ID NO: 415806 - DNA, 76 bp, Homo sapiens
taacaccaccttcaaaaatttctgtggtccacaattagtgaaaatctgtttgcaaccactggttatcctggcaaaa

SEQ ID NO: 415807 - DNA, 87 bp, Homo sapiens
catccaaaagaggagtccatgatggaggcagaggtaaacttggagaggtatcgaaggatgatcgcagtgatgtggagagcagctcag

SEQ ID NO: 415808 - DNA, 100 bp, Homo sapiens
gtaaaaagcagtgggatttggatgtgggatccggttccttggtgtcatccagccttagcaaaccagagaaaggaattcagtgtttcctggtagtggttgc

SEQ ID NO: 415809 - DNA, 80 bp, Homo sapiens
cccacttggtgaatggagatgcagctcagcagtatctggagtccatctttcaccatcttctcctgagattgtactggacc

SEQ ID NO: 415810 - DNA, 80 bp, Homo sapiens
ccatgctctccatcctgctcttcttccacaggtctctaattaacagaagatggcaaagcccagccacagcagctatgtcc

SEQ ID NO: 415811 - DNA, 96 bp, Homo sapiens
tagagggtgccatgcacattcagaggcttcgtgacggagttatcagagacattgagaggcaaattcggaaaaaagaaaacattcgtcttttgggag

SEQ ID NO: 415812 - DNA, 99 bp, Homo sapiens
gcgtccctcttcagttctctggagccccagattcaacccgtgtacgtgcctgtgcctaaaaatatggtgcacctgaagattgggaactcaaaacacagc

SEQ ID NO: 415813 - DNA, 75 bp, Homo sapiens
atagctaatcttgggacatcagagggtcgcttcatgcaggttttctgtctcaactggtctctgacaagcctctga

SEQ ID NO: 415814 - DNA, 74 bp, Homo sapiens
ctgggaccgtgcgcgtgcgcctgggggcaccgctgccgttccgaggagatcatttggcatttagctgtgatgtt

SEQ ID NO: 415815 - DNA, 96 bp, Homo sapiens
aaaacttgtgagggcgaaggtcgtattgaatggtgttgtagttattgccagtttccgaggaaccgttccatatggcctgtcattggaaattggaga

SEQ ID NO: 415816 - DNA, 90 bp, Homo sapiens
ccaccgtgttcttcgacattgccgtcgacggcgagcccttgggccgcgtctcctttgagatgggaaagggctccttcaagtatgcctggg

SEQ ID NO: 415817 - DNA, 50 bp, Homo sapiens
gtgtatgaccttcacctcattaacagacatgtctcaggaaggctatggaa

SEQ ID NO: 415818 - DNA, 100 bp, Homo sapiens
tcatcaccaaccctttcataggactactgaccaacagatctttaatctcatgaagtacgacagctacagccgcttcttaaagtctgacttgtttttaaaa

SEQ ID NO: 415819 - DNA, 95 bp, Homo sapiens
gcgggaggccagctttgtcctgcacaccattggcaaaactgtggagtatctgcactcacagggggaggaacatatgcagcagaaaaaagaggagg

SEQ ID NO: 415820 - DNA, 83 bp, Homo sapiens
ctgagagccgacctcggtcctcggcattgcgcgggggatatgagactttctactcggaatatcctgagtgttgcgtggatgta

SEQ ID NO: 415821 - DNA, 120 bp, Homo sapiens
ttgtgcgtcctcgccaccaaaaccaagagttctggccctgcctgctggagaaggcctatgccaagtctcctaaaaacccagaacagaagatcattaagagagtgattgctcttgaaggag

SEQ ID NO: 415822 - DNA, 75 bp, Homo sapiens
tgcagcttcacctggccgggctgcgtcgcttcgatgccgcgcaggagcaggccgggctctcgccatgggtcactg

SEQ ID NO: 415823 - DNA, 90 bp, Homo sapiens
atttgaagttctaaacttgctttactgttggtccccaagagattcaacaggggccatgctgcggcaaatctacagggaccctgagaccct

SEQ ID NO: 415824 - DNA, 90 bp, Homo sapiens
caacaggatcagtgctgtagtgcccggttcaagctgaaaatgttacacaggaagacataccatgtaaagaagtgagcttgtagtggacaa

SEQ ID NO: 415825 - DNA, 100 bp, Homo sapiens
ggtccagagggcagctgaagagaaacataaagaattctttgtttcagaggttgggggccgtcccgctcctaaggcaggaagatggtggccgcaaagaaga

SEQ ID NO: 415826 - DNA, 98 bp, Homo sapiens
tgtctcctatttctgcaagatgtcaagattgttgaacaccccagggagaagatgtcaaccggacactagaaggtggaaggaaacctcttcattatgca

SEQ ID NO: 415827 - DNA, 100 bp, Homo sapiens
tcctctatgctggacatcaaatttccagtggccacagatgtctttaattccaaaaacctggccgttcaggcacaaaagaagatcttgggtaaaatggtgt

SEQ ID NO: 415828 - DNA, 98 bp, Homo sapiens
gaaggactaccgcctgcacaagcgtttccccgcggccttcgcgccccaggcttcgcggggctacatgacatcaggtgacagatcagtcagtgaaagca

SEQ ID NO: 415829 - DNA, 100 bp, Homo sapiens
atttatgtcatcaagaagaatgacgatggcaagatgatgatgaatgaagtcctggcagcttcctgtgtcccaggccttgtagaaataaatgagacagacg

SEQ ID NO: 415830 - DNA, 51 bp, Homo sapiens
ccgcgccgcgcctcagctctggcccgataaaagtgaaggatgtaatagatc

SEQ ID NO: 415831 - DNA, 90 bp, Homo sapiens
ggagcgcgagagcttcgagcggactcaggattttgcctaccattttacagtatttgtcttctattttggagcctttttattggaagcagc

SEQ ID NO: 415832 - DNA, 83 bp, Homo sapiens
gcatggtcccagccaggacggagataacaccatcttcaaggaatgtatcctgtcaggtataatgtcagtgaatggcaagaaag

SEQ ID NO: 415833 - DNA, 82 bp, Homo sapiens
gttggtcccggcggagatccagtgggaagagccggcggctgcccgggcacatgaagacatcttatccatcctcactgctgtc

SEQ ID NO: 415834 - DNA, 120 bp, Homo sapiens
tgaagactacagatattatgaatacaaccatgatctcttccaaagaatgccacagaatcaggggaggcatgcttcaggaatgaatctgaagtctgctgcagtaaaacacagaaggcttta

SEQ ID NO: 415835 - DNA, 95 bp, Homo sapiens
gcgaggcggggccgccggggccgccatggagcccgactcggtgattgaggacaagaccatcgagctcatggactcacaccacccggcaagaactg

SEQ ID NO: 415836 - DNA, 75 bp, Homo sapiens
cggaaggtgatgcccaagatggaccagggtttcccaaactctcgattgcctcttgcaagcagatgacctgggagc

SEQ ID NO: 415837 - DNA, 100 bp, Homo sapiens
atttttacaaaatttgatgaagtccagaaatctggaaacatgatacaatctgcaaatgctcttcagtgggtcatctgtgtgtcacagcctcagaagacca

SEQ ID NO: 415838 - DNA, 83 bp, Homo sapiens
tgcccgcgtccgaggctcgcgggcggcgggcccgggcctgctggtgggtacccttgatgttgtgttggactccagcgcccggg

SEQ ID NO: 415839 - DNA, 100 bp, Homo sapiens
cgctctgggatcccggccaccagcaattgtccggttggacacgagttgccgctggttgtccaaatcaacaaccaggtcgtccagctcctgctgaagcctg

SEQ ID NO: 415840 - DNA, 75 bp, Homo sapiens
ttccagcccccagaactgtaagagagccctttttgattatgacaagactaaagacagtgggcttcccagtcaggg

SEQ ID NO: 415841 - DNA, 98 bp, Homo sapiens
tggggccgtgtctcagtccacccaaggtctcctcggatcgcctggagaggcactcggacctggggtctaatgtgatggaagagcaggacctgcgggac

SEQ ID NO: 415842 - DNA, 100 bp, Homo sapiens
cagcccccagccttgcgcgtcgtcgctacctcctcggacaggtgagaagcagcccagtggcttttcatggcctgccactgaaaatcaagaaagaacccca

SEQ ID NO: 415843 - DNA, 100 bp, Homo sapiens
acccaggcccctgtcaagaaggtgccggtggtgcgagtcttcggagcgaccccggcagaaaccagcaaatatcctagtaatgggagaaggtcctgagagg

SEQ ID NO: 415844 - DNA, 100 bp, Homo sapiens
tagcaacctggagtttgcccagaaagtggagccctgcaacgaccacgtgagagccaagctgtcctgggctaaggctaagtcctatcagccatggaaacac

SEQ ID NO: 415845 - DNA, 83 bp, Homo sapiens
cagtccgccgctcaccccgcggccgcaccttcccgccttctcagcgggctgacgcacgaggcacacaggaaggaggtggagca

SEQ ID NO: 415846 - DNA, 100 bp, Homo sapiens
agagcaaggggatggactccgggagttgaacaaacaagaaagtgcaagtgacatgacttctgtaaactaacattatggatttttccaagctacccaaaat

SEQ ID NO: 415847 - DNA, 78 bp, Homo sapiens
cgcgggcggcgcggcccagctcgttccaggaggcatacacggaatacctgaggagcatccactatatctcccaggtgt

SEQ ID NO: 415848 - DNA, 82 bp, Homo sapiens
agctgtttctcatctttatactcttccagcgctcctggttgcagccagaatgcatgacttcaggaggactgtgaaggaggtc

SEQ ID NO: 415849 - DNA, 90 bp, Homo sapiens
cttgaggaagaagacatgctctacagtgctcagtctttgagtttaattggttggggtcagataagaagaggagtgacaatcaagccaaca

SEQ ID NO: 415850 - DNA, 75 bp, Homo sapiens
cagcttaggtgtttcaaatcctcatcagcaggtaccattaggcttctcagctccaccagatggcctcccccaagt

SEQ ID NO: 415851 - DNA, 90 bp, Homo sapiens
cctgtttgagaaaaggcctaagaattttggcattgatgctgcattcctggcccgagagaaagcgaaagcagatgctgaatattatgctgc

SEQ ID NO: 415852 - DNA, 99 bp, Homo sapiens
ctgctgtgcttgccttattggtgatgtgcattgtcttacgcccttcaagaggtatctgatggtataattgccccaggatatgaagaagaagccttgaca

SEQ ID NO: 415853 - DNA, 88 bp, Homo sapiens
gacgggcacatatgtccaggaggagtctccggaaggttctggctccttggcagcaatggctgtatttgaagataagtttaggccagac

SEQ ID NO: 415854 - DNA, 95 bp, Homo sapiens
tgaagagttctgcgttttgccagtcacctctcaactgtgtgccaaaggtacttctcccagcagctggtctcttacagttacaggatgtgaagaag

SEQ ID NO: 415855 - DNA, 100 bp, Homo sapiens
tcatacgcagctggcagatattatcatagttgctgcaggattagcagagtggaggagtcggctctgagagctctgagggagaagctgtttgctcattctt

SEQ ID NO: 415856 - DNA, 100 bp, Homo sapiens
gctgctgtcccgggcctaccccctggactccctggagaagcagatggaaaagcacctggccacattcatcatggacaagagcgaagccatcacgtctgtg

SEQ ID NO: 415857 - DNA, 83 bp, Homo sapiens
cagatcctgtggtattgtggaaattcccagaggactttggagaccagcaattctgtggtgttcttggtcacacatttatggag

SEQ ID NO: 415858 - DNA, 74 bp, Homo sapiens
ggggctcgctgtatttactgggaactagtcttgcaggaaggattatgtatatcacgtagtgagtgcgatctgtg

SEQ ID NO: 415859 - DNA, 75 bp, Homo sapiens
caacttaagagcttcttcaaaggtcccaaacaggaaacggttaacgacttctggagaatggtctgggagcaaaag

SEQ ID NO: 415860 - DNA, 51 bp, Homo sapiens
tgaagatacaactgttagtccaaggtgtcatggagaaactccagctgggcc

SEQ ID NO: 415861 - DNA, 80 bp, Homo sapiens
agggctggacaccccttcatgcagcagcttcctgtggctatctcaacatagcagagtgccagatgtgacatccagatgac

SEQ ID NO: 415862 - DNA, 100 bp, Homo sapiens
ggacggggcggggccgcgggacgccaggaggcggaggcggagtggagttaggttgcacgttttcaaaaaatacctaatggtgaaaatgagacaatgattc

SEQ ID NO: 415863 - DNA, 51 bp, Homo sapiens
cgctgttactgatatacctttagaaacacctggctgggctgggcctgactg

SEQ ID NO: 415864 - DNA, 88 bp, Homo sapiens
aggatttgtagaagatttagatgaatcgtgtccaaggcagctgcagatttgatggcctactgtgaagcacatgccaaggaagaccccc

SEQ ID NO: 415865 - DNA, 97 bp, Homo sapiens
ggagaactacagaaacctggtctccctagcatatcttcattgacataacagaagtgagatggcccagtcttgatacagatggtaccatgatatatat

SEQ ID NO: 415866 - DNA, 90 bp, Homo sapiens
atgttttggccactggacatcagaaccacattttgggtttgaagaatcttctacatggccgagacgcatccagagctttcgtgaccgggg

SEQ ID NO: 415867 - DNA, 96 bp, Homo sapiens
caggcatcagggctgcagcccaggagcctcaaggcggcccggcgggcgactggacggccggacaggttcacgcaaagaatctgctccacaagtttt

SEQ ID NO: 415868 - DNA, 100 bp, Homo sapiens
ctgctgatgaatattacatcatataccgaaatgtttttgataagcggagcgtgctttggacaccatgaattttgatgttataaagggcaagccagtacgc

SEQ ID NO: 415869 - DNA, 90 bp, Homo sapiens
cagattcgcagtggtcgcttcttctccttggtcaacgtattgaaacttactgttgaagacttggagaaagagagggatttctacttcgga

SEQ ID NO: 415870 - DNA, 50 bp, Homo sapiens
attaaaaccagggctccacagttaggagagacaaagcatggaggacacaa

SEQ ID NO: 415871 - DNA, 73 bp, Homo sapiens
tacttagctcagcaattcttaccttgttgtcaatagggtgactggaaatttcaagcatgcatctcctattctg

SEQ ID NO: 415872 - DNA, 100 bp, Homo sapiens
attcgcagtggtcgcttcttctccttgatccctttaagatgtaccatgatgatgacctggcagatttggtctttccctccagtgcgacagctgatacttc

SEQ ID NO: 415873 - DNA, 97 bp, Homo sapiens
ggccaaggtggatgaggcccaggctgatgggaaggagcacccaggagctgaagtttcgaccacttggcacagtaacgatgacgatgtgtatagggcg

SEQ ID NO: 415874 - DNA, 50 bp, Homo sapiens
accacctgaaggccaagatgaaggtgtctggttgagaagggagatgtggc

SEQ ID NO: 415875 - DNA, 74 bp, Homo sapiens
gtttgtggatcgctgtgatcgtcacttgagactctccaacatgtgccttctgaccatacaaatgaaacttccaa

SEQ ID NO: 415876 - DNA, 100 bp, Homo sapiens
tgtagtcctgttcttctggctctaagatctgaatgttgtgaccactaatttgatgtggtggtacagtgggagctattctgacatgtccactggaagttgt

SEQ ID NO: 415877 - DNA, 90 bp, Homo sapiens
ccagtcggtgctccggggaggtcacctgacgaggagaccagagtctcactgtcgcccaggctgcagtgcagtggtgccatcacgcgtcac

SEQ ID NO: 415878 - DNA, 75 bp, Homo sapiens
gtaatcgcctgctttgattcattgaaaactgcccttgaagtatgcagagcatttttacaggaagataaaggcgaa

SEQ ID NO: 415879 - DNA, 107 bp, Homo sapiens
gagacccggaggaggttcgaagctgagtatgtgacagcttttcctaagcccaaatgggactgtcaattatttgattcttattctgagtcactgccggcaaatcaaca

SEQ ID NO: 415880 - DNA, 88 bp, Homo sapiens
gtggccttgggtcggagcccatctgatgaatacaaagacaacctgcaccaggctcttgggaaagctggtgctgctgctgcctgattcc

SEQ ID NO: 415881 - DNA, 100 bp, Homo sapiens
ctgcatgcagagatgctgtggttcggggggtgctcgtccacaggtcctggctaccctgggaagagacaagaagtaaatgaagaaagaggaagattccagg

SEQ ID NO: 415882 - DNA, 100 bp, Homo sapiens
tggatgtggcaattttggagaattacgattagggatctgaaacttgcccacccttcgggatattgcaggacgctgcatcatgagcgacagtaaatgtgac

SEQ ID NO: 415883 - DNA, 98 bp, Homo sapiens
ccgactcttcctggtgaagcatctgatgcacgttccatccggcgctcagctgggcttgaggcaagccaaaattccttccggatagaatatgatacctt

SEQ ID NO: 415884 - DNA, 110 bp, Homo sapiens
gccagaagatggcttgtcagatgacaagaaaccattcaagtgtttcactcctaaaggttcatctctcaagaagaagctcattcacacagaagacccatttaatgatgaac

SEQ ID NO: 415885 - DNA, 100 bp, Homo sapiens
atggaaagaagtattcctcgctcaacctgtttgatacgtataagggcaagtccttagagatccagaaacccgctgcacgagggccgggaggaggatcagc

SEQ ID NO: 415886 - DNA, 100 bp, Homo sapiens
tccatgtttccatttggagggtttatcggatccctcctggtcggccccttggtgaataaatttggcagttatttatcagagagtctgatgctgaaagaga

SEQ ID NO: 415887 - DNA, 110 bp, Homo sapiens
agcaagaagaagagcccagctagcaccttcgccctctccagccaggtacctattagcctgaggcctgctcagtcgttcctaatgaataaaaatcaagtgccaaagcttca

SEQ ID NO: 415888 - DNA, 80 bp, Homo sapiens
gtcgccatggggcgaggcagcggcaccttcgagcgtctcctaggtcacaccgacaaatctgaagcgggtttgccagggga

SEQ ID NO: 415889 - DNA, 90 bp, Homo sapiens
cgccagccaatctacatgagtctagcaggtcagcagatccggaagctcatcaaagatgggctgatcatccgcaagcctgtgacggtccat

SEQ ID NO: 415890 - DNA, 100 bp, Homo sapiens
aagaatgaagccgtggaccctcacggattagaaaagcacttgggaagcccattaatcttgccggcgttgtcaggagtgatcagcgagttttattaaaagc

SEQ ID NO: 415891 - DNA, 75 bp, Homo sapiens
agctgccaaaagtgacatgcagctgtcttgtcgacggtctcactgatgcctcttctgcattcaaagttcctcgac

SEQ ID NO: 415892 - DNA, 82 bp, Homo sapiens
ggagcttatactcctcccagtgacgggtctggagtgcgtgggggaccggctgttggcggctcagtgtggaggctgctggccc

SEQ ID NO: 415893 - DNA, 100 bp, Homo sapiens
agggactaggtccaaacgctaggtggctgggtccaggatctagtgaaaagccatttgatgtatgcggtcagagaagaagtggaggtcctcaaagagcaaa

SEQ ID NO: 415894 - DNA, 100 bp, Homo sapiens
cggaaccggcgccgcgcttgctgctggtaacagggccttgcctagtgggccttccttcccaggcggaagcccggctcgctgcaaaacgggcggcccgcgc

SEQ ID NO: 415895 - DNA, 100 bp, Homo sapiens
ctggaagaacacccgactcggtgattatagattcacagggagaaggttttaaggtgaaaacgaagaaagaaatccggcatgtggaaaagaagagccactc

SEQ ID NO: 415896 - DNA, 74 bp, Homo sapiens
gtgaaagaagtggaaacacccctaactctcccagcttttcatgcaacacccaacacttataagcggaagaacac

SEQ ID NO: 415897 - DNA, 82 bp, Homo sapiens
ctggcgcttcctgcgcatcgtctgcaagaccgcgaggcgagacctcttgttttgggatttgagattgacgcggtgaactctg

SEQ ID NO: 415898 - DNA, 74 bp, Homo sapiens
tgccctggtcttgctcggccgatgaagtgcagaggtttttttctgctgcacagttggggatcttcaaaccaaga

SEQ ID NO: 415899 - DNA, 90 bp, Homo sapiens
tggcacctgcgcgaagctggccaaagcctgcccagacggctcacctgtgcgggatggaacaaaaggatcatgcggccagatgatgccaac

SEQ ID NO: 415900 - DNA, 50 bp, Homo sapiens
cgggaacttccccaaggagctgctgaaggggaggaactggacttgcggct

SEQ ID NO: 415901 - DNA, 83 bp, Homo sapiens
caggacttcatccaggcctacgaggaggtgcgcgagaagtacaaagggtatttgaagtataccatacaactgttttgaaaatc

SEQ ID NO: 415902 - DNA, 75 bp, Homo sapiens
aaaatcagtgacattccaattcctgaaagagctccaaaacgttttgattcccaccatggccatcacccagtttcg

SEQ ID NO: 415903 - DNA, 81 bp, Homo sapiens
cggcttcctggcctgggcgctccggtggcggcggaggagggccctcctggacccgggagcggaccctggtggcggtgaagc

SEQ ID NO: 415904 - DNA, 100 bp, Homo sapiens
acttcgcggtgctcactgcagagatcaccagcaagattgcgagggtcccacgactcccgcctggtgaattatgtaacctcattacgctggatgtagctca

SEQ ID NO: 415905 - DNA, 101 bp, Homo sapiens
gtgacgtggaggatcactcggtgcacctgcttttttctgcaaatcgctgggaacaagtttattgccttgtctgtcaagatccgcagttatgaagaacactt

SEQ ID NO: 415906 - DNA, 82 bp, Homo sapiens
caggaaattcagcctcaaaaccgtcctgctgcttgctgaccaaatggccatcagcatcagcaaagccatcaacacccaggag

SEQ ID NO: 415907 - DNA, 80 bp, Homo sapiens
caaggtcgccctcaaggccatgatcaaaaccttcgagagctgtgcccaggagtgaacaaccagccctacctctgtgagag

SEQ ID NO: 415908 - DNA, 83 bp, Homo sapiens
cttccgccacggccgtctctggagagcagcagaaggaagtggaaccctctgtgtagggctgcgggcctgctaggtttttgttg

SEQ ID NO: 415909 - DNA, 75 bp, Homo sapiens
agacaggagtggagtgatatcagacaccgagcttcagcaagctctctccaacgatgccatggacaatattaccag

SEQ ID NO: 415910 - DNA, 97 bp, Homo sapiens
ctctgccgtgccacctgctgcacccacgaatctgcccacccctcctgtaacccagcctgtttcacttcttgagtcttcggatgactcctacgtgtcc

SEQ ID NO: 415911 - DNA, 100 bp, Homo sapiens
atgctctgatgacggcactgttagaatctgggactttcttcgttgccatgaggaaagaattctccgagataacagtcttcactcctatgctgatttttct

SEQ ID NO: 415912 - DNA, 106 bp, Homo sapiens
caggtccctctctctgtccccggccgccatggagcagccgccggcgcctaagagtcaagctgtattagtcgacaggaccatttacatttcaggacagataggcatg

SEQ ID NO: 415913 - DNA, 73 bp, Homo sapiens
aggcgccgctctagcggccgggactctgaactatggcgctcattcttggaatcccagaacaggccttaagtct

SEQ ID NO: 415914 - DNA, 105 bp, Homo sapiens
ggagacgagaagcctgaaaagtcgcagcgagctggagccgccggaggcacgcttaaaaaggcctcttaagagccttgatggtgctctatatgatgatgaagatga

SEQ ID NO: 415915 - DNA, 100 bp, Homo sapiens
gtggtgggataaacggagagcagcagccgcccgcttcaaccccaggggaccagaggaactcagccctgattgcgggcagctgtgaagtcctgcggctgtt

SEQ ID NO: 415916 - DNA, 98 bp, Homo sapiens
aatcgctgtctccaagtcctttttccaccagctcagatagcacagactttagggacatcaaagacgtcagactggatggcgagtcccagtgaggcgat

SEQ ID NO: 415917 - DNA, 74 bp, Homo sapiens
agcttatcatcttcaagacgatggtacccagacagtcagatggaagtttactgttctgattttcatgctgaaag

SEQ ID NO: 415918 - DNA, 100 bp, Homo sapiens
gtgtgcagctccctaatgatgatgctcagtttgatgcgtcacactacgacagtgagaaaggaggaaagcagatggtggagctgaatatgccacttaccag

SEQ ID NO: 415919 - DNA, 82 bp, Homo sapiens
gcctttgaaaatcaacgacaacttgagcacaggcaacatcagatgctgacctgaaagaacatatggttggaatcatattcag

SEQ ID NO: 415920 - DNA, 75 bp, Homo sapiens
ttggaactagtgccggcggctctccaccccccagacttccttgccgtccaggaagggatttcgacaccagaccac

SEQ ID NO: 415921 - DNA, 101 bp, Homo sapiens
aaaggaaaagggctcaggtttaagcgactggaatcattcctacatgattcctggcggcagaaacgtgacaagctgaaggcctgctgacccagggtgataag

SEQ ID NO: 415922 - DNA, 96 bp, Homo sapiens
gaatcgttgtcaacaatcctaaccagtcagtgtttctcttcattgacagacagcacttgcaggttgaatcaagggattctttgaatagcatagccc

SEQ ID NO: 415923 - DNA, 74 bp, Homo sapiens
catccgctcggagcgctgcttcgacttaattcagtgcacaaatgagatgaatgtgaacatcccacagttggcag

SEQ ID NO: 415924 - DNA, 95 bp, Homo sapiens
tacattgaacgggtgcagcgggaaaaggctaatggcacaactgtccacgtaggcattcaccccagcaagggtggcatggagaaatcgttgtcaaa

SEQ ID NO: 415925 - DNA, 98 bp, Homo sapiens
gccacttcttctgggcccacgaggcagctgtcccatgctctgctgagcacggtggttcctcaacttaaaagggatgaggagaccttggagacggttct

SEQ ID NO: 415926 - DNA, 80 bp, Homo sapiens
ctggaccccaactcagccttcctgcataccctggaccagcagaaacctagagtgaacatccatgatagcagtcttctgta

SEQ ID NO: 415927 - DNA, 82 bp, Homo sapiens
cgcagaaaccccgttgacaaggcactgctttttcatgacgagagaagaagaaggaggttcctgctgtgccagaaacccttaa

SEQ ID NO: 415928 - DNA, 75 bp, Homo sapiens
tacgactacttcacacgccagtacggggatgagtccactctggccttccagcagtggtttgatgataagaaccca

SEQ ID NO: 415929 - DNA, 90 bp, Homo sapiens
aaagacccaacagaatacactggacctgaaagttatgtggctcaaatgattgtgacaaatttacatgtattggagaccagaccagaagcc

SEQ ID NO: 415930 - DNA, 82 bp, Homo sapiens
cggagatgcctgacgcatctgtctgaggagcggtcagtgacgcgatggagcgggcaagaccatggtgaatccgggcagcagc

SEQ ID NO: 415931 - DNA, 88 bp, Homo sapiens
aagaagataattctggttgaagcactgtctgaggcctgtggtcaggaaataactactaagcaaatgctgcccatcgtattaaaaatgg

SEQ ID NO: 415932 - DNA, 100 bp, Homo sapiens
gatgtaccctgcctggaccaaactagagtgaagctaacaaagcgaagtggccatactcagtgcatgctgggaccgcgacggacaggctgccgcaccccag

SEQ ID NO: 415933 - DNA, 90 bp, Homo sapiens
cctgcgcgcgcctcccgggcggattccagccccgagcgggacagcgcggcggggagcgacgagtaaatgaaattgcctttataaataccc

SEQ ID NO: 415934 - DNA, 99 bp, Homo sapiens
tggaaactctatacccctgtgcctagtcagaaacagtgacggggagggacccagggaccaggcctcgagctgcttttctaacccaaactgtatgtcttg

SEQ ID NO: 415935 - DNA, 90 bp, Homo sapiens
tggagacagacctggccctgaccttctccttgcagacctcctgccccccgaggtctgcagtctcctgaacccagcagccatctacgccaa

SEQ ID NO: 415936 - DNA, 90 bp, Homo sapiens
ggcggctgagccgcgctgcgcagccgacgcgggaatgaagcgggcgctgggcagattgtcctgggtcacataatgccagctgagcgtaaa

SEQ ID NO: 415937 - DNA, 98 bp, Homo sapiens
ttatctcatattagtgcctgtgatggcatctttcatctaacacgtctagtgacggagcccgcgcgcggcgccaccatgcggcagaaggcggtatcgct

SEQ ID NO: 415938 - DNA, 82 bp, Homo sapiens
atgaatgctacttggatgcctcttaaggttcatgaaccatcgagctccagccaatggccgctacaagccaacttgctatgaa

SEQ ID NO: 415939 - DNA, 100 bp, Homo sapiens
acactctggggctgcctgtgggagaaagtggatgaggaggggctgaagaagctgatgggcagcctggatgagaacagtgaccagcaggtggacttccagg

SEQ ID NO: 415940 - DNA, 96 bp, Homo sapiens
cgcccgcgggtggtataaaatggcggatttcgaagagttgaggcaggactctggactgtcttcacactaggtggtgtgggcagcaaagcggctgcc

SEQ ID NO: 415941 - DNA, 75 bp, Homo sapiens
tgcacttactggcatgctcaaggaatgggctattaaggtgatgaaggggataacttctatgtgattgatcaagga

SEQ ID NO: 415942 - DNA, 98 bp, Homo sapiens
ctcattgctccaaactgtgttgtttcagctgtattagggaattgaatgatctggcacgggaccctccagcacagtgttcagcaggtcctgttggagat

SEQ ID NO: 415943 - DNA, 100 bp, Homo sapiens
gcgcccgtctgcttcgggcctctggaatttagcgctcgcccagctagccgcagagaaggaagcaccctcactatgtggctctacctggcggccttcgtgg

SEQ ID NO: 415944 - DNA, 75 bp, Homo sapiens
gtcagaaggaagcaccacacagaggagctcttgtccctggcaaagcgaaagcgcagtgactctgaggagaaggag

SEQ ID NO: 415945 - DNA, 80 bp, Homo sapiens
ccgcagtcagccacctcgcgcgcgcctccaggagcaaggatggagaggctggatgcttggatattaattcatctgtgaaa

SEQ ID NO: 415946 - DNA, 75 bp, Homo sapiens
tgttctccgtaaccagaaacaggttcattcattgtgttgtacatcagtacacagaagagacggatgtgaagacac

SEQ ID NO: 415947 - DNA, 97 bp, Homo sapiens
tgctcatccacttcaatgtccgtgacataaagatcggcccagagtgccatgcaactagaagccatttgtgtcaaggtaacgtctggagaaacaaaag

SEQ ID NO: 415948 - DNA, 82 bp, Homo sapiens
accgccgaatcgctcctgcagcagagaaaccaaggtgtatgttggtaacctgggaactggcgctggcaaaggagagttagaa

SEQ ID NO: 415949 - DNA, 100 bp, Homo sapiens
catgcttgaccgtaccttggaggatggtgccaagcagcacaatctaacagcagtcaatgtccgaaacatccttcatgaatcagagatcattgatttcttc

SEQ ID NO: 415950 - DNA, 100 bp, Homo sapiens
gccgcggatggggagcgtgagtggcgaggatgccgaggaatgtgacagggctgggagtgtggccacctgccaggccgtcatgcgtgccgtgattgggatt

SEQ ID NO: 415951 - DNA, 96 bp, Homo sapiens
atcggtgccaaggaccacgcatccatccagatgaacgtggccgaggttatgggccaggaatccgggtcgatgaagtctcgtttcacagctctgtga

SEQ ID NO: 415952 - DNA, 100 bp, Homo sapiens
ggctgaggtggcagcggcaggagagtccggccgcgacaggacggccgaatacatcaagcaatggtaacatctttaaatgaagataatgaaagtgtaactg

SEQ ID NO: 415953 - DNA, 100 bp, Homo sapiens
aagaagaagaagttgcgaaggatccccaacggggaggccaacgtgaagaagatcatccagcagctcgtcaacggcatcatcacgcccgccaccatcccca

SEQ ID NO: 415954 - DNA, 100 bp, Homo sapiens
ccaggagtattccagcaactgcaccgaggtccagaaagcagcccaggcctttaactctgggctgctgtgtgtggcatgtggttcataccgacggggaaag

SEQ ID NO: 415955 - DNA, 98 bp, Homo sapiens
gactttgagtggtgatgcttttttacaccttcttccacatgtaagaagagttcctgggtcaagtggtcaccttcataaaaccgaagacggggactggg

SEQ ID NO: 415956 - DNA, 100 bp, Homo sapiens
gaagtgtccaaaccacaagttctcaaaactctctgaaaaatggctccctccgagttaaggcctaaacggcagcggcaaaacaactttcccatgtttccct

SEQ ID NO: 415957 - DNA, 104 bp, Homo sapiens
aagggagagagagagggggactctgtgtgagggaaagaaaacaatttctcctgctctgcagcttctgttcaggtgctggagaatctggtaaaagcaccattgtg

SEQ ID NO: 415958 - DNA, 83 bp, Homo sapiens
accagatcttccaggacgagacgggcaagaaccgcttcatggcggctgaagagatgcattggcctgtccctatgaaggccatt

SEQ ID NO: 415959 - DNA, 83 bp, Homo sapiens
cccccccttccccacgcaaccccagatccatttacactttacagttgataaggattttattcctggactcatgtacatccgag

SEQ ID NO: 415960 - DNA, 75 bp, Homo sapiens
tggaggtggaggttggaggtggtgctgctggggaacgggagctggatgagactacgcgtttgttcacatggagaa

SEQ ID NO: 415961 - DNA, 100 bp, Homo sapiens
gggacgcggagcccggagctggggcgacgaggcgattgcgggggcctgggctaggtagaacacctgaaggagaagctcattagccaggcccaggaagtga

SEQ ID NO: 415962 - DNA, 82 bp, Homo sapiens
gagtactccacagaggataaatttcaacctccggggccacaatagcgagggatcatagacggtatttctatgtaaacgaaca

SEQ ID NO: 415963 - DNA, 75 bp, Homo sapiens
gaatatcttcccttacaagggttatatatggaattatggtaccctccctcaggagtggcaaaattctattcagaa

SEQ ID NO: 415964 - DNA, 51 bp, Homo sapiens
agaaaggaaggaatatatcctgactgattaaatacccgcagcccaaagggc

SEQ ID NO: 415965 - DNA, 100 bp, Homo sapiens
acaagatgtatcacctatagaaagaaatgagcagctttggataatgacgacagcaacccgaagacagggaaatttagggacccactactggcgtctggac

SEQ ID NO: 415966 - DNA, 75 bp, Homo sapiens
aggtgcaagagtccacaaagggacctgatgaagcgaagatcaagattgtcactgctgttccaagggcacacgcag

SEQ ID NO: 415967 - DNA, 90 bp, Homo sapiens
ctcgcccctggcctcgcgggccgtgtctccggcatcatgtgtggtaccctcttaccaattatacttttggtacaaaagagcccctctacg

SEQ ID NO: 415968 - DNA, 75 bp, Homo sapiens
cccgattcaccaacgagccctagtcagacacattctatgtgaaaaacatggcaaaatcatggaagccatggaaaa

SEQ ID NO: 415969 - DNA, 100 bp, Homo sapiens
tggaaatgcgaatcctaaagcgtttcctcgcttgcattcagctcctctgtgtttgccgcctggggtctccgtctctccaccgggggcttcatccttccag

SEQ ID NO: 415970 - DNA, 100 bp, Homo sapiens
cagaatcactgagctgtaacaaagcactctgtgctagtgatgtgagcaaatgcctcattcagatggagcagttgaggaatgagctacttcaggagagagc

SEQ ID NO: 415971 - DNA, 50 bp, Homo sapiens
ctcaggagtgggattgctggatcatatgtagagatggggtttcaccgtgt

SEQ ID NO: 415972 - DNA, 100 bp, Homo sapiens
gacacaagtcttcactccttcctgcgagccctgaggaagccttatcattcctgtagagaaattagtgaaaggaaaattccaagataattttgagtttatt

SEQ ID NO: 415973 - DNA, 100 bp, Homo sapiens
ctcggccgatgaagtgcagaggtttttttctggtactgggcctaatcgctacgtgcctctttggctatgatgcctatgtcaccttccccgttcggcagcc

SEQ ID NO: 415974 - DNA, 82 bp, Homo sapiens
gtgaatgtcagtagcctctcactgaatgagcctgaagacaaggatgtgactgctgttaaaagacataatctgactaaaagat

SEQ ID NO: 415975 - DNA, 83 bp, Homo sapiens
tggacgctggtggggactcgctctcggcttgaccgcattcttcctcccagaaactagatgatggccatttaaacaactctttg

SEQ ID NO: 415976 - DNA, 88 bp, Homo sapiens
aagcttcggaagaagagccagggcagcaagaatcctcagaagtactcggacaaggagctgcagaaactggcgatggaatatgagagga

SEQ ID NO: 415977 - DNA, 83 bp, Homo sapiens
ctcctgagtagctgggattgcaggagatttcctctggaagacatcccgctggatgaaaaggaagcagctcagtggcttcataa

SEQ ID NO: 415978 - DNA, 98 bp, Homo sapiens
acagacacagccggggtcgggagccgcccggggcagggctcgggagagcggatgatcacagtcgtgttaaactgcaaaatgctgagaatgattatatt

SEQ ID NO: 415979 - DNA, 73 bp, Homo sapiens
cggcactacttccagaacactcagctgtgaaggaggccgcggtgcagaggaagcacaacctctaccgggacag

SEQ ID NO: 415980 - DNA, 100 bp, Homo sapiens
gctgccaccccagaaggatctggatagctcagcgatgggtgacagtgacaccactgaggatggtgaagagcgattatatgttagagatagctgatcaagt

SEQ ID NO: 415981 - DNA, 100 bp, Homo sapiens
gtgatgaagaatccccccgaaaggaccccccagtggccaatccgccatggtatagttgaagattgggacttaatggaaaggtttatggagcaagtgatct

SEQ ID NO: 415982 - DNA, 50 bp, Homo sapiens
aagcggaggtgctgggagcgagttggctgctgatggttcctgggaaggaa

SEQ ID NO: 415983 - DNA, 101 bp, Homo sapiens
cctcgacccagggcccgcgggccaggagagcgctcggcggtgccccatcctgtccctccaggacgtggtgaagggcctgttcgtgtgctgcctgttcctgg

SEQ ID NO: 415984 - DNA, 77 bp, Homo sapiens
tgtctgtgtgagcagaggggagagcggccgccgccgctgccgcttccaccacaggcaacagcattattgagaaaagc

SEQ ID NO: 415985 - DNA, 74 bp, Homo sapiens
gagatctgatggcattaggaggaagagttttaaaggcaagtcagaagaagctgatgatcaagcagggccttctg

SEQ ID NO: 415986 - DNA, 90 bp, Homo sapiens
tgatttatatattgggactgcagaaactatccaactctggccaatattgaaaggaagaagaagttaaaacttgaaaaggagaagagagga

SEQ ID NO: 415987 - DNA, 100 bp, Homo sapiens
tgtgcctataccaatagttgccttgacaatgcctgtggaagacaagtcagaccccccagaggggtctgaggaagccgcagagccccggatggacacacca

SEQ ID NO: 415988 - DNA, 101 bp, Homo sapiens
attcctcctccttggtcgccgcgtccttggctggcgtgtaagtaaggaggtctctgtaccatggctcgtacaaagcagactgcccgcaaatcgaccggtgg

SEQ ID NO: 415989 - DNA, 80 bp, Homo sapiens
caaccggtcaggctggacgtgcacgcagcccggcgggaggataaagaccaccacgcaagagtgagccatggagctacgtg

SEQ ID NO: 415990 - DNA, 90 bp, Homo sapiens
tggacaagctggacgttaaagggaagcgggtcgttatgaggcttggtggagccagtgaacgtggtggacaatggagatggcacacacaca

SEQ ID NO: 415991 - DNA, 98 bp, Homo sapiens
ctgcgttgaggatctttgctcttccatccgcctttgatcgtcttcctcttcagccatccagggtgtcaaattgagaaccaggtagatccccaccacct

SEQ ID NO: 415992 - DNA, 75 bp, Homo sapiens
ctccaggcatgccccgctacgagctggctttaatcctgaaagccatgcagcgggctcttgcagccaatgccggaa

SEQ ID NO: 415993 - DNA, 90 bp, Homo sapiens
gttggagccgtctgcaaagtgtccccggcaagaagagtgatgatgcgggtgtgctggttggtgagacaggacagccggcaccagcgaatc

SEQ ID NO: 415994 - DNA, 100 bp, Homo sapiens
caggcctccgcttctccggcctccctgctcttaccgggaggcagcatggccaagcggctgagccaaattggggtggaaaacacagaggagaaccgccggc

SEQ ID NO: 415995 - DNA, 100 bp, Homo sapiens
tgactctctgaggctcattttgcagttgttgaaattgtccccgcagttttcaatcatggttacggcctccgctgccacagggccatcatcaccatctgcc

SEQ ID NO: 415996 - DNA, 98 bp, Homo sapiens
ctgcaaggccaccgggaccgcttcatggagcagtttacaaactgtcttgtcgacggtctcactgatgcctcttctgcattcaaagttcctcgacccgg

SEQ ID NO: 415997 - DNA, 74 bp, Homo sapiens
ctgggagcctagaatgcatcagtgcccttgtggcgaatggggctcacgtcgaattttaccaaatgttgcaagaa

SEQ ID NO: 415998 - DNA, 100 bp, Homo sapiens
tgaacatccacaaggcacctgcaaggagctcgaggccatgagcagatataccagcccagtgaacccagctgtcttcccccatctgaccgtggtgcttttg

SEQ ID NO: 415999 - DNA, 75 bp, Homo sapiens
gagctggagacggtcgtagctgcggtcgcgccgagaaagattcgagtggtgaatgcatttcgtagttctttatat

SEQ ID NO: 416000 - DNA, 107 bp, Homo sapiens
ttcaagtccgacaacaccgtgtccaaaaagggcttcaaggcccacttcttctcagcgcgagcccagcattgacctgctgcaggccttcgtggagcactggaagggca

SEQ ID NO: 416001 - DNA, 100 bp, Homo sapiens
ctgcgtctttgctcccggagcgcttgaaggagctgcggaaatggtggagtcaatgaagaaagtagcagggatggatgtggagctgacagttgaagaaaga

SEQ ID NO: 416002 - DNA, 100 bp, Homo sapiens
tccggggggtccctggcagcccccgctcggattgccctcctgaagatcctgttggctgcagcacccacctcaaaagccaaaacagactcaatcaacatcc

SEQ ID NO: 416003 - DNA, 97 bp, Homo sapiens
cctctgggtcctcggtcggtacagtctctgcacctcgcgccccagcaggatatgaacgagactgccaaacaagaagatattttggaatccacaacag

SEQ ID NO: 416004 - DNA, 97 bp, Homo sapiens
gcagaggattcgctcccagagcagctgcggccagttaatgacagttcggactatcacaggaaatatctactatgcaaggtcaggaactaagattatt

SEQ ID NO: 416005 - DNA, 75 bp, Homo sapiens
atttaccctttggtcggaacgaacccttaggagaaatcttgagagtggacagcaattgtgaagatcgccagagag

SEQ ID NO: 416006 - DNA, 75 bp, Homo sapiens
cttagcgaagctgccggtgaagatgaactgtcaagtaatccacctctggctaccatccttattcctcctcatgct

SEQ ID NO: 416007 - DNA, 88 bp, Homo sapiens
agattcgatggacatggacatgagccccctgaggccccagaactatcttttcgatcatgattgagttctgtccagggggagccgtgga

SEQ ID NO: 416008 - DNA, 100 bp, Homo sapiens
aagggcaggacgaggtgtcggcgcgggagcagcacttccacagccaagtgcgggagtccacggtgaccattgtgaggtagatattttgttctaattttcc

SEQ ID NO: 416009 - DNA, 97 bp, Homo sapiens
gctccagggcccccgctgggctccatggctgcactgaggccccctctggggctgaggaagctgccctcgaaaccctccagaagacatctgtcctgca

SEQ ID NO: 416010 - DNA, 100 bp, Homo sapiens
ctgccgcttcagttctcccggtgtggccacgagtcgggtgctactatgtcggcattgatcctaacagcttgcattatttggtgcatctgctcaatcaagt

SEQ ID NO: 416011 - DNA, 75 bp, Homo sapiens
gctgcctcagttcttagcgcagtactttggaagtgttgctgaaatcatcaggaatcatcaacatagtcctttggt

SEQ ID NO: 416012 - DNA, 99 bp, Homo sapiens
ttgtgcagaaaggaatcaaaagaatatttagaatgcaggatggagagatgggcccaaaagcacaagaactggaggtttcagaagacgaggcagacgtgg

SEQ ID NO: 416013 - DNA, 82 bp, Homo sapiens
ctgaggatatggtgcagaaggtgcacagccacagcgccgagatggagcgtctgcttctgcgctttgcctgggagaggccctg

SEQ ID NO: 416014 - DNA, 50 bp, Homo sapiens
gggagaggctgcagagcgagggcaggaggcctggaagaaacgctggttta

SEQ ID NO: 416015 - DNA, 82 bp, Homo sapiens
ccaaaaatgtgcatactcacagagttagagagagggatggtgtacgtagagaaatcgacactcttaatgaacgtttagctgc

SEQ ID NO: 416016 - DNA, 82 bp, Homo sapiens
atgaccatggcaagaactggcgtcacgtttacaagaaaccaaggtgtatgttggtaacctgggaactggcgctggcaaagga

SEQ ID NO: 416017 - DNA, 82 bp, Homo sapiens
attgagaaggctgaggaactcagcaaccagctagctactcgagagtgagatggaagattttcgaggtatagcagaagaatca

SEQ ID NO: 416018 - DNA, 90 bp, Homo sapiens
gagccgaggcggagccgctgtcctcgtccccagcggtcccgcccaacgcccgactctaagtgcctagctgccactccatttatatgaggc

SEQ ID NO: 416019 - DNA, 74 bp, Homo sapiens
gctcaacgaggaactcaaagtggatgaggaaacagaaaaatatggctcaggagactaaccagaccccggggccc

SEQ ID NO: 416020 - DNA, 50 bp, Homo sapiens
acgggcgccgaggaggacgtcgccagcagatccggaacatggtggcggtg

SEQ ID NO: 416021 - DNA, 100 bp, Homo sapiens
cggggacagccatgaccggtatgagcgtctcacctctgtctccagctccgttgactttgaccaaagggacaatgttgttgatcattatgaaaatcctaga

SEQ ID NO: 416022 - DNA, 100 bp, Homo sapiens
ctgatcgcgatggggacaaaggcgcaagtcgagaggaaactgttgtgcctcttcatattggcgatcctgttgtgtgttacagggtcttgattatttacat

SEQ ID NO: 416023 - DNA, 82 bp, Homo sapiens
ttagctgtgctcgcgctactctctctttctggcctggaggctatccagcctccaattaaggaacagctatatcctgcttcct

SEQ ID NO: 416024 - DNA, 75 bp, Homo sapiens
cccagcgcagcgttccaccgctcgggtttggctgggcaaagccaaagctaattgagccactcgactatgaaaatg

SEQ ID NO: 416025 - DNA, 90 bp, Homo sapiens
gaaactgcatttcttgagcataaagaacaggtacaggtttgcagattccgccagcagcacagcaagctctacagatgagtggctctttgg

SEQ ID NO: 416026 - DNA, 82 bp, Homo sapiens
ccaccgctgccctcagctccgagtccagggcgagagctcccagctcctccagcagccgacaggaggcccgtcaagatgcagg

SEQ ID NO: 416027 - DNA, 85 bp, Homo sapiens
gtggagtgcggacccgcggtagtgccagggggcgaaggcggcggtggtgaggaagtccatgatggcagtgaagaagaagacgatg

SEQ ID NO: 416028 - DNA, 83 bp, Homo sapiens
gtgtggaagccagaacatcgttctcaatggcaagatcgtcagtatttaaacagatcacatcatgcgtgagtacaagctagtgg

SEQ ID NO: 416029 - DNA, 100 bp, Homo sapiens
gaggaggtcccacaggctcctgccctggactaccgagatcactccaagaactgaggcccctgtcagcagtgtcagtaatagtttggagaatgccctgcac

SEQ ID NO: 416030 - DNA, 82 bp, Homo sapiens
cggcacaaggcactgggctacgtgctggacagataacgaaggaggcccaacttcattcaataaggagcctgacggatttatc

SEQ ID NO: 416031 - DNA, 82 bp, Homo sapiens
ggaccgaaacctagccccggacgagaagcgcagcaacgtgcggtgggaccacgagagcgcataagggccatgtgttctgaaa

SEQ ID NO: 416032 - DNA, 80 bp, Homo sapiens
ggaaaagtttccccgccagggctccccagggggacaccgtggtgtttaaggatggccagtactggatccgaggccggacc

SEQ ID NO: 416033 - DNA, 82 bp, Homo sapiens
cccccgccgcagcagcaccggcgacaggttatggaaacaaaggacatgctttacatcgtcactgaatttgctaaaaatggag

SEQ ID NO: 416034 - DNA, 80 bp, Homo sapiens
cccctatcctaggattacctgaaggtgaaacagattgagccagaaggaagacaatgctgttaattgtgtgaggaacacgc

SEQ ID NO: 416035 - DNA, 74 bp, Homo sapiens
caccacctaacgctggccgacaacagcctggcgtccgccacggttccctcggagacatggaggccagagaggag

SEQ ID NO: 416036 - DNA, 100 bp, Homo sapiens
cagcctcgtcgccacccgtgaggactacagaaaccagcctggacaccaagtctgtgtcagaaggccacctcaagaggaacatcgtggtgaagaccgtgga

SEQ ID NO: 416037 - DNA, 96 bp, Homo sapiens
cctgagggtgcgactccgccgcgatggtgacccggttcctgggcccacgctaccgggagctggtcaagaactgatgctgagccagggaggcggccc

SEQ ID NO: 416038 - DNA, 100 bp, Homo sapiens
agacccaataggataactcaagttactggaattaaatcaaaggtggatgagctaaaagcagcctatgaccgggaggagtctacaaacttggaagactatg

SEQ ID NO: 416039 - DNA, 83 bp, Homo sapiens
ctcggccgatgaagtgcagaggtttttttctggcatatatggtgctggttgtctcattacggaaggatgtcgtggagagggag

SEQ ID NO: 416040 - DNA, 82 bp, Homo sapiens
agccggagtgagaagcaagaaggccctggacacagcaatatctctgggctttcacaggcatgttatttgaaagcaattgaga

SEQ ID NO: 416041 - DNA, 98 bp, Homo sapiens
ggttaagaaccaactggttgaggttcaatgcagacaagacggatgtgatgctgaaaccgaagctgaaagactggcatcctcctgggggctttattctg

SEQ ID NO: 416042 - DNA, 101 bp, Homo sapiens
ctgacaccggcatttcgtccaaggccatgggcatcatgaattcgtttgtgaacgacattttcgagcgcatcgcagggttttaaccaagaagatctggaaga

SEQ ID NO: 416043 - DNA, 90 bp, Homo sapiens
tgcggggagatgctcttcggcctagtgcgccagggcctcaagtgcgatggtgggaaatacaccaagagtgatttcaaggagtatgaaaaa

SEQ ID NO: 416044 - DNA, 88 bp, Homo sapiens
gatggagaccaatcacccacccagtgtgcggttaaataggattgcgaatcaggtggccattcagcggaagaagcagtttgtggagcga

SEQ ID NO: 416045 - DNA, 75 bp, Homo sapiens
caagaggacccaggagaaattcgccctcaaactcaccatggatgatgatatcgccgcgctcgtcgtcgacaacgg

SEQ ID NO: 416046 - DNA, 75 bp, Homo sapiens
gtgacttttcctgtggtaataatagagtcaaacagatgaaatccctgtattgacattaaaagataattctaagta

SEQ ID NO: 416047 - DNA, 98 bp, Homo sapiens
gctgtcctggcagggtctttggatgttaaagtatctgagaccagcagtcaccaggtgcatacattcagagggccacactggtgtgaatactgtgccaa

SEQ ID NO: 416048 - DNA, 100 bp, Homo sapiens
cggcttcacatgtacagtcctccccagtgtgtgccggagaacacgggctacacgtatgcgctcagccgaggcctgcctggagccccagatcaccccttcc

SEQ ID NO: 416049 - DNA, 74 bp, Homo sapiens
gactggatgctacaaactgtttgaggataactgacttaaaatctggaatcgagagctccagatcatgagaaagc

SEQ ID NO: 416050 - DNA, 83 bp, Homo sapiens
gtcggatgttgtgttgcccgccaccatgagctacacaggacccgtgcatctcttccgactctcgggcaagtgcttcagcctgg

SEQ ID NO: 416051 - DNA, 83 bp, Homo sapiens
gtctgcgagccaggattcccgacagccctcagcgcctttttccaggagaccaacatcccctacagccaccatcaccaccagat

SEQ ID NO: 416052 - DNA, 98 bp, Homo sapiens
gtgaaggaatgggacaagacccatctttatgcaaagccagcgttacagtaatgttccagcgccagcagagacttcagaaggaacgcctcatgaatgac

SEQ ID NO: 416053 - DNA, 100 bp, Homo sapiens
ttcaagaatgaagccgcggaccctcacgagacttggaggaggccttggagatgggggtggactggtccttaagagaagggtatgcctgggctgaagacaa

SEQ ID NO: 416054 - DNA, 75 bp, Homo sapiens
cagaagattgtagatgatcccaaagctttaaaaacattgacatttaagttggtatacaaaactaggatatgctgg

SEQ ID NO: 416055 - DNA, 82 bp, Homo sapiens
ctttaatttggcctccctcagatgactggtaccttgtggtctataatcctttagaacaagaccgaatctcgttggtctcagt

SEQ ID NO: 416056 - DNA, 101 bp, Homo sapiens
agctgtttcttcatgggcaaaacaggccacacccaccgggccctctccggcgtctgctttccacaatgcagcccccgcccaggagggcccatgtgcttacc

SEQ ID NO: 416057 - DNA, 83 bp, Homo sapiens
cgtctctgttcgtcaggaacgtggccgacgacaccaggatggtgaaacgccacttataaaggctaccaagatgagaaacattg

SEQ ID NO: 416058 - DNA, 107 bp, Homo sapiens
caccaacctctcgtacatcggcgagggcgcctacggcatggtgtgcgagtccctgtggcccatcgaggccagaaacgcagccattgccaatcactgcttcacctgcg

SEQ ID NO: 416059 - DNA, 116 bp, Homo sapiens
agacatgttctctcggtttgggcggatcatcaactcgcgggtcctcgtggatcagactacagtcacattaactttgctctagaagacaactttacaaggatctaaaaggaacagga

SEQ ID NO: 416060 - DNA, 100 bp, Homo sapiens
gagggacacgggagcggcccgcacacctgagccgcccggagaggagcctcggccccgtacccagaatgccaatactggggctcagagctccagctaccca

SEQ ID NO: 416061 - DNA, 90 bp, Homo sapiens
gagttctgcaaaagctcaggttaatccagtgaagctgtggtctaccaatctagacaactcagtggcaagcattgaggcaaaggctaatgt

SEQ ID NO: 416062 - DNA, 100 bp, Homo sapiens
agatgaagacggttccaaggagagtaatgatctggctaccactgggtaacaactccgtgggtgccatccagtgccctgatagtcagttcgaatgcccgga

SEQ ID NO: 416063 - DNA, 100 bp, Homo sapiens
tgcgggccgacctgctggaggcgcaggccctcaagctggtggaggggccggacgtccggaatttcgctaaggagtttgtgatcagtgatcggaaggagct

SEQ ID NO: 416064 - DNA, 82 bp, Homo sapiens
ctattgtgaggcggttgtagaagttaaaggcattaggatttcctgaaggacttgtgatacaagcgtattttgcttgtgagaa

SEQ ID NO: 416065 - DNA, 101 bp, Homo sapiens
ctttcacaattgcagcagatgaagatccattggtaaattgatcaggatttttggcctaccctccaaagaaaaggtttaagaattgtttaagctgcatcaat

SEQ ID NO: 416066 - DNA, 115 bp, Homo sapiens
agccatctcccatgctgcgttcacctacccaactgccactgccgctgccgccgccctccacgctcaggacgagaagctcactgtgacccaggacctccctgtgaatgatggaaaa

SEQ ID NO: 416067 - DNA, 74 bp, Homo sapiens
cctgggtcgcccttcacaacggagggggcgtgggctggaggtatctttaaaatagcttcctgggcagatctagt

SEQ ID NO: 416068 - DNA, 100 bp, Homo sapiens
tagtgtgcctgttgcaaaaacagcagaactttctggttctagtagtactttagaaccaattataagtagttcagaaaagagtctcatcgtggaaggcaag

SEQ ID NO: 416069 - DNA, 98 bp, Homo sapiens
ctcagcaccagctttactgaaaaatatgagatggaagccccttgctctgcagagaaaatacggtacatgtccccatggaggatatggcttgggcttgg

SEQ ID NO: 416070 - DNA, 100 bp, Homo sapiens
gcgggcccgaggccggaggaacccggactccggcgtagcgaatgttatggaacagttcaatcctgggctgcgaaatttaataaacctggggaaaaattat

SEQ ID NO: 416071 - DNA, 100 bp, Homo sapiens
ttcgggccgagatgtctcgctccgtggccttagctgtgctcgcgctactctctctttctggcctggaggctatccagcgctgacaaacgggctcatcata

SEQ ID NO: 416072 - DNA, 82 bp, Homo sapiens
gtagcctctaggaagcgctagacacatgtttccaatacttatctacaggaatcgccatgaccccagctctgagggaggcaac

SEQ ID NO: 416073 - DNA, 83 bp, Homo sapiens
gagggttcgaggccaatgatgggagaccaccgggatgggcagaaaagcctgccattgctccgcccgtctttgtgtttcagaag

SEQ ID NO: 416074 - DNA, 100 bp, Homo sapiens
ggccgcgctgctgctgaggcggagagcttggagctcggcggcacaaccagcaccatctggtcgcgatggtggacacggaaagcccactctgccccctctc

SEQ ID NO: 416075 - DNA, 82 bp, Homo sapiens
ttggtttcgggatctcggtgctgcagacggcgagacctcctgcacaggctttatcctgtggataaacgcagagtgaacgagt

SEQ ID NO: 416076 - DNA, 50 bp, Homo sapiens
ccgcaacccatgggtggccagggattctgacgtgaagccctccaatatgc

SEQ ID NO: 416077 - DNA, 51 bp, Homo sapiens
gcagttcatcacatcattcatgattttcagttttctgaaaatggtaaccag

SEQ ID NO: 416078 - DNA, 100 bp, Homo sapiens
ggacaagctcctacaaggcaggcagtattgggtgcagatatgagggaaggcaccattggagatatggctatcctgggtataacagaaagttttcaagtga

SEQ ID NO: 416079 - DNA, 100 bp, Homo sapiens
ggagcctcatcattggttatgccaggaacctggagtagagcgtgtgctccgagatcttcgcatcttccggatctttgaggggacaaatgacattcttcgg

SEQ ID NO: 416080 - DNA, 51 bp, Homo sapiens
tcttcgaaacctgctataaccccaaaggccgttaattaaggaaaagttgag

SEQ ID NO: 416081 - DNA, 109 bp, Homo sapiens
atgtggcttcactgcttacctatatcccaaacagtgctgtctggtggcccttctatcacttctatgcagctctccactccttcattgggacggaagtgctggtccccgc

SEQ ID NO: 416082 - DNA, 75 bp, Homo sapiens
cagattcgcagtggtcgcttcttctccttgtatgattcatccagccttccagctctgttatttaaagcaagaaca

SEQ ID NO: 416083 - DNA, 82 bp, Homo sapiens
atcaagaattttggagaagacatggatgatgagcgccttaaggatctctttggcaagtttgtgtctgcactgcttggggagg

SEQ ID NO: 416084 - DNA, 82 bp, Homo sapiens
tcttcctatccttacccgacctcagatgctcccttctgctcctgtcagagcaccataacatggtgtgggaagtgaagacaaa

SEQ ID NO: 416085 - DNA, 51 bp, Homo sapiens
cagagttctctcctgctgctcctcctggtgttgagatctgcatagccactc

SEQ ID NO: 416086 - DNA, 90 bp, Homo sapiens
tagacttatacttctcaaatcttaatttcctaaaggcagaagagcactgatcgtactggctcactcagagaggacgtccttcaactatgc

SEQ ID NO: 416087 - DNA, 100 bp, Homo sapiens
tgatgaaacttgggactctgcaatagatacatggagcccatcagaatggcagatggcttatgaaccacagatttgtttagtgaatgaccctaggccccag

SEQ ID NO: 416088 - DNA, 100 bp, Homo sapiens
cctggcaggtcatcaaaggtgtgctgtttagggcggcgactggcggcgcgatggacctgaccgggctcctgctggacgaagaaggcaccttctccctcgc

SEQ ID NO: 416089 - DNA, 83 bp, Homo sapiens
tgggaaggtggagccaccagcctctccttggtgtccctggccagtgtccttccacctgtccacaagcatggggaacatcttcg

SEQ ID NO: 416090 - DNA, 101 bp, Homo sapiens
ctggactcaagcaacccccgcttggcctcccaaagtgctgggattagaggcgtgagccactgcacctgacctaaggatttgttaaggattccaagtaactc

SEQ ID NO: 416091 - DNA, 74 bp, Homo sapiens
tccgccctcaggcccgtggccgctgtccaggagctctgctctcccctccaggtcgtttatacgcaatgcagact

SEQ ID NO: 416092 - DNA, 80 bp, Homo sapiens
gtgcctgggttagccaagagagacagagaacactggatagacttcgaacatttaaacagaacgtggtgtagtatgggaag

SEQ ID NO: 416093 - DNA, 74 bp, Homo sapiens
gcctggctgcccttaaccatcgagctgtccactgccaaggagatcatccagcactttaagggctgccctgcgga

SEQ ID NO: 416094 - DNA, 76 bp, Homo sapiens
aagccacgtgcagacatctacaaccttcgatctcctgacgagtttggcaaacatcgaaaagatgacaagattgaga

SEQ ID NO: 416095 - DNA, 90 bp, Homo sapiens
ctagcggactcttcttcgccttcgagaccaagaatcgccttcagccctgtctggtgcatccttggcagaaagtgaggaggaaaacacccc

SEQ ID NO: 416096 - DNA, 100 bp, Homo sapiens
gtgaaaggcaaagaacaagagaagacctcagatgtgaagtccattaaagcacggcagcaatttgataggtatgtctgatctcaatgtgcctgagcagctc

SEQ ID NO: 416097 - DNA, 90 bp, Homo sapiens
aaaattcgatttgcaaatcattcagtgaatcccaactgttatgccaaaggattattacagtggtggctactatcctgcacaggacccggc

SEQ ID NO: 416098 - DNA, 100 bp, Homo sapiens
tttttctttggtccagtttcccttatgggagtccttaaaatgggtgaatttgtaagtgatgtcctgctagttccagaaaagtgccagtttttccacaaag

SEQ ID NO: 416099 - DNA, 90 bp, Homo sapiens
gggagctggacctggaggcgccgccgcgacagcagcagccatggaggacgagatgcccaagactctgttctgtcatatgttgaagaatcc

SEQ ID NO: 416100 - DNA, 100 bp, Homo sapiens
tatataaagaagaccttaatcaaggaattttacaacagtttgaacactggcctcatatttgcacggtttacccagggttgatgataaccgctggccttat

SEQ ID NO: 416101 - DNA, 82 bp, Homo sapiens
atgaattgtacggcacttggcgtaaagccgcttccctcaagagtaactacaagaataaagggattcattcctcattttaact

SEQ ID NO: 416102 - DNA, 100 bp, Homo sapiens
acaagtatacaaagatagctgtggatcgagtgaacgctgctgatgggagataccatgtcctgtttctcggaacaggtgaatctggattgggaaagtcgac

SEQ ID NO: 416103 - DNA, 90 bp, Homo sapiens
gagaagccttggggtcaatttgttgtatagctgagttgccctcaaattggctgtagccacacggatataagaaagtcagatcttatccag

SEQ ID NO: 416104 - DNA, 100 bp, Homo sapiens
caggagtaataggtgtagaattgaaaaggcgacggcggattgacagaagtatgattggagagcccacaaactttgtgcatacagctcatgttggatcagg

SEQ ID NO: 416105 - DNA, 76 bp, Homo sapiens
cgcctgcgacctgcccgcctggcttccccgggcgctgcctggacaggcctgcctgcgtgctgggacatgtctggcc

SEQ ID NO: 416106 - DNA, 101 bp, Homo sapiens
cccgccgccgccgccgccgccgcccctgttgcgatggcgcagaaaccccgttgacaaggcactgctttttcatgacgttgttgacctcctgtactggagag

SEQ ID NO: 416107 - DNA, 50 bp, Homo sapiens
ccaagagggatccttcacccgtgtctgcgagggcggcactgctcacagga

SEQ ID NO: 416108 - DNA, 100 bp, Homo sapiens
tatagagctggaattaggcaaatatggacaggaatccccttctggtcgaaggaaagctcttgctactagcagcatcaatatgaaacagtatgcaagccct

SEQ ID NO: 416109 - DNA, 96 bp, Homo sapiens
ggttgcacttgagaaaattaatgtggcaggaatagagctgtgcccccctggaaaacggttcatgattacgatggtggcgagcttcgtggccatggc

SEQ ID NO: 416110 - DNA, 75 bp, Homo sapiens
ggaggacaacaagtactgcgccgactgcgaggccaaaggtaatagcctgcagctggtgttttgagaagccctact

SEQ ID NO: 416111 - DNA, 51 bp, Homo sapiens
cttgtcagccagggctgaacccccgcagtggctgcacttcgtgacgctgag

SEQ ID NO: 416112 - DNA, 100 bp, Homo sapiens
cccggagcctggaggagctgctgctggacgccaaccagctccgcgagctgcccgaggcatccagtaccctgctgactctgacatgcccccagcctccccc

SEQ ID NO: 416113 - DNA, 100 bp, Homo sapiens
tctaaatgctgaaagggagaaagtccaggtcgcatagggcatggagctggagaactataaacagcccgtggtgctgagagaggacaactgccgaaggcgc

SEQ ID NO: 416114 - DNA, 100 bp, Homo sapiens
gatggtgtcctccgggacggagatggagccgtggtccttcccaatgaggcttgcagccaatttactggagcagggatgacgtagcccagtggctcaagtg

SEQ ID NO: 416115 - DNA, 82 bp, Homo sapiens
caggatgatgaccagagatcatcacactacgatgaactgcttgctgcagaggccagctatcagaggactcctgaaacctgga

SEQ ID NO: 416116 - DNA, 100 bp, Homo sapiens
tgaaggccgaggccaagatggcggtgctgtcaggaaaaccaattctgtgtcctcggaggaccacagcccagttgggccccaggcgaaacccagcctggag

SEQ ID NO: 416117 - DNA, 101 bp, Homo sapiens
tgtacagttcctcaaccgcttttctacagtttgtgaggagatgtggaattagaagaagctattagaagaagtcttgaggaaatgtaattaaagatattacc

SEQ ID NO: 416118 - DNA, 85 bp, Homo sapiens
ctaagtacactcgtcttgaataggtttttgtatgaatatgcaagaaggcatcctgattactctgtcgtgctgctgctgagacttg

SEQ ID NO: 416119 - DNA, 100 bp, Homo sapiens
acttagcagcagctccactgaacagataagggcagtacaagaaacatggtgccggcatctgcttctggcgagggcctcagggagcttctactcgtgcagg

SEQ ID NO: 416120 - DNA, 98 bp, Homo sapiens
ccgggtgctgctggttagtgtgctctgagggagggtccgagccagccgctgttttgccggaggagcccctcaggccgatgccaagtttgtggaggaac

SEQ ID NO: 416121 - DNA, 102 bp, Homo sapiens
gtgaaggtccggggcttgccctggtcttgctcggccgatgaagtgcagaggtttttttctgctcctggaatgaggccgcccatgggaggccatatgccaatg

SEQ ID NO: 416122 - DNA, 100 bp, Homo sapiens
cagacggctcacctgtgcgggatggaacaaaaggtatgcagagaaggagaagaaaaatcttagatacgtcagtggcatatgtgcggggagaagagaactt

SEQ ID NO: 416123 - DNA, 90 bp, Homo sapiens
cgtccccagccctgcctctccctgggctctggctcccagccaacctctgataaaccctcccagcggccatcagagagcacaaattgtagc

SEQ ID NO: 416124 - DNA, 100 bp, Homo sapiens
accatatagctgccctcagctgcactgtggcaaggcttttgcttccaaatacaagctgtatagtattaattttaaagacccacagtttgctgaagattac

SEQ ID NO: 416125 - DNA, 82 bp, Homo sapiens
cgaggcaaggagctaaagcagcgtgcgttcagccctggggccctgggctgcatcttgtacctgctgtgcttccggcagcacc

SEQ ID NO: 416126 - DNA, 75 bp, Homo sapiens
gcgagcaggagcgattccgtcgccaaacaggtaagaatgattgatgttggctgatattggagtgctcattcacat

SEQ ID NO: 416127 - DNA, 90 bp, Homo sapiens
ggatggtcagcacaaccaatttgcattagctcaagtggtcctgtcgaagtatttatcactgagactccgagtcagcccaactcccacccc

SEQ ID NO: 416128 - DNA, 60 bp, Homo sapiens
ctgctgagcagctgatggaatatttagggctgtttaacgacccccaactccccatccatg

SEQ ID NO: 416129 - DNA, 100 bp, Homo sapiens
tccccctcgaggtgctggatcttcagcataatgcactcacgaggctgccagacaccctcttctccaaggccttaaagcttcgctagtgatggacccatac

SEQ ID NO: 416130 - DNA, 83 bp, Homo sapiens
ccgagtgcagaagatctgggtgcccgtggaccacaggccctcgttgcccagatgcagatcgggagcggtgccgagaaaaattt

SEQ ID NO: 416131 - DNA, 100 bp, Homo sapiens
gcattctccagggaaaggatgacatatttttggacctgaaacagaaattctggaacacctatatggctttcggacagtcctttctccagcccgacatcca

SEQ ID NO: 416132 - DNA, 113 bp, Homo sapiens
gtcatctttccaaagaagagtgagtagcttggttggtggtaccctaaaattagggcatgattaagtctctggcaagatgctttaggaagataaaagtttgaggagaacaaaca

SEQ ID NO: 416133 - DNA, 75 bp, Homo sapiens
ctacaccttcttcattgacatcctgctcgacactatcaggcctgtagtggtggagacacgcccagtggatgatcc

SEQ ID NO: 416134 - DNA, 75 bp, Homo sapiens
cttgccttatcaccttcttgcttgcagaaattgcttcccaagaagaaggtgctactatacagtggatgtcatctg

SEQ ID NO: 416135 - DNA, 100 bp, Homo sapiens
ggattccgggagcacagttccgccgaggaggctgccggcgtggaccgcgggaaggcggggctggggctcggcgggaggccacccccacagccgccccggg

SEQ ID NO: 416136 - DNA, 99 bp, Homo sapiens
gtggcctgggagttcagcttttagagcaggtgtatgatcttttggaggaggaggatgaatttgatagagaggcttctccagggaaagtgaccgaggcag

SEQ ID NO: 416137 - DNA, 90 bp, Homo sapiens
caaagacgctaaacgtgccctactctgccccgggggagagatgaaggatttgggggcagagcacttggcaggtcatgaaggggtccaact

SEQ ID NO: 416138 - DNA, 75 bp, Homo sapiens
ttctagcagtttcagtctgtaccataaagtagctgcttgtctcctactatacctgtctgacacaatatcaccaga

SEQ ID NO: 416139 - DNA, 75 bp, Homo sapiens
ggaggctgaggcggcggccgaggcggcgacggaggaaacagaagatgttgacatgaagacaatggagactgcaga

SEQ ID NO: 416140 - DNA, 113 bp, Homo sapiens
ggaagaggagctgctgaggatcgccaaaaagctggagaagatggtggccaggaagaacacgatgtctttggtggacttgggaaagaggttgctagaagcagcaagaaaaggcc

SEQ ID NO: 416141 - DNA, 100 bp, Homo sapiens
aagatcgggagcgggtccttcggagatatctacctgggcccgggggatgctccagaaccgcgtgctgctgtggaaggagcagtctgaggccagccgcagc

SEQ ID NO: 416142 - DNA, 99 bp, Homo sapiens
cagctgcacctaaattctctgttccagaatctgtcatgaaggaaactctatatccaaaatatgagaacctaaatcacagccacagcagcttcatcaggg

SEQ ID NO: 416143 - DNA, 83 bp, Homo sapiens
gaacagggcgctcctgagaccctccagcgctgcctggaggagaatcaagagctccgagatatggctcgtggacagcagaaaat

SEQ ID NO: 416144 - DNA, 101 bp, Homo sapiens
acgggaagaacaaagacttagactcgcaggatcaaggtgaaaaggagaaccccatgcgggaacttcgcatccgcaaactctgtctcaacatctgtgttggg

SEQ ID NO: 416145 - DNA, 98 bp, Homo sapiens
cggagccggactgcggttggggcgggaagagccggggccgtggctgacatggagcaggttttatgaatgaagctatggctacagattccccaagaaga

SEQ ID NO: 416146 - DNA, 100 bp, Homo sapiens
tggcttcactcattgccctgatgtctgtccagaagaactagaaaagatgattcaagtcgtggatgaaatagaggagaacgaggagcgcacgatgattgac

SEQ ID NO: 416147 - DNA, 50 bp, Homo sapiens
gaaaaacaagcaagaaaccttttagcctgtgcccagggcaccttcaagcc

SEQ ID NO: 416148 - DNA, 73 bp, Homo sapiens
gggactgcaaaggccaatgttggtgctggcaaaaaggagatctattgggaaactgattataaccactcgggca

SEQ ID NO: 416149 - DNA, 98 bp, Homo sapiens
gtaaaagacatggcaacaggaaagtctaagggatatggctttgtctcctttttcaacaaatggcttctagaattcctctccagagctactctcaagtt

SEQ ID NO: 416150 - DNA, 100 bp, Homo sapiens
ggatggcctagagggctgaactgatgcttgaaggggaggaagttgccttgtactgtgccaaatatcttcctgatatcatcaaagatcagaaggcctacaa

SEQ ID NO: 416151 - DNA, 101 bp, Homo sapiens
ctggaagaaccatcctataaacgggaaagattgactagtttcacaggggctgcgatttatccagttgaaaaatccttggagtcatttacgttggaaaggaa

SEQ ID NO: 416152 - DNA, 101 bp, Homo sapiens
tcgtgttcgtgagggccttttctggatattttcattgtctccgaattttagagctgaaaagtgccttagagatcatctagttcaacctctccgttcaaatg

SEQ ID NO: 416153 - DNA, 100 bp, Homo sapiens
ctccgccaggctgcattcaagctctatgcctctcttggagcaaatgatgaagacatccggaagaaggtgaccttggagaaggtgctgggaattacagtgt

SEQ ID NO: 416154 - DNA, 98 bp, Homo sapiens
gcggtaggaagccggagacagcagggtgacagttaataacgacatgatagtcactgacaacaacggtgcagtcaagtttccacaactgtgtaaatttt

SEQ ID NO: 416155 - DNA, 100 bp, Homo sapiens
agccacgaataacctataatgctgaaaaaattaggtgtgatgcccccggaacagccattacctgtgaaatgtaatcgcatctaccagataatgtgggcca

SEQ ID NO: 416156 - DNA, 82 bp, Homo sapiens
attacaggagtcctccacttgccactggtcagcctacgctgtgtccctgctgcgggagtgtgtgaagttgcggccctcggac

SEQ ID NO: 416157 - DNA, 82 bp, Homo sapiens
agcggctctttgtatgatgacgtcgcgtggggcaggcagtggcgctgcgggccaaggccttcggcttcaacgtgctcttcta

SEQ ID NO: 416158 - DNA, 100 bp, Homo sapiens
ggagaacgaccggctcctgctcaagatctcagagaaggaggaggtgaccacgcgcgaggcgcgactcttcgatgaaccgcagctggccagcctgtgcctg

SEQ ID NO: 416159 - DNA, 75 bp, Homo sapiens
cctgtaaggttaagtcggctccaaggtgttgctatttgaactgctgggacctgaaggacttgaacttattgagaa

SEQ ID NO: 416160 - DNA, 87 bp, Homo sapiens
cccagctgtccaatcacctcgcaggagccctaggaatgatctctgcctttcacaaagaccacctttgtgcatccatgcctactcttc

SEQ ID NO: 416161 - DNA, 50 bp, Homo sapiens
ctaagtctgtttgcaaagcacctgaactgatgatacataccttttctcga

SEQ ID NO: 416162 - DNA, 100 bp, Homo sapiens
ctggtgtgccgcgtgcagcttgggccctaccagcccggccggccggcagcctgcgacctgaggactgcctccgggcctgccaggagcagatcgaagccct

SEQ ID NO: 416163 - DNA, 96 bp, Homo sapiens
gaatttttaaagtctttagtatgttgaactggaaatataggacatgcgtttgagatctactgtgagaaacctcgacctgtctcccagttggttgca

SEQ ID NO: 416164 - DNA, 75 bp, Homo sapiens
acccctgagcagcctggcctgccatgtccgggagaagacacctcaaggaataggttctcctagtgtctatcatgc

SEQ ID NO: 416165 - DNA, 90 bp, Homo sapiens
ttccaaagagctgagacagaagtacaacgtgcgatccatgcccatccgaaaggatgatgaagttcaggtctccatcacatttttgcccag

SEQ ID NO: 416166 - DNA, 75 bp, Homo sapiens
gcgcactgggcttgcgcctgggagaccgcgtgctgctggatggccagaagaacctcaagaaggcatgaagccagc

SEQ ID NO: 416167 - DNA, 82 bp, Homo sapiens
ggctccctcgggagctcatcttcgtggggcgtgaggagtgtgagctcatgctacaggtgggaggaggagctcgccaagcgca

SEQ ID NO: 416168 - DNA, 74 bp, Homo sapiens
tcataattatgggaccactcagaggcatgggtgtcgaggactgccttatgctcgtaactggcggaaacccagag

SEQ ID NO: 416169 - DNA, 75 bp, Homo sapiens
cgcaagaccttcaatatcaaaaatgactttactgaagaggaggaagcccaggtgacaggccgctgcggctctgtg

SEQ ID NO: 416170 - DNA, 75 bp, Homo sapiens
aatcatattatagatggagtaaaggagtacgaccccagcaaagcgacctttgtgaaggtggtgccaacccccaac

SEQ ID NO: 416171 - DNA, 74 bp, Homo sapiens
ccgacttcttgtatgcatactccacagcacctgaaggggtagaagagccatccaaaaaacgagttatagaagga

SEQ ID NO: 416172 - DNA, 75 bp, Homo sapiens
gcctgagttgggagaagagctccagagaagcagcccgacggccatggaggctgaagagacgatggaatgccttca

SEQ ID NO: 416173 - DNA, 83 bp, Homo sapiens
ggaagacctggaagacagatctgaaggagatttaaccatagtagaaagaatggagaactattaactgcctttcttctgtgggc

SEQ ID NO: 416174 - DNA, 100 bp, Homo sapiens
gctttcagcaaacttatcatttatgacattgttgacatgcatgcagctgcagacatcttcaaacactacatgaagatcttaatatttgccagtgatgcct

SEQ ID NO: 416175 - DNA, 83 bp, Homo sapiens
ttggaacagaacaagaggacaggaggtgtcgttccaggaggttccccaatacaactcatgagggtttcaatgtcaccctccac

SEQ ID NO: 416176 - DNA, 75 bp, Homo sapiens
cctggactgaggtgcgagaggctccatcaggcacacatgcagacgattacgggcgagaccgcctttctccagact

SEQ ID NO: 416177 - DNA, 100 bp, Homo sapiens
cgccatgttcaagaaactgaagcaaaagatcagcgaggagcagcagcagctccagcaggcgctggctcctgctcaggtggttccttaaaaacagttattg

SEQ ID NO: 416178 - DNA, 98 bp, Homo sapiens
agagctatgaacagaatatcaaacagattggcacctttgcctcttgtgcaggtaacagagctggaagggatgtacgtgtgactccgctgccttcactg

SEQ ID NO: 416179 - DNA, 100 bp, Homo sapiens
ggagtggtttgaatatcgtaagcgcacgtttaaacatctcaaggttagctgctgaatcaaagcttcaaacagaagttaaagaaggaaaagaaacttcaag

SEQ ID NO: 416180 - DNA, 95 bp, Homo sapiens
ggcagcagcatcggcatgctctatctgtactgccggcacctcaaccagatgaggaagtacaactttgaggagccagcaccgctctttgaccttgc

SEQ ID NO: 416181 - DNA, 74 bp, Homo sapiens
gcgcggggaccgctgtgctctcggcttccaaggaatgccaagtgctatacgccagtctgggcctcgtccaactc

SEQ ID NO: 416182 - DNA, 100 bp, Homo sapiens
tccgaagaggtggccccaactatcaggagggcttacgggtgatgggagaagtcggttttgcaaaccgtttttcaaaacccaaaggaccaaggaatccacc

SEQ ID NO: 416183 - DNA, 76 bp, Homo sapiens
gtgggaaaatattagctgtaaagatttggagcaagaggtggtggtggccttcccccgaagaaatttggtaatcctg

SEQ ID NO: 416184 - DNA, 98 bp, Homo sapiens
cagctccagagctttgtcaaagagggaaggagttcgagacacgactgaaggagaagaagccaggagatctgtctgatgagctaaggatttccttgggg

SEQ ID NO: 416185 - DNA, 82 bp, Homo sapiens
cagaaacccattatacttcaagtggtaaccctcaaaccaccacacggaaattggagggaaatcctcattgacgattcaattt

SEQ ID NO: 416186 - DNA, 100 bp, Homo sapiens
gcagtccatgaaccaggcgttgcagaggcgcttcgccaagggggtgcagtacaacaggtttccaggcctgaggtgcccgccctggccccaggagaatgaa

SEQ ID NO: 416187 - DNA, 100 bp, Homo sapiens
cagaggcacccgagccctgagagtccgccgccaacgcgcaggtgctagcggccccttcgccctgcagaccctgctggaaacaacaaccagccttctaaac

SEQ ID NO: 416188 - DNA, 90 bp, Homo sapiens
tgggataattatccaaataaattgcaagcattctatccaaatgagagagatcatcattgcctgaatttagctttgtgactgcaagagcaa

SEQ ID NO: 416189 - DNA, 74 bp, Homo sapiens
gacctcggtctgcccccagaaccagcagagtgttctgccagttctggataatccactgtccaagaaggttcgag

SEQ ID NO: 416190 - DNA, 73 bp, Homo sapiens
gataacaagttttgtgcagattgccagtctaaagagttaagctgaaatatgtaaaactaaagaattatctgaa

SEQ ID NO: 416191 - DNA, 75 bp, Homo sapiens
atcgtggtcgtaggaggctgtcctgtctgcaggttttgggatttgagattgacgcggtgaactctgtccagtttt

SEQ ID NO: 416192 - DNA, 74 bp, Homo sapiens
aagggaccacggtcaccgtctcctcagtgagacggtttaagcggaagcatcttactgccattgactgccagcat

SEQ ID NO: 416193 - DNA, 90 bp, Homo sapiens
ctttcttgtcaactgctcacgacagaaggcgtctcatggcgttggaataccggctctcagcggctttaagtgggcagaccaacatccacc

SEQ ID NO: 416194 - DNA, 98 bp, Homo sapiens
atcagaggatgccctgccaaattggttttgtagaagacaagtctgaaaactgtgcttctatccgagcagttggcagactaaaaagagagcggtctatg

SEQ ID NO: 416195 - DNA, 100 bp, Homo sapiens
gacatgacatcattgcatgggttaatgacatagtatctttaaactacacaaaagtggaacagctttgttcagctggagtcacatcagaagccgcgcagac

SEQ ID NO: 416196 - DNA, 73 bp, Homo sapiens
tcacccaagaggcttcagataccagttggcagggctggcacaggtgtggacaatgtggatctggaggccgcaa

SEQ ID NO: 416197 - DNA, 101 bp, Homo sapiens
gggtccagccgtccccagaacgcagatcagaggtagtcggacctttcccgctggcgcgcagcctcagctagaatggccaacatgcagggactggtggaaag

SEQ ID NO: 416198 - DNA, 48 bp, Homo sapiens
cctcgggcctcatcatggccaggaagtctgcgctcctcagaccaccgg

SEQ ID NO: 416199 - DNA, 74 bp, Homo sapiens
cagcaccagacactccctggcccacacctcccgctcatcgcccgccacgaggtcagctggcggctccagtcctg

SEQ ID NO: 416200 - DNA, 95 bp, Homo sapiens
gtggagtccgagctgagatccatctgcaccacggtgctgtgccggatggagtgctgtgatgtgccagccgagacactctacgacgtcctacacga

SEQ ID NO: 416201 - DNA, 76 bp, Homo sapiens
gggcatcttggctcctccttgatcacccacaaaagctgtatataatgccagacattggaatcatccagattcagaa

SEQ ID NO: 416202 - DNA, 122 bp, Homo sapiens
caaggcactcagctcaaatacacacacctgttgccattatagagctggaattaggcaaatatggacaggtggataatattaatgcagctgtgatggatttgaaaaaaaagaagatccgcagt

SEQ ID NO: 416203 - DNA, 83 bp, Homo sapiens
gtatcagggaacctctgtgggacgcctggaggagaggaacctttgcttctatggaagggccccctgctgcgctggctcaaggt

SEQ ID NO: 416204 - DNA, 100 bp, Homo sapiens
aaattgatgagattgtgatcgagttaactgtgcaagattggctatcggcatgtggtggatgctactcttcaggaggaggcctgctcgctggccagcttgc

SEQ ID NO: 416205 - DNA, 51 bp, Homo sapiens
ggctgccctgtggcctcgctcctcggagggccatcgaagacggcaatttgg

SEQ ID NO: 416206 - DNA, 51 bp, Homo sapiens
gccatcacaaaagctggacaagcgaagaaacctctgcgccatgagagccaa

SEQ ID NO: 416207 - DNA, 96 bp, Homo sapiens
ctctctctctctctcttaagaaaggaaaatatcccaaggactaatctgatcgggtcttccttcatgtacggattttcaaatatgcgctatatttct

SEQ ID NO: 416208 - DNA, 100 bp, Homo sapiens
tcttttgtgatggatgaagaaaggtccagtatgcttcctaccatggcagcagagtcttttattcaaaacttcagcgttctctatagtcccttgaaaaggc

SEQ ID NO: 416209 - DNA, 100 bp, Homo sapiens
aatattggagatgtatcctacaagttgaaaattcctaagaatccagaacttgtgccacagaactacaaacggcccgggatgttggacttcacgggcaagg

SEQ ID NO: 416210 - DNA, 76 bp, Homo sapiens
ggaagtaaaatggcggacctggcgaacgaaggtactccaaagattcaggtttactcacgtcatccagcagagaatg

SEQ ID NO: 416211 - DNA, 87 bp, Homo sapiens
gaacaaagtgagtgacaagcaccccgagtactgggacactgccatcctcttcaccaggcagtgggtgtataacattctcgacaagaa

SEQ ID NO: 416212 - DNA, 100 bp, Homo sapiens
gcgtcttcaagccgtgggaggagcggaccgaccgctccaagctagatacactgtcagatcctttggcatccggagaaatgaaaagattgctgtccactgc

SEQ ID NO: 416213 - DNA, 75 bp, Homo sapiens
acagaaattctggaacacctatatgggtaatcactttgatcagtatgaggaaggacacttggaaattgaacaagc

SEQ ID NO: 416214 - DNA, 90 bp, Homo sapiens
cctcctgccgtgtaaccctcacggcaacgggctgctctacgccggcttcaaccaggaccacgacaactaaactggtaggtggcagcagag

SEQ ID NO: 416215 - DNA, 100 bp, Homo sapiens
ccagctatgcccccgtggccaccgcctccagcttgccaccaaagacctgcgactttgctcagccctgggcgctgcctatggcacagccaagagcggtacc

SEQ ID NO: 416216 - DNA, 74 bp, Homo sapiens
tgagctggcccagagaattgcagccctcaccaagggatcatagacggtatttctatgtaaacgaacagtcgggc

SEQ ID NO: 416217 - DNA, 100 bp, Homo sapiens
cgactcaacaagcggcgcttcccggggctgcggctcttcgggcacagaaacttgggaaccgtgggtgctgttgccttggactgcaaagggaatgtagcct

SEQ ID NO: 416218 - DNA, 87 bp, Homo sapiens
ttcatgcctgtaggtttaattgcaggtgccagttctcctgtgcctcctgttggctctctttgcatctggcctcatccaccgagtctg

SEQ ID NO: 416219 - DNA, 82 bp, Homo sapiens
tgccaaggaaaaactggagagcttcatcaaaaatagtgatagctttgataaaacctgaatggcgtgatggtggcagtggcgg

SEQ ID NO: 416220 - DNA, 73 bp, Homo sapiens
gaacacaggtccatggaacaatcacaggtttaaaaacctcacagcttgtataatgtaaccatttggggtccgc

SEQ ID NO: 416221 - DNA, 98 bp, Homo sapiens
gcggcgtgcccagcaagagattaaagatgcagtacgccacggggccgctgctcaagttccagatttgtgttgaaaatgagcccatgagcacaagtcag

SEQ ID NO: 416222 - DNA, 100 bp, Homo sapiens
cacttattccaaggaaagatacagcggatactctgttttcaaggaagctgaatgggaaatacagacttgagcgacttgttccaactgcagtgtatcagca

SEQ ID NO: 416223 - DNA, 98 bp, Homo sapiens
ttggcctgattctattgcatcaggagtcgcacagccaccgccgagcgagctcaccatgtcggaaggtcatattgaacattccagatacctatcattac

SEQ ID NO: 416224 - DNA, 100 bp, Homo sapiens
ggtggaagtgagaccgaaatagactctgaagtaatatctggactttgaaattgttcaagaacatgaagactcgggtgactcagaagtggagaatgaagca

SEQ ID NO: 416225 - DNA, 76 bp, Homo sapiens
cgcagctactaattttcatgatgctcttagctccaataattcatgggctgaccagtttgagtatgtaatgtatgga

SEQ ID NO: 416226 - DNA, 83 bp, Homo sapiens
tataaggatgtcatccccatggctgatgcagcaggcatcatccgctatgcaattgggcccctttgatgccaagaatccgttcc

SEQ ID NO: 416227 - DNA, 82 bp, Homo sapiens
ctcggagtccgctggccacccagctgagaggagaggcgcccccggggacggtactccaaagattcaggtttactcacgtcat

SEQ ID NO: 416228 - DNA, 100 bp, Homo sapiens
cgagtccacgggcctgaagaagacagaaagaatttactttcaggttttcttacctaaagggagcaaagagaagagcaaaccaatgttcttttgccaccga

SEQ ID NO: 416229 - DNA, 100 bp, Homo sapiens
aatatctgagctttactcctcctgataccaccaggccccgaaagagccatgagaaggaaggagtggaatatcactttgtgtctaagcaagcatttgaggc

SEQ ID NO: 416230 - DNA, 99 bp, Homo sapiens
cacgatgtttcccttggtcaaaagcgcactaaatcgtctccaagtgtggaaccatcagagaatctacaatccctgatggagaagaatcagtccctggta

SEQ ID NO: 416231 - DNA, 101 bp, Homo sapiens
cagaagaggactgggaccgggacctgctcctggacccggcctgggagaagcagcagagaaaggaagactatgaccgtctgaggcctttatcttacccaatg

SEQ ID NO: 416232 - DNA, 83 bp, Homo sapiens
tcggaatattacagcggcgaccagtcagtattgaatttgaccgggattgtgactattttgcgattgctggagttacaaagaag

SEQ ID NO: 416233 - DNA, 109 bp, Homo sapiens
cagggccagtggtttctgtcagattttcgccgccacattgctgtgaggaagcctgggctacatggagaagcccacatgaagaggcccatgtggagaggaactgaggccc

SEQ ID NO: 416234 - DNA, 100 bp, Homo sapiens
gtcggggagctgctctgccgaagaccttaaaatggccagaagtctggtccccaaggctctggagccatacgtgacagccgagaggccccagcaacatgca

SEQ ID NO: 416235 - DNA, 102 bp, Homo sapiens
aatcctccccacttatgtttgtaaatgtgagtggaagccatgaggccaaaggcagttgtattgaagcagtacaacatccacgtgggaactgctggatcaaag

SEQ ID NO: 416236 - DNA, 75 bp, Homo sapiens
ctctgacagtcctcccactaaggtcctctccacccggatcctggccatgaaggcctcgctctgcaagctgtcgcc

SEQ ID NO: 416237 - DNA, 91 bp, Homo sapiens
cagaaatttactggaaatataatgcaagtgccccccctggataggatgggatctgcactgatgattgaaacagcaagaaaccccacatgtc

SEQ ID NO: 416238 - DNA, 100 bp, Homo sapiens
ctcctgtcttcctccagcattcacaaaccaggaacggctagctttttgacctagagaagaagaaggaggttcctgctgtgccagaaacccttaagaaaaa

SEQ ID NO: 416239 - DNA, 90 bp, Homo sapiens
cggagccggtatgggcccgcctgaccctgggcgccgcgccgcacgagcaccagcctagagccagccttcacttaacttaagggaccttgg

SEQ ID NO: 416240 - DNA, 75 bp, Homo sapiens
gaccttaacaatccacctaagaaattcagaggacaccattgcagtggctagatttattgtttttttagcttcttc

SEQ ID NO: 416241 - DNA, 100 bp, Homo sapiens
gacggactcggtattggagctgaaggcggcggcagagaacttgccggtgccagctgagcagagatcgcggacagtgatgaaagactggacggcattgctc

SEQ ID NO: 416242 - DNA, 95 bp, Homo sapiens
aagaagagagccttgttggacactgaagaagggacggggatttctcctcctaatctgggcctcttgtcatgattcctagaggggagtgcctgcga

SEQ ID NO: 416243 - DNA, 100 bp, Homo sapiens
gtcaccactggacctccaaggaagccacgtgcagacatctacaaccttcgatctcctgacgattaccaccaccctgtgaatctgcctgcacagtaccaac

SEQ ID NO: 416244 - DNA, 100 bp, Homo sapiens
caaactcttgtcaggaaacaagctctgtggcattcacgcagaagagcaatggtacaacagctccatgaacgtgatctgcacctggttgacggaccggatg

SEQ ID NO: 416245 - DNA, 83 bp, Homo sapiens
gtgggccgcgtcgaagacatggaccagggctacggaggcttgggcactgtttaaaggaaagttccgagaaggcatcgacaagc

SEQ ID NO: 416246 - DNA, 51 bp, Homo sapiens
gagcctcaagtgcttctgcattacatgtccggtttttctacagaccctggc

SEQ ID NO: 416247 - DNA, 100 bp, Homo sapiens
ctttggcagacatcgagaagcataatgacattgtggacagtgacagcgatgctgaggatcgaggaacgttgtctggaccatgaatggcacctacaacacc

SEQ ID NO: 416248 - DNA, 100 bp, Homo sapiens
ttaaaagttggagaaatttcacagtacatcatccaaaagaggagtccatgatggaggcagaggttgcccccaagtttcctggcagtgtgtgatactgagg

SEQ ID NO: 416249 - DNA, 100 bp, Homo sapiens
tttataacatggattttagatgctgatggaggagagacttcagcatgcaaaccttcatctgttcggcttgcaccgtcattttcattccatgctgctggcc

SEQ ID NO: 416250 - DNA, 90 bp, Homo sapiens
gggaatttccttgtgcctccattcccgggaggggggagcggcgttggaggccaccgtttccaggagcaggacatcgagactttacatggc

SEQ ID NO: 416251 - DNA, 100 bp, Homo sapiens
ctggaatatgaagagacacagtatggtagccacacccccagatccgcctcacggacacgctgggcaggctctcgcacatcctggagatggaccacttcgc

SEQ ID NO: 416252 - DNA, 90 bp, Homo sapiens
ggcgaggttcgggctggttgttccgttgcgagctgcagctgcgatctctgtggtaggcccagatcatccgggaagcccacgggaccctca

SEQ ID NO: 416253 - DNA, 90 bp, Homo sapiens
aattactgtcccagtgtttcacctgtttcacaaactcttggcaggtgtacctgaaggaaatcttaaaagaaattggtgttcagaatgtaa

SEQ ID NO: 416254 - DNA, 120 bp, Homo sapiens
atgaaaacaagcaaatcgagtgcacctgggatgacaaaaagtcatagtggtgtgacaaccacaggtggaattaagaaatctggcaaaaagtaagctgttccttgtgcctgaggagatggt

SEQ ID NO: 416255 - DNA, 99 bp, Homo sapiens
gacttccagtgctcagagggcggggagaatctcagcagcctcccgcgacgatgcccctcaacgttagcttcaccaacaggaactatgacctcgactacg

SEQ ID NO: 416256 - DNA, 75 bp, Homo sapiens
gcttttttatctcatattagtgcctgtgatggcatctttcatctaacacgcagatgatgttgagggcaaaattag

SEQ ID NO: 416257 - DNA, 74 bp, Homo sapiens
ttggtggacacttttgcttgcagttaggtcaagtggagatagtattgaagccagccttgaggctgcgtcctcgc

SEQ ID NO: 416258 - DNA, 100 bp, Homo sapiens
gacttgtggctacacttctggccagtttgacctggaacatcatcaagaaggtgatcgggcagaagtttgtgtacaagtttgtctctttcccggagatcct

SEQ ID NO: 416259 - DNA, 90 bp, Homo sapiens
taatccagtggaaatcaggagagggtggttctcttcccaaagtggaagccaaattcatcaattatgtgaagaattgcttccggatgactg

SEQ ID NO: 416260 - DNA, 100 bp, Homo sapiens
gtgaagcaatggtatgggaaaattgtttgcagaaggatgaaaaggctttattgccaaactgtccccagtctatgtgaggatctcctgtcttctgttgacc

SEQ ID NO: 416261 - DNA, 83 bp, Homo sapiens
ccagacctgcaagctctttgacacacagcagttcttgtcagccaacatgcccatcactcggatgcgcatgagaccctggctag

SEQ ID NO: 416262 - DNA, 100 bp, Homo sapiens
cttaaatacttgctttactggaaagacccagaatatgccaagtatctaaagtccacgctgcttttatgagctgtaacactcaccgcgaagatctgcagct

SEQ ID NO: 416263 - DNA, 108 bp, Homo sapiens
cgtcagcaaggaaggggaggaacgcgaggggagactgaagttcacgttccgctcttagtgcgcgtggttacccaggctgtccttacccacctggtggtccatatcctg

SEQ ID NO: 416264 - DNA, 75 bp, Homo sapiens
cgatgcaggggcctcaattaatgtatctggggacaccatcgccagcgtcaatggcctgaatgtggaaggcatccg

SEQ ID NO: 416265 - DNA, 75 bp, Homo sapiens
aaaagaaaccactgtaatcacagggactaccagaatatttcaagaaatgtatatctctctaccgggggaattgca

SEQ ID NO: 416266 - DNA, 75 bp, Homo sapiens
ctcagggctgcggccgcccgaagaggagagagcgcgggcctctaggaagccacataaagaagatccctaatagtc

SEQ ID NO: 416267 - DNA, 75 bp, Homo sapiens
gcctcggtgcagggctccaccccgtcgcctcgacaggttggcgtgcagtggtgtgatctcagctcattgcaacct

SEQ ID NO: 416268 - DNA, 90 bp, Homo sapiens
tcttgctgcaccgcagcagcccctccccaacccggtaaaatgtgggcgataattcctttcttacaaggtgtagatgcccctgatccaggt

SEQ ID NO: 416269 - DNA, 101 bp, Homo sapiens
gcccattgactttcccacatctgctgcctgtcaggctgttgcaggtgtctgcaaatccatattgggaaatccctaagtcagccaacccctcctcccatgcc

SEQ ID NO: 416270 - DNA, 100 bp, Homo sapiens
caagacaagaaggaaagaaagtattgggaataatgctgccctcccatcctcaagggccagtgggaactctaatattgaattctgcttggtcagaatcgtg

SEQ ID NO: 416271 - DNA, 97 bp, Homo sapiens
tctaagaaaatatcacaggcttggtttgcttgaatcaggatctcagcaaggcagctgccagacccggccatcgaggaccagggtggggagtacgtgc

SEQ ID NO: 416272 - DNA, 75 bp, Homo sapiens
tggagaatggcatgctggtgacggacagtgcagggaagcaactgcagagcatgtgtgcctggatgattgatagct

SEQ ID NO: 416273 - DNA, 100 bp, Homo sapiens
tgctttgcactgtacgatcttagcatcagcaggggcaagctctgtgtgattgattggaagacatcagagaaaccaaagccttttattcaaagtacatttg

SEQ ID NO: 416274 - DNA, 87 bp, Homo sapiens
gaggcgagccagagcctgcagtcccacacgatggtaattgcgctgcagaacaccaccacgaccagccgctacctgcgagtcctcccg

SEQ ID NO: 416275 - DNA, 101 bp, Homo sapiens
ggagatccatagggaggacggcggaacatctggaggctgggaaatggagcagctgatgagccagatccgggagacgcagcagctctgccaccagaccctgt

SEQ ID NO: 416276 - DNA, 86 bp, Homo sapiens
tatactcctcccagtgacgggtctggagtgcgtgggggaccggctgttggcggcaggttacgggcaggacttgagtggcttcggac

SEQ ID NO: 416277 - DNA, 100 bp, Homo sapiens
gaagagtcgacgtcggtgcttccagtgccaaaccaaactggagctggtgcagcaggaattgggatcgtgtcgctgcgtgattcgcctttgccagtctcat

SEQ ID NO: 416278 - DNA, 100 bp, Homo sapiens
accaagtgtctgggcaaaagcaagggccggaaatatcccgagatggacttggatgatggaatttttaagatgagcctttctccagatgggatgctcctgg

SEQ ID NO: 416279 - DNA, 90 bp, Homo sapiens
ctcacattcaagctgataggctgcgctaccggaatgtcatccagcgagtgattagagccccccaagatgaacccagtggtggagccactg

SEQ ID NO: 416280 - DNA, 75 bp, Homo sapiens
gtcgcagacatggacaccaaacatttcctgccgctcggtttgtggtaaatatgccagctctagaacacatgaatc

SEQ ID NO: 416281 - DNA, 102 bp, Homo sapiens
gccaaccgcaaccattgacgccatgtcgggttattcgagtgaccgagaccgcggccgggaccgaggactattgggaagaagttacctgcaactacagcaact

SEQ ID NO: 416282 - DNA, 82 bp, Homo sapiens
ggcgaacgcggagagcacgccatgaaggcctcgggcacggtttggtgcacctcgatttggaggaagtagggcagggccctta

SEQ ID NO: 416283 - DNA, 100 bp, Homo sapiens
ggctccagcgctcctgatctccgtgtgcagtacctccgccagatccacgccaaccacgaggtttggggacgacatccctggaatggaaggcctgggaaca

SEQ ID NO: 416284 - DNA, 83 bp, Homo sapiens
cagtgccctgagggccttcgagagctaccgcgccagacagatgtgaagttcatttccaatccgccctccatggtggcagcggg

SEQ ID NO: 416285 - DNA, 82 bp, Homo sapiens
tcatctcccgcctggacctgcacatttgtgatgatagccagtcccgagagccagggacctaatacctatcattgctgctctg

SEQ ID NO: 416286 - DNA, 100 bp, Homo sapiens
tcagtttcaaatttagacctgaccactggtgccaccttaccccagtcaagacttgttcgctgatatctaaattaagaagttggttcttgagtgaattctg

SEQ ID NO: 416287 - DNA, 98 bp, Homo sapiens
gctgcagcccgcgcacagctgctcccttcgccttcgccctttccacctcgcggcagttcgcgtgtccggagcggtgactggaaggggtacacaggcaa

SEQ ID NO: 416288 - DNA, 100 bp, Homo sapiens
ctgtacctgttttatacttgcttttgcttcagcgttctgtggttgtcaacaggtaagaatgattgatgttggctgatattggagtgctcattcacatgaa

SEQ ID NO: 416289 - DNA, 101 bp, Homo sapiens
cggtccccaccgtgcagcggggcatcatcaagatggtcacggtctagatcacattctcgatccagaggaaggcgatactctcgctcacgcagcaggagcag

SEQ ID NO: 416290 - DNA, 101 bp, Homo sapiens
tgtgtttggctgcccaggctcgcctcgactccaaatggttgaaaacagatatacaggtgcaaatatatacagagcttcataatcagcccaagaccacatag

SEQ ID NO: 416291 - DNA, 100 bp, Homo sapiens
attaaggactatcgggagaaagtggagtccgagctgagatccatctgcaccacggtgctgaaatgcactcggtgatggaaagagagccactattctgaag

SEQ ID NO: 416292 - DNA, 100 bp, Homo sapiens
cacatgattgggattgggccagtcttaaatatctacccatggaataaagagctgtatttgatcaggaaactttgaaaagcaccccaaagaactgatcagg

SEQ ID NO: 416293 - DNA, 100 bp, Homo sapiens
atcttgcaagactaaaattggccattaagtaccgtcaaaaagagtggactaaagaggatggacatagaacttccacctctgctgtccctaacctgtttgt

SEQ ID NO: 416294 - DNA, 83 bp, Homo sapiens
ggcggcggctgcggtcgaagaaggggacgccgacaaggagaactacgatgacccgcacaaaacccctgcctccccagttgtcc

SEQ ID NO: 416295 - DNA, 90 bp, Homo sapiens
cgacgcaaaccagccttcagcagtcggctacgaaacagcagcggaagtagccgggctttgtgccttgggcaaagggcagcttactcctgg

SEQ ID NO: 416296 - DNA, 75 bp, Homo sapiens
ctgaaacggattgccagagaattggcagaagccggagcagacagtcctcattgacaactgtcggcagcagtgcac

SEQ ID NO: 416297 - DNA, 88 bp, Homo sapiens
cgtggcgctcttcctctctcagctggtgttcgtgattgggatcaaccagacggaaaacccgggtgtccgcaatgttgccagtgtctgt

SEQ ID NO: 416298 - DNA, 100 bp, Homo sapiens
cagacggcgttttgcgcccaactggcctccggtgtggctgtctctgatggtgtcatcaaggtgttcaacgacatgaaggtgcgtaagtcttcaacgccag

SEQ ID NO: 416299 - DNA, 98 bp, Homo sapiens
ggaagacttcgagtgggtctacaccgaccagccgcacgccgaccggcgccgggagatcctggaggatgaagtttttgctgctgcagcagaagtaccta

SEQ ID NO: 416300 - DNA, 75 bp, Homo sapiens
aaggtgacccatgcattggttaatatcaggttcctaaaagtaaagctttagaggccaccaaattggcaattgaag

SEQ ID NO: 416301 - DNA, 90 bp, Homo sapiens
ggacaatgacaatgcggagacatctgccagtggatctccagacactttactaccatcaggtgaactgtcacccctacaactcagcttgca

SEQ ID NO: 416302 - DNA, 100 bp, Homo sapiens
cgaaggccctatcaggacatggagtatgaaagacgttccagaaagctgagtctgatctggattacattcaatacaggctggaatatgaaatcaagactaa

SEQ ID NO: 416303 - DNA, 99 bp, Homo sapiens
gcgatttcctctcagaagagtggagggagcgaatcgccaacacgagcctatggcgttggcctccttgtgacattcgtggcactggccctgatgcagcgt

SEQ ID NO: 416304 - DNA, 75 bp, Homo sapiens
atggatttgggtgagctggtgggaatgaccccagagattattcagaaggtgggatgtgtgtgggctgaaattccg

SEQ ID NO: 416305 - DNA, 90 bp, Homo sapiens
ccccttgcagaagacgccgtacgaggttagtggatgacagatgtgtggtgcacccagaggccggggaccttgccaaccctcccaagaagt

SEQ ID NO: 416306 - DNA, 75 bp, Homo sapiens
gtcacacacggtcctaagagctgggcaccaggaagcgaaggctggctcaagcacggacatcagtgaggactggga

SEQ ID NO: 416307 - DNA, 96 bp, Homo sapiens
ccaacaatggaggccagtggctggtctcaggaacagggcggatacctgaccaactcgtgatcctagacatgaagcatggagtggaggcgaaaaatt

SEQ ID NO: 416308 - DNA, 100 bp, Homo sapiens
tctttggcatcactgcagctagtaatttgccttctggattgatgatgatgctgaagctatccttgctgcagacttcgaaattggtcactttttacgtgag

SEQ ID NO: 416309 - DNA, 89 bp, Homo sapiens
gacgtgtttggagggaaatgggaatgtacacgataattaaagagtaaagttgtgctcaacgtcgactcctttacatctagcagcgggct

SEQ ID NO: 416310 - DNA, 90 bp, Homo sapiens
tgaagataagccaactttgaatttcttctatcaacagcctacaacacagcagtcccctcaggatgagcaggaaaagctcttggatgaagc

SEQ ID NO: 416311 - DNA, 88 bp, Homo sapiens
aagaagctggaggtcaacgaggccgagctgctgcggcgccgcaactttaaagtcatgatctaccagggtgactatgaccagagcagga

SEQ ID NO: 416312 - DNA, 82 bp, Homo sapiens
tctgggtctccaggcccgcgaccgtccgccagtcgtcccgagattcctggtcgggtggcttccagtggtcttcagtctgtcg

SEQ ID NO: 416313 - DNA, 51 bp, Homo sapiens
attaccatcagctgaagggaaaatgaaggcatctaataggattcaggaatc

SEQ ID NO: 416314 - DNA, 83 bp, Homo sapiens
caaggcactgctttttcatgacgattctttggatgggaagagaccttgaaaggacctctagtttatcctgcaactccagtcaa

SEQ ID NO: 416315 - DNA, 97 bp, Homo sapiens
tcccactgatgaggatcagcccatggagtcagagtattcatcgaaaagaaagcacagctaacacttttaggaacagaaatggactatgttgaagaca

SEQ ID NO: 416316 - DNA, 97 bp, Homo sapiens
cctcagcgactcttctgacctccgcgcgacgtacccgccgccgccgttggctggagccttatgccagcctggaccatcttggaggcagtgtaggatc

SEQ ID NO: 416317 - DNA, 89 bp, Homo sapiens
aggagaatgactccgattcgtgaccctcagcgccggtgcatgtcgatggactttgaacatgtcggggatcgccctcagcagactcgccc

SEQ ID NO: 416318 - DNA, 73 bp, Homo sapiens
agcagtgcttcgtggtgactgaaaaagctttctctcctttgaaaacactaagaataatgtcactgcatcagtt

SEQ ID NO: 416319 - DNA, 110 bp, Homo sapiens
gctacctcatgactattgcaccacgcccggggggacgctcttctccaccacaccgggaggggttgtagaaggtgatttagctgccatagaagcatacaagtcatcaggag

SEQ ID NO: 416320 - DNA, 75 bp, Homo sapiens
cagcttttgatatctaggaggactcttctctcccaaactgcaggtatgtttattcctaaaacgaggtgccaatca

SEQ ID NO: 416321 - DNA, 50 bp, Homo sapiens
ccgcgcccggccggacccgggcccgagagtgcctggtgaagaatgtgatg

SEQ ID NO: 416322 - DNA, 101 bp, Homo sapiens
aaacgaacctctatatccgaggactgcctccccacaccaccgaccaggacctggtgaagctctgtcaaccgagcttcagtttcagcgactcacccgagaac

SEQ ID NO: 416323 - DNA, 100 bp, Homo sapiens
ttctggcattctgttagacagtgaatgtggaaaggagattgacagtcacaattttgtaataaggtggtatcacggaaaacttgacagaacgatagcagaa

SEQ ID NO: 416324 - DNA, 50 bp, Homo sapiens
attttatgttgtgtcatttcgaaggattcgccatgaagtcagcgtaaata

SEQ ID NO: 416325 - DNA, 82 bp, Homo sapiens
ttaaagttgtcactccactgtcttacgaagtttctgatggtacaatgtcagtcaactggaagaatggctgcgtgacaagaat

SEQ ID NO: 416326 - DNA, 98 bp, Homo sapiens
ctggacatttatggctttgagattttcgagggtagtcaatcagtaccaagaattagtccagaatgaagccaaatgtccggtcaagatgtcacacagct

SEQ ID NO: 416327 - DNA, 100 bp, Homo sapiens
cccagtgtccctcgggctgacaagaaccacttcccaagacccacagtgcctggagaggacatggggaaggaagcaatgaggctccccaagaacacacctg

SEQ ID NO: 416328 - DNA, 100 bp, Homo sapiens
catcgtgggcgtccgcaagaccgggcagatctggcccaacgatggcgagggcgccttccatggagacgcaggagcggtggtgccccccccgggcacgggg

SEQ ID NO: 416329 - DNA, 82 bp, Homo sapiens
atgtggtggtgaaaaatgaccctgaactggaccagcaggatgggtttgtggagttcttccatgtagaggacctagaaggtgg

SEQ ID NO: 416330 - DNA, 75 bp, Homo sapiens
tttaactttgcattggttggacaccttttaaaagatcaagatcatctggataaagaaatagaaaaactgcggaag

SEQ ID NO: 416331 - DNA, 74 bp, Homo sapiens
gtggccgcgctccaggacctgagatacacctctgagagtggttttcaagatggcagcatctatgcatggtcagc

SEQ ID NO: 416332 - DNA, 101 bp, Homo sapiens
gcccggcaggcagccacggggtgcagtgcgcacacagcgcttctatgcagccacatcacggcaactgaagcggctggaatcagtcagccgctcacctatct

SEQ ID NO: 416333 - DNA, 73 bp, Homo sapiens
tggtgtccaaaagctgaaacaagccatgccatgcccattcgctccttgaccttttccccggactcccagctcc

SEQ ID NO: 416334 - DNA, 100 bp, Homo sapiens
caatcctggagctgctgttgcagcacttgttccccaaacaagtgctcctacattctgacgtccttctatggccgcttcaggcacttcttggatatcatcg

SEQ ID NO: 416335 - DNA, 88 bp, Homo sapiens
ttgtgatgagatattctgctgagtggaaggttctctccataaatgaagaagggctaaggcgatgcgaagagaatacaaaagtctttgg

SEQ ID NO: 416336 - DNA, 50 bp, Homo sapiens
attagggtgacgtgtgcattgagtaaacgatcagttcgacagcttagaca

SEQ ID NO: 416337 - DNA, 96 bp, Homo sapiens
ctgccggatagagtggctcacttgcatgtatttggaacaaaaaaaggagatgcctggcagccccgctctctgcaatgaagactggcccatttgcag

SEQ ID NO: 416338 - DNA, 51 bp, Homo sapiens
gaaacaaaatgtcaacaaattgatggggtgcttcaaggatgaccgcatcgt

SEQ ID NO: 416339 - DNA, 75 bp, Homo sapiens
agtatctcaaagacttcacttgacttcttgatcctgcataaaaccaaggaaggaaaatcacctcggcagtgtttg

SEQ ID NO: 416340 - DNA, 98 bp, Homo sapiens
acacgaaaaccacccagattggatgcctgctgcgcttggagccgaacctgcaagcccaggtgcagcggaactgctgcctgacgctctgcaacttcagc

SEQ ID NO: 416341 - DNA, 95 bp, Homo sapiens
agattactaccagggccggaggattaccatcaccggaaatgccatggacaatattaccaggcagaaccaattctacgatacccaagtcatcaaac

SEQ ID NO: 416342 - DNA, 100 bp, Homo sapiens
gcacgcacaatatcgggcagaaagataatcacgattggcgctgttccactggctgctttgggggctcctactcttgatcctgcccttgctgcacttgggc

SEQ ID NO: 416343 - DNA, 100 bp, Homo sapiens
ttgcctagtcgcggctacggcgtcatggaggagatccggcggcagggcaagctgtgcgacgtgaccctcaaggttgaaccatgccaatgttgtaaaggcc

SEQ ID NO: 416344 - DNA, 140 bp, Homo sapiens
ttgttgccataatcatagaggcaagtgggggaggagcgttccttgtcctccctctgcacaaggttgcactgctgtgatccatcctcatctcctaaagatgcatcctgacttatctccacacttgcacactgaagaatgca

SEQ ID NO: 416345 - DNA, 80 bp, Homo sapiens
ctcatggcccggctccttagcacctctccaggtgtaattgaaaagtgatcctctcttcagagatgtcaaaaacaaacaaa

SEQ ID NO: 416346 - DNA, 90 bp, Homo sapiens
gcacatacagctgcaagtggttcaagtggcctcgacctggaatcatttttctgataatgaggcagagcgggttaaaatgatggaagaagt

SEQ ID NO: 416347 - DNA, 82 bp, Homo sapiens
ggaggtcctgccgtccatgcggaagatcgtcgccacctggatgctggagcacggggtcactctggtgcccattgaggagttc

SEQ ID NO: 416348 - DNA, 90 bp, Homo sapiens
tggcttttatctgatattttaggccaaggagctactgcaaatgtctttcgtggaagacataagtgtgaaaaactcaaattactgtcttcc

SEQ ID NO: 416349 - DNA, 74 bp, Homo sapiens
cgacgtgcagcctggcagtgcagtggggaagaggctgctgggggtgacaggctcatccatgagcaggacctgga

SEQ ID NO: 416350 - DNA, 74 bp, Homo sapiens
ttcctcccttcgctcgcaccatgcgcaaatctgtccaaggctgcctggggagcattggagaagaatggcaccca

SEQ ID NO: 416351 - DNA, 74 bp, Homo sapiens
cggcgagatgcctttgttcaccgccaaccccttcgagcaagacgtgggacaaaactttcggtttgaagaataag

SEQ ID NO: 416352 - DNA, 100 bp, Homo sapiens
atactcatcttgtccagaactctgtcaaatgaagaacactttcaagaaccagagggtatattacctctctctggaattttacatgggccgaacattacag

SEQ ID NO: 416353 - DNA, 100 bp, Homo sapiens
ccgagccgagcctcccgccgtcgccatgggccagaacgacctgatgggcacggccgaggacttcgccgaccagccgagccgctgccgctcatggatttgt

SEQ ID NO: 416354 - DNA, 80 bp, Homo sapiens
tgtgtggcttcaagagactgatcaaattgtgagaggaaaacagcctacccggcgcctgtgtctggcagagctggtgtgag

SEQ ID NO: 416355 - DNA, 100 bp, Homo sapiens
gcctgaatggcgggaagtgtgaagcggccaatggcacggaggcctgcgtgtgacgcggcgcacggcgcggatggtggccgagtggcagtgtgtgggcttc

SEQ ID NO: 416356 - DNA, 90 bp, Homo sapiens
cggtgagccggaggagtcagtcagaggggcgagcaggagcgattccgtcgccaaacagaggcgtggagctatttcctatgacagttctga

SEQ ID NO: 416357 - DNA, 98 bp, Homo sapiens
ccatcgccaacatccgaggggaaactttcttcttcaaagaatggctgttgatggtgggtgtggggacactggagactgggaaggtcgctggaaccatg

SEQ ID NO: 416358 - DNA, 74 bp, Homo sapiens
cgcggcggagacgatgcctgagatcagagtcacgcccttggcgccgtggggaagacatgcttgctgatcagcta

SEQ ID NO: 416359 - DNA, 100 bp, Homo sapiens
acatcgatctggtctgtggtgatgatgaaaaccctagcgcctattatagtgatgaaaccacccctactcctaatcccccgactacagaagaggagaaaac

SEQ ID NO: 416360 - DNA, 75 bp, Homo sapiens
ggcggcggcggcagcgggtcttgggtcctccgagagcagcagcgagtttatagaaacctattcaccaaaatggca

SEQ ID NO: 416361 - DNA, 100 bp, Homo sapiens
gagccgcgccgcgcccggcgccccactccgcgcagcgggttgcctccgctccccatacggcggccccagaatgtggccccgtcccagagcaccacccgag

SEQ ID NO: 416362 - DNA, 83 bp, Homo sapiens
gagaaccagctcggaggacaacctgtacctggctgtgctcagggcctctgagggcaagaaagtggtacaggagctgcagcagg

SEQ ID NO: 416363 - DNA, 101 bp, Homo sapiens
ctgaactgagcgtatgtgccacgccgcccaggagacccctctgctgcaccacttcatggttatcaatactctggctgaccatcatcatcgtgggactgact

SEQ ID NO: 416364 - DNA, 100 bp, Homo sapiens
agagcagaacttggactgagtcctgcaggacacaggtgttttcgccatcagggtgtattggaggctgacacttaatgggtgtgtgttgcgcccagaactg

SEQ ID NO: 416365 - DNA, 101 bp, Homo sapiens
ttttcccttacatctcactaatgcttctctctctctcatctctccatccttagctaagcctggattcaaggacttcctcgttctgcccatcttcctaacaa

SEQ ID NO: 416366 - DNA, 75 bp, Homo sapiens
gcggagactgcatcaggctctcggtggctattatcatggaaaactaatttttcccagagaatttcctttcaaacc

SEQ ID NO: 416367 - DNA, 100 bp, Homo sapiens
cagcatgggacggctgggaggatccacagactggcgtctgccggcgtggacaccaatgtcagggtgcagcggaactgctgcctgacgctctgcaacttca

SEQ ID NO: 416368 - DNA, 74 bp, Homo sapiens
cgggccggcgagcgcgtcgccaccatggagcatcagatccatgctgctgctgactcggagccccacagcttggc

SEQ ID NO: 416369 - DNA, 88 bp, Homo sapiens
gattttgcattggatattcgcatgcctggggttacacctaaacaggtacagcaatcatttgaaactccaagggccaaagctcaaatgc

SEQ ID NO: 416370 - DNA, 88 bp, Homo sapiens
gcggcgcccccgcagcccgtcacccacctcatctttgacatggacggacttcttctggaggcggggtttcaccatgttgcccagactg

SEQ ID NO: 416371 - DNA, 100 bp, Homo sapiens
ggcgattccagagagcggcggaaaggataagcctcgacttagaagctaccgagttaccctaagaaagatatatttttgccatcatggatcagtttggaga

SEQ ID NO: 416372 - DNA, 100 bp, Homo sapiens
gacaccgcgagctatatctgcgcgtggagctgagtgacgtacagtactatactggcaattgctggagaagattttgcaattgttgcttctgatactcgat

SEQ ID NO: 416373 - DNA, 51 bp, Homo sapiens
gacaagggtccagcctccgataatatactgatgataatgctctgattccta

SEQ ID NO: 416374 - DNA, 97 bp, Homo sapiens
tggccaagaagctggtgtgcggagatgaaggagtacttctttgattccagagtattaacagatggagaactggctcccaatgatagatgttgccgtg

SEQ ID NO: 416375 - DNA, 100 bp, Homo sapiens
cgggacctcctggaagccaaaaatggtggatgaaagccaaactggagaacccggctggcttggaggagaattaaaaggaaagacagggtggttccctgca

SEQ ID NO: 416376 - DNA, 76 bp, Homo sapiens
gcttggtagcgcgccgtagctgcttccacgtccttgcttcacctcagtgaccaaagacttgaccactcaaagtcca

SEQ ID NO: 416377 - DNA, 88 bp, Homo sapiens
tcccggagtgtatgtctttggagaacttctggagctggccaacgtgcaggagacttaggtaaccctcagatgtcccagcagacttcat

SEQ ID NO: 416378 - DNA, 50 bp, Homo sapiens
ccggccgaaaggcgaggaaccggttctcccctggacccggcctccaccac

SEQ ID NO: 416379 - DNA, 76 bp, Homo sapiens
atgaaaccaggcgggtaaacatggtggacagaaagtcagcctcttgtgcttcctgggtctgcaggtccagccggct

SEQ ID NO: 416380 - DNA, 141 bp, Homo sapiens
actgccctggggcagctgaactgagcgtatgtgccacgccgcccaggagacccctctgctgcaccacttcatgggctgcgctggcctcggcacaccagtgccacccgctgccccggacgctgagcgtcctgaagagcacgc

SEQ ID NO: 416381 - DNA, 75 bp, Homo sapiens
cctgtgggtgctgggcctctgctgcgtcctgctgaccttcggcatccagcaagatgaggacatctatgaggaagg

SEQ ID NO: 416382 - DNA, 83 bp, Homo sapiens
agagagcctgcggaacctgcgcggctactacaaccagagcgaggccgctttgtgtccctggtgatgttggaacattaatgatg

SEQ ID NO: 416383 - DNA, 98 bp, Homo sapiens
gccgaagaagcatcgttaaagtctctcttcaccctgccgtcatgtctaagtcagagaattaaacaaccaccatgtcgagcaaaaaggcaaagaccaag

SEQ ID NO: 416384 - DNA, 101 bp, Homo sapiens
gagatggtcaagaagtctgaaagagtcttgagggaaaaccagtgtgcctacatcaatgccctttctaaggcacaaaatgatgtgatggaaatgaagatgca

SEQ ID NO: 416385 - DNA, 76 bp, Homo sapiens
accactctttgtgccgcagcttcgcagattctgctcagcaatcctcagatgtggtggttaaatgattccaatcctg

SEQ ID NO: 416386 - DNA, 90 bp, Homo sapiens
acaagatgcacctgtacggcctccacgaggggcagcgcgtgggcccggtgtccgccgtgggcgtgacagacggagtctcactctgttgcc

SEQ ID NO: 416387 - DNA, 90 bp, Homo sapiens
aagtgaaaactgaacccacagaagattctgcaaatcgcagtcttctccaggctgacaaggcgaagggcatggcttcgaagtgcaaaagag

SEQ ID NO: 416388 - DNA, 76 bp, Homo sapiens
ccccttctgcccggcgcttcggcccgggccgctcaggtgcagtttaaggaagaaatctctaaacgttttaaatcac

SEQ ID NO: 416389 - DNA, 75 bp, Homo sapiens
cttcacccagcatttcatccctcgtcgaaaggattggattggcatctttagacttttagaggaacttgataaaac

SEQ ID NO: 416390 - DNA, 50 bp, Homo sapiens
cgaaggtctcccagatggtctaaggtgaaaaaccatacaagtgtcaaatt

SEQ ID NO: 416391 - DNA, 101 bp, Homo sapiens
ctctttggggtggctctttgctaagtgctgctgttgcttcccgtgtagagaaacttgtggtggagaatgttgatgtgttaacacaaatgaggaccagcttt

SEQ ID NO: 416392 - DNA, 87 bp, Homo sapiens
aaccccgaggagccctgttccaaagcctcctggaccgtccaagaagccctgggcatgttcagcgcagccttggcctcggggcagctg

SEQ ID NO: 416393 - DNA, 83 bp, Homo sapiens
aattgatgacggagaagttttatatttggtacattactatggatggaatgtcagacttcattagaggggtggtagactcggag

SEQ ID NO: 416394 - DNA, 83 bp, Homo sapiens
gccgccgccgccgccatgaacaactcgggcgccgacgagatcgggttagctttatacgtctacgaatatttactgcacgtagg

SEQ ID NO: 416395 - DNA, 83 bp, Homo sapiens
cgacgtcgtgatccagaagtccagagctgaggactgcctgtttgcagcaggaggccactgtctgcagctcccgtgaagatgtc

SEQ ID NO: 416396 - DNA, 76 bp, Homo sapiens
gaaagagactcggtgacagatacagacccaacatgagtgaagtttcctgcaagaaacgggacgactatttggaatg

SEQ ID NO: 416397 - DNA, 121 bp, Homo sapiens
attaaccttacgtggagttatttcctgcatttcctcctttcgtctttacaaggtagccgtttggcgtcgtgaggttatcaatactctggctgaccatcatcatcgtgggactgactttggt

SEQ ID NO: 416398 - DNA, 75 bp, Homo sapiens
tcagttggaagcagccgatccagcctgcggagcctgtggggcaggaggctctgtcggtggtgagcgacgaccagt

SEQ ID NO: 416399 - DNA, 82 bp, Homo sapiens
tcgcctcccggccgagctgacggtacgaggaacagcaaattcaggaaaaagtggcgacctttcgactcatgttgctggagaa

SEQ ID NO: 416400 - DNA, 100 bp, Homo sapiens
ccgtccaggctgtgtatcaaaagatcttcagtcgtgctggtgaagcctgcaaaaaggtgatacttaatgtaccttctaaactagaggcagacaaaataat

SEQ ID NO: 416401 - DNA, 75 bp, Homo sapiens
ccggatgagcgcagcccagagacagcagcttctaaggaagaggcccagcagaagggactcgctgagccacccccc

SEQ ID NO: 416402 - DNA, 90 bp, Homo sapiens
ccctccccgagctggcccagcacaagagctagagccggtgcaggccacgcagaacaagacagggaagtatgtgccgccgagcctgcgcga

SEQ ID NO: 416403 - DNA, 100 bp, Homo sapiens
cttgcctgtgcgcgcgtgcgcggacatggcctcaaacgcaagagtgagccatggagctacgtgtggggaacaagtaccgcctgggacggaagatcgggag

SEQ ID NO: 416404 - DNA, 100 bp, Homo sapiens
atgaacgccttgttgcccagttccccagttctggcagattctggaaactgtacattgaagcagagtatccggagtgtgatgcagaagtaccttgcagaga

SEQ ID NO: 416405 - DNA, 82 bp, Homo sapiens
tcgacccaggaatcactaccaccatcccaagacataccagcaatttttagagaagacatatctgaagagatggattaagaat

SEQ ID NO: 416406 - DNA, 82 bp, Homo sapiens
cgctgagtggtttttcggatcatgtctggtggctccgcggattataacagatcaggagaacctcagtctgacgacattgaag

SEQ ID NO: 416407 - DNA, 78 bp, Homo sapiens
gacagctagctgcttatggctataaaattacaggcagcagtacctgtccaaagatcgctttagttccaccttgctcca

SEQ ID NO: 416408 - DNA, 82 bp, Homo sapiens
gacggtacttctgccactgctgctccgtggagatcgtcccgcgcctgccgattttgcaagaacgaggctcaaggatgtgagg

SEQ ID NO: 416409 - DNA, 100 bp, Homo sapiens
cggccggtgccagcacctttcggcttctgagacggcggcagcagcggcattcagttcagaatgaccgaagaagcatgccgaacacggagtcagaaacgag

SEQ ID NO: 416410 - DNA, 100 bp, Homo sapiens
cgagagtttgcgctacgctgagtacttgcagccctcggccaaacggccagacgccgacgtcgaccagcagagactgaatgccagctgatgaagaccgaga

SEQ ID NO: 416411 - DNA, 100 bp, Homo sapiens
ccgcccgcggcaaacatggcggtggactcggcgatggagctgttatttttagatacttttaaacacccgagcgctgagagttagagaaggaacggcagcg

SEQ ID NO: 416412 - DNA, 100 bp, Homo sapiens
ggcagcgcagccagtgcggatgcggacgcgggtcctgtcactgcagaatcaggaaacccaggcccaacggcaggtggatgcaagaagaaatgttccccaa

SEQ ID NO: 416413 - DNA, 95 bp, Homo sapiens
gtgcatccttggcagaaagtgaggaggaaaacacccccattgctgctgatactttggctgtgaggcaaaaaaggagaatttatgatatcaccaat

SEQ ID NO: 416414 - DNA, 82 bp, Homo sapiens
cgccgctctagcggccgggactctgaactatggcggtgacctgagcatctctgcagaccgcctgagtgagaagcgctctccc

SEQ ID NO: 416415 - DNA, 75 bp, Homo sapiens
agtccacccaccgccgccgcctcccagtttttgaaatcatgaatcctgtttatagtcctggatcttctggggttc

SEQ ID NO: 416416 - DNA, 101 bp, Homo sapiens
gctctgactactgtaagatcgctgagcagctgggtgacggggatgaaggaaccattaaagagatcctggggactgcccagtcagtgggctgtaatgttgat

SEQ ID NO: 416417 - DNA, 83 bp, Homo sapiens
caggagagtccggccgcgacaggacggcagaagctctccggaggatccaggtggtgcatgcatttgacatcttccagatgctg

SEQ ID NO: 416418 - DNA, 90 bp, Homo sapiens
gagtcccaaaagacagctccagttttacaggtcacccgtgtgaacagaaagtgagaggttgtagcacattgccaccgtccagatctcggg

SEQ ID NO: 416419 - DNA, 99 bp, Homo sapiens
ttacaggacacacagtgtatgctaattgcacaccacaaaccaggctctggagatgataaaggaagcctgtctttgtgatcaagcaccccaacattgtag

SEQ ID NO: 416420 - DNA, 75 bp, Homo sapiens
agggggaagtagagagataacaaaagctgctcagagtctcaatgaacttggttgttgaggcatcttcattaagct

SEQ ID NO: 416421 - DNA, 100 bp, Homo sapiens
tcgaaccaggaagcagctctccaagactagtctcttccaaggaagatcttgcagatattggctccaataattgtggatactatgacttacaagcagtact

SEQ ID NO: 416422 - DNA, 51 bp, Homo sapiens
gcattcttctcagagaactggagaaggcatttgcaagtaaaatcactggca

SEQ ID NO: 416423 - DNA, 75 bp, Homo sapiens
caccgcgccgcatccatgttcgagcagaggcaaggctggcagcaaaacgggctgcccgggcagaagcaagagata

SEQ ID NO: 416424 - DNA, 50 bp, Homo sapiens
gccgcgcagccctcggagcacggtttggtgcacctcgatttggaggaagt

SEQ ID NO: 416425 - DNA, 74 bp, Homo sapiens
gcgggactgtgatggccagagagatgacgatcttagtggaagacaagcattccagtgatgccagtagtttgctc

SEQ ID NO: 416426 - DNA, 101 bp, Homo sapiens
cctcagctgatggaagtttccgctccagcagtacccgcggctacgggaggagatggagcgcatcgtgaccacccacatccgggagcgcgagggccgcacta

SEQ ID NO: 416427 - DNA, 82 bp, Homo sapiens
atgaggcccaggccgacctggcgctgcggaggtgtactagccctctcttggtacccacctgatgtaaatgatgaaaatggag

SEQ ID NO: 416428 - DNA, 95 bp, Homo sapiens
tcatcatgaaggacgtgcccgactggaagccagctgaggtgggtgtcctggttggcaaagaccggtcaagtttttacgtgaatgggctgacactt

SEQ ID NO: 416429 - DNA, 100 bp, Homo sapiens
acatccaggctggtcagtgtggcaaccagatcggtgccaagaacgtgaagctcttggagcaatttgtctgcgcccacacgggtatcatcttctatgctcc

SEQ ID NO: 416430 - DNA, 96 bp, Homo sapiens
acgcgaattggagaaaaagttcagtgggaagcatgtcgtctttatcgctcagggtgaggacgcttgagcggaagttagaagcaaaaatgatcaagg

SEQ ID NO: 416431 - DNA, 100 bp, Homo sapiens
gcggcgaggaggggaatttccttgtgcctccattcccgggaggggggagcggcgttggaggccaccgtttccagaattaaacaaccaccatgtcgagcaa

SEQ ID NO: 416432 - DNA, 100 bp, Homo sapiens
tatgaagcccttcaccaacaaagatgcctatacttgtgcaaatgtgttcagagcaacattgttttgttgacacaagcatttagaagaaagtttgtgattc

SEQ ID NO: 416433 - DNA, 82 bp, Homo sapiens
ggaagcatgagctgtatgtgagtttccaagacctgggatggcagcgttacagtgtttctgccacctctgtacaaaagacaat

SEQ ID NO: 416434 - DNA, 82 bp, Homo sapiens
gcccgcgtctgccgcccacgtacatgcacgccatgtgggcaacaggtttgtctatgctggctctaactcgggcgtggtccag

SEQ ID NO: 416435 - DNA, 100 bp, Homo sapiens
cggaccgggaccaggaccgggccccactttccaccctgaaacatgtatctgatgacatgaagactcacaagaaccctgccctgaaggctcagagtggtcc

SEQ ID NO: 416436 - DNA, 100 bp, Homo sapiens
tgctgtctctagcatcacctctcagcacgattttcccgagagttcacaggtgaaagaacttgtcctggacaacagtcggtcgaatgaaggcaaactcgaa

SEQ ID NO: 416437 - DNA, 100 bp, Homo sapiens
ctgcctcagcctcctgagcagctgggattacaggtgctgctgatgtagagaaggtggaggaaaagtcagcaatagatctgacccctattgtggtagaaga

SEQ ID NO: 416438 - DNA, 90 bp, Homo sapiens
cataaatgagggcctctgagttaggaaagaaagttcgtcgctgcttcctgtgctccaggagaggacatctcctgtattcctgtccagccc

SEQ ID NO: 416439 - DNA, 50 bp, Homo sapiens
ctacagagcggcctgcgccagcgagcattctgaaggcaaatcctgtttag

SEQ ID NO: 416440 - DNA, 100 bp, Homo sapiens
ctgggaaccttggtggaggggtggtgaccatcgaaaggagcaagagcaagatcaccgtgacatccgagctctcggatacagccgacaccatgggtttcgg

SEQ ID NO: 416441 - DNA, 75 bp, Homo sapiens
ccggatccagcatctctccaccatcgactacgtggaggacggtgagatcaaattgggaatgctttcataatgaac

SEQ ID NO: 416442 - DNA, 87 bp, Homo sapiens
tttcctcatcatcaaggatcaggaccgcaagtcccgtcttatgggacttgaggccctcaaggccctggccaacgtcaacattgggag

SEQ ID NO: 416443 - DNA, 113 bp, Homo sapiens
taagcctttggtcataatcgctgaagatgttgatggagaagctctaagtacactcgtcttgaatagtgccaggtggagctcaacaggaaagtcctagcggatctggccatcta

SEQ ID NO: 416444 - DNA, 100 bp, Homo sapiens
ccggcaggtgagaggcggatctacagacatagtggacatcctcatcatggatgatgacgacgtccccagctggcctcccaccaagctgtccccgccccag

SEQ ID NO: 416445 - DNA, 114 bp, Homo sapiens
tgttaaaggaacctctacaacgaaggtgaagccacggaagataagggtctccctccactgctgtagtaacccgggtccggggcctcggtggtgctcctgatgcccctcacccac

SEQ ID NO: 416446 - DNA, 75 bp, Homo sapiens
gggcaggcctagtttgactctgacagtcctcccactaaggtgacaaaccgatacctgtcccagctgaaggatgcc

SEQ ID NO: 416447 - DNA, 113 bp, Homo sapiens
ggcgttcaagcgaaaacatgaccgctgagcccatgaggttccagcaacagatagaaatgctttaagttcactctggggaaagctggcctctgaaatcttaatgcagaattggg

SEQ ID NO: 416448 - DNA, 101 bp, Homo sapiens
gctgctcgcacgggagccagctgggtgtggatgaggatcgcagtacggaacctgaccgattgcaggtgtttcacaagagagccatcatgccttacggtgtt

SEQ ID NO: 416449 - DNA, 50 bp, Homo sapiens
ccagtacacagacgagcatggggaagcaaggtttcgataggaacatgctg

SEQ ID NO: 416450 - DNA, 75 bp, Homo sapiens
cggatgttgtgagccgggtcgctgcggccgaggctccggtgtccacaggatgaaatgtccgagtcaggccagtcc

SEQ ID NO: 416451 - DNA, 75 bp, Homo sapiens
gcgagctcacccagcaggcgctgcagcggtacctgaagacccgggagaaggaattggcagcaatgaaacagattc

SEQ ID NO: 416452 - DNA, 82 bp, Homo sapiens
aagagattcagccagcacactcctcgcgagcaagactgtgccctgtccacggtgcctcctgcatgtcctgctgccctgagct

SEQ ID NO: 416453 - DNA, 100 bp, Homo sapiens
tgtcatgaggtcactgggtcagaacccaacagaagctgaattgcaggatatgatcaatgaagtggatgctgatgctaatttcttgagatagaggacagag

SEQ ID NO: 416454 - DNA, 75 bp, Homo sapiens
aggtagccctggacggcattcagtgttttggatagaatttttgcggcatttgaagagctttttccagattatgtt

SEQ ID NO: 416455 - DNA, 75 bp, Homo sapiens
ccatggaccccaggaatggttacatggagccccactaccctctccgaacagcaggatttcccaacggcagcttgg

SEQ ID NO: 416456 - DNA, 83 bp, Homo sapiens
ttcgggacagctctctagaaactcgctctaaagacggaaccgccacagcactcaagtctcctctgagcctccggcctccataa

SEQ ID NO: 416457 - DNA, 74 bp, Homo sapiens
ttcagtgctttggcctaactcgaagtggtgccgctaagagttgctggagaatgtaaccctaatccataaaccag

SEQ ID NO: 416458 - DNA, 100 bp, Homo sapiens
ttgccggtctgggagttgggggcaaggagaagatcctgcctccatcttccaagaagagcgatggttctgggacatatactaagttgcagaatacccaggt

SEQ ID NO: 416459 - DNA, 83 bp, Homo sapiens
cggcccggcgcggcccagcgccctcagctcaccatggatgatgatatcgccgcgctcgtcgtcgacaacggctccggcatgtg

SEQ ID NO: 416460 - DNA, 101 bp, Homo sapiens
cgctgctggccctcgggctgcgggagccgggctaggacgccgagcggtgactccccgccgctcccgggggccgtgacgtgaaagagtttctagccaaagcc

SEQ ID NO: 416461 - DNA, 75 bp, Homo sapiens
gagtcatgtggcagtggaaaatgcgctcgggctggaccagcagagcggttctggtgaggttggaaggatgcagcc

SEQ ID NO: 416462 - DNA, 100 bp, Homo sapiens
ataaaagagccctgcaatttgaagatacatgagacagcagccaaacccccagtagtttatgccaacgtgacttcattcatacagatgaaccaaggatcgg

SEQ ID NO: 416463 - DNA, 75 bp, Homo sapiens
gaggaacataaaattgaaacatggaggggagagagctctgttagcagaatgaaaaaattggaagccagattcagg

SEQ ID NO: 416464 - DNA, 75 bp, Homo sapiens
aagcagtatagatctctatttctatgtgattggcagctcctatgaaaatgagagtcttattctgttgcccaggct

SEQ ID NO: 416465 - DNA, 100 bp, Homo sapiens
cggagcgtctgggatgcgctgggagcctaggatccccgacaggtcatgtccaaagtaatggagatgttccagcctagtgcggtggtcttacagtgtggct

SEQ ID NO: 416466 - DNA, 83 bp, Homo sapiens
ggttagcggagcaatgcgcaggaataaggaagcgacctgcaaccgacgctattgttaaccgtgatggcacccgctatgtccag

SEQ ID NO: 416467 - DNA, 80 bp, Homo sapiens
tgggactgtcactgctggagaagctgatctcccagccatccagccccggctagtggcggtcagcaaaaccaaacctgcag

SEQ ID NO: 416468 - DNA, 88 bp, Homo sapiens
tcctcctggccttggttggggaagtgggggagctggcagaactcttcaggaggccactgtctgcagctcccgtgaagatgtccactcc

SEQ ID NO: 416469 - DNA, 102 bp, Homo sapiens
gataaaggaaaggaagaaatgcaatttgctgttggctggagtggttccttaaatgtcgaagaagggttggatggcaagcatgtggtgtttggcaaagtgaaa

SEQ ID NO: 416470 - DNA, 82 bp, Homo sapiens
ggagctctgaccgaggcgcctcgctggggcggggaccttgccttgcccggggtcatcttccacgatgttgctgtgctgacgg

SEQ ID NO: 416471 - DNA, 100 bp, Homo sapiens
cgcacatttgacttggaagcaatgtttgaacaaactcgaagaacagctgtggaaagaagttgcaaaacactggatctccaagaaggagaagcttctctcg

SEQ ID NO: 416472 - DNA, 100 bp, Homo sapiens
ccagttttctacaattgagtacgtgatacagctgtcaaagctcgaaaaacagcagcagaggaaagaaaagaccagagctaagggaccttctgaatcaagc

SEQ ID NO: 416473 - DNA, 74 bp, Homo sapiens
gagcggccgcgagcagagccgcccagccctgccagctgcgccgggacggacctcagcagccatgtcgaagcccc

SEQ ID NO: 416474 - DNA, 100 bp, Homo sapiens
gcagctaatgaagcccagcttctgaggaaaattcagttgttgtgcctcatggagtctcaggggccagccaagcccccacccccaaggaagccactgcctg

SEQ ID NO: 416475 - DNA, 80 bp, Homo sapiens
cgagtccggtctcaaaatggagcaatggctgccatccggaagaaactggtgattgttggtgatggagcctgtggaaagac

SEQ ID NO: 416476 - DNA, 75 bp, Homo sapiens
ttccttccccctcggaaaatggttcccactgccgggcgagaccagatgatgtgcttctgcatcgcactcatgatg

SEQ ID NO: 416477 - DNA, 83 bp, Homo sapiens
gtacttctgccactgctgctccgtggagatcgtcccgcgcctgccgcgggctgacgcacgaggcacacaggaaggaggtggag

SEQ ID NO: 416478 - DNA, 100 bp, Homo sapiens
ccaggccaccacgcagggacagctgaaggagcagctctaccaggaaatcatccactacttcgacaaaggcaaggcttctagtgaggacgttgccagctcc

SEQ ID NO: 416479 - DNA, 82 bp, Homo sapiens
ctgagctgcgaggaaaatggcggcgggaggttcgagaacttgtcttggacaattgcaaatcaaatgatggaaaaattgaggg

SEQ ID NO: 416480 - DNA, 87 bp, Homo sapiens
ggaggcttgggcttgcgccgttgaaggtactccaaagattcaggtttactcacgtcatccagcagagaatggaaagtcaaatttcct

SEQ ID NO: 416481 - DNA, 75 bp, Homo sapiens
gccagccgcaagagtcaggagaagccgcgggagatcatggacgcggcggaagaaattgacaatggcccttcagct

SEQ ID NO: 416482 - DNA, 75 bp, Homo sapiens
gacgaggctgtgacgcaccttgatgaccagatcctgcagctcacaggtgaggtccagagatatatccagagagga

SEQ ID NO: 416483 - DNA, 75 bp, Homo sapiens
cgcctggctccccatactagtcgccgacacgatgaggcgagtggtacgacagagcaagtttcggcatgtatttgg

SEQ ID NO: 416484 - DNA, 100 bp, Homo sapiens
tctacacgtggctgaccctgtggaggctgtgctgcagctccaggactgcagcatcttcatcaagatcattgacagaatatggagcagcatattgtatggg

SEQ ID NO: 416485 - DNA, 80 bp, Homo sapiens
aggccctagaggcagcccatgggcctgggcaggccaaccaggatgttgacaatgcgtctctggcacgtcttgaccttgaa

SEQ ID NO: 416486 - DNA, 80 bp, Homo sapiens
tcggtctcctgttgctcactttcctgggtattgtagccgctgtgcttgtcaagccgattagctatgatgtcttcaagctg

SEQ ID NO: 416487 - DNA, 100 bp, Homo sapiens
ttccttgaagaaatacagcttggtgaagagttactagctcaaggcccacacaggaccatgaaggtgcttctcctcacagggctgggggccctgttcttcg

SEQ ID NO: 416488 - DNA, 98 bp, Homo sapiens
attcatacgcagctggcagatattatcatagttgctgcagtctctaacgaagtgccggagcacccatgtgtatcccctgtctctaatcatgtttatga

SEQ ID NO: 416489 - DNA, 82 bp, Homo sapiens
ggaggggccccagcagcccccgaaggccctatcaggacatggagtatgaaagacggtggcagtgctccttttggacttttct

SEQ ID NO: 416490 - DNA, 75 bp, Homo sapiens
attggatcaaacatgtcacaagagtcggacaacactcctgtaggaggcctgctgatggcatttcagaagtactct

SEQ ID NO: 416491 - DNA, 80 bp, Homo sapiens
cacgaggcggcgggctggagacatggaccgcggcgagcaagaattcagaaggagctggcggacatcactttagaccctcc

SEQ ID NO: 416492 - DNA, 75 bp, Homo sapiens
ctgatcgaccctattcgagtggtgcagggagatattggagaggagactacctaggtggagaagcgtactgggccg

SEQ ID NO: 416493 - DNA, 100 bp, Homo sapiens
ggatagagaccaaaatcatactttgaagtctcctctgagcctccggcctccataagacccaaaacagatgacacctcttcccagtcccccgcgccttccg

SEQ ID NO: 416494 - DNA, 50 bp, Homo sapiens
cctcttgagtagctgggattacagctaccgagtctattgcttgctgggag

SEQ ID NO: 416495 - DNA, 73 bp, Homo sapiens
gcaaacccggaagcggatcgggtggagtgaaggtcacgtcgccatgacgtagctgggtgcgaagaatcaaatt

SEQ ID NO: 416496 - DNA, 90 bp, Homo sapiens
actttgttggttgcatctgctaaagaggatcctgccaacattttacagatattgatgagtgtgcagctaagatgcattactgtcatgcca

SEQ ID NO: 416497 - DNA, 100 bp, Homo sapiens
ccccggtccatggtggtcatcgaggtgttcacccccgtggtgcagcgaatcctcaagcataacatggatggcatagtcaatccaacaataagaaaagatt

SEQ ID NO: 416498 - DNA, 98 bp, Homo sapiens
gcagaagtggaagcaacttctatttagtgatcatgcagatccagtttgctgaccagaagcaagaattcaacaaacgtcccaccaaaattggacgtcgc

SEQ ID NO: 416499 - DNA, 100 bp, Homo sapiens
acagaggtgtttacccccctattcaagttcatgtcacgctgggtaatgaggatttgactgtgaaggatggtcttgttaatgtaggatggatggactgtgc

SEQ ID NO: 416500 - DNA, 50 bp, Homo sapiens
ctggacccggaccggttttggtcataccatgggcagttttaccgggacca

SEQ ID NO: 416501 - DNA, 75 bp, Homo sapiens
atgatgatgtgaaaacagaagctgtggctatttgataatgggctgcattaaaagtaaagaaaacaaaagtccagc

SEQ ID NO: 416502 - DNA, 75 bp, Homo sapiens
tttatgctgaaaaggtggccactagagctcctggggagatcttttacctgtgcttactccgtctgcgtttcctcc

SEQ ID NO: 416503 - DNA, 75 bp, Homo sapiens
agatgaagcctaagaatatgatcagtggaggccatagtggagtttgactaccaggcccagcacgatgatgagctg

SEQ ID NO: 416504 - DNA, 99 bp, Homo sapiens
caagagccctgagctgccacggatactgagctgactgccgtccacctcgtggattctcactactgcacagaccctgccaagttcatttcagtactgtgt

SEQ ID NO: 416505 - DNA, 51 bp, Homo sapiens
ggcgcctccggcccatttacgaaaaagcttgtggtgaaggggggcaaaaaa

SEQ ID NO: 416506 - DNA, 87 bp, Homo sapiens
caaaatgtccctgaaaaattagaagtcaccaggagactaaagtccatcaaaaacatccagaaaattaccaagtctatgaaaatggta

SEQ ID NO: 416507 - DNA, 83 bp, Homo sapiens
ctcaacctcgcctatgtgggcgccgtccctcaccgcggcatcaagcaggcgtccgacctccgatcatgaacgggcccctgcac

SEQ ID NO: 416508 - DNA, 75 bp, Homo sapiens
ggaggcggaggttgtggtgagccaagctgggacgatgccggagtgtgaaggagtttgagaagctgaaccgcattg

SEQ ID NO: 416509 - DNA, 75 bp, Homo sapiens
acttctgtttacatggaactcagacatctgcaaatcatggtgtggacactgccagcggctgcagccgacttggaa

SEQ ID NO: 416510 - DNA, 90 bp, Homo sapiens
ggaaaacatcgtggccaacacggtcttgctgaaagccagggaaggttcaagtgctggggccggcagtggagagttccacgtgtacagaca

SEQ ID NO: 416511 - DNA, 80 bp, Homo sapiens
cttgtgacaaaactcacacatgcccaccgtgcccagcacagccccccagcgtgtccctgttgcctccccatccgcccaca

SEQ ID NO: 416512 - DNA, 87 bp, Homo sapiens
gtattggccaagaagagagatcctgtttctcacatttgtttcattgaagaaatagttaagatatggctcgtggacagcagaaaattc

SEQ ID NO: 416513 - DNA, 90 bp, Homo sapiens
aaagttgcgaatctactgtgacccagaacagaacaaccgggagacagcatgtgagattcctggattttttgtgatggacgcctctgaccc

SEQ ID NO: 416514 - DNA, 90 bp, Homo sapiens
ctgaggtccagatgaaagagaagtttctggtcactccccaggattatgcgcggcaatcgctcctttgctggaaaacaaccacccaccacc

SEQ ID NO: 416515 - DNA, 90 bp, Homo sapiens
acgggaggctttaccaccggagctgcttcagggtcctgccctccggaggagcagcctcgaggctggtggttttcagagcaggaggccgac

SEQ ID NO: 416516 - DNA, 75 bp, Homo sapiens
gtcgcacccagcgacaggccgctgcaattgccatgccttgctttccatgacatttcccctcaagcaccaacacat

SEQ ID NO: 416517 - DNA, 100 bp, Homo sapiens
ttgcatcagaggactcactcgactccaaagagagcgtcccagcttctttgaaagagggcaggctgctcctgcgtttggtggatgatttcttgttggtgac

SEQ ID NO: 416518 - DNA, 100 bp, Homo sapiens
ggataccaaatagcagtggaaaccgaataccctctaccatctgctttggtcagggtgccgctcgaggatttaaaagcaacaagaagaaaaccaaacaatg

SEQ ID NO: 416519 - DNA, 75 bp, Homo sapiens
ccttccgctattcagcagagagctattattccctgtattaaaggtgtgatgaatgcagactctgctaccattttg

SEQ ID NO: 416520 - DNA, 100 bp, Homo sapiens
cagaggctaagaaggtggagaccggagaagctgtgaggtttactgaccaagtgccaggaagaggtcagccacatccctgctgtccacccgggttcattca

SEQ ID NO: 416521 - DNA, 98 bp, Homo sapiens
tcatgtggccatcttgagtctactctgtcgctcttgtgccctagcaccccgagaaccgtcagtttgagccagatgttactccacaggatccgctgaac

SEQ ID NO: 416522 - DNA, 98 bp, Homo sapiens
cgtgcatgaaccaaacccacttcgttcaagacaggtgtttaagcagctgtaggtaaaacttgcctactgatcagttacacaaccaatgcatttcctgg

SEQ ID NO: 416523 - DNA, 90 bp, Homo sapiens
ctacggccgcctcagcagccggctgcaggccagagagggcctcgggaagagatgcgaggatgacaagcattggagaaaccaatgtagaaa

SEQ ID NO: 416524 - DNA, 83 bp, Homo sapiens
gaggttttcaggaccaaaattgtggaaaagtcactctggatgacgtagctttgccaaagacttagaagctaagcagaaaatga

SEQ ID NO: 416525 - DNA, 75 bp, Homo sapiens
gtacctcataagccatagcttcagatttcctgttccccatcgatatttccttggtcaagagagagcatgattttt

SEQ ID NO: 416526 - DNA, 100 bp, Homo sapiens
gtcgaatccagtagaaaactggtcaaggaagcttttgggcttcctgtagacacccttttcctgcgcaacagagctgggcctccctttctctaatttcccc

SEQ ID NO: 416527 - DNA, 100 bp, Homo sapiens
gcaattttgagagagttttgggaaaggccaactgtgcaggaagatggaggggatgtaatctacaaaggctttgaagatggcattgtacagctgaaactcc

SEQ ID NO: 416528 - DNA, 82 bp, Homo sapiens
gtatctgctctcctgaaataattctggagtcatgcctgaaatgccagaggacatggagcagaacctaaaggcagacccagaa

SEQ ID NO: 416529 - DNA, 97 bp, Homo sapiens
gaacagagcaagatctgtatgttcgcctcatagattcaatgaccaaacagatgctcaagtccatgtgtgccgggcagaggctagcgagcgagcccca

SEQ ID NO: 416530 - DNA, 98 bp, Homo sapiens
cggggaggcagcgcgggatcccagcctcaggcgtgcgcggacggtgtgcgggtgactgtccatgttcacggccaggaagtcctgtcagaggagacggt

SEQ ID NO: 416531 - DNA, 75 bp, Homo sapiens
cacaacacagggaagcttggggaggaagtggtcctgtactgcttagagaacaagatttgtgatgtaaatcatcgg

SEQ ID NO: 416532 - DNA, 83 bp, Homo sapiens
ctggacaacaccatggaaatatttgacattgagtttgaaggatgacctctaggaagaaagtgttgctgaaggttatcatcctg

SEQ ID NO: 416533 - DNA, 75 bp, Homo sapiens
gcatctctcgggagccgcaaggcgagagctgcaaaggtgagcacctgcggatctgtccccagggctacacctgct

SEQ ID NO: 416534 - DNA, 83 bp, Homo sapiens
tgaatccacatagagaaagtgatgggaaatatcgacagtatatggcaggacttctggctcctccttatggtgttatggaaacg

SEQ ID NO: 416535 - DNA, 50 bp, Homo sapiens
caaggcactgctttttcatgacgctgcggttggatttctcacgatgtcca

SEQ ID NO: 416536 - DNA, 100 bp, Homo sapiens
ccaccgccgctgccccggctgcctcctccctgagggccccgtggttatgaatgtgcttcagtttcataatgcctcctgctatggcagacatccttgacat

SEQ ID NO: 416537 - DNA, 100 bp, Homo sapiens
ggtgaacaacccgttcttgcctcaggccagtcgcctccaggccaagagggatccttcacccgtgtctgttgggacccctgattttagcaggatggcccaa

SEQ ID NO: 416538 - DNA, 98 bp, Homo sapiens
aaagatatggactccagttatgcaaaaagagggctgcgaataaaggagaccaaggaagtttatgaaggtgaagtcacagagctaactccgtgtgagac

SEQ ID NO: 416539 - DNA, 100 bp, Homo sapiens
ccattccagaaagatggcatcatttttgccctcaaaagaaatggcagggaaaaatatttacttccttggagccagagcatgaccttaatgatgtttgtct

SEQ ID NO: 416540 - DNA, 100 bp, Homo sapiens
gggaagcgccctggagagaggagagaaaatgtccactggacctctgtccaggtgtcatggagaaactccagctgggcccagagattctgcagcgggaaaa

SEQ ID NO: 416541 - DNA, 97 bp, Homo sapiens
gaagcccaactcctatgagctcctctctggcaggaataagacgagttggaagaagacctgatcaacaacttcagggtgaagggaaaataattgatag

SEQ ID NO: 416542 - DNA, 80 bp, Homo sapiens
ccgggccacgcaccgcctgctgctgctgggctgcctatgtgttatccaaataccagtactttgtctgcccagtggaatac

SEQ ID NO: 416543 - DNA, 75 bp, Homo sapiens
catcctggtcagagttcagaaggacatgtggagtataagaggcggggtttcaccatgttgcccagactggtcttg

SEQ ID NO: 416544 - DNA, 75 bp, Homo sapiens
gcgataaccaactctcagaggtggccaataagttcgccaaagcgacaggagctcacttttcagagccttccattt

SEQ ID NO: 416545 - DNA, 75 bp, Homo sapiens
ggcaatgaacagtgagggatacttgtacacctcgctgcaggtggagctggagcaagaataccaagacaaattcaa

SEQ ID NO: 416546 - DNA, 75 bp, Homo sapiens
cactgatgaaaatgggctttgtcctgcatgtagaaagcttgcattggtgacttggagagactgtctgttcaggcc

SEQ ID NO: 416547 - DNA, 100 bp, Homo sapiens
ctcatgatcgacttcctcacccgcgcctgcgacctcggatccctgctgccttggtgatcccgggctgacagccagagagcacagcggctcagctcctgga

SEQ ID NO: 416548 - DNA, 98 bp, Homo sapiens
gtgattagcttcgcagtctggaaagctttaggagttcacagtgttgcaagaaagctcaagtagcctatggagaggatgcaaggcttccagctgatgcc

SEQ ID NO: 416549 - DNA, 75 bp, Homo sapiens
cccggaccgaccatgggcagatcccagatcaatgtccgagttaccaccatggatgcagagctggagtttgcaatc

SEQ ID NO: 416550 - DNA, 74 bp, Homo sapiens
cgggacccggttccccggcccacagtgggggtgtgcaaacccgagagaactggcaaaccagtccagctacgggg

SEQ ID NO: 416551 - DNA, 100 bp, Homo sapiens
tgaaaatcaacaacagcaaaagttgtagagctcatattcacaatgggtatggactctctgcagctacatcctacctgtggtttaagaaattcctacgtgg

SEQ ID NO: 416552 - DNA, 75 bp, Homo sapiens
gctacgggaagatcctggaggtggatctgaagaacggtgccggtggtggtgtgcacattgagccccggtatagac

SEQ ID NO: 416553 - DNA, 75 bp, Homo sapiens
caaataagttcagatcttcttcaaattgccatcacgaaagccaaagtggatttctccagtgtggtgtgcctgccc

SEQ ID NO: 416554 - DNA, 98 bp, Homo sapiens
cccatctcgctgcagtctataagaagtagcctactgctaggcttcaggagattatgtctactttgagaattcctccagcaacccatacctaataagaa

SEQ ID NO: 416555 - DNA, 97 bp, Homo sapiens
agatcctgggatcagatgatgaggagcaagaggaccctgcggactactgcaaaggtgtcatggagaaactccagctgggcccagagattctgcagcg

SEQ ID NO: 416556 - DNA, 82 bp, Homo sapiens
agggcgggcttccagtggggggagagcccctggcaggtctcgaagtgctgcagctaaaactcatacaactgccttggctggg

SEQ ID NO: 416557 - DNA, 82 bp, Homo sapiens
aggaccctgttccatccaaactcttgccctttgagggaccaggaatttgagagcgtattttgcggtaaaactggccgaaggc

SEQ ID NO: 416558 - DNA, 90 bp, Homo sapiens
acggcgtggaccacatagacatttacgcggatgtcggcgaagagttcaaccagataggagcatgctgctatgtggaatgttcagctttaa

SEQ ID NO: 416559 - DNA, 89 bp, Homo sapiens
agccaacacaccattcatgccacagggcactgccacattgatacagccttgttcgggagtctagcagttctcgctcaccaaccccaaag

SEQ ID NO: 416560 - DNA, 100 bp, Homo sapiens
gaccgccgccgccgccgccaccatgggatcgcccggagcccacacccgtcctccgctctgcatttccctacgacgtccatcctaccccagacggcctcca

SEQ ID NO: 416561 - DNA, 74 bp, Homo sapiens
cagctcgtgtatactaccaatatccaggagctcaatgtctacaggaagattgttgatcgaatcgacaatgatgg

SEQ ID NO: 416562 - DNA, 51 bp, Homo sapiens
tatttaattcagcctttggaagttttttggagtggcaaaattctattcaga

SEQ ID NO: 416563 - DNA, 96 bp, Homo sapiens
gatggcgccaggacgaaggccctactgggcaaggggccctggcctccagtctgagtgctgacctcgaagagcccctgagtgaggaggagacagaac

SEQ ID NO: 416564 - DNA, 90 bp, Homo sapiens
attacagtatgcctttcaggacaaaaatcacctttatctgaacctcaagaaggcatgaagccagcccctgcagtgccgtccacccgcccc

SEQ ID NO: 416565 - DNA, 76 bp, Homo sapiens
atttgatttcacaaaagtgaagagagggtgctgctggtgagtagcagccggtacccagaccagtggattgtcccag

SEQ ID NO: 416566 - DNA, 100 bp, Homo sapiens
ttcgtgcaccggggcggtccgttgccaaagccagactgcaggcacacagtttggaagggctctgcctttgctgctcttcatagaggaagacctcctgaaa

SEQ ID NO: 416567 - DNA, 135 bp, Homo sapiens
ttctgtaaagagtttaactactcaggttgccgatttaaaattgcaactgaagcaaactcagacagggacattccagctacatcacacaccttgactggtccccagacaacaagtatataatgtctaactcgggag

SEQ ID NO: 416568 - DNA, 90 bp, Homo sapiens
cagactccatccccagcagccctgcttcttcacagttattgcagccttcttcgctgagtctctgcccagtgtgggagggcagatcattcc

SEQ ID NO: 416569 - DNA, 83 bp, Homo sapiens
ggaaaaattaatcaacagagtgggacctaatggtgagagtggtctggaactgaaagtgatgcgtatttctgagttatgcctgt

SEQ ID NO: 416570 - DNA, 51 bp, Homo sapiens
cgatgaaaagagcaccttgaaggaactgccttctgttgaagaactcactat

SEQ ID NO: 416571 - DNA, 82 bp, Homo sapiens
gggatcttcttcactgcctctggcatggatgagacggcagaatgcctccaaaggtgacttcagagctgcttcggcagctgag

SEQ ID NO: 416572 - DNA, 100 bp, Homo sapiens
gttggttcacagggaagtcgcctggaaaaaccaatagtgatttgcagatttacagaatggctgcacattaatggaaagagaagcataaacctatcttctt

SEQ ID NO: 416573 - DNA, 99 bp, Homo sapiens
cgaagaaaagtgctggacaggaagggagaattctgacgccaacatgcagcgaagtatcatacatccggctccgggttcgagcagagtactgcgagcatg

SEQ ID NO: 416574 - DNA, 83 bp, Homo sapiens
cgttttccctgggttggacaacaggatggcatcctgagaaagtcaatgaagacgttgagaaagaagggccttaatggctgtga

SEQ ID NO: 416575 - DNA, 100 bp, Homo sapiens
aagaagagaagcagaattatacctagaagtctactaatggacagttagtcacccacctacatgttgaggtgcagattttaatttcagtgactgaattaaa

SEQ ID NO: 416576 - DNA, 100 bp, Homo sapiens
cccttctgggcaggcttctcgcctctgcgcttagataccttcatgaaaacagaatcatccatcgggatctaaagccagaaaacatcgtcctgcagcaagg

SEQ ID NO: 416577 - DNA, 51 bp, Homo sapiens
catagtcaactgcgtggaagagaagctgatcctacagttaaagacttaatc

SEQ ID NO: 416578 - DNA, 108 bp, Homo sapiens
tgccgcctcctccgccgcccgaaaacccggagtgccccgcacaggttgcaaaagcttctcatttcagagagatgccaggatcctaagtgcctgccaaacttaccaatt

SEQ ID NO: 416579 - DNA, 100 bp, Homo sapiens
ctacctaccaatcgtgaaaactatattcacagggaacagaaagaacagcttcaaaagatgaaagacttcgggtctgagccacagatggctgaccatctac

SEQ ID NO: 416580 - DNA, 83 bp, Homo sapiens
atcaatgtctgtgtccatataccccagctcagcagaagttctgaaggcatgcagttaatcagctgtgttcagcgaatacttat

SEQ ID NO: 416581 - DNA, 50 bp, Homo sapiens
gggacttcccgtccgcggcgtggaggtgtgctcactgatccgcctccagg

SEQ ID NO: 416582 - DNA, 51 bp, Homo sapiens
caccacaaagaccgagaatccttgtccagggttatgtggtccgaatcagtg

SEQ ID NO: 416583 - DNA, 96 bp, Homo sapiens
gtctacccctcctgtcggggaggcaaggtggttttggaccagacaggcgtgtctaagacttcctcgttctgcccatcttcctaacaaggctatggc

SEQ ID NO: 416584 - DNA, 98 bp, Homo sapiens
cctgccaaagccaagctcaccaaactgaagatgccttctcagtcagttgaggtgatggaggcctttgagcaggccgagcggaagcccaaacccaaccc

SEQ ID NO: 416585 - DNA, 76 bp, Homo sapiens
caacaatagtaatacactcttacccttacagaatccaattctcagttttgaactacctatgaatttggcaaactgg

SEQ ID NO: 416586 - DNA, 87 bp, Homo sapiens
gaaggtgcaaggggtgtttttccgtaagcatactcaggagaaaatatggagaagtcttgtgcaagcaaggaagaagtcaaagaagtc

SEQ ID NO: 416587 - DNA, 74 bp, Homo sapiens
caatgcacagccaatttcatgctccactataggcagtacaagaaacatggtgccggcatctgcttctggcgagg

SEQ ID NO: 416588 - DNA, 83 bp, Homo sapiens
cccaagcaaagaaacagcccactggaagcctccaccttggaatgataacgaaggaggcccaacttcattcaataaggagcctg

SEQ ID NO: 416589 - DNA, 98 bp, Homo sapiens
ctgggggccgcgctgctgctgctgccgctgctcgccgccgtggaaggggccggccaggacgtgggccgaagctgcatcctggtctccattgcgggcaa

SEQ ID NO: 416590 - DNA, 103 bp, Homo sapiens
cggagagctccagtgagtccagctcctctgacagcgaagactccgaaacagcaattctgtggtgttcttggtcacacatttatggagtttctgaagggcagtg

SEQ ID NO: 416591 - DNA, 80 bp, Homo sapiens
gaatgacaacttcggtcgtggaggaaacttcagtggtcgtggtggctatggaggcttttacaacagtgatggatatggag

SEQ ID NO: 416592 - DNA, 100 bp, Homo sapiens
tatccaatagggatattgtagaaactgtctttaacctggtttctatatatgctgtaccagaaaagattggtcaagttcattatgccttggaaacaactgt

SEQ ID NO: 416593 - DNA, 50 bp, Homo sapiens
tccctagagacacctagtaatgcaggggaaatgctgtctgtagctgagca

SEQ ID NO: 416594 - DNA, 110 bp, Homo sapiens
actgagcgccatggccctgcctctgctgccgggcaacagcttcaaccgcaacaatcatgtcaaccctgccatggacttcacgcagactccacctgggatgttggctctgg

SEQ ID NO: 416595 - DNA, 98 bp, Homo sapiens
agatgaagatgatgatacattctcctatactgttagaatagcagctcaagacttgttgctggaggaccaacgacaactttatgcaatggcaaataccc

SEQ ID NO: 416596 - DNA, 74 bp, Homo sapiens
taattttagggtcctttatatagaagggagagtagttgctctatatgcaatcagtgctgtctactttgctggag

SEQ ID NO: 416597 - DNA, 100 bp, Homo sapiens
cctgcagatcccggctagggcacggaccgcctaggccgaggttcatggaatccgagctggacctaaatgacatcattcaggagatgcacgtggtggccac

SEQ ID NO: 416598 - DNA, 100 bp, Homo sapiens
ccgggaagatggcgaggaggagccgccaccgcctcctcctgctgctgctgcgctacctggtggtcgccctgggctgtaaatatctaagtgtggaattgct

SEQ ID NO: 416599 - DNA, 100 bp, Homo sapiens
taaccgaggcacggacaacatcaccgtgaggcagggggacacagccatcctcagggatcgcttacacctgagacgaactacagaacagcacgtaccagag

SEQ ID NO: 416600 - DNA, 83 bp, Homo sapiens
gacagtcctcgtcagcactgactttcagctatggaatcgagaaccatggagtctggcagtaccgccgccagtgaggaggcacg

SEQ ID NO: 416601 - DNA, 74 bp, Homo sapiens
aagaggaacagcagtgtaaatgactcagcccttagagatttgtttgattccatggataaaacttcttccagtat

SEQ ID NO: 416602 - DNA, 75 bp, Homo sapiens
cccgtgtccttcattgccacgtacaggtgaaaggtgtagcagtcactcggcctacacccacagcatcgaccttgt

SEQ ID NO: 416603 - DNA, 100 bp, Homo sapiens
gaaaaagcccaggcataaaatcatctccatattctcaggcacagagaaaggtgatgctgtggagtcttcaaaaagcccgaccactctggattacaaattt

SEQ ID NO: 416604 - DNA, 100 bp, Homo sapiens
gttgcaaatacctgaagaagaaagagaagctgtggccaccattatgtctgggtcaaaggccaaggtccggaaagcggtgatccagattaatctgaattca

SEQ ID NO: 416605 - DNA, 87 bp, Homo sapiens
cgactacaaacggaacttgccgcgtcgaggactgtcgggtcacgaaagatgcccagggccagcctggcctcgaaagagcccagcagg

SEQ ID NO: 416606 - DNA, 100 bp, Homo sapiens
gagacaccaggacagaaaagacagtgttctgctttcatggagttcacagaagagtcgaggagatgagtgatgtgtctgcaggaggagccactgtttttcc

SEQ ID NO: 416607 - DNA, 76 bp, Homo sapiens
cgagtgcagtgaagccctggcggacgattggctctaccagtgcacctggacagggaggaatcctggctcagcggga

SEQ ID NO: 416608 - DNA, 74 bp, Homo sapiens
tctccatacctctggcttttgcctgtctcctacatttagccaatgaaaagggccaggaaaattctctgtgttgg

SEQ ID NO: 416609 - DNA, 50 bp, Homo sapiens
ccatcctgggtgctggccctgtgctggagttgctgctgacacgccgaccg

SEQ ID NO: 416610 - DNA, 100 bp, Homo sapiens
catcacttcctacaacagccaaggattattgggactttgcagaactctgcagagttttcagaagcctttcactgccgcaagaattcatacatgaatccag

SEQ ID NO: 416611 - DNA, 98 bp, Homo sapiens
agtgatggtgatagtgctaatgacactgaaccagactttgcacctggttagtggatgacagatgtgtggtgcacccagaggccggggaccttgccaac

SEQ ID NO: 416612 - DNA, 100 bp, Homo sapiens
gaccaggactgcaggacagtcgggacggaagaagtctatagtggctgtggagcccaggagtcttattcaaggagcctttcaaggctgctcagtgtccggg

SEQ ID NO: 416613 - DNA, 90 bp, Homo sapiens
ctatgtcagcaaaaactggagcagaaattggaggctcagcatagagttaaacatgaagtttctggagagacagtggtatttcaaggggga

SEQ ID NO: 416614 - DNA, 101 bp, Homo sapiens
ggaggcagaggcacttatgcttgtcagtgattcgcctttgccagtctcatctcgtgtctgctttgttaagttccatgatccagactcagcagttgtggcac

SEQ ID NO: 416615 - DNA, 96 bp, Homo sapiens
cttcgaagtgaccagcgctaacgttgtcaaggacccgccctccaagtacgtggactcacaccacccggcaagaactgctcactacggctccctgcc

SEQ ID NO: 416616 - DNA, 90 bp, Homo sapiens
gacctgttcgagatcagccagccgaccgagcttacagttgaacatgagtcttcttatgattagtgagaatgtaaaattggctcgtgaata

SEQ ID NO: 416617 - DNA, 96 bp, Homo sapiens
ctaaggaacatggcgaaggtggagcaggtcctgagcctcgagccgcagcacgagctcaaattccgaggtgagccctattcccagaggcaggtggtg

SEQ ID NO: 416618 - DNA, 73 bp, Homo sapiens
ccctgagtctgcagcgggtcccttttgtgcttccttcccctcagccccaaatccaaggccaggccatcctctc

SEQ ID NO: 416619 - DNA, 99 bp, Homo sapiens
gagctccagtttatgcagatttgatggcaatacattaaaaactactcatgtgatgagctttgatccaaaccttctccacaacaatggacataatgggta

SEQ ID NO: 416620 - DNA, 100 bp, Homo sapiens
aaaaactggagagcttcatcaaaaatagtgatagctttgataactctcgtggcattatccttcagtggggctattggactgacttttcttatgctgggat

SEQ ID NO: 416621 - DNA, 75 bp, Homo sapiens
ctcagaagacagagggttttcttttgaggttatgaagttcatggaatggaaaaaataccagaagatggaccagca

SEQ ID NO: 416622 - DNA, 82 bp, Homo sapiens
gagagtggggtatttatctataccacaagcaaccacatcaaatatgctgtcaccactgggggataaaaacattcagatggca

SEQ ID NO: 416623 - DNA, 80 bp, Homo sapiens
gggtggcgcctccctgcgactcctggaccaccgggcgctggtctgctcccagccgggtctgggggtggtggcatctcccc

SEQ ID NO: 416624 - DNA, 82 bp, Homo sapiens
ccggggccgccatggagcccgactcggtgattgaggacaagaccatcgagctcatgcagcccctgtcaaagggaacaggaag

SEQ ID NO: 416625 - DNA, 100 bp, Homo sapiens
cttggcagcagcattgggactcctccagaagagagcagagctgacatctgataaagacatgtaccttgacaacagctccattgaagaagcttcaggagtg

SEQ ID NO: 416626 - DNA, 100 bp, Homo sapiens
cggcgcgtgccggggtagcccgtagtaaccccgagtctgcggaagtggtgacccgtgggacgcggctgagacagctggataacgcagatgaacaagcagc

SEQ ID NO: 416627 - DNA, 75 bp, Homo sapiens
ggaggaagcttcaagcacctgcatgctttccagcctcagtcaggtatataatgtttacatggcagggaggcagct

SEQ ID NO: 416628 - DNA, 50 bp, Homo sapiens
cgcctcctccagctgttgttgctgctgactcagcccacctgcacccaggt

SEQ ID NO: 416629 - DNA, 73 bp, Homo sapiens
tagatgcaatggatgttcagcagctttcacaaatagtaccaaaggtggagccgccaccaaaatgcagattttc

SEQ ID NO: 416630 - DNA, 100 bp, Homo sapiens
aggcagccaagtgtaacctgctggcagaaaaggatgaagacttgtggatatggatggtggtgatggttgcacaacaatatcaatttattttataccactg

SEQ ID NO: 416631 - DNA, 100 bp, Homo sapiens
gccgcctgcaggcctcgcgctgacaggatcttttgtgacgctgcaaatgtcctgattacttgattggagacgtatatgttgaaagaatcattgttagact

SEQ ID NO: 416632 - DNA, 100 bp, Homo sapiens
gccttcggcctggtctacgtgctgaaccacgctgaggggctgggagccgcgcacaccaccatcactgctgtccccggcataggtccatctctgcagaagc

SEQ ID NO: 416633 - DNA, 75 bp, Homo sapiens
aaaggagaagacttggattctcagtgggggcttatttggcctccccaggatggactggagcatcagtagtgcccg

SEQ ID NO: 416634 - DNA, 75 bp, Homo sapiens
ggaatgtttcctcctactcctctttcacctgccaggttcaagctggctgaaggcggtgcaggtcctcatggtgct

SEQ ID NO: 416635 - DNA, 80 bp, Homo sapiens
aaggctgcagccgcgaatgccgtagtatgattcatccagccttccagctctgttatttaaagcaagaacacttctgggag

SEQ ID NO: 416636 - DNA, 98 bp, Homo sapiens
aaagattgattaagtcttttatccgagacctgtctctctacctccagcacatccggatcacccggaagttcaggctgaattctgaaggcaaacttgag

SEQ ID NO: 416637 - DNA, 100 bp, Homo sapiens
tgcaagtgagaacatatttaacagaaatgtgattgataacagtaaagccacactcctcaagtgcctgaaatacccctcattgtcttcttcaggtggcaag

SEQ ID NO: 416638 - DNA, 74 bp, Homo sapiens
cggcggtacccgggtggttaaacttcgcaaaatgtatgtgcaacgtatagagaaacagtttcttttgtatgcct

SEQ ID NO: 416639 - DNA, 71 bp, Homo sapiens
aggctccactaactggggctacgactctgatgggcagcaggcgccatgtggacggcagtgtttgatgagcc

SEQ ID NO: 416640 - DNA, 109 bp, Homo sapiens
ggatgtctacctggtaatagaggacttgaagcagaaagcaagtgaatacgagtcagaagagtctcatcaagtcctagctcaactgctggatactttgcttgcaattggc

SEQ ID NO: 416641 - DNA, 75 bp, Homo sapiens
ttcccatcaggtttcctgatgtgagcagggcctattccactagaagcaagatggctgaactcaatactcatgtga

SEQ ID NO: 416642 - DNA, 89 bp, Homo sapiens
cggagctctcggaggaggacctgaagcagctgcatatagcactttctacattgtgggtttaatattatcaatgcagataccttttgtgg

SEQ ID NO: 416643 - DNA, 82 bp, Homo sapiens
cgctaagttgctgatcgtggcgcgtccgtctccaagagagtatgaagagagtgcgtctgtagggcagggaagatggcggaca

SEQ ID NO: 416644 - DNA, 103 bp, Homo sapiens
gacaacagaaacagaaacgattgtggaaacaggaccttcgaaattaccagtataccttgcataatatagatcaactgttgattcatatggaaatgggaaaaag

SEQ ID NO: 416645 - DNA, 100 bp, Homo sapiens
taaacccatcttggtatcgctggatcaacaaccgccttgtggcaacatggctcaccctacctgtggtgcagagtccagtggtgacatggatgttctcctg

SEQ ID NO: 416646 - DNA, 98 bp, Homo sapiens
tccagccctgccacatcagagaggccattcgacgctacagccacaggattggcccactttccccattcacagtatatgactgatgggatgttacttcg

SEQ ID NO: 416647 - DNA, 96 bp, Homo sapiens
ttggctagatcaggaagcctatgtcaactatggaacaacaacttgcagctcatctctattgatgattctgtttctggcgtctgcatacgcaagtcc

SEQ ID NO: 416648 - DNA, 75 bp, Homo sapiens
ccaggtcttgtagcagcgcctcctcggtgacaaacagcatgtttggtgcttcaagaaagaagtttgtagaggggg

SEQ ID NO: 416649 - DNA, 75 bp, Homo sapiens
attttcctgccttaagaaaaaacaaaaatattgacaactttttaagcagatcccttagagatttgtttgattcca

SEQ ID NO: 416650 - DNA, 75 bp, Homo sapiens
atccgccgcccgtccacacccgccgccagcattccacgcctacgggaaggcaggcaagatgctggtggagaccag

SEQ ID NO: 416651 - DNA, 90 bp, Homo sapiens
gcgacccggagcagctcggaggcggtgaagatatgggccctcacattttccaaacctgtccatctgctaactattttgactgcagagcca

SEQ ID NO: 416652 - DNA, 83 bp, Homo sapiens
gatcatatagattcagcttgtgtgactgtcaaactaccatacatgacagacatcacacctccagtgcaatccctgttcctaag

SEQ ID NO: 416653 - DNA, 90 bp, Homo sapiens
ctttctcggaaacgcggcgcggccggctgccggaaagacatgtgtagtcttccagattatgtgacatttaagagtttccctggaatacct

SEQ ID NO: 416654 - DNA, 89 bp, Homo sapiens
acagcaccaaacaggaggcggccaaggcccaaactgcactgcacatgcctgcacagctgaccacagttgggaaacgttgctgtctttgg

SEQ ID NO: 416655 - DNA, 75 bp, Homo sapiens
gtcttcagcacccacccaccgtggtacaggttctgatctacaatggccaactggacatcatcgtggcagctgccc

SEQ ID NO: 416656 - DNA, 96 bp, Homo sapiens
ttcaccgtgtacctgggctcgagcctgcacatgaagccctctgcctttgaagagaaggccattgagaaggtggatgacctgctggagagttacatg

SEQ ID NO: 416657 - DNA, 50 bp, Homo sapiens
tttgccaccacactccagcctgggtgagaagccctaccactgcaactggg

SEQ ID NO: 416658 - DNA, 82 bp, Homo sapiens
tgcgggcccgctccgacgcggaagcaaactcagtcgtggctttggagatcactttaagcttgtctccagctggcacactaag

SEQ ID NO: 416659 - DNA, 100 bp, Homo sapiens
tatgagaaagtggggtttcgtggagttgaagaaaagaaatcattagaaattctcctaaaagatgaccgtctggatccagaatgaagagagtgtggtgctt

SEQ ID NO: 416660 - DNA, 50 bp, Homo sapiens
gggacagcgcggcggggagcgacgacttgaaatccatggcccaaaatgac

SEQ ID NO: 416661 - DNA, 90 bp, Homo sapiens
cgtgtcccgatgtagaagaaatagcaaattggacatattgaaagaattaaacaaccaccatgtcgagcaaaaaggcaaagaccaagacca

SEQ ID NO: 416662 - DNA, 80 bp, Homo sapiens
gaagcaacaagattgcttgcaacaattgttatgcttgtgtgaatgtcacagatcatgatttgacattcggaagtctaaca

SEQ ID NO: 416663 - DNA, 98 bp, Homo sapiens
tggtggcctgcgtgtcggcggagtcgctccagggtttgagccacaatgtgatcttcaccttggattctttgttaaaaggagacctaaagggagtcaaa

SEQ ID NO: 416664 - DNA, 75 bp, Homo sapiens
ctcccaccttagcctcccaattggttgaatctggcgatgtggaacccatggatatggagggctgactatatacac

SEQ ID NO: 416665 - DNA, 101 bp, Homo sapiens
ccctgaagttgcctcttctggtgtcaaagcttttggacattcctgggtgccctataaggactgccaggcaataatgaaggttcttttactgaaggatgcga

SEQ ID NO: 416666 - DNA, 50 bp, Homo sapiens
gggcctttctgtgtcctactccttgcagttgtttcatgacgatcagggcg

SEQ ID NO: 416667 - DNA, 83 bp, Homo sapiens
cgatgggcatcaggattccgagtcaggagagacttcgggagaagataacgaaggaggcccaacttcattcaataaggagcctg

SEQ ID NO: 416668 - DNA, 75 bp, Homo sapiens
ggcaggtgacagtctgcatgtgcagttttcaggtgttggagcgggccggagagaagtagagtgggctgcgaggag

SEQ ID NO: 416669 - DNA, 90 bp, Homo sapiens
gagagatggaacccgaagaagaaaggattcgttacagccagagattgattacctggctggtgtttgcttgttctggagtgatcttctgac

SEQ ID NO: 416670 - DNA, 98 bp, Homo sapiens
gcagagatataccagacggtcatgctgcgccatgaaaacatccttggatttattgctgctgacaataaagctgtctgctcccaggaggcgatgacggg

SEQ ID NO: 416671 - DNA, 56 bp, Homo sapiens
gaccagaaaattcaggtgactcctccaggttgcagagcctgaggcctgtgatcaga

SEQ ID NO: 416672 - DNA, 50 bp, Homo sapiens
agaggcttatgagtatcttaacaagatacgtaggtaacctttccagagat

SEQ ID NO: 416673 - DNA, 98 bp, Homo sapiens
acctggacggctggggccacttgtggtcgccgggagggctgttgataatcaggtgtatgtggccacagcctctcctgcccgggatgacaaagcctcct

SEQ ID NO: 416674 - DNA, 74 bp, Homo sapiens
ggagcctcagttggaagcagccgatccagcctgcggagcctgtggggcagatgaggacgctgaggcccagagag

SEQ ID NO: 416675 - DNA, 75 bp, Homo sapiens
acagcttaacaattgaacccttgaatcagaaaggcaaggatgttgacaatgcgtctctggcacgtcttgaccttg

SEQ ID NO: 416676 - DNA, 100 bp, Homo sapiens
agttccagtgaagttggtccttttgtctccaaaataagagcagtgattaacgatattgtctctgttggatgaacccaatcccaatagtccagcaaacagc

SEQ ID NO: 416677 - DNA, 100 bp, Homo sapiens
tagtaaaggtatcccctattatgaaagttctttggctaacaacgtcacatctgtggtgattgcatgtcgtggcaaaaacatggaagtgagacttattttt

SEQ ID NO: 416678 - DNA, 87 bp, Homo sapiens
cgtccctggagcggccgccttccagcgacaactgtcatctgggaagtaacaacgcaggatgccccctggggtggactgccccatgga

SEQ ID NO: 416679 - DNA, 83 bp, Homo sapiens
gggaggtgaatttccatgtcaacatagtcctggttttagctaaagaagatactgaggcagctattcaatcaatattatacaaa

SEQ ID NO: 416680 - DNA, 122 bp, Homo sapiens
gggactcgttcagggttttttgcaacttcacggcgggaggagagacctgcctctatcccgacaagaagtttgagatcctgggccccaacgtctccatcgggaagggggtgaccgtgggtgag

SEQ ID NO: 416681 - DNA, 75 bp, Homo sapiens
tgccttttgcctcccaccgtgattctgaggcctccccaaccatgtgcaattttaaacgagaagattcatcaccgc

SEQ ID NO: 416682 - DNA, 83 bp, Homo sapiens
accgagccgatcgccgcggggcagttcgggccggctgtcctggcgcggttacctgtcctgctgccgattcctggatgacaatc

SEQ ID NO: 416683 - DNA, 50 bp, Homo sapiens
cagcctccccagacgacgataatatcctccgaatcctaaatctagagctc

SEQ ID NO: 416684 - DNA, 83 bp, Homo sapiens
gtctcggcagcgcccgcggagacgtgaagagcaccgaacaagatttgtgatgaaatggagcctggaacaaactcttttcgggt

SEQ ID NO: 416685 - DNA, 87 bp, Homo sapiens
acctgttaccactttcaaaacccctacccgtgcctgtggaccatcagcaatggtgccggaggccccagtgggccaggcccggaggtg

SEQ ID NO: 416686 - DNA, 97 bp, Homo sapiens
gggaaagtgatctcggcccttgcagatatggtctcctctgagcctccggcctccataagacccaaaacagatgacacctcttcccagtcccccgcgc

SEQ ID NO: 416687 - DNA, 100 bp, Homo sapiens
ccggactcggcgggcatcgccctctacagccacgcaaacatgcagatctttgtgaagaccctcactggcaaaaccatcacccttgaggtcgagcccagtg

SEQ ID NO: 416688 - DNA, 90 bp, Homo sapiens
cctgcatgtgtgtgcgcgcgaaggagcggaagaatggcagtgctcaaactcaccgaccagattttaccaaatgttgcaagaactctggag

SEQ ID NO: 416689 - DNA, 90 bp, Homo sapiens
ccggtagacttaggtctgttagaggaagacgacgagtttgaagagttccctgccgaaggtctctaattaacagaagatggcaaagcccag

SEQ ID NO: 416690 - DNA, 98 bp, Homo sapiens
cgctctccctgcgctctccgcaccgcggcttaaatgatgtattttgtgatcgcagcgatgaaaggtttggtgcacctcgatttggaggaagtagggca

SEQ ID NO: 416691 - DNA, 97 bp, Homo sapiens
gcccacagtgggggtgtgcaaacccgagagaactgggtcagtatgggaatcctttaaataaatatatcagacattatgaaggattatcttacaatgt

SEQ ID NO: 416692 - DNA, 74 bp, Homo sapiens
gctgcacaaggaagaacgctatgacctgaagaccaaggtgatccttgccgaactcccggaggattttaaagctg

SEQ ID NO: 416693 - DNA, 80 bp, Homo sapiens
agtcctcatcctggatgaagccaccagcgctttggatgccgagagcgagtatctggctaagtcctatcagccatggaaac

SEQ ID NO: 416694 - DNA, 75 bp, Homo sapiens
caagtccaagaggaccttctgattagtccacagtcttcctctatagctttcactttcagaagaacagaatgaagt

SEQ ID NO: 416695 - DNA, 73 bp, Homo sapiens
accaacgccatccaggactccctgactcgatgcggtttgctgtgtttcaaagaagggtgctgaccacagtagt

SEQ ID NO: 416696 - DNA, 97 bp, Homo sapiens
tctccctcgagaagctccagatggcgtcttccgtgggcaacgtggccgacagcacaggatgggtcatcagttaaggaagttgaaacctaccaccgga

SEQ ID NO: 416697 - DNA, 75 bp, Homo sapiens
ggcacattacaacttcaagaaaattacggtggtgccgtccgccaagactgcctctgtcaccgggtccctccaccc

SEQ ID NO: 416698 - DNA, 83 bp, Homo sapiens
tcagaacagcagcttatgaactgcttcattttccaaaagtgtttcccaaaaatcaggcagcagaagaggatgaaacacaaaac

SEQ ID NO: 416699 - DNA, 90 bp, Homo sapiens
cttgtgggagcaaaaccaacgcctggctcggagcagcagcctctgagggagtgaggattctttggacaccagcctgagagctcacggggt

SEQ ID NO: 416700 - DNA, 83 bp, Homo sapiens
ggacaacatcctgcccgagcttggggtgcggtttgaagaccacgaagcgcacgtaccgggtgccgaaggaggtccgcgtggag

SEQ ID NO: 416701 - DNA, 83 bp, Homo sapiens
attatatcatggaaccctccatcttcaacactctgaagaggttatggaaacaaaggacatgctttacatcgtcactgaatttg

SEQ ID NO: 416702 - DNA, 100 bp, Homo sapiens
gttacagctactcctgtgctctccattactggaacagattcctctgtggaagccagggagaagaggagctctactgagatgaagaaagaaaaagaatacc

SEQ ID NO: 416703 - DNA, 50 bp, Homo sapiens
gatttttagaactccacatttgaggaagattcttacctctgaagacaatg

SEQ ID NO: 416704 - DNA, 75 bp, Homo sapiens
gaggggatcctcatgagttaagaaacatatttctacagcagcagccgctcttctaaaacattcaaaccaaagaag

SEQ ID NO: 416705 - DNA, 100 bp, Homo sapiens
gctggctgcggccgccctgggccgggccccaccggacggtgaaaggtgtagcagtcactcggcctacacccacagcatcgaccttgtgaacccagcgacc

SEQ ID NO: 416706 - DNA, 75 bp, Homo sapiens
cgccgctacaaccagagcgaggctggcccgggcgcaggaccgctggaggacgcagcgtccagggccagcgagctc

SEQ ID NO: 416707 - DNA, 101 bp, Homo sapiens
agagtccaccagatcatccatgtgagtgaccatgcagcaaaagaaggagggtcctctcagtgattaagaactgagagaagatggtttccagcctcaaactt

SEQ ID NO: 416708 - DNA, 75 bp, Homo sapiens
gcgagtgcttggaggagcgcgccctgcctgagaaggagcccctcgtcagtgggtaaacctcacaagtgcaactac

SEQ ID NO: 416709 - DNA, 75 bp, Homo sapiens
tcctgaaagagcacgaggagttccagataactgcaaagcagccgcagccatggcggggatgaagacagcctccgg

SEQ ID NO: 416710 - DNA, 100 bp, Homo sapiens
atctaccacaacttcccagaacagaggactctaattgttactcattccaatcagctcagaaatatgtgcccagggccgccctggtggacttagagccagg

SEQ ID NO: 416711 - DNA, 82 bp, Homo sapiens
cgtctctctgctgcggcgcggggaccgctgtgctctcggaacaggcctttgagagcagccagaagtacaaagaggggaagta

SEQ ID NO: 416712 - DNA, 96 bp, Homo sapiens
cgtggggaagacgtcgctggtgctgcgctactgcgagaacaagtttaacgacaagcacatcaccactctgcagttatttgctggtataaaggatgg

SEQ ID NO: 416713 - DNA, 100 bp, Homo sapiens
aacctgtcaaagccttcttaattatgtctgagaaaagggcatatcaagagaggagatttctttcacaactcatccagaagtttatctctgtgctgaaatc

SEQ ID NO: 416714 - DNA, 100 bp, Homo sapiens
gcaatcgatacttcacactatggagagggaagcagatggtgcaggtgatggtcctaccagtgtgtctgttgaggtcacccgtcctaaagtgacctccctg

SEQ ID NO: 416715 - DNA, 100 bp, Homo sapiens
ttcagttctttggaattccattcttttccttattcttctgatgtggatccagttccacttacttacatgatcatttcgagagatgtaatgttgattgctg

SEQ ID NO: 416716 - DNA, 114 bp, Homo sapiens
cgctccgtggccttagctgtgctcgcgctactctctctttctggcctggaggctatccagcagctgccatcagtcatgctcttaaacggggactgcccagagagcctgaagaag

SEQ ID NO: 416717 - DNA, 99 bp, Homo sapiens
gtgaaggagtgcagaggcatcacctgaaaggtagatatagttgtaggtactccgggaagactagatgacttggtgtcaactggaaagctgaacttatct

SEQ ID NO: 416718 - DNA, 50 bp, Homo sapiens
tttgtcaaacaggaatttacttcacccacaaaagctgtatataatgccag

SEQ ID NO: 416719 - DNA, 100 bp, Homo sapiens
ttggactgcccagatgggtatgacgaaggagtacattgtcaggggttcccagttttccagacctgaagtgttttccaatcaaagcgaagagacgatctgt

SEQ ID NO: 416720 - DNA, 100 bp, Homo sapiens
gacaatattcgcacccggctgaaggtgcccgtggttgacacgagctgtgtccccagctgttcccgtctacaatggcatcatcttcctctttgtcctggcc

SEQ ID NO: 416721 - DNA, 101 bp, Homo sapiens
cagttgaagcagtgaggtggtgccagtccatgcaggatccttctgtcaataagaagaagaggacagtgctccagtgaaagtggaagaacaaaggaagatga

SEQ ID NO: 416722 - DNA, 100 bp, Homo sapiens
ctagatgaaagggaagctggcatcactgagaaggttgttttcgagcagacaaaggtcatcgcagatgatgtgaagaaaggaggccctggaagaggaggga

SEQ ID NO: 416723 - DNA, 101 bp, Homo sapiens
ccagtagcttggatccttgtgggcatgatccataatcggtttcaaggtcccctcgggtggctattcttccatcaacaatgtccaggatcctcagaagcccg

SEQ ID NO: 416724 - DNA, 75 bp, Homo sapiens
ggagaagaacctttgccaatgaagtttgcctgcaatggtactgtaattgagcatccggaatatggagaagtaatt

SEQ ID NO: 416725 - DNA, 118 bp, Homo sapiens
gggcgatgctggaggagctggagtgcggggcgcccggcgccaggggagccgccacagaaatactacccgccggactttgacccatcaaagatccccaaactcaagctccccaaagacc

SEQ ID NO: 416726 - DNA, 83 bp, Homo sapiens
cactcctagttaccagaaaggtggaatctggatgagtggaggaatcttgtcgattggcctggctgctgcctactacagcggag

SEQ ID NO: 416727 - DNA, 88 bp, Homo sapiens
agctccggagagagtttgaggtgtacggacctatcaaaagagcagcctggcatcctcgctacaacctcattgttgtgggccgataccc

SEQ ID NO: 416728 - DNA, 75 bp, Homo sapiens
aaaagctaccccccaaagtcctggagctgtgtgtttgtccaacatgatgctgcccaactgtacctcaaactctgg

SEQ ID NO: 416729 - DNA, 101 bp, Homo sapiens
cagaaggtcaacgccgcaggcacaggtcagtcttccacctccactaccggtgccaaaaaaagggctgccccaaaaggaactaaaagggatccagctttgaa

SEQ ID NO: 416730 - DNA, 75 bp, Homo sapiens
atgaagatgaagccagagaagcccagtcttccgaaatgcggtgctcaggtttgagcacaaaatgaacataattag

SEQ ID NO: 416731 - DNA, 100 bp, Homo sapiens
caatcatgggaatttccaaggggattcaaacttcaacagaatgtggcaaccagattctgaaaaagagttccacgtcctcccttatcgagtctttgttccc

SEQ ID NO: 416732 - DNA, 75 bp, Homo sapiens
cgtcaaactcaccaaaaacaacatctttccagaaagaggtgaccaagaatatggcccaggtgaccaaagccctgg

SEQ ID NO: 416733 - DNA, 82 bp, Homo sapiens
tgcagccttctggtataccatcgtcaccatgacaacactagggatattgacggccaagcactcctgcttctgacccttccga

SEQ ID NO: 416734 - DNA, 96 bp, Homo sapiens
ccaaatcaagtatacagaaaatcggtgaagagaggttttgaattcacgcttatggtagtggatgtcaagccctccaacatcctagtcaactcccgt

SEQ ID NO: 416735 - DNA, 100 bp, Homo sapiens
caaagcagtagctataatcaagtctgttggagaactatcagtaccagaaaaatacaaatctattcatcaaatcagagaaaatagtggccgagtatgagaa

SEQ ID NO: 416736 - DNA, 82 bp, Homo sapiens
ataaaacctaccccagggtaggacggactgttcggtgcggtcttgctctgttgcctaggctggagtacagtggtatgagtat

SEQ ID NO: 416737 - DNA, 51 bp, Homo sapiens
ttgatggatatggttaggtgtcagcagcggatgatttgtcattaattcgga

SEQ ID NO: 416738 - DNA, 83 bp, Homo sapiens
gcctccctcaccttggacacctcgcttgggtcctcagccctcgctctcgctggcggagcagcacctggagtcgcccgtgccca

SEQ ID NO: 416739 - DNA, 74 bp, Homo sapiens
caccaccaagcgcgtcttgtacgtggttcgatcctttggtacagaagacagaccgacagatcgtccaataccac

SEQ ID NO: 416740 - DNA, 90 bp, Homo sapiens
gagctccaagcactcattcagcagctttccattgatttgcaaaaggatgttttagaagaatgtatgtctcttcccaagctatcttcttat

SEQ ID NO: 416741 - DNA, 100 bp, Homo sapiens
tttcttaggagttaagttgctttccaaaaatttgggacccactctggaacctgaggaagtggtaaacaggctgatgcatgggattctgactgagcagaag

SEQ ID NO: 416742 - DNA, 101 bp, Homo sapiens
cccgcgccatgtccgcgcacaatcggggcaccgagctcgtatctggagtccatctttcaccatcttctcctgagattgtactggaccgtgaccactcttct

SEQ ID NO: 416743 - DNA, 100 bp, Homo sapiens
gctggaccagaccatggccgcggccttcgtgagtgagatcattggccgagacctgagtggcttccctgcacctcctggagaagagcctcctgcctgaacc

SEQ ID NO: 416744 - DNA, 75 bp, Homo sapiens
cttggattgagtaccagcatcacaagcctcctttcaccaacataattcctgtggacaaattagtaaaaggaaagt

SEQ ID NO: 416745 - DNA, 75 bp, Homo sapiens
ggaggcctggttacagtgttgtgcttctttttcagtcatggagaggatttaagtgccctgtatgctcaaaatttg

SEQ ID NO: 416746 - DNA, 82 bp, Homo sapiens
gctctgctgtgggcgctgctggcgctctggctgtgctgcgcgacccccgcgcatgacagccctcagcgcctttttccaggag

SEQ ID NO: 416747 - DNA, 75 bp, Homo sapiens
gctcacatcttcaggtgcctcattcacatacgtcaaggaaattgagggctgaagaagatgcagagcagcctgaag

SEQ ID NO: 416748 - DNA, 89 bp, Homo sapiens
gcacatcagcgaccgggagaacatagacggactgaatgtgggcccagttggcgtcattctgctttgacctaaacattcccatctgattg

SEQ ID NO: 416749 - DNA, 75 bp, Homo sapiens
ttcatcttacccagtggaacctaagaaattaaattctccagggtgtccgcaatgttgccagtgtctgtctgcaga

SEQ ID NO: 416750 - DNA, 100 bp, Homo sapiens
agacggggacaatgaggaggagacggagcacgccaaaggcttggtgtgtgccttgcctagtttcacttgatactcttcaggaattatgtagaaaagaaaa

SEQ ID NO: 416751 - DNA, 75 bp, Homo sapiens
ttctgcaacgcgcccctccctggccctggaccctatcgacccccagaggagcccaccacctggaccgggtacttc

SEQ ID NO: 416752 - DNA, 48 bp, Homo sapiens
gtacccggtggactcggtgaaggaaatggcggtggaagagagggaagt

SEQ ID NO: 416753 - DNA, 100 bp, Homo sapiens
ctggagcggatcccacacctccggaccgagggacgcggccagtaatgttaaagtagagactcagagtgatgaagagaatgggcgtgcctgtgaaatgaat

SEQ ID NO: 416754 - DNA, 90 bp, Homo sapiens
gcgccatgtccgcgcacaatcggggcaccgagctcggaaaaaggcaattgctgcctgtttttttttcacccacagacaactgtggacccc

SEQ ID NO: 416755 - DNA, 99 bp, Homo sapiens
ccggcggtgatgcggctgtgaagccctagtcgagctggtggagttgagatctataatggagatcgtaaaataaaggtttccaacaccctggaaagccgg

SEQ ID NO: 416756 - DNA, 51 bp, Homo sapiens
ccctggtgtcacctatcagtaaaagtccttccagggcagtcaggggcgtgc

SEQ ID NO: 416757 - DNA, 90 bp, Homo sapiens
gctatgtcagaaatgctaagacatcctaggatatcgggaaagcctatattggtgattgtgcagactggtgcttaaaatggaagtcgatat

SEQ ID NO: 416758 - DNA, 100 bp, Homo sapiens
cacaaaggtcttgaaggccctaaaggtgaagttggagcacctggttccaagggtgatgctggtgcccctggagctcccggtagccagggcgcccctggcc

SEQ ID NO: 416759 - DNA, 77 bp, Homo sapiens
aattatttcaagtggaaagtcaaaacaagccttaccagtggcttcagaggaagaacagcaaaggcgtgaaagaagtg

SEQ ID NO: 416760 - DNA, 88 bp, Homo sapiens
cccggcctggtcctggccccggagctgttgctggacccctggcaggatgacagtgtgcttcacctgactttctactacctcatgaacc

SEQ ID NO: 416761 - DNA, 80 bp, Homo sapiens
ctcgttttactgaaaaaggcacctcctcagttggtagctggcagtgttgtgatggcttttgaagaagtatgcccggacag

SEQ ID NO: 416762 - DNA, 80 bp, Homo sapiens
tggaccgctaaagtggaagctattcagatatggatcagaaactttcgaagttggtagaagagctcacaacttcaggagaa

SEQ ID NO: 416763 - DNA, 51 bp, Homo sapiens
agagtggatccgacctttggcttcagaaagaaatgaccgcccggatgtgcc

SEQ ID NO: 416764 - DNA, 83 bp, Homo sapiens
ccgttgaaaggagagccagttactaacttgttctgacttattctggagaggagtaggaagtaatatgagcaggaactcttggg

SEQ ID NO: 416765 - DNA, 90 bp, Homo sapiens
cccgaggcggccgccgctgcaccttcaccgcgtacccgggacccgcccgcccgcgggagaccctggaagctgtcctgaatttcaaatact

SEQ ID NO: 416766 - DNA, 80 bp, Homo sapiens
ctctgatccccccctgccggggagggcccagcgcatccgacagtgtactaatggtcacttgatgtgcgctggctgtttta

SEQ ID NO: 416767 - DNA, 82 bp, Homo sapiens
ctggaggaacagaagcggaacagccacagcagcctcccaaggagtctgcaagttgacttctgctggatgtgtctaggagatt

SEQ ID NO: 416768 - DNA, 82 bp, Homo sapiens
caacagacatatagtgaagatgctggaaaaatacctcaaggtgagaagccctaccactgcaactgggacggctgcggctgga

SEQ ID NO: 416769 - DNA, 85 bp, Homo sapiens
caaggtcctaccacccagtccagggccactagcccatcgtccgccaactgcagccccgagcctggagatgagggggagccggggc

SEQ ID NO: 416770 - DNA, 74 bp, Homo sapiens
agaaaagagtagcagcagtgaggaagagctgccgagacgctgtgagaccaaagacctggttgtgcaacaggcag

SEQ ID NO: 416771 - DNA, 74 bp, Homo sapiens
ggtctccgggcctacatccgcaaacagtgcaaccacatcttcctccgaccttcccctcctccaatgagtcccgc

SEQ ID NO: 416772 - DNA, 83 bp, Homo sapiens
gctgagccagcggagctgcttggttttaaaatcaaagatgggaaaatcggagaaaattgcccttccccatggccagcttgttc

SEQ ID NO: 416773 - DNA, 144 bp, Homo sapiens
caacctggtccatctcctgctgctggcccgctgggaggacacacccctcgtcatactcggtgttggtatggacctgtctgccaatcaggacgaggagaccgaccaggagaccttccagctggagatcgaccgcgacaccaaaaa

SEQ ID NO: 416774 - DNA, 101 bp, Homo sapiens
tttaaatcaagatttaacattccaacacataaaaattatttatccaacagctcctcccagaagaaaaagtcagcactttttgaagtgtctgaggttatacc

SEQ ID NO: 416775 - DNA, 74 bp, Homo sapiens
gtcgtaaacaaccctgaagagaacagccaggcctgccaccttctgggtgaaccctcagttcaagatccggctgg

SEQ ID NO: 416776 - DNA, 90 bp, Homo sapiens
cttccccagccacatggaacttcctacaagattatcaattttgcccccagtttacttcggattatagtctctgaccatgtggaattccca

SEQ ID NO: 416777 - DNA, 51 bp, Homo sapiens
acgtctgtgggttacgccatctttaagaaaaagcttgtggtgaaggggggc

SEQ ID NO: 416778 - DNA, 98 bp, Homo sapiens
ttcccagctacttttatataatatgatggtggtgctaccccagtacaggatgaacgggattcagggtcagacggtgaggatgatgtaaatgagcaaca

SEQ ID NO: 416779 - DNA, 82 bp, Homo sapiens
cgagacggcgatccgggcgctcgagacttaccagagccacaagatcatggaagggaagtggttgctgtgtatgttactggtg

SEQ ID NO: 416780 - DNA, 88 bp, Homo sapiens
cgcactggcccaggacctgcacaaggtcctagctggactgctgcaccttggcaatatccagtttgctgcctccgaggatgaagcccag

SEQ ID NO: 416781 - DNA, 50 bp, Homo sapiens
gggaggtggaacgggccgaactgcaggctgaccaactgactgaagagcag

SEQ ID NO: 416782 - DNA, 75 bp, Homo sapiens
aatccgccatgggctactcagtttacagccactgcagtatcacagccagcggatgtgatgctggtacaacccaga

SEQ ID NO: 416783 - DNA, 100 bp, Homo sapiens
ggccggcttcaggaggcccaagacaccacagaagccctccgagcccagctacgcaggatgcaggctctggagagagaacaggatgccctgtggcagggtc

SEQ ID NO: 416784 - DNA, 100 bp, Homo sapiens
ggcaagatgaatttcctccgcggggtaatggggggtcagagtgccggaccccagcacacagaagccgagacgtaactctcaggagccttctccgcagttg

SEQ ID NO: 416785 - DNA, 87 bp, Homo sapiens
actctttgattctacaatagctgatgagggaacatggactttggtatgaagtattcagaacagaagaggaagaaaaaataaaatctc

SEQ ID NO: 416786 - DNA, 95 bp, Homo sapiens
ccctggtcttcgggctgtcgctcgtctacttcctcagcagcaccttcaagcagctgctctgttaaaagcgaaaatgaaacaattgcctgcggcaa

SEQ ID NO: 416787 - DNA, 85 bp, Homo sapiens
aggaagagctgaacgtttagaggcaacagaataccttgtctcagctgctgaagctgatcttcaaagctgctgcgggcattctatg

SEQ ID NO: 416788 - DNA, 50 bp, Homo sapiens
gcaacatctgcaaggtccgcttcaccagcattgtcccagatatagccgtt

SEQ ID NO: 416789 - DNA, 88 bp, Homo sapiens
gtggagatatggcgcaactgcggcgcaagcaaggtctcgctgtgttaccctggctggagtgcagtggctacttacaggcatgatcata

SEQ ID NO: 416790 - DNA, 89 bp, Homo sapiens
catcgtggccaacacggtcttgctgaaagccagggaaggtctgtccacgttctctgtgggttcattgccggacttgagtctgagttcat

SEQ ID NO: 416791 - DNA, 82 bp, Homo sapiens
ctccattaatgcaactaccattacactaaggtgaaatgacaatggatgctctgttggctcgattgaaacttctgaatccaga

SEQ ID NO: 416792 - DNA, 101 bp, Homo sapiens
gggatagtggagctgcccactctagaggagctgaaagtagatgaggaaaatgtttataggaggccttagctgggacactacaaagaaagatctgaaggact

SEQ ID NO: 416793 - DNA, 97 bp, Homo sapiens
atgcattggaacatgacatgagattaaggacaggaagatgtcacccaagcgcatagctaaaagaaggtcccccccagcagatgccatccccaaaagc

SEQ ID NO: 416794 - DNA, 100 bp, Homo sapiens
gggctcgccgccgccatgtctaccgcccagtcactcaaatccgtggactacgaggtgttcggaagagtgcagggcctgtgtgcgctctatccagctggac

SEQ ID NO: 416795 - DNA, 100 bp, Homo sapiens
aatatccagtttgagccatcggatctaagatccaaaagcataccataaagtctccaaaggatggcacagtaaagaaagtgttctacagagaaggtgctca

SEQ ID NO: 416796 - DNA, 74 bp, Homo sapiens
caaatgcattccacgtgtatcagactgtgcaggtgcctgtgtactcggagcaggagtaccagctttatctccac

SEQ ID NO: 416797 - DNA, 74 bp, Homo sapiens
atgaaagcagtaatcagatgtttgccatgaaagaaataaggcttcccaagggtacagctctgccggggggggaa

SEQ ID NO: 416798 - DNA, 88 bp, Homo sapiens
actgtgggtgatatttgcctttagtgcactcttctccttcacagtaaagtggctgagggaggaagaaggagacttcagagaaagaggc

SEQ ID NO: 416799 - DNA, 90 bp, Homo sapiens
atatgattttctttaaggatggtttagaaatggaaaaatgtgcagcctggcatcctcgctacaacctcattgttgtgggccgatacccag

SEQ ID NO: 416800 - DNA, 75 bp, Homo sapiens
tggcccgacgactgtgacgaggacgaggaggcagccacggggcccctggatgccatggacaatattaccaggcag

SEQ ID NO: 416801 - DNA, 80 bp, Homo sapiens
attcgcagtggtcgcttcttctccttggcagaagaagagttcaacatagagaaaggtcggcttgtgcaaacccaaagact

SEQ ID NO: 416802 - DNA, 90 bp, Homo sapiens
atccagactgaggaagacccggaaacttaggggccacgtgagccacggccacggccgcataggcctgttacatgaacagaatatggcaaa

SEQ ID NO: 416803 - DNA, 90 bp, Homo sapiens
ccgctcttacaaagctcggctgcccctacggctctttctgatcattgccaacacaatggcattccaggctttaaaacagagagaagcaat

SEQ ID NO: 416804 - DNA, 74 bp, Homo sapiens
taacctccaagcagtgtttacatacctgagccgcaacgtggtacacagtgtccgccgagagcacttcagcttca

SEQ ID NO: 416805 - DNA, 100 bp, Homo sapiens
acaccaaacaatatgggattagtgagaaatgaacttcaactggttgatcttccaacaggacgactgggtttggattcagaagaggattattatacaccac

SEQ ID NO: 416806 - DNA, 100 bp, Homo sapiens
ccctctacgccaccaatccgccctggatcttcacccaggaggccccggaggaggggaccgggggcttcgcttgcctacatgtagcctgtgttgtacagca

SEQ ID NO: 416807 - DNA, 100 bp, Homo sapiens
ggcagccggaaggacaccaagatgcggatccgggcctttccggtaatctttagatggtggaagatctctctaaggagtgagtatcgatcaacaaaacctg

SEQ ID NO: 416808 - DNA, 90 bp, Homo sapiens
ccatcatcctgacagctgtgtactttgccctcagcatctcccttcatgtctgggtcatgtattcgcctgggaatttttctccgaagatac

SEQ ID NO: 416809 - DNA, 98 bp, Homo sapiens
ggctattcatttattctcaccagggtgaaaggtgtagcagtcactcggcctacacccacagcatcgaccttgtgaacccagcgacctgactgccttgg

SEQ ID NO: 416810 - DNA, 100 bp, Homo sapiens
ctcaaaatttgtatcctcagatgaaatggatttgcatcttgtaatgtgtttaacaaagccacgaataacctataatgcatccataccccagtttaccaat

SEQ ID NO: 416811 - DNA, 83 bp, Homo sapiens
ccctggcggacgcaggagcgatggcagcgaccgatatagctcgccaggtgaaaccaaggtgtatgttggtaacctgggaactg

SEQ ID NO: 416812 - DNA, 89 bp, Homo sapiens
atttgttaaggattccaagtaactcttatttggaggaattttgttgtcagagaataaaaggaggttgtccataattgactttaagcagc

SEQ ID NO: 416813 - DNA, 83 bp, Homo sapiens
aagaccctgtggatatgccctgtggacatgacttttgtagaggatgttgggagtcgcaccccagcctgcggtccatgtgcagg

SEQ ID NO: 416814 - DNA, 107 bp, Homo sapiens
ttgctcctctctccttggcctctcctgggatcggcccaaggccagttctccgcagtgatcctgccatgaagcagtttctgctgtacttggatgagtccaatgccctg

SEQ ID NO: 416815 - DNA, 82 bp, Homo sapiens
ggacggcgtggaccacatagacatttacgcggatgtcggcgaagagttcaaccaggagcaatttacagcaatgagggattta

SEQ ID NO: 416816 - DNA, 50 bp, Homo sapiens
gccacacacaccatcatggtcctggtcatgttggcagaactcaagggcaa

SEQ ID NO: 416817 - DNA, 83 bp, Homo sapiens
gaggccatggcgctgaacgagaagcagatcctggagaaagtgaacagtaggtttgtagtgtttggcgatccgccgagaagttg

SEQ ID NO: 416818 - DNA, 97 bp, Homo sapiens
cacggccatcgggcagtggctccgctgggataagggcgactacgtgcacaagtctgtgtttatcattttcttccaaggcgatcagctgaaaaacaga

SEQ ID NO: 416819 - DNA, 100 bp, Homo sapiens
cctggagctctacgcctcctacgtttacctgtccatggtctcggcgcggaagatggccggcggcgtggacggccccatcgggatcccgttccccgaccac

SEQ ID NO: 416820 - DNA, 97 bp, Homo sapiens
gggagcagaggaagccttgaggacctactcacagataggaattgaagaactcagcctcctcccaagctccctgtgggtcctagccacaagctctcca

SEQ ID NO: 416821 - DNA, 102 bp, Homo sapiens
ccagagccgagatgagcagaacctgctgcagcagaagaggtgtcatggagaaactccagctgggcccagagattctgcagcgggaaaatccaaggcttattt

SEQ ID NO: 416822 - DNA, 98 bp, Homo sapiens
gggctggtgcctattgtgacgtgcccaatgtctcttgtgacatagcagcctccaggagagtctgcagatgtggatcctgactcctgagagaagtagct

SEQ ID NO: 416823 - DNA, 88 bp, Homo sapiens
aaacttggagatcttgggcttggccggtttttcagctcaaaaaccacagctgcacattctttaggtcaggaatatcccgctatagtag

SEQ ID NO: 416824 - DNA, 83 bp, Homo sapiens
gccagacaaacagcccgcccgaccccgtcccgaccctggccgccccgagcggagcctggaggattatatctgtccaagatgcg

SEQ ID NO: 416825 - DNA, 50 bp, Homo sapiens
ttttactactgtgacaacattaacgagacaaagcatggaggacacaagaa

SEQ ID NO: 416826 - DNA, 100 bp, Homo sapiens
ccggcagaacacagcagggcggaggaaagtgcaggcccagaggcagagctacacaaccatggaatccaaattaattcctgttctgtgcgactggtggata

SEQ ID NO: 416827 - DNA, 76 bp, Homo sapiens
cagggtccctgaagagggaagacacgcggaaacaggcaaacacagagcagcccaagctgagtagagatgagcagcg

SEQ ID NO: 416828 - DNA, 74 bp, Homo sapiens
gacaaaagaagagttaaatgccctcaagtcgacaggggatgggaccctagggaagcagctcgagagtgtcgtag

SEQ ID NO: 416829 - DNA, 100 bp, Homo sapiens
tagagtccaccagatcatccatgtgagtgaccatgcagcaaaagaaggagggtcctctcagtgattaaggacaatgaaggccaaacagctctacattatg

SEQ ID NO: 416830 - DNA, 75 bp, Homo sapiens
cctgtaaaacgctgtggaaagtctgcactctttcaactggcagaggaaaagcccgatggctccccagtatttatt

SEQ ID NO: 416831 - DNA, 100 bp, Homo sapiens
agctaagagatatctgcaatgatgtactgattactgatctctcattacccaactatctgatggcatcttcggttggactgcttcctacccagcttctgaa

SEQ ID NO: 416832 - DNA, 90 bp, Homo sapiens
gctgcctcgagccggggctggaggctccccgggagcctcctgacaaggtgatccgggcgggccccgcaggaattttatcccctcaccggc

SEQ ID NO: 416833 - DNA, 87 bp, Homo sapiens
tgttgtatgcagtgaaagagttgctgaactacaaagaaagaaatacaggtatcaggatgaagatacacctcctcaagagcatatttc

SEQ ID NO: 416834 - DNA, 100 bp, Homo sapiens
gaacaatcatcagctggaactggcaaagcagctacacaaagagggtcatctcttctattgtacctgcaggtggtataagttgaaatccaaaccaggaaag

SEQ ID NO: 416835 - DNA, 96 bp, Homo sapiens
ctgggctcatgggtcttgctctttacaaagagaaaaatccagttacactcttaaaggaattgtcagtgataaagtctcgatatcaaactttgtatg

SEQ ID NO: 416836 - DNA, 75 bp, Homo sapiens
ctgcgcatgatcgtcatgggacacagaagaattggcagagggggtcgatttgggaggaaaggtgtggctataaac

SEQ ID NO: 416837 - DNA, 101 bp, Homo sapiens
tgggcaagggcgagatcctggagagcctgcaggacggcgcggcagagtccccgtacgcctacagtaacgcctgtggacatctctacagcaatgagtgaacg

SEQ ID NO: 416838 - DNA, 100 bp, Homo sapiens
tgggggttgcagctttgtataaggaaatctgaaatagagtactatgctatgttggctaaaactggtgtccatcactacagtggcaataatattgaactgg

SEQ ID NO: 416839 - DNA, 100 bp, Homo sapiens
aaagaactcaagaaaatcttcgaagacttttcagagtcttttagtcctgctatacagctgcaccttgtacatcaagctccatgtaatgttcctccttacc

SEQ ID NO: 416840 - DNA, 82 bp, Homo sapiens
acgttgtctaaatttcggtagccatggcacaagaatataggcttttttccagacttcaagctcccattccaacagtaagagc

SEQ ID NO: 416841 - DNA, 73 bp, Homo sapiens
ctacgagccagatccactgcattgaggactttcacagggcagcctgtgagcagcaagctgtggctctgactct

SEQ ID NO: 416842 - DNA, 101 bp, Homo sapiens
gtgtttgttcgtctgctgagactcggctccaaggtcacagctcgtaacactgacatgaagccattattatatcaggaaccgaaatggccaagcatatccag

SEQ ID NO: 416843 - DNA, 83 bp, Homo sapiens
caaataaccgttttgaaattgagctctttgttcaatgcctagccacctattcctacagacacggcagtggaaaggaaaagaaa

SEQ ID NO: 416844 - DNA, 100 bp, Homo sapiens
ctgggagagaggtacctctccttttccctctccctttccctaagtaatctatgccagcaattatgacaatgttagcagaccatgcagctcgtcagctgct

SEQ ID NO: 416845 - DNA, 86 bp, Homo sapiens
ccttctccactttcgccagcccgtgccgcgagcgcggcctgcaggaggaggccccgtgtgggccgcggcccggccctcaccatgga

SEQ ID NO: 416846 - DNA, 82 bp, Homo sapiens
ggcgcggcgcggggaggctgaagggacgctcgggtaggcaagatgaaggatttgggggcagagcacttggcaggtcatgaag

SEQ ID NO: 416847 - DNA, 82 bp, Homo sapiens
ccagctgcgagtgcggcctcggctggcggcggcaccaggtgagaagccctaccactgcaactgggacggctgcggctggaag

SEQ ID NO: 416848 - DNA, 100 bp, Homo sapiens
ctcggacgctcctgctcggctgggtcttcgcccaggtggccggcgcttcagctctatcttaaaggaaccaaccacagaaagccttcaagccctgtgtgct

SEQ ID NO: 416849 - DNA, 51 bp, Homo sapiens
tccctggttaatgtgggccatgtctgggtttcgtggctgtcccaacaaaaa

SEQ ID NO: 416850 - DNA, 82 bp, Homo sapiens
cgggatctcaggtcctcgggggcggcggccacgccaaggacggacaacacaggcagttctacataccggccaccccctcgga

SEQ ID NO: 416851 - DNA, 50 bp, Homo sapiens
cagaactgcagccctcccagcgtcgatgtgtcgtggaggccgaatgtttg

SEQ ID NO: 416852 - DNA, 98 bp, Homo sapiens
cacggccacactcaccactccatggccacacaggtcgctacgcatttcggatctggaaacctctagaacaagttatcacagaaactgcaaagaagatt

SEQ ID NO: 416853 - DNA, 83 bp, Homo sapiens
agaaaagggagtattttgtcaaagttgaaggtcgcaatggaagaagagatcgccgcgctggtcattgacaatggctccggcat

SEQ ID NO: 416854 - DNA, 89 bp, Homo sapiens
caaggaagaaattgttcagttcttctcaggtcacggtctagatcacattctcgatccagaggaaggcgatactctcgctcacgcagcag

SEQ ID NO: 416855 - DNA, 100 bp, Homo sapiens
ccaggggcgggaactggccgggaggaccgcgcgggagagcacggatgggcaccctgggctcgatgtgtctgatgatttgtgagcctcaagtgactactct

SEQ ID NO: 416856 - DNA, 100 bp, Homo sapiens
gcagtgtggctcataagccacgaaccgggaactccactttgtggcaccgtgagattctccagagattcagttgtggaaattctttttgaacaagataatg

SEQ ID NO: 416857 - DNA, 74 bp, Homo sapiens
ggccgcctgggcagtgccatggagtgttgtgagcaagatggaattggggaggaggtgctcaagatgtccacgga

SEQ ID NO: 416858 - DNA, 82 bp, Homo sapiens
ccaggacagtcgcgaggttcgagtgttgcagagcctgcggggcaagatcttggtcccaggctgcacccatggcagaaggagg

SEQ ID NO: 416859 - DNA, 75 bp, Homo sapiens
actgtcctggtacaaggatgaggaggctgaaggtgatgtggccgccctcaaccgacgcatccagctcgttgagga

SEQ ID NO: 416860 - DNA, 100 bp, Homo sapiens
gaaaagggaaaacttgctgcggttgctcaaggaggcaagtgaggcctatctggttggcctttttgaagacaccaacctgtgtgctatccatgccaaacgt

SEQ ID NO: 416861 - DNA, 100 bp, Homo sapiens
ccctcaccgcggcatcaagcaggtccggacccactggctgctggagcttgtcaccaccaggttgttccaagttgttgggaaaacagacgacacacttgcc

SEQ ID NO: 416862 - DNA, 100 bp, Homo sapiens
caggaccccagatgtctgacagccctgtgtgacaccaagataagtaacaatgtggtccaacccatgaaggagctatatggaattaacctctcagatggcc

SEQ ID NO: 416863 - DNA, 80 bp, Homo sapiens
ctacaacctgcacaacctctacggcctgaccgaagccatcgcctcccacagggattagaaaatgagtatcaggaagaagg

SEQ ID NO: 416864 - DNA, 74 bp, Homo sapiens
agagagatgagcagcttctgagttctctacttttagagtcgaaaataaatcctaacactgcataccagaaacaa

SEQ ID NO: 416865 - DNA, 99 bp, Homo sapiens
gggccctgaggctgcaccaagtggcgaaggagccggctccaagttccagctattcttcagatgctctggattttgagacggagcacaaattggaccctg

SEQ ID NO: 416866 - DNA, 100 bp, Homo sapiens
ctcgtagcaataatattagctgttttgcaccttcatagtatgaaaaggattgaactggatgacagtttacaagtccttccactttctctctgaggcagaa

SEQ ID NO: 416867 - DNA, 100 bp, Homo sapiens
ctctgctgatccgaagaatcacaggaagatttggagtcaaaatatggacctgagaaaatatctccagaaaatgatatttttgaaataaatttacccaaac

SEQ ID NO: 416868 - DNA, 98 bp, Homo sapiens
cctgctgcacccacgaatctgcccacccctcctgtaacccagcctgtttcacttcttgagaaagcaattgagctgcgtctggcaaaaattgaccatac

SEQ ID NO: 416869 - DNA, 89 bp, Homo sapiens
ccgccgtgcagcgcttcctggtctcccgggtcaccagccaaggccacctttgatgccatttctaagacctacagctacctgacccccga

SEQ ID NO: 416870 - DNA, 50 bp, Homo sapiens
ccgggctgccccgcaggatcatcaaggactgcctccaagtggaagttggc

SEQ ID NO: 416871 - DNA, 100 bp, Homo sapiens
ttacccgacctcagatgctcccttctgctcctgaaagccaaacttggccctgctggcaacaaagtcatcagtccctctgaagacaggaaacaaccttcca

SEQ ID NO: 416872 - DNA, 90 bp, Homo sapiens
atttcacggacactgaaagcagagaccatggagcttcttgacggaatcagtccccaatgcctggaaattcctcattggattactgtgttt

SEQ ID NO: 416873 - DNA, 75 bp, Homo sapiens
acatgaacctggcctctgtggaaagatccccagcaggccctcaaggagctggctaagatgtgtatcctggccgac

SEQ ID NO: 416874 - DNA, 101 bp, Homo sapiens
gttggatatttgcttggaaaaacgtgtgggtacgaccttgatattaataaggcagcggaaagaagaaatatgaatacggctccatcaagacccagccccac

SEQ ID NO: 416875 - DNA, 75 bp, Homo sapiens
tttctcctggggaacccgttcagctctccagtgggacagcgcatcgacctggtcctgtagacgggaaggagcctg

SEQ ID NO: 416876 - DNA, 75 bp, Homo sapiens
gccgaggccaagatggcggtgctgtcaggtcacgagaagagaatgccttctagatgcaaaatcacctccaaacca

SEQ ID NO: 416877 - DNA, 96 bp, Homo sapiens
tggtttctttgctggagcacttgagccacgtgcatgaaccaaacccacttcgttcaagacaggtgtttaagcgaagagtctaacctgtctctgcaa

SEQ ID NO: 416878 - DNA, 75 bp, Homo sapiens
atgctacaaactgtttgaggataactgacttaaaatctgggttggtcaaagaaaaagtgatgtatgaaaaagagg

SEQ ID NO: 416879 - DNA, 126 bp, Homo sapiens
ggtcccttccttttggggctctcactctggaggatggggtggatgggaggatgatcacggacgtgcagctcgccatcttcgccaacatgctgggcgtgtcgctcttcttgcttgtcgttctctatc

SEQ ID NO: 416880 - DNA, 100 bp, Homo sapiens
ctcagatgacgcttcatctgtttcacaaattcagtctcaaactcagtcaccgcaaaatgtccctgaaaaattagaagaaaaaaagggcctcattttatga

SEQ ID NO: 416881 - DNA, 100 bp, Homo sapiens
gaggccgccatcaaccgccagatcaacctggagctctacgcctcctacgtttacctgtccatgggtctcctatggacagaagtgcgggcaaggagctttg

SEQ ID NO: 416882 - DNA, 96 bp, Homo sapiens
tgatcgtagagcacgcccggggcccgcgtcgcgatcgcgacggctacagctacggaagccgcaccgcttacaaacacgcagatggcaagaagattg

SEQ ID NO: 416883 - DNA, 101 bp, Homo sapiens
agacttggccaaatggacgggactattaaggtcgcaatggaagaagagatcgccgcgctggtcattgacaatggctccggcatgtgcaaagctggttttgc

SEQ ID NO: 416884 - DNA, 100 bp, Homo sapiens
ctttagtcctctctcacctgatgtgcctatgcgggaacttcattgcaggccgtgtgtcaccctgaccacgtctatctctgggggtcgcacgttgcgggca

SEQ ID NO: 416885 - DNA, 75 bp, Homo sapiens
ggagatgattgagccgcgcacgctacagtacaagtgccaggtggagctcaacaggaaagtcctagcggatctggc

SEQ ID NO: 416886 - DNA, 51 bp, Homo sapiens
aatgccacagcatcctccagcacctcagatcttgcttctgaaatatctacc

SEQ ID NO: 416887 - DNA, 76 bp, Homo sapiens
cgagaagcgcagcaacgtgcggtgggaccacgagagcgtggggatcgtgggccgcactggggctggcaagtcttcc

SEQ ID NO: 416888 - DNA, 75 bp, Homo sapiens
aatatccacaccttttctgcctgcctagatcgacgtaattaacacattccagacgggagcctcttttaagggagt

SEQ ID NO: 416889 - DNA, 100 bp, Homo sapiens
gctgagtccggagcgcctagccctaccggactacgagtatctggtggaagatagatgataagcctgtaaaaattgacaagtgggatggatcagctgtgaa

SEQ ID NO: 416890 - DNA, 100 bp, Homo sapiens
ttccagaaacgcaagaagtacaacgtgccggtccagaggggttcgagttctggagcctggatgtgaatggaggcgatgagtggaaggtggaggatctctc

SEQ ID NO: 416891 - DNA, 74 bp, Homo sapiens
ccgcggtgcaccgcctgctgggagcgccgctcaagggctgaaatctctttaatgatggagggaagcaggcagac

SEQ ID NO: 416892 - DNA, 100 bp, Homo sapiens
ggaagagctgcagtctttgtgggacaaggtgctgccttcacctgcctggagactgccttccgcctggacgccctgcaccggcagatgaagcttctgggag

SEQ ID NO: 416893 - DNA, 100 bp, Homo sapiens
gtcaccatctccaagccctgtggcaaactgaccaagcccaaacctcaaggcgcacgctctccgcccggggcaggagccccggcttcaggtaggggcctag

SEQ ID NO: 416894 - DNA, 50 bp, Homo sapiens
actaaaaagcttccccatcctgatctggttgctgctaaatgggaaaaact

SEQ ID NO: 416895 - DNA, 100 bp, Homo sapiens
agccacaaagagacagatgaagatgcagaaaggaaatgttctccttatgtttggtctactattgcatttagaagctgatgctgctgcagcttcagcaatg

SEQ ID NO: 416896 - DNA, 83 bp, Homo sapiens
cgggtggcagcgacagagccaaaatcagagctggaacctgaggagagagccatgacagtgcagatcctgctgaagctggaccg

SEQ ID NO: 416897 - DNA, 75 bp, Homo sapiens
gtggacgctgactcggaagtgcaggttgacatcatggacatatgtgagtccatcctggagaggaagcggcatgac

SEQ ID NO: 416898 - DNA, 75 bp, Homo sapiens
gccatcgttgctgccttcttcgtcaagaccctacagcttggggcctgggctcctctgaccatcctcattgagaaa

SEQ ID NO: 416899 - DNA, 76 bp, Homo sapiens
ccggactccatcgactcccccggctcttagactagggaaagttggggacatgctgctacaatacggctaatctttc

SEQ ID NO: 416900 - DNA, 151 bp, Homo sapiens
agaacttgctggacggaccgcccaaccccaaaagagccaaactcagctcgcccggtttctcggcgaatgacagcacaggctggacaccaaccagttccaggaccccgtgatggagctgctgggcagcgtgctgagtgggaaggactgtcgc

SEQ ID NO: 416901 - DNA, 89 bp, Homo sapiens
cgggcatcggggtcatctccttcatgcagagtgacatgggtcgggaagcagcatatgggcctggagaacagctggcgccagcaccgcga

SEQ ID NO: 416902 - DNA, 100 bp, Homo sapiens
tgccagctctccagagagaaaaggcatgtggagaccccaaggcaaaaccatcctatcttatcgacaaaaacctggaatctgctgtgaaattcatagtcag

SEQ ID NO: 416903 - DNA, 82 bp, Homo sapiens
cttggccgtgcttgccctgtcatcccacctgagaaccatgctcaccgaccctatcctgggtttgagcagtttaaaatgtcag

SEQ ID NO: 416904 - DNA, 87 bp, Homo sapiens
caagatggcggcgcagccaccccgcgggatacgcctcagcgcggttcgagaacttgtcttggacaattgcaaatcaaatgatggaaa

SEQ ID NO: 416905 - DNA, 82 bp, Homo sapiens
ccctcagctccgagtccagggcgaggggtgctggcactgtgggtcctggtgacgcacgtgatgtacatgcaagattattgga

SEQ ID NO: 416906 - DNA, 90 bp, Homo sapiens
ctcttgttgaaatccgaaatttcttgggtgaaaaatatatccgcagggttcggatgagaccagattttcagaacaacgtgcaggtcaaag

SEQ ID NO: 416907 - DNA, 100 bp, Homo sapiens
aatgatgtcatgatcagaaaagagttttttgctccactcaagcctgttagaatcaccatggaatacagctccagtgggaaggccactggagaagctgatg

SEQ ID NO: 416908 - DNA, 100 bp, Homo sapiens
tcggcgcggcagcgctccagctcgctctccaccttcagaatttacatagtacatgacgaagttaaggataaagcttttgaactagaactcagctgggttg

SEQ ID NO: 416909 - DNA, 75 bp, Homo sapiens
ggccagagcccattatccctgtcactcagccccggtcggccctcctccacgctgacttccgggtctcactctccc

SEQ ID NO: 416910 - DNA, 101 bp, Homo sapiens
acacgcaaaataaaagacacttgtattcagtcaccaagcaaagaggaacttacaatgtctcagaaaaatggtgggaatgttcttcagatgatgtatgagaa

SEQ ID NO: 416911 - DNA, 100 bp, Homo sapiens
aagaggaggacatcccatgcggctactcctgcccagcgtggtggggcagcagaagctccagagcccagacttgcaggatgagttccacccgttcatcgag

SEQ ID NO: 416912 - DNA, 74 bp, Homo sapiens
gtcggccctgcagcacgagaaggagggttacaccatctacaagacgcagctggtacaggacgagaacgtgcgcg

SEQ ID NO: 416913 - DNA, 99 bp, Homo sapiens
atgatagatacatcagtgtgggaagccaagcagatacaagtaaatcgatttagtaaggtggaagacagagcaatttttgtcactgaccgtcacctgtat

SEQ ID NO: 416914 - DNA, 100 bp, Homo sapiens
catcagttatattccatctactgtctttttcttcaatgggcagcatatgaaagtggattatggcttacaaagagccctgttttgtgtattcccgagttgg

SEQ ID NO: 416915 - DNA, 104 bp, Homo sapiens
ctggccacttgcttgggatcctttatcctggtcatcttctatttccaaagttttaaaatcaaagatgggaaaatcggagaaaattgcccttccccatggccagc

SEQ ID NO: 416916 - DNA, 82 bp, Homo sapiens
ggcaaaactgcgctttctggctgaggaggcccctcgggaggcattggcacagaccgtgctcgcagaagtgcccacacaactg

SEQ ID NO: 416917 - DNA, 100 bp, Homo sapiens
caacttcaagtagtggaaggagtacagggaagtctataagctttgcaacagaattacagagtatgatagcagcccgacggccatggaggctgaagagacg

SEQ ID NO: 416918 - DNA, 82 bp, Homo sapiens
gctcaacaaggagctgggctgcatcaactcgctcggagcccaagatcctcttctcctacaaatgccaagtggacgagacaga

SEQ ID NO: 416919 - DNA, 82 bp, Homo sapiens
ctggttccgttgcgcgccccggatgtggcgcggctgcgcgaggagcaggaaaaggtatttacatgaggaatttccagagtcc

SEQ ID NO: 416920 - DNA, 75 bp, Homo sapiens
cctgagccctgtgagctggaggaaaggttcgccctggtgctggatttttcaagccacattcaattgataggatga

SEQ ID NO: 416921 - DNA, 82 bp, Homo sapiens
gaaagatagcctggatccatcttttgtgcatgcgtcgcgccttttggcagaagatttttcgaaagaaagcagtggaacttgg

SEQ ID NO: 416922 - DNA, 127 bp, Homo sapiens
ccggcgtgccccaccatgtcagacgcagccgtagacaccagctccgaaatcaccaccaagaggctgggaggcggcagaatgcagccagaggagggcacaggctggctgctggagctgctgtccgagg

SEQ ID NO: 416923 - DNA, 97 bp, Homo sapiens
gccattgcccaggcagagtctctgcgttacaaactcctaggagggcttgctgtgcggagggcctacttccagcagtacggctgcaccttcaccgctg

SEQ ID NO: 416924 - DNA, 97 bp, Homo sapiens
aaacccatgctaggagttatacataagccattttccgaatatacaggaacgtcagtaatccaggtgacagcttcagatgcagatgaccccacttatg

SEQ ID NO: 416925 - DNA, 76 bp, Homo sapiens
ttatttggcagatctgaagggaaagctccagatactaaactccatccggcacaacctgtcactgcatagtcgattc

SEQ ID NO: 416926 - DNA, 89 bp, Homo sapiens
cgagcttgttttgtcccggactcggtagtagctgggtgtgacgcaagagtgaaacagaaagcctggcagccacggtttcctgggattaa

SEQ ID NO: 416927 - DNA, 101 bp, Homo sapiens
tgccgccacctcggtcgcgatgggggcgcaggaccggccgcagtgccacttcgacatcgagatcaaccgggagccggccatcagtggcctatgtacatacc

SEQ ID NO: 416928 - DNA, 100 bp, Homo sapiens
agctccccctataagcctcggcctccacaggcagaggcaaggctggcagcaaaacgggctgcccgggcagaagcaagagatatacgcatgagagaactgg

SEQ ID NO: 416929 - DNA, 75 bp, Homo sapiens
ttccactacacttttgccctcaaccgggatgtgcggaagttcaaggagacaaagaagcagtttgacaaggtgcgg

SEQ ID NO: 416930 - DNA, 101 bp, Homo sapiens
tgaagctgcatataaaactgctgaatctgaagaactttcttctgatgaagagatgaaaatggcggagatgcgaccaccattaattgaaacctctattaacc

SEQ ID NO: 416931 - DNA, 100 bp, Homo sapiens
gtagaaaccaacctcttcctggaggagattcaggccaagtcctgtatctgccatgtctgtggcgtccacctcaacaggctgcattcctgcctctactgtg

SEQ ID NO: 416932 - DNA, 82 bp, Homo sapiens
cgctgttcgtgctgctgggattcgcgctgctgggcacccacggagcctccggggctggctgaaggtgatgtggccgccctca

SEQ ID NO: 416933 - DNA, 83 bp, Homo sapiens
gaagtgcagctgcctcagttcttagcgcaggtcctgggaactccaacaagggagcaaatcagagaaatgaacccaaactacac

SEQ ID NO: 416934 - DNA, 56 bp, Homo sapiens
ccattggcaccctggaaggcagccccccagagaaactggagagtgagaagctaaat

SEQ ID NO: 416935 - DNA, 100 bp, Homo sapiens
actgtgaatcttccattgtgattgggtcacaagccaattctattgagaactcaataccgttgtcatcctgcaatcagtgctattgctaatgatctgtttt

SEQ ID NO: 416936 - DNA, 87 bp, Homo sapiens
tctctccagaaaatcttgtggacaaatccaggggaagacgagctcatctgcgcctttgtttagaacgcttaaaagttctgattccac

SEQ ID NO: 416937 - DNA, 132 bp, Homo sapiens
tctgaatcatggtcttttggtaaagttcctttgaacacatgccttcaggaactcggaccattggagccagaggatttcagtcataatcggttgtctaactggaacatcagcttggaatcacaaacattacag

SEQ ID NO: 416938 - DNA, 90 bp, Homo sapiens
ctctgtagtgtttgccaatgttggagccgtctgcaaagtgtccccggcaagaaggcctcttatgtgaggagctgaagaggaattaaaata

SEQ ID NO: 416939 - DNA, 75 bp, Homo sapiens
tcctttggtagtccagaaagaaacatctccgacagttagttaatatgtgcatcaacccagatccagagaagcgac

SEQ ID NO: 416940 - DNA, 143 bp, Homo sapiens
cctgcctctctctccgctccccacttcagacgagctcttcctgcctggaatctgatcgagctgggagcattagtacccttgattctttagactttgcaagatattcagatgatggtaacagggaaacagatgaaaaagtggca

SEQ ID NO: 416941 - DNA, 83 bp, Homo sapiens
tgcctccggggacaagaaactagagcaaataaccgttttgaaattgtacagcagggaagaactggaaactcagagaaagaaac

SEQ ID NO: 416942 - DNA, 75 bp, Homo sapiens
aaaagtaaacagctgaaggatgaaggagccagtttggctgaaaataaaagttgactgaaacctcctcccgttacg

SEQ ID NO: 416943 - DNA, 74 bp, Homo sapiens
gagctggacctctacctggcctacttcgtgcgtgagcgaggcaattgaagatgaaggtggtaatcctgacgaaa

SEQ ID NO: 416944 - DNA, 75 bp, Homo sapiens
tcatggtcttccttctcttcattgccttcaactttggacctgtcaggtctccaactggtttggcaacaagaggat

SEQ ID NO: 416945 - DNA, 75 bp, Homo sapiens
cagttctcccaccttgacctcccaaagcgctgagattacagcttctcaataggtttggcatggacaagatctatg

SEQ ID NO: 416946 - DNA, 75 bp, Homo sapiens
gggagaaacctcgtggcctggtctccattatttgagatgagttacatcttggagatggagtctccttctgtcgcc

SEQ ID NO: 416947 - DNA, 132 bp, Homo sapiens
agaccagtaacaaaaggtctgaaggtgtcgggacctcttcatctgagagcactcatccagaaggccctgaggaaggatggcttaaattccttggtccttgatttagattttcctgctttgaggaaaaacaag

SEQ ID NO: 416948 - DNA, 73 bp, Homo sapiens
tccagcagcctctgcttcccaggagagaggtgctgaagtccacgaagaggcatgaaagaattactgatgtcct

SEQ ID NO: 416949 - DNA, 97 bp, Homo sapiens
ctggtggagagcggggtggatgtgaactcccaaaatgaggtcaacggctggtgacgcggcgcacggcgcggatggtggccgagtggcagtgtgtggg

SEQ ID NO: 416950 - DNA, 118 bp, Homo sapiens
gaagtttgtcctgtcctggatcagtttctttgtcatgtagccaagactggagaaacaatggcagcaaggcgaaccccatccctactcactggagctcagctttgatttttaacctccc

SEQ ID NO: 416951 - DNA, 100 bp, Homo sapiens
acatgggctcttcctctagcagccagtatactttctgtcagccagaaactgatgtggaagatgtgaaatttgtcatcaattatgactaccctaactcctc

SEQ ID NO: 416952 - DNA, 75 bp, Homo sapiens
cgaggcttcacggaggaggtgggtgcgctcccctggggccccagggcccctgactctgaaggaggtggaggagct

SEQ ID NO: 416953 - DNA, 101 bp, Homo sapiens
gagtacattgacagacttttcagtattgtaagaccaagaagacttctctacatggcaatagatggagtggatgatgatgctgaagctatccttgctgcaga

SEQ ID NO: 416954 - DNA, 74 bp, Homo sapiens
tgtggatcgctgtgatcgtcacttgacgaagttatacggaagcgtctcctcattgatggagatggtgctggaga

SEQ ID NO: 416955 - DNA, 75 bp, Homo sapiens
gcagaagattatacctcactattctcttgctcgatggctactctgtaatggcagctatgaagacggccaagtggg

SEQ ID NO: 416956 - DNA, 75 bp, Homo sapiens
cctcctcgaagtcatcccagtattgaaaatcttcaagagcagcttagagacaaggaaaagcagatgagcagcttg

SEQ ID NO: 416957 - DNA, 75 bp, Homo sapiens
ctcactcatgcctcccctgaggatctccctgattcaggatatgaggatctggctttgctgcccacgctggagtgt

SEQ ID NO: 416958 - DNA, 90 bp, Homo sapiens
caaagactgtggaacttttaagtggagtggtggatcagaccaaagatggatgaagactggcccatttgcagagcactccaaccagctgtg

SEQ ID NO: 416959 - DNA, 75 bp, Homo sapiens
cggcggaaaggataagcctcgacttagaagctaccgagttaccctaagaaagaatgattgactggctatcctggc

SEQ ID NO: 416960 - DNA, 83 bp, Homo sapiens
ctaagcctgcacagccgcggcggcagcagcagtgagagagctgccatcagtcatgctcttaaacggggactgcccagagagcc

SEQ ID NO: 416961 - DNA, 100 bp, Homo sapiens
ggactcggagctgagaggagctgctgctcggaccagcgcgattgagaggatccagaatccagatctctggaatagctaccaggcaaagaaaaaaactatg

SEQ ID NO: 416962 - DNA, 74 bp, Homo sapiens
cattttactccgcccagaagacaacatcaggctgaaaaattggaagctccaccacccaccccaggacagctgag

SEQ ID NO: 416963 - DNA, 75 bp, Homo sapiens
ggtctggacactgaaaccaccgtggaagtcgcctggtgtgaactgcagctgagcttcagtcattgtctattcctg

SEQ ID NO: 416964 - DNA, 90 bp, Homo sapiens
ggaatcttcaatcaatcatatttcacaatgaatggtagtgtctagaaagggtatgtcccttcaagagagaggtgccaatgtccaaccggc

SEQ ID NO: 416965 - DNA, 80 bp, Homo sapiens
caaaatggagttgccggagagacagcccagtgagacggtttaagcggaagcatcttactgccattgactgccagcatttg

SEQ ID NO: 416966 - DNA, 98 bp, Homo sapiens
attccaatcatcttacaaaactggaaactgaggcatctaatatgaagaagaggtgtggtggaaaggtcttccagaaccagaggctaagcacacagcag

SEQ ID NO: 416967 - DNA, 75 bp, Homo sapiens
ctcattttgattgtagtagcagtggaggtatttaccttgctgtggattgctgactggatggtccatcacttctgg

SEQ ID NO: 416968 - DNA, 98 bp, Homo sapiens
cgcacaggagctgccctcgcgacatgggtcacccgccgctgctgccgctgctgctgctgctccacacctgcgtcccagcatccctctctacctgccaa

SEQ ID NO: 416969 - DNA, 150 bp, Homo sapiens
aaggaacctgatgctttaactttgctggccccagccgctggagacacaatcatatctttagattttggcagcaacggaagaggatcacctagcccgggtagaagaggcaatcacccgtatgcttgtgtgtgccctgaaaactgcagagaa

SEQ ID NO: 416970 - DNA, 100 bp, Homo sapiens
aaagatgtcatgatggagaattatggaaacctggtctcactgggaaaacgactgtcttcttctgccaaaatgtcaggaattggaaataaaagagcagctg

SEQ ID NO: 416971 - DNA, 78 bp, Homo sapiens
ggaggttgggctgaactgcagtgggagaggagaagagatgctggcgtgaagggtagctgctgctggtggtgacaatgt

SEQ ID NO: 416972 - DNA, 48 bp, Homo sapiens
cgcgcgactcggcgcccgcccgcggtttaaggagttcatgagtaaaca

SEQ ID NO: 416973 - DNA, 100 bp, Homo sapiens
caaacatatggtgtaatcactttatatgagatcaccccccaacttgcccttcaagttctacttcagtttgataaggctataaatgcagcactggctcaga

SEQ ID NO: 416974 - DNA, 74 bp, Homo sapiens
gtggatatagcacaccatccccagccaactgtgccctgtccacggtgcctcctgcatgtcctgctgccctgagc

SEQ ID NO: 416975 - DNA, 51 bp, Homo sapiens
ctatagtcggagtggagaactgcaagtacaagccagctgccatgttgtgag

SEQ ID NO: 416976 - DNA, 81 bp, Homo sapiens
cgcagggggacggggaccagcagctgtcgccgccgctctcaggtgccgtgagcgatgtggagatgcaggaacactatgatg

SEQ ID NO: 416977 - DNA, 75 bp, Homo sapiens
cctgcaactaactccattcttaattgaattaaacaaccaccatgtcgagcaaaaaggcaaagaccaagaccacca

SEQ ID NO: 416978 - DNA, 82 bp, Homo sapiens
cgacagtggcggcggcgccatggcagggcttgcaggtggccgtctgcccggcccagcaccatgcacacgcttgtgttcttga

SEQ ID NO: 416979 - DNA, 100 bp, Homo sapiens
tcgcgctagtgcgccgctcctgcgggtgcccttgtcagaaaaatgtccattccacaaggtttgtgacatatttctgtgagcaggttctccctaacctcgg

SEQ ID NO: 416980 - DNA, 74 bp, Homo sapiens
ctacttacatttcatctttttgatgcttttgtcagtgtactgggtgctctgtggatgtgtatagttttaaaccc

SEQ ID NO: 416981 - DNA, 75 bp, Homo sapiens
cagcagttgccccatctgctcaagatacaaactggactctcaggacaaaacgacaccagccaaaccagcagcccc

SEQ ID NO: 416982 - DNA, 90 bp, Homo sapiens
gcaattctatccgttgatcttagtggtgaaaaaggacagaataacgggctcccagattcacaagccccaccaagaggatcaccccaggaa

SEQ ID NO: 416983 - DNA, 100 bp, Homo sapiens
gccatctgttctgccctggctgcctcagccctaccagcactggtcatgtctaaaggtgttggagagcacaatggctgaacaagtccttcctcaggctttg

SEQ ID NO: 416984 - DNA, 82 bp, Homo sapiens
actgcagcctcggcggtcagcagactcggtgaaatacctggagtgctcagctctcacccagagaggcctgaaaaccgtgttc

SEQ ID NO: 416985 - DNA, 76 bp, Homo sapiens
tggcaagccggactaaggaccggggacttcttgattgagattccagactccatcatttctcgtggtgttcaggtgc

SEQ ID NO: 416986 - DNA, 90 bp, Homo sapiens
ggctgcgagagtggcagaggagctggcggagagcggcctgcgggcgatcgggccgagcgccagccagcctttgacacctttgatgggtcc

SEQ ID NO: 416987 - DNA, 100 bp, Homo sapiens
cagcccgtatcggggcctttatttctcgtcggcggcgccctgcaccgcgcctcgcaaagtctgtcagtggcccagcggaagtttgctcattcactcagag

SEQ ID NO: 416988 - DNA, 75 bp, Homo sapiens
gcaggggctgcaggagcaagtgaccaggagcaggactggggacaggctccaggaggccagagctctactgaagcg

SEQ ID NO: 416989 - DNA, 82 bp, Homo sapiens
ggcgttgctgcgctccgtggccggggagcaagcgccagaaagcgtggatacccatcaacgaagttttgatattggaattcag

SEQ ID NO: 416990 - DNA, 100 bp, Homo sapiens
gttctgaagaaacgattactttagtatcaatatctgctacaacatcacattttcatgcatcattttttcaaaataggcctcttatacctagaagtcccac

SEQ ID NO: 416991 - DNA, 90 bp, Homo sapiens
tgcagctgttcagaccgcgctccgccgaggcttcagtttcacattcttggtacctcctggtggtgcctgggagggagccactgctgtaca

SEQ ID NO: 416992 - DNA, 116 bp, Homo sapiens
tcggtgctgtggtgcagagctagttcctctccagctcagccgcgtagttgaagactgggatagtttccaagctattttggatcatacctacaaaatgcatgtcaaatcagaagcca

SEQ ID NO: 416993 - DNA, 76 bp, Homo sapiens
tgctggatttaagcactgctgcactttatgaggtcagcccaaggccaaccccactgtcactctgttcccgccctcc

SEQ ID NO: 416994 - DNA, 142 bp, Homo sapiens
tggaccatgctggtgaataggttcctgggccccaagaacagccgtcgggccttgatgggctacaatgaccaggaacgatggcactgaatttggaggttctatctaccagaaggtgaatgagaagattgaaacatccataaac

SEQ ID NO: 416995 - DNA, 76 bp, Homo sapiens
ccaaggccaagctctccaagttcagcatccccaagcagggggagggtcgacatgttaaaacgggtcagttggcagc

SEQ ID NO: 416996 - DNA, 76 bp, Homo sapiens
gttggcgcccggcagcacgtgttcctggtttcagctctaagcgaaagacatgaggcctcagcctgaaatgaggttg

SEQ ID NO: 416997 - DNA, 100 bp, Homo sapiens
ctttaagtgacggggtagacaaaagctggaacaaaagagcctctattaagttagagatgtttatgattacttccgagctgtcctgcagcgtgatgaaaga

SEQ ID NO: 416998 - DNA, 100 bp, Homo sapiens
tcagttacaagagaaactttatgtgcctgtaaaagaatacccagatgaagatattttcgattcagataaagaagttcctatcgaatccacttttgttcgc

SEQ ID NO: 416999 - DNA, 74 bp, Homo sapiens
gggcaaatttcttggtgattctgcaaacctaagcattttgtctggagttgatctctctaatgtattagatcttc

SEQ ID NO: 417000 - DNA, 98 bp, Homo sapiens
aagagtgcaaagactttgtggacatgtctctggagaatggttcgactgttgcctgataccatcaatagcattaacctagacagaattcttctggatat

SEQ ID NO: 417001 - DNA, 73 bp, Homo sapiens
cagttagtcacccacctacatgttgaggatacggatgtcctctacatcgtgtctcagttctttgtagaagagt

SEQ ID NO: 417002 - DNA, 100 bp, Homo sapiens
agcatttcttactacaataatgagaagccatttcgtagagtgacgttttctgttgtgagtcagcctcaggacccacatcaggggtcactgcagagttgct

SEQ ID NO: 417003 - DNA, 51 bp, Homo sapiens
gttaaaacctgacacttttaacagagtcttcctgcgagcaattaatcagta

SEQ ID NO: 417004 - DNA, 101 bp, Homo sapiens
ctccaggatcccacctagctgtacttgcctcatagctggtgaaggattcttctgaacccccaccctaccccctaaagatctccaagaaggagaagcttctc

SEQ ID NO: 417005 - DNA, 74 bp, Homo sapiens
cagcgcagcgttccaccgctcgggtttggctggagtctgataaggaggagaaaccacaacattctgtgataccc

SEQ ID NO: 417006 - DNA, 75 bp, Homo sapiens
gggccgggtgcgaggcacgctcttcctgccgccaggtaaaaggcccaggcattgggcttttgggcatttctctag

SEQ ID NO: 417007 - DNA, 75 bp, Homo sapiens
gcgccgccaaggcggcgcgcgagctggagcactcgccgtctgcttctacgctttgcctgggagaggccctggtgg

SEQ ID NO: 417008 - DNA, 97 bp, Homo sapiens
ccatggaagctgccggcagccctgcggctacggagacaggtgtcatggagaaactccagctgggcccagagattctgcagcgggaaaatccaaggct

SEQ ID NO: 417009 - DNA, 89 bp, Homo sapiens
tggccagggtgccctcagggctcccagacctcaagctcctccaggatgaatttcacccattcatcgaggcacttcttccacatgtccgt

SEQ ID NO: 417010 - DNA, 82 bp, Homo sapiens
cgatccagcctgcggagcctgtggggcaggccccttcccagctgcctgcctgccctagccagctcccaggtgaagagactct

SEQ ID NO: 417011 - DNA, 101 bp, Homo sapiens
ctgggagatccatagggaggacggcggaacatctggaggctgggaaatggtgtcctagttgcctatgaaggtttgccacttcatcttgcactgttccccaa

SEQ ID NO: 417012 - DNA, 75 bp, Homo sapiens
attgtaaagctttatggagcctgcttgaatccatgctattaccacagctactggcactccatggtctatgtgcca

SEQ ID NO: 417013 - DNA, 90 bp, Homo sapiens
ccttgaccagcatcttggctgaccttgagtgcagctccccctataagcctcggcctccacagatggcgtttaatgattgcttcagtttga

SEQ ID NO: 417014 - DNA, 100 bp, Homo sapiens
ttgaacagcagattttgtcaattgaccgagaaatgctagaaaaattgactgtatcctatgatgaagcaggtttccacgctttgagaaggactgaatgaga

SEQ ID NO: 417015 - DNA, 90 bp, Homo sapiens
aaaagctgtgtccattttttctcaaatcatgaatccagaaagcatagcctgcattaatttaaatgcctatatgaacccaatagcaatggc

SEQ ID NO: 417016 - DNA, 82 bp, Homo sapiens
cctcggcctcgcggcgacggcggcggtggcggcttggacgactcggagagccggttcgagaacttgtcttggacaattgcaa

SEQ ID NO: 417017 - DNA, 75 bp, Homo sapiens
aaatgaatctgagcaatatggaatattttgtgccacacacaaaaaggtgatctgtgaaaatggttcgctattcac

SEQ ID NO: 417018 - DNA, 75 bp, Homo sapiens
caaacgtggagatcaactcctctctgttaatggagtggagttgatccctgaattttattatctccctgagatgtt

SEQ ID NO: 417019 - DNA, 100 bp, Homo sapiens
aaaaggaggacagcagccccaaggaggagaccgacaagtgggcagtggagaagggcaaggaccacaaagagccctggcgttagaggagaagcggcgtctg

SEQ ID NO: 417020 - DNA, 100 bp, Homo sapiens
tgactggtggtgcagcctctgtgaagcagcaccattcaagtgcccataacaaaggattgccatttcctaaatccggtgtggtctccaggttggagcaagg

SEQ ID NO: 417021 - DNA, 88 bp, Homo sapiens
tccagtagaaaactggtcaaggaagctagacgaagtttcatcatgttgtccaggctggtgtcaaactcctgacttcaggtgatccacc

SEQ ID NO: 417022 - DNA, 73 bp, Homo sapiens
ttacatgccatggccttctacgttgtgaaaatggtgatgcaggttctgaatgctgatgccattgttgtgaagc

SEQ ID NO: 417023 - DNA, 97 bp, Homo sapiens
ggggcttccagcgcccagcagcaactcatgcagcagatgatccagcttttggctggaagtggaaactcacagatggagtttcgctcttgtcacccag

SEQ ID NO: 417024 - DNA, 101 bp, Homo sapiens
tgccaagttagatgccgattacccacttcgagtcctttattgtggagaacatgaacgattggatgcccatcgccaaggagtatgatccactcaaagcgggc

SEQ ID NO: 417025 - DNA, 100 bp, Homo sapiens
cgccaccggcatggcgctccggggcttctgcagcgccgatggctccgacccgctctggagacaaattaaatgccttacgaagacataaggaaaagctgga

SEQ ID NO: 417026 - DNA, 90 bp, Homo sapiens
ggccgcgctgcccgggccgcgaggacgaggcggcgccgccgggctgtggaggaatcccttggcaccatgtcctgtgtgcattataaattt

SEQ ID NO: 417027 - DNA, 75 bp, Homo sapiens
ttcgacttcagtaatttgagtagtagtgtgaccgcaacaagggaaaacatggcttatactgtggaatgcctgcgg

SEQ ID NO: 417028 - DNA, 108 bp, Homo sapiens
ggcgggactgccacgtccaagcaaaccgggaaaggagaggatcccggagccgagagaagcaagcagaaggcccggaggagaacaagatccagctcctcctcctcttct

SEQ ID NO: 417029 - DNA, 82 bp, Homo sapiens
tcttcggaactgggaccaaggtcaccgtcctaggcatggagagtagaaaactgatttctgctacagacattcagtactctgg

SEQ ID NO: 417030 - DNA, 51 bp, Homo sapiens
ctaccaggaggccaggggtgtcgccatggtggagccccctgagctgcccgc

SEQ ID NO: 417031 - DNA, 83 bp, Homo sapiens
tgctgataaatatacccaaacaccctggagacgaattcctgtcaataagcatgcgttttctggagggagagacaccatcgagg

SEQ ID NO: 417032 - DNA, 100 bp, Homo sapiens
gcagcacgggcgaccccccggcgcagcagcatcatcaaggaagttgacaaaagtgttgaagaactacgtggacggtgctgagaagccgggagtaaatgag

SEQ ID NO: 417033 - DNA, 90 bp, Homo sapiens
gatcccctgagcagtgcagaaaattccttgtctggaagctgccaatccttggacaggatccagtttgtgtgttctctgtgcaaataccgg

SEQ ID NO: 417034 - DNA, 100 bp, Homo sapiens
ctttcccctgagcctcagcacctgcttgtttggaagccaacaaatggaattttcttgagcatgtttctaatcgttttgccattggaatccatggctcatg

SEQ ID NO: 417035 - DNA, 95 bp, Homo sapiens
gctacttaatcctactcagaagaacttgtacagagatgtgatgttggagaactatagcaatctggttttcttggatttgctgtcgctttcacaga

SEQ ID NO: 417036 - DNA, 75 bp, Homo sapiens
gaggctgtttgagcctctgagccagacaggggcaagtgtccgagtggtgaatcagctacttacagagatggatgg

SEQ ID NO: 417037 - DNA, 74 bp, Homo sapiens
ggatggtacctgagaatgtggacatctctgtgaccctctacaggctggtggaggccattgtcttgccaatgaac

SEQ ID NO: 417038 - DNA, 100 bp, Homo sapiens
cggctctcagaagaagtttagccgcccacttctgcctgccactacaacaaaactgtctcaggtctcagctgagtctgctctgatcacccaacaagaccta

SEQ ID NO: 417039 - DNA, 88 bp, Homo sapiens
ctggcgtcttgtagtgatgaccgtactgtgcgtatctggcgtcagtatctaccaggcaatgaacaagcaaaccagtccagctacgggg

SEQ ID NO: 417040 - DNA, 95 bp, Homo sapiens
cttactggagtccaagatgctaatggtcctggcattgatgtgcctgctccagacatgagcacaggtgagcgggagatgtcctggatcgctgatac

SEQ ID NO: 417041 - DNA, 74 bp, Homo sapiens
cagaaactggaggagtcccgctcgaagctaggcaagaagctaccggatgtttcacgacgacagcatgaagtctt

SEQ ID NO: 417042 - DNA, 98 bp, Homo sapiens
ttcaattggaaaaagctacagggaatcctaaacaccccttcagtaaatttgggacaggagttggcatcctttggaagagttcgtgaaagctttctgcc

SEQ ID NO: 417043 - DNA, 75 bp, Homo sapiens
agtgggcctgcagccaaggaaggaggcctgcaaattcatgacaggattattgagtacttcgggatgacttcagac

SEQ ID NO: 417044 - DNA, 100 bp, Homo sapiens
cgcctacttcccacagatcgtctcagtggctgcccgcatgctcaagagctctggtggacattctgagacatcaggcggggcctgggacccgcccggaccg

SEQ ID NO: 417045 - DNA, 83 bp, Homo sapiens
atgggacttaagttgaacggcagatatatttcactgatcctcgcggtgcaaataggcttgggcactgtttaaaggaaagttcc

SEQ ID NO: 417046 - DNA, 75 bp, Homo sapiens
attgactattccattgtctagactttgtgttccaagatcagagtcatccgtccttggctcaggatttggagagct

SEQ ID NO: 417047 - DNA, 82 bp, Homo sapiens
gaagctgtacgacatcctgggcgtcccgcccggcgccagcgagaacgagctgaagaagcccccaaatacatcaagatgtttg

SEQ ID NO: 417048 - DNA, 75 bp, Homo sapiens
atttttggatgatgatggatccatttctcctattgaggagtcaacgatgactgctcaggctgtagaggaagataa

SEQ ID NO: 417049 - DNA, 75 bp, Homo sapiens
atcctctggttccggggcctgaaccgtatccagactcagttcctgctcattttccacaaggccgcggcaggggag

SEQ ID NO: 417050 - DNA, 100 bp, Homo sapiens
gattggcatcgatctctccatcccttccgaggcccgacttcggtgttacagaacatcctggacactgaaaaagaatatgctaaagaacttcagtctcttc

SEQ ID NO: 417051 - DNA, 90 bp, Homo sapiens
aattcctgaataagcactacaatctggagaccacagtcccacagaggaggaggtggaggaggaggaggatggagagctgcccaagacagg

SEQ ID NO: 417052 - DNA, 95 bp, Homo sapiens
gttaacagaaatggtccctggacaggaggattcatctgatctggagttgctgcaggagctggcacgggcgaggtcgaggttgtgatccaggaccc

SEQ ID NO: 417053 - DNA, 100 bp, Homo sapiens
cattaacaaatggttttgacactccagaagagaggtatcagaagcttaaaaagcggagtttaagagagctgtgaaagtagcaacaggacaagaactctca

SEQ ID NO: 417054 - DNA, 89 bp, Homo sapiens
acactttgttattggagaaacatgcagattatatcgcatcctatggctcaaagaaagatgattatatttttgatcaccatactgaagag

SEQ ID NO: 417055 - DNA, 75 bp, Homo sapiens
ctcatatgtctcaggcttccatgcagcctgccttaccggatgaagatttgataaagtggaaggcactgtttgagg

SEQ ID NO: 417056 - DNA, 95 bp, Homo sapiens
aagggcccaaaaggcgagaactgaatgtgcccgaaagtcgagatcagaggattccagctaagaaagagtcttgtccaaacactggaagagacaaa

SEQ ID NO: 417057 - DNA, 75 bp, Homo sapiens
caacatcaggtgactgtcccagaagtgaatcgcagtgtctattcaggccaccagtctgtcttaattcctcctatg

SEQ ID NO: 417058 - DNA, 98 bp, Homo sapiens
tcaaaaagtttcttaaacttgtggcctcagaacagttgccgggtgggcttggactgggcgtgctccatggcagagatcctgcggtcactcaacagtgc

SEQ ID NO: 417059 - DNA, 82 bp, Homo sapiens
tggcgcgatgcgtcaagtacactgaaattcatcctgagatgagggcgtgatggtgggcatgggtcagaaggattcctatgtg

SEQ ID NO: 417060 - DNA, 100 bp, Homo sapiens
aaggaccgcgccaacgatgatcttctctccgagttccccgacaagtttggatcctgtgttccccatgatttgtcattaattcggaagaacagaatggctc

SEQ ID NO: 417061 - DNA, 50 bp, Homo sapiens
cacaggcgcgggaatcagcacggtggtcttttggtgccttaatgaagagt

SEQ ID NO: 417062 - DNA, 100 bp, Homo sapiens
gaggccgggaggccgtgcccggagggagatgcagttaaagacttgatgcttcgctttctgggtgaaaaagctgcagcaaagagacaagtcctaaatgccg

SEQ ID NO: 417063 - DNA, 90 bp, Homo sapiens
atgagatggtagccaaacccccaggtgctggagaatctggtaaaagcaccattgtgaagcagatgaggatcctgcatgttaatgggttta

SEQ ID NO: 417064 - DNA, 75 bp, Homo sapiens
aacagcccctgctggcaagtcaagtggcaactccgtcagctcgttagaaaggcttttgcagaaatgctgaaagtg

SEQ ID NO: 417065 - DNA, 75 bp, Homo sapiens
cgaggccctgcggagctgcttcgccgctgcgaatgtccctcttccagtggaaagcccaaccatgcagacatcttg

SEQ ID NO: 417066 - DNA, 100 bp, Homo sapiens
taaagacaaatatgtggaagcacaatataaagtttcatcaacttccataccgggagatggagcatttgagacagccctggtacctgacagtgtaaagaag

SEQ ID NO: 417067 - DNA, 83 bp, Homo sapiens
ggaagaccgcgcgcagggcctgcagcgggagctggacggcgagcgcgagcggcgcgagaaaatcccagtggtagctattatgg

SEQ ID NO: 417068 - DNA, 83 bp, Homo sapiens
ctggaatgcatccaagagaatccctcaacatgctgtccacaggcactgaggacccaggccttccaggtccttctccagcccct

SEQ ID NO: 417069 - DNA, 50 bp, Homo sapiens
gtccgagacgcgctggacaagcaggtgaatgaaaactttgccattgattt

SEQ ID NO: 417070 - DNA, 89 bp, Homo sapiens
gcacataccacccaggtgttccggtctttcacgatgcattaaaggtaaagtcagtgataaatcttttgtttgctgcatatactggagat

SEQ ID NO: 417071 - DNA, 98 bp, Homo sapiens
ttaaactagactcaggagtcgtcaagaggctctgcaccctggatggaaagcaggagttgatccctgaattttattatctccctgagatgtttgtcaac

SEQ ID NO: 417072 - DNA, 100 bp, Homo sapiens
agcgtcctgctgctgctctccgtggtggggacctggaacggtaccaccagggtggccatcaaaaccctgaagcctggcacgatgtctccagaggccttcc

SEQ ID NO: 417073 - DNA, 74 bp, Homo sapiens
ccgaaactttcaccgcgagcgggaaaatcatcagcgtgttagcattttctttgactatgcaagatgtagcaaga

SEQ ID NO: 417074 - DNA, 82 bp, Homo sapiens
ctggaggaggggaggagggccactgggctcccagcagcccaggttcaggtcagcccaaggccaaccccactgtcactctgtt

SEQ ID NO: 417075 - DNA, 98 bp, Homo sapiens
gcgacctcaagaagcagctccacgaaaggcagccgcggatcgccgcgctcagcgacaaacaaggctggtgaattaccatatctccgtcaagtgcagta

SEQ ID NO: 417076 - DNA, 74 bp, Homo sapiens
ccaacatggcggaacgcaggagacacaagaagcggatccaggtcctgaatctgtgcctccttcccttcttaaag

SEQ ID NO: 417077 - DNA, 101 bp, Homo sapiens
cttacactaaaaaagcactgaagtattttgaagagggactccaagatgggaatgatacttttgctctgctgggtaagctctggacatcctgagcccaagtc

SEQ ID NO: 417078 - DNA, 101 bp, Homo sapiens
tctggaacttctgcccagctctccttggaagtgggaaaactcttgcctttgccatcccaatgattcatgcggtgttgcagtggcagaagaggaatgctgcc

SEQ ID NO: 417079 - DNA, 75 bp, Homo sapiens
gacggcgatccgggcgctcgagacttaccagagccacaagggacctgatgcccagaaccctggacgggcagatca

SEQ ID NO: 417080 - DNA, 100 bp, Homo sapiens
cagctcaaccgcttcgtgcaactctccgggcggccgcacctgccagatttggcagctgatcggaagctctttcgtcttgtctccaatgactccttcatct

SEQ ID NO: 417081 - DNA, 90 bp, Homo sapiens
tccgacctctacctggagcatttgctgcagaagcgtagtcggccagaggtgcaatgaagggcgtgttggtagacattgtgaatgcagcac

SEQ ID NO: 417082 - DNA, 95 bp, Homo sapiens
agatgcctgaccgggagaacacgtttgtggttaaggcattgaacctggccacatcccaggtaccgtgaacatccccttcacagacttcctgagcc

SEQ ID NO: 417083 - DNA, 100 bp, Homo sapiens
tttggctgaggagttttcaatcccagccctggccaacgtcaacattgggagcctcatctgcaatgtaggggccggtggacctgctccagcagctggtgct

SEQ ID NO: 417084 - DNA, 99 bp, Homo sapiens
aaagcatccccgaggaggaagacgaatcgttaaacatctgaaagggtcaggtgtgagatgcacaatgcgaaacctaggccccagcttttacaccatgat

SEQ ID NO: 417085 - DNA, 90 bp, Homo sapiens
gctttccgggagactggagtcgaaggccgtgaggtatttttctaaggaattttggagagtaaaaggctgaaccttgttaaagagaaaacc

SEQ ID NO: 417086 - DNA, 82 bp, Homo sapiens
atctgtcttcggtggactccttcggcagtccacccaccgccgccgcctcccaggtcccgcgcggccccgggtgaggcacgcc

SEQ ID NO: 417087 - DNA, 75 bp, Homo sapiens
cacatcgacagggacgtcctcattgtcctcgagtggagagcagcccaaaaatatgcaggtaactgaagccaggaa

SEQ ID NO: 417088 - DNA, 100 bp, Homo sapiens
cctcccgaagtgctgggattacagctactacttatacatgtgtgataaagtggttgccccaaatgtgtcacttacttctgctgtatcccagtctaaagag

SEQ ID NO: 417089 - DNA, 98 bp, Homo sapiens
gccagaaggaagatggcggatctggaggagcagttgtctgatgaagagaaggagaactgcgacacatcaccaagctgaagccctggagcctctttgat

SEQ ID NO: 417090 - DNA, 50 bp, Homo sapiens
ggaaaagcattttaatgaaagcagggtcaaaatgcagatcttcgtgaaaa

SEQ ID NO: 417091 - DNA, 100 bp, Homo sapiens
cacctccgggcgcagaggcctacatcccacagagatacccagacaacaggatcgtctcgtccaagcaccagccatgaactacgtggggcagctggcggag

SEQ ID NO: 417092 - DNA, 75 bp, Homo sapiens
ccagtggtggtgtcgacccacacagttcagcacttagaggaagacaccagagaagcctatgatgacaagcaggtg

SEQ ID NO: 417093 - DNA, 98 bp, Homo sapiens
tctagtaacccgcgaaatgatgggatagcgttgcaaatccttaaaagagtcttaacgaatagcctaacatggcagaccagagacagcgctcactgtct

SEQ ID NO: 417094 - DNA, 50 bp, Homo sapiens
attggtctacaaagacagcagtagacctaatctgggagcctgcaagtgac

SEQ ID NO: 417095 - DNA, 103 bp, Homo sapiens
cagattcgcagtggtcgcttcttctccttggtgtggatgaggtcaccattgtcaacattttgaccaaccgcagcaatgcacagagacaggatattgccttcgc

SEQ ID NO: 417096 - DNA, 50 bp, Homo sapiens
caagttcacccaacataactttcaagagatggggcattctcttctcccac

SEQ ID NO: 417097 - DNA, 83 bp, Homo sapiens
aggatgacggagctgcagtcggcactgctactgcgaagacagctggcaggctggcgcccatgcggctctacacgctctccaag

SEQ ID NO: 417098 - DNA, 88 bp, Homo sapiens
agcatggcatttcagtcactggtttgcagagtccagaggaatgtttgctgggggattgaaggagatggaacaggaagaggtcctgatc

SEQ ID NO: 417099 - DNA, 100 bp, Homo sapiens
atgtttctgtccaggcaagggtgtgtgctgaatgactcaaggattttttgggccaaagaactgccaactctgaaagataatgatttcattaatgagggcc

SEQ ID NO: 417100 - DNA, 73 bp, Homo sapiens
aattagccagcgttctcttttcccatcatagagtgactgttttgcaggagttaacaccgtcaccaccttggtg

SEQ ID NO: 417101 - DNA, 75 bp, Homo sapiens
tgctgggcctgcccttcaccctctacatgaaaactctcccaccatgtcgcagaatggatacttcgaggattcaag

SEQ ID NO: 417102 - DNA, 101 bp, Homo sapiens
aggctccggactccgcggcgcagactgcacctcgcagtctccccaggtccgcccagcagccgcgcttcagccaggtgaatctggattgggaaagtcgacat

SEQ ID NO: 417103 - DNA, 98 bp, Homo sapiens
cagaaagagtcaacagcagtggcaacaggggctggcaaggtttaattgcttatggatgtcattcacttgtggtagtgattgattccattactgcccaa

SEQ ID NO: 417104 - DNA, 98 bp, Homo sapiens
gaacggcaaagtcatgggagcagagctcagacatgttctcaccacccttgattgaagataaaactttccaagtccttggtaatctttacagcgaggga

SEQ ID NO: 417105 - DNA, 75 bp, Homo sapiens
attgaacatgccttcatcctctataacaagtatatcactattggtaaaggttttcaaggtgtcatgaaaagatgg

SEQ ID NO: 417106 - DNA, 82 bp, Homo sapiens
ctgctacgacgcgctggtgcacttcgcgctgcttttacccagcacctgtccagtgaaacaacttgataatcgtttcgagggg

SEQ ID NO: 417107 - DNA, 51 bp, Homo sapiens
tgttggtgcatgctacaaaaagaggggtattccctcagcggatactacacc

SEQ ID NO: 417108 - DNA, 83 bp, Homo sapiens
cgcgggcccggccacggcggagccaagcaaaatgatgcttcaacacccaggccaggtctctgcctcggaagtgagtgcttctg

SEQ ID NO: 417109 - DNA, 100 bp, Homo sapiens
tctgtttttaagcttctaattaaagagttccatgccattgcagtgtcaactaggcctcagttacttttcagtttgcccaaattgagcccatctcaacatt

SEQ ID NO: 417110 - DNA, 75 bp, Homo sapiens
ggaataatatttatggagcatatattatggaacacagcattaactgaacgtctggatgctcttcttctggaaaaa

SEQ ID NO: 417111 - DNA, 100 bp, Homo sapiens
gctcatgctggagtctccagaatccctccatgccaaggttgaaatcacaaagattagacacctttttagataggtgttcttcagcaccactgacaacacg

SEQ ID NO: 417112 - DNA, 51 bp, Homo sapiens
aggcctccccagccatgtggaactgctggagtacaatggcacgatctcggc

SEQ ID NO: 417113 - DNA, 101 bp, Homo sapiens
cggggccccgctgtccgccgcccgccgccgctggagctagagacacgatgaggcgagtggtacgacagagcaagtttcggcatgtatttgggcaagcggtg

SEQ ID NO: 417114 - DNA, 100 bp, Homo sapiens
cctcttcaatttctacgaggacttgtacttcacctacctcgagatcaatccccttggtactctgtggatatccccttggacaaaactgtcgtcaataagg

SEQ ID NO: 417115 - DNA, 98 bp, Homo sapiens
agtggattatgaaatttttgggaaggtgcaaggggtgtttttccgtaagcatactcaggagttaaagttcctcgtaattttcgcttgttggaagaact

SEQ ID NO: 417116 - DNA, 98 bp, Homo sapiens
cacgcaggaacggctccagcatcaagatccgtctgacaggaacggaaaacagttcttccttcaaagcatgcagtacctgaagtaatagaagactttct

SEQ ID NO: 417117 - DNA, 98 bp, Homo sapiens
cctgagcaggcagagagcagaagatattcacagacatgcggaatttgaggagtctccccaggacagtgctatcacccgggatattaaccgaacattcc

SEQ ID NO: 417118 - DNA, 100 bp, Homo sapiens
gtgggaccccatccttcctgtcttcgcagaggagtcctcgcgtgaggaggagacccacccggtggacttgagctcgctctccagtaagctactcccaggc

SEQ ID NO: 417119 - DNA, 100 bp, Homo sapiens
ggccgcgccgcgcctcagctctggaaagtaatggaccagtgaaggtgtggggaagcattaaaggactgactgaaggcctgcatggattccatgttcatga

SEQ ID NO: 417120 - DNA, 88 bp, Homo sapiens
agtcagctcccctttctcgcccagcgcccccaggccgctcccggggctcacggttctgaagccagacacaagatgaaaaagctaactc

SEQ ID NO: 417121 - DNA, 100 bp, Homo sapiens
gggaggaagccctttctcctcggcactgtattctttacctgcttcccaatcccactgatgaggatcagcccatggatgtacagttacccagcacgtgtac

SEQ ID NO: 417122 - DNA, 96 bp, Homo sapiens
agaatacaagaggattatcttagaattttaagatacttcagctggaggaaagcaggaatgttcagaggcaaatgaagattctgcagaataagcaag

SEQ ID NO: 417123 - DNA, 74 bp, Homo sapiens
cccgcgtcatgcggctcctcggctggtggactccatcagaaagtttgagcgagagctgatgttggagcagcagg

SEQ ID NO: 417124 - DNA, 75 bp, Homo sapiens
gggggcctggctaaggaaaccctattacctccagaaggccaatgatgaggccaatcagagtgatacaagtgtctc

SEQ ID NO: 417125 - DNA, 100 bp, Homo sapiens
cgcgaatatcgtcatcgttagaagacttcacagagaatgcagttgtcttgacttcaggtctgtctgttctgttggcaagtaaatgcagtactgttctgat

SEQ ID NO: 417126 - DNA, 82 bp, Homo sapiens
ccacatctggaatctggaatgaaatcttccaagtccaaggatgtgtgagaagccctaccactgcaactgggacggctgcggc

SEQ ID NO: 417127 - DNA, 97 bp, Homo sapiens
cacttccggtcacgccatcgttgctgccttcttcgtcaaggtattgtcttctaagaactctgaagcaatgtcagacattgagggaagctctcattgc

SEQ ID NO: 417128 - DNA, 100 bp, Homo sapiens
ccgcacacagccttcctcggagaacaagactgcccacctccacaagggcttcctggccctctaccaaaccgtggaaactggcgatggaatatgagaggag

SEQ ID NO: 417129 - DNA, 90 bp, Homo sapiens
cacaggctaaactgaatggacagcaggctgctctcgcttcccagtatagagctatgatgcctccttatgaagagagaagggcacagttac

SEQ ID NO: 417130 - DNA, 82 bp, Homo sapiens
gccgaggcaccgaggcactcagaggagagtcatcttagtgggatttggggaagcaacagggctgtgtggggtaacctgccac

SEQ ID NO: 417131 - DNA, 75 bp, Homo sapiens
ttaaggattccaagtaactcttatttgatctctgtggtaagaagtgctactttagagacaaaacctgaatcaaaa

SEQ ID NO: 417132 - DNA, 98 bp, Homo sapiens
gcagccggcgccgcctgactgtggggtgttcgttccgcacccgctcccggcgcctgccggagaggccagtattggtaaaggttttcaaggtgtcatga

SEQ ID NO: 417133 - DNA, 75 bp, Homo sapiens
acctaactacggaaaacctgatcccaaaattattgaaaacactcgaaggatgccgctcctacgaggactgctgtg

SEQ ID NO: 417134 - DNA, 82 bp, Homo sapiens
aggattccaagtaactcttatttggagggtttgcatttgtgtatgaagctcaagatgtggggagtggcagagagtatgcatt

SEQ ID NO: 417135 - DNA, 75 bp, Homo sapiens
ctggtgccttcattcatgaaaagcatgcccatacgattaaacctgcgatttctggtaggtcctactttaggacaa

SEQ ID NO: 417136 - DNA, 50 bp, Homo sapiens
tccaaccttccagccccttttgaaagttaaacacagtgggaatatcactt

SEQ ID NO: 417137 - DNA, 97 bp, Homo sapiens
aataagactgattttatgggaaaattaagcagatgctccagtttgagaaacctggatctgcgatctgtttgtgactcgcagggcaatgacattaaag

SEQ ID NO: 417138 - DNA, 99 bp, Homo sapiens
ctcggacccacggagccggcagcccagcactccgggctctggaggccacgggcatgatgcttcgggtcctggtgggggctgtcctccctgccatgctac

SEQ ID NO: 417139 - DNA, 83 bp, Homo sapiens
gacaccagaagaatattataatgtcacagttcagtttctaagcatgaattgaggaacagaagaagcagagcagatgatcggag

SEQ ID NO: 417140 - DNA, 96 bp, Homo sapiens
ctcccagattgtgcaagaaccatgggaggggcgtcagagacgagttgtactgctgtcacaggaaatggacgctggattacaagcatggcagctcag

SEQ ID NO: 417141 - DNA, 100 bp, Homo sapiens
gttcccgcaagcccagacaatgccggtggaggaatttgtggctggctggatctctgtgaaaattgataccaaggccattccactgtttgggaactccctg

SEQ ID NO: 417142 - DNA, 112 bp, Homo sapiens
tccctgcactctcatcgctctcggcctcggcctcggcctccgacacggtgaagacattcagtgaagcttgcctgatggtaaggaaaccagccctagaacttctgcattacct

SEQ ID NO: 417143 - DNA, 90 bp, Homo sapiens
gagccgggccatcctgtgcaatgttccttcctcagagatcacctatgggatggttgtggcagacctgttccactccttgttggcagtcag

SEQ ID NO: 417144 - DNA, 98 bp, Homo sapiens
ttgaggaattcaagtacttgtggaacaacatcaaaaggtggcagggccatgctatgatagtggaagcttatccaaaataatagatccagaagaagtga

SEQ ID NO: 417145 - DNA, 74 bp, Homo sapiens
tcgtcagaaggaattatgggaaacgcagaggcagaaaccagatttcaggtatgctgctgaaagtgggaatcctc

SEQ ID NO: 417146 - DNA, 87 bp, Homo sapiens
ggaagtacttggccagtggatccttcgacaagtgcgtccatatctggaatactcagtattctgacaagtccctgtacacccagctgt

SEQ ID NO: 417147 - DNA, 88 bp, Homo sapiens
gcatggctacttcatattttggaaagcagtttttaagacaactaatcacatatggctctgatagaactgaggcactgaagagaatggc

SEQ ID NO: 417148 - DNA, 89 bp, Homo sapiens
gctgcctcgccgcgtctcgccacggtgtcgtgaaaactacccctaaaagccaaaatgggaaaggaaaagactcatatcaacattgtcgt

SEQ ID NO: 417149 - DNA, 95 bp, Homo sapiens
cggcccaaggtggaaggaggggccgtgaggtgagagagtccgggagcccgagcttgagatctgccgacaccccaggccatcgagccccaggccat

SEQ ID NO: 417150 - DNA, 74 bp, Homo sapiens
tcagctcgagcttccctcgtggccgacggaacaatgaagtgtatgggtttcgacagaccatgatgaaattgaga

SEQ ID NO: 417151 - DNA, 96 bp, Homo sapiens
atggaaaatggctggggtgaagaggagactagggctgcaagaaagcgtaagattgccattcgaaaagcccaggggaaaaatgtggaggccattcgg

SEQ ID NO: 417152 - DNA, 75 bp, Homo sapiens
caatttaccagagataattgataacaccctgtaacagctgagttgctgatcagctctgtgccaagtatagcaagg

SEQ ID NO: 417153 - DNA, 100 bp, Homo sapiens
caggagatggacccgccaaatccagaggaggtgaaaacgcctgaagaaggcatttcctgcagatcaccctgtgcgtgtgcgagctgtatggctgctggat

SEQ ID NO: 417154 - DNA, 75 bp, Homo sapiens
tcggcctcggagcaacgagcgcagcgccggagtggttaatgtgttgctaacaactccactctgggtggtaaacac

SEQ ID NO: 417155 - DNA, 100 bp, Homo sapiens
agtatgtggacaagttcggcttccacacggtgacgtgctgcggcttcatcccgcaggttcaaaccttgtactactcagctgatcacaagctgcttgatgg

SEQ ID NO: 417156 - DNA, 96 bp, Homo sapiens
agtccctgccggccactgcccaaggacagctcaaaactcagatgtatcctccactcctcgctggccaccatcctgctgcccaacagaagaagctct

SEQ ID NO: 417157 - DNA, 75 bp, Homo sapiens
gtttgccacacagatcaccctgggaatcctcatctccactcagcgggcccaggagattcacagagagacgagccc

SEQ ID NO: 417158 - DNA, 96 bp, Homo sapiens
gatgaagaaagtgttagaaacagtagtggagaatcaaggtgttttattccaaacgtctatgctgctttgttcactgcagctcttgttcctttgacg

SEQ ID NO: 417159 - DNA, 51 bp, Homo sapiens
tcactttccgatcacttcaaagtaagagaatggcatggatcaagaaaatcc

SEQ ID NO: 417160 - DNA, 80 bp, Homo sapiens
tcctgatgaagttcgagcactaatatttaagaaagaagatgttaactttcagaccttcctgatgtaaatgataaacaaag

SEQ ID NO: 417161 - DNA, 100 bp, Homo sapiens
ttgtggcagagttaattctggtggcctactctgtgaagagaacattgatgactgtgcccggggtccccattgccttaatggtggtcagtgcatggatagg

SEQ ID NO: 417162 - DNA, 100 bp, Homo sapiens
tctaccagcccatgcccctgaaggcctcgctggagatcgagtaccaaataacgaaggaggcccaacttcattcaataaggagcctgacggatttatccca

SEQ ID NO: 417163 - DNA, 129 bp, Homo sapiens
tgacatctgacgacgtgaaggagcagatttacaaactggccaagaagggccttactccttcacagatcggtgatttgaagatattaaagctagaaattggaactagaaaatcaaaagaattcaaggcat

SEQ ID NO: 417164 - DNA, 74 bp, Homo sapiens
taacaagcgactggaattggcaggacaggccagtacagatgacggctttgtatataatttggatgcacgttcag

SEQ ID NO: 417165 - DNA, 96 bp, Homo sapiens
gccattcacagcaaatgtcctgaacagatgtctcagctgctctacaagggagtcccatttcaggtgtggggctgggcatggtcactcctgctggat

SEQ ID NO: 417166 - DNA, 82 bp, Homo sapiens
aaggaaaaactggagagcttcatcaaaaatagtgatagctttgataaggagaacagatcccattccaatcgttgtcaagtat

SEQ ID NO: 417167 - DNA, 83 bp, Homo sapiens
gtactctcgaattaaaaagaagcaacagcagcaggttcatcaggtgtacatcagggcaggcaaggaaagcatcttttgggacc

SEQ ID NO: 417168 - DNA, 50 bp, Homo sapiens
cggcagtcgcgaagcagcaaccatggatttttagactctgaggagcagtt

SEQ ID NO: 417169 - DNA, 82 bp, Homo sapiens
agccagcaggagctgaagccatttccctttggtgtccgcattgactacgtgctttacaagagccccccaaaattaaacgagg

SEQ ID NO: 417170 - DNA, 90 bp, Homo sapiens
cacgcgggtggaggtgtccgtgtcctgcagatgctggcatcaccatctacatcaggtcagctgtctcagtttggggcaagtttatacggg

SEQ ID NO: 417171 - DNA, 75 bp, Homo sapiens
gggagtctccgcgtcccgctcgctgggagagaggtacactgaggaggggacggctccgtcttcacattgtgcaca

SEQ ID NO: 417172 - DNA, 100 bp, Homo sapiens
gagtctaggggaagcagtacggcgtccctgcctcaggcctgcccggacggtgtgcgggaggtttgtctccgaggaagacccagggaactggatatctagc

SEQ ID NO: 417173 - DNA, 96 bp, Homo sapiens
gagctgctccgtggccacgaggacgtcaccatggtgggccccctcctgctcccccgaaccgctcgaagtggaaaaggagctggggaaacaaggcgt

SEQ ID NO: 417174 - DNA, 89 bp, Homo sapiens
ggcggagtcaccctggggctggccatcgagcccaagtcagggacatcgagtccacaggtgggagaaatgttttagaggcaagagaggct

SEQ ID NO: 417175 - DNA, 76 bp, Homo sapiens
agggaaggcgcgagtgaggaaaggaggtactgtagatttcaacactacacttgcacaatgtctttgaaaccaagag

SEQ ID NO: 417176 - DNA, 143 bp, Homo sapiens
tgcgctacgctgagtacttgcagccctcggccaaacggccagacgccgacgtcgaccagcagagactgtgacttctgacagctctctccatggaaggaggcggcggccgcgatgagccttcagcctgccgggcaggggacgtg

SEQ ID NO: 417177 - DNA, 100 bp, Homo sapiens
ctggcccactggatcatccatgggcgcccggagaaggacatgcatggctatgacatcagtttctgtgtttgaagaacatacgcaccttcctgaaagtctg

SEQ ID NO: 417178 - DNA, 100 bp, Homo sapiens
aacggacttccataaccattcagtgaaggagtctatgggtaaaacatcagggaagctgtttgatagcagtgatgatgacgaatctgattctgaagatgac

SEQ ID NO: 417179 - DNA, 82 bp, Homo sapiens
tactggacttcatgcttagatacatgtataacaagtttcttgcagaacataaattattaggaaacattaaaaatgtggccaa

SEQ ID NO: 417180 - DNA, 75 bp, Homo sapiens
tgcaggtctctgtcgagcagcggacgccggtctctgttccgcaggatggtttgatgatctgatggccaacattcc

SEQ ID NO: 417181 - DNA, 75 bp, Homo sapiens
gggaaaaggcaaaaatcccatctaccgcaactctcagttcgagagtaaaggttctccttactatgacaatgtccg

SEQ ID NO: 417182 - DNA, 118 bp, Homo sapiens
tcctgctgtcacagaagctaatggacatatccattttgataatgtcagtgtggtatctctacaggaacttagtgatttggcccgtgaccctccagcacaatgttctgcaggtccagtt

SEQ ID NO: 417183 - DNA, 83 bp, Homo sapiens
ctatcctggttttaatatatctactcccagaggaattccagacagccccccaagatgaacccagtggtggagccactgtcctg

SEQ ID NO: 417184 - DNA, 83 bp, Homo sapiens
agctcgtttcggtgctctgggtggaaaagtgattgcccacagtgagtatcaaaagtccaaaagaatttccatctttctgagca

SEQ ID NO: 417185 - DNA, 82 bp, Homo sapiens
cccactctgcggagttagcagtcacgacctccagcacaggccctggctgtggagaatgctgaaggaagaagacgcagaagca

SEQ ID NO: 417186 - DNA, 83 bp, Homo sapiens
catgacttggtcaagctaggtttcaagttccaagatgagatgggattctccaacatggaagatgatggcccagaagaggagga

SEQ ID NO: 417187 - DNA, 101 bp, Homo sapiens
cccaccgcgcactcggagatgcagccgctgttgctgatgtatattcaagatgagtggattaggagaaaacttggatccactggccagtgattcacgaaaac

SEQ ID NO: 417188 - DNA, 73 bp, Homo sapiens
gagtgcttccatcggcgcactggacagaagtgtgccctgaaggcaaagccatgactacagtagtggtacatgt

SEQ ID NO: 417189 - DNA, 82 bp, Homo sapiens
cgaaattgggcttggaacccgggagccagatcttggaccctgaactgcacctctgtcaagttacgccccatggtgtccatcc

SEQ ID NO: 417190 - DNA, 83 bp, Homo sapiens
ccacctggggcacaggggcctcagcagaaactaatctggattcactccctctggttgatacccactcaaaaaggacacttctg

SEQ ID NO: 417191 - DNA, 83 bp, Homo sapiens
gcgcctagccctaccggactacgagtatctgggttaagaatagacccaccagcatttcgtgggatggtcttgattcagggaag

SEQ ID NO: 417192 - DNA, 82 bp, Homo sapiens
ctcagcagctccctgcgggacctctcggaagccgccacacccactcgcccgggtctatggccacggtcggagagtggtcctg

SEQ ID NO: 417193 - DNA, 90 bp, Homo sapiens
ggggcgcacgtcggctcccacgcttagccagctcccggtgactctcctattccatctgtttcttcgggatcatcttcacctctttcagcc

SEQ ID NO: 417194 - DNA, 80 bp, Homo sapiens
gattctttttggtgcatatgttacccaaagtgttggggatgtcctttgcactgaccctgaactgccagattgacaaaacc

SEQ ID NO: 417195 - DNA, 75 bp, Homo sapiens
ctgtgagtgactctttgacatggagagaatttcactatattcaggtgagatcggactggaactgttcggctgcga

SEQ ID NO: 417196 - DNA, 82 bp, Homo sapiens
gggtgtcgtcgtcagcttgggaacaggtgcagatgaaggattttcggttttcttacaagtttaaaatggcctgcaaggagga

SEQ ID NO: 417197 - DNA, 75 bp, Homo sapiens
caccaaagacctgcgactttgctcaggtcttattagtaggtaagaaacagctgctcctccacctccaccccagcc

SEQ ID NO: 417198 - DNA, 90 bp, Homo sapiens
ggaaaagaaccattgaagcttgagagaaaagcccccaaaagcagctattcaggatttccagatgtgacttgcactcagaagatcagtggt

SEQ ID NO: 417199 - DNA, 51 bp, Homo sapiens
ctgaacatgactgatgtatatagaggaaaatttgctgtggttagacaatgt

SEQ ID NO: 417200 - DNA, 100 bp, Homo sapiens
ggccgcttggttctgacccagctgagtgtgaagatcattcaccgatgaagacagacccagttggatcccctttgtctgaattcaggagatgtccatttct

SEQ ID NO: 417201 - DNA, 127 bp, Homo sapiens
ctctgccgcccttctgtgcctgctgctcatagcagccaccttcattccccaagggctcgctcagccagctccagggcccacaacggcagtgtcctacatgtcggtgaaatgtgtggatgcccgtaag

SEQ ID NO: 417202 - DNA, 75 bp, Homo sapiens
ggagcctcactgctcccagcagcacctcaggccgactcgcgggccgctgcacccaccgccaaggacaaaaggagc

SEQ ID NO: 417203 - DNA, 96 bp, Homo sapiens
ctggaggtggatctgaagaacgggaaggatgataaagactatgctttaaaacaaatagaaggaactgggatctctatgtcggcatgtagagaaata

SEQ ID NO: 417204 - DNA, 100 bp, Homo sapiens
agctgtcgggacacttctgcaaccccgcagagcgcatccatcaaagctttgcgcaacgccaacctcaggcgagatgctcatccgaatatggaggctggac

SEQ ID NO: 417205 - DNA, 129 bp, Homo sapiens
acagcagcacccgagcaaaccccagcaagatgcggaggctgcctcggcggagcagaggaaccacacgctgatcatgaggctgggaggcggcagaatgcagccagaggagggcacaggctggctgctgga

SEQ ID NO: 417206 - DNA, 82 bp, Homo sapiens
tttgaggacttctggaggcccccgtcaccctccgcgtctccagtttggtgccctggttgtcagatgttggaaagcagtagga

SEQ ID NO: 417207 - DNA, 82 bp, Homo sapiens
gacggattcatttagagctgcggaacaggacgccctctgatatgatatcatcaagttgaatcgaaaggaagggaagaagcag

SEQ ID NO: 417208 - DNA, 75 bp, Homo sapiens
tttttctcatggatgttcttcttcgagtatttgtagaaggacccaacatgagtgaagtttcctgcaagaaacggg

SEQ ID NO: 417209 - DNA, 75 bp, Homo sapiens
ccgcgggcgcgatgcggcactgcagggagaagatgtcaaccggacactagaaggtggaaggaaacctcttcatta

SEQ ID NO: 417210 - DNA, 87 bp, Homo sapiens
aagactggaattgagcaagggagtgatgccggttatctctgtgaatctcaggcggcttacagggagaacacagttggcctccaccgt

SEQ ID NO: 417211 - DNA, 96 bp, Homo sapiens
tgcatgccagagacttcacagtttctgctctgggttcagtttggcaaagacttggtgcagatgtgacagcagttgaatttttaggtcatgtaggtg

SEQ ID NO: 417212 - DNA, 101 bp, Homo sapiens
tcgcgggcgcaatgaatccgcggcaggacagtcattttgtttactcattcagccctgttgcaggtcccaataaactcttcataaggttgacagaagcaccc

SEQ ID NO: 417213 - DNA, 50 bp, Homo sapiens
cggcgcccggcggggactgcagaactgataaatttcaaacggaagagagt

SEQ ID NO: 417214 - DNA, 90 bp, Homo sapiens
tgcatcaagaaacccaagctgctgaggaaaatcctgccttgcttcgttgggcctatgcaagaacaataaatgtctatcctaatttcagac

SEQ ID NO: 417215 - DNA, 82 bp, Homo sapiens
agcagaaggtgtttgccctctgggagtctggagacatgagtgatcagataagcatggattcctggttcattcttgttctgct

SEQ ID NO: 417216 - DNA, 98 bp, Homo sapiens
cgcctctgcgtctttgctcccggagcgcttgaaggagctgcgggtctgctgagaacagacccagtccctgaggaaggagaagatgttgctgccacgat

SEQ ID NO: 417217 - DNA, 90 bp, Homo sapiens
tacagattttataaacagcttggcagtgcaggttaatccctatatcctgaagaagaacatgatcctcatgacaaatcatttctatgcagc

SEQ ID NO: 417218 - DNA, 127 bp, Homo sapiens
cccagccctatgatgtttacgaccaggttgagtttgatgttcctgttggttctcgaggggactgctatgatagttggtctcttcccatggcgatgtccatctgccaccgtggcactggtattgcttt

SEQ ID NO: 417219 - DNA, 78 bp, Homo sapiens
aggtcatcattgtccaggcctgcagaggtggtgggaacctaaattattctgcaagacaaagggaagaaataaaatttt

SEQ ID NO: 417220 - DNA, 74 bp, Homo sapiens
attttgaacggcttacgaaaatttgtgcaacacatcaagaatacccattgacaacatgaccaatgagatggagc

SEQ ID NO: 417221 - DNA, 100 bp, Homo sapiens
gcaccgagggctaccacgttctgcgggatcagtgaatgcttgtgaaaagacctcatttatgtttctgcggcaagagttgcctgtcagactggcaaatata

SEQ ID NO: 417222 - DNA, 103 bp, Homo sapiens
gcctcagcctcccgagtggctgggattacaggattacaagaagttctgggcaggcctgcagggtctcaccatttatttctacaatagcaatcgggacttccag

SEQ ID NO: 417223 - DNA, 75 bp, Homo sapiens
gggaggcggtccaggactcactctgctccacctctgactccttgaagcgtccagaggaccagaggttaatttatt

SEQ ID NO: 417224 - DNA, 83 bp, Homo sapiens
gtgggccgcgtcgaagacatggaccagggctacggagggtgctgttggcccaaaggttgccctgaagccccccatccagagga

SEQ ID NO: 417225 - DNA, 99 bp, Homo sapiens
caacaggcgagacctggagatggacctgtgatctgggtgcgagaagatgtactaaattcattgaataacaactttcttcaaacgctaaatcaagcttgg

SEQ ID NO: 417226 - DNA, 100 bp, Homo sapiens
aacagattcctctgtggaagccagggagaagaggaggacgtcttgcatggctggtatacttagttgggacagttgtaggaggaagattaacatataccag

SEQ ID NO: 417227 - DNA, 75 bp, Homo sapiens
atgccaggagcaggatctgcagaagacgcagggctcaaggagccaaaaacctgtatatcatctccgtgaagggga

SEQ ID NO: 417228 - DNA, 75 bp, Homo sapiens
gcaaagagtaatgattgatgcagcttctacagaaggactatccatcccttgccttgcttggagagaaattggcag

SEQ ID NO: 417229 - DNA, 97 bp, Homo sapiens
gaattacactgtgatacgactgactatccacagaccagcatggctgccactgctgctgtgagtcccagtgactacctgcagcctgccgcctccacca

SEQ ID NO: 417230 - DNA, 83 bp, Homo sapiens
caagttttgtgcagattgccagtctaaagttccaaagaactactggttcagattttagctcttcccaagttgtgaaaatagtg

SEQ ID NO: 417231 - DNA, 75 bp, Homo sapiens
ctacagagagccctgctacgcgtcgggtccaggtggcagaacatcctaggaactgccttctgttgaagaactcac

SEQ ID NO: 417232 - DNA, 74 bp, Homo sapiens
tgtcaaacatccatatcataagtggaattttggagatattcaaagggttctcatgtatcagccatcttctgtaa

SEQ ID NO: 417233 - DNA, 75 bp, Homo sapiens
cagggaggatgtcgggacaccccggaagctgggaaatgagagtggtttttcctcctgtctcatgaggtgctcaac

SEQ ID NO: 417234 - DNA, 100 bp, Homo sapiens
cccaacccttgtgggcatttgtggtgagggaaccgagtctgtgcaaagcctcctgcttgattggaggttttaaagcaggaaacagcagttgttgaaaacg

SEQ ID NO: 417235 - DNA, 82 bp, Homo sapiens
cctgttcatcaggaacgtcgcggacgccaccagggaaagcaggcaggatgggagagtcgccgatagaaccacctcttccctg

SEQ ID NO: 417236 - DNA, 50 bp, Homo sapiens
gcgtctgctagtagggtcgttcagaactcaagctccatgaggagatgttt

SEQ ID NO: 417237 - DNA, 100 bp, Homo sapiens
aaccacttctctacatcccatctcaatcagaattactagattttctctcaaactacgaggaccttgcctcatagtattcgatcagattcagaagatatct

SEQ ID NO: 417238 - DNA, 100 bp, Homo sapiens
aagttttctaaagaagaatctgaagtgaaatgacatcaagagacctatcaagacctgtatccaggaaaagcttatgttcctgaggaagaattgaaggcag

SEQ ID NO: 417239 - DNA, 82 bp, Homo sapiens
cgcccgtcccgcagcggcgcgcggagccaggtgagaagccctaccactgcaactgggacggctgcggctggaagtttgcgcg

SEQ ID NO: 417240 - DNA, 75 bp, Homo sapiens
gaccagttgatgggcacctcccgggacggttatgaagacagtatggagtttccagaccatagtagacatttgcta

SEQ ID NO: 417241 - DNA, 83 bp, Homo sapiens
tcagaactgcagggaaacagccatcatgaggatgcctttgtggaactgtacggccccagcatgcggcctctgtttgatttctc

SEQ ID NO: 417242 - DNA, 97 bp, Homo sapiens
cgtctcttacgtctgcggaagtgcagctgcctcagttcttagcgcagaaagtgtggactatgggccagtttttgtgcaagaaccagatgatattatt

SEQ ID NO: 417243 - DNA, 96 bp, Homo sapiens
agcagggtttcacggatgtcactgtgcttgaggcttccagccacatcggaggccgtgtgcagagtgtgaaacttgattcctcgaggtctgaacaag

SEQ ID NO: 417244 - DNA, 82 bp, Homo sapiens
aacgaggcaaggagctaaagcagcgtgcgttcagccctggggatagtaatgatgacactgaagatgtttcactgtttgatgc

SEQ ID NO: 417245 - DNA, 86 bp, Homo sapiens
cagcccagccaagcactgtcaggcatttttgaaacgttggggttgttggagtggttggattttccctggaattgagtgagaaattc

SEQ ID NO: 417246 - DNA, 133 bp, Homo sapiens
ctcaagaatgcctgggacaaggagccagtgctggtcgtgtccttcgtcgtcgggggcctcggtacaggtttgcagattccgccagcagcacagcaagctctacagatgagtggctctttggcatttggtgctg

SEQ ID NO: 417247 - DNA, 100 bp, Homo sapiens
aaggcccccaagccctccttcgtgtcgtacgtacgccctgagcctcttcgagcactactgctactcccggggcggcatgcgccacagctcctacacctgc

SEQ ID NO: 417248 - DNA, 82 bp, Homo sapiens
gacagatgatgccagttaattactttgaatctgaaactagaggaccgttctgtggtgccccgagatgtggtccggcacatgc

SEQ ID NO: 417249 - DNA, 75 bp, Homo sapiens
ccatggtttccagtgcagcgcggagtgggcgatgccagcgtgccagtccacctggaaggccgctgtggtggaagg

SEQ ID NO: 417250 - DNA, 117 bp, Homo sapiens
ggctgcttcctccatcctggtattttttggagcttccatcctggttcttccaaagtgcccggacccaaaacaggaaacacagataatgtacaagtggatagagcccaaaatctgccg

SEQ ID NO: 417251 - DNA, 75 bp, Homo sapiens
gccgaaaggactgaggaacggtgcctggaaaagctttgactctcccggatcttgcagagcagtttgcccctcctg

SEQ ID NO: 417252 - DNA, 97 bp, Homo sapiens
ggaggaggcggccgccgcagccggggcccccgccgccgccggagcggcacacaagccatgccccctcttttctctttgggataccaccagtgccgct

SEQ ID NO: 417253 - DNA, 75 bp, Homo sapiens
acctgcttcagagacatgagaagattcatactgacaagttggatggcttgaggactggtactaaaaggaaacgtg

SEQ ID NO: 417254 - DNA, 75 bp, Homo sapiens
gatggacttcaaatgctgtttgtattccagagactagctggaccagctattccttctgttgtggcgtatccgaaa

SEQ ID NO: 417255 - DNA, 82 bp, Homo sapiens
ggctaaggacttcatgcccgccagcaaagccgtgagcagaagtgtgtgaagtgcaaggaagcgcagcccgttgtggtgatac

SEQ ID NO: 417256 - DNA, 90 bp, Homo sapiens
gcggcgttagtattggccgtgtacccgaaaaactgattgactgggctggcgttaactgtgcggaggcagcttataggctttatactgtgg

SEQ ID NO: 417257 - DNA, 103 bp, Homo sapiens
cccagaagtagctgaatgtgttactccattgctgaggagtgtgtgcttgtgaagttcataataggtgctcatggctgtgaagtgcctgtggaagacagggaag

SEQ ID NO: 417258 - DNA, 101 bp, Homo sapiens
acgatcccaccgcacgttcagaagtcggacctagaggatcaagacataatgggagcatttttagacaagccaaagatggaaaagcataatgcccaggggca

SEQ ID NO: 417259 - DNA, 75 bp, Homo sapiens
ggaggcgagctagccgggagttacaccgccaccgccagatttaaattccaggttgtcatcaatggccgagagttt

SEQ ID NO: 417260 - DNA, 90 bp, Homo sapiens
ggggatcgctacggaccttaaaatacccgcaacagccccttcgtcccaaatcccagattacaggaatgcagtaatcgtggccaagtctcc

SEQ ID NO: 417261 - DNA, 75 bp, Homo sapiens
gcctagcaccattgccaccagcatgcgggattccctcattgacagattattttcgaaataccagtatttcgactc

SEQ ID NO: 417262 - DNA, 100 bp, Homo sapiens
attatgctgggaaaaacaaagttccagagctacaaaagtttttccagcccacttcgatgtgttgttcttgtcgcacttagggacatcaatcaaggagaag

SEQ ID NO: 417263 - DNA, 100 bp, Homo sapiens
aatgcggttgaatttctgtgggacccagcaaaacgcacctctgctttcattcaggttttgagaacagagtgctgttttagagctggcagcagcatctcag

SEQ ID NO: 417264 - DNA, 100 bp, Homo sapiens
gccttcagcgactgcaccagcaagatcggcaggcgagattgcctgacccaggcctgctcggccctcacaggcgccgtgccgtccctgcagtgacaccgag

SEQ ID NO: 417265 - DNA, 100 bp, Homo sapiens
tttggcattgcaacaccgtttcacattgccacaatcaaggtacatcaggaacgtctctatcaagaatacaatttcagcaaggctgagggccatctgaaac

SEQ ID NO: 417266 - DNA, 87 bp, Homo sapiens
ggcctggcgtgcactccgcacctcggggacattattgcgcgtggaacggctgcttttggaagactagacgcttgaagcaaagctgcc

SEQ ID NO: 417267 - DNA, 83 bp, Homo sapiens
ccgcagcttcagcacctcggcccaggtatgaggatacatgggctgcacttcacagaagagccaaagactgtgcaagtgctgga

SEQ ID NO: 417268 - DNA, 96 bp, Homo sapiens
tgttctttgccatttggccaatcatgtgcgacctcgatctgtcccaagcattcatgttccctcaccagctgtacaacacagtcactcctggcggca

SEQ ID NO: 417269 - DNA, 100 bp, Homo sapiens
ctactttgtatttggtgatttcaacttccggctggattccaagtccgtcgtggagtttggaaattttagcattcaggtgccaggaatgcagatgggacag

SEQ ID NO: 417270 - DNA, 100 bp, Homo sapiens
ggcggatctggaggagcagttgtctgatgaagagaaggtcacaatccaaggtccggctcctccgcgtcccagggccggacggagggatgaggcagggggg

SEQ ID NO: 417271 - DNA, 101 bp, Homo sapiens
gcggcagcatgtcggtggcggggctgaagaagcagttctacaaggcgagccagagttattcccagaacctgtgtcttttggccaagtgtttccttgaccat

SEQ ID NO: 417272 - DNA, 100 bp, Homo sapiens
agtacatgagacgatgaagcaaagtgaacagagtatctgtcaggcaagagctgctgtgatggtttatgatgatgccaataagaagtgggtgccagctggt

SEQ ID NO: 417273 - DNA, 75 bp, Homo sapiens
tggcctttgatgccctggtgaccttctgtgaagaactgggatgaggacggggacttggttgccttttccagtgac

SEQ ID NO: 417274 - DNA, 88 bp, Homo sapiens
accatgttcaccagcaccggctccagtgggctctcgacatctcgaatcagcgatgcacacttggcagacacaatgattggcaaagcag

SEQ ID NO: 417275 - DNA, 100 bp, Homo sapiens
ggaaggcctgagaccatggaaaacttgcctgctctctacactattttccaaggagagcttattgacatgtgtgtgcagaactgtggtccaagtttccagt

SEQ ID NO: 417276 - DNA, 83 bp, Homo sapiens
gcgctagggaagatcgcaccgcggacgcccgctgagcttggcgcacgggccgaccagacgctctgcacaaaagccaccatgca

SEQ ID NO: 417277 - DNA, 100 bp, Homo sapiens
tcctcaaatccaaacggccacaatacatgcgctatgtcatcaagggaggccacacggttacggagccgatggctgacgtatttcatggcagtcaagtcca

SEQ ID NO: 417278 - DNA, 75 bp, Homo sapiens
tggcgacccattcaggcacttatggccatttcagccactgctacaggagctgagagaccctaccctcactttccg

SEQ ID NO: 417279 - DNA, 87 bp, Homo sapiens
gaacatctcttcccagcggctcagattaagatgttctacgaggagcatttgcacttggacgatgagatccgctacatcctggatggc

SEQ ID NO: 417280 - DNA, 89 bp, Homo sapiens
ctccgtgggcagcattggcgaccagcgcttcacgttgatattcactgatggactccaaagaatcattaactcctggtagagaagaaaac

SEQ ID NO: 417281 - DNA, 74 bp, Homo sapiens
gcgtcatggaggagatccggcggcagggcaagctgtgcgacgtgaccctcaagctagagttgggaagacatcac

SEQ ID NO: 417282 - DNA, 75 bp, Homo sapiens
gccgtgaacgaaagcagtgacggaggagcttgtaccaccgtttaagctatgaagaaggacatccctcacactctg

SEQ ID NO: 417283 - DNA, 136 bp, Homo sapiens
tgggagctactgatgcttcttcctacatgtcctaatatgttgatggcattccagaatatctcagatgagcaggtcgctgaaaattttgttccccctctgttggatgcagttctcattgattatcagagaaatgtcc

SEQ ID NO: 417284 - DNA, 100 bp, Homo sapiens
agccgcaccacctaacgctggccgacaacagcctggcgtccgccacggcgaaacctaaccaaactgtccctcatcttcagccacatgctggcagaactaa

SEQ ID NO: 417285 - DNA, 90 bp, Homo sapiens
gagtgtgatattactgaatattgtactggagactctggtcagtttgaagaaaacaggtctgaaacaaggtcttacccccagctgcttctg

SEQ ID NO: 417286 - DNA, 82 bp, Homo sapiens
ccccgatgttttcgccaccgcgcccaggcattggttcctgtcaccattgaagtagaggtgccctttgaccttcaccgttacg

SEQ ID NO: 417287 - DNA, 100 bp, Homo sapiens
ggggacaagtcggcgccccagagcggacgaggtcacccctggttcgacttgtgctgtctttggcctaggaggtgtgggtctttctgctgtaatgggttgt

SEQ ID NO: 417288 - DNA, 82 bp, Homo sapiens
ctacaagactctcttcgctctttgcatcttaactgcagggtggcccagttgaaatccttcccttcctctaccttggaagtgc

SEQ ID NO: 417289 - DNA, 83 bp, Homo sapiens
cgcttcaccacttacgaaatcagggtcaagatgtccagctcgccgctgtccaagaaacgtcgcgtgtccgggcctgatccaaa

SEQ ID NO: 417290 - DNA, 76 bp, Homo sapiens
agttgcgatgcatgcaagtcggaggaaacgctagtgcagtgccttatgcccgctcagaggcccacctcacagagct

SEQ ID NO: 417291 - DNA, 75 bp, Homo sapiens
cctcagccgctgtgggctcctggggagatggaggggccggggctgggctcgcagacagagccttgctctgttgcc

SEQ ID NO: 417292 - DNA, 51 bp, Homo sapiens
agattttgaagatgcagatacccaggaaaatgtttcaacgtgcgcaagagt

SEQ ID NO: 417293 - DNA, 75 bp, Homo sapiens
agtctttggcagccttatcattggttatgccaggatgctccagaccttgtatgattacttctggtgggaacgtct

SEQ ID NO: 417294 - DNA, 82 bp, Homo sapiens
tctgctgcggcgcggggaccgctgtgctctcggcagaagctcctcctggggtagagacagatcttattgatgttggattcac

SEQ ID NO: 417295 - DNA, 96 bp, Homo sapiens
gagatctctacagagatgtgatgttggagaactacaagaatctcattatactaggtgtgcccccgagagcctgaagacacgcaccttctcccatgc

SEQ ID NO: 417296 - DNA, 75 bp, Homo sapiens
tgaagatcaagcgcctgagaaagaagtttgcccaaaagatggttctggcttcagtgatcctctcactggagcacc

SEQ ID NO: 417297 - DNA, 101 bp, Homo sapiens
tgttattaggaatgacaatgacagttgggactacactaaaccatatttgggaagacgaggaggcaagtgaggcctatctggttggcctttttgaagacacc

SEQ ID NO: 417298 - DNA, 115 bp, Homo sapiens
cggccgtgcccgaggggctcagcgccttcacccaagcgctatatccgtgggcttcaaagctttctggaccaggcctcgcggctgggccttgacgtctctttacaaaaggtggaca

SEQ ID NO: 417299 - DNA, 85 bp, Homo sapiens
gcttaaaaacagctcattctcctaatgttttccttcagcaaggacaaaggctctctttaaactgtggggctccccagacaagtat

SEQ ID NO: 417300 - DNA, 90 bp, Homo sapiens
cgcgcctgcgccacaatctctcctcccagggattttgcaggttaattcctcacacacgttcaccaggtacttggacaatatattttgaag

SEQ ID NO: 417301 - DNA, 50 bp, Homo sapiens
gaaaagtgtggagaagctgctttaaatattatacccaacaagcaacccaa

SEQ ID NO: 417302 - DNA, 100 bp, Homo sapiens
atggcggagagagaggtggagtccggcccccgaaagaggatctcacattcttgaaggtggcattgaagagcactaagatcggaagatgagtgagcttgac

SEQ ID NO: 417303 - DNA, 51 bp, Homo sapiens
gtccctggagcggccgccttccagcatgcatggtcatggaggctatgattc

SEQ ID NO: 417304 - DNA, 100 bp, Homo sapiens
cgtgtgagtgataaagtcatgattccacaagatgagtacccagaaatcaactttgtggggctgctcatcgggcccagattgaggtggtgccttctgcctc

SEQ ID NO: 417305 - DNA, 96 bp, Homo sapiens
aacccctggaaacttgctaaagagctgtggagcttgatcctggatagtgtttgtatgatgtgcacacgtctctgcaaatgcttgtttgaagattgg

SEQ ID NO: 417306 - DNA, 82 bp, Homo sapiens
ccagaccctggagcctcagttggaagcagccgatccagcctgcggagcctgtggggcaggaaaacgcagcacagttcccttg

SEQ ID NO: 417307 - DNA, 90 bp, Homo sapiens
ccttcaccgcactcgaccaggaccacagcggcaaggtctccaagtcccagctcaaggcctataccattcaaggacagtatgccattccac

SEQ ID NO: 417308 - DNA, 100 bp, Homo sapiens
ctgttttcgacaggtgtgcaggtttcggcacatggagattgatgagctatgaagacatgattggtgaggaggtgccatcggatcaatactactgggctcc

SEQ ID NO: 417309 - DNA, 74 bp, Homo sapiens
cccaaggaacacctgggcaacagaatattggtcaagttgctgaccttgaaatgcatctcgagcacttccagagt

SEQ ID NO: 417310 - DNA, 75 bp, Homo sapiens
cctcttaccaccgtcatggcagtcccagacgaagttatacggaagcgtctcctcattgatggagatggtgctgga

SEQ ID NO: 417311 - DNA, 101 bp, Homo sapiens
atcacctgcggaatggggtagatattaacacctgtaaccagagatcctgcatattttgatgaaaattggctaaacagaatcaaaactgaagtaggagataa

SEQ ID NO: 417312 - DNA, 90 bp, Homo sapiens
agattcgcagtggtcgcttcttctccttgtactataaccaagagtggacattgtgggatcgctttgaggtacaagggctgcagcctaatg

SEQ ID NO: 417313 - DNA, 83 bp, Homo sapiens
cccgaggaggcagccaagctcgtggcctgcctctgcgtgctgtcaacagcatctccaccctggagcctgtgagccggtgccag

SEQ ID NO: 417314 - DNA, 100 bp, Homo sapiens
ctgctcagatgcttgtgggagattcttttgccagacattactacttcctaggcagaatgcttggaaagagaattcgagaagagaagcgagaagaacggag

SEQ ID NO: 417315 - DNA, 50 bp, Homo sapiens
ccgagtcaacaaccgcttcgagctggtgaaatgacaatggatgctctgtt

SEQ ID NO: 417316 - DNA, 74 bp, Homo sapiens
acaagaacagagggattctttgactcagaaactacagctcttggataagcacaagaatacagagagcatggtgg

SEQ ID NO: 417317 - DNA, 100 bp, Homo sapiens
gtgcctccattcccgggaggggggagcggcgttggaggccaccgtttccagagccagctgactatgcaacaagatgactatgcaacaagatgaatgagga

SEQ ID NO: 417318 - DNA, 74 bp, Homo sapiens
ctcaacaaccatttctaagtgggagtacacctttaggatgctataaaaaactaatagaatatcataagaatgga

SEQ ID NO: 417319 - DNA, 105 bp, Homo sapiens
ctcatctttcacaaaggccttcacaacgtggacccaagtggagagattgtggaactggcgaaaggtgcatgtccctggaaggagcatctctaccacctggaatct

SEQ ID NO: 417320 - DNA, 90 bp, Homo sapiens
tgcacttgcaggccgggcagtgcggcaaccaaatcggcgccaagatgaccgcacctcgagcaggagtggggatgccacgtctgcccccag

SEQ ID NO: 417321 - DNA, 74 bp, Homo sapiens
gctggaacagttgcagggtcacagaaacatcgctcatctttgggtgaaaaattgtcgggatcttctgcagtcca

SEQ ID NO: 417322 - DNA, 100 bp, Homo sapiens
ctctgtgagggagcaggaccaaactctgctgctaaagatcatggatcaagctgctaatccccagaaacagaagcctatcagttgctgaagaaggccaccc

SEQ ID NO: 417323 - DNA, 74 bp, Homo sapiens
agaagaattttccaaatgaatttgcaaaacttactgtaggtgcccagggtggctccgtggcccgcacactcctg

SEQ ID NO: 417324 - DNA, 80 bp, Homo sapiens
agaattactagattttctctcaaactacgagggatgtattcttggcctgggtagcctctagaaattcaaacacagtggtg

SEQ ID NO: 417325 - DNA, 100 bp, Homo sapiens
cggcccggcagcgacatggaaggtccctatcactgttcagtccatcgtcattcagtctctaaataaaacgctcacccgacgggaggacactgatgtgctg

SEQ ID NO: 417326 - DNA, 83 bp, Homo sapiens
acaacgatggtgaaaagggtcctcctgctcacagtgtgaataacagggcgaccattgacgaggtggagacggacgtggtggag

SEQ ID NO: 417327 - DNA, 75 bp, Homo sapiens
aaagtatcttataacttctggctggaattaagagaacactgcttggattctggaagaaaacagctcgaatgatgt

SEQ ID NO: 417328 - DNA, 100 bp, Homo sapiens
tgacaccaagttggacgctatgctggaagaatttaagaaaggtctctcaggcagctgcagagcttcaacagtactgtatgcagaatgcctgcaaggatgc

SEQ ID NO: 417329 - DNA, 100 bp, Homo sapiens
aagaaacaggagaacgggaagcctcctgccgagataaagccaccacgtctgttgaccactgaaaaacacacatactatctgactgcagattctcccaata

SEQ ID NO: 417330 - DNA, 75 bp, Homo sapiens
atgatgtctatgatgtcatgctaaatcaggggattctgcttttgcatcttcctcgttttctcttgccgctgccaa

SEQ ID NO: 417331 - DNA, 82 bp, Homo sapiens
tcaggaggccaccaacttccctctgcggccgtttgtcattcccttcctgaaggaagctcttcgtgggcggtcttgactggag

SEQ ID NO: 417332 - DNA, 83 bp, Homo sapiens
tttcggcggagggaccaaggtggagatcaaacgctcacgaggcccagggaatcctctggaccatcagattaccaatgaaagag

SEQ ID NO: 417333 - DNA, 82 bp, Homo sapiens
atccagcctgcggagcctgtggggcagctgatgaacttattagtcctaaagacattgatcctgtccagcgctatgtcccact

SEQ ID NO: 417334 - DNA, 90 bp, Homo sapiens
catacagggctatgatgctattgtggttgaacaatggacagtcctggaaggcccaatggctgcaaaatcgcaacccaacattcccaaagc

SEQ ID NO: 417335 - DNA, 75 bp, Homo sapiens
cccggcgctccgtgcgcggagccgtctgcctgcatctgctgctgaccctcgtggcattatccaattggtttgcta

SEQ ID NO: 417336 - DNA, 83 bp, Homo sapiens
gtcctagtccgaggtgccaccgtggaaggacagaatggcctcgaaggagctccagcaagcccagacaaccagaccagaatcga

SEQ ID NO: 417337 - DNA, 75 bp, Homo sapiens
actgtgagccaaggaattttgtgtttcttgccatcttacaaggagtacaaaccaccaggaacccgtaaacttcat

SEQ ID NO: 417338 - DNA, 100 bp, Homo sapiens
ctgccgcccaccttgtggccctgggctttaccatctttgtggctgtgcttgccaggcctggctccaattgaagataaaactttccaagtccttggtaatc

SEQ ID NO: 417339 - DNA, 83 bp, Homo sapiens
tccgcggcatccgtaaccacaaggaggacgagatctggtggctggacccagagctgacctatggctgcgccaagcccttcgtc

SEQ ID NO: 417340 - DNA, 119 bp, Homo sapiens
gtcatgtttgatgatggctcctttagcagagacacatttcctgaggatatcgtggtttcccaacctctttcccccactgaagccggagacggtggcccggaggacagtggaagctgtgc

SEQ ID NO: 417341 - DNA, 100 bp, Homo sapiens
attttagggtcctttatatagaagggagagtagttcgtaagaaggcaacaagttcttctcctctacagaaggattttgcaaacaattcggcaagttccaa

SEQ ID NO: 417342 - DNA, 100 bp, Homo sapiens
ccttcccccacccccgactcgggcttggcgcggcggccagaggaaccccgaggccgccatggcatcagatgaaggcaaactttttgttggagggctgagt

SEQ ID NO: 417343 - DNA, 100 bp, Homo sapiens
gatcacttcaagatatttaccatgtccgagaaatgtggtttgtggtaggaaggaatggtggcctactccatgagcagagcctgtgggggctgaacctgac

SEQ ID NO: 417344 - DNA, 75 bp, Homo sapiens
agaaagtggtgaatcccctgtttgagaaaaggcctaagaattttggcattggctggaatgagctgctcatcgcct

SEQ ID NO: 417345 - DNA, 100 bp, Homo sapiens
acgtccgcgagatggcttgctccattgtcgaccagaagtgtgggaattttgctgtcctcgtggatcttcatatcttgccacaaggttcaaacaaagatac

SEQ ID NO: 417346 - DNA, 100 bp, Homo sapiens
gcttacagcccaacatgaactccagtgacccagacctggctgtggtcaaacccacccggcccaactcactctcaggcccagaatcagcagcagacagaag

SEQ ID NO: 417347 - DNA, 75 bp, Homo sapiens
gctgacgggaggatctgaagccggccgcagaaatttaaaagcctgttgattcaagaactttctaaagtatttccg

SEQ ID NO: 417348 - DNA, 100 bp, Homo sapiens
gggacaaaaagcaatgcaagagtcgctttgttacacctttcaagtgtctcgataaggatgacattcggctgctgccgtcagcattgggtgtgaagaagag

SEQ ID NO: 417349 - DNA, 51 bp, Homo sapiens
tgactcatttgtggagctgggacaggttagaacaattaatcctctctgaca

SEQ ID NO: 417350 - DNA, 100 bp, Homo sapiens
ctctgtcctcattcacttccctccactgctgggtcattttgaagcaaattatatacacattagatcattgcatttatggtgtcctactcttctgtcctca

SEQ ID NO: 417351 - DNA, 100 bp, Homo sapiens
cgcagagcgcgggaggcggcggcggcgcggagcccaggtatccagctcacatagaagacattgactacgaggaaggaaaagtactcatccatttcaagcg

SEQ ID NO: 417352 - DNA, 100 bp, Homo sapiens
atggttacagcacagctgcccctgcctatgtattgactcggagacaaaaagaggccaagaccaagagtgacagtgggacagctgcccagacttctctaga

SEQ ID NO: 417353 - DNA, 75 bp, Homo sapiens
ctatgtttacaacatcatcggtggacttgatgaagaaggagcttaatgccaggaacagattttgcagttggtggg

SEQ ID NO: 417354 - DNA, 96 bp, Homo sapiens
aatgacttgactttcagagtatcttgtcgctgcagtggaactattggaaaggccttcactgcacaggatcagatgtggccgcccagcagttgtgca

SEQ ID NO: 417355 - DNA, 98 bp, Homo sapiens
cgacatcatcgtcttcgcctatgcctgccaggctgctgattttcatgttccagctgctccggggcctcgcctactgtcaccaccgcaagatcctgcac

SEQ ID NO: 417356 - DNA, 83 bp, Homo sapiens
gaatccaccgccatccgccaccatggaaaatgtttataggaggccttagctgggacactacaaagaaagatctgaaggactac

SEQ ID NO: 417357 - DNA, 95 bp, Homo sapiens
ggccgctcacaacatgcacagcctggcgacggctgcgaggaccattcttagtggcactggggaaatcttggcacccagaagaattcaactgcgct

SEQ ID NO: 417358 - DNA, 74 bp, Homo sapiens
ttagcttcagagttctttgtggatggacttgattctgatgagaggtacaaacccgtagtgctgatgaaccaatg

SEQ ID NO: 417359 - DNA, 75 bp, Homo sapiens
agaggacgaggagggcccatactacagcgcactgtcaggtgtgatccctcacatccacaaatctctgattggaaa

SEQ ID NO: 417360 - DNA, 101 bp, Homo sapiens
aagttcaaagggaccatcatcctgacagctgtgtactttgccctcagcatctcccttcatgtctgggtcatggttgaagaagaggatgaacttgaatctgg

SEQ ID NO: 417361 - DNA, 83 bp, Homo sapiens
cttcctgcctttaacacacctactgggattccttgggcaatggtgaatttgaaaagcttatgtccctgatgccaaaaatgcac

SEQ ID NO: 417362 - DNA, 90 bp, Homo sapiens
attttctatatccttttttagttcatgtgaattgcactttctgcctgcttctagaattcctccaagtgtttacgaaaatggggttacaga

SEQ ID NO: 417363 - DNA, 96 bp, Homo sapiens
gcctgtaaccaggtcgtcaagccacaggttttccagtcgcactgcggacaggaagataatatgacctcagtaacaaaccacttttctcaatcaaag

SEQ ID NO: 417364 - DNA, 96 bp, Homo sapiens
tttgctgctaggggaccaaggatggcaaaacgacgacaggtgtccctggccagtgtccttccacctgtccacaagcatggggaacatcttcgccaa

SEQ ID NO: 417365 - DNA, 100 bp, Homo sapiens
gcaattcataatggagctactgtactggctattggaaggaggagattctgaagataaggaggaagtgtttggattgtgagctatttcagaactgttctca

SEQ ID NO: 417366 - DNA, 82 bp, Homo sapiens
acgcaaaccaaggatctggggatcttcgcactatcccaagtgtactaatggtcacttgatgtgcgctggctgttttatccac

SEQ ID NO: 417367 - DNA, 75 bp, Homo sapiens
tcgcctcagggcattcatttcaggctccttctaaatggccaaggtgatggcatcagctgagaagggaaggaagcc

SEQ ID NO: 417368 - DNA, 75 bp, Homo sapiens
cgccagcctgcgaaggtggcggcgctgctgctcgggctgctcttggagcccaacctcagcgcttgcctcagcttc

SEQ ID NO: 417369 - DNA, 82 bp, Homo sapiens
actgccaaactggactactccaagagtcaaaggctttagccatcacctccaaggctccgccagccaaggatggggctccaag

SEQ ID NO: 417370 - DNA, 100 bp, Homo sapiens
ctggaggacatctgggggccacaaatgctccttctcctggagacgcaactcaagactccccatccccaggatgtcaacctcagtccctcaaggccatacc

SEQ ID NO: 417371 - DNA, 83 bp, Homo sapiens
atgccatcaacctgcgtgaggtcaacctgcgcccccagatgtcccagggctgaagctgccctcgaggacctggtctccaccat

SEQ ID NO: 417372 - DNA, 102 bp, Homo sapiens
tccggcccatagccgagcagactggcatctgtaaggtgcggccgccgccggggacggcaaaacagaacagaaaggcggagataaaaagaggggtgttaaaag

SEQ ID NO: 417373 - DNA, 83 bp, Homo sapiens
tttccaacatcttctcataaaaggggaaagcttcatagcctcaaccatgaaggaaaccagtcccaacaagcatcagagtgctg

SEQ ID NO: 417374 - DNA, 100 bp, Homo sapiens
ggcggcgccccggccgaggtggcggcggctcctcaggagggtgaggacaaaatcttcttaatcaacaagcttcactccatctacgagaggaaggagaggg

SEQ ID NO: 417375 - DNA, 101 bp, Homo sapiens
ccggaagaagcgaccaaagcgcctgaggaccggcaacatggtgcggtcggggaataaggtatgacgctgggcgggatggcttcatcgacctgatggagctg

SEQ ID NO: 417376 - DNA, 82 bp, Homo sapiens
ccgacactgggggcagtccgcgagccccgcactctctcgatgagtcggagaagtccccaaacggggattcagcgtccgatcc

SEQ ID NO: 417377 - DNA, 82 bp, Homo sapiens
tgagcgagctgtcagagcccggggacggcgaggccctcatgtaccacacgaattctaccttgtcaaagattcctgctttaca

SEQ ID NO: 417378 - DNA, 82 bp, Homo sapiens
cggaaaattgaggaaatcaaggacttcctgctcacagcccgacgaaaggatgccaaatgagtccttcaataatgttaaacag

SEQ ID NO: 417379 - DNA, 102 bp, Homo sapiens
cggcaatggtctcatcaaggtgaacgggcggcccctggagatgattgagccgcgcacgctacagtacaaggcggctgagtgacagcccatcaatgaaaaagg

SEQ ID NO: 417380 - DNA, 97 bp, Homo sapiens
gaggcactcatcctgcacgccggcgagtgccagcgtgtgttctaggtcagtggcttcaaagactccagttggattcattggactgggcaacatgggg

SEQ ID NO: 417381 - DNA, 98 bp, Homo sapiens
gtggtacttctgctagggaaaaagagctctctcccccacctggcttaccttctaagataggcagcatgaatacggggtgctttgcattcaggaataca

SEQ ID NO: 417382 - DNA, 100 bp, Homo sapiens
cggtactggagaacacggatgtttacaagtccttccactttctctctgaggcagaaagagcaagggtttttctctccattttatggttgggaaaattgag

SEQ ID NO: 417383 - DNA, 98 bp, Homo sapiens
tcttccttggaacatcacagtacattttaaggatccctcatggaaccaccgggtataccgactggccctcgccaagctctcccctcctgtcatcccct

SEQ ID NO: 417384 - DNA, 96 bp, Homo sapiens
gcatctgagtaccagatcctgcaataggagataaggccatttcaccacaacagttctgaagtagcaggatacctccaaaagcagccatactttgga

SEQ ID NO: 417385 - DNA, 82 bp, Homo sapiens
gtccttacagccgctcgtcagactccagcagccaagatggtgaagcagatcgagagcaagatcatcagccatgacacccggc

SEQ ID NO: 417386 - DNA, 100 bp, Homo sapiens
aattcagaaactatctcattcccaagggtgagtggaagccccggcagatcgacaacccagattacaagggcacttggatccacccagaaattgacaaccc

SEQ ID NO: 417387 - DNA, 74 bp, Homo sapiens
ctgcttgcaggctgtgtcacagaagagaatggttccgcagcgcagtggtgaaggaggacgccatgcctgcgact

SEQ ID NO: 417388 - DNA, 100 bp, Homo sapiens
tgatgaagaaccatcccaattagaggagctagctgacttcatggagcaggtacttgagctggatacactggtggataatttatctattgatccttcctcg

SEQ ID NO: 417389 - DNA, 90 bp, Homo sapiens
gtgatgttggagaactacagaaacctggtctccctagtgttctaagaacggaagcatctgggctggatggaatttagcatcaagcagagt

SEQ ID NO: 417390 - DNA, 83 bp, Homo sapiens
gcgggctgagcggcgagtttccgatttaaagctgagctgcgaggaaaatggcggcgggaggacttaaagatggaggaagctat

SEQ ID NO: 417391 - DNA, 82 bp, Homo sapiens
tccccaaatgtagacatctcttcagtggaccccctgataggccggtttgctccaggccagtacgggatccctgaaccatgga

SEQ ID NO: 417392 - DNA, 80 bp, Homo sapiens
atatactaccccttctggagaggtgcgctatgctgctgtaacacagtttgaggaggagatgttaaagtaacccatcttgc

SEQ ID NO: 417393 - DNA, 100 bp, Homo sapiens
gccgaccttgagctccaggagttcgtctcttacgtctgcggaagtgcagctgcctcagttcttagcgcagaccaatttatatctgacttggaacaccagc

SEQ ID NO: 417394 - DNA, 100 bp, Homo sapiens
cagaggaacctatacaaagaagtgatgctggaaaatctcaggaatctggtctcattggattacataccggttacggcacctccttcgtgcaaggtgtgat

SEQ ID NO: 417395 - DNA, 74 bp, Homo sapiens
ggataacaagttttgtgcagattgccagtctaaagatatggccgcgtggaaagtgtcaaaattcttcccaagag

SEQ ID NO: 417396 - DNA, 50 bp, Homo sapiens
gaagcagatacttgtgaagtcattgggagaatcaggaaacccaggcccaa

SEQ ID NO: 417397 - DNA, 83 bp, Homo sapiens
cttagctgtgctcgcgctactctctctttctggcctggaggctatccagcagggtcaccatgaagttcaatcccttcgttacc

SEQ ID NO: 417398 - DNA, 100 bp, Homo sapiens
aaactacctcttcaggttacagcttgaggatctgtctcttatccaggtgaatgaaaactttgccattgatttgatagcagagcagcccgtgagcgaggtg

SEQ ID NO: 417399 - DNA, 82 bp, Homo sapiens
cggtcctgtactggctgctgctgccctgcgcgctgctggctggttgacatcatggacatatgtgagtccatcctggagagga

SEQ ID NO: 417400 - DNA, 82 bp, Homo sapiens
ccctgtgccggctccgtctgcgatgcagggcggcggcctgtaatcccagcgaccgccaggtaatctcaggggcgatataatc

SEQ ID NO: 417401 - DNA, 96 bp, Homo sapiens
tgaagctcaaggcacaggtggcccgatcccagcaggacattgaaaggtgaaatgacaatggatgctctgttggctcgattgaaacttctgaatcca

SEQ ID NO: 417402 - DNA, 74 bp, Homo sapiens
aaaaaaccattatccagaatcccacagaccagcagaagcgttacatagccatgtgccgcgagaagcagcccatg

SEQ ID NO: 417403 - DNA, 75 bp, Homo sapiens
ggcggcgggaacgattgggctgagcagaggacgacatgttgcttttcgtggagcaagctattcagagtcagcgag

SEQ ID NO: 417404 - DNA, 76 bp, Homo sapiens
ccggggacaagaaactagagcaaataaccgttttgaaattgcagaggtggaggagacactgaagcgactgcagagc

SEQ ID NO: 417405 - DNA, 100 bp, Homo sapiens
tttttattcagagtgaagctaccaattacacaatattgtttacagtgagtataagaacccaaggcttattgatatttgcggagttgatttctgcgattaa

SEQ ID NO: 417406 - DNA, 87 bp, Homo sapiens
cttccggctccgtcgtggaagcaggactgcgccgcgtcttcctcaagattctgaaagtcaagaagacatcatccggaatattgccag

SEQ ID NO: 417407 - DNA, 75 bp, Homo sapiens
gacggttcgccgtcggtgccgagaccccatcaacgtggagggcctgctggtgaatgattccaattgtgaccaaga

SEQ ID NO: 417408 - DNA, 75 bp, Homo sapiens
aggagcctgttccagaactgctggaagctgagtatttgagcaagataaagattcagcaaattgagaaggatcgag

SEQ ID NO: 417409 - DNA, 119 bp, Homo sapiens
gcggcggagcgggagcgggtaccgggcgcgggcagagcgcggcggcgcggattagtcagaagaagttgaaaaaatacgagaaagaatatcacaccatgagggaacagcaggcccagcaa

SEQ ID NO: 417410 - DNA, 50 bp, Homo sapiens
aggatttctctttgggaaactaaaggtttttaatgaccacaacaagcaag

SEQ ID NO: 417411 - DNA, 74 bp, Homo sapiens
cgccctgggccgggccccaccggacgaagctggcagggcggagatgctggaccacgccgtcctgcttcaggtga

SEQ ID NO: 417412 - DNA, 51 bp, Homo sapiens
gtcaccaaaggaagagtgccatacccagacttaattcagtgcacaaatgag

SEQ ID NO: 417413 - DNA, 83 bp, Homo sapiens
cggctcctagcggatgggtgctattgtgaggcggttgtagaagctcaccatggatgatgatatcgccgcgctcgtcgtcgaca

SEQ ID NO: 417414 - DNA, 96 bp, Homo sapiens
gtgtattccatgtgaggggaagggtccaacagtcctggtcattcagactgcagttccccaggctgaccggttccctgatgtgttacctgcttctgc

SEQ ID NO: 417415 - DNA, 75 bp, Homo sapiens
gtcccgccgggtcttccatcctcgctgcgccaacggaggaggctactaccactattcctactcggtggtgagggg

SEQ ID NO: 417416 - DNA, 82 bp, Homo sapiens
gacctttttggaggcctccaagctgctgctcacctatgctgacaacatcctcagagttggcgtggacctggatgaaaatctg

SEQ ID NO: 417417 - DNA, 82 bp, Homo sapiens
gcggccgccggagatgcctgacgcatctgtctgaggagcggtttggtgcacctcgatttggaggaagtagggcagggccctt

SEQ ID NO: 417418 - DNA, 98 bp, Homo sapiens
acacggagaacaagaaggtgcatggggatgtcgtgaagtatggcagtgtgatccaggtcagtgacttcctgtcgggccgttcgccactgacactggcc

SEQ ID NO: 417419 - DNA, 100 bp, Homo sapiens
cctggctcttgctatctcaaactgttgtcactcactccccctttggttttaccagttattgccttgtctgtcaagatccgcagttatgaagaacacttgg

SEQ ID NO: 417420 - DNA, 100 bp, Homo sapiens
taagaggatttatagatcagaatctcagtccaacaaaaggttttactgcaatcacagcaaccaaccccatttggcttataaagactcggttacagcttga

SEQ ID NO: 417421 - DNA, 75 bp, Homo sapiens
cacgagctgcgcctcagcgccctgcagaaggcccaggtcaaaatgcagatcttcgtgaaaacccttaccggcaag

SEQ ID NO: 417422 - DNA, 82 bp, Homo sapiens
ggccagggaaccctggtcaccgtctcctcagggttgtctcctcacagactatgagctccttgaaagagggaatcgtgtctta

SEQ ID NO: 417423 - DNA, 49 bp, Homo sapiens
gtgcaagcatctgggccatcttcaatcgagcccaagctgcactgcaggc

SEQ ID NO: 417424 - DNA, 100 bp, Homo sapiens
gcgttgtgaagaccatgacaggaggccgagcgcagagcattggcaggaggggcaaggtggaacagcctctgcagggaagaaggccagcagtgctgctgcc

SEQ ID NO: 417425 - DNA, 120 bp, Homo sapiens
cgaaaagccacttgaagaaaagggtgaaggaggcgaattttcagttgatagatgtcatacttgtaacaccacagatcgaaatgccatatgtgtgaactgcattaagaagtgccatcaggg

SEQ ID NO: 417426 - DNA, 75 bp, Homo sapiens
ttccccttccccaccgaaccgcgtatacaattggaccgtggatgaggtggtacagtggctgatcacatatgtgga

SEQ ID NO: 417427 - DNA, 96 bp, Homo sapiens
ctcaggagagagcagccagagtgagcattctgctaagtgatgaatccagcgaggctgattctcagagtgaagacgatgatgaagaagaactcaatc

SEQ ID NO: 417428 - DNA, 116 bp, Homo sapiens
ccatcaagcatggatcggcgctggacgtgctcctctccatggggttccccagagcccgcgcgtactaggttttgacaagcttgcatcatgcgtgagtataagctagtcgttcttgg

SEQ ID NO: 417429 - DNA, 100 bp, Homo sapiens
cggcgcgcgcgagccgagtgtgagcggaaaggggcccggcgtctgcctcgagactgaagaccgggaattcacaattgaaactgaagggaaaacatttcag

SEQ ID NO: 417430 - DNA, 50 bp, Homo sapiens
gactaatctgatcgggtcttccttcatgccccttcacagatgtagtcact

SEQ ID NO: 417431 - DNA, 83 bp, Homo sapiens
gggagagcggcagagataccgcgatatttgggagcggccccgagacgcgcctggcgcggggggatatgagactttctactcgg

SEQ ID NO: 417432 - DNA, 100 bp, Homo sapiens
ctctgcctaagtaccgatgcagcagccccacagaccatggtcatgccaggtggtgatgatgtccagcaactctgtgaagcaggagaagaggagtttttgg

SEQ ID NO: 417433 - DNA, 98 bp, Homo sapiens
ttgaggcctggtatgaacctttcctgtttaatttcttatatagagacctattcactgcaatgattattgaaattggctaaacttctgctctgtggcac

SEQ ID NO: 417434 - DNA, 75 bp, Homo sapiens
tgcgttgacacgtcttatttaatccacatcataggtctggaggcggctggtggaaatccaattccccgcggagca

SEQ ID NO: 417435 - DNA, 83 bp, Homo sapiens
cttggcgcgccggtcgcccagacatggcggacggcagcggctggcagttttccaagagataacttcaccaagatgtccagtga

SEQ ID NO: 417436 - DNA, 75 bp, Homo sapiens
gataagaaaacacatctttacacactaagcatttatattccagaggatgacaaagatgccccagagaagtttcgg

SEQ ID NO: 417437 - DNA, 100 bp, Homo sapiens
atcaaggtgaacgggcggcccctggagatgattgagccgcgcacgctacagtacaagaagcacctctctccctcgctccgcccttcacccagacgctcgc

SEQ ID NO: 417438 - DNA, 90 bp, Homo sapiens
cgagcggtggcgtcgttgtcgccccctcctcgtcgggaagaatcgtttggtctcctgccgtgcccgggctgaaatctctttaatgatgga

SEQ ID NO: 417439 - DNA, 100 bp, Homo sapiens
ggtagaggagaaggagccagaagtgaccatctcaagcatccggcctatttcagaaagccttatgccagcctggaccatcttggaggcagtgtaggatcat

SEQ ID NO: 417440 - DNA, 130 bp, Homo sapiens
cccgacgaggagagcatcgactggaccaagatcgagcccagcgtcaacttcctcaagtcgcccaaaggtctggccgtgggcctgggcttcggggcactggcagaggtcgccaagaagagcctgcgctccg

SEQ ID NO: 417441 - DNA, 75 bp, Homo sapiens
cagccggctctggagtgcgggcgggggcgacagggccgattccggagtggatgagctgcttcagaaagagcaaaa

SEQ ID NO: 417442 - DNA, 100 bp, Homo sapiens
gtctactgaaagctgccgctgaagctgccgccgttgcctccgccgccaagagtgagcgagcggacccgcgatgggtgcgttccatggatgaactgaatca

SEQ ID NO: 417443 - DNA, 100 bp, Homo sapiens
aagtaaaaattttcagaagcacatgtattataacagggattcgataaacaagtggatgtgtcatatattgccaaacattacaacatgagcaaaagcaaag

SEQ ID NO: 417444 - DNA, 75 bp, Homo sapiens
gtctgcaagaaaggcccttcttttgtgggctcaggaacaatgcgccacgcagacaccacccatcctttaaccaag

SEQ ID NO: 417445 - DNA, 98 bp, Homo sapiens
tgcctgagagatctccaagaattacagcgtgcctgccagtgtagagccggtggagcagctgggctcggcgctgaggtttcgccctggctacaacgacc

SEQ ID NO: 417446 - DNA, 76 bp, Homo sapiens
gcagagcaggctctgaagcacctgaagatcctgggtgtttggctgacctacagatacaggaaccagaaagaccccc

SEQ ID NO: 417447 - DNA, 74 bp, Homo sapiens
tctaaatggacaccacatgaacctctgtttagaatacctacgttacaggaaatacaggaggcagaggaacaaat

SEQ ID NO: 417448 - DNA, 82 bp, Homo sapiens
cgcagcaccgctactcggagggcgagcggacctccctggagaagctgcccaacatgttcggcgaccttcggtccacgtttat

SEQ ID NO: 417449 - DNA, 102 bp, Homo sapiens
ggggagcgcctcgtcgacatgagtgatgtggaggaaaacaacttcgagggcagagtacaaacacaagtgcgccttgcaaaaaaaaactttgacaaattgaag

SEQ ID NO: 417450 - DNA, 100 bp, Homo sapiens
aaccaagaaacagtatgtttagcaagcactgctatgaagactgagaattgtgtggccaaagtagatgacattaatgctgataagaatatctcttctgcac

SEQ ID NO: 417451 - DNA, 100 bp, Homo sapiens
gaagagctgatgagaatgctggcggaggacgagctccgggatgctgtactccttgtctttgcaaacaaacagggacagtggccttagagctattgagaat

SEQ ID NO: 417452 - DNA, 83 bp, Homo sapiens
catgaagtgcactctgctgcttatcctcctccggcagtggaagaggaccagttacagaagtggatccgcggtaatgtgagtgc

SEQ ID NO: 417453 - DNA, 82 bp, Homo sapiens
cagaagtcgcgtgtctaggtgagtcgcggtgggtcctcgcttgcagttcagcgaccacgcacatgattaagtaccggtacat

SEQ ID NO: 417454 - DNA, 75 bp, Homo sapiens
caggttgacactgtggccaccaaggtgaaggagtttgagaaactctctgatttcttcaaaactcactatcgcctt

SEQ ID NO: 417455 - DNA, 100 bp, Homo sapiens
cgcacaggacaaacagtggtggtggagacgggccccacatcagctccaaggtcagggtgattaagctgtcaggtggggttgtttttgagcacgttcactc

SEQ ID NO: 417456 - DNA, 98 bp, Homo sapiens
ctccaggcttggctaagccccagatgcccccagctctttccttcggggaacaagccgggcccttgctggccgggccccagctcacatgccaatggaga

SEQ ID NO: 417457 - DNA, 82 bp, Homo sapiens
atggcacttcattggccacctacagaaacaaaatgtcaacaaattgatggcttaaagcttttcaagccaggccaagaagctg

SEQ ID NO: 417458 - DNA, 100 bp, Homo sapiens
ctattcatgttgctttttgatggccatggcataaggaactctatcccaggaatacagctttgcattaggatccctctgtgacccagctgaccaacgcccc

SEQ ID NO: 417459 - DNA, 100 bp, Homo sapiens
cgcctgtgttacgtgttgatgaccggcagcggctggcccgggagcgacgtgaggaacgggagaaacagctagttggacagagagactctgaagatgtgag

SEQ ID NO: 417460 - DNA, 100 bp, Homo sapiens
tgcagtacacacactggaacacacaccagccgcttttaaccatgctgaccaacgaaactggctttgaaatcagttcttctgatgctacagtgaagattct

SEQ ID NO: 417461 - DNA, 107 bp, Homo sapiens
tctgtttctctgctgcaccgacctcgacgtcttgcctgtgtcccacttgttcgcggcctataggtattgttgcagcatctggcagtgagactgaggatgaggacagc

SEQ ID NO: 417462 - DNA, 100 bp, Homo sapiens
gaggaagaagaggacgacgacgacgaggaagaggaggtttctgaggccgggattatgaaaagaataaagtctgcaaggaattctcccatctgggaaagga

SEQ ID NO: 417463 - DNA, 87 bp, Homo sapiens
ggattcaaatgctagcagacacggtggctactctgcctcggggacgaaagcagatcggattcaaccgcacatcatgacagatgttcc

SEQ ID NO: 417464 - DNA, 85 bp, Homo sapiens
aaaatataataaggctgagtgcggagccaagatacactgcctctaggactgggacagatagccactgagtacctgcttcaaatca

SEQ ID NO: 417465 - DNA, 103 bp, Homo sapiens
tttagccacaccaggctggagaatatggtgcagaggccctccacggcaagataacccctgtgacagaaggctactgttgctgtaacaaagggcatacatacat

SEQ ID NO: 417466 - DNA, 101 bp, Homo sapiens
ttgcccgtgagagcgaacgagcctgccgtacttctgattttgaaacacctgggtctgggcttcccgggcgagcggtgggctgaccggttccctgatgtgtt

SEQ ID NO: 417467 - DNA, 75 bp, Homo sapiens
ccgggccgggggacccgcccgccatggccaccaagttatgagccagagttatttcctggtttaatctacagaatg

SEQ ID NO: 417468 - DNA, 74 bp, Homo sapiens
cgcggcccctagctttctccttctggtgtggggcccgagacaatgcagatcttcgtgaagactctgactggtaa

SEQ ID NO: 417469 - DNA, 100 bp, Homo sapiens
ccgggacgtcgtgggatccggaacaggctgacttgacaggaattaagtggaaaaaatatgtatggcaaggcccaacttctgcccctattctgtttcctgt

SEQ ID NO: 417470 - DNA, 80 bp, Homo sapiens
atctgtcttcggtggactccttcggcagtccacccaccgccgccgcctcccaggtgtcctgtggccaggcggaaagcagt

SEQ ID NO: 417471 - DNA, 98 bp, Homo sapiens
gctgcacgacctcagctcccagaggatcaccagcgtggataaggatgacattcggctgctgccgtcagcattgggtgtgaagaagagaaaacgaggac

SEQ ID NO: 417472 - DNA, 100 bp, Homo sapiens
ccaaaatccctttccaatgagcctccctcagaaaccatggaggaaatagagcacacatgcccacagcctcgactggaagtgtttggattgtgagctattt

SEQ ID NO: 417473 - DNA, 74 bp, Homo sapiens
acagcactactgataaccaaactggagtcaggttatgatgtgattgctcaagcccaatctgggactgggaaaac

SEQ ID NO: 417474 - DNA, 74 bp, Homo sapiens
gctgcgccacattgtggatgaggtcaatggattaataagatgacctggatggactcctgagtgagcttcctgaa

SEQ ID NO: 417475 - DNA, 116 bp, Homo sapiens
cacaacagggacacctggttccagctgcagcacgtggacgctgactcggaagtgcaggaacttgctactaccagcaccatgccctaccaatatccagcactgaccccggagcagaa

SEQ ID NO: 417476 - DNA, 101 bp, Homo sapiens
cctaacgctcttcgctgtcgtttgtggtctcgcgcagggcggccccggttctggtgtttggcgtcggattcgccatgaagtcagcgtaaataatgtaacac

SEQ ID NO: 417477 - DNA, 50 bp, Homo sapiens
tattattcggttgaccagaggaatggatttgccatcatccggcccccagg

SEQ ID NO: 417478 - DNA, 100 bp, Homo sapiens
cacgaacacagtggtggggctgcccaggccaatccacgaaagcatcaagactctgaaacagcaatacttcatgctgttgctgctgactgatggtgctgtg

SEQ ID NO: 417479 - DNA, 75 bp, Homo sapiens
aggaccttgagctcacagtatttgtgatgagctactcctgggtcatgagaaggcccctgccttcagagactatgt

SEQ ID NO: 417480 - DNA, 100 bp, Homo sapiens
tgatcgaggagaacgtttggaagagccagaaagtactaaagaatctaaatcatcatggaaaagagtttcttttgggaggccgaggcgggtggatcacttg

SEQ ID NO: 417481 - DNA, 100 bp, Homo sapiens
caacagatagaaaggcaggagcagcttctggatgaaatacatcgtgagaagagagctggttggtggagaatttgaactggagatgaactctattatccag

SEQ ID NO: 417482 - DNA, 82 bp, Homo sapiens
cttggtttcgggatctcggtgctgcagacggcgagacctcctgcacagggtaaagtcgagtatctggtgaagtggaaaggat

SEQ ID NO: 417483 - DNA, 51 bp, Homo sapiens
cagatagtcgtttaggatacgaggtgaagattggtgcgttagaaggatata

SEQ ID NO: 417484 - DNA, 99 bp, Homo sapiens
ggtactgtcgcggaggcttgtcattctgacccggggattcctcacagcgtctggcagccatgtgatgccaagaggctcaggaactggcatttacagcaa

SEQ ID NO: 417485 - DNA, 100 bp, Homo sapiens
cgagtcccagatggacagtgtggtcaaggaccttaaagacaaggccaaagagactgcagatgccatcactaaagaagaaaatttttactactggagatgt

SEQ ID NO: 417486 - DNA, 74 bp, Homo sapiens
acaacgcctccatcactctgcaggagcagctgcgggccctgacgcgcgacaacaggaatggatttggtggtgaa

SEQ ID NO: 417487 - DNA, 83 bp, Homo sapiens
gtacgagctggttaggaggcacagggcgtcggacctgcacgagctgtctgcttccttcaaaatgtctactgttcacgaaatcc

SEQ ID NO: 417488 - DNA, 109 bp, Homo sapiens
cagaattcaatgagaaagaagatgatgaatggattcttgttgacttcatagatacaagccttaaagatggccttttccatgaatttaagaaatttggaaaagtaacttc

SEQ ID NO: 417489 - DNA, 100 bp, Homo sapiens
acaaagaagtgatgctggagaattacaggaatcttctctcattgggcgcctgtgtctggcagagctggtgtgagacgagacaatcctgccccgccgccgg

SEQ ID NO: 417490 - DNA, 74 bp, Homo sapiens
gcaaaatggcggatcatgtgcaggaagttaaatgaagttcgaaagagattgaatgagctaagagaattagttca

SEQ ID NO: 417491 - DNA, 75 bp, Homo sapiens
ttttggtttaatatctgattgggacaacattcagacccatttccagtcatgacatttatgacattaacagagaac

SEQ ID NO: 417492 - DNA, 75 bp, Homo sapiens
tggctggatcaagggtgtattaccggaatacacctggcgtctaccctgtggaggggttcgaaatccaaatcagag

SEQ ID NO: 417493 - DNA, 75 bp, Homo sapiens
gcaatagtcatcgactgtggaatcaattatgtcccagcagaagatggctgtgccacccacgtatgccgatcttgg

SEQ ID NO: 417494 - DNA, 83 bp, Homo sapiens
ctctctcatctcgctcggctgcgggaaatcgggctgaagcgactgagtccgcgatggagggtttccaggcctgaggtgcccgc

SEQ ID NO: 417495 - DNA, 82 bp, Homo sapiens
agggacggcaagtgtgttggaaagaacaccgacttcattgagaaggtttctctggaaacccccctggtaagtgtggaggagg

SEQ ID NO: 417496 - DNA, 99 bp, Homo sapiens
catgaagaaggggtaaggcgtgagcccccaagatttcacgcaagctgtgtaatgttcttgatcgactaaatgtgattgcagaaagtgtggtgaagaaaa

SEQ ID NO: 417497 - DNA, 50 bp, Homo sapiens
gaatagctctgaccacccggcgaaggagtccaatgtgctgattgctgcta

SEQ ID NO: 417498 - DNA, 74 bp, Homo sapiens
ccggacatgtcggtacagctgtggtcgtcagcactgctgagaggcattgagatgttccacaagagcctggagag

SEQ ID NO: 417499 - DNA, 75 bp, Homo sapiens
ctggacagaggacaatggcttccatggagggagcaaaggagtttgctgctgctctcaccgctgagcggataaaga

SEQ ID NO: 417500 - DNA, 100 bp, Homo sapiens
agggactcggccaatgccaatgatgtggaaacaggacagagcgggatgccaccagcttgtccaaagggaagttccaggagctcctggtgggcatcgttgt

SEQ ID NO: 417501 - DNA, 75 bp, Homo sapiens
aattccaacaacttcaaagtaaaatcagtttaatttcagaaaagatatgagggaaggcaccattggagatatggc

SEQ ID NO: 417502 - DNA, 90 bp, Homo sapiens
tagatgaaaaagatccaaataaagaaaaacaagcatttgtcaaaacagttaaagcatatagcactttctacattgtgggtttaatattat

SEQ ID NO: 417503 - DNA, 101 bp, Homo sapiens
ccgaggttcgtgcgcgtctggtggcggcggcgtgatgttctcggcaggagcggagagtttgctccaccaggccagcttagaccatgctcagcctccaagca

SEQ ID NO: 417504 - DNA, 74 bp, Homo sapiens
ccatgtgccagaaggagttcgcccccaggttacgccaaggaggccctgaatctggcgcagatgcaggagcagac

SEQ ID NO: 417505 - DNA, 100 bp, Homo sapiens
gagcccctcatcgagctcttcgtcaagggtggcaattttaagcccagccagaaaggttttgcaggaggaaccaaatctttcatggacttcggcagctggg

SEQ ID NO: 417506 - DNA, 82 bp, Homo sapiens
attctctacgggatctcatagcagattcaaatccaatggcataatttgttggactctaagatcaacaccctgttatcattgt

SEQ ID NO: 417507 - DNA, 83 bp, Homo sapiens
aggcttcctaacgcagactcgagtgcgaagcgcgcagtcgccgggcctctactacgtggacagtgaagggaaccggatttcag

SEQ ID NO: 417508 - DNA, 50 bp, Homo sapiens
ggcggcccactggcagttcgaggagacggtggctcagggagtaaaggaag

SEQ ID NO: 417509 - DNA, 74 bp, Homo sapiens
cagaagtgccgaaagagcactggactccggaaggattattgcatcgagcttttagtgtcttcttattcaacacc

SEQ ID NO: 417510 - DNA, 100 bp, Homo sapiens
cgtagatacaaatttttggatgatgatggatccatttctcctattgaggagtcaacatatgattcatcaacttccactgttgacagaaaaacagtacatt

SEQ ID NO: 417511 - DNA, 90 bp, Homo sapiens
gatggtgcgttgcgtgccctacttcaaggataagggcgacagcaacagctctgccggctggaagtcaaagaagtttggcagagatcacgg

SEQ ID NO: 417512 - DNA, 112 bp, Homo sapiens
ccgagttatgcccaccctccaactttgcgacggaaatgtgtcatcgaaagccaggaatgagtagcgacagtgacattgaatgtgacactgagaatgaggagcaggaagagca

SEQ ID NO: 417513 - DNA, 90 bp, Homo sapiens
caaaatgctgcacagatctaccgtcgcgtgaccagtaattttgattctgacattagcagtgtgggaatagatggctgctggcaggcagac

SEQ ID NO: 417514 - DNA, 83 bp, Homo sapiens
caagcgcagcgccctcagcagctccctgcgggacctctcggaagccgaacatccagtcatggataaaaatgagctggttcaga

SEQ ID NO: 417515 - DNA, 89 bp, Homo sapiens
tcaaggtggcctaccaggaggccaggggtgtcgccatggatatgggcactgtggtcctgggaaagctggaatcaggatctatttgtaaa

SEQ ID NO: 417516 - DNA, 82 bp, Homo sapiens
ggcaaagatgagggggattcttaaggttttacagacatttcaccagaggaattgaggcttgaataccataacttcttaacca

SEQ ID NO: 417517 - DNA, 82 bp, Homo sapiens
gcatgatcggcatgtccaccaaggcagttgatattcactgatggactccaaagaatcattaactcctggtagagaagaaaac

SEQ ID NO: 417518 - DNA, 82 bp, Homo sapiens
agcgctctcgtcttctgcggctctcggtgccctctccttttcgtttccggaaacatggatccctccccgcggcggcgatggc

SEQ ID NO: 417519 - DNA, 50 bp, Homo sapiens
gcagaaattgcacacagatgatgagtgaacaggggagctctacacctggg

SEQ ID NO: 417520 - DNA, 100 bp, Homo sapiens
gaaagctaggtccggattgcacgtggagggccgcccgaagggcactctcggacattaacccgcattctgctctcttggcctcctagtttctacctaatca

SEQ ID NO: 417521 - DNA, 83 bp, Homo sapiens
cgcaaacccaaagatccccgttcctggagattctgattgaggtgacttaagagattaaaattaatttggttgctgttggttct

SEQ ID NO: 417522 - DNA, 83 bp, Homo sapiens
ctacagcatggtggagtcgcctctgatctgcaaagaaggagaaagcgtgcagccccaggaccaaattaccatcacagggtacg

SEQ ID NO: 417523 - DNA, 90 bp, Homo sapiens
aaggcaccgacgtcatcatgctgaccaccaatcagatccgtaagatgtcagtattgaatatggtggtgaggcgtgaccctggcaacactg

SEQ ID NO: 417524 - DNA, 99 bp, Homo sapiens
acaacgtgcctttgaagctgccgatgccagagccaggtgaactggaggagcgatttgccatcgtgctggatgtaaatgaagaccctggagaagatgtgg

SEQ ID NO: 417525 - DNA, 100 bp, Homo sapiens
tatgctggggtttttgtccgcacgccaaacgggtttggaggaccctcttcgccttcggagagcagagtcaacacggagacagaagcattaaaatgcgtgg

SEQ ID NO: 417526 - DNA, 74 bp, Homo sapiens
tcggtgctggtgggccctgtgccagcagggagacacatgtttgtctttcagggctcccggagcgtgtggagctg

SEQ ID NO: 417527 - DNA, 87 bp, Homo sapiens
ggcgtatacaggaacaatattgatgatgtagtaaggaatgttttaaaggaagttgggctactcacaagttactacataagaaagcaa

SEQ ID NO: 417528 - DNA, 95 bp, Homo sapiens
ggccttgaaggacacggccaaccgcctacgtatcagctccatccaggccaccactgcggcgggctctggggtctcctatggacagaagtgcgggc

SEQ ID NO: 417529 - DNA, 83 bp, Homo sapiens
agctgtggagacccacctgctcaggaaccctcaccttgtttcggactataggttcaaaatgagcctgtttggaacaacctcag

SEQ ID NO: 417530 - DNA, 83 bp, Homo sapiens
gatgtatgcctgtgtttgtgactggcttggattttcatacagggaagaagtacaatgggtggatcagtacaagggaaagcggg

SEQ ID NO: 417531 - DNA, 90 bp, Homo sapiens
agagctcaagctcatcgacttcggttcgggtgcgctgctcaaggacacggtctacaccgacttcgacgctgccactgcagagccccgcca

SEQ ID NO: 417532 - DNA, 100 bp, Homo sapiens
ccgtgcatggggctgctccccaggacctgagcaggaacctggagttttcagctgctcctgctaaggccaagccggctgaagctcctgctgctgcagcccc

SEQ ID NO: 417533 - DNA, 75 bp, Homo sapiens
attgaaaaaatggttgacctcacccaggttgggggccgtcccgctcctaaggcaggaagatggtggccgcaaaga

SEQ ID NO: 417534 - DNA, 100 bp, Homo sapiens
cggtggagatagtgacaatgtctcaccaagattgtgcacgcgccggagcagcggcgcaccagcccccggctccggcgccaccatcttcgcgctaagctct

SEQ ID NO: 417535 - DNA, 89 bp, Homo sapiens
ctgcagctcttgggttttttgtggcttccttcgttattggagccaggcctacaccccaggtgtcgtgaaaactacccctaaaagccaaa

SEQ ID NO: 417536 - DNA, 83 bp, Homo sapiens
ggccctgagtcaaagaagatgcctcgaactaaacaaattcatcccagaaatctaagaggtagctacagcaagctgggtagcag

SEQ ID NO: 417537 - DNA, 90 bp, Homo sapiens
aaaagaagatcctgtatgccacatcaggtgcactttacaggtccccgatgaaccaagagaaccctccaccatatccaggccctggtccaa

SEQ ID NO: 417538 - DNA, 50 bp, Homo sapiens
ggcaaggtctccaagtcccagctcaaggaaatctgaaatagagtactatg

SEQ ID NO: 417539 - DNA, 50 bp, Homo sapiens
ggcagctgctgagttctcggtgaagctctttcaccatgcctggatcactt

SEQ ID NO: 417540 - DNA, 100 bp, Homo sapiens
gcatgggaaaatcatggaagttgattactcagtctctaaaaagctaaggcagttgcagtggtgcagaatggctgacctcagtcttgcagatgcattaaca

SEQ ID NO: 417541 - DNA, 100 bp, Homo sapiens
gtctacaaccatcttaatgaacttcctgtacctgctgggagaagttctgaacaactatatctgggatacacagaaaaatggagtttcactctgtcgccca

SEQ ID NO: 417542 - DNA, 97 bp, Homo sapiens
cagagttctgtgcataacaggatcccataccaaagccctgtgagttcatcagagtcagctccaggaaccatcatgctgaaaaaaggaagggtgggca

SEQ ID NO: 417543 - DNA, 100 bp, Homo sapiens
ctgatgcattacccattcatcggggatgtacactcactgattcttaaggctctgttccttagagatccaaagctatgtttccagtgtcctctgggtgttt

SEQ ID NO: 417544 - DNA, 84 bp, Homo sapiens
ctgccgtccttctccactttcgccagcccgtgccgcgagcgcggcctgcaggagcccagagcctgaccacctgcgaggtctgcg

SEQ ID NO: 417545 - DNA, 100 bp, Homo sapiens
aaaaatcaaaaggagttcatgcttatgaatgctcgacttcagtggatccggattggtgccaatgtctccaacttcacttttgctcctagcacgattatat

SEQ ID NO: 417546 - DNA, 100 bp, Homo sapiens
ctccaagttgggggctcagaggggagtcatcatgagcgatgttaccattgtgaaagaaggttgggttcagaagagggttacagatgaggacacagtaaag

SEQ ID NO: 417547 - DNA, 98 bp, Homo sapiens
acctgggagcggccccttcctccaggccgcagggccgtaggcagccatggcgcccagccggaatggcatggtcttgaagccccacttccacaaggact

SEQ ID NO: 417548 - DNA, 74 bp, Homo sapiens
aggattcatgctctacatccccatagagaatgagagggagaaacttcaaataaagatagatgagatggataaaa

SEQ ID NO: 417549 - DNA, 74 bp, Homo sapiens
aatgccacagtgaccacctgccactccaagactgcccatctggatgaggaggaggattctgaggttccattcac

SEQ ID NO: 417550 - DNA, 82 bp, Homo sapiens
aaagaacggagcttgaagcaaagctgcaggttttaaagacctttaccagaagatgatagtattgaagcagatatactagcta

SEQ ID NO: 417551 - DNA, 74 bp, Homo sapiens
ggaaccatggctgccccgagaggtgaagtattacagacacttagcacctgatcacttgctgcaaatatgtcatc

SEQ ID NO: 417552 - DNA, 103 bp, Homo sapiens
gcaccacggagagcacgagagacccgagttcatcgcctacccccatctccgcatcaggaccaagatgctgagggttggaaaagcaaaagcagatgtgtggccc

SEQ ID NO: 417553 - DNA, 90 bp, Homo sapiens
tgaagatcagtacaaaaattcttcaagaaatctaagaaatgcactcggtgatggaaagagagccactattctgaagaacacttggccaaa

SEQ ID NO: 417554 - DNA, 95 bp, Homo sapiens
gagctgaaaggcgggaaggcttattccaaggttgcactccaggacttgcagacgaactccaagattggggcactcctgccttactttgtttatgt

SEQ ID NO: 417555 - DNA, 97 bp, Homo sapiens
agtttcaaggaaaagttcgttcgcaagacccgcgagaacccggtggtacccataggtgccacacctccctggatgatccaagatgaagaatacattg

SEQ ID NO: 417556 - DNA, 75 bp, Homo sapiens
cttggatttggctacacacttatagatcttctgcactgtttacaggcacagacactggccaaaagaagaccctag

SEQ ID NO: 417557 - DNA, 83 bp, Homo sapiens
ctcgctccctctgctcttcctcccttcgctcgcaccatggagcatcagatccatgctgctgctgactcggagccccacagctt

SEQ ID NO: 417558 - DNA, 98 bp, Homo sapiens
gtggtgaaacccaaacaacatctcctgctattccttgggctgcctttcctgcaggatgttgagaaagagaaggaaacccacagttacctcagcaaaga

SEQ ID NO: 417559 - DNA, 89 bp, Homo sapiens
gctacttttcaacagccttctcaattttctttctcagaaagcagaggctcagagcttggagacagacgacaaatttacatgtattggag

SEQ ID NO: 417560 - DNA, 90 bp, Homo sapiens
gcagctcaagtggccaaggcaagatggggcaagattcttgccaagagaattaatgtgcgtattgagcacattaagcactctaagagccga

SEQ ID NO: 417561 - DNA, 88 bp, Homo sapiens
atcgatgtgggcggccacatgtacaccagcagcctggccacgctcaccaagtaccctgactccaggagcccaggatgtgcgagttcaa

SEQ ID NO: 417562 - DNA, 83 bp, Homo sapiens
actgcccacggaggaagagtgggagtttgccgcccgagggggcttgaaggctatcatggtgaacttacttcagattgtgcggg

SEQ ID NO: 417563 - DNA, 71 bp, Homo sapiens
gagaaccgtcagtttgagccagatgaaaacaccacagggatggcgagaagtatttgttgacattgatccac

SEQ ID NO: 417564 - DNA, 96 bp, Homo sapiens
agcaggacagtgagccatcccagcaggcttcgcaggacaccctgagtcggactgatgaggaagatgaggaaatttgcaggtcgaagtaagaaggaa

SEQ ID NO: 417565 - DNA, 98 bp, Homo sapiens
tgcatttcatactccctctggaataccttgggcattgctgaatatgaaaaggttaatgactccagagagtaagatcagattcgtccacaaagagatgg

SEQ ID NO: 417566 - DNA, 99 bp, Homo sapiens
cagctactagcattatctgtggctgctcttgcctgggagtcatggctctggtgtttgccatcaagtgcagtcattggagaaatcgatgaagaaacagat

SEQ ID NO: 417567 - DNA, 83 bp, Homo sapiens
gcctggtatggagaacgagaggaaagaagtcccttatcacggtcatcatcagatttgaaatatttaaagtggatacaaaacta

SEQ ID NO: 417568 - DNA, 109 bp, Homo sapiens
caagagattaaagatgcagtacgccacggggccgctgctcaagttccagatttggatttttagactctgaggagcagttggagctaatccacattatggaaatggaaac

SEQ ID NO: 417569 - DNA, 75 bp, Homo sapiens
aaaaaactcaatcacaaaaatattgtcaaattatttgctattgaagaggagcctgaagcaggacattctaaatga

SEQ ID NO: 417570 - DNA, 100 bp, Homo sapiens
gaacaaggagctggatgtcgttcggagtctcactctactgctgcccaggctggagtgcagaggcgtgatcatggctcgctgcagcctcagcgtccccagg

SEQ ID NO: 417571 - DNA, 75 bp, Homo sapiens
ccaaggcggcgcgcgagctggagcactcgcctgcctctctccagaatgatctcaaccagggtggcccagggagca

SEQ ID NO: 417572 - DNA, 75 bp, Homo sapiens
gaggtgatgcctttgacttcaatgttgcattgcaggaccatttcaaggagaagagcaacctggcccacagcctgc

SEQ ID NO: 417573 - DNA, 98 bp, Homo sapiens
cgcttttccaagtacatgcccagcgtcaaggtgtgagccatgcaatgggagggagaggaggaataaacagaggaaatattaattaaatggtctgtaaa

SEQ ID NO: 417574 - DNA, 50 bp, Homo sapiens
ggagtccggacatctgaaacttggccaagtcctgtatctgccatgtctgt

SEQ ID NO: 417575 - DNA, 100 bp, Homo sapiens
gaaggtctctggagacatcttcagcagcccgagaccgaggacgagaagaagcgctttgaggaaggcaaagggcggtacctgcagatgaaggcgaagcgac

SEQ ID NO: 417576 - DNA, 101 bp, Homo sapiens
cttctgagggaggaggacaacaagtactgcgccgactgcgaggccaaagcaattctgtggtgttcttggtcacacatttatggagtttctgaagggcagtg

SEQ ID NO: 417577 - DNA, 90 bp, Homo sapiens
agtggtgcgagccggcggggctgcggagggccagtggactcagggccccattttgtggctgtgaacaacaagaatgaaattgtagtaacg

SEQ ID NO: 417578 - DNA, 75 bp, Homo sapiens
gcactccactctgactcccaggacgggcaccagctgctactgtttgaacggtcttggatgaacagatggaagtct

SEQ ID NO: 417579 - DNA, 110 bp, Homo sapiens
cctttttcgacgcctccgccgccgcctgaggaggcgagctagccgggagttacaccgccaccgccaggtcggggtatgataggtcggggaagagggggctttggaggccg

SEQ ID NO: 417580 - DNA, 75 bp, Homo sapiens
ccactcgagaattggctcagcagcgtgtccggagcggtgactggaaggggtacacaggcaagaccatcacggacg

SEQ ID NO: 417581 - DNA, 83 bp, Homo sapiens
atctggcctccatcttcggcaccgagaaagacaaagtgttctgccagttctggataatccactgtccaagaaggttcgaggcc

SEQ ID NO: 417582 - DNA, 74 bp, Homo sapiens
atcacctctttgtacatcttctgcaattactcgatgcccatccagggaggacttccccctgattgagacagagg

SEQ ID NO: 417583 - DNA, 74 bp, Homo sapiens
tggaggcctcgctgaggaacgacgccgaggaagaaacaccgtgctggacagccagcgtcaacaaaagcattatg

SEQ ID NO: 417584 - DNA, 50 bp, Homo sapiens
gtacccacagtgcttcatgagaggtaccccctgtaccggctgggtggccc

SEQ ID NO: 417585 - DNA, 82 bp, Homo sapiens
aaattctggaacacctatatggccctcagccacaagtacggtggacacagcagccatgtgacaaatgtggccttcttgtggg

SEQ ID NO: 417586 - DNA, 100 bp, Homo sapiens
gtgcctgcctctgccccttggtgggctgaagcttcatggagtgtcgagttatagcagtgctggattgggagctgtcaaccattggtcatcctttgtcaga

SEQ ID NO: 417587 - DNA, 99 bp, Homo sapiens
gttcttcgacattgccgtcgacggcgagcccttgggccgcgtctcctttgaggtctctgcatggattcccccagccctatggacccccacatggcggag

SEQ ID NO: 417588 - DNA, 82 bp, Homo sapiens
cccgggggcgccatggcgaccggagcgaacgccacgccgttgggagtgtggccatctggggccgtgtggtatttgccactca

SEQ ID NO: 417589 - DNA, 75 bp, Homo sapiens
agactgtccgcctggagcgttacaaggccttctacattaccggtaaaaagaacgtattctcatggtacttacaga

SEQ ID NO: 417590 - DNA, 75 bp, Homo sapiens
tgacatcgaaaacccggacctcgcttacctgcatgctgaaaccttctctatgtctacccacagaggctgaacttt

SEQ ID NO: 417591 - DNA, 97 bp, Homo sapiens
gctcttgcacacaaagaagagacatgatgtatttgcatccttccctgcttcagccagtctcttcaagaaaatgaggaggaggagattgggaacctag

SEQ ID NO: 417592 - DNA, 75 bp, Homo sapiens
atggaccgggagcgagaagcagttctgctccagacgagcccttaccacgttgactcactcctgcagctcagcgat

SEQ ID NO: 417593 - DNA, 82 bp, Homo sapiens
cgacaagccgctggcagccgcggatctcaccgccgctcaggtggcattttgtcagcacttgggaacttcctggcccagatga

SEQ ID NO: 417594 - DNA, 95 bp, Homo sapiens
ccaggaccggccgaacgcagaggtggaagcagggaaaggcctggagatgaggaagctggttctctcggggttcttggccagcgaagagatctaca

SEQ ID NO: 417595 - DNA, 75 bp, Homo sapiens
actccttcgtgggcacgcgctcctacatggctctcgggttcatgacgctctcgatattcctgtgcagaaacctgg

SEQ ID NO: 417596 - DNA, 100 bp, Homo sapiens
aagcggcaggagccgccgccgacacctgaagaatccagactccaaaatgatgcaaatcaacctgactggatttttgaatggaaaaaatgctcgagaattt

SEQ ID NO: 417597 - DNA, 74 bp, Homo sapiens
gtaacttggccaggctggccccgagcggaactggagaaagctgagggtgtggcggggcaccctggcccgcatgc

SEQ ID NO: 417598 - DNA, 101 bp, Homo sapiens
agaaacggctggctgcacttgccctcgcgtcttcagaaaacagcagtagtactccagaggagtgtgaggagatgaagtggcggcagtgggcggacgactgg

SEQ ID NO: 417599 - DNA, 75 bp, Homo sapiens
aaagacttcctcaaggactacagtatgcacttaatgtccctggtatttgaagtataccatacaactgttttgaaa

SEQ ID NO: 417600 - DNA, 50 bp, Homo sapiens
ataagactcgctatatggggaaggtccctgcatcccatgactcggagctg

SEQ ID NO: 417601 - DNA, 82 bp, Homo sapiens
tctgggtctcagccgccaaagaccccgtccgcctgcagaattttcttcctgccccttgaactctgatgaagaagtgaataaa

SEQ ID NO: 417602 - DNA, 75 bp, Homo sapiens
ggctgtggggcctccgcgccgcggccgttagtcatgtcggaggctgcctccattcgaaacattttctcagggacc

SEQ ID NO: 417603 - DNA, 50 bp, Homo sapiens
aagcggagttcgagcggcagcgaaaaatatcagcttgaacgggtcttttt

SEQ ID NO: 417604 - DNA, 100 bp, Homo sapiens
atcaccatgggccgggatcacattctgattttggagcagtgccagtcctttccaaagaatgtgcatcaggggagagaggccgccgcatgagtcaaatgaa

SEQ ID NO: 417605 - DNA, 75 bp, Homo sapiens
cagtcttcttggagtcactttggctggactctggcatctgtgaagatttctaaagtgaaatacgttatctggtca

SEQ ID NO: 417606 - DNA, 75 bp, Homo sapiens
cgccgtgacccaggtgtgggggatgatggtgacgcttctcactcacgtgtgaagataaggagggttcctgccccc

SEQ ID NO: 417607 - DNA, 97 bp, Homo sapiens
tgggttctattttccctcctcaaactgactttgcagccacggagagggagccccgcgcggactcactctatgatgtccctgtcggtgcggccgcagc

SEQ ID NO: 417608 - DNA, 100 bp, Homo sapiens
ctcaccctgcttgctttgtggctatcatcaaaatcaccaaccaaaagattcacctttggatttcatcgcttagtattattccacagtaatggaacagcaa

SEQ ID NO: 417609 - DNA, 75 bp, Homo sapiens
agcatggaaatggagggcatcttcaaccacaaagaattaaacaaccaccatgtcgagcaaaaaggcaaagaccaa

SEQ ID NO: 417610 - DNA, 82 bp, Homo sapiens
cctcccggctctcgtcagcctcccgccggccgtctccttaacaccgaacacctttgcccgaccatctgtaagtcacacggct

SEQ ID NO: 417611 - DNA, 75 bp, Homo sapiens
tgacaaattgtactttgtcctagactacattaatggtggagagctgcaagctttcttcctggtggcagatgacat

SEQ ID NO: 417612 - DNA, 50 bp, Homo sapiens
ctctcaacaggatttcctaagagagctgggtctcgccctgtcacccaggc

SEQ ID NO: 417613 - DNA, 75 bp, Homo sapiens
gtgcagccgagtcactactgcctgcctgcctgcctgctacgatttcgctgcctcatcacccacatctcccaatgc

SEQ ID NO: 417614 - DNA, 100 bp, Homo sapiens
gaacatggctagcaggaatgcttactgttgcgtggttcgttattaacaggacaaagcagttccaattccagagaaaatgagtgaatgggcacctcgacct

SEQ ID NO: 417615 - DNA, 90 bp, Homo sapiens
cgggcactccagggcgtgtttttgctgttgttggcctactgtacccctgtatcgacagtcacctcggagaaccccacaaatttaagagag

SEQ ID NO: 417616 - DNA, 50 bp, Homo sapiens
gcgggacctgttccagtttaacaagatgtgcactcccagcaacacccctg

SEQ ID NO: 417617 - DNA, 51 bp, Homo sapiens
ctcgcctcctcgcagcagcgccatgggtaagcttgatgattaccaggaacg

SEQ ID NO: 417618 - DNA, 90 bp, Homo sapiens
ttcctggagattgccagcaacgactgcttttactactcccagaggtagatcgacaggtgggtgtgcctgctgctttggacatgatgctga

SEQ ID NO: 417619 - DNA, 101 bp, Homo sapiens
ttcttcatcatcggtctcatcttcattcccatcggcattggcatttttgtcacctccaacaacatccgcgagatcgaggaacagcatatgccatatatgag

SEQ ID NO: 417620 - DNA, 100 bp, Homo sapiens
gctcagggatgcctgtaccatgatgtgatgctggagaccttgacacttatatcctccctggatacaaactggactctcaggacaaaacgacaccagccaa

SEQ ID NO: 417621 - DNA, 83 bp, Homo sapiens
gttttgcgtgtgttgaaagtacaattctattgcacatcaatgatatcatcccaggaaataaagtctttgcttttgctttttgg

SEQ ID NO: 417622 - DNA, 75 bp, Homo sapiens
caaccatgatctcttccaaagaatgccacagaatcaggggaggcatgcttcagagatggaaaataatgtcctgca

SEQ ID NO: 417623 - DNA, 80 bp, Homo sapiens
gaaagctttaaaagaaaaagaaaacagattattattgcaacaaagacccaacatgagtgaagtttcctgcaagaaacggg

SEQ ID NO: 417624 - DNA, 83 bp, Homo sapiens
cttcaagtacatcataatcggcgacacagcatgttggcagataaattgaacatgactccagaagaagctgaaaggtggattgt

SEQ ID NO: 417625 - DNA, 100 bp, Homo sapiens
cttgagtaaggtggcaaagatagatttgagaacactagaatttcaagtcttcagaaacagtcaggatcaaggtgaaaaggagaaccccatgcgggaactt

SEQ ID NO: 417626 - DNA, 82 bp, Homo sapiens
aaaatgcaaaaaaggaggccaaagactttactgaaatcgccaagagattgaatacgatttgtgcacaagtcatcccatttct

SEQ ID NO: 417627 - DNA, 74 bp, Homo sapiens
cgaatcatccacgcacctgcagctctgctgagagagtgcaagccgtgggatactaaaatgtctgatgatgctgg

SEQ ID NO: 417628 - DNA, 101 bp, Homo sapiens
tctggaacatcaacctgcagttgcggcccagcctcataacagggatcatgaaagacagtggttggatggcaagcatgtggtgtttggcaaagtgaaagaag

SEQ ID NO: 417629 - DNA, 101 bp, Homo sapiens
cgccgctcccgggggccgtgacggttactataacaacagtaccaaggtggctgtgaaaaccctgaagccaggaactatgtctgtgcaagccttcctggaag

SEQ ID NO: 417630 - DNA, 100 bp, Homo sapiens
acctttccctgctcagacccctccctggctgtatgatctcgtgaaatcttgagagaaactgaatgacgaatgaaactattgttcctgtttcacacagaag

SEQ ID NO: 417631 - DNA, 75 bp, Homo sapiens
cacagagcctcgcctttgccgatccgccgcccgtccacacccgccgccaggtgaccagaagtcagcagcttccca

SEQ ID NO: 417632 - DNA, 74 bp, Homo sapiens
acaccagggcatcaccagtctctatcacaaaatccaactggactggtgattgcagctggaagtgcccatgaccg

SEQ ID NO: 417633 - DNA, 95 bp, Homo sapiens
gctctggagtgcgggcgggggcgacagggccgattccggagtgggctttaatccagtgtgaccagttgaggaaggagctggagaggcaggcggag

SEQ ID NO: 417634 - DNA, 83 bp, Homo sapiens
tggagagctactgcatgcccagcaccattcctaggctgggagcaaaacggagccttcacgtaaatgggtccagtcatgcctcc

SEQ ID NO: 417635 - DNA, 100 bp, Homo sapiens
cctacccagcctggggccctgtgtgccagcacctactctttttttttgagacggagtcttggctctgtcacccaggctgaggcaggagaatctcttgaac

SEQ ID NO: 417636 - DNA, 99 bp, Homo sapiens
attataccccaacttcagcatcctttgttaacaaacaacctgtcaatgtgacggtggactacattagaccagccagcccagccacagagacagtgcctg

SEQ ID NO: 417637 - DNA, 75 bp, Homo sapiens
aaaatctgtacctggctggaaatcaaagtccaccatgtgcttttgcacatccaacataaccagtgcggtgcaatc

SEQ ID NO: 417638 - DNA, 75 bp, Homo sapiens
cagaacattgccctacctgccaccaaactagtattgtggtcagaaatgagaagacatgaaatgttgagggaggag

SEQ ID NO: 417639 - DNA, 75 bp, Homo sapiens
cttctgattagtccacagtcttcctctatagatgctgaagagtttctggcagaaggtttgcggaatgagaacctc

SEQ ID NO: 417640 - DNA, 50 bp, Homo sapiens
atgcctggggttacacctaaacagggaacacgggtctggctgagagaaaa

SEQ ID NO: 417641 - DNA, 101 bp, Homo sapiens
ggtgcaggccgttggggcggctcagaggcagagaatagtgacagtggtacaggaaagaaagaaaaagaaaagaaaaacagaaagggcaaagacaaggaaaa

SEQ ID NO: 417642 - DNA, 98 bp, Homo sapiens
ggtccagcttcaggagtactggcggaggggctggacgttccacgccaaagatcttcagtttagatcttggaggcatatcaactgtggttctaaatggc

SEQ ID NO: 417643 - DNA, 82 bp, Homo sapiens
cccggagaaaaagttgaagcgttattttggtgccctggttgtcagatgttggaaagcagtaggacggaacatactcttcgtg

SEQ ID NO: 417644 - DNA, 82 bp, Homo sapiens
aacggggctccgggccctaaggggacacagcttgggctatggctttgtgaactacgtgaccgcgaaggatgcagagagagcg

SEQ ID NO: 417645 - DNA, 100 bp, Homo sapiens
cactgggtggtgatcgtggcaggttcaaatggctggtataattataggcaccaggtcaaaatgcagatcttcgtgaaaacccttaccggcaagaccatca

SEQ ID NO: 417646 - DNA, 88 bp, Homo sapiens
gagcaggaacctggagttttcagtccagcctggacctgtttctgggaggtgagagcagcccagaacccctggacaacatcttgttggc

SEQ ID NO: 417647 - DNA, 75 bp, Homo sapiens
caatcccactgatgaggatcagcccatggttgctccttgagggcaggacagttcttatggctttatccgttgcgt

SEQ ID NO: 417648 - DNA, 76 bp, Homo sapiens
catggaggtcatggacattctcatggctctggtgatgtacagttcattgattatgaatattctggatacaactacc

SEQ ID NO: 417649 - DNA, 74 bp, Homo sapiens
agggcggctacacctgcgagtgcttcgaggacttcactggcccgcaccgccgccatgatgtgcgaggtgatgcc

SEQ ID NO: 417650 - DNA, 87 bp, Homo sapiens
agatgaaccatcttcctgcacacagccacgatttgcaaagccctcatggagaccataaagcaaatgtgggtttaaatctcaaattca

SEQ ID NO: 417651 - DNA, 50 bp, Homo sapiens
cctggagcgaatcctaccttccaaacagtacctggagtagaacagaaaaa

SEQ ID NO: 417652 - DNA, 100 bp, Homo sapiens
caggctgctttcttcggtagctaccgaaacgctctgaaaatcgagccggggcatggtctagtggcccagtcaggacgcggaaacactccctggaggttct

SEQ ID NO: 417653 - DNA, 76 bp, Homo sapiens
ctctcctgtccctggacctcatgcaccatattcacatgttggaggagatgttaaagtaacccatcttgcaggacga

SEQ ID NO: 417654 - DNA, 83 bp, Homo sapiens
cccgggggaagctggctgaacgcgacatcgtccagatgtgaagttcatttccaatccgccctccatggtggcagcggggagcg

SEQ ID NO: 417655 - DNA, 80 bp, Homo sapiens
ctgataaaagtacttgggattttaaagaaaaatggtggtaaataaagatgtcctggacgtttacattgagcatcggctaa

SEQ ID NO: 417656 - DNA, 100 bp, Homo sapiens
aaatatcccccggcttgtgagtggatgggtaaaacctatcatcataggtcgtcatgcttatggggatcaaacatgcacatgatggtgtccaagccagaac

SEQ ID NO: 417657 - DNA, 75 bp, Homo sapiens
aacctggagttaaggaacagatccccggaggagcattgttggaaactgttactacatttttactggaaatactat

SEQ ID NO: 417658 - DNA, 101 bp, Homo sapiens
ccggccgcctggctccccatactagtcgccgcttagaaatgttggacaaagttgagcctccaactatacctgaaggttacgccatgtctgtggcattccat

SEQ ID NO: 417659 - DNA, 75 bp, Homo sapiens
ctgggacgcacagagaccgtgaagattccaagttcaggagaactcgaccgctgaagtgagtagtgaatatagtat

SEQ ID NO: 417660 - DNA, 127 bp, Homo sapiens
agcagatcgaggcttgctaccaggtgatgggtatcccgcaatcccacatggccgaaatgacagagctgtaactgaagttcgtgaagtcaccagaaaatcagtccctcgtaattccttagaaagtgct

SEQ ID NO: 417661 - DNA, 101 bp, Homo sapiens
tgtcctcatccactgctcgctgcctctccagggaactctaatgatccaggacaaagaagttaccctggagtatgtatcaagcctggatttttggtactgca

SEQ ID NO: 417662 - DNA, 75 bp, Homo sapiens
agcggccaaagcagtacagctgggatcagcgcgagaaggcagagttgggcctaaatgagcaccatcaaaatgaag

SEQ ID NO: 417663 - DNA, 51 bp, Homo sapiens
gcggacgccggtctctgttccgcaggatggacaaagactttggaaagcagg

SEQ ID NO: 417664 - DNA, 91 bp, Homo sapiens
cggggcgcgatgcccaggccgcgccgccacgagacaatgcagatcttcgtgaagactctgactggtaagaccatcaccctcgaggttgagc

SEQ ID NO: 417665 - DNA, 83 bp, Homo sapiens
caatatggctggttccccaacatgcctcaccctcatctatatcctttggcagctcacagtacttgttgttaaaaaagccttcc

SEQ ID NO: 417666 - DNA, 82 bp, Homo sapiens
ctgcgggcccgctccgacgcggaagagaggtggagaagagcgagtacttgagaaagaagaggaagaagatgatgatgaagat

SEQ ID NO: 417667 - DNA, 75 bp, Homo sapiens
aaacctgtttagaaaataaaccaggagatctggaagccctcaaaaaggaaaccattgtgttaaaggaaggttctg

SEQ ID NO: 417668 - DNA, 82 bp, Homo sapiens
tggtgtgaccgcatcctcatgtccccgtctgccaaggagctggtgctgcgggagccttcacgtaaatgggtccagtcatgcc

SEQ ID NO: 417669 - DNA, 50 bp, Homo sapiens
tctcttctcgccctggcggggaaggtgagcatctgcctggagtgtaacag

SEQ ID NO: 417670 - DNA, 90 bp, Homo sapiens
cttgtgcctgacaggaccgtggccgaccggcagctggttctatgaatttgaatgctgtgtgtgtcgcgggggccctgagaaagtccggag

SEQ ID NO: 417671 - DNA, 75 bp, Homo sapiens
tttttagtccattgactatgcagcctaatggggcataaggaaatggtggcaggcacttcctcctaacaagaagga

SEQ ID NO: 417672 - DNA, 88 bp, Homo sapiens
gagcgcctatgtgaaaaacctgaagaagggggtcatggaggacgctggcggcggcgaggagaccccggccccggaggccccgcacccc

SEQ ID NO: 417673 - DNA, 83 bp, Homo sapiens
aaagacatcttaattgggcacgaaagagatactgagccttcataagggttgactacctcagatttgctgcactcattgtggac

SEQ ID NO: 417674 - DNA, 115 bp, Homo sapiens
gtttaataatgatagaatgaagaccacaataaaagagacctctacttagctcagcaattcttaccttgtttttcgttggaatatacgttgcacatttatggcgattctgagtgtg

SEQ ID NO: 417675 - DNA, 80 bp, Homo sapiens
ccatgtcagacgcagccgtagacaccagctccgaaatcaccaccaagtccctgaagaggaaggagaaggaatatgagcat

SEQ ID NO: 417676 - DNA, 100 bp, Homo sapiens
gccgccgcgccgccatcatggacaccagccgtgtgcagcctatcaagctggccaggatggaggctggacagtaattcagaggcgccacgatggctcagtg

SEQ ID NO: 417677 - DNA, 100 bp, Homo sapiens
caacacgggaactctttcactagcaggcaagatcctcagcctggagacgtgtcaccgtctaacattgtcaaaatgcagatcttcgtgaaaacccttaccg

SEQ ID NO: 417678 - DNA, 75 bp, Homo sapiens
tgaacacgcaccgtgacaagccaactcttgcctttcaggagagtaagaacctctgcgaagccatggagaacttta

SEQ ID NO: 417679 - DNA, 80 bp, Homo sapiens
tgccaccgcaggttcgcgcagaaggtcaacatgctcaagcactgcaagcggcacacgggacttaaccaccaccatgtcga

SEQ ID NO: 417680 - DNA, 98 bp, Homo sapiens
atgctgtgtgctggacgctggacagggggcaaaagcacctgctcggcagcagtggatggtgcaggggaaagaggtgggaaggaggtcctgggagggac

SEQ ID NO: 417681 - DNA, 83 bp, Homo sapiens
ggccaagggaccaaggtggaaatcaaactctgatatcctgttgggcattctggacaacttggacccagtcatgttcttcaaat

SEQ ID NO: 417682 - DNA, 75 bp, Homo sapiens
gtacttgggatcccccagttccaaagtgtcttaaagttgatcagatgttttgggaggttatgcagttgagaaaag

SEQ ID NO: 417683 - DNA, 96 bp, Homo sapiens
tggaattgctgatagacatgggggcctcaaacgtggagatcaactcctctctgttaatggagtgccgtcatggaaatgatgagtcagaagattcag

SEQ ID NO: 417684 - DNA, 101 bp, Homo sapiens
cccgttgctgctgccatgtgtgtgcttaaaacagggttcctttttgtagcatcagaatttggaaaccacaaatactgcatgtgatggtgataaggaatcag

SEQ ID NO: 417685 - DNA, 110 bp, Homo sapiens
gcatgtcggtggcggggctgaagaagcagttctacaaggcgagccaggtgaaaggtgtagcagtcactcggcctacacccacagcatcgaccttgtgaacccagcgacct

SEQ ID NO: 417686 - DNA, 83 bp, Homo sapiens
gcactgttgtttatattagcctcctggatcatttttacagttttccagaactccacaaaggttgcagtgagagcagatgctgg

SEQ ID NO: 417687 - DNA, 100 bp, Homo sapiens
cgcggtcggcgtgccccgacgtacagcgggccgggaaaagtggcactgaggctctggaacttctgcccagctctccttgtgtgtgctgtatttatggagt

SEQ ID NO: 417688 - DNA, 90 bp, Homo sapiens
tgtgaatgctgtgtatgataccttacttaatactgtacactgaggaggggacggctccgtcttcacattgtgcacagatctgaggatggg

SEQ ID NO: 417689 - DNA, 90 bp, Homo sapiens
tggagacaccgagaaaccatgagtgtaaggttaccccagagtatagacagcatggcggacaccgacctgttcatggaatgtgaggaggag

SEQ ID NO: 417690 - DNA, 78 bp, Homo sapiens
gagaagctctaagtacactcgtcttgaataggaggagatgttaaagtaacccatcttgcaggacgacattgaagattg

SEQ ID NO: 417691 - DNA, 90 bp, Homo sapiens
ggatgactgagtacctgaaccggcacctgcacacctggatccaggataacggaggctgggttcccgtgtcagtggctatgatgacacctc

SEQ ID NO: 417692 - DNA, 125 bp, Homo sapiens
tgaccagtgtggccaaagtggtcagggtggcctctggctctgccgtagttttgcccctgggaatgttacgttcataacttactaaggattagtgtatattttccaaccttgaggcatgaaattct

SEQ ID NO: 417693 - DNA, 75 bp, Homo sapiens
agggcagtgaccggcaccttctgtgcgtcctggactcctctgagaaacaggtgctggagagtcatgcctgtgagc

SEQ ID NO: 417694 - DNA, 88 bp, Homo sapiens
caagagtctcgaccactgaatggaagaaaaggacttttaaccaccattttgtgacttacagaaagggtctcgctctgtcacacaggct

SEQ ID NO: 417695 - DNA, 82 bp, Homo sapiens
cccaccatgcggaggaccgtgtcggagatccgctcgcgcgccgaaggctgtattcatcaccaaagaaaaaacttacaccaat

SEQ ID NO: 417696 - DNA, 75 bp, Homo sapiens
attgggaggggggcagctggagcctcaggcggcagcgcttctagcatccaccagctgaggaacaaagtatcagag

SEQ ID NO: 417697 - DNA, 95 bp, Homo sapiens
cgcggttcctttttgcgagctttccgagtgccaggcgccggccggctgcgaagacgcggtgggccgcccctccgagaggcgtttccatcaaccag

SEQ ID NO: 417698 - DNA, 75 bp, Homo sapiens
cgggtgctaatttgtgaagaaaaagcaccagttctcaagctcatctttgggtgaaaaattgtcgggatcttctgc

SEQ ID NO: 417699 - DNA, 99 bp, Homo sapiens
atgtctactgcaacttcaagtagtggaaggagtacagggaagtctataagctttgcaacagaattacagagtatgatacatggagcccaaacctgcaac

SEQ ID NO: 417700 - DNA, 100 bp, Homo sapiens
attccctagttactatctctaagcactgaagtcggtgtttggagaaaaggactcagggtgcccgggaaacatttgagaattactaccgaaaacagaggcg

SEQ ID NO: 417701 - DNA, 75 bp, Homo sapiens
atgttcacttacgcctctcaaggagggaccaatgaggtgtgtgatgagattaagagcaagcttgcctccctgaag

SEQ ID NO: 417702 - DNA, 74 bp, Homo sapiens
aaaaccacctttgtcaccagaatgaatgaagtgcttcagatttaaatagttgaggaacaggttagcaccactga

SEQ ID NO: 417703 - DNA, 116 bp, Homo sapiens
caggaatctggaccttcagcagaaaagtatagcgtggcaacccagctgttcattggaggtgtcactggatggaagatgtagattccttcatgaaacagcctgggaatgagactgca

SEQ ID NO: 417704 - DNA, 100 bp, Homo sapiens
ggcgtttggcaagagtcaccgggatccctacgcgacctccgtgggccacctcataggttgccaacttggcctgttccatctcaaataatgaagaaggtgt

SEQ ID NO: 417705 - DNA, 80 bp, Homo sapiens
ctgactttgaaggtggaattctcatcaacagttgtggaatatggtctgccctacttgagagaatgcctgtcatggaaaaa

SEQ ID NO: 417706 - DNA, 101 bp, Homo sapiens
gtgatgcttttgatatctggggccaagggacaatggtcaccgtctcttcaggtcaaaatgcagatcttcgtgaaaacccttaccggcaagaccatcaccct

SEQ ID NO: 417707 - DNA, 100 bp, Homo sapiens
cccgggacccgcctgctgagtggacccgggttgccggtggtggtgtgcacattgagccccggtatagacagttcccccagctgaccagatcccaggtgtt

SEQ ID NO: 417708 - DNA, 83 bp, Homo sapiens
agccactggttgccttggtaggcaataaaaggtgagcttgtcggccacagactgctacattgtgcatgagatctacaatgggg

SEQ ID NO: 417709 - DNA, 76 bp, Homo sapiens
attagcagcagcagcttctctcaatgctgagtagaacatccaatacttgggcaacccttttttgtacttcatccct

SEQ ID NO: 417710 - DNA, 75 bp, Homo sapiens
aacttggaagctctgcaaagacctacgctccttcatctaatccatggaaagtttctgcagaaaaatgtgggcccc

SEQ ID NO: 417711 - DNA, 134 bp, Homo sapiens
ttcacctcgcgtcgcgcccgggaggaaggaacgaggcaaggagctaaagcagcgtgcgttcagccctgggatctgaagaagacacttgaatcatgggtgacgttaaaaattttctgtatgcctggtgtggcaaa

SEQ ID NO: 417712 - DNA, 101 bp, Homo sapiens
gagcgccctgtaaggtatattcggaaacctatcgattacacagttctggatgatgtgggccatggtgtcaagctcttcagtaggttacctgcaacatccag

SEQ ID NO: 417713 - DNA, 98 bp, Homo sapiens
tgaggcttcgggaagcagatagcatagctgctgtggctgaactacgacaacacattgctgagcttgaaatccaggagtttccagatgtcttggaatgc

SEQ ID NO: 417714 - DNA, 76 bp, Homo sapiens
atcagcatttacatgacagaaatcacctatgtttacagcgacaggaagggaaaaggccgaggcatcagcgtgtgaa

SEQ ID NO: 417715 - DNA, 100 bp, Homo sapiens
atttaatggaaaatcgcttggttaaaacctgacacttttaacaggaagaagagtgacaggaccaccctagattcacaggaaggggactacacaacgttat

SEQ ID NO: 417716 - DNA, 144 bp, Homo sapiens
ggacctgcccgccgggagccccggagtccgcggcagcgccgagggcccctcccccaggcctctgggctctgagcaatggctgccatccggaagaaactggtgattgttggtgatggagcctgtggaaagacatgcttgctcata

SEQ ID NO: 417717 - DNA, 100 bp, Homo sapiens
ttgtctgtgaagctaaactcaatgctgctgtgtgggaagaagatttgtaaagaaaactcttagtcaagtcctaattcgaagcagagtcctcagggaaaat

SEQ ID NO: 417718 - DNA, 98 bp, Homo sapiens
gccctgagtcatcttcctgagctgaatgatagttaagctgaatatgatgattattccccaccttctaagagacaaagaccaacgagccaccacagcca

SEQ ID NO: 417719 - DNA, 82 bp, Homo sapiens
agagaccagacctgcaagctctttgacacacagcagttcttgtcaggtggagagtctggctcagcaggcaacagtgacaatg

SEQ ID NO: 417720 - DNA, 56 bp, Homo sapiens
ctccagcccaaacgaccggacgtttccagtggccgtcctacgggtggaagcactga

SEQ ID NO: 417721 - DNA, 100 bp, Homo sapiens
tggagagcgtcaacaagctgtaccaggacgaaaagaattgcggcgagcagtaagaagcagcgtgtggaaaagggagacgattgttcatcaacatgagtat

SEQ ID NO: 417722 - DNA, 98 bp, Homo sapiens
ggaagagaagatcatcgagcatttcaaacgatcgccatggatcggatgaagaagatcaaacggcagctgtcaatgacactccgaggtggccgaggcat

SEQ ID NO: 417723 - DNA, 82 bp, Homo sapiens
taccttcccagcaggcctttggttctgcatcaaaaatatcaacgatgaaagagtatttgccctagggtggtcccaaccatgt

SEQ ID NO: 417724 - DNA, 51 bp, Homo sapiens
tggaagttacttgtggacatggaggagatgttaaagtaacccatcttgcag

SEQ ID NO: 417725 - DNA, 90 bp, Homo sapiens
aaaggatgcagagaatcatgaggcccagctcaagaacggcagccttgactccccagggaagcaggcatttttagatgaattcactaactg

SEQ ID NO: 417726 - DNA, 75 bp, Homo sapiens
gactaaactgccaaagttcaccatcctccaaacaagtgaaagctgaaatatgctaataccgtgatgcgctttgat

SEQ ID NO: 417727 - DNA, 83 bp, Homo sapiens
cctgggcgtggccaccgtcaaggccaacatcacgcccttcggcgccgaccagctgagcgggctttggacaccatgaactttga

SEQ ID NO: 417728 - DNA, 80 bp, Homo sapiens
ctgctgcggcacatggaacagcatgtctccttcaaggctcctgctccagcccagcccccagagagcagaccccaggtgct

SEQ ID NO: 417729 - DNA, 74 bp, Homo sapiens
tgcgctgttccacctcattcaacttcagttttctttttaaaagcggaaggagagttttacatggaagtggctta

SEQ ID NO: 417730 - DNA, 75 bp, Homo sapiens
atggagtctccccagtgaatgctttccccgcccagaacaactacggacctagaagaatcccttaggatgaagctg

SEQ ID NO: 417731 - DNA, 50 bp, Homo sapiens
tccaggccaccactgcggcgggctctggggtcccgacggcctacacatgg

SEQ ID NO: 417732 - DNA, 74 bp, Homo sapiens
ggccgggagggcggccgcagcagggcctgcaccctagaataatagctgaaggatttgaagctgcaaagataaaa

SEQ ID NO: 417733 - DNA, 100 bp, Homo sapiens
actttggtgaaagctaagaaggttcaaacaaatttgcaaatgatatacaacttctaagggcaccataaaacaagcttacacgagtgctccaatggtagac

SEQ ID NO: 417734 - DNA, 100 bp, Homo sapiens
cggagccaggggcccgagggcggggaccggcggcgctggaggagcgaggcagctgtactaggactgggaacggatgtgtatatctcatgattgatatgga

SEQ ID NO: 417735 - DNA, 80 bp, Homo sapiens
gtggatcgctgtgatcgtcacttgtacctggagtagaacagaaaaattattatgtctgtgttcccttgggactcattgga

SEQ ID NO: 417736 - DNA, 100 bp, Homo sapiens
cgccaaggagatcgtctctctcatcgaggcccaaaccgccaaggaggtagaagaggatgatccagtgcctgagatccgtcgagatcactttgaagaagcc

SEQ ID NO: 417737 - DNA, 100 bp, Homo sapiens
ggagctgagcaaagtgcgtgaggagtttaaggagctgaaagcgcgatgtgggacctaggaaaaggcctgaagattccccagctataccagtctggagtgg

SEQ ID NO: 417738 - DNA, 75 bp, Homo sapiens
cgccgccaagagtgagcgagcggacccgcgatggggagtctagtggattttctcaagaccccttcaggcatcaag

SEQ ID NO: 417739 - DNA, 100 bp, Homo sapiens
ctgtagtggacaaagatttccttgataactcacggatgattgatatccagaccaggatggctgggcgagcattggagcttctttatctgccagagaataa

SEQ ID NO: 417740 - DNA, 100 bp, Homo sapiens
ggccgacgcagcctcgggagttggtggacgggacaggaggcatacaccatacatggtacagccagagtaccgaatctatgagatgaacaagagactgcag

SEQ ID NO: 417741 - DNA, 100 bp, Homo sapiens
cgccgattcctcctccttggtcgccgcgtccttggctggcgtgcaatggatcacttggagtcctttattgctgaatgtgatcggagaactgagctcgcca

SEQ ID NO: 417742 - DNA, 82 bp, Homo sapiens
tcccccctactcttcatctcgtctgtacccaggtatagtcgtctccccctccaccacggcaagtcctgcagagggaaccagc

SEQ ID NO: 417743 - DNA, 48 bp, Homo sapiens
gggaactctactcttcctacattatttcccatgagaaaaaagcacatg

SEQ ID NO: 417744 - DNA, 101 bp, Homo sapiens
gcaggctttgatggacgttggtacacagacatcaatgctactctggagttctgggaaatcgttcattcatttacagatgaacagaaaagactcttcttgca

SEQ ID NO: 417745 - DNA, 75 bp, Homo sapiens
tgtctttgatccatttgttggaacaggtccatctgaactgtttactgtttgttcatcgattagcagaagagtcca

SEQ ID NO: 417746 - DNA, 74 bp, Homo sapiens
gactaaactgacaagccttcaaggagcccagggttggcttcctgaggctcaggtagtccaaagagccctgaatt

SEQ ID NO: 417747 - DNA, 100 bp, Homo sapiens
gacagttggaatgccattgtggcagatgttagaaacaagattgcattcctcagggtcaaaagaaatagactggcaaccttattttactacacgcattgta

SEQ ID NO: 417748 - DNA, 97 bp, Homo sapiens
ggattaagactcgcaccgcgtccacacccgtcaacacaccctccagacccccgtccagtgaattctggaccctgacagtggagcagatttatcagga

SEQ ID NO: 417749 - DNA, 82 bp, Homo sapiens
cagcgggcgggggcccacgaggagagatgacatgctggacgtggagaccgatgcctacatccactgcgtcagtgccttcgtc

SEQ ID NO: 417750 - DNA, 98 bp, Homo sapiens
ggctgggctgctggtgctagcactgctggtgctgctcctgtggaagggacattgacaaggtagatgaactgatgactgacatcacggaacaacaggag

SEQ ID NO: 417751 - DNA, 100 bp, Homo sapiens
agaactgaatgtgcaacttgcaagggaactggagacaatgaaaatcttgtcagcggacaaggcaaaatctcagcaagttcggacctctagtacaataagg

SEQ ID NO: 417752 - DNA, 90 bp, Homo sapiens
gtctgagactcctgctcagtgtagcattaaggtagagtacagagagatggatgaaagcttggccaacctctcagaagatgagtattattc

SEQ ID NO: 417753 - DNA, 101 bp, Homo sapiens
ccggcttctcccctacgcgctacacaagtggagctccttttcctccacctaccttcccgattggagtcattcgttgcccagtttgcagccaagaatgtgca

SEQ ID NO: 417754 - DNA, 100 bp, Homo sapiens
actgttgaattagacccgtttcctatagatgagaaaccatacaagctgtggtcctcagaatggttggaatgaccctccagctttgaacagagtacccaaa

SEQ ID NO: 417755 - DNA, 100 bp, Homo sapiens
aaaaaggccctcttcaagcctggagctatgaagacatgattggtgaggaggtgccatcggatcaatactactgggctcctttggcccagcatgagcgagg

SEQ ID NO: 417756 - DNA, 75 bp, Homo sapiens
tggttcaagaaccttgacaagctcatccggctggtaaatgcgcagctggcgtgcggccaggatgggcagctgaag

SEQ ID NO: 417757 - DNA, 75 bp, Homo sapiens
cacctggagcgagtccttgggtttgtcaaagtggcaaaggagcaggactcaacgatgactctgaataatgtcacc

SEQ ID NO: 417758 - DNA, 101 bp, Homo sapiens
gagaagaagggtgtttggggtgtgttttacaaagttgcagaatgaagaagagtctggagaacctgaacaggctgcaggtgatgctcctccaccttacagca

SEQ ID NO: 417759 - DNA, 51 bp, Homo sapiens
cgggggtctgggctttaggcaatccgagagactgaggtcatcgacccccag

SEQ ID NO: 417760 - DNA, 100 bp, Homo sapiens
cttagcagcgcgcggagaagaacggggagccaggactgcccaagaagttcgtggacatctttcagcagactcctctgggcaggtttcttgcccagctcca

SEQ ID NO: 417761 - DNA, 75 bp, Homo sapiens
tagaaatacaaagcctttgcttcagagcaggaatgctgcggcctccctattccctgagacacaacagtattgaaa

SEQ ID NO: 417762 - DNA, 76 bp, Homo sapiens
agctggcagagcagaagtctgtggagaccgcaaaaagaagaggcaattcggacataaagagaaacatcaagggcat

SEQ ID NO: 417763 - DNA, 100 bp, Homo sapiens
tatgacatggacgtccgactgggcctgccccccgtgccagacaatgcggacctctctgggctggctattaagaggttgacggatatattcagacgttacg

SEQ ID NO: 417764 - DNA, 82 bp, Homo sapiens
acggcacagcctctcagtcaacatctccttcgcagccgcgcaaaaaaacgggagatacagatgacccaccaagaattactca

SEQ ID NO: 417765 - DNA, 51 bp, Homo sapiens
agcctcccgaggagctgggactacagatggagtctcgcactgtcgtccagg

SEQ ID NO: 417766 - DNA, 101 bp, Homo sapiens
cacgtatagcattggtaaagaacgatcgtccagtggaggtgccactgattaatgaacttgaatcagcaatacatcagctgtacaaacagcgagcttcccgc

SEQ ID NO: 417767 - DNA, 50 bp, Homo sapiens
ggagttggcaacgcgacacagagccagaccattcccggagtaataaatcc

SEQ ID NO: 417768 - DNA, 82 bp, Homo sapiens
gggagatcccaggcggtgacagagtggagccatggctagagttatgcaaagggtgacctggacatatcttacatcacatcca

SEQ ID NO: 417769 - DNA, 76 bp, Homo sapiens
cagagctgtcatggctgccatctctacttccatccctgtaatttcacagccccagcctgcctagggtagttaaaag

SEQ ID NO: 417770 - DNA, 82 bp, Homo sapiens
ctcctttctccatcacctccttattggacagaaacgacccaggaatgcgcctcgccccgcggcgccatggctcacgtcggct

SEQ ID NO: 417771 - DNA, 95 bp, Homo sapiens
gcccaggagcctcagccccgccggcagccctaagggcaagggttgtgagtcccggcccagcccctccacccccctgcccccccgatgcgaccatg

SEQ ID NO: 417772 - DNA, 75 bp, Homo sapiens
gcagcgtggaagagttggacggccctgcggctctgcgccacagggagcatgattgagcggatattagtgtcgtgc

SEQ ID NO: 417773 - DNA, 74 bp, Homo sapiens
ttgccagagcaagagctggatctcgtctttctttccgccatggagtcatagttgcagctgactccagggctaca

SEQ ID NO: 417774 - DNA, 100 bp, Homo sapiens
gtccagtagtttctcattggatacagtgggaagttatgggtgtgtgaagtgtcctgccaacaatatggagtacctggagatgcagaaactaccagaggcc

SEQ ID NO: 417775 - DNA, 83 bp, Homo sapiens
ctacagcgccgcggggcccaggccgggagccgaccggcacagcaggtgtccctggccagtgtccttccacctgtccacaagca

SEQ ID NO: 417776 - DNA, 82 bp, Homo sapiens
gagcaggtgtcaccagccgccatcaagaagaccatcctggacaagtttgacaagtatgcgcccaagctggacagcccctact

SEQ ID NO: 417777 - DNA, 83 bp, Homo sapiens
cgggagagggagaacacagttggagaaaatcggcagctgagacggccttggccgagggaagtcttgccggaccatcacctttg

SEQ ID NO: 417778 - DNA, 50 bp, Homo sapiens
cacagctctgcggcccaggcccaaggtcgtttatacgcaatgcagactgg

SEQ ID NO: 417779 - DNA, 136 bp, Homo sapiens
tcggcatgctctatctgtactgccggcacctcaaccagatgaggaagtacaactttgagctgtatgccactgggtatggtgcaggtggcagactaggcattggagggacagagtcggtgtccaccccaacattgct

SEQ ID NO: 417780 - DNA, 100 bp, Homo sapiens
ctcgactggcagcgcgggaaacgtcaaactcgagaaccttctgaggaaaggaggccatacagaaattgaacctcagcacttctgtcaagctttccacaga

SEQ ID NO: 417781 - DNA, 111 bp, Homo sapiens
ctctgcgggcccggcggcgtggaccacctcccggtgaagatcctgcagccaggagcatcagatccatgctgctgctgactcggagccccacagcttggcacaggctctctc

SEQ ID NO: 417782 - DNA, 75 bp, Homo sapiens
ccggcgcccgggagacccaggaggagcccgcagcccgttttacggagaagacttttactgtgaaattcctcggag

SEQ ID NO: 417783 - DNA, 100 bp, Homo sapiens
atttcttaaaacctgtgttgggtggttgtggaggcagagaatcaggttataccttgaagggactggcataaaccctgtacctgtggaccttcacgagcag

SEQ ID NO: 417784 - DNA, 105 bp, Homo sapiens
cccacacacaggtgaatttaaaggagcagccctggtgtcacctatcagtaaaagtttcggagcaacatcccctgtcacctggttgatatctcttgcggattaccc

SEQ ID NO: 417785 - DNA, 75 bp, Homo sapiens
cttgttatgttttcatcacttctctccagaagacagggtctcactttgtcacccatgctggagtgtagtggagtg

SEQ ID NO: 417786 - DNA, 100 bp, Homo sapiens
atgatgacaaagttacctttgaagtctttgtacaggcggatgctccccatggagttgcgttaaacccatccagagtaatggctgcggccttacccaggac

SEQ ID NO: 417787 - DNA, 101 bp, Homo sapiens
cggagccggagccgacgggcggtggccgcactgggaccccggaatcccgcgcgctgcccacgattcgcttctgagagacacctatggctgccgatgaaggc

SEQ ID NO: 417788 - DNA, 95 bp, Homo sapiens
aggttctgcctgaagcaacaactacagcatttgaatatgtcaagccctccaacatcctagtcaactcccgtggggagatcaagctctgtgacttt

SEQ ID NO: 417789 - DNA, 82 bp, Homo sapiens
cacgctgcctcggcggcccggcccggctcgacgccaatggaacaccttccaccatgaccacctcagcaagttcccacttaaa

SEQ ID NO: 417790 - DNA, 100 bp, Homo sapiens
cgtgagccaggcccaggagcgggtgcagctgcagatggccccctcagaccgtgccatgggtgacagtgatgacgagtacgatcgaaggcgcagggacaag

SEQ ID NO: 417791 - DNA, 100 bp, Homo sapiens
cattatccatgagaaggggagcgagctccattggaaagatgttcgtgaactggtggtagattcgacggaggcgccttgcacgacttgctggtggacagac

SEQ ID NO: 417792 - DNA, 50 bp, Homo sapiens
ctggctctcagattggaagtcagattgtagaaggcatgaaacaaaaaatg

SEQ ID NO: 417793 - DNA, 100 bp, Homo sapiens
gctctgctggagaaggcttatgctaagagtctttgttgctggctatgaaagcctgaaaaagaatgaaattcttcatctgaaattacctctcagactttct

SEQ ID NO: 417794 - DNA, 100 bp, Homo sapiens
cctcacatgtcaacagcatgaaaagtgcctctaagacatccacaggtgtgcagtgttaaagcaggtacgaactatggctcgagatttatacgatgaccat

SEQ ID NO: 417795 - DNA, 100 bp, Homo sapiens
attgacagcgacaagataatggagtctccccaggacagtgctatcacccgggatattaaccgaacattcccagcccatgactactttaaggacacaggag

SEQ ID NO: 417796 - DNA, 50 bp, Homo sapiens
tctactttgccagcaaactggtgctcaagatattgtgacccccaatgggc

SEQ ID NO: 417797 - DNA, 90 bp, Homo sapiens
cgacaagccgctggcagccgcggatctcaccgccgctcaggtgttctaagaacggaagcatctgggctggatggaatttagcatcaagca

SEQ ID NO: 417798 - DNA, 104 bp, Homo sapiens
agcaagggattgctggctacagcttcagaagaccgaagcgttcgtatctggaaggcttgggcactgtttaaaggaaagttccgagaaggcatcgacaagccgga

SEQ ID NO: 417799 - DNA, 100 bp, Homo sapiens
gatcaacaaggcatctcaagagacttgcgttgatgatacagtcctctgaccattaaaaatctcaagtgacgactttgggaaactctggttatccttcgca

SEQ ID NO: 417800 - DNA, 100 bp, Homo sapiens
tttgtcagcgctcctaaagcaaacgccaccattgaagtgaaaggaataggaggccttcaagattttgtgctgaaatctgcaacactgtgtagcctgccat

SEQ ID NO: 417801 - DNA, 83 bp, Homo sapiens
gcctcgggactgctccgatgcccgacttctgcctggtgtcgaaggtggtgggcagatgccgggcctccatgcctaggtggtgg

SEQ ID NO: 417802 - DNA, 75 bp, Homo sapiens
cttcctgctgctgctgccctggttccccggccccacccgatgcggcctccaaggggactcattggcgccccctga

SEQ ID NO: 417803 - DNA, 74 bp, Homo sapiens
ctgtaacccagcctgtttcacttcttgtttttcagaagaagtgaagtcaagatgaagaaccatttgcttttctg

SEQ ID NO: 417804 - DNA, 100 bp, Homo sapiens
ggaccggagtccgctaaagcgaagcattccaggtttggaaattttagcattcaggtgccaggaatgcagatgggacagccagtgccagaaacaggcccag

SEQ ID NO: 417805 - DNA, 74 bp, Homo sapiens
actaaaatcactgaagaagaaaattaaaaaggtttcaaatgccagtgaaatgatgatccgttggtgctgaatga

SEQ ID NO: 417806 - DNA, 122 bp, Homo sapiens
gcaggtcctggatttatttctcgattcgctgtcggaggagaatgagaccctggtggagtttgctattggttttgaacgaagaatgtgatcagaactggtacaaggcagagcttaatggaaaa

SEQ ID NO: 417807 - DNA, 98 bp, Homo sapiens
cttgccttagcgacataccagtctctgtacccactcaccttgtttgtcccaggactcctctatctcctccaggtttcctgggagaaggtggcttaagg

SEQ ID NO: 417808 - DNA, 100 bp, Homo sapiens
aggaaagtctgttactactacgacgattgccaacactcctgatagctgaatgtgtgctggtttacatgactccagagcagtccgcaaacctcctgaagtg

SEQ ID NO: 417809 - DNA, 98 bp, Homo sapiens
actaccctgaccctccaataccccacagctattctagtgataggattcacagcttgagctcaaataaggtagattggggtcaactggactacttagtt

SEQ ID NO: 417810 - DNA, 100 bp, Homo sapiens
ctcccatgttcagcagaagcgacttcagcgtgtggaccatcctgaagaagtgtgttggcctgaaccctgccatcagcatcactgaaaacgtgctgcattt

SEQ ID NO: 417811 - DNA, 98 bp, Homo sapiens
tatctgtacttcacacagttcaaggcagaggtgcggggcgctgagattgagtacgccatggcctacatggaaactgtcaagcaaggcgttgatcagaa

SEQ ID NO: 417812 - DNA, 75 bp, Homo sapiens
actgatggcagtgttttagctgctggggaagaaggagaaagggccaacccctgaagaagcaatacagaaactgaa

SEQ ID NO: 417813 - DNA, 51 bp, Homo sapiens
gcatcaccagcaccacatgttattcatgtgattgaacggcgtgctcttcct

SEQ ID NO: 417814 - DNA, 82 bp, Homo sapiens
tcaagcttggaatgatcatcaaacagctatggtgatgattagagacatactaatgtacatgatataattgaccctgcaatcc

SEQ ID NO: 417815 - DNA, 80 bp, Homo sapiens
gaacagattcctctgtggaagccagggagaagaggagatgcctgtgaggagccaccaacatttgaagctatggagctcat

SEQ ID NO: 417816 - DNA, 75 bp, Homo sapiens
ggcgagatgcctttgttcaccgccaaccccttcgagcaagacgtggaaaagcagagcaaatgtttggagagatgg

SEQ ID NO: 417817 - DNA, 75 bp, Homo sapiens
tgcttttggaatgaatttggaatcttcccttgaagagaaggcagacggtaacaagtactccttgctggattgaac

SEQ ID NO: 417818 - DNA, 100 bp, Homo sapiens
ccacttcgaccagcttcatcctcagacagccgagagacacacaagattgcagtattttatgttgctgaaggacaagaagacaaacactccattctcacca

SEQ ID NO: 417819 - DNA, 82 bp, Homo sapiens
cctctgatgcagaatttgatgctgtggttggatatttagaggacattatcatgggtcaaaatgcagatcttcgtgaaaaccc

SEQ ID NO: 417820 - DNA, 137 bp, Homo sapiens
cagtcatggatctggaagctgagggcacgtgtttgcggttcagccctttgatgaccgcagcagagacgagttgtactgctgtcacaggaaatggacgctggattacaagcatggcagctcaggcagcagaagttgca

SEQ ID NO: 417821 - DNA, 100 bp, Homo sapiens
aaatacatgaaaaatggggcagaagaagagcagaaaatagcagccaggaaccaagaaaacttgggaaacatgcacaattcttggattacaacaggtgaag

SEQ ID NO: 417822 - DNA, 90 bp, Homo sapiens
accagtgttgccatttcactctggaagatatgctctatgctgcttcatccataaaggacttgcaattgtgaccaaatatattacaaaggg

SEQ ID NO: 417823 - DNA, 100 bp, Homo sapiens
ctggggaccatgcagagctacatggatgcctcccttatctccctcattgaggattttgggagccttggagaggtggccttggataagggctgctcccaat

SEQ ID NO: 417824 - DNA, 100 bp, Homo sapiens
ctgcacttccccctgtcatgaaacagcaaccagttgctatttctagcgcaccagcatttgaacgctgtaaatgtaagcctattagagctacacagaagac

SEQ ID NO: 417825 - DNA, 75 bp, Homo sapiens
atgacccattatttccacctattgagagggctctgagagatttcatttctgtcctgctgatgaagtctacgttca

SEQ ID NO: 417826 - DNA, 90 bp, Homo sapiens
tcctccagctggatccttccttaggactgatggagaagatcaaagagttgctgcctgactggagcctcagggaacccagccagcacagca

SEQ ID NO: 417827 - DNA, 100 bp, Homo sapiens
caatgaaccttgggtgatttgttctgtatcagaagacaatatcatgcaagtgtggcaaatggaaggaactgccatgctgttagaacatcttgctgggagc

SEQ ID NO: 417828 - DNA, 85 bp, Homo sapiens
ccggccagaagcgggcggcgcgggggagatggtgaatccgccatactacatcccgctggttgagctggtcccccacccggagacg

SEQ ID NO: 417829 - DNA, 100 bp, Homo sapiens
aagaaactcctggttgagctcaaagttattttacattgctgcaaggtgtgactgttgtaaatctcaaggaactcttaaagagcgagttcagtggcgtggg

SEQ ID NO: 417830 - DNA, 78 bp, Homo sapiens
aactacctgcactttggggagcctaagtcctgacaatgcagatcttcgtgaagactctgactggtaagaccatcaccc

SEQ ID NO: 417831 - DNA, 80 bp, Homo sapiens
ccagtgcattcccatcctcgctcccacctgtcagccttctaccccatgagaaagaccagaagtccattggaatattaagc

SEQ ID NO: 417832 - DNA, 100 bp, Homo sapiens
acgtatatcagtactctgctccatgttaacatcagagatagagagtctacagggagattgaacaggtgattggcccacatcgccctccagagcttcatga

SEQ ID NO: 417833 - DNA, 82 bp, Homo sapiens
aagagcagagcggagggagccccagacacgtcttgctatgttgctcaggctggtcttgaacccctgagctcaagtgatccac

SEQ ID NO: 417834 - DNA, 74 bp, Homo sapiens
ggtgacactcaacaggattcccggtacaataacttgcctgaaattctatggcaacaggcatttaatcagtggag

SEQ ID NO: 417835 - DNA, 100 bp, Homo sapiens
caacttcctgcaggactccaaggtcattttcgtggagaaagccccagagcggttccgccaccccagccgcagatgtttggtgaagagctgcctgacgctc

SEQ ID NO: 417836 - DNA, 101 bp, Homo sapiens
tggcgggaccggtttggaagactttgccggcctgcaggagctgctgctcttcctccagaacctgcccacagcccactgggatgatgaggacatcagcctgt

SEQ ID NO: 417837 - DNA, 87 bp, Homo sapiens
tgcactatccaacatgccaaaggtggaagaactcagtaaaatactccaacgtgggagaaatgaagataataaaaagtctgatgtaga

SEQ ID NO: 417838 - DNA, 73 bp, Homo sapiens
caggccgttgttggtcgagctggcgggtcccgcgggccaggccgtggaggtctcctctgagcctccggcctcc

SEQ ID NO: 417839 - DNA, 75 bp, Homo sapiens
tgaagtgcttggagtgcagaactgaaagaggaaaggaaacagattcattgtctgtctgaggatgagttaagttct

SEQ ID NO: 417840 - DNA, 98 bp, Homo sapiens
cccccaatttcccagctgctaaaggaagaggaagagataattgacgaccttgccaacctagtggagaacacagatgaaaaacttcgcaatgaaaccag

SEQ ID NO: 417841 - DNA, 90 bp, Homo sapiens
ctttgtcagtgcacaaaatggcgccctacagcctactggtgactcggctgcagcgctgccactggagtgacatgttcacgggaaggctgc

SEQ ID NO: 417842 - DNA, 75 bp, Homo sapiens
gtgccatcctcacgaccatgcttgtctccaggaacttctcagctgccctcggatttccaggagcgcgtgagcctg

SEQ ID NO: 417843 - DNA, 75 bp, Homo sapiens
cttccccgttagaactcgcgtttccacttcagagatctgggaggtggggaagacagggctccagctaccacagga

SEQ ID NO: 417844 - DNA, 100 bp, Homo sapiens
gccaattgtgtggccttagcgatctatattccctttccagaagatgattccaacgccaccaattccaacctgagcagccagacacagtctccaacgccac

SEQ ID NO: 417845 - DNA, 115 bp, Homo sapiens
aaagattttgctgtcaaagttgtgtcagtgaatacaaacaggctggactctgtgaagctgagcaggagcagatgcggaagatcctctaccagaaagagtctaattacaacaggtt

SEQ ID NO: 417846 - DNA, 99 bp, Homo sapiens
caaaacctcgctccggaaaggggacacctgcactcaggttgaatcagaaaataaccaagaagaacagaaacaggtgcgcttaccagaaagccgcctgac

SEQ ID NO: 417847 - DNA, 73 bp, Homo sapiens
gactgtgcaggaagaaaacgagccagtgatttacaatagagcaaggttgcccccaagtttcctggcagtgtgt

SEQ ID NO: 417848 - DNA, 111 bp, Homo sapiens
aggagtattaaatgaaaacacagtttctgcaggaaaagatctctctacttctcctaagtcccgaaccgacagccacaagtggcgcccgaacagggacgtgagtgaagaagg

SEQ ID NO: 417849 - DNA, 100 bp, Homo sapiens
cttgtatggagtttattttgcacatttgcaagtatatgagtgtaatcttgggactggaactgcaaaggcttcagaggtgatctgtgaaaatggttcgcta

SEQ ID NO: 417850 - DNA, 100 bp, Homo sapiens
tgtgcttgtggatgcctctcatcgggagaatgctcttcaggatagtatcttggccagggaactcaaacagcagatgcagatatctccggagcatttggat

SEQ ID NO: 417851 - DNA, 100 bp, Homo sapiens
gctgtctgtggtgtggctgtgggacccgtgagcaagcagcgacgccagcggcggagaaccgacgaaagtcttaggaaaagtcctcagtgctgtgggcagt

SEQ ID NO: 417852 - DNA, 97 bp, Homo sapiens
caaggtgcttctaggttacccaacagcactatctacgtggtcgaacctggatacctaggcatggatgagttgatggaggtgtctttctcgcccctgg

SEQ ID NO: 417853 - DNA, 100 bp, Homo sapiens
tcagcaccgcccctgcgccaagccagccggccaggaccacagccgctttgtcaactgtgtgcgattctctcctgatgggaacagatttgccacagccagt

SEQ ID NO: 417854 - DNA, 74 bp, Homo sapiens
aagaacaagaatctccagtgaactgctttagaaaattatttgttatggctgcagcttcgattgccaatattgta

SEQ ID NO: 417855 - DNA, 82 bp, Homo sapiens
cgagttcctcctctcaccatcgaagctctgcagacacctcgctggagaccccatggaacaagatcactcaaggtgaaggata

SEQ ID NO: 417856 - DNA, 90 bp, Homo sapiens
gcaatgtggttcccagtgacaccaacattctggacacgtgggcggtcccgctccccgaggcgcaggtcccccgtgcgccggagatcacgg

SEQ ID NO: 417857 - DNA, 97 bp, Homo sapiens
gcataggtcaaagctgtttggagaaaatcagaagtacagttttatctagccacatcttggagaatgcccagtgtttacatggggacattgcacagtc

SEQ ID NO: 417858 - DNA, 141 bp, Homo sapiens
attggaaattatacctgtgaattaaaatatggaggctttgttgtgagaagaactactgaattaactgttacaggtgatttcaagtgtcctatcaaagaggagatagcaattaccagtggtgaatgggaagttcttggccgg

SEQ ID NO: 417859 - DNA, 75 bp, Homo sapiens
cacgtgtttgcggttcagccctttgatgaccgcagcagacactttttcaaaaatggcaatggtatcagaattcct

SEQ ID NO: 417860 - DNA, 74 bp, Homo sapiens
attgaaattatctctggtgctgcagctctgtctccaccagctcctggccgggttcgaggacaagtcagcctatg

SEQ ID NO: 417861 - DNA, 75 bp, Homo sapiens
atcaagttctcgtggagtcagacaatgagattaatccaaaagagggatgtaaagttcacgtggtcttcagcacag

SEQ ID NO: 417862 - DNA, 83 bp, Homo sapiens
tccagagcgcagctatcggtgctttgcagaccaagatgaagagacgagctgtggggatctggcactgtggttcctgcatgaag

SEQ ID NO: 417863 - DNA, 97 bp, Homo sapiens
ggaaaatattcaagaagtgtaaaaaggggccttggacaagattcgctatgagagcctgacagacccttcgaagttggacagtggtaaagagctgaaa

SEQ ID NO: 417864 - DNA, 75 bp, Homo sapiens
tgtggccgttttacattggctgttttcctcacattcctcaagcagagtggcagaatttagtgacatttggaagct

SEQ ID NO: 417865 - DNA, 100 bp, Homo sapiens
atgtaactccgaagacttaggcccttggacgcatccgactcacccgccccttggtatcggccgccccaggtaagaatgattgatgttggctgatattgga

SEQ ID NO: 417866 - DNA, 95 bp, Homo sapiens
ggaacgtgaagcaggccactccttacatcgctgttggcctggacaatgctggaaagacaaccatcctgaagaagttcaatggggaggacatcgac

SEQ ID NO: 417867 - DNA, 83 bp, Homo sapiens
tggcatctgccggctgctccgcaccccggggtcccaggaagggcggcccagggtggcccagttgaaatccttcccttcctcta

SEQ ID NO: 417868 - DNA, 100 bp, Homo sapiens
gcggaggatggtgcaggagcgcgagaaggatatcctgacggccatcgccgccgacctgtgcaagaacattgatgatggcacctcagatcgcccctacagc

SEQ ID NO: 417869 - DNA, 75 bp, Homo sapiens
cgagggttgaagattgtgaagcaatagcctaaggtttgtgaaatggctgctgacatttctgaatccagcggggct

SEQ ID NO: 417870 - DNA, 98 bp, Homo sapiens
acagttatagtcaacatggttgacgttgcaaaggcgcttaatcggcctccaacgtgtgtatcttccaacgtggtccccatgtacttaggggagctggc

SEQ ID NO: 417871 - DNA, 83 bp, Homo sapiens
caagacgctgcccgccatcgaggtcagcccaaggccaaccccactgtcactctgttcccgccctcctctgaggagctccaagc

SEQ ID NO: 417872 - DNA, 75 bp, Homo sapiens
gccaggtggcgaggatttccacattgtactaatggtcacttgatgtgcgctggctgttttatccacctactagca

SEQ ID NO: 417873 - DNA, 96 bp, Homo sapiens
gataatggttgccaaatgtcagatgcagttactgtagaagtcactcaatataatccaccttttcagactgctaaggagccctgtatggctaagttt

SEQ ID NO: 417874 - DNA, 98 bp, Homo sapiens
aactaatggccagtgatatgctagaggcctgtgtcaaaagccttggaatggatggctttggccaaccagttggcattcttggacgccctgccacagca

SEQ ID NO: 417875 - DNA, 101 bp, Homo sapiens
accgtcaccaccttggtggagaacaagaaagctcagctggtggtgattgcacacgacgtggatcccatcgaggtcagaatggcggcagtggagcatcgtca

SEQ ID NO: 417876 - DNA, 75 bp, Homo sapiens
aatcagagtggaggaagtacagccagcaatcatagcaatggatcatttaacttgaaagctttgtcaggaagctct

SEQ ID NO: 417877 - DNA, 100 bp, Homo sapiens
ctgccatctttccaggaggctttggagcggctaaaaacctaagtccattggaatattaagcccaggagttgctttggggatggctggaagtgcaatgtct

SEQ ID NO: 417878 - DNA, 100 bp, Homo sapiens
aacctgcgcgctgccctagggcccggccgacccgcggcccggtactccaaagattcaggtttactcacgtcatccagcagagaatggaaagtcaaatttc

SEQ ID NO: 417879 - DNA, 88 bp, Homo sapiens
gtacttcgccacttactttaatgagaagatctccattcctgaggaggagtgtgaagcctcagtttaggtcatctggtggttcagaaca

SEQ ID NO: 417880 - DNA, 50 bp, Homo sapiens
agatgccactgctgttcgtaatggtcttgccacttgcctagtgaggcttt

SEQ ID NO: 417881 - DNA, 100 bp, Homo sapiens
cacgtcctgaacatgagcctcctcctctccttctacctgctggggttgcttgtcagtagcgggcaagccaagtatcttcaagaccttctcatggagagtg

SEQ ID NO: 417882 - DNA, 83 bp, Homo sapiens
cgctgcgccgcaacgccgagcgcaccgacatctgcctgctcaaaggagcggaaagaatgtcggagcgggccgcggatgacgtc

SEQ ID NO: 417883 - DNA, 73 bp, Homo sapiens
gtgcatgacactcctggaaaacaggatgttaaagtctttagtgaagatgggacaagcaaagtggtggagattc

SEQ ID NO: 417884 - DNA, 75 bp, Homo sapiens
gggccgccttcaacatcatagaagtgatgagtgcctccaagttcaccttcaaggcaactgtgtgtctcaaaagca

SEQ ID NO: 417885 - DNA, 100 bp, Homo sapiens
gcggagtcccaatgaaacgggcagccatggccctccacagcccgcagttttcggctttgtgagaaaccttaccatcaaacacgatggccagcaacgttac

SEQ ID NO: 417886 - DNA, 75 bp, Homo sapiens
gccttgcatacggacttgcttgaggaggaggcaaggcaaggaatgggtaccacagaccatgtcatcgtcctggcg

SEQ ID NO: 417887 - DNA, 98 bp, Homo sapiens
gtgatgaggaaagctgtgaaagttctcaagatgaaaaagagaggtttgaccctactcagtttcaagactgtattattcaaggcttaactgaaaccggt

SEQ ID NO: 417888 - DNA, 99 bp, Homo sapiens
atcctgccgtccttctccactttcgccagcccgtgccgcgagcgcggcctgcaggaggcgatcagtgggtgaccgcggctgcgagggactttgtcatcc

SEQ ID NO: 417889 - DNA, 75 bp, Homo sapiens
cgcccacgagtagcagccgcaactggacggaggacatggaaggagacttggagtccaggtgtgagaaatttctac

SEQ ID NO: 417890 - DNA, 74 bp, Homo sapiens
acttaggtctgttagaggaagacgacgagtttgaagagttccctgccgaagcgtttatgtcatggttggtgcag

SEQ ID NO: 417891 - DNA, 50 bp, Homo sapiens
tacaccactgggatgtaacagaggaatccagatcttacataagatggaag

SEQ ID NO: 417892 - DNA, 75 bp, Homo sapiens
ggcgggactaagagagccgaggtcgctccccatccactctcacaaggtacaggtttgcagattccgccagcagca

SEQ ID NO: 417893 - DNA, 80 bp, Homo sapiens
ttagactacctactcagcattccaagccttgcaaaataccctactaaataaatcattttagacatggagtgcaggtggac

SEQ ID NO: 417894 - DNA, 98 bp, Homo sapiens
tgtggcatcttctacaaacccatttcagaccaatgccagaggagcaacagaatagcattcctttcgaacaccacggcaagtagctgctcgtctcccat

SEQ ID NO: 417895 - DNA, 82 bp, Homo sapiens
actcaacgagactcacatcttcaacggaaactgcaaaattcaaaatggggctcaaggtattcgtttcatctacaccagagaa

SEQ ID NO: 417896 - DNA, 113 bp, Homo sapiens
gaacgggcgagaaagaggaggaggcgagaaactcccaccgacccacagagaactctaagaaggagctgatgtggaggagcagctgagacagttcaagatgacgaccacagtag

SEQ ID NO: 417897 - DNA, 101 bp, Homo sapiens
aaatcacagctaatgaaccttattcgatctgtaagaaccgtgatgagaggtgggtttggaggatttgggacaacatctacaactgcaggttctgcattcag

SEQ ID NO: 417898 - DNA, 96 bp, Homo sapiens
cacactgcatttctgtcggcactgcagcattctcttttggaaggtacaccagaggatcgcttcctggcagaatttgggagctgtttattgcagcac

SEQ ID NO: 417899 - DNA, 83 bp, Homo sapiens
gaagaagaggtggatccccggatccaggttatgaagacagtatggagtttccagaccatagtagacatttgctacagtgtctg

SEQ ID NO: 417900 - DNA, 98 bp, Homo sapiens
acagctcccacaggagtcatgcccagtgtgtgaagatgttcctcctgctgatcaagagaagctttttatccagaagttacgtcagtgttgcgtcctct

SEQ ID NO: 417901 - DNA, 101 bp, Homo sapiens
agcatcaatggcaggaggtttcctgttgaggaaaaatttgagggactgtttcggacttatgatgactgtgtgacgttccagctatttaagagtttcagacg

SEQ ID NO: 417902 - DNA, 75 bp, Homo sapiens
caagaaacatatactgcttacctcattgaaacaagctttctgaaaaggatatgagcatgctcgaggagaggatta

SEQ ID NO: 417903 - DNA, 97 bp, Homo sapiens
ggaagcacctgcgggatacagtggagctacaacttctgaagggtggtcttttggtgccttaatgaagagtcggattttgaagcagccttcagcgtgg

SEQ ID NO: 417904 - DNA, 83 bp, Homo sapiens
cagcctctctcatcttgggaatctgcgtcagaagtcactcgcagtcccgtcagcccaggttcattttccagacactgaaagag

SEQ ID NO: 417905 - DNA, 100 bp, Homo sapiens
tggcatcatatgtcaagttttatcagaataataaagacttcattgattcacttgctacccaaacctctttccctgacttatcaagagagattattggttc

SEQ ID NO: 417906 - DNA, 51 bp, Homo sapiens
cagtggtcgcttcttctccttgtgtccatgaaactgggaggcgaccgtgtt

SEQ ID NO: 417907 - DNA, 97 bp, Homo sapiens
tggaaaatcaaggactatctggaggagctgtgggtccaggctcagtacatcacagacgcagaaggactgccggatgcagctgagtgatgaggaaggc

SEQ ID NO: 417908 - DNA, 75 bp, Homo sapiens
ttatagatggacaagagacgatcattctgcaagcaggcaacctgaatacaggctaatagctcgtcagcttgctaa

SEQ ID NO: 417909 - DNA, 88 bp, Homo sapiens
gaagagcagacccgtttgggttctccacgcattctagactcccgaagagacaatgcagatcttcgtgaagactctgactggtaagacc

SEQ ID NO: 417910 - DNA, 88 bp, Homo sapiens
gaagccttcaaatccatcaagctcatcaaaaggttgaaatcacaaagattagacacctttttagataggtgttcttcagcaccactga

SEQ ID NO: 417911 - DNA, 75 bp, Homo sapiens
gctatggaggacttgcttttgttgaactggtttgatccatcttcttgggaatctgtggccaatgaagaaatgtgg

SEQ ID NO: 417912 - DNA, 74 bp, Homo sapiens
ttcttcaagagaaatggagcccttctccaagacctagaggatcaagacataatgggagcatttttagacaagcc

SEQ ID NO: 417913 - DNA, 100 bp, Homo sapiens
aacaaaatccattattagggtttggcgctatagctattgctgtattgtgctcaggatttgcaggcaattcgaagttttcaagtagcccttcacatctatc

SEQ ID NO: 417914 - DNA, 75 bp, Homo sapiens
gttcttccagtcccctgaggtgatggcagctgcatccagatctcattatgcatcagaaaaatgaaaaaacagagg

SEQ ID NO: 417915 - DNA, 50 bp, Homo sapiens
cgccgagtgggaggatggcggaagtacactgaggaggggacggctccgtc

SEQ ID NO: 417916 - DNA, 75 bp, Homo sapiens
ccaaggtctctcgcgggcgggagaacggaaaactcccaacttcctggatggagagcaatacatcatcatctttgg

SEQ ID NO: 417917 - DNA, 82 bp, Homo sapiens
aggattgcaactggacagatagctggcgtggataaagatggaagggcaactcatgcagcaattccagaaccccgacttccca

SEQ ID NO: 417918 - DNA, 101 bp, Homo sapiens
ggcatgccacaaggcatggtcccagccaggacggagataacaccatcttcaagacaccattcgcttttcacccaagatgatttgatgtcttataaaactct

SEQ ID NO: 417919 - DNA, 75 bp, Homo sapiens
gaagcagcgtgtcctccgtgggagcccgagccaccttctgggtgaaccctcagttcaagatccggctggatgaga

SEQ ID NO: 417920 - DNA, 101 bp, Homo sapiens
cgcagcggcaacagtaacgaaaaacagggctagtaatcaagtcagaggattatatgacttttatctgcctagagaagaactatggatctacaacatggaga

SEQ ID NO: 417921 - DNA, 100 bp, Homo sapiens
tgtggaggaaaacaacttcgagggcagagtgtcttctctttagggatggtgaggttggaaaaaggctcctgtaaccctcctccaggatgaaccacctgcc

SEQ ID NO: 417922 - DNA, 89 bp, Homo sapiens
tcaatgtgtcctacaccaggcagcccccaaatcccggcccaggtctctaattaacagaagatggcaaagcccagccacagcagctatgt

SEQ ID NO: 417923 - DNA, 100 bp, Homo sapiens
tcactgaggcagagatccagcagctgaaaagaaagacccatttacccaatattaaagtccacgcctacttcgcacctgtcactccacccccatcagtagg

SEQ ID NO: 417924 - DNA, 124 bp, Homo sapiens
cggtttttctcttccttcgctaacgcctcccggctctcgtcagcctcccgccggccgtctccttaacaccgaacaccatagggccagatttgagtgtgtgaatttttgagtgaaacctggaacc

SEQ ID NO: 417925 - DNA, 97 bp, Homo sapiens
gaccaccctccctgccggctttgggtgcgttgtggggtcccgaggattcgcgagaattctccaaaacaccagtggggagaagaggaaccaaattctc

SEQ ID NO: 417926 - DNA, 100 bp, Homo sapiens
ccatcaggtgcagagctgtgggtctggttccaagacactgtcactgatcaaggcggataagaaggcggcacaagaaaagatgatccagcaggagcatgag

SEQ ID NO: 417927 - DNA, 96 bp, Homo sapiens
tcctggggtttcctcatcaacccacaccatgactggacattgccaagtcactgtcccaatgacagaaccactcacgaattcttgtttggtgccctt

SEQ ID NO: 417928 - DNA, 90 bp, Homo sapiens
ccctgccctccttcaagattgacttctcggaatggaaggatgacgaggagctcgaggccatgagcagatataccagcccagtgaacccag

SEQ ID NO: 417929 - DNA, 90 bp, Homo sapiens
gaagggacaagaagatactgccctgatgctgacctgacctttgaccagacggcgtggggggacagtggtgtgtattactgctccgtggtc

SEQ ID NO: 417930 - DNA, 90 bp, Homo sapiens
cgagaggaccaacggagcgctgaggcgggcgttttcttggatgaattgcttgctttggagttgaggagctcaagcttgggaaaatggtgt

SEQ ID NO: 417931 - DNA, 75 bp, Homo sapiens
cgagtagtgtctcccggacctcttcattgcctaaaacacgaagatcgattgagaagttattagaatgggaaaaca

SEQ ID NO: 417932 - DNA, 75 bp, Homo sapiens
gcacagccgtgctgcctgctgattgcagagcgcatccattcgggttacgaagatcacaaatcgggacaaaccgct

SEQ ID NO: 417933 - DNA, 75 bp, Homo sapiens
aatgctgtcctgtcctcctggggccaccacttttaggctccttgccagaggcctccactcactccagacccctat

SEQ ID NO: 417934 - DNA, 100 bp, Homo sapiens
gagcccagcgtcaacttcctcaagtcgcccaaaggctttatcctgtggataaacgcagagtgaacgagtttggggagtcctacgaggagaaggccacgcg

SEQ ID NO: 417935 - DNA, 83 bp, Homo sapiens
gcttccgggagggcggctcgcagattgaccgactcatcagtcacggggccgacatcctgaagcctgtaatgctcaggcaggga

SEQ ID NO: 417936 - DNA, 82 bp, Homo sapiens
cgctctgctgtgggcgctgctggcgctctggctgtgctgcgcgacccccgcgcatgctgtttgcagacaaggtcccaaagac

SEQ ID NO: 417937 - DNA, 51 bp, Homo sapiens
tccactctgctggggtcgtgcacagggacctgaagcccggcaacctggctg

SEQ ID NO: 417938 - DNA, 78 bp, Homo sapiens
cttaccagtgtgaacggtgtcatcagatgttggatgacaataaccatcttattcagtgtataatggactctcagaata

SEQ ID NO: 417939 - DNA, 51 bp, Homo sapiens
ctcacactctttcaagagaagcttccttgatctgtgccatcattggcggga

SEQ ID NO: 417940 - DNA, 83 bp, Homo sapiens
agacatcttaattgggcacgaaagagactgcaaaattcaaaatggggctcaaggtattcgtttcatctacaccagagaaggca

SEQ ID NO: 417941 - DNA, 75 bp, Homo sapiens
accttttggctttcttggcctgatgctgaactctcgaggtggagcggaggcggagggacaagatcaacaactgga

SEQ ID NO: 417942 - DNA, 95 bp, Homo sapiens
tgcccaaacaggaagtctatgatgagtacaagtaaatgaaattgcctttataaatacccttgaagcccagaataaacgtcatgatgttttatcaa

SEQ ID NO: 417943 - DNA, 75 bp, Homo sapiens
cgatattatagtgatcctcgatttctcaatctctggcttaaattagcacagtatgaaaacccaccacatatctat

SEQ ID NO: 417944 - DNA, 90 bp, Homo sapiens
gtccttccccaagtcaaaagcggagttgctgtcaatgctggacatggggaccctcttcacattcagcaggtaaataaaggcagctaaagc

SEQ ID NO: 417945 - DNA, 74 bp, Homo sapiens
atcatgggcaaaggacagatccaggatgatcggctgaatgtaacagaggaactaacgtccaacgacaagacgag

SEQ ID NO: 417946 - DNA, 100 bp, Homo sapiens
tgtggttaacaaacagctcggatccatgtcacttgacgagcaacagggctcccagccaacctctgataaaccctcccagcggccatcagagagcacaaat

SEQ ID NO: 417947 - DNA, 100 bp, Homo sapiens
ttttcttatggagaactgtccttgttgggagctgtatttcctggcgacctcttacccaagtgcctatgcaccacgtggatctatttacaagtttgttgac

SEQ ID NO: 417948 - DNA, 98 bp, Homo sapiens
cttgaggagaccagctcagcaaacggaagacacttaaagtggaaaagcccgatggctccccagtatttattgccttcagatcctctacaaagaaaagt

SEQ ID NO: 417949 - DNA, 50 bp, Homo sapiens
tcagtcccatcactccaaggagagaagatccagatgtaccagctctcgag

SEQ ID NO: 417950 - DNA, 139 bp, Homo sapiens
gccgccaaaggtctggttcctgccgcccgtctgcatggcccactgcatccgcctggcgctcatccgcttccacgtcaagcgtctggtggaggctgcagaagaagcacacctgaaacatgaatttgatgcagacttacag

SEQ ID NO: 417951 - DNA, 90 bp, Homo sapiens
ctgggtgactcagcttcgagcttgtgccaaataccacatggaaatgaattctaagagcccagccctgaccctgctgctggtggacgaggc

SEQ ID NO: 417952 - DNA, 93 bp, Homo sapiens
gccagaggaagctggaggcgctgatccgagaccctcgctcccccatcaacgtggagagcttgctgtggctttctgataggaagaagagagcgc

SEQ ID NO: 417953 - DNA, 75 bp, Homo sapiens
agcccatgcgggaccagatcatccgcgtgaagcgtatgaagtattcagaacagaagaggaagaaaaaataaaatc

SEQ ID NO: 417954 - DNA, 74 bp, Homo sapiens
caagattcttctgaattgtgctgccttggccaaaagaggattattgcatcgagcttttagtgtcttcttattca

SEQ ID NO: 417955 - DNA, 101 bp, Homo sapiens
gagaagccgcccaaagaactgtggtctaccatcacggcaacagtgcgacgggcggccattacactacagacgtcttccagatcggtctgaatggctggctg

SEQ ID NO: 417956 - DNA, 101 bp, Homo sapiens
ccgcagccgagcggccgtgggcccgggcggcgggcggagacgtgggcgccctccccgccaaggcccgtgcgagctgcaagctttcttcctggtggcagatg

SEQ ID NO: 417957 - DNA, 100 bp, Homo sapiens
caacgccttccagctccggctcccgctgcctgcaccatgtccgccagagaagaagacgtaaagcaggctaccagcaattttgagaacttgcaaaaacagc

SEQ ID NO: 417958 - DNA, 135 bp, Homo sapiens
ggaggatggaagggcaggacgaggtgtcggcgcgggagcagcacttccacagccaagtgcgggagtccacggtcagcccaaggccaaccccactgtcactctgttcccgccctcctctgaggagctccaagccaa

SEQ ID NO: 417959 - DNA, 100 bp, Homo sapiens
tgatgaagtagtctatccaccacctgtggatcccaagaagctgattgattctttagacatttttgaaacgttggggttgttggagtggttggattttccc

SEQ ID NO: 417960 - DNA, 102 bp, Homo sapiens
tgtcctttcacaaccagctgggattccacaggcagttcaagtcaagcaactaacaagttggatggcttgaggactggtactaaaaggaaacgtgactgggag

SEQ ID NO: 417961 - DNA, 82 bp, Homo sapiens
atctgtaaagggtatctgatcaagccaacaacagtgacggaatgcctccatacatgttcaggattcaggtgatgtgattaca

SEQ ID NO: 417962 - DNA, 98 bp, Homo sapiens
ttgtccctgtttcgccacagttcctaccttatgagctcggttttcttatgcttataagagtggaacagggccatgaagcccccaggaggagaatcgag

SEQ ID NO: 417963 - DNA, 97 bp, Homo sapiens
tgaagtggatgctttatgtcctcgaagatcagaccgagaggtgtcatggagaaactccagctgggcccagagattctgcagcgggaaaatccaaggc

SEQ ID NO: 417964 - DNA, 90 bp, Homo sapiens
ccgggagatccgtagctcagacgccaggacatcccggaagctgggaaatggcaattaagttggaatatgcaaggttggttaagttggccc

SEQ ID NO: 417965 - DNA, 98 bp, Homo sapiens
aaagagcagtctcacatgaagaccaatttttacgtctagatttccatgcccatggaaggatcttaaatgtatttcggcattgggttgaacatcatttt

SEQ ID NO: 417966 - DNA, 50 bp, Homo sapiens
tcaagttttagctttggaagaatgcctaaacctgaagattatcggctata

SEQ ID NO: 417967 - DNA, 75 bp, Homo sapiens
cgcggagctggaatgactggcaacccaggttgtcggggtaccagttgggtctgctttaccttcaacagtgaagca

SEQ ID NO: 417968 - DNA, 82 bp, Homo sapiens
tgggtgggggaagctgagcgctgagaccaagggctaaagctgggaggtaactcaactggacccaaataaatcattattggag

SEQ ID NO: 417969 - DNA, 75 bp, Homo sapiens
cctggtgttttagaggataccttggtcccagagtcatcatgaagagttttgattcatcatggataatctgtcatc

SEQ ID NO: 417970 - DNA, 98 bp, Homo sapiens
cctggtgctgatcctccagctgctgaccctcttggtggtatctccatcaaggcttctgcaaatatggacctcatgagggctgacatgggaggagctgc

SEQ ID NO: 417971 - DNA, 75 bp, Homo sapiens
aacccaggacacaagaaactccttcacatctggaagaacttgaagatctcattcgtcggttcggatccaagccag

SEQ ID NO: 417972 - DNA, 92 bp, Homo sapiens
ggacacctaaaacccacagtcctccagtaaggtacctgccgtgggcagatctgagctttcttcttggacaccccatacccacagtcctccag

SEQ ID NO: 417973 - DNA, 98 bp, Homo sapiens
ggataatccaaagattcagctgacatttgaggctactctccaacaattagaagcaccttataacagcatctctgggaaaggacctggggctggtgagg

SEQ ID NO: 417974 - DNA, 75 bp, Homo sapiens
cttacaggaagcccttaagaactttaagggcttccagggctggctggagaccatggtgagttcggagagaaggga

SEQ ID NO: 417975 - DNA, 50 bp, Homo sapiens
tctcaactacaacatcgtttcaggctgcagggaagtcaacatttgtgaat

SEQ ID NO: 417976 - DNA, 99 bp, Homo sapiens
gcggggacctgacagcaggcagggaccgcttcaggtcctgggtcgatgtctgtctatggaataaagccccgtcagtcaccaggagactaaagtccatca

SEQ ID NO: 417977 - DNA, 96 bp, Homo sapiens
gaagacatacctgcccgctgtagatgagaaactcaggggcctttttatcattgatgataagggtattcttcggcagatcactgtaaatgacctccc

SEQ ID NO: 417978 - DNA, 98 bp, Homo sapiens
atcttctcactctttgacagtaaagagaaccggccaatcaggtctctaattaacagaagatggcaaagcccagccacagcagctatgtccttcagcag

SEQ ID NO: 417979 - DNA, 74 bp, Homo sapiens
gaacaagtggtactaggattatacattgtaagaggtgacaacgtcatcttatacaaaaccaagctgcctttcat

SEQ ID NO: 417980 - DNA, 100 bp, Homo sapiens
ccgagaacgaggaggagcggccaaagcagtacagctgggatcagcgcgagaagattgaagaatgtgtggtatgctctgacaagaaagcagctgttctttt

SEQ ID NO: 417981 - DNA, 90 bp, Homo sapiens
atattgtgagaatcaatttacgtttactcctggcttgggggcattaggaagcactggaggctcttcgggaactaatggatctaacgccac

SEQ ID NO: 417982 - DNA, 82 bp, Homo sapiens
gcggatctcaccgccgctcaggcaaaagactgttgaagtagagagcattttgcccagctcactcggattctttgctggcatg

SEQ ID NO: 417983 - DNA, 75 bp, Homo sapiens
ctttttgcttagcactgaaaattctggataatggtgaatgggaatttaaactttgggataatgagctgcagtatg

SEQ ID NO: 417984 - DNA, 75 bp, Homo sapiens
caatggggagcagaaggactcggacacagggggatatgagactttctactcggaatatcctgagtgttgcgtgga

SEQ ID NO: 417985 - DNA, 83 bp, Homo sapiens
cagaagtcgcgtgtctaggtgagtcgcggtgggtcctcgcttgcagttcagcgaccacggtagtctgggttggaggaggcaga

SEQ ID NO: 417986 - DNA, 74 bp, Homo sapiens
cggcagcgggtcttgggtcctccgagagcagcagcggcgtctgcgtcctgcacaactgtatctatgctgctggg

SEQ ID NO: 417987 - DNA, 83 bp, Homo sapiens
ggaacaacgtcggcgagcgggacaatgcagatcttcgtgaagactctgactggtaagaccatcaccctcgaggttgagcccag

SEQ ID NO: 417988 - DNA, 100 bp, Homo sapiens
gtgatggaccctcccacagccaggcctacagaaccagatctctcaccaggaaagactgatacagaacgatcgatacagaaaccacgctgccgccaccaca

SEQ ID NO: 417989 - DNA, 87 bp, Homo sapiens
ttgatgtctgacaacgtggatcgttgttttgaaacgaggactcacgaatggcagtggaagatacatctctgctgctccaggcgctga

SEQ ID NO: 417990 - DNA, 100 bp, Homo sapiens
caaggcccttctagttcagcctctccttggagtaggatgttaaagtctttagtgaagatgggacaagcaaagtggtggagattctagcagacatgacagc

SEQ ID NO: 417991 - DNA, 75 bp, Homo sapiens
aggagccattttgagcaatggggaacgctcacggactgtgtggtgttcctccaagaaaagctggttatattgaag

SEQ ID NO: 417992 - DNA, 97 bp, Homo sapiens
cctgctagagccatcaaggtcccagatcccctgtaagcagcttacagattcgctatgatcaaccaggcaacagcagtttggaaaatctgcctccagt

SEQ ID NO: 417993 - DNA, 100 bp, Homo sapiens
tggaggcacagaaactgttattcgggcattctacggagggagatattcttgagaggagaggagacgccgtgagcgggacgaccagatgtaccgagagcgg

SEQ ID NO: 417994 - DNA, 98 bp, Homo sapiens
atatgtccaacgccaaacaatcagtttatgatgggaggccggtattataacagaagtcacagcttggaggaaaccagtttgcactatttgatgaggaa

SEQ ID NO: 417995 - DNA, 75 bp, Homo sapiens
tgcgcctgtgcagccctcccaggtggagtacacggcagactctgatggtgttgctttgggagcagcagcatctac

SEQ ID NO: 417996 - DNA, 96 bp, Homo sapiens
gctgctctcagcccccaagctggttcccgctgtagcaaacgtccgcggcctctcagattgccatcacgaaagccaaagtggatttctccagtgtgg

SEQ ID NO: 417997 - DNA, 100 bp, Homo sapiens
gaaaactggtttgcagccatagaggattttacagccttgttaaatatagatcaccaaaattctcaagcaagtgcaaacggttagagcaggagcttcatca

SEQ ID NO: 417998 - DNA, 50 bp, Homo sapiens
gggaggtgccagggctgaaccaggtgcgtgcaggagctgcggcaggggct

SEQ ID NO: 417999 - DNA, 75 bp, Homo sapiens
cggggatgtatttggaacattatctggacagagcagtttttgcaagaaaggatcaaagtgaacggaaaagctggg

SEQ ID NO: 418000 - DNA, 98 bp, Homo sapiens
tcttatttagccggagtgagaagcaagaaggccctggacacagcaatatctctgggctttcacagcttggttctacagccattgggatccagacatca

SEQ ID NO: 418001 - DNA, 83 bp, Homo sapiens
gttcataaaagatatcgaggatttagccggaagctgtatgcaggagctattcttgaagtttgtggatgaaaattgggaaggtt

SEQ ID NO: 418002 - DNA, 82 bp, Homo sapiens
gaaggagcgaactgaagaggttctacacaattgggccgcttgaagatgccattgaagatgaggaagaagaatgtccatcaga

SEQ ID NO: 418003 - DNA, 99 bp, Homo sapiens
ctggagatgattaaaacggaatttacactgacagaagcagtggtcgaatccagtagaaaactggtcaaggaagctgtatgatctcgtgaaaccttgaga

SEQ ID NO: 418004 - DNA, 98 bp, Homo sapiens
tttttgtcatttgcaccagcttctttctccaggaaagatcaaaacgatgcactgcaaggtgaacacacagtgttcatcccctcaggaggacacagctt

SEQ ID NO: 418005 - DNA, 74 bp, Homo sapiens
tgggggtgtgcaaacccgagagaactgggtgacgatggcttaatagaatttaccacagttactttagagtctcc

SEQ ID NO: 418006 - DNA, 75 bp, Homo sapiens
accaggcactgagatggctttgggtggaatgggtaccacagaccatgtcatcgtcctggcgtccacgaaccgagc

SEQ ID NO: 418007 - DNA, 73 bp, Homo sapiens
gctttgtgaggagaccgcgaagtttgggcagaggggtcgggcgtcgcctaagagatggggtttcatcatgttg

SEQ ID NO: 418008 - DNA, 51 bp, Homo sapiens
caacgtggatcgttgttttgaaactttgcatttatgtcggatcctcagtga

SEQ ID NO: 418009 - DNA, 51 bp, Homo sapiens
ctcagagtcggtcggggaaggccacccaggctactgcagcactggggtgtc

SEQ ID NO: 418010 - DNA, 100 bp, Homo sapiens
tctgccaccatcctgggttgacaattctacacaaggagattgtttaacaaacaacagtgaagaattatcaaacagcacagtatatttccttaatctattt

SEQ ID NO: 418011 - DNA, 130 bp, Homo sapiens
ggtgtataagatcccagaattcagcaacgatgttaatggggaggccaaagagacacagcccatttttttaggaaacttggatttaactggccagaagcaggtattcaaagcagagaacaatccctgggtg

SEQ ID NO: 418012 - DNA, 96 bp, Homo sapiens
acctggatacctattctgacaatcacagttcaaggcagtgctaaagccacctacctgcctagggtagttaaaagacgagtgaatgctctcaaaaac

SEQ ID NO: 418013 - DNA, 100 bp, Homo sapiens
caggccgggcacctccgagcgcaaggacagcgcgaggtccgcgcagcccagcgcagccatttgatattcactgatggactccaaagaatcattaactcct

SEQ ID NO: 418014 - DNA, 75 bp, Homo sapiens
caagaatatgtaaagaaaaagtgttgagttggcttttagcgactgcatttgcctccagacttgtcagacacagtg

SEQ ID NO: 418015 - DNA, 83 bp, Homo sapiens
ggaggtgcagctcaacttctaccagttcctcggggtgcagcaggtggatctccttacgtagcagccaaaataaatgaagcaaa

SEQ ID NO: 418016 - DNA, 100 bp, Homo sapiens
ggaaggacattgttgctagactgcagactcagggcaagtgtccagagaatggctgggatgaaagtacacttgaactctttttacatgaacttgcaatcat

SEQ ID NO: 418017 - DNA, 100 bp, Homo sapiens
ctcctatgcaagggctattcctgaccaagaagatctaaagagaacgtctctgaaatcaagtccggatgaaggcaggcagtggttaaaggttcccttccac

SEQ ID NO: 418018 - DNA, 122 bp, Homo sapiens
gctgagggctggattccaggctttgtcctgggccacaccagtgcagtcatcgtggagaacccggacgggactctcaagagttattagaacggccttacataacatggacagagaagccagag

SEQ ID NO: 418019 - DNA, 100 bp, Homo sapiens
cgtcccaccgggcaggatgaaggcagagcgtgtggcatctccacctcaaggttcacagccatgaatgaaccacagtgcttctacaacgagtccattgcct

SEQ ID NO: 418020 - DNA, 50 bp, Homo sapiens
ggaactgcaggagcaagtggcgctgaccttcccctcctccaatgagtccc

SEQ ID NO: 418021 - DNA, 83 bp, Homo sapiens
tggtgcggcgagccgagcgaggcagctctgagccgcgcgcattactctactgactggcagagacaggagaggtagatgtccac

SEQ ID NO: 418022 - DNA, 80 bp, Homo sapiens
taacaagaggaacacggtagatctagctttatgaaggcaaagaacagatggagtttgaagaatccatgagacggctcttt

SEQ ID NO: 418023 - DNA, 101 bp, Homo sapiens
caggagcaggcgcctacatcctaactcgatttgctgtttgaagatgccgcatttggattggatgaattccaaattctgcttgcttgctttttaatattgat

SEQ ID NO: 418024 - DNA, 83 bp, Homo sapiens
aaagacacagctttcctcttcctctccaaaccacctcgaagcagggagagtcgcggttgctgatcgtggtgcttgagtagagc

SEQ ID NO: 418025 - DNA, 100 bp, Homo sapiens
ggctgtttgtctccttgcccgccaaagttctgcccagtccaacgactccacgcagctcgcccttgctgtcccccagcgagcagatcacagggtagtgggc

SEQ ID NO: 418026 - DNA, 100 bp, Homo sapiens
tccatcatgttttccaggctgatctcaaactcccacggtcaagcgatctgctggcctcggcctctcaagtgatccatcacaatgtgattccaacacaaaa

SEQ ID NO: 418027 - DNA, 90 bp, Homo sapiens
gcacagcgtttcttgcaagaatgggagatatgtgtcacaaagatgtctacacggaactgccagggaatggactcagtgatcaaacccctg

SEQ ID NO: 418028 - DNA, 100 bp, Homo sapiens
ttgttgtatcagtgggtgttgatgaagaaattgtttatgccaaatcaactgccttacagagatggcatagaatttgcttttaaagagcctaatccgcaag

SEQ ID NO: 418029 - DNA, 82 bp, Homo sapiens
agtgccctcaggggttccccaggaatatcgatacaacaccaacagatatcagttttagagaatgtggcgtggagaaattctc

SEQ ID NO: 418030 - DNA, 100 bp, Homo sapiens
cgaatctgcccacccctcctgtaacccagcctgtttcacttcttgactcggacagccagtgcagccccacgcggcagagcctcagcctgtcggaaggcga

SEQ ID NO: 418031 - DNA, 83 bp, Homo sapiens
tccactccgtcccccgcgggtctgctctgtgtgccatggacggggtcctcactgagcagcgagtcgtcccccgtgtcctctcc

SEQ ID NO: 418032 - DNA, 75 bp, Homo sapiens
cgttagccaatagtaacactagtagctttgcagtttggggagggctgttttccatgattgactgtagtatggttc

SEQ ID NO: 418033 - DNA, 98 bp, Homo sapiens
tcctcagcttcaagaacaaatgagacaacagctcccaactttcctccaacaaatggattaccgggccttggtgcatgagcgagatgaggcagcctatg

SEQ ID NO: 418034 - DNA, 100 bp, Homo sapiens
caagcccagacaatgccggtggaggaatttgtggctggctggatctctgcgcaagcaccaggaaatccgagccatgagaagtcagctcaaaaagatcgag

SEQ ID NO: 418035 - DNA, 75 bp, Homo sapiens
ctcggtgctgcagacggcgagacctcctgcacagggccgcccaataactccagtatacacggtggctccaaacgt

SEQ ID NO: 418036 - DNA, 83 bp, Homo sapiens
gacctgctgctgcttcaatgtccgcatcgcaaccaccgccctggccatctaccatgtgaccattgccctcttgaacatttacc

SEQ ID NO: 418037 - DNA, 87 bp, Homo sapiens
atgggggcgcaggaccggccgcagtgccacttcgacatcgagatcaaccgggagccggtaccccgagattttccttatgaagaggac

SEQ ID NO: 418038 - DNA, 100 bp, Homo sapiens
agatggcatcatttttgccctcaaaagaaatggcaggaccttgcctcatagtattcgatcagattcagaagatatctgtttatttacgaaggatgaaccc

SEQ ID NO: 418039 - DNA, 75 bp, Homo sapiens
taaagctgctgtttttgaagagcttgaactcagtgaaaatagaatctttggaggtctggacatgttagctgaaaa

SEQ ID NO: 418040 - DNA, 98 bp, Homo sapiens
caggattctggaaccgtggagacaccgagaaaccatgagtgtaaggttaccccagagtatagacagtacaagttgtgcaaagtgaggaagattactgt

SEQ ID NO: 418041 - DNA, 75 bp, Homo sapiens
gagcctctctacaatgctgtggcaaattatgcgcacagccatgaagtataacctgggattggacctgagaacagc

SEQ ID NO: 418042 - DNA, 101 bp, Homo sapiens
ccagcgagccagcgagccgccgacccgccgagcaaaatggagcccagtttcctccaattgcagcacaagaccttccttttgttctaaaggctggctacctt

SEQ ID NO: 418043 - DNA, 105 bp, Homo sapiens
gttctctgtgttctcagaagacgttctgtatttcagcttcctgctatgtgccctctttgttcctaaagatatttggagttcttacaacatggcagacattgacaa

SEQ ID NO: 418044 - DNA, 82 bp, Homo sapiens
gaaccttcgaccttggacttctcagcctccagaatgctcaaactggaggattataaggatcgcctgaaaagtggagagcatc

SEQ ID NO: 418045 - DNA, 100 bp, Homo sapiens
gggctctggagcagtttgccactgtggtggaggccaagctgataaaacacaagaaggggattgtcaagtggaagtttccagagaaaacagccatcaaaga

SEQ ID NO: 418046 - DNA, 100 bp, Homo sapiens
ttgtgcttgcatttgccgaagcttatatcccaccattgccacgggcattctccatctccttgcaggagggccctcctggacccgggagcggaccctggtg

SEQ ID NO: 418047 - DNA, 100 bp, Homo sapiens
cagagacagctcaacacggcacttccacagtgtaaacaggaacatcgataagtagtgtaaaaacttgcacaatgaaatccgaagccaaggatggagagga

SEQ ID NO: 418048 - DNA, 50 bp, Homo sapiens
aacgggacagacagtataatggcaaaacaagctatcgatcagggaagatc

SEQ ID NO: 418049 - DNA, 100 bp, Homo sapiens
catcattggacctggtattgtgctttccaaccctgaccgaccatgtcaccagattttctccaagttcggcacagtgttgaagatcatcaccttcaccaag

SEQ ID NO: 418050 - DNA, 50 bp, Homo sapiens
gatctgactgaagattttacagcagaggcagaggaggtggacacggtgga

SEQ ID NO: 418051 - DNA, 78 bp, Homo sapiens
gcccgtgccctcccgctcggccccgccagcagcactgtggaggccgtcctcggctgctctttggcgtaaattgcaatc

SEQ ID NO: 418052 - DNA, 99 bp, Homo sapiens
aaagccgcgggggcccgggcccggattactatctcaaaaactatgaggatgggcaactccaacaacattgccaccgtggacatctccgcaggcttcgtg

SEQ ID NO: 418053 - DNA, 80 bp, Homo sapiens
atagtaatgagtttgagtgggaagattcagaaacacgagttgatctgaaatttatgtacctggatcctccaagagatcat

SEQ ID NO: 418054 - DNA, 100 bp, Homo sapiens
gacatagaggccaaccaacctttggaggaacggaaaacagttcttccttcaaagcatgcagtacctgaagtaatagaagactttctctgcaatttcttga

SEQ ID NO: 418055 - DNA, 74 bp, Homo sapiens
taacctgaacactgaccagctctcagttgcacttctcaaagagccaacacagatctatagatttcttcgaactc

SEQ ID NO: 418056 - DNA, 83 bp, Homo sapiens
gagtgtgctagcatcaatcgcatttatggattctatgatgaatgctatcaagtactagctccaactgcctattatgatcagac

SEQ ID NO: 418057 - DNA, 75 bp, Homo sapiens
ccgcctcgtctccgctcctgggggaccgcaggtttggttgggatgttccagtaattctgagaaattcagaagaga

SEQ ID NO: 418058 - DNA, 147 bp, Homo sapiens
ggcctccggtcccaacttcgcttctctgctgaccctctctcgtcgccgctgccgccgccgcagctgccaaaatcaggaaaaccgaaagcgccatggctctagtcgaagtgtagtagatatggatttagatgatacagatgatggtga

SEQ ID NO: 418059 - DNA, 100 bp, Homo sapiens
ctccccggggcctggccgcgcgctgctgtgttctggaagggctcattgtacagtcaaggcggcagtcctggaaagacaagcatcatgcctctgaccagtg

SEQ ID NO: 418060 - DNA, 89 bp, Homo sapiens
attatgatcaaggggggcgtatggaggaataccgagaataccctctaccatctgctttggtcagggtgccgctcgaggatttaaaagca

SEQ ID NO: 418061 - DNA, 104 bp, Homo sapiens
tggatggctgggagttcagtcaggacgtctacctgtccaccattgtgaccgagattcttctgctgatcgacattgagcagtcctacatcaacacgaaccatgag

SEQ ID NO: 418062 - DNA, 74 bp, Homo sapiens
cgcctgcccagcaaatgcgaagaatggctgttgatggtgggtgtggggacactggagactgggaaggtcgctgg

SEQ ID NO: 418063 - DNA, 82 bp, Homo sapiens
cgagttttgagcagcctcggttttcccaccacctccaaatcatgcaagacacaggcttccccgggcgctgcctggacaggcc

SEQ ID NO: 418064 - DNA, 100 bp, Homo sapiens
cgggcggccgggagccatggagcgcggccctggggcccgggggcgcgggccggggtggaaggtgctcgggtcttcggggcactgggtcccatcggtccct

SEQ ID NO: 418065 - DNA, 100 bp, Homo sapiens
ttgcaacaacaccaaacgccgcttttaactggaatacctttcttcaacgctctgatttctctatgaatcatcatcaagaactctgggagaacttttgaat

SEQ ID NO: 418066 - DNA, 74 bp, Homo sapiens
tccgagtcccaggtcaagagcctctgcgagaagaaaattacttggggcacacagcaaaaaatgctgtgatcaca

SEQ ID NO: 418067 - DNA, 100 bp, Homo sapiens
cgacctcagccccatcacggtcaagtacacagagagacggcagccgctgtacagattcatcaccacgaatggagatgtatgcatttcgattcttcatccg

SEQ ID NO: 418068 - DNA, 74 bp, Homo sapiens
gaaaaaaatgcattatgtggaccctgaccatgtaaaggagcatcgtgcatcaagtcaccagggtggtccattca

SEQ ID NO: 418069 - DNA, 96 bp, Homo sapiens
ccttctaggtgtcaacaacctggaattcaattggctcttgccttatgaagatgagaatgtgcctactgctcctgatcctccaagtcaacatttacg

SEQ ID NO: 418070 - DNA, 75 bp, Homo sapiens
cgtgctcaagagggactggacggctgagctgggcatccgacacgtactgctggtattgttgcagcatctggcagt

SEQ ID NO: 418071 - DNA, 82 bp, Homo sapiens
ccggccctctggtacagaagatgtcgtccgagtatatgcagaagcagactcacaactaaacccacagttcagccctcccctt

SEQ ID NO: 418072 - DNA, 90 bp, Homo sapiens
tgttacggctcggaggcaccaaggatacgggaagaagaaatggctggtgatctttcagcaggtttcttcatggaggaacttaatacatac

SEQ ID NO: 418073 - DNA, 75 bp, Homo sapiens
ctcctcgtgggcatccacctcctcaagggccatgatccaaaggaaccagagcagttgagaaaactgtttattggt

SEQ ID NO: 418074 - DNA, 101 bp, Homo sapiens
gcaacttttgttaccaaaggaatcaggccaaatttgagtttcatcatggtgactatgaaaaacagtttctgcatgtactgagccgcaaggacaagactgga

SEQ ID NO: 418075 - DNA, 101 bp, Homo sapiens
gcaaggctggagccgcagcgggagcccccggtgctggagaatctggtaaaagcaccattgtgaagcagatgaggatcctgcatgttaatgggtttaatgga

SEQ ID NO: 418076 - DNA, 83 bp, Homo sapiens
caacgacgttccatctgtggaaggacctaccaaccagctgaactagatgcagagcacgcccagaaggtcctggaaatggagca

SEQ ID NO: 418077 - DNA, 74 bp, Homo sapiens
ctaatgtgagtgaggaagtgactgtatgtggactgtggagaaaacgccttctggcaagaggggagagcctctgg

SEQ ID NO: 418078 - DNA, 100 bp, Homo sapiens
agggtgcagcagtgacaagcaacagtgctggtgtcgccaggctctggagcagttccatcagctcagccaggtcttgaatgtgggtgccggcaggacaggc

SEQ ID NO: 418079 - DNA, 100 bp, Homo sapiens
atgaccacaaacagccatcaagaagccgtcagacgttgaaagtcagagagcatagtgtgttgggaccttatgtcgacggactttctaaactggctgtcac

SEQ ID NO: 418080 - DNA, 83 bp, Homo sapiens
cttagctgtgctcgcgctactctctctttctggcctggaggctatccagcgtttggttttcctaaacaaatcctttcacaggg

SEQ ID NO: 418081 - DNA, 100 bp, Homo sapiens
ctggccaagggctccacacaccaagaccaagcattttgaaagcgaagcagaagccgtagaatcagcggcgagcctgttgaaagaacccacaggtgcattt

SEQ ID NO: 418082 - DNA, 82 bp, Homo sapiens
gagtttatctggagtgaggtggccggttcttggtgggatctgagcagccgaacgaccctgtcaccaacatttgccaagcagc

SEQ ID NO: 418083 - DNA, 83 bp, Homo sapiens
ctgttgaacttgtaaaatcttggaataattctcttcttatgaaggttgctgctgactcagccattctagaagttcttcagtcc

SEQ ID NO: 418084 - DNA, 90 bp, Homo sapiens
aagccgtcgctgccctgcccccgcggacaaacataaattgcagagattcctgactgctgacatggccctggtggcgacagtctatgcgcc

SEQ ID NO: 418085 - DNA, 83 bp, Homo sapiens
caagccgctggcagccgcggatctcaccgccgctcaggtttccctgaaacctgggctcttgaagacgcatcactggagcagat

SEQ ID NO: 418086 - DNA, 82 bp, Homo sapiens
catactatccgtttgttcaggaaccaccagtgacagaaggtaaataccggattgtatacgtaactccagaatactgttcagg

SEQ ID NO: 418087 - DNA, 50 bp, Homo sapiens
cctcccgagtagctgagaccacaggtgcatgccaccacacccagctaatt

SEQ ID NO: 418088 - DNA, 96 bp, Homo sapiens
acttctggggtccgctctgggactgacactggcagatccatcgctgacatctgaaatgtttgaagcagatcttgagaaggcattgttactaagtaa

SEQ ID NO: 418089 - DNA, 75 bp, Homo sapiens
tctttagctgaaatacttctgaaggtgcacatccagaatgccacgctcgcaggaggggtggccgtgggtaccgct

SEQ ID NO: 418090 - DNA, 75 bp, Homo sapiens
tcgtgatatcccaccccttacaggtactccaaagattcaggtttactcacgtcatccagcagagaatggaaagtc

SEQ ID NO: 418091 - DNA, 100 bp, Homo sapiens
tgcctgtcgtcgtggtggccaacaagcagatatgtcttctccgactactatgaagaagcctgaaaagccattgttcagctctgcatctccacaggattct

SEQ ID NO: 418092 - DNA, 80 bp, Homo sapiens
gtgaaatcctaagtggattgcagttgggagactttctcattaagacccctccacgtcgctgcgcgcaatggcttaaaggt

SEQ ID NO: 418093 - DNA, 88 bp, Homo sapiens
ggagaagctgggattggagattccacccaaacttgctggtcactgggaggtccttatgtcgtcagaagatcgagaagctcaggaggat

SEQ ID NO: 418094 - DNA, 83 bp, Homo sapiens
gcctcgtgggcggcaaggacttcgagcagcctctcgccatttcccgggaccatcagcacgtgcccatcgacatccagaccagc

SEQ ID NO: 418095 - DNA, 100 bp, Homo sapiens
gtggaacgagactgcaatggggacacgccaaacctgagtttctacagaaatgagatccgcttcctgcccaacgactggggcagcacctactccgtgtcag

SEQ ID NO: 418096 - DNA, 100 bp, Homo sapiens
cttagaagctaccgagttaccctaagaaagattacgtgtgaaaatgaacttgtgcaaacccaaccccatgctgataatccatctaatactgtcacttcag

SEQ ID NO: 418097 - DNA, 99 bp, Homo sapiens
cattgctctcgccatggctctcagcgatgctgacgtgcaaaagcaggttagagccacagctgaaacaactacaaacaaaatatgatgaacttaaagaga

SEQ ID NO: 418098 - DNA, 74 bp, Homo sapiens
acaaatgtacccccagtacacttactactatcctcattatctccaaaccaagatgagttttgatcatcctgaga

SEQ ID NO: 418099 - DNA, 82 bp, Homo sapiens
aggtgttcgagaacgaccccgagacgattattttcgaaataccagtatttcgactccagggggatgttcatttctatagtat

SEQ ID NO: 418100 - DNA, 90 bp, Homo sapiens
aggagaagccgcccaaagaactgacagttcagtttgttcagggaatttttgttgaaaaatatgacccaacgatagaagattcctacagaa

SEQ ID NO: 418101 - DNA, 80 bp, Homo sapiens
gggctccggctggtctgtggtgagcccaagccagtgacctggaaaaaatccacctggatgagaagtctttccgttggttg

SEQ ID NO: 418102 - DNA, 100 bp, Homo sapiens
gctctaaagcccttcacagcaagacccaggaagccgcgggcaaactcagactcgaaggcgccttggtgctgaattggggaagtctgttgtatatcaagag

SEQ ID NO: 418103 - DNA, 75 bp, Homo sapiens
cgcggagggtcgaggcggcgcggcctgaggcacctgaatggacagaagaggacctcagccaactgacaagaagta

SEQ ID NO: 418104 - DNA, 74 bp, Homo sapiens
gaatgtacagatggcagatctcatcatttgaagaacagggaggccacacggttacggagccgatggctgacgta

SEQ ID NO: 418105 - DNA, 82 bp, Homo sapiens
aacgcatcaaaatcgagagtcttctctacagaattgcctcatttttgcaactggaaattcgaaatgagtcccatgactatcc

SEQ ID NO: 418106 - DNA, 50 bp, Homo sapiens
gccccccgtatgaattgagggaagctacaagcaggggggtgtcgcctctg

SEQ ID NO: 418107 - DNA, 96 bp, Homo sapiens
gaatgctggaaaaaatactatgagatagtcatgctctgtggattactgaaaatgtgggaagatttacgcctccggccataggaaaaggatacagag

SEQ ID NO: 418108 - DNA, 100 bp, Homo sapiens
ggcgggcactggtggaaggcgctgattcccagttctcaggtgccaggggagagcaagaaacagtggaaaccagccctggttgtgctgactgagaaagacc

SEQ ID NO: 418109 - DNA, 95 bp, Homo sapiens
atacaaatcacacgcataatggatgaaaggaaccgacagattgagaggatccagaatccagatctctggaatagctaccaggcaaagaaaaaaac

SEQ ID NO: 418110 - DNA, 100 bp, Homo sapiens
ccgagaagtacttaaaaaaacattggaattctgcttatctaggatggtgccatgacaatggtgtgaactacaagattggagagaagtgggaccgtcaggg

SEQ ID NO: 418111 - DNA, 83 bp, Homo sapiens
ctggaagccgtggctgcgctctcttccctctgctgggcgtcctgttcttccaggctacatccgatactcccagatctgtgcaa

SEQ ID NO: 418112 - DNA, 75 bp, Homo sapiens
tgggattcagtcactgacttggagccgctcgggggaagtcccggcaacgcggtaaaaatattgcttcggtgggtg

SEQ ID NO: 418113 - DNA, 100 bp, Homo sapiens
cttgactgtgttcatcagcttcagaggcaatttccttgctcttttgagttcaatgaagcattccttgtctgagctctttctactcggagctgatgaaagg

SEQ ID NO: 418114 - DNA, 101 bp, Homo sapiens
gccttctctcgtctggtttagaaggaatcgccgggggaatacaggccaaactacaattcccgagagactgtgccctgtccacggtgcctcctgcatgtcct

SEQ ID NO: 418115 - DNA, 100 bp, Homo sapiens
gcagtgcagaggtagcgaagtgtcccaagaacatggaagttgcatgtgccatgggaggcggagtctctgaggacatcctggctgtgcctcggcggctctg

SEQ ID NO: 418116 - DNA, 50 bp, Homo sapiens
tgcagcctgccagctgttcaagctgcaagctttcttcctggtggcagatg

SEQ ID NO: 418117 - DNA, 100 bp, Homo sapiens
attacccaaatccggttggagcatgacgtgaacatccagtttcctgataaggacgatgggaaccaggaggaagagctgcgcaaaggtggagaccccaaat

SEQ ID NO: 418118 - DNA, 88 bp, Homo sapiens
cacttttcttcagaagctggtcgccgccggcaggcatcatgacggtgatgtcagctctgtcggtggccccctccaaggcccgcgagta

SEQ ID NO: 418119 - DNA, 75 bp, Homo sapiens
gcggatcagagagtatttaaagggcaccatgactcctgtgaggatgcagcactccctggcaggtcagacctatgc

SEQ ID NO: 418120 - DNA, 87 bp, Homo sapiens
aaatggaagcaggaagtcctggtgttcctccaagaaaagctggttatattgaagacctggttttgatgctgcctcagaacatttggg

SEQ ID NO: 418121 - DNA, 100 bp, Homo sapiens
cagtgatgtccgggccagcataggtgctgggttcatttaccctttggtcggaacggctggaaaacattttcagacactgtgctttatcctgaaaggattt

SEQ ID NO: 418122 - DNA, 83 bp, Homo sapiens
caaactcgaagactggcatgaggtgtcagaacctcaaagataacaccattggcatcgaggagaatgcagtctccctgacctgt

SEQ ID NO: 418123 - DNA, 75 bp, Homo sapiens
ggccttctgtggattggggaaaaatccagagaccccctgaagattcgggaagagacttccaccttaggatagtgt

SEQ ID NO: 418124 - DNA, 133 bp, Homo sapiens
tgaaacacagtcgaaaagaatactgtgaattatgcaagcacagatttgcttttacaccaagaattggtggtaaagaccctgattgtagcagaacctcatgtcctgcatgcctatcgaatgtgtagacctggtc

SEQ ID NO: 418125 - DNA, 83 bp, Homo sapiens
gagtctgcttcgtgggatggagtggtcagcttggcatcgcggctgtgacaatgcagatcttcgtgaagactctgactggtaag

SEQ ID NO: 418126 - DNA, 80 bp, Homo sapiens
gatcccccgtctgaggactgacctttttccaggttgttggatggatgtatgggaactaatgtcgcaggaatgcagggatg

SEQ ID NO: 418127 - DNA, 75 bp, Homo sapiens
cattccaatgtgactgtccactacatttcactggccgcttctgtgaaaaaggcaaagcgaaggctggagctagga

SEQ ID NO: 418128 - DNA, 74 bp, Homo sapiens
tggcccagcatttaccacacaatggcctatgtagccatagctgtaacgtataaccatgatgggtcttatagcat

SEQ ID NO: 418129 - DNA, 100 bp, Homo sapiens
gatacattttgctgaacaaatagcaaaggaggatttgacagctaaggatattgaagaaattattgatgagctcaaggctggcaaaatcccaaaaccaggg

SEQ ID NO: 418130 - DNA, 98 bp, Homo sapiens
caggcgcttgagctcgagcgacggcgctggcggagacgccggctgctcctcccctccccgccggaatatcgttcagaaaaatctcttgaagaattgag

SEQ ID NO: 418131 - DNA, 100 bp, Homo sapiens
gccgcaagtacccgtccatcatagtcaactgcgtggaagagaagaatgcatacacagccacagctatcaacagcaccaacttctgcacctcagcaaagga

SEQ ID NO: 418132 - DNA, 100 bp, Homo sapiens
catcaagcagcaggtccttaagtaagactttgaccccgacgcaggcttcagtgattgccgcggatcagaagcctgagcactttggctcgagacaattaag

SEQ ID NO: 418133 - DNA, 75 bp, Homo sapiens
cggaggatgagcctgcagagcgcgcagtacctccggcaccagaagtcatcagaatgcaagataaaaatccataca

SEQ ID NO: 418134 - DNA, 82 bp, Homo sapiens
tatgctttctgatgatgcccgtctcttcacagaggctagagtaccgtggcacaatctcagctcattgcaacctctgcttcct

SEQ ID NO: 418135 - DNA, 100 bp, Homo sapiens
tttgccaacgtgctcaccatggagcccatcgtgctgcagtacgtgcctcatgatcgcttcaacaagaaatatgagattacggagcagcgcaagattgatc

SEQ ID NO: 418136 - DNA, 78 bp, Homo sapiens
aggctccgggctgaagattgcttctcttctctcctccaaggggcaagattcttgccaagagaattaatgtgcgtattg

SEQ ID NO: 418137 - DNA, 75 bp, Homo sapiens
gagccccgcgtttcagccctagggaaggtttgtcctggttgtggtcaagactggatgatgtaactggctctctag

SEQ ID NO: 418138 - DNA, 75 bp, Homo sapiens
gtctgctggccagccaagatgagacaaagccttgcatccaagggtccttaagccgttgtcttcattgattcatct

SEQ ID NO: 418139 - DNA, 90 bp, Homo sapiens
cagtggctctacccctgctcctgcccgaccctgccgcctccctcacggagccagcggccggtacaacacctcaggtattgagccccacta

SEQ ID NO: 418140 - DNA, 50 bp, Homo sapiens
tgtgttactccattgctgaggagtggaatttggataaagagagggcagtg

SEQ ID NO: 418141 - DNA, 100 bp, Homo sapiens
agaaggtctctggagacatcttcagcagttccagggtcacccccgagaggacaacaggcatctggaagtgctctctcgccactctgggtgctttactgtc

SEQ ID NO: 418142 - DNA, 107 bp, Homo sapiens
acgagcaccatgtcgaatctgagcaaaggcacgggcagccggaaggacaccaagatgcggatccgggcctttccgccgttggacataccagatggtcgaagagctcc

SEQ ID NO: 418143 - DNA, 75 bp, Homo sapiens
cagagtaaagctgctggacaacaccatggaaatatttgacattgagtttgcctatctggggcgcctggctcacga

SEQ ID NO: 418144 - DNA, 100 bp, Homo sapiens
aaatgttatgcagctcagcaaggtgaagaccctgagacagggaagacctgtctgctgaaagccatgctcaacctgcacgacggacagaacaccaccatcc

SEQ ID NO: 418145 - DNA, 75 bp, Homo sapiens
ccctggacacagcaatatctctgggctttcacaggttgtaggtcataaagaaggtctggatgttatggagagagc

SEQ ID NO: 418146 - DNA, 100 bp, Homo sapiens
aaaaccgagctgctgggagaagtaagactttgaccccgacgcaggcttcagtgattgccgcggatcagaagcctgagcactttggctcgagacaattaag

SEQ ID NO: 418147 - DNA, 73 bp, Homo sapiens
ggtgtactcctttctattttaaagagccaagcctcagagaggagtttgcctggcgtgatcctgagttgcctga

SEQ ID NO: 418148 - DNA, 74 bp, Homo sapiens
ttggataaaccatgtatcacattgattgtagagattcttcaaacacctaaatgaaagtgataaattcaaaactg

SEQ ID NO: 418149 - DNA, 90 bp, Homo sapiens
ccgcggccggggcaggagcgcagctctgaacagcaacatggggtgcaaagtcctgctcaacattgggcagcagatgctgcggcggaaggt

SEQ ID NO: 418150 - DNA, 101 bp, Homo sapiens
gagaactatagcaatctggttttcttggacaaagaaacagccttggtataatagcacgttagcatcaagacgaaaacgacttactgctcattttgaagact

SEQ ID NO: 418151 - DNA, 97 bp, Homo sapiens
tgaagataggatcaagatggccatgtggcaggtttgcagagcagtctctgatgaagaatgccataaaaacatcggaggagtcatggattgaacagca

SEQ ID NO: 418152 - DNA, 100 bp, Homo sapiens
aagagcaagcctaactcaagccattggcacacaggttctggaagcgctcgcgggccgtcaagccacgctgcgagctctgcttaggaacgtccagccgccc

SEQ ID NO: 418153 - DNA, 103 bp, Homo sapiens
aaatccccctgaaggtaccgcggacctcgccccgggacagcgaggagctgagggaccctctggagcagatccgcagggacatccgagacttccggtctagcgc

SEQ ID NO: 418154 - DNA, 75 bp, Homo sapiens
aattgtccaagccctgaatgccaatgtgtggtccaatgtagtgatgaagaatgcttccttcaaaatgtctactgt

SEQ ID NO: 418155 - DNA, 82 bp, Homo sapiens
tttggaaccttcgggcaaacaggattccacagtgtcctctggaaaatgttgtcatttacgtgctgaagcatattgacttgag

SEQ ID NO: 418156 - DNA, 100 bp, Homo sapiens
ctcgcgctactctctctttctggcctggaggctatccagcaaatggtggagtcaatgaagaaagtagcagggatggatgtggagctgacagttgaagaaa

SEQ ID NO: 418157 - DNA, 83 bp, Homo sapiens
gttcgaactacttccaggtgaatccaacaagatcccccgtctgaggactgacctttttccgtgccatggatgtagctttggga

SEQ ID NO: 418158 - DNA, 96 bp, Homo sapiens
tggagcacgactcatttctgtttgttactttgagtctgaaaatgactgtacgaatgtaaagttatcgcagaaaaatctcatcaggaatgaagaagg

SEQ ID NO: 418159 - DNA, 103 bp, Homo sapiens
gagcggccaacatggcggaacgcaggagacacaagaagcggatccagacaatgcagatcttcgtgaagactctgactggtaagaccatcaccctcgaggttga

SEQ ID NO: 418160 - DNA, 83 bp, Homo sapiens
attgagaacaatatagatttgcaggtatctctgcattagccagattggacatatgtaaagggacatcagtatatctggatcat

SEQ ID NO: 418161 - DNA, 82 bp, Homo sapiens
gaatccatcgagagtgagattaggcgagaacgagagaggcagacaaacccatcagccatgctggactacaagcaacaacaaa

SEQ ID NO: 418162 - DNA, 83 bp, Homo sapiens
aaaaatgacatccagcgacaaggactttagctgttccatttcctccaagtcaccggcttacagcaaaagaagtgtttgataat

SEQ ID NO: 418163 - DNA, 100 bp, Homo sapiens
ggtcctactacgcgtacgtggtggagctctgcgtgttggagtcattgggcgaagctgggccatgctgtttgccagtggaggcttccaggtgaaactctat

SEQ ID NO: 418164 - DNA, 75 bp, Homo sapiens
aagagcaacatctttcctcaccccaaggaaatgccacaatcattttctgcaatcacattaagtaacacagagatg

SEQ ID NO: 418165 - DNA, 100 bp, Homo sapiens
gaacagattgttcctaaaccagaagaggaggttgcccagaagaaaaagagacaaggtctcaccatgttgcccagaatggacccgaactcctgagctcaag

SEQ ID NO: 418166 - DNA, 51 bp, Homo sapiens
tcctggttgagctcaaagttattttacattcctgcttgaatttcttgaaac

SEQ ID NO: 418167 - DNA, 74 bp, Homo sapiens
ttactgtcaagacatttcttcggcattctgcaacaggctgttaccttctcctctcaaggatgcagtggaagtct

SEQ ID NO: 418168 - DNA, 82 bp, Homo sapiens
gataaccggaaaatcacacctcttatgtcagcatttcgcaagaacctgatgaccacctcacagtggctgagtcactgaagag

SEQ ID NO: 418169 - DNA, 75 bp, Homo sapiens
cccggaccctggaagagaagagggtggctaatgattaagaatttggactcatatcaagatgctctgaagaagaac

SEQ ID NO: 418170 - DNA, 80 bp, Homo sapiens
gttcccttcacggagaaagattttgaacaatgcagatcttcgtgaagactctgactggtaagaccatcaccctcgaggtt

SEQ ID NO: 418171 - DNA, 98 bp, Homo sapiens
ggggcggccggcggcggccatgggagatatcccagccgtgggcctcagctcctggaagcttagaccatgctcagcctccaagcagccttgtcatcgac

SEQ ID NO: 418172 - DNA, 100 bp, Homo sapiens
caggagatggcatgccagtaggtcctgtaccaccagggttctttcagtacctggagtagaacagaaaaattattatgtctgtgttcccttgggactcatt

SEQ ID NO: 418173 - DNA, 100 bp, Homo sapiens
gccaaggtgttcggtccttccgaggaagctaaggccgcgttggggtgagaccctcacttcatccgcaaaaattggatgcagagtttcagaaaagactgga

SEQ ID NO: 418174 - DNA, 90 bp, Homo sapiens
tgcgagtcttcggagcgaccccggcagggccgcgatgggcctcttggaacattggtgtgttcatctgcattcgatgtgctggaatccaca

SEQ ID NO: 418175 - DNA, 75 bp, Homo sapiens
gctgtcaggcggaagctgcattcatggaagaagagtgtgtggacactccaaaggcagcagaacttgctgaattca

SEQ ID NO: 418176 - DNA, 76 bp, Homo sapiens
tatgcactttactacaaagatggacttctctgtacagggaactctaatgatccaggacaaagaagttaccctggag

SEQ ID NO: 418177 - DNA, 74 bp, Homo sapiens
tggcctggagtccgcggctggccgcgtgagtagagcgacaccacaggcaagctgggctttgaggaattcaagta

SEQ ID NO: 418178 - DNA, 100 bp, Homo sapiens
ctttgtggttgatgttcggcgctgtgaggagctggagaagaccttcagtgtctcaaaggctgttgagcacatcaataaaactattgcgcctgccctggtt

SEQ ID NO: 418179 - DNA, 83 bp, Homo sapiens
ctttggggagcctaagtcctgcccgtggaccgggagcccgtggaccgggagccggtggtgtgccaccccgacctggaggagcg

SEQ ID NO: 418180 - DNA, 51 bp, Homo sapiens
tcctcatgtggggggtaaaccactcggataccgcccaccaccattttcaga

SEQ ID NO: 418181 - DNA, 100 bp, Homo sapiens
attgaactcatccggcagaataagagactggacgctgtgagtggtggtatctccatcaaggcttctgcaaatatggacctcatgagggctgacatgggag

SEQ ID NO: 418182 - DNA, 82 bp, Homo sapiens
ggctcctgccctctcgctttccctctcgcgtctctggctgcagagcataaatgcccagtggatgagcgggagcaactggaag

SEQ ID NO: 418183 - DNA, 97 bp, Homo sapiens
gcagcccgcaccggacaacttgcgagccatggggctggcggatgcgtcggggggactcgggcaagggtgccgaagatagacaagaggcacacagaga

SEQ ID NO: 418184 - DNA, 82 bp, Homo sapiens
catttccaagatgatgtctttaatgaaaagggatggaactacattcttgagacagtgtttaagaatgaaagcctcaacgcag

SEQ ID NO: 418185 - DNA, 100 bp, Homo sapiens
aactgttgaactcagctgcctgtagggcagctgcaatgactctccgcacggtattattgtcattgcaagcactattggcagctgcagagccagatgatcc

SEQ ID NO: 418186 - DNA, 100 bp, Homo sapiens
ggcttttgctctgtcaggctggtggcgttttggtgtcttcgtttgttatggccgctgctgtcgctatggagacaggaagaggagatcccagaactggaga

SEQ ID NO: 418187 - DNA, 90 bp, Homo sapiens
cctgatgccctttctcctcaaccagtgtggatcccttctctattacctcaccttggcatcgacagggtctaaaattcccaggactccaca

SEQ ID NO: 418188 - DNA, 75 bp, Homo sapiens
ctgagtgcggatttctgctatgatgacaggtcctagcagaagatgtgactcagactgcctctgggtggggctggc

SEQ ID NO: 418189 - DNA, 83 bp, Homo sapiens
aaaatggacaacctgctgcgggatcccaaatcggaagtgaattcggattgtttgctggtgtgtcttcactgggatttatattt

SEQ ID NO: 418190 - DNA, 46 bp, Homo sapiens
gcaggtccttcccacagaagacaatgtgtatatctcatgattgata

SEQ ID NO: 418191 - DNA, 100 bp, Homo sapiens
tcgcggagctggaatgactggcaacccaggaacaagctgaaagctggatacctaatgtcagtggagtcttctgagtgtttcctggaagaagtcgggtccc

SEQ ID NO: 418192 - DNA, 74 bp, Homo sapiens
acagacccagtctctgccaatgctcaagtaaagctctttgtgacagggcttttcagcttaaatcaagatattcc

SEQ ID NO: 418193 - DNA, 99 bp, Homo sapiens
ctgcgctgcagccaccgccgcggttgatactactttgaccttccgagtgcagtgtgtccatgttagctgtagaagagtatgaggagatgcaagtaaacc

SEQ ID NO: 418194 - DNA, 100 bp, Homo sapiens
cacagcgggactcttggcctgtccctcacatccgatgcaccctttttgtcagattatcaggatgaggattggattcttcaaaagaccactgaaaaagaaa

SEQ ID NO: 418195 - DNA, 101 bp, Homo sapiens
ctttaatgtgaccacactccagaaggagctgtatgactttgctaaggaaaatataatggatgatgatgagatcattgagactgaaaatatgatggaccgaa

SEQ ID NO: 418196 - DNA, 80 bp, Homo sapiens
gcgcctaccccaaactcatggaaattgatcagagagcagagcaactctccaacacactgaaaaaaattgcagccagtgag

SEQ ID NO: 418197 - DNA, 125 bp, Homo sapiens
caggcacccgggcgccgggcctcccagccgacatgtctctagtggcggaagccttcgtctcccagattgcaggaataatgtatttgtggccttggacatgaggcagtcagtcctctgttgctgtt

SEQ ID NO: 418198 - DNA, 82 bp, Homo sapiens
tgctagcactgcattaagtgatgcatacaggttttgcacactagggaccaagaagccctcggggacactgctgagaaaagac

SEQ ID NO: 418199 - DNA, 100 bp, Homo sapiens
ctccctacccagcatccctgggggaaagccgccatcatctgtgcgatctctgcggtggacgaggtggactacaagacggctgaggagaagtacatcaagg

SEQ ID NO: 418200 - DNA, 98 bp, Homo sapiens
ctgcattttgcatcagaggactcactcgactccaaagagagcgtcccagcttctttgaaagagggcagaatgtggccccgtcccagagcaccacccga

SEQ ID NO: 418201 - DNA, 83 bp, Homo sapiens
tagaaaggctcaacgagaacaagctatcagcaattctgtggtgttcttggtcacacatttatggagtttctgaagggcagtgg

SEQ ID NO: 418202 - DNA, 111 bp, Homo sapiens
taattttagggtcctttatatagaagggagagtaggagacagtgtttcacaaaatgattttccttctgaagctcccatctccttgaatctttctcataacatctgcaatcc

SEQ ID NO: 418203 - DNA, 83 bp, Homo sapiens
aatagtgatagctttgataagtcagcccaaggccaaccccactgtcactctgttcccgccctcctctgaggagctccaagcca

SEQ ID NO: 418204 - DNA, 75 bp, Homo sapiens
aatatttgggagagcaggcgtgggcaagtcaggagttgtgaacagatgtgtgtacagcacaaccaaggcagccgt

SEQ ID NO: 418205 - DNA, 49 bp, Homo sapiens
gaacacagcttcactttgctgcaacttgagttggtggaaccaagtggct

SEQ ID NO: 418206 - DNA, 98 bp, Homo sapiens
tcctgacaaggaaaaagcctggaaagtgaaagatgaaaagtcaggaaaagatgacacccaaattatcaaggttactggtaaaaagctactagaaaggg

SEQ ID NO: 418207 - DNA, 88 bp, Homo sapiens
ccctggggacgaagagctgcagctcctcctgtgcgggtccctgccatctccttggcctatgaggcagctgagagtgatatcatgaagc

SEQ ID NO: 418208 - DNA, 82 bp, Homo sapiens
atgctttccaagttccacaggaagctcagaagtcaatgaaaggattctattttgcaaagctgtattatgaagctaaagaata

SEQ ID NO: 418209 - DNA, 75 bp, Homo sapiens
cttcggcagtccacccaccgccgccgcctcccagctctggccctgccccatctcccagtagcttcctgcccagcc

SEQ ID NO: 418210 - DNA, 98 bp, Homo sapiens
ctacgagggcatcctctacaccatcgacaccgaaaactccaccgtagcccttgccaaaggttacgagaagtttctgagaagctgaacaaatataattt

SEQ ID NO: 418211 - DNA, 90 bp, Homo sapiens
ggggaacatggcctggagctggcttccatgatccccgccctgcgggagctgggcagggaaagctaacagccagggagaggatcagtctct

SEQ ID NO: 418212 - DNA, 75 bp, Homo sapiens
taggctgtgctgtgaactgtgaacagaagcaagtgctgggctttgacaaacttcctctgtggggtaccatcctca

SEQ ID NO: 418213 - DNA, 50 bp, Homo sapiens
gaagagggaagacacgcggaaacagaactctactacgatcgcgggaacca

SEQ ID NO: 418214 - DNA, 80 bp, Homo sapiens
gctaatcttgtacttcaagaggaggaatcacgctcggaaacaatggtgcctccggagccagcgtggtggccatagacaac

SEQ ID NO: 418215 - DNA, 98 bp, Homo sapiens
aaaatacgaaggtttctggctgggaggcaggtggaagtcatcataaagtttctgtttcacccgtcgtccatgttcgaggactctgtgaatctgtggtg

SEQ ID NO: 418216 - DNA, 100 bp, Homo sapiens
tggaatgccatcagccagcaggcccctgccatcatctatgacttctatctgtggctcactggaaggaaacccagtgtggcgagaaaggacactacgccaa

SEQ ID NO: 418217 - DNA, 90 bp, Homo sapiens
atacaggaacagggcagacgttagcgtgagtgatcactctcaatcccgggcggaggtttgacctacagaacccatctcgaatggatcgta

SEQ ID NO: 418218 - DNA, 50 bp, Homo sapiens
caagtgagagagtggagctggtcacagagtggacagtttgcggttgtgaa

SEQ ID NO: 418219 - DNA, 89 bp, Homo sapiens
ggaactgtgcccacaccagaagccatcagcagcaagggtttccaaggcaagaccggccctccaggcccccccggcgtggtcggccctca

SEQ ID NO: 418220 - DNA, 50 bp, Homo sapiens
cctctcgaatgggcacacctgtgtaggtgtggccgacgacgatgccctcg

SEQ ID NO: 418221 - DNA, 98 bp, Homo sapiens
tgcagaaaaggcacgcaacatccagaatgctggagccattggtggcattgttattgggtggcatggagaaatcgttgtcaaaacagagatgtccgtca

SEQ ID NO: 418222 - DNA, 78 bp, Homo sapiens
tgatggagctttcctaccagaccctgaaattcacgcatcaggcgcgggaagcgacgttggacctctcgaacaaccagc

SEQ ID NO: 418223 - DNA, 100 bp, Homo sapiens
tctttccaaattttaacacagtgcgagcccctatggttaatccaacattaggtgttcatgaagctgaccttttaaagacatcaggaacgctgattagttt

SEQ ID NO: 418224 - DNA, 100 bp, Homo sapiens
cacggagaccagcgagatgctgctgaatgggacgggaccctgcacctataacaaatcgggctccagggagtgtgaggcaactcagcatatctgccaccaa

SEQ ID NO: 418225 - DNA, 90 bp, Homo sapiens
caaatgaattatgtcagcaacgtatccaaggagtgaaacctcggtccggctgggctattgatccctttggacactcaccaacaatggctt

SEQ ID NO: 418226 - DNA, 100 bp, Homo sapiens
tggcaagacagcagccttcctcatccctctgctggtctggatcaccacacttcccaaaattgacaggcttacagcttcgccatgggctgctggcccaaga

SEQ ID NO: 418227 - DNA, 75 bp, Homo sapiens
tgaagctcttcaagactggtttgatgctattaacttcgtagacgaggattctgagaaacgaacccctcttcatgt

SEQ ID NO: 418228 - DNA, 75 bp, Homo sapiens
ctggggctgcctgccgggcggccgggcgcggcgagcccagcgcaaatctgtccaaggctgcctggggagcattgg

SEQ ID NO: 418229 - DNA, 100 bp, Homo sapiens
gaggaatcaattttggtatgcagataatcactgggctcatgggtcttgctctttacaaagaggaatgtatcctgtcaggtataatgtcagtgaatggcaa

SEQ ID NO: 418230 - DNA, 98 bp, Homo sapiens
gaagaagtcgaaaatggagcacgtccaggctgaccacgagcttttcctccaggcctttgagatagtttatgccaacgtgacttcattcatacagatga

SEQ ID NO: 418231 - DNA, 88 bp, Homo sapiens
gttgattgaaattatctctggtgctgcagctctacctgaagattatcggctataagagaataagaattgcagaaaataacagtgaagt

SEQ ID NO: 418232 - DNA, 100 bp, Homo sapiens
cgaagacagtcaagtgtagactctcgccaaagccgctctgggcaagcttctctccaagataaaatggcaaacccaaaagagaaaactgcaatgtgtctgg

SEQ ID NO: 418233 - DNA, 83 bp, Homo sapiens
gctgtgagtggcgatcacgagaacaataagtgacaacgcgcctgcaaaagggaacaagagcccttcgcctccagatggctccc

SEQ ID NO: 418234 - DNA, 75 bp, Homo sapiens
agagcttcaggggaaatggcttcagcgcagtatattactgcagatatgattctataacagactcttccagaaatg

SEQ ID NO: 418235 - DNA, 83 bp, Homo sapiens
cttgcatgtatttggaacaaaaaaaggagatgcctggcagccccgctctctgcagtgtccctggccagtgtccttccacctgt

SEQ ID NO: 418236 - DNA, 75 bp, Homo sapiens
gcaatgtttgattgcactgggcatgtccttcctggactgtgggcatacggtaagaatgattgatgttggctgata

SEQ ID NO: 418237 - DNA, 75 bp, Homo sapiens
acaccgagacagtgccctcagagcagcagtttcgagccagaggaagaggctggggcagaggcaactactctggga

SEQ ID NO: 418238 - DNA, 96 bp, Homo sapiens
acattcagcatgacctcacatacaacctccgagaaggtcatgagagtgatgttatacattggctcttcaaagacgttcacctcatcagagaaatcc

SEQ ID NO: 418239 - DNA, 100 bp, Homo sapiens
ccttacttcaggaggtggagcaccagattgaacgagaggcaattattttagataatcttcaggaagaactccctgaaatttccaaaacaaaagaggcagc

SEQ ID NO: 418240 - DNA, 101 bp, Homo sapiens
acaaagctgccaggagaaatggaaaaacaaaaatgaatgaatcaagagtgatttgttaatgttaaatggaagctgatcggcgttcacatggaatcctcctc

SEQ ID NO: 418241 - DNA, 101 bp, Homo sapiens
agagcagcccacccatgccgtgtgtgtgctgggcaccttgactcagcttgacatctgcagaagccctgtcaatgaagacaatcaagatggtgtcacgcact

SEQ ID NO: 418242 - DNA, 82 bp, Homo sapiens
caaagaatagagttgagcctgtgggacacttcgggtcatgaaacgagtgcgtaccgagcagattcagatggcagtgtcctgc

SEQ ID NO: 418243 - DNA, 75 bp, Homo sapiens
cacaatttgaccctgcgactttggaatacctccacgggcccattcccgagattctagtgattctgctgatggacg

SEQ ID NO: 418244 - DNA, 100 bp, Homo sapiens
tctattctggacatgataagcttaatgaggaaatatcaagaacatgaagatgttcctatttgtattcattgcaggaaattcgtacaagtttcaagctggc

SEQ ID NO: 418245 - DNA, 100 bp, Homo sapiens
cagcggatactcgcccatgcactgggcctcctacactgaggcatttcatccttcatgaagccattcaggattttgaattgcatatgagtgcttggctctt

SEQ ID NO: 418246 - DNA, 51 bp, Homo sapiens
cgtctgcaaagtgtccccggcaagaagagtttgccagatccggcccggtgc

SEQ ID NO: 418247 - DNA, 82 bp, Homo sapiens
gtgcagccaccctcgctccctctgctcttcctcccttcgctcgcaccatggacagagcgggatgccaccagcttgtccaaag

SEQ ID NO: 418248 - DNA, 75 bp, Homo sapiens
ctgctttgttgggagtgatggatggacaggcagaagctcctcctggggtagagacagatcttattgatgttggat

SEQ ID NO: 418249 - DNA, 82 bp, Homo sapiens
atgtacaatgatggagctgaagtgtgggatactaaagaggttccaagaccaaagattaaattaagagaaggtaaagctggac

SEQ ID NO: 418250 - DNA, 98 bp, Homo sapiens
gtgactgaaaaggaatattttggtttacagcatgatgacgactccgtggactctcctacatcccagttaccagtgtccttgaattgatagtggcttct

SEQ ID NO: 418251 - DNA, 100 bp, Homo sapiens
tgaccccttcctcagggccgggctcagcggctctgactctggaggaggagctgcaggaagcgatccggagggcgcagtgctcttaaagttccgtacagat

SEQ ID NO: 418252 - DNA, 99 bp, Homo sapiens
aaatatataatgaagaagttcgtgaccttttgggcaaggatcagacacaaaggttagaggttgccaacttggcctgttccatctcaaataatgaagaag

SEQ ID NO: 418253 - DNA, 100 bp, Homo sapiens
gaagcagaagtacccccaccacgcctctgcaatcatgggtcaccaagagaggctgagagaccaggcacctgaatggacagaagaggacctcagccaactg

SEQ ID NO: 418254 - DNA, 83 bp, Homo sapiens
cccggcagcagcccgacgcaaaccaaggatctggggatcttcgcactatcccaagagtccctgtgaagcaggaagagtgaggg

SEQ ID NO: 418255 - DNA, 100 bp, Homo sapiens
ttaacaactggaggaacaggatttgcaccacgagatgtcactccagagtgtgacccttacataaaaataacactgggcaaaaaagtcattgaagaccgag

SEQ ID NO: 418256 - DNA, 100 bp, Homo sapiens
cacttcatccgaaccctcagcctcaagccgctgctcttcgtgcaactgcagatagaagacctgactcgtaaactgcgcacaggagacctgggcatccccc

SEQ ID NO: 418257 - DNA, 95 bp, Homo sapiens
cattgagatgatccttacggaaaaggaacagattgttcctaaaccagaagaggaggttgcccagaagaaaaaggagctccagggtcagaggtcgg

SEQ ID NO: 418258 - DNA, 117 bp, Homo sapiens
tgctctggggctcttatgctcagaagaagggcagtgccattgatagggccgagcatgtcgggactccacctggtgaagaggggacgggaacacaagaagctggacctgcacagagac

SEQ ID NO: 418259 - DNA, 80 bp, Homo sapiens
cagaagaccgaagcgttcgtatctggaaggtcgtgtccccagccttctctgcagtcccttctgccctgccgggcccgtcg

SEQ ID NO: 418260 - DNA, 75 bp, Homo sapiens
gagcacagagcctcgcctttgccgatccgccgcccgtccacacccgccgccaggacctgatgaccttcgaggatg

SEQ ID NO: 418261 - DNA, 100 bp, Homo sapiens
acagactttgtggggaaaaaaaggagcttgccttctgagctttgtaccaaagacctgggaaaaaatggtgtgctcttgcttgcacagcttttgaatgagg

SEQ ID NO: 418262 - DNA, 75 bp, Homo sapiens
acggggctgacatcagcggctctttgtatgatgacccggcacagtcttcactaccgtagaagaccttggctccaa

SEQ ID NO: 418263 - DNA, 98 bp, Homo sapiens
ctgctgagtcccagcagcctcttctctgccctgcacagggccatgtttatgagtggactaagtgaaagcaaacaaacccatgtacacctgaggaatgt

SEQ ID NO: 418264 - DNA, 100 bp, Homo sapiens
cagcagtatgacaaggcactggatgatgcaatcaaagctcgacttctcaatcccaagtggccaaagaagcctggctacagataagggaccaaaatgactg

SEQ ID NO: 418265 - DNA, 83 bp, Homo sapiens
gtccagctcgcccagctcgcccagcgtccgccgcgcctcggccaagcgggctgacgcacgaggcacacaggaaggaggtggag

SEQ ID NO: 418266 - DNA, 74 bp, Homo sapiens
cctgaccctgatttcacagtccgagacgtcaaactcctagtggtgccggtggtggtgtgcacattgagccccgg

SEQ ID NO: 418267 - DNA, 75 bp, Homo sapiens
gctggattgtcttaggaccataccatgacaagctggtcccacctataggaatgttgaataatcctatgaatgcag

SEQ ID NO: 418268 - DNA, 115 bp, Homo sapiens
gaccgcgcgcagggcctgcagcgggagctggacggcgagcgcgagcggcgcgagaaacaaacggggattcagcgtccgatcctttggaacagggactcacgtgaagcttccagga

SEQ ID NO: 418269 - DNA, 83 bp, Homo sapiens
cgagaatttatcacaatggttgtatacaagactgatgggaaaaaagtttattacccagacaacctcatcagccttgaaaggtg

SEQ ID NO: 418270 - DNA, 100 bp, Homo sapiens
agatccaggtctatttcacgaccaagaagcagatgcaaccttaaaatcagtgacaagaaacattccaaacaagcaacagtcttcaagaaattaaactggc

SEQ ID NO: 418271 - DNA, 108 bp, Homo sapiens
aagaaaactcactggaaaatgaaaagttaaaggatgaattactgaaattaattcaaagaagctttttcactatttgacaaagatggtgatggaactataacaacaaag

SEQ ID NO: 418272 - DNA, 82 bp, Homo sapiens
cagacgagcagtgaaagccctttggaacctccggagcaatgatacaggattactaggcagaagtcaattcatctggaaagac

SEQ ID NO: 418273 - DNA, 51 bp, Homo sapiens
gttggccttcgtacccgtcttgattgaggaatctagagctttggctgaaat

SEQ ID NO: 418274 - DNA, 75 bp, Homo sapiens
gtgaggaaaggaggtactgtaggttcctgctgctcaacagatgctaaattttcctgagaaaaacaaggaaaaacc

SEQ ID NO: 418275 - DNA, 50 bp, Homo sapiens
ggattcccagcgcgggacagccaggtctctttagtcagccttatagctaa

SEQ ID NO: 418276 - DNA, 96 bp, Homo sapiens
acatgatgtgtgatgacatcctcattgatgttaatgaatggtgctatacttgaattttctaaggtgtcattaggaaggaccagtacctcctctcgc

SEQ ID NO: 418277 - DNA, 100 bp, Homo sapiens
caaagcctgaagaccccggagcccctttagccatgtggatacctacggagcacgagaaatacggcgtgggcatgggtagcaagaaactaaaacgagtggg

SEQ ID NO: 418278 - DNA, 75 bp, Homo sapiens
ggcgaagtcttcattcataaggataaaggatttggctttatccgcttggtgttcaagcagccctggccagggatc

SEQ ID NO: 418279 - DNA, 101 bp, Homo sapiens
agcaaacgatccagacggcagggagtgcatcaaaggtgtgaacacaggcaacttcagttcatttatgcagaaggaaatatttgagcagccagagtctgtcg

SEQ ID NO: 418280 - DNA, 50 bp, Homo sapiens
cgcagccggagtggggccgtgagagaactcttcttgaagactaatgctca

SEQ ID NO: 418281 - DNA, 100 bp, Homo sapiens
tgcacagcagctgcacgcgccgtggctccggatctcttcgtctttgcagcgtagcccgagtcggtcagcgccggaggaaagagcatctacggtgagcgct

SEQ ID NO: 418282 - DNA, 75 bp, Homo sapiens
cgcctcgcctgtctcggggagcccaggtgtggacactgccagcggctgcagccgacttggaatgacctgggagac

SEQ ID NO: 418283 - DNA, 74 bp, Homo sapiens
ccgggattggaccgacgcagccatggccataggaaaaggatacagagtagagtttcatgaacctgaaacttggt

SEQ ID NO: 418284 - DNA, 98 bp, Homo sapiens
ggggcgagtacgaccctcggagacaccgatatgaccatcaccagagctacgagttcatgcggagaagcctcatcttctacaggaacgaaatccggaag

SEQ ID NO: 418285 - DNA, 75 bp, Homo sapiens
gaaatgactaatcaagagtctgccgtacatgtgaaaatgacatggacgtctcgctgcctaatgaagttctatgct

SEQ ID NO: 418286 - DNA, 82 bp, Homo sapiens
tagaagtctcatgcttgagaatacagaatgtcacagtatttacgaagaatcccctgagcggatgtcctggaacaggtggagg

SEQ ID NO: 418287 - DNA, 83 bp, Homo sapiens
ctcggctcctgtcgtccgttctctcaggctcccgttcagagcagtcattatggcgaaccttggctgctggatgctggttctct

SEQ ID NO: 418288 - DNA, 100 bp, Homo sapiens
tgtgacggcgcggcggctgctggggggcccggggcctcgcgctggggacgttgcgtctgcagctgcggcgcgcaattaccagctctggctgggtcgccac

SEQ ID NO: 418289 - DNA, 82 bp, Homo sapiens
gatcatcattaaggacggaggcacggagacaaggacggcagcaaggtgacaacagtggtggcaactcctgggcagggtccag

SEQ ID NO: 418290 - DNA, 100 bp, Homo sapiens
agatggcgaccgagacggtggagctccataagctaaagtttctggcccccaaagacaaaccaagtggagacacagcagctgtatttgaagaaggtggtga

SEQ ID NO: 418291 - DNA, 90 bp, Homo sapiens
aagttgtcgacgaccgacagggtggtgaaaggaagtctgcggtcttgcagttcttcagactgctttaataaagtgatgccaccaaggaaa

SEQ ID NO: 418292 - DNA, 87 bp, Homo sapiens
gcgagcgcgagcggcgcgagaaactctgagagggacagacggtgctcagcctgtgtcctggggcaaagctggattcattttcctccc

SEQ ID NO: 418293 - DNA, 100 bp, Homo sapiens
gccggcgcggctcatgggcagagtcggccgggcgggccggattgctcgctgtaagcagctcatctgtgaccccagctacgtaaaagatcgggtagaaaaa

SEQ ID NO: 418294 - DNA, 75 bp, Homo sapiens
gtatggtgctgggtgcagatgcagtgtggctctggatagcaccttatggacagatgaataatacggcagctagtc

SEQ ID NO: 418295 - DNA, 75 bp, Homo sapiens
acatactatccgtttgttcaggaaccaccagtgacagagactagaaggctgggaaaaaaggcttattatatctga

SEQ ID NO: 418296 - DNA, 75 bp, Homo sapiens
agtgcactgaggaaggaaaatggagcccggagcttcctgtctgtgctcgtcctaggcctacttacaagcctccag

SEQ ID NO: 418297 - DNA, 75 bp, Homo sapiens
gcaacactcctctacagtttgagcttatgtccctgatgccaaaaatgcacctactctttcctctaactctggtga

SEQ ID NO: 418298 - DNA, 101 bp, Homo sapiens
aggaaaaggaacatttgaaagtggcctcaaaggaggagtgaagatagttttctcttatactcagcgtgtggttggaaatggaatcaaagcccagtctggaa

SEQ ID NO: 418299 - DNA, 113 bp, Homo sapiens
atcaaagacagctttcacagtttgcgggactcagtcccatcactccaaggagagaagttgatcacagccgagttaaattgacattaaagactccttcacaagattcagactat

SEQ ID NO: 418300 - DNA, 97 bp, Homo sapiens
tggctgcggctgcgctccccgccgcccgcctgcgcctccggggccggccctgcaggatcttcaagatgaagttcaaagggagaatactaatctgcaa

SEQ ID NO: 418301 - DNA, 100 bp, Homo sapiens
caactataaacgagtgactgggacaagttttacagctcccagcacagtaggaaagagaaatttgagtcctagtcaagaggaagctggcctggaggacgga

SEQ ID NO: 418302 - DNA, 97 bp, Homo sapiens
ggattattctcccccatctggaagaggattattctctataatcccagttagagacacaatgacataaacatcgctgaacaagaccctgcagatggag

SEQ ID NO: 418303 - DNA, 101 bp, Homo sapiens
ttttcaatttctcccagccatctctgtttcgctaaaggtttctgaagacagtgggttccagcaacagatagaaatgctttaagttcactctggggaaagct

SEQ ID NO: 418304 - DNA, 100 bp, Homo sapiens
gaaagtggctctacaaacccaaggttcatctgcagaagccagcggacgcctctgttcaacttgtgggttacctggctcatgagaccttgccggcgaggct

SEQ ID NO: 418305 - DNA, 98 bp, Homo sapiens
acataaacgggaggctgaagatggtgctgcaaaggaagaaggagagacgaccatcttgcaactagaaaaagatttgcgcacccaagtggaattgatgc

SEQ ID NO: 418306 - DNA, 99 bp, Homo sapiens
cgaggcaaggagctaaagcagcgtgcgttcagccctggggatttttagactctgaggagcagttggagctaatccacattatggaaatggaaaccaccg

SEQ ID NO: 418307 - DNA, 100 bp, Homo sapiens
agttccatctaggcctacgagggccccgcccagtgtcccaagatgtgtgcattgcaatgttgtgtactctgatgtggctgctctgaagtctcacattcaa

SEQ ID NO: 418308 - DNA, 50 bp, Homo sapiens
cactggctgctggagcttgtcaccaccagtggttcagcactgagtcatgc

SEQ ID NO: 418309 - DNA, 51 bp, Homo sapiens
gcaaagtgaaaagcttgaacggaaggtggagttgcagcaagggctacgggc

SEQ ID NO: 418310 - DNA, 100 bp, Homo sapiens
ggcggaaaatagcctttgccatcactgccattaaggggaaggtgtggctcattgactttaatccatttggtgaagtcacagattcactgctgttcacctg

SEQ ID NO: 418311 - DNA, 100 bp, Homo sapiens
cgagcgggcggcttcctggcctgggcgctccggtggcggcggagggtgctttcttctgcgacctggtactcatctacctcatcaaaaagagagagtttta

SEQ ID NO: 418312 - DNA, 51 bp, Homo sapiens
tttcagtcactggtttgcagagtccagacttaattcagtgcacaaatgaga

SEQ ID NO: 418313 - DNA, 74 bp, Homo sapiens
aacaaatagaggaagaagatctaatcatatatacttggcatatcgaaattttatgattgacacgtatcgtctaa

SEQ ID NO: 418314 - DNA, 90 bp, Homo sapiens
ggccagacatggcattctgcaggtggcaggtaaatgagctggatggtatcccgttgatcctggacaactgcaacatcagtgacagtaacc

SEQ ID NO: 418315 - DNA, 82 bp, Homo sapiens
gcagccgcgaggaggcgcgggaggtgttcgagaacgaccccgagacggggacaccgtggtgtttaaggatggccagtactgg

SEQ ID NO: 418316 - DNA, 90 bp, Homo sapiens
aacatgcctcaccctcatctatatcctttggcagctcacagagatggagtttcactgtgtcagccaggatggtctcgatctcctgacctc

SEQ ID NO: 418317 - DNA, 85 bp, Homo sapiens
cccgtacttgaagccctacgccgtggacttccagcgcagacgtttgatgcaaatgatttgtatcaggggcagaattttaacaagg

SEQ ID NO: 418318 - DNA, 83 bp, Homo sapiens
gttgggcttggtaccgtgctgcccagaatgcccttcgggagattgacgcgtcatgccttacgtgggaaggacaacagttccag

SEQ ID NO: 418319 - DNA, 75 bp, Homo sapiens
tggggcagagcgttctaaggagatgcccagaggtgaagagtgcgacattgacataaatgaatgtgacagtaaccc

SEQ ID NO: 418320 - DNA, 100 bp, Homo sapiens
ccacaaagctgcgatcacctccttggacctcagccccaacggcaagcaacttggaaaaccagtagattcccagacatcgcgaagtgaatctgaaattgtg

SEQ ID NO: 418321 - DNA, 50 bp, Homo sapiens
gaaggtgcaggaggtgctgaaggccaggctttccatctgatggtcccctg

SEQ ID NO: 418322 - DNA, 76 bp, Homo sapiens
tctaatggggaagccaacagaaggggccttaattgctcttgcaatgaaggagtctgcactatggaaacaacctgtc

SEQ ID NO: 418323 - DNA, 100 bp, Homo sapiens
aatcgttaaacatctgaaagggtcagctctacattaatcatactcctccaccactgtccaagagtaaggagagagaaatggacaagaaagatttggacaa

SEQ ID NO: 418324 - DNA, 83 bp, Homo sapiens
gtgaaaccaacagccagtgatatgctatacatgtctctgctggatgaaccgaatcctaacagtccagccaatagccaggcagc

SEQ ID NO: 418325 - DNA, 100 bp, Homo sapiens
ctgggagcccgggtgaccgcgtagaagcacatggaacaagcagctatacccctgataagtcatcttttaatttagctacagttgttgctgaaacacttgg

SEQ ID NO: 418326 - DNA, 50 bp, Homo sapiens
gcccgggtcactggccagcaccccgaggccctgggaggagcggggacact

SEQ ID NO: 418327 - DNA, 75 bp, Homo sapiens
ggcgcaggagcatctggagttccgcctgccggaagatttggagactggagttcaccttgaccctgccgtcaaaga

SEQ ID NO: 418328 - DNA, 75 bp, Homo sapiens
gcttcaggaggagcagcctatacaaagagggttatccatgtgaacttttgcctctgacggtcgcaggtattccat

SEQ ID NO: 418329 - DNA, 100 bp, Homo sapiens
tggtctctgcttcagaggatgctacaattaaggaacaggagtacagctgtgtagtaaagatgccttctggtgaatttgcacgtatatgccgagatctcag

SEQ ID NO: 418330 - DNA, 50 bp, Homo sapiens
agaagatgacacttgggagcctggacacagagtctgggatctaataattc

SEQ ID NO: 418331 - DNA, 132 bp, Homo sapiens
acggaccccagcgttaccatgcatcctgccgtcttcctatccttacccgacctcagatgctcccttctgctcctgaatcatttgctgtttcaaatagagaactgtgcgatgatgagaaagagttcatacatt

SEQ ID NO: 418332 - DNA, 75 bp, Homo sapiens
aagaggctctgctgagcagggacctggggaagagatagcctgggctggaagctcttctacgtcacaggctgcctg

SEQ ID NO: 418333 - DNA, 100 bp, Homo sapiens
ggagaaattgctgaagaactcgcaagctcctacgaaagaaagctcatcgagctcattgacacaattgcctcggagatcggagaactgaaacaggagatgg

SEQ ID NO: 418334 - DNA, 103 bp, Homo sapiens
tgttcccccaaatgtctgactctgactctcggactgagaaacgcaaggtttttagaacttcagccataaaaatgggcagaattttccttgatcatatcggtgg

SEQ ID NO: 418335 - DNA, 100 bp, Homo sapiens
gactcttcatttagattggattctgaatatcaggaaatctactttcttcaatgtgttaaccaatagtcaggcttcagcagaaaacttcccgttctgcact

SEQ ID NO: 418336 - DNA, 100 bp, Homo sapiens
tggtcgcttccggagggactgcaaaagctctcagggatgctggtctggcagtcaggaatctgagaaaaaggggttgattgaaagaatctatatggtacag

SEQ ID NO: 418337 - DNA, 73 bp, Homo sapiens
tcacattggaccctcctcccaactgtagatgcaaccttaaaatcagtgacaagaaacattccaaacaagcaac

SEQ ID NO: 418338 - DNA, 116 bp, Homo sapiens
ggagaggagcagcccccggagacagcggcacagaggtgcttctgccaggttccaggtgccctggctggagtcagtcctcatcgtagtcagcaacaacattgacgaggaggcgctgg

SEQ ID NO: 418339 - DNA, 152 bp, Homo sapiens
acgccattatcctctgtttctctgctgcaccgacctcgacgtcttgcctgtgtcccacttgttcgcggcctatagagtgcttgtgatttcacgtatttttgctgaactcgtaaaagagacacttggatggtggattaaccagaacactaaca

SEQ ID NO: 418340 - DNA, 100 bp, Homo sapiens
tgcgagaagaagtcagaaatctacagttactcacacaaggtattccaaagttgattacgtctgatatggttaaagaaggtgctgctgtaattgatgtggg

SEQ ID NO: 418341 - DNA, 82 bp, Homo sapiens
aaactgtcccgggtgggaagaggaacagcctatgtgggcttccacggagataccactgcatccccacccagcgcatccccga

SEQ ID NO: 418342 - DNA, 50 bp, Homo sapiens
aggcatcatccgctatgcaattggggggctgaggaagctgccctcgaaac

SEQ ID NO: 418343 - DNA, 82 bp, Homo sapiens
atttaagagagctctggacaagctggaatgcatccaagagaatccctcaacatgctgatgatgattattccccaccttctaa

SEQ ID NO: 418344 - DNA, 100 bp, Homo sapiens
cagaagtagagccaaaggatggtgagattgttggcctttcaggaagagtgcttaagaaatgcactcggtgatggaaagagagccactattctgaagaaca

SEQ ID NO: 418345 - DNA, 83 bp, Homo sapiens
tgcttttcaagtatgccaccaacagtgaagagggttatgtaccgaaggactctaccgtgtcagcgggaataaaactgaccaag

SEQ ID NO: 418346 - DNA, 98 bp, Homo sapiens
gtgcgttgcgtgccctacttcaaggataagggcgacagcaacagctctgccggctggaaggtgctgccacgggacctggagaaggaggatgcccccca

SEQ ID NO: 418347 - DNA, 100 bp, Homo sapiens
gagcgcttggaccccggcttctgggacgcgtcagacaccaatgggaatcccaatggggaagtcgatgctggtgcttctcaccttcttggccttcgcctcg

SEQ ID NO: 418348 - DNA, 88 bp, Homo sapiens
gccctgtggctgggggcagagctcagattccagaggggtgactaccatattgatgtctgtatcaatgactacctggatgttttctgcc

SEQ ID NO: 418349 - DNA, 98 bp, Homo sapiens
agggctctgaaagctagaagaaaaggtgtacttgcaagaaacctcaggacttgagtaacagcaacatggacacattcagctaacgtattttagcaggt

SEQ ID NO: 418350 - DNA, 102 bp, Homo sapiens
gcgtgagtctctacctgagcgaggacgaggtgcgccggctgatcgtatgccgagattttgctgtcctggaggaccacaccctggctcacagcctgcaggaac

SEQ ID NO: 418351 - DNA, 83 bp, Homo sapiens
gctcacttttcttccaaggataagttgcaagaggtggacacccatatccatgcagccgcttgcatgaaccagaaacatctgct

SEQ ID NO: 418352 - DNA, 87 bp, Homo sapiens
cggagatctctctcatctcgctcggctgcgggaaatcgggctgaagcgactgagtccgcgatggagatctctagctcctataccacc

SEQ ID NO: 418353 - DNA, 100 bp, Homo sapiens
ggtgtctgagtggatggggacctgcctgctgaaagtgaagtcactgcttttgctgtcttggatcaagaccagaaagaaattattgataccaatggagctg

SEQ ID NO: 418354 - DNA, 75 bp, Homo sapiens
ccggcgctctcctggctcccttctgccccagctccgtctcggcggcggcggtgtaaacaggaacatcgataagta

SEQ ID NO: 418355 - DNA, 95 bp, Homo sapiens
ggaaggtctcacctgaggtgaaccttcgaccttggacttctcagcctccagaatggtgtccctggccagtgtccttccacctgtccacaagcatg

SEQ ID NO: 418356 - DNA, 73 bp, Homo sapiens
caccagacagatcgctgtcaaaaccctaggacagaactgtaccgctctctttttggccagctccaccctcccg

SEQ ID NO: 418357 - DNA, 83 bp, Homo sapiens
ttcgagtacatgaaggaaaatctttaccagctcattaaagagagcaaaccctcctggggcttgcccatagatgctgttcagtg

SEQ ID NO: 418358 - DNA, 90 bp, Homo sapiens
cgggaaatcgggctgaagcgactgagtccgcgatggaggaggaggagacggaggctgccattggagcccctcctactgccactgagggcc

SEQ ID NO: 418359 - DNA, 50 bp, Homo sapiens
agaccactttagaaactcaattaaaaaagagtctcatcgtggaaggcaag

SEQ ID NO: 418360 - DNA, 75 bp, Homo sapiens
ctgcgagctcctcaagaatctcgtgctcaccggtttctcccacatcgacctggactatacaggctccaacccaag

SEQ ID NO: 418361 - DNA, 75 bp, Homo sapiens
gcacacgctcggcgctgcgatccgcgcatataacgactttatattcagagcaccaatcaaattaagcaagcctgg

SEQ ID NO: 418362 - DNA, 100 bp, Homo sapiens
agcaaatggaatccttctcctcctgcttgtgagcccatgatagactggagtgatgttagaaaacacaaatatggtcacctatcagagtctgcatcccaat

SEQ ID NO: 418363 - DNA, 98 bp, Homo sapiens
tggtgttcagggatttcctaccattaagatttttggatccaacaaaaacagaccagaagattaccaaggtttctacgataaagacagttcagggtgga

SEQ ID NO: 418364 - DNA, 82 bp, Homo sapiens
tggcttgtgaaatcatgcctctgcaaaggtcctcagaatggttggaatgaccctccagctttgaacagagtacccaaaaaga

SEQ ID NO: 418365 - DNA, 100 bp, Homo sapiens
tgaaaagtagttaatggcagtggtggtatgaaggatatatcccctggggcagctggtggggctgaagatggtttctttgtgcccccaaccaagggaacaa

SEQ ID NO: 418366 - DNA, 88 bp, Homo sapiens
ggcgtcctgttcttcctgggggactggcagaaggacagaataacgggctcccagattcacaagccccaccaagaggatcaccccagga

SEQ ID NO: 418367 - DNA, 73 bp, Homo sapiens
ctgaggcggcccagcggcggcagtttgatgaaggccggaacaactttgaaggggaggtcaccaaggagaacct

SEQ ID NO: 418368 - DNA, 75 bp, Homo sapiens
tgggccgagagatggggctgggtaagcggaagggtacagccaatgcccgaatgccagagaaggtcacatggatga

SEQ ID NO: 418369 - DNA, 90 bp, Homo sapiens
ccggaccgcagtgccccaagagagaaatgcctggagttgaagacaagcctgctggcccgccagaggggcacccagtcatccctggaccgc

SEQ ID NO: 418370 - DNA, 80 bp, Homo sapiens
cttggtgtcatccagccttagcaaaccagagctactgtgtgaagacattcacaggacacagagaatgggtacgtatggta

SEQ ID NO: 418371 - DNA, 51 bp, Homo sapiens
gcaggagcaggatgcagaggagaacggtgctggagaatctggtaaaagcac

SEQ ID NO: 418372 - DNA, 51 bp, Homo sapiens
tagacaccatcctgcatgtgctgacaacgtctaacttctccctggccatcc

SEQ ID NO: 418373 - DNA, 75 bp, Homo sapiens
gctgaggagcgccgctgcctcgcctcgaacatccagtcatggataaaaatgagctggttcagaaggccaaactgg

SEQ ID NO: 418374 - DNA, 90 bp, Homo sapiens
gtgtccatcgctctcagagcagctggggattgtggattccagtgagagtagctcctctgcaccagccacacagttcatcatgttgcctct

SEQ ID NO: 418375 - DNA, 95 bp, Homo sapiens
aaatacgaatctttccaaaggagatgcccggagagcaagccctggaggttcactctttcaagaagtcgtgtgctgaggtgtaatgctacacaagt

SEQ ID NO: 418376 - DNA, 100 bp, Homo sapiens
atgacttgaggaggcgcttatatgtaatatttagaggagaagaaggacttgattatggtggcctagcgagcccacagaagaagaagcatcttcaaaggag

SEQ ID NO: 418377 - DNA, 51 bp, Homo sapiens
gcagcgccgatggctccgacccgctctggagtctcaccctgtcacccaggc

SEQ ID NO: 418378 - DNA, 88 bp, Homo sapiens
tggtggtcgccgcggcggcgtgtgcgcccctcagaatagcctaacatggcagaccagagacagcgctcactgtctacctctggggagt

SEQ ID NO: 418379 - DNA, 50 bp, Homo sapiens
tgttgttcccggagatgcggcgcgcaggcacgcacagaggctgggctgcg

SEQ ID NO: 418380 - DNA, 82 bp, Homo sapiens
cggcgttcggggaaatggctgcgagaccctagaggcctgcgatataacacgtgggaaccggaggagaacatcctggacccca

SEQ ID NO: 418381 - DNA, 82 bp, Homo sapiens
cgcagagcaagcgcggggaaccaaggagacgctcctggcactgcaggtcgaactggaaggtacacccttatagagaaatgga

SEQ ID NO: 418382 - DNA, 100 bp, Homo sapiens
gttcatgtgggccctgaaaaacggagacttggatgaggtgaaagactatgtggccaagatccagtttgctgaccagaagcaagaattcaacaaacgtccc

SEQ ID NO: 418383 - DNA, 100 bp, Homo sapiens
aaatgccgactcagtggaacaatcttttgttggattgaaacagctaatcgttgctccttgagggcaggacagttcttatggctttatccgttgcgtaagc

SEQ ID NO: 418384 - DNA, 100 bp, Homo sapiens
cgatgatttcgatgtaacagaagattatagaagactaaaaagtcttcttattgcgacatcatattggagatcgcagtctttccttatgtaatatgttcct

SEQ ID NO: 418385 - DNA, 123 bp, Homo sapiens
tatgtctctccttctgacctactggatgacaagactgcatctcccatcattttgcatgagaataatggtgctcaaaaatgtgataactttgctgaaaaaagacccctccttggtgtttgtaag

SEQ ID NO: 418386 - DNA, 101 bp, Homo sapiens
ggagctttaccaaaaaggcctcgcacattcagttggacagctttaggttggtctcagccttgtgatgtttggagcataggttgcattcttattgaatatta

SEQ ID NO: 418387 - DNA, 96 bp, Homo sapiens
gccaaacagtgtctttggacttatattttatatactacagttattacttgcaccgacgagagtgctggggaataaaaaggggatcttcactcggca

SEQ ID NO: 418388 - DNA, 75 bp, Homo sapiens
catcttacagatgtattaagaagcctcaggtttccaatacttatctacaggaatcgccatgaccccagctctgag

SEQ ID NO: 418389 - DNA, 102 bp, Homo sapiens
tttgactactggggccagggaaccctggtcaccgtctcctcagccgcttacaaacacgcagatggcaagaagattgatggcaggagggtccttgtggacgtg

SEQ ID NO: 418390 - DNA, 82 bp, Homo sapiens
cgggagaaggtgctggagctggaggacgagacaatgcagatcttcgtgaagactctgactggtaagaccatcaccctcgagg

SEQ ID NO: 418391 - DNA, 51 bp, Homo sapiens
ggaccaccctgctccgaaaactaaggttttgggatttgagattgacgcggt

SEQ ID NO: 418392 - DNA, 49 bp, Homo sapiens
aatggaagcagctggcttcactgctcagtttgctgacactccatcgaag

SEQ ID NO: 418393 - DNA, 82 bp, Homo sapiens
ttttggaccaaaggcctgtgtgctgcagaacccccagaccatcatttggaatcgaagcctcttaaaatggcagatgacttgg

SEQ ID NO: 418394 - DNA, 82 bp, Homo sapiens
tagaccagctccaacaggattccatggtagctgggatgttagggctcaggcttgggcactgtttaaaggaaagttccgagaa

SEQ ID NO: 418395 - DNA, 100 bp, Homo sapiens
accttcgcctggcacaccgaggacatggacctgtacagcatcaactacctgcactttggggagcctaagtcctggcatccggtcttgggatgtcgatcct

SEQ ID NO: 418396 - DNA, 50 bp, Homo sapiens
gagattcatatgagagttatgggttaatgcgagatgatacaatatacgag

SEQ ID NO: 418397 - DNA, 97 bp, Homo sapiens
aacatttcagtaatgcagagtcctcttgttggagttacatctactcctggaacagctgttgacagtgtcttgaagaggatgacaataattggtgtaa

SEQ ID NO: 418398 - DNA, 82 bp, Homo sapiens
gcaacctgtccggggatcccagggagccttatgccagcctggaccatcttggaggcagtgtaggatcatggaagaactttga

SEQ ID NO: 418399 - DNA, 82 bp, Homo sapiens
ccggagtggggtgtcggcgcctcattcgggtggagctgagccggagacagggactggtgattgcagctggaagtgcccatga

SEQ ID NO: 418400 - DNA, 74 bp, Homo sapiens
gtttctcatcatcaccaaacgatatgtcttgtcgttcaagacttgcaacactaaacgagaaattgacagccctt

SEQ ID NO: 418401 - DNA, 50 bp, Homo sapiens
cagcactccaatttgtatgccatatcagacttcgattttcagaattcctc

SEQ ID NO: 418402 - DNA, 75 bp, Homo sapiens
acaatagtttcacctgctattgtttcccccacccaggagtacaagcgcaagctagccagagtttccctggtgcgc

SEQ ID NO: 418403 - DNA, 98 bp, Homo sapiens
ggcgagcggagcgcaacactcgcttggttggggagatcggcgcttggccggccactccccacctgtcctgcctttgtgtgcctctgtgtctttgctgg

SEQ ID NO: 418404 - DNA, 100 bp, Homo sapiens
acccagcctcccaagaaggctgtggagaagcagcagcctgtggaaagcagtgaagacagcagtgatgagtctgatactagagtaaaaggatggtttcttc

SEQ ID NO: 418405 - DNA, 73 bp, Homo sapiens
ctgccaagtcatccgtgtcattgcccacacccagagttcctatcagactgagattgggcagaccctggacctc

SEQ ID NO: 418406 - DNA, 101 bp, Homo sapiens
tgagcggcggcctcggcctccggcgcagcccggaaatgtccggcaagatcgagaaagcagatctacgcagaccccaccaagaggctggagctgtacttccg

SEQ ID NO: 418407 - DNA, 119 bp, Homo sapiens
ataattgataaacgacttcaagagcttggagcccggcatttctatgacactggacatgcagatgactgtgtaggtttttcctgagtgactcagaggaaacaatccctccaactgccaac

SEQ ID NO: 418408 - DNA, 83 bp, Homo sapiens
ggaggaagctgggacacccgggagtcaggaaatgaaatgggacgtcggtcatcagatactgaagaagaaagcagaagcaagag

SEQ ID NO: 418409 - DNA, 98 bp, Homo sapiens
aaaattatgagagggatatggacataattatgaaattgaaggaagaggacatggccatgaatgcccaacaagataatttatgtcacgcatctgatgaa

SEQ ID NO: 418410 - DNA, 80 bp, Homo sapiens
gaacaaactcgaagaacagctgtggaaagaagttgcaaaacactggggtgaatttaaggtgtcagagagatacctcacca

SEQ ID NO: 418411 - DNA, 83 bp, Homo sapiens
ggagcttatactcctcccagtgacgggtctggagtgcgtgggggaccggctgttggcgggacctccgggagaagaactggaag

SEQ ID NO: 418412 - DNA, 50 bp, Homo sapiens
ccgggatctcggctgtccttcctcccggtgaatccgccatactacatccc

SEQ ID NO: 418413 - DNA, 74 bp, Homo sapiens
tgaatttccatgtcaacatagtcctggcacagttggcgggcagctcccaggtctccatgagtacggcgccgtcg

SEQ ID NO: 418414 - DNA, 75 bp, Homo sapiens
gaaagaagttgcaaaacactggcggaaaaactcggatgaatgcgaggtgtgctgtcaagggggacaacttctctg

SEQ ID NO: 418415 - DNA, 83 bp, Homo sapiens
aaatataacattcaatataggaccaaagatgcctcaacttggagccaggtgacattccaagcctgcagtatatctgaggccag

SEQ ID NO: 418416 - DNA, 101 bp, Homo sapiens
cacagcagaagctctgaatcgtgttcctgaatgaaagaagtcagggtacccagtgtgttgaacaaattcaagagttggttctacgcttctgtgagaagaac

SEQ ID NO: 418417 - DNA, 101 bp, Homo sapiens
ggggaccgcggcccccagcagagcccgcctgcccggctatgttctcagtgcagctgagtcttggtgagcagacatgggaatccgaaggcagcagtataaag

SEQ ID NO: 418418 - DNA, 82 bp, Homo sapiens
cagacttcagcgttggggctgacacagcactcaatactatctgcacagtgaggtccagagatatatccagagaggagtggaa

SEQ ID NO: 418419 - DNA, 74 bp, Homo sapiens
acgcaggccagcaactcccagctcaatgcaatggaaaagtacccagatgccgtgtacctctcggaggggccctc

SEQ ID NO: 418420 - DNA, 100 bp, Homo sapiens
agactgttgaaaacaatcggcaaggggaattttgcaaaagtaaaattggcaagacatatccttacaggcagagagcatcaagtaccacgtttttgaagac

SEQ ID NO: 418421 - DNA, 78 bp, Homo sapiens
acggtgcgagctctgaagatgcatggaggcgggccaagtttacagaatgtctgaaggggacagtgtgggagaatccgt

SEQ ID NO: 418422 - DNA, 100 bp, Homo sapiens
gctaaaaacaaaatcaaccgggaccccagcttttcagaactgcagggaaacagccatcatgagaaatggtggagtcaatgaagaaagtagcagggatgga

SEQ ID NO: 418423 - DNA, 83 bp, Homo sapiens
acggctttggaaacgacgtcatgtgttagaacgacaccgtaactatccgcactagaaagttcatgaccaaccgactacttcag

SEQ ID NO: 418424 - DNA, 87 bp, Homo sapiens
gcgatggagctgttatttttagatacttttaaacacccgagcgctgagcccatatgttgtaaagtactatggcagttattttaagaa

SEQ ID NO: 418425 - DNA, 75 bp, Homo sapiens
acccatctgtacatcctatgtcaactgcttctcaggtagcaagtacatggggagtgttatgtgccaagaaccttg

SEQ ID NO: 418426 - DNA, 100 bp, Homo sapiens
cgtggcgctggtggggggagtcctcatcatcatcgcctcctgcgtcatcaacttaggcggtttgaacaggccatccaggcagccagccggatcattcgaa

SEQ ID NO: 418427 - DNA, 100 bp, Homo sapiens
ccagtgatgatgaaattgactttaaagaaacgggtttctcacaggattcttctttgcagcaaggtctagacagtttcaaagtgaaacagaagttcttcgc

SEQ ID NO: 418428 - DNA, 101 bp, Homo sapiens
cacacatggaatgtagaagtcttgattgacgttcttaaagaactgatggacaatctaaaatatgtaaatcagttgaagaaggaaaatgaacgtgcccaggg

SEQ ID NO: 418429 - DNA, 101 bp, Homo sapiens
agccgcctttccagcatgcaggggctgctcagtttgcctgagaatacagatcaacccacagaacaaagcggatttccaaggcatctccccagagcgagcct

SEQ ID NO: 418430 - DNA, 75 bp, Homo sapiens
ccgagtccggaccggagactttggggcctaactagtatgaaagttttcaagacgcctacaagtggaaaatgcact

SEQ ID NO: 418431 - DNA, 95 bp, Homo sapiens
gggttgctgcccaagtgcatcatgcaggccacggacatcatgcggaagcaggttggctgcaaccctaatgaagatgtggctatctttgctgttga

SEQ ID NO: 418432 - DNA, 100 bp, Homo sapiens
ttctattacttcagcaacagtccttcaaagtggcaccctgtgctgcgcacactaaagaaccgcattgaagagaacactggccacaccttcaactccttac

SEQ ID NO: 418433 - DNA, 99 bp, Homo sapiens
cgtggacaaacagcacgtgtatatcggcagtgccggtttggactggcaatccctgggacagagagattggaacaattatcaggtcattaggatgctgtc

SEQ ID NO: 418434 - DNA, 73 bp, Homo sapiens
cccagccagtccccacagcataacagggacttcattgagaaacgctacgtggagctgaagaaggcgaatcccg

SEQ ID NO: 418435 - DNA, 82 bp, Homo sapiens
ctgctgttgcggccgctgccccagggctgcggggacgttacagacgttccacgttccgtctccctgtgccagccctcaggac

SEQ ID NO: 418436 - DNA, 75 bp, Homo sapiens
aaggtcatcaatgcagcctcaagtcagttgccttttctaagtttgagaaagatatctacgtctgcatgatctcct

SEQ ID NO: 418437 - DNA, 73 bp, Homo sapiens
gggggacgagcagcagcggctcctcaacacccctcgaagggtcatgtaggtacaacagcaaccaagaagatcg

SEQ ID NO: 418438 - DNA, 85 bp, Homo sapiens
tttaaaaggctcttccatggcagatattcgcagaggcatcagggctacacttaaatgaagatcatacatctgtcggtggcctggg

SEQ ID NO: 418439 - DNA, 100 bp, Homo sapiens
gaaagaaaagaatacattcctgattacctgccacccattgtgtcttctcaagaaggatgcatcatctgcagacatcagaaaagcatatcgtaagctttca

SEQ ID NO: 418440 - DNA, 100 bp, Homo sapiens
tccggtgaagctctacgtgtacgacctgtccaaaggcctggcccggcggctcagccccatcatgctggggaagcgtgacagcaatgacagtgttttttcc

SEQ ID NO: 418441 - DNA, 95 bp, Homo sapiens
cgcggggccatgtgcaggaccctaacgacaggcgcctccggcccatttacggggctgcttgctctcggtgactacatgaatgtccagtgccatgc

SEQ ID NO: 418442 - DNA, 100 bp, Homo sapiens
atcatcaggaaaaggatccagcttccttctgaaaaggcgatcttcctgtttgtggataagacagtcccacagtccagaccaaccctggaatggtccccag

SEQ ID NO: 418443 - DNA, 100 bp, Homo sapiens
tggaggttcgagcgctgttctcgctccggagccgctgcacatttcgtttggtgccctggttgtcagatgttggaaagcagtaggacggaacatactcttc

SEQ ID NO: 418444 - DNA, 100 bp, Homo sapiens
aatactacctttatttccaccataggtagttgatgtcacttggcgatattcctgcaaacatgaagaggtgattgccagaagaactaaggttaaagaagca

SEQ ID NO: 418445 - DNA, 83 bp, Homo sapiens
cacaagggcttcctggccctctaccaaaccgtggagtatcgagatcgttatgattcagaccggtatcgggatgggtatcggga

SEQ ID NO: 418446 - DNA, 83 bp, Homo sapiens
atggtcctgcactccatggactaaattgactgctgtgtaagctatggtggcatgtggtaccttaaagggacagtacagtcttg

SEQ ID NO: 418447 - DNA, 98 bp, Homo sapiens
aatggcctgcagaaggcccaggctcatgacggagctggtctgaagctggtagtttcctcacccaccagtccgactgaaatcgccaagagattgaatac

SEQ ID NO: 418448 - DNA, 75 bp, Homo sapiens
ttcgtcctacattcattggaactgagccaccgctggagtcgctggccacagtggaggagacagtggtgcgggaca

SEQ ID NO: 418449 - DNA, 75 bp, Homo sapiens
attgacaaggaggacctgcacgacatgctggcctcgctggatcctcccaagaaggtgaccacagtgattcaaaac

SEQ ID NO: 418450 - DNA, 90 bp, Homo sapiens
tgaccattccaacagatttgattgcctccagtggagatatcatcaaggtccaggtgcaggtacagcagtctccgcaacaggtctcggctc

SEQ ID NO: 418451 - DNA, 75 bp, Homo sapiens
cggcccccgcagacgctcggcagacctgcctagagctggaacgttacctccagagcgagccctgctatgtttcag

SEQ ID NO: 418452 - DNA, 100 bp, Homo sapiens
ggtcggtcccggggtcacccgctacgggaagcaggcctcgccacaggaagcagaacatcagagagccatgcagagacgtgctatccgtgatgccaaaaca

SEQ ID NO: 418453 - DNA, 74 bp, Homo sapiens
aaaatccagcaagatgcaagccttcaggaggatgaagaaggttataacgatggagaggtagatgacgaggaaga

SEQ ID NO: 418454 - DNA, 75 bp, Homo sapiens
tgtgcgcatggtggatcccaagaaagccgctcagatccggtcccaggtcctagccaatggtctggacaacaagct

SEQ ID NO: 418455 - DNA, 100 bp, Homo sapiens
ccccactggtattccagttcacctagagctggccagtatgactaacagggagctcatgagcagcattgtccatcaggtcatacttacctggttgcttgcg

SEQ ID NO: 418456 - DNA, 82 bp, Homo sapiens
cgcagaacccgggagtaggagactcagaatcgaatctcttctccctccccttcttgcctacagacctggtacctggattttt

SEQ ID NO: 418457 - DNA, 115 bp, Homo sapiens
caaagccatctggcacgccttcaccgcactcgaccaggaccacagcggcaaggtctccaagtcccagctcaaggagtccatgaagaatatcagctgccatattacgacttagtgc

SEQ ID NO: 418458 - DNA, 82 bp, Homo sapiens
cgagactgtaggcactgccatggcccctgtgctcagtaaggactcggcggacatcgaggtgtccctggccagtgtccttcca

SEQ ID NO: 418459 - DNA, 51 bp, Homo sapiens
cctgaagtcttcccacaactctagcaggtcgtttcggcccttccctggtcc

SEQ ID NO: 418460 - DNA, 100 bp, Homo sapiens
ggctcatcgagaagcgggctttccaggacaagtactttatgatagatgccatggacaatattaccaggcagaaccaattctacgatacccaagtcatcaa

SEQ ID NO: 418461 - DNA, 87 bp, Homo sapiens
cttccggagccctcggggcggcggactggctcgcggtgcagggggaaatttgcagtggtgagaaaatgtataaagaaagattctggg

SEQ ID NO: 418462 - DNA, 75 bp, Homo sapiens
gatatagcacaccatccccagccactgccactgcagagccccgccatggaagacacgccgttggtgatatcgaag

SEQ ID NO: 418463 - DNA, 100 bp, Homo sapiens
gaggccaaggcaccttccagaggctttgtggtgcgggacgcaccctggaccgccagcagcagtgagaagccagctgaagatgagtggggtaaaaccccag

SEQ ID NO: 418464 - DNA, 100 bp, Homo sapiens
caccattctaagaatgaaaggccagcacggtgcctaatggataagaacttcgttaggattgggaaatggtttgtccgaccctacgaaaaggatgaaaagc

SEQ ID NO: 418465 - DNA, 80 bp, Homo sapiens
agaagagaagctttactggtgttccagccctaaggctttatcctgtggataaacgcagagtgaacgagtttggggagtcc

SEQ ID NO: 418466 - DNA, 83 bp, Homo sapiens
ggagagcacaaccatcgcagttggaagcccatggggcaggatgttgcttcagagtgtgaagtcaaatgcatgccaacattcca

SEQ ID NO: 418467 - DNA, 75 bp, Homo sapiens
cggttccccggcccacagtgggggtgtgcaaacccgagagaactggcagcaaagtggggcaccaaggccctgtgc

SEQ ID NO: 418468 - DNA, 89 bp, Homo sapiens
cagattcaacccgtgtacgtgcctgtgcctaaaaagtccccacgagaagaagaagaagaggcggtcccggtcgcggaccaagtccaagg

SEQ ID NO: 418469 - DNA, 75 bp, Homo sapiens
agtgagttgggcaggttcttggccaagcagatatgcaatatgatgaggatgatgatgaaatcaccccggatttgt

SEQ ID NO: 418470 - DNA, 83 bp, Homo sapiens
gcatgatgttcgtccgcaacgattgcaagctgcagatctgggacacggccggccaggagcggttccgcaccatcacccagagc

SEQ ID NO: 418471 - DNA, 135 bp, Homo sapiens
cctgcatgtactgggggattcgcagggaggatgtcgggacaccccggaagctgggaaatggaacgtgttgtgggctttcacgtactgggtccaaatgctggagaagttacacaaggctttgcagctgcgctcaaa

SEQ ID NO: 418472 - DNA, 98 bp, Homo sapiens
gaggccggccggtgccagcacctttcggcttctgagacggcggcagcagcggcattcaggtggatctggagcatgagtggacaattcccagccacatg

SEQ ID NO: 418473 - DNA, 51 bp, Homo sapiens
tggcactgtcatctgtgtccctcgaccccaactggaccctaggcaaaagtg

SEQ ID NO: 418474 - DNA, 82 bp, Homo sapiens
ccagaccctggagcctcagttggaagcagccgatccagcctgcggagcctgtggggcagagttcggaatccagcattaagaa

SEQ ID NO: 418475 - DNA, 141 bp, Homo sapiens
acgtgctggtcgaggaagcggagtgtgccatgagcgagagggaggctgccccaaatgaggaagtgaatctggattgggaaagtcgacattaatcaactcattattcctcacagatttgtattctccagagtatccaggtcc

SEQ ID NO: 418476 - DNA, 100 bp, Homo sapiens
acctcaaagtgggacaatatcctctgtggagaacacccccccatggaggcgaggtagagttggggtcgcaggaaggggaacagtttgtgaagaaaatcgg

SEQ ID NO: 418477 - DNA, 74 bp, Homo sapiens
cacaccctgtcctatgtggacgtcagcactgggaaggttcatgggcgggggtggtgagagctgcagcctcatcg

SEQ ID NO: 418478 - DNA, 90 bp, Homo sapiens
gacttactctctacccttggcagtatgacatcgttggacactctggagatggctacaacattggtctggttccaatgaacaaaatcccca

SEQ ID NO: 418479 - DNA, 75 bp, Homo sapiens
ccgaaaagcgtttccgcagacagaagtggggagaagcggagcataagcagtactataatggatgtagacagcaca

SEQ ID NO: 418480 - DNA, 100 bp, Homo sapiens
gtgagacctgcctgaatggcgggaagtgtgaagcggccaatggcacggaggcctgcgtctccaattaaggaacagctatatcctgcttccttctgtaagc

SEQ ID NO: 418481 - DNA, 100 bp, Homo sapiens
gtgctacctatataataatcaccaggctaaggactgtatcgactcctttgttactcactgtgttcgggcctttgaagacctcagcaaactaatgatcaag

SEQ ID NO: 418482 - DNA, 100 bp, Homo sapiens
atatgatcttctgtcagtcatttgccatcatggaactgcaagtaatcaaattttctccggtggctaaaaagttgtttgtggtaactgcagtgagtgctat

SEQ ID NO: 418483 - DNA, 90 bp, Homo sapiens
cacgctcatgatcgacttcctcacccgcgcctgcgacctcgctgccgcagcgggaaccgcaagagcttggtggtaggaacgccctccccg

SEQ ID NO: 418484 - DNA, 100 bp, Homo sapiens
gacaactggatcctgcaccgtgacctcaagacgtccaacctgctgctgagccacgccggcatcctcaaggtagaggaggccgatgactggctgcgctacg

SEQ ID NO: 418485 - DNA, 82 bp, Homo sapiens
aagaggcagcctgggggccacagctgcttcattctttaaggaaaaacagtagtgctctgcatagtttactgaaacgagtggt

SEQ ID NO: 418486 - DNA, 74 bp, Homo sapiens
ctgtggaggtgaagacattgtggatttgacttgggctcatatgacataaggatgatcatctctggcacaacagc

SEQ ID NO: 418487 - DNA, 75 bp, Homo sapiens
tgaggccccagaactatcttttcgatagaagcagatttgggatatcctggaggtaaagcaagaattattcataag

SEQ ID NO: 418488 - DNA, 98 bp, Homo sapiens
ccaaacgcactgcctcgaagaagttcacgactctttactagtgacagctccacaaccaagtagctctataaatcagtcagcagatagtgggggaacag

SEQ ID NO: 418489 - DNA, 75 bp, Homo sapiens
tgctggagccaggtggcgagagcttccttcaaaatgtctactgttcacgaaatcctgtgcaagctcagcttggag

SEQ ID NO: 418490 - DNA, 75 bp, Homo sapiens
cgcggacctccagtggccggctccggaggcttggtgactccagtggcccagatatgaggccccaggattcctggc

SEQ ID NO: 418491 - DNA, 98 bp, Homo sapiens
ctagtccaaagcgaagagttgtctgtgtgatgatagtattggcatttataatactgaactatggacctatgagtactatactggcaattgctggagaa

SEQ ID NO: 418492 - DNA, 75 bp, Homo sapiens
tattgaaccaccaaaagtccattatgaaactgctaatggcagcattagccgctgttgggcctcctaatcctcggg

SEQ ID NO: 418493 - DNA, 83 bp, Homo sapiens
gccggggtcaccacgcctgccccagggaaccgcacaggttggatttggtctagggagtcccagaaagaagtagaaaaagagag

SEQ ID NO: 418494 - DNA, 156 bp, Homo sapiens
accattgtctttgaagactgtcggaaccagtggtcagtatccaggcctctcctggggctcatcctgctcaatgagaaggccttcacctaccaccatatccaggagatcatggtccagctgctgcggacagtgaaccggacagtcatcaccatgggc

SEQ ID NO: 418495 - DNA, 90 bp, Homo sapiens
gctgtctacgctgctgcaaccgggccgcatctggacggggcgccgcgcggcggagccgacgccgggtcatttgaaccaattctccgcctc

SEQ ID NO: 418496 - DNA, 100 bp, Homo sapiens
aaatccgttttgaagattgttgagaaattggatcttacacttgaaatacagactgttggggaacaagaggccctagactggagctggttacagacggaag

SEQ ID NO: 418497 - DNA, 75 bp, Homo sapiens
tgctcatccccaaagccaagccactcactctgctctggggattgtcagtggcttcgccccgaggagagctgactg

SEQ ID NO: 418498 - DNA, 98 bp, Homo sapiens
agctaccggcccaaggccatctacctggacatcgatggacgcattcagaaggatttagaaataccagcagtgcccatactccatagcatggtgcaaaa

SEQ ID NO: 418499 - DNA, 75 bp, Homo sapiens
gggacgacaaggagggcatgatcaacctcgtcatgtcctacgcgatgaagatgtgtgtgtctttaagtgctcagt

SEQ ID NO: 418500 - DNA, 125 bp, Homo sapiens
ttgataaaaagagatgtggggggattctcgacctgctaacagaactggaccttttcgctatcatggtgaacttacttcagattgtgcgggaccactgggttcatgttcttgtccctatgggattt

SEQ ID NO: 418501 - DNA, 100 bp, Homo sapiens
gcttttctgagtgtttacaagcaattaattgaagcaccagaccatgtaaatggacactgcacaagtccaacttctcagagttgcagttctggaaaacgtc

SEQ ID NO: 418502 - DNA, 75 bp, Homo sapiens
tgaggaggcgagctagccgggagttacaccgccaccgccagctggttatattctgggcactaaatgaaggcgttt

SEQ ID NO: 418503 - DNA, 90 bp, Homo sapiens
gcagtcatctcactagttatgttcaaaaaagtgtcagcttcctctggtgcaaccagcaagtcttccagtatgaatcccacagaaaccaag

SEQ ID NO: 418504 - DNA, 75 bp, Homo sapiens
ctcagtggcacagaccaagcctgatgtctataagggagaattccaactacctgactttcttaaagaaaaaccaca

SEQ ID NO: 418505 - DNA, 50 bp, Homo sapiens
cccggacagagcccgtggtcgcgcagtctttaacacctctgtgtgaagat

SEQ ID NO: 418506 - DNA, 100 bp, Homo sapiens
atgtcctaagacgccaggaggagtttgagcataagaccattgtgatgaatgactgtattatccgaggggatctggcaaatgtaagagttggacgtcattg

SEQ ID NO: 418507 - DNA, 100 bp, Homo sapiens
ccttgtccacacagagttcctgtacaaggttcctgacctgtggctaccaagcagtttctcgaagagattaacaagtggacagttcagtacaatgtttccc

SEQ ID NO: 418508 - DNA, 75 bp, Homo sapiens
gctcgtgagtgtggtggacacaatagccaagccctggtacctgacagtgtaaagaaggagctcctacaaagaata

SEQ ID NO: 418509 - DNA, 82 bp, Homo sapiens
cccgggtggcgcctccctgcgactcctggaccaccgggcgctggtctgctcccagccgctcagagcccgggcgctgtggaag

SEQ ID NO: 418510 - DNA, 100 bp, Homo sapiens
tcacccaagtgcattgcctttggaaacgaggctttatgaaggcaaagaacagatggagtttgaagaatccatgagacggctctttgaatccatcaacaat

SEQ ID NO: 418511 - DNA, 73 bp, Homo sapiens
gacgtcgtgatccagaagtccagagctgaggactgcctgtttgcagggatatgggattagaactgtttagaac

SEQ ID NO: 418512 - DNA, 50 bp, Homo sapiens
gacttgtacaccgaagaacggccgcgtgaaatcttacaggctggtgttaa

SEQ ID NO: 418513 - DNA, 100 bp, Homo sapiens
gtgctgcgcacctacttggagctggtgctttgcgtgctggtcagcatccggaacaacagacctgaaggaaaagattatgcccttcattggctagtgctgg

SEQ ID NO: 418514 - DNA, 100 bp, Homo sapiens
ttaacgagtattccaaatttgatggcaagcgggggctcaacccccagacctccagaaatgacgtcagaatcatttgcatcccgctgcctctacctgcctg

SEQ ID NO: 418515 - DNA, 88 bp, Homo sapiens
gcacagggtgtccctgaagtgccgcaggcagctccgtgtggaggagctggagatggaatcagagatcattgatttcttcctgggggcc

SEQ ID NO: 418516 - DNA, 100 bp, Homo sapiens
gtaagaagtgcctttcgcctcccaccatgattctgagacctccccagcaatgtggaactggaatgggtactgttcaaaaaggaatgccccacaagtgtta

SEQ ID NO: 418517 - DNA, 48 bp, Homo sapiens
gactccagccggcgggcgagcagggagcatcagatccatgctgctgct

SEQ ID NO: 418518 - DNA, 75 bp, Homo sapiens
gacccccccacccccgccggccgctgtggcggtcgcagtgacaccaggttgcccccaagtttcctggcagtgtgt

SEQ ID NO: 418519 - DNA, 90 bp, Homo sapiens
gtcagggacatttctgaagcgagcgtcttcgatggttttagctaaagaagatactgaggcagctattcaatcaatattatacaaagaaaa

SEQ ID NO: 418520 - DNA, 50 bp, Homo sapiens
tggtgagccaagggatcatgccgcggaactctaatgatccaggacaaaga

SEQ ID NO: 418521 - DNA, 90 bp, Homo sapiens
aattcttccactgatatctcaaaaggtgatctggacaaaggaacaggtatctcaggacgccaggaaagcatgtgcagatgcaactctctc

SEQ ID NO: 418522 - DNA, 75 bp, Homo sapiens
gttcaaccctccaaaagagcccatgaaagatgacgtctgaaggggcgtctcgattacctgagctctctgaaggtg

SEQ ID NO: 418523 - DNA, 95 bp, Homo sapiens
acagaatcaacccagaacggagagctccctcctagaaaagttcctccaggagtgatccaaaatggagcgcgggtcctgagccgagggctgtttcc

SEQ ID NO: 418524 - DNA, 100 bp, Homo sapiens
gttcctattgatggtccccccataatgggctatctgaagaggaacggggacgggagcctgctctacagcgtggtcaacacggccgagccggacgctgatg

SEQ ID NO: 418525 - DNA, 100 bp, Homo sapiens
cggctgcggaccctgccattccggaggaggtgtacacttaaagcgttctgggaatatgaatcccttctgcaccctggaatcaccagtccagccatgcatg

SEQ ID NO: 418526 - DNA, 100 bp, Homo sapiens
gcaacatcaggtgactgtcccagaagtgaatcgcaggtattctctactgccgctgatggtcaaacgcaagtggaaattaaagtgtgtcagggtgaaagag

SEQ ID NO: 418527 - DNA, 100 bp, Homo sapiens
gattacccacttcgagtcctttattgtggagaatattgctatcatctcagaagctgccagctcgggtatttcattacaagcagataggagagctaaaaat

SEQ ID NO: 418528 - DNA, 99 bp, Homo sapiens
tgattttggcttggctcgacaatttaccaattcctgtggtgacgtcagaccaattcttcaagagaaacttaatgaaatgagctatgaactaaagtgtgc

SEQ ID NO: 418529 - DNA, 90 bp, Homo sapiens
atgagctcccgcatcgccagggcgctcgccttagtcgtcacccttctccacttgaccaggctgttaattggccttggtcctcacagctcc

SEQ ID NO: 418530 - DNA, 75 bp, Homo sapiens
gcgagcggctcctctgccagagagtgaagatagtccaagtcctaagagacagcgcctctctcattcagtctttga

SEQ ID NO: 418531 - DNA, 90 bp, Homo sapiens
ggaaactgcgtttgcacaagtattaccccgtctttaagcagctctccatggagaagacttttttgtataacgagctctatgtctacaata

SEQ ID NO: 418532 - DNA, 74 bp, Homo sapiens
acccaccgaagacgaccatgacgagctctagctggatgggcgcagaggctcccagccccattgccaataccttc

SEQ ID NO: 418533 - DNA, 82 bp, Homo sapiens
cgaggactcttggagtttgagcatcagagggcccctagggtctcaattgagcccctgagtcctgagttggtggcagctgcat

SEQ ID NO: 418534 - DNA, 98 bp, Homo sapiens
gcaggatgggatccggctcctccagctaccggcccaaggccatctacctggacatcgatggacgcattcagaagtgatgtggagccaactgcaccgat

SEQ ID NO: 418535 - DNA, 51 bp, Homo sapiens
ccaagaaacatctcaccaatttcaaatctgcagcctcccgcgacgatgccc

SEQ ID NO: 418536 - DNA, 98 bp, Homo sapiens
atgggccctgtccctgtctcccagagcctgagccaccaaagcacaaggcagaaaggagtgcatcttcatgatacagttaagaggaatcttgacagcgc

SEQ ID NO: 418537 - DNA, 100 bp, Homo sapiens
acttatctgccgacttgaacacagttctcccctgaagggacagatggagttcattgaggagatcctggccaatttggagcaaggcttagcagaagacggc

SEQ ID NO: 418538 - DNA, 100 bp, Homo sapiens
gacctgactgtggagatggcggctcagaagataaacgaggggctggaacacctcgccaaagcagagaaataaactgtaagagtaaatgggtccagtaatt

SEQ ID NO: 418539 - DNA, 83 bp, Homo sapiens
gggagcacgcccccccagggcccccgcaccaggatgttctcaggctatggaactcagtcaactccccagggatatggctcgac

SEQ ID NO: 418540 - DNA, 80 bp, Homo sapiens
ctctggccgctatcatcccagcagtggagttcagcccactactctgaaccaggccaccagcccctcgggttccaagatgc

SEQ ID NO: 418541 - DNA, 90 bp, Homo sapiens
cggccgaggcggcggtgtgggcgcgtcaggccgcgacgagggcgctgaggtgctggagaatctggtaaaagcaccattgtgaagcagatg

SEQ ID NO: 418542 - DNA, 100 bp, Homo sapiens
ttccggaagcacacagtgcgcggggagcgttcctacaggcttgcagccaatttactggagcagggatgacgtagcccagtggctcaagtgggctgaaaat

SEQ ID NO: 418543 - DNA, 90 bp, Homo sapiens
ctttgggcgtcccattgccatggagccgtgtaaagccagtggaatatagtcagatgtacagttatagctacaaccagtattatcagcagt

SEQ ID NO: 418544 - DNA, 76 bp, Homo sapiens
ccagaaccggagcatggaggcgcacaacatcctcaggccacggcatatgcctccaaggacggggtcctcactgagg

SEQ ID NO: 418545 - DNA, 75 bp, Homo sapiens
ttgtttctcattctcatatttcaccaataaagttggctagagatttactacatccgtccttggaagaggaaaaga

SEQ ID NO: 418546 - DNA, 100 bp, Homo sapiens
gcgcagctggctggcggagcatgagcgccccagctgcctcgttttcagttgtgcacatctgaatgcaagcaatccctgtctgatgtggagtttcttgcac

SEQ ID NO: 418547 - DNA, 100 bp, Homo sapiens
ggaggcaaggccgaggataaggagctccacagcacctgttgccttcattagcagcttttcctcctcttccctgcacttcccagaaccaaagaatgtgaag

SEQ ID NO: 418548 - DNA, 90 bp, Homo sapiens
tgggaacgaggggtgaagcggcccaggtgaggctatgacatggtgcattacggccactccaaccagctgcgccaggcacgggccatgggt

SEQ ID NO: 418549 - DNA, 100 bp, Homo sapiens
caagacttttcctttaaagctggccagtgataaacaggggtcacatgacgacagaagccaagagggctgcaaagatggaaaagaagatgaaaattttgct

SEQ ID NO: 418550 - DNA, 100 bp, Homo sapiens
cccaaatgcagtctggagatgatcgaccacattgtgggaaaccagcctgatcaggagatggtgtccgcctccgaatggcgggatgtagctcattttggga

SEQ ID NO: 418551 - DNA, 111 bp, Homo sapiens
cccgcgagcaccagagtcggcgtaactatcgcctgacagggtatggacctgtctgccaatcaggacgaggagaccgaccaggagaccttccagctggagatcgaccgcgac

SEQ ID NO: 418552 - DNA, 98 bp, Homo sapiens
ccagagccgcccgggagcagggagggctccgctagcccggggggccctccccgcggggcagatggtgttccccccacactggggctcccactactgcg

SEQ ID NO: 418553 - DNA, 90 bp, Homo sapiens
atttcacagaaaataattcctctcttggaacttccatctgtttctgaagatgatttctgagagagcagacaccatcttatttctgttgaa

SEQ ID NO: 418554 - DNA, 75 bp, Homo sapiens
tctcatgaacaataacttgataactgcaattgaaatgagcagtctttctgagacatgaagccattattatatcag

SEQ ID NO: 418555 - DNA, 75 bp, Homo sapiens
gagacagaggtcatgattctgagatgattggagaccttcaagggttatatcctgtgttgtgacctcatggtttaa

SEQ ID NO: 418556 - DNA, 90 bp, Homo sapiens
atgaattacagctctcagatgtcccaaggacctattgctatgcaggacctgaaggagaagaaggagaaggtggaggagaaggcaagccgg

SEQ ID NO: 418557 - DNA, 74 bp, Homo sapiens
agatttgtggtgcgttctgagccgtctgtcctgcgccaagccaagctagcctttatgggaagcgcagaagtcag

SEQ ID NO: 418558 - DNA, 83 bp, Homo sapiens
gtttctctccctctgcccccccttccccacgcaaccccagatccatttacactttacaccagagagatgacacgggggaaatt

SEQ ID NO: 418559 - DNA, 76 bp, Homo sapiens
tgctcgttggaggctgtgcagcagaaggtatgagccagagcgggatgagtggcacttggtggccccaatgctgaca

SEQ ID NO: 418560 - DNA, 101 bp, Homo sapiens
ttgaaattaccaactgctttcctttccctcagcacacagaggatgatgctgactttgatgaaggtggagccgccaccaaaatgcagattttcgtgaaaacc

SEQ ID NO: 418561 - DNA, 75 bp, Homo sapiens
gccgaggcgccgcggtcggctctgggactcgtctggcgtccctcaggtcagcgcattgtgaataggctgagaact

SEQ ID NO: 418562 - DNA, 76 bp, Homo sapiens
tctagtctttccgcttcttgaatttctctctgtaaaggagatttggaggccaatcactgccaccttttatttccct

SEQ ID NO: 418563 - DNA, 83 bp, Homo sapiens
atgaccccaacgccaccgagagggcgcctggaatgcttgggcactgtttaaaggaaagttccgagaaggcatcgacaagccgg

SEQ ID NO: 418564 - DNA, 76 bp, Homo sapiens
gcttcaccgccgagtcctccagaaaatttttactactggagatgtcaacaaagatgggaagctggattttgaagaa

SEQ ID NO: 418565 - DNA, 98 bp, Homo sapiens
agaaaaaagatgacattccagaagaagacaaaggaaatgtaaaacaatgtgaaatcaattatgtgaacatctagtcttcacagtatgtttatcatatc

SEQ ID NO: 418566 - DNA, 83 bp, Homo sapiens
ccgggaccctcgcgcgcgaccgccgaatcgctcctgcagcagagggggatatgagactttctactcggaatatcctgagtgtt

SEQ ID NO: 418567 - DNA, 72 bp, Homo sapiens
ctgcacacctggatccaggataacggaggctgggtatccgcccccagatcatgaacggccccctgcaccccc

SEQ ID NO: 418568 - DNA, 100 bp, Homo sapiens
acctccagtgtcccttcttccacatgaaaaggataaggcggaattctccacgagttttgagcagcctcgggtttcccaccacctccaaatcatggaagac

SEQ ID NO: 418569 - DNA, 74 bp, Homo sapiens
gaaatgtttgacgacactgatggtttgcagataatcaccagaatgggagtgaatgacttgtggcaaattttgga

SEQ ID NO: 418570 - DNA, 90 bp, Homo sapiens
gtcctcctaggcatcttattgatcctccagtcgagagtgcctggtgaagaatgtgatgggatcactagcatgtctgcggagagcggccct

SEQ ID NO: 418571 - DNA, 101 bp, Homo sapiens
ctttttcgtttttcggatgatgccttcaatactacctttatttccaccatagacaacaatatgcacaggttttggcccaacagcagaaagcagcactgtct

SEQ ID NO: 418572 - DNA, 50 bp, Homo sapiens
actcctgtatatattcaaacaacagtttcacttttgttgcccaggctgga

SEQ ID NO: 418573 - DNA, 75 bp, Homo sapiens
gatagtcttcctatcacgggcactagtgtggctctcctgttccagcaattggacctcctgccccccgaggtctgc

SEQ ID NO: 418574 - DNA, 100 bp, Homo sapiens
ggggaatgggatttctgacgagtatcacgtgatccggcacgccatgaacctggaggccgtgaacacctacgaagagacagggtttcgccgtgttggccag

SEQ ID NO: 418575 - DNA, 100 bp, Homo sapiens
gtctgatttccattctgggtgatgccagacttaattcagtgcacaaatgagatgaatgtgaacatcccacagttggcagacagtttatttgaaagaacta

SEQ ID NO: 418576 - DNA, 74 bp, Homo sapiens
aatccgcaccaagaacctgctccccatgtaccaggaggctgagcacggaactggatctaccatgaaagacttgt

SEQ ID NO: 418577 - DNA, 100 bp, Homo sapiens
gtatagtgaagataaagccaggcaagggggccggctgacagatggaaaagggaagaccattgattgcaaggacgccatcttcatcatgacctccaatgtg

SEQ ID NO: 418578 - DNA, 115 bp, Homo sapiens
aagtgaagactttgaacgcactcctcagagtccgactctcccacctgctaagcctcgtcacgtgttcaatatgctaaagaagtatgtccgcgcagaacagaaggacagacagcac

SEQ ID NO: 418579 - DNA, 75 bp, Homo sapiens
ggaaggagcagaacgtgagggtgtaacttacaaaaagggtgcggggggcaatggcactgcagctctgggccctga

SEQ ID NO: 418580 - DNA, 152 bp, Homo sapiens
attaatctcagtcaaccctttcaagcagatgccatattttggggaaaaggaaattgaaatgtaccaaggagcggacattggctccctggattatcaagagtttgtagttgacattgaatccaggctgaggatggaaggtgtggaacttaaag

SEQ ID NO: 418581 - DNA, 75 bp, Homo sapiens
cgaagcaaggatttccgggactacctcatgaggaactcgaatcatttatgacagaaagtttctgttggatcgtcg

SEQ ID NO: 418582 - DNA, 75 bp, Homo sapiens
cctcagtacgccacctactattacccccagtatctgcaagccaaggacatggatttgattgacatactttggagg

SEQ ID NO: 418583 - DNA, 100 bp, Homo sapiens
ctccaggaagctgaccagctactgagtactcgcacagaagcattagaagccttacagagtgaaaaatcacgttccacagaaacagacacttccagttgct

SEQ ID NO: 418584 - DNA, 90 bp, Homo sapiens
catctacaaccttcgatctcctgacgagaactttccgctgtactttttgccatacagaggtagaagaggatgaatcagcaatgcccaaaa

SEQ ID NO: 418585 - DNA, 98 bp, Homo sapiens
gttactcttcagtacaatgtcaccctcccagcaacagaaatggagaaggtagaggagatgccacataaaccacagaaagatgaagatctgacacagga

SEQ ID NO: 418586 - DNA, 95 bp, Homo sapiens
ttgcttttacgggcgcctgcattactcaagttgtatcagagtaagatggacggtagctttgattgtgattgtggtgagctggagccacctgatca

SEQ ID NO: 418587 - DNA, 100 bp, Homo sapiens
gctggctgagaggctcaagaagctgattgagcagtatgagctgcgcgaggaggcctgaggcccagccagcgcccaatggatgacaaaaagaagaaacgga

SEQ ID NO: 418588 - DNA, 82 bp, Homo sapiens
ggattaagcgcctaattaggatggtttttcaacaagttggagtaagcatgcaatcgaatggcgccattttgcggtacggaag

SEQ ID NO: 418589 - DNA, 100 bp, Homo sapiens
ggagcaccgccttccggcagaagctggtcagtcaaatagaaagaagtgtgtttggaagtcaaaatgtggaggaactgtcttttcctctccgtgtttgaac

SEQ ID NO: 418590 - DNA, 75 bp, Homo sapiens
cttggcgatagttccctttctagaaagattgctcgctgtaagcagctcatctgtgaccccagctacgtaaaagat

SEQ ID NO: 418591 - DNA, 96 bp, Homo sapiens
agcaacagctggcagcatcacccccggacagcaaggattacagtttaaagacaatttctgtgatcaagttgtcatttggaagattaaacccatttc

SEQ ID NO: 418592 - DNA, 83 bp, Homo sapiens
tcccccctggatccgccgtcagccgggcccggggctttcgacatgccccccagtccctgaagaggaaggagaaggaatatgag

SEQ ID NO: 418593 - DNA, 87 bp, Homo sapiens
gattttgccaagattattaacaatacagagaatcttgtgcgggaattgctattcaattagcagagcctcacagacaatggccaaatg

SEQ ID NO: 418594 - DNA, 90 bp, Homo sapiens
tcatttcaggctccttctaaatggccaagaaactggcgatggaatatgagaggagccctctggaaagaaaaggacagaccctgtgctttc

SEQ ID NO: 418595 - DNA, 100 bp, Homo sapiens
ggttcctagagttgttcagaatcctccaaaaccagtcatgaccactagacccacagctgttaaagcaacaggtgaaaagcaatcacagtgttaaaagaag

SEQ ID NO: 418596 - DNA, 100 bp, Homo sapiens
tgtctttgctctgatgttcttgtatgcaccatcccataaaaactatggagaagaccagtccaatggggaggctcagaagcaagaagaagatgaaagttgt

SEQ ID NO: 418597 - DNA, 75 bp, Homo sapiens
gaatggctgagcggaggctgtaaaacctggcactctgcttgggttttacagacatttcaccagaggaattgaggc

SEQ ID NO: 418598 - DNA, 75 bp, Homo sapiens
ctgggttctggtgccgcgcagctttccccggcacccaggcatgtggaatatgctcatagtggcgatgtgcttggc

SEQ ID NO: 418599 - DNA, 98 bp, Homo sapiens
taaaaacaacaaggaagctttcagtaacgctgccaagaagagagaccaggagcaagtggagctggaaggcgagagctccgcacctccccgcaaggtgg

SEQ ID NO: 418600 - DNA, 102 bp, Homo sapiens
ccctgagccctgaggagttgaaggagaagcagaagaaggtggagaggatcaagacactcattgccaaatccaggttcaaggcaacactgtggctgagtgaag

SEQ ID NO: 418601 - DNA, 109 bp, Homo sapiens
cagtgggggtgtgcaaacccgagagaactggattgccaacactcctgatagctgaatgtgtgctggtttacatgactccagagcagtccgcaaacctcctgaagtgggc

SEQ ID NO: 418602 - DNA, 83 bp, Homo sapiens
cttttacttctcacttggacaagaactcaagagcagaatctccgatgtggacgagtgctcactagcagaaaaaacctgtgtga

SEQ ID NO: 418603 - DNA, 82 bp, Homo sapiens
ggcggtggctgcggttgcgggaccggtcaaaatgcagatcttcgtgaaaacccttaccggcaagaccatcacccttgaggtg

SEQ ID NO: 418604 - DNA, 75 bp, Homo sapiens
cgcagctgctttccgaggaagccggtgttgccgaggtcagccatgtcatctgagcctcccccaccaccacagccc

SEQ ID NO: 418605 - DNA, 82 bp, Homo sapiens
aacgccagcaagaacgaggaggacgcggggtgcggtctgcctgcagcctttctgccacctgtactggggctgcacccggacc

SEQ ID NO: 418606 - DNA, 75 bp, Homo sapiens
tgcccccttccgctggaaagcgcttcgagagctgtgcccaggagtgaacaaccagccctacctctgtgagagtgg

SEQ ID NO: 418607 - DNA, 82 bp, Homo sapiens
ctaagggtttctctactatgtccaatcctaatagctaccatcacccatcttttaccaagtacagaggcttcatcttatgaaa

SEQ ID NO: 418608 - DNA, 101 bp, Homo sapiens
ttggccaggccgtgttccgtgtctctggattcaagtcccaggagtcctgaccagagagcaggttggtgttcgaggaagagacattgttgttcttggtgtgg

SEQ ID NO: 418609 - DNA, 82 bp, Homo sapiens
caggacccgggctttagctatggcagcggcagcaccgggagtcagcagagtgaagatgagcgggatcgtgtgcagaagaaaa

SEQ ID NO: 418610 - DNA, 87 bp, Homo sapiens
cgggagcaagtgtcccaagatttaatggccttgcagggaacccagaatggcccggagttgctgcctcgcgtggccatgctgcgtctt

SEQ ID NO: 418611 - DNA, 87 bp, Homo sapiens
acagatctatatggagaacttttagaaacttgtatcattaacatcgatgttccaaatagctcttgcaagcttaggatatgaaaagag

SEQ ID NO: 418612 - DNA, 100 bp, Homo sapiens
atgtttcttctggatatccttcacttcaaaatagcttcataaagtcagaccctatcagatttggatatgtccttcatatttgattggatttacagtggtt

SEQ ID NO: 418613 - DNA, 100 bp, Homo sapiens
tagggccagcaggaactaccattcttggcaacagcaagaaaagcaagccattttcaagatggagttcgctcttgttgcccaggctggaatgcaatggcat

SEQ ID NO: 418614 - DNA, 100 bp, Homo sapiens
cttggccgaagtgcccgctgccgggcgcgggcctcaggttcgagaacttgtcttggacaattgcaaatcaaatgatggaaaaattgagggcttaacagct

SEQ ID NO: 418615 - DNA, 82 bp, Homo sapiens
ttcgcctccttcaccgccgcagaccccttcaagttctagtcatggttttaaaatcaaagatgggaaaatcggagaaaattgc

SEQ ID NO: 418616 - DNA, 88 bp, Homo sapiens
cgatgccggccgtgagcctcccgcccaaggagaatgcgctcttcaagcggatcttgaacaaatcacctgctgcagtaacagaaccaga

SEQ ID NO: 418617 - DNA, 100 bp, Homo sapiens
ttctggcattctgttagacagtgaatgtggaaaggagattgacagtcacaattttgtaataagtgcaaccaagatttttgttaatggctgctgggttgga

SEQ ID NO: 418618 - DNA, 50 bp, Homo sapiens
gcggcggcaccgggaggccgggccgagcgatgtccatgaaggaggtgggt

SEQ ID NO: 418619 - DNA, 73 bp, Homo sapiens
ggatgtgaaaaccaaattttacaatgcagagcccaaaggatctgaaggccgttccaagcgagggtgcttctga

SEQ ID NO: 418620 - DNA, 80 bp, Homo sapiens
ggatcgctttggaaacatctttaccctgttcattgggccagagccttccttgaatccagaagctggcaaacagcatcagc

SEQ ID NO: 418621 - DNA, 82 bp, Homo sapiens
cgaaccttacccggatgatggcatggggtgagacagagagggtctggggtcctgaggctgctggcagactatgggtacaacg

SEQ ID NO: 418622 - DNA, 50 bp, Homo sapiens
accggttccagccgaacatgacggcctcatggcggtccgagcttcgttcg

SEQ ID NO: 418623 - DNA, 74 bp, Homo sapiens
actgatcccccgaagagcttctgtcgccgctctagggctccactttgaggctctgatgaacattccagtgctgg

SEQ ID NO: 418624 - DNA, 50 bp, Homo sapiens
cgccggagcagctcctaacccaggagtacatcgatgcccaccctgagacc

SEQ ID NO: 418625 - DNA, 50 bp, Homo sapiens
cgacactgccagctggaaccagaccatatgaaattgacagttcttcaatg

SEQ ID NO: 418626 - DNA, 75 bp, Homo sapiens
gagatgcttaaaaatcaccagttactttaatgaatgccaacgtccggcggtacctccagctgacacagtcagaac

SEQ ID NO: 418627 - DNA, 112 bp, Homo sapiens
ggacaacctagaagggaagacaccaccagtttttgcttctgatgagagtccggagtgttgtcatgtgaagcctgccatccaggaacctccaatagttattagtgatgatgac

SEQ ID NO: 418628 - DNA, 75 bp, Homo sapiens
ttcatccctcgtcgaaaggattggattggcatctttagaacccagattgatcactatgttggcatcgcccgagat

SEQ ID NO: 418629 - DNA, 75 bp, Homo sapiens
tggtgaagcatctgatgcacgttccatccggcgctcagctgggcttgagattatgatgcatcattatcacagaag

SEQ ID NO: 418630 - DNA, 74 bp, Homo sapiens
tcacaccatcagcttcagagaatggcagccatttatttgtcccgtgagaagaagctggaggagttctccgtgga

SEQ ID NO: 418631 - DNA, 95 bp, Homo sapiens
ctgtcatcacaaaagagttgattgaaattatctctggtgctgcagctctacacgaatgcagagtttgagtccagatcccaaagcccagtacacaa

SEQ ID NO: 418632 - DNA, 98 bp, Homo sapiens
tggccaagcttcaggaggccaagcggcaacaccagtcagactgtgtggcttttgaggcctcgatgagtgttaaatcgccatttaatgtgatgtcaaga

SEQ ID NO: 418633 - DNA, 92 bp, Homo sapiens
tggtggttcctgctgccctcaaggtcgtgcgtctgaagcctacaagaaagatcactgagacccagaggctgggcctggctatggccctagaa

SEQ ID NO: 418634 - DNA, 82 bp, Homo sapiens
gaattctccaacaatggaggccagtggctggtctcagcgccacagcaacatcctcagagtctgagcgaactgcgcccagcgc

SEQ ID NO: 418635 - DNA, 82 bp, Homo sapiens
ggaaggcgtccgttggccttcgtacccgtcttgattgaggatgcctaaatcaaaggaacttgtttcttcaagctcttctggc

SEQ ID NO: 418636 - DNA, 118 bp, Homo sapiens
ggggactgcaggggttctcagagaggaaattcaggaaactttgacttcggagtatttccagatttgcaaggaaaatcctgccttgcttcgttgggcctatgcaagaacaataaatgtc

SEQ ID NO: 418637 - DNA, 75 bp, Homo sapiens
ggacagttcgctacacagcaatgcatcgaggacttgacacagcaagcaaaagacatacagaacataacagtccag

SEQ ID NO: 418638 - DNA, 73 bp, Homo sapiens
tcacctccctaaactggttaatagtggcatggaagatccatttgcttatgtccctgatgccaaaaatgcacct

SEQ ID NO: 418639 - DNA, 90 bp, Homo sapiens
tcgagtcctggaggaggatccccaagtagggggagtcgggggagatgtccagaaaattatgacttacctgtttgacttcccacatggccc

SEQ ID NO: 418640 - DNA, 100 bp, Homo sapiens
tcatccatgtgagtgaccatgcagcaaaagaaggagggtcctctcagtgattaagagatgaagcatctggtttttgttatctcaatgatgctgtcctggg

SEQ ID NO: 418641 - DNA, 75 bp, Homo sapiens
cctggtacaacaggatgtccaggctaaagtgaacaactccagcctgataggtttaggatacactcagactctaaa

SEQ ID NO: 418642 - DNA, 75 bp, Homo sapiens
tcagatctgcaaacagcaaagcccagaagcagctgtgcccccatgggttgacactaacgatgaagaaacaattca

SEQ ID NO: 418643 - DNA, 75 bp, Homo sapiens
caacaggttaacgtgtatggcgtgtgcgtgccagcttcgcctcaacagcatcaagaagctgtccaccatcgcctt

SEQ ID NO: 418644 - DNA, 75 bp, Homo sapiens
gcctgctgtagttatgcaccttaagaacctagatgatgaactggattctttccatgatttgaagaaacaggaaac

SEQ ID NO: 418645 - DNA, 100 bp, Homo sapiens
tggctcttccagcatctcacacaaaggtatatttgatgaatacagccagataaccagtcttgtcacagaggaaatagtgaatgtccataaagagattcaa

SEQ ID NO: 418646 - DNA, 100 bp, Homo sapiens
cttagcctgaacttttgaatgagaggtgccccatcaactggacttctcctgagtgttgaaaagaattcaatgactgcacttattgtggcagtgaaaggag

SEQ ID NO: 418647 - DNA, 100 bp, Homo sapiens
ctcatctacgactccatggccctcggcaacccaggaggcagcacccagggtcattcctggagcataaacgatccctgcagaacatgggctagaagacccc

SEQ ID NO: 418648 - DNA, 83 bp, Homo sapiens
cgccagatagaaaacggcgagagtgggcgagaacgtccactgcgggccggcgaaagctgccagagactgctgctactttgaaa

SEQ ID NO: 418649 - DNA, 114 bp, Homo sapiens
ctcgtggacaagtttgcagatcgggagcgcaaggtcgccctcaaggccatgatcaaaacatgtggacgagtgctcactagcagaaaaaacctgtgtgaggaaaaacgaaaactg

SEQ ID NO: 418650 - DNA, 90 bp, Homo sapiens
ggggggcaagcagtacctcctaggactctatgacacggccggacagaggactactgagcccagccaggctgtatgccattgctgccaaag

SEQ ID NO: 418651 - DNA, 100 bp, Homo sapiens
gaagacaagtgagccagatttcacctctgcaaatatgagagattctgcagaaggaagccagcagacctgcagaacttggctcccgggacccacccaccat

SEQ ID NO: 418652 - DNA, 100 bp, Homo sapiens
cctcaagctgctgcaccgcggcgccgacatcaattacgccaatgtggacggactcactgccctgcaccagctcctctggtgcaagtgtggtagctattga

SEQ ID NO: 418653 - DNA, 97 bp, Homo sapiens
agattccagtcatcctcctgcctcagccacccaagaagctgggaccacagttgctacccaagcattgtgccaaaactatcagtcaagcagtgaataa

SEQ ID NO: 418654 - DNA, 50 bp, Homo sapiens
cgatggaggagctgagcgctgatgaggttcgatacaagaggctgttttcc

SEQ ID NO: 418655 - DNA, 50 bp, Homo sapiens
cccatctccgcctcgcttccagcccaggtgctggagaatctggtaaaagc

SEQ ID NO: 418656 - DNA, 75 bp, Homo sapiens
caaagggatgtgatgctggagaactataggaacctagtctcactttggcaattgaaggaacagactaaaaatcgt

SEQ ID NO: 418657 - DNA, 50 bp, Homo sapiens
gaaaagatgcttctgggaacaaggacccatggatgaaggaccagatcttg

SEQ ID NO: 418658 - DNA, 83 bp, Homo sapiens
cagttggagttggaatttgtgcaatgtttagccaacccaaattaccttaattgttgccgaggagcccaagtagaagaaatatg

SEQ ID NO: 418659 - DNA, 83 bp, Homo sapiens
cggcgccctggggccccggagagagatgacctgatcagagccatcaagaaactaaaggcacttggcactggcttcggcatcat

SEQ ID NO: 418660 - DNA, 78 bp, Homo sapiens
gatctcgtcactcctttctttgtggtcttcatttgtgaatacataggtactccaaagattcaggtttactcacgtcat

SEQ ID NO: 418661 - DNA, 100 bp, Homo sapiens
cccagcccgggaccccacccccgctggacagtgggggaaactgaggcctgagcgggtgcagcggaactgctgcctgacgctctgcaacttcagcatcccc

SEQ ID NO: 418662 - DNA, 82 bp, Homo sapiens
gtgatttccagaggatttacactccccaaactggataccacccacatgtccatcatcagtagaatggataaataaattgttg

SEQ ID NO: 418663 - DNA, 82 bp, Homo sapiens
ctttgggatccggccagatgattacttggccctgggaggagcggggacactgaggacctctctccaaattggcctctcaact

SEQ ID NO: 418664 - DNA, 51 bp, Homo sapiens
agcatgatggacaggatgtttgccctcgagattcagaatggacagtttaga

SEQ ID NO: 418665 - DNA, 95 bp, Homo sapiens
gggcttcagtgcagacgcagtggtggccctggagcagtatgccagcaagactccccatccccaggatgtcaacctcagtccctcaaggccatacc

SEQ ID NO: 418666 - DNA, 87 bp, Homo sapiens
cttccgtgggcaacgtggccgacagcacagtcttcaggcagtgacagtggtgggagcagcagcagcagcagcagcagcatcaatagc

SEQ ID NO: 418667 - DNA, 83 bp, Homo sapiens
ggcaaggagatcattgacccagtgctggatcggatccgcaagctggttaccattccatcaaatacaatatctgtgaatggaag

SEQ ID NO: 418668 - DNA, 100 bp, Homo sapiens
gcccgctcgggccaccgcgggaaccgagcccgaggagttagccgagaattttctctacatgtgcacccatttaaaggactcggcttcaagggaagcagct

SEQ ID NO: 418669 - DNA, 98 bp, Homo sapiens
cttggaagcggccgccggcgcctagaacaccttccaccatgaccacctcagcaagttcccacttaaataaaggcatcaagcaggtgtacatgtccctg

SEQ ID NO: 418670 - DNA, 147 bp, Homo sapiens
cttccatctggggatggacaacctgcattggacccagctattgctgcagcatttgccaaggagacatccctcttagatgtgccctgtctccttcatttctttatttccatggcccctgctactagaagcattgtaaaaagccaaaag

SEQ ID NO: 418671 - DNA, 115 bp, Homo sapiens
agcacaggtctgcgtcctgctccttctgcatctggctcctgcagtcactcatccacatcttgcagctcgggcaaatctggaggtgtaaagtggatatctcggcactccctctgaa

SEQ ID NO: 418672 - DNA, 88 bp, Homo sapiens
caacgtagacactgttgacatcctaggatgcacagctttacacagagggggaacgcagctgttgttctccggagtcggctgaaggtca

SEQ ID NO: 418673 - DNA, 74 bp, Homo sapiens
tctcattggccggcgatatgatgatcctgaagtacagaaagacataaagcgaaacgactgatagtgtgcccagc

SEQ ID NO: 418674 - DNA, 103 bp, Homo sapiens
tctgatgcaatgaaaaaagttggaagaaagggtgtcatcacagtaaaggatggagatgaagatgaggaagctgagtcagctacgggcaagcgggcagctgaag

SEQ ID NO: 418675 - DNA, 75 bp, Homo sapiens
gagaccgtgaccgagagcgtgaccgagagcgcgaatatcgtcatcgttagaagattatttgcatgggtgcaaaag

SEQ ID NO: 418676 - DNA, 100 bp, Homo sapiens
cagattcgcagtggtcgcttcttctccttgatttatgtgatcagtttggctgaaccccgtctgcccctgcagctggatgatgctgttcggcctgaggcag

SEQ ID NO: 418677 - DNA, 98 bp, Homo sapiens
gacctgctaacagaactggaccttttcgacgcaaacatgcagatctttgtgaagaccctcactggcaaaaccatcacccttgaggtcgagcccagtga

SEQ ID NO: 418678 - DNA, 80 bp, Homo sapiens
aatgaagtgggcaggggccagtacagcgccgagacaagcagtggacagtttgcggttgtgaagaaatgccgtgagaaaag

SEQ ID NO: 418679 - DNA, 75 bp, Homo sapiens
gcaggagacactgtgacactttagcaaattgtggctactaatttgccccctgaagatcaagatggctctggggat

SEQ ID NO: 418680 - DNA, 96 bp, Homo sapiens
ccgtcttcccggcgagtccgcgacggtcgccgcccacggcgagcccagcagaccgggttatcccagtccgaggtccagcgaaggattttatcccag

SEQ ID NO: 418681 - DNA, 88 bp, Homo sapiens
gagaaatagacatagagtggtcacttcatttaccaaccctggaaccgcagacctctgggcttcctggccagaggcattgatgtgcagc

SEQ ID NO: 418682 - DNA, 74 bp, Homo sapiens
caaaacccctcgcctggctcggacccacggagccggcagcccagcactccgttcatagccctgatgaagcaagt

SEQ ID NO: 418683 - DNA, 101 bp, Homo sapiens
gctgagttcccatgtaggattctcctgtgtgagaactaccgctcccatgaagctatcatcaaaggggtctggttgctgcttacagtggtgacagtgacaat

SEQ ID NO: 418684 - DNA, 82 bp, Homo sapiens
gagactccggcgctcgccatggccgacgaaaagcccaaggtgtttgagaagtcccccctgcgggtgaagaacttcgggatct

SEQ ID NO: 418685 - DNA, 98 bp, Homo sapiens
tctgcaaagcctccagaggacataccacctccaggatcaggatgcagagcgacatctcgaatcagcgatgcacacttggcagacacaatgattggcaa

SEQ ID NO: 418686 - DNA, 99 bp, Homo sapiens
ctgctctcgagatggcaggagtcgggagctgcggcaactgatggagaaggctcggggcccccagttcccgccccagacctcttgatgcagatcaagcag

SEQ ID NO: 418687 - DNA, 75 bp, Homo sapiens
ttagagatcgttttgatggatatatcttccttgacagcaaagaatggaggaacacctctgctttatgctgtacat

SEQ ID NO: 418688 - DNA, 100 bp, Homo sapiens
caagatcacaagatgttgatcagcttcgtgatatcaaagagagattagcagaggcatttcatatcagtgaggattctgatcctttcaatatacgttcttc

SEQ ID NO: 418689 - DNA, 100 bp, Homo sapiens
tgcgggccaccgccaacctgccctcctacaacatggaccgggccgcggtccagaccaacatgagagacgagaactgcgctatcctcaaggagctggtgac

SEQ ID NO: 418690 - DNA, 100 bp, Homo sapiens
ctccccactgtccaccttctttagtgctgcccctgggcagaatcccatcgtgcctgagacccagggattgtcaatgaggcagatcagattccgatttgac

SEQ ID NO: 418691 - DNA, 75 bp, Homo sapiens
cggatgacctggaaggagatggtggacccaagtggagagattgtggaactggcgaaaggtgcatgtccctggaag

SEQ ID NO: 418692 - DNA, 100 bp, Homo sapiens
acaatgaccagtggctgagcaccgtctcccagtacgaccgggacaagtactggaaccgctttcgagactgtggggctgccttccaggaggatgatgtcat

SEQ ID NO: 418693 - DNA, 98 bp, Homo sapiens
gtcagacggcgctatgtacgccctcttcctcctggccagcctcctgggcgcggggaaatcctcattgacgattcaatttgttgaaggccaatttgtgg

SEQ ID NO: 418694 - DNA, 100 bp, Homo sapiens
caccgggatggagaaggaggaggaatcgtattaaaggtggaagaaggtccatatctttttctgtgggtgcttcaagtgttgttggaagtggaggcagcag

SEQ ID NO: 418695 - DNA, 74 bp, Homo sapiens
aatgacaagcctgcggggaagggcttgattacgatctcattgccccggatcatctgcgacaacacaggcatcac

SEQ ID NO: 418696 - DNA, 97 bp, Homo sapiens
gagtttacctgttgggctcctggctgcgcagattgccatcacgaaagccaaagtggatttctccagtgtggtgtgcctgcccccttccgtcattgct

SEQ ID NO: 418697 - DNA, 50 bp, Homo sapiens
aaaacatctaccagtttgactttaaaggtccggcctctttggcctacccc

SEQ ID NO: 418698 - DNA, 100 bp, Homo sapiens
acgcaggacagaaatgaccaacagataactgaggacaatggacctgcctgggcatagacttccttaagatctatttaggtccacctgaggaaagcgctgc

SEQ ID NO: 418699 - DNA, 75 bp, Homo sapiens
atgacattgacgacaggcgggagtttcaggaaactctggatcttttgccagaaatgagggcatactggcctgacg

SEQ ID NO: 418700 - DNA, 99 bp, Homo sapiens
atcacatcagggactccacggccagagccctggatgtcatttggaaaaacactagagacagacggctggcaggtacaagaaaattccccaggacacaga

SEQ ID NO: 418701 - DNA, 97 bp, Homo sapiens
agtcgactccctagcagcagccgccgccagagaggcccgcccaccagttcgcccgtccccctgccccgttcacaatagtttctctcttgttgcccag

SEQ ID NO: 418702 - DNA, 75 bp, Homo sapiens
ggtgaaattccgtggggaagaaggtttggattacggtggtgtggccagatttctctatgaatcatcatcaagaac

SEQ ID NO: 418703 - DNA, 49 bp, Homo sapiens
cggaggcctgactctgggagcacgcagaggtggagatcgccagtgtgga

SEQ ID NO: 418704 - DNA, 82 bp, Homo sapiens
agcagtcacgacctccagcacaggatatccattaccaaaacttgacatgaacttctcattggagaatagagaagagccatgg

SEQ ID NO: 418705 - DNA, 100 bp, Homo sapiens
aaatagagttcacgatcctgtaactgccaaacccaagttggttggagatgtggattttgaaggaatgatgagaagacagcagctgattacaagattttag

SEQ ID NO: 418706 - DNA, 75 bp, Homo sapiens
attaccgggttcgctaggctcacagatggtgtatcaagagctggagctgctttttttaacgaagttcgaaatgca

SEQ ID NO: 418707 - DNA, 100 bp, Homo sapiens
atgaattagaagaagaccttgaaattcttgaggaggctgcattgcagatgggcggaagccatttccaattaaccatggtgaaactagtgatgaaacttta

SEQ ID NO: 418708 - DNA, 100 bp, Homo sapiens
gaagattccatccctgaatgtagattgtgcagtgctcgactgtgaggatggagtggctgcaaacaaaaaggccattgaacacccagttcgaaccaatcag

SEQ ID NO: 418709 - DNA, 100 bp, Homo sapiens
caaacaccacatgttgtctcttagaagtgggagctgaacggtaacgatgggaaaggaactcctgtattcacaggggaggttgactgcacctacttcttca

SEQ ID NO: 418710 - DNA, 80 bp, Homo sapiens
caaagtgctgggattgcagggtatgtaaagaattcttgaaccgattctacaagtcactgatagacagaggagttaacttt

SEQ ID NO: 418711 - DNA, 82 bp, Homo sapiens
ttccaccgaatgccacctggtttataacaaaagggccaataataagaagtggacaatacagtatttgcttcattgtgtgggg

SEQ ID NO: 418712 - DNA, 100 bp, Homo sapiens
taagaatgggtctgtgatgtcacatctaggagcatctacccatggacagacatgtcttcccatggaggaagttggtgaaccatctaaagaagagaaggct

SEQ ID NO: 418713 - DNA, 100 bp, Homo sapiens
aaattagaacctcttcgccaaagccttaatttatctgaaagaaacagcacttcttctcagtctcagacaagtactgcctccagaaaagccaattcaagcg

SEQ ID NO: 418714 - DNA, 102 bp, Homo sapiens
ctcactgatgatagtgatactcctactttctaccaaactctggctggagtcacacattatgccctccaaatccttggttatggaatatttggctcatcccag

SEQ ID NO: 418715 - DNA, 59 bp, Homo sapiens
agtgcttggcaactgatgttccacttgacacactccctggtttcctgaggtttgtgagg

SEQ ID NO: 418716 - DNA, 50 bp, Homo sapiens
cccgagcctcttttcactgatggagtacaagatcctcagcatgagagaat

SEQ ID NO: 418717 - DNA, 75 bp, Homo sapiens
atctctttcgaagccattcagtcctcaatctccttttccttggctacccttcaggacctcaaggggctcggctat

SEQ ID NO: 418718 - DNA, 50 bp, Homo sapiens
ggtccctcgcctcccggccgagctgacgttcagtgatcggattttgtggt

SEQ ID NO: 418719 - DNA, 104 bp, Homo sapiens
gctgctcaaagctgctgccgccccttgggctaaaaggtgtcatggagaaactccagctgggcccagagattctgcagcgggaaaatccaaggcttatttatgcc

SEQ ID NO: 418720 - DNA, 100 bp, Homo sapiens
tgagtttcttcatctacaacccgcgcttctggccgcgggaaggagaggttggatggcaagcatgtggtgtttggcaaagtgaaagaaggcatgaatattg

SEQ ID NO: 418721 - DNA, 157 bp, Homo sapiens
aggtgttcaaacagcactgccaaatagcagaagaataccatgaggtcaaaaaggaaatcaccctgcttgagcaaaggaatggaatgcagtagccctctgggcctgggatattgtggttgataactgtgccatctgcaggaaccacattatggatctt

SEQ ID NO: 418722 - DNA, 74 bp, Homo sapiens
aaagatctcagtggatataaaggttcaagatggcagttaaacagggaaaccaactgcagatgcaagtccacgaa

SEQ ID NO: 418723 - DNA, 75 bp, Homo sapiens
gaaggcaccgacgtcatcatgctgaccaccaatcagatccgtaagagtatgtattcccgtgtgccagagtgccag

SEQ ID NO: 418724 - DNA, 100 bp, Homo sapiens
gacacctctgtatgaccttcgtattgaccaaaagatacgaggatgtcgtccaggaaagattgtgcagatgactgaagcagaagttcgaggcttatgtatc

SEQ ID NO: 418725 - DNA, 75 bp, Homo sapiens
tcagctctttggggttcccgttgtggtggctctgaatgtcttcaagcagcctgcttctgcaaagtggtacgatcg

SEQ ID NO: 418726 - DNA, 74 bp, Homo sapiens
gacactcttggtcatggcaacggaggcacagtctacaatttgagttcatgatcgagtccatcctgtatgcccgg

SEQ ID NO: 418727 - DNA, 74 bp, Homo sapiens
gggccggacaagaacctgaccgagagggaggtggaaatggatattgttgaaaaactggtgaaaatgataccttg

SEQ ID NO: 418728 - DNA, 100 bp, Homo sapiens
gaaacgaatcgctgctgctcttctaaaagccggttccctagaaactccagaaaatcttgccaaacttctgaccaggatgtatttaaaatcagaagtcata

SEQ ID NO: 418729 - DNA, 75 bp, Homo sapiens
gccggctccgggatgagcgcacggacggagacaggagactctctccatcatgtgaagatacagcaaaacagcagc

SEQ ID NO: 418730 - DNA, 100 bp, Homo sapiens
agagaaaatcagttcgtggttgcattgtggatgcaaatctgagcgttctcaacttggttattgtaaaaaaagggagaaggactcagaattgaaccagaag

SEQ ID NO: 418731 - DNA, 49 bp, Homo sapiens
cgaaagagcactggactccggaaggactcgtgagctgaagtgcagatga

SEQ ID NO: 418732 - DNA, 73 bp, Homo sapiens
tctcccaggccacaagacatttcctgctcggaaccttgtttactaattgagtggattagaacaagatgacatg

SEQ ID NO: 418733 - DNA, 100 bp, Homo sapiens
ccaggacacccctgaagccgagaaatggcacaccgtccctgcagtctggtggaagaacgcccaaggcaaagaccagatgtggtatgaggatgccttggct

SEQ ID NO: 418734 - DNA, 98 bp, Homo sapiens
aaacctttccaacacagatgtccaagctgccaaggtgtccgcaatgttgccagtgtctgtctgcagattggctacccaactgttgcatcagtacccca

SEQ ID NO: 418735 - DNA, 75 bp, Homo sapiens
attttcgaaccccggagtttgaagggccatactgatgcagagattgaggcaatattcacaaagtacgaccaagat

SEQ ID NO: 418736 - DNA, 96 bp, Homo sapiens
ggaacaggggaaaatggaagaaaatgttccaatatttccattggagatgaggttacaagacaagtggctcagtgcaaatgtgcaaaaaggtttcag

SEQ ID NO: 418737 - DNA, 75 bp, Homo sapiens
agggcgccttccatggagacgcaggatggcactggatctttaaaacgcagtggttcctttagcaaactccgggct

SEQ ID NO: 418738 - DNA, 74 bp, Homo sapiens
tagaacatcttcaggagaaaactcttaaagaatgcagcagcttgggaatgggtaccacagaccatgtcatcgtc

SEQ ID NO: 418739 - DNA, 75 bp, Homo sapiens
aactcttagagcctgtggtttgcatgcattggggagaatcttcaactgctggtggaccggcccgatggcacctac

SEQ ID NO: 418740 - DNA, 100 bp, Homo sapiens
taaggaagtaaaatggcggacctggcgaacgaaggtcagtcaccacgaacaggggcactcggcatgctgccccagcactggagaagcagcgctgtggggg

SEQ ID NO: 418741 - DNA, 82 bp, Homo sapiens
gtctgcgagccaggattcccgcatgatgccttcttctgtagagtgggcgctttgcagaatacgtgttgaatgaaatcactga

SEQ ID NO: 418742 - DNA, 51 bp, Homo sapiens
tgccctgtctcctcgcagatgaggaacgactgaagctggtgactgttttgg

SEQ ID NO: 418743 - DNA, 100 bp, Homo sapiens
gaagtgcccctgtggctggcgattaacctgaaacaaagacagaaatgtcgcctgctccctccagagtggatggatgtagcatctggaatcaagagaccca

SEQ ID NO: 418744 - DNA, 75 bp, Homo sapiens
cagactaaactactctcgaactggaagggttcctgagctcactgaaaagactattgtgccttaggaaaagcattt

SEQ ID NO: 418745 - DNA, 100 bp, Homo sapiens
gtgcaactgaaaatgacattgctaatagtgacagaaggaagtcaaggcaccattatgactcggatgagaaatcagaaacaagagaaaatggtgttacaga

SEQ ID NO: 418746 - DNA, 109 bp, Homo sapiens
caacgggaagggccggcccgcctccctggccggggcgcagttcggaggttcagcggggatctgacgagcttttctctacttgtgtcactaacggaccgtttatcatgag

SEQ ID NO: 418747 - DNA, 90 bp, Homo sapiens
gcaccatcggcatgcggcccaacgccaagaacaacaattgaagaggagctgggcagcaaggctaagtttgccggcaggaacttcagaaac

SEQ ID NO: 418748 - DNA, 100 bp, Homo sapiens
aaagagcctgtacaaccagcgcctgcgcctacagaacgagcatcgagcccggccacacctgtgcagctcagggccctgccggaacgggggcacgtgcaag

SEQ ID NO: 418749 - DNA, 90 bp, Homo sapiens
tgtttttctgttttgcctgaatacatgatttaaacaagagatttccacagaagacatgcgtcgggatgtccaggaaatttttcgcatgac

SEQ ID NO: 418750 - DNA, 75 bp, Homo sapiens
cagacttttcagcctttgacccaaagactgagtgagtcacctgttttcagtgggcagcaatgctggcatcgtggg

SEQ ID NO: 418751 - DNA, 98 bp, Homo sapiens
ccagtacatcccaactgagctggatcaagaccctgatgctcccataagacagaaaatgccccttgatgatctggatagagaagatgaagttagattac

SEQ ID NO: 418752 - DNA, 100 bp, Homo sapiens
atcatattatagatggagtaaagcacatcatgtctgaacctgaagaaatcactactatgtctggacagaagttaccactgaaaatgtctgttgattacat

SEQ ID NO: 418753 - DNA, 100 bp, Homo sapiens
ttgaacaaatttgatttccggagtcagtcattttactgtcaagacatttcttcggcattctgcaacagcaatggtgaaaggcagttttcctcgaatgaga

SEQ ID NO: 418754 - DNA, 100 bp, Homo sapiens
attatcatcggccccctcatctttgtctttctcttcagtgttgtgattggaagtatttatctattcctgagaaagagggaagtttgcctggctagtgaaa

SEQ ID NO: 418755 - DNA, 75 bp, Homo sapiens
gcggcgggagaggaacgcgcagccagccttgggaagcccagccactcccatggttcaagctttgactacaaccag

SEQ ID NO: 418756 - DNA, 100 bp, Homo sapiens
ctctacagttaactggcaaagaagattttgtggaagtataatactttgtcattatgagatgtcgtctctcggtgcctcctttgtgcaaattaaatttgat

SEQ ID NO: 418757 - DNA, 50 bp, Homo sapiens
gacacggtctacaccgacttcgacggtgggacagtcacttcctcctccct

SEQ ID NO: 418758 - DNA, 82 bp, Homo sapiens
cagtatggcttccagtacccccttgccatggcagcaaagctatgactttgcagccgtcctggagtggttcgcggagcgtgtg

SEQ ID NO: 418759 - DNA, 87 bp, Homo sapiens
agaagatgcctcgaactaaacaaattcatcccagaaatctaagagttgactatattgtggagtatgactatgatgctgtacatgatg

SEQ ID NO: 418760 - DNA, 74 bp, Homo sapiens
aacctggttatcagggagacggcttccgttgcgtgcccggaggtaagaatgattgatgttggctgatattggag

SEQ ID NO: 418761 - DNA, 100 bp, Homo sapiens
ctgaagcagaaaatcctagagacaggtcggatcatgctaaaaggagataatattactctgctacaaagtgtctccaactagaaatgatcaatgaagtgag

SEQ ID NO: 418762 - DNA, 90 bp, Homo sapiens
atctggaattttgccgatttcatgactaaccagtttggcacttggcaatgtaataagtgccttgggagacaagagcaagagggccacaca

SEQ ID NO: 418763 - DNA, 100 bp, Homo sapiens
tggcttcttcatcatccgggccagccagagctccccaggggacttctccatctctgtcaggatcgtacctagccatatggcctgctgcctctgccaattt

SEQ ID NO: 418764 - DNA, 75 bp, Homo sapiens
gcattttggcattgacatttaattttagggtcctttatatagaagggagagtagataagaaacctgatcgggaag

SEQ ID NO: 418765 - DNA, 80 bp, Homo sapiens
gggaccgggacctgctgctggacccggcctgggagaagcagcagcgcaagaccgagacatgggtgcccggcaccgcgccc

SEQ ID NO: 418766 - DNA, 75 bp, Homo sapiens
gagcagctgacttccctgaaggttctttacaatgacctgggcgcacaggagtctactcttcatcttgtgttgaga

SEQ ID NO: 418767 - DNA, 97 bp, Homo sapiens
atttcatccaccacattacttagatgatgaagaacgagagcttcaaatggatcctgcagactatggaaagcaacatttcaatgatgtcctttaagtc

SEQ ID NO: 418768 - DNA, 100 bp, Homo sapiens
aggagacagagctactggatctcagccttgtcaaagatgccagatgtgggagacacgccaaagctcccaaggaagctgccacttttgctagagagcaagg

SEQ ID NO: 418769 - DNA, 100 bp, Homo sapiens
cctggccagagaggagtgcctgagactaacagaactgctgggcgaatctgagcaccaactgcacctcaccagcttttctcaatttcatggacttattact

SEQ ID NO: 418770 - DNA, 101 bp, Homo sapiens
cgcggagctcgggcggccggcgcggaggtgctggagaatctggtaaaagcaccattgtgaagcagatgaggatcctgcatgttaatgggtttaatggagag

SEQ ID NO: 418771 - DNA, 100 bp, Homo sapiens
ctcactttagcagacagcgtccacaatgtgaatcctacagtttccaggccccgccagcaggcgaagcagggagatgtcagactgctacacggagctggag

SEQ ID NO: 418772 - DNA, 74 bp, Homo sapiens
catttacagtacctaaaaacaggtccctggcgagccccttgcaggggatgtatggcattgagaatgaagtcttc

SEQ ID NO: 418773 - DNA, 100 bp, Homo sapiens
acctgaatgacatctacctccatcaggaccccagatgtctgacagccctgtgtgacaccaagataagtaactgggtaattccagaattgattggccatac

SEQ ID NO: 418774 - DNA, 75 bp, Homo sapiens
catttgtgtatgaagctcaagatgtggggagtggcagagagtatgcattaaaggctgatcagctgaccgaagaac

SEQ ID NO: 418775 - DNA, 80 bp, Homo sapiens
cgcctgccgcatcccagggggccacacgccccccctccttcacgccacacacacgtgtgaatgacagaggtggtgccatc

SEQ ID NO: 418776 - DNA, 50 bp, Homo sapiens
gttggtgtggagtcacagcttgacttttgtgttccatcgacctgaagaaa

SEQ ID NO: 418777 - DNA, 54 bp, Homo sapiens
tggagacacggccagatctgccctccagttcaaaagatgtcgtgataaaggcac

SEQ ID NO: 418778 - DNA, 76 bp, Homo sapiens
gggtctgaagactgaaagagtcgaatggtttgttggcagtagccggatcgagctgggagatgtgacaccacacaat

SEQ ID NO: 418779 - DNA, 73 bp, Homo sapiens
ttctgctaacatggacccagctatgatgtttcgacagaggtgtgatgaatgcagactctgctaccattttggc

SEQ ID NO: 418780 - DNA, 75 bp, Homo sapiens
aggccaggttttgcagtggtctgagtccttcagcctcaagtccaaagcctggtgacatcctcccaggtacagccg

SEQ ID NO: 418781 - DNA, 74 bp, Homo sapiens
tgcggatctgcctccgcagaaggtaattcagtaccaaactgttcgatatgatatcctccccttatctcctgtgt

SEQ ID NO: 418782 - DNA, 100 bp, Homo sapiens
agtttctccacctgggtgaggtggagccacggagactgcttttctccagaaccagacgagctccagctcccaggctagaacagcactatgggcttctctt

SEQ ID NO: 418783 - DNA, 100 bp, Homo sapiens
ctgcctcctcttgtcaggcagggacaactgggaggaatagccaggtctggctgggtcggcacaacctgtttgagcctgaagacacaggccagagggtccc

SEQ ID NO: 418784 - DNA, 83 bp, Homo sapiens
caaaagttgtcaggttgaaaatggaagagtaattgcctgctttgattccctaaaggaccttaaaggctttgatccaggagaga

SEQ ID NO: 418785 - DNA, 74 bp, Homo sapiens
agagccctgcgcctcgcccgcccggaccagcctgccccggcgccgagggagaggctgtcgatgctgaggcacga

SEQ ID NO: 418786 - DNA, 74 bp, Homo sapiens
atttggagcaagattctcaaggaagcaacaagatcctaagacctgatggccaaaagaaaggaagaaaatttttc

SEQ ID NO: 418787 - DNA, 100 bp, Homo sapiens
caagaacttactggaagtgtgcctctgtgtctccttcctcggggaagtgcctagctgccactccatttatatgaggcaagaaggcttcctggctcatccc

SEQ ID NO: 418788 - DNA, 83 bp, Homo sapiens
cttcactatgtatggggtactcaatcctagtactgtgccctacaacattcaattggctcacagtggttgattgatcaacccca

SEQ ID NO: 418789 - DNA, 98 bp, Homo sapiens
atcaccagccgggatgccgcccgcttccccatcatcgccagctgcacactcttggggctctacctctttttcaaagacttggatgttgtgggtgatgg

SEQ ID NO: 418790 - DNA, 87 bp, Homo sapiens
cacatcgacagggacgtcctcattgtcctcgtactatactggcaattgctggagaagattttgcaattgttgcttctgatactcgat

SEQ ID NO: 418791 - DNA, 100 bp, Homo sapiens
tgcagggcgctcctccgagtccctcggcgctctgagcccacagggccccagtacgggaccgtggagaaggcctggatggccttcatgtccgaggcagaga

SEQ ID NO: 418792 - DNA, 100 bp, Homo sapiens
agcttccaggatcctgagatccggagcagccggggtcggagcgggtacttgaagtttattgagttgcccttgactcagagaaagttttgtcaaacatgtc

SEQ ID NO: 418793 - DNA, 100 bp, Homo sapiens
gtcaaacctgaaagaccccagttatggatgggagagattctacattgcattgactgggattccagtagcaattttcataactctggtgaatgtattcatt

SEQ ID NO: 418794 - DNA, 82 bp, Homo sapiens
cgctgagcctgcagccggccctgccgatgtgaagttcatttccaatccgccctccatggtggcagcggggagcgtggtggcc

SEQ ID NO: 418795 - DNA, 98 bp, Homo sapiens
ccgccaccgtctgaactaggatgtcccgacatgaagcagttgcagacttgcaaaggatgtttcccactccaccatctttggaacagcatcctgcattt

SEQ ID NO: 418796 - DNA, 51 bp, Homo sapiens
ggtgtctcttctcgccctggcggggaaggtcgcaatggaagaagagatcgc

SEQ ID NO: 418797 - DNA, 98 bp, Homo sapiens
ctgtccccgggggcgccatggcgaccggagcgaacgccacgccgttggcctggtggagttgacagaagagatcctgaagctgctgatggaactggtct

SEQ ID NO: 418798 - DNA, 96 bp, Homo sapiens
cttggaatgatcatcaaacagctatggtgatgattagagacatactaatgtacatggttccatcataatgaatggatccaatatggcaaatacatc

SEQ ID NO: 418799 - DNA, 75 bp, Homo sapiens
aatccagttccaaggactccacgggggccagctctcaatgttgcaagaaaaaatagaccatttggagcgtttgct

SEQ ID NO: 418800 - DNA, 88 bp, Homo sapiens
attctgcaagcaggcaacctgaatacagtgagaaagatcagtctaaagaaaaggagaagaaagtgaaaaaaacaattccttcctgggc

SEQ ID NO: 418801 - DNA, 100 bp, Homo sapiens
cctcagcccagagcagcacacactcggatttctatattcagatgaagttcaaattggtccagaaacagttatgaccactctttatactgccaagaaatac

SEQ ID NO: 418802 - DNA, 75 bp, Homo sapiens
cacacagccagaagctagaccacctccaatgtgacagtgatgataacatgggtgccaaaaatacttcaataggag

SEQ ID NO: 418803 - DNA, 100 bp, Homo sapiens
gagaaagcctggaatgcttacccctactgcagaaccgttggcctctacacctccatcttcggcgtgctccagctgctgtgcctgctgacggcccccgtca

SEQ ID NO: 418804 - DNA, 83 bp, Homo sapiens
ccgcgcaggagcctcccggagctgctgcctgtggaggaaccgattgtgtccacagatgaggtcatcttcccactcaccgtttc

SEQ ID NO: 418805 - DNA, 105 bp, Homo sapiens
atttgcgcaagcaggtagcgccgctgctgaagagtttccaaggagaggttacagaactcaataatgtgaagaacgtagctcgattgccaaaaagcaccaagaaac

SEQ ID NO: 418806 - DNA, 51 bp, Homo sapiens
cagcgggatcatccagcacatagacctgcgaccgcatcaagcagtccgcca

SEQ ID NO: 418807 - DNA, 75 bp, Homo sapiens
cgcatcgggggcgactcaggcctgtccagccggggcaagaaggatgccttccgtgccttccatcaagatctcaat

SEQ ID NO: 418808 - DNA, 100 bp, Homo sapiens
agaaagccaaggccctgagaggcaggatctttcaccaacaatcaccagtggtttacacaacattgcaaggagcattgaaactcgaaactactcagaagga

SEQ ID NO: 418809 - DNA, 82 bp, Homo sapiens
gcggattcgccgaggcaccgaggcactcagaggagagttcctatcagactgagattgggcagaccctggacctcctcacagc

SEQ ID NO: 418810 - DNA, 82 bp, Homo sapiens
gcggacgaggggaagtcgtacagcggagcttactccacgggaacagcctctagataatctgagttgttgaaaatacgaagcc

SEQ ID NO: 418811 - DNA, 98 bp, Homo sapiens
ggtacattgagcaggctacagtccactccagcatgtgggctcgggatgagtttgaaggcctcttcaagcagccagcagaaaatgtcaaccagtacctc

SEQ ID NO: 418812 - DNA, 74 bp, Homo sapiens
ctgcagcatattgtactggcctgctgctggcccgcagggtttttaacaagttaatcaggcgctacaaatacctg

SEQ ID NO: 418813 - DNA, 118 bp, Homo sapiens
tgggtagctctcgagaatctagaggtggatgggattcccgggatgacttcaattctggcctgattgttggcaaaggcatcataagaagctggcatttatttctgttctaacctattac

SEQ ID NO: 418814 - DNA, 50 bp, Homo sapiens
catgaatggaaatcggctccgcagatgatgtgatgccagccacttactgt

SEQ ID NO: 418815 - DNA, 101 bp, Homo sapiens
cgcccgtctctgagactgcagttatatgatgatatgttagtggtacccattattgagaatacacctgaggagaaagacctcaaagatagaatggctcatgc

SEQ ID NO: 418816 - DNA, 76 bp, Homo sapiens
aatgctggcaaagtggaaaaatgtgcgagatcatgatgcagccgtccttttggatttctttttaataatgtgtgac

SEQ ID NO: 418817 - DNA, 98 bp, Homo sapiens
tttcctaccatctaaaatacgaaggtttctggctgggcttatcaaagttttggctttgttgcaagagcaggtcaagatttagctgttcttcagtgaac

SEQ ID NO: 418818 - DNA, 100 bp, Homo sapiens
gatacaacatctattgaaaagatgtcaaactgttgtgaagatatcattccatattggaagaagagatttctacacatgaaaaaaatgcctttgtttagta

SEQ ID NO: 418819 - DNA, 75 bp, Homo sapiens
cggagaggtgctcggattctcgtagctgtgccggctgaagacagttccccagggataagcctgtccagcagcaga

SEQ ID NO: 418820 - DNA, 100 bp, Homo sapiens
gcttctgcctaagaagaccgagagtcaccacaaggccaagggcaagtgatttgacagtattctgaaaaggaggacaaatatgaagaagaaattaaacttc

SEQ ID NO: 418821 - DNA, 90 bp, Homo sapiens
aaaacaagaggccccagagggaaaagaagcccaaagttttaaagcctctacggcagacacatgcaggccaacccagaaccaccgaagaag

SEQ ID NO: 418822 - DNA, 80 bp, Homo sapiens
ttcaatgtccgcatcgcaaccaccgccctggccatctaccatgtggccctgggaggagcggggacactgaggacctctct

SEQ ID NO: 418823 - DNA, 74 bp, Homo sapiens
tttcgcctgcagctgctcaccgtggatccaaacttctacagcaaaaacttacttcttttaggaaagacatactt

SEQ ID NO: 418824 - DNA, 50 bp, Homo sapiens
ggtttggactggcaatccctgggacagcaaccaaccctgtcagatatgac

SEQ ID NO: 418825 - DNA, 50 bp, Homo sapiens
catcgagtgtgacgtggtgaaagatgaaggatttgggggcagagcacttg

SEQ ID NO: 418826 - DNA, 99 bp, Homo sapiens
gtacgacaagatctgcaaggccgccaggcactgagctggagcccgcctggagagacagacacgtgaccaagaatcgccttcagccctgtctggtgcatc

SEQ ID NO: 418827 - DNA, 100 bp, Homo sapiens
ctcctctcctaggtgccggccgggagggcggccgcagcagggactggtgattgcagctggaagtgcccatgaccgagctggcgtcctccgggggcgggtc

SEQ ID NO: 418828 - DNA, 83 bp, Homo sapiens
ctcgtgggagccccgcgggtcctgcccaggaaaaatgaggaagctgtgagtaccagtggaaggaacgagccaggaagagggac

SEQ ID NO: 418829 - DNA, 100 bp, Homo sapiens
cagaagtgcttgctgttatccaggaatcagagatcattgatttcttcctgggggcctctctcaaggatgaggttttgaagattatgccagtgcagaagca

SEQ ID NO: 418830 - DNA, 100 bp, Homo sapiens
cttttgacatcatcaagcgttacatggacggcatgaccgtggtaaacctattgatggcaattttgctgactgtggaagtgactcatccaaactccatgcc

SEQ ID NO: 418831 - DNA, 98 bp, Homo sapiens
cgcggcttccggagccctcggggcggcggactggctcgcggtgcagtatctggagtccatctttcaccatcttctcctgagattgtactggaccgtga

SEQ ID NO: 418832 - DNA, 98 bp, Homo sapiens
gaaggcgcgagtgaggaaaggaggtactgtagctttgccctttcggatgaagcatacagatccctacgagatcaagataaggaccaatgtattctcat

SEQ ID NO: 418833 - DNA, 82 bp, Homo sapiens
cagctgttcccactggctctgctgaccttgtgccttgggggatatgagactttctactcggaatatcctgagtgttgcgtgg

SEQ ID NO: 418834 - DNA, 90 bp, Homo sapiens
aaaagatcacaagcaactctggatgggattgcaaaatggtatcgtcagatcctggaaaaagccattcagttatctggagcagaacaacta

SEQ ID NO: 418835 - DNA, 98 bp, Homo sapiens
ccgtggaggtggcctggggagccgtggccctttcgggggaccttcgagacaaggctgtcagcccctaggttgcccgaagctcagcagagagtcggagg

SEQ ID NO: 418836 - DNA, 96 bp, Homo sapiens
acaagctgtgtggaccatatgaaaaatttatatgtgagcaggagagtttggagctgtgatggaaggccagctcaaccaggacgactccatcctcaa

SEQ ID NO: 418837 - DNA, 90 bp, Homo sapiens
cggcacgatggtcatggcgtatttcgtcgagaatttttgggttattaatgctgcactggctttagcagcaaaaccacagagtaaactggc

SEQ ID NO: 418838 - DNA, 89 bp, Homo sapiens
tttcttccattcactcactggaatattgacccttatttatccagaagattgatcatcatatgggtttcaacgcaaaatcatgctgccgt

SEQ ID NO: 418839 - DNA, 75 bp, Homo sapiens
gttttggtagaagatgtggtacacactcagttaattaatctggactgatcctttgaaatactccagccatgacta

SEQ ID NO: 418840 - DNA, 75 bp, Homo sapiens
gctcctcactttcttcctccgcacggatgctgagaggctgatcccttatccaacatggttctaaccttcagtact

SEQ ID NO: 418841 - DNA, 83 bp, Homo sapiens
cgagagatggagatgggcagacggattcatttagagctgcggaacaggacgccctctgatgtcatctccgcggtgtcgaggct

SEQ ID NO: 418842 - DNA, 75 bp, Homo sapiens
aactcaatcaaaccagtattcttttcacacaggtacgtacctgtgggcatcatgttccttgttggaagcaagatc

SEQ ID NO: 418843 - DNA, 75 bp, Homo sapiens
cgcaacctcgccgtggccatgtgcagccgctacgaccgtcacgacggcaccagcaacgggacggcacggttgccc

SEQ ID NO: 418844 - DNA, 82 bp, Homo sapiens
gagtttttgccagctgggaaggcagaatccaaagcagtcttgattgatatggaagaaggggtagtgaatgaaattctgcagg

SEQ ID NO: 418845 - DNA, 100 bp, Homo sapiens
cttcgcggtggtcaagcgggccacgcacctcgtcaccaaggccaaggttgccgtcgagtatcttaaggactccaacctcctgttcttcggggggctgctg

SEQ ID NO: 418846 - DNA, 100 bp, Homo sapiens
cgcgctccctccgccgccgccgccttgctgctgctcaaagctgctgccgccccttgggctaaaagtcaccaggagactaaagtccatcaaaaacatccag

SEQ ID NO: 418847 - DNA, 75 bp, Homo sapiens
catactatccgtttgttcaggaaccaccagtgacagagccaagaagcttgagagaagaaaaatttcagaaaaatt

SEQ ID NO: 418848 - DNA, 93 bp, Homo sapiens
ccacgttctgcagaggaccatccagtgtgcaaaagggtttccaggcctgaggtgcccgccctggccccaggagaatgaaccagccgcagagga

SEQ ID NO: 418849 - DNA, 75 bp, Homo sapiens
taacggagcaacttgctaatggcaggcattttacaagttactccacaggatccgctgaacataggatgttgccac

SEQ ID NO: 418850 - DNA, 90 bp, Homo sapiens
gcagcggaaaatgatccagtcacagatgcctgaggaagtgcaccatggagaggaggaggtggagacttttgcctttcaggcagaaattgc

SEQ ID NO: 418851 - DNA, 100 bp, Homo sapiens
tcaagttcaactcttacatcagttaatagtagcaaatatgactggactggaaccatcaaacaaggctgcagagtcttcaggaaccagtattactgtggac

SEQ ID NO: 418852 - DNA, 99 bp, Homo sapiens
agagaagccaagccacacatggcttttgtggccacaggaaccaatctgtctctccagttttttccggccagctggcagggagaacagcgacaaacacct

SEQ ID NO: 418853 - DNA, 98 bp, Homo sapiens
ttcagcaagagggtccagaagagcatctcgcagaagaaactcaagctggacatcgacaagagcgtcaaggtcagcatctcctcgacgatcaagatcta

SEQ ID NO: 418854 - DNA, 90 bp, Homo sapiens
ggaaactgaggcttagagaagtttggcaaattggctaagttcctacagctactgcacagttggggatcttcaaaccaagatagatggctt

SEQ ID NO: 418855 - DNA, 51 bp, Homo sapiens
ttcgcagtggtcgcttcttctccttggtcaatgagctgaaggagaaaggca

SEQ ID NO: 418856 - DNA, 51 bp, Homo sapiens
aacgatttcatcagtatggatcccaaggatgaaacaagtgaagatgctaac

SEQ ID NO: 418857 - DNA, 98 bp, Homo sapiens
gagcaaattcctactgtccggctgcgcggctaccgtggccgagctaggtgtctggaaatgaagtatggaaatgaaatcatgaataaagacccagtttt

SEQ ID NO: 418858 - DNA, 147 bp, Homo sapiens
gtcatgtccctgggactcctgtctacagagaaaaagaagatatgtatgacgagattattgagttaaagaagcgcccgggggctggagaaggccaggcagcagctgcaggaggagctccggcaggtcagcggccagctgttggaggag

SEQ ID NO: 418859 - DNA, 75 bp, Homo sapiens
ccaagacggggtccccgagtggttccatggtgcaatctcaagagaggtgtccgcaatgttgccagtgtctgtctg

SEQ ID NO: 418860 - DNA, 75 bp, Homo sapiens
agcaaacttgctacaatggcaaaattactggaaacacctatttctaggacttcagtactagtgctaataacatcc

SEQ ID NO: 418861 - DNA, 100 bp, Homo sapiens
ctggcagggactgcccagccctgtggacgctgccttcgaggatgcccagggccacatttggttcttccaagataagtatgctgtgcgcttcatccctcgg

SEQ ID NO: 418862 - DNA, 100 bp, Homo sapiens
ctttggtgaaagctaagaaggttcaaacaaatttgcaaatgatatacaacttctaagtttttcagaagaagtgaagtcaagatgaagaaccatttgcttt

SEQ ID NO: 418863 - DNA, 106 bp, Homo sapiens
cgcaggtcgaggacggtcggactcccgcggcgggaggagcctgttcccctgaggtacaaactcttaatgagcaggattgggaacgtgcccagcaagctagtgtctt

SEQ ID NO: 418864 - DNA, 75 bp, Homo sapiens
cggaactcaagcttggagctgacggcagtgccacttctgccccaccaacgttgggccaaccaaaaggagtcagtg

SEQ ID NO: 418865 - DNA, 101 bp, Homo sapiens
gcagaaggtctctggagacatcttcagcagcctggctctgacagtggtacaacagcggtggtggccctgatacgagggaagcagttgattgtagccaacgc

SEQ ID NO: 418866 - DNA, 83 bp, Homo sapiens
cgccggctcggggagcccagttccgccgctgccgagcgcgtccaggcagctgtgcctcctgctgaatgcggagaacatcttcc

SEQ ID NO: 418867 - DNA, 100 bp, Homo sapiens
gcgcggaggccgcgacggacgcaagatggcgacggcgaccatagctctcaactgaagcgctgcggcatggcgcgcgcctgcctccaggccgtcaagtacc

SEQ ID NO: 418868 - DNA, 82 bp, Homo sapiens
cggttctccatcgcgcgcacggcagcctagcgcaatgaggcgggcagcactgcggtggccaaggtggaatacgtcaggaaga

SEQ ID NO: 418869 - DNA, 100 bp, Homo sapiens
cagggccacaaataaggcaggagaagatgaaaagcaagctttcctccaagtctttggtgaccaagaatatggcccaggtgaccaaagccctggacaaggc

SEQ ID NO: 418870 - DNA, 96 bp, Homo sapiens
cgatgcaccagtgatctacgggctggagttccaggtttttagaacttcagccataaaaatgggcagaattttccttgatcatatcggtggtacccg

SEQ ID NO: 418871 - DNA, 88 bp, Homo sapiens
acatttaattttagggtcctttatatagaagggagagtagatgaacgccgaggcccacgtcagaaagctggaagacagcttatcagaa

SEQ ID NO: 418872 - DNA, 98 bp, Homo sapiens
caggccttcctcaatggggaaacccaaattgtagctgacgaagcattttgcaacgcagttcggagttattatgaggtcagatgaacagattcaatcag

SEQ ID NO: 418873 - DNA, 98 bp, Homo sapiens
tggacatcctaggaacttgtgcaacagagcagtccagatgtctacgagcatacctggggctgattggccccctggaaaaaggacaagtgaaaaatgag

SEQ ID NO: 418874 - DNA, 75 bp, Homo sapiens
tcaaggcaacacaaaaagtacctggtgtggagagagtatgctctgtgtcgtcccagacatttctgcattccgaga

SEQ ID NO: 418875 - DNA, 80 bp, Homo sapiens
ccttcagccagattgattcctcatctgtgaaaaggaggtcagcccaaggccaaccccactgtcactctgttcccgccctc

SEQ ID NO: 418876 - DNA, 106 bp, Homo sapiens
caaccacactaacgagattcaagattatttgcaacagctcacgggagcaagaacggggtctaatgtgatggaagagcaggacctgcgggacatcggcatcagcgac

SEQ ID NO: 418877 - DNA, 100 bp, Homo sapiens
aagagatctcagcgctcaccgacttctctggcactcaaggagttgcccctggtcctgtaattggacttcaggcaccatctactggtcttcttggcgcccg

SEQ ID NO: 418878 - DNA, 75 bp, Homo sapiens
gccaggcccggagcctgccccagccacagaaggaagaggcccagcagaagggactcgctgagccaccccccgccc

SEQ ID NO: 418879 - DNA, 98 bp, Homo sapiens
cggcagcggaaccggtgccagtactgccgctaccagaagtgcctggccatgggcatgaagcgggaaggtactccaaagattcaggtttactcacgtca

SEQ ID NO: 418880 - DNA, 75 bp, Homo sapiens
cagccgggaggacatctacaagcggaggcggggtttcaccatgttgcccagactggtcttgaactcctgagctta

SEQ ID NO: 418881 - DNA, 98 bp, Homo sapiens
cctgccctggcgctgacaagggtccagcctccgatacatatgtagagtgtgtcggtcagaaggaacacctgagaaaccgctttatcatccttgtgtat

SEQ ID NO: 418882 - DNA, 96 bp, Homo sapiens
tcccagctgcgcaaagcttgcgaggtggcgttagggcgaactttctgaccaagtatacaactacccagagggcctaggagaagtgctgtatagaga

SEQ ID NO: 418883 - DNA, 99 bp, Homo sapiens
tggaacagtacgggaaattgggtcacaagctgtttggtcactctcatcttgcaaaccagctggacagtgccacatcgcttatccaggcagctaaaaacc

SEQ ID NO: 418884 - DNA, 82 bp, Homo sapiens
tcctccttggtcgccgcgtccttggctggcgtcttcctgcctgacacagctcacttcaagaagtgcacaatgtcagaacgtg

SEQ ID NO: 418885 - DNA, 100 bp, Homo sapiens
tcttctaagctgaataaagctgttttggaactgtcaggtacctcaaagctctgaacaggaattaagaataactcaaagtgaatttgatcgtcaagcagag

SEQ ID NO: 418886 - DNA, 90 bp, Homo sapiens
cgctgacaagggtccagcctccgataacagctttgctgagccatcaaggtctaatggaagcatggttcggcattcttcatctccatatgt

SEQ ID NO: 418887 - DNA, 97 bp, Homo sapiens
tcaaggttgaagcagaagaataaggagaaggataagtcgaaggggaaggcgcctgaagaggacgaagatagcagcgacagtgagctggagctgtcca

SEQ ID NO: 418888 - DNA, 100 bp, Homo sapiens
ggctgcaccaagtggcgaaggagccggctccaagggcacggccgagcagatgaggactgtgtggacgaccgggccagacaccgggaggaacggctgctcg

SEQ ID NO: 418889 - DNA, 89 bp, Homo sapiens
accaagaccccagcaccaaccagacctggttgagaaagtggcgacttctataagacatggatagatgcaaacatgtagggcggttacgg

SEQ ID NO: 418890 - DNA, 96 bp, Homo sapiens
cctgcgctatgccctgctgtagtcacaggagctgtagagaggaccccggtacatctgaaagccgggaaatgttccctgacatcgtggagttctgcg

SEQ ID NO: 418891 - DNA, 83 bp, Homo sapiens
acaaggaatctgagggtgccctcaatgagcacatgaccagcttagcttctgtcctaaagatcctgagagtcagaccttgaaag

SEQ ID NO: 418892 - DNA, 49 bp, Homo sapiens
ctgagccgcccctacacccacaggtcagaacaaaatctgcttcatccca

SEQ ID NO: 418893 - DNA, 73 bp, Homo sapiens
ctcattctcatatttcaccaataaagggcatgccagaacagtgggctcgattactacagacctccaatatcac

SEQ ID NO: 418894 - DNA, 74 bp, Homo sapiens
gtctccaggcccgcgaccgtccgccagtcgtcccgagtgggtaattccagaattgattggccataccattgtca

SEQ ID NO: 418895 - DNA, 83 bp, Homo sapiens
cgctgctggaggaaacacctcaggacacggcctacaacaccaagagtgtccttgaatccgacccctactttgggtttgaagaa

SEQ ID NO: 418896 - DNA, 76 bp, Homo sapiens
taatcgctgaagatgttgatggagaagctctaagtacactcgtcttgaatagcttcttggacacttaatgattgtt

SEQ ID NO: 418897 - DNA, 87 bp, Homo sapiens
tcgagaagatccctagtgagactttgaaccgtatcctgggcgacccagaagccctgagaggttatggaggttttgatgactatggtg

SEQ ID NO: 418898 - DNA, 89 bp, Homo sapiens
ccgagtgattgatcgtgcgattcaggaggagatgttaaagtaacccatcttgcaggacgacattgaagattggtcttctgttgatctaa

SEQ ID NO: 418899 - DNA, 83 bp, Homo sapiens
gttcaagtacacatttcatcaggatttgtactgtgttcgcagtgacctggggaacctgctcaaagccctgggtcgcttggaag

SEQ ID NO: 418900 - DNA, 82 bp, Homo sapiens
aacaagacctcccggcccaagatgtccctggtgatgcctgccatggcccccaatgcggaaaagacaggaggcagaaggtgag

SEQ ID NO: 418901 - DNA, 75 bp, Homo sapiens
ggactggaggaggccgcgccgatgaacctgaccgagacacctgtgctgccccccaccatcaccgaccagatccgg

SEQ ID NO: 418902 - DNA, 89 bp, Homo sapiens
agaaatttggagtgtgcgtgcgcgccgagcgggccccctgctgcgctggctcaaggtgaacttcagtgaagccttcattgcctggatcc

SEQ ID NO: 418903 - DNA, 75 bp, Homo sapiens
cgatcctgtaactgccaaacccaagttggttggagatgtggattttgaagttcttatcaggagaggatcaatgga

SEQ ID NO: 418904 - DNA, 101 bp, Homo sapiens
agacgatattgatattgaagcaatgcttgaggctccttacaagaagagccctatgagtttgtctctctggaatggctgcaaaagtggttggatgaatcaac

SEQ ID NO: 418905 - DNA, 100 bp, Homo sapiens
gttggagttgcggcggcgggaacgattgggctgagcagaggacgacatgttgcttttcgtggaggaatggaggatctttggttccataccaatgcaggca

SEQ ID NO: 418906 - DNA, 99 bp, Homo sapiens
agagcaaccctgaaaaattactgaatgtgaagaaatgccgtttgagcaaggaagacattgaacgtatggtccaggaagctgagaagtacaaagctgaag

SEQ ID NO: 418907 - DNA, 100 bp, Homo sapiens
tgttagacagtgaatgtggaaaggagattgacagtcacaattttgtaataaggtttactcctggcttgggggcattaggaagcactggaggctcttcggg

SEQ ID NO: 418908 - DNA, 113 bp, Homo sapiens
aaattgtcgtttcttcaagcggaaaataatgatcaagcggcacgaggtggagcagcagaacattcgggaggagctatcgaaaaaccttgaactgagtactaacagtttccaac

SEQ ID NO: 418909 - DNA, 50 bp, Homo sapiens
cgtccgagtcaacaaccgcttcgagctggggtggcctatgtatgcacagc

SEQ ID NO: 418910 - DNA, 100 bp, Homo sapiens
caggcaccccagggccctccagtgggggccatgcttcccagagcggagacaacagcagtgagcaaggctcattggtgggcagtattacttatgggaattg

SEQ ID NO: 418911 - DNA, 101 bp, Homo sapiens
agaaacatctggtgatgggggatattccagcagctgtcaatgcattccaggaagcagctagtctttttgcacacacccagaagctatgtccttcggcagta

SEQ ID NO: 418912 - DNA, 118 bp, Homo sapiens
cttcaaggtgtcggcgcgcaccctcacgggggccctcaacgcccacaacaaggcggcggtggactgtggatgaggatcgcagtacggaacctgaccgattgcaggtgtttcacaagag

SEQ ID NO: 418913 - DNA, 74 bp, Homo sapiens
cagtccccccgttccctggaggtcctgtggaatgtgttcctctgaacaacagggagaatatctctgatcccacc

SEQ ID NO: 418914 - DNA, 74 bp, Homo sapiens
ggagacgagtggtgggagaaccagccgactggagcaggcagcagcccagcataccataaagtctccaaaggatg

SEQ ID NO: 418915 - DNA, 50 bp, Homo sapiens
cggcgccgcaccagcagaacggtgacgcatccaaagaagacattgacact

SEQ ID NO: 418916 - DNA, 87 bp, Homo sapiens
acgttaagatgacgacagactcagatccaagtcaacagtgatcttgctctgtcacccaggctgcagtgcagtggcgtgatcatagtt

SEQ ID NO: 418917 - DNA, 100 bp, Homo sapiens
ttcacattttccccaatatatgacattgatcgccctaaaggactggcattcactgatgtggatgtcgattccatcaaaattgcttgggaaagcccacagg

SEQ ID NO: 418918 - DNA, 90 bp, Homo sapiens
tgcaccttatcacccggaacctgcagaaacatctgccaaagaaggtctgctgctttggtgtcagaggaaaactgctccttatagaaatgt

SEQ ID NO: 418919 - DNA, 89 bp, Homo sapiens
caaggaaggaggcggtgacagacgggctgaagcgagccctcaggtacaggctgagaggctgagaaatcatcccctgaataactttttcc

SEQ ID NO: 418920 - DNA, 88 bp, Homo sapiens
ccgaggtgcctttctccaaaaggtatcgagaaccttccctgcgaacttcagaggaacttccagctgatgcgagagctggaccagagga

SEQ ID NO: 418921 - DNA, 50 bp, Homo sapiens
agaactctggctagagaccctccaaggaagtctggcaagttgatgagcag

SEQ ID NO: 418922 - DNA, 83 bp, Homo sapiens
ctgggttctggactttgggcgtcccattgccatggtggaatccatagagctccccatggacaacaagaccaataagaggcgtg

SEQ ID NO: 418923 - DNA, 50 bp, Homo sapiens
ctcttcaccagctcttcagatcaatatgggtgtgaacggcatgtctgtgg

SEQ ID NO: 418924 - DNA, 86 bp, Homo sapiens
gctccaccttccacagggtgatcccttccttcatgtgccagggggatatgagactttctactcggaatatcctgagtgttgcgtgg

SEQ ID NO: 418925 - DNA, 109 bp, Homo sapiens
catggtcccagccaggacggagataacaccatcttcaagctgcgttcctttgcctgcaacaggggtcaagatgagttttgcctgacttctttgatgtcctgaactttcc

SEQ ID NO: 418926 - DNA, 100 bp, Homo sapiens
tcagctgaccattgacaatcagccatgtcatccaggcctcttgaaagtccacctccttacaggcctgatgaattattcccaacctgctgagcatccgcac

SEQ ID NO: 418927 - DNA, 100 bp, Homo sapiens
gaagatggtggataagcccacccaggaatagcgggttttgcagcaattgttgcatatggattatataaactgaagagcaggggaaatactaaaatgtcca

SEQ ID NO: 418928 - DNA, 98 bp, Homo sapiens
cagcctggcccactgctcttcattgaagcctccccgaccacccgatcgcgcagctcctgaggcggctgcagtgctccgtgtacagcgccctgtatccc

SEQ ID NO: 418929 - DNA, 90 bp, Homo sapiens
atcgagagcctaactttgcaaccattggtctgcaggacatcactttagatgatgagctcttcagtatccccatcagccagtttccgaggt

SEQ ID NO: 418930 - DNA, 124 bp, Homo sapiens
gaggacttgaaaagctgagatatgatgattttgaagtcatttcacatcgaagccatgatttaaatatcggcgttaagccttcacttaacttaagggaccttggattatctgaactaaaaattgg

SEQ ID NO: 418931 - DNA, 100 bp, Homo sapiens
cattactctctccgcctcgccgaagagtggatggaggctccgcgggtaaaattgccgagaatgaggctccagcaaaccttcaccaatttacatcagttcc

SEQ ID NO: 418932 - DNA, 83 bp, Homo sapiens
ccctgtccccgctggcgggcttccctgtcgccgttcgctgcgctgccggcaattctgtggtgttcttggtcacacatttatgg

SEQ ID NO: 418933 - DNA, 75 bp, Homo sapiens
ctttccagcccgtttgtgaatcagcggtatttcatggaaacttggagagagaaaagtgatgaagtgatgggagag

SEQ ID NO: 418934 - DNA, 83 bp, Homo sapiens
ccgggccctcgagacggggacgggggcagctggcattttatgctatgtgggagcctatgtcttcatcacttatgatgactatg

SEQ ID NO: 418935 - DNA, 100 bp, Homo sapiens
gacattcccaagaatggcaagttaaacatacagtcgcctctgacaagccaggttcaactactcaatttcatgctggcatgagaagataatcctttgaaac

SEQ ID NO: 418936 - DNA, 100 bp, Homo sapiens
ttcccgtccatgctggccctctctggcggcttacagggagaacacagttggcctccaccgtttctgccccacagaaaacgtagcaaagatcaaccgagag

SEQ ID NO: 418937 - DNA, 75 bp, Homo sapiens
gggcaccgaggactccgctcctgcccaggtacctatggagttgtgtataagggtagacacaaaactacaggtcaa

SEQ ID NO: 418938 - DNA, 75 bp, Homo sapiens
gtgaaatatcagattcagaggatgacagttgcaaaaacctctgtagaggagcaggatgcaaccgacaggctgtgg

SEQ ID NO: 418939 - DNA, 90 bp, Homo sapiens
agagcagaggaatctatacaaagaagtgatgctggagaattacaggaatcttctctcattggcaattttccagattattcaaagtatcag

SEQ ID NO: 418940 - DNA, 75 bp, Homo sapiens
ccctggggggctcgctgtatttactgggaactagtcttgcaggaaggcatgcttctgacggccaatgaaaccccc

SEQ ID NO: 418941 - DNA, 96 bp, Homo sapiens
gcggaacggctggaacgtcatggacttcgtggtcgtcctcacaggtagtattattgattccacagaatacagccaacctccaggtttcagtggcag

SEQ ID NO: 418942 - DNA, 89 bp, Homo sapiens
tggctctgtgcaacggagactccaaggaaagatgaatgggagggctgattttcgagagccgaatgcagaggttccaagaccaattcccc

SEQ ID NO: 418943 - DNA, 75 bp, Homo sapiens
aaaacaacttcgagggcagaggagagcctggggatgtacaggagatgcctgctccagaatctcctcctggaaggg

SEQ ID NO: 418944 - DNA, 75 bp, Homo sapiens
caatctcctcagggaaggggcagcacaagctgcagcccgatgcaacaaaggcatagaagtactgtttgcagtggc

SEQ ID NO: 418945 - DNA, 83 bp, Homo sapiens
ctgcatcccaacgacaaagtcatgggacccggggtttcctacttggttcgggcaggggaaatggaaggtgatgcagtcgaagc

SEQ ID NO: 418946 - DNA, 97 bp, Homo sapiens
gggagaggcaccaaatctggcctgggggcccgagaagcttcctctcaggtacccagactcatggtatcgtgatatcacatccaacaagaagttcttt

SEQ ID NO: 418947 - DNA, 98 bp, Homo sapiens
tgtgttgtttcagctgtattaggatttgttgtgctgttcacagatgacctgggccacatttcccagtggagctccatcatggctgggagtctcgcagg

SEQ ID NO: 418948 - DNA, 75 bp, Homo sapiens
cttttatcttggtctttgaccttcttattgtgatgcaggtacatgttgggacttgcagcagttccggcggttata

SEQ ID NO: 418949 - DNA, 75 bp, Homo sapiens
gaaaggggaaaatgtctcagtcgaaaggcgtggtgtccctcgtggccgttcacccctccaccgtcaacccgctcg

SEQ ID NO: 418950 - DNA, 100 bp, Homo sapiens
cctgtggatgactgagtacctgaaccggcacctgcacacctggatccaggataacggaggctggccagcagtatctgttggaaatgttggccagcttgca

SEQ ID NO: 418951 - DNA, 97 bp, Homo sapiens
gctggggaggcgaggccggacgcacctctgtttgggggtcctcaggactttccgtgacatttctgaagatctgaaatcttcagtaggttgatgtggt

SEQ ID NO: 418952 - DNA, 75 bp, Homo sapiens
ggacctctatgccatgaacttcaatcccatcatttccagaaaggacatcacaggaagctcttcgtgggcggtctt

SEQ ID NO: 418953 - DNA, 88 bp, Homo sapiens
cgcgagtgaggaaaggaggtactgtagcaggatgaagttaaaggaagtagatcgtacagccatgcaggcatggagccctgcccagaat

SEQ ID NO: 418954 - DNA, 74 bp, Homo sapiens
gaattctataagaccattccccggttttattataggctctggaagagaaatggccccagttcatcacccttctc

SEQ ID NO: 418955 - DNA, 50 bp, Homo sapiens
gcgctttcagggtcatggcataccacaattcaattaaaccccagctatat

SEQ ID NO: 418956 - DNA, 75 bp, Homo sapiens
gcttaagatggaagccaatatcgacaggataaagagttcttcgtaagtacatcttaaagctgtcaagatggttct

SEQ ID NO: 418957 - DNA, 74 bp, Homo sapiens
tgattgtgacctctgtggaaaatgagccatgaaccaaccaatgatgaggaagactcctttgtgatgaaagccat

SEQ ID NO: 418958 - DNA, 100 bp, Homo sapiens
tttgcacttagtgaaagactggagaactgtgaatgaaggtgggagaaatgttttagaggcaagagaggctgctaaacatcctacaatataaaggaaacat

SEQ ID NO: 418959 - DNA, 98 bp, Homo sapiens
gacaaggcactgctttttcatgacggacaacaccatcgacttcctggagtacgtggcagctctgaatctcgtgctgaggggcaccctggagcacaagc

SEQ ID NO: 418960 - DNA, 100 bp, Homo sapiens
acctgagactgggcctgaagggagagtttcagttcttcattgacgcctctacggcagacacatgcaggccaacccagaaccaccgaagaagaataatgac

SEQ ID NO: 418961 - DNA, 83 bp, Homo sapiens
gtcctcgcttgcagttcagcgaccacgtatgcctgtggcatcaaagccgaggtggtggggaagccttctcctgagtttttcaa

SEQ ID NO: 418962 - DNA, 100 bp, Homo sapiens
cgggtggacaagtgtacccgggagaggcatcccgggtatcggtcgccgaccactccctgcacctaagcaaagcgaagaatgaagtctcgctctgtcacct

SEQ ID NO: 418963 - DNA, 99 bp, Homo sapiens
ccgcgagcacagagcctcgcctttgccgatccgccgcccgtccacacccgccgccaggagcatcagatccatgctgctgctgactcggagccccacagc

SEQ ID NO: 418964 - DNA, 100 bp, Homo sapiens
cagaagagtattttgaaaaagcattacaaatatgaagaggcattatttatgaccttttctatggaaaggattgatttccagagacttatgttacttgagg

SEQ ID NO: 418965 - DNA, 75 bp, Homo sapiens
ccgcggccccgccccggctcggcctggcagatggagtattcaaagcacaaagaaatgcagtaacttcctaaaggt

SEQ ID NO: 418966 - DNA, 100 bp, Homo sapiens
ccacactgtgccatctgcactctgctcatgccgtaccacaaggctggagtgcagtaacaccactgaagctcactgtaactttgaactgctggacttggaa

SEQ ID NO: 418967 - DNA, 90 bp, Homo sapiens
atttgttaaggattccaagtaactcttatttgatccgctgttgtaccaggggtctaatcaggcctgtgtctgcctccttcttgaatagcc

SEQ ID NO: 418968 - DNA, 74 bp, Homo sapiens
aaccgcctacgagacactcaagatcctgaaggacacgcaggtgactcgacaggccttaaatgagatctcggccc

SEQ ID NO: 418969 - DNA, 95 bp, Homo sapiens
aagcagtcctaccatgtcagccttcccagtagctgggaccacagtcagaaaagccacgaggctttgctcgaggtttggagccggagcggattatt

SEQ ID NO: 418970 - DNA, 74 bp, Homo sapiens
ttgtcctacctgaagtatgccattagttcccaggatgttttagaagaatgtatgtctcttcccaagctatcttc

SEQ ID NO: 418971 - DNA, 75 bp, Homo sapiens
gcaggacgcacttgtcttagcagttctcgctgaccgcgctagctgataagaccatcatcatgtggaaactgacca

SEQ ID NO: 418972 - DNA, 75 bp, Homo sapiens
cactgcatgggacaaagatgctgggaaaagggatgatttcattggcagaatgttcatgaagaagtcttacaagaa

SEQ ID NO: 418973 - DNA, 100 bp, Homo sapiens
ggctcttcgagactttgagaagcggcccagcccaatccagctttactcccctccctttatattggccccaatcaaagacaagcagacagagctgggagag

SEQ ID NO: 418974 - DNA, 74 bp, Homo sapiens
aaaactaaggtggaggtggcgaagatgattcaggaggtgaagtttgatgaaggccggaacaactttgaagggga

SEQ ID NO: 418975 - DNA, 100 bp, Homo sapiens
gacagagctgagggagcaagaggtgtcggaggtctcatctttgaactactgccggagcttctgccagctccagggcccacaacggcagtgtcctacatgt

SEQ ID NO: 418976 - DNA, 75 bp, Homo sapiens
ccgacattcagagttgtttcctccatttgctaaaggaatagtgtttgaatcagacacaagtttggcagaaggaag

SEQ ID NO: 418977 - DNA, 104 bp, Homo sapiens
cggcggcagcgggcggacggccggcgggggcggcgtgcggcctagcgtctcagcgccgacaccatgtggatccaggttcggaccatggacgggaggcagaccca

SEQ ID NO: 418978 - DNA, 78 bp, Homo sapiens
acactctctagaagcagagcacaggttttatggcaggaattcttcctatgttcatggtggagtagatgctagtggaaa

SEQ ID NO: 418979 - DNA, 100 bp, Homo sapiens
cggagtagcaagtggccatggggagcctcagcggtctgcgcctggcagcagatgtcagtattgaatatggtggtgaggcgtgaccctggcaacactgaac

SEQ ID NO: 418980 - DNA, 90 bp, Homo sapiens
gcaaagtgtccccggcaagaagggtttggaatcacttgctaggagtcttgtctctctgccacccaggacatcatggcagctcacctggta

SEQ ID NO: 418981 - DNA, 100 bp, Homo sapiens
atcaacccacctcacagcacttcattatgcagctaaggaatgtatcctgtcaggtataatgtcagtgaatggcaagaaagttcttcatatggatcgaaac

SEQ ID NO: 418982 - DNA, 110 bp, Homo sapiens
ctgaagagcgacaagccgctggcagccgcggatctcaccgccgctcagggtttgtcctggttgtggtcaagactggatgatgtaactggctctctaggaagcctcacttg

SEQ ID NO: 418983 - DNA, 83 bp, Homo sapiens
tcaatgtccgcatcgcaaccaccgccctggccatctaccatgtggttttaaaatcaaagatgggaaaatcggagaaaattgcc

SEQ ID NO: 418984 - DNA, 90 bp, Homo sapiens
cggactcggagctcgagcagtacttcaccgcgcgaacctcgctagctcgcaggccgcgccgggaccagaatacgctgccatcaactccat

SEQ ID NO: 418985 - DNA, 98 bp, Homo sapiens
ggcgaccggatccggttcattctggacgtgcttctgcccgaggtggacccccaaaagtacaagggcatatttaacggattctcagttacacttaaaga

SEQ ID NO: 418986 - DNA, 74 bp, Homo sapiens
ttttgattgacatagcttctaacatgtgctggatcgaaggggtattttgccactggaggaaagtggaagtcgac

SEQ ID NO: 418987 - DNA, 100 bp, Homo sapiens
gagcaaggaaaaaaaccttcgactatgcagagacatgagatggtagccaacccctcagcatctacttgtttccaaagttatttgggtcagcattttcctc

SEQ ID NO: 418988 - DNA, 83 bp, Homo sapiens
ccacccgggctcggcgggggagcgactcatggagctgccgtaagttgcaagaatgtagtaactctgatcagctacaaggaaag

SEQ ID NO: 418989 - DNA, 75 bp, Homo sapiens
ctgaagatggctactctggagttgaggtatcacagcctgtacctgaaggtgaaggggaatgtgttcaaaaacaag

SEQ ID NO: 418990 - DNA, 76 bp, Homo sapiens
gcagcacaatgttctagtagcggagggcctgctatggtgtgctgcggttcatcatggagagtggggccaaaggctg

SEQ ID NO: 418991 - DNA, 74 bp, Homo sapiens
gctgcaaacgggcgctgacctcaaccagcaggagtgtggccatctggggccgtgtggtatttgccactcaggag

SEQ ID NO: 418992 - DNA, 90 bp, Homo sapiens
ctacttaccacctgccgccggttgccggaggccatcgaggaagtgaagaagtggaaccaagctcacaaatcctcaggaaccaactttcag

SEQ ID NO: 418993 - DNA, 100 bp, Homo sapiens
gtttgtctgttcgacacaggcttggggccgacgggggagacggagccccaggtggttaccctaacagctaatgataagacaagtgtttccttctcctccc

SEQ ID NO: 418994 - DNA, 82 bp, Homo sapiens
tgagggcaagctctccctgccgtggctgctcaacaaggagctgggctgcatcaactcgccgccaccggcacggccaggccag

SEQ ID NO: 418995 - DNA, 75 bp, Homo sapiens
aaaacgacaggagcatcccaggaaggggttcccagaagtcagaatccaagatgtgagcaagaagaacccatcagg

SEQ ID NO: 418996 - DNA, 82 bp, Homo sapiens
cgtcactggccctggtggggattgacagccacgggaagggtttccaggcctgaggtgcccgccctggccccaggagaatgaa

SEQ ID NO: 418997 - DNA, 100 bp, Homo sapiens
aagcggcggcaggtggtccgcggcttctcggagcttgttaaaaatctgtaagagcctgattttagaattcaccagctcctcagaagtttggcgaaatatg

SEQ ID NO: 418998 - DNA, 88 bp, Homo sapiens
attatttatgtcatcaagaagaatgacgatgacaacagcagttctgtagagagtttaaatatgaaggaatggcaggacgggctaaggg

SEQ ID NO: 418999 - DNA, 75 bp, Homo sapiens
ccctgcaagcctccagcgtcgcgagagaactcgatgccaccgcaacggtattggcgaaccggcaggatgaaagtg

SEQ ID NO: 419000 - DNA, 111 bp, Homo sapiens
tccagtacaagcacctcctgctccagtaattgtcattgaaattatgagactatcattcaaatggaagcattatagttcttcggaaccattatgatctcaaaacgaaaggag

SEQ ID NO: 419001 - DNA, 75 bp, Homo sapiens
tcatgtggtggtgaaaaatgaccctgaactggaccagcagacctgcctagagctggaacgttacctccagagcga

SEQ ID NO: 419002 - DNA, 90 bp, Homo sapiens
ggttccatcatggcgtcaatgcaggaccgtataatagacgctggccccaaaggaaactactctcgatttatgaatcacagctgccagccc

SEQ ID NO: 419003 - DNA, 76 bp, Homo sapiens
tattcaggctcctcactttgccttgctatggcttaaggccgccgcccaccgcccgccgccatggggctgaaggccg

SEQ ID NO: 419004 - DNA, 88 bp, Homo sapiens
caggatacagggtcaaaggagagcacaaccatcgcagttggaagcccatggggcagagctacacccccacggtgtttgagcggtacat

SEQ ID NO: 419005 - DNA, 100 bp, Homo sapiens
aggggccagttagaacagataactggcaaaggtgcttcggggacattccaggacttaaccaccaccatgtcgagcaaaagaacaaagaccaagaccaaga

SEQ ID NO: 419006 - DNA, 73 bp, Homo sapiens
ggccatcgtggctaaacaggtactgctgggtatcagcctggtggacgatatctctcgatgtctcgcagtgaca

SEQ ID NO: 419007 - DNA, 125 bp, Homo sapiens
acccagtctgagtgtctgtccccagagcctcagtttgtgcaggacaccgacatggaacagggactcactggggccccattgacaaaccttcagattctctcagtatagggaacggtgataattcc

SEQ ID NO: 419008 - DNA, 75 bp, Homo sapiens
cttttggccaggggaccaagctggagatcaaacgaacctctttcaggagctataaaagaaagggaggaatcatgt

SEQ ID NO: 419009 - DNA, 75 bp, Homo sapiens
tttgtctgctggcagctaggggcgacgaggcgggacgtcatggaagtggggaaatttgcagtggtgagaaaatgt

SEQ ID NO: 419010 - DNA, 75 bp, Homo sapiens
tggagagtctggccttagcacatgcagatgagaagtccttagctctcatttcactcttcagtgttcctgttattt

SEQ ID NO: 419011 - DNA, 97 bp, Homo sapiens
tgacttccgttggactgatggcagcacactggaagtatcaaaactccgctgtcagcttgctaaaaaaaaacaaagtgagacaaaacttcaagaggaa

SEQ ID NO: 419012 - DNA, 100 bp, Homo sapiens
taccatttggttgcagcaaagaggaaatagttcagttctttcaaggtttccaatacttatctacaggaatcgccatgaccccagctctgagggaggcaac

SEQ ID NO: 419013 - DNA, 100 bp, Homo sapiens
atcattaagaagcagatcctgaaacacctgtcccgaaggaacacaacgtcctacatcaagaaaaaagacagaagcatatcttggagatatgaaaagaacc

SEQ ID NO: 419014 - DNA, 100 bp, Homo sapiens
ccgctgcgccccgggtttcgccgcaaccaagacccagcgagtgcagcggcggccgccgaggagggcgccatgttttggaagtttgacctgcacacaagct

SEQ ID NO: 419015 - DNA, 89 bp, Homo sapiens
tgcaaatggctgttttcagaagtggaattggggctgaatgaagatgatgcatttgcaaagggccctacgttaacagtgtataaagaatc

SEQ ID NO: 419016 - DNA, 82 bp, Homo sapiens
gcgttcggtcctgctgttgcggccgctgccccagggctgcggggacggtgctgggcctcgtgcgggtcccgctgtacaccca

SEQ ID NO: 419017 - DNA, 138 bp, Homo sapiens
cgggaactagaggacggcccggcagacatgcagaaagtacgaatctgctctgagggcggatggcatagattccagcctcaaaatcctctctcaggagcccagcaatttgtggcaaaggatccccaagatgatgacgac

SEQ ID NO: 419018 - DNA, 97 bp, Homo sapiens
ggaattccagtattgtgtctaaattctgtggatgatgttttctcacccagtcatgaaacctctgtagaggagcaggatgcaaccgacaggctgtggc

SEQ ID NO: 419019 - DNA, 101 bp, Homo sapiens
gatgattaaaacggaatttacactgacagaagcagtggtcgaatccagtagaaaactggtcaaggaagctactatgtcttcagcagtggtgcagttatatg

SEQ ID NO: 419020 - DNA, 100 bp, Homo sapiens
tcggcatcgggcgacagcaggtcacagtggacgaggtgttggcggaagatcttagcaaagcaatgtctcaagatggtgcttctcagttccaagaagtcat

SEQ ID NO: 419021 - DNA, 98 bp, Homo sapiens
ggtattgctattgattgacattcaagtctcttacatcaacaccaaccatgaagacttcattggcttcgcaaagaaccagcagcacaaacactgttggg

SEQ ID NO: 419022 - DNA, 73 bp, Homo sapiens
atgggatggtgacgttgactccaaacaagggtgtgtgggattcagtccccgtgggggtggctttggcggccga

SEQ ID NO: 419023 - DNA, 50 bp, Homo sapiens
tgaggacgagtccacgggcctgaagaagggtcccaagcaagacagaactg

SEQ ID NO: 419024 - DNA, 82 bp, Homo sapiens
gggaaggaataagcctggaagaaaaagatacaacgaactagcacaacgaggagacctcatccttcaacagctgaatcaaagg

SEQ ID NO: 419025 - DNA, 90 bp, Homo sapiens
ctttaaaatatcaggagttaatggaacacatatttgtcaggatacgaatcaggttctcttcaagtgctgccagggatctgaagaggtacc

SEQ ID NO: 419026 - DNA, 50 bp, Homo sapiens
cggtgtcctgcgcgtcttcggattcaaccctatgaaaagataaaggccag

SEQ ID NO: 419027 - DNA, 90 bp, Homo sapiens
agagaatggcatgtgcaaagatacagagcagacatggccgcttaccaacaagaagggcagatgcagcttccccgagctgatgccattcgt

SEQ ID NO: 419028 - DNA, 89 bp, Homo sapiens
ggcgcgggaggtgttcgagaacgaccccgagacgcaccgaacaagatttgtgatgaaatggagcctggaacaaactcttttcgggtaga

SEQ ID NO: 419029 - DNA, 97 bp, Homo sapiens
gagaggcctctcccaaagcacctgcgcaggatgaagatgagctggattcccacaccatggtgaagactagtgtggagagtgtgggcaccatgcgggc

SEQ ID NO: 419030 - DNA, 100 bp, Homo sapiens
ccctagcccatcgtcaggacaaagatgctcaggctgctcttggctctcaacttattcccttcaattcaagtaacagatgatgctgtgtatctggacaatg

SEQ ID NO: 419031 - DNA, 97 bp, Homo sapiens
cggaggtgacaacaataacaagactgtccttcggacaagttttagctccagaaacatgacaaggaggactttcctgcctcttggagatcagaggagg

SEQ ID NO: 419032 - DNA, 97 bp, Homo sapiens
ggggatggacctccagatttccttactggtatggcctcacaagtcttggtctacccaccatatgtttatcaaactcagtcaagtgccttttgtagtg

SEQ ID NO: 419033 - DNA, 98 bp, Homo sapiens
gatgtcacagcttttccatagaacaattggaagtggagctactttgttttccggaaagttcgaagcttgctagggggaaatattcgtctcctgttgtg

SEQ ID NO: 419034 - DNA, 108 bp, Homo sapiens
cttttctcagatgttggatatttgcttggaaaaacgtgtgggtacgaccttgccacataaagaagatccctaatagtcatttctcaacaattatatagtcaactgatg

SEQ ID NO: 419035 - DNA, 100 bp, Homo sapiens
gccgccgccgccgccgccgccgccgccgcccgctttcggctcgggcctcagaatgcttcagacatgcctgaaacaatcaccagccgggatgccgcccgct

SEQ ID NO: 419036 - DNA, 88 bp, Homo sapiens
agccctcccctgtcctcaggcacacagtacaacagagtcaacctcaccttggatctggggcagtagcatctcttcctcaaagatgagc

SEQ ID NO: 419037 - DNA, 83 bp, Homo sapiens
ggggcccggggctccggcgcgcccggtgacggcggagaggcgccccccgcagcagcgggagatacagatgacccaccaagaat

SEQ ID NO: 419038 - DNA, 80 bp, Homo sapiens
atccaaccctacatgcgcagaatggtggccacctggatgctggaggtgagaagccctaccactgcaactgggacggctgc

SEQ ID NO: 419039 - DNA, 82 bp, Homo sapiens
gtccggattggcagtggttttgacaacatcgacatcaagtcggccggggatttagaagttccacctggtgccaagcatcaac

SEQ ID NO: 419040 - DNA, 75 bp, Homo sapiens
tttctggcctggaggctatccagctgtgcaacttgctttggtgtttgctgttttattgccacagatgacattact

SEQ ID NO: 419041 - DNA, 102 bp, Homo sapiens
agaagcggcagaagcttacctccgagggtgccgccaagctcctgctagacaccttgtatagaacaagatgcagtgaatacttttaccaaatatatatctcca

SEQ ID NO: 419042 - DNA, 73 bp, Homo sapiens
aaatctgaagatggtgtcaaagagaaattctgatgttccatttaagcagacctcttccatagctgtagctgga

SEQ ID NO: 419043 - DNA, 100 bp, Homo sapiens
ccacaaggagaaaaatgagtcagccatagtcagtgcaatccagatattgctgactttacttgagacacgacgaccaacgagtccttcaataatgttaaac

SEQ ID NO: 419044 - DNA, 75 bp, Homo sapiens
cgacactgctgtaaatgccgccatggagctctggcaggctgccctgagcacgctcaaccccaaccccacggacag

SEQ ID NO: 419045 - DNA, 100 bp, Homo sapiens
cgaagatccccaaggaggacggcgagagcacggacagactcatggggaagggccaggtccagctgccacgcctcccaatgctgtggaccggccctgcctg

SEQ ID NO: 419046 - DNA, 100 bp, Homo sapiens
ggcaatgggggcaggagctgttggagctttgcagctgacctacatctcgaaggatgctttggagtctgcaatgaagaatggcctgtggggtcacgctctg

SEQ ID NO: 419047 - DNA, 101 bp, Homo sapiens
ctcagatgttggatatttgcttggaaaaacgtgtgggtacgaccttggctcacgaggcccagggaatcctctggaccatcagattaccaatgaaagaggag

SEQ ID NO: 419048 - DNA, 51 bp, Homo sapiens
gggaagatggcggctgggttcaaaatggccaacagaaagggagaaggtgaa

SEQ ID NO: 419049 - DNA, 100 bp, Homo sapiens
ggtcctcttctgcaaggtccggctgctggatggaggggattttgtcagcttgtcgtcaaggacctcagcagccatgtcgaagccccatagtgaagccggg

SEQ ID NO: 419050 - DNA, 101 bp, Homo sapiens
ccctaaactagcagtttagggtgtcaggtgctggagaatctggtaaaagcaccattgtgaagcagatgaggatcctgcatgttaatgggtttaatggagag

SEQ ID NO: 419051 - DNA, 99 bp, Homo sapiens
gaggcggagccgctgtcctcgtccccagcggtcccgcccaacgcccgactctgagtccatagaggccactgtattctattgaagaacatgtctaacagt

SEQ ID NO: 419052 - DNA, 100 bp, Homo sapiens
tcaaactcaacaaattgaaggttaacaccttaagagttgtagttactgaccaggtatagtggaggattacaagccaccgttctacgatgtggttcccaat

SEQ ID NO: 419053 - DNA, 100 bp, Homo sapiens
cggcggatggagctggagcagaaggtgcaggaggtgctgaaggccaggatgccggctccaggagcagcagtggaggtcgggaacgcctcattgtggagcc

SEQ ID NO: 419054 - DNA, 98 bp, Homo sapiens
cagcatcaaggacgtcctggacagcgaagggttggcaaaagcagcttttgatgatgcaattgcagaactggatacgctgagtgaagaaagctataagg

SEQ ID NO: 419055 - DNA, 100 bp, Homo sapiens
tgcgcgctgccccccgagcaggaggtgaaccagtgtgttattggtactgctcaggccaacaggaagtgaagacggatccagatctgtgtgtgtgtgtgtg

SEQ ID NO: 419056 - DNA, 75 bp, Homo sapiens
agtttgacgacgtcgtgcaggccatcaaagaccacgcctttgttacctcgagatcaacaggcggtccttcgggtc

SEQ ID NO: 419057 - DNA, 75 bp, Homo sapiens
cacgttcttccaagaaaccaacattcccaacagccaccaccaccaccagatgagctcatctcctgtcctgggtgt

SEQ ID NO: 419058 - DNA, 80 bp, Homo sapiens
gagggaagacgccctggtgctcaccaagcaaggtaatgcaggtggtgaaggagcaggttatgagagcacttacaaccaag

SEQ ID NO: 419059 - DNA, 75 bp, Homo sapiens
cagcagcttcgggatttagggattctctccgttcagattgaagtggggccgacttgcttgctgtcaactcggatg

SEQ ID NO: 419060 - DNA, 100 bp, Homo sapiens
gcaggaggctaagaaagtggtgaatcccctgtttgagaaaaggcctaagaattttggcattgtattggtaaaggttttcaaggtgtcatgaaaagatggg

SEQ ID NO: 419061 - DNA, 100 bp, Homo sapiens
tcggcagcaagaacagagagagaggtggacagatctgagagatactgagggcatgaggcagccttcgctgctttcctctgctgtctctgcaagattgggg

SEQ ID NO: 419062 - DNA, 75 bp, Homo sapiens
ccgccatggcccgctggatcccgaccaagaggcagaagtacggggttggggtcggcaccaggaattattatagaa

SEQ ID NO: 419063 - DNA, 95 bp, Homo sapiens
aggatccccccaccacacccatcaggcatttggttgccaagctccagctttgaagaaccaaattaagctaccatgaaaagaagaggaaaagtgag

SEQ ID NO: 419064 - DNA, 100 bp, Homo sapiens
gggaaccttggtggaggggtggtgaccatcgaaaggagcaagagcaagatcaccgtgacatccgagggcaagaagtacaagcccctggacctgcggccta

SEQ ID NO: 419065 - DNA, 82 bp, Homo sapiens
ccgggaggtgcttctgcggctgtacggagccatcttgcaggtgaggtcccagcttgaagagaaagaaaacaagaagttccct

SEQ ID NO: 419066 - DNA, 75 bp, Homo sapiens
ggtgttcgactgctagagccgagcgaagcgctatggagttactagtagagaaagcaatcagcagtgcttctagcc

SEQ ID NO: 419067 - DNA, 100 bp, Homo sapiens
aggtcatcagattttgccaagattattaacaatacagagaatcttgtgcgggaattgctcaaccaggttttcctgtgactgtgacagtagagagtccttc

SEQ ID NO: 419068 - DNA, 98 bp, Homo sapiens
catttctccgccaattcaccttgactctgagctagaaagaccctctgttaaagagtaattccctcctggtcccagacagtctaagaggcacagataaa

SEQ ID NO: 419069 - DNA, 75 bp, Homo sapiens
aaatatattactggcacagatatattggatatgaaactggaagacatcctgattatctgactccagaaaaagaac

SEQ ID NO: 419070 - DNA, 100 bp, Homo sapiens
ccatggcgaggggtgcacggcggccacctgagtggcgcggcggtgtcaggaaatggtgctcttgcagaacattctgaaaatgtgcatatttcaggagtgt

SEQ ID NO: 419071 - DNA, 100 bp, Homo sapiens
tcaaatggcacttcattggccacctacagaaacaaaatgtcaacaaattgatggttcctctttagagagcaaagaccacctacaggcaccagacacagag

SEQ ID NO: 419072 - DNA, 57 bp, Homo sapiens
actcctgagtatgttcacgatcggggtcagagctgaggaactgcgtgtggagtcagc

SEQ ID NO: 419073 - DNA, 82 bp, Homo sapiens
ccacatagacatttacgcggatgtcggcgaagagttcaaccagcttccccgggcgctgcctggacaggcctgcctgcgtgct

SEQ ID NO: 419074 - DNA, 51 bp, Homo sapiens
gctgatgcttcatacagcagactcagctgaagtgagtagtgaatatagtat

SEQ ID NO: 419075 - DNA, 75 bp, Homo sapiens
caagtaatggtgcaaagcctgaagtccaccttcatccgaagaggctgaatcataaatataacccagtgtcacttc

SEQ ID NO: 419076 - DNA, 97 bp, Homo sapiens
attggctgagcatcgagggctgccagccagctatccccgagaacccgcccccagccatcccaggcctcaggacctgagttctccgacgcccacatga

SEQ ID NO: 419077 - DNA, 100 bp, Homo sapiens
atgagacctggggacagtgtcatacagatacctttatcaatgaatgtgtcaacctttctggcatacgaccagcccacaataagttactgtggggtgcatc

SEQ ID NO: 419078 - DNA, 89 bp, Homo sapiens
tgctgggcctggctccctggctggccagcctctgcttggcatccccttgctggacagtggctgtgattattgccaagcgcctcccccca

SEQ ID NO: 419079 - DNA, 100 bp, Homo sapiens
ctcaggaatttatggtcgcctttttgaatgagattatggattggatatgtctacttctggatgcaaattttactgttgttgtaatgatgccagaagcaaa

SEQ ID NO: 419080 - DNA, 74 bp, Homo sapiens
gcggagggcgactgccgagggtctcagcgggatctggagtcaggggcttcctgtgtccagtaccggttagtggt

SEQ ID NO: 419081 - DNA, 100 bp, Homo sapiens
gatttacttgaaacaaaaggagaccctaatcttcagggacttgccatgaggtgttgaagccttgtttcactgagttggagagactggacctaaatggcgc

SEQ ID NO: 419082 - DNA, 75 bp, Homo sapiens
gtgtacagccttgtgcctgacaggaccgtggccgaccggcagctggtgcgtgagcatctgctccctggccttcag

SEQ ID NO: 419083 - DNA, 100 bp, Homo sapiens
gcggacggcggggtccgggccggagtacgtcgttcccgctgcgctaggggaagcgggcaggccacaccatgaggccccagccccaccagaggccccgcgc

SEQ ID NO: 419084 - DNA, 90 bp, Homo sapiens
ataaacttcagaaagaactcaatgtacttaaatcagaacaggaagatgagaatgtgcctactgctcctgatcctccaagtcaacatttac

SEQ ID NO: 419085 - DNA, 98 bp, Homo sapiens
tcttagccaggaggagggtgatcagatctgtttgtaccatatccggaaaagttgtagctttcaagggcacctggcctgggtggagcccactcctcagc

SEQ ID NO: 419086 - DNA, 50 bp, Homo sapiens
ttcaagaacaaaggccgcgacttggagtgggcctttggagtgacgctgtg

SEQ ID NO: 419087 - DNA, 100 bp, Homo sapiens
agaagatgccgcagcccgagtcccagaaggcggcgatcctgggctgcgggcaaggcgaaatccgagaggcctttcgggttctggaccgggatgggaacgg

SEQ ID NO: 419088 - DNA, 82 bp, Homo sapiens
ggagctaataaatattaagggaattagtgaagccaaagctgataaaattctggtgctggagaatgccgaaggtgccagaacc

SEQ ID NO: 419089 - DNA, 75 bp, Homo sapiens
gcccctgagccatgcccatcgcagccgccccgaaggagccagacctgcctagagctggaacgttacctccagagc

SEQ ID NO: 419090 - DNA, 78 bp, Homo sapiens
aagagctttcacaggattcagcaaatgattaggtgacggagctaagacttcgagaccatctcgtcctttttgtatcgc

SEQ ID NO: 419091 - DNA, 49 bp, Homo sapiens
tgccaggcgtgtactgcctatgtgtgctatgcctgaaaacttcatgcct

SEQ ID NO: 419092 - DNA, 75 bp, Homo sapiens
cgacagactcagatccaagtcaacagtgacttgtcttacaaggaccggcactggcatgaagcctgtttccactgc

SEQ ID NO: 419093 - DNA, 50 bp, Homo sapiens
ggaacatctcttcccagcggctcagatggtggagccagggcaagatttac

SEQ ID NO: 419094 - DNA, 82 bp, Homo sapiens
ttttaaacacccgagcgctgaggacttttcccatgctaaacagctctttgctgcttgtttggagttggtaacagagttctca

SEQ ID NO: 419095 - DNA, 51 bp, Homo sapiens
ggaaagcagagggccccttggacagacagcacccaagaaaacctcatttgg

SEQ ID NO: 419096 - DNA, 78 bp, Homo sapiens
cccccgcctagcccttccggatcctgcgcgcagaattgagaggatccagaatccagatctctggaatagctaccaggc

SEQ ID NO: 419097 - DNA, 75 bp, Homo sapiens
cgcggggaccgctgtgctctcggcggcactctggctgagttcatccaaaagcgctgtaattccctgctggaggag

SEQ ID NO: 419098 - DNA, 50 bp, Homo sapiens
atccgatatgatgctgtgaagagtaaatttattcacctcgatgatgattg

SEQ ID NO: 419099 - DNA, 100 bp, Homo sapiens
ctgtgcctggtccctgaatatccaagcaaataactgcttcagtacagggctccacgctggccaggaggatgaaaggccccagctgggggctccttgccac

SEQ ID NO: 419100 - DNA, 100 bp, Homo sapiens
cgccccgcgcagctggctggcggagcatgagcgccccagaaactgctggagcgaacccgtgccaggcgagagaatcttcagagaaaaatggctgagaggc

SEQ ID NO: 419101 - DNA, 100 bp, Homo sapiens
agaagaagaagatgagaacagtagacagtcgactgggagactagacctgaaatgaaagagttggatccaaagaatgacatttcggaagacaagctctccg

SEQ ID NO: 419102 - DNA, 98 bp, Homo sapiens
ctagtcaaggccgcacaggaacaggagggtctgatgtcctccaggtgagcgactggtgggaggagtacatctacctccgaggacgagggccgctcatg

SEQ ID NO: 419103 - DNA, 100 bp, Homo sapiens
attttaaggctggtgtgatggctttggctaacctgcttcagattcagcgtcatgatgattacctggtaatgcttaaggaggagatgttaaagtaacccat

SEQ ID NO: 419104 - DNA, 82 bp, Homo sapiens
aaaggattcggatttattaagcttatgcctccaagatgtagctctcctacagtggggccacctccattgccacagaaatcac

SEQ ID NO: 419105 - DNA, 101 bp, Homo sapiens
attcgcagtggtcgcttcttctccttgagggctgtgctgaagtttgctgctgccactggagccactccaattgctggccgcttcactcctggaaccttcac

SEQ ID NO: 419106 - DNA, 99 bp, Homo sapiens
cccttcgcgttgttgctcaggagcacggacgcctgaaggtgaagacgtcagaagagcaggcggaggccaaaaggctagagcgagagcagaagctgaagc

SEQ ID NO: 419107 - DNA, 80 bp, Homo sapiens
atagtgaaaaaggagtggactttgttctgaattactccaaagctgtcaacagcatctccaccctggagcctgtgagccgg

SEQ ID NO: 419108 - DNA, 92 bp, Homo sapiens
cttagctgtgctcgcgctactctctctttctggcctggaggctatccagcgtcagaagttgagtagcaggggcctaggagggctcgaagcct

SEQ ID NO: 419109 - DNA, 75 bp, Homo sapiens
ctgacgaggcacagcgtttcttgcaagaatgggagtataccaaatactacattcaccgaattccaagaagccggg

SEQ ID NO: 419110 - DNA, 75 bp, Homo sapiens
aagaaaaatattccacgcatcacgtgtgtcccggcatggatatccggaacaacctcactaggttgcatgagctgg

SEQ ID NO: 419111 - DNA, 100 bp, Homo sapiens
gtgcagaaataccagtccccagtgagggtgtacaaatacccctttgaattaattatggctaggtaagccagcgattccccacaacacaccccaacgggcg

SEQ ID NO: 419112 - DNA, 90 bp, Homo sapiens
ggcacactttttggagcacagaataaagatggcatatagcataccagagattcattccaactagcattccaactctgacagtgacaccaa

SEQ ID NO: 419113 - DNA, 100 bp, Homo sapiens
ccccccaaactgcaataagccgccttccaaggtgaccgaagaggcctatgtcccagtgagtgacatgaacggcctgggatttaagccttttgacctggtc

SEQ ID NO: 419114 - DNA, 50 bp, Homo sapiens
caatcagatgtctgtctgccgggagtctgctacaccatttttgatttggg

SEQ ID NO: 419115 - DNA, 99 bp, Homo sapiens
cttctccgcctggctggagtgtgtgtgcgtggtcaccttcgacctggagctgggccaggcgctggagtctgcgctcctcagaccaccggcaggtgaaca

SEQ ID NO: 419116 - DNA, 98 bp, Homo sapiens
aaagaggaggaaggagggacttcttggcttctcccagcatagccccagaacatgacctttgacctgccatcagatgccacagtggtgctcaaccgcag

SEQ ID NO: 419117 - DNA, 97 bp, Homo sapiens
acgcacaggatggactccattgagaaggagttggatgggactgtaccagctcgccatggatatcatcataatgatccgagtgtgtaaaatgttccgc

SEQ ID NO: 419118 - DNA, 100 bp, Homo sapiens
cagcagccgcttcctagaagaccagcacgggctgtatattgggagttggacttgttctgtccctcatgagccacagcagccaaatgcagtcccgcgttca

SEQ ID NO: 419119 - DNA, 98 bp, Homo sapiens
tggaattatgccctgttggttccaatgctgggattggctgcttttcgttatgaagacagtatggagtttccagaccatagtagacatttgctacagtg

SEQ ID NO: 419120 - DNA, 100 bp, Homo sapiens
cgggcgctggaggaaggggcgcgccgcgtgggagccacgcacatcgtgacagatcccagatgcagtgactggttactacctgaaccgtgctggctttgag

SEQ ID NO: 419121 - DNA, 105 bp, Homo sapiens
cctgggccgccgctgctacctgcagcgccgtgtggcacgacacaaaaatcaggtcacagagatgcggcggaccctgacgcctgccagctccccagtgtcctcgcc

SEQ ID NO: 419122 - DNA, 83 bp, Homo sapiens
cccaacaagaggaaagacacacctaccaagaagccagtcaagcggccaggtgacttaagagattaaaattaatttggttgctg

SEQ ID NO: 419123 - DNA, 100 bp, Homo sapiens
ggggaccgcagcggctgaactcgggtggccgctgggactcagaggtcatggcgagcacggtggtgaagtacctgagctggacaatgccaggcagtctgct

SEQ ID NO: 419124 - DNA, 101 bp, Homo sapiens
cacgccgctccgaggcctcgcgaccgccgagcctgcagcctgccccgcggccaacatgagcttcttgttaatgacagcccatatcaaggcggtgtattctt

SEQ ID NO: 419125 - DNA, 74 bp, Homo sapiens
aattcattttcagcagacacaagaaaagcagtttttttttcaggtgccaggatgagtgtcctgttgggacctat

SEQ ID NO: 419126 - DNA, 100 bp, Homo sapiens
gggccaagcctcatataactgctgcagagggtaaacttcacaacatgatagttgatctggataatgtggtcaaaaagctctcaaaggtctatggccctgt

SEQ ID NO: 419127 - DNA, 113 bp, Homo sapiens
ctcacctcatcagtgtgcatagtggcagaaattataaagaaggttgaaaggagcagggaaaagatccagaagcatggccgagatctggacgataaaattcaggaatataaaca

SEQ ID NO: 419128 - DNA, 82 bp, Homo sapiens
tgagggtggtgtccatggcctgcactcgaagtgcccaccgcgtgccccgattggagaggggaccttctgcaggttgtgcaag

SEQ ID NO: 419129 - DNA, 75 bp, Homo sapiens
ctacatcccacagagatacccagacaacaggatcgtctcgtccaagtcggcttacccgctggccgcctcctgaca

SEQ ID NO: 419130 - DNA, 100 bp, Homo sapiens
caaagacaaaggcacagctggatgaatggaaagcaaagaagaaagcttctaatgggattcccaaatgctggaaaatcctctttgctaagttgtgtttctc

SEQ ID NO: 419131 - DNA, 74 bp, Homo sapiens
gacccgacgccggagccgtcggctccgtccttaccgttgctctccagggcacctggacgatgacggattaccgc

SEQ ID NO: 419132 - DNA, 90 bp, Homo sapiens
gaagtggagaaccagagtctgcgtggcgctcccggcgatgttgaaagtacgggacccgcggccctggctcctcttcctgctgcacaacgt

SEQ ID NO: 419133 - DNA, 122 bp, Homo sapiens
atagatgtcataacagtatttggagaactcactgatgaacttgctcctgagaccaaggctgtcattcattggattatggatattccttttgtgctttctgccaatctccatggaggagacct

SEQ ID NO: 419134 - DNA, 90 bp, Homo sapiens
gataaatcccaaacttcttaacccctagaccggtttttagtccattgactatgcagcctaatgggggaattggcattatctcctgctgtg

SEQ ID NO: 419135 - DNA, 100 bp, Homo sapiens
aacattttgtggaattcgtgaaacttgtccgtgccaaatttcctgaacacaccattatggattccagacagcattggaaaagacatagaaaaggcttgcc

SEQ ID NO: 419136 - DNA, 133 bp, Homo sapiens
tgactgttgaagtgaagggtccctatgaatacctcacacttgaagactatcccttgatgattcctattgaagagatgcgacacacgattgtagatattctaacaatgaagagtcaagaaaaagctaatttagg

SEQ ID NO: 419137 - DNA, 75 bp, Homo sapiens
gcccgacatggcgccggagctgaccccggaggaggagcaggacttaaccaccaccatgtcgagcaaaagaacaaa

SEQ ID NO: 419138 - DNA, 101 bp, Homo sapiens
cggcgagcagaactacggcgagcgggctgcctgctgtttcccggggagatcatgaaacgaggtcgccttcccagcagcagtgaggattctgacgacaatgg

SEQ ID NO: 419139 - DNA, 83 bp, Homo sapiens
ccggtgacagcgtgagaggttcgcagaatcgcaccccctccctccctggcggagcccctgaaggagctgttcaggcagcagga

SEQ ID NO: 419140 - DNA, 100 bp, Homo sapiens
gtatgacctggatgccgacgacatcaactccagggtggagatgctctacgaggaggccctgtacacggtgctttaccgcgcgggtaccatgggccctgac

SEQ ID NO: 419141 - DNA, 100 bp, Homo sapiens
agaggagaatgtccatgtacagccagggtaccccggaaacgcccaccttcaaagaccactccttctttcatcttcatgatacagttaagaggaatcttga

SEQ ID NO: 419142 - DNA, 88 bp, Homo sapiens
ggaccgccctggacatcaagattaaaagagcgaataaagtttatcacgccggggcgactgagtcaaagaccaacaccagaagaactag

SEQ ID NO: 419143 - DNA, 101 bp, Homo sapiens
tgggaaattgtattctccgagtcagattggagcatttgtgttgatgaagatgaaagagactgcaggctctgcatacaaactggtctgctactacaccagct

SEQ ID NO: 419144 - DNA, 100 bp, Homo sapiens
ttcaggcagaaattcaaaatggagagacaaagcatggaggacacaagaatgggaggaaaggcggactctcaggaacttcattcttcacgtggtttatggt

SEQ ID NO: 419145 - DNA, 89 bp, Homo sapiens
cattgtgaaagaaggttgggttcagaagagggcatgattccacctttccactgatagactcaagttcccagaaccagattagaaaacgc

SEQ ID NO: 419146 - DNA, 75 bp, Homo sapiens
gcaaaaagtctcagatgagctcatgagtgaaagttctgcagaatcagaagatttggcagtacatttatatccagg

SEQ ID NO: 419147 - DNA, 124 bp, Homo sapiens
cagcaatggaggaaacagctatatgggaacaacatacagtgacgcttcacaggaaacttgggaaccgtgggtgctgttgccttggactgcaaagggaatgtagcctacgcaacctccacaggcg

SEQ ID NO: 419148 - DNA, 101 bp, Homo sapiens
ctatttcttgtggatattatggctaataacacaacaagtttagggagtccatggccagaaaacttttggggccaggagtggtggctcacacctgtaatccc

SEQ ID NO: 419149 - DNA, 100 bp, Homo sapiens
cttcacctgggtctgcacgccctttctgaatttcgctaaggagtttgtgatcagtgatcggaaggagctggaggaagatttcatcaagagcgagctgaag

SEQ ID NO: 419150 - DNA, 96 bp, Homo sapiens
tccttggcaacttcttccttgtggacttcgagcagtcgcacctggaggttcagctggtgcaccccagacatggatgtcatcctcaacattcctgtg

SEQ ID NO: 419151 - DNA, 50 bp, Homo sapiens
ggcggcggccacgccaaggacggagctcgaaagagcattccagacacata

SEQ ID NO: 419152 - DNA, 50 bp, Homo sapiens
atgcagtctgctggatcacagagaggatgacgatgtcgataccaagaagc

SEQ ID NO: 419153 - DNA, 75 bp, Homo sapiens
gaggacagttcgctacacagcaatgcatcgaggacccactgatctcagcatgaagagacaattggcgactagctc

SEQ ID NO: 419154 - DNA, 75 bp, Homo sapiens
caaacacagttgtttacagctctaacaaaatagacgggaagcggatttgtcttggtgaaggcatcgcccgtgcgg

SEQ ID NO: 419155 - DNA, 101 bp, Homo sapiens
cgcccagttccctgcatcctaagactcgaaggcagcacaggacctggaaaaattacatgcaacggacagccaagacgtagatccatccaagacttgactgt

SEQ ID NO: 419156 - DNA, 75 bp, Homo sapiens
ccagtgtggaaaaccagtggtaaatgtcagctacaggccagcttatgaccaggatctcaaagatttcatgagaca

SEQ ID NO: 419157 - DNA, 98 bp, Homo sapiens
agtggcctaagaggctgctgcactgaaatatacagtttatgtaacttgatggaagaaaatggaattactccaaaaagacaagtgctcaagcagcaaaa

SEQ ID NO: 419158 - DNA, 80 bp, Homo sapiens
agatgttccatttgtccacgtccggagagtcaacaatgttaccagcgaggcttgaagtagaaaatgccatgatgagaaaa

SEQ ID NO: 419159 - DNA, 100 bp, Homo sapiens
ccactatggaattctaatttgaaccatgtttggattgaagccgcctctgtattacttaccagcgagggcggcactgctcacaggacggctacccatccgc

SEQ ID NO: 419160 - DNA, 135 bp, Homo sapiens
tccacattgctgcatttgttctgcctgacttggaccctggaaaacctggccctcttcaatttctgacaaaagcctctgaagagccaatccattcaggatgggaaaccacgcaggcaaacgagaattaaatgccga

SEQ ID NO: 419161 - DNA, 100 bp, Homo sapiens
cgcgcagccatggccgagaaccccagcttggagaaccaccgcatcaagagcttcaagaacaagggccgcgatgtggaagaacagatgttgttattgtaaa

SEQ ID NO: 419162 - DNA, 100 bp, Homo sapiens
gacgagcagtgatgtatctctataaacaccccaaggagtcaaggtctaacaaggacatggcagggaaattaatcaccaagatgttccgaagggtgctcac

SEQ ID NO: 419163 - DNA, 100 bp, Homo sapiens
acggcggcagcagcggcattcaggccatgtcaaaggacgccctgaatctggcgcagatgcaggagcagacgctgcagttggagcaacagtccaagctcaa

SEQ ID NO: 419164 - DNA, 83 bp, Homo sapiens
cagcggtacccgaatccctataggattttttatcaagcagaaatgcatcgaacaacgagaatcaagatcactgagctaaatcc

SEQ ID NO: 419165 - DNA, 100 bp, Homo sapiens
ttttgaagatgcaacgagtgcacttggtgctggagaatctggtaaaagcaccattgtgaagcagatgaggatcctgcatgttaatgggtttaatggagag

SEQ ID NO: 419166 - DNA, 83 bp, Homo sapiens
cccagaccctggagcctcagttggaagcagccgatccagcctgcggagcctgtggggcagggaggacatgtatgcccaggact

SEQ ID NO: 419167 - DNA, 99 bp, Homo sapiens
aactcgaagaacagctgtggaaagaagttgcaaaacactgggtgatgatgaacagtctacacagatggctgcaagttgggaagatgataaagttacaga

SEQ ID NO: 419168 - DNA, 100 bp, Homo sapiens
ccgtgtcttacatcagttcagagagaaaggacaactgggcagaccaattttggatgtgccatattggaatgcaaagccagctcccatgcctaacattgga

SEQ ID NO: 419169 - DNA, 74 bp, Homo sapiens
tcaagcaaagaagagttgagcacaatcaggtgtatgcaacagcgttattgcaacaggctaacgaaaacagacaa

SEQ ID NO: 419170 - DNA, 80 bp, Homo sapiens
tgatgattttgaagtcatttcacatcgaagccatgatttaaatatcggcgttaaggggacacctgtgttcgtgcatgcgg

SEQ ID NO: 419171 - DNA, 51 bp, Homo sapiens
gtcaggtctggagctcgaccgggccagatgtattagacacagaaatgattg

SEQ ID NO: 419172 - DNA, 100 bp, Homo sapiens
cttgaacgattccgctctgcggcgggtgtccctaaactagcagtttagggtgtcagatatccttggaacagaagatcttattgtggaagtgacttccaat

SEQ ID NO: 419173 - DNA, 100 bp, Homo sapiens
ctggctagaagcagagacaccaggacagaaaagacagtgttctgctttcatggagttcacagaagagtcgaggagacacaacatttgcctgcaacaagga

SEQ ID NO: 419174 - DNA, 98 bp, Homo sapiens
atcgaaagcatggcgtcggtggtgttggcgctgaggacccggacagccgactgtgccctgtccacggtgcctcctgcatgtcctgctgccctgagctg

SEQ ID NO: 419175 - DNA, 82 bp, Homo sapiens
cgggagttgggaggacccgggacaccgcacagccgggaaatgttcaaaaggtgatgacctatcaacagccattctcaaacag

SEQ ID NO: 419176 - DNA, 82 bp, Homo sapiens
ggagctaaagcagcgtgcgttcagccctgggcgaccccgataacgtggtgttgtgcctgctggcggcggacgaggacgacga

SEQ ID NO: 419177 - DNA, 75 bp, Homo sapiens
tgtccaggtttgagctgcctggtaaagctgcagtgtttgaaagatgtatggtgatcttgaaacctccagacacaa

SEQ ID NO: 419178 - DNA, 74 bp, Homo sapiens
tttggtgaccagccagatatccgctgtccaattcccaggaggcgggttatcaatactctggctgaccatcatca

SEQ ID NO: 419179 - DNA, 74 bp, Homo sapiens
tcaagtagatgggcactccagtaaaaatgacatccacacactgttgaagaaaatgcatccgatgcagatttatg

SEQ ID NO: 419180 - DNA, 75 bp, Homo sapiens
catggcggaacgcaggagacacaagaagcggatccagggtatgctgggaaaatcagccagatgccggtgattttg

SEQ ID NO: 419181 - DNA, 100 bp, Homo sapiens
ctgggctgttacagaagaagactggaagaggtaatttccaaggttcttcccagctctgaagttgtgtgtcaaaggaaaatgcccagataatcagagaagt

SEQ ID NO: 419182 - DNA, 75 bp, Homo sapiens
ctggctccgctggaagtgagggttctgggcccacgaggcgcagttgtgtagcagttgagtaatgctggttagctg

SEQ ID NO: 419183 - DNA, 100 bp, Homo sapiens
cttttcaccaaggaactggtgctgcagcgagaggtagtgtgccagtatttgaaaaatcccaatgtatctgattcactgctgctgcagaatattttccaag

SEQ ID NO: 419184 - DNA, 119 bp, Homo sapiens
caagagttgaaataaaagaatctgttcgtggccaagatattttcattatacagacaatacccagcccaccttgggacaccttgactccaagcccagcagtaagtccaacatgattcggg

SEQ ID NO: 419185 - DNA, 75 bp, Homo sapiens
ccggggacccttccgtatctgcctaggcattttgctgtctcctcctaatacgagcaatagtatggttacagaacc

SEQ ID NO: 419186 - DNA, 82 bp, Homo sapiens
tcggtacagtctctgcacctcgcgccccagcaggtactccaaagattcaggtttactcacgtcatccagcagagaatggaaa

SEQ ID NO: 419187 - DNA, 100 bp, Homo sapiens
tgagtttcttactcgggagctggctgaagatggctactctggagttgagcaaagtctctcgcgacaccctgtacgaggcggtgcgggaagtcctgcacgg

SEQ ID NO: 419188 - DNA, 100 bp, Homo sapiens
ggaagaggagccgagcatctgggccgagaccattccgtatggagagccgggacttttttcaggagatattgcacctttaatgcaagaaaaagtactaagc

SEQ ID NO: 419189 - DNA, 95 bp, Homo sapiens
tcatccatttgcttggagatgaagaccccagggtgcgacatgttgccgcagcatcactaattagcatcctgtgtgaagcactgcagcacaatctg

SEQ ID NO: 419190 - DNA, 142 bp, Homo sapiens
gaggcaccgggatcgtgaccgagaccgtgaccgagagcgtgaccgagagcgcgaatatcgtcatcgttagaagtgtggcaaaggagcagagaactttgacaagttcttcacacgaggacagcccgtcttaacaccacctgat

SEQ ID NO: 419191 - DNA, 75 bp, Homo sapiens
tctccacagaaaatgtcgtctcggcttggaatctttttgccataaattctaagaagctcttcgtgggcggtcttg

SEQ ID NO: 419192 - DNA, 83 bp, Homo sapiens
gggagatcccaggcggtgacagagtggagccatggctagagatgaagaaaccaaggctttgtgactaactcaacccctcaaga

SEQ ID NO: 419193 - DNA, 83 bp, Homo sapiens
gccgggacagcggcgagacgcgcgtgtgtgagcgcgccggaccaagcgggcccagaagcgggctatgactttgcagccgtcct

SEQ ID NO: 419194 - DNA, 82 bp, Homo sapiens
acgtgggacaggccacgctgtccgtccgcagtaccgacgcctgcagatgaaggatttgggggcagagcacttggcaggtcat

SEQ ID NO: 419195 - DNA, 82 bp, Homo sapiens
ttcgatcgcctcgcgccggctgctctttccgggtaacacaagtggcaagacagccgggaacccctaccccatccccttattc

SEQ ID NO: 419196 - DNA, 75 bp, Homo sapiens
gagcgcccgaggcgtctgggatggtgtgggaccggggaaatcctcattgacgattcaatttgttgaaggccaatt

SEQ ID NO: 419197 - DNA, 100 bp, Homo sapiens
caatgaatttggggaaagagttgtcaaacgaaacccatgtttctaatgaccagcagggccctgttacataaaccagagatgataaaacagatacttccag

SEQ ID NO: 419198 - DNA, 100 bp, Homo sapiens
aaagcagtggtgaatgccgcaattccagcctatcacctaagagaccttatcaaaagaacattcagaagattctcggccttgccccttcacgagccgccac

SEQ ID NO: 419199 - DNA, 83 bp, Homo sapiens
gaaaaacaagacaaaatctacttcatggctgggtccagcagaaaagagatgaaacgactacaaagtgccatgacagaaggtgg

SEQ ID NO: 419200 - DNA, 75 bp, Homo sapiens
ttcgacaggaaaaaaatttgctggatattgatgcgccagtcactgatggagaacttaatgttctggatgatattt

SEQ ID NO: 419201 - DNA, 73 bp, Homo sapiens
cggtgggctaggtactgagcgcgcgagatcgaagaggttcctggtgagctcatgcaggaagacctggcaacgg

SEQ ID NO: 419202 - DNA, 98 bp, Homo sapiens
cagaattacgggcaagcgctgttcaaacccatgaagaacttgcttgctagaaaacaaagtgcaaggcttgacaaacacaatgacttgggatggaagtt

SEQ ID NO: 419203 - DNA, 133 bp, Homo sapiens
gaccgtgtcccggaagacccatgacgcctcgggccagctagtcctcatcagccaggagctgctgcggaaggagcgggtacagccaaagaccggagctttggagagatgaagtttaaacagtgtcctacagaga

SEQ ID NO: 419204 - DNA, 100 bp, Homo sapiens
cagcacttcatccagcagtgcacagctggcggaggcagtgacctcagactctggacggtgaacggggatctcgttggacatgtccactgcagggagatca

SEQ ID NO: 419205 - DNA, 90 bp, Homo sapiens
ctttcacctatgaaagcaaacgtatgggcatcatcgtgcggtaatccagtccctcatagcactggtgaatgacccccagcctgagcaccc

SEQ ID NO: 419206 - DNA, 76 bp, Homo sapiens
gtggaacctcaggggcccgcgttaggcaagaagttatgaaatggaatggatggggatataatgattctaaattcat

SEQ ID NO: 419207 - DNA, 100 bp, Homo sapiens
ggggctacatcgtgacagacagagagacccttgaacatctgtgaagaaatgactattctgcatggaggcttcttgctggccgagcagctgttccacccta

SEQ ID NO: 419208 - DNA, 73 bp, Homo sapiens
gataaaacaaaggctcttacccactttctgaagatgatgtggaaacctgcctatgattttctgtatacctgga

SEQ ID NO: 419209 - DNA, 96 bp, Homo sapiens
agaactacaggaacctgctttctctcgatgaggataacatccctccagaagatgggaagaggaagaacgtctgagaaataaaattcgagctgatca

SEQ ID NO: 419210 - DNA, 75 bp, Homo sapiens
cctgcctcagcctcccacgtacctgggattacagatactgtggaacactccctagacaataaagatggtcctgtc

SEQ ID NO: 419211 - DNA, 83 bp, Homo sapiens
cgcaaccccagatccatttacactttacagacttcagaaatgggcttgggaaccagctgagttcaggatcccacacctctgct

SEQ ID NO: 419212 - DNA, 82 bp, Homo sapiens
ttcggctgtacatcgatagctatgagaaggacgttgccaagattaaccaggacccccagaaacagagctgtcagtcagtgct

SEQ ID NO: 419213 - DNA, 75 bp, Homo sapiens
ttcttctgtatagaaatgcaagctgacttggatgttgtgggtgatggtatgcagtgtcctccttcacctttgctt

SEQ ID NO: 419214 - DNA, 100 bp, Homo sapiens
accatggacggcagggctccctctggatgtggaattctccgtccctttccagggagggaacaaagcccacagcaccgaagttcgagcctagcatcagtat

SEQ ID NO: 419215 - DNA, 100 bp, Homo sapiens
aaaaggggacaatgactacaggacacaatgtggctgacctggtggtgatactcaagattctgccaacgtgcagccaaaggagactctggagatggtgtgg

SEQ ID NO: 419216 - DNA, 100 bp, Homo sapiens
ttcttcccgcccacacggcagatgggactcctgttcacctggtgtgatccctcacatccacaaatctctgattggaaagaagggacagcagaaaactgct

SEQ ID NO: 419217 - DNA, 95 bp, Homo sapiens
cttggcgaagccttgggtttctttcttaaaggactgatttttagaactccacatttgaggtgagacacagtaacctggttgaactctgcatctgg

SEQ ID NO: 419218 - DNA, 96 bp, Homo sapiens
gttctggggacagtttggtattaaaatgaccatgaaccagaccgaacataatctgacagtgtcccagattccgtctccacaaacgtggcatgtgtt

SEQ ID NO: 419219 - DNA, 88 bp, Homo sapiens
ccgcttcccaggaaaggtccgaggtccccttcccctgagcccatctacaatagcgaggggaagcggcttaacacccgagagttccgca

SEQ ID NO: 419220 - DNA, 100 bp, Homo sapiens
gccgcagccagcaactatttcaggtactaggttttgacaagcttgcatcatgcgtgagtataagctagtcgttcttggctcaggaggcgttggaaagtct

SEQ ID NO: 419221 - DNA, 100 bp, Homo sapiens
caccttcaacaaccccaccacggagttccggtacaagctcctgcgggccggcgggacgctgcaggagctgaagatggcgagctccgtggcgccctacgag

SEQ ID NO: 419222 - DNA, 100 bp, Homo sapiens
atgaatgtaggacgctgctcttcaaagcgatccacaatctgttagaaaggtgattttacaacgagatgctgctctccatagggatgctcatgctgtcagc

SEQ ID NO: 419223 - DNA, 100 bp, Homo sapiens
gccgcgggcgcccgaggggccgagcgagcgcgcagggaccatgtcggcggagaccgcgagcggccccacagaggaccaggtggaaatcctggagtacaac

SEQ ID NO: 419224 - DNA, 75 bp, Homo sapiens
caaggctacgagaggacgattgcaagataattgacgaccttgccaacctagtggagaacacagatgaaaaacttc

SEQ ID NO: 419225 - DNA, 87 bp, Homo sapiens
gaaccaaccctgccagcacctggaccttggacattcagacttcagaatggagccagagaagaagatcgtccaggagctgctggagac

SEQ ID NO: 419226 - DNA, 74 bp, Homo sapiens
ctctaaaattaaacatcggggacctacaggttacaaaggcgagcccacaccttaaccgtgctcttcatcctcac

SEQ ID NO: 419227 - DNA, 82 bp, Homo sapiens
agaacatccacagaatagacctgaagacaaaaatccagaagtacaagcagtctggaacgaatgcaggaatttgggaactgag

SEQ ID NO: 419228 - DNA, 95 bp, Homo sapiens
ctttgattgagaaacttcatggggaactgcaagacaggaagagaggccgtgcccctcagctgaatgccaagggaacagaagcacccgcagtagtg

SEQ ID NO: 419229 - DNA, 82 bp, Homo sapiens
agccgatccagcctgcggagcctgtggggcaggactatgagagtaaattgcaggccttgcagaagcaggttgaaacccgatc

SEQ ID NO: 419230 - DNA, 100 bp, Homo sapiens
cacagaggccacggaaatgatgggtgcccttgtggccagtaggcaatcacctgaaggatctgacttccagaagatgacaagagcacctcaaaggcagcag

SEQ ID NO: 419231 - DNA, 75 bp, Homo sapiens
ttagaagcaagctggcccactcacccacaccggaatagtaaggaggaatcctacgccaacgtgaagcagtggctg

SEQ ID NO: 419232 - DNA, 75 bp, Homo sapiens
tcctagaagtcagtctcagatgggatgatgcagtgtgtgattgcagtcgcggacaaagtattcgatgccttcctg

SEQ ID NO: 419233 - DNA, 100 bp, Homo sapiens
tgcctgtggcgatggctctgatgaagcaggtgaggccgcagcgtttgatgacgagtggcggcgggagacctcccgattccggcagcagcgtcccctggag

SEQ ID NO: 419234 - DNA, 100 bp, Homo sapiens
cgtcaggtggtgaagaagtactgcccaccaagaaaacacattgtggagcgctatacagagttttatcatgtacccactcacagtgatgccagcaagaaga

SEQ ID NO: 419235 - DNA, 100 bp, Homo sapiens
taccagacctcgctgacaactctcacacagattcggctgcagatactcacagttggtgacaaagttcctgctgatataaggttaacttccatcaaatcta

SEQ ID NO: 419236 - DNA, 99 bp, Homo sapiens
cgccgtgctgaaccacctgggtgccctgcccaacattgaattgacctcgccacgcatgttcacctatggtgctggagaatctggtaaaagcaccattgt

SEQ ID NO: 419237 - DNA, 98 bp, Homo sapiens
tatgaagacatagctgtgaagctgggaactgatctagaatacctgctgatcttaagaagagaatagaatctttaattgaccgggactacatggaaaga

SEQ ID NO: 419238 - DNA, 74 bp, Homo sapiens
gccaagcaggtgaccatggcagaactgaacgccatcattggggtaacttgggtttttactcctgtaacaactga

SEQ ID NO: 419239 - DNA, 82 bp, Homo sapiens
ctaacgcctcccggctctcgtcagcctcccgccggccgtctccttaacaccgaacaccgtgcagcagtaccgcgtcgccatg

SEQ ID NO: 419240 - DNA, 75 bp, Homo sapiens
cgtggactacgagttggcgcccaagtccagaatccgcgcgcaccgcgatgttctcagtgcagctgagtcttggtg

SEQ ID NO: 419241 - DNA, 100 bp, Homo sapiens
ttccgagattggagcctaacagtgtagatcctgagaacatcaccgaaatagtaattccctcctggtcccagacagtctaagaggcacagataaacgcaga

SEQ ID NO: 419242 - DNA, 96 bp, Homo sapiens
gaagcaaggcctgctctgtgcggagcagaaacgccttgtgcgaacagaaataaattcccgcggaaaggatctgcagaaccttggcctgaaaatgct

SEQ ID NO: 419243 - DNA, 75 bp, Homo sapiens
aatagattttcatttgcatgtcctacggagaaaaggagaacatcgtatgaggttgactatagtcaatggggccaa

SEQ ID NO: 419244 - DNA, 100 bp, Homo sapiens
cccctctccagctcgaaatcattgtaaaccatggctgtgtggatacaagctcagcagctccaaggagaagcccttcatcagatgcaagcgttatatggcc

SEQ ID NO: 419245 - DNA, 102 bp, Homo sapiens
agaggaggatgaagcccttagccctgctaaaggccaggttggatggcaagcatgtggtgtttggcaaagtgaaagaaggcatgaatattgtggaggccatgg

SEQ ID NO: 419246 - DNA, 75 bp, Homo sapiens
gcacttccggtcacgccatcgttgctgccttcttcgtcaaggtcactttagacaactgtgttgaagttggacgga

SEQ ID NO: 419247 - DNA, 83 bp, Homo sapiens
gttccttgtggagccggagctgggcgcggattcgccgaggcaccgaggcactcagaggagcctcccggcatggtgctcaaggc

SEQ ID NO: 419248 - DNA, 83 bp, Homo sapiens
ctggacgtgcacgcagcccggcgggaggataaagaccaccacggctgaccccgcactacatctacccaccagccatcgtgcag

SEQ ID NO: 419249 - DNA, 100 bp, Homo sapiens
ttacaagacgattcacctgtccagcatccgaccaccgaggctggagggggagaacacccaggtttgtttgaagagactgtaccagagggccagggaggag

SEQ ID NO: 419250 - DNA, 83 bp, Homo sapiens
cgaccagtccaagagccggcggcatgacgaatgactcagtgtatcgggagccgggagatggagctctcagcagagtggccagg

SEQ ID NO: 419251 - DNA, 83 bp, Homo sapiens
cgaccacagaaggaaattcaacagaacttagcataaatgctgaaggtggcacaagaatggctcaactctccaaatagagagaa

SEQ ID NO: 419252 - DNA, 50 bp, Homo sapiens
gggcgctgcggaaactctgtgacctgaaaggaagcggagagatgtcatgc

SEQ ID NO: 419253 - DNA, 101 bp, Homo sapiens
ccgggccgcaggcagtcccgcggcagcaggatcacagtactatactggcaattgctggagaagattttgcaattgttgcttctgatactcgattgagtgaa

SEQ ID NO: 419254 - DNA, 75 bp, Homo sapiens
cacaatgtcggggatggacctccagatttccttactggattactacagcatcccatttcccacacccactactcc

SEQ ID NO: 419255 - DNA, 49 bp, Homo sapiens
cagtaaagctttggacaactaaggtctcggcgcggaagatggccggcgg

SEQ ID NO: 419256 - DNA, 100 bp, Homo sapiens
tgctttttgatggccatggcataaggaactctatcccaggaatacagctttgcattaggataaaatggaccagttgctacagatgctgcaaagtacagac

SEQ ID NO: 419257 - DNA, 82 bp, Homo sapiens
ctggtggaacagctacgcatagaagccgggattgagcgcatcaaggtcttgccccagaagctgcgggcacatccacgcctga

SEQ ID NO: 419258 - DNA, 74 bp, Homo sapiens
caggaatttgataaccatatcaactcctatgatcatgcacacaagcagattggggaccacaaattcagtgccca

SEQ ID NO: 419259 - DNA, 100 bp, Homo sapiens
cagaagacttgccagcccaccagcacaatgtcagatttccatggtgtcagtgattcatattcctgataggacttataaactatcctgcagaatattgtat

SEQ ID NO: 419260 - DNA, 100 bp, Homo sapiens
ccgcgtccccggctgctcctcctcgtgctggcggcggcggcggcggcggcggcggcgctgctcccgggggcgacggtccccaaagctccagagatagatc

SEQ ID NO: 419261 - DNA, 100 bp, Homo sapiens
gcatttcaagctgccaaggtggagagagggattacagaaaggagaacaccttatttcaggtgccatgtttcagaacagagtaagacccctggtaaagaag

SEQ ID NO: 419262 - DNA, 115 bp, Homo sapiens
aacaaagctgaggtccagatgaaagagaagtttctggtcactccccaggattatgcgcgtgtgttaacagggcacaaccattatgtgatgtgtgctcagttccaccccacagaag

SEQ ID NO: 419263 - DNA, 76 bp, Homo sapiens
ggcggagctgacggtggaggttcgcggctctaacggggctttctacaagggatgatggcgccacttcctcagtttc

SEQ ID NO: 419264 - DNA, 83 bp, Homo sapiens
ggagatcgtctctctcatcgaggcccaaaccgccaagctgtgtaaatgagtatggaagattatgatttcctgttcaaaattgt

SEQ ID NO: 419265 - DNA, 98 bp, Homo sapiens
gttcatgagtggaatccatgtttctggacgcggatttttggcctcatactctgttatagataaacaaggctacccacctttctgttctgagacccctc

SEQ ID NO: 419266 - DNA, 75 bp, Homo sapiens
atggagtttcaagcctgagtgtgaagattatgccagaggaacaagcattctgtgttttggtgaaaatcatgtacg

SEQ ID NO: 419267 - DNA, 75 bp, Homo sapiens
cagattcgcagtggtcgcttcttctccttggatcagaaatgtcaatatgactcaaaatatcgtgctgccacatgt

SEQ ID NO: 419268 - DNA, 100 bp, Homo sapiens
accagacccccgtggtagacattatctcctgctgcatactacgcccagaggatgatccagtatctctcacggagagacagtattcgccagcgctccatgc

SEQ ID NO: 419269 - DNA, 74 bp, Homo sapiens
agccatcagcgctcgttttgtgcagcttcagcacaatgacattgacaaacggtagagacgggggttcaccatgt

SEQ ID NO: 419270 - DNA, 149 bp, Homo sapiens
tccccgccaaccgcaaccattgacgccatgtcgggttattcgagtgaccgagaccgcggccgggaccgagggggacggcaaaacagaacagaaaggcggagataaaaagaggggtgttaaaagaccacgagaagatcatggccgtggat

SEQ ID NO: 419271 - DNA, 101 bp, Homo sapiens
gaattatgggagcgcatttccccaggtttagaaacctgctgaagtggtatgctaaggagttcaaagacccactgctacaggagcccccagcctggtttaag

SEQ ID NO: 419272 - DNA, 88 bp, Homo sapiens
ctcctcacccgaacatcagggccctccagactcaggcgccccaacaccatggctatgcacggtggcaggacatccagaatgatgctca

SEQ ID NO: 419273 - DNA, 100 bp, Homo sapiens
gtcagcaacgccccggtcactgagtacatggtgctgtgggcccagaagcgcccatgcctgagagcgtccaggaccaggcagagctgggccttaagggccc

SEQ ID NO: 419274 - DNA, 82 bp, Homo sapiens
gcggctgggacgtacggagcccgcaagtcccggcccgagatgtggaagatgtgaaatttgtcatcaattatgactaccctaa

SEQ ID NO: 419275 - DNA, 90 bp, Homo sapiens
gaagaaggtcagtgtgcttgcttggagatcaggacgcaaagtctccaacctgtcccagtatttcagcccagcctcggtgtccagcagccc

SEQ ID NO: 419276 - DNA, 141 bp, Homo sapiens
agccatcgcctggccccggctctctggaccttgtctcgctcgggagcggaaacagcggcagccagagggccgttgctccagggagaactgcaaatatcttcatccacccccacatttaaaaacgcagttggagataaatgg

SEQ ID NO: 419277 - DNA, 100 bp, Homo sapiens
caccccccgaatggacaatctttccttctgtcaacggcaggggcaggcctagtttgactctgacagtcctcccactaagatcgcaccccctccctccctg

SEQ ID NO: 419278 - DNA, 100 bp, Homo sapiens
ttggaaatgatacaattacctgcacgacacatggaaattggactaaattaccagaatgcaggggcgcagttgtgtagcagttgagtaatgctggttagct

SEQ ID NO: 419279 - DNA, 50 bp, Homo sapiens
cgggccatggccgccgccgatgccgaggctgtccggagtacacatggctt

SEQ ID NO: 419280 - DNA, 75 bp, Homo sapiens
tcatcccaatggacactgattcagatgttatgcacttacaagaaaggaaaggacctgacttacagtcagctctca

SEQ ID NO: 419281 - DNA, 51 bp, Homo sapiens
aaaaggatagcctccggcattccaggttgacaatggtctccaggatggtct

SEQ ID NO: 419282 - DNA, 49 bp, Homo sapiens
gcagcgccccgcagagcagtcgagtaaccctccactgagtgaagaaatg

SEQ ID NO: 419283 - DNA, 100 bp, Homo sapiens
ctggacgacatcgacctgtccgccctgcgggaatctggccaactgtgagcgcctcatcgaagtggaggacatgatggtgatgggccgcaagccggacccc

SEQ ID NO: 419284 - DNA, 98 bp, Homo sapiens
tcaatattctcacaaataaacatggtgcttggggagcagtttctcatagctgtgatgcagatccatccgccctagcaaaatatgttctggctttggta

SEQ ID NO: 419285 - DNA, 97 bp, Homo sapiens
tccgacacgacctctactggccttgcccagcgcctaggatctatcttgggatcccatggctttctttactgggctctggggccccttcacctgtgta

SEQ ID NO: 419286 - DNA, 50 bp, Homo sapiens
gaggaggtgcgcgagaagtacaaagtaattcgccaaaatgacgaacacaa

SEQ ID NO: 419287 - DNA, 100 bp, Homo sapiens
tcaacggcagaagcttcaccacaaaagcgaaatgggcacaccacagttccaattgcccgggctgttcttgttgacatggaacccaaagttatcaatcaaa

SEQ ID NO: 419288 - DNA, 100 bp, Homo sapiens
catacttggaaatggctgcaggttcagagtcaacatgattgtgtgaccataatcaacaatttctttcctcgagagagactggattattacactaagcccc

SEQ ID NO: 419289 - DNA, 83 bp, Homo sapiens
cccgttcttgcctcaggccagtcgcctccaggccaagagggatccttcacccgtgtctggtcctggtgcttgatggtcgaggc

SEQ ID NO: 419290 - DNA, 100 bp, Homo sapiens
gaacttcaatgcagattctagccaacataaaggacacattcagctaacgtattttagcaggtggagtgaggttgaagattcctgtgacagcgatgccata

SEQ ID NO: 419291 - DNA, 75 bp, Homo sapiens
cgaggaggcggttcgggcgaagagcggcttagggcctcaccgcgacctgggtggagtctcgctctgttacccagg

SEQ ID NO: 419292 - DNA, 75 bp, Homo sapiens
ctggagaaaaagaagaaaatgttaaaaagaacagatacaaggacatactgccatcaagatgtgagtgaattcaca

SEQ ID NO: 419293 - DNA, 74 bp, Homo sapiens
ataagttgccttatgtcaccatggccaaggccacctttgatgccatttctaagacctacagctacctgaccccc

SEQ ID NO: 419294 - DNA, 82 bp, Homo sapiens
gtctccttaacaccgaacaccattaactgctgaagtactgatcgagttctgcatttcttcaatgaggaactacaggctgatc

SEQ ID NO: 419295 - DNA, 98 bp, Homo sapiens
gcggggacgccatgcgagccaggtgcgagaagatgtactaaattcattgaataacaactttcttcaaacgctaaatcaagcttggaatgatcatcaaa

SEQ ID NO: 419296 - DNA, 88 bp, Homo sapiens
acaatgagacggaaataccgtgtttgtaatgtaacaaggaggcctgccagtcatcaaaccttcttggacacttaatgattgttggcaa

SEQ ID NO: 419297 - DNA, 107 bp, Homo sapiens
gggatgagtcatgtggcagtggaaaatgcgctcgggctggaccagcagagagaacgaggtgctcaaagtccaactgaagaaatatgtaggagctgtccagatgctga

SEQ ID NO: 419298 - DNA, 100 bp, Homo sapiens
cggtttaaagatttgggagaagaaaatttcaaagccttatataaagatgaagcgcagctgtataaagaagagcacctgaggaatcggcagcaccctcact

SEQ ID NO: 419299 - DNA, 83 bp, Homo sapiens
gaacctttgacttggtgttgaaagtgaaatgtcatgcctctgaaaatgaaggtggtgtttcataagatgtcacccaacgagac

SEQ ID NO: 419300 - DNA, 98 bp, Homo sapiens
cctggctacaacgaccccatgtcaggatgatatcatcaagttgaatcgaaaggaagggaagaagcagaattttccaagactaaatagaagactcctcc

SEQ ID NO: 419301 - DNA, 100 bp, Homo sapiens
gtgaaaccatcaatacaagattgattagtggagttgtacagtcttacgcgtggatagaaataaatatcaaattcacattccattgcctcctaagattgac

SEQ ID NO: 419302 - DNA, 83 bp, Homo sapiens
tcagaaggaagccgaattttaagtcatcgttctaggataggtttccaaggtgctattgggagctcatgcactcttggccaacg

SEQ ID NO: 419303 - DNA, 100 bp, Homo sapiens
cgaattagtctggctgagatgcttgaagaccttcatatttcccaagatgccactggtgaagaaggtgatctttagacagtgactgagtatggatcatttg

SEQ ID NO: 419304 - DNA, 140 bp, Homo sapiens
cgcgccagccccggcccccaacaaggacggagacgccggcgtgggcagcggccactgggagctgagatgtgctggtggacggacagccatgtgaccgcgaggctgtggcggcctgccaggtgggcgaccccgtgcgcctg

SEQ ID NO: 419305 - DNA, 88 bp, Homo sapiens
gaggacttcatccagtttgctacggtctacggggcagagcagggaaaacttgttattggacacaatatgctcttggacgtcatgcaca

SEQ ID NO: 419306 - DNA, 75 bp, Homo sapiens
atgatttgttatgcagtcgtagataaccagaaaacatcggatttacattttaagctctttcagtctcacatggca

SEQ ID NO: 419307 - DNA, 50 bp, Homo sapiens
ctttcaactacaccagccagcccgaccagacaagttggatggcttgagga

SEQ ID NO: 419308 - DNA, 100 bp, Homo sapiens
ctatggaggagccggagatgcagctcaaggggaagaaagattacaggctgtgccagccctggaaaaacagttacaattgttgttcgtggttctaacaaac

SEQ ID NO: 419309 - DNA, 100 bp, Homo sapiens
gtcatagaaactcacatgagacaaatgcgctcagcttcaattggagggaaaacccctgatcctaaaatgaatgctaggacttacatggatgtaatgcgag

SEQ ID NO: 419310 - DNA, 50 bp, Homo sapiens
tcctggtgaagctggtcgtgatggtcaaatagaaattgacgatcaggtgg

SEQ ID NO: 419311 - DNA, 98 bp, Homo sapiens
gaggcgcgccctggagctgctagagatccggaagcacagccccgaggtgtgcgaagccaccaagtctgccatcatggatgttctcgcagaagcaaatg

SEQ ID NO: 419312 - DNA, 82 bp, Homo sapiens
cgggatcctgtctggagagaagcagcggatcagcagagatgatgtgcgaggtgatgccgaccatcagcgaagcagaaggccc

SEQ ID NO: 419313 - DNA, 75 bp, Homo sapiens
ggccagcagctccaagatgatttgatgaaggtcctgaacgagctctactcgcctactcgacacccagcacctccc

SEQ ID NO: 419314 - DNA, 100 bp, Homo sapiens
agcttatggtgtatatctgctgcgatcctactgtttcactgcaaataaaccagccatggcaatgacaggctcaacaccttgctcatccatgagtaaccac

SEQ ID NO: 419315 - DNA, 100 bp, Homo sapiens
ctttgacctctgcttcctggtgcagagctcagatttcaagactttgagaatcactacaagaaaaactccttgtggtgaaggttctaagacgtgggatcgt

SEQ ID NO: 419316 - DNA, 100 bp, Homo sapiens
gtcgccagcaacctgaatctcaaacctggagagtgccttcgagtgcgaggcgaggtggctcctgacgctaagaggcgtggtgaccaagatgaagatgcag

SEQ ID NO: 419317 - DNA, 100 bp, Homo sapiens
gctggccccggaagcccccacgggctctacctgaccctgcagaaattcattgagtttgaagatgctctggaacaagagaagaaagagctgcaaatccagg

SEQ ID NO: 419318 - DNA, 96 bp, Homo sapiens
gttatgacaggaagcagagtggctatggtgggcaaactaagccgattttccggaaaaaggggtcccttcagtgttgtacgacgatgtatcaacaga

SEQ ID NO: 419319 - DNA, 134 bp, Homo sapiens
ctgggacctgcgctcagggctgctgcacgtggccatccgcatccggcctttcttcgacagtagcgggaacagcttccacgtgttcgaccagggccagtttgccaaggaggtgctgcccaagtacttcaagcaca

SEQ ID NO: 419320 - DNA, 85 bp, Homo sapiens
aaacagcagcagcttcaccagtctcgactggattacaattggagtacaaaccaccaggaacccgtaaacttcataacattcttgg

SEQ ID NO: 419321 - DNA, 51 bp, Homo sapiens
aagctttcctaggccaaaaagaggtatggcctcacaagtcttggtctaccc

SEQ ID NO: 419322 - DNA, 100 bp, Homo sapiens
ggaagacatggccactccagtcggtgttgagcacggcgagcagtctcaggcctttagtgatgatgcccagaagaatcagtgcggtttctgtggcagagcg

SEQ ID NO: 419323 - DNA, 100 bp, Homo sapiens
tcggtgtgcgacgtggagatccgaaggaatgaaatccgggattttttatcaagcagaaatgcatcgaacaacgagaatcaagatcactgagctaaatccc

SEQ ID NO: 419324 - DNA, 98 bp, Homo sapiens
acgaaggcaccgacgtcatcatgctgaccaccaatcagatccgtaagttccagggtctccctccactgctgtagtaacccgggtccggggcctcggtg

SEQ ID NO: 419325 - DNA, 100 bp, Homo sapiens
cgccaggccagccgggacggacgccgatgcccggggctgcgacggctgcagtactaaggctcgtacgtctgcatcgattatcttacgtggggcaaatgat

SEQ ID NO: 419326 - DNA, 101 bp, Homo sapiens
atttcggtagccatggcacaagaatatagccaaagatgaagaggaagcctttctggattggagtgatgatgatgatgatgatgatgatggatttgatccaa

SEQ ID NO: 419327 - DNA, 75 bp, Homo sapiens
ccgagaagagcagagcggagggagccccagacacggagaaaagccttacagatgctcatgggaagggtgtgagtg

SEQ ID NO: 419328 - DNA, 83 bp, Homo sapiens
caaccatcgcagttggaagcccatggggcagaatccacattcatctcaatggaaggatcctgccttaagtcaacttatttgtt

SEQ ID NO: 419329 - DNA, 100 bp, Homo sapiens
cggaaatgtgtcatcgaaagccaggtcctgggaactccaacaagggagcaaatcagagaaatgaacccaaactacacagaatttaaattccctcaaatta

SEQ ID NO: 419330 - DNA, 83 bp, Homo sapiens
atttaccagagataattgataacaccctgtaacagctgagtctatcagccacagtctctgcaagtttccaagagcagcagaaa

SEQ ID NO: 419331 - DNA, 75 bp, Homo sapiens
actgaaggcagtgaagcgaagaaaaggatcccagaaagtttcaggtaagaatgattgatgttggctgatattgga

SEQ ID NO: 419332 - DNA, 75 bp, Homo sapiens
gagacttgtcacatgcatcaggaccagagtctctggctgatgaacttgctcttgtggatgttttggaagataagc

SEQ ID NO: 419333 - DNA, 89 bp, Homo sapiens
gaaattgccggtctgggagttgggggcaaggagaagatcctgagctgtctggccttttgtccttgatccttggttaaggaaatgaccaa

SEQ ID NO: 419334 - DNA, 75 bp, Homo sapiens
ccaaacatcaagcagaatgtgatttgcttgaagatatgagtgtggtacaggtcctgcttgctgctggggctgatc

SEQ ID NO: 419335 - DNA, 75 bp, Homo sapiens
gggaatccaatcaataaaattgaagactggctgcaggattgcggtctgatgcaggctgggaagaatactttgatt

SEQ ID NO: 419336 - DNA, 75 bp, Homo sapiens
agtcacccggcggccaaaggccagtgactaccaacgtttggaccagaaggccacgaataccatgttctgtcccct

SEQ ID NO: 419337 - DNA, 73 bp, Homo sapiens
ttggcacaaatactattatggataagatgatggaagccagcagacctgcagaacttggctcccgggacccacc

SEQ ID NO: 419338 - DNA, 75 bp, Homo sapiens
aaattaattgctatcaatgcgaatgatcctgaagcctcaaagtttcatgattacctaggaacagtacgatttggg

SEQ ID NO: 419339 - DNA, 100 bp, Homo sapiens
tatctgaagaaaagtagaaggaaaaacagaacgttgcaaactctggaaaaaaacttggaatcaggaaacccaggcccaacggcaggtggatgcaagaaga

SEQ ID NO: 419340 - DNA, 100 bp, Homo sapiens
ctggatttccagaagacgaaatacgcgagagtgtgaacatggctacgcctcttcattcccgtccatgccgagcccccgactgcagcattcaaagccccca

SEQ ID NO: 419341 - DNA, 97 bp, Homo sapiens
aaaactcctgcccctcttcaacacctggacaccttgttagatggaacctacaagcagtgacgggtcagtcttacgagaatatggtaactgagatcat

SEQ ID NO: 419342 - DNA, 83 bp, Homo sapiens
acaaatacccctttgaattaattatggctgtacaggtttgcagattccgccagcagcacagcaagctctacagatgagtggct

SEQ ID NO: 419343 - DNA, 50 bp, Homo sapiens
caaagttgaaaacaaagtgctgaacaactctgctcatggtgattacatgc

SEQ ID NO: 419344 - DNA, 98 bp, Homo sapiens
gggatttgggtcgcagttcttgtttgtggatcgctgtgatcgtcacttgacctgcctagagctggaacgttacctccagagcgagccctgctatgttt

SEQ ID NO: 419345 - DNA, 117 bp, Homo sapiens
ctgcgctctccgcaccgcggcttaaatgatgtattttgtgatcgcagcgatgaaaggagcatcagatccatgctgctgctgactcggagccccacagcttggcacaggctctctcag

SEQ ID NO: 419346 - DNA, 88 bp, Homo sapiens
atgttttatcaatgcagctaaggtgggatgtgtgtgggctgaaattccgagctgcggttgtgcatgagaatacacccttcgtggtacc

SEQ ID NO: 419347 - DNA, 83 bp, Homo sapiens
gcacctggaccttggacattcagacttcagaatgccatcactggtgcaagctatatttaacggagatcctgatgaagttcgag

SEQ ID NO: 419348 - DNA, 100 bp, Homo sapiens
cagttttctacaattgagtacgtgatacagttacatgagcatgcagcataccttgtggatagcatgtgggactgtgctactgagctgctgaaagactggg

SEQ ID NO: 419349 - DNA, 74 bp, Homo sapiens
aggagctgctgaaggaattaagacatggtctgggaggggctgaacgtggtgaagacaggccgagtgatgcttgg

SEQ ID NO: 419350 - DNA, 93 bp, Homo sapiens
gatcccagaaggtcgcgaaggcagtaccgtttcctcagcggcggacaatgcagatcttcgtgaagactctgactggtaagaccatcaccctcg

SEQ ID NO: 419351 - DNA, 100 bp, Homo sapiens
ttgcacatgtaacatccctggagcccccctccatgcgcctgaaggcccgacccagcagccctggcttttccgtgcttacctgcagcgccttctccttcta

SEQ ID NO: 419352 - DNA, 80 bp, Homo sapiens
ccccggaagctgagcagatgccagcaccataattccagtacagcctatcaaactaagaatcctgcaaaaatgtctctcta

SEQ ID NO: 419353 - DNA, 98 bp, Homo sapiens
gggaagatggcgccagcggtcaagagcgaggtcagcggggctgcgagcactatgacagaggatgtctcctaaaggtaccgaagtggcatccgaggcca

SEQ ID NO: 419354 - DNA, 75 bp, Homo sapiens
tttctctctcgtcctcgctgctgtacttcgtctatgtggcgcccggcatagaaacgatggaaagaactttctaag

SEQ ID NO: 419355 - DNA, 98 bp, Homo sapiens
caactagttcctgaatataaggaaaaacagacacctgaaagtcttcctcaaaataacaatccagttctgccctctgaggaccctgccctttcccaaaa

SEQ ID NO: 419356 - DNA, 84 bp, Homo sapiens
gaaccccatccacatcaccattgtgcgcctggtcctgctggaagatgaggaggaggacctaaagatcatgcaccatgcagacaa

SEQ ID NO: 419357 - DNA, 51 bp, Homo sapiens
cggatgtttgctgaccctcatagcaaggctgaagtccctgctgtaaaggac

SEQ ID NO: 419358 - DNA, 82 bp, Homo sapiens
gacgcggttctgccgagagccgcggagcgtgctttggacaccatgaattttgatgttataaagggcaagccagtacgcatca

SEQ ID NO: 419359 - DNA, 97 bp, Homo sapiens
gcggcagaagggctacgaagaagtgcttcagcgggccaggaagcgcatccaggagatgccttcaattaagttgcagagttctgatggagagatattt

SEQ ID NO: 419360 - DNA, 83 bp, Homo sapiens
ctgcggacggcgctgcggtacatccagcaaaatgatgcttcaacacccaggccaggtctctgcctcggaagtgagtgcttctg

SEQ ID NO: 419361 - DNA, 75 bp, Homo sapiens
gacgctgctgggtccgctgagcggggcgacccgaggtgatagaaattgaagatgcttcacccaccaagtgtccaa

SEQ ID NO: 419362 - DNA, 100 bp, Homo sapiens
agccagagcatgaccttaatgatgtttgtctctaccccaactcagtgggccacagttacatttcatcttcctcatcatgtgttgaagtccattgccagtg

SEQ ID NO: 419363 - DNA, 49 bp, Homo sapiens
ctgccttctgtctagcccagaaggctcaggcaaagcaacgagctggcag

SEQ ID NO: 419364 - DNA, 100 bp, Homo sapiens
ggacgctgggcaccccacccgcttctcgggtgttatcacacagggcaggaactctgtctggagagcgatcgtcttctgatcaaaggaggtaaaattgtta

SEQ ID NO: 419365 - DNA, 75 bp, Homo sapiens
cagctaccgcagcatgagcgaaagctacacgctggagtgagctgaagagacgcctgaaagctgagaagaaagtag

SEQ ID NO: 419366 - DNA, 51 bp, Homo sapiens
cttcaagccctggctcaaaatacttcagaatggcagaagatgatccatatt

SEQ ID NO: 419367 - DNA, 83 bp, Homo sapiens
aaactcgccagtgagaagacagagatgcagcggcattatgtcatgcagaaaaatatggctcaggagactaaccagaccccggg

SEQ ID NO: 419368 - DNA, 74 bp, Homo sapiens
gcgctgcatccgctcgacctcgtgaagatccgcttcgccgccaacagtgaactgggtggtgcccgtggcagaca

SEQ ID NO: 419369 - DNA, 100 bp, Homo sapiens
caccgactggaccgggaaggagcatcccaggacctaccagaatctgatcactccaagaactgaggcccctgtcagcagtgtcagtaatagtttggagaat

SEQ ID NO: 419370 - DNA, 100 bp, Homo sapiens
gaagtcatttaacttctatgttttcccgaaacccttcaatagatcctcaccagatgtcaaatttgtttgtcagcctcttccatgagtggggagcccgctg

SEQ ID NO: 419371 - DNA, 98 bp, Homo sapiens
gtgtatcaagtaatggtgcaaagcctgaaatttagcatgtagactgctggggcaatcaatggatgaaagtggattaccacagctgaccagttatgatt

SEQ ID NO: 419372 - DNA, 101 bp, Homo sapiens
gagcgcgcgggcacagggtgccgctgaccgactctaaaatagagctcaagcttgagaagagagaaccactaaagggcagagcaaagactccagtaacactc

SEQ ID NO: 419373 - DNA, 83 bp, Homo sapiens
gcgttagtgaagcgcgcccggcgtcacgccatcagagggttctcgcttcagcacaagatccggagttttgaagaagcgcgagg

SEQ ID NO: 419374 - DNA, 81 bp, Homo sapiens
ctggttctgccttctggacaatctttccgggggtgcagatgatgcctgggcagatgtggaggacgtcacggaggaggactg

SEQ ID NO: 419375 - DNA, 95 bp, Homo sapiens
cgtggctcaactttaccaccaagttagtaaaattgagtgggattatgagtgtgagccagggatggtcaaaggcacacggatgataccatcgggga

SEQ ID NO: 419376 - DNA, 100 bp, Homo sapiens
aggggtccagtgggtctgagcaaaagaaggaagaatcctgctcaaaaatgaggtgaattaatacttgggcgctcaggaaccctggacagctacatgaggt

SEQ ID NO: 419377 - DNA, 117 bp, Homo sapiens
gaagagtccccccaagtctcctgaagaggaaggagcggtgtcctcttaagaaaatgtttgtagaagactatgaacctaccaaagctgacagttatagaaagaaagtggttcttgatg

SEQ ID NO: 419378 - DNA, 75 bp, Homo sapiens
gtctttggcagccttatcattggttatgccaggccgcaccaggatgtcggacaccgaggagcaggaatatgagga

SEQ ID NO: 419379 - DNA, 82 bp, Homo sapiens
ctcctggccctggccctgatcatcctgctgggcttcgtccagatcgggaaggctgtttgcagacaaggtcccaaagacagca

SEQ ID NO: 419380 - DNA, 75 bp, Homo sapiens
tttctgagcgagccttgaaagagataaaagcggaagtttgccacacggaaactggagcacccatcctaactgatg

SEQ ID NO: 419381 - DNA, 100 bp, Homo sapiens
tgttcaagaggaagcccgctgccttgtggaggagttgagaaaaaccaaggacgtgcgatgggacacatttcccctaggccgaatgccaggtcagaccgag

SEQ ID NO: 419382 - DNA, 75 bp, Homo sapiens
gtgcttttatattcatctcaaaaacaaaattctgaactcaggacttggcaagaattgaatgatctggcacgggac

SEQ ID NO: 419383 - DNA, 100 bp, Homo sapiens
gggccccagcgccgacggcgacgtcggggccgagctaacccggcctctggacaagaaaatcgtggatgggaatgtgaagatgaccctgggcatgatctgg

SEQ ID NO: 419384 - DNA, 90 bp, Homo sapiens
cagttggagagggaagaaaagctttggatgaaggagcttcaaacccaaagaggtaagcattcagaatatcagctgcatccagtgtcccca

SEQ ID NO: 419385 - DNA, 80 bp, Homo sapiens
aaggacctgctgatgaatattacatcatataccgaaatgtttttgataaggacaaggatagtgggaaaacctctgtggtt

SEQ ID NO: 419386 - DNA, 76 bp, Homo sapiens
tgaaaaagaaaagactaccgcactgaaagtgaaggaagcccatcccccagaattgagctgctgcataatattgacc

SEQ ID NO: 419387 - DNA, 96 bp, Homo sapiens
gggtggcggcaagatgaatgaggagatctccagcgactctgagagcgagagtctgcgctcctcagaccaccggcaggtgaacagcctgatgcagac

SEQ ID NO: 419388 - DNA, 50 bp, Homo sapiens
cgtgggggtctctatgataggggaagattgttgtgtccactgtatcctgg

SEQ ID NO: 419389 - DNA, 98 bp, Homo sapiens
ggcggagaggcgggcgggaggccgagactttggctatgaaaggattaacactgaactgtttaggaaaaaaagaagaagcttatgagtttgttcgtaaa

SEQ ID NO: 419390 - DNA, 100 bp, Homo sapiens
cgactgcccagagtccgcggccggggcgcgggagccctcgatttgaactgcccatgggaaccaccgagcagcccccactgccgcagcagacacagcctcc

SEQ ID NO: 419391 - DNA, 90 bp, Homo sapiens
cccattctccaccaagtctggggataccttactgctcctgcaccacggggacttctcagcagaggtaatctttagatggtggaagatctc

SEQ ID NO: 419392 - DNA, 75 bp, Homo sapiens
gcaggtgatggtgttcgatacttgctcagagcctgtgtggtgcccctatctccttgttccaagggcctctcttgc

SEQ ID NO: 419393 - DNA, 74 bp, Homo sapiens
accgggcgctggtctgctcccagccgggctgaagaagatgcagagcagcctgaagctggtggactgtatcatcg

SEQ ID NO: 419394 - DNA, 96 bp, Homo sapiens
gaggaaagactctgggccccaggactcacctaaactggagttcgaatactgttcgctcgctgtgtgaccttggttcatcatcaaccaaggtggatc

SEQ ID NO: 419395 - DNA, 83 bp, Homo sapiens
aacagatgttaagacattcttggaagccttaccgccgctccgggaattctgaagttctgggcctttctcagaagactgtaatg

SEQ ID NO: 419396 - DNA, 109 bp, Homo sapiens
ccaaacgaagttaaaggaagtgttccccacggctgcgctcatgccaggtcctcctagccagcagttttgtgcccatttatgcaggactgaagctagtggaatacaaagg

SEQ ID NO: 419397 - DNA, 50 bp, Homo sapiens
gaggatgatcaagcggagttcgatgcggctgccgcgggcggacacgccag

SEQ ID NO: 419398 - DNA, 90 bp, Homo sapiens
agaagaacttgtacagagatgtgatgttggagaactatagcaatctggttttcttggagttcctgagttggaggtagaagaagaaaccca

SEQ ID NO: 419399 - DNA, 90 bp, Homo sapiens
aatcaaccaccttgtctggacagcagtcagcatgctttgcttcacctctgggtcatgattgttctgttgacttacacaccagaaatgcac

SEQ ID NO: 419400 - DNA, 97 bp, Homo sapiens
ctggatgagacatttgctacagcatcccacattaagtcaacgtaacggcacagccaacaagatgaacggagctttggatcactcagaccaaccagac

SEQ ID NO: 419401 - DNA, 119 bp, Homo sapiens
ctgggtctacgataacgcgcttttgctcctcctgaagtgtctttggtccaacgttgttccaggaccgtagcatcctgagacattttgaattgacacttctcaagatttgactggatcag

SEQ ID NO: 419402 - DNA, 100 bp, Homo sapiens
cagattttggtctgagtaaggagtttgtggctgatgaagtgtccaaggcagctgcagatttgatggcctactgtgaagcacatgccaaggaagaccccct

SEQ ID NO: 419403 - DNA, 74 bp, Homo sapiens
ttttgatgatgatggagaagggaacagtaaatttttgaggaccgtgtgtatgtacaacaaaataatgtggagaa

SEQ ID NO: 419404 - DNA, 82 bp, Homo sapiens
gagaattcggtttgtaggtcgtcagaaagaggtgtggaaacaggaagagaactagaactggaagtaaagcattgaagatgtg

SEQ ID NO: 419405 - DNA, 98 bp, Homo sapiens
tgtacgccaaggggggcaagggttcggccgtgccctccgacagccaggcccgcgagaagtgctggagaatctggtaaaagcaccattgtgaagcagat

SEQ ID NO: 419406 - DNA, 87 bp, Homo sapiens
tcttggtatatagatacttgcaagagtcaggccttgaaccggggcattgctgctgtcaaggaggatgcagtcgagatgctggccagc

SEQ ID NO: 419407 - DNA, 100 bp, Homo sapiens
tttaaacagatccacaaactgaacagagtcattgaagtcaacaagagagacatagtcttcctggtggatggctcatctgcactgggactggccaacttca

SEQ ID NO: 419408 - DNA, 82 bp, Homo sapiens
agtcacgtttccaaagctgtgtgctcaacctacttacagtcacgttactacagtttgcagaaaaaacttcagcatgtgccag

SEQ ID NO: 419409 - DNA, 50 bp, Homo sapiens
gacaaccttgatttcagtgtgtgttatagttttgccgctggactcttccc

SEQ ID NO: 419410 - DNA, 102 bp, Homo sapiens
gccaggacaagattcgacccctctggagacactacttccagaacacccaagggttggatgggctgtctgagcgctgtgcccagtacaagaaggacggagctg

SEQ ID NO: 419411 - DNA, 100 bp, Homo sapiens
gaagtgcttggagtgcagaactgaaagagattacttctctaacaggatcaccagtttgctccacaaagcacaatgtctcgatcacgacaacccccccttg

SEQ ID NO: 419412 - DNA, 82 bp, Homo sapiens
ccgggcccgcccgcccgcatccagacaatgcagatcttcgtgaagactctgactggtaagaccatcaccctcgaggttgagc

SEQ ID NO: 419413 - DNA, 83 bp, Homo sapiens
ctcgcccagcgtccgccgcgcctcggccaagggtttgccttcccggattgggcctacaagccagagtcgtcccctggctcaag

SEQ ID NO: 419414 - DNA, 98 bp, Homo sapiens
cgactcgggagccggagctttggaacgaggagtggcgcccattaagcgtcagacctgcaagcgcaggaccgagcccaccgcatcgggcagcagaacga

SEQ ID NO: 419415 - DNA, 99 bp, Homo sapiens
gacttgagactgcactgtgaaattcttctagtgtgttcttcagctttatcagagactaaggtgtcagtatgttcttcaagctgctctgctcctgggccc

SEQ ID NO: 419416 - DNA, 80 bp, Homo sapiens
tactgcccctgcattgttggtattgaaacctgtcctgggggaacagagaggccctgcggtggctacgggcagtgtgaagg

SEQ ID NO: 419417 - DNA, 100 bp, Homo sapiens
taacccttgatcctcctcctaattgcaggtgtggagggcgcagctttccagagccgacttcctcatgaccggatgacttctcaagaagcagcctgttttc

SEQ ID NO: 419418 - DNA, 100 bp, Homo sapiens
gtgtgtccagaacgtgccatggagacgcttaacgaccaacagaacttcacagtgacactggaccaggtcctgctccgctgcctggaacaccagcagcact

SEQ ID NO: 419419 - DNA, 90 bp, Homo sapiens
cgcgtccgccgattcctcctccttggtcgccgcgtccttggctggcgtcaggggaaatgctgtctgtagctgagcacttcctggagcagc

SEQ ID NO: 419420 - DNA, 87 bp, Homo sapiens
aagagatggcctggtggaaagcctgggcgggatgtagctcattttgggatacgagtctccatcgtggagcctggcttcttccgaacc

SEQ ID NO: 419421 - DNA, 100 bp, Homo sapiens
gacaagtttcatacatttctccgccaattcaccttgactctgagctagaaagaccctctgttaaagggtagaatttcagaacaaattctacgttggtgca

SEQ ID NO: 419422 - DNA, 82 bp, Homo sapiens
ctggaggctgctaacctcttccaggtctccaaagcggcgtctgacctcatgagctactgtgagcaacatgcccggaacgacc

SEQ ID NO: 419423 - DNA, 90 bp, Homo sapiens
gttgctgccgccatacgcgctctccctgtttagatggcggctcagcggcagcgggcgctggccatcatgtgccgcgtctacgtgggctct

SEQ ID NO: 419424 - DNA, 100 bp, Homo sapiens
aagaggactggtgatctacgtgtgctttttcaagggagctgataaagaacttcttcccaaaatgggaaaacggacgatgtattactaagctggaaaacat

SEQ ID NO: 419425 - DNA, 87 bp, Homo sapiens
cgaggccggacgcacctctgtttgggggtcctcaggaatcagagatcattgatttcttcctgggggcctctctcaaggatgaggttt

SEQ ID NO: 419426 - DNA, 83 bp, Homo sapiens
gaagcatttactgagaaatttcttaaaattaattgcaaatatattaccagtggcaaggaagctgaatatggtgggcatgatca

SEQ ID NO: 419427 - DNA, 75 bp, Homo sapiens
gacctgggccagaatggtgaggagagtacaggggctcaggtccaggtggcaggggatatgctacccaactcaact

SEQ ID NO: 419428 - DNA, 83 bp, Homo sapiens
ggccgagcgggcggcttcctggcctgggcgctccggtggcggcggaggtatcatgatattagctggtttgacatcaagtcatt

SEQ ID NO: 419429 - DNA, 90 bp, Homo sapiens
agacactccccagggcagaaatagcgaccatggcgagcttcctgcctgacacagctcacttcaagaagtgcacaatgtcagaacgtggaa

SEQ ID NO: 419430 - DNA, 146 bp, Homo sapiens
tttttggaagtcctaggactgatctccaggaccagcactcttctcccagcccttagggtcctgctcggccaaggtactccaaagattcaggtttactcacgtcatccagcagagaatggaaagtcaaatttcctgaattgctatgt

SEQ ID NO: 419431 - DNA, 75 bp, Homo sapiens
cagccgcttcctggcatgtcagagaacccctccgtctatgtgcctgctcaccaaccaccaggagctgtgggcctt

SEQ ID NO: 419432 - DNA, 100 bp, Homo sapiens
tttcccacagggagaaaatggagcagacattcagggtggtgctttgtaaatttcactccgtgtttctgtctcagaaagggcaggtttatacctgtggtca

SEQ ID NO: 419433 - DNA, 73 bp, Homo sapiens
aggacatggccatgaatgcccaacaagataatactggtattgctcgagttccacttgctggagctgccggggg

SEQ ID NO: 419434 - DNA, 50 bp, Homo sapiens
ctgcaagagaaggcactcaagtttatggagattagcagaggcatttcata

SEQ ID NO: 419435 - DNA, 48 bp, Homo sapiens
cctcttcaagcttaaacctgggtgaaacctttgtcctggggaatagtc

SEQ ID NO: 419436 - DNA, 82 bp, Homo sapiens
gtggaggccgacttcttgtatgcatactccacagcacctggctttgtccagggatctgaaaccactttgcagtcgacatact

SEQ ID NO: 419437 - DNA, 90 bp, Homo sapiens
atggaggaagagagcggcgcgcccggcgtgccgagcggcaacggggctccgggccctaagggggtgcaacaccggaggatttcagcaacc

SEQ ID NO: 419438 - DNA, 90 bp, Homo sapiens
tactgggctccggtgtttggaaccaacatctatgcagatattcctgggacttcaagcagtccacacgcaacatctcccccaccatcaacc

SEQ ID NO: 419439 - DNA, 50 bp, Homo sapiens
agcgtcgggattaggtgaaaaaaaatggctacaaacttcctagcacatga

SEQ ID NO: 419440 - DNA, 100 bp, Homo sapiens
gcgaccaagatcaggaacctgccctggagagcgacttgcagttgtggaggtacagtgtgaacggctgaggatgctctaccgggactgtgctcggccccca

SEQ ID NO: 419441 - DNA, 77 bp, Homo sapiens
tacaatatgtgtcgcaaccattagaaaggttcaagaacatgaagactcgggtgactcagaagtggagaatgaagcaa

SEQ ID NO: 419442 - DNA, 98 bp, Homo sapiens
gagtgattggggcttcggggagttcggtctccatcatggtagccaacatcctgaggctcttccagacaaatgctgtgcttcatgaagttaaaagagag

SEQ ID NO: 419443 - DNA, 100 bp, Homo sapiens
tactgtctttttcttcaatgggcagcatatgaaagtggattatggaccattaaaaatctcaagtgacgactttgggaaactctggttatccttcgcaaat

SEQ ID NO: 419444 - DNA, 90 bp, Homo sapiens
ggaaaacaatgcccagactcaatttagtgagagcaggaaagtccaatccaaccttttatctccagaagggctttcaaacatatgtgctca

SEQ ID NO: 419445 - DNA, 118 bp, Homo sapiens
tccttgtggagccggagctgggcgcggattcgccgaggcaccgaggcactcagaggagcacatacccccggcctcatgagtacctgtccccagcggatctgcccaagagctgggactg

SEQ ID NO: 419446 - DNA, 100 bp, Homo sapiens
ctggaggccaaggtggatgccctgaatgatgagatcaacttcctcaggaccctcaatgagacggagtcgatagcagcagttggtgacgagatggcactca

SEQ ID NO: 419447 - DNA, 98 bp, Homo sapiens
ggagcccgcccgccggcagcgccgctccccagggagggagtccgcagcctgaggtcaactttgtagtgtgccaactctttgccttgctagcagccatt

SEQ ID NO: 419448 - DNA, 83 bp, Homo sapiens
cttgacacagagaggatgttggccaaaagtgccatgccaatagagctttccagttctcagggaacaatagaaaccagtcttca

SEQ ID NO: 419449 - DNA, 78 bp, Homo sapiens
gcgagaggcggcgccgctcccaagatgtcgcagacggccatgtccgaaacctacgcaacatcggcaagtatagacaga

SEQ ID NO: 419450 - DNA, 82 bp, Homo sapiens
cgctgactggcccggctgggcagggagccttcacgtaaatgggtccagtcatgcctcccagtaagaagccagaaagctcagg

SEQ ID NO: 419451 - DNA, 99 bp, Homo sapiens
gctacaccgagtacaaagtaaccgcgcaggtgctgactctggctgcccaggagctgtctaggcctgggtgcctcgggaggactccccaacctggctccc

SEQ ID NO: 419452 - DNA, 100 bp, Homo sapiens
gggtagtctatattctaactgtagcccttcctgtgttcctggttatcctcttctgctgttctggaaagattcaaccctatgaaaagataaaggccagggg

SEQ ID NO: 419453 - DNA, 75 bp, Homo sapiens
cagaatggaaaagtaattggtgtaaaatctgaaggagaagagaagatggtataaactggtccatcagtgacaaag

SEQ ID NO: 419454 - DNA, 75 bp, Homo sapiens
tgaaagagattccttgcagagacagctcaacacggcacttccacagaccagcatgttttggaaatttgatcttca

SEQ ID NO: 419455 - DNA, 101 bp, Homo sapiens
ccatcagggacgtgctggccgtgatcaaacactgcaaggaccccctccggctcaagtgtgtcaagcaagagtgtgaacatggctacgcctcttcattcccg

SEQ ID NO: 419456 - DNA, 90 bp, Homo sapiens
gcagaaggtctctggagacatcttcagcagagctccacgcaggagatcggtgaggagctgatcaacggagtcatctactccatctccctg

SEQ ID NO: 419457 - DNA, 100 bp, Homo sapiens
gaagagagctctgttgttgcagttatggaggttttgatgactatggtggctataataattacggctatgggaatgatggctttgatgacagaatgagaga

SEQ ID NO: 419458 - DNA, 100 bp, Homo sapiens
cgcactgagtcaacagactgagcgcgtccaggcctgacagctctgcggctcgggccctgagggtaaagttctttacaaagttcgctggaaaggctataca

SEQ ID NO: 419459 - DNA, 100 bp, Homo sapiens
cgagaacgcaaggtgcctgcctcccgcatcagccgcttggccaactttggggtggtggacttgctttgtgaagagacagttcatgaacaagagtctttca

SEQ ID NO: 419460 - DNA, 100 bp, Homo sapiens
agaacgcttagcccaggctatggaggtgggcaatgggcactccaatgaggcagccttgatcctccacagaaaagggtttgattgtcggttctctagcaaa

SEQ ID NO: 419461 - DNA, 98 bp, Homo sapiens
aaaacattgaagacgtcattgcccaggtgggattttcctgtgatgggatgagaccagaagccataaggcaagatcctacccggaaaggctcagtggtc

SEQ ID NO: 419462 - DNA, 101 bp, Homo sapiens
cagcaataagtttttggtgaaataacaaagaggtttttcgttggaatatacgttgcacatttatggcgattctgagtgtgagggcagacttctgccaggct

SEQ ID NO: 419463 - DNA, 88 bp, Homo sapiens
gaccgcgcgactcggcgcccgcccgcgcctatcagcttatcactgtggtgatcgcagccgcgggaggtgggctcctgctcatcctagg

SEQ ID NO: 419464 - DNA, 74 bp, Homo sapiens
agcaggcgcttctggcagggcagcacggaccaccgcggggtccccggcaaggcactctacgcttccaagatcat

SEQ ID NO: 419465 - DNA, 87 bp, Homo sapiens
tccccggcccacagtgggggtgtgcaaacccgagagaactgggctgaacataacttctttttttcaaagttccctgtgttgtgaact

SEQ ID NO: 419466 - DNA, 100 bp, Homo sapiens
cacaagtggagctccttttcctccacctaccttcccgaataatctggagctttcaaaatgtttgccaaagcaaccaggaattttcttagagaagttgatg

SEQ ID NO: 419467 - DNA, 102 bp, Homo sapiens
gggcagcgaggggccgggccggctggaggagcacagtgcggattctgcatgggcaagaaggacgaccccaagctgatgcaggagtggttcaagctagtgcag

SEQ ID NO: 419468 - DNA, 75 bp, Homo sapiens
gagtacatgccctttatgaagatattcttgaggccgattccacgactcttctttgcgggagaacatacgatccgt

SEQ ID NO: 419469 - DNA, 82 bp, Homo sapiens
ctgcggcagaagccgagttcaacatcctcctggccaccgactcctacaaggacttcgcaggtgagcagtaacggaaatcagc

SEQ ID NO: 419470 - DNA, 99 bp, Homo sapiens
caacgaacagctcttcaccatgaaatggatagatgaggaagctactacttatacatgtgtgataaagtggttgccccaaatgtgtcacttacttctgct

SEQ ID NO: 419471 - DNA, 95 bp, Homo sapiens
tgggacacacctccattggatttaaaagacagtcctcgtcagcactgactttcagctatggaatcgatattaataaggcagcggaaagaagaaat

SEQ ID NO: 419472 - DNA, 75 bp, Homo sapiens
tcttggatttggctacacacttatagatcttctgcactgtttacaggcacaggggtctaaattatggataataat

SEQ ID NO: 419473 - DNA, 100 bp, Homo sapiens
gcataggaatcagaggagttaatcttcggttgtggaacaggaaatgaaaaaggactggctttttgcccctcattatcgatactatgtaagagaaatgaga

SEQ ID NO: 419474 - DNA, 76 bp, Homo sapiens
ctggtatctggagcacgcagacccgcttttaaaggttcactattatgaagatggcaatgttcagttggttagtcat

SEQ ID NO: 419475 - DNA, 83 bp, Homo sapiens
gaagcagcgcctgatcgagtccctccggaactcacactccaggatctgccactgtgaaggagatgatgagagccccctgatca

SEQ ID NO: 419476 - DNA, 90 bp, Homo sapiens
ggccgcggaggagaagccggaggaggacaacgactaccaccgcagcgacgagcagtcattaagatcagatgcctatgatcactatagtgc

SEQ ID NO: 419477 - DNA, 100 bp, Homo sapiens
gcggaagaccgcgcgcagggcctgcagcgggagctggacggcgagcgcgagcggcgcgagaaagttcctgcgtgaagaccagctgggagcccactgcctg

SEQ ID NO: 419478 - DNA, 90 bp, Homo sapiens
actctcggaaccctcaacgagctagcgatagatttagaggaaaggaagcaccgtcggaaagcaaagctcatcatccatggtagctttgcc

SEQ ID NO: 419479 - DNA, 75 bp, Homo sapiens
gagggggaagggcctcaaagccagaagatgatacataccttttctcgatgtgtgttatgctgtgctgaagaagtg

SEQ ID NO: 419480 - DNA, 101 bp, Homo sapiens
tgacatttctcacatgaagatcaaagatgccttgccatctgtggacaacagtgagtatatgcggaatggagacttcttacccaccaggctgcaggcccagc

SEQ ID NO: 419481 - DNA, 75 bp, Homo sapiens
tctaaaaagccctcagtaccagagacagaagcagatggattcgtccttttaggaaaaagacgtctacctggtgga

SEQ ID NO: 419482 - DNA, 80 bp, Homo sapiens
cgcgcggagaagaacggggagccaggttgcacaccgatgctccagaattgtgagggagccatactctacagctattccac

SEQ ID NO: 419483 - DNA, 73 bp, Homo sapiens
aaccggttgcagaggccttctggggaagacaggtggcaggaaaaggagaaacatcagatggagtgaggaagtc

SEQ ID NO: 419484 - DNA, 100 bp, Homo sapiens
cagaaagcattgggagaatatctggaaagagagcggtcatctttccccaggtactggtgtggcatactcggacagagaagcccaagatgaagcaggagga

SEQ ID NO: 419485 - DNA, 96 bp, Homo sapiens
cacatgcggagactccgaggtggaggaggagtccccaggaaagcgcctggacgcaggaagcggacacggatgaccaccaagggacgctgggttttg

SEQ ID NO: 419486 - DNA, 74 bp, Homo sapiens
aagatcttggacagcgtgggtatcgaggcggacgacgaccggagttcgagaccagcctggccaatatggtgaaa

SEQ ID NO: 419487 - DNA, 100 bp, Homo sapiens
ctgggttcgttttattcagcggcagtggtgctttcccgaatctcagaatgccgttaaagctgaagctcaacaaagatatagtgatctctgtgggcattta

SEQ ID NO: 419488 - DNA, 90 bp, Homo sapiens
ctctgggagaaatcatcctgccagattattcagttcatggagggggacaagggaggcgtggcagccaaaggagactctggagatggtgtg

SEQ ID NO: 419489 - DNA, 90 bp, Homo sapiens
actcggtgattgaggacaagaccatcgagctcatggtgatgctactaggaggtggagcctttgggaggtgattagttcatgaaagtggag

SEQ ID NO: 419490 - DNA, 50 bp, Homo sapiens
cttcatgcttagatacatgtataacaagggtatgttagagcccaccaagg

SEQ ID NO: 419491 - DNA, 75 bp, Homo sapiens
ccgtgcccgagaatagctccgtccagcaggaaagatgaatgggagggctgattttcgagagccgaatgcagaggt

SEQ ID NO: 419492 - DNA, 100 bp, Homo sapiens
caaacttgaggctcctttcactcaggatgacacccttggactggaaaactcacacccggtctggacacagaaagagaagggacagagcacaggaaaggga

SEQ ID NO: 419493 - DNA, 90 bp, Homo sapiens
ccggagccgaaacaccggtaggagcggggaggtgctggagaatctggtaaaagcaccattgtgaagcagatgaggatcctgcatgttaat

SEQ ID NO: 419494 - DNA, 74 bp, Homo sapiens
agcagcggcgggggcccgagggagaggagtctgcaatgccgagtggaggaaggaggaaccggagtgtgagcagt

SEQ ID NO: 419495 - DNA, 100 bp, Homo sapiens
tggccgcgtgctgggaggagactggagcccggttaggaagaatggagttggcgactcgctaccagcagcaatgcagcaagtcttggaaaaccttacggag

SEQ ID NO: 419496 - DNA, 98 bp, Homo sapiens
gagtcggagcggcactcggcgagtccgggactgcgctggaacaatggataacttcttcaccgaggaacaagactgccaatggagactgccgcagagac

SEQ ID NO: 419497 - DNA, 98 bp, Homo sapiens
ccgccgccgccgccatgaacaactcgggcgccgacgagatcggggcgccctgcgtccggcagaggaggcgagcatcccgctcaggtgatgaggaaccc

SEQ ID NO: 419498 - DNA, 100 bp, Homo sapiens
tgcccactctgcggagttagcagtcacgacctccagcacagggctattgagtggccagacttccccaacaaatgccaaattggagaaactggactctcag

SEQ ID NO: 419499 - DNA, 89 bp, Homo sapiens
ttctcatgcatttattgatctgactgaagattttacagcaggattatgatgttgatgaagaggacatgatgaatcaggtgttgcagcgc

SEQ ID NO: 419500 - DNA, 97 bp, Homo sapiens
tctgtttcgtgaactgcgagtggaacaggaatctctgttgacagtctcagatgcaaacatcagtgggaattgtacccacacaagcaattgcaacagg

SEQ ID NO: 419501 - DNA, 101 bp, Homo sapiens
cgaaggagggctctcctgtctgccaccatcctgggttgacaattctacacaaggaggagattttcccctctgtcctcttcaattaagggatgacctgacat

SEQ ID NO: 419502 - DNA, 50 bp, Homo sapiens
ttcatatccttcgaaaacgacggatcagtttgacaacttagaaaaacaca

SEQ ID NO: 419503 - DNA, 88 bp, Homo sapiens
agaggccgagggtttgatgaaggtggaggcagcgcggctctcaggattttttatcaagcagaaatgcatcgaacaacgagaatcaaga

SEQ ID NO: 419504 - DNA, 100 bp, Homo sapiens
aaaaactaggggaaaggaaaccatgcaacagtcaaccttctgagctttcttcagagacctcagcaatggctgccatccggaagaaactggtgattgttgg

SEQ ID NO: 419505 - DNA, 75 bp, Homo sapiens
caaatgagctgatggaagatctgtttgaaactgatgtatgttgtgttcacagcgaaggtactcccttcagcctgt

SEQ ID NO: 419506 - DNA, 100 bp, Homo sapiens
cagtacaagatcccagactggttcttgaacagacagaaggatgtaaaggatggaaaatacagccaggaaattgagaggctgactgagcgactagaagaaa

SEQ ID NO: 419507 - DNA, 92 bp, Homo sapiens
gaatatgccaaggaaaaactggagagcttcatcaaaaatagtgatagctttgataagttggaaacacttttactgtattatctatgaagaaa

SEQ ID NO: 419508 - DNA, 101 bp, Homo sapiens
aatcttcctgccaattcaacaatcaaaaagaaagctgctgttatcatcatggctgtagaggacatggtctgctatacagctcagactctcgtccgaatcct

SEQ ID NO: 419509 - DNA, 100 bp, Homo sapiens
tcctcctcctcctctccttcccaggatactgcagagaccccctgccctctgacgatgaggacggggacttggttgccttttccagtgacgaggaattgac

SEQ ID NO: 419510 - DNA, 100 bp, Homo sapiens
acaacatgtgaaaaatctgttacttgatgaacttcagaaggatattaatatgattctctcaatgatggatatcaacccaggtgatactgttttggaagct

SEQ ID NO: 419511 - DNA, 50 bp, Homo sapiens
ccgcgatggagctgggggagccgggcgattcttcgctgctgctgccttac

SEQ ID NO: 419512 - DNA, 88 bp, Homo sapiens
tcgccgtggcgccatgggtgttgtccgcagccgcaggtcctgggaactccaacaagggagcaaatcagagaaatgaacccaaactaca

SEQ ID NO: 419513 - DNA, 99 bp, Homo sapiens
agcagctggaggaactgttcagtcaggtggggccggtgaagcagtgcttcgtggtgactgaaaaaggaagaagaatttggtgttgatgattcttattct

SEQ ID NO: 419514 - DNA, 100 bp, Homo sapiens
cacggaactgaaccaaggtgacttgaaaatgccaacctttgagtcagaagtaaaatgcccattcccatcaagaccagacaatggatttgtgaactatcct

SEQ ID NO: 419515 - DNA, 74 bp, Homo sapiens
gaccccgaggacttcgtggacgacgtgagcgaggaagttcatggcctcccacgggaacgacgccgcgagagcca

SEQ ID NO: 419516 - DNA, 51 bp, Homo sapiens
cccacctgtcctgcagcactggatgctttgacgctgtgcagagctgcaagt

SEQ ID NO: 419517 - DNA, 100 bp, Homo sapiens
caggactgccctctccagaaaaacagtagcagtttcctggtcctgttcctcatcaacaccaaggatctgcagtaacctggatgaggacatcattgcagaa

SEQ ID NO: 419518 - DNA, 100 bp, Homo sapiens
tgtgggagccccgagaacgcctccagcggggatgacacagaagggcatccgcttcgatcctgaaattccgcaaacactacgactagagtttgctaaggca

SEQ ID NO: 419519 - DNA, 73 bp, Homo sapiens
ggagctgggcctaggtctgcgccctggtacatcaggaacgtctctatcaagaatacaatttcagcaaggctga

SEQ ID NO: 419520 - DNA, 50 bp, Homo sapiens
ccggagaagcgagtttcagctggcagagtggcatgattccgactggatac

SEQ ID NO: 419521 - DNA, 87 bp, Homo sapiens
cgagtatcatctttagatacttctactcataaatcaagtgataataaactagaggaggtatcatttaaaggatgtgattgttggaaa

SEQ ID NO: 419522 - DNA, 82 bp, Homo sapiens
agaagccgggattgagcgcatcaagcgtccgtctccaagagagtatgaagagagtgcgtctgtagggcagggaagatggcgg

SEQ ID NO: 419523 - DNA, 83 bp, Homo sapiens
atagcgtggagtgacggtgccaccgcggcgcgatgaccgagtgggagacagcagcaccagcggtggcagagaccccagacatc

SEQ ID NO: 419524 - DNA, 97 bp, Homo sapiens
tgctccacctgcctactcagagtttcagagcctgaggccggcactttggacccagcccttgacctctcagcaactacagtgtatccgggagctgagt

SEQ ID NO: 419525 - DNA, 91 bp, Homo sapiens
gatgcaggaaaatttcgatattgaagtgtcaaaatccatagatggaaaagatggttgcacagtgaattaaaagatgctgttgaaaaaaaat

SEQ ID NO: 419526 - DNA, 100 bp, Homo sapiens
ggcctactggggataacattcatgcagaacatcagcaatgggtgacaagccggcagatgcgatttgaaggaggatttcagggccgctgcaacaagctggt

SEQ ID NO: 419527 - DNA, 96 bp, Homo sapiens
agacatggcgagcgactccccggctcgaagcctggatgaaatagatctctcggctctgagggattttttatcaagcagaaatgcatcgaacaacga

SEQ ID NO: 419528 - DNA, 48 bp, Homo sapiens
gatggacaatttggaatccacaaatgcagtaatagtggccttgtcttc

SEQ ID NO: 419529 - DNA, 83 bp, Homo sapiens
gcttctcagaggacgccttcaacaccaccttcatctccaccatcgacaatgcagatcttcgtgaagactctgactggtaagac

SEQ ID NO: 419530 - DNA, 82 bp, Homo sapiens
ctgtgtggggagttggcaacgcgacacagagccagaaactaatctggattcactccctctggttgatacccactcaaaaagg

SEQ ID NO: 419531 - DNA, 98 bp, Homo sapiens
gttgcggggtccgcggggaagtcttggcggtggagccatggtcggccaactgagcgagggggccattgcggagctatgaagacatgattggtgaggag

SEQ ID NO: 419532 - DNA, 100 bp, Homo sapiens
catcctcctaatgggacccggttttacacttttcaaatacagatccacgggttttagaaaaacaagaattacagcagccaacctatgttgccctgagtta

SEQ ID NO: 419533 - DNA, 75 bp, Homo sapiens
gcttgggagagctcctgggccacccctcctttcaggtcaaggtcctgaacgaggctgtgggggccctgatgtacc

SEQ ID NO: 419534 - DNA, 90 bp, Homo sapiens
cggcgaccgagccggagctgctcgacgaccaagaggcgaagagattcctcggacaccacaccctgctgctttgcctacattgcccgccca

SEQ ID NO: 419535 - DNA, 83 bp, Homo sapiens
agcaggactacaaccgcgaggaggacgccgcgctcttcaagggcgagagaggctggctgaggatcgtgaccagcacctataag

SEQ ID NO: 419536 - DNA, 49 bp, Homo sapiens
ccgtgtggcaccgcgagctccgcaaagctattgacctgaaaagtggttc

SEQ ID NO: 419537 - DNA, 74 bp, Homo sapiens
gtgaaagtgcctggggagtgttgccctgtgtgcgaagatgattcaagagagccggtttctcatagaaatggcgg

SEQ ID NO: 419538 - DNA, 50 bp, Homo sapiens
cagagattgctcaggaagcaatggaggtcaaagagttagtggaagcagag

SEQ ID NO: 419539 - DNA, 82 bp, Homo sapiens
ttcttgtatgcatactccacagcacctggatcactactcttggaatcaaagataaatccaaatactgcatatcagaaacaac

SEQ ID NO: 419540 - DNA, 99 bp, Homo sapiens
cccggagttccggcgcgccgggagccgttgctgatcatctgggctgtgatccacaaacccggttctttgtccctcctaatatcaaacagtggattgcct

SEQ ID NO: 419541 - DNA, 100 bp, Homo sapiens
caggatgcctctcagctgccacctgcctttgacctttttgaagcctttgcaaaaggattaaagcctgtggtttccacagaagcaccacctatcatatttg

SEQ ID NO: 419542 - DNA, 100 bp, Homo sapiens
ggcctcgcagcacgccctgagctctgaagtcagtcggaaggcagcctcagcctacgattatggctcctcccatggatccaggatgagaagactgataaaa

SEQ ID NO: 419543 - DNA, 73 bp, Homo sapiens
gttttgactcactagagtcagggaaacagaagcagtaccaccctgttgtacatccactggacctaaaatatga

SEQ ID NO: 419544 - DNA, 50 bp, Homo sapiens
tggagctctcagcataccgtgcaacaggttattgcagccgaaggagaaat

SEQ ID NO: 419545 - DNA, 75 bp, Homo sapiens
gttgtttgcaacgaccgtctggggaagaaggtccgcgttaaatgcaatgttgaattcaactgaaggcgaggaatg

SEQ ID NO: 419546 - DNA, 100 bp, Homo sapiens
cgtaatgcgactcaaagctgcacggcagtctgtttatgagaatgagtccctggaacgccagatgcgtgaaatggaagagaactttgccgttgaagctgct

SEQ ID NO: 419547 - DNA, 101 bp, Homo sapiens
cgagaaccgtttggcaatatgtacgacgcggatgagggtccagtggcattgcagagcacggatggttgcaggagccaacttttacattgttggacgagacc

SEQ ID NO: 419548 - DNA, 75 bp, Homo sapiens
caggactgcagggtctctccaggtgctggagaatctggtaaaagcaccattgtgaagcagatgaggatcctgcat

SEQ ID NO: 419549 - DNA, 100 bp, Homo sapiens
aggccttccagcaccgttctgtgtcctggtcgcagttcaacaagaccacattgtgcaacacatcattggacaacccaacccagagaaacaaggatcagct

SEQ ID NO: 419550 - DNA, 96 bp, Homo sapiens
aaaactgaagaagctggtggaacagaatggaacagatgactggaaagttattgccaattatctcccggagttccaggaagcgctcgcccctggccg

SEQ ID NO: 419551 - DNA, 74 bp, Homo sapiens
ggccagtggcactcccagctcgaatggtgaggttctggagaattgatgaggattatccagtgcaagttgcacct

SEQ ID NO: 419552 - DNA, 100 bp, Homo sapiens
gggaatcccgttcttcgccatgggagctgccactccgaaaccagtcccagaacccgagaaacagacagaccatacagttaaaattgctggagtcatcgcg

SEQ ID NO: 419553 - DNA, 75 bp, Homo sapiens
cgagctgttccggcccttccacacgttgctgcggaaaataagatggcagcatggggacactgaggatgattggag

SEQ ID NO: 419554 - DNA, 82 bp, Homo sapiens
ctcttggaatcaaagataaatccaaatactgcatatcagaaacaacaggtattgaagcccctgggtgataatttgatggagg

SEQ ID NO: 419555 - DNA, 100 bp, Homo sapiens
ctgccattgaaagctgtaacaagaaatttaaaagcctgttgattcaagaactttctaaagtatttccggaagacatggctaagtatcgaagcatccgggg

SEQ ID NO: 419556 - DNA, 100 bp, Homo sapiens
cacgcatgaagctgaattgggctgtggcagctggagccgaggatccagacgcaaacatgcagatctttgtgaagaccctcactggcaaaaccatcaccct

SEQ ID NO: 419557 - DNA, 83 bp, Homo sapiens
ggcggttcctctgcggtgtggtggaaggtgtaccttgaaagacttttaacatacgcagagatagatatctgtccggccaactg

SEQ ID NO: 419558 - DNA, 95 bp, Homo sapiens
attcttggcacaaatactattatggataagatgatggctttggtgaagcacgtgcagtctaaaggatacccaaatgaacgttttgaacttctcac

SEQ ID NO: 419559 - DNA, 75 bp, Homo sapiens
atgtcaggcagcttatgatgccaatttgtcccatggtgtaaagcaggccctctggctcaccaagaccaagttaat

SEQ ID NO: 419560 - DNA, 75 bp, Homo sapiens
ccttattaggagatgatgccttggtgcagctgtccaggcagccatcttgtctggagacaagtctgagaatgttca

SEQ ID NO: 419561 - DNA, 98 bp, Homo sapiens
tgaaccagccgggcggcgcggcggctccgcaggtgctgttaagccaagtgcaccggctgagagcattggacttgcttggaagatttttggacctgggt

SEQ ID NO: 419562 - DNA, 75 bp, Homo sapiens
ctttactgaagaggaggaagcccagaaaagacagctttgatttctggctgcaaaaaagatatgaggaagagctcc

SEQ ID NO: 419563 - DNA, 100 bp, Homo sapiens
tgattacaatagaattggttcttcattatatgctttaggaactcaggattctacagatatatgcaatattttaataagcggaaaacctactttgctcacg

SEQ ID NO: 419564 - DNA, 100 bp, Homo sapiens
ggcagctgggaatccggaatgctgcccgatggccctgggtcctcgctgtggggcaatccgggcttgcagacgagctgcatcttcctcccgtgaggctggc

SEQ ID NO: 419565 - DNA, 73 bp, Homo sapiens
agaagaaagcacagctcggaaaggcagagctgataccccaatgtccttctttgactttgtggttgatcctcat

SEQ ID NO: 419566 - DNA, 82 bp, Homo sapiens
cggatcatggccgcagccgctctggggcagagctagagccggtgcaggccacgcagaacaagacagggaagtatgtgccgcc

SEQ ID NO: 419567 - DNA, 100 bp, Homo sapiens
ccgagcctatgctgtcgccatcccactggctgcaggcctcctgctgctcctgtttgtggttggctgattgcaattctggcccaactcaaccctctctttg

SEQ ID NO: 419568 - DNA, 82 bp, Homo sapiens
agatgtcatgatggagaattatggaaacctggtctcactggtttggtgccctggttgtcagatgttggaaagcagtaggacg

SEQ ID NO: 419569 - DNA, 82 bp, Homo sapiens
tgaagctactaaccagagccggctctttctcgtatctgacgaagcaagtggaacttctacggcagatgaacgaacaacatgc

SEQ ID NO: 419570 - DNA, 101 bp, Homo sapiens
ccgagcccaaggcaattgatcccaagttgtcgacgaccgacagggtggtgaaaggaatgttttaaaggaagttgggctactcacaagttactacataagaa

SEQ ID NO: 419571 - DNA, 117 bp, Homo sapiens
ccagcctgggcgctgacgccgcggacctccctgcgaccgtcgcggaccatgggcgacaaagggacccgatttctccgtggacgatggcagccacgattcaggccatggagaggaaga

SEQ ID NO: 419572 - DNA, 75 bp, Homo sapiens
aaaaatctggagggactccaacttcaatggttgctgtagtaaaactaaaaaatgcagataaagtgtttgccatga

SEQ ID NO: 419573 - DNA, 75 bp, Homo sapiens
gaaaaattcactgtggtccagaagcagatatcggtgaggtgtctgcaattgaactccaaggtgcagaatggtttg

SEQ ID NO: 419574 - DNA, 82 bp, Homo sapiens
aaaagagtctcaaggatccttcaaataacttcaggtttttgaatcagagccgacaggcacttgaattgaaaatggaaaaccc

SEQ ID NO: 419575 - DNA, 75 bp, Homo sapiens
cgagtcgccgctgcagccctagtgactgcggcctgcatcccggtggccagcatcgaaatgttcagccttttagtg

SEQ ID NO: 419576 - DNA, 100 bp, Homo sapiens
tgccaccattgctgaacggagaggtagccatgatgccccacttggtgaatggagatgcagctcagcaggtgccttagctggaccaattattgtggagcca

SEQ ID NO: 419577 - DNA, 100 bp, Homo sapiens
ttccttctaccagctgagtggaaaacagtccaggcaactcctagtagtacaacggaagaaacagctacccagaaggaacagtggtttggcaacagatggc

SEQ ID NO: 419578 - DNA, 75 bp, Homo sapiens
ccatggaggacgagcggaaaaacggagcctacggagctaatttcgttactcgaaaaattagccggtcagtagcta

SEQ ID NO: 419579 - DNA, 100 bp, Homo sapiens
aaagagatgtggggggattctcgacctgctaacagaactggaccttttcggacttttcttggtagagatggaaatccaaataaacggaatgtgcacaatg

SEQ ID NO: 419580 - DNA, 90 bp, Homo sapiens
gggaggcctggctgagctgtcatcccccaggacttgagtaaactgtctgcagtattggaagacacagaaaattggctttatgaagacgga

SEQ ID NO: 419581 - DNA, 75 bp, Homo sapiens
ccgtgtggaccaggaggagcgctgtatatgccctcattttgcttaagacctctggccagagcagggcatggaaga

SEQ ID NO: 419582 - DNA, 107 bp, Homo sapiens
cccaggagagaatactactttgcaataacaatggaaaggtcatttcaagacccagatgatgtggtaccagttggccaaagaagagcctggtgttggtgcatgtgctt

SEQ ID NO: 419583 - DNA, 73 bp, Homo sapiens
cggttccccggcccacagtgggggtgtgcaaacccgagagaactgggtggcagaactggtgaagccattgtag

SEQ ID NO: 419584 - DNA, 96 bp, Homo sapiens
cggagggctgcagcgcccaccctgcgccagagaccagataaatgggatggagtaggacctcttccagactgtgctgaaccaccaaaagggatccag

SEQ ID NO: 419585 - DNA, 82 bp, Homo sapiens
cccctacactgtcactgttggccaagattcggaggaacctgagtgcctcagtcatcgccgtcaccatccaggggggagcgca

SEQ ID NO: 419586 - DNA, 88 bp, Homo sapiens
tgcttgggatcctttatcctggtcatcttctatttccaaagcatcgttggcttcacagtatgactgatgatcctccaacaacaaaacc

SEQ ID NO: 419587 - DNA, 90 bp, Homo sapiens
gcccaagcccctttgttttatggagcaatacgaggattctctccaccacatagaatctgcagttttgaagaggcaaagggtttggatagg

SEQ ID NO: 419588 - DNA, 85 bp, Homo sapiens
ggaatgcttactgttgcgtggttcgttattaacaggttcctgattgtcctggggtgcttgattctggctgtcctgaccacattca

SEQ ID NO: 419589 - DNA, 74 bp, Homo sapiens
ttggggatggctataatgggtatggaggaggacctggaggtggtggcagtggtggtggtggccgaggaggattt

SEQ ID NO: 419590 - DNA, 97 bp, Homo sapiens
cgtggagatatggcgcaactgcggcgcgtagagttggctttgtgggacacagctgggcaggaagattatgatcgcctgaggcccctctcctacccag

SEQ ID NO: 419591 - DNA, 98 bp, Homo sapiens
tgaactcaggcgattacaagacgattcacctgtccagcatccgaccaccgaggctggagggggagaacacccaggtgttctttgacctaatgagagaa

SEQ ID NO: 419592 - DNA, 83 bp, Homo sapiens
ctcatgcaacaattacaagatctggaggaatgcagcctgtgacattctggccattgataagtccctgacaccagtcaccctgg

SEQ ID NO: 419593 - DNA, 75 bp, Homo sapiens
tgggagccgcaccacctaacgctggccgacaacagcctggcgtccgccacgttttccaaagaaattagaccattt

SEQ ID NO: 419594 - DNA, 95 bp, Homo sapiens
tcgtcgtgagatgtttgttttcaagagctccactggttcaacagcctctcctccagtttcgaccccagtcacaggacacaagagaatggtcatcc

SEQ ID NO: 419595 - DNA, 50 bp, Homo sapiens
ccaaggtcccagaaagaaccatcgcaggagcaagtgacgtttgaggacgt

SEQ ID NO: 419596 - DNA, 75 bp, Homo sapiens
gtgagaccctcacttcatccgttttcggctttgtgagaaaccttaccatcaaacacgatggccagcaacgttacc

SEQ ID NO: 419597 - DNA, 75 bp, Homo sapiens
tttttggcaagttgttacgggaatttagacttgtagcagctgaccgaagggttgcatatggccaagtccttggag

SEQ ID NO: 419598 - DNA, 123 bp, Homo sapiens
gaggggccaggtttgcatcgtgctggtcaccgaactcatgacctcgggcacgctcaagacgtcaccacctcccacagccctgctgcaccaggggagcaaggcttcggggaatgcctcctggcc

SEQ ID NO: 419599 - DNA, 100 bp, Homo sapiens
tcctactccataaagacttcaaatatggctcgtggacagcagaaaattcagtctcagcagaaaaatgccaaaaagcaagctggacaaaagaagaaacaag

SEQ ID NO: 419600 - DNA, 82 bp, Homo sapiens
cccggatcgtggcctctcgagagcaaggaaggtgggagtcaatcattttgacaagtctcctgaaaggaacagctagcaggaa

SEQ ID NO: 419601 - DNA, 100 bp, Homo sapiens
cagccgccggagcccgagtggatcggggacggagagagcacgagcccatcagtgttcgaactggtcaaccaagggtgagtgtcccagctcccagcagggg

SEQ ID NO: 419602 - DNA, 82 bp, Homo sapiens
tggtgcacctgtggccgccatgtttgagcgaggttcgtgctggccgtgggcagcgccgtctttgatgccatgttcaacgggg

SEQ ID NO: 419603 - DNA, 76 bp, Homo sapiens
cctcgggcgccccgcagccccccaacatcctgctcctgctcatggacgacaccacactgcccacgtttcagagccc

SEQ ID NO: 419604 - DNA, 74 bp, Homo sapiens
gggactgcaaaggccaatgttggtgctggcaaaaagcacaacgtggaagttcttggaatactttccgatgatgt

SEQ ID NO: 419605 - DNA, 58 bp, Homo sapiens
agctggctggcttcagtggaccagttggtgttcgaggaagagacattgttgttcttgg

SEQ ID NO: 419606 - DNA, 90 bp, Homo sapiens
gaaaggtggacctaggaactcctgaacttttgggttgccttaagtgagaaatcagcatggctcagactggggactccactgtgagaccac

SEQ ID NO: 419607 - DNA, 50 bp, Homo sapiens
gccaaggggtggccgctgccaagcagatctcacattcttgaaggtggcat

SEQ ID NO: 419608 - DNA, 74 bp, Homo sapiens
gaagaatgaaaaaaccaaaattatcgccaagattcagcaagtggaccccaagttcctgaggaacatgcgctttg

SEQ ID NO: 419609 - DNA, 103 bp, Homo sapiens
gttcctgttgcttcagacaatggatgagcaatcacaaggaatgcaagggccacctgttcctcagttccaaccacaggttgtggaaaatgcccttaaagtgaac

SEQ ID NO: 419610 - DNA, 150 bp, Homo sapiens
caggactcctggactccctctatggcaccgtgcgccgcttcctctcggtggtgcagctcaatcctttcccttcaggacgtgttcctcatgatccggcgccacaagaccaccatcttcacggacgccaaggagtccagcacggtgttcgaa

SEQ ID NO: 419611 - DNA, 97 bp, Homo sapiens
agcaggaaagcagagttcatccaaggggtttgccaacttgttaataagatggaggagaatactggcaaggttaagcctttcaaccgaaatgacgaac

SEQ ID NO: 419612 - DNA, 69 bp, Homo sapiens
ggctttctgctgccgcccgcaagcagaggtcacggtctagatcacattctcgatccagaggaaggcgat

SEQ ID NO: 419613 - DNA, 82 bp, Homo sapiens
gagattatagctctgtatgagaaggacaacacctacttagggaaggtgctgagctactggtgcttcagtcccggccacagca

SEQ ID NO: 419614 - DNA, 82 bp, Homo sapiens
aacggagataaattcccggaaccgcgattcggcgtgtcagttatacatgggaagctgttgataccaaaaataatgtacttta

SEQ ID NO: 419615 - DNA, 100 bp, Homo sapiens
gaagatgaagctttgagtaacattgccagagaggaccgcagctgaatgcacagctagaaggttggctttcacaagtacagtctacaaaaagacctgctag

SEQ ID NO: 419616 - DNA, 75 bp, Homo sapiens
tcagctgacatatgaaggactcattgatgaaatttatggcattcagaacaatcatcatggcaaaaccagctggtg

SEQ ID NO: 419617 - DNA, 90 bp, Homo sapiens
caccggctccttcttctggctcagtggggatgaagtcatgtacacccactggaaccgggaccagcccgccaaaactggacaagccaaggc

SEQ ID NO: 419618 - DNA, 97 bp, Homo sapiens
cagcaggctgtcatgctgggtgccctgactgaagttcctgtgcccacaaggtactctgtggatatccccttggacaaaactgtcgtcaataaggatg

SEQ ID NO: 419619 - DNA, 102 bp, Homo sapiens
tggaggggtggtgaccatcgaaaggagcaagagcaagatcaccgtgacatccgaggtgcctttctccaaaagcccatggcgaattgtggatgattgcggtgg

SEQ ID NO: 419620 - DNA, 100 bp, Homo sapiens
agcgatgttcggccaggtggctccaaggagaggaagcagtgatgcattgaggtctagatgttgatggaatatatcgagttagtggcaatctggcaacaat

SEQ ID NO: 419621 - DNA, 74 bp, Homo sapiens
tgaaagaaaccacagagtacttaaaaacatcatggatcaatctcaaacaaagacatgcgtcgggatgtccagga

SEQ ID NO: 419622 - DNA, 100 bp, Homo sapiens
gaccagcgcggacggcggcgacggaggagagcagctcctcactgtcaagcacgagctgcggactggtatattactcgaggggtttttaaatattgtcagg

SEQ ID NO: 419623 - DNA, 89 bp, Homo sapiens
gacgctgctcaaaacctcgctccggaaaggggacacctggtggatctaggatccggcttccaacatgtggcagctctgggcctccctct

SEQ ID NO: 419624 - DNA, 98 bp, Homo sapiens
cttttgctgtagatccccagatcacctcgctcgacgtgttgcagcacatcctcatccgagcctttgatttgagtggtactatactggcaattgctgga

SEQ ID NO: 419625 - DNA, 97 bp, Homo sapiens
aacaaacctattgttaatattgatccccagacagctgaacttaatcatctaaagcaacaggttgggggccgtcccgctcctaaggcaggaagatggt

SEQ ID NO: 419626 - DNA, 50 bp, Homo sapiens
tcacggggctggactcggagaaggcgggcagggctgggcagcggcctgag

SEQ ID NO: 419627 - DNA, 75 bp, Homo sapiens
gaaaatacaaatcacacgcataatggatgaaaggaaccgacagatgacagtttgatttacatggatcctcattac

SEQ ID NO: 419628 - DNA, 100 bp, Homo sapiens
cttattaatcatttcccgggaatgctgtgcaggcaaaaggaaaacaaaggcattcaggagccacaggtacagtccttgacagaattgactataacgttga

SEQ ID NO: 419629 - DNA, 100 bp, Homo sapiens
tctactgataggcaggttaccatcactggatctgctgccagcattagcctggctcaatatctaatcaatgtcagaggcggggtttcaccatgttgcccag

SEQ ID NO: 419630 - DNA, 98 bp, Homo sapiens
gacatcagccgctgggcacagcggcacccagggggcagccgcctcatcggccaccacggcgctgaggacgccacggtttgctggttggctcccgagca

SEQ ID NO: 419631 - DNA, 75 bp, Homo sapiens
ggacggagagaacacgagcccatcaggagtggagtcaacatatcaatggagcaagtcacagtcgtcgatgccagc

SEQ ID NO: 419632 - DNA, 82 bp, Homo sapiens
tgtgtgcagaaggaggtcctgccgtccatgcggaagatcgtcgccacctggatgctggagggaacggcaggagcagctgatg

SEQ ID NO: 419633 - DNA, 75 bp, Homo sapiens
caacgcttgttatgttttcatcacttctctccagaagagtcatcctttttgaacttccatgactcagactgcgaa

SEQ ID NO: 419634 - DNA, 75 bp, Homo sapiens
tgaaacagttacactgcttgtagctcttaaggctgcagagactgcaagtctggaagaacagctgcaaggatgggg

SEQ ID NO: 419635 - DNA, 83 bp, Homo sapiens
ggccacgccggccgcgcgcgccagcaagaagatcctgctgcccgagcccagggatttcatgcatcaccctgacagccagtgga

SEQ ID NO: 419636 - DNA, 73 bp, Homo sapiens
tcggcgcaccacgcagatcatcaacatcaccatgaccaaggtgctggctgctgtctacaaggctctgagtgac

SEQ ID NO: 419637 - DNA, 51 bp, Homo sapiens
ggctgggcaagcactacaagaagagtgatcagcagctggactgtgccttgg

SEQ ID NO: 419638 - DNA, 50 bp, Homo sapiens
ccacaatgggacatgtgcaaggcagctgcaatgactctccgcacggtatt

SEQ ID NO: 419639 - DNA, 82 bp, Homo sapiens
ctgtcgcgaacctccggcgcgctgccccgccggaccgtgggtcggcactcttcaccctcccgagccctgcccgtctcggccc

SEQ ID NO: 419640 - DNA, 71 bp, Homo sapiens
ctgtttgcaaaggttgcagcaaccaaaagccagccacataccctattacagagagtcaaagcctgcacaac

SEQ ID NO: 419641 - DNA, 82 bp, Homo sapiens
acgcacgggatccagagcgccgcgcacttcgtcatgttcttcgcgccctgagacacctatggctgccgatgaaggctcagca

SEQ ID NO: 419642 - DNA, 100 bp, Homo sapiens
aggtggaggtggagcgtatgggtgccaagatccacatctcaaagaagtggggcttcaccaagttcaatgctgatgaatttgaagacatggtggctgaaaa

SEQ ID NO: 419643 - DNA, 100 bp, Homo sapiens
acacctcttcccggcccctgaagttggcactgcagcagacagctccctgggcaccaggcagctaacagaactgccattggatgtccagaatcccctgtag

SEQ ID NO: 419644 - DNA, 50 bp, Homo sapiens
ggacccccctgcggggacccggaactgaaatatggctacacacacctttc

SEQ ID NO: 419645 - DNA, 75 bp, Homo sapiens
ccgggattttggaggccggggccgcgctgagggcgcccagctggttgcacgatgggaacacaagacccgcaagct

SEQ ID NO: 419646 - DNA, 82 bp, Homo sapiens
tgatcgaggagccagccttcaatgtgtcctacaccaggcagcccccaaatcccggcccaggaagatgatgagaagcttattg

SEQ ID NO: 419647 - DNA, 82 bp, Homo sapiens
gacctaaggaggtacccactggatgaacaaaactgcaccttggaaattgagagctctatctctgaagggcacaaatcagaag

SEQ ID NO: 419648 - DNA, 100 bp, Homo sapiens
gacgaagaggaggaggaggaggggcggagggagacgcccgaggacagggaggtgcgtctgcagctggcgcggaagaggggcaccaccacgaggcgatttg

SEQ ID NO: 419649 - DNA, 98 bp, Homo sapiens
cgcccagaggcgagccctggtggaggaagagcaagatggaaagttgccttttgttcctccggaggaagaatttattatgggagtttccaagtatggca

SEQ ID NO: 419650 - DNA, 142 bp, Homo sapiens
ggccctttctccagacccttgcgatgctcctgatcgggacagtgtctttccacctttggatccgcagaaatcgaggcccagaccgagccataattccagaaatggagtggacgagccaggccctgctgacagtggacatagt

SEQ ID NO: 419651 - DNA, 82 bp, Homo sapiens
ggacgcgcaggagaagctggagctcacggagaagaaggcctccgacgagccttcacgtaaatgggtccagtcatgcctccca

SEQ ID NO: 419652 - DNA, 100 bp, Homo sapiens
tgacttgataagaggcgcaaaagaaaagaatctcaaagtgaaaggaccagttcgaatgcctaccaaggacctgaaggagaagaaggagaaggtggaggag

SEQ ID NO: 419653 - DNA, 98 bp, Homo sapiens
ctggacctgctggtgttcgcccacgaccatgaaacgcttcgttaagggactcaggcagtacgggaagaacttcttcagaattagaaaggagctgcttc

SEQ ID NO: 419654 - DNA, 73 bp, Homo sapiens
ccacaatgtgcctttgcaggggagcctgagagccacaggccaggtacaaagcagaaagtgcatagaagatgtg

SEQ ID NO: 419655 - DNA, 88 bp, Homo sapiens
gaggctgcaccaagtggcgaaggagccggctccaagagagaagaagaaggaggttcctgctgtgccagaaacccttaagaaaaagcga

SEQ ID NO: 419656 - DNA, 75 bp, Homo sapiens
ccgcgttcacagccccagcgcagggattgaggaatgatttgaaagcagccttggataagattgatcagcagtacc

SEQ ID NO: 419657 - DNA, 83 bp, Homo sapiens
gaagctcaagatgtggggagtggcagagagtatgcattaaaggccctgggaggagcggggacactgaggacctctctccaaat

SEQ ID NO: 419658 - DNA, 82 bp, Homo sapiens
tccccaaggaggacggcgagagcacggacagactcatggggaagggccaggtccagggctggaccccaatggagaacaggtg

SEQ ID NO: 419659 - DNA, 90 bp, Homo sapiens
gaacgcagtgctcttcgaagtggcctgggaggtggctaacaaggccaaggccacctttgatgccatttctaagacctacagctacctgac

SEQ ID NO: 419660 - DNA, 100 bp, Homo sapiens
gtgggagtctccgcgtcccgctcgctgggagagagtattgactcggagacaaaaagaggccaagaccaagagtgacagtgggacagctgcccagacttct

SEQ ID NO: 419661 - DNA, 87 bp, Homo sapiens
cctttggatgtagcaaggaagaaattgttcagttcttctcagcctcttcggtgatctttggtctgaagggctatgtggctgagcgga

SEQ ID NO: 419662 - DNA, 50 bp, Homo sapiens
cgacaacattaaaccatcagatgagtaccccgagattttccttatgaaga

SEQ ID NO: 419663 - DNA, 100 bp, Homo sapiens
gtctgtctgtaccagcatcggatgacagatggattttcacaatttggaaataaaaacatgagtgaagggttcggaaggcaagtctctggtccattacaca

SEQ ID NO: 419664 - DNA, 90 bp, Homo sapiens
ctacaagggtagcagtcgtggacgttctaagaggaagaagtctggaagaagaggaagaggaaagaaaaggagtcagggatggcccttact

SEQ ID NO: 419665 - DNA, 74 bp, Homo sapiens
tgaatgaccaggtgtaaagtgcaagagtaatatgctatgactgaggtgtcatggagaaactccagctgggccca

SEQ ID NO: 419666 - DNA, 74 bp, Homo sapiens
agagccctggaatgtgaagagacaggaggcagcagacggacatccagattttcagctgaactctcatctctcaa

SEQ ID NO: 419667 - DNA, 90 bp, Homo sapiens
cgtcgacatgagtgatgtggaggaaaacaacttcgagggcagagaagctgccctctgtcgacagctccccatggaagctgagactcttgc

SEQ ID NO: 419668 - DNA, 87 bp, Homo sapiens
aagaccagcagcttctaagagacagcttccaacagtttacttcacctcgcagtggtatcttctgagtaaaccatcagtctgtgctta

SEQ ID NO: 419669 - DNA, 98 bp, Homo sapiens
ggagatcaactcctctctgttaatggagtggtcttagtggtgcaatggctagtataagcgtgcgttcgagtaccccaggctctcctacacatgtaagc

SEQ ID NO: 419670 - DNA, 100 bp, Homo sapiens
caccatcgagcgggagttcgaagagttggatactcagcgtcgctggcagccgctgtacttggcgtctgtagaggcttctggtgaaatcgcattatgcaag

SEQ ID NO: 419671 - DNA, 97 bp, Homo sapiens
taatggagaccaaaagtatgttgtaccttgtgacagaatatgccaaaaatggagaaatttttggtgtcatggagaaactccagctgggcccagagat

SEQ ID NO: 419672 - DNA, 100 bp, Homo sapiens
catgcgcgggagggcgccgcggggcagccgccgctcctccgggtaccaagggaagaacacctacctggagaagattgacggcttccgagcctattacaag

SEQ ID NO: 419673 - DNA, 99 bp, Homo sapiens
agagactccttgggggtcgagcacataacggggttcgggtgtctcgtgtgtgaacatcacaggatggcactggatctttaaaacgcagtggttccttta

SEQ ID NO: 419674 - DNA, 75 bp, Homo sapiens
caccaacaacaccacaataatccacagccaaggtacccactgatggtaatgctggcctgctggctgaaccccaga

SEQ ID NO: 419675 - DNA, 75 bp, Homo sapiens
cagccaccatggcgctcctgctgtgcttcgtgctcctgtgcggagtagtggcttacaacaggttgatgaacatag

SEQ ID NO: 419676 - DNA, 100 bp, Homo sapiens
aaagaagctcctggcagcagcaaaactcttagctgactccactgctcgcatggtggaagctgcaaagctcatcttccccgacctggtggaggggctggtg

SEQ ID NO: 419677 - DNA, 100 bp, Homo sapiens
ctcttcgccaagcaggtgcagaagaagtttagcagggcccaggagaaggaaaatcctgccttgcttcgttgggcctatgcaagaacaataaatgtctatc

SEQ ID NO: 419678 - DNA, 99 bp, Homo sapiens
atagaaaacggcgagagtgggcgagaacgtccactgcgggccggcgaaagctggggaacgcccttttgcttgtgactggcagggctgcgacaagaagtt

SEQ ID NO: 419679 - DNA, 100 bp, Homo sapiens
gcctggagtctgcgaaggccgggacccggttccccggcccacagtgggggtgtgcaaacccgagagaactgggttcagccgtctgtatatctccccagat

SEQ ID NO: 419680 - DNA, 75 bp, Homo sapiens
gcggagtcggggctcctgacgaaaatgacagatggcgagacctggacaggaaatgccctcttcagattgaccaac

SEQ ID NO: 419681 - DNA, 100 bp, Homo sapiens
ggaagaagaagaaacgggccgcgaaccgcagtatcatgctggccaagaagatcatcattaaggacggaggcacggatcagttcgacagcttagacaagca

SEQ ID NO: 419682 - DNA, 101 bp, Homo sapiens
ggcgcaccgaccatggcctccaaatgccccaagtgcgacaagaccgtgtacttcggcacgggcgaaacgcccacgctgggcactctggacttctacatggc

SEQ ID NO: 419683 - DNA, 74 bp, Homo sapiens
tacagatctgggaccgaaatttgacttaacaacatgctgtaccccaaggaagacaaggagaaccgcattctgct

SEQ ID NO: 419684 - DNA, 74 bp, Homo sapiens
tgaaagcctataggaaaaacgttttggcaaaatgtgtgacggcaattgcctcatgcatgccacttctcagtaca

SEQ ID NO: 419685 - DNA, 75 bp, Homo sapiens
cgaccattgagctcaaggccctcaggctgctgaacttccagaggcagccccaactggaccctaggcaaaagtgag

SEQ ID NO: 419686 - DNA, 118 bp, Homo sapiens
tctatctcagatttggaattttcatcagattttaccctgaaaatcacaaggacatccatgtgcacgacaaggacatttacctatggtcatattattactccagcatggtgcagacccc

SEQ ID NO: 419687 - DNA, 115 bp, Homo sapiens
acaccttcagttacgacaagaagaaaaacggcaacgtgtaatcagaaggcacagattagaggaaggaagagcaacacagatgtacacacggtggcatcacttcttaagctgtacc

SEQ ID NO: 419688 - DNA, 75 bp, Homo sapiens
gatttactttcccatccgtgactcctggaatgcagaaaaagcggatggtggttcctgctgccctcaaggtcgtgc

SEQ ID NO: 419689 - DNA, 90 bp, Homo sapiens
cagtttcttctcctcggtatcagaagctctgtaagcatttctggaaaggagtccattatcgctgggcatttttcatggccagtggcccat

SEQ ID NO: 419690 - DNA, 100 bp, Homo sapiens
gagttccaggaaaaccttcccagagaaaggctatgaggtgtcaggtcgcattgaggccattgagggctcaagagaggacatcgtggttcctgtctacctg

SEQ ID NO: 419691 - DNA, 51 bp, Homo sapiens
aaagtgcctctccctttcagtttggaaaataactgaagtgaagtgatggac

SEQ ID NO: 419692 - DNA, 82 bp, Homo sapiens
agccagcggacccgacggctgagaggagccttcacgtaaatgggtccagtcatgcctcccagtaagaagccagaaagctcag

SEQ ID NO: 419693 - DNA, 50 bp, Homo sapiens
aatccaccatcaatatatctggaggctgaactcacgggaatcaaatggcg

SEQ ID NO: 419694 - DNA, 98 bp, Homo sapiens
actgggcttactacaaggccaatgtggccaaggctggcttggtggatgactttgagaagaagcaacagtatcaaagtgctctattttgggcagataaa

SEQ ID NO: 419695 - DNA, 75 bp, Homo sapiens
ccgccgctgccgccgccgcgcgcgggtacttggaaaaatggacaaggattgtgaaatgaaacgcaccacactgga

SEQ ID NO: 419696 - DNA, 95 bp, Homo sapiens
ggccagtccaacactgataagattgaatgccaagcagaaaattacctaaatgcactctttcgaaagaaagaaaaacacaccttgactttagtcag

SEQ ID NO: 419697 - DNA, 98 bp, Homo sapiens
taacattctgagagagcctgtgtgtttaggaggatgtgagcacatcttctgtaggctgctttgactctcccgcgaagacctttccttcactgttctac

SEQ ID NO: 419698 - DNA, 75 bp, Homo sapiens
ttttattcaggttcctaggaatctcgttgatctctggcttcctgctctgtttgttctggttgccctggaaagcct

SEQ ID NO: 419699 - DNA, 96 bp, Homo sapiens
cagaagtccttcttcgccaaatacgtccccagcgggacgcccaggcggcgcgggagttcatcctgaagatgttcgtggacctgaaccccgacagcg

SEQ ID NO: 419700 - DNA, 76 bp, Homo sapiens
ggaccgtccagcccagcgattctcagtcagatgccatggacaatattaccaggcagaaccaattctacgataccca

SEQ ID NO: 419701 - DNA, 83 bp, Homo sapiens
tcttggcaaagcttctccctcagtatttagaccaggaaacttttgagaagaactttgaaagagaaacccataaaataagtgag

SEQ ID NO: 419702 - DNA, 88 bp, Homo sapiens
gtcaacccagaggatccccagtatgcatctcaagatgtggcagtatttggcagtcgtattcagagataaacccctggagctatgggat

SEQ ID NO: 419703 - DNA, 88 bp, Homo sapiens
gctcacctctcaccgcgcatgtttggagataaacctctcataatgaaggcccccgctgtgcttgcacctggcatcctcgtgctcctgt

SEQ ID NO: 419704 - DNA, 101 bp, Homo sapiens
cctgaaggaacgcgacggcggcgcccgcaggaatttagataatgggctgtgtgcaatgtaaggataaagaagcaacaaaactgacggaggagagggacggc

SEQ ID NO: 419705 - DNA, 97 bp, Homo sapiens
gctggtcacagccacactctgcaccgctaggccgtccccgaccttgcctgaacaagggagtctgaagatacagtattgctcgtcctcaaagagatct

SEQ ID NO: 419706 - DNA, 101 bp, Homo sapiens
caggccaagcacgatttactcaagcagaccctgggcgaagtttaaactcatatcccaggcatatgaagtgctttcagatccaaagaaaagggatgtttatg

SEQ ID NO: 419707 - DNA, 75 bp, Homo sapiens
gttgaccaagaacatttttcaagacctgatcccaaccttgaagaaagtcctaaaagaaaaaatattacatatgag

SEQ ID NO: 419708 - DNA, 100 bp, Homo sapiens
ctttgtggtagcggcagctagcctgagatgtcagaactacgggattccaccggtcaaccgtgcccagcacctgaactcctggggggaccgtcagtcttcc

SEQ ID NO: 419709 - DNA, 73 bp, Homo sapiens
cggggcagacgtcggtgtatgccctggatgagaatgacttcccaagtaagaagcggaagaggagccgctggaa

SEQ ID NO: 419710 - DNA, 100 bp, Homo sapiens
gaatccccatttgaacaagcaaagaaggtgataaccatgtttgtacagcgacagtgcctaaactgcacccaggtcttccagagaaccgctttggtttggg

SEQ ID NO: 419711 - DNA, 100 bp, Homo sapiens
atccctgcgtagaaacgcctgccaatgctttctcatttggacccagactccagatcgggaggatattaccttccaaatgatgatggagaattttatcagt

SEQ ID NO: 419712 - DNA, 96 bp, Homo sapiens
gccaggaacatggactgaagtatccagcgctcattgggaatttagttaagtgaggactcttgtgaagatatgagttgtggagaggagagtctcagc

SEQ ID NO: 419713 - DNA, 100 bp, Homo sapiens
aactgtcgtatgcctactacagcaacattgccaccaagacaccccttgaccagcacacactgcaaggagatcaggaggagcaccgaacagccagttccct

SEQ ID NO: 419714 - DNA, 100 bp, Homo sapiens
ccggaggagtctcagagctgtcagaaagaggactacactgaaacattcaaatgtgtggcgaaaacataattttcattccttggatggaacttcaaccaga

SEQ ID NO: 419715 - DNA, 100 bp, Homo sapiens
gcgatcctgaccagtgcaaccacgggatggtgctggagaatctggtaaaagcaccattgtgaagcagatgaggatcctgcatgttaatgggtttaatgga

SEQ ID NO: 419716 - DNA, 74 bp, Homo sapiens
ggcgttccgcgggatcttgcagaggagagaaatgcttcggttacccacagtctttcgccagatgagaccggtgt

SEQ ID NO: 419717 - DNA, 51 bp, Homo sapiens
gtgaagtggaaaggatggcccccaaaggccaattcctgtccccccagcagc

SEQ ID NO: 419718 - DNA, 75 bp, Homo sapiens
agatgccaggacatcctggaagctgggaaaaggagggtgtgaagacagagaatgaccacatcaacctgaaggtgg

SEQ ID NO: 419719 - DNA, 73 bp, Homo sapiens
ctggcaggcgaggctccaggcctccaggcatccctccctgctcttctgtcggagcccgcggcgggggaggggc

SEQ ID NO: 419720 - DNA, 82 bp, Homo sapiens
ttgaagccgaccagaatgatagccagtccctggagctggtgcacaggttccaggaccccaaaatgtatgtacagacagtgct

SEQ ID NO: 419721 - DNA, 83 bp, Homo sapiens
cgagtccggaccggagactttggggcctaactaggctttccttaaagtttcccatgtctcaatggactcctgaatataacgag

SEQ ID NO: 419722 - DNA, 82 bp, Homo sapiens
ctgcagctggagggccccaaggaaaacgccagcagagccaagagtgttctgccagttctggataatccactgtccaagaagg

SEQ ID NO: 419723 - DNA, 100 bp, Homo sapiens
cgctcattggctgggtcctgcgtgcggccctggattcaggggccttccagaggtactgaccccaccggcaagaacatttacctgcatgatatttggccta

SEQ ID NO: 419724 - DNA, 75 bp, Homo sapiens
ctctgggcgaaaattggatgtgaaaatgaagccagaccgaggacccagccttgatgcccacttgggaggcagaaa

SEQ ID NO: 419725 - DNA, 116 bp, Homo sapiens
gttcctcctcctgtcgctgcccgtgtgattactgagactcaggttgtgctgtgttacaggtcagcccagtgactgaaacacgtacttaccatgatgtgaaagagatttgcaaatgc

SEQ ID NO: 419726 - DNA, 74 bp, Homo sapiens
gtggaattggcccaggatgacagctggagaatggagtcaggaactctaatgaatcattgattgaccagcactat

SEQ ID NO: 419727 - DNA, 50 bp, Homo sapiens
ggattgtcctctttctacaaaaggctatggtgaactaaacggtaatgctg

SEQ ID NO: 419728 - DNA, 80 bp, Homo sapiens
tgcatcgcccactccagaagtagcatggaaatggagggcatcttcaaccacaaaggttaaagatcgaggtccggaagcca

SEQ ID NO: 419729 - DNA, 74 bp, Homo sapiens
gcagaggctgcagagccccaggagggcctgatcaaccccgtataaccaaagatgtaatttgttttcatgctgaa

SEQ ID NO: 419730 - DNA, 101 bp, Homo sapiens
aacgtcttgcacgtgcgaggggcatttcaggagtttcctgtctgtcaggtaaagtcagtgataaatcttttgtttgctgcatatactggagatgtgtctgc

SEQ ID NO: 419731 - DNA, 80 bp, Homo sapiens
atgaatccaaaatccttcatttacaggtttggtgcacctcgatttggaggaagtagggcagggcccttatctggaaagaa

SEQ ID NO: 419732 - DNA, 75 bp, Homo sapiens
cagattcgcagtggtcgcttcttctccttgggaaagtttaaaggaagaggaaatgatcgcagggaaaagctccag

SEQ ID NO: 419733 - DNA, 50 bp, Homo sapiens
ctttcttggactattccagagaggattatatgcgtcaggcaggagaagtg

SEQ ID NO: 419734 - DNA, 107 bp, Homo sapiens
agcaaaaccaacgcctggctcggagcagcagcctctgagttacagaatgtctgaaggggacagtgtgggagaatccgtccatgggaaaccttcggtggtgtacagat

SEQ ID NO: 419735 - DNA, 75 bp, Homo sapiens
ggcggcgcggcccagctcgttccaggctgaccccgcactacatctacccaccagccatcgtgcagcccagcgtgg

SEQ ID NO: 419736 - DNA, 100 bp, Homo sapiens
ctcgacctctggttctacttcacactgcagaactgggttctggactttgggcgtcccattgccatggtcatttaatgaacctgaagtactatgtctctcc

SEQ ID NO: 419737 - DNA, 89 bp, Homo sapiens
cagagaaatattacaactgtagtagaaaaattgcagttatgccttcctgctgccaccacagtgcttggtccttccaaggaagctaaggc

SEQ ID NO: 419738 - DNA, 95 bp, Homo sapiens
tagtgaggctcagagatgcctgtaccgtgatgtgacgctggagaacctggcacttatgtcctccctggagctggcctgaacctccaggacttcag

SEQ ID NO: 419739 - DNA, 90 bp, Homo sapiens
acattctgtcagtgctgttctccaagaggcccagagacatgctgaaacatcgaagctcatgggcctcctgagtgacccagaattaggtcc

SEQ ID NO: 419740 - DNA, 60 bp, Homo sapiens
aacatgccaggagagcaatgcaaaagggcatatctggaatctgaagttgctatatctgag

SEQ ID NO: 419741 - DNA, 120 bp, Homo sapiens
agggctctgaaagctagaagaaaaggtgtacttgcaagaaacctcaggacttgagtaacagcaacatggtttttagaacttcagccataaaaatgggcagaattttccttgatcatatcg

SEQ ID NO: 419742 - DNA, 100 bp, Homo sapiens
cagcttagaatcagtatttgtggttgggaaagatggacttacgggagcttgacggtctggaaaatcccgaagcagaagcccgtattcatctaggcattca

SEQ ID NO: 419743 - DNA, 74 bp, Homo sapiens
gccagttacccgctggccctggtccggacccgcatgcaggcacaagtccagggaccttgacccagcccctctca

SEQ ID NO: 419744 - DNA, 101 bp, Homo sapiens
atgacgaacaagataaggagcaatccaatccatctatggtattggacatagaggctctaattcggccacttccaagtcaacaaatgtttgaacatatgcag

SEQ ID NO: 419745 - DNA, 100 bp, Homo sapiens
tctgggcacccacagctgaagcttccactgagctgacagggttaaaagatgtgaatgcccaggcccttaccagtgccttctctccacacaccaagccttg

SEQ ID NO: 419746 - DNA, 74 bp, Homo sapiens
atgagtgtggatgaaacactaatgtgttcttttcagtttttcagaagaagtgaagtcaagatgaagaaccattt

SEQ ID NO: 419747 - DNA, 75 bp, Homo sapiens
aatgaccctgggtggaaaaatttgacagagagtatacatatcttacctcgatagtgttcatttcttccgtcctaa

SEQ ID NO: 419748 - DNA, 106 bp, Homo sapiens
agaccgcgcgcagggcctgcagcgggagctggacggcgagcgcgagcggcgcgagaaagaatcccttggcaccatgtcctgtgtgcattataaattttcctctaaa

SEQ ID NO: 419749 - DNA, 100 bp, Homo sapiens
gctcagctcagccacagctttgcagacatccctttccaggctggcctccccagagggtcagctgtccgaggaggagaaaccagatcagcagcccctgagc

SEQ ID NO: 419750 - DNA, 50 bp, Homo sapiens
agccgctcggcctaccacagccacaaggacatggtctgctatacagctca

SEQ ID NO: 419751 - DNA, 100 bp, Homo sapiens
gaaaccaaaatagactgtgtccaagtggccacaaaaggatgagttagatgaactccgtgctgagatggaagagatgagagacagttatttagaggaagat

SEQ ID NO: 419752 - DNA, 100 bp, Homo sapiens
ttgctgtgaaagtcaacccggagcgtgaggacagtgagactcgaacagatctcaaagatttcatgagacaagctggggaagtaacgtttgcggatgcaca

SEQ ID NO: 419753 - DNA, 98 bp, Homo sapiens
atctcatcctgtcctgctgcctccactactgcaaagacaaggctaaggacttcatgcccgccagcaaaggagcctgattcgggaggatggggggccgg

SEQ ID NO: 419754 - DNA, 75 bp, Homo sapiens
gtcacatgcttgaactcagcatacaggatgtacagagacagcctggagctgttgcccaaagaattggaagtcatt

SEQ ID NO: 419755 - DNA, 50 bp, Homo sapiens
gtacgggcggccgtgcgcgaggcgaggtattgttgcagcatctggcagtg

SEQ ID NO: 419756 - DNA, 82 bp, Homo sapiens
cccgagacacaccaggccggcaggctgagaaaagcgagaccgcgtgcgaggaccgggcgtgatggtgggcatgggtcagaag

SEQ ID NO: 419757 - DNA, 50 bp, Homo sapiens
cggatctcagaaggccagttcaaaggaaaactcaatgtgagtagtgacac

SEQ ID NO: 419758 - DNA, 74 bp, Homo sapiens
cggctcggctctcgctgcggcagacgggctcccccgggatgatctacaggcctcttctgaagagctgaaagctg

SEQ ID NO: 419759 - DNA, 100 bp, Homo sapiens
tggccgatgaggaagtactgagcctgttggaggaactggcccggaaacaggaggacgacactcatgaggaccatgatacttccactgagaatacagacga

SEQ ID NO: 419760 - DNA, 98 bp, Homo sapiens
gctactcgactgctctggaggtagcggccgcggtgaggagagccatgggacgggcagtcaagtttctccttggaccaagatgactgatggaaaactct

SEQ ID NO: 419761 - DNA, 100 bp, Homo sapiens
tacaaacttccttatgggagatgtaggcaatgattcattattgcgactgcctgtttctcgagaaactaagatgaataatacggcagctagtccaatgtct

SEQ ID NO: 419762 - DNA, 74 bp, Homo sapiens
cttcggaccctggcctcttgggatgcaaagaatgcgataagttgcggcatgatggctaccgcagttctcagtac

SEQ ID NO: 419763 - DNA, 98 bp, Homo sapiens
acggtctgcgtagctccagaggtttaaccataggatagagaaaccaggtgacaatctccaatagacttgtgtcttcaccttgctgcattgtgaccagc

SEQ ID NO: 419764 - DNA, 95 bp, Homo sapiens
tatttcagcagaaagactttcacagagactttcttcatgagattgaaacagagcaaatcatggaggaagataaaaaacatggtgcactggtctcc

SEQ ID NO: 419765 - DNA, 90 bp, Homo sapiens
ctggaaggagactggatgatagaattgtattgggagagttgctgctacatctttaggaaatttgactaaccatggttctgaagatttacc

SEQ ID NO: 419766 - DNA, 75 bp, Homo sapiens
tactacagcctcttgctgtgcctcggtttaccaggcactccaggaataggaactacaaagctgaatttgcatcat

SEQ ID NO: 419767 - DNA, 98 bp, Homo sapiens
gggcagcagccctacgcaaccctgggaagcaaaaacctcgctctatcctgtccaagtatgacgaagagcttgaaggggagcggccacattccttccgc

SEQ ID NO: 419768 - DNA, 100 bp, Homo sapiens
gccgcgggccgctgctgggagttgaagccatccttgtcaatatatttggtggtatcgtcaactgtgccatcattgccaatgggatcaccaaagcctgccg

SEQ ID NO: 419769 - DNA, 75 bp, Homo sapiens
cgtggagtccgtctgcacacaccgggagaggtcagagaaattccaacagaatgggtttcctgaaacggatttgca

SEQ ID NO: 419770 - DNA, 100 bp, Homo sapiens
cgcggggcagccgccgctcctccggggcctcagctgttgaagaacgctctgcagagagcagtagagaggggccagttagaacagataactggcaaaggtg

SEQ ID NO: 419771 - DNA, 100 bp, Homo sapiens
gaaaatggagcacgtccaggctgaccacgagcttttcctccaggcctttgagagtttcagtgttgactggtgggctcttggagtgctcatgtttgagatg

SEQ ID NO: 419772 - DNA, 98 bp, Homo sapiens
ggagtactactttgaacagcatagagccaatcacattttgcacaagggcagtcaccatgaaagttcattcggctcctaaagaagtagcagtgtccaag

SEQ ID NO: 419773 - DNA, 88 bp, Homo sapiens
cccgcgccgcatggaggccggctgaggagcgccgctgcctcgcctcggactttccttatcccagttgattgtgcagaatacactgcct

SEQ ID NO: 419774 - DNA, 75 bp, Homo sapiens
aaatcatccatctaaagcaccagtaaaatatggtgaactcattgtcttaggataaagaccattttgagcggcttt

SEQ ID NO: 419775 - DNA, 100 bp, Homo sapiens
ctgtttttccagctcacccactgccagcagagagagtaaaacttgtctcggcacagagtcaagtaaagaaagccaacatacagtggagcccctggggagc

SEQ ID NO: 419776 - DNA, 99 bp, Homo sapiens
cttgtccacccgccggccggaccagatgatattgctgataggatgaggatggatgctggagaagtgactttagtgaaccacaactccgtattcaaaacc

SEQ ID NO: 419777 - DNA, 98 bp, Homo sapiens
gaaggacaaggacagaatcaccagcactggctgaaggctcaaactgctttttctgcaaaccctgccaatccagcaattttgtcagaagcttctgctcc

SEQ ID NO: 419778 - DNA, 100 bp, Homo sapiens
tttatattcatctcaaaaacaaaattctgaactcaggacttggcaaaggagattttgaagacacacatcgcacactggtggtctccggatggcacgagac

SEQ ID NO: 419779 - DNA, 75 bp, Homo sapiens
ctccagaactttccaagcgggggaaacttggcggcgggcttgtggaatatacccgtgctgatggcacagttggcc

SEQ ID NO: 419780 - DNA, 75 bp, Homo sapiens
aaggagctggacatcgagcctgagggaggggaaaggcgcagggagtctcgctgtgtcacccaggctggagtgcag

SEQ ID NO: 419781 - DNA, 103 bp, Homo sapiens
ctggattatgcaaagaaaaatgaacccaaacatagacttgcaagagagcaactttcagccagaggcatggatgcttctctgtctcatcagtccttagtagcac

SEQ ID NO: 419782 - DNA, 75 bp, Homo sapiens
tctatttcttcatagcggcttcctacgcaccctgtcatcagtgagttctgcctcagtcagctcccaagtgaggac

SEQ ID NO: 419783 - DNA, 100 bp, Homo sapiens
taagctccctgccgccagaagccagccaaggtgctggagaatctggtaaaagcaccattgtgaagcagatgaggatcctgcatgttaatgggtttaatgg

SEQ ID NO: 419784 - DNA, 100 bp, Homo sapiens
ggaaagtccgtgacttgcaagaggcagatctggaccttttgagaggtttattcttcagtccaaggaagcaattcacagtcagctgttagagaagcagaaa

SEQ ID NO: 419785 - DNA, 143 bp, Homo sapiens
gttttcttttgtccctctgatgcaagaagatggtaggactcttccagatggcactcatgagctcatcgtgcataagctatatcgagcttatgtggccttcccagactttttccgtaattcaactgccaagtggtggaagaggg

SEQ ID NO: 419786 - DNA, 119 bp, Homo sapiens
aactccagatcacccacaaggacccgaagacaggaaagctgaggacttcaccagcgctggagctgcagaggctggagacagagttgggccaacccgctgagcgctggaaggacacctgg

SEQ ID NO: 419787 - DNA, 80 bp, Homo sapiens
gctgggtggtcccagcctggagctgtgccagcctgacatgggaaacaaaccatcaggcctcccagaaagtatccgggatc

SEQ ID NO: 419788 - DNA, 74 bp, Homo sapiens
ggcagatcttctcatattcgggaaggagctaagtgagaaagatcagtctaaagaaaaggagaagaaagtgaaaa

SEQ ID NO: 419789 - DNA, 90 bp, Homo sapiens
gacagattcgcagtggtcgcttcttctccttgatggagaacatcattgcaacagtaagagattccaacctcaagctgacccttgctttcg

SEQ ID NO: 419790 - DNA, 90 bp, Homo sapiens
gccgtcgccgccgccaccatgcccaagagaaaggagggccctcctggacccgggagcggaccctggtggcggtgaagcccgatggcgtgc

SEQ ID NO: 419791 - DNA, 100 bp, Homo sapiens
tggtccaaggacacctacagccccgacgaacatttctgggtgacactcaacaggattcccggtgtcccgacccaggctaagcttgagcatggctgagcag

SEQ ID NO: 419792 - DNA, 75 bp, Homo sapiens
ttagagatgcaaatccttctctactcacaagatgcggtggtgctagaatttgttatattttccatgagacttttg

SEQ ID NO: 419793 - DNA, 83 bp, Homo sapiens
agaagtgaaacgccaggctctctggaggccaggagatggccaggggttatcaccatgcaagctttgtcggaagaggaccggag

SEQ ID NO: 419794 - DNA, 75 bp, Homo sapiens
ccggtgccagcacctttcggcttctgagacggcggcagcagcggcattcagggaccattgacatttatggatgtg

SEQ ID NO: 419795 - DNA, 98 bp, Homo sapiens
cgatggcctagcacgtggaattcgcgaagctgccaaagccttagacaagcgtctacggtgacgtgcagcgcgtgaagatcctgttcaataagaaggag

SEQ ID NO: 419796 - DNA, 75 bp, Homo sapiens
tccgcaggttccctacacggtctcctgggtcaaggctgaagactttaagtgacaagtcaagagaagcaaaagtga

SEQ ID NO: 419797 - DNA, 90 bp, Homo sapiens
atggaacaaaccttacctttattggagacaaaaccgaagatgagaatgtgcctactgctcctgatcctccaagtcaacatttacgtgggc

SEQ ID NO: 419798 - DNA, 101 bp, Homo sapiens
gagctgaccctaggcctccaccctggcaggaatcccaatttgcctccacttagtgagcggaagaatggatgtgtctagtccgaatgaagcaggaaggccgg

SEQ ID NO: 419799 - DNA, 83 bp, Homo sapiens
aatggaagcctgatccgggagaggtggttccagaattatggtggaatgcaagctttaggacttcacctgacagatccaagtca

SEQ ID NO: 419800 - DNA, 82 bp, Homo sapiens
aggcttcgagtgacccgggtgccgaggagcgggaagagttgctgggcagggagagcaacaagccccggccctcagagctcag

SEQ ID NO: 419801 - DNA, 100 bp, Homo sapiens
cactcacttacatctccgaggacggagacacacctcctgccccccgaggtctgcagtctcctgaacccagcagccatctacgccaacaacgagatcagcc

SEQ ID NO: 419802 - DNA, 83 bp, Homo sapiens
agatcttttctacagcttctgataatcaaccaactgttacaatcaaggtctatgaagattgccccagtggaaaatgacaatag

SEQ ID NO: 419803 - DNA, 90 bp, Homo sapiens
gcttgggccgccgagctggacccggaccggttttggacagggtctctgtgtcatgcaggctgagtgcagtgcgcaatcacagcttactgc

SEQ ID NO: 419804 - DNA, 50 bp, Homo sapiens
gtgactcgactaagagaattaaccaggagtcagccagcctgaaagagcag

SEQ ID NO: 419805 - DNA, 74 bp, Homo sapiens
tgttacagaagagtcaattaaggaattctttcgaggattaaatgatgatgatgctgaagctatccttgctgcag

SEQ ID NO: 419806 - DNA, 90 bp, Homo sapiens
aactctctacaagtgcccctgatgagccccttctggaagatgagaatgtgcctactgctcctgatcctccaagtcaacatttacgtgggc

SEQ ID NO: 419807 - DNA, 100 bp, Homo sapiens
gtcacgtggcacaagcgtggaggaaacctccctgcccggcaccagggtgattctgggggtccacttgtctgtaatggtgtgcttcaaggtatcacatcat

SEQ ID NO: 419808 - DNA, 100 bp, Homo sapiens
cccgagccgacctgtcttgtctcgtcccagccaccagcgtggctgtccgcagagggacctgctgtgccatcaacaagggtaagggactgttctgaagaac

SEQ ID NO: 419809 - DNA, 83 bp, Homo sapiens
ctgacgagacctgcaacaactaccaggccaaggaccagggtgaaatgacaatggatgctctgttggctcgattgaaacttctg

SEQ ID NO: 419810 - DNA, 80 bp, Homo sapiens
aaggaggcctgttcataaaagatatcgaggatttagccggaagtcataaacaggaagctgatgacattgttcgagtggca

SEQ ID NO: 419811 - DNA, 83 bp, Homo sapiens
ccgcgagcgcggcctgcaggaggtggaaatgagttctcaacagtttcctcggttaggagccccttctaccgggctgagccagg

SEQ ID NO: 419812 - DNA, 76 bp, Homo sapiens
accggatcaacttcgacaaatactgtccaggcagccatcttgtctggagacaagtctgagaatgttcaagatttgc

SEQ ID NO: 419813 - DNA, 75 bp, Homo sapiens
ctgggcaccttcatctggaataaggctcccggggagctttctgtgaagtgagaccagatgataaaagaattctgg

SEQ ID NO: 419814 - DNA, 98 bp, Homo sapiens
cgagcgcgaatggcacgagctggagggagaatttcaagaactgcagcacactagcaacttcagacgtcagcaggcggaaatggctgattccaggtgca

SEQ ID NO: 419815 - DNA, 73 bp, Homo sapiens
cattattttatggaagttttcacaaggtttctaagcatgaattgaggaacagaagaagcagagcagatgatcg

SEQ ID NO: 419816 - DNA, 110 bp, Homo sapiens
tgcaaatctgcaaggggtaaatgagggtgttgatttctccaaggatctgctgaaacaagttgaagtcgattgccaacagtgtatgctcgaaatcctggatactgcaggga

SEQ ID NO: 419817 - DNA, 101 bp, Homo sapiens
gccaagcgccgcggacggccggggcaccgccatcacccacgctctgacctctgatgtatcccccatatctcccgttccctccgccctatggaccccagggg

SEQ ID NO: 419818 - DNA, 100 bp, Homo sapiens
tctggctgccttatctttacacgctgcaggctggatggaaagaaaaccatgcaacgtttatgaatgaattgaaaaaccttcaggctgaaggacttacgac

SEQ ID NO: 419819 - DNA, 75 bp, Homo sapiens
gccgatggctatatcctcaatgcgcacaggaagtgcgtgggctgtaccttcacagtcctggtgcacacgagagaa

SEQ ID NO: 419820 - DNA, 100 bp, Homo sapiens
accgagagtttgaaagtgcgattgtggaagctgctcgggactttgcctcccgggccaaactggcagttcaaaaactagtacagaaagttggattttttgg

SEQ ID NO: 419821 - DNA, 80 bp, Homo sapiens
cctgatcatcctgctgggcttcgtccagatcgggaagggtgtcgtgaaaactacccctaaaagccaaaatgggaaaggaa

SEQ ID NO: 419822 - DNA, 100 bp, Homo sapiens
ctgcaaatttcactttggacacgtgagtcagaggacgtgttcctcatgatccggcgccacaagaccaccatcttcacggacgccaaggagtccagcacgg

SEQ ID NO: 419823 - DNA, 100 bp, Homo sapiens
acacattcaatgcagttagaaggaaaaggtcaactcgatccaatacagaccatttgtcccatcagatgaaaagaagaaacaaggttgtcaacgagaaaat

SEQ ID NO: 419824 - DNA, 65 bp, Homo sapiens
cctggagttcttagaccttgtgaaaccagaggaagccctcaatctagaagagtagaggtccaaag

SEQ ID NO: 419825 - DNA, 82 bp, Homo sapiens
ccgaccgttatccagtcggttcgtggagaggagaggtattgttgcagcatctggcagtgagactgaggatgaggacagcatg

SEQ ID NO: 419826 - DNA, 50 bp, Homo sapiens
gattcttccaaggaaccagtgcgaagcagcagccgctcttctaaaacatt

SEQ ID NO: 419827 - DNA, 83 bp, Homo sapiens
caccgctgccctcagctccgagtccagggcgagattttgcaagaacgaggctcaaggatgtgagggacacagtattgacagct

SEQ ID NO: 419828 - DNA, 100 bp, Homo sapiens
tggtcctcctgatcgccggcagtgctggggccgcgccacttccgcaaacaggtgcagagttggccaccctgttcaagggcttaggagaaagtcaacacac

SEQ ID NO: 419829 - DNA, 75 bp, Homo sapiens
gtgcagaaggtgcacagccacagcgccgagatggagaaagaagatgctgatatgctacaacacggatgaacctgg

SEQ ID NO: 419830 - DNA, 75 bp, Homo sapiens
cagctggatcttgctcagtctctgccaggggaagattccttgccacagcctggcagctctgatcaggaaagtgag

SEQ ID NO: 419831 - DNA, 50 bp, Homo sapiens
catctacaaccttcgatctcctgacgaatagaatgagtccatttaagtcc

SEQ ID NO: 419832 - DNA, 50 bp, Homo sapiens
ccgacacaagagacttatggagaatatggcaagtgtccagagaatggctg

SEQ ID NO: 419833 - DNA, 75 bp, Homo sapiens
tcctccactgccactacagggaagtgcatcacatgtcaggaatcttgcctccacaccacgagtcccatgccaagg

SEQ ID NO: 419834 - DNA, 100 bp, Homo sapiens
gtccgccagacctgctgctgcttcaatgtccgcatcgcaaccaccgccctggccatctaccatgtggtttttcgttggaatatacgttgcacatttatgg

SEQ ID NO: 419835 - DNA, 74 bp, Homo sapiens
cggcggcggcgcccgccccggcgatgcgggccccgcccgtcgcctcaggtatggacgacaaaggcgacccgagc

SEQ ID NO: 419836 - DNA, 75 bp, Homo sapiens
ttcgcagtggtcgcttcttctccttgggaagacatctggtttgacgacgtggacccagcggatatcgaagctgcc

SEQ ID NO: 419837 - DNA, 82 bp, Homo sapiens
ctccttcggcagtccacccaccgccgccgcctcccaggctggacggcagtctggaaacgaccaatgagatcttggactctgc

SEQ ID NO: 419838 - DNA, 98 bp, Homo sapiens
ggaacaaaatacaaatcatggagccgctggggtcccttttgcctcagatactattttgaagattttgggaaccagtaggacattgacatacatccgag

SEQ ID NO: 419839 - DNA, 96 bp, Homo sapiens
gtgagcgaacagcccgcctcgcctccaggagcatgaattgtaatagagaccactttcctggtggataacaaaaaggtctttggaactcatctcatg

SEQ ID NO: 419840 - DNA, 90 bp, Homo sapiens
tgtgggtgatatttgcctttagtgcactcttctccttcacagtaaagtggctgacacgagacgacttcctgggccaggtggacgtgcccc

SEQ ID NO: 419841 - DNA, 98 bp, Homo sapiens
tgcgcttcctgagggagtgggtggagagatcactgagacccagaggctgggcctggctatggccctagaacctaacaccaccttcctgaggaagtccc

SEQ ID NO: 419842 - DNA, 90 bp, Homo sapiens
gacgaagacagtccctggatcaccgacagcacagacagaatccctgctaccagccaccagcccctcgggttccaagatgcagctactgga

SEQ ID NO: 419843 - DNA, 75 bp, Homo sapiens
gccaatggtgttcgggaagaaaataaccccattgccttgaggctgtggaagaatgtgacccttactctggcctct

SEQ ID NO: 419844 - DNA, 83 bp, Homo sapiens
caatttaccagagataattgataacaccctgtaacagctgagagtctccaagagcttttagattaccccggggaggatgtgga

SEQ ID NO: 419845 - DNA, 88 bp, Homo sapiens
agctttactggtgttccagccctaagcaataatgacgatgaggacctgacaccagagcagaaggcagagcgtgagaaggagcggagga

SEQ ID NO: 419846 - DNA, 55 bp, Homo sapiens
gcatggagtacttggcttcccaaaaagtgctcatctgccggaactaccgtggcga

SEQ ID NO: 419847 - DNA, 75 bp, Homo sapiens
gcgatgtgtggcgactgtgtggagaaggaatatcccaaccggttcagaaatggattcgtacccgtaagctgaagt

SEQ ID NO: 419848 - DNA, 100 bp, Homo sapiens
gaaagagccagaggcctttgactggtccccagtggtgacctatgtgtgtgatcttgaagggaacagtggtgcttcatgccccacctccaaccaagatcaa

SEQ ID NO: 419849 - DNA, 74 bp, Homo sapiens
attctggccaacagtgttaagtataatggatcttaagattgaaagtgatgttcaagaaccaactgaaccagagg

SEQ ID NO: 419850 - DNA, 76 bp, Homo sapiens
tgctggcttggtgacgctcacagtgctgggaaggaatctatccaaggttgtaaagctctctgaaatagtgacctta

SEQ ID NO: 419851 - DNA, 100 bp, Homo sapiens
cagtattcgggaaaggcagacagtttgcctgagaatacagatcaacccacagaacaaagcggatttccaaggcatctccccagagcgagcctttgctgat

SEQ ID NO: 419852 - DNA, 100 bp, Homo sapiens
atccgctcgacctcgtgaagatccgcttcgccgggccgttgctccagggagaactgcaaatatcttcatccacccccacatttaaaaacgcagttggaga

SEQ ID NO: 419853 - DNA, 100 bp, Homo sapiens
gaaccaggacctggacccggacccaaagtgccatgtctttaatctttctgaaaaggatatgagcatgctcgaggagaggattaagcggtcagcaaagaga

SEQ ID NO: 419854 - DNA, 129 bp, Homo sapiens
catcgccaaatatgacttcaaagctactgcagacgacgagctgagcttcaaaaggggggacatcctcaaggtttattcttcagtccaaggaagcaattcacagtcagctgttagagaagcagaaaatag

SEQ ID NO: 419855 - DNA, 100 bp, Homo sapiens
tggcttgtcaggaactcgactcagacgtggataaagataatcccgcccgcagggccccggaccccggcttccaggagcgcttcttccagcagcgtctgga

SEQ ID NO: 419856 - DNA, 82 bp, Homo sapiens
ggaagtgaagaagctttctgagcaggctcagatccggaacctgaccgtgctgacccccgaaggggaggcagggctgagctgg

SEQ ID NO: 419857 - DNA, 88 bp, Homo sapiens
tctgaaactggagagttacagcctgtactacctgaaggagcttcagctgcccctgaagaaggtgagcgagtgctgtgctttcatgggc

SEQ ID NO: 419858 - DNA, 75 bp, Homo sapiens
agggcccagcaaagggaccaagtttccagccttaccctgtaggaattctagtgactatgttgccaccatcttgga

SEQ ID NO: 419859 - DNA, 75 bp, Homo sapiens
aaccactaatttatctagtactccttttggccatggtagtaaccaggccatccactgcagagcaatccttccttg

SEQ ID NO: 419860 - DNA, 100 bp, Homo sapiens
cgggagcgtccgggacgcggagcccggagctggggcgacgaggcgattgcgggggcctgggctaggaagaaatgttggctatttggcgatgagaggtggt

SEQ ID NO: 419861 - DNA, 101 bp, Homo sapiens
atatgtttcctctcacctgggttttcttagccctctacttttcaagacaccaagtgagaggccaaccaggttcgatacaagaggctgttttcctagcgtgg

SEQ ID NO: 419862 - DNA, 100 bp, Homo sapiens
gcacttcattggccacctacagaaacaaaatgtcaacaaattgatggatggaatcttgctctcttgctcagactggagtgcagtggcatgaccttggctc

SEQ ID NO: 419863 - DNA, 82 bp, Homo sapiens
tgcgagccgacaacgccttcatgctgctcacgcagatcattgagaagcagccaggccacattcggagcagggttttcaggga

SEQ ID NO: 419864 - DNA, 83 bp, Homo sapiens
aggggccgccgctcacagatgacaacaagaatgtggaggctgtggacccacgaggtcgaacattattgcatcttgctgtttcc

SEQ ID NO: 419865 - DNA, 74 bp, Homo sapiens
gtgaaatcgcgtggactgcaacacccagcagcgcgggtttggaaatcccttgtctccaggttgctgggattgac

SEQ ID NO: 419866 - DNA, 100 bp, Homo sapiens
ggatgggctgcctccaggtgacagcaatcagctggcctggtttgatactgacctgtaaatcatcctttagaaatgggacgtcggtcatcagatactgaag

SEQ ID NO: 419867 - DNA, 83 bp, Homo sapiens
tcccgagatcaccaagatgctgggcgccgagtggagcaagctgcagccaacggaaaagcagattggtgctgaagacatggacg

SEQ ID NO: 419868 - DNA, 96 bp, Homo sapiens
cttgcttgacctacaaggaatctgagggtgccctcaatgagcacatgaccagcttagcttctgtcctaaaggagtccttcaataatgttaaacagt

SEQ ID NO: 419869 - DNA, 75 bp, Homo sapiens
ggtgaacgagccacggcagagaggatgagagcgtggatccctggtgcgggttgtgggcgaacaggcgtcctgtgc

SEQ ID NO: 419870 - DNA, 140 bp, Homo sapiens
caagaaaggcaaggaaacatcttttgacaagatgtcacctgaaagtggtcacagccgcatctttgaaggtgctggagaatctggtaaaagcaccattgtgaagcagatgaggatcctgcatgttaatgggtttaatggag

SEQ ID NO: 419871 - DNA, 82 bp, Homo sapiens
cgggagatcttgcgggaaaaggagagctcggctgttccagccaggaggagcccaaggtgggcatcaagaccatcaaggtgta

SEQ ID NO: 419872 - DNA, 100 bp, Homo sapiens
gtttaaatccctcatcacacgctgcgcttcaaccacacatgaattgcacagccctgagaatctgtctgacagcaatgcaagcttcctccgtgctgccaga

SEQ ID NO: 419873 - DNA, 100 bp, Homo sapiens
ggcaagtctgccttcctgcaggcctttctcggccgcggcctggggattttgcaagaacgaggctcaaggatgtgagggacacagtattgacagctgaaga

SEQ ID NO: 419874 - DNA, 98 bp, Homo sapiens
ggaacttctacccgacacttacatgccatggccttctacgttgtgaaaatggaaaccacccctactcctaatcccccgactacagaagaggagaaaac

SEQ ID NO: 419875 - DNA, 74 bp, Homo sapiens
cctgcgctgtgatgcctgcagagctgtggcttaccaggcccagagccatggctatctcctcttcctcctgcgaa

SEQ ID NO: 419876 - DNA, 96 bp, Homo sapiens
cggcgacccagacggggaaagcggaaggaatgtcgcgtgccagggctcttggagagggtgggctttgaagatgatgcctcctcatgccagactacc

SEQ ID NO: 419877 - DNA, 82 bp, Homo sapiens
caaaccctgaatttataactgagtagccaatctgaattctaaggacctctcatataccttaaaggattatgtttttaaagag

SEQ ID NO: 419878 - DNA, 104 bp, Homo sapiens
atggaaaccaccccgagcttggcgtgtgctaataaatgtgtcttctgttggcggattaagttgtcatcattctgggaagaaaaaaaaaacattaatgaagaggc

SEQ ID NO: 419879 - DNA, 88 bp, Homo sapiens
gccgattgatacctgtgtctcctacccaaggacagggggacagggctctgtctcgcacttcccaggaggagccattggatgaaagctc

SEQ ID NO: 419880 - DNA, 120 bp, Homo sapiens
tcctggtctttggcttctcgactcggtcctgtttcgacagcgaacatgtcgcggcctgtcagccacataaagaagatccctaatagtcatttctcaacaattatatagtcaactgatgta

SEQ ID NO: 419881 - DNA, 95 bp, Homo sapiens
tgtcattaaaaattaagcgtggcttttgaggaagatgtgacaactaccggagggtccaagttttctctccgaggcccgtttttctacacgagcaa

SEQ ID NO: 419882 - DNA, 99 bp, Homo sapiens
ctagtttggatgtggaggggaatagactccatctatccatatgaggcaaaatccatgtttggtgaccagagctgtatatattgatattctcttcctatt

SEQ ID NO: 419883 - DNA, 80 bp, Homo sapiens
gtggagctattgccaacagcatgtttaatggaacagcatatgccatatatgagctggctgtggcttcatttcccaagaag

SEQ ID NO: 419884 - DNA, 85 bp, Homo sapiens
cccgcggcaagatggcggcctgaacgcagctggcagcggcggaaaacaatggcgatgaccactcagaaggaggcctggtggagaa

SEQ ID NO: 419885 - DNA, 100 bp, Homo sapiens
aatcaagaagacccaggaccagatcagtaacatcatgtttcaggcatatggagacaaacagggaccactgcatggaatgttaatcaatactccatatgtg

SEQ ID NO: 419886 - DNA, 75 bp, Homo sapiens
ctctcagcccccaagctggttcccgctgtagcaaacgtccgcggcctctcagacggtctggaaaatcccgaagca

SEQ ID NO: 419887 - DNA, 75 bp, Homo sapiens
gggttcgaggccaatgatgggagaccaccgggatgggcaggatggctggctttgatggctcagcatgggatgagg

SEQ ID NO: 419888 - DNA, 75 bp, Homo sapiens
aaacaataggacggaaacgccgaggaacccggctgaggcggcagttgctgctgacacgccgaccgcctgctgctt

SEQ ID NO: 419889 - DNA, 100 bp, Homo sapiens
cgcagctcctcggcgcttcctcggtggcttccccgggtcgagcaaacaggtcccagagaactacttctatgtgccagacctgggccaggtgcctgagatt

SEQ ID NO: 419890 - DNA, 80 bp, Homo sapiens
taggatagaatgtgaaagcccaaacaatgacctcagcagattccgaggcttcctgacttccaatagtagtcagacattat

SEQ ID NO: 419891 - DNA, 76 bp, Homo sapiens
cttccttactttgtcttggtatactacatggcaaaatgggaaagtgagcaagaagaacccatcaggtgattgtcag

SEQ ID NO: 419892 - DNA, 75 bp, Homo sapiens
tatgatcccacatctggaatctggaatgaaatcttccaagtccaaggatgtatgggcggaagccatttccaatta

SEQ ID NO: 419893 - DNA, 50 bp, Homo sapiens
tgcaagtgtccttcgacgggaggaccgcagctgaatgcacagctagaagg

SEQ ID NO: 419894 - DNA, 89 bp, Homo sapiens
tgctctcaaattacctaaagagcctaaaggttgaagaaggcagactgcagccacttgcagcaggagatttatcagactcttcatggaag

SEQ ID NO: 419895 - DNA, 83 bp, Homo sapiens
cgccgagcgcaccgacatctgcctgctcaaaggcgggagcatccaatcaacttcgagagcgtaggccccacctatcgtgggtc

SEQ ID NO: 419896 - DNA, 83 bp, Homo sapiens
gggcgagtgacatctgggccggaccagctggtgctgcgcggcgcagcaccctcatcacatgtgtggattctgggattctcaga

SEQ ID NO: 419897 - DNA, 75 bp, Homo sapiens
ctttgtctatcttcttccttaggaaaccagagtcttttagtcctgctatacagctgcaccttgtacatcaagctc

SEQ ID NO: 419898 - DNA, 74 bp, Homo sapiens
tggctgccttatctttacacgctgcaggtggagagccctggcacgtaccagcaggacccatgggccatgacaga

SEQ ID NO: 419899 - DNA, 98 bp, Homo sapiens
gctccgtggatgaggctctgcggctggtccaggccttccagtacacagacgagcatggggaagatttctcgaatgctggcagccaaaaccgttttggc

SEQ ID NO: 419900 - DNA, 100 bp, Homo sapiens
tagcagagtacgatactcaggtcaaagatgccacttcaaatgaacaacaagagcttttctgtcagaagttgcagcagtgttgtatactgtttgatttcat

SEQ ID NO: 419901 - DNA, 75 bp, Homo sapiens
cggctctgcagttaacgggaccagctctgcggattatttctcaaactctgaggctgcggagttcacacattgaaa

SEQ ID NO: 419902 - DNA, 100 bp, Homo sapiens
gtctatgagaacaagacggacgtcatcctgatcttggaactgatttggagttccatggagtgatgagattttattttcaagataaagctgctggaaactt

SEQ ID NO: 419903 - DNA, 75 bp, Homo sapiens
caactatatgaaattcatggagctcagaaaattgctgatggagtgggtgccattattatccatgaagtttatgaa

SEQ ID NO: 419904 - DNA, 75 bp, Homo sapiens
cgactgcggaattttctcactggtatgcctggactgttgcccagtgtaagatctgtgcaagccatattggatgga

SEQ ID NO: 419905 - DNA, 82 bp, Homo sapiens
cagaagcgggcctcccgcctccagcaggacaatattcgcacccggctgaaggccaatgtgagggagttgatggaccgagctc

SEQ ID NO: 419906 - DNA, 100 bp, Homo sapiens
acatttgccctcagtggtggggttactgctgtttcggagaaacgaagtctcactgtgttgtccaggctggtctcaagctcctgggctcaagcaatacttc

SEQ ID NO: 419907 - DNA, 100 bp, Homo sapiens
gtaaagtcgagtatctggtgaagtggaaaggatggcccccaaagacacattcagctaacgtattttagcaggtggagtgaggttgaagattcctgtgaca

SEQ ID NO: 419908 - DNA, 100 bp, Homo sapiens
acgctgcggccaagcagaaagttgaacagaacgcggctcccagccacaccaagttcagcttacaagagcagtgattcccaggctttctcagcaatgtacc

SEQ ID NO: 419909 - DNA, 80 bp, Homo sapiens
agcacttggataaaatttatcaagaaagagccagccaggcggagagggagatgcaagtttccacggccactccagtgcca

SEQ ID NO: 419910 - DNA, 95 bp, Homo sapiens
taatgggtattgggcgtcactgtaataaggttgccaacttggcctgttccatctcaaataatgaagaaggtgtaaagcttgttcgaatgtctgca

SEQ ID NO: 419911 - DNA, 82 bp, Homo sapiens
gggatggcgtgcagcgcaaccacgagacggccttccaaggaggatacgaagcgttttcggcttcctgcccggagctgtgcag

SEQ ID NO: 419912 - DNA, 50 bp, Homo sapiens
ggagccgccgccgccatatcaggttttgagcaaaattttggactgtgaag

SEQ ID NO: 419913 - DNA, 100 bp, Homo sapiens
tccggacaccatggacaagttttggtggcacgcagcctggggactctgcctcgtgccgctgagcctggcgcagatcgtgccaacaatatgcccaagcagg

SEQ ID NO: 419914 - DNA, 98 bp, Homo sapiens
cctccgcagcgacaacatggaggccgtgaagaccttcaatagcgagatgaacacaatgacgtacagaagaaaacctttaccaaatggataaatgctcg

SEQ ID NO: 419915 - DNA, 80 bp, Homo sapiens
acctttgatctaagggttcagcctttcaatgtgacacaaggaaagtattctacagaggaatggcttcttgtgggaaccaa

SEQ ID NO: 419916 - DNA, 74 bp, Homo sapiens
gtaggaatggagagggaccggatctcaggaggaaagcagaagtcatgcttggacatggattgttttcattgcta

SEQ ID NO: 419917 - DNA, 90 bp, Homo sapiens
cagattcagaaggagcaggattaccaaagggaccacatggtgacaatgcatgatgtgcttgatgctcagtggctgtatgataaccacaag

SEQ ID NO: 419918 - DNA, 98 bp, Homo sapiens
cgtcgttgctgccgggattttggaggccggggccgcgctgagggcgcccagctgagtcaaggaaacttttcttttgagctactgacagcttaactcct

SEQ ID NO: 419919 - DNA, 102 bp, Homo sapiens
tcttgcggcaacgcccccgggacatgcatcgtcccctggactctctcaaacaagcttaccattgttcagaagcaaacagtttgcagtaaaaagaagatttag

SEQ ID NO: 419920 - DNA, 74 bp, Homo sapiens
ggactatttgtagtcatgtacagaacatgatcaagggtgttacactgggcgtgatggagcctactaccagctgt

SEQ ID NO: 419921 - DNA, 75 bp, Homo sapiens
tgctgctgcccgcgtccgaggctcgcgggcggcgggcccggttcgtgccctcgtgaggctggcatgcaggatggc

SEQ ID NO: 419922 - DNA, 76 bp, Homo sapiens
cggcaccatgtcagacaaggaaattactcatgatgtcaaagtaccttctccaggcaaattccgttcccctgcagca

SEQ ID NO: 419923 - DNA, 100 bp, Homo sapiens
gttcctgggaaggtggagccaccagcctctccttgctcttcaagaagcccagccccttcatcttcatcagccagcgtccctccccagagacccaagacac

SEQ ID NO: 419924 - DNA, 100 bp, Homo sapiens
ttaaacatacagtcgcctctgacaagccagctcatgatggagcagtccaagaagtcctccctcatggtggcccgcagtattctcaacaacaagctcatca

SEQ ID NO: 419925 - DNA, 90 bp, Homo sapiens
gaaaccccgtaaagtggttggttgcagttgtgtagtagttaaggagctttggttcggagacaggcaaaggagccatgtgtggagagcctg

SEQ ID NO: 419926 - DNA, 100 bp, Homo sapiens
cttaaacatctggaagctcaaggtactagccggaagtcggtgcagcccacctcagaggagcgcatccccaagaccatcgagatcaagtccatcacgcacg

SEQ ID NO: 419927 - DNA, 90 bp, Homo sapiens
ggaggagccaggtccctgtctgagccaactccaaccgggaagactttgacccagcacctgtaaagagcaaatttgattctcttgactttg

SEQ ID NO: 419928 - DNA, 83 bp, Homo sapiens
caaaccgaggcttctgggcgccgcggatacacattctagatatgagctgtggcgcggggccttccaggagtctgagctatgag

SEQ ID NO: 419929 - DNA, 89 bp, Homo sapiens
cactgatcgtttctgcagctgcagattctgctgttcgactctggtctaaaaagggtccagaagattttgaagacattttggctacaata

SEQ ID NO: 419930 - DNA, 51 bp, Homo sapiens
gagttgattgtgatcagcactcaactccgatccaatatccgagaaattgag

SEQ ID NO: 419931 - DNA, 83 bp, Homo sapiens
tgcggcggccggcgggaccataagggcttaactcatatatttaacccccctccaaaaaaactgaaggcagaagctagtctaat

SEQ ID NO: 419932 - DNA, 100 bp, Homo sapiens
gtcacatcaggtgtttttagtgtcactgagctagtaagagtgtcacagaagagaagcccatctggaagtgcctttggaagtcaagaaaatttgaggtgga

SEQ ID NO: 419933 - DNA, 100 bp, Homo sapiens
ggggacccttccgtatctgcctaggcattttgctgtctcctcctaatacgatggagatggacacatggatcatttactgccaggctgtgaagataaaaat

SEQ ID NO: 419934 - DNA, 97 bp, Homo sapiens
ccgcctggggatgaggcctggtcttgtggaactgaacttagctcgacggggctgaccgctctggcccagggtggcacattcaggaccccgcgagcca

SEQ ID NO: 419935 - DNA, 75 bp, Homo sapiens
cgcccaccgccggcggtgatgcggctgtgaagccctagtcggcgccaagcccatctttgtgtgcttgcatccaac

SEQ ID NO: 419936 - DNA, 97 bp, Homo sapiens
gtcttcccgcgtccgccgattcctcctccttggtcgccgcgtccttggctggcgtatgtgaagttcatttccaatccgccctccatggtggcagcgg

SEQ ID NO: 419937 - DNA, 75 bp, Homo sapiens
caaagacgttttagtgctagcatgctctcttttaaaagagatttccatggagaatgattatctgggacctcgaag

SEQ ID NO: 419938 - DNA, 101 bp, Homo sapiens
agggctaaatccaaatgctgattcagactttagacaaaggtgtatcgcattaagttcaaggagagctttgctgagatgaacaggggctcgaacgagtggaa

SEQ ID NO: 419939 - DNA, 88 bp, Homo sapiens
gaaggggttcctggtcatacaccagtactaccaaggacagcttttttcctgcaagtctggagggcagtatgagctttttgctgtgatt

SEQ ID NO: 419940 - DNA, 100 bp, Homo sapiens
atttagccggagtgagaagcaagaaggccctggacacagcaatatctctgggctttcacaggacgccaggaaagcatgtgcagatgcaactctctctcag

SEQ ID NO: 419941 - DNA, 87 bp, Homo sapiens
ctattggatcagctcagcaggggcatttgcacgccaaaggcaaagaagaaaaaatgtccaaatcattaaagaactacattactatta

SEQ ID NO: 419942 - DNA, 75 bp, Homo sapiens
aggttctctgcagatgcagtaccagcagagcatgcagctctggtagctgaagaacatctcacagtggacgccagg

SEQ ID NO: 419943 - DNA, 98 bp, Homo sapiens
ctgcagccccagtgaccttgaacgattccgctctgcggcgggtgtccctaaactagcagtttagggtgtcagggaccattgcaatttagagatgtggc

SEQ ID NO: 419944 - DNA, 75 bp, Homo sapiens
atatgtatgccaaagcagcagccttctcgacagccttttactgtgaacaggaattacatgaacgacagccttcgc

SEQ ID NO: 419945 - DNA, 100 bp, Homo sapiens
ccggagacaagtcctgaatctgtgcccataatctctgtcagtctgctgtttgcaggcgtcattgctgctagaatcgatgaacgactttcgaagtaaaatg

SEQ ID NO: 419946 - DNA, 95 bp, Homo sapiens
cccgagccgattcaagaaggacaaagagatcatagccgagtatgaaagtcaagtcaaaggtactaggttttgacaagcttgcatcatgcgtgagt

SEQ ID NO: 419947 - DNA, 134 bp, Homo sapiens
cgcactggcccgaggcgtctcggggatcttcgtgtggactgccctggtgctcacctgccaccagacttctagattgggaaacgaagctctgctgggcgtggtggctcacacctgtgagtggctcccagcacttt

SEQ ID NO: 419948 - DNA, 106 bp, Homo sapiens
aaacagcccgcccgaccccgtcccgaccctggccgccccgagcggagcctggaggtcaaaatgcagatcttcgtgaaaacccttaccggcaagaccatcacccttg

SEQ ID NO: 419949 - DNA, 50 bp, Homo sapiens
atgagatattctgctgagtggaaggccagtctatccatatggggatgggg

SEQ ID NO: 419950 - DNA, 51 bp, Homo sapiens
caccatggttctggtctcctggatcatgtgagacagagtttcaccatgttg

SEQ ID NO: 419951 - DNA, 75 bp, Homo sapiens
agaaggtctctggagacatcttcagcaggagccaaaaacctgtatatcatctccgtgaaggggatcaagggacgg

SEQ ID NO: 419952 - DNA, 107 bp, Homo sapiens
ctggagcctcagttggaagcagccgatccagcctgcggagcctgtggggcaggacctgctgaagttcccatgatgtcacccaatggatccattcctcccattcatgt

SEQ ID NO: 419953 - DNA, 100 bp, Homo sapiens
cgggaggaacgctcactgtcagcgcctggaaacttgctcacgtccgcgggagagctgtggggcttggtgagtgtttcgtggcctctcgggttggtcagca

SEQ ID NO: 419954 - DNA, 75 bp, Homo sapiens
agatggagatgaacctctaacacagtggaaaggaaccgttctggatcagtctacaaataagaaacctcgaaaatc

SEQ ID NO: 419955 - DNA, 100 bp, Homo sapiens
cagagggctgtgtacaaggacctggtgctcttgctccagaaagactcactgctcacagctgcccagctgaaagccaagggtgaacgtgggctgcgggcca

SEQ ID NO: 419956 - DNA, 51 bp, Homo sapiens
gaggaaagaaggaatatctcattgcagaaagctgacttcatgagaccgagg

SEQ ID NO: 419957 - DNA, 75 bp, Homo sapiens
gcactacaacaggaaaatcatattatagatggagtaaagggcatccgtttccgaggctttagtatccctgaatgc

SEQ ID NO: 419958 - DNA, 75 bp, Homo sapiens
tgcaagcagctgtccgagtcccaggtcaagagcctctgcgagaaggtgattactggtggtcactatgatgtagat

SEQ ID NO: 419959 - DNA, 88 bp, Homo sapiens
tcttcgcaatatgactatgacaaatccttccggttcccgaccttcaacacctaaaagtgattcagaattggtcagcaagtccacggaa

SEQ ID NO: 419960 - DNA, 80 bp, Homo sapiens
agcatttcatccctcgtcgaaaggattggattggcatctttagacggagtttaagagagctgtgaaagtagcaacaggac

SEQ ID NO: 419961 - DNA, 100 bp, Homo sapiens
cgaggagggcacattccttttcacctcagagtcggtcggggaaggccacccaggctcctcgtccatccaccggtccccacaagttgagagagtgtctccc

SEQ ID NO: 419962 - DNA, 106 bp, Homo sapiens
gcgcgacgtgcggctcgcagaacggcgagtagcggagcgggacccgctgtgctgactccagcacagatcaagtcaatttgtcaggcaattctggactctgggaagc

SEQ ID NO: 419963 - DNA, 74 bp, Homo sapiens
tcctgcatgtatgttcgctgcgtgcctggtgccaggtacatccagacactgaaggaccacaggccccggatggt

SEQ ID NO: 419964 - DNA, 101 bp, Homo sapiens
gacgctccgtggatgaggctctgcggctggtccaggccttccagtacacagacgagcatggggaaggagcccaggatgtgcgagttcaagtgctacccgag

SEQ ID NO: 419965 - DNA, 100 bp, Homo sapiens
cgcaaggaggaggagacgctgctgcggttgaaggcagccctgcacgaccagctgaaccgcctcaagatacatactgccatgaaagaaagctcacctttat

SEQ ID NO: 419966 - DNA, 75 bp, Homo sapiens
attccaagtaactcttatttggttaatgactccagagagtaagatcagattcgtccacaaagagatgggcataat

SEQ ID NO: 419967 - DNA, 100 bp, Homo sapiens
tttgcttctgaggaagctggaagctgcagccacaatgtgcctttgcaggggagcctgagagccacaggttgggacaaacattcctatggttaccatggtg

SEQ ID NO: 419968 - DNA, 100 bp, Homo sapiens
caggggccaccccgtgggcggcgggggcacagacactatctggacgttggtggttggctatgtgttgactgtttcattcaagtggaatgcaagcactgaa

SEQ ID NO: 419969 - DNA, 100 bp, Homo sapiens
ctatgagagcggacgggccatacccaataaccaggtgcttggcaaaatcgagcgggccattgggggggccctcagcctcttggccttgaacgggctgttc

SEQ ID NO: 419970 - DNA, 50 bp, Homo sapiens
atcatccgctatgcaattggggcccaccgtttccatggtcgaaggtcagg

SEQ ID NO: 419971 - DNA, 101 bp, Homo sapiens
acgacgtgaaggagcagatttacaaactggccaagaagggccttactccttcacagatcggtgctcgcatttggcttttcgttggtttcatgttggccttt

SEQ ID NO: 419972 - DNA, 95 bp, Homo sapiens
tttgaaccaaattatgctgcaaattgccggtggtggtgtgcacattgagccccggtatagacagttcccccagctgaccagatcccaggtgttcc

SEQ ID NO: 419973 - DNA, 100 bp, Homo sapiens
ctggagggcttcaacatggccaaggtgctggcgtccctcaggcccccgggctggcgactacacctaccgtgagggccttgagcacaagtgcaagcgggac

SEQ ID NO: 419974 - DNA, 50 bp, Homo sapiens
aacagtctacaagggaaagtggcatgggggcgccatatccaacatgtaca

SEQ ID NO: 419975 - DNA, 100 bp, Homo sapiens
ggtgactgtctctccagatggatccctctgtgcttctggaggcaagctactctctgcaggtgaggacacctttgtgcatatctggaagctgagcagaaac

SEQ ID NO: 419976 - DNA, 75 bp, Homo sapiens
ctcggggcgtctgggcagcctacgctttccgatggggcaccctggcatgcattatgccccaatgggaatgcaccc

SEQ ID NO: 419977 - DNA, 96 bp, Homo sapiens
gggactgttggtctcggccctgcggaaggcaaatgaagaggattcttccagttctctagtgaaggatcacctttttcagcaagagacagttgttac

SEQ ID NO: 419978 - DNA, 100 bp, Homo sapiens
cgaactctgcaaagcctccagaggacataccacctccaggatcaggatgcagagccttaaattggaatgtgagaaactggcaagtgaaaagacagaaatg

SEQ ID NO: 419979 - DNA, 100 bp, Homo sapiens
ccaaaatggcggcggcggcggtatctggtgcgcttggccgggcgggctggaggctcctgcagctgcgatgcctgcccggaaacatgccctgaactgtcac

SEQ ID NO: 419980 - DNA, 90 bp, Homo sapiens
cccacttgatcaagacttttgggaaaatgaggactgatgtggtagcaaaagatgtgattgaagagcatggtccttcagaaaaggcaataa

SEQ ID NO: 419981 - DNA, 100 bp, Homo sapiens
gcttccctgtatgtgatgatgaccgtcaccaactggttcaagcatttgcatcaagtgtgggcttggcatctacggagcccagcaggcgtgccaggcaatg

SEQ ID NO: 419982 - DNA, 98 bp, Homo sapiens
ttgtggaactggaaaagcaactcatgcagaggaacaaggagctggatgtcgttcggctgactcctgagttctcacaacgcttgaccaataagattcgg

SEQ ID NO: 419983 - DNA, 51 bp, Homo sapiens
gtgggaggctttgatgggagtacaggataagccagagacatgggaaaacca

SEQ ID NO: 419984 - DNA, 100 bp, Homo sapiens
tgtacaaccgtcttcagatctctgacaatacttgtatggagtttattttgcacatttgcaagtatatgagtgtaatcttgggactggaactgcaaaggct

SEQ ID NO: 419985 - DNA, 100 bp, Homo sapiens
ctcaccatcctcaacgaccggggcgtcggcatgctcacccgcctctacaacatcaagaaggaactctccggagtcctttctgtattgttgtgattttgct

SEQ ID NO: 419986 - DNA, 110 bp, Homo sapiens
tttgaaactatggctaaattacatattccagtaatggtggatgaagttgttcattgtttgtcaccacaaaaaggacagttgctctaggtcgtaaccagcctttgaaaaag

SEQ ID NO: 419987 - DNA, 95 bp, Homo sapiens
cctctgtttagaatacctacatgctggctcgtgatttcttagatgaatatatcttcttggctgtaggaagagttggctctacctctgaaaacatc

SEQ ID NO: 419988 - DNA, 74 bp, Homo sapiens
ttccgtgctgtcctacgaaagcctggtccacgccgtggccggagccgtgacattgggtttgcctatcacagatg

SEQ ID NO: 419989 - DNA, 100 bp, Homo sapiens
tccagaagtccagagctgaggactgcctgtttgcaggttcaaaatggaaagtatttattgaccaaattaacaggtctttggagaattacgaaccatgttc

SEQ ID NO: 419990 - DNA, 75 bp, Homo sapiens
aagatgttgaagtgactaaggcactagaaagtttgggatttggctcttacatcagtgaagtaaaagaagtcttgc

SEQ ID NO: 419991 - DNA, 100 bp, Homo sapiens
caatcatggtgcagaaataccagtccccagtgagggtgtacaaatacccctttgaattaattatggctgaactttatattgctgttggaatatctggagc

SEQ ID NO: 419992 - DNA, 83 bp, Homo sapiens
gagctgacccgctgcaaggagaagctgcacgacgtggacttctacaaggcccgcatggagagtgagcctcgcagctggtccct

SEQ ID NO: 419993 - DNA, 75 bp, Homo sapiens
tggttgagatacttggagaagctcttgttggcaaccagcagggacagtcattttgtttactcattcagccctgtt

SEQ ID NO: 419994 - DNA, 100 bp, Homo sapiens
tcagcaacatctgagaacaatgaatcatcaaagtcaggactctagaaatggagaaggtagaggagatgccacataaaccacagaaagatgaagatctgac

SEQ ID NO: 419995 - DNA, 75 bp, Homo sapiens
gatttttgatgatgaccttgaagatgatgcccttgatgctgatgagaaaggtaaccaaggagcagtgaacagcag

SEQ ID NO: 419996 - DNA, 90 bp, Homo sapiens
gcgcttccccacgtcgcttgggggccacggcgcggacgccatgggggggccctcagcctcttggccttgaacgggctgttcatcttgatt

SEQ ID NO: 419997 - DNA, 100 bp, Homo sapiens
ctccaggaccaaaagaggaagatagtcttgggacccttgcatggtgtttcaaagggtggtgaagaactaaggtgaaagaacttgtcctggacaacagtcg

SEQ ID NO: 419998 - DNA, 74 bp, Homo sapiens
tgcctgggcttcatcgccttggcctactccctcaaagctcagccgcccagtgggctcaggcccagagcccagag

SEQ ID NO: 419999 - DNA, 101 bp, Homo sapiens
gggacctcgaatgtgggaccccagcccctctccagctcgaaatcggaagatcagttttcctgccatccaggctgctccctccttcagcaactcattcccac

SEQ ID NO: 420000 - DNA, 75 bp, Homo sapiens
ccaaccatgatgctgccatctttccaggaggctttggagcggctaaaaacctgtttcactgaagaaacttcttag

SEQ ID NO: 420001 - DNA, 100 bp, Homo sapiens
tctgcccggccaagaggcaaaggggaggttacgcagcaaaccatccagaagacatttatgcagtgtgtgattctttctaaaacaactccctggaagagag

SEQ ID NO: 420002 - DNA, 74 bp, Homo sapiens
attcgttacagccagagattggaatgggtaccacagaccatgtcatcgtcctggcgtccacgaaccgagctgac

SEQ ID NO: 420003 - DNA, 95 bp, Homo sapiens
ggagctgggcgacgagctgaccctgggagacatcgacgaacatccagtcatggataaaaatgagctggttcagaaggccaaactggccgagcagg

SEQ ID NO: 420004 - DNA, 90 bp, Homo sapiens
cagagatctacaaccttggagcccagagccacgtcaaattctggagaccagaaggccaaaatcaaaagtatgggcaggcttgatttcttt

SEQ ID NO: 420005 - DNA, 80 bp, Homo sapiens
gaaaaggcaacatcctgtcacaggccatgctctggcaaaaacggggggccctcagcctcttggccttgaacgggctgttc

SEQ ID NO: 420006 - DNA, 97 bp, Homo sapiens
cccagcttgatttccaatgggaaaaagttaacaaaatgtacaaggaccgacaaggtgagaaagatcagtctaaagaaaaggagaagaaagtgaaaaa

SEQ ID NO: 420007 - DNA, 75 bp, Homo sapiens
tgacatcattgcaatcaagtcacctgacacatttgtgagaactatttatgcagagatggggacttgcttggggtc

SEQ ID NO: 420008 - DNA, 50 bp, Homo sapiens
tttgcagccctttacagcactcacaaagaggcctgatggcgtcggactat

SEQ ID NO: 420009 - DNA, 83 bp, Homo sapiens
cccaggcgactgcctcatcttcaagagacaagaggagcagcagcggcaccgcccctcaccctggagggtcctgtacaatctca

SEQ ID NO: 420010 - DNA, 115 bp, Homo sapiens
aagcgacaagtggaggcgccgctctagcggccgggactctgaactatggcggttatttggaaatagcggtgcttgcagcgcttgcggacagtcgattcctgcgagtgaactcgtc

SEQ ID NO: 420011 - DNA, 100 bp, Homo sapiens
caggttttggaaaatgacgatggtgagacaggtgctctagttcacagctataggggaacaggtggaatatttgaagtttgctggaatgcagcaggagaca

SEQ ID NO: 420012 - DNA, 100 bp, Homo sapiens
cagcgggcggacggccggcgggggcggcgtgcggcctagcgtctcagaaatctcccaagcctaagaagaagaagcacaggaaggagaaggaggagcggac

SEQ ID NO: 420013 - DNA, 75 bp, Homo sapiens
tctcctggcggcgctgcggatccagggggtcggctgccaggtacaggtctgttggagtttgctggaggtccactc

SEQ ID NO: 420014 - DNA, 83 bp, Homo sapiens
ggaggaatccgagaagagcagagcggagggagccccagacacgggaacggcaggagcagctgatgggatatcggaagagaggg

SEQ ID NO: 420015 - DNA, 75 bp, Homo sapiens
atatcattatgctgacctctgacgagctgcaatttggttatgaggtgtaatggataggtaacagagaagacctcg

SEQ ID NO: 420016 - DNA, 100 bp, Homo sapiens
attttcatgaaacaaccccaaataaaggaagtggaaccacttcaggccccttcacagatgtagtcactacaaatcttaaattgcgaaatccatcggatag

SEQ ID NO: 420017 - DNA, 97 bp, Homo sapiens
accttttaccatgaatagttctactccttctacaggtgtgtatgatatctcagatctcagtgaagatatcttgctgtccacgccttaaaattcttcg

SEQ ID NO: 420018 - DNA, 51 bp, Homo sapiens
aaagaaaagaacgtgcctcttccagtggggggactgcaccgttttccccca

SEQ ID NO: 420019 - DNA, 82 bp, Homo sapiens
gcagtggcgccgagcagcccctcccgcagccggtgtgacctgtcccttcagtcgagtaatcctgcctgtgtctgtagatgag

SEQ ID NO: 420020 - DNA, 130 bp, Homo sapiens
acatcttttgacaagatgtcacctgaaagtggtcacagccgcatctttgaaggtaagaagagttcctgggtcaagtggtcaccttcataaaaccgaagacggggactgggagtggagtgacgacgagatg

SEQ ID NO: 420021 - DNA, 100 bp, Homo sapiens
aaaagacctgtggctattaagatagagttgtctgctggttctcagcttgaagaagattctgcagtccttattgatcctttttcttggcgttaccattttt

SEQ ID NO: 420022 - DNA, 100 bp, Homo sapiens
cccggagcggtccccggcccgggaaacttggaccgagaccaggcctccggtgtggctgtctctgatggtgtcatcaaggtgttcaacgacatgaaggtgc

SEQ ID NO: 420023 - DNA, 100 bp, Homo sapiens
gggatctctcagggaaggtcaacgtcactgaaacgagatttcaaggtgtgggcccatcgctggatggatctgtcagaacacggctttgggctggccctgc

SEQ ID NO: 420024 - DNA, 76 bp, Homo sapiens
gcaaagaacagaccgttcagtatatactaactatggtggatgatatgctgcagggattaaagcctgtggtttccac

SEQ ID NO: 420025 - DNA, 90 bp, Homo sapiens
ggggaggagggccactgggctcccagcagcccaggttcagcccaaagagattacttggagcccctcgcgagtgtttccgcctgttcgagc

SEQ ID NO: 420026 - DNA, 98 bp, Homo sapiens
aacccaagcagtggcgaagggaatcgcaaggctcttccctgaccattttctactgtccctgcgcgagaaatcgagctatagcagattatcttcgttca

SEQ ID NO: 420027 - DNA, 50 bp, Homo sapiens
cagaatcatatgacatagcaatgaggaaaacgggccttactatacatcat

SEQ ID NO: 420028 - DNA, 75 bp, Homo sapiens
atgaagacgctggagatccagggcaagcgggtcaaggaatctgaattagagcctatgaatggtgagataatggac

SEQ ID NO: 420029 - DNA, 49 bp, Homo sapiens
cacagggctactgttttccaatcctcagacacagaatgttcagcttaac

SEQ ID NO: 420030 - DNA, 100 bp, Homo sapiens
acagacggagtgctgtgccactacgtagagaaatcgacactcttaatgaacgtttagctgctgaaggacaagcgattgatggagcagagctgagtaaggg

SEQ ID NO: 420031 - DNA, 83 bp, Homo sapiens
ggaaacaagacagttctgtctgcagaagcccattatggctgtaactggagatgacacaggtttacaaaggaggaaaacgactt

SEQ ID NO: 420032 - DNA, 90 bp, Homo sapiens
gactttgttgaatgtgagccgagtacaggtaggtcagacaagttggatggcttgaggactggtactaaaaggaaacgtgactgggaggcc

SEQ ID NO: 420033 - DNA, 100 bp, Homo sapiens
aaaatcgcttggttaaaacctgacacttttaacaggttttccagcttgcagctcatctggtgtactggggcaaggccatcatcatctacccgctgtgtga

SEQ ID NO: 420034 - DNA, 75 bp, Homo sapiens
gcgcagctccggccgcctggctccccatactagtcgccgatcggtgttgctggaagtcggtccaggagctttttg

SEQ ID NO: 420035 - DNA, 100 bp, Homo sapiens
ggcggctgctgcagcccgggcggctgccgagaaggagggaggggaaacacaaagccggctacgcgctgcgagcactttcatttggacccgtggataccca

SEQ ID NO: 420036 - DNA, 100 bp, Homo sapiens
catgaaggaggacagtgaaaaagttccgagcttgttaactgattatattctgaaaggatcccatggtccattattgcctttaccaagtcgttacagaatg

SEQ ID NO: 420037 - DNA, 101 bp, Homo sapiens
ccaaagaatgccacagaatcaggggaggcatgcttcaggaatagctattcagtcagacagaaccacttatcacgttttgcagtatctcctgaggaagtcag

SEQ ID NO: 420038 - DNA, 83 bp, Homo sapiens
ttgttccccagagtttggggaccccttgtcttgacagtatcatgcacaggaactgtggctgcaccatctgtcttcatcttccc

SEQ ID NO: 420039 - DNA, 100 bp, Homo sapiens
atccgggtgcggctccaccccttccacgtcatccgcatcaacaagatgttgtcctgtgctggggctgacaggatggatgtggagaaaggcaagattgaag

SEQ ID NO: 420040 - DNA, 100 bp, Homo sapiens
caaacttggggaaaatgtttgcggtccacttgatggcattttacttcagcaagctgaaggaggaccagatcaagaaggctaaaataaatgaagctgtaga

SEQ ID NO: 420041 - DNA, 100 bp, Homo sapiens
ccagacactcgatgccaagaggactcagactgtggaacttccgtgccccccaccctcaccaaggtggcagagatgcatggcgagctgattgagttcaacg

SEQ ID NO: 420042 - DNA, 75 bp, Homo sapiens
cgggaccccgtggaaacggaggaactacaaccagggagtcgtggggtgtccttcttcacatcattatggaatcac

SEQ ID NO: 420043 - DNA, 100 bp, Homo sapiens
gagattgtgaagaagaatttcgatctccgccctggggtcattgtcagcctgcctagggtagttaaaagacgagtgaatgctctcaaaaacctgcaagtta

SEQ ID NO: 420044 - DNA, 90 bp, Homo sapiens
cgcgacctccggaggccggcgtgacaggctctgtcactaaaataggctcatgcacaattagttcgagaagttgatgtggagaaggtgtct

SEQ ID NO: 420045 - DNA, 75 bp, Homo sapiens
attcgggaactgactgctgtagttcagaagaggtgaatcaacggaatgtaccaggtattgacagtgcatacctgg

SEQ ID NO: 420046 - DNA, 100 bp, Homo sapiens
ttctcctctgcgcgccggggcctcgaggctttttttctccagccgagaggacgcggctgtgatatacgaaggatcgaggccatcaagctacagatggtct

SEQ ID NO: 420047 - DNA, 90 bp, Homo sapiens
cggcagagcagctctcccacagcgtggcgtgacaacactgcagctgaaggaggagttgctggatggagaggattataatttccttcaagg

SEQ ID NO: 420048 - DNA, 48 bp, Homo sapiens
gtgcctcatgatcgcttcaacaagcatacagtgaagttgttctctgaa

SEQ ID NO: 420049 - DNA, 82 bp, Homo sapiens
acgtgctgaacaagagcaacgaggattccagttctttgatgaaagtctctattccacccatcaagtctgtgtctgataacac

SEQ ID NO: 420050 - DNA, 74 bp, Homo sapiens
gtggtcgcgtctcggaaaccggtagcgcttgcagcatgttgttgcgaagctctttggtgaataatagaactcag

SEQ ID NO: 420051 - DNA, 75 bp, Homo sapiens
gaacgaggaattccgccccttcattcgaaggctcccagagtttaaattttggtacatgtcccagagcaagcacac

SEQ ID NO: 420052 - DNA, 82 bp, Homo sapiens
aaatggagcccttcaccaatgctgatcttgcatctttaatggataaaacatttgagagaaagttgcctgttagttctttaac

SEQ ID NO: 420053 - DNA, 82 bp, Homo sapiens
tctgcttactcacttgtagatccagagaaagccaaagctcatgtttataactactgtactagtgttcaccagtcaaaccaag

SEQ ID NO: 420054 - DNA, 96 bp, Homo sapiens
aatttttgactggagactatagtaggactgcctccgggcctgccaggagcagatcgaagccctgctggagtcaagcctgcgccaggcccagcagaa

SEQ ID NO: 420055 - DNA, 90 bp, Homo sapiens
gagaccgcctctgctcccgcctgggggtaaatgggaagttggtagctctgaaggtgatcaggctgcaggaagaagaagggacacctttca

SEQ ID NO: 420056 - DNA, 100 bp, Homo sapiens
ctacaacatccctgccttcttcctttgcaaaactgcagttttgacagcatggcctagcaatcctggttgtctctttctagaatgtttgatgggaaattgc

SEQ ID NO: 420057 - DNA, 100 bp, Homo sapiens
ctttaccaagcaaggtcctatgaagggcatttccggagagttcttttgaagtcacttcagaaggatctacatgaggaaatgaactacatcactgcaataa

SEQ ID NO: 420058 - DNA, 83 bp, Homo sapiens
cttccggagtcagggcgctgagggagcgttgacagggaagcagccggatggggactcgggcaagggtgccgaagatagacaag

SEQ ID NO: 420059 - DNA, 103 bp, Homo sapiens
gcggcgcggccggcctcttcgccaagcaggtgcagaagaagtttagcagggcccaggagaagcatgatggaagtggttcattgcatgatattcaactgtcatt

SEQ ID NO: 420060 - DNA, 75 bp, Homo sapiens
gaaaatctcaggaatctggtctcattgggtaagaatgattgatgttggctgatattggagtgctcattcacatga

SEQ ID NO: 420061 - DNA, 100 bp, Homo sapiens
tgttagtgctcaagagcctcattatctaccacccgagatgccccaagttttctggatatgccgcagaaggatccgtgccagaagcaagcctgtgagatac

SEQ ID NO: 420062 - DNA, 100 bp, Homo sapiens
gtacctttgtcatttggaagaagcgaagagttatgtcacgcatctgatgaagcgaattcagagaggcccagtaagaggtatctccatcaagctgcaggag

SEQ ID NO: 420063 - DNA, 100 bp, Homo sapiens
ctgggttctggactttgggcgtcccattgccatgatggcccactgcgtgaccttggttcagctgtccatttcctgtgaccatctcattgacaaggacatc

SEQ ID NO: 420064 - DNA, 75 bp, Homo sapiens
cctccctccgccatggatcccagcaactggagcagcttcatcttccagcatcagcatcactacctcatgctaccc

SEQ ID NO: 420065 - DNA, 83 bp, Homo sapiens
agaaggacatgcaaaacttgcagattttggggtagcaggtcaacttacaggacactttgtgagaaatttaggtgatgttggag

SEQ ID NO: 420066 - DNA, 96 bp, Homo sapiens
cctggagaaccaggaccttccaccaatattcctgaaaatggaagctgaatatggtgggcatgatcagatagatttgtatgacgatgtcatatctcc

SEQ ID NO: 420067 - DNA, 98 bp, Homo sapiens
tccacaaggcttgctgcccaatctttgccaacagcgggaagagaggcagagcacttgtcctccccttggggagaatcctcaccagaagagctccgctt

SEQ ID NO: 420068 - DNA, 75 bp, Homo sapiens
ctgagagaaatcaatgacgtgtttgaaggaagacgaggcagacctgttatcctaaactaggtgagtcagcttttg

SEQ ID NO: 420069 - DNA, 100 bp, Homo sapiens
cgctcaggtgctgcaggcacagcccgagaaaccgcagcactacacttacttcagacttttagaagttctagactcatggatgaatttaaaattggagaat

SEQ ID NO: 420070 - DNA, 115 bp, Homo sapiens
acttcctggtgaaggtgggcacggtcacaatggggcccagtgcccggggcatctctgtggaggatacccaaagcagaggactgcggcagctcgaaatgggtttccgcccaagccg

SEQ ID NO: 420071 - DNA, 100 bp, Homo sapiens
cttcaagctaaaatgatgactaatttggttatggccaaggaccgcttacaacttctagagcatgaataatctttcatttagtgagctatgttgcctcttc

SEQ ID NO: 420072 - DNA, 101 bp, Homo sapiens
gacccgaagtaccgacccgagttatgcccaccctccaactttgcgacggaaatgtgtcatcgaaagccagggctctgatacttgtgctcaatgtgcccatt

SEQ ID NO: 420073 - DNA, 90 bp, Homo sapiens
gaaggtgcgagaagaagtcagaaatctacagttactcacacaaggtgcagtagacattgttgcaatcatgatcggcaatctgaaaggcac

SEQ ID NO: 420074 - DNA, 100 bp, Homo sapiens
tactggcataattactcatcatgatctcttcacccgcaccatgatcgttatgaatgatcagctggtcctatagtacccctcctcaggaatgtctccccag

SEQ ID NO: 420075 - DNA, 98 bp, Homo sapiens
cgtcaccgccgcggctccggccctggccccgatggctctgtgcaacggagactccaaggtaaaaatgtctccatcgtatcatcagtccaaaggggatc

SEQ ID NO: 420076 - DNA, 82 bp, Homo sapiens
agaaacatatctattatatcacagcagaacaggataattcagacaacaacaccatctttgtgcaaggcctgggtgagaatgt

SEQ ID NO: 420077 - DNA, 100 bp, Homo sapiens
gcaaaagtcatggcaacttctggatgtgcagcaatcagatttatcattcggactttgctaccaggacttgctggcccctctggggagatggttaaatcca

SEQ ID NO: 420078 - DNA, 100 bp, Homo sapiens
ctttgaacaatacaaaggatgggtggtcttcgagggatagcacgaggtggtctgacaggactaacacttaccagcctctatgcactatataataactggg

SEQ ID NO: 420079 - DNA, 101 bp, Homo sapiens
gcggccccgccgagagccggaggcaatggatgaacagagcgtggagaactgccattggatgtccagaatcccctgtagttgataatgttgggaataagctc

SEQ ID NO: 420080 - DNA, 58 bp, Homo sapiens
gttcattggatcaaacatgtcacaagagtcggacaattttctgagtttaaccagtaat

SEQ ID NO: 420081 - DNA, 108 bp, Homo sapiens
gtctcaatatctgtcttcggtggactccttcggcagtccacccaccgccgccgcctcccaggctgtctgtccccagaccccagagcacgtccggcaccaccatgactg

SEQ ID NO: 420082 - DNA, 100 bp, Homo sapiens
agagaggacggagtcgtccaggaggcctcctccaagccggccaattccccccgcaccaaattgcatcgtttcccagtctcaggaggaggtctgcgatttg

SEQ ID NO: 420083 - DNA, 75 bp, Homo sapiens
gggctttcttcttcttcagcgagattcctgagccgttctatccctgaatcccgttctgcttccagaagtggaagt

SEQ ID NO: 420084 - DNA, 80 bp, Homo sapiens
caagtcttctaatctgtgaacatgcttaccctgaaagaagcagatcccagttcaaaagtagccataagaaggaaggattc

SEQ ID NO: 420085 - DNA, 100 bp, Homo sapiens
aggagtgtcaaaaatatggaccagtggtatctctacttgttccaaaggaaaatcctggcagaggacaagttaatagtcctaggatggatctgactcttgc

SEQ ID NO: 420086 - DNA, 100 bp, Homo sapiens
gaacccgagtgctgcttggcggcgaggcagaaggagaagacagcctgaagaagatgcagctgatggagcttgcgattctgaatggcacctacagagatgc

SEQ ID NO: 420087 - DNA, 95 bp, Homo sapiens
aaacatggaaatattcaagtgggatgtgtagactgttcaatgcaacaaggcaagatctgtgccaggccattcacagtgtttcgctggtgccctgg

SEQ ID NO: 420088 - DNA, 75 bp, Homo sapiens
cattcaactcaagcagatcaaagttgttttgagaataccaagctgctattttacacttgaagagggagcacaaag

SEQ ID NO: 420089 - DNA, 100 bp, Homo sapiens
acttctctgcacagcatccctgtgacagacttcccaagtaagaagcggaagaggagccgctggaaccaagacacaatggaacagaagacagtgattccag

SEQ ID NO: 420090 - DNA, 82 bp, Homo sapiens
ggaacccgagctggagctgaagcgcaggctgcggggcgcggagtcgggaggggttcagtcggctgccgtcaatgtcatctgc

SEQ ID NO: 420091 - DNA, 82 bp, Homo sapiens
accatctggcagatgcagaaacaggcccagagaggttaaagatcgaggtccggaagccactaggagattttttaattggttt

SEQ ID NO: 420092 - DNA, 98 bp, Homo sapiens
ggaaagcagcgggacgaggatgacgaggcctacggcctagttccccgagagcgttcagacagtgggggctcaagctcagagccatttgaccgtcatgc

SEQ ID NO: 420093 - DNA, 100 bp, Homo sapiens
atggaagtcttggctttgctgcagggggcacagtcttttgctgagcgcctgcgcctgggaattgcagtgattcatggagaggcgcaggatgccgagtcgg

SEQ ID NO: 420094 - DNA, 100 bp, Homo sapiens
tttgggttgtactcatagattgtgtaggcgttggtcttctgatagcaactttaatgtggcccatctttatctttgagatctacttaccctccgaacgtgt

SEQ ID NO: 420095 - DNA, 100 bp, Homo sapiens
gaacccatacagatgtccgcccctaccactgcacttactgtaacttctcctttaagactaaaggaaacctgtaggaagtgtcagggactctggaaagaac

SEQ ID NO: 420096 - DNA, 74 bp, Homo sapiens
tctctccatacccatccggataccctcccaatcccagatggaattagacatggcattaagtgacttggaggctg

SEQ ID NO: 420097 - DNA, 100 bp, Homo sapiens
tcagggtcttgcattcttggcacatctaggaagaacgtgcaaggatgcgaattgtgaatcgcttctccaaacagttggtttcagtgctgatgaaacttgg

SEQ ID NO: 420098 - DNA, 80 bp, Homo sapiens
ggatggctgagggagccccgcggatcgtttaggaaagccggccagctgacagtgaataaagatcaaaagctactccacca

SEQ ID NO: 420099 - DNA, 75 bp, Homo sapiens
agaggccgagcggctgcagatggacaacgagctcctgaggcagcagccaggcgagaaacagcctctggatctggg

SEQ ID NO: 420100 - DNA, 100 bp, Homo sapiens
cacacttggagcagaaggcataattagtgaatttacacctttgccaagcacccagtcagcttgaagagtttcaaatggaccctaccactgagaaatcaag

SEQ ID NO: 420101 - DNA, 74 bp, Homo sapiens
agtgaaatgtcatgcctctgaaaatgaaggagtccaatgtgctgattgctgctaacagtcagggtacaattaag

SEQ ID NO: 420102 - DNA, 100 bp, Homo sapiens
ttatagatcaaaagaaacctgttcgcttctatcatgattggaatgacaaagagaataactgaagtgaagtgatggactccgatttggagagtagtaagac

SEQ ID NO: 420103 - DNA, 100 bp, Homo sapiens
gacagacggagtcctgttccaccttcagagcgtcacggcgtacgccctcatggggaaaatctccccggtgactttcagctgcggcttgatgagacccagg

SEQ ID NO: 420104 - DNA, 75 bp, Homo sapiens
tcctgctggccatgctctacgggacagaacccagtgacttgattgtaaaaatttacagagcggaatcatatgctg

SEQ ID NO: 420105 - DNA, 107 bp, Homo sapiens
tcctgatctctctcgctgtgagacatgtctgagactcctgctcagtgtagcattaaggttctccagcatttggctcaaggccccaagggcacatgtgacaagaaggc

SEQ ID NO: 420106 - DNA, 75 bp, Homo sapiens
ctatatcctttggcagctcacagttgctttccgtatctatgacatggataaagatggctatatttccaatgggga

SEQ ID NO: 420107 - DNA, 98 bp, Homo sapiens
gtccaggcgtgacggtcatcccgaaaggccggccccaggcattcccatcaagagcaccatggacaaccccaccaccacccagtatgccagcctcatgc

SEQ ID NO: 420108 - DNA, 90 bp, Homo sapiens
ccacccctcctgtaacccagcctgtttcacttcttgaagggatggaaaccctattttcttttctccaagaccatggttggtctgcttccc

SEQ ID NO: 420109 - DNA, 100 bp, Homo sapiens
tcgccgtgcacatggctggaggagcgtctctccgccactgcgcacattttgcagcctgcaccggccaacggtgtcagctgtgatgcatgtttaaaaggaa

SEQ ID NO: 420110 - DNA, 98 bp, Homo sapiens
ctgaggcccgtggaaggagtcaaacttgcgggaattttgcaggcatcgagcccacaggcaacatggtgaagaagcgggcagagttcactgtggagacc

SEQ ID NO: 420111 - DNA, 98 bp, Homo sapiens
cgacggcggcggcggtggcctgaggaggcccgagcggcggcggtggcggcgaaggccgaggcgcaaaccagtccagctacgggggcccagccagccag

SEQ ID NO: 420112 - DNA, 50 bp, Homo sapiens
aaagatgatgaattctatcagcagatctttgaccatcagtctgtgacctg

SEQ ID NO: 420113 - DNA, 88 bp, Homo sapiens
tatcctgacactatgaatgctacttggatgcctcttaagattatggtgacaagctgaacatggagctgagtgagaaatacaagctgga

SEQ ID NO: 420114 - DNA, 74 bp, Homo sapiens
ctggtttcaagcgattatccagtacacattgataagggttttctgtagtgatgatgtccatatggccatatctc

SEQ ID NO: 420115 - DNA, 100 bp, Homo sapiens
cgcctggctcggagcagcagcctctgagggcgccctgcgtccggcagaggaggcgagcatcccgctcaggtgatgaggaacccctcgcgcacccagcgca

SEQ ID NO: 420116 - DNA, 98 bp, Homo sapiens
ctccatcaggaccccagatgtctgacagccctgtgtgacaccaagataagtaactgaaagcccctcagggaaaaaaccagaagtcctttgtcttcatc

SEQ ID NO: 420117 - DNA, 76 bp, Homo sapiens
gagacaagaggaatggttacacaggttttgatgtgaaggaccatgctcagaagcaggagaccgctaacagcctgcc

SEQ ID NO: 420118 - DNA, 82 bp, Homo sapiens
tgaagagcgacaagccgctggcagccgcggatctcaccgccgctcaggggagacataagacatcagtcagtacatgtgaggt

SEQ ID NO: 420119 - DNA, 82 bp, Homo sapiens
cggcggtggtgacgggcaccgggctcgcggcccatgatgatgccatttggtcagttgcttgggggacaaacaagaaggaaaa

SEQ ID NO: 420120 - DNA, 83 bp, Homo sapiens
atgagcctgaaacgtgcatggtggagaaaatgaacttaactttccatgaaggctttgtgatacctgatgaagggggcccacag

SEQ ID NO: 420121 - DNA, 100 bp, Homo sapiens
cctgatgcgagtggccaatgaggagtcagagcacaatcaagctcatgatggagcagtccaagaagtcctccctcatggtggcccgcagtattctcaacaa

SEQ ID NO: 420122 - DNA, 75 bp, Homo sapiens
gtttacttttaattttgcaaagaatccaggacaaaaaggattaggtggcatggaatattcacatgggagagccgc

SEQ ID NO: 420123 - DNA, 96 bp, Homo sapiens
cgcctttgatcgtcttcctcttcagccatccagcatgcaaggatctcgtggctcctgtccgtgatcgtaaactgaatacactggtgcagatctccg

SEQ ID NO: 420124 - DNA, 100 bp, Homo sapiens
ccggatcctgaggaggcagctgcggtggcagctgctgagttctcggtgaagtggtctcggaaagagggtcgtggtcccgcacggatgcgcttgttgggag

SEQ ID NO: 420125 - DNA, 75 bp, Homo sapiens
attgataacaccctgtaacagctgatcactgttggaggcccatgatattgtggcatcaaagtgttatgattcacc

SEQ ID NO: 420126 - DNA, 75 bp, Homo sapiens
cggggccagcggagccggagccgccgggacatgggaaacctgtaggaagtgtcagggactctggaaagaacataa

SEQ ID NO: 420127 - DNA, 96 bp, Homo sapiens
tggtggtggtgtcttcctgtctcaacgatacctattttctagtgctgagatcctgagacaatgggaaacagatattgaagactctgatgatattcc

SEQ ID NO: 420128 - DNA, 87 bp, Homo sapiens
tccttcgccgtcagtatttgaggagaaagcatttgccagaagatcagctgccatgttacttgactcacaccaaccctagagtggatg

SEQ ID NO: 420129 - DNA, 75 bp, Homo sapiens
tgagggaaatgatgaccaaagatagaggctatggagaaaagatggtccccatccctgctggagtatttacaatgg

SEQ ID NO: 420130 - DNA, 135 bp, Homo sapiens
tcttctatttcttgtggatattatggctaataacacaacaagtttagggagtccatggccagaaaacttttgggtggagtacgacaaggagttctcccctcgtcagcgacaccacaaagagttcaagttcaactt

SEQ ID NO: 420131 - DNA, 129 bp, Homo sapiens
cgacatggacaaagtgcttctcaagtacacggagtacaacgagccgcatgagagccggacaaactcagacatcgtggagatttcctccttcttcacccctgaaaccatatccaaagaagcccccaaacc

SEQ ID NO: 420132 - DNA, 75 bp, Homo sapiens
caattgtgaagatcgccagagagttctgtgtttcatcaccgccgaaagcttttctgggagaagaggctacaagga

SEQ ID NO: 420133 - DNA, 50 bp, Homo sapiens
gaatctgctctaaaggagaccaagctccatcaagtatgatggtgaaggat

SEQ ID NO: 420134 - DNA, 102 bp, Homo sapiens
ccggccgccgccagagcgatgttcccgcagagccggcacccggttatcaatactctggctgaccatcatcatcgtgggactgactttggtggaagtccttgg

SEQ ID NO: 420135 - DNA, 75 bp, Homo sapiens
agatgtgatgttggagaactacagaaacctggtctccctaggacctattcaaactcagtctgtctcttgactgga

SEQ ID NO: 420136 - DNA, 83 bp, Homo sapiens
gacagtacgcctacttctataaagtcatccagatattaataaggcagcggaaagaagaaatatgaatacggctccatcaagac

SEQ ID NO: 420137 - DNA, 82 bp, Homo sapiens
ccagcctgcggagcctgtggggcaggtcctcgaggccacacgggttaatcgaagaaagagcgcactggctttgcgctgggaa

SEQ ID NO: 420138 - DNA, 123 bp, Homo sapiens
gactttgggtctgggtgagccttctcgtggcggcggggaccgtccagcccagcgattctcagtcagtgtactaatggtcacttgatgtgcgctggctgttttatccacctactagcagatgcc

SEQ ID NO: 420139 - DNA, 82 bp, Homo sapiens
accaggcagcccccaaatcccggcccaggattttttatcaagcagaaatgcatcgaacaacgagaatcaagatcactgagct

SEQ ID NO: 420140 - DNA, 83 bp, Homo sapiens
cgcgcagcccccggccgcagcgcaggcagcccagcaggaagcaggtcctggggaccaaggtggacgcggagcgtgacggcgtg

SEQ ID NO: 420141 - DNA, 96 bp, Homo sapiens
tggcttaaactcttggcatttggctttgcctttctggacacagaagtatttgtgacaggcgagggctgcattgcccttcggttagaggccacagaa

SEQ ID NO: 420142 - DNA, 101 bp, Homo sapiens
actgggtagaagatctgatcggtcaccaggattctgacaaaagtactctccgaagaggaattgacatagctactgtgtgaagacattcacaggacacagag

SEQ ID NO: 420143 - DNA, 100 bp, Homo sapiens
cgtagtcctgggagcacagcagaagtgatgctttggagtctgcaatgaagaatggcctgtggggtcacgctctgctacttgcaagtaagatggacagccg

SEQ ID NO: 420144 - DNA, 82 bp, Homo sapiens
gctgaatgggctgaaggaggaggacaaagagcccctcatcgagctcttcgtcaagaaccgggctgtgggtcggcccaagggg

SEQ ID NO: 420145 - DNA, 95 bp, Homo sapiens
tgatgctgtcttgaattgtcctgcctgcatgaccacactttgccttgattgccaaaggccagaaatgtacacacaggagagctggctgcagtaaa

SEQ ID NO: 420146 - DNA, 74 bp, Homo sapiens
gctggcacggggctggtgggcatagtggctgccctgctggtgtctcgactgcattgtgagagtgaatctttcaa

SEQ ID NO: 420147 - DNA, 48 bp, Homo sapiens
aagagttgctgaactacaaagaaaggggggcaaggagtacttgatgcg

SEQ ID NO: 420148 - DNA, 83 bp, Homo sapiens
ttcccatcgaagctctagaaatgaatgtttccatctcttcagagatgaaccagatctgaagaagacacttgaatcatgggtga

SEQ ID NO: 420149 - DNA, 126 bp, Homo sapiens
ggagacaccgagaaaccatgagtgtaaggttaccccagagtatagacagagcaaatttttcagaacataaaacaagaatatagtcgttatcagaggtggagacatttagaagttgttcttaatcag

SEQ ID NO: 420150 - DNA, 50 bp, Homo sapiens
cggacgcgggacacctgaggaaaggtagaacttcatggaggaacacggag

SEQ ID NO: 420151 - DNA, 76 bp, Homo sapiens
cctacagaatctttttgtaccaagtctctggatggtcgtcagatccgtgtggatcatgcaggcaagtctgctcggg

SEQ ID NO: 420152 - DNA, 90 bp, Homo sapiens
aggcttactgtggatctggattctaaggcaacacttccttgaagaaacaagcttacaggttgagagcaccattggatgcttactttcagg

SEQ ID NO: 420153 - DNA, 75 bp, Homo sapiens
acactgtagcagagatcactgggagcaaatatccagaacaggtaaagaacaagcacctttggagatgagtatgca

SEQ ID NO: 420154 - DNA, 100 bp, Homo sapiens
cgcaacctggtagtggccgggacctcgcagctctacgtgtaccgcctcaaccgcgacgccgagtcactctgagaggagtgataccaatgaaaaaaggtca

SEQ ID NO: 420155 - DNA, 134 bp, Homo sapiens
tacttctcgagcttctcagtcagtcctgcctcatcccagccatgtcatcttatctacgaaatgattcagacactcctatcttaaagccagtatctcttttgcgaaaacgtgatgtgaagaattctcctcttgag

SEQ ID NO: 420156 - DNA, 100 bp, Homo sapiens
gggccggcgccagctggagagcagcttcgcggagcgactggagagccagaggtcccattctatgagtggctggaactcaagtctgaatggcagaaaggcg

SEQ ID NO: 420157 - DNA, 74 bp, Homo sapiens
tggaggaagacttaaaggcagacgaaccatcaagtgaggaaagtgatctaggacctgatcccaaccttgaagaa

SEQ ID NO: 420158 - DNA, 75 bp, Homo sapiens
tcgcacctaaagtcgcacctgcggacgcacacagaccgagtgtgtcagcagccaggactttctctctgggtcccc

SEQ ID NO: 420159 - DNA, 88 bp, Homo sapiens
aaagtcaaatctctcaagcccattgactatgtctggctctgggagaggagtggacagcagctggttgagatacatccccatctggaga

SEQ ID NO: 420160 - DNA, 98 bp, Homo sapiens
ccgggccctgggctggaggtaaaaccccacgaagtccaaggcttgcgagaaggtcatttccgtgggtcaaacggtcatcacgaagcatcggaacaccc

SEQ ID NO: 420161 - DNA, 99 bp, Homo sapiens
gctgggctggaggcggcggagcgcgagagcttcgagcggactcagggcactccagatgtcatgctgttctctaggccggcatccctaagcctgctcagc

SEQ ID NO: 420162 - DNA, 95 bp, Homo sapiens
cagccacatactatccgtttgttcaggaaccaccagtgacagagtttactcctggcttgggggcattaggaagcactggaggctcttcgggaact

SEQ ID NO: 420163 - DNA, 114 bp, Homo sapiens
accgggatcgtgaccgagaccgtgaccgagagcgtgaccgagagcgcgaatatcgtcatcgttagaagagctggaagtcgagtgtgctactcaactcaggagatttggagacaa

SEQ ID NO: 420164 - DNA, 108 bp, Homo sapiens
caccgccgcccccccagacaagatggacaccgcggaggaagggcgccaatgcttcggcattagagaaagagattggtccagaacagtttccggtcaatgagcactatt

SEQ ID NO: 420165 - DNA, 96 bp, Homo sapiens
caagagcaagatcaccgtgacatccgaggtgcctttctccaaaaggatcatccagcagctcgtcaacggcatcatcacgcccgccaccatccccag

SEQ ID NO: 420166 - DNA, 100 bp, Homo sapiens
cgcctgcttgaagggaggcggcagaagaagacgaagaagcagaagcgtctgctcaggttgcagcaggagagaggctggagtgcaatggtgcgatctcggc

SEQ ID NO: 420167 - DNA, 80 bp, Homo sapiens
acctccgccctcctctccggctttgccatggcctccaggcccaaggtcagcatcccactgtcagccatcattgaggtccg

SEQ ID NO: 420168 - DNA, 75 bp, Homo sapiens
gggctgcggacgctcggtcccgcgctgcgcatccccgcggacgccacagcgctatgccacccagatgaacaacgc

SEQ ID NO: 420169 - DNA, 109 bp, Homo sapiens
gaggctctggaacttctgcccagctctccttgtttttcagaagaagtgaagtcaagatgaagaaccatttgcttttctggggagtcctggcggtttttattaaggctgt

SEQ ID NO: 420170 - DNA, 109 bp, Homo sapiens
ttcacctcggtgtctgcagcaccctccgcttcctctcctaggcgacgagacccagtggctagcccattgcagatgcaaaggctcctgagaagcgggcctcaccatccaa

SEQ ID NO: 420171 - DNA, 98 bp, Homo sapiens
gaaattggcagactttggcttagccatagaagttcaaggggaccagcaggcgtggtttggttctgcagctgattcatgagagagataacatctgtaaa

SEQ ID NO: 420172 - DNA, 83 bp, Homo sapiens
cacaaaatggcgccctacagcctactggtgactcggctgcagactttaagtttgccatgtacccaccgtcgatgatcgcaact

SEQ ID NO: 420173 - DNA, 75 bp, Homo sapiens
aggagactgaccgcaacggcagggcggtgcgtctttctacgtgaataggattttgtggctggccagatacactgc

SEQ ID NO: 420174 - DNA, 100 bp, Homo sapiens
ctccctgaagcagatatttcaggttttgacaacaattcgttcagggcaccgagcaaacatatttagtgcaaagttcttaccttgtacaaatgataaacag

SEQ ID NO: 420175 - DNA, 101 bp, Homo sapiens
atgtggtaggaaaaatccgcagagaaattcagaacctcaagcttttcaggcatcctcatataattaaactgtggaaaaggagggagctactctaaggctga

SEQ ID NO: 420176 - DNA, 90 bp, Homo sapiens
aatctctaaatgcagattccagaaaaattacagcacatctcagtgaatttgcaagtggcagccttaagtgccttgaaacaattttctgaa

SEQ ID NO: 420177 - DNA, 89 bp, Homo sapiens
actctctctttctggcctggaggctatccagcgctggctacagcaaacatcattcaagatgtccagcaaagggagcagcacagatggca

SEQ ID NO: 420178 - DNA, 100 bp, Homo sapiens
aaacagagtccgatgaaaggaatgggtctgggaccttaacagggagccatgatatccttggaacagaagatcttattgtggaagtgacttccaatgatgc

SEQ ID NO: 420179 - DNA, 78 bp, Homo sapiens
gagagcttggttaacttgggagaaagtttcatctgtggatggagtattgagtgcccttatgcctgcacagttgttttt

SEQ ID NO: 420180 - DNA, 74 bp, Homo sapiens
agaagcaagaaggccctggacacagcaatatctctgggctttcacaggaaacttcttgtggaccacggacatgg

SEQ ID NO: 420181 - DNA, 75 bp, Homo sapiens
ctttataccatctttattgtggccacaaagcagtaccttgatgataacactgtggaagctgtggcctttcggaag

SEQ ID NO: 420182 - DNA, 145 bp, Homo sapiens
cggggaccgagcctgggaggccggccggtgccagcacctttcggcttctgagacggcggcagcagcggcattcagctcctcaagagttactgatctatgaaatggcagagaatggaaaaaattgtgaccagagacgtgtagcaat

SEQ ID NO: 420183 - DNA, 90 bp, Homo sapiens
cttccccacgcaaccccagatccatttacactttacacctggagcattggtaagcgtcacactgccaaagtgagagctgctggagaactc

SEQ ID NO: 420184 - DNA, 98 bp, Homo sapiens
tgctacaggttctacagcaccagagatgcaaccttaaaatcagtgacaagaaacattccaaacaagcaacagtcttcaagaaattaaactggcaagtg

SEQ ID NO: 420185 - DNA, 141 bp, Homo sapiens
acgtcctgaacatgagcctcctcctctccttctacctgctggggttgcttgtcagtagcgggcaaggtacccactgatggtaatgctggcctgctggctgaaccccagattgccatgttctgtggcagactgaacatgcac

SEQ ID NO: 420186 - DNA, 95 bp, Homo sapiens
gcgaagatgctaagataccagcttgtgaagaaagcctaagccagaccccgccctggccaacgtcaacattgggagcctcatctgcaatgtagggg

SEQ ID NO: 420187 - DNA, 100 bp, Homo sapiens
aagctctgaatcgtgttcctgaatgaaagaagtcaggggaggaagccgcagcccaaggaggtcgtcacttgccgggaaggtggctcgggccaggctgcac

SEQ ID NO: 420188 - DNA, 100 bp, Homo sapiens
gcagcagcggcctcgccgccgcccgtctcctgtcgcgcagcttcctccatcttagcaaagcaatgtctcaagatggtgcttctcagttccaagaagtcat

SEQ ID NO: 420189 - DNA, 75 bp, Homo sapiens
ggagtggggaatgaggcgggggtcggcccggggctcggagaatgggcagatctcccttgagtttagaaatctggc

SEQ ID NO: 420190 - DNA, 100 bp, Homo sapiens
gccatgaatttgttactttttcttgtccgggtgcggataagggacccgacactgatacaagttggatggcttgaggactggtactaaaaggaaacgtgac

SEQ ID NO: 420191 - DNA, 100 bp, Homo sapiens
ccgcgccgagccacccgcccgcccaaggtctctcgcgggcgggagaacggaaaactcccaacttcctggttcgttttaaaaatttagcatccagaccgta

SEQ ID NO: 420192 - DNA, 50 bp, Homo sapiens
tgcagacctggggaccctctgtcaagatgaacacaatgacgtacagaaga

SEQ ID NO: 420193 - DNA, 100 bp, Homo sapiens
tgatgattcctgcgtattccaagaaccgggcctatgccatcttcttcatagtcttcactgtgataggagatctgcccaaggagaatccatatgaggatgt

SEQ ID NO: 420194 - DNA, 100 bp, Homo sapiens
taaaaacagtgaattgatggatcccaaatgcaaacagatgataaccaagcgccagatcacccagaacacaggtatttcagaccgaacaaaagaatctttt

SEQ ID NO: 420195 - DNA, 100 bp, Homo sapiens
atgaggaggaggaagaagaggaggaggaaggtgaattcatgacacctttgactcttctactgtctcagaccttaggtaacatacctgcagctgcttttct

SEQ ID NO: 420196 - DNA, 98 bp, Homo sapiens
aggagtcttcatgaaggtggtgaagcccaagaactctactacgatcgcgggaaccaccatgagtttgtgtccctggtgaaggacctggcccggcctgg

SEQ ID NO: 420197 - DNA, 100 bp, Homo sapiens
gtcagcagcagtttaatgtccaggctcttgtggcggtgggagaccatgcaagcaagcagatggttaaatttgctgccaaaaggaacccagccagccggcg

SEQ ID NO: 420198 - DNA, 83 bp, Homo sapiens
aaattaatggtgaagtggtgacgaaaattctacattgcttagaaagcaagaactgtggctgcaccatctgtcttcatcttccc

SEQ ID NO: 420199 - DNA, 75 bp, Homo sapiens
aagctaccaaagacgtagaaagaaatcttagcaggcttgcagtaaggttgggctgctggcacgacccttacatcc

SEQ ID NO: 420200 - DNA, 100 bp, Homo sapiens
gtatgtggggtccatgcctcttaagaactcttttcgaggaactatccgttttcggctttgtgagaaaccttaccatcaaacacgatggccagcaacgtta

SEQ ID NO: 420201 - DNA, 96 bp, Homo sapiens
tatggctgtccttgggagttttccatatgtgaccatggatataaaatcacaggtgggggatggaagaatgggatatgctgaagaagccccttatga

SEQ ID NO: 420202 - DNA, 75 bp, Homo sapiens
ggatgatccagttggaccttttggacaggaaagtgtaacatcagttacagagttatccaaatgtgaaacattttt

SEQ ID NO: 420203 - DNA, 75 bp, Homo sapiens
tgctttagaaaaacacgatcagctcttagacaggtatctgaaaactgaagagtggagaatatgttcagcagggaa

SEQ ID NO: 420204 - DNA, 109 bp, Homo sapiens
tgacgtcacatggagcacagaaatcaatgttagcagatagccagcccatacaagatcgtagccataagtgtgatccttggtgacaggtggaagaaaatgaagaatgaag

SEQ ID NO: 420205 - DNA, 75 bp, Homo sapiens
aggggtcagttgtccagttcatccctgagccttgagctcccagtcgcagattgcccccgaggaattagcacttgt

SEQ ID NO: 420206 - DNA, 100 bp, Homo sapiens
cgaaaccatgcctcactgtcctaggcaaggttcgagaacttgtcttggacaattgcaaatcaaatgatggaaaaattgagggcttaacagctgaatttgt

SEQ ID NO: 420207 - DNA, 80 bp, Homo sapiens
gcagctgtgcccgggcggcacggccagggagtgcatccgccccaacccttttccccctcgtctcctgtgagaattccccg

SEQ ID NO: 420208 - DNA, 82 bp, Homo sapiens
tggctgttagaagaattcatgctcatccggttgttcaggggatgaaggaagctcaggaaaggctgacgggtgatgccttcag

SEQ ID NO: 420209 - DNA, 82 bp, Homo sapiens
gcggcgctgctgctcgggctgctcttggaggcatgtcgggccccaggcctgtggtgctgagcgggccttcgggagctgggaa

SEQ ID NO: 420210 - DNA, 150 bp, Homo sapiens
gctcaacttcgacggcgagccgcagccctacccaacgctgccgcctggcacgggccgccgcatccacagctaccgagatatgtcttgtcgttcaagacttgcaacactaaacgagaaattgacagcccttgaacggagaatagagtacat

SEQ ID NO: 420211 - DNA, 100 bp, Homo sapiens
tggaaattgccttattggaaaaacatttcttacgtgctggagaatctggtaaaagcaccattgtgaagcagatgaggatcctgcatgttaatgggtttaa

SEQ ID NO: 420212 - DNA, 145 bp, Homo sapiens
aacaccttcagttacgacaagaagaaaaacggcaacgtgtaatcagaaggcacagattagaggaaggaagaggaataagttcccctgtcagtggaggatgggatacttcaacctgggggttgaaatcaaacactgaacctcagag

SEQ ID NO: 420213 - DNA, 89 bp, Homo sapiens
agcactttcagcttctggtcaggactctattcagagactgaaggcactgtgggcaccatgtccttgaagcttcaggcaagcaatgtaac

SEQ ID NO: 420214 - DNA, 75 bp, Homo sapiens
gccacatcgggggcaccaccctccatgcctttgcaggaggagcttgccatccaacagggtcaactggagacaact

SEQ ID NO: 420215 - DNA, 96 bp, Homo sapiens
tgcgacctcgatctgtcccaagcattcatgttccctcaccagctgtagaacagcatatgccatatatgagctggctgtggcttcatttcccaagaa

SEQ ID NO: 420216 - DNA, 90 bp, Homo sapiens
acgctaagagaacttaaactttcaaaggttggacaaatggtgatggaatttcctgataatgtgttaaatctcgatggacatcagaataat

SEQ ID NO: 420217 - DNA, 75 bp, Homo sapiens
caggcccagcataccaggagccgggaaagagcagacggcaccgctgacagggagttcatcgaggccaggaggaga

SEQ ID NO: 420218 - DNA, 80 bp, Homo sapiens
caatgtgctctgggacctggttgacaggatagggctgaccggttccctgatgtgttacctgcttctgctactgatccaaa

SEQ ID NO: 420219 - DNA, 83 bp, Homo sapiens
ctgctcaagatctcagagaaggaggaggtgaccacgcgcgaggtctcctctgagcctccggcctccataagacccaaaacaga

SEQ ID NO: 420220 - DNA, 100 bp, Homo sapiens
aaactcgtacctgcggctaagagcagaatgtccctcttccagtggaaagcccaaccatgcagacatcttgctcataaacttacagtatgtttcagaagtg

SEQ ID NO: 420221 - DNA, 100 bp, Homo sapiens
acaggtgaatttctcccaattcagccagcccagcacatccagtcagaaaccagtggatctgccaactactcccagagcgcaagtactcggtgtggatcgg

SEQ ID NO: 420222 - DNA, 98 bp, Homo sapiens
gccggccgtggacatcggggcagctgacctcgcccacgcccagcagcagcagcaacagaggcgtggagctatttcctatgacagttctgatcagactg

SEQ ID NO: 420223 - DNA, 101 bp, Homo sapiens
agtggagtgatatcagacaccgagcttcagcaagctctctccaacgattgacctcatcgatggcaaaggcaggggtgtgattgccaccaagcagttctccc

SEQ ID NO: 420224 - DNA, 100 bp, Homo sapiens
tctcccaggccacaagacatttcctgctcggaaccttgtttactaattggacatctctacaccgttcccatccgggaacagggcaacatctacaagccca

SEQ ID NO: 420225 - DNA, 100 bp, Homo sapiens
atagctaactgtatcgtgcacagcactgacaagggccccaacagtgcattagtgcagcagcttatcaaaggtagcctttccagtaaatatatgactcagg

SEQ ID NO: 420226 - DNA, 98 bp, Homo sapiens
ggatcaccattcccgtgcagaccttctccaacctgcagattcgaggtcagaatggcggcagtggagcatcgtcattcttcaggattgccctactggcc

SEQ ID NO: 420227 - DNA, 82 bp, Homo sapiens
accgacagcaagatcctgcaggagtgagaagccctaccactgcaactgggacggctgcggctggaagtttgcgcgctcagac

SEQ ID NO: 420228 - DNA, 74 bp, Homo sapiens
ataacgggaggtgaatttccatgtcaacatagtcctgcctatggaccagctctcattgaacactgtcttttaga

SEQ ID NO: 420229 - DNA, 101 bp, Homo sapiens
tcaatatctgtcttcggtggactccttcggcagtccacccaccgccgccgcctcccaggagcaggccgggctctcgccatgggtcactgtcgcctctgcca

SEQ ID NO: 420230 - DNA, 50 bp, Homo sapiens
tccaactcggctgcccacaaggaggtgattgtagagaaggctccaaaagc

SEQ ID NO: 420231 - DNA, 83 bp, Homo sapiens
gaagaattcagaagaaacaaaagtgccaccgaagagatttgaggcttaagcaacttcttccggggaagagtgccagtgcagcc

SEQ ID NO: 420232 - DNA, 115 bp, Homo sapiens
cttgtcctctgctttgagctcagaagccaaagaggaaagtaagaagccggtggtgactttccaagggctctcgaaatatcggccagctagctcccgatctgctttaataccccag

SEQ ID NO: 420233 - DNA, 75 bp, Homo sapiens
ccgcattcaagctggagaatgagaggctgaagggcaaagatgagtcccagcacacagaatctatggtacttcagt

SEQ ID NO: 420234 - DNA, 60 bp, Homo sapiens
cttccgagtagctgggactacagggggttttgtgctgctggatggggagacgttcgaggt

SEQ ID NO: 420235 - DNA, 75 bp, Homo sapiens
ggagcgccacgccatcttcacagaggacggaagctcctgttttcttgtcagccgccagctgagggccattcgcag

SEQ ID NO: 420236 - DNA, 101 bp, Homo sapiens
ataaggaaagttgactgaaaatggggcggaagaaaatacaaatcacacgcataatggatgaaaggaaccgacaggtggagataagtaattaacatttcgaa

SEQ ID NO: 420237 - DNA, 75 bp, Homo sapiens
gtgcgctgctcaaggacacggtctacaccgacttcgacgttgagccccatatgggggttggcaggcagcagagag

SEQ ID NO: 420238 - DNA, 75 bp, Homo sapiens
aaacaagtgaccaacagttgaatcaaagtatggacacagctccatcaagtatgatggtgaaggatgaatatgtgc

SEQ ID NO: 420239 - DNA, 75 bp, Homo sapiens
cggcttcggagcgggagtgttcgttgtgccagcgactaaaaagaggtatctggaccttcgtcgatttggatctgt

SEQ ID NO: 420240 - DNA, 89 bp, Homo sapiens
ccgcaccaggggccctcagggaagagaccctgcaaagatcctgggagaccaagacgaaggccttcatccaccacgagctgctggcctac

SEQ ID NO: 420241 - DNA, 74 bp, Homo sapiens
cctcacagtttgctctgctcttccaacaccagtggaagatgatcacatcccagaactcatgagagacaagcagt

SEQ ID NO: 420242 - DNA, 97 bp, Homo sapiens
gggaaagcttacagactgtgtggatctcaaagatttcatgagacaagctggggaagtaacgtttgcggatgcacaccgacctaaattaaatgaaggg

SEQ ID NO: 420243 - DNA, 100 bp, Homo sapiens
ctcctgccgggatgattctgagtgtatcacaaggctatgcaggcaaagcataattgatttgaaggagaaggaaataccagaattaagaaacaaactgcag

SEQ ID NO: 420244 - DNA, 105 bp, Homo sapiens
ccgagatcgtgagttgtgggtgcagcgactgaaggaggaatatcagtcccttatccggcaaaactggttgaacagcggatgaagatatggaattcaaagctctaa

SEQ ID NO: 420245 - DNA, 75 bp, Homo sapiens
ccgcagcgagcacgaggtgtcagagatcatcgatggcctctcagagcaggagcaccagaaatgtcagcagcccag

SEQ ID NO: 420246 - DNA, 75 bp, Homo sapiens
cagacatctacaaccttcgatctcctgacgatccctgcactaggtcagacaatcccctttggggtacaggaaaca

SEQ ID NO: 420247 - DNA, 105 bp, Homo sapiens
tttcactggaagaacacccgactcggtgattatagattcagtgactggtatagtggtcccgcaactgaacttgatactgaacctgatgatgaatgggtgaaaaat

SEQ ID NO: 420248 - DNA, 74 bp, Homo sapiens
ccgcgcccgggatgtattcgtccccgctctgcctcacccaggtttggctcagaagaaggcggccccaacagagg

SEQ ID NO: 420249 - DNA, 74 bp, Homo sapiens
acatgcgcctcatcttccagaaccacagggcctcttacaagttgccagagtctgccctccgagacctcatcgta

SEQ ID NO: 420250 - DNA, 98 bp, Homo sapiens
cgcgcggggaccgccaccgagcgagtaccccaaggagataactctggaggcatttgcagttattgtcacccagatgctggcactcagtctgggaatat

SEQ ID NO: 420251 - DNA, 75 bp, Homo sapiens
caaggctaaagaaattaatgacaataatggatagtatgaatgatcaagctattcaggattatgaaactgctcagg

SEQ ID NO: 420252 - DNA, 100 bp, Homo sapiens
gaggataaacagctcgttggcagtagcagcttatgaggatggctgaactcacgggaatcaaatggcgtaggtacaattttggagggcatggggactgtgg

SEQ ID NO: 420253 - DNA, 100 bp, Homo sapiens
ggaggcggcacacgcccgcgccgacgcggccccgcaagccagacctgcaggtgtacctgccgcgacaccgaggaagttccaggttaaaggcagcctcagc

SEQ ID NO: 420254 - DNA, 75 bp, Homo sapiens
ggacgtgggggcggccacggcagttttcggctttgtgagaaaccttaccatcaaacacgatggccagcaacgtta

SEQ ID NO: 420255 - DNA, 75 bp, Homo sapiens
cagggaggatgtcgggacaccccggaagctgggaaatgccgttgccgagagatggatgagcagattagactgatg

SEQ ID NO: 420256 - DNA, 82 bp, Homo sapiens
gaggagtgtctgaaggactcgccccgcttcaggactgcaatgtgccgatcttagctgctgcctgagaggatgtctggggtgt

SEQ ID NO: 420257 - DNA, 75 bp, Homo sapiens
atttttgttactcttcagtacaatgtcaccctcccagcaacaggtaaagcttgcatttccttcaacaagaaggat

SEQ ID NO: 420258 - DNA, 78 bp, Homo sapiens
ttgaacttctcagcctccagaacggatccaaggattctgtagctacaatgttgtcaagactttttcgaatgcatggcc

SEQ ID NO: 420259 - DNA, 89 bp, Homo sapiens
aagtgtcatgcagcaggacgtcactgttggaagaactttctcctggggcaagcctgaaatcccaggggattgatgtcctgagagcatcc

SEQ ID NO: 420260 - DNA, 74 bp, Homo sapiens
tggagcgcccagaggcgagccctggtggaggaagagggtcacagtaaatcgatccagtgtctgacggtgcataa

SEQ ID NO: 420261 - DNA, 78 bp, Homo sapiens
tctcggatagtgggctctgtagaattcgacagtatgacattcacggcatggtgtaactcccacctccggaaggcgggg

SEQ ID NO: 420262 - DNA, 90 bp, Homo sapiens
gggtgcagaaaagaggtcacatcagcgttctgcgtcatgggggagtgctgatcaactaaaagagaaaacatcggttgtgaagagaaagcc

SEQ ID NO: 420263 - DNA, 100 bp, Homo sapiens
cagatgatgaccctgagcaaggaaaatctgaggtgagaaagatcagtctaaagaaaaggagaagaaagtgaaaaaaacaattccttcctgggctaccctt

SEQ ID NO: 420264 - DNA, 98 bp, Homo sapiens
ctctgatcccagccatggccttcctctcctgcgtgagaccagaaagctgggagccctgcgtggaggttgtggagactaatttggttgcttttgactgt

SEQ ID NO: 420265 - DNA, 51 bp, Homo sapiens
gggcccgggggtggtgacagcaggtctgagtcaacaacaagtttgggcttc

SEQ ID NO: 420266 - DNA, 100 bp, Homo sapiens
aattttgcaaaagtaaaattggcaagacatatccttacaggcagagaggtctatgcctctcagcgaatgagagctggcaaaggcaaaatgagaaaccgtc

SEQ ID NO: 420267 - DNA, 74 bp, Homo sapiens
ctgatcctatcgttttgacgccagaaagctctgggtgtgcggcagtaccatgtggcctcagtcctgtgccaacg

SEQ ID NO: 420268 - DNA, 100 bp, Homo sapiens
cggtgtggctgtgccgttggtcctgtgcggtcacttagccaagatcccacccgcaggaccccaaaacccaatgatcctgcagcagcccttgcagcgaggc

SEQ ID NO: 420269 - DNA, 74 bp, Homo sapiens
caagatcgagttcatcgggcagatcgtgtctaaaaagcacggcaagctcattacgttcttacgaacattcatga

SEQ ID NO: 420270 - DNA, 50 bp, Homo sapiens
ctgtcaccacatacaacacactttatgagacggagtctcactctgtcgcc

SEQ ID NO: 420271 - DNA, 100 bp, Homo sapiens
aaaccaggcatctctgggtgggcaacttacccgagaacgtgcgggaagagaagatcatcgagcatttcaaacgagctgaagaagcaggtggagagtgccg

SEQ ID NO: 420272 - DNA, 90 bp, Homo sapiens
ggaccgaattcctgtgccgaagaggcctgcagtgggagagcaggatattaacctggctgcagagccaaaagtgaaccgaggaaaagcagg

SEQ ID NO: 420273 - DNA, 50 bp, Homo sapiens
aagcttctctgtgaaagagcacagatactcagaactaaccactgttcaac

SEQ ID NO: 420274 - DNA, 100 bp, Homo sapiens
ctgctgatgaagatgatgacgatgatgatgaagaggatgatgatgaagatgatgatgatgatgacaacgacagaactaacagaagagaaagcatatctcc

SEQ ID NO: 420275 - DNA, 100 bp, Homo sapiens
ggtgaagcctcctgcgccggccttgcctcggaaatgaaagctcattagcatctacactgaagacgctcctgttcttcacagctttaatgatcactgttcc

SEQ ID NO: 420276 - DNA, 100 bp, Homo sapiens
agaaatgccaaggaatttaagagaatacatggttgaaaaaatttacccacaaatacctgctatgatagtagtggagcttccaaagatgaaattaaggaga

SEQ ID NO: 420277 - DNA, 98 bp, Homo sapiens
ctggggctgcctgccgggcggccgggcgcggcgagcccagaaacttttcagcattacctaagaagcaaaggctcaattttggctgcttcattcttatc

SEQ ID NO: 420278 - DNA, 98 bp, Homo sapiens
cgcgagcgagcttccgcgccgcccgcacgcgcgacctacctgggcgctccgcgcccccggatgctgcaggatgttgcttcagagtgtgaagtcaaatg

SEQ ID NO: 420279 - DNA, 75 bp, Homo sapiens
tgccgcagcccgagtcccagaaggcggcgatcctgggctgcgggcaaggcggtcttgggcgtctttggtactggc

SEQ ID NO: 420280 - DNA, 100 bp, Homo sapiens
ttctcagacaaacagattgcccttgcagttctgaggctacatccacgtgacgcagaccttcagcattatggctgttctgtgggccctggtgtccgtgagc

SEQ ID NO: 420281 - DNA, 100 bp, Homo sapiens
ctgaagtcggtgtctgctgcgttcacggcaggattcggttagaattcaagccaggaagaagcagcaatctgtcttctggattaaaactgaagatcaacct

SEQ ID NO: 420282 - DNA, 50 bp, Homo sapiens
ggataactgacttaaaatctgggtctcactcttctttgccccagatgtcc

SEQ ID NO: 420283 - DNA, 75 bp, Homo sapiens
cactccgtcccccgcgggtctgctctgtgtgccatggacggctggaccgtgaggccaacctcaccagcagcgtga

SEQ ID NO: 420284 - DNA, 82 bp, Homo sapiens
ccttattgctggagaaggagaaaagtgcccaagatcctttcagatcactggggtgatcctgctggctgttggagtctggggc

SEQ ID NO: 420285 - DNA, 89 bp, Homo sapiens
ccacaaccgcaccaagaagcacgacctgctgagatatgtcttgtcgttcaagacttgcaacactaaacgagaaattgacagcccttgaa

SEQ ID NO: 420286 - DNA, 75 bp, Homo sapiens
tgaccgagagcgcgaatatcgtcatcgttagaagattcttcctttatacccctgggacacatgctcacccaaaaa

SEQ ID NO: 420287 - DNA, 83 bp, Homo sapiens
ggagctggcggacatcactttagaccctccacctaattgcaggctgaactcacgggaatcaaatggcgtaggtacaattttgg

SEQ ID NO: 420288 - DNA, 96 bp, Homo sapiens
tttgcaacagaattacagagtatgatacatttgcctgaaaaaattaaggatgaccagcagctgaagaatatgagtggccaatggttttatgaagcc

SEQ ID NO: 420289 - DNA, 90 bp, Homo sapiens
accaaaggactcgccctctgggaggcttaccgagagtttgaaagtgcgattgtggaagctgctcggtttttgaatcagagccgacaggca

SEQ ID NO: 420290 - DNA, 100 bp, Homo sapiens
gcggggatggcgtcccccgggggcccgtactgcacatcgtggtggtcggatttcaccacaagaagggctgccagtactatactggcaattgctggagaag

SEQ ID NO: 420291 - DNA, 80 bp, Homo sapiens
gcgcggctctgtgtggactcggagaaacgcggtgcagagcagagcgggcggaggaccccgggcgcgggcgcggacggcac

SEQ ID NO: 420292 - DNA, 100 bp, Homo sapiens
cgatctgcacttcgcattttggcattgacatttaattttagggtcctttatatagaagggagagtaggtgtgtagaccacactccaaaactgaaactgtg

SEQ ID NO: 420293 - DNA, 90 bp, Homo sapiens
ataatgcccagcggcccgccaggtcccggtctgccatcatggatgttctcgcagaagcaaatggcacctttgccttaaaccttttgaaaa

SEQ ID NO: 420294 - DNA, 75 bp, Homo sapiens
tgtggggggattctcgacctgctaacagaactggaccttttcggaattgaatgatctggcacgggaccctccagc

SEQ ID NO: 420295 - DNA, 95 bp, Homo sapiens
atgcagtccgagagctagatggaaggtctctaattaacagaagatggcaaagcccagccacagcagctatgtccttcagcagctaaacaaccaaa

SEQ ID NO: 420296 - DNA, 75 bp, Homo sapiens
gcctcctcccccatgtaccacacctgtgtggccttcgcctggtgtaaggcaaacattggtgggcaccgatcttcc

SEQ ID NO: 420297 - DNA, 100 bp, Homo sapiens
tgttgctcccgcctgagcccagcccccagaaaggattgtgacatatcgttggacccagaattgagaaaaagtttggaaaccttcatctagaaagtggtct

SEQ ID NO: 420298 - DNA, 83 bp, Homo sapiens
gggtattcttgaaccaggtcatgctccaaattctccacaaaccggaggactacccccagactgcagtaagtgttgtcatggag

SEQ ID NO: 420299 - DNA, 100 bp, Homo sapiens
gaagtatgcgaactgtaaaaagggaaactttaaagttaatatctggttgggtgagccgatccaatgatccacagatggtgctatacttggtagatcagaa

SEQ ID NO: 420300 - DNA, 74 bp, Homo sapiens
acgtggagtgttaccactgcgaggaagtgagctcacaatgactcaagctgccacatagtgttgattgtgaaatg

SEQ ID NO: 420301 - DNA, 49 bp, Homo sapiens
cggaaagagctacttgctgatttaattggttggggtcagataagaagag

SEQ ID NO: 420302 - DNA, 100 bp, Homo sapiens
caaccagtgtgggccaggcatggagttgtctaaggtatgcttcagaagtgtccttctgttgatgacttcgtaagtgccctcgtttccgacttggatctgg

SEQ ID NO: 420303 - DNA, 90 bp, Homo sapiens
cttatctgaggccaaacccgccactccagaaatccaggagattgttgataaggagaatgagatcctgactgaacaggaggagctcctggc

SEQ ID NO: 420304 - DNA, 73 bp, Homo sapiens
aaaaaagaagaagtccccgagttcaccaaaattcagacattgaagaggagcaggacttggatggtgagaaggg

SEQ ID NO: 420305 - DNA, 74 bp, Homo sapiens
ggacactgagctttgtggaagcatttggcggcataccaccctgcactgtgagatagtcactgccaatccttgga

SEQ ID NO: 420306 - DNA, 100 bp, Homo sapiens
gcgtgcttttcgcaagaacaagactctcggctatggagtccccatgttgtcaagtaagggagaattgactacgcttatacatcagcttcaagaaaaggac

SEQ ID NO: 420307 - DNA, 51 bp, Homo sapiens
gaattcattaaatggatcttctgctggcagttagttgaatccatggacatg

SEQ ID NO: 420308 - DNA, 100 bp, Homo sapiens
attataccttgtttcacctacagaaatccagagacttacttatagtcaagagacctgtgaaaatcttcagtcctcgtccttcagcagcatcacggactcc

SEQ ID NO: 420309 - DNA, 100 bp, Homo sapiens
cgcgagagatggagatgggcagacggattcatttagagctgcggaacaggacgccctctgatcactgccctgggaagaactaggatgaggtattgacttg

SEQ ID NO: 420310 - DNA, 74 bp, Homo sapiens
gaaggagcatcccaggacctaccagaatctggaaaaacgtggtcttcgagaaatgcgagttcttgaaaatttga

SEQ ID NO: 420311 - DNA, 100 bp, Homo sapiens
ttgcagcgagccccagattattgcccagagacaatgatgtctttggtggacttgggaaagaggttgctagaagcagcaagaaaaggccaagatgatgaag

SEQ ID NO: 420312 - DNA, 75 bp, Homo sapiens
gccgaggaacgagagcgcgaagctaagcaaactcattattacattgggtaagaaacaaaaaagaaagaatgagtc

SEQ ID NO: 420313 - DNA, 102 bp, Homo sapiens
ctttccacaatgcagttgctgtagtcatctacaataataaatccaaagaggagccagttaccatgactcatccaggtactccaaagattcaggtttactcac

SEQ ID NO: 420314 - DNA, 75 bp, Homo sapiens
aaggattccaagtaactcttatttggtgaccccaaaggagccatgataacccatcaaaatattgtttcaaatgct

SEQ ID NO: 420315 - DNA, 82 bp, Homo sapiens
cacggagaggcggcgagaccgcagttgcaagaatgtagtaactctgatcagctacaaggaaaggaggaaagagtaaatgaag

SEQ ID NO: 420316 - DNA, 83 bp, Homo sapiens
cgatgcatgcaagtcggaggaaacgctagtgcagtcaaaatgcagatcttcgtgaaaacccttaccggcaagaccatcaccct

SEQ ID NO: 420317 - DNA, 74 bp, Homo sapiens
aacaagcggttctctaccctgtaaagaatgccagctgatgaagaccgagaggccgcgacccaacacctttgtca

SEQ ID NO: 420318 - DNA, 75 bp, Homo sapiens
aaggtggggttcggggggccaccgaatcgctgtcacgccggcaggtagaaaattatggcatgccgtttagcagaa

SEQ ID NO: 420319 - DNA, 75 bp, Homo sapiens
tggcggcgcgatggagcagcgaaaacgtggttgtagagttccgtgactcccagtgcacttacatttcaatcgacc

SEQ ID NO: 420320 - DNA, 80 bp, Homo sapiens
ataagtcgccaaaaacaaatggggcaggaaattgggaatgaattggatgaacaaaatgttggaatcgaagcctcttaaaa

SEQ ID NO: 420321 - DNA, 90 bp, Homo sapiens
tttacaccagcctttgctgattttggaaggcagacacctggtggaagaggcgtacctcccattttgaaagccggagatgaaatagatgag

SEQ ID NO: 420322 - DNA, 100 bp, Homo sapiens
ccagaggtcatgctgaaagtacgtctaatagacaggatttggagttccatggagtgatgagattttattttcaagataaagctgctggaaactttgcaac

SEQ ID NO: 420323 - DNA, 100 bp, Homo sapiens
gtgcctttgaccttctgccatgattgtgaggcctccccagccacgtgaaactgctgaactccagtgcacccagttagacttggagcggaaactcaagttg

SEQ ID NO: 420324 - DNA, 100 bp, Homo sapiens
cgcctagtccacggagctcaatggcggcagtcgcgctgagggactcggctcagatagttttgaggcagctgtgccatcaaatagccacattgtttcggaa

SEQ ID NO: 420325 - DNA, 75 bp, Homo sapiens
catcgatagggatgcagaggatcagaaccggtacctggatggcatgaagtccattggaatattaagcccaggagt

SEQ ID NO: 420326 - DNA, 75 bp, Homo sapiens
aggtccgcggccaggtgctggcgccgctgcccctccacggagaaactaaagttacagagtggagaggtaacaaaa

SEQ ID NO: 420327 - DNA, 100 bp, Homo sapiens
tgagccgcgaggacacgggctgcaacctgcagcacatcagcgaccgggagaacatagacgagacccctggagaagcccgacggcctggacgtgtccgacc

SEQ ID NO: 420328 - DNA, 90 bp, Homo sapiens
aagaaatgcacgcatttgattgttccagagccaaaggggatcactttgggaagcagtgacatccaacctgtatcaagtcttctaatctgt

SEQ ID NO: 420329 - DNA, 83 bp, Homo sapiens
gaccgcgcgcagggcctgcagcgggagctggacggcgagcgcgagcggcgcgagaaagaaacatttactagggacaacttttg

SEQ ID NO: 420330 - DNA, 90 bp, Homo sapiens
gggcagaggaggcggccaaggacctggccgacatcgcggccttcttccgatccgctacgagttccagggagctctgtcctggtgaccgtg

SEQ ID NO: 420331 - DNA, 100 bp, Homo sapiens
cctggatgtcatttggaaaaacactagagacagacggctggcagtacctggagtagaacagaaaaattattatgtctgtgttcccttgggactcattgga

SEQ ID NO: 420332 - DNA, 90 bp, Homo sapiens
gccatgatgagtgtggatgaaacactaatgtgttcttttcagaccgagacatgggtgcccggcaccgcgcccgagcccactccattcaga

SEQ ID NO: 420333 - DNA, 101 bp, Homo sapiens
ataataaaacgctttgatggaaaggaagatgagaagtttttgtctgaagtttttgcacaattaacagatgaggctacagatgatgataaacggcgtgaatt

SEQ ID NO: 420334 - DNA, 96 bp, Homo sapiens
cttgactgttaccggctcaggaaaagccggccacgcagtggtcatcatcagatttgaaatatttaaagtggatacaaaactatttcagcaatgcag

SEQ ID NO: 420335 - DNA, 82 bp, Homo sapiens
gaatatccaaataaaccaccaactgttaggtttttatccaaaatgtttcatccaaatgcctgatgaaaacaaaggcgatatg

SEQ ID NO: 420336 - DNA, 101 bp, Homo sapiens
tattatggctgctgttgtccaacagaacgacctagtatttgaatttgctagtaacgtcatggaggatgaacgacaggtacctagtcgatagtcgctggttc

SEQ ID NO: 420337 - DNA, 83 bp, Homo sapiens
ggcggccgctctgcctgcgcgctgctcctgctctgctacctgaacaactcttggaatttatgcaccagttgcctgcttttgcc

SEQ ID NO: 420338 - DNA, 75 bp, Homo sapiens
acggaatgcagtttttacataagttgttcgtgagccacacatctccccacaccaagctcctccatacaagacctc

SEQ ID NO: 420339 - DNA, 75 bp, Homo sapiens
aatccacatatctcctctaccagccaacctccatgagagctatccgtgccagatatgaccctttcctacagacaa

SEQ ID NO: 420340 - DNA, 74 bp, Homo sapiens
ccgcgcgcccgcgccctccgcgcgacgccaggttaatttggagtggcccctggagtcagtttcctacaccatcc

SEQ ID NO: 420341 - DNA, 83 bp, Homo sapiens
aacgaggcaaggagctaaagcagcgtgcgttcagccctgggagatcctacagtaaggaattgtttgaagaagttatttcaaag

SEQ ID NO: 420342 - DNA, 82 bp, Homo sapiens
ccggacggtacttctgccactgctgctccgtggagatcgtcccgcgcctgccgccacaatggtgcgcatgaatgtcctggca

SEQ ID NO: 420343 - DNA, 75 bp, Homo sapiens
gaacatgccttcatcctctataacaagtatatcacgtttttagaacttcagccataaaaatgggcagaattttcc

SEQ ID NO: 420344 - DNA, 75 bp, Homo sapiens
cagccaagctcgtagcctgccactccgtgcctgcctgtggaggaaccgattgtgtccacagatgaggtcatcttc

SEQ ID NO: 420345 - DNA, 75 bp, Homo sapiens
ggacagtacaaagaacggtgatggtacgaagcgccgtgctcagcagggagaccccctttcccgctatatcttcag

SEQ ID NO: 420346 - DNA, 75 bp, Homo sapiens
agctgctccggcctagcctggcggagctccacgacgagctggaaaagactcaaggcacaggagggaagaaagtca

SEQ ID NO: 420347 - DNA, 98 bp, Homo sapiens
cggagccggtgccgcagctgcgatggccgtggccgtggggagaccgtctttcataattggacccttgaagacactcttcagtggttgatagagtttgt

SEQ ID NO: 420348 - DNA, 101 bp, Homo sapiens
agggggcttggggggcctcgcctgagagagtgagcgtgttccgcagctgtaggcacctgtcgtcctgccttcgatggctcctccctccgtccccctggtcc

SEQ ID NO: 420349 - DNA, 98 bp, Homo sapiens
ctaaggccgcgttggggtgagaccctcacttcatccgggtgagaactctgtctcagtcgacgggaagtgcagtgactccacgctactgagcaacttgt

SEQ ID NO: 420350 - DNA, 100 bp, Homo sapiens
cccagtccctcggacccatcgccgcttctagaccctactgcggtctcggatattgccgggttaatagcaatgaacttacaaatggggtaataaatgctgc

SEQ ID NO: 420351 - DNA, 74 bp, Homo sapiens
cctttatatagaagggagagtaggtgggatgagagactgagaaaagaaataagacacggagacaaagtacagag

SEQ ID NO: 420352 - DNA, 83 bp, Homo sapiens
atgagctggggcaccgagctctgggggtggcctggaggccaagcagatgtggcagttctgcagcagaagcatctgccacaaaa

SEQ ID NO: 420353 - DNA, 74 bp, Homo sapiens
ttgcattctactggtgtggatgtgctttggaactgcgacataactagcgatggctgctgcgatctcacaaagct

SEQ ID NO: 420354 - DNA, 83 bp, Homo sapiens
cggcagtggcggcgcgtaggaggcgtgccaggtggagctcaacaggaaagtcctagcggatctggccatctacgagccaaaga

SEQ ID NO: 420355 - DNA, 76 bp, Homo sapiens
gcgagcgagaaggcacggagtcgccgcggagcgcagctaaacccacagttcagccctccccttctacaacttccaa

SEQ ID NO: 420356 - DNA, 76 bp, Homo sapiens
ggtttgatagcggaacttcatggtcttatgttcttccagggattaatgaaaatcaagttccatcctcagacaagag

SEQ ID NO: 420357 - DNA, 87 bp, Homo sapiens
agtgctacagagccaactcctgacaggtatctcttgggtcacagattgatttacagaagaagaagcggcgagcgccagctccccctc

SEQ ID NO: 420358 - DNA, 90 bp, Homo sapiens
agaatatttaatggaaaatcgcttggttaaaacctgacacttttaacaggcagtgaaatcaactgtgcagaccatcactgttggaggagt

SEQ ID NO: 420359 - DNA, 51 bp, Homo sapiens
tttcttcgaaaaaagcttattgggaagaagctgctcagatggaagataaaa

SEQ ID NO: 420360 - DNA, 50 bp, Homo sapiens
atttactgcacctaaagacaaaggcagcacgctggctcttctcctgaact

SEQ ID NO: 420361 - DNA, 135 bp, Homo sapiens
tggggcagccgccctctgccacccccacggccatcctcactcaggactccctgcagatgttcctgccccagggaagctgtgattaagcactcattggtgcataaagtattcttggacttttttacctatgcaccc

SEQ ID NO: 420362 - DNA, 100 bp, Homo sapiens
cttgcctaaagctgataagaaggcagttatccaggatcatggcggggcgctggggcccgaggagttcaaggcctgcctcatcagcctgggctacgacgtg

SEQ ID NO: 420363 - DNA, 100 bp, Homo sapiens
gcccgcaaggagtgctgggaccgggacggcaaggagagggtgacaggttggatggcaagcatgtggtgtttggcaaagtgaaagaaggcatgaatattgt

SEQ ID NO: 420364 - DNA, 75 bp, Homo sapiens
gatgccggatacaggagggacgtgcaccaggtgcgtgggactcatgaactcaccaatcccgggatcgccgaggtc

SEQ ID NO: 420365 - DNA, 51 bp, Homo sapiens
ggacgaaggccctactgggcaaggttgctcgtgggggccccgcgggcagaa

SEQ ID NO: 420366 - DNA, 90 bp, Homo sapiens
gtgagtgcctgtataaaatattctatgtttaccttcaacttcttgttctggggagaagagaagtttacctttattgagaaatgtaacaac

SEQ ID NO: 420367 - DNA, 75 bp, Homo sapiens
cagccccccaagcagggacccgttgaacaactctggggtatatcccgtgccttacctgactgggggctctgagtc

SEQ ID NO: 420368 - DNA, 74 bp, Homo sapiens
aaaagccaagaggaggacagttcgctacacagcaatgcatcgagagccgagagtgtgtggagcagttacagctg

SEQ ID NO: 420369 - DNA, 90 bp, Homo sapiens
gatgaacttgctagccttggagaatacagagatacccccgtttaccttatgggtgggaggaagcttacacagcagatggaatcaagtact

SEQ ID NO: 420370 - DNA, 101 bp, Homo sapiens
atggaaccaacacttcagctcctcaggacatttatgcggtgaccatggccgaccgggcggcagctgagagggcttgcaaagacccgaaccccatcatcgac

SEQ ID NO: 420371 - DNA, 90 bp, Homo sapiens
ggattctcactgagttttgactagcggaagaaaagccacccaggctactttgggaaagttggtatgaagcattaccacttaaagaggaac

SEQ ID NO: 420372 - DNA, 96 bp, Homo sapiens
gtcgcctccggggggcgtagcaagaacgtccagttgcggataatgagcgaatgtttgatgttcttcaacgatttggaagtcagaggaacgaagttc

SEQ ID NO: 420373 - DNA, 82 bp, Homo sapiens
gccagacacagaaagacaaataccacgttctaatttgtgcatgggagctaaaatagaatcaagtactggaaatgtttgatca

SEQ ID NO: 420374 - DNA, 88 bp, Homo sapiens
gcctggcttcaagttcatacctgaggatccgaaggtctgcacaggccagcctttcgaccccaccttcctcatcggctgcgcgccctgc

SEQ ID NO: 420375 - DNA, 82 bp, Homo sapiens
aaagatttattagacattgcaaatggccactttaatggatcgagaagtggcgttgcttgctgaaatggacaaagtgaaagct

SEQ ID NO: 420376 - DNA, 52 bp, Homo sapiens
gctgctacaggaccgccgggcccgggaagtggtgctggacatgcagtcccac

SEQ ID NO: 420377 - DNA, 83 bp, Homo sapiens
ggaattttggagatattcaaagggtgtccagggtggtcgagccaaacgctattcatcccagcggcaaagacctgtgccagagc

SEQ ID NO: 420378 - DNA, 100 bp, Homo sapiens
agaaaagacagtgttctgctttcatggagttcacagaagagtcgaggagacttaccagcgttataggccagtatcaacttcaagttcaaccactccatcc

SEQ ID NO: 420379 - DNA, 82 bp, Homo sapiens
cgcgcaggagaagctggagctcacggagaagaaggcctccgacgtaacgtgaagcacctggttctcttcctccatgaggctg

SEQ ID NO: 420380 - DNA, 100 bp, Homo sapiens
ccggggcctgctggtcatctggaaccaggcctcgcagtgtgtggaccacatcttcctggggaaccaggttgactgcattcagccagtgccaaaagaggag

SEQ ID NO: 420381 - DNA, 100 bp, Homo sapiens
tctggcgctgctgggcgcccgggcccgcgccgagcccgccgggagtgccgtccccgcgcagaaaacagggaaacagccttgcagctgaggactggtgtga

SEQ ID NO: 420382 - DNA, 90 bp, Homo sapiens
cacgagacaaagctaatgaagaaggtctggcattactacagctatttgaactgctgggacctgaaggacttgaacttattgagaaactcc

SEQ ID NO: 420383 - DNA, 82 bp, Homo sapiens
tttagagatggtgaagaagcaggtgcttatgatggacctaggactgctgctatccagtcagttcgctgctattcccatgggt

SEQ ID NO: 420384 - DNA, 90 bp, Homo sapiens
aacgagctcaccctggctgactgcaacctgttgccaaagttacacatagtacagacgctgaccggaaaggagattgagattgacattgaa

SEQ ID NO: 420385 - DNA, 75 bp, Homo sapiens
ttctgtcttcaatgaggctgagaccaagtccacactgatgttcggacagaggttgtaggtggcctagatatccac

SEQ ID NO: 420386 - DNA, 90 bp, Homo sapiens
tggactcatcttcatggaaacgtctgctaagactgcttccaatgtagaagaggctcaaactgctttttctgcaaaccctgccaatccagc

SEQ ID NO: 420387 - DNA, 75 bp, Homo sapiens
cggctcccgcaccatggaggaggacgacagctacggatgcagcagtctcggccctggctgctctatgcagtgaat

SEQ ID NO: 420388 - DNA, 75 bp, Homo sapiens
ttcctgctagtgcaggcctccaggtgagaagccctaccactgcaactgggacggctgcggctggaagtttgcgcg

SEQ ID NO: 420389 - DNA, 83 bp, Homo sapiens
ggcatttgtcttctgtccatggtgctgaagtttattcactttcaaaccactttcagtaacagagtgtgagaattttgaacaag

SEQ ID NO: 420390 - DNA, 88 bp, Homo sapiens
acggcagggcttaaagttccgggcccctacaaaggcttcagagtagatatctctgccaacatgaggacagaaggactggtgcgacccc

SEQ ID NO: 420391 - DNA, 98 bp, Homo sapiens
ctatcttgaactccacagccttgatgacttctacataggaaagtattttggaggagtggcatacaagaattaaattctgaataagtctgcaggtagga

SEQ ID NO: 420392 - DNA, 88 bp, Homo sapiens
ggaacctcaattaatgcaaacgcagtatttggcagtcgtattcagagataaacccctggagctatgggatgttaggacttgtaccctt

SEQ ID NO: 420393 - DNA, 100 bp, Homo sapiens
tggacatcaagattaaaagagcgaataaagtttatcacgccgggggacgattactttgccaaaaaaaatgaagaaagaaaacaaaataaagtggaagcta

SEQ ID NO: 420394 - DNA, 100 bp, Homo sapiens
acacatgctaaaagatgacagacttggacaacatgtcccaacattacatcccagtagatttcgggcagacaacttgaacaagctgaagaacctatgcagc

SEQ ID NO: 420395 - DNA, 75 bp, Homo sapiens
tgaaaagaaaatttctgtttcatgtgaagaattccgatttggtactttcaatggagtctcgctctgtctcccagg

SEQ ID NO: 420396 - DNA, 89 bp, Homo sapiens
gtggcggcgctgccgcctgaagtgcgggcgcagctggcggagctggagctggagctctcggaggattgagggatactccccctttccac

SEQ ID NO: 420397 - DNA, 98 bp, Homo sapiens
gaagagtacaagctgatcctgtccacaggagccctctggcacaaatggaagaagaaagaagggagcaagtagctaaaattaagaagatggagatggag

SEQ ID NO: 420398 - DNA, 101 bp, Homo sapiens
gatgcagaggatcagaaccggtacctggatggcatggcgagcccacaccttaaccgtgctcttcatcctcacctgtacgcttggctatgtgacgctgctgg

SEQ ID NO: 420399 - DNA, 82 bp, Homo sapiens
gacaagctgagcttgccgcacaaaaagctagagaggctatggctttgtggaattcttgagtgaggaagatgctgactatgcc

SEQ ID NO: 420400 - DNA, 98 bp, Homo sapiens
ctaggggtgcaggaggaggacggcagcaaccgcagcagcagccttcagagcgagctgccctcggaggccggcgtggggaagatggcccagtccaccgc

SEQ ID NO: 420401 - DNA, 100 bp, Homo sapiens
gaataatctgcttccatcccgccagtttggccgggctgcccatctacgagtgcaactcccgctgccgctgcggctatgactgcccaaatcgtgtggtaca

SEQ ID NO: 420402 - DNA, 83 bp, Homo sapiens
accaagtcgggttttagtgattccttcctcaaatgttagcattacaacgatcaatatggaaattatgtaatccaacatgtact

SEQ ID NO: 420403 - DNA, 75 bp, Homo sapiens
cagtctgggggcgctggcggcctgcgcagccacctcaaggtgtcagtaattaacactgtggatacctcccatgag

SEQ ID NO: 420404 - DNA, 98 bp, Homo sapiens
gccggaacaccctggaagccgagaaatgtcccagctatctgacttcatgtgaaagatggctaatgcagaagtgagtgtcccagtgggggatgtggttg

SEQ ID NO: 420405 - DNA, 96 bp, Homo sapiens
cgacagattatgactgctggaaggagcacgaggaagcagtttcctatgctcgcccaagttcagcttctatcagagatgcaaatttatatgtcagcg

SEQ ID NO: 420406 - DNA, 100 bp, Homo sapiens
acgcccggcgccagcacatcgcaggttaatgatgaaatggcaggtaattcacacttttggacagagcgcaccgcccccgtggaatcaccctacagaagag

SEQ ID NO: 420407 - DNA, 100 bp, Homo sapiens
cggggctccccatccttcagcaccacagccttactcaagattgacatcacagatgctgagtatgtgcacgagggaggcatagaggacctggtgaggcccc

SEQ ID NO: 420408 - DNA, 83 bp, Homo sapiens
gagaactggagcccgagctgcgccgccgccgctacgaatacgatcactgggacgcggtgagaagccctaccactgcaactggg

SEQ ID NO: 420409 - DNA, 100 bp, Homo sapiens
gtcggaacagaaccaaaggctattggatcagctcagcaggggctgtgggacagatgatgtctaccatgttctacccactggtcacctttgtcctcctcct

SEQ ID NO: 420410 - DNA, 74 bp, Homo sapiens
gaccatgcagcaaaagaaggagggtcctctcagtgattaaggaactgtggctgcaccatctgtcttcatcttcc

SEQ ID NO: 420411 - DNA, 100 bp, Homo sapiens
catgaagcgggctggcggcgctgccgctcccgggcggccgcgggcggggcagcgggtggcatgagacgtgggaacatgggccacctcacacggatcgcca

SEQ ID NO: 420412 - DNA, 100 bp, Homo sapiens
tgcaatttatgaacctacggaagaagaatgtgaatggaaaccagatgaagaagatgagatttcggcaaacctgtatgtgggactggtggtcatgtgtggc

SEQ ID NO: 420413 - DNA, 100 bp, Homo sapiens
gaagctggatgtatacatctaccaagaactgcagtacagcaatggcgatcagaaggtagaacagctgtatggctgcacattcccatcctccaaagccgat

SEQ ID NO: 420414 - DNA, 83 bp, Homo sapiens
cgaggtgcccggctgcggaaagagtccaactccccagattaaacctgaatatttagccttgaggtctgttggcatcagaagag

SEQ ID NO: 420415 - DNA, 100 bp, Homo sapiens
aacgggagggcgctacggaagaggcggtccgggagaggtttactcctggcttgggggcattaggaagcactggaggctcttcgggaactaatggatctaa

SEQ ID NO: 420416 - DNA, 101 bp, Homo sapiens
ctacaggcggggacggcttctcggagtccatagaggccactgtattctattgaagaacatgtctaacagtaacactactcaagagaccctggaaataatga

SEQ ID NO: 420417 - DNA, 90 bp, Homo sapiens
gcaaactcatctccaggaaggacttcgagaccctctacaatgactgcaccaacgcaaggatggctgcagctcctccaagttactgttttg

SEQ ID NO: 420418 - DNA, 100 bp, Homo sapiens
ctctaccttgcgagccgtcttccccaggcctgcgtccgagtctccgccgctgcgggcccgctccgacgcggaaggagcgcctggaccatgctgctgagcg

SEQ ID NO: 420419 - DNA, 100 bp, Homo sapiens
ccagaagatgacatatgcaactgcaaatcagaaggagcccatgaatcttaattttaaagtgaaagaggagcctaaggaaggggagtccctaagcacgact

SEQ ID NO: 420420 - DNA, 100 bp, Homo sapiens
gaaaggataagcctcgacttagaagctaccgagttaccctaagaaagccctggcctcccacgactacatcctgaagattgtgcccacggtttatgaggac

SEQ ID NO: 420421 - DNA, 100 bp, Homo sapiens
cagccacctaattactacgaggtaatggagtttgatcccttagctcctgctgtcactacagaggaaggacatggagcccaacggcccgtcgctgcccagg

SEQ ID NO: 420422 - DNA, 77 bp, Homo sapiens
catcatgggtcgcatgcatgctcccgggaagggcctgaccttcgtctctgtgcacgactgttactggactcacgcag

SEQ ID NO: 420423 - DNA, 83 bp, Homo sapiens
gttcagttggcaaaccagatatatgacttggatgctgggcagttttatgctaaatataaagaaacaagattgaaggaaaagga

SEQ ID NO: 420424 - DNA, 100 bp, Homo sapiens
ggccaaaggattgcttcgaaaccttcgacttccttcagggtttaggagaagcactgttgttttccacacagggcatccgcttcgatcctgaaattccgca

SEQ ID NO: 420425 - DNA, 75 bp, Homo sapiens
gtggatgcagcatcctagtggaggacgcccctgtggtgcaactgacatgggtgaaccccagggatccatgcggat

SEQ ID NO: 420426 - DNA, 50 bp, Homo sapiens
gagtatataaggatgaaatttggataatttccagcagtgttataagcgag

SEQ ID NO: 420427 - DNA, 75 bp, Homo sapiens
tatatccatcatgtcagaagtgcttctctaggataatcctggtctccaaaagccatcactggtgcaagctatatt

SEQ ID NO: 420428 - DNA, 100 bp, Homo sapiens
ctggtcaacatgtgcgtggctacggtcctcacggccggcgcttacctctgctacaggatatttctccctcgagtggctgggaaacttggcaagagaccag

SEQ ID NO: 420429 - DNA, 75 bp, Homo sapiens
cggcgtgggcgtttgaggaagctggatggagcagctatcagatgaagaaattgatcatggtgctgaagaagacag

SEQ ID NO: 420430 - DNA, 90 bp, Homo sapiens
cagctgccgaggcgttcggtcctgctgttgcggccgctgccccagggctgcggggacggtctcttaaccttcattaactgtgcctatgtc

SEQ ID NO: 420431 - DNA, 100 bp, Homo sapiens
ctgattctgcccccagttccagttccaaagattaaaggaatcgatccagatctcctcaagattattggagaccttttacaattccaaggatctcacaagc

SEQ ID NO: 420432 - DNA, 96 bp, Homo sapiens
ggtggcggctcgggacggaggacgcgctagtgtggtcaagtaccccctgcacgccatcatggagatcaaggagtacctgattgacatggcctccag

SEQ ID NO: 420433 - DNA, 100 bp, Homo sapiens
cgccgagtcatatggggacctttcggaggaggtgcagcagtgaacagcagtgagagtctccctccatcctcgtctgtcaatgacatctcctccatgtcca

SEQ ID NO: 420434 - DNA, 83 bp, Homo sapiens
cgagcctccggacagacgccagagcgaggagggcgctacgcggacagagcgggatgccaccagcttgtccaaagggaagttcc

SEQ ID NO: 420435 - DNA, 100 bp, Homo sapiens
ctttcccgcggctgatttgccttaaactccctaaaatctccgcagctctggttcctgttgcggccggtatattcgaattgttgggactcacaacacagtg

SEQ ID NO: 420436 - DNA, 100 bp, Homo sapiens
gctgacggactgggggcgccgcccgcgcccgggaccgacccctctgctcgcggccgcgcctttgaggtgacagatcagtcagtgaaagcatttgctgaac

SEQ ID NO: 420437 - DNA, 50 bp, Homo sapiens
ctggaacatgcagagtctgcacaaatgccttcaattaagttgcagagttc

SEQ ID NO: 420438 - DNA, 90 bp, Homo sapiens
gaagtcgacggcgccggcggctcctggacactgcccatctctaagataagaacctggaaaggggactctgttggccattggaaattgcag

SEQ ID NO: 420439 - DNA, 100 bp, Homo sapiens
ggctgagccatgaagctcttagacaaatctatctctctggacttcattcctggaaaaagaagttcatcagattcaaggtcctgctggttggggcagacaa

SEQ ID NO: 420440 - DNA, 75 bp, Homo sapiens
gtggctgcggcgcgggccgagaaggaagatctattaatgagatgaagcggttggaagaaatgtcaaatatgtttc

SEQ ID NO: 420441 - DNA, 100 bp, Homo sapiens
ggcggggatacagcctggaaggtgcgtgtggggctgggtctcggagtgggagacgtggagtgcagccggcacagtcttcactaccgtagaagaccttggc

SEQ ID NO: 420442 - DNA, 75 bp, Homo sapiens
cgcaagcaaggcaaaccccagcacttaagcaaacgggaattctcgcgaatggtcctcgtccgaagtgagaatggg

SEQ ID NO: 420443 - DNA, 75 bp, Homo sapiens
tgataacctgtctcaaaaccctcctcatcatctactccttcgtcttctgggtcctcctagccagcagttttgtgc

SEQ ID NO: 420444 - DNA, 75 bp, Homo sapiens
gacgacgagtacgactacctctttaaagttgaaaacgaggcccactgcgactttgtgaagctgcgggagatgctg

SEQ ID NO: 420445 - DNA, 80 bp, Homo sapiens
ccgttcttgcctcaggccagtcgcctccaggccaagagggatccttcacccgtgtctgaagtccattggaatattaagcc

SEQ ID NO: 420446 - DNA, 112 bp, Homo sapiens
cgcgcgcagggcctgcagcgggagctggacggcgagcgcgagcggcgcgagaaaaaggaagaggcccagcagaagggactcgctgagccaccccccgccccactccatgttg

SEQ ID NO: 420447 - DNA, 87 bp, Homo sapiens
tgtcctttcaggaaggagccattatttatgtcatcaagaagaatgacgatgcttcgcagaatcaagaacggctatgtgcgtttaaag

SEQ ID NO: 420448 - DNA, 97 bp, Homo sapiens
cacttccccatctgtaacgaggtgttgagacgaggggttcagctgttgcaaaaataattggtaataatgtcaagaaacttcagaaatttgcctccac

SEQ ID NO: 420449 - DNA, 100 bp, Homo sapiens
ccgggtgctgctggttagtgtgctctgagggagggtccgagccagccgctgttttgccggaggagcccctcaggccgctgaagctcagggccctgtctgc

SEQ ID NO: 420450 - DNA, 82 bp, Homo sapiens
ggatcatgtctgcgagccaggattcccgtttctccacagtcgaactcctctaggcccacctgtgcccgtcacctcaccttgg

SEQ ID NO: 420451 - DNA, 83 bp, Homo sapiens
gtgcaagcaccaaggaggcctgttcataaaagatatcgaggatttagccggaagtgttctaagaacggaagcatctgggctgg

SEQ ID NO: 420452 - DNA, 100 bp, Homo sapiens
cagtgatggtgatttatgcctagttgttaaggaagaaccagtggagtctttcattttggatcaggatgatttggaaaatccaatgctggaaacagcttcc

SEQ ID NO: 420453 - DNA, 83 bp, Homo sapiens
ggatgggggaccacaagatcctcatcgacagaaactatgttccaacttcctgtcaacaatcttggcagtttaagaaaagcccg

SEQ ID NO: 420454 - DNA, 100 bp, Homo sapiens
ttttgagggaattgatgatgttcactggaaggaaaatgggacattagttcaagtagcaactatatcaggcctgaattattggaacaactttggaaagcca

SEQ ID NO: 420455 - DNA, 75 bp, Homo sapiens
tttgaaaattgttgaagctgagtaatgggctaccctgtcatgatcaaggcctcagcaggtggtggtgggaaaggc

SEQ ID NO: 420456 - DNA, 100 bp, Homo sapiens
ccttagctgtgctcgcgctactctctctttctggcctggaggctatccagccgacttcctgattctcccaggattcatagacttcatagctgatgaggtg

SEQ ID NO: 420457 - DNA, 100 bp, Homo sapiens
ggactcagatgagcaactggattatactgtactgcccatgaaaaaggatgttgaccggacagaccaagaaacatcatggtgtataattgtacaacaggca

SEQ ID NO: 420458 - DNA, 100 bp, Homo sapiens
atcgaatgcatgggaagaaacttccatgaaaattgctacaggtgtgagacagcagccctctcgtgggcagcacgcccaccggttatgggaccctgacgat

SEQ ID NO: 420459 - DNA, 80 bp, Homo sapiens
aggacgtggaggattcaatatgcgtggtggaaatttcagaggaggaggacatggtctgctatacagctcagactctcgtc

SEQ ID NO: 420460 - DNA, 100 bp, Homo sapiens
tgactcaccagcgtcctgaagcttttgatcaccattggctgggaaggaaaaacagaatcagctgttccctgcgaaagatgtgccgtttgggggtgctaaa

SEQ ID NO: 420461 - DNA, 82 bp, Homo sapiens
aggcggcgtgggcatgggcatgtacaacaccgacgagagacgagttgtactgctgtcacaggaaatggacgctggattacaa

SEQ ID NO: 420462 - DNA, 100 bp, Homo sapiens
cattcacctgaggcacccgaagaagagaccatccatatttccagttttctggatatgccgcagaaggatccgtgccagaagcaagcctgtgagatacaga

SEQ ID NO: 420463 - DNA, 51 bp, Homo sapiens
cggaaagcaaggatgctttaccaatgagccagccccagtgcctgctgagcc

SEQ ID NO: 420464 - DNA, 99 bp, Homo sapiens
ctggggccgaagcagcatgtgacaccgaccaggcatgtcctagttcagataaacatgctttagtaactccttggctcaaaggcgatatccttggtgaga

SEQ ID NO: 420465 - DNA, 100 bp, Homo sapiens
gtcatttccttcgtacccacagtgcttcatgagaggaagtgctctctggcgtggtggtcatatcgagtaaggattcagtccaacaccagggagtgtcttt

SEQ ID NO: 420466 - DNA, 100 bp, Homo sapiens
tgatttaggaaagtcctatcggatgctgagatcattcagcgggctacattgagagacctcagctgattcgagcaaaagtgccaattgtgaagttcaggga

SEQ ID NO: 420467 - DNA, 83 bp, Homo sapiens
tgtctatatatttccccattcactggtgtccctggccagtgtccttccacctgtccacaagcatggggaacatcttcgccaac

SEQ ID NO: 420468 - DNA, 96 bp, Homo sapiens
ggaaggggaagaggaaagcaaaggcgtcaggaatggttcttcctcagtcctggtcagctgagtggaaatagaaggatttctgctgccatcatcttc

SEQ ID NO: 420469 - DNA, 82 bp, Homo sapiens
cacacccatcgcccctggctttgccagcctcaatgagatgggatctcagaccgtggtggaggaatcgctcacaaagatctgg

SEQ ID NO: 420470 - DNA, 75 bp, Homo sapiens
gtcggagacccatcactggcatggtaacagagattcaaaggtaccttcagaaggaaagaaatctctctacacaga

SEQ ID NO: 420471 - DNA, 51 bp, Homo sapiens
gatggcccaggttcttcaaaagatcaggcattgccagtggacctgagcaac

SEQ ID NO: 420472 - DNA, 90 bp, Homo sapiens
ggcctgggtgctggcgaagcggaggccggaggtacctgcacatgttgttctttgtcagtgctgtcaagtgtgtgccagggtgatccatgg

SEQ ID NO: 420473 - DNA, 83 bp, Homo sapiens
catgtcggcgcaggcccagatgcgcgcgatgctggaccagttgatgggcacctcccgggacgacagcccacctgaggatattg

SEQ ID NO: 420474 - DNA, 90 bp, Homo sapiens
cacttgactaatcttcgggcagagagaaggaaacacttagaggaagttctggagatgaatactaaggctcgtacgtctgcatcgattatc

SEQ ID NO: 420475 - DNA, 82 bp, Homo sapiens
tatcgtcgagaagcctatcatcgaatgccttccctgtgtctggtcaactctatacaacacacctactatctcttgatgccct

SEQ ID NO: 420476 - DNA, 100 bp, Homo sapiens
ggaagaggagaaggggggcaaagatggaaagaactccagtggatccaagcgttataatcgcaaacgtgaactttcctaccccaaaaatgaaagttttaac

SEQ ID NO: 420477 - DNA, 83 bp, Homo sapiens
cagctccattaatgcaactaccattacactaagggggatatgagactttctactcggaatatcctgagtgttgcgtggatgta

SEQ ID NO: 420478 - DNA, 98 bp, Homo sapiens
aggtgagcctgcgatgcgcgggaagacgttccgctttgaaatgcagcgggatttggccaaacgtaccaagaaagtcgggatcgtcggtaaatacggga

SEQ ID NO: 420479 - DNA, 98 bp, Homo sapiens
gccattatcctctgtttctctgctgcaccgacctcgacgtcttgcctgtgtcccacttgttcgcggcctatagacccgtgcctgtatattccacgctt

SEQ ID NO: 420480 - DNA, 75 bp, Homo sapiens
cattttgctgtctcctcctaatacggttgccaaggaaagtgtactgcagttttacccgaaagctaatatcgttgc

SEQ ID NO: 420481 - DNA, 74 bp, Homo sapiens
tatgcaacgctgggcatgaggagcggagcggagaatgccaaggccctcgggaccaaggatcacgtcatgactcc

SEQ ID NO: 420482 - DNA, 76 bp, Homo sapiens
ctctaagcctatggaaaagcttctgggcatccgtgtcattctggaccttactcccaactaccggggtgagaactcg

SEQ ID NO: 420483 - DNA, 74 bp, Homo sapiens
cgggctcctacctcctggacggcaagccgctcagcaagctccacatccccgtgttctgggaagtcatcagtgat

SEQ ID NO: 420484 - DNA, 139 bp, Homo sapiens
ctgcgttcgctcaccgctgtcacctgcacggtgtggctggcggcctacggactcttcaccctctgcgagtgacactggagagctgattgttgaggagcttctgttgaacggcaaactgacaatgtcagctgttgtgaag

SEQ ID NO: 420485 - DNA, 98 bp, Homo sapiens
caaacttggtataccttgctacaatagcagattctaatcaaaatatgcagtctcttttaccagcagttttaccaattcttgagattctgtatcatgtt

SEQ ID NO: 420486 - DNA, 106 bp, Homo sapiens
tatctgtcttcggtggactccttcggcagtccacccaccgccgccgcctcccaggtaactaggatttctacctcaaccgcgagacctatgcaaggacggtgtggac

SEQ ID NO: 420487 - DNA, 100 bp, Homo sapiens
agacagcagcgactagggctcgggcgccggcgagatgcctttgttcaccgccaaccccttcgagcaagacgtgggctctgccgacttccagttctggaac

SEQ ID NO: 420488 - DNA, 97 bp, Homo sapiens
cgaccagtgaggcggccgccgcagcccaggcgcgggggcgacgacagctccatctgatccactggaactccactctgtttggcagcattgatgaggc

SEQ ID NO: 420489 - DNA, 80 bp, Homo sapiens
gaagaggccctgcggaggcggcggtgcagcgctccggtctcagatgatgataaagaaaagggagagggagctcttccaac

SEQ ID NO: 420490 - DNA, 100 bp, Homo sapiens
gagaagtttcccagaaaaaatgcccagcgcggcgcggggctgcggagtcgtccggagccgctgcgcgagtgtgaacatggctacgcctcttcattcccgt

SEQ ID NO: 420491 - DNA, 90 bp, Homo sapiens
ggctgtttgacagagcagacttaccctgaagtagttagaatgttggaaaatggatataccttatttgattatgatgttggactgaatgat

SEQ ID NO: 420492 - DNA, 83 bp, Homo sapiens
acgaggcaaggagctaaagcagcgtgcgttcagccctgggcagtgactcttcgagaagacagtgccaagaggttggagaggag

SEQ ID NO: 420493 - DNA, 74 bp, Homo sapiens
cagcatattgtactggcctgctgctggcccgcaggaaatttctgaataaattggcagaagaacgcagacagaag

SEQ ID NO: 420494 - DNA, 83 bp, Homo sapiens
cgcggggaccgctgtgctctcggttgaaatcacaaagattagacacctttttagataggtgttcttcagcaccactgacaaca

SEQ ID NO: 420495 - DNA, 100 bp, Homo sapiens
gacggacagaggatgcacttgtccaatcctcaatcctgttttcagatgcttcaagtgttgtgaacagagacttgtttggattatgcatttctcagctaga

SEQ ID NO: 420496 - DNA, 75 bp, Homo sapiens
cctgggtgaactttcacggacaacctcagaggacaacgaagtgttcgcaggggaacaggaacctgataaagaatc

SEQ ID NO: 420497 - DNA, 100 bp, Homo sapiens
tagtggctcactcatgattgcttgccatgcaactgtgaaaccagggcagacagaaaatgatctctgcctttcacaaagaccacctttgtgcatccatgcc

SEQ ID NO: 420498 - DNA, 90 bp, Homo sapiens
ctctgaccaccatggctccctacctcagcactgaagatgtggtggatagatacttctcaagacatcacacagcgtgagtcaatcaaggag

SEQ ID NO: 420499 - DNA, 100 bp, Homo sapiens
atttcttccaaagcacaggaatctcactctgttaaagctggtctgttctaactgaggatgacccctccggcgaaggtgtcctgccctcggcccgcggccc

SEQ ID NO: 420500 - DNA, 78 bp, Homo sapiens
ttcatccgagacagcctggagaagagcgaccagctcactaagaacatggcttttatcttgagaacatggtgtctggag

SEQ ID NO: 420501 - DNA, 83 bp, Homo sapiens
ctggaacacacatcagtcacgatgctcgtcagaagttccgctctgttctggttgaagcaacggtgaaactggatgaactggtg

SEQ ID NO: 420502 - DNA, 83 bp, Homo sapiens
caggagccccggacttcacctgagctacctcagacctgcctagagctggaacgttacctccagagcgagccctgctatgtttc

SEQ ID NO: 420503 - DNA, 129 bp, Homo sapiens
gctgatgaaacttgggactctgcaatagatacatggagcccatcagaatggcagatggcttatgaaccacagttcttctcaccactaaatccaatacgagttcatattgatattggagctgatggcaga

SEQ ID NO: 420504 - DNA, 82 bp, Homo sapiens
ttgcgttgtagtcgtctcaaaggggcaaatgatggtggcatctggcaatcaattagtagaatgtcaggagtgccataatctc

SEQ ID NO: 420505 - DNA, 82 bp, Homo sapiens
ctgcagtgtcttccacaacctgggtcagggaagtcaaagatgcatccctgagttcttcctagcaggcaagcagccgtgcacc

SEQ ID NO: 420506 - DNA, 50 bp, Homo sapiens
gtctcaacagacctatagtgaatgaggaaggtggagtgtttacttttgga

SEQ ID NO: 420507 - DNA, 75 bp, Homo sapiens
ctgtacagttcctcaaccgcttttctacagtttgtgaggaggttgaaaatggtgtatttgtagccaacccacttc

SEQ ID NO: 420508 - DNA, 100 bp, Homo sapiens
ttgtctttatatcctgacactatgaatgctacttggatgcctcttaaggttttgaacgaagaatgtgatcagaactggtacaaggcagagcttaatggaa

SEQ ID NO: 420509 - DNA, 75 bp, Homo sapiens
cccaaagctattctgggggcaacagagcttggagttatgacctacagtgatacagggaaactaagtccagaaacc

SEQ ID NO: 420510 - DNA, 71 bp, Homo sapiens
aagctctcagggatgctggtctggcagtcagttattagaggaagtaacacaaggggatatgagtgcagcag

SEQ ID NO: 420511 - DNA, 90 bp, Homo sapiens
cgggagctcaaagtgtgccttctcgggccctgggcgctgcctatggcacagccaagagcggtaccggcattgcggccatgtctgtcatgc

SEQ ID NO: 420512 - DNA, 100 bp, Homo sapiens
ctctacagaaggaagcacaaaaagggacagtcggtaaagcctcttggtgttatatggggaaagttttcggagttttacagcaagaaaaacaccattatgt

SEQ ID NO: 420513 - DNA, 75 bp, Homo sapiens
gttaggatattgtggaacggtgaaaagaaatctgttgcttcttgcatgggaactctaatgaatcattgattgacc

SEQ ID NO: 420514 - DNA, 110 bp, Homo sapiens
atgaaggtagcaagaccagtgaggaggctctagtaactgtccaggttataaagttttagcacttttggatgtgcctgataagagtcaagaaaaagctgatttatacatcc

SEQ ID NO: 420515 - DNA, 50 bp, Homo sapiens
cttccgggagggcggctcgcaggtattgttgcagcatctggcagtgagac

SEQ ID NO: 420516 - DNA, 75 bp, Homo sapiens
ggcaggcgaaccgtggcaccgagagcaagaaaatggagcgtgaggatcatccccggagaggacgggaggatcggc

SEQ ID NO: 420517 - DNA, 90 bp, Homo sapiens
ccgagggtcgcgtgctcaaggcccttcagggctgcgcccagcgcttccgacaatgcagatcttcgtgaagactctgactggtaagaccat

SEQ ID NO: 420518 - DNA, 99 bp, Homo sapiens
tatggggcctttatcaaaatcccaggctgtcggaagcaagaaaatttttactactggagatgtcaacaaagatgggaagctggattttgaagaatttat

SEQ ID NO: 420519 - DNA, 100 bp, Homo sapiens
acaggccagtcgtgtctccagtgatgtcattgaccagaaggtgtatgagatccaggacatctatgagaacagttttgatggcgacgactttgatgatgtg

SEQ ID NO: 420520 - DNA, 88 bp, Homo sapiens
aagaaacatccacagcagcgactggcccaagttctttgaaaagactgaagttgctgaagatcctcaacaagtttcaactgtccatctc

SEQ ID NO: 420521 - DNA, 75 bp, Homo sapiens
ggactatttagtccaaccatgaaaacagccccctggccactgttctaggtgctgttgttctactaaacaaggaaa

SEQ ID NO: 420522 - DNA, 82 bp, Homo sapiens
gcttcagaggcagaaaggcagaagtggaagcaacttctatttagtgatcatgtcttacaggccccagaatcagaatgcctgc

SEQ ID NO: 420523 - DNA, 83 bp, Homo sapiens
ctttcaggagactagacctcgtaattacattctctcggccagcgcctccgcggaacttgctactaccagcaccatgccctacc

SEQ ID NO: 420524 - DNA, 98 bp, Homo sapiens
gctgatcgcagtccggaggtgaggcggaactctgagggccaattcctgtccccccagcagcatggcatcgtgtgctgaaccctctgagccctctgccc

SEQ ID NO: 420525 - DNA, 100 bp, Homo sapiens
ctggcggccaccccctcttcctcacttccctgtactctcatcgctctcggcctccgacacggagggccgtgtagccatcacccgagtggccaaccttctg

SEQ ID NO: 420526 - DNA, 107 bp, Homo sapiens
caaaggaattccgcccttgtccttacgtcctgctaacccgcttggcattgagattgaaaagctcacgaggcccagggaatcctctggaccatcagattaccaatgaa

SEQ ID NO: 420527 - DNA, 83 bp, Homo sapiens
gactccttcggcagtccacccaccgccgccgcctcccaggaaggagtcaagactgagaacaacgatcatattaatttgaaggt

SEQ ID NO: 420528 - DNA, 143 bp, Homo sapiens
tatggcacaggcctgcttgaaaaccaactcagcgtgggtgactttgtaaaaatacagaaggcctttgagcatatcagaattatctttagattcaactcttcatgccgtcaatcttcattgcaataacatctccaagatcgaag

SEQ ID NO: 420529 - DNA, 75 bp, Homo sapiens
cgacacgtggatccaagatggcgacggcgatgatcgcagtggtcatgggctcctgcaccgcaggaggagcctatg

SEQ ID NO: 420530 - DNA, 100 bp, Homo sapiens
tggtttagtatcttcttcagcaactcagtacggggctcatgagcagacgcatgcgatgtatgctctttccttcggggaacaagccgggcccttgctggcc

SEQ ID NO: 420531 - DNA, 85 bp, Homo sapiens
gagcagctgccacaatgggacatgtgcaatcaagctgtattagtcgacaggaccatttacatttcaggacagataggcatggacc

SEQ ID NO: 420532 - DNA, 109 bp, Homo sapiens
aggaagatggacagctgggaattgctgaattagaactgcagaggttcctctacagcaaggaagctgaagagggaactacccttttcattccgatcaattaatacgagag

SEQ ID NO: 420533 - DNA, 135 bp, Homo sapiens
cagcaatgagaggacccgcgtgggcaccctgcaggtggtcagacatgtcatcaactcagctggtttccgagagagcgcttttgcctacgccatcgcagcagctggcgtggtgcacgccgtgtccaatgcgtgtgc

SEQ ID NO: 420534 - DNA, 100 bp, Homo sapiens
atgggagtatctgccaaacgtagaccaaaggctcagcccacaactcttgtcctaccacctcaatcgggagcggtgccgagaaaaatttccttactagatg

SEQ ID NO: 420535 - DNA, 82 bp, Homo sapiens
aggacacttgtggagagctcgaattccagaatgatgaaattgtgtttgtggtatcctgtacccccagctggttttgggggcc

SEQ ID NO: 420536 - DNA, 100 bp, Homo sapiens
accgctccagccgcccgcgggccagcgcaccggtcccccagcggcagccgagcccgcccgcgcgccggaatactcccccagttgcaagaggcgcaggacc

SEQ ID NO: 420537 - DNA, 75 bp, Homo sapiens
aagaagttaggaaacaactgcgttttcgccccagccgacgtgcacagatgtattcataaaggaagacattagatc

SEQ ID NO: 420538 - DNA, 101 bp, Homo sapiens
gccacacgcgtacccccgtagcggaaaaactattaaaggtggaagaaggtccatatctttttctgtgggtgcttcaagtgttgttggaagtggaggcagca

SEQ ID NO: 420539 - DNA, 98 bp, Homo sapiens
ggcttcttacctacaaatgacttaagtcagcccacgggatttttagcccagcccatgaaggcagaagctcctcctggggtagagacagatcttattga

SEQ ID NO: 420540 - DNA, 75 bp, Homo sapiens
ccaaggaaaaactggagagcttcatcaaaaatagtgatagctttgataaatctgctcactttagcactctggcaa

SEQ ID NO: 420541 - DNA, 105 bp, Homo sapiens
cgagcctgggaggccggccggtgccagcacctttcggcttctgagacggcggcagcagcggcattcaggagccggcatcatggattccttcaaagtagtgctgga

SEQ ID NO: 420542 - DNA, 75 bp, Homo sapiens
caccggcagaagccgcccatcatccacagggacctcaaggaggcaacgcacgggccacaggcatgttcctgcagt

SEQ ID NO: 420543 - DNA, 87 bp, Homo sapiens
gggctgcagcaagccgcacctggagaagctgaccctgggcatcacgcgcatcctaggtgttaaaatagcatttgctgttactctgga

SEQ ID NO: 420544 - DNA, 100 bp, Homo sapiens
ccaggatcccaggagcccatcccgcttcctggtgttcttctacccggaggacgacgcagtaaaacgcaggactcttcccgcttggattcgcgaaggtctt

SEQ ID NO: 420545 - DNA, 80 bp, Homo sapiens
cgccgaccaagatggagactgccgagcagccttgagccgaaactaatctggattcactccctctggttgatacccactca

SEQ ID NO: 420546 - DNA, 83 bp, Homo sapiens
tcttaacccagtttgaaacgtaactggttccctgaccaggtactggctgtgatcgaacttctcaaccctcagagacttagatc

SEQ ID NO: 420547 - DNA, 82 bp, Homo sapiens
tgaaaactggacattataacattaaattggtttttcagcagcagatgctgtaacaggactgaaattggtagaagagggagta

SEQ ID NO: 420548 - DNA, 78 bp, Homo sapiens
gaagatgggggatttctacgacccggagcacccgacccctgatgatcgtaaacttgttgataaagaagatatcgacac

SEQ ID NO: 420549 - DNA, 75 bp, Homo sapiens
gacggctcacctgtgcgggatggaacaaaagtctcacagaaagttctccgctcccagacatgggtccctcggctt

SEQ ID NO: 420550 - DNA, 75 bp, Homo sapiens
agcctcccgagtggctgggattacagctgccatgtccacgcagagacttcggaatgaagactaccacgactacag

SEQ ID NO: 420551 - DNA, 75 bp, Homo sapiens
tttgtcagagaaagtatcactccttcatttttgtagaccaacttttctggaataaatgatgtttctcaggcttct

SEQ ID NO: 420552 - DNA, 48 bp, Homo sapiens
cagtgcctgttacttgggcaccccgagcaaccattaatctgctttctg

SEQ ID NO: 420553 - DNA, 83 bp, Homo sapiens
ggccttcagcgtttctcactggttcgaggaaggcggcctcagaggagagggaagcaaccaaccagtggttcatcccagccgtg

SEQ ID NO: 420554 - DNA, 50 bp, Homo sapiens
ccatgtcacttgacgagcaacaggaagaactggacggggctggaggagaa

SEQ ID NO: 420555 - DNA, 75 bp, Homo sapiens
agtggagtgacccgttgccagagtgcagaggagtccaatgtgctgattgctgctaacagtcagggtacaattaag

SEQ ID NO: 420556 - DNA, 90 bp, Homo sapiens
agagaagcacctgcacctcagagtaaagctgctggacaacaccatggaaatatttgacattgagggcaactccaacaacattgccaccgt

SEQ ID NO: 420557 - DNA, 100 bp, Homo sapiens
gcagaggagctggcggagagcggcctgcgggcgatcgggccgagggctttttggtggtgctggagttggcaagactgtactgatcatggagttaatcaac

SEQ ID NO: 420558 - DNA, 98 bp, Homo sapiens
tcctttcctttctccctcgcgttaggggtgagcccctccagactccgaataggagatcaagagtttgattcattgcctgctttactggaattctacaa

SEQ ID NO: 420559 - DNA, 80 bp, Homo sapiens
caagtttcctgtggcaactggcattgcttggctcttgcggctgctgtatttcctgaagaactaggtaccagtgttccttt

SEQ ID NO: 420560 - DNA, 100 bp, Homo sapiens
ataaaaactatggagaagaccagtccaatggatggagaacctaataaggggaaggaatcccccgcaataccagagaagtccttgtaaagaggttcgtgca

SEQ ID NO: 420561 - DNA, 82 bp, Homo sapiens
tcactgcggggagatgctcttcggcctagtgcgccagggcctcaagtgcgatgcttaatgcagataccgaaagagaagaagg

SEQ ID NO: 420562 - DNA, 75 bp, Homo sapiens
ccatgaaatggtacacgcagaacatgctcgagatgtctttttaatgctaaagaagccaaactataagaagctaga

SEQ ID NO: 420563 - DNA, 75 bp, Homo sapiens
ggggaaggcgccctctctgagcccagcgctactgtgaccattgaggagctcgacctggccataagggacaccttt

SEQ ID NO: 420564 - DNA, 88 bp, Homo sapiens
ggttgctttgtttttaagccaaactccaaaaagagaaagatctctctgccaatagctttccagagtgttgaatcttccaccagaaaac

SEQ ID NO: 420565 - DNA, 90 bp, Homo sapiens
agtcttcggcatcgggcgacagcaggtcacagtggacgaggtgttggcggaaggtactccaaagattcaggtttactcacgtcatccagc

SEQ ID NO: 420566 - DNA, 75 bp, Homo sapiens
gacacatcaagggcagccaattactgagactgcaaaattcaaaatggggctcaaggtattcgtttcatctacacc

SEQ ID NO: 420567 - DNA, 100 bp, Homo sapiens
agagtcctcagaagcatgtgtcttccccagctctgcagccacatactatccgtttgttcaggaaccaccagtgacagaagccaatgaagagattgctcag

SEQ ID NO: 420568 - DNA, 75 bp, Homo sapiens
gattcagccagcacactcctcgcgagcaaggaccatggccaacctggagcgcaccttcatcgccatcaagccgga

SEQ ID NO: 420569 - DNA, 100 bp, Homo sapiens
agaatgtttgattacacagatgatcccgagatatgggcacggttatgaaatattttgtgttacttgtaacagttcaaagactctgcttgcctcagcttgt

SEQ ID NO: 420570 - DNA, 100 bp, Homo sapiens
atggaggacgaggagagacagaagaagctggaggccggcaaagccaagggtgctgataagactgtgaaaggcccagatggactgaccgcctttgaagcca

SEQ ID NO: 420571 - DNA, 100 bp, Homo sapiens
attggaggccaggtttactggagtaggtgttagtaaggctgaccggttccctgatgtgttacctgcttctgctactgatccaaactgcagaacttctcat

SEQ ID NO: 420572 - DNA, 83 bp, Homo sapiens
gctggagattgctgcaaacttggtcgggaaagaggttaaagaagacacgcaagtatgatatcatcaccactccagcagagcga

SEQ ID NO: 420573 - DNA, 88 bp, Homo sapiens
gcttccttctgaaaaggcgatcttcctgtttgtggataagacagtcccacagtccagatctccagtctatgtgctgaagaagcagcag

SEQ ID NO: 420574 - DNA, 75 bp, Homo sapiens
cagacgatcccgaacggactgtcctcatcaccgggggcatcgtggccacagctgggcgcttcacccagtggtact

SEQ ID NO: 420575 - DNA, 100 bp, Homo sapiens
ggagtcaccactggacctccaaggaagccacgtgcagacatctacaaccttcgatctcctgacgagctggcatgactcacatcgtgcgggaagtcgacag

SEQ ID NO: 420576 - DNA, 82 bp, Homo sapiens
acagtgtgagtgccaagaacagggcagtgtctatcgagcttcctgcctgacacagctcacttcaagaagtgcacaatgtcag

SEQ ID NO: 420577 - DNA, 82 bp, Homo sapiens
attctcctctgcgctatgtggacattgccatcccatgcaacaacaaggtaagccaagatgggtgcatacaagtacatccagg

SEQ ID NO: 420578 - DNA, 100 bp, Homo sapiens
tgggatttttcatgaacgtggacagcctggcttggctactcactcttctgttaacagggtcctggcagggggctagagagctgaaggagagccagtttcc

SEQ ID NO: 420579 - DNA, 75 bp, Homo sapiens
tggagtgcgtgggggaccggctgttggcgggtcccaggtgtgacaccttcagcaggtctcagggaagatggcagc

SEQ ID NO: 420580 - DNA, 101 bp, Homo sapiens
gtttgagatccaggcggaagatgacgcccgggcccggaagatttgtagccaaaccgtgcgccatagccctcaacattcaggccaatggaccacaaattgct

SEQ ID NO: 420581 - DNA, 55 bp, Homo sapiens
gaagaatccccccgaaaggaccccccagatgccttcaattaagttgcagagttct

SEQ ID NO: 420582 - DNA, 100 bp, Homo sapiens
aaaccaggccaagatccacgctgacgcagagcggaaggagtgacctgaccaacggtgcagatgggatgctggccacaagctccaatgggtctcagtacag

SEQ ID NO: 420583 - DNA, 82 bp, Homo sapiens
tctaatttgaaccatgtttggattgaagccgcctctgtattacttaccagctccccgcagccaccgccacccattggaatgg

SEQ ID NO: 420584 - DNA, 75 bp, Homo sapiens
ctggaattgctactgctgcctctgtcactcctggtgaccagcattcaagatgatgaagaacgagagcttcaaatg

SEQ ID NO: 420585 - DNA, 51 bp, Homo sapiens
aagaacgggaacaaaactctggttgactatagtcaatggggccaatggagc

SEQ ID NO: 420586 - DNA, 49 bp, Homo sapiens
gttggaataccggctctcagcggctgttgcacaaaagtttataccaagt

SEQ ID NO: 420587 - DNA, 75 bp, Homo sapiens
cgcggcacgcagccgggaggccgaggactcggagttcacctgcaggaaatctggcattttttaaagtttgcgccc

SEQ ID NO: 420588 - DNA, 50 bp, Homo sapiens
ttttccacagggaattgagttgactcttcatcagtctttatccctggcat

SEQ ID NO: 420589 - DNA, 120 bp, Homo sapiens
agatattagcctaacaagatggaagcaggtttaaaattttacataagaagttacctttttcaggttgactatagtcaatggggccaatggagccaagtgtatggaaacccacaacagtat

SEQ ID NO: 420590 - DNA, 90 bp, Homo sapiens
atctaactaacacggtttttattgacagagctctgatagttgttccttgtgcagaaggccaacagagcacttatggcaaggcatctcgag

SEQ ID NO: 420591 - DNA, 82 bp, Homo sapiens
tcttgctgggtgagatggcagtgtgtgcaaaaaagcgccccccaggcttgggcactgtttaaaggaaagttccgagaaggca

SEQ ID NO: 420592 - DNA, 74 bp, Homo sapiens
cgcacgagcaccagcctagagccaggataaagtggccagtgtgtacgaagccccgggctttttcctggacctgg

SEQ ID NO: 420593 - DNA, 100 bp, Homo sapiens
gctgagacaccaagaggtggttaaagccatattggagtagcgaggaatctgattccaagcaaaaaccaggactgaagcttcaagatggctgaccaggacc

SEQ ID NO: 420594 - DNA, 83 bp, Homo sapiens
ctagagtggagaggctggcaaagaagaaggcacacgcatgatgaacgactttcgaagtaaaatgcaatcaatatttccaacaa

SEQ ID NO: 420595 - DNA, 90 bp, Homo sapiens
gaaagagccaaatcttaccttctggaccatggctgtgaatggacagagggagggattaccccggtgttcgagccccgagctgttagccac

SEQ ID NO: 420596 - DNA, 82 bp, Homo sapiens
ctacatccaggagcctcccacgaatgggaagggtcaaagaattgactgtagatccaactgctgctggtgatgttcgtccaat

SEQ ID NO: 420597 - DNA, 96 bp, Homo sapiens
agcacagcaggacaccaggacctggcctgaagacatttcctctcctcccctctggatttctcagagagatcattgaagatcctattcaagagctga

SEQ ID NO: 420598 - DNA, 116 bp, Homo sapiens
gtcagttctctgtagtgtttgccaatgttggagccgtctgcaaagtgtccccggcaagaaggtgctggagaatctggtaaaagcaccattgtgaagcagatgaggatcctgcatgt

SEQ ID NO: 420599 - DNA, 75 bp, Homo sapiens
ggcatcgaattcgcactgatgaaaatgggctttgtcctgcatgtagaaagtgtacccgtgtaatgtggacaccac

SEQ ID NO: 420600 - DNA, 109 bp, Homo sapiens
ggatcttgatgcgggacttcagtcctagtggcattttcggagcgtttcaaagagcctactttggggataaaggattatttggtcttctggatttggaggcaatcagcgg

SEQ ID NO: 420601 - DNA, 50 bp, Homo sapiens
ctcagaacacagtggacagtgacaaggcagaccagtaatgattgtggtgg

SEQ ID NO: 420602 - DNA, 90 bp, Homo sapiens
aattggccctgaaaaaagacagagaaactatgggacacagatatgttgaagctatgacttcacacctatggattcttctgcagtttatgt

SEQ ID NO: 420603 - DNA, 75 bp, Homo sapiens
cattccttctcacttggcctatggaaaacggggatttccaccatctgtcccagacctatgtgcccaccgtgttcg

SEQ ID NO: 420604 - DNA, 98 bp, Homo sapiens
ccaaacagaggattttagtctatatgcttgtgcttctccaaaaacacccatccaggcagggggatatgtgatatcagtatcaagataaaagtttggaa

SEQ ID NO: 420605 - DNA, 76 bp, Homo sapiens
tgtacccacccaaggctaaaggcagagccaggatttttgtccctgagtcatggaagacagaagagctgaaaagtca

SEQ ID NO: 420606 - DNA, 153 bp, Homo sapiens
ggggaagcagcgtgagcagccggaggatcgcggagtcccaatgaaacgggcagccatggccctccacagcccgcagggtgcgtcagggaaatcatgcagccatcaggacacaggctccgggacgtcgagcatcatcctctcctggctgaaaat

SEQ ID NO: 420607 - DNA, 98 bp, Homo sapiens
aaaagccacattcgctcccattcggataccagcattgcctccaggggagctccaggttcacagcaaacaggattcctaaatgcccttaaggacagtcc

SEQ ID NO: 420608 - DNA, 83 bp, Homo sapiens
taagaaaaggcattgaggaactcaatcaaaccagtattcttttcacacaggtgctggagaatctggtaaaagcaccattgtga

SEQ ID NO: 420609 - DNA, 100 bp, Homo sapiens
ggaggatcgtgcgggtcgcaaagggaagccgagtgctcctgcggctcccagactgcaaccagccacccctttgctgtgaagttgcttgcgctctgtaaga

SEQ ID NO: 420610 - DNA, 51 bp, Homo sapiens
tacagaaacctggccttcctgggtattactgtttctaagccagacctgatc

SEQ ID NO: 420611 - DNA, 98 bp, Homo sapiens
acctctccccctcggaggcggcgggcggaggcggcggagctcccagctcctccagcagccgacaggaggcccgtcaagatgcaggcaggcattgccac

SEQ ID NO: 420612 - DNA, 129 bp, Homo sapiens
gcgcccaggactgtgtgcaatgggggctacacaccaagacgagatgcttcccagcacccgggtatggcgttgacggtggatgtggccgggccagcgccctggggcttccgtatcacagggggcagggat

SEQ ID NO: 420613 - DNA, 98 bp, Homo sapiens
cggtggaagacctctattggaacctgagcttggtgtgccacttgtggagggagatcatcagtgacccgctggcagactgccagattcacttacagccc

SEQ ID NO: 420614 - DNA, 83 bp, Homo sapiens
aaggacccgggttttcgaaattcttcttatccagagacaggatccactccaagatgcacacggagaccatcaagccccacaag

SEQ ID NO: 420615 - DNA, 87 bp, Homo sapiens
ctgcgttttgttttcccctcggcactaggcagcggaggagcccgaccgacccgttagaacctggcccattagatgaaacccagatcg

SEQ ID NO: 420616 - DNA, 82 bp, Homo sapiens
gccgccaccactgccaccacggtcgcctgccacaggcaagtgaaccggagcaaacgacttccgatccagtctgcgctgttgc

SEQ ID NO: 420617 - DNA, 74 bp, Homo sapiens
gcgacggaaatgtgtcatcgaaagccaggttcgatacaagaggctgttttcctagcgtggcttgctgcctttgg

SEQ ID NO: 420618 - DNA, 82 bp, Homo sapiens
aaggaggtgctgaagagcgaggaggtctgagaaacatcttacctattacaacagcaaaggtgccaattgtgaagttcttcca

SEQ ID NO: 420619 - DNA, 117 bp, Homo sapiens
aaacactgtgtgatagttcctacacatctcattatagtttcttagcagtgtctgcaaaaacgaatcttttcctacaacctgttaactgactggactgttggtaacaaagtaattgtg

SEQ ID NO: 420620 - DNA, 100 bp, Homo sapiens
tgtgacctacactagtcgcgggagccacgcagaggacgccggaacaccctggaagccgagaaatggtttcattgaaaacagatcctgcaaaagttccagg

SEQ ID NO: 420621 - DNA, 83 bp, Homo sapiens
tccccgagacgatggcggagggagataatcgcagcaccaacctgctggtttccttgttgcagaatgaaagtgtagaaaaaaac

SEQ ID NO: 420622 - DNA, 75 bp, Homo sapiens
cgagacaaggctgtcagcccctaggtactccaaagattcaggtttactcacgtcatccagcagagaatggaaagt

SEQ ID NO: 420623 - DNA, 74 bp, Homo sapiens
ggcctccaggaggaagaggtggccaaccgccccaggcagcacagtggaatgagctcagtgaccacttggatgct

SEQ ID NO: 420624 - DNA, 75 bp, Homo sapiens
gaagaagaaaggattcgttacagccagagattgatgcttttactgactctgctatcagtgctaaagtgaatggcg

SEQ ID NO: 420625 - DNA, 100 bp, Homo sapiens
cactaactgatttacaagatgatatacctacaacattccagggtgctacggccagtacatcgcaaattcaacacccaacagcttccttaatagcaaaggt

SEQ ID NO: 420626 - DNA, 75 bp, Homo sapiens
cttcccactgctgctgcaggaggccctcaggagtgtcaaggccgaggtaccgagcccctgaactgctgttgggaa

SEQ ID NO: 420627 - DNA, 96 bp, Homo sapiens
cctacggctgcaaggacgctctgcgccagcagctccgctcggcgcgagaggagcctccagaagatgatgcaaacatcattgagaagatcctggcat

SEQ ID NO: 420628 - DNA, 100 bp, Homo sapiens
cgagttttaacatctggaagccttcctcctgagaagtctggatttgatgagtttgatgaagcaattgatgaagctattgaagatgacatcaaagaagccg

SEQ ID NO: 420629 - DNA, 100 bp, Homo sapiens
tcgctggagcacaaaagagtctccgcggtggaggtctgcgttgctcttgcttttcctcgctggggtgtacgcctcgtgtgcaagctgaacacaaggacca

SEQ ID NO: 420630 - DNA, 74 bp, Homo sapiens
ttggcagttctaaatttgaatttgagattgggaaaatgaggtacgttagtgttcgcgattttaaaggcaaagtg

SEQ ID NO: 420631 - DNA, 141 bp, Homo sapiens
agcaaaggtcaccagtcccaagtcgtccccctctccgccccccaggaggggcgagagggagccgcagctgatgtcaggctcacagaacatttcctgcctgttgctcacactctgttgtccacagcatacccgcaccctaga

SEQ ID NO: 420632 - DNA, 75 bp, Homo sapiens
aacagttttttctaatggctattcaagatatgcacccaatgtccagggagcgtgcaaaatttgtcaaaagtggcc

SEQ ID NO: 420633 - DNA, 98 bp, Homo sapiens
acttcacaaattgggcaattgcaagtggcagcagcacagcactactatacagcaagcgactgatttacccggacgaaagccattactttaccagctcc

SEQ ID NO: 420634 - DNA, 100 bp, Homo sapiens
aacacctcagctttttctaagaagagatgtgagacttcccttggaagttgaaaaacaggttgatggacggatggctacatggatgtgatggagatggttt

SEQ ID NO: 420635 - DNA, 75 bp, Homo sapiens
tcgtgcgcttcgaggacccccgttaaacgagaagattcatcaccgctttgatggctgcctcacaaacttcacaaa

SEQ ID NO: 420636 - DNA, 100 bp, Homo sapiens
acactgagtgggcactgtgctcctgttctggcttgtgctttttcccatgatgggcagatgctagtctcaggaataataataacctggatgcctgctgtgc

SEQ ID NO: 420637 - DNA, 75 bp, Homo sapiens
gagaaggatgaagagatgagcacaaaggtgtacttagacctggatacttatccgctttttccccttggagtcctg

SEQ ID NO: 420638 - DNA, 100 bp, Homo sapiens
aagttttggatgatggagacagcaacccaaagagaagggaatttagccttcacagttgttgatcacatagcatggtcatccactcacagcttaaaaaaat

SEQ ID NO: 420639 - DNA, 74 bp, Homo sapiens
aatagacaggctacgcctggacaaatactatatgcccatttgcttatgtggaccccttgcactgtaacatggcc

SEQ ID NO: 420640 - DNA, 75 bp, Homo sapiens
gacgcaccctggaccgccagcagcagtgagaagcaaattgtggctactaatttgccccctgaagatcaagatggc

SEQ ID NO: 420641 - DNA, 100 bp, Homo sapiens
tggacatgcggactgacctggccacactgagggagctgtccaagcagaggcttatccctgttacacatgagcaggggaataatcctccaggctgagagca

SEQ ID NO: 420642 - DNA, 100 bp, Homo sapiens
ctcctcacacgaccaggtgaggggggtacgggaccgccagggcctcccctcaccaccaggaccaagtgtgcaggggtttcttccagaaaacaagttcaat

SEQ ID NO: 420643 - DNA, 100 bp, Homo sapiens
acagaacttcctgtccagcatcaatgaggagatcacaccccgacggcagtccatgacggtgaagaagggagaggggacaggggaggcctcctcaggatcc

SEQ ID NO: 420644 - DNA, 101 bp, Homo sapiens
tggatgatcgagaggatctggtgtaccaggcgaagctggccgagcaggctgagcgatacgacgtggtctcggaaagagggtcgtggtcccgcacggatgcg

SEQ ID NO: 420645 - DNA, 82 bp, Homo sapiens
gtgttgctgcctttctatgaccctgacaccagcatcatttacttatgtggaaagggctgaaggcctttcggcagcagctgag

SEQ ID NO: 420646 - DNA, 74 bp, Homo sapiens
gcggcggtggccgctagctccaaggaaggtaagaatgattgatgttggctgatattggagtgctcattcacatg

SEQ ID NO: 420647 - DNA, 100 bp, Homo sapiens
cgatgccaatctctgcttgaaaggagaagacttggattctcagtggggttgcccagactctcaagaaaggagaagtttttttgtatgaaattggaggaaa

SEQ ID NO: 420648 - DNA, 88 bp, Homo sapiens
agcctgagcgcggcggcggcccacgcgcagcgacagggagaggttccttcaatggtgccttagctgctgttcctgtccaggacctggg

SEQ ID NO: 420649 - DNA, 101 bp, Homo sapiens
gcccagctatgtactccccgtactgcctcacccagagaggtggagaagagcgagtacttgagaaagaagaggaagaagatgatgatgaagatgaagatgaa

SEQ ID NO: 420650 - DNA, 75 bp, Homo sapiens
agaagggaggctccaagacctcatcaacaattaaggaaataagatatgtggaacggagttatgtatcaaaaccca

SEQ ID NO: 420651 - DNA, 106 bp, Homo sapiens
gccccccaccgccgccccctccggcgtgttcatgcccccgggggccaattcctgtccccccagcagcatggcatcgtgtgctgaaccctctgagccctctgcccca

SEQ ID NO: 420652 - DNA, 97 bp, Homo sapiens
taaagaatggctgttgaacatccacaaggcacctgcaagaaacctgaatagagtcaccttgtaataactgggaactcttcccctgaagacacctggt

SEQ ID NO: 420653 - DNA, 101 bp, Homo sapiens
cccgggacaccctggaagccaggaaatggccccttcccagctgcctgcctgccctagccagctcccaggtgaagagactctcggcttccaggcggaaacag

SEQ ID NO: 420654 - DNA, 94 bp, Homo sapiens
ccgatttaaagctgagctgcgaggaaaatggcggcgggagggagtgcatccgccccaacccttttccccctcgtctcctgtgagaattccccgt

SEQ ID NO: 420655 - DNA, 75 bp, Homo sapiens
aacggtttgtggctggagtaggagcaaacagcaagtacaactccaaaaggagacattggagaagaaccaagctgg

SEQ ID NO: 420656 - DNA, 101 bp, Homo sapiens
gcaaggaggttggcttcttcatcatccgggccagccagagctccccaggggacttctccatctctgtcagctctagaggacaaaatcccagtccttggcac

SEQ ID NO: 420657 - DNA, 83 bp, Homo sapiens
cacaaaggagagctccgtggagagaagtatgctcaggcttcagaagaggctcgcctctagtgtcctccgctgtggcaagaaga

SEQ ID NO: 420658 - DNA, 96 bp, Homo sapiens
agtaaacaagagaccatcatgagacatcatacgcttcggcagccgatgaagaggcccctgattatggctctggcgtccgccagtcgggaactgcta

SEQ ID NO: 420659 - DNA, 75 bp, Homo sapiens
cagactattgtctggtgctgaaggcttttgacctttatgaacaaagatatgctgctgtgaagatacatcagctta

SEQ ID NO: 420660 - DNA, 100 bp, Homo sapiens
aagcgaaaacatgaccgctgagcccatgagaattcctagaggacctgtgcaacaacctcttgaggatcgaatcttcactcccgctgtctcagcagtctac

SEQ ID NO: 420661 - DNA, 80 bp, Homo sapiens
gtcgcctgtgctgtgacccgcactggtcgtgggagtcacctgaaaggcaagaaatggacgtagacaagtttggcaacgag

SEQ ID NO: 420662 - DNA, 51 bp, Homo sapiens
gaaatgtcatgcctctgaaaatgaaggatggagagcaatacatcatcatct

SEQ ID NO: 420663 - DNA, 90 bp, Homo sapiens
gggcgccggcgaggagagcccgcggctgcaggccctgggctgcatcttgtacctgctgtgcttccggcagcacccttttgaggatggagc

SEQ ID NO: 420664 - DNA, 100 bp, Homo sapiens
cctgagcaggaacctggagttttcagatgcctgaggaaacccagacccaagaccaaccgatggaggaggaggaggttgagacgttcgcctttcaggcaga

SEQ ID NO: 420665 - DNA, 96 bp, Homo sapiens
gccggaccgaaggtgcggcggcggaggggagccagggcgccccagcaggcaccttggaagttgttttcaaccatatccagcctttgccgaatacat

SEQ ID NO: 420666 - DNA, 103 bp, Homo sapiens
ctttttcacatctgccagtcaggatctgcagggagagaagatgactgaggaggaggtggagaccgttctggcaggacacgaggacagcaacggctgcatcaac

SEQ ID NO: 420667 - DNA, 100 bp, Homo sapiens
cctggacaaagtctgcaacatggctagagactgccgggactggtcagatgaacccatcaaagagtgcgaggagaaggcagagcccccccaggctatgaat

SEQ ID NO: 420668 - DNA, 90 bp, Homo sapiens
tgggcaacgtggtaagaccagtgaattccacgaacatgagcccactgctgcacttctatggccgtaaagctgaagtgcagtggtgtgatc

SEQ ID NO: 420669 - DNA, 100 bp, Homo sapiens
ccgggtgagctcaccgcccagcccaaaccaggagattgcgagggagcgatgcggtgcagcgcgctgaaaatgtgtgtctgacatgcaagctcagtggggc

SEQ ID NO: 420670 - DNA, 75 bp, Homo sapiens
ccgcgatctatgggggtgtagagggcctggaattgtctcgccatttaaacgagtattcctaaaaggtgaaaagag

SEQ ID NO: 420671 - DNA, 100 bp, Homo sapiens
agaaggcagaaaacaagataaaggtggctttggattcagaaaaggtggaccagatgacagaggtgctggagaatctggtaaaagcaccattgtgaagcag

SEQ ID NO: 420672 - DNA, 83 bp, Homo sapiens
ctcggagaaacaggcgccgcgggctccgcgcccggccggacccgggcccgaggctgatcagctgaccgaagaacagattgctg

SEQ ID NO: 420673 - DNA, 75 bp, Homo sapiens
acaagctcctacttccagaaaaagtgctcctgggactccaggataccagagccccccaagatgaacccagtggtg

SEQ ID NO: 420674 - DNA, 82 bp, Homo sapiens
cgatgttggactcatagtcactgccagaaaggtgaaaacttttggcccgtttggaagcggcagccaggacaacctgactatg

SEQ ID NO: 420675 - DNA, 82 bp, Homo sapiens
tccgaagctctttggacctagcaggttcggcggccgggacaaatttacatgtattggagaccagaccagaagcccttctgaa

SEQ ID NO: 420676 - DNA, 88 bp, Homo sapiens
cagctgcctcagttcttagcgcagataaggctcaattacttgaaatagccaaagctaatgcagctgccatgtgtgctaaggctggtgt

SEQ ID NO: 420677 - DNA, 75 bp, Homo sapiens
cttaaatgggcgaaagatcacgatgaagaggtccgagtggacagtggcatccaaccaggaagtgatattagcatt

SEQ ID NO: 420678 - DNA, 100 bp, Homo sapiens
tgcttcaggccctgggagatggtgactttgtcaagtgtctgcactccgtgggccagcccctgacaggacaaggctgctgaccctggggctgtccctcctg

SEQ ID NO: 420679 - DNA, 90 bp, Homo sapiens
gtgctccagagaaaggccggcctgcagcacccgccaccgtcgccggccgcccgcacgtccgtccgatgttcgagcctgtgagctgcacct

SEQ ID NO: 420680 - DNA, 97 bp, Homo sapiens
ggcctgctctgtgcggagcagaaacgccttgtgcgaacagaaataaattcccgcggaaaggatggcagtctgaagatggccaattacacgctggcac

SEQ ID NO: 420681 - DNA, 82 bp, Homo sapiens
cggccatggtccaaccttgaagacaatgcagatcttcgtgaagactctgactggtaagaccatcaccctcgaggttgagccc

SEQ ID NO: 420682 - DNA, 100 bp, Homo sapiens
gctatggctatggctatggctatggccaggataacaccaccaactatggcctctgcagtccttgtccctggctgactcgaaactcaagactgaggtcacc

SEQ ID NO: 420683 - DNA, 100 bp, Homo sapiens
cacccagaaatctacaggtcattcctggagatcctgcacacgtaccaggcggtgcgtctttctacgtgaataggattttgtggctggccagatacactgc

SEQ ID NO: 420684 - DNA, 78 bp, Homo sapiens
tcagtgctgctttctttaggacgaaagttattgggccagttcaattgtcttactcatcaactggagtgtacccaaaac

SEQ ID NO: 420685 - DNA, 101 bp, Homo sapiens
cgctgttgctgccgccatacgcgctctccctgtttaggaatccagacgctctgcagtgtcccatcgtcttatgcggatggcggggaaaggcctccattcga

SEQ ID NO: 420686 - DNA, 82 bp, Homo sapiens
gcccctcaaggacaacctcggcctgagacaccggaggaccgggtgggatgctatggaatatgatgagaagctggcccgtttc

SEQ ID NO: 420687 - DNA, 75 bp, Homo sapiens
ttgagttggtcgggggcagcggcagatcttgagccagatgattgtgcatccatttacatctttaatgtagatcca

SEQ ID NO: 420688 - DNA, 100 bp, Homo sapiens
ccggcttgcccagaaagagaagacagccatggaagggttatgtggtccgaatcagtggtgggaacgacaaacaaggtttccccatgaagcagggtgtctt

SEQ ID NO: 420689 - DNA, 78 bp, Homo sapiens
tggacaagagatgcctgggcgtcaccatgccacagctacccacttgttgccaccagaattaaagctatagagagtccc

SEQ ID NO: 420690 - DNA, 100 bp, Homo sapiens
cctctgcagacttcagattcgtttctgagatttccttcgtccctgacatcatctctgtgcactgataataaccctgcagcacatcaaagctgcccaatga

SEQ ID NO: 420691 - DNA, 80 bp, Homo sapiens
gtattgaacaagaaggatattggttgccaggagatgagattaagaaggctcaagcttggaggaaactggctttaactggg

SEQ ID NO: 420692 - DNA, 100 bp, Homo sapiens
catttcactgttagtttcaaagtcaggtagcattggtgctgcagatagtcctgagaactgggagaaagtctgggacaactggaggctgctgacaatggcc

SEQ ID NO: 420693 - DNA, 95 bp, Homo sapiens
ggctgctggtcctcatggattcctggtgccagcccggctttgacatcaaggacgttgccagcactgactcatatattgaagtccttgatggttcc

SEQ ID NO: 420694 - DNA, 101 bp, Homo sapiens
tacgaatatgaacacactgagctgcagaaggtgaatgaaggtgaaaaagtctttgaagaagaaatagtgcacccagtcagcttgaagagtttcaaatggac

SEQ ID NO: 420695 - DNA, 96 bp, Homo sapiens
cctcccgccccgcgagccctaactcagcgcaggaggaccggctgccgccgccgccgccgccaggcaccatggctgaggaaacagctccagcagttc

SEQ ID NO: 420696 - DNA, 100 bp, Homo sapiens
cacaacccatcctttccgaagatgggagtagaatcagatatggaggacgagactacagcttggatgaatttgggtgtccgcaatgttgccagtgtctgtc

SEQ ID NO: 420697 - DNA, 82 bp, Homo sapiens
tctccttttccctctccctttccctaagaggttgacggatatattcagacgttacgacacggatcaggacggctggattcag

SEQ ID NO: 420698 - DNA, 83 bp, Homo sapiens
gccgcaccatgccgctcctaagcctgcacagccgcggcggcagcagcagtgagagcttgaaaactatttttctagtctgaaaa

SEQ ID NO: 420699 - DNA, 100 bp, Homo sapiens
ggaagacgagaggcagaggagcggccaacgactcgacccagttcactgtggctggcaggatggtgaagaaaggagtccatagaggccactgtattctatt

SEQ ID NO: 420700 - DNA, 90 bp, Homo sapiens
ctccctgctccgcagcgacatcaccaagctggaggtggacgccatcgtcaacgccggtcatcatcagatttgaaatatttaaagtggata

SEQ ID NO: 420701 - DNA, 97 bp, Homo sapiens
tatcatgcaagtgtggcaaatggtgaggagacaaggattgagaatgggaagcttattgtagtaacagactcttgtggaagagtagagtcatctggga

SEQ ID NO: 420702 - DNA, 95 bp, Homo sapiens
catcaggctcaacgaggaactcaaagtggatgaggaaaactgtgccctgtccacggtgcctcctgcatgtcctgctgccctgagctgtcccgagc

SEQ ID NO: 420703 - DNA, 88 bp, Homo sapiens
ttctggtggggagatgaacccaacctagtgggtgtaatacatcatgaactgcagggacctcagcagccatgtcgaagccccatagtga

SEQ ID NO: 420704 - DNA, 78 bp, Homo sapiens
agtttttcaccctcacgctgatgaacttgtacttcacgcaggtaatctatttaaagaagacaccagaagaagcctaca

SEQ ID NO: 420705 - DNA, 80 bp, Homo sapiens
gagctgagcttctgccgtggtgccctcatccacaatgtctccaaggagcccgggggctgcagtagaagactcagaaagtg

SEQ ID NO: 420706 - DNA, 100 bp, Homo sapiens
ggtgtccccattgacgccatcatctttggtggccgcagacccaaagggtgaatttaaggtgtcagagagatacctcaccatggatgacttgacaacagcc

SEQ ID NO: 420707 - DNA, 75 bp, Homo sapiens
cttgcgtccgctacagtatgtcaatcgcttgccccagcacaggtcatcatcagatttgaaatatttaaagtggat

SEQ ID NO: 420708 - DNA, 100 bp, Homo sapiens
tcccggttggtagagggtttgagtccgcatcgccacagctgaaggctgcgagggactaagagcagagttagcatggcctcattgaaagaactagatcaaa

SEQ ID NO: 420709 - DNA, 100 bp, Homo sapiens
tgaggggcgagaactgatcctggacctggagaagaatgaggagttctgggaaatcgttcattcatttacagatgaacagaaaagactcttcttgcagttt

SEQ ID NO: 420710 - DNA, 75 bp, Homo sapiens
cacagagcctcgcctttgccgatccgccgcccgtccacacccgccgccaggttatggaaacaaaggacatgcttt

SEQ ID NO: 420711 - DNA, 100 bp, Homo sapiens
tcgtggccgcctccttcttcctcatcgtggcagctctgggtattgatgaagatgaccctactgctgatgataccagtgctgctgtaactgaagaaatgcc

SEQ ID NO: 420712 - DNA, 75 bp, Homo sapiens
ctgaaattcatcctgagatgaggatgtatcaggacaaactggcttctctcaagaggcagttgcaacaactgcaag

SEQ ID NO: 420713 - DNA, 108 bp, Homo sapiens
tcttcccgcgtccgccgattcctcctccttggtcgccgcgtccttggctggcgtgccaccagcttgggctccccacggagggcagcaagtgggacttggggaacccgg

SEQ ID NO: 420714 - DNA, 98 bp, Homo sapiens
cctggagcctcagttggaagcagccgatccagcctgcggagcctgtggggcagcacttctcagaacttctggatgagttttcccagaacgtcttgggt

SEQ ID NO: 420715 - DNA, 87 bp, Homo sapiens
ggcaataattatgtggtcattggcacgtgtacgtttcaggtgtctgtccctaaagaactggtggcacttatgagtgctattcgtgat

SEQ ID NO: 420716 - DNA, 75 bp, Homo sapiens
agaggcccggactcatacagagattgaaatgttccttagaaaggagcagcagagctggactggccattatggagg

SEQ ID NO: 420717 - DNA, 90 bp, Homo sapiens
gagaagtttctggtcactccccaggattatgcgcggatctagtttgaagcactaagaagaataagacatcagtttgaaaagaggctctat

SEQ ID NO: 420718 - DNA, 75 bp, Homo sapiens
cgccgctctagcggccgggactctgaactatggcgccgcttacaaacacgcagatggcaagaagattgatggcag

SEQ ID NO: 420719 - DNA, 75 bp, Homo sapiens
ggaaagaggaggaaaacaaaagctgctacttatggaagatacaaaggctcccgattctcctgaaggggacgtccg

SEQ ID NO: 420720 - DNA, 95 bp, Homo sapiens
cccgccggcccgcgggtctacttcctcaaaggtcaaaatgcagatcttcgtgaaaacccttaccggcaagaccatcacccttgaggtggagccca

SEQ ID NO: 420721 - DNA, 100 bp, Homo sapiens
aatggcagcagcggcgggggctatggcgccagtaagaagaaaaaagcgtccgcttccagctttgcgcagcatcctggtggggaagaagttttaagggaac

SEQ ID NO: 420722 - DNA, 75 bp, Homo sapiens
atgatcaagggtgttacactgattttagtccatggagaacagaatgaaatggccagattgaaagcagcactgatt

SEQ ID NO: 420723 - DNA, 100 bp, Homo sapiens
agtgatgacgtccatcaagcagttgagcagtgaggagctggagcagttccagaagactgctcaaatcccagccttctatatggacacaagtcatttattc

SEQ ID NO: 420724 - DNA, 75 bp, Homo sapiens
ccgcgccgccaccgtctgaactaggatgtcccgacatgaagccctgtgattgctgcacagttctcagacaatctg

SEQ ID NO: 420725 - DNA, 75 bp, Homo sapiens
caggttacctaatgggagtgcgagagctctgcaccaggcaccaggctatctatgtgcctgctgatgacttgactg

SEQ ID NO: 420726 - DNA, 82 bp, Homo sapiens
agccgcagaggctcccgggctggactcaggcttctcagtgtggacgaatgtggaacctcgctctgtggctgtgttcccttgg

SEQ ID NO: 420727 - DNA, 100 bp, Homo sapiens
tctgcttccaggacaagtcctgcgcttggggatcctctgtacgcccgttcactgattagcctgaggcctgctcagtcgttcctaatgaataaaaatcaag

SEQ ID NO: 420728 - DNA, 103 bp, Homo sapiens
aagcctaactcaagccattggcacacaggtccaggttcacactagaaggccaaaacttccgcaaacatctgatgatgaaaagaaagatttttgagactgcagc

SEQ ID NO: 420729 - DNA, 100 bp, Homo sapiens
aagctcatgaagactgtgtaaataatatcaggtttggtgcacctcgatttggaggaagtagggcagggcccttatctggaaagaagtttggaaaccctgg

SEQ ID NO: 420730 - DNA, 83 bp, Homo sapiens
ccagccttggtctgagtggactgtcctgcagaggtcctgctgtactagccaccaaagcagctgctggtactaagaaatatgat

SEQ ID NO: 420731 - DNA, 98 bp, Homo sapiens
ctcaagactggtccacggagtgtatgaccacaaacagccatcaagaggctgttggaagctgcttgggagaagtgggtcctatagatttctctaccata

SEQ ID NO: 420732 - DNA, 90 bp, Homo sapiens
caccgggatcgtgaccgagaccgtgaccgagagcgtgaccgagagcgcgaatatcgtcatcgttagaagccacccgcgagtcggccttcg

SEQ ID NO: 420733 - DNA, 83 bp, Homo sapiens
ccggcacgcgactccccccgggcccaaagacctatatccagactttgcctgacactgcagggtccaagagaattaaagaaata

SEQ ID NO: 420734 - DNA, 50 bp, Homo sapiens
cttttgtcagaagtgtattgataaatgggttttgactctgggaggagggc

SEQ ID NO: 420735 - DNA, 75 bp, Homo sapiens
caggccaccaccggccgcctcagccatggacgcgtccctggagaagtctcttcaagaaaatgaggaggaggagat

SEQ ID NO: 420736 - DNA, 100 bp, Homo sapiens
acctcttccagttggaattgaagaatattcccaagtccttcacccggggacatttttgaagaagataattacagccccatccctgttgtcaatgaagaag

SEQ ID NO: 420737 - DNA, 109 bp, Homo sapiens
atctgatgcacagagaacaatgtaccctggaagttgtgtgaaaaagaatattgatggtacaatagagtgctgtgctgtggctttcattgagaagctagacgcccagtct

SEQ ID NO: 420738 - DNA, 98 bp, Homo sapiens
aagtcatcagaggaactactttactgagttcagaagtacaaaaattggcaagtgctttattaaaccaaaagttacatccggtgatcaaggctttcctg

SEQ ID NO: 420739 - DNA, 75 bp, Homo sapiens
ggctccctcgtgaagaacctgaaggacacactagattctggacaatcaggaagtccaagccacaatgatcctgcc

SEQ ID NO: 420740 - DNA, 75 bp, Homo sapiens
agacagccaacaagatgagattgacagaatgattttagaaattcagatgatgagagttcactggttgaccctgat

SEQ ID NO: 420741 - DNA, 90 bp, Homo sapiens
tggaggtggaggagggcgagctggaaatcgtgcctgtgcggcgctcgctcaaggaactgatcccgatttccacaagacggcaccctatgt

SEQ ID NO: 420742 - DNA, 98 bp, Homo sapiens
ttccagtttctgggtggcaagaacttgaaactgcatttcttgagcataaagaacagtgattacagtggcgagatcttgaacaactgctgcgtcatgga

SEQ ID NO: 420743 - DNA, 90 bp, Homo sapiens
aggcggcggcggtcctggtgcggaccctccggccgcagccatgtgggacccgcgggcagctaggcaagctaagagccaaatcatgaatga

SEQ ID NO: 420744 - DNA, 100 bp, Homo sapiens
cgggaacttggtggatgaatgtgatgacgaccaggccaactgccacagtggaacaggtgatgacttccagctcacagggtgtgattaggcccactggggg

SEQ ID NO: 420745 - DNA, 90 bp, Homo sapiens
cgggactccctgtgccttgcttggagctgacgccgacgggtgctccatctcgaaaagcgagaaaggcctccagaccaccaacactcagct

SEQ ID NO: 420746 - DNA, 100 bp, Homo sapiens
ctctgcagagacaagaaaacaaacagcatgtaaaccagagattgcatatgcagcagcagttgcaagctcagcatctttctcatggccacggacccccagt

SEQ ID NO: 420747 - DNA, 98 bp, Homo sapiens
tcaacattgatggaaaacaaatcaaactgcaaatctgggatacgggaagatcagttttcctgccatccaggctgctccctccttcagcaactcattcc

SEQ ID NO: 420748 - DNA, 74 bp, Homo sapiens
cccacagctgttaaagcaacaggtgggatatgagcctcttcctccaacaataggacgaaatatttttgggcggc

SEQ ID NO: 420749 - DNA, 82 bp, Homo sapiens
cgcgggaggtgttcgagaacgaccccgagacggtggaacacctgcagcaggagactgctgctctgaaaaagcaaatgcaaaa

SEQ ID NO: 420750 - DNA, 75 bp, Homo sapiens
ttcagatcatccaagtggaggttcctacagagattcatatgagagttatgctgacctgatctccagcttcctgct

SEQ ID NO: 420751 - DNA, 90 bp, Homo sapiens
atcctgcatcgggagaaaacaagtccaaggatgaatcccagtccctgttacggttgtaatcgtaaaatgaaaccaccttaccttaaagaa

SEQ ID NO: 420752 - DNA, 100 bp, Homo sapiens
aggccttccagctgtttgaccgaacagtttgccaaggcacgagtaacaagctcacgcagttgggcacttttgaagatcattttctcagcctccagaggat

SEQ ID NO: 420753 - DNA, 100 bp, Homo sapiens
gtcgaagctctgcgagacccaatatttgccaataagaatggttatggactttctgaagaccttttcccccgatgtcttccggttcttctgcctgcggagc

SEQ ID NO: 420754 - DNA, 75 bp, Homo sapiens
gagaggggccgcggaaacctggagtggaagggtacatcaggaacgtctctatcaagaatacaatttcagcaaggc

SEQ ID NO: 420755 - DNA, 89 bp, Homo sapiens
cttccggatcgggggcaagcggaaggtgatgcccaagatggaccaggcagaatccagagaccacatttgaagtatatgttgaagtggcc

SEQ ID NO: 420756 - DNA, 144 bp, Homo sapiens
gccttacggagccgtctaccagatcaacgtcctccgggaccggagtcagaaccctccgcagagtaaaggaaacttggatttaactggccagaagcaggtattcaaagcagagaacaatccctgggtgacccccattgcagacca

SEQ ID NO: 420757 - DNA, 74 bp, Homo sapiens
tttatcaaaggagacatggattcactagctttcggtggtggaggttgtggacatcggatacccaaggagacgaa

SEQ ID NO: 420758 - DNA, 82 bp, Homo sapiens
attcaagttcatgtcacgctgggtaatgaggatttgactgtgaagatcctcttctcatgtagacggctttcttccaagtggt

SEQ ID NO: 420759 - DNA, 100 bp, Homo sapiens
tcagcctcccgagtggctgggactacagggcgatgagggtggagagcgggtgctacagcagcgctggacctccttcctcaaggcccagctgctgtgctca

SEQ ID NO: 420760 - DNA, 98 bp, Homo sapiens
tgttgtggggcttttacagcctttgggaaaagcttttgacatcacctatgtgcgtctcaagttccacaccagccgcccggagagctttgccatttaca

SEQ ID NO: 420761 - DNA, 82 bp, Homo sapiens
tggcggccaccccctcttcctcacttccctgtactctcatcgctctcggcctccgacacggactgtatccagtacacctggc

SEQ ID NO: 420762 - DNA, 75 bp, Homo sapiens
ccccgaggaactcttcggtcaggtggtcagcgggtcccagtcctatgaggatatgagaggaatcctgtatgcagc

SEQ ID NO: 420763 - DNA, 84 bp, Homo sapiens
gggcgctagcgttcgccttcagccaccatggggaatgggatgaacaagacaatgcagatcttcgtgaagactctgactggtaag

SEQ ID NO: 420764 - DNA, 100 bp, Homo sapiens
taaatttttgctggaagcctgcaaagtaaaccctttccccaaggacaggaattgaatgatctggcacgggaccctccagcacagtgttcagcaggtcctg

SEQ ID NO: 420765 - DNA, 100 bp, Homo sapiens
ggctcagccagcggcagacagaacgggacctgtgtcagaccgcggccttcagtgtcacagcgtggccttgcttgtctgccacagcgggagctaagccggc

SEQ ID NO: 420766 - DNA, 75 bp, Homo sapiens
ttcactgatacccggaaggacgagcaggagcgttgcatcaccatcaagtcaacttactacaaggggatccggcag

SEQ ID NO: 420767 - DNA, 98 bp, Homo sapiens
aagatgggaaagttattgaacggctgggccagagcgtggttgctgaccagttgaaaggttcgagaacttgtcttggacaattgcaaatcaaatgatgg

SEQ ID NO: 420768 - DNA, 100 bp, Homo sapiens
gctgatccagaacatggaccgcgtggaccgagagatcaccatggtagagcagcagatctctaagctgaagaagaagcagcctacatcaaggaggtggagg

SEQ ID NO: 420769 - DNA, 108 bp, Homo sapiens
ggaggatctgccagggagcaaacctgagcctgatgccatttctgtgtgaacgtggcatcactgacacaatcagaaattcgagacatcatcctgggtatggagatctcg

SEQ ID NO: 420770 - DNA, 100 bp, Homo sapiens
acttgctcgtgcactttacacacatgaggaactttccgctgtactttttgccatacagaggtagaagaggatgaatcagcaatgcccaaaaaagatgcac

SEQ ID NO: 420771 - DNA, 82 bp, Homo sapiens
agacactgaacgaggagccagtgcacttttcaggattagaagaggctgtgtatagaaacatacaagcttgcaaggagcttgc

SEQ ID NO: 420772 - DNA, 83 bp, Homo sapiens
ggtcaggctcgccgccgagctggtttggtgcacctcgatttggaggaagtagggcagggcccttatctggaaagaagtttgga

SEQ ID NO: 420773 - DNA, 51 bp, Homo sapiens
ttcagtgtccaagagttcagtttcaggtcagtttgctgagaacgaaaccaa

SEQ ID NO: 420774 - DNA, 90 bp, Homo sapiens
gtgtattcgttctgtgcctgaactcaaagatgcccttaaaagtgtttgtggagaaggtgctgcagagactttttcctcctgttccaagtg

SEQ ID NO: 420775 - DNA, 90 bp, Homo sapiens
aaactattgaatgcattagcctcattggtctggctgttgggaaggaaaaaagtgtcaatccatatctacaaggacagagactggataatg

SEQ ID NO: 420776 - DNA, 74 bp, Homo sapiens
ttactctgaagggcatcatgcatcttactgaaggcactacacgctggatgcttccctgcctttgcgtctgcgac

SEQ ID NO: 420777 - DNA, 75 bp, Homo sapiens
tgacgccatgtcgggttattcgagtgaccgagaccgcggccgggaccgagggctcacctttcgagtgcggagggt

SEQ ID NO: 420778 - DNA, 74 bp, Homo sapiens
ttcgtctcttacgtctgcggaagtgcagctgcctcagttcttagcgcaggaaccattaaagagatcctggggac

SEQ ID NO: 420779 - DNA, 83 bp, Homo sapiens
cctgcgccggcctcggccaccgagatcctgctgacgccggctagggccattaagcagatgtatgtactcattcttggacttga

SEQ ID NO: 420780 - DNA, 82 bp, Homo sapiens
cttcggtggactccttcggcagtccacccaccgccgccgcctcccaggactttgtgttttatgccccacgtctgagaatcaa

SEQ ID NO: 420781 - DNA, 100 bp, Homo sapiens
tttccaatgccatcaaccgcctcaaagacactggttgctcacgaggcccagggaatcctctggaccatcagattaccaatgaaagaggagaatcaagctg

SEQ ID NO: 420782 - DNA, 100 bp, Homo sapiens
gttgactggagtccagcctgccagacagaaagttatggtgaaaggaggaacgctaaagcatggcacattacacttctgtggatttaaagtccttgcccct

SEQ ID NO: 420783 - DNA, 99 bp, Homo sapiens
gatggaacagttctctatggactccggaaaattgcctaagaattatgacccaaaagttaccccagatccagaaagatggctgccaatgcgagaacgttc

SEQ ID NO: 420784 - DNA, 75 bp, Homo sapiens
tcccaaaatattctagaaggggaaaagctacttcaaggattttaaacaatttgaacctaatgacttttatttgaa

SEQ ID NO: 420785 - DNA, 82 bp, Homo sapiens
cgggacctgtgacagggctggtagcagcgcagaggaaaggcggcttttagccagacatctaggcttgctgtcaaggcttctg

SEQ ID NO: 420786 - DNA, 82 bp, Homo sapiens
ttggaagcagccgatccagcctgcggagcctgtggggcaggcccgcgatgctcccagcccggtgagacctgcctgaatggcg

SEQ ID NO: 420787 - DNA, 75 bp, Homo sapiens
ctcggaggagctgaccacaactacagagtattttgaaggtggcgtctcatctgtctacctctgggatctggatca

SEQ ID NO: 420788 - DNA, 100 bp, Homo sapiens
agtacctcatgttcgccttcaacctgctcttctgggtcaaaatgcagatcttcgtgaaaacccttaccggcaagaccatcacccttgaggtggagcccag

SEQ ID NO: 420789 - DNA, 99 bp, Homo sapiens
tctggactgcagaagaacaaggtggagttggtgccttccagtattatcagttacacaaggccaaatgtgtgtggaaacacccacctggtgatgagatat

SEQ ID NO: 420790 - DNA, 90 bp, Homo sapiens
ggctgctaccgcccctccgcttccagacattctcagctgtcaggccgttaattaaggaaaagttgagccagggcgtgaccctcgtcgtgg

SEQ ID NO: 420791 - DNA, 100 bp, Homo sapiens
agtgcccctaaaaccaatgagaacaagaagagaatctgagtgcagaggcccctgggagctttgagggatacattgctcaacaccacagcttactaacaag

SEQ ID NO: 420792 - DNA, 74 bp, Homo sapiens
agacaagaggagacactgagggaacaaacacttctggatgcatcctttcttaaacaattaggtctacatcctaa

SEQ ID NO: 420793 - DNA, 99 bp, Homo sapiens
ggaaaaagaagcagtatctatgcccatctctgctcccagttttcgagaggagtctatgctatttttggattttatgacaagaagtctgtaaataccatc

SEQ ID NO: 420794 - DNA, 100 bp, Homo sapiens
ccggccaatctacatcaaggactatgtgacactctatgtgaaaaacatcagagagctcgtactggcactgttccatttcctccaagtcaccggcttacag

SEQ ID NO: 420795 - DNA, 75 bp, Homo sapiens
ttggggagatgacaaaacttggtagcaagacagccctcaatagacgggccctgacaagccaattgacagatgaag

SEQ ID NO: 420796 - DNA, 75 bp, Homo sapiens
ccagttatttgcctcagtaaaagagttcatgcaaatattgaaaactcttggaatgaggaagaagtttggagaatt

SEQ ID NO: 420797 - DNA, 100 bp, Homo sapiens
catgtcatcagattctgcagatcctttctactggatgagagttattctggcttccaatagaggaaagtgatgaagcattgggcccaacaatgatgagttg

SEQ ID NO: 420798 - DNA, 80 bp, Homo sapiens
ggtagaagatgtggtacacactcagttaattaatctgcttaaagcttttcaagccaggccaagaagctgtgaagtaccag

SEQ ID NO: 420799 - DNA, 82 bp, Homo sapiens
gtcttcccgcgtccgccgattcctcctccttggtcgccgcgtccttggctggcgtgagtccaaaactacttacctggaagac

SEQ ID NO: 420800 - DNA, 100 bp, Homo sapiens
cgaacaatcacctccagttattacagaggagcccatggcatcatagttgtgtatgatgtgacagatcaggacagagcgggatgccaccagcttgtccaaa

SEQ ID NO: 420801 - DNA, 100 bp, Homo sapiens
aagcagcagtggggacgagctttgaaagaacttgccagacttaaacagctcactaccctgggaaatcttacaccttcaagcactgtgtttttctgctgtg

SEQ ID NO: 420802 - DNA, 100 bp, Homo sapiens
accagggctccagcggaagctacttcgtcaaggaccctcagggggttttctgtctcaactggtctctgacaagcctctgactgaatgtatccgtgctggc

SEQ ID NO: 420803 - DNA, 97 bp, Homo sapiens
cagagatggaagatcaagtggtgacaccagctctgaagtaagcacagtagaactgctgcatctgcaacaacagcagatgggcttaggtcacgagcaa

SEQ ID NO: 420804 - DNA, 80 bp, Homo sapiens
agcgaagtagaggatgccgaggagaaaacagcaggcacccaagcgggcggcaggcctacaagaggaagacagaagcagca

SEQ ID NO: 420805 - DNA, 82 bp, Homo sapiens
ctactggggccagggaaccctggtcaccgtctcctcaggcagaggtggaggagacactgaagcgactgcagagccagaaggg

SEQ ID NO: 420806 - DNA, 98 bp, Homo sapiens
ttcgatcccttctctgatttgctgtcagccatgaacggatggatgtgatgcctgctagccaaaagggtgtcatggagaaactccagctgggcccagag

SEQ ID NO: 420807 - DNA, 83 bp, Homo sapiens
gccacaagagcgaggagaagcgagaaaagatgaaacggaccctagtacaaggaatgcttctccctgtatgacaagcagcagag

SEQ ID NO: 420808 - DNA, 82 bp, Homo sapiens
ggatgggttacatgcccaagaggggacttgatgttaacaaatgtgagattgccagacaactgggcggagttaatggaagtca

SEQ ID NO: 420809 - DNA, 75 bp, Homo sapiens
gtgttcattttcccgggcaagcagttggcacaagatctcaggaaacaggctcgacagctggaaaatgaacttgac

SEQ ID NO: 420810 - DNA, 50 bp, Homo sapiens
ggaagcaaatcaggccccgaaatcaaaggcatgggaggttgatacctgcc

SEQ ID NO: 420811 - DNA, 98 bp, Homo sapiens
caggattggtaggctccaccgctcggcagccggcttccctgctcggacgccgagcaccgccaaagcgcgagatctattgggaaactgattataaccac

SEQ ID NO: 420812 - DNA, 74 bp, Homo sapiens
cctggacacagcaatatctctgggctttcacagtaaacatctcccaggagagtccaaatttcagcagaaactgg

SEQ ID NO: 420813 - DNA, 83 bp, Homo sapiens
gtagaagaggagcatctgctccagaagatggctgtgccacccacgtatgccgatcttggcaaatctgccagggatgtcttcac

SEQ ID NO: 420814 - DNA, 95 bp, Homo sapiens
cttgcttgggatcctttatcctggtcatcttctatttccaaagatcctcagtcttccacaatgaaccctgtttacagccccgtgcagcctggggc

SEQ ID NO: 420815 - DNA, 75 bp, Homo sapiens
atggtgttgctgctgtactccttctccgtgtgtgttttaatagaaaagttgtcactttccaaaatgccctttaga

SEQ ID NO: 420816 - DNA, 100 bp, Homo sapiens
acagaatcaggggaggcatgcttcagccagaagatcagctgccatgttacttgactcacaccaaccctagagtggatgagattgtccttaagaaccttca

SEQ ID NO: 420817 - DNA, 100 bp, Homo sapiens
aaggagctcaccaagcactaccagggcaataacgacacagacgtcttctctgccacctggaactcggtcatgatcacagctctccccggaggctcagccc

SEQ ID NO: 420818 - DNA, 50 bp, Homo sapiens
tgcagaaaccacagtggtagaggcttgggaacaatgggccgaggcattgt

SEQ ID NO: 420819 - DNA, 75 bp, Homo sapiens
aaagaactctggctagagaccctccaagggaattacatgaacgacagccttcgcaccgacgtcttcgtgcggttc

SEQ ID NO: 420820 - DNA, 100 bp, Homo sapiens
gtttctgtccaaccagcagccatacccccagttcatggccaccgtggtgtataaggacttctacatcctggaccagggtggcttcaagatctatgtgtgg

SEQ ID NO: 420821 - DNA, 99 bp, Homo sapiens
gtgtgaacacctcaatctcttggagaaagactactttggacttttgtttcaggaaagccctgagcagaaaaatcgggaccagtattcacatctgctaag

SEQ ID NO: 420822 - DNA, 100 bp, Homo sapiens
agaccacacgaaccgcaccaccagctggatcgacccgcgggacaggcacttcctcttcaagacctcctcggggagcacacccttgttcagcagctcttcc

SEQ ID NO: 420823 - DNA, 90 bp, Homo sapiens
ctctccctgggcaggaagactgaggaggaagggatggctgtggatctgctgtctgctcaggttgtttacattcagagctctatcaataag

SEQ ID NO: 420824 - DNA, 100 bp, Homo sapiens
aagggagaggggagcgaccctggggaccgactctggggaccctcgccgaagaggatgccgaggaatgtgacagggctgggagtgtggccacctgccaggc

SEQ ID NO: 420825 - DNA, 100 bp, Homo sapiens
gcttcgtcagcggctcatcgagactgagctggctaagcaggtgctgcagacggagctggagcgaccgagagaggttggtgttcgaggaagagacattgtt

SEQ ID NO: 420826 - DNA, 75 bp, Homo sapiens
tgcagatcttcggcctagactgcgaggaggctctaattgagaaatgaccagttgctcttctgtgatgactgcgat

SEQ ID NO: 420827 - DNA, 82 bp, Homo sapiens
cgccggcggccaagcagccaaccatgctcaacttcggtgcctctctccagcagactgcgttttctttttaaaagcggaagga

SEQ ID NO: 420828 - DNA, 98 bp, Homo sapiens
attcacaaggcagctcgctctgggagcctagaatgcatcagtgcccttgtggcgaatggggctcacgtcgaagtgttgcggagataggaacatgggag

SEQ ID NO: 420829 - DNA, 50 bp, Homo sapiens
caccagctccgaaatcaccaccaaggactttgccattgatattattaaaa

SEQ ID NO: 420830 - DNA, 100 bp, Homo sapiens
cccgatgaagcagattcttttgagtacactggccatggttgtgggactggaaaatatcttaaagtgaacagccaggtacataccgtgggctgtgactact

SEQ ID NO: 420831 - DNA, 100 bp, Homo sapiens
ctcctgagctcaagagatcctcctgcatcagcctcccgaagtgctgggattataggtggccttaatttgagccccttaaaatttctggtttttgactgga

SEQ ID NO: 420832 - DNA, 100 bp, Homo sapiens
gtgtggaagagagagtggctgccttcagaaatttcagtgatgaaaaagagcgggatttagaattggccgctcgcatcggccagtcgttgttgaagaagaa

SEQ ID NO: 420833 - DNA, 100 bp, Homo sapiens
tctactgacgaagcttggaagttgcagaagttaatgttggagaagattgtccagtgtttgatggactctttgagttttgtcagctctcaactggcggttc

SEQ ID NO: 420834 - DNA, 83 bp, Homo sapiens
gccacagttcctaccttatgagctcggttttcttatgcttataagagtggaacaggtgcgcgcggagccatggttatcatgtc

SEQ ID NO: 420835 - DNA, 49 bp, Homo sapiens
ctggtagccaccggcactcacggtgaaaggtgtagcagtcactcggcct

SEQ ID NO: 420836 - DNA, 50 bp, Homo sapiens
atctctgttccaaatgctttgctggtatagacacgtgtggccgtttacgc

SEQ ID NO: 420837 - DNA, 100 bp, Homo sapiens
agattttgagtctgtcagcaagataaccaagagtggagtcaaggaattgaaagatgttggccatcgtgatcagatggctgcagctagaggaatcctgcag

SEQ ID NO: 420838 - DNA, 100 bp, Homo sapiens
aggcctgcgtccgagtctccgccgctgcgggcccgctccgacgcggaaggtgacttaagagattaaaattaatttggttgctgttggttctgaacaaata

SEQ ID NO: 420839 - DNA, 78 bp, Homo sapiens
aagatggctactctggagttgaggtaaggctggcctctctgcagtcagaggtctgagctctgccatggggataggggt

SEQ ID NO: 420840 - DNA, 100 bp, Homo sapiens
acaaagaagaaaacatttcttttaatttttaaacttggtttgaaagccacacacagcaccttgacttgcatgagcagggagttccagtgcgaggacgggg

SEQ ID NO: 420841 - DNA, 153 bp, Homo sapiens
gggccccaaggaccacatggtaaccagctccttctgctgccagagcgacggctgcaacagtgcctttttgtctgaagggtcccagcaccatggaggacccgaaccctgaagagaacatgaagcagcaggattcacccaaggagagaagtcccc

SEQ ID NO: 420842 - DNA, 103 bp, Homo sapiens
caggactgcgaccagagatcgtgttggacattagctcccgagcgctggccttctggacatatcaggcacagggtggtggtttcctatcctcctcagagtgagg

SEQ ID NO: 420843 - DNA, 90 bp, Homo sapiens
tgaaaaaaggggagacactgcgaaagcaaaccgaggaggttagaaaatggatttctgactggaatctcaccactgaaaaaaagcacaccc

SEQ ID NO: 420844 - DNA, 83 bp, Homo sapiens
gttggagagctcatctggaattttgccgatttcatgactaaccagtgtaatctgtaagtcagatgctccaacaggggatgttc

SEQ ID NO: 420845 - DNA, 60 bp, Homo sapiens
tggttgcagttgtgtagtagttaagcctcccgcgacgatgcccctcaacgttagcttcac

SEQ ID NO: 420846 - DNA, 98 bp, Homo sapiens
gccagagatccagtgcgtgtcagccaagtccccccaacactgcatggagcggatccaggtctgtttctgtcgactgtggaccacttatgtgcgatccg

SEQ ID NO: 420847 - DNA, 100 bp, Homo sapiens
gttggttacccaggacggcaatactactttaatagttcaggactgactgcattgcacagatgatggatatttacgtatgtttgaaacgaccatcctggat

SEQ ID NO: 420848 - DNA, 90 bp, Homo sapiens
gccgccgttttcgcctgcagctgctcaccgagtcattcttatagaagagcatcagaggaagataaaaaagaatcctcaatgtcaggcccc

SEQ ID NO: 420849 - DNA, 100 bp, Homo sapiens
gaaggaaattcaacagaacttagcataaatgctgaagattctactcaacatgtcccttcagaaacaagtgaggaccctgaagttgaggtgactattgaag

SEQ ID NO: 420850 - DNA, 97 bp, Homo sapiens
agatggcctctgccggccagggcaaggaggaggcggtgaagcagcttcgcaagatgcaggcccagatgaaggactgcatgcgcgagctggatgacac

SEQ ID NO: 420851 - DNA, 75 bp, Homo sapiens
cctgcgcagctccggccgcctggctccccatactagtcgccgctccttcgagaactcatagaacggaagaccagc

SEQ ID NO: 420852 - DNA, 82 bp, Homo sapiens
gaggaggcggtggccctgctggaggagctctgggggttgtgtccactgtggtccccgactctgcccacaagctgttcatcgg

SEQ ID NO: 420853 - DNA, 82 bp, Homo sapiens
cttattattggccctccagatacactttaaccctgtacccaagcctgtcatcaaaattgagaagatagaagacatggatgac

SEQ ID NO: 420854 - DNA, 100 bp, Homo sapiens
gcagtcagcagccggcagcagcagcggctggagctctcaaacactgctgtcctgcaccagatgcggcgggaccaggtgacagacacgtgccgagccaaca

SEQ ID NO: 420855 - DNA, 50 bp, Homo sapiens
aacttaaggaaagagtgggaaagtgaggcctgttcagtccttggagttgc

SEQ ID NO: 420856 - DNA, 83 bp, Homo sapiens
gagactgctgagcccgtccgtccgccgccaccacccactccggacacagactacgtctactttgagaactcctccagcaaccc

SEQ ID NO: 420857 - DNA, 100 bp, Homo sapiens
ctctgttccaaatgctttgctgacaagttggatggcttgaggactggtactaaaaggaaacgtgactgggaggccattgccagcagaatggaggattatc

SEQ ID NO: 420858 - DNA, 73 bp, Homo sapiens
ggatcagaagcaagacccagcggctctccaaggtaccgagcccctgaactgctgttgggaaccaccacgcaga

SEQ ID NO: 420859 - DNA, 100 bp, Homo sapiens
aatttgtatagagatgtgatgttggagaactacagaaacctggtctccctagtgccggtggtggtgtgcacattgagccccggtatagacagttccccca

SEQ ID NO: 420860 - DNA, 75 bp, Homo sapiens
aggctgcaggaagaagaagggacacctttcacagctatcagggaaggtgctggagaatctggtaaaagcaccatt

SEQ ID NO: 420861 - DNA, 75 bp, Homo sapiens
agccgacgcgggaatgaagcgggcgctgggcagttggaggagagcagattagtgccattggaaggggcatatgtg

SEQ ID NO: 420862 - DNA, 75 bp, Homo sapiens
ggacagcaccatgtccaccaaagcggagcagtgctgtctcctggttcggacatctatgtgacggtctcatccatg

SEQ ID NO: 420863 - DNA, 100 bp, Homo sapiens
gccatccccgcggcccgcggaaaggatcctggtggacctgctgaagctgaacgtggcccccctcgccgtcttccagatgctcaagtccatgtgtgccggg

SEQ ID NO: 420864 - DNA, 50 bp, Homo sapiens
cttgtggagctgtggcaagtcctcatagggagaaccgaagattacaggag

SEQ ID NO: 420865 - DNA, 50 bp, Homo sapiens
ctaaatgttatgaggatcatcaacgagcctgtcttacacttagcaatcat

SEQ ID NO: 420866 - DNA, 100 bp, Homo sapiens
gggaaggacggggcctggcccccgggactccctgtgccttgcttggagctgacgccgacgggtttttgtggaaactctggataagtgtttcgaaaatgtg

SEQ ID NO: 420867 - DNA, 100 bp, Homo sapiens
cgccaacctggatggagagaccaacctgaagcggcggcaggtggtccgcggcttctcggagcttaacattgatgatggcacctcagatcgcccctacagc

SEQ ID NO: 420868 - DNA, 75 bp, Homo sapiens
agcccagctagcaccttcgccctctccagccaggtacctcgtgtgaaggcaaagaagaatgctgctccattcaga

SEQ ID NO: 420869 - DNA, 89 bp, Homo sapiens
cagagaggccatgctccatttgggcattgacacccctacccagaacaacatctttaaggccatccgggatggtgtcattgaggccagca

SEQ ID NO: 420870 - DNA, 82 bp, Homo sapiens
ccgtccgccgccaccacccactccggacacaggtgtgggcaagagcagtttactgttgcgttttgcagacaacactttctca

SEQ ID NO: 420871 - DNA, 50 bp, Homo sapiens
gtcgtcttccggacagactatggtcagaaatctcctgcaaagaagctgag

SEQ ID NO: 420872 - DNA, 100 bp, Homo sapiens
catgcctcaccaagtcacatgacaagcaggcctgctttcttccccgggcgatgtgcagagatctttgccaggggtcaaagcgtcgggaagcttggggtcc

SEQ ID NO: 420873 - DNA, 95 bp, Homo sapiens
acgccggcgccgagggacaccgcagtatgaggcagaggagctgccagagcatgacgagcctgttcagtaacactgtgtcaccgacccaggacggg

SEQ ID NO: 420874 - DNA, 75 bp, Homo sapiens
aagaacccccaaacccaaaccgaggagcgcttccgccctcagtggagctacctggcctatcgaaactttatgatt

SEQ ID NO: 420875 - DNA, 107 bp, Homo sapiens
tggcgaatatcttcccttacaagggttatatatggaattatggtaccctccctcaggcatactccaaatgcttcttccagttcatttttcagccatcagttcaagag

SEQ ID NO: 420876 - DNA, 90 bp, Homo sapiens
ttgagattcctgatgaagatgatgatgtcctcagtattgattcagccccgtcgcagaatttagtctcaaaggaaacttcaaccacagcac

SEQ ID NO: 420877 - DNA, 80 bp, Homo sapiens
cgccgagggcccggaccccgaatatgacgtacctataactacctgggaaaaaagacaaaccagatgttggaggcttttga

SEQ ID NO: 420878 - DNA, 99 bp, Homo sapiens
cagagaaagcagagggtgagatggatgagtccagcattctaagacgaagagggctccagattattcttggagaaaccctgtctgtttactgtaaccttt

SEQ ID NO: 420879 - DNA, 87 bp, Homo sapiens
gcggccgcggacgaagatggcgaccgccatgtacttggagcactatctggacagaagctcttcgtgggcggtcttgactggagcacg

SEQ ID NO: 420880 - DNA, 100 bp, Homo sapiens
agaagctgtggatgaatttgcttttctggaaggtgtcctagtggtcaatgtcacgtggaggaacaaaacgtacgtgggaaccctactggactgcaccaag

SEQ ID NO: 420881 - DNA, 100 bp, Homo sapiens
ttttcttcaatgataagagctgtcagttttctgtggatgaagaatagcctaacatggcagaccagagacagcgctcactgtctacctctggggagtcatt

SEQ ID NO: 420882 - DNA, 98 bp, Homo sapiens
gcctgaggagcgggcacagggcaaggcggcggacggctgcgtcgcccgaggcgaggaggagcgctggcgcacactttcatattccccatcacattggc

SEQ ID NO: 420883 - DNA, 100 bp, Homo sapiens
cttcgccgcgccatcctgctgctcagcccacagggagcccactccttcatcaacgaggcagccatgttgttcagttctggagtcttttggatgggcttgt

SEQ ID NO: 420884 - DNA, 98 bp, Homo sapiens
ttgccccagaaagccccagacggaaagagctacttgctgagaacaaaacataaccctttcatttgtactgcctccttccacacgagtgcccctttggc

SEQ ID NO: 420885 - DNA, 83 bp, Homo sapiens
catgcaggcagccgtggatgccgtggcccgggtcactggccagcaccccgagaaggatatggccctgaagccacatgagcgga

SEQ ID NO: 420886 - DNA, 95 bp, Homo sapiens
cttccagcttctgctgtccttctttgtggagagcaaggactttctaaatgggtacggcagcagattcagcaccattcaacctttgaaagtgcact

SEQ ID NO: 420887 - DNA, 75 bp, Homo sapiens
tggaaacacatgaaagacttcctcaaggactacagtatgcacttaatgtccctgctgtggatctttccattgatg

SEQ ID NO: 420888 - DNA, 90 bp, Homo sapiens
cctgtggtctctgcacctcctttctgttccagcaacagatagaaatgctttaagttcactctggggaaagctggcctctgaaatcttaat

SEQ ID NO: 420889 - DNA, 100 bp, Homo sapiens
tggcgctctggccggtcagcaagcagctctaccgccgcctcaactgccgcctcgcctactcactctggagcctactgactgctttgaaggttattgctgg

SEQ ID NO: 420890 - DNA, 83 bp, Homo sapiens
aggaaacaagacagttctgtctgcagaagcccattatggctgtaactggagatgacacagacaaatttacatgtattggagac

SEQ ID NO: 420891 - DNA, 75 bp, Homo sapiens
ccgcggtggcggcggcgacggcggccctggcagagcatccacaatgggtaccccagcctcggtggtcagtgagcc

SEQ ID NO: 420892 - DNA, 100 bp, Homo sapiens
cgccgctgaccaccctcaacacggatatcagcatcctgtccttgcagcagtctctggtcccagcccaccccatggcccctcccagtcccagcaccaccag

SEQ ID NO: 420893 - DNA, 83 bp, Homo sapiens
agtaatatctggactttgaaattgtgaatatgaccatctcccagaacaggccttctatatggtgggacccattgaagaagctg

SEQ ID NO: 420894 - DNA, 100 bp, Homo sapiens
gaaacatatctgcgaaaacacaggtatgatctcgtgaaatcttgagagaaactgaatgacgaatgaaactattgttcctgtttcacacagaagaaaactg

SEQ ID NO: 420895 - DNA, 51 bp, Homo sapiens
tggaagaccacatcagggcgcttgaaaggatggaatacagggggcacagtt

SEQ ID NO: 420896 - DNA, 82 bp, Homo sapiens
gatgacatatttttggacctgaaacagaaattctggaacacctatatggaactctgcgaccttcaagtcgtttgaggaccga

SEQ ID NO: 420897 - DNA, 100 bp, Homo sapiens
ccccaatgagtggcacacagtctactatcaccgacaggtcatagcaaatgacagaagtcccttggtgggcaaaattcactgggagaaaatggttaaaaag

SEQ ID NO: 420898 - DNA, 100 bp, Homo sapiens
gcatcgtcgtctatgggggctactcgaaacagggcttcccacggcacgacatggagacctgtggttgcgaggctccctggggctcggcttggaccgcgat

SEQ ID NO: 420899 - DNA, 100 bp, Homo sapiens
gaattacagtgtctggaggcagaggacttgcctgtgacccccgatcaggtttagttgcttacccagcaggtgccggtggtggtgtgcacattgagccccg

SEQ ID NO: 420900 - DNA, 75 bp, Homo sapiens
aagagatccagcccccttataagccaaaagctgagcatctttccttgaagaagtacattattgacattgtggttg

SEQ ID NO: 420901 - DNA, 88 bp, Homo sapiens
ggcagcggcaggctcaggtgcagccgctggtgagcacctgcggatctgtccccagggctacacctgctgcaccagcgagatggaggag

SEQ ID NO: 420902 - DNA, 74 bp, Homo sapiens
gtacttctagcaagtgcaccaacagaaaaacaacgcctggaatgggtggctttgtccactatggtgaagtgacc

SEQ ID NO: 420903 - DNA, 100 bp, Homo sapiens
gagacccattcggcggcgcccgggacggcggcggacctgtcgcgatgtcagggctgcgcctctctgcagcagcttctgacaaggcttctaaagagcaacc

SEQ ID NO: 420904 - DNA, 97 bp, Homo sapiens
tctcttctaagctgaataaagctgttttggaactgtcaggtacctcaaagcaagaagctcattcacacagaagacccatttaatgatgaacatcagg

SEQ ID NO: 420905 - DNA, 100 bp, Homo sapiens
cgagggtcaacgagaaagagatcgcactattcctgatcagagaactccagttgcttcaacacacagtatcagtagtgcagccaccccagatcgaatccgc

SEQ ID NO: 420906 - DNA, 78 bp, Homo sapiens
tattcagcagagagctattattccctgtattaaaggtggacattgaagtggacctaattcggttttccttttaaaagc

SEQ ID NO: 420907 - DNA, 51 bp, Homo sapiens
gtctgggtctccgggccaacctgaggctggaaaacaggcttgggggagaag

SEQ ID NO: 420908 - DNA, 75 bp, Homo sapiens
accggcgggatttgatggcgtgatgtagcctctagttcgttagtcaaaacgtgaaaaaaaagacctgctttgccc

SEQ ID NO: 420909 - DNA, 100 bp, Homo sapiens
tgttgtcatccatttgcttggagatgaagaccccagggtgcgacatgttgccgcagcatcactaattagtgttctaagaacggaagcatctgggctggat

SEQ ID NO: 420910 - DNA, 100 bp, Homo sapiens
gaagacttgtgtaatcacagtggcaaagaaacttggttttcattacagcctgttgactccaattcagaggttcaggattggccatttgatgatggagctc

SEQ ID NO: 420911 - DNA, 100 bp, Homo sapiens
gaccccctactctatccgccaccggaagaatctccgtccttgtctttccattctgccctcccggcttcccagtaaggcaaaaagccctcccacgtttgag

SEQ ID NO: 420912 - DNA, 100 bp, Homo sapiens
gacagccaccgccgcccccaacgtccatgcctgaatacgatgaatggattaaagcagataaaatagtaagacctgctgataaaaatgtgccaaagataaa

SEQ ID NO: 420913 - DNA, 73 bp, Homo sapiens
agagcccctcatcgagctcttcgtcaaggagctgaagaagaagctgttcaaacgccggcgggtgttgaatcgg

SEQ ID NO: 420914 - DNA, 104 bp, Homo sapiens
gtcaaggtggcctaccaggaggccaggggtgtcgccatggatcaagcaccccaacattgtagccctggatgacatctatgagagtgggggccacctctacctca

SEQ ID NO: 420915 - DNA, 74 bp, Homo sapiens
caccaccatctccatcacccaccaacaacaccacaataatccacagccaaggtatagacacgtgtggccgttta

SEQ ID NO: 420916 - DNA, 75 bp, Homo sapiens
ttacctgccacccattgtgtcttctcaagaaggtgagcgagtgctgtgctttcatgggcctcttctttatgaagc

SEQ ID NO: 420917 - DNA, 83 bp, Homo sapiens
ccgacagccaggcccgggagaactctacgaactcgacggggaccccaagaggaaggaattcctggatgacttgttcagcttca

SEQ ID NO: 420918 - DNA, 100 bp, Homo sapiens
gccagcgagagccagggctccaaagaactcggagctctgtgtgtcgtctgagcagtcgcgagaagatttccctccaggacttgtccaaggagcgccggcc

SEQ ID NO: 420919 - DNA, 82 bp, Homo sapiens
aaggtcaagaggctacatggcatgctgcgggacccagctgtgatccagcaccgacccagccggcagtatgccacgcttgacg

SEQ ID NO: 420920 - DNA, 83 bp, Homo sapiens
cagctacccccgcacccacgcggccctgctgaaagtggcgcaaatgatgatatcatcaagttgaatcgaaaggaagggaagaa

SEQ ID NO: 420921 - DNA, 110 bp, Homo sapiens
atgcatacttggaatgaatccttctagagacgtccacggtactccaaagattcaggtttactcacgtcatccagcagagaatggaaagtcaaatttcctgaattgctatg

SEQ ID NO: 420922 - DNA, 90 bp, Homo sapiens
cttacattgaagggttgccccaaggccctacaacggcagaagagactgttcagaaagcccgtgatgctgatgagcgagagaagtggatcc

SEQ ID NO: 420923 - DNA, 94 bp, Homo sapiens
acggagatcctgatgaagttcgagcactaatatttaagaaagaagatgttaactttcaggaactgtggctgcaccatctgtcttcatcttcccg

SEQ ID NO: 420924 - DNA, 98 bp, Homo sapiens
ttggcctcagaggatgtagaagcggacatctacgacaaagtgtcgggcgacatgcagaagcaaggctgcgactgtgagtgtctgggcggcgggcgcat

SEQ ID NO: 420925 - DNA, 90 bp, Homo sapiens
gatctctctcatctcgctcggctgcgggaaatcgggctgaagcgactgagtccgcgatggaggatccacatgtgaatgcatttttccaag

SEQ ID NO: 420926 - DNA, 82 bp, Homo sapiens
gttcacgcacgggatccagagcgccgcgcacttcgtcatgttcttcgcgccctggccaaagagtgtggccagatgcaaaata

SEQ ID NO: 420927 - DNA, 96 bp, Homo sapiens
agcccttgaaattctaaaagtcatgtcccttcacttttcaggattagaagaggctgtgtatagaaacatacaagcttgcaaggagcttgcccaaac

SEQ ID NO: 420928 - DNA, 109 bp, Homo sapiens
cccgtctgcttcgggcctctggaatttagcgctcgcccagctagccgcagttgatattcactgatggactccaaagaatcattaactcctggtagagaagaaaacccca

SEQ ID NO: 420929 - DNA, 75 bp, Homo sapiens
ccgaggatgataaacacccaggacaggtaccttgtggtctataatcctttagaacaagaccgaatctcgttggtc

SEQ ID NO: 420930 - DNA, 102 bp, Homo sapiens
tccctgggaggtggagaaagacggttctggcgtctcctctctagcttcctgcctgacacagctcacttcaagaagtgcacaatgtcagaacgtggaattaag

SEQ ID NO: 420931 - DNA, 98 bp, Homo sapiens
gagatggtggtagccaaacattcagggaggtggggaagacagggctccagctaccacaggacgggctctgggtatagccgttccagtcagggacagcc

SEQ ID NO: 420932 - DNA, 90 bp, Homo sapiens
tttgaaactcctgcaccaaactattacaatgatcgagatgaccacagccacccctctgggggataccaccttcttctcactgaacatgac

SEQ ID NO: 420933 - DNA, 75 bp, Homo sapiens
aacagagggaaggatacaaatggttcacagttcttcatattcatgatgttgctatcaaaagttgagaaattgtca

SEQ ID NO: 420934 - DNA, 90 bp, Homo sapiens
gtttacggaacatgttgcagaaaagcacatttacagcctaatgcgggcaaaaaggccccgagtcacttcaggtggtgtgtcagagtctcc

SEQ ID NO: 420935 - DNA, 50 bp, Homo sapiens
ctggaggttgttatgacacaaaggtgggggagtctgtgttccacacaacc

SEQ ID NO: 420936 - DNA, 100 bp, Homo sapiens
ctggatcatggctgccgcgccgccgctacgggaccgcctgagctttctacaccggacaccaatgggaatcccaatggggaagtcgatgctggtgcttctc

SEQ ID NO: 420937 - DNA, 100 bp, Homo sapiens
cgtcccctacacggatgaggcccggcggtcgcgcctcaaccggctgtacggaatccaagggagggtgacaggacggttctacggagaggatgggctgccc

SEQ ID NO: 420938 - DNA, 80 bp, Homo sapiens
catccttggaaatcctgccgcggacttctctgcacagcatccctgtgacagactccccacctggtgaacctgaacgaaga

SEQ ID NO: 420939 - DNA, 95 bp, Homo sapiens
cttatgagccagacctcctccagcgacagcaacggccatgaggactcacgccggaggagagccattctggatgaaattgaagaacataacatcaa

SEQ ID NO: 420940 - DNA, 100 bp, Homo sapiens
tcgagttacacagcctcaagccaaaagccagcagcgaatgttctttctctttgaccaccagctcatctactgtaagaagtgagtgagatcattggccgag

SEQ ID NO: 420941 - DNA, 80 bp, Homo sapiens
ccgggagctgagtagccgtcgattgcagaggactctccttcagcaactccagaagcttcagactttggtgatgggcaagg

SEQ ID NO: 420942 - DNA, 100 bp, Homo sapiens
atgtggcaggactaactgtctcctaccaagggtacaaactgcagaagatgacttgaaaacagatttctacaaggatttaacttctcttggacacaatgaa

SEQ ID NO: 420943 - DNA, 100 bp, Homo sapiens
gtccgcgctgcttccacccaacttcctgttaggtactccaaagattcaggtttactcacgtcatccagcagagaatggaaagtcaaatttcctgaattgc

SEQ ID NO: 420944 - DNA, 91 bp, Homo sapiens
gcgagcacagagcctcgcctttgccgatccgccgcccgtccacacccgccgccaggtctcggcgcggaagatggccggcggcgtggacggc

SEQ ID NO: 420945 - DNA, 119 bp, Homo sapiens
tcagacccattgcacttcagtatctcaggcggcaccctgtccccgaggaggggaccatgacacatgtactaatggtcacttgatgtgcgctggctgttttatccacctactagcagatg

SEQ ID NO: 420946 - DNA, 73 bp, Homo sapiens
gagcccttgggccgcgtctcctttgaggaagaagtctttgcagaggaaattgaatgctgtctgatgctacaat

SEQ ID NO: 420947 - DNA, 82 bp, Homo sapiens
gatgttggactcatagtcactgccagaaagccgctgccatggcccagacactgcagatggagatcccgaacttcggcaacag

SEQ ID NO: 420948 - DNA, 97 bp, Homo sapiens
acgataaaggaactcaggcgcctcttcttagttgatgatttagttgattctctgaagtcagccataatggcaggtgaagaaattaatgaagactatc

SEQ ID NO: 420949 - DNA, 103 bp, Homo sapiens
ctctctcatctcgctcggctgcgggaaatcgggctgaagcgactgagtccgcgatggagaggctgacccgcggctgattgagtccctctcccagatgctgtcc

SEQ ID NO: 420950 - DNA, 100 bp, Homo sapiens
cttgcttgcctgtgcgcgcgtgcgcggacatggcctcaaacggattttttatcaagcagaaatgcatcgaacaacgagaatcaagatcactgagctaaat

SEQ ID NO: 420951 - DNA, 100 bp, Homo sapiens
ctggggctcgccttgtatctcaacaccctgagtgcggatttctgctatgatgacagtgaagcagccgacacgagtcgttgttcataaaacagcttttgaa

SEQ ID NO: 420952 - DNA, 83 bp, Homo sapiens
gtccgttctctcaggctcccgttcaggtctcctccgggctggggctgagcaagccctcggagtgaccgtgggtgacagcggct

SEQ ID NO: 420953 - DNA, 147 bp, Homo sapiens
aggacatggcaggagtgtttgacatagacctggaccagccagaggacgcgggctctgaggatgagctggaggagggggatgatgaagtggttctgcagtgcaccgcaaccatccacaaagaacaacagaagctatgcttggcagcag

SEQ ID NO: 420954 - DNA, 100 bp, Homo sapiens
tgctgtcaagttcaacgccctggaacttgatgacagtgacctggccctattcattgcggccatcattctgtgtggagatgggaagcggtctcgagcagaa

SEQ ID NO: 420955 - DNA, 82 bp, Homo sapiens
cggctccatcatcacccaggcgcggagggaagacgccctggtgctcaccaagcaagaaatggaggcaaacgaccattttaac

SEQ ID NO: 420956 - DNA, 80 bp, Homo sapiens
agcgggcagccttccaggtggacagggcaattgaaggaacagactaaaaatcgtgtcctggaaggaaactacaggtacta

SEQ ID NO: 420957 - DNA, 90 bp, Homo sapiens
agaggagctggtggatcacttcctgcccatgacggaggaagagctcgccagtgagctcctccgacagcgaggcccccgaggccaaccccg

SEQ ID NO: 420958 - DNA, 96 bp, Homo sapiens
tctcaatatctgtcttcggtggactccttcggcagtccacccaccgccgccgcctcccagatatggatcagaaactttcgaagttggtagaagagc

SEQ ID NO: 420959 - DNA, 89 bp, Homo sapiens
gaagacaaggacagccctttcgctattgacctgaaaagtggttctggaaaagtgtaccaaggccctgcaaaaggtgctgctgatacaac

SEQ ID NO: 420960 - DNA, 75 bp, Homo sapiens
tgtcaggtggttgcggagctggagccttcacgtaaatgggtccagtcatgcctcccagtaagaagccagaaagct

SEQ ID NO: 420961 - DNA, 96 bp, Homo sapiens
ggctgagccgttttgccccaaaacgagagaggagttggtggtgaccccgcccagttggcccagaggatctcttctaacatccagaagatcacacag

SEQ ID NO: 420962 - DNA, 100 bp, Homo sapiens
gcagaagatgaccttaacacagtagcagctggaaccatgacaggcatgttgtataaatgtacaggtcatctaatacatgggagaaacatggattttggag

SEQ ID NO: 420963 - DNA, 102 bp, Homo sapiens
ggaaaggatgttggcggtccctgtgacctgtggagacacggccagatctgccctccattggaggtccccctccccactaagtgcctctttgcatagcaccag

SEQ ID NO: 420964 - DNA, 100 bp, Homo sapiens
cggcctcgtgcgccgcgctttgagcttttcttggacagtgacttactttgattcttttgaaccaggaatgtttcctcctactcctctttcacctgccagg

SEQ ID NO: 420965 - DNA, 90 bp, Homo sapiens
tctgcaagcaggcaacctgaatacagtgtcttgatgggatgtctctctttggcaccctttgggatatgactctgaactctgccttctggc

SEQ ID NO: 420966 - DNA, 98 bp, Homo sapiens
ttgcaagggcgaggtcagccccaaactaccggcccagtgacgagcaccatccggaagtgaaggctgatgggtacgtggacaacctcgcagaggcagtg

SEQ ID NO: 420967 - DNA, 100 bp, Homo sapiens
agggcaggccatgggcaagatatctcagtgttctccgctctcataggtcaggtcctacatcgccaatcgagtgactgacaagctgacacctattcacgac

SEQ ID NO: 420968 - DNA, 98 bp, Homo sapiens
agtcacgaggctcccttgacaggcggctttgcatcggaaatcagctctacagttcagtaacaaatgtggcaattattttggatctatcacctgtcatc

SEQ ID NO: 420969 - DNA, 83 bp, Homo sapiens
gccaagggaccaaggtggaaatcaaacggcctgaaggccaggaggagtcaactccgcaatcagatgttacagaggatggtgag

SEQ ID NO: 420970 - DNA, 101 bp, Homo sapiens
tgtcggtggggaagacttgcctcattaatagcctcctggttcggaatgtcaactatgagatcccctcactgaagaagcagattgccaagtgccagcagctg

SEQ ID NO: 420971 - DNA, 96 bp, Homo sapiens
agcgtgaccgagagcgcgaatatcgtcatcgttagaagatgaccgtccggctggaacgcggagtgtgagagctccggtgacgaaagtccatggcgg

SEQ ID NO: 420972 - DNA, 100 bp, Homo sapiens
gtgatcaatatcaggaaaggccccatcttcccttcacacctggattcagagactgtttttgatattcagaatgacagaaatagtatacttccaaaatctc

SEQ ID NO: 420973 - DNA, 101 bp, Homo sapiens
aggcaattgatcccaagttgtcgacgaccgacagggtggtgaaaggtgatgggcagaatctgtttacgaaagacgtgacagtgatcgagggagaggttgcg

SEQ ID NO: 420974 - DNA, 97 bp, Homo sapiens
tgtggaaaacatccttggagaggtcggagatgggtttaaggaagctcttcgtgtggtgaagatcttacagaaccttgatccgccatttagcattgat

SEQ ID NO: 420975 - DNA, 100 bp, Homo sapiens
ccgaagccccctgcaggaactctacaacccaatccaggtaaatattgggaagatggattcacccattgaaaagtggaacctaataattggcaacttggct

SEQ ID NO: 420976 - DNA, 96 bp, Homo sapiens
ggccgaggagattcaggatgaagttgggaaccctgagcagaacacatgcacaaactcatgccataccctaagggacaaggttccccacatctactt

SEQ ID NO: 420977 - DNA, 88 bp, Homo sapiens
aagaagataaagctcaaagattactcaaagcaaagaaacttaccagtgatgaggagcatctttccttgaagaagtacattattgacat

SEQ ID NO: 420978 - DNA, 90 bp, Homo sapiens
gttgccttcaggtgaccacggattcgccatcgtgagttccagaacctggagaacgatgaggatggagcccaggcctctccggagccggat

SEQ ID NO: 420979 - DNA, 100 bp, Homo sapiens
taagaagttatgtccagatcttctactggcacaagttcgtgagtcccgtgggaaagctaacctcaccaataatgatgtagacatggaaacagatcactac

SEQ ID NO: 420980 - DNA, 74 bp, Homo sapiens
ccgaataccaccccgacgcctcagcccaagtgtattcattgccttcaagaaagctggtggctctacagttaaga

SEQ ID NO: 420981 - DNA, 76 bp, Homo sapiens
aagagatttatggcagcctcactcccagtagtttctgcatttagtgagataagatcagagaacaggcatgtgtttc

SEQ ID NO: 420982 - DNA, 80 bp, Homo sapiens
caaacccactggacaccttcgtcccctttgatccctgtgtgctgaagaggtgtcagttgtacccgaggcgttctcagcag

SEQ ID NO: 420983 - DNA, 80 bp, Homo sapiens
ggcgaggatgcaccttcccctgccttggaaagaattcagaaggagctggcggacatcactttagaccctccacctaattg

SEQ ID NO: 420984 - DNA, 75 bp, Homo sapiens
tgcaacctcctgatgcagtcagaagaagtagagagagaagactggcagtggagcatgcatctggagggcagagac

SEQ ID NO: 420985 - DNA, 75 bp, Homo sapiens
gttccaaatcatcaatgaagcaagtaagcatctctggaagttgatggtagaagaatccgatttactgggtcagct

SEQ ID NO: 420986 - DNA, 96 bp, Homo sapiens
cagacagtgacgattatagcacaatatcaacctgaagatcctgataacttaagtgactctctcttttccggtgatgaagaaaatgctgggactgag

SEQ ID NO: 420987 - DNA, 75 bp, Homo sapiens
agggggaccttgaagacgacttcgaccctgcccagcacgaccagctcatgcagtgggctcgggatgagtttgaag

SEQ ID NO: 420988 - DNA, 100 bp, Homo sapiens
ctgagaactgcgaggctgccctggctcttcatctctataggggaggcaggcttttgcaaggatcttatggttggtgatgaggcaagtgaattacgatcaa

SEQ ID NO: 420989 - DNA, 96 bp, Homo sapiens
atggctgcagtccgtatgctgagaacctggagcaggaatgcggggaagctgataacgaaggaggcccaacttcattcaataaggagcctgacggat

SEQ ID NO: 420990 - DNA, 75 bp, Homo sapiens
tcagagcggagccaagatgcgaatgggaggtgaagttccagcagcgatttgtgtttccagtacagtttggtggcc

SEQ ID NO: 420991 - DNA, 100 bp, Homo sapiens
aagagaagcagtgaaggagtgcagaggcatcacctgaaagaaccccgagatgcccctgtccttcacaataagccgaggattctgggtgctgctttcctac

SEQ ID NO: 420992 - DNA, 75 bp, Homo sapiens
tccactgagtggtaatggatgatgcagttcaaataactaaggtggaacaatccaaagttttaatcaaagaaggtg

SEQ ID NO: 420993 - DNA, 89 bp, Homo sapiens
cccgcggccgcaccttcccgccttctcagttttccaagagataacttcaccaagatgtccagtgataggcaaaggtccgatgatgagag

SEQ ID NO: 420994 - DNA, 100 bp, Homo sapiens
cgcttgtctaaggagctgggcatagagacttacaaagtgaatgtcagtgagcgtctcgttcaatatgtcaagcatgccaatgaagatgtggaaagaatgt

SEQ ID NO: 420995 - DNA, 100 bp, Homo sapiens
cgatgtggagcgcttctttaagggctacgggaagatcctggaggtggatctgaagaacggacttaattcagtgcacaaatgagatgaatgtgaacatccc

SEQ ID NO: 420996 - DNA, 96 bp, Homo sapiens
gcaaggaggccgtcaccttcaaggccgtcagacaaggactttctgcagggcgactgcaccaaagcgaaacagaagctgaactggaagccccgggtc

SEQ ID NO: 420997 - DNA, 100 bp, Homo sapiens
actagaggctggataccaaatagcagtggaaaccggatctaaaatgtccactgaggcacaaagagttgatgacagtccaagcactagtggaggaagttcc

SEQ ID NO: 420998 - DNA, 96 bp, Homo sapiens
catctacctggacatcgatggacgcattcagaaggtgctcgcggtgaggatcgatgacctggaccacctcccggagaccaccaccatcgacgcctc

SEQ ID NO: 420999 - DNA, 82 bp, Homo sapiens
tggttttccttgcagtcgcctgctgctgtcgtcgggagaccctgtattcagtggatcagctggcaccacccaaatagataaa

SEQ ID NO: 421000 - DNA, 83 bp, Homo sapiens
acctctttggatctgatgatgaggaggagtctactcttcatcttgtgttgagacttcgtggtggtgctaagaaaaggaagaag

SEQ ID NO: 421001 - DNA, 100 bp, Homo sapiens
gacctctactccccatcgtatccgcagaaagagttctgtcttgactatgaatcggattaggcagcagcttcggccttaatagtgggaaggagattgtcca

SEQ ID NO: 421002 - DNA, 89 bp, Homo sapiens
tcatgactgagaaagatatggaattatttcgtgatatccaagaacaagcactgcaggaccctgatgctcccataagacagaaaatgccc

SEQ ID NO: 421003 - DNA, 73 bp, Homo sapiens
gcggctcggcggtgagatcgtcagcgctgactccatgcagtgtgtcccggcatggatatccggaacaacctca

SEQ ID NO: 421004 - DNA, 98 bp, Homo sapiens
agagcgcgaatatcgtcatcgttagaaggttgaaatcacaaagattagacacctttttagataggtgttcttcagcaccactgacaacacggttctga

SEQ ID NO: 421005 - DNA, 82 bp, Homo sapiens
agtacaggatatgaagaaattgagggttcttgccatgatgaaactgttaaagatggagtcaccttatacctgctacagtcgg

SEQ ID NO: 421006 - DNA, 101 bp, Homo sapiens
cacatatggccctgtcggccaacagaaaggctgtgggacagatgatgtctaccatgttctacccactggtcacctttgtcctcctcctcatctgcattgcc

SEQ ID NO: 421007 - DNA, 98 bp, Homo sapiens
attgtcagatgcctagcatttgctccatgataatctgaggttgaccccctgtttacagtgccagcgccaccaccgccgatttccagcagtctcacgcc

SEQ ID NO: 421008 - DNA, 88 bp, Homo sapiens
ttcctacaagtgaaaaatgtgctgaaagatggtcccgcagctcaggatgggaaaattgcaccagatgacaagagcacctcaaaggcag

SEQ ID NO: 421009 - DNA, 83 bp, Homo sapiens
ccaccagtgccctggatgcaaacagccagttacagcttgcttggctcaggaacaacagaagagaataaagaaaatgacctcag

SEQ ID NO: 421010 - DNA, 100 bp, Homo sapiens
tgagatttcatgaagatggcgccaggacgaaggccctactgggcaagcttcttatccaatgggagagtagtggctcaaggctcctgggctgctgcaagag

SEQ ID NO: 421011 - DNA, 51 bp, Homo sapiens
cggaggtcaacctcactctgatctggatcatccagcagctcgtcaacggca

SEQ ID NO: 421012 - DNA, 82 bp, Homo sapiens
cgacgagcgcggaggaccgggaggctcccgggcttgcgtgggtgacttaagagattaaaattaatttggttgctgttggttc

SEQ ID NO: 421013 - DNA, 76 bp, Homo sapiens
gagagagagcttggttaacttgggagaaagtttcatctgtggatggagtattgggaagacatgtaaggaatttgca

SEQ ID NO: 421014 - DNA, 82 bp, Homo sapiens
ctccactttcgccagcccgtgccgcgagcgcggcctgcaggaggtctcctccgggctggggctgagcaagccctcggagtga

SEQ ID NO: 421015 - DNA, 98 bp, Homo sapiens
ggccctccctcatgacacagctatctctgggccactccactatgccccttaccacaggagctctgcacagggatctaccgaacagaaagggacaaagg

SEQ ID NO: 421016 - DNA, 73 bp, Homo sapiens
cctgggacagctaccgcagcatgagcgaaagctacacgctggagaggatgccagcccccatcagattgcggga

SEQ ID NO: 421017 - DNA, 100 bp, Homo sapiens
cagaaattaagattctaagcataggcggaggtgcaggttttgaaagagggaaggaagatatttctcaaaataaagatgaatcttcactttctatgtcaaa

SEQ ID NO: 421018 - DNA, 98 bp, Homo sapiens
agagccgtgcatggggctgctccccaggacctgagcaggaacctggagttttcagggttgggccagcccctgccgggtgcgccacagccccaggcctt

SEQ ID NO: 421019 - DNA, 80 bp, Homo sapiens
tttgctggatttaagcactgctgcactttatgaggttatcaatactctggctgaccatcatcatcgtgggactgactttg

SEQ ID NO: 421020 - DNA, 100 bp, Homo sapiens
aacaagagcaagtgtcagaactgcttcaagccccgcgagtcgcatctgctcaacgacgaggacctgacgcaggttggatttggtctagggagtcccagaa

SEQ ID NO: 421021 - DNA, 96 bp, Homo sapiens
cggcgggagcacgtcctcaagcagctggagcgggtcaagtaagactttgaccccgacgcaggcttcagtgattgccgcggatcagaagcctgagca

SEQ ID NO: 421022 - DNA, 100 bp, Homo sapiens
attgaaaaaatggttgacctcacccaggtaatgctggaggatggaagaagcaaagggtttggcttcgtctgcttctcatctcctgaagaagcaaccaaag

SEQ ID NO: 421023 - DNA, 100 bp, Homo sapiens
gctcctccaagcaagtcaccatcgatgccatcactaaaccagacatggcctgagctgaatcagagcagtgagaattccaggctctaagaaaagtcccgag

SEQ ID NO: 421024 - DNA, 82 bp, Homo sapiens
caattctattgcacatcaatgatatcatcccagagggcctgagctgcatgaataaggatcacggctgtagtcacatctgcaa

SEQ ID NO: 421025 - DNA, 97 bp, Homo sapiens
ctaccatgtcagccttcccagtagctgggaccacagctcaggcgctcaggactgccaggacccagaggattcacacgccagccccggctgaagccca

SEQ ID NO: 421026 - DNA, 100 bp, Homo sapiens
aagcttcagccccctccttagttcggcatctgcacagcactgaagaacctgggaatcagaccctgagaccctgagcaaggccagggtgacacggaagcat

SEQ ID NO: 421027 - DNA, 83 bp, Homo sapiens
gcgggcgcagtttctcacgacgggccgagcctgccactgtcttcaatgaaatttatccagtatggacttactcttacctggtg

SEQ ID NO: 421028 - DNA, 75 bp, Homo sapiens
ctggaacttcatcatcatctacttcacaggaattgccatttacgaagggaacgtcatcgtttggaaagcgtcgca

SEQ ID NO: 421029 - DNA, 100 bp, Homo sapiens
aaaaatcaggactcagttgtaaatggcacagaggctgaagttaaagagacagcaatgattgcgtttcagactgaaattcaaacagtgaataaacagttcc

SEQ ID NO: 421030 - DNA, 82 bp, Homo sapiens
gtcttttccgcccgcttcgatcgcctcgcgccggctgctctttccgggtatcatgatattagctggtttgacatcaagtcat

SEQ ID NO: 421031 - DNA, 100 bp, Homo sapiens
cagaactgtagcacctcttcctcaggaaatgtccaccactgtttctcatcatcaccaaacgcttttcgctgtggcctgcagtttttaggcaacattgcct

SEQ ID NO: 421032 - DNA, 74 bp, Homo sapiens
ctgatattgatattattacagcttcatatgcaccagaaggagatgaaggtgtggggatattcagctttgccagg

SEQ ID NO: 421033 - DNA, 100 bp, Homo sapiens
cccgtgcctgtcttcagatcttcacagcacagttcctgggaaggtggagccaccagcctctccttgatatttggagttcttacaacatggcagacattga

SEQ ID NO: 421034 - DNA, 50 bp, Homo sapiens
gtggaagatggcgcctgttgtgacaggccacaggacgaagtcttcaggct

SEQ ID NO: 421035 - DNA, 75 bp, Homo sapiens
ctcaaagcctcctggccccagagacaggtagatatagttgtaggtactccgggaagactagatgacttggtgtca

SEQ ID NO: 421036 - DNA, 100 bp, Homo sapiens
ctggcctttgccgccgttaacgtgtggcggaagaacctgcagatcctggagagctcccagactttgctcagcgttctcaagagggaagctgggaacctga

SEQ ID NO: 421037 - DNA, 110 bp, Homo sapiens
gtgacggcgccgctaggatgaagctcgtgaggtaacagaaatccaggactggagtgcatcaagcccacatagcgcagcatatgtcctctgggataatggtgctaagaacc

SEQ ID NO: 421038 - DNA, 100 bp, Homo sapiens
aaaaattattctgatggctctgaaacctcatcagagttttctaaaatgcaagaagatctgtgtcatattgcccataaagagacagagtctcgctgtgttg

SEQ ID NO: 421039 - DNA, 83 bp, Homo sapiens
cacagctagaggccgcgcagcagcaaaggatgagcggaaccttggaaaagaatccacattcatctcaatggaaggatcctgcc

SEQ ID NO: 421040 - DNA, 50 bp, Homo sapiens
cagccagtccccacagcataacaggtgctgccatgcttactgagtccctt

SEQ ID NO: 421041 - DNA, 100 bp, Homo sapiens
ctttaatgttgagtctaccaaaaagaatgaaccgcttgcttcttatttaggtgcagtagacattgttgcaatcatgatcggcaatctgaaaggcacaaaa

SEQ ID NO: 421042 - DNA, 100 bp, Homo sapiens
gctgatagcaaatggaatccttctcctcctgcttgtgagcccagactggagtccagagttgccaccagatgggatattcaaaaatacgccagagaggcct

SEQ ID NO: 421043 - DNA, 75 bp, Homo sapiens
cactgggaaacatcattaaatctccctgcactaggtcagacaatcccctttggggtacaggaaacaaagcaggag

SEQ ID NO: 421044 - DNA, 75 bp, Homo sapiens
agagatgtggggggattctcgacctgctaacagaactggaccttttcgtgctatgctggaaaatgagaagaagaa

SEQ ID NO: 421045 - DNA, 75 bp, Homo sapiens
cgcctccattgtttgaccacaacaagggccggattctcacccagccaccaaccgctaaaatgcacgccatcatcg

SEQ ID NO: 421046 - DNA, 75 bp, Homo sapiens
gttgtctccagaagctgctgtgggcttgctaaaaggggcagccattttggggggtgctgatggatacctgcgggg

SEQ ID NO: 421047 - DNA, 76 bp, Homo sapiens
tcatcaaggaatccatgtttcttccaagaagcaggaatctttgtctgaagtggaagaaaaatacaagaaagccatg

SEQ ID NO: 421048 - DNA, 50 bp, Homo sapiens
cgagatcagccagccgaccgaggtgtgagcgccactttgaagggcatcca

SEQ ID NO: 421049 - DNA, 50 bp, Homo sapiens
cggggagcggagccatggcctccgaggctgggaggcggcagaatgcagcc

SEQ ID NO: 421050 - DNA, 101 bp, Homo sapiens
aagaaaatcacagcctttgtacccaatgacggttgcttgaactttattgaggttagcactctacgtatatgaatatctgctccatgtaggagctcagaaat

SEQ ID NO: 421051 - DNA, 74 bp, Homo sapiens
atgcagcaaacacagttgtttacagctctaacaaaatagacgaagttagccaagatgaacttaatgaaatcaat

SEQ ID NO: 421052 - DNA, 96 bp, Homo sapiens
gagacatgtccaggcggaaacagagcaacccccggcagatcaagccttcggaaccaaaaagaagcttcccagagccggggccaggagccccaagcg

SEQ ID NO: 421053 - DNA, 75 bp, Homo sapiens
cctgcctcagcctcccgagaagctgggattacagacccgtttgatggagctgcaccgccagtgggaattactttt

SEQ ID NO: 421054 - DNA, 75 bp, Homo sapiens
gcagagatgtttcgtgagcgatataccattttgcaccaggccactgcagaacaaattagacttgcacagatgatt

SEQ ID NO: 421055 - DNA, 96 bp, Homo sapiens
cgccctggagctgctagagatccggaagcacagccccgaggtgtgcgaagccaccaagtgattgcatactcggaacatcgttaccgtatctttggg

SEQ ID NO: 421056 - DNA, 80 bp, Homo sapiens
aagacatcagagacttttatgaaatgttagccgaaagaaggtacagcaacatctttcatgtcttcatccgcatctcgaga

SEQ ID NO: 421057 - DNA, 121 bp, Homo sapiens
tctcgggctcggttgaggagctgctcttcctccagaatgcgctcggacggaacgttaggaaggccctgttacctggtgatgccgttcatgggcaccgacctgggcaagctcatgaaacatg

SEQ ID NO: 421058 - DNA, 90 bp, Homo sapiens
gccacactgaacgccttcctgtaccacatgggccaacacagcaacaaacctccgaggaagaactcttcagcaccaatgaggaaagtcccg

SEQ ID NO: 421059 - DNA, 100 bp, Homo sapiens
aaacttcctaaggcagaaccctagccttccagctgccagggggcttaatgaactgcaaaggccagacgggtgcagggaacaactgggcgaaagggcacta

SEQ ID NO: 421060 - DNA, 100 bp, Homo sapiens
taagatcgtcgagatgtctacttcgaagactggcaagcacggccacgccaagaggaggctgcagacatcagaagcagccctgtcaagcagccaagcagag

SEQ ID NO: 421061 - DNA, 100 bp, Homo sapiens
ggcggcgcgaaccctgctgggcctccagtcaccctcgtcttgcattttcccgcgtgcgtgtatgatgataattccgaagaaggcttccacactattcatt

SEQ ID NO: 421062 - DNA, 95 bp, Homo sapiens
cggagagtttgctccaccaggccagatgagctggacagccctgcgggctgcgttccccgcactgagcccagcacagctgcaccggctgctgactc

SEQ ID NO: 421063 - DNA, 88 bp, Homo sapiens
tgagcccgtccgtccgccgccaccacccactccggacacagatctggtggctggacccagagctgacctatggctgcgccaagccctt

SEQ ID NO: 421064 - DNA, 90 bp, Homo sapiens
actggaaccatctcagaagccatgcccctcaggctggaacttgccctgtctcctcgcagatgagttggcaaacatgaattgactgggcat

SEQ ID NO: 421065 - DNA, 74 bp, Homo sapiens
ttaatcagcgcactggcaagtgcagcgcctgtaatgtttggcgagtctgagtgcgcccccacccctgtgtccaa

SEQ ID NO: 421066 - DNA, 100 bp, Homo sapiens
atatttggaacattaaatatgggagcagagaatctgtggaattattgctggaagactggcatagactaattgagcagcgtgatactttgaaagaaacaaa

SEQ ID NO: 421067 - DNA, 51 bp, Homo sapiens
cctgtgtttcagctgggataggtcaggtcaattcagtgaagatatgatacc

SEQ ID NO: 421068 - DNA, 90 bp, Homo sapiens
gttctacaacctggtgcgcttccggatcgggggcaagcggaaggtgatgcccaagatggaccaggttctgaagaaagtctccaaatacat

SEQ ID NO: 421069 - DNA, 100 bp, Homo sapiens
agctgtctgtgagggtccatgcctgcatcgcaacatccatttttcaccctacatgaatccaaaggaacagatgtggcatcttttgtaaaactgattcttg

SEQ ID NO: 421070 - DNA, 50 bp, Homo sapiens
acgttaaagggaagcgggtcgttatgagatgtctatacctgagatccgac

SEQ ID NO: 421071 - DNA, 90 bp, Homo sapiens
ctcccagatcctaatgatggcagcctgtatacgcttggaagcaagaataatgaaggcctgacgacacatcatctcagagttggagcacct

SEQ ID NO: 421072 - DNA, 100 bp, Homo sapiens
tgagacggtgtcccgccgaaaggcaccactggatcataccagtgacaagtcacttctcgacgctaattttgagccaggaaagaagaactttctgcatttg

SEQ ID NO: 421073 - DNA, 100 bp, Homo sapiens
acaacaacttgcagctcatctctattgatggatactagcatcaacacaatttgaacccactgcagctagaatggcctttccctgctttgatgaacctgcc

SEQ ID NO: 421074 - DNA, 50 bp, Homo sapiens
cctgtatcagctggcccctgtcgaatcaggaaacccaggcccaacggcag

SEQ ID NO: 421075 - DNA, 80 bp, Homo sapiens
tggcctggaggctatccagcctgtcccctttcctccaacccaacggcttactttcaaggaagtatttgagaatgggaaac

SEQ ID NO: 421076 - DNA, 75 bp, Homo sapiens
gaaccttcattaacagatgccattccctctcacccaagagtgtctcagtttgaaactgaattctacatcagtgga

SEQ ID NO: 421077 - DNA, 100 bp, Homo sapiens
ttttaaatcaagatttaacattccaacacataaaaattatttatccaacagctcctcccaggatgacagtgatgggattccgtggtcagaagaacgggtg

SEQ ID NO: 421078 - DNA, 50 bp, Homo sapiens
ctttacgatgtcacttgggaagctgaattcttgccgccaggatggggaaa

SEQ ID NO: 421079 - DNA, 100 bp, Homo sapiens
gcgggagcccggccggagctgggtctggagacgccgtggcagcctgaacggagtgtgcgacggattgggagaattcacagatggattcagtggaaaagac

SEQ ID NO: 421080 - DNA, 100 bp, Homo sapiens
aatacacgatacctttttcttggcgattatgtggacagaggttattttagtatagaggagcgggacggtatgcgggccatcctggggtcctacgacagcg

SEQ ID NO: 421081 - DNA, 105 bp, Homo sapiens
ctacacctgtgcctgccccactggcttccgcaagatcagcagccacgcctgtgcccagaaggctgggaggcggcagaatgcagccagaggagggcacaggctggc

SEQ ID NO: 421082 - DNA, 101 bp, Homo sapiens
tacctgaagcagatgaagcttcgagtgatgaattcccaggagcagagttgcatgctgagaatttgaaaaatgaagatgatgtagacactggactattaggt

SEQ ID NO: 421083 - DNA, 100 bp, Homo sapiens
accaagctcaaacccctccggaaggtaaaacttccttttcctgtagatcaaatcacagatcttccaaggaacgatttccagatgatgattaaaatgcaca

SEQ ID NO: 421084 - DNA, 96 bp, Homo sapiens
tttgcagggaggtgtagacgctgatcaccgtttccagtcattttaaaaattcagcttttgcagggcccccagatcctctgcacgggaacagcttgt

SEQ ID NO: 421085 - DNA, 83 bp, Homo sapiens
atcgcctgggtggttgttggcgtgtccctgcagcgaaggatcctgaattaaacaaccaccatgtcgagcaaaaaggcaaagac

SEQ ID NO: 421086 - DNA, 75 bp, Homo sapiens
tgcctatactgccctcctcactcacttccggtggcagggtttggattcaggatttgttcctagtgtccaagattt

SEQ ID NO: 421087 - DNA, 90 bp, Homo sapiens
ggacagttagtcacccacctacatgttgagctgagtcagtgctgattctctcaaatagagcttgaaggataaatcttcatttttgtttca

SEQ ID NO: 421088 - DNA, 75 bp, Homo sapiens
ggcctcctgccagccccagcccctggagaggatgcagattctgctcctaagtgtaggagagaacttggtgcctct

SEQ ID NO: 421089 - DNA, 83 bp, Homo sapiens
gctcggggatctggctcaggcccacatacagcaacttagcgaagctgccggtgaagatggtcatgcaagacaagataatctgc

SEQ ID NO: 421090 - DNA, 96 bp, Homo sapiens
aatatttttggcaggcgctggttggacagacaaaaaatgatttggtggtcagcttgcctgaggaggattgccccctgtgggtcactttctcagtca

SEQ ID NO: 421091 - DNA, 95 bp, Homo sapiens
agaggtttaaccataggatagagaaaccagtgccggtggtggtgtgcacattgagccccggtatagacagttcccccagctgaccagatcccagg

SEQ ID NO: 421092 - DNA, 98 bp, Homo sapiens
tcttcctgctggaacacttgaaaagggtttgccttcccggattgggcctacaagccagagtcgtcccctggctcaaggcagatccagctgtggcactt

SEQ ID NO: 421093 - DNA, 83 bp, Homo sapiens
acattccaccattcaacaaaagatccccaagtaagcccttggcacggaaattaatggattgggaagtagtaagcagaaattca

SEQ ID NO: 421094 - DNA, 100 bp, Homo sapiens
gttgaatcttacaaaagaaagtctggctgatgatttgaaaattggatgaaggtgaccaagcagcaagtgttgaagagctggaaaaacagattgaaaaact

SEQ ID NO: 421095 - DNA, 100 bp, Homo sapiens
caggggcagaagaacaaggaagcggagaggcaagagccgggggccattgagactgccatggaagacttgaaaggtcacgtagctgagacttctggagaga

SEQ ID NO: 421096 - DNA, 100 bp, Homo sapiens
caccctaccgaattacaagatcaggaatcccacggcctccgcaccctccagatatatccccgtattacccactatcgcctggcaccgtaggacaaatccc

SEQ ID NO: 421097 - DNA, 98 bp, Homo sapiens
gtaatcaggctgtagaagaacgactacaaaatattgaggcccacttgcggttacagacagtttttatgaagaacagtttgtcagcatcttcatttatg

SEQ ID NO: 421098 - DNA, 100 bp, Homo sapiens
gtcatctcgctcggagcttcgctcggaagggtctttgttccctgcagccctcccacgcatccctctctacctgccaacatcctgtattagagaacttgtg

SEQ ID NO: 421099 - DNA, 100 bp, Homo sapiens
aacttcagtagatacattgcctacattgaatcccaaggagctcatcgggcagggctagccaagggtgcggaggcagcaaatgttacaggtcctggtggtg

SEQ ID NO: 421100 - DNA, 74 bp, Homo sapiens
tggagagttttctagaagcctgtcgaaaaatgggggtgcctgaggtgcccgtggttgacacgagctgtgtcccc

SEQ ID NO: 421101 - DNA, 82 bp, Homo sapiens
ctggaggagctgaaagctgagaatggtgcagattcactttataggaacagcttcagcttcagtgatgaaaaactgaattctc

SEQ ID NO: 421102 - DNA, 73 bp, Homo sapiens
tacaaagaactgaggtggtaaagaagcatatcaaggccctggccaacgtcaacattgggagcctcatctgcaa

SEQ ID NO: 421103 - DNA, 100 bp, Homo sapiens
gaaagaaggttaagctggctgtcctgaaatattataaggtgccagctgctgcccgtgctggtgccattgccccatgtgaagtcactgtgccagcccagaa

SEQ ID NO: 421104 - DNA, 49 bp, Homo sapiens
ggacatcctggaagctgggaaatgccccatggctgggggttatggagtg

SEQ ID NO: 421105 - DNA, 82 bp, Homo sapiens
ttgtatgtgtagaaagtgaaatcagaggagatgtaactatcgtcaagtatatgaaggacgtctcaccgtatttcaagaactc

SEQ ID NO: 421106 - DNA, 101 bp, Homo sapiens
cttcggcaagatccagatcgggatttacgtggagatcaagcgcagcgatggagctctgtgtgtcgtctgagcagtcgcgagaagatttccctccaggactt

SEQ ID NO: 421107 - DNA, 82 bp, Homo sapiens
gacgaggaacgaatgggacaagatcccgtccatgaatcagaacggaaagatgctgaaggatgggagaccgttcagagaggaa

SEQ ID NO: 421108 - DNA, 97 bp, Homo sapiens
agaaagcaggcgaacccgcggcgcaataacgggtgtccggtggagagctgtttgaccggatagtggagaaggggttttatacagagaaggatgccag

SEQ ID NO: 421109 - DNA, 75 bp, Homo sapiens
ggattttttaactgaagatagtgcctttcagccctaccagatagaagctttggagaaaatgaatgaagatcacgt

SEQ ID NO: 421110 - DNA, 78 bp, Homo sapiens
atttttagttttgctgtcatcaccatctcaggattaacagaatgatatgacaactgtacgactacaatggggagatat

SEQ ID NO: 421111 - DNA, 51 bp, Homo sapiens
tgtcaccgccggaacctggcgcaggttatgaagacagtatggagtttccag

SEQ ID NO: 421112 - DNA, 74 bp, Homo sapiens
agaacctgtcattgcaccctggctcatcagctttgcactatgcagtggaagtcaaaatgcagatcttcgtgaaa

SEQ ID NO: 421113 - DNA, 132 bp, Homo sapiens
cttcagcagaggcggcagcctggagagtcgaagcagcagctctcgctccagaagcttcactttgctccccgcagccaccgccacccattggaatggccaacaggggacctgcatatggcctgagccgggagg

SEQ ID NO: 421114 - DNA, 85 bp, Homo sapiens
caagaagacatacatctttgctggagacaaattctggagggcctgctttcttccccgggcgatgtgcagagatctttgccagggg

SEQ ID NO: 421115 - DNA, 78 bp, Homo sapiens
cagctgctcctggtgcagtggaagcagaggcacccacgctcctacaatgtgaacagtctacacgtggctgaccctgtg

SEQ ID NO: 421116 - DNA, 75 bp, Homo sapiens
tgccattgtgtattacctcattcaaagtcagtactcctgcatttgtaccaacgaaaactcacgtgctgcttcatc

SEQ ID NO: 421117 - DNA, 83 bp, Homo sapiens
agaatactgaaaattgtcactggatttaatgggcgcagacggggaagcggagccaacatgccagtggcccggagctgggtttg

SEQ ID NO: 421118 - DNA, 75 bp, Homo sapiens
aagagctgaatgactcaagtctggacctgggacccactgcagatgaagttggagcccttgtttttgacattggat

SEQ ID NO: 421119 - DNA, 100 bp, Homo sapiens
agaaggtctggggaaaataatccagagatttccacagaaggactgggatgatacaccttttccacagggaattgagttgagcatctgctgcacccaagcc

SEQ ID NO: 421120 - DNA, 75 bp, Homo sapiens
cacagtgggggtgtgcaaacccgagagaactggctggtgtcatagatgaagattatagaggaaatgttggtgttg

SEQ ID NO: 421121 - DNA, 90 bp, Homo sapiens
ggtaggcatatggaggcgctggagattgctgcaaacttggaaaatcatcagcgtgttagcattttctttgactatgcaagatgtagcaag

SEQ ID NO: 421122 - DNA, 72 bp, Homo sapiens
tttagcaacaaagtcctcaatgccttgaaaccagaaaaagatgtggatggctctgagcccagaggaagccga

SEQ ID NO: 421123 - DNA, 96 bp, Homo sapiens
gcgggagagcaggagcctcggggtccggaaccagacgatgagacagagttgcgaccgcgcggcaggtatgggctacgtgagttcgtggtgattgcc

SEQ ID NO: 421124 - DNA, 75 bp, Homo sapiens
ccggagcacccgacccctgagccgggtgagagcaaaactttcagcaccacttgctggcatgggaaatgccaaggc

SEQ ID NO: 421125 - DNA, 100 bp, Homo sapiens
ttttgtacgagtctgggtggaactcctcataatacggcactgaaggatagcacagaagtagaaattgtggatgagaaaatgagaaaaaagatagaaccag

SEQ ID NO: 421126 - DNA, 75 bp, Homo sapiens
gcgtgtctaggtgagtcgcggtgggtcctcgcttgcagttcagcgaccacgagttaatagagtggatacaacctt

SEQ ID NO: 421127 - DNA, 100 bp, Homo sapiens
gtcgcttgaaaagactgggcttgtccttgctggtgcatgcgtcgtcggcctctgggcagcagtgacttttttgaacgaaccattctgtgcaacagccttg

SEQ ID NO: 421128 - DNA, 100 bp, Homo sapiens
tcagtttcccacagctatgaatgaattcctagaggacctgtgcaacaacctcttgaggatcgaatcttcactcccgctgtctcagcagtctacagcacgg

SEQ ID NO: 421129 - DNA, 49 bp, Homo sapiens
gacctcctcctccacaggggagacagagacaggggcaagtgtccgagtg

SEQ ID NO: 421130 - DNA, 97 bp, Homo sapiens
gcctggaatgatgatgtctcatatgtctcaggcttccatgcagcctgccttaccggctaaagtaaataatgccagcctgattggactgggttatact

SEQ ID NO: 421131 - DNA, 75 bp, Homo sapiens
acaccggctgttcgaggccttgactgtaggtacatgtcccagagcaagcacacggaggcccgggagctcatgtac

SEQ ID NO: 421132 - DNA, 75 bp, Homo sapiens
ctaccggcccaaggccatctacctggacatcgatggacgcattcagaaggagcgagcccagggcgtggtgctgaa

SEQ ID NO: 421133 - DNA, 100 bp, Homo sapiens
aaaataatgggaaggaagaagtatccaagaagaagctcattcacacagaagacccatttaatgatgaacatcaggagaggcaagaggtggaaatgttggc

SEQ ID NO: 421134 - DNA, 82 bp, Homo sapiens
gtgcctttgaccttctgccatgattgtgaggcctccccagccacgtgaaactcgtccgtctccaagagagtatgaagagagt

SEQ ID NO: 421135 - DNA, 90 bp, Homo sapiens
cccagacgcggcacagagagggcctgggagcttgctgcagcttcagggcggaccccggaggcctgagcggcacctgcccccagccccctg

SEQ ID NO: 421136 - DNA, 88 bp, Homo sapiens
acgacatgtgaaacggaagctgtctaaatcagatgactgaaatctggccaaatttcgcagtctcctgtgcacagcggagggtgaagca

SEQ ID NO: 421137 - DNA, 100 bp, Homo sapiens
ctgccgccgcccgcctccgcctgccttctgccgccggccggcgcgtcgtccccacagttcgttcccacatgcagggcagcacaaggagaatgggcgtcat

SEQ ID NO: 421138 - DNA, 100 bp, Homo sapiens
cggcggtcggggccgaggcgcgaggagaaaatgatgcatcctgttgccagcagtaatccagctttctgtgggcctggcaagccttcctgcctcaatgaag

SEQ ID NO: 421139 - DNA, 100 bp, Homo sapiens
ctcgacaaagaccgaaaagaagatgatacaaatgaatttgttagtgctgtgtgctggagggcactaccagatgggacctcaaaggaagaccttctgcagg

SEQ ID NO: 421140 - DNA, 100 bp, Homo sapiens
actttgtatttggtgatttcaacttccggctggattccaagtccgtcgtggagggggggccctcagcctcttggccttgaacgggctgttcatcttgatt

SEQ ID NO: 421141 - DNA, 96 bp, Homo sapiens
atatctcaaaccacttctcagacaagttccatcccacctttgagtcagatgaaaggagaagctggacatatgctacacaatgaaaagtcaaagcag

SEQ ID NO: 421142 - DNA, 100 bp, Homo sapiens
attttgttcctgaaaatcaccagttccgtgctccattatgtcgtgtgcttccccgaatataacaccagcaatcctgacttgttgctagtcatatttcaag

SEQ ID NO: 421143 - DNA, 100 bp, Homo sapiens
ctcactgacttcaagaatgaagccacggacccttgcgggccaattcctgtccccccagcagcatggcatcgtgtgctgaaccctctgagccctctgcccc

SEQ ID NO: 421144 - DNA, 83 bp, Homo sapiens
cctagcaccttctccagtcgacactctcgcgcccggaggatgctcgtcagaagttccgctctgttctggttgaagcaacggtg

SEQ ID NO: 421145 - DNA, 130 bp, Homo sapiens
ctcactgcactccatactgaggaggaaaattataatgtggttgcaccaggctgtctttcacaatccagaaacagcacttcttctcagtctcagacaagtactgcctccagaaaagccaattcaagcgttg

SEQ ID NO: 421146 - DNA, 75 bp, Homo sapiens
caaggattggagcacagaggctcagaagcaagtccagctgcagaaccttggcctgaaaatgctacattatatcag

SEQ ID NO: 421147 - DNA, 83 bp, Homo sapiens
ggtgggggagggaagaagccggagccgccgcaagccacacggctgaaggtgatgtggccgccctcaaccgacgcatccagctc

SEQ ID NO: 421148 - DNA, 102 bp, Homo sapiens
gccgggtacctgggctgggatccggagcaagcgggcgagggcagcgccctaagcagacaatgcagatcttcgtgaagactctgactggtaagaccatcaccc

SEQ ID NO: 421149 - DNA, 75 bp, Homo sapiens
cgataatattattgacctcttcctttatcagccacagagcttcaggatggttcgtactaagacatggaccctgaa

SEQ ID NO: 421150 - DNA, 51 bp, Homo sapiens
agatgctcacagtggggtgctgctccaggtgactctgacatcattagaagc

SEQ ID NO: 421151 - DNA, 100 bp, Homo sapiens
aagagattcagccagcacactcctcgcgagcaaggagccatgtggctagaaatcctcctcacttcagtgctgggctttgccatctactggttcatctccc

SEQ ID NO: 421152 - DNA, 75 bp, Homo sapiens
gttggcctctcaagagaccgtgcaggctcccgctggtgtccctggagcatgggaggctgctgagcgtgagtggcg

SEQ ID NO: 421153 - DNA, 80 bp, Homo sapiens
ggacgagttctcgggcagaggcgacctccccgcgttccatgcgcacagggacaggggccagcactccttgcccgaggaca

SEQ ID NO: 421154 - DNA, 76 bp, Homo sapiens
aaaagagcgaataaagtttatcacgccggggtttttggcgcattctcacagacttagatgaaactgtgatggccac

SEQ ID NO: 421155 - DNA, 100 bp, Homo sapiens
tggcccaccccttctccttggccgtctttgaggagccggtgaaacctgaagaaggcagagatatggcaaacaggattggcgcttttgggtacatggagtg

SEQ ID NO: 421156 - DNA, 100 bp, Homo sapiens
cagagacacacggtcactgcagctgaagccgctgcccctgctacagtttcaggtttagctgtgcctcccagtgactataatgacaaggaagctgtaaatg

SEQ ID NO: 421157 - DNA, 101 bp, Homo sapiens
gaaagatggatgctacttcctattctaggtccctgtgttcatgatgaggactctggcctatcgctcattggaaaacctgcccttcaggctcttttatatca

SEQ ID NO: 421158 - DNA, 74 bp, Homo sapiens
gtaagaaccgccggggacgaaacaataaagaccggaagctgagtttttatccgggagtaggttgcatctttgtt

SEQ ID NO: 421159 - DNA, 75 bp, Homo sapiens
gatcattctgcaagcaggcaacctgaatacaggtgaccacccgccggcggaagaaggaaggagaatacaacgtcc

SEQ ID NO: 421160 - DNA, 100 bp, Homo sapiens
tgaactaggatgtcccgacatgaagacaagttggatggcttgaggactggtactaaaaggaaacgtgactgggaggccattgccagcagaatggaggatt

SEQ ID NO: 421161 - DNA, 90 bp, Homo sapiens
tataaaagcagcaaatctacttttgggttacaaaaatccagaccagagtgaagatagtccaagtcctaagagacagcgcctctctcattc

SEQ ID NO: 421162 - DNA, 96 bp, Homo sapiens
ctcctgcgcctggaggctgggtgggcgtccggcgcgcgggaggcggcccggggctcccgggcgggctccggcagggtgatgaccagttaaatgtat

SEQ ID NO: 421163 - DNA, 100 bp, Homo sapiens
tggggctgttacttgcagcaactgggaacctgaatgcctacttgcaacagggttgcaaactgtcttccaggcgagagcggccgggtcctgcagatctcag

SEQ ID NO: 421164 - DNA, 51 bp, Homo sapiens
cttccagctgtttgaccgaacagtgaccaaagacttgaccactcaaagtcc

SEQ ID NO: 421165 - DNA, 100 bp, Homo sapiens
ggcttaaacacctccaacggggatggctctgaaacagaaaccacctctgccatcctcgcctcagtcaaagaacagggccttgcccgagatggacagccgg

SEQ ID NO: 421166 - DNA, 98 bp, Homo sapiens
agtgtacaacttccccgcaggcggcgtgggcatgggcatgtacaacaccgacgagctcatgggcctcctgagtgacccagaattaggtccagcagcag

SEQ ID NO: 421167 - DNA, 116 bp, Homo sapiens
tggcgtgcactccgcacctcggggacattattgcgcgtggaacggctgcttttggaaggttttaaaatcaaagatgggaaaatcggagaaaattgcccttccccatggccagcttg

SEQ ID NO: 421168 - DNA, 75 bp, Homo sapiens
ccttgctgccaggaagcttcggccccgcagctcggcttgctgcggtctcaggccctgggctgcatcttgtacctg

SEQ ID NO: 421169 - DNA, 100 bp, Homo sapiens
actccagcccctcgccgggctgtgctggaaaccatcagaacttacctcaccatcactgacactcagcctgcctacgtgctgcagatcttcccgccctgtg

SEQ ID NO: 421170 - DNA, 100 bp, Homo sapiens
gtcgctgctgatggtcttcgccgatggggccttccccgagtcaccgagacttggagccagaatctgagcctcagctggagtcagagacagcaggaaaatg

SEQ ID NO: 421171 - DNA, 100 bp, Homo sapiens
ggagctgggcggccatttaccagagaaagatgctggtttcgagttttggagatccttgttttttatggaacacagttctgtaaaattttcataagattcc

SEQ ID NO: 421172 - DNA, 107 bp, Homo sapiens
gggaaagtgatgtccctctgaaaactgaggaatttgaagtgaccaaaacagcagagggagacctggccttacagggcagcattgggagtctgtctctaagtgacctc

SEQ ID NO: 421173 - DNA, 100 bp, Homo sapiens
agcacgtgataactttgaaggaggctgcctggctgagctgatcggatcacctagagactggaaatgctttctggatgcatcatcccattcagatgaaacc

SEQ ID NO: 421174 - DNA, 100 bp, Homo sapiens
aagaaatatgtcaccctgtgtgacaatggcgtgctgacctatcatcccagtttacatgatggtcttgttaatgtaggatggatggactgtgccacccagg

SEQ ID NO: 421175 - DNA, 96 bp, Homo sapiens
tatgaacaatccgtctggatcacggatgtaggaagtggttggatggcaagcatgtggtgtttggcaaagtgaaagaaggcatgaatattgtggagg

SEQ ID NO: 421176 - DNA, 75 bp, Homo sapiens
gtagtcgctggagtccgcgcctccctggtgtgcaccggcacagacatgaagctgcggctccctgccagtcccgag

SEQ ID NO: 421177 - DNA, 100 bp, Homo sapiens
ggagaggcgagctcgcgatgagtggtctcggcaggctcttcgggaaggcaactagaagccatttgtgtcaaggtaacgtctggagaaacaaaaggtcagg

SEQ ID NO: 421178 - DNA, 96 bp, Homo sapiens
tttgcgccttgcagcactgctggaccagccaagagtcgaagctaaaccagaagttcaatctcagccacctcgtgtgcgtgaacaacgacctagaga

SEQ ID NO: 421179 - DNA, 100 bp, Homo sapiens
tttgtcagctcccgcacagtaacgaccgactgtgattcctccaccacctcactctgctccttccctgttgccaatgtctcgctgactaagggtggacgtg

SEQ ID NO: 421180 - DNA, 75 bp, Homo sapiens
atgcccaaatcccggaaactccagcgtgtctccagccgtggtgtggacactgccagcggctgcagccgacttgga

SEQ ID NO: 421181 - DNA, 75 bp, Homo sapiens
cctgtacgcggagggctcggtcaacggcttcatcagcaccttgggtatctggagtccatctttcaccatcttctc

SEQ ID NO: 421182 - DNA, 95 bp, Homo sapiens
attacaagcagcatcatgcagaaagtgtctactgatcatctacctgatgggccaccagactcctggagagatcaagcaaggagaacctggggctg

SEQ ID NO: 421183 - DNA, 83 bp, Homo sapiens
gaagattgcttctcttctctcctccaaggacactcaatcacttgtcggaagtccctcaacccgtatagcacctcatattattg

SEQ ID NO: 421184 - DNA, 74 bp, Homo sapiens
cagctgtcctcatgtctctccagcagataagctccgaagaagtatgcctaacctagcccggatgccaagtacaa

SEQ ID NO: 421185 - DNA, 75 bp, Homo sapiens
cctccatgtcccacgtggacaagttcgtcaagtccggcctctttggcctacccccgttggctccgctgccccagg

SEQ ID NO: 421186 - DNA, 75 bp, Homo sapiens
cttcaagcttaggaccacccaccatgcctatccagagctgtaggtaaaacttgcctactgatcagttacacaacc

SEQ ID NO: 421187 - DNA, 106 bp, Homo sapiens
cggcgcagcgtctatggcaccgcggagttcaaggagcctacgccgagcctcaccggatctgtgggacagacccagcaggtggtgccccatgtaagaagcaatgaaa

SEQ ID NO: 421188 - DNA, 100 bp, Homo sapiens
ggacgcggccatggccgagctcccggggccctttctctgcggggccctgctaggcttcctgtgcctgagtgacagccgctccgaccgctggtcccagatg

SEQ ID NO: 421189 - DNA, 98 bp, Homo sapiens
gactatggccgccggctgagtgctgacatccgacattgacgagtgtgagaatgactactacaatgggggctgtgtccacgagtgcatcaacatcccgg

SEQ ID NO: 421190 - DNA, 129 bp, Homo sapiens
tcagacttacgcctagtggtaggagacagcttgaaagcagagaaggagctaacagcatcagtcactgagttcccagaggtccacttgggccagtggtactttatcgcaggggcagctcccaccaaggag

SEQ ID NO: 421191 - DNA, 90 bp, Homo sapiens
tatacttgtgccttggaattcaacagaccccatatcatgtgaacctcctcctggctggctatgatgagcatgaagggccagcgctgtatt

SEQ ID NO: 421192 - DNA, 98 bp, Homo sapiens
agagtccttgtggtcgacatccaagcccagaaagtcctacaggtctctaattaacagaagatggcaaagcccagccacagcagctatgtccttcagca

SEQ ID NO: 421193 - DNA, 100 bp, Homo sapiens
agagaaataccttaaaagtgttttacgggaactggtcacatacctcctttttctcatagtcttgtgcatcttgctgggctttgacaaacttcctctgtgg

SEQ ID NO: 421194 - DNA, 74 bp, Homo sapiens
cgtcagcactgactttcagctatggaatcggatcacagaagaactgcagcttcctggggagcagtttcacctcc

SEQ ID NO: 421195 - DNA, 75 bp, Homo sapiens
acgaactccgcaatgaggacgttcagtcgtccctcatggaccttgctgacgtcttcacggccccagctcctgccc

SEQ ID NO: 421196 - DNA, 100 bp, Homo sapiens
ctgtgctcgtgcactcagctggtgggggcgtgcaacagggagctgccaccaccgtgtactgtgctgctgtcccagaactggagggtctgggagggatgta

SEQ ID NO: 421197 - DNA, 82 bp, Homo sapiens
ggggccagttcctgccgtctgctcttctgcctcttgatctccgccaccgtcttcaggccagtgcctccggagccagcgtggt

SEQ ID NO: 421198 - DNA, 100 bp, Homo sapiens
atcattgatgtggtgcgatcggtaaagagaaatgtgtatgaccttacaagtatccccgttcgccaccaattatgggagggctggccaacttctgctacag

SEQ ID NO: 421199 - DNA, 82 bp, Homo sapiens
aacgggactggctagttaaacaaagaggctggcgtgaagcctctgcgggccttcttttcgtcttatttgaagtcattgccgg

SEQ ID NO: 421200 - DNA, 98 bp, Homo sapiens
agtctctgtccgggggcctggctaaggaaaccctattacctccaggtccacgctgcttttatgagctgtaacactcaccgcgaagatctgcagcttca

SEQ ID NO: 421201 - DNA, 96 bp, Homo sapiens
tcgttccgcgacggcctggctttctgcgccatcctgcaccgccaccggcccgacctcatctggagatggagctgaagatgctgaagtctcagtcca

SEQ ID NO: 421202 - DNA, 100 bp, Homo sapiens
gccacgccgagtgtcgcccgcagccacgcggaggcggcggggagccgcgcgcggcagatggttgccaccctggggaccacaacatgctgctcctttgaca

SEQ ID NO: 421203 - DNA, 98 bp, Homo sapiens
gattgaggacgttcccttcacggagaaagattttgagtttattctcgagccaatgaacaggaaccttgtggctggtggctggcccgggtgcggatgat

SEQ ID NO: 421204 - DNA, 74 bp, Homo sapiens
ggctatcaaactcgctactaatgctgcagtcactgtacttagagtggatcagatatacgagaacgccatgattg

SEQ ID NO: 421205 - DNA, 101 bp, Homo sapiens
ggcggagcagggccttggaccccgcggcgcccctcggcctcggagcaacgagcgcagcgccggtgctggagaatctggtaaaagcaccattgtgaagcaga

SEQ ID NO: 421206 - DNA, 98 bp, Homo sapiens
ctcttaataaacacttcgagagttcttccaaagtcgcccaggcaccttctccatgcattgcaagagttcgtaaactcctggttgatgcaattcataat

SEQ ID NO: 421207 - DNA, 83 bp, Homo sapiens
ggccgctctgggatcccggccaccagcaattgtccgcaaaagactgttgaagtagagagcattttgcccagctcactcggatt

SEQ ID NO: 421208 - DNA, 100 bp, Homo sapiens
ggcaatatactgttacgatccagttgaagattactggatgcacgtacagaatacattcagccgtcagtctccccgagtgaaagaatcaatatcaaattct

SEQ ID NO: 421209 - DNA, 107 bp, Homo sapiens
tcacatgtaccggatggcagttatggctatggtgatcaaagatgaccgtcttaacaaagaccggaacaggatctggacttggcacatttcttttaaaggtgcttgaa

SEQ ID NO: 421210 - DNA, 100 bp, Homo sapiens
gggttctaccagtgattatgtcagccaaagctactcctactcatctattttgaataaatcagaaactggtggaagtttagctgatgctataagtgaaaac

SEQ ID NO: 421211 - DNA, 76 bp, Homo sapiens
gagtgagctgcactgtgacaagctgcacgtggatcctgagaacttcaggatcttgcttctgaaatatctacctggg

SEQ ID NO: 421212 - DNA, 100 bp, Homo sapiens
ctgagcaacaagacagaggaggacatcaagaaggcgcggagaaagtccacacaggctgagaagcagggccctgagcggaagaggattaagaaggagcctg

SEQ ID NO: 421213 - DNA, 100 bp, Homo sapiens
agtggccggagcagcctcaaagcagaagccgagaacaccaaggagaaggcagagcccccccaggctatgaatgccctgatgcggttgaaccagctgaagc

SEQ ID NO: 421214 - DNA, 82 bp, Homo sapiens
aggaacagggacagcacctcatcccctggatgggggaccacaagatcctcatcgacaggtttacccaaggtccagcctagcc

SEQ ID NO: 421215 - DNA, 119 bp, Homo sapiens
acgcgcccggcgcccctgagccggccgagcggcgacggaccgcgaggatttttgtccctgagtcatggaagacagaagagctgaaaagtcatgtgaacaagcatgtgaatcacttaaga

SEQ ID NO: 421216 - DNA, 104 bp, Homo sapiens
gctgcggccgccctgggccgggccccaccggacggtcaaaatgcagatcttcgtgaaaacccttaccggcaagaccatcacccttgaggtggagcccagtgaca

SEQ ID NO: 421217 - DNA, 100 bp, Homo sapiens
ggggcaacctccaccttgacggttccaggagcctaagttgccaaaggattaccttacacaaaaatctgttcttctcatttgtttgtaactctgttgtaac

SEQ ID NO: 421218 - DNA, 100 bp, Homo sapiens
cagtgcctgcggttggccttcaacacacccaaggtcacagagcagctcatgaaactggatgaacaaggggatcattttacttctccagatgaatatgatg

SEQ ID NO: 421219 - DNA, 101 bp, Homo sapiens
aaaacagagacaccgtctatgacatgctggttgaaatcctgagagcaagcaaggctgagactcgggctgagtttgcggagaggtcagtaactaaattggag

SEQ ID NO: 421220 - DNA, 100 bp, Homo sapiens
aaagagaaggcagaattaaatcctgagctagatgctttactaggccatgctttacaaggtgttacagttcgagtgcctcaaacaaccacatatgttgtaa

SEQ ID NO: 421221 - DNA, 133 bp, Homo sapiens
ccccgtctgagaagtgaggagcccctccgcccggcagctgccccgtctgagaatagccggatcgagctgggagatgtgacaccacacaatattaaacagttgaaaagattgaatcaggtcatctttccagtca

SEQ ID NO: 421222 - DNA, 101 bp, Homo sapiens
cttatgagacttttgcactgtaaaactttacacattgtgctattcactctgctttacaagctgacctcaagagaatttgcaagacaatagttgaggctgca

SEQ ID NO: 421223 - DNA, 128 bp, Homo sapiens
gcgtacttctgaagcaaccaaaatgcatgctccacccattaatatggaaaggaagctgtgctgaatggtttggtggccactgaggtgttgatgtggttttatgtcggagagattataggcaagcgggg

SEQ ID NO: 421224 - DNA, 90 bp, Homo sapiens
aaggagcacagttattgaccagattccttttctggcagtagcaagagcacttgaatggagctggtttgtcaaaatccaaaggaagccgaa

SEQ ID NO: 421225 - DNA, 87 bp, Homo sapiens
gggacacttacaaattgctgcttgtccaaatcaggatccactgcaaggaacaacaggaacgccgcgatggctgcgcagggagagccc

SEQ ID NO: 421226 - DNA, 100 bp, Homo sapiens
ctggaaatagggcacagatccaggtaatgagagatccaaacaccaagcgctccaggggctttgggtttgtcacatatgccactgtggaggaggtggatgc

SEQ ID NO: 421227 - DNA, 80 bp, Homo sapiens
caatgagctggcacagtcggaggtgtactcagtgcctatggggggtatgatggtaaggcagtcctttgccattggaggct

SEQ ID NO: 421228 - DNA, 100 bp, Homo sapiens
gttcggatgagctacagaggcacaaacgtacacacacaggtactccaaagattcaggtttactcacgtcatccagcagagaatggaaagtcaaatttcct

SEQ ID NO: 421229 - DNA, 50 bp, Homo sapiens
cttcttgctatgttggagacaatactttctctgtggacattgactcggag

SEQ ID NO: 421230 - DNA, 82 bp, Homo sapiens
gccactcgggggtgaagctttgcaggtggacaaagcatcaaagctggacgactcctctcctacattccatatcagctgtaca

SEQ ID NO: 421231 - DNA, 100 bp, Homo sapiens
cgaggaggtgaccagggaggaaatggcggcagctgggctcaccgtgactgtcacccacaagacgtctcccacaacctgctccgggcgctggacgttgggc

SEQ ID NO: 421232 - DNA, 74 bp, Homo sapiens
gtgtatgagggattcatctcggctcaggaaagaccacagcaagattctttcattcgtctcctcctagcctgggg

SEQ ID NO: 421233 - DNA, 103 bp, Homo sapiens
ggctgattcatctcttgggtgagaagatcctgggcagcctccagcagggacctgtgacagacaatgcagatcttcgtgaagactctgactggtaagaccatca

SEQ ID NO: 421234 - DNA, 76 bp, Homo sapiens
gagcggttctgtgccaacatcataaagtggatcaatcttcctgtcctacaactgacaaaggatcccctaaagaccc

SEQ ID NO: 421235 - DNA, 100 bp, Homo sapiens
gcccttcttcctcttcctcggccggcgggcgtgcatcatccacggggtgctgcagatcctgttccagatgtgaagttcatttccaatccgccctccatgg

SEQ ID NO: 421236 - DNA, 75 bp, Homo sapiens
caagtcggcgccccagagcggacgaggttccgaggcctcatcctgctgctgaccttcctaatttacgcctgctat

SEQ ID NO: 421237 - DNA, 50 bp, Homo sapiens
ctagacggtatgaatttctaagtaagattgccctcttagactcccccaca

SEQ ID NO: 421238 - DNA, 100 bp, Homo sapiens
ttgagaaaaggcctaagaattttggcattggaactgtggctgcaccatctgtcttcatcttcccgccatctgatgagcagttgaaatctggaactgcctc

SEQ ID NO: 421239 - DNA, 100 bp, Homo sapiens
gtgaatttccatgtcaacatagtcctgtgatcttgagcctgaatggctggacagtgtgcagaaaaatggagagctgttttatttggaattgagtgaggat

SEQ ID NO: 421240 - DNA, 100 bp, Homo sapiens
ttaaccctcagcctcagagtcagatgcaggttgttcccatgactttgccgactaaagttctaagtgcccaccgtaaatcactgaatcttgttgattctcc

SEQ ID NO: 421241 - DNA, 89 bp, Homo sapiens
caatcctcacattcaagctgataggctgcgctaccggaatgtcatccagcgagtgattaggacaatgaaaagcgaaccccattgcacgc

SEQ ID NO: 421242 - DNA, 82 bp, Homo sapiens
ggaggagacgccatgatccccaccttcacggctctgctctgcctcgggctgagtctgggccccaggacccacgtgcaggcag

SEQ ID NO: 421243 - DNA, 74 bp, Homo sapiens
ggagaacgaacatcttctggacctttgtccagggtagggtcttgctctgttaccaaggctggagagcagtggaa

SEQ ID NO: 421244 - DNA, 73 bp, Homo sapiens
ctggccgacaaggtcaccaagctgcaggacattgacaagcagtacgtgggcttcgccacactgcccaaccagg

SEQ ID NO: 421245 - DNA, 75 bp, Homo sapiens
atgattgttataaatgaaggctctcttgatgagtccaaaactacttacctggaagaccttccaccaccccctgag

SEQ ID NO: 421246 - DNA, 100 bp, Homo sapiens
tcctcgggcccgcaggtcgcagggcggcctgcagctgggccgcggccgaggaggcagcgcgacctccgcacggactcacggcagctgtgttctgatttcg

SEQ ID NO: 421247 - DNA, 100 bp, Homo sapiens
atgaccacaaccaccaccttcaagggagtcgaccccaacagcaggaatagctcccgggggatatgagactttctactcggaatatcctgagtgttgcgtg

SEQ ID NO: 421248 - DNA, 85 bp, Homo sapiens
cccgcaccaagctctgctccacactgccaaccggccagaggacgagtgtgctgggaactgctggctccgtcaagcgaagaacggc

SEQ ID NO: 421249 - DNA, 80 bp, Homo sapiens
tggaaggagaactaaatgggagaagaggaatgttccctgacaatttcgttaaggctgctgatactttggctgtgaggcaa

SEQ ID NO: 421250 - DNA, 101 bp, Homo sapiens
ctgaatcctgagacgacagtggtggccatcttcccatctcccatgatgtatgctggaccaactgagcatgcttttcacttccactgcatctctcgctggct

SEQ ID NO: 421251 - DNA, 51 bp, Homo sapiens
cacttggagtccggacatctgaaacttggagcccagtttcctccaattgca

SEQ ID NO: 421252 - DNA, 83 bp, Homo sapiens
gagccggagccgcagaggctcccgggctggactcaggcttctcagcccgagcgggaagaagttccgcagcaagccgcagctgg

SEQ ID NO: 421253 - DNA, 83 bp, Homo sapiens
acaaataattcacctgaaatccagagctccttaataagcatttatagtcagtttttggcagcaatagaatcactaaaggcatt

SEQ ID NO: 421254 - DNA, 54 bp, Homo sapiens
acttggagtccggacatctgaaacttggcccaacctccgagaccacccttaaac

SEQ ID NO: 421255 - DNA, 75 bp, Homo sapiens
aacgtgccatggagacgcttaacgcacccagtcagcttgaagagtttcaaatggaccctaccactgagaaatcaa

SEQ ID NO: 421256 - DNA, 50 bp, Homo sapiens
gatctggggctgcttcacaaactaaagattttgacagtgaagaactggag

SEQ ID NO: 421257 - DNA, 50 bp, Homo sapiens
tgccatggcctttttgggaaagactggtgtcgttcagtatttctacattg

SEQ ID NO: 421258 - DNA, 71 bp, Homo sapiens
gcactgcaagcggctgagggacctcagggtgaaccgtatctgaacaccgcatatgggcacatgatctgcta

SEQ ID NO: 421259 - DNA, 50 bp, Homo sapiens
cggtcgggcggggcggcggcgctgacagaatcaggaaacccaggcccaac

SEQ ID NO: 421260 - DNA, 99 bp, Homo sapiens
cagaccttcaagatagacattgaccccgaggagacgaattcctggaaaactcaagcaattcgtatttgacttacattctggaaaactgcacagagaatt

SEQ ID NO: 421261 - DNA, 101 bp, Homo sapiens
cttgaggttcacagatgatacctttgatccagaacttgcagcaacaatagcatttggccatccagtgtcattggtctcagaggccagcagttattggagat

SEQ ID NO: 421262 - DNA, 74 bp, Homo sapiens
tggggcccgggccgtaccgagctaccaggctgttcagacttggttccttcaacctagagaaagttgaaaaccca

SEQ ID NO: 421263 - DNA, 100 bp, Homo sapiens
gaacaattcattccagcgatcaaaaaggagatactttaagcttcgagggcgaacgctttactatgccaaaacggcaaagacggtggagaactgcgtgtgc

SEQ ID NO: 421264 - DNA, 98 bp, Homo sapiens
caaagataaatccaaatactgcatatcagaaacaacaggctgcctttaatattggttgggaacaaatctgatctggtggaatatagtagtatggagac

SEQ ID NO: 421265 - DNA, 105 bp, Homo sapiens
tgtgtcctggttgagggtctccagggttctttggggcccgaggcagctgagtatgtcccagagaaggtgaagaaagcggaaaagaaattagaagagaatccatat

SEQ ID NO: 421266 - DNA, 100 bp, Homo sapiens
taaaatcttgctcctaagaaatctcaagcttcttttgtggaatatgcactttctggttggaatttgaataacatgcctgtcctggaacagtctgttcttg

SEQ ID NO: 421267 - DNA, 75 bp, Homo sapiens
gccgagtcctagcgcctggcctgcgcgccgctgcccgcgccacaggatgaccatgaaagctgtggttctaattct

SEQ ID NO: 421268 - DNA, 75 bp, Homo sapiens
acaaatggggcaggaaattgggaatgaattggatgaacaaaatggcacaacgaggccctcttggaggaggcgaag

SEQ ID NO: 421269 - DNA, 100 bp, Homo sapiens
gctgctgaaaacagaagttcacctgcacatcttgttttccctaacatcaagaatgccctggtacctgacagtgtaaagaaggagctcctacaaagaataa

SEQ ID NO: 421270 - DNA, 100 bp, Homo sapiens
cacaggttgaaaaaccaaagctccctgctgcataagaccttgtcagagactcagattgatggacaacttttcttaattaagcaccttttgatacttcgtg

SEQ ID NO: 421271 - DNA, 82 bp, Homo sapiens
ggactcgctcttctcctacttcgacgcaggggccgcaggggctggccctcgcagtctcagacttgatccgcagtggaaaacc

SEQ ID NO: 421272 - DNA, 75 bp, Homo sapiens
ctcaaaacgcccgtgcggaccacggcctgtcagcacgtgggcatatgatattttcctgaatgcaaaagagcaaaa

SEQ ID NO: 421273 - DNA, 102 bp, Homo sapiens
accctggagcctcagttggaagcagccgatccagcctgcggagcctgtggggcagagaatgtaactggtcactacatttccccctttcatgatattcctctg

SEQ ID NO: 421274 - DNA, 75 bp, Homo sapiens
ttgggacgaggagaggatccaggaggaggagttgcagaggaaagcgtctctagcagctgatatccccagacttgg

SEQ ID NO: 421275 - DNA, 133 bp, Homo sapiens
gcgcctctgacccagctagccagatcccggacccaaaccatgttccctgtgaaggtgaaagtggagaaatcagagacgagttgtactgctgtcacaggaaatggacgctggattacaagcatggcagctcagg

SEQ ID NO: 421276 - DNA, 100 bp, Homo sapiens
gccagcaagaaatgatcagtagcaccagtgtttatgatatattcgactttatgggagaaaatttagcaaagaagatcatgttctttttattaagttattg

SEQ ID NO: 421277 - DNA, 100 bp, Homo sapiens
gctgcaggggcctatgtccatatggtcactcatttcattcaggctggcctgggaccccggcgctctcagcagggaccccgaaaagaaccacgcaagatca

SEQ ID NO: 421278 - DNA, 75 bp, Homo sapiens
ccacaagcactcccgcctggcagagatctgcgatttccttctggttggctgtcctgcgtgggtgccaagttccac

SEQ ID NO: 421279 - DNA, 78 bp, Homo sapiens
gatattgggagatccacagctaagacgccgggactccctggaaacctagaaatggcctcgaaaaagcccaagacagca

SEQ ID NO: 421280 - DNA, 49 bp, Homo sapiens
cgatgctttggatgttgccaacaaactatttgtcgtagatgtccagaca

SEQ ID NO: 421281 - DNA, 75 bp, Homo sapiens
gacaagatggacaccgcggaggaaggaatacaggagtttccagaaaatataaaaaattgtaaagttttgacaatt

SEQ ID NO: 421282 - DNA, 100 bp, Homo sapiens
cggagcgtgtggtgctggtcaacgtcagcatcagctggcccaacggcatctcagtggactaccagctacatggcgttttgcgggtgatactggagccact

SEQ ID NO: 421283 - DNA, 116 bp, Homo sapiens
gtcggtttgacgcaagaccctggcggatcccagagccaaagtaagcgctcacctccgccggacagggacagagcgggatgccaccagcttgtccaaagggaagttccaggagctcc

SEQ ID NO: 421284 - DNA, 100 bp, Homo sapiens
ttgagactggagtgagaccccagccctaggctggggttctttccattatagaggagacggattcagaagggctacaggatgggcgattgctccaggaatt

SEQ ID NO: 421285 - DNA, 90 bp, Homo sapiens
ctcgggtcgttgtggtgcgctgtcttcccgcttgcgtcagggacctgcccgactcagtgagtacaggggctcaggtccaggtggcagggg

SEQ ID NO: 421286 - DNA, 100 bp, Homo sapiens
caggacttgacgttcctgacgaagcaggagatcctcctgctgttttggagtcagcggaagatcaccaaggccagggagtggttccaccgcactgtgaaga

SEQ ID NO: 421287 - DNA, 100 bp, Homo sapiens
caatgacattgggggcctgtggaaattttcaattctggaacttttcaaagcctgactctcttcttgaaacagtggagcatcatacagagtttacttgtgg

SEQ ID NO: 421288 - DNA, 100 bp, Homo sapiens
ccatcagtgagaacgaggcacagggacccaccgagacaccaatgggctgtgggctgaggaagagccacctggacgtcaaatgattgccatcagaaagaga

SEQ ID NO: 421289 - DNA, 75 bp, Homo sapiens
atgacctttaacaaccagctgaccactgtccacaaccagaaaaatcgttgcttatatgtatttggtggccagcga

SEQ ID NO: 421290 - DNA, 51 bp, Homo sapiens
agggaagaaacaagaggagagtgtacagctctacttctgcaggccccatcc

SEQ ID NO: 421291 - DNA, 95 bp, Homo sapiens
aaacatgctagaattacctggaacttcatcatcatctacttcacaggaattgccatttctgatttcatgccaatattgggaaccaacctaaatcc

SEQ ID NO: 421292 - DNA, 83 bp, Homo sapiens
ccggagcccaaacccggggcaggcgggcagctgtgcccgggcggcacggccaggcctccggtgtggctgtctctgatggtgtc

SEQ ID NO: 421293 - DNA, 83 bp, Homo sapiens
ttgctgcgagtgggacgcgcactggtcggtgccggctcaggagccggggtcaaaatgcagatcttcgtgaaaacccttaccgg

SEQ ID NO: 421294 - DNA, 100 bp, Homo sapiens
cccagattagaaatgatatttgccaaatttgatgaagtgcaaagttcaggcggtatgattttgagtgtctgcaaagcacttttccagccattaactccag

SEQ ID NO: 421295 - DNA, 80 bp, Homo sapiens
tgatcatttcccccctcaagaccatatcagcttctctggtctattatcctcccagtccacaacgctgaaccgtggctgga

SEQ ID NO: 421296 - DNA, 83 bp, Homo sapiens
ttggcattcccattgctgtgcctacaccttcgccacccactattggaccaggaagctctacagaggatcatttcaactctggc

SEQ ID NO: 421297 - DNA, 100 bp, Homo sapiens
agcctcaagggcttcagcaccgcgcccatggcagagccagaccacggcagttctgctactgcgaattgatgacatcgtttcaggccacaaaaagaaaggc

SEQ ID NO: 421298 - DNA, 98 bp, Homo sapiens
ggagccccgcggatcgtttaggaaagccggccaggtctcggcgcggaagatggccggcggcgtggacggccccatcgggatcccgttccccgaccaca

SEQ ID NO: 421299 - DNA, 82 bp, Homo sapiens
ccattgtcaccacagtcaccactgtccagtcccggccccgtatagacggcaaattaggggcactatggcagacaaagttagg

SEQ ID NO: 421300 - DNA, 100 bp, Homo sapiens
gcggtcgctccgagcggcgggccgcagaggactggactcgggccatatccgtggtgccgtcaacatgcctttcatggacttcctgactgaggatggcttc

SEQ ID NO: 421301 - DNA, 74 bp, Homo sapiens
agatccacagctaagacaccgggacctcctggaagccaaaaatggaaaaatcgcagccctcagagagtcgctgg

SEQ ID NO: 421302 - DNA, 83 bp, Homo sapiens
tgggcgagcagcggcgggggcccgagggcaattctgtggtgttcttggtcacacatttatggagtttctgaagggcagtggag

SEQ ID NO: 421303 - DNA, 83 bp, Homo sapiens
gccggggccgtggctgacatggagcagcaaacggggattcagcgtccgatcctttggaacagggactcacgtgaagcttccag

SEQ ID NO: 421304 - DNA, 100 bp, Homo sapiens
tttccactttgactacaaagatatttcagagagcttcttactggatttcttcatggtgtccattttatttagcaaggcatgttatttgaaagcaattgag

SEQ ID NO: 421305 - DNA, 95 bp, Homo sapiens
ggagcctgccgcgagtgctgacgatcatgctcagtggtgccggtgccctcacccctcaggacattcaggccctggcctacgggctgtgcccaacc

SEQ ID NO: 421306 - DNA, 120 bp, Homo sapiens
tttggagaagaggttgttcacaacaggtatccagcaatgaggacctgaggtgagtgccgggctcggcgctctgctcctggagctcccgcgggactgcctggggacagggactgctgtggc

SEQ ID NO: 421307 - DNA, 100 bp, Homo sapiens
gagggtccgcctggccatcattgagtatatgccgctgctggcaggccagctgaggctaagaatattgtacacaaagattcttgatgttcttgaggaaatc

SEQ ID NO: 421308 - DNA, 74 bp, Homo sapiens
tctggattaccttgcaccttatgccaaggcatcaactgtgaaatctgtgttagaattgattcctgaattaaatg

SEQ ID NO: 421309 - DNA, 98 bp, Homo sapiens
ggaagatggcggacggcgtggaccacatagacatttacgcggatgtcggcgaagagttcaaccaggccattctcaagcacaacctgggtgaggctctg

SEQ ID NO: 421310 - DNA, 83 bp, Homo sapiens
caggtgcatatgtggttttacacatgatgatggatacatgatctgttgtgacaaatgcagcaaaactggttgaacagcggatg

SEQ ID NO: 421311 - DNA, 83 bp, Homo sapiens
gctaaatgtagacaatggttagagaagaattttccaaatgaatttgcaaaacttactgtagatggagcagcatattgtatggg

SEQ ID NO: 421312 - DNA, 83 bp, Homo sapiens
ggacagaggccggctggcccggcagaatcaagccagggaggacttcaaccaggacatcggctggtgtgtctccctcatcaccg

SEQ ID NO: 421313 - DNA, 51 bp, Homo sapiens
ggctttgtcctgcatgtagaaaggaatttatgcaaatattctcatgaggtt

SEQ ID NO: 421314 - DNA, 75 bp, Homo sapiens
gaattcctcaagacaccattccaggaatgggtaccacagaccatgtcatcgtcctggcgtccacgaaccgagctg

SEQ ID NO: 421315 - DNA, 90 bp, Homo sapiens
cccgatcctaccactttggcatcgtcggcctcaacatgaatggctactttcacgtgaaaggtgtagcagtcactcggcctacacccacag

SEQ ID NO: 421316 - DNA, 50 bp, Homo sapiens
ccatgggcgacaaagggacccgaaaggcctaaagaatgtatttgacgaag

SEQ ID NO: 421317 - DNA, 83 bp, Homo sapiens
gttcattgaagctatcactgtcagtgctgcatcctgtggcagctgctactcatttgcttctatgggtatgctagaagcgagaa

SEQ ID NO: 421318 - DNA, 100 bp, Homo sapiens
cagcaccccagatgggtgagagatgtgatcactggtttcgtggcctgaccaaggacctccaagcctgatgtgtgagaagcggatattggcggcagtgacc

SEQ ID NO: 421319 - DNA, 82 bp, Homo sapiens
gccgatccagcctgcggagcctgtggggcagttggaaaatggatataccttatttgattatgatgttggactgaatgatata

SEQ ID NO: 421320 - DNA, 83 bp, Homo sapiens
cgtgagcgcgcctgcgccgccggggccgctgcaaggggaggagagaggccgcctcagtcgagtaatcctgcctgtgtctgtag

SEQ ID NO: 421321 - DNA, 100 bp, Homo sapiens
cccagcaagatgcggaggctgcctcggcggagcagaggaaccacacgctgatcatggtggttccaggaaagaaatcactgaacactgggaatggcttgag

SEQ ID NO: 421322 - DNA, 100 bp, Homo sapiens
agccaggagccggggcccgagccccgcccggcccgggccatgtcggtgggcgagctctacagccagtagtgagttgaaactcttggaggaagcaaccatt

SEQ ID NO: 421323 - DNA, 100 bp, Homo sapiens
caaattcctggccattattgtggaggctggaggcgggggtgccttcatcgtcctgcctctggccaagggtggacaagtccttcacttctcgccggagtgt

SEQ ID NO: 421324 - DNA, 75 bp, Homo sapiens
ctggaattttgccgatttcatgactaaccagtgatcaaatctaaatcgctgtggtttccgaggctcttcatacct

SEQ ID NO: 421325 - DNA, 74 bp, Homo sapiens
gcgagctgcaattgcccagaaaaaggaaatccccatttggaagtacagaaagaaagactcctgttaaaaagctg

SEQ ID NO: 421326 - DNA, 100 bp, Homo sapiens
catcttcattatagaataattgatgtgagcactgttaaagaactgtgcagaggcatttcatccttcatgaagccattcaggattttgaattgcatatgag

SEQ ID NO: 421327 - DNA, 96 bp, Homo sapiens
tttgatgataccttttctatatggattacaatttgatcgctgggaattctccaccttaaagaagtattgctgacagacagaacgccttggaggctg

SEQ ID NO: 421328 - DNA, 99 bp, Homo sapiens
gttgccaccctggggaccacaacatgctgctcctttgacaatctcttagaagtcggtcctatctgtactggctcctgtatcacccagctctggagttga

SEQ ID NO: 421329 - DNA, 99 bp, Homo sapiens
tggaaggatgactatgagtatgagctattatagaaaccatggctatggagttactagtagagaaagcaatcagcagtgcttctagccctcagagccctg

SEQ ID NO: 421330 - DNA, 50 bp, Homo sapiens
gacgctttactctaccagagcaagggtcagcccaaggctgccccctcggt

SEQ ID NO: 421331 - DNA, 100 bp, Homo sapiens
cggaaggacaccaagatgcggatccgggcctttccgaagctgcagttcatcatctgctgtgatagttccacaaccagaggatccagacagagccaatact

SEQ ID NO: 421332 - DNA, 100 bp, Homo sapiens
tccgaggctgccctgtctctccttgtcctcatccttatcattacttcggcttctcgcagccagccaaattctggaagttacggtcagtctgggggtgagc

SEQ ID NO: 421333 - DNA, 74 bp, Homo sapiens
aagagatggctagtgcttcatccagccaaagaggtcttgttgcagtaggagaaagagcacaaaagaggtctggg

SEQ ID NO: 421334 - DNA, 75 bp, Homo sapiens
acagtaaggccaaaaatgtgcatactcacagagttagagagagggatggtgatcagctgtttcatgtattagcct

SEQ ID NO: 421335 - DNA, 99 bp, Homo sapiens
tacttgtatctacggtggtgctcctaagggaccacaaatacgtgatttggagagaggagtggaagctggacacactatgtgacttgtatgaaaccctga

SEQ ID NO: 421336 - DNA, 93 bp, Homo sapiens
ccaacttcggcaagatccagatcgggatttacgtggagatcaagcgcagcgatggaagctcttcgtgggcggtcttgactggagcacgaccca

SEQ ID NO: 421337 - DNA, 100 bp, Homo sapiens
cggatggggaacccctgagccgcatggactcggaggacaggaagatgagaatgtgcctactgctcctgatcctccaagtcaacatttacgtgggcatggg

SEQ ID NO: 421338 - DNA, 75 bp, Homo sapiens
aggggattcacttgtgtgcggaactcctcggaaccatgtgaaggagtcttcaagtgccctgaggaccagcttcct

SEQ ID NO: 421339 - DNA, 83 bp, Homo sapiens
cctatccccagtggagccggagtgcgggcgcgccccaccaccgccctcaccatggtttggtgcacctcgatttggaggaagta

SEQ ID NO: 421340 - DNA, 146 bp, Homo sapiens
atatcagcaacagcaacagtggggatctagaggaggatttgcaggaagagctcgtggaagaggtggtgactgggactcttcaattaatctgacatttcacaaatccaaaattgccgtggatgaactctttacttcacttcgggata

SEQ ID NO: 421341 - DNA, 100 bp, Homo sapiens
gtccataccggagcgcaatggcgtccaaccccgaacggggggagattctgctcacggaactgcagacgaaatctcacaaaactgtcccttatcttcagtc

SEQ ID NO: 421342 - DNA, 89 bp, Homo sapiens
acaagatggaagcaggtttaaaattttacataagaagttacctttttcaggaccgcctggcccggtgcaccatgcattgcaacgacaaa

SEQ ID NO: 421343 - DNA, 100 bp, Homo sapiens
catgctgtgtgctggacgctggacagggggcaaaagcacctgctcggttaattccaccatccccatcacagcagaagttttcaagaagcatggagtgtac

SEQ ID NO: 421344 - DNA, 100 bp, Homo sapiens
gaggaccggcaacatggtgcggtcggggaataagacatgccttgaattggaacgctacctacagacggagccccggaggatctcagagacctttggtgag

SEQ ID NO: 421345 - DNA, 100 bp, Homo sapiens
ggacaagaaactagagcaaataaccgttttgaaattaattaaacaaccaccatgtcgagcaaaaaggcaaagaccaagaccaccaagaagcgccctcagc

SEQ ID NO: 421346 - DNA, 100 bp, Homo sapiens
agtccatccggatataaaacttcaaaaattaccattttatgatttactggatgaactgataaaacccaccagtctagggtcatctagtagcaggcaccca

SEQ ID NO: 421347 - DNA, 100 bp, Homo sapiens
tcctgacgaaattgaaattacctccgagggaaacaagaaaacatcaaagaggtctagcaaagggaattgcaacccagtgaagaagttacctggaagtaaa

SEQ ID NO: 421348 - DNA, 80 bp, Homo sapiens
tctccgggttccccggctcgcggggcccggcgaagggcagtaacctttggaaacatcagaagctactctccattgacctg

SEQ ID NO: 421349 - DNA, 101 bp, Homo sapiens
cctgagagtccgccgccaacgcgcaggtgctagcggccccttcgccctgcaggaggccagatgctccagtgcctgatggcgaaagtgagaaaactgtagaa

SEQ ID NO: 421350 - DNA, 90 bp, Homo sapiens
ctcgatgatggaactctggtggtttcaggaagaattatatccagatcgagagacagaagattctgaaagggttcaatgaaatgagagtca

SEQ ID NO: 421351 - DNA, 75 bp, Homo sapiens
tactatgcttcctgagtgcttctttcttggagctgaccatgaagagccacgtggtgctttgctggttaagttggc

SEQ ID NO: 421352 - DNA, 100 bp, Homo sapiens
ccagttcactgtggctggcaggatggtgaagaaagcgcgttccttcacctcgggcagaataactttgcagaagcccacaggttcttcacagagatcttaa

SEQ ID NO: 421353 - DNA, 96 bp, Homo sapiens
actttgcagaaaggaaggattatgtcaaatagttagaagattcccagaaccccccgaccctaacctgttcattgagcccatcactgaggagagagc

SEQ ID NO: 421354 - DNA, 100 bp, Homo sapiens
gtggccccgtgtcctgcaggtattgggagatccacagctaagacaccgggacctcctggaagccaaaaatgcaccgggtgctcagcagttctgcttcttg

SEQ ID NO: 421355 - DNA, 75 bp, Homo sapiens
gcaccgcctggtctctttcctgtggccagcccaggggccttcctgctgtgctggacgcccttcttcgtggtgcac

SEQ ID NO: 421356 - DNA, 113 bp, Homo sapiens
agaagaataagcacaagagaaagaaggttaagctggctgtcctgaaatattataagggtccaaattccaagcctgtagtgtccttcattgctggtttaactgctcctcctggg

SEQ ID NO: 421357 - DNA, 100 bp, Homo sapiens
aactttcaacaaccccacagaggactttaggagaaagttgctgaaggcaggaggggtcctgaatctgtgcctccttcccttcttaaagtagtgatgaaac

SEQ ID NO: 421358 - DNA, 101 bp, Homo sapiens
gaaggaatgggacaagacccatctttatgcaaagccagcgttacagtaatgttccagggacttcatgagaagactggtgcatttacagctgttaaagtgat

SEQ ID NO: 421359 - DNA, 74 bp, Homo sapiens
cggctgccgaaggtcctcgccagtgggccacaatacgaattgaaaaaggaaccccaaaggagtcgattcttaaa

SEQ ID NO: 421360 - DNA, 82 bp, Homo sapiens
aaataccaggctaccatggtctacaagactctcttcgctctttgcatcttaactgcagaacatccagtcatggataaaaatg

SEQ ID NO: 421361 - DNA, 83 bp, Homo sapiens
accagatccagaagactgtgatcgagcccttaaaaaatcggcatgtgcgtcaacaaatgaagagaaggcaaaaaatgctaagt

SEQ ID NO: 421362 - DNA, 100 bp, Homo sapiens
gcccagttggaagcccgggaccgtttaaaaaactggtatttgaaatatctcaccaaaaaatatttgaagaagaataatctacgtgactggttgcgcgtag

SEQ ID NO: 421363 - DNA, 76 bp, Homo sapiens
ctctctgctcgtgcctcaaacgcttggattctacagcaacatattgctggttgtcttcttgcctgccctgtgtcgt

SEQ ID NO: 421364 - DNA, 83 bp, Homo sapiens
gcggcggccaggtccctgctgaatcacacgccgccatccgggaggcccagggaagtccaatatcagatggaaatgatgcggag

SEQ ID NO: 421365 - DNA, 100 bp, Homo sapiens
ggaactggcccggaaacaggaggacgaagtcctgacggccacgctggatctggaggacgtccggagctacagggcggagatttcatctcgaaacctggcg

SEQ ID NO: 421366 - DNA, 83 bp, Homo sapiens
aggtctggacctggactcacggctgcttggagcgtccgccatgaggagaaggtttggtgcacctcgatttggaggaagtaggg

SEQ ID NO: 421367 - DNA, 90 bp, Homo sapiens
ttgctggaatacacaagagagtagttgcaccatcaatcttcctgtccacttccaacgaagcggtctataagatctttgatgacagcccct

SEQ ID NO: 421368 - DNA, 100 bp, Homo sapiens
ttatcctgtgacctgcaggtactgggagatccatagggaagaaggcggaacatccggaggctgggaaatggtctataagggagaattccaactacctgac

SEQ ID NO: 421369 - DNA, 100 bp, Homo sapiens
tttaacctgtcatcaagacctgggattttggtggtattctgagagaagcctcacaaagtgtattggaattactattgaaaccagaccagattactgcatg

SEQ ID NO: 421370 - DNA, 75 bp, Homo sapiens
atccagttggaccttttggacaggaaagtgtaacatcagttacagaacagttgaatttctgaatgaaaagctgga

SEQ ID NO: 421371 - DNA, 100 bp, Homo sapiens
aggagggccgtcaagatcctcaagaagaagaagttgcgaaggatccccaacggggaggccaacgtgaagaaagacacctatggctgccgatgaaggctca

SEQ ID NO: 421372 - DNA, 50 bp, Homo sapiens
gttatatcctccaggaatactggccaggtgcccctgggcgctgggattgc

SEQ ID NO: 421373 - DNA, 76 bp, Homo sapiens
ttcaccacgcggctgcacaactgcaggaacaccgtcacgctgctggaggagatatttggagttcttacaacatggc

SEQ ID NO: 421374 - DNA, 100 bp, Homo sapiens
cagctagccttgtagctacagaagggtagtcagcagagtgcacacagcagctgtcatccctccttcgctcctgtcatcactggcctgcaaaacctggttg

SEQ ID NO: 421375 - DNA, 100 bp, Homo sapiens
ccggatcttcaaaccgtgggagtggtgcggcggctagagtccctggactcctcaacctagggagctactcgcgaggtgcagtagacattgttgcaatcat

SEQ ID NO: 421376 - DNA, 82 bp, Homo sapiens
ggactagtgctggggttcctcatctcgtcagtgactttctttactccactgggtcctcgatgggcttcctggaatattggtg

SEQ ID NO: 421377 - DNA, 75 bp, Homo sapiens
cgcaccctccgtcccgacccgggccccgccatgtccttcttccggcggaaaggttctccacatacgattctactt

SEQ ID NO: 421378 - DNA, 90 bp, Homo sapiens
catggcttgtttgccacaggaaccatagagtacagctttatggcggtcatccactttgcggggctcaaggccgtgggcgagtcggtgcag

SEQ ID NO: 421379 - DNA, 90 bp, Homo sapiens
caccggagacttttggggggaaactaggtcgatggtcggcggcgcccggatgggcagctgaggccgagacgcatccagagctttcgtgac

SEQ ID NO: 421380 - DNA, 98 bp, Homo sapiens
aggagtgtgccatattccaatggctgagccgttttgccccaaaacgagagaggttggtggccctgatgccttggaatatgtgccaggtcaggatattt

SEQ ID NO: 421381 - DNA, 98 bp, Homo sapiens
ggggaacatggaggaggaagaaatgaatgatggctcacagatggtgagatctcagttgctgagacaaaggaaaacccactcccttggaggagcatgac

SEQ ID NO: 421382 - DNA, 82 bp, Homo sapiens
gaagaaaggaggtcattgaaggaggccctggcttaggcatgtcctctgtataccaacagatgttttaaagattgtgtattct

SEQ ID NO: 421383 - DNA, 94 bp, Homo sapiens
ctaccaacttcgccaccctgcggtggattgactacggcaaagtggccactcagggactttgaacatgtcggggatcgccctcagcagactcgcc

SEQ ID NO: 421384 - DNA, 90 bp, Homo sapiens
cgcaaccattgacgccatgtcgggttattcgagtgaccgagaccgcggccgggaccgagggtacaccaggggttggaaaaaccacactag

SEQ ID NO: 421385 - DNA, 90 bp, Homo sapiens
ggcaaggagatcaacaacccagagtccgtgtattactgggcccagaaggaggctgagctccagagggtccagaaggtccgagagctggaa

SEQ ID NO: 421386 - DNA, 75 bp, Homo sapiens
tcttctgtgtgtgtgaattatgaatcttttgaagttggcgccggacagaccattgccctcttgaacatttaccgt

SEQ ID NO: 421387 - DNA, 101 bp, Homo sapiens
ttgggacaacattcagacccatttccagtcatgagacttaaccaccaccatgtcgagcaaaagaacaaagaccaagaccaagaagcgccctcagcgtgcaa

SEQ ID NO: 421388 - DNA, 74 bp, Homo sapiens
cagcatgttgccaccttgaaagaacatgataattctgtcaaagaagagaaatttccatcgtgaagcctttaatc

SEQ ID NO: 421389 - DNA, 83 bp, Homo sapiens
ctcccgcggagccggagccgcagaggctcccgggctggactcaggcttctcaggagaacgtatttaccgggcagtcaaagatc

SEQ ID NO: 421390 - DNA, 82 bp, Homo sapiens
agtaccgggacatccggctgatggtcatggagatccgcaatgcttatatttaacaacctgggtgtcctgcatgtgactaaga

SEQ ID NO: 421391 - DNA, 75 bp, Homo sapiens
ccaggagagcctgcctgcacggaagagacgcctcctcggtggtggtgaagtttattaagaaggagaaggtcttgg

SEQ ID NO: 421392 - DNA, 100 bp, Homo sapiens
aaatgagaagctggctatggttaaagcggattaaactgcaaatatctcatgaagctgctgcctgtatcactggtctccgggcagccatggaggctttggt

SEQ ID NO: 421393 - DNA, 90 bp, Homo sapiens
tcatccctaagggtcctaaccggggaatggagatttacagacagtcatctgggtggaggacacccttttgggatcagcactgaaagtgac

SEQ ID NO: 421394 - DNA, 100 bp, Homo sapiens
cagccaaaggctactttgacgccctggtgaagatgggggagctggccagcgagagccagggctccaaagaactcgctccttgctcggattgaacgtatgg

SEQ ID NO: 421395 - DNA, 75 bp, Homo sapiens
caaggagaatgcgctcttcaagcggatcttgcaagtgcagccgcggagccctgtacacaggcttttccatcctgg

SEQ ID NO: 421396 - DNA, 82 bp, Homo sapiens
gtggagaatatagatatggacacaagcctcattttggaatattgcaggcagaagctcctcctggggtagagacagatcttat

SEQ ID NO: 421397 - DNA, 95 bp, Homo sapiens
gctgcccttccgcagcgatggcatcccggattcttcagaggaggcccctccagccactcagaacttcatcattccaaaaaaggagatccacacag

SEQ ID NO: 421398 - DNA, 90 bp, Homo sapiens
ctgtacctcacgtattgtgccaatcacccttctgcagtgaatgtcctcacggaacacagttggagtgcttagtgcagttggtgagagcgg

SEQ ID NO: 421399 - DNA, 75 bp, Homo sapiens
tcctgcacgctctcctcttcagctggaaagcgctcccttcacagcaaactgtacaatggcagttgagtgggtttt

SEQ ID NO: 421400 - DNA, 90 bp, Homo sapiens
ctcaagagccggggcctttttgacagcttccgccgggactgcctggccgacgtggacaccaaggacggggaggtttactgcatcgacgcg

SEQ ID NO: 421401 - DNA, 88 bp, Homo sapiens
tctgagtcgtcttggtcccaggagccagtagtgaaggcaacagtctgcccacctgtggacaccaggataactgggatgacgatgatga

SEQ ID NO: 421402 - DNA, 100 bp, Homo sapiens
gttgacagcatcgatgctagacagacatggtcaaggaagtttgctccaaccttttatatactatagatttcttacccttcgatattcgtctcgaagaaac

SEQ ID NO: 421403 - DNA, 50 bp, Homo sapiens
gagagctttgtcacagatgagcaaagatacctgtggaagggggacaggag

SEQ ID NO: 421404 - DNA, 82 bp, Homo sapiens
tctaggaggatttgctgagctcatggaattcagcaactgtttgaagaaatcctgagtaatagtaggcaactgaaatggctgt

SEQ ID NO: 421405 - DNA, 98 bp, Homo sapiens
gtctaaatgttattaggaatgacaatgacagttgggactacactaaaccatatttgggaagacgagtttcctattctgtgaaacagaagacattgtga

SEQ ID NO: 421406 - DNA, 87 bp, Homo sapiens
aatgttgccactgctgttttagaacatataaagttgagacatttgggaaatgatgaagtgcacattgtttggtcagagcatactaga

SEQ ID NO: 421407 - DNA, 82 bp, Homo sapiens
actgcgactccggagacagcccaaatatcctcggaagagcgctcccaggagaaacaagccctggccaacgtcaacattggga

SEQ ID NO: 421408 - DNA, 90 bp, Homo sapiens
ctgccgacaggaacgtggagatctggaagatcaagaagctcattaagagcttggaggcggcccgcggaaaatgatgcatcctgttgccag

SEQ ID NO: 421409 - DNA, 98 bp, Homo sapiens
gctgagtgaggccgaggccgggaggccgtgcccggaggttttcaagctagaaatgcccttcttcagtcaaatctttctcaaactcagctggctactat

SEQ ID NO: 421410 - DNA, 105 bp, Homo sapiens
aggaactgtctttatctgctgtcaaggatcttgtgtgctccatagtttatcaaaagttctttatagctccaagctctacagattcttcaaatatattgagaatag

SEQ ID NO: 421411 - DNA, 101 bp, Homo sapiens
cgcaggctgaccccgcagcggccgggctgtcgcggcccccacctcaggatctagtgaaaagccatttgatgtatgcggtcagagaagaagtggaggtcctc

SEQ ID NO: 421412 - DNA, 75 bp, Homo sapiens
ccgtagtggactccgcgggccttcggcagcctgattacatcaaccccagagccgtgcagctgggctcccttctcg

SEQ ID NO: 421413 - DNA, 90 bp, Homo sapiens
cagagtttgaagatgtccaggaacagaataatatgtggattcgagaccatgaggatagtgggtctgtacatttggggaccccaggtccat

SEQ ID NO: 421414 - DNA, 90 bp, Homo sapiens
caggaagtcagctagagagccgtctcccctctctggagccgagagaggccggtttcccccaccaaatgagccgtcagactgctacagcat

SEQ ID NO: 421415 - DNA, 97 bp, Homo sapiens
gagggagaggagaaagtggaaaaggcagaggtgaaggagagaacagaggaacctatggagacagagcccaaagcatgccagtgtgaaggaaaagata

SEQ ID NO: 421416 - DNA, 89 bp, Homo sapiens
ggtgtctgtggaagactttcttactgacctgaataacttcagaaccacattcatggagaaaatatggagaagtcttgtgcaagcaagga

SEQ ID NO: 421417 - DNA, 74 bp, Homo sapiens
tttgcctcatcccaggttgccttggaaaatgccaacgccgtgtctgaagatacagcctgcaagatggtccgctg

SEQ ID NO: 421418 - DNA, 73 bp, Homo sapiens
tgaacttccggtgctcagccgccaggcatcaacaggtgctggcatcggccccaccattcagattggggaggag

SEQ ID NO: 421419 - DNA, 76 bp, Homo sapiens
gagatcttgggcaccgagagggactacgtgggcaccttgcgcttcttgcagtcgaactgcatgaacttgcccccag

SEQ ID NO: 421420 - DNA, 100 bp, Homo sapiens
gagatttgctgatggaagcataagaacatgagaactgcgactcagcatgcagaaggaatgtttacccttgcggaagttgcatcacttaatgacattcagc

SEQ ID NO: 421421 - DNA, 82 bp, Homo sapiens
ggaccaaggtggaaatcaaacgtcacggtctagatcacattctcgatccagaggaaggcgatactctcgctcacgcagcagg

SEQ ID NO: 421422 - DNA, 100 bp, Homo sapiens
tcatatccatttcttgttcttcagatgttgctagtgactcatattctcagacggtctggaaaatcccgaagcagaagcccgtattcatctaggcattcaa

SEQ ID NO: 421423 - DNA, 75 bp, Homo sapiens
taaaaattgtataccgcagattcaggtgtcagttgtacccgaggcgttctcagcagcagcaagtacctgtggtgg

SEQ ID NO: 421424 - DNA, 98 bp, Homo sapiens
tcgaaggggaaggcgcctgaagaggacgaagttgttccaatcagaaaaattcatgctctgaccatcacatgggcacttcctcctcaacagcaacatta

SEQ ID NO: 421425 - DNA, 76 bp, Homo sapiens
gatggggatgacactctggagtatgggaagccacactacgacgaggacttcaaccatgagccgtgtcagaggaagg

SEQ ID NO: 421426 - DNA, 100 bp, Homo sapiens
agtacccgcatgctgcagcttatgaccatcaatatgtttgcagtacacaactcccagctgaaagacctcagcaatcacccagcggataagtccttgttcc

SEQ ID NO: 421427 - DNA, 83 bp, Homo sapiens
cccgaaggggaagcccaaatcggggcgagtgtggaaggaccgctccaagaaaagataacgaaggaggcccaacttcattcaat

SEQ ID NO: 421428 - DNA, 75 bp, Homo sapiens
ttgggtttacctgctgttaagaaagatccttcttcgaaagttttgccaggctatcaatatgacggctgaagaaac

SEQ ID NO: 421429 - DNA, 100 bp, Homo sapiens
ggacgaagctctctccagaaagacatcctgagaggacttggcagggtgacccagagaagacagctaaagtggaatgtggggacttctacaacactgggga

SEQ ID NO: 421430 - DNA, 101 bp, Homo sapiens
gcatgctctggaaatgttcccagaacattgcacgatgcctcctgaaatcgaaacgagttggctgagactcttgcactcctgaaagcacaaattgatcctgt

SEQ ID NO: 421431 - DNA, 75 bp, Homo sapiens
agcaggtgccgacttctgctatgccatcgagacactacaacaacaggagtgcaaacttctctacagccgaaaaga

SEQ ID NO: 421432 - DNA, 98 bp, Homo sapiens
cttgagttcattaaatggtcagctgcagaagagaagctgaatttggacgacagccagtgggaggacatccacgttgtcaccggagcactgaagatgtt

SEQ ID NO: 421433 - DNA, 82 bp, Homo sapiens
ggatttagataaactcaacatcgacagcattatccaacggctgctggaagatcttcgtgaagactctgactggtaagaccat

SEQ ID NO: 421434 - DNA, 100 bp, Homo sapiens
tcaatgaaactagagacatgttggaaagtcaccagaagcgtgtctttgagacagtaagaaacatcaaccaggttgtcaagcagagatctctgaccccttc

SEQ ID NO: 421435 - DNA, 83 bp, Homo sapiens
gagagtttgagtaaaggtggaaacataatggaacagaattttgaggaggaattttggggaaattaaaacctgcctttctgcca

SEQ ID NO: 421436 - DNA, 51 bp, Homo sapiens
gaccaaactatggggaaatccctgttcaagaaaacatccagtacagacctt

SEQ ID NO: 421437 - DNA, 74 bp, Homo sapiens
tgcaacttgtgattttgatttatcacatttctggagcaagtacagaatcaaacattttaagtccagtgcaggat

SEQ ID NO: 421438 - DNA, 75 bp, Homo sapiens
aacccaaacaacatctcctgctattccttgggctgcctttcctgcagtactatactggcaattgctggagaagat

SEQ ID NO: 421439 - DNA, 100 bp, Homo sapiens
caacatcgagcagatttttaggtctttcgtggtcagtaaattccgggaaattcaacaggagctttccagcgtaactggcggaaacccagaggcattgaca

SEQ ID NO: 421440 - DNA, 96 bp, Homo sapiens
gcaagcctaactcaagccattggcacacaggatccaaggagctggttctgctggttggaccaaacctcgtgagccagccacccctgacccaaatga

SEQ ID NO: 421441 - DNA, 100 bp, Homo sapiens
tccggaggcttggtgactccagtggcccagcttgctcacttccgacagagaaaaacaaaaggtgacagttcgcattcggagaaaaagacggcgaagagga

SEQ ID NO: 421442 - DNA, 75 bp, Homo sapiens
agaccctttgaaggtcccttgtggggactggaaagaggacggagcgcctggaccatgctgctgagcgcctactgg

SEQ ID NO: 421443 - DNA, 96 bp, Homo sapiens
cgaggatcaaaatcttcgaaggaggatcgaggagactggcagagggaaagaaagttcaactatggtggtggcaacaacaatccaccatggggaagc

SEQ ID NO: 421444 - DNA, 124 bp, Homo sapiens
agtctactctgtcgctcttgtgccctagcaccccgagaaccgtcagtttgagccagatggaagaaatgttggctatttggcgatgagaggtggtgaacagtgaccatactggtatacaacacta

SEQ ID NO: 421445 - DNA, 98 bp, Homo sapiens
agttgagaacatctctgttgacattcattgtgacactggccaaaagaagaccctagacaagaaagatggaagacgaatgtcttttcagaaacctaaag

SEQ ID NO: 421446 - DNA, 75 bp, Homo sapiens
ccggccatctcgctgcccgacgatgtccgcaggcgatgatgaacaacatgggtggtgatgaggatgtagatttac

SEQ ID NO: 421447 - DNA, 98 bp, Homo sapiens
tcaaatactgttgaagtatatggttattcaggcctcaggagtgcaagtagctgatgaagtatgtcgcattttttatgacatgaaagttcgtaaatgct

SEQ ID NO: 421448 - DNA, 75 bp, Homo sapiens
ctgcggtcgaagaaggggacgccgacaagtgcccagcagaggagcacgcagctgaacaagaagagagccatcccc

SEQ ID NO: 421449 - DNA, 76 bp, Homo sapiens
ttgggatcctgctgacggaaattgtcacccacggccgcatcccttacccagctaaagctgttgatggatacgtgaa

SEQ ID NO: 421450 - DNA, 100 bp, Homo sapiens
gcgacgtgggtgaggaacctgactctgagaacaccccccagaaggctgacaaggatgccggcctggcccaggttgcacagacagcagatggtgtggatgc

SEQ ID NO: 421451 - DNA, 83 bp, Homo sapiens
ttccgcagtgattgaagctttgataaatgaaatcttcctaagtatagataacgaaggaggcccaacttcattcaataaggagc

SEQ ID NO: 421452 - DNA, 50 bp, Homo sapiens
gtgcaacgatgacccagatgtcctgccacaaaacaagctatcgatcaggg

SEQ ID NO: 421453 - DNA, 83 bp, Homo sapiens
catgtggcagtggaaaatgcgctcgggctggaccagcaggtcttctcagtacagcatggtggctggggcaggccgagagaatg

SEQ ID NO: 421454 - DNA, 100 bp, Homo sapiens
gctggaattatgggcgtgagccactgtgcccagtgccgcagaatggaattcggcattgttcctacacagcttctcggcaacatctctatgttgataaaaa

SEQ ID NO: 421455 - DNA, 75 bp, Homo sapiens
tccagtagctccaaggaggttaagcctcctgacaaggtgatccgggcgggccccgcaggaattttatcccctcac

SEQ ID NO: 421456 - DNA, 100 bp, Homo sapiens
tatggagaatggctggtctcctactcccagatgcatccgtgtcagcacgtgtggttctcaaatataggcattctgatgggaacttgtgtgttaaagtaac

SEQ ID NO: 421457 - DNA, 100 bp, Homo sapiens
agagggtcctggtactactgcttgctgtggcatttggacatgctttagagagagtaccttctccaggcaaattccgttcccctgcagcaccatctccttt

SEQ ID NO: 421458 - DNA, 90 bp, Homo sapiens
gctcaagtacctgtggaccgtgtgctgccactgcgggggcaagacgaagtgaagctgtggtctaccaatctagacaactcagtggcaagc

SEQ ID NO: 421459 - DNA, 89 bp, Homo sapiens
cggctccttcggagacatctatctcggcgtgagattcaacattttggggtgaaaatcagcatagttgaacctggctacttcagaacggg

SEQ ID NO: 421460 - DNA, 80 bp, Homo sapiens
ctacattctgaagatgaatttctacaagggaaattgtttattttcagtctgatggaagcaaacaagaagataaagaaaaa

SEQ ID NO: 421461 - DNA, 101 bp, Homo sapiens
cagcatctctggtgcatgctgatgacgaaaaacgacccagatgatgtggtaccagttggccaaagaagagcctggtgttggtgcatgtgctttggactagc

SEQ ID NO: 421462 - DNA, 82 bp, Homo sapiens
tgctgctcgacgtgctgtgcttactggtcggtggaacacctgcagcaggagactgctgctctgaaaaagcaaatgcaaaaaa

SEQ ID NO: 421463 - DNA, 98 bp, Homo sapiens
gcggtggcgcctgcggacctaactagctccaggttaggccgagctttgcgggaaagcagcggttactataacaacagtaccaaggtggctgtgaaaac

SEQ ID NO: 421464 - DNA, 90 bp, Homo sapiens
cgaggggcgcgcggagatggcagcgtccagcaactccagcctgtccggctcgtcggtgtcctccggtgcagcttcaagcttaggaccacc

SEQ ID NO: 421465 - DNA, 96 bp, Homo sapiens
ccgcagccccggagcccgggccagggtccacctgtccccgcagcgccggctcgcgccctcctgccgcagccaccgtggtggactgtcccgtgtgca

SEQ ID NO: 421466 - DNA, 100 bp, Homo sapiens
aaaatcattaaattggagcctgagtaatcaagtcagaggattatatgacttttatctgcctagagaagaactatggatctacaacatggagactggaaga

SEQ ID NO: 421467 - DNA, 83 bp, Homo sapiens
tcacagaatacggtcgtctggcaatggatgaaattttccaaaagcctttccagggaatgggtactgttcaaaaaggaatgccc

SEQ ID NO: 421468 - DNA, 75 bp, Homo sapiens
cccagccctgcgtgaggccgcggagcgccagctcaatgaagtgtacgtgtcttacgactatggaaaatcattcaa

SEQ ID NO: 421469 - DNA, 101 bp, Homo sapiens
cggggggagcgcggggcgacgctggctgcagggacccggtgacagcgtgagaggttcgcagaacccaacatgagtgaagtttcctgcaagaaacgggacga

SEQ ID NO: 421470 - DNA, 75 bp, Homo sapiens
caacccaagctttgcgattacaggttgggtatctacagccattggttgctgttcaggtcagctttgctcctaaca

SEQ ID NO: 421471 - DNA, 76 bp, Homo sapiens
cccaccaagtaggactgatcaggtcttacaattctaaaaccatgacctgtgacagagcgggatgccaccagcttgt

SEQ ID NO: 421472 - DNA, 51 bp, Homo sapiens
gagagaaagagcctccgtcaccacatacatcctaatgtcctatgatcacgt

SEQ ID NO: 421473 - DNA, 83 bp, Homo sapiens
cacggatgtcctggaccggagctgctcccggaactggcaggaggagcccagaggagcgtggtctgatacagtggaaagctggg

SEQ ID NO: 421474 - DNA, 98 bp, Homo sapiens
ttgttccagtatgacaactatgggtccacagctgaggacattgtggagtggctgaagaagcagttatacttaagcatgaacattgacgacaaactgga

SEQ ID NO: 421475 - DNA, 74 bp, Homo sapiens
cctagcagctcgggcaaggatggtggaggcgagaacactgaggaggtccctgagctgcggaagaaatctcgccg

SEQ ID NO: 421476 - DNA, 75 bp, Homo sapiens
caagaagatgaagaagattgtggatgccgtgatcaagtacaaggacagggggcagtacccaaaggaaacgctacg

SEQ ID NO: 421477 - DNA, 83 bp, Homo sapiens
tcttcaattcttgacttgtgtattttcaactctgggatcacctgatcatttcaaaaatatttacaccagcagctccagttcat

SEQ ID NO: 421478 - DNA, 100 bp, Homo sapiens
tcgaccagctgctggacatgtcctagacatgtcatccagtgacagtgactcggactgggatggaggcagccgtctttcaccatttctaccccacgaccac

SEQ ID NO: 421479 - DNA, 129 bp, Homo sapiens
cacttcagagctaggagagatggaactgacttggcaggagatcatgtccatcaccgagctgcagtacgctggggaggaggaggaggaagggagcggcagcagtgaaggatttgacccccctgccactga

SEQ ID NO: 421480 - DNA, 100 bp, Homo sapiens
gtcgaatctgagcaaaggcacgggcagccggaaggacaccaagatgcggatccgggcctttccgagcacaaagttatcattgttgggctggataatgcag

SEQ ID NO: 421481 - DNA, 75 bp, Homo sapiens
gtttcagcagttgttaaattctcaacagctcacaccatacatagtggaatgtcatgggatcacccttcttcccca

SEQ ID NO: 421482 - DNA, 103 bp, Homo sapiens
cgggtttgggctggaggtcgccatggggcgaggcagcggcaccttcgagcgtctcctaggacgtagacaagtttggcaacgagatcacccagctggcccggcc

SEQ ID NO: 421483 - DNA, 75 bp, Homo sapiens
cggagttacaagaggctaccaaagaattccagctctggattaatcgaattacagctgctagccaggaacatggac

SEQ ID NO: 421484 - DNA, 95 bp, Homo sapiens
tatacaaagaagtgatgctggaaaatctcaggaatctggtctcattgggttatgatgtgattgctcaagcccaatctgggactgggaaaacggcc

SEQ ID NO: 421485 - DNA, 83 bp, Homo sapiens
ttctgacctccgcgcgacgtacccgccgccgccgttggctggagaagaggactgtcagaaggacgtagaaggcacggttttac

SEQ ID NO: 421486 - DNA, 100 bp, Homo sapiens
gcagccgtcaacagcctggtcaatttgtacctgcaggcctcctacacctacctctctctgctcgccctcccctacctgcggaagagtcaagggaatgtca

SEQ ID NO: 421487 - DNA, 101 bp, Homo sapiens
atccgacttgccggcagaacttacgctgcgggaccccgggcactgttgctgctgcgggagggtgtcaacatctgggccctggtggcggctgtggtgctcct

SEQ ID NO: 421488 - DNA, 50 bp, Homo sapiens
gcacccagtttccaccatgattaagggttgttatctggaatctgatgatg

SEQ ID NO: 421489 - DNA, 100 bp, Homo sapiens
gagccgccaccgcaggtcgaggacggtcggactcccgcggcgggaggagcctgttcccctgagactctggaacttctttacagaattactaatgcacaga

SEQ ID NO: 421490 - DNA, 83 bp, Homo sapiens
ctcgcactatccttgatgctaggtgacttaagagattaaaattaatttggttgctgttggttctgaacaaataatgagttctt

SEQ ID NO: 421491 - DNA, 75 bp, Homo sapiens
aggtactgtccatcaaacatcttccaccacagcttagagagtacagttgtgaatttggctccgcgaagtattatg

SEQ ID NO: 421492 - DNA, 100 bp, Homo sapiens
ctgacagatctccagctattgaaggggtctcattctgttgcccaggctggagtgcagtggtgcgatctcggctcacagcaacctctctgcctccaggttc

SEQ ID NO: 421493 - DNA, 75 bp, Homo sapiens
cgccacctaaaaacaaagaggattttgagaaggtaagaaacggttgaactggatgcaatttttatcacagcttgt

SEQ ID NO: 421494 - DNA, 74 bp, Homo sapiens
gtatagtaaaacagtatctagatgttgtttacattcagagctctatcaataagaggaatacatattacagtgaa

SEQ ID NO: 421495 - DNA, 97 bp, Homo sapiens
gcttcctttccgccactgcccaaactgctgaagcagctcccgcgaggaccacccggatggaatccgacgtggtaggcccagagcagatactgtccgc

SEQ ID NO: 421496 - DNA, 98 bp, Homo sapiens
ctgccccgcaggcaccttcgggccctcctgccttccttttcttgcctggagaagagggaggggagaggacaagggccctggctactcctggattccta

SEQ ID NO: 421497 - DNA, 98 bp, Homo sapiens
aatatgaaacatggacagatatcaacaaaagaactagcagattttgtaagggaacgttggtagctggcagtgttgtgatggcttttgaagaagtatgc

SEQ ID NO: 421498 - DNA, 51 bp, Homo sapiens
ctcatcattgtttatgtggagcagatgtgagaagaggggatgtcctggcag

SEQ ID NO: 421499 - DNA, 50 bp, Homo sapiens
gcaaaatacaggcgatggaatatagtttctccacagacactacccaaagc

SEQ ID NO: 421500 - DNA, 92 bp, Homo sapiens
cacggaatgcagtttttacataagttagctatcagcttcccagtttgcacaattcatcaagaaattatgcggggtcaccggcacaaatgatg

SEQ ID NO: 421501 - DNA, 82 bp, Homo sapiens
ccctcagcctctgcccaaagaaagaaggaggttaagacatcagaattttatagatactcccgacagctccgttacgaagttg

SEQ ID NO: 421502 - DNA, 90 bp, Homo sapiens
gttcctcttttcctcggttcccagtgttctggcagacctattcaggcctgttctgtgtggtcatcaatccttacaagaacctgcccatct

SEQ ID NO: 421503 - DNA, 82 bp, Homo sapiens
gcgctactctctctttctggcctggaggctatccagcatacctctaacctatttggaaacagtggggccaagacatttggtg

SEQ ID NO: 421504 - DNA, 110 bp, Homo sapiens
aagaagctccgtttccaccctcggcagttgtacctgtccgtgaagcagggcgagctgcagaaggtgatcctgatgctgttgaagtacctggctttcctccgcaagcggat

SEQ ID NO: 421505 - DNA, 50 bp, Homo sapiens
agagcagggcggcggcgactcgaagcagatgccacgctactaaagaagtc

SEQ ID NO: 421506 - DNA, 90 bp, Homo sapiens
gccagatggaagaaccattgttagtgaacgtggacaaagctgttgtctcagggagcacagaagtgagacatggaatccattaaaattgca

SEQ ID NO: 421507 - DNA, 98 bp, Homo sapiens
ttgcctctttctctcaggctttcctacaactcatgcccagcagcagcaagcagggtgtgctgatctgcaaaccctggacacaatgcagccaattgaga

SEQ ID NO: 421508 - DNA, 97 bp, Homo sapiens
ccgttcccctctccctgaaaaggcaccaggaaaagagagagggagagaagagttcacagcaggctggcgcccatgcggctctacacgctctccaagc

SEQ ID NO: 421509 - DNA, 76 bp, Homo sapiens
ggaaggacaccaagatgcggatccgggcctttccgagggtatattacctctctctggaattttacatgggccgaac

SEQ ID NO: 421510 - DNA, 96 bp, Homo sapiens
ccgagaacgcctccagcggggatgacacagaagattttcagctgaactctcatctctcaacactggcaaatattcataagatctaccacaccctta

SEQ ID NO: 421511 - DNA, 76 bp, Homo sapiens
gttggcgagctagcaaaacttggtgatttcagaaagtatggatatactcttcagaataagaggaggccttgatttg

SEQ ID NO: 421512 - DNA, 73 bp, Homo sapiens
aaaactccagctgtgaaagcaacataaatgaacttgatggagagtttggattcattgctttgtgcagaaggtt

SEQ ID NO: 421513 - DNA, 98 bp, Homo sapiens
tttccctacgaaaaacagatctttttaagattcgaaatcagagcaaagcctctgggtctgggctctgtgagggagatgaagtggtttccatcaatggc

SEQ ID NO: 421514 - DNA, 100 bp, Homo sapiens
tgtttgcctccctgcttctggagaggagggtcatcttcattgcagacaagctcagagctagcaacatggaccacagatatactggtgactccgctctcct

SEQ ID NO: 421515 - DNA, 87 bp, Homo sapiens
aggaggtggatgtgaaagatcctaactatgatgatgaccagaaagaactggttgtcttcttgggcggtgttgcagggttcatcttta

SEQ ID NO: 421516 - DNA, 90 bp, Homo sapiens
cgaaggactctatccaacctattatatgtgccaggaccattgacaccagaaatggaggcacggcaggctacacggaaaagggagcagaag

SEQ ID NO: 421517 - DNA, 100 bp, Homo sapiens
gggaggccagagcgtggagcgctgcgcggcgcggcggccgggccctcgagacggggacggccaaacgtaccaagaaagtcgggatcgtcggtaaatacgg

SEQ ID NO: 421518 - DNA, 75 bp, Homo sapiens
cccaccagcatcttgcccctcagatcgaaaagtggagaacctgacttccatgcggttgaaccctacacgaagaaa

SEQ ID NO: 421519 - DNA, 101 bp, Homo sapiens
ttttccctcctcaaactgactttgcagccacggagaggtacaagaatattccacagatgtcctttgatgatacagaaagggagccagatcagacctttagt

SEQ ID NO: 421520 - DNA, 50 bp, Homo sapiens
cctgtttttgccaccacactccagcttggacaccaactctacaacattac

SEQ ID NO: 421521 - DNA, 71 bp, Homo sapiens
agcacttactggagtccaagatgctaatggtgtggatgaggtcaccattgtcaacattttgaccaaccgca

SEQ ID NO: 421522 - DNA, 100 bp, Homo sapiens
tcacggtggccttgtggagacaacgccttaacccaaggaagtgactcaaactgtgagaacttcagatggcaggagaggagaacttcaaggaagagctcag

SEQ ID NO: 421523 - DNA, 90 bp, Homo sapiens
gacaagcaggctgctgctaaggcttcataaacttcacttaccaaatacttcaagggattcagaaacagccaagccttctgtaaatgggca

SEQ ID NO: 421524 - DNA, 82 bp, Homo sapiens
cccgagaccgtcctggcgcgatgcgtcaagtacactgaaattcatcctgagatgagaaacctgagtgggaacccgtttgagt

SEQ ID NO: 421525 - DNA, 75 bp, Homo sapiens
cgccaccgccggacttcaatgcccagtccccagctcgccagcagctgagaatgaagcggagagcatcagacagag

SEQ ID NO: 421526 - DNA, 83 bp, Homo sapiens
ccgagccgtccgagccggggaagccgggcgcgtgctgccgctcgtggcgggccgagacaatgcagatcttcgtgaagactctg

SEQ ID NO: 421527 - DNA, 83 bp, Homo sapiens
cgcgcctcttccgcgccctctcaggtgtggacactgccagcggctgcagccgacttggaatgacctgggagacaaatacaaca

SEQ ID NO: 421528 - DNA, 83 bp, Homo sapiens
ctttttccagagaagagaagctttactggtgttccagccctaaggtagttgatgtcacttggcgatattcctgcaaacatgaa

SEQ ID NO: 421529 - DNA, 100 bp, Homo sapiens
taggaagtctgatgccagctcactcatgcctcccctgaggatctccctgattcaggatatgaggtgactctgacatcattagaagcatgccagaacagac

SEQ ID NO: 421530 - DNA, 75 bp, Homo sapiens
ggaggccgagcgcagagcattggcaggaggggcaaggtggaacaggtgctggcgggcgcagaggcctcccaggag

SEQ ID NO: 421531 - DNA, 90 bp, Homo sapiens
ccctggggctgacaggaatcttctggtgtactctttttatgaaaaggtggctttctagaagatgaccatagaggaccttccagattttcc

SEQ ID NO: 421532 - DNA, 100 bp, Homo sapiens
cgacgcggacatggtcatgagctttgtgaacctggattttgaagccagcttcataaggctattggacaaaataacgaatggttctcgaattgaaataaac

SEQ ID NO: 421533 - DNA, 75 bp, Homo sapiens
gatggctcagcaccacctatggatcttgctcctttgcctgcaaacctgtcctcagaatggttggaatgaccctcc

SEQ ID NO: 421534 - DNA, 75 bp, Homo sapiens
ggacagcgacggcctgaagagggagaaggatgagatctatgggggctgaggaagctgccctcgaaaccctccaga

SEQ ID NO: 421535 - DNA, 80 bp, Homo sapiens
tgagtccagctcctctgacagcgaagactccgaaacaggattttttatcaagcagaaatgcatcgaacaacgagaatcaa

SEQ ID NO: 421536 - DNA, 100 bp, Homo sapiens
gaggagagtgctgcttcaggaggagcagcctatacaaagagagtcacctaaggtcctgcgagtacaagggtcgacccccaaaggcaggggcagagccagc

SEQ ID NO: 421537 - DNA, 100 bp, Homo sapiens
cctgcagcgacctacccactacaatacctcttgggactgggctcgatttgaggagaagaacgcccagctcctgggtgcggctcagcagctcctcagccac

SEQ ID NO: 421538 - DNA, 82 bp, Homo sapiens
agaaaatcggcagctgagacggccttggccggcataatcaccagcaacacccgggacaataatacgggggccacctaccccc

SEQ ID NO: 421539 - DNA, 98 bp, Homo sapiens
accgaacagaataacccgcccccagcgggatgtgaaggactccgggtgaggccggccacgccccgcacggtgcatggctgcctcctaatcccatagtc

SEQ ID NO: 421540 - DNA, 83 bp, Homo sapiens
cggagaccgtcacgccctcagaggccccggtgctggcagctgagcccgaggctgacaaggcagtcacccgcagggccaaggtg

SEQ ID NO: 421541 - DNA, 74 bp, Homo sapiens
cttccagatcctcctagaagtagttacttggaaagtccaagaggcccaaggttcctactatctgaccaccacct

SEQ ID NO: 421542 - DNA, 50 bp, Homo sapiens
gccttgtgctgaccaagctgctcacctcgcccctcccgaggaatgacttc

SEQ ID NO: 421543 - DNA, 75 bp, Homo sapiens
tgggaaatggcggagtatctggcctccatcttcggcaccgagaaagacaaactgaaactgttgaggagcccatgg

SEQ ID NO: 421544 - DNA, 83 bp, Homo sapiens
ccgctcacaagcatacggctgtcttggtgggaactgtggctgcaccatctgtcttcatcttcccgccatctgatgagcagttg

SEQ ID NO: 421545 - DNA, 73 bp, Homo sapiens
gaagatcgtgggggccatggtccagatcatccaagcctagaaaacatggaacagatagagaaatttcaggaaa

SEQ ID NO: 421546 - DNA, 83 bp, Homo sapiens
ccacagtgttctttgcctcaagacccagctattgttcagcccaagaagatgaaaggattgttcttgttgacaacaaatgtaag

SEQ ID NO: 421547 - DNA, 101 bp, Homo sapiens
agatcatcaagcgcaagcacaccctaccgaattacaagatcagggtttcatcaccttaaatggttttgaaccaatgaaggtgtattcccttaaaaagacgg

SEQ ID NO: 421548 - DNA, 82 bp, Homo sapiens
ctgcggaacaggacgccctctgatgttcgagaacttgtcttggacaattgcaaatcaaatgatggaaaaattgagggcttaa

SEQ ID NO: 421549 - DNA, 82 bp, Homo sapiens
cgagtgcaacatctgcaaggtccgcttcaccagtgcctccggagccagcgtggtggccatagacaacaagatcgaacaggcc

SEQ ID NO: 421550 - DNA, 100 bp, Homo sapiens
ctgtgggctgttgcaaggaattgcagtggttggatttcatcccttactggtctcaaccaaaatattcctgttggaatcatgatgataatcatagcagcac

SEQ ID NO: 421551 - DNA, 75 bp, Homo sapiens
tgttgcttccttcttcatattgaagaacttcaaccccacagtctaattgtccaatgatgcatcaagagcatgagg

SEQ ID NO: 421552 - DNA, 100 bp, Homo sapiens
ctcagtactgatgcccagtggggcattcgtcttggtaaacttggtgacctggcaatgcccagacatctgtgtccccctcaaaagtcatcctgccccgggg

SEQ ID NO: 421553 - DNA, 100 bp, Homo sapiens
ggaggacaggtgccggagcagctcgtgcagctaagcagccaactgcagaaacgtcagggcctccttggcaatgcatttgatggccaccagcttctgcgtc

SEQ ID NO: 421554 - DNA, 74 bp, Homo sapiens
ccgtagacaccagctccgaaatcaccaccaaggacttatcaaactggtttcaaagcacagagctcaagtaattt

SEQ ID NO: 421555 - DNA, 100 bp, Homo sapiens
aggcctgaaggactgggagaagaggctcatcatctctgacagagcccaccttgagaagaccaagcgactcctgttcctcggggcccaggcctacctggac

SEQ ID NO: 421556 - DNA, 100 bp, Homo sapiens
agaaccacctcctttgcggagagctgcaagccggtgcagcagccttcagcttttggcagcatgaaagttagcagggataaaaacattcagatggcagatc

SEQ ID NO: 421557 - DNA, 97 bp, Homo sapiens
cagcatcatcccagtaagctccaaccaggaactcaccttcgaggcttggaaaccacagccacgtatgaccctgaaacccaggagttcattctcaaca

SEQ ID NO: 421558 - DNA, 101 bp, Homo sapiens
tagctcaaggaaacctttccaacacagatgtccaagctgccaaatcataggtatattgaactgttcctgaattcatgtccaaaaggaaaataagactctag

SEQ ID NO: 421559 - DNA, 75 bp, Homo sapiens
ccctctacacctggacccgacctcctcgccttggaggaagaatataaatctaaatcggaaggtagcacacagaca

SEQ ID NO: 421560 - DNA, 51 bp, Homo sapiens
acccctgccttttgttcaactctataaagtggaactgggcaaactattaaa

SEQ ID NO: 421561 - DNA, 82 bp, Homo sapiens
ctgagccctacaacacccccagcggccgccggctcccccacgaggtaaaatgtcggttccaggaccttaccaggcggccact

SEQ ID NO: 421562 - DNA, 90 bp, Homo sapiens
cttgggaacgaggggtgaagcggcccaggtgaggatctgccgacaccccaggccatcgagccccaggccatcgtgcagcaggtcccagcc

SEQ ID NO: 421563 - DNA, 83 bp, Homo sapiens
ggcttactgcagtctggaactcctgggctcaaaccatcctcccacctcagccttactattatgtggctgtttacttacctggt

SEQ ID NO: 421564 - DNA, 50 bp, Homo sapiens
atgagacagtagtcagcttctcagccaagtgcaagatctgtgaatgggcg

SEQ ID NO: 421565 - DNA, 75 bp, Homo sapiens
atcatacaatatttcagaggtcatgtcaaaagaggtcaagagcaatctgaatccaaatgcaaaggagtttgttcc

SEQ ID NO: 421566 - DNA, 50 bp, Homo sapiens
ctcgtgcactttacacacatgaggtaaaatctgtaaaaactgggtcagtt

SEQ ID NO: 421567 - DNA, 82 bp, Homo sapiens
ccgcgcgctgagggtctcggggcgggcgccgcgggacctctccgggccatgggaattctgtggccacactgcgaggagatcg

SEQ ID NO: 421568 - DNA, 50 bp, Homo sapiens
gcgctcgcgcccggatccctcaggtaaagtcagtgataaatcttttgttt

SEQ ID NO: 421569 - DNA, 100 bp, Homo sapiens
ggaagtgtgggcgcggctgcggtttaacccgcggtggcggcggcgacggcggccctggcagcacctgtggaatcctctcaagaggaacagtcattgtgtg

SEQ ID NO: 421570 - DNA, 100 bp, Homo sapiens
cagagcctggtcgagccggaggaagccaccaggtccggaccctatttgtcagtggccttcctctggatatcaaacctcgggagctctatctgcttttcag

SEQ ID NO: 421571 - DNA, 75 bp, Homo sapiens
tagccctggacggcattcagtgttttggcttcagggatgacttcttagggggcaggggaggtagtcgcccaggcg

SEQ ID NO: 421572 - DNA, 73 bp, Homo sapiens
aactacaggaacctggtctccctggtcctggtatctgggatagcaaaggtcttcttccctcgccccttctcca

SEQ ID NO: 421573 - DNA, 75 bp, Homo sapiens
aggcgacccaagacacccagagagggacaggtctctgtgccttgcggagaatcctgaaaaaacagcctaacctcc

SEQ ID NO: 421574 - DNA, 75 bp, Homo sapiens
agagactgctgagcccgtccgtccgccgccaccacccactccggacacagggatgtttcagcagcccctgagaag

SEQ ID NO: 421575 - DNA, 100 bp, Homo sapiens
cttctaccccatgagaaagaccaggaggagccgatcactttctgtgaggaagccttcgtgtcccactaccgctccggagccatgaggcagttcctgcaga

SEQ ID NO: 421576 - DNA, 100 bp, Homo sapiens
ctcagttaaagaagatgaagaagtcttcaggggagattgtctactgtgggcagggctggcacaggtgtggacaatgtggatctggaggccgcaacaagga

SEQ ID NO: 421577 - DNA, 82 bp, Homo sapiens
ctgatggagatcgtcacctacggccggatcccttacccaggagcttctggaagaggtgaagaaggaattgcagaaagtgaaa

SEQ ID NO: 421578 - DNA, 75 bp, Homo sapiens
gcggttccgctgccctgaggcactcttccagccttccttcctggtctcaagggcgaagtgaaatcttaatgagtc

SEQ ID NO: 421579 - DNA, 99 bp, Homo sapiens
gaaaattcacccttgtagagtcattcctgcctttgagcggactcccttttaagagaaaatattctctttggaatgggaaatcctctgcttgacatctct

SEQ ID NO: 421580 - DNA, 50 bp, Homo sapiens
catcattgatgtggtgcgatcggtaacagttaacctcttccacatgcagc

SEQ ID NO: 421581 - DNA, 83 bp, Homo sapiens
ctcggccgcgcaatgggcacccgcgacgacgagtacgactacctctttaaagcagcgtccgtctccaagagagtatgaagaga

SEQ ID NO: 421582 - DNA, 95 bp, Homo sapiens
cagccttgtctcggccacctcaaggataatcactaaattctgccgaaaggactgaggaacggtgcctggaaaagtgtccatagcagctaccatca

SEQ ID NO: 421583 - DNA, 83 bp, Homo sapiens
caacgatggtgaaaagggtcctcctgctcacagtgtgaataacagaaatatggctacacacacctttctgcaggagagctgct

SEQ ID NO: 421584 - DNA, 100 bp, Homo sapiens
ctcaggcacgtcctcgacctcagttgccacgtgcacatgctggtgccttccaggaacagggcggatacctgaccaactcgtgatcctagacatgaagcat

SEQ ID NO: 421585 - DNA, 99 bp, Homo sapiens
gttgccttggaaaatgccaacgccgtgtctgaaggactttgccaataccattcctggccatggaggcatcatggatcgctttgactgccagtatctgat

SEQ ID NO: 421586 - DNA, 101 bp, Homo sapiens
gaagaacccagtcagcgtgatgatatctctcgccttacagttcagatggaaaacacctatcagttgggtgcttttctgctttgggccaagtagcaaaagct

SEQ ID NO: 421587 - DNA, 74 bp, Homo sapiens
ccaatacttgtacacctccaaggctgctgtgtttgatgtggacaagaagaaagggttgactctgattgagctct

SEQ ID NO: 421588 - DNA, 75 bp, Homo sapiens
attaaaacatttttcagggacgtagccatccagaggtggcagtgctccttttggacttttctctaggtttggcgc

SEQ ID NO: 421589 - DNA, 90 bp, Homo sapiens
ctgtgacctgctggcattgaatgatttatagctaagactccaggacacccctgaagccgagaaatgctccgggattgtggagggctgcgg

SEQ ID NO: 421590 - DNA, 100 bp, Homo sapiens
cctccgccggctaccatgtccgcccaggcgcagatgcgggccctgctggaccagctcatgggcacggctcgggacggtgatctgtgaaaatggttcgcta

SEQ ID NO: 421591 - DNA, 97 bp, Homo sapiens
ggacgggaaggcgggagacgagaagcctgaaaagtcgcagcgagctggagccgccggagtgggccccatgctgattgagtttaacatgcctgtggac

SEQ ID NO: 421592 - DNA, 129 bp, Homo sapiens
tcgggtccccgcaccacctcctgctgccttcccgtcgccgctcccgaagcttttccagggacttcagtactagtgctaataacatccagattgataaaaccaagcctttgtggcacaactatttcttat

SEQ ID NO: 421593 - DNA, 51 bp, Homo sapiens
gtggtgtgcgacaacggcaccggggtggtcttcaagctgacagagaagctg

SEQ ID NO: 421594 - DNA, 82 bp, Homo sapiens
ggaggaagcaggagcagcccaagcgccttccctcacgcattctgaaggcaaatcctgtttagacccaggcaaaggttcctgg

SEQ ID NO: 421595 - DNA, 99 bp, Homo sapiens
aaagatactgccttgcttttggacccaaacatatacagaaatttaaaagcctgttgattcaagaactttctaaagtatttccggaagacatggctaagt

SEQ ID NO: 421596 - DNA, 98 bp, Homo sapiens
agagaacgggaccggcaccactgagaaagggccaccactgcccagttcgggaaatgagcagcactcatcagcctccatcttcgagcacgtggacagga

SEQ ID NO: 421597 - DNA, 101 bp, Homo sapiens
cggaacatctggaggctgggaaatgatgatgactttgaccagtttgataagcctggcgcggaacggtcgtggagaagaagagctgctgatgaggactggga

SEQ ID NO: 421598 - DNA, 75 bp, Homo sapiens
actacgaaattcttaattcccctgaccgtgcctgcagaatgatgccaatgggtggaatgatgccacctggaccag

SEQ ID NO: 421599 - DNA, 82 bp, Homo sapiens
ctgccctcggcgggcggcgacggcggcaaatctaagaaatttgatatggctttagttgcccctgaagctccttcagaacaag

SEQ ID NO: 421600 - DNA, 100 bp, Homo sapiens
tggagaaccagctcaagtgggcatcctgggagctccattccctaaggcactgtggtctggattccctggagcacagcctgtttccatggacaagcaaaat

SEQ ID NO: 421601 - DNA, 98 bp, Homo sapiens
tctcctacgacgggctcaaccagcgcgtgcgggtgctggacgagaggaaggcgctgatcccctgcaagagactctatcaagaagaatatctaatccgt

SEQ ID NO: 421602 - DNA, 100 bp, Homo sapiens
gagtctgggggttcgcgcccgccgacccgcgccctgctccctctcagcacctgggcggacggatctggagtgggagagcaggatgggggactgatcggtg

SEQ ID NO: 421603 - DNA, 90 bp, Homo sapiens
ccggtgtctgccactgtgctgacgttcctcagagcagccctgggctgtcaggagcgcattaactgcctggaagggacccacgagtttttt

SEQ ID NO: 421604 - DNA, 82 bp, Homo sapiens
catcaagggagttttccggggccctctcagcaagaacgggaacaaaactctgaaagtgaagtcactgcttttgctgtcttgg

SEQ ID NO: 421605 - DNA, 101 bp, Homo sapiens
ctagccagttacattccagaggatgaggcgctgatgcttcgggatggacgacttcattagaggggtggtagactcggaggatctccctctaaacatatccc

SEQ ID NO: 421606 - DNA, 75 bp, Homo sapiens
atcagctgcatcctccctatggcactgggccgcgatgggcctcttggaacattggtgtgttcatctgcattcgat

SEQ ID NO: 421607 - DNA, 118 bp, Homo sapiens
gcacatgacccaggcctatgccaatcagcatttcacattcctcatggttggttcaaagatctcttccgttccctgctggcagttcatcagctggatcagccacatggtggccttactg

SEQ ID NO: 421608 - DNA, 50 bp, Homo sapiens
atagagtttgtggacagatttatattggagatggaataaactgagactgc

SEQ ID NO: 421609 - DNA, 75 bp, Homo sapiens
taacccaagagcatgaaagaagtatggcttatggactgaggcggggtttcaccatgttgcccagactggtcttga

SEQ ID NO: 421610 - DNA, 88 bp, Homo sapiens
aggcagcaactgaggcagcggcaggctcaggtgcagccgctggacacagcattgttggttttgccatgtactattttacctatgaccc

SEQ ID NO: 421611 - DNA, 75 bp, Homo sapiens
cttggccatcccaaagctattctgggggcaacagagaatccagcaactatcacaagaatactccttagccacttc

SEQ ID NO: 421612 - DNA, 105 bp, Homo sapiens
ggaccgtgctagtgacctgactgatgccttcgtggaggatgtcttccaagcgaccagcctctccgtatggggaagcagatggagaggtagccatggtgacaagca

SEQ ID NO: 421613 - DNA, 82 bp, Homo sapiens
aggaaacagctggctaagctcatcattgttactgactattgcccagaagaaaagatgtttggttttcacaagccaaagatgt

SEQ ID NO: 421614 - DNA, 99 bp, Homo sapiens
tctttgcctcaaccactcatctcccaggaatctacatgacctgctattttcagatttctgaaatgtcaccttatcaatgttttctggcaaaggccttcc

SEQ ID NO: 421615 - DNA, 99 bp, Homo sapiens
ctggagctctacgcctcctacgtttacctgtccatggggatgtggagacgctggtagcggggccaggaaggctccggacggagcaggttttctggacca

SEQ ID NO: 421616 - DNA, 90 bp, Homo sapiens
gcagaagcggcggcgacacgacgcgcagcagctgcagcagctcaagcacctggagtcctttgtgaaagaaaatgtctttatttaaagccc

SEQ ID NO: 421617 - DNA, 82 bp, Homo sapiens
cgagaccgcggccgggaccgaggattcagagcattcttcactccagaataatgagcaaccctctttggccaccagctccaat

SEQ ID NO: 421618 - DNA, 90 bp, Homo sapiens
ctgtggaagaagcgccgcgcacggacttcggcagagttcatggcctcccacgggaacgacgccgcgagagccaggtttgagtccaaagta

SEQ ID NO: 421619 - DNA, 100 bp, Homo sapiens
gaaaatggaatcctcctctgcgatcagggcctttctacttacaaggaactttgttctctggcaagtgatcttagccagccagatctggtgtataaattta

SEQ ID NO: 421620 - DNA, 80 bp, Homo sapiens
ctcccggctctcgtcagcctcccgccggccgtctccttaacaccgaacaccttactccacaggatccgctgaacatagga

SEQ ID NO: 421621 - DNA, 76 bp, Homo sapiens
tgtggtacagtttaaagatatggactccagttatgcaaaaagagggaagaaggagaaagggccaacccctgaagaa

SEQ ID NO: 421622 - DNA, 100 bp, Homo sapiens
gcaggaattaaactttgtaaagccatgtccctgagccacccagagttccctcactgaagatctgagcatgacccgggacgaggcactgccggactctcat

SEQ ID NO: 421623 - DNA, 100 bp, Homo sapiens
ctgccaccggacctacagctgcattcactgcagagctcacttggccaatcatgatgaactaatttccaagggtccacatatagcctcagttacattagct

SEQ ID NO: 421624 - DNA, 100 bp, Homo sapiens
taacaatcgcagccatggtaacaggttcctcagggattactgtgagcgaggctgcttttctgatttggatctcattgacaacctggggccagccatgatg

SEQ ID NO: 421625 - DNA, 73 bp, Homo sapiens
agcacatcacctacactaccacggccacactcaccactccatggccacacagtctggatgtggatagtgaagc

SEQ ID NO: 421626 - DNA, 75 bp, Homo sapiens
ctccacgccacccggggggctgcactcctctcttggggtcgagcacgcacgcatgcatgccaagcaccgtggcca

SEQ ID NO: 421627 - DNA, 75 bp, Homo sapiens
aagaacttaagaaacacaacaaaaaagatgattgttggatatgcataagagcaatgctggggtgaaaacaacacg

SEQ ID NO: 421628 - DNA, 75 bp, Homo sapiens
gtcgaggacggtcggactcccgcggcgggaggagcctgttcccctgaggttgtggcagcactgcctgaaggtatg

SEQ ID NO: 421629 - DNA, 75 bp, Homo sapiens
gagcacgcgggtctgtcatcatgtcgcgttacgggcggtacggaggaggttcaagaagacgtggaagctgcgggc

SEQ ID NO: 421630 - DNA, 104 bp, Homo sapiens
ctcggcggctgaggaaagcaggaggaggtggcggcggcgggaagatggccatgaagcccccaggaggagaatcgagcaatctttttggaagtccagaagaagct

SEQ ID NO: 421631 - DNA, 101 bp, Homo sapiens
ttgcctttgggctcagtgaagagtctggagtttatctggagtgaggtggccggttcttggtgggatctgagcaggtcgtagttcccccgctccctgggaaa

SEQ ID NO: 421632 - DNA, 100 bp, Homo sapiens
gtcttgcctgtgtcccacttgttcgcggcctataggtttttagaacttcagccataaaaatgggcagaattttccttgatcatatcggtggtacccgtct

SEQ ID NO: 421633 - DNA, 75 bp, Homo sapiens
ggcagctcggggtctggatattcctaaagtccagcatgtcatccattaccagactccccatccccaggatgtcaa

SEQ ID NO: 421634 - DNA, 50 bp, Homo sapiens
gccactggccggtgccctacaagtgtcttataagactttgacacttcctg

SEQ ID NO: 421635 - DNA, 100 bp, Homo sapiens
taaacagacaggctacggatggatatgtcaggaatgtgattcttcatcttccaaggttacttgaatttccactagaggagcagaaatgccaccaatgcca

SEQ ID NO: 421636 - DNA, 50 bp, Homo sapiens
gcgggacgtggtataccgcgacatcaagacctcagttggatgaacccatt

SEQ ID NO: 421637 - DNA, 100 bp, Homo sapiens
aggacttgcagaagtaccacaacagggacacctggttccagctgcagcacgtggacgctgactcggaagtgcaggccagaagcggactcctagaagaggg

SEQ ID NO: 421638 - DNA, 76 bp, Homo sapiens
gaggcccccctgaaccccaaggccaacagagagaagatgactcagcatgcttttcacttccactgcatctctcgct

SEQ ID NO: 421639 - DNA, 100 bp, Homo sapiens
tcggcaaggcagacttcgtgctgatggacaccgtctccatgcccgagttcatggccaacctcaggctcagctagagttgggaagacatcactgattatgt

SEQ ID NO: 421640 - DNA, 100 bp, Homo sapiens
gagacttctgaggtctttgtggaaaaggaggtggatggaagcatgcctaggggaagatctgcctcccaccacagaactggaggaggggcttaggaatggg

SEQ ID NO: 421641 - DNA, 82 bp, Homo sapiens
aacgacccgcgcgtgccctctgagggccccaaggattttttatcaagcagaaatgcatcgaacaacgagaatcaagatcact

SEQ ID NO: 421642 - DNA, 75 bp, Homo sapiens
gaaatcaacctgctcaccggggagtctgatacacagggaccaagacaaagcatgggacatgaaattaagagtgaa

SEQ ID NO: 421643 - DNA, 82 bp, Homo sapiens
gagcttcctcctcgatgcctacaaacagacactaccccaagcagtccttcaccatggtggcggacaccccggaaaaccttcg

SEQ ID NO: 421644 - DNA, 130 bp, Homo sapiens
agatgttcagcgtagagtcgctggagcgggcggagctgtgcgagagcctcctcacttgggtgctggagaatctggtaaaagcaccattgtgaagcagatgaggatcctgcatgttaatgggtttaatgga

SEQ ID NO: 421645 - DNA, 76 bp, Homo sapiens
cggctactacaaccagagcgaggccggatacaatgtctctttgctatatgaccttgaaaatcttccggcatccaag

SEQ ID NO: 421646 - DNA, 82 bp, Homo sapiens
gagcctcggccaggaccggcgcgagaggcgttggaatcgaagcctcttaaaatggcagatgacttggacttcgagacaggag

SEQ ID NO: 421647 - DNA, 96 bp, Homo sapiens
acttcatcacccctctcttccaaatcctgtagccataaatgtctggctaatggcatttacaggagaccaccgctcttgataaggagaggcaggttt

SEQ ID NO: 421648 - DNA, 100 bp, Homo sapiens
aatatttggcaaagcacaatgcaggatcatgctcctctgtggagcaagtgcctccatgaaatgccatattttgtgaagaaagtgcatgcaggaatattca

SEQ ID NO: 421649 - DNA, 100 bp, Homo sapiens
cctgggtctacgataacgcgcttttgctcctcctgaagtgtctttggtccaacgttgttccaggttggtcaaagaaaaagtgatgtatgaaaaagaggca

SEQ ID NO: 421650 - DNA, 50 bp, Homo sapiens
cagcctcccgaggagctgggactacagaagactcgagctctgggctcatg

SEQ ID NO: 421651 - DNA, 82 bp, Homo sapiens
aagaattcctcactaatgagctctccagaaaattgatgcagatattgatgatgttaagaagttcaaaccgggttacctggaa

SEQ ID NO: 421652 - DNA, 73 bp, Homo sapiens
tttctctcgatgaggataacatccctccagaagatggaaagtctacagtttggtaccccaggactcgctggtc

SEQ ID NO: 421653 - DNA, 100 bp, Homo sapiens
gaagagaacaagacgtgtgaagactcaggtggaagcactgcaggctcagctgggagagcagaccaaactttctcgagaacaaattgaagggctcatcgag

SEQ ID NO: 421654 - DNA, 97 bp, Homo sapiens
ggtcttcgtgagttttctcaaatccgatatgatgctgtgaagagtaaagttgtctgcattcaaaagagcattctattaaagctaccttaatttggcg

SEQ ID NO: 421655 - DNA, 75 bp, Homo sapiens
caattattgatggaaatcaggtcagcggagaagatgctggaaacaagtatgaacatgctaatgatgataagagca

SEQ ID NO: 421656 - DNA, 87 bp, Homo sapiens
tcttctggataaatctaagcaactgttcaatgggttaagattatggtgacaagctgaacatggagctgagtgagaaatacaagctgg

SEQ ID NO: 421657 - DNA, 76 bp, Homo sapiens
gcaagttgcaaaaggaatgcatttatgatgctaattcatgcagatcagtccttaatggatcagtactttgcccgaa

SEQ ID NO: 421658 - DNA, 95 bp, Homo sapiens
ctgcggcgcgcgcgaagacgctcgggcggcgggacccagggaaggcagcggccggagcgcgcaagccgcttacaaacacgcagatggcaagaaga

SEQ ID NO: 421659 - DNA, 83 bp, Homo sapiens
acggattcatttagagctgcggaacaggacgccctctgatgctttatcctgtggataaacgcagagtgaacgagtttggggag

SEQ ID NO: 421660 - DNA, 83 bp, Homo sapiens
tttggtcagaatggagctcatgccactggtcaccctccccaaagcttgctttgaccagatcaagttctttaagtgacttttcc

SEQ ID NO: 421661 - DNA, 83 bp, Homo sapiens
attggtgaaactgaatcacaggagatatttccagagaaattgcttttactaggcagcttcatgagaaaacttctcaactcagc

SEQ ID NO: 421662 - DNA, 88 bp, Homo sapiens
ggcatccggggatttctgctcacctggagaagggatggaaatacttcaacaaggcagcaattccatttccgtgagggcgtttctagat

SEQ ID NO: 421663 - DNA, 82 bp, Homo sapiens
cttaattcagaaggtggctcaatgcaggtattcaagcagggctacaaacctcctgatgaaggaccttctgagtaccagacta

SEQ ID NO: 421664 - DNA, 83 bp, Homo sapiens
gggaaacctgggggctccctggacaactccgagcagggtgctttcttctgcgacctggtactcatctacctcatcaaaaagag

SEQ ID NO: 421665 - DNA, 88 bp, Homo sapiens
gctgagcagaggacccggcgggcggcctcgcgggtcagctatggcattgctggttctaccaacgtgacaggtgatcaagttaagaagc

SEQ ID NO: 421666 - DNA, 75 bp, Homo sapiens
gtccactcctggaattgttccagatgaaacaatcccagtatcatcctctacagactggcaagcagcttttggctt

SEQ ID NO: 421667 - DNA, 82 bp, Homo sapiens
caccacaataatccacagccaagggtcggcactcttcaccctcccgagccctgcccgtctcggccccatgcccccaccagtc

SEQ ID NO: 421668 - DNA, 100 bp, Homo sapiens
ccacaaatgtttttctgttttgcctgaatacatgatttaaacaagagatttccacagaagaagtgaccggggaggtgcgtcctcatcatgggaaggaggc

SEQ ID NO: 421669 - DNA, 75 bp, Homo sapiens
ggaaaggctctcagtgaaaaaggttacctgtcctgctgccgattcctggatgacaatcagatcgtcaccagctct

SEQ ID NO: 421670 - DNA, 104 bp, Homo sapiens
gggccgccgagctggacccggaccggttttgggattccagacagcattggaaaagacatagaaaaggcttgccaatctatttatcctctccatgatgtcttcgt

SEQ ID NO: 421671 - DNA, 87 bp, Homo sapiens
agtagtggaaggagtacagggaagtctataagctttgcaacagaattacagagtatgatgctatggtgaactaaacggtaatgctgg

SEQ ID NO: 421672 - DNA, 88 bp, Homo sapiens
gcaggagtgctgccagaaatttgaacaactttccgaatctgcaaaagaagggtgtccgcaatgttgccagtgtctgtctgcagattgg

SEQ ID NO: 421673 - DNA, 101 bp, Homo sapiens
gccaggacatgcagctgcattttcagaagattgtgattcagcctctactaaagttgtcatccgtggagcaggaaaccagattttattgtcaagatatccga

SEQ ID NO: 421674 - DNA, 103 bp, Homo sapiens
aagactccaggaccctctggaagcctagaaatggacaaccctccatatgataagggagccttcagaatcgaaatcaactttccagcagagtacccattcaaac

SEQ ID NO: 421675 - DNA, 90 bp, Homo sapiens
tgagtgatgacaaaccctttctatgtactgcgcctggatgtggccagaacagagagtacctgattgagaagctgcttacaagaacaccag

SEQ ID NO: 421676 - DNA, 100 bp, Homo sapiens
tgatgagccttttaggcctgttcagatgtggaattagaagaagctattagaagaagtcttgaggaaatgtaattaaagatattaccacacaacatcaagt

SEQ ID NO: 421677 - DNA, 101 bp, Homo sapiens
gctcgagggaccatggccgatcctcgcgtgagacagatcaagatcaagaccggcgtggtgaagcgggttacacatcattttggaatgactgtatatcatct

SEQ ID NO: 421678 - DNA, 100 bp, Homo sapiens
ctgccaggaagcttcggccccgcagctcggcttgctgcggtctcaggtattgttgcagcatctggcagtgagactgaggatgaggacagcatggacattc

SEQ ID NO: 421679 - DNA, 74 bp, Homo sapiens
tgcttttgatatctggggccaagggacaatggtcaccgtctcttcagcaaacggggattcagcgtccgatcctt

SEQ ID NO: 421680 - DNA, 75 bp, Homo sapiens
ccgggaccctcaggctcagatcagtggccgaggccccagaggtgaccaagaatatggcccaggtgaccaaagccc

SEQ ID NO: 421681 - DNA, 100 bp, Homo sapiens
ctgctccgtggagatcgtcccgcgcctgccgtgtactaatggtcacttgatgtgcgctggctgttttatccacctactagcagatgcccggctgaaggag

SEQ ID NO: 421682 - DNA, 124 bp, Homo sapiens
agaggttagacttgtttcttatatgtgatgccattccagcactggactcatggaggctgagcatttattcagaggagaaggcagagcccccccaggctatgaatgccctgatgcggttgaacca

SEQ ID NO: 421683 - DNA, 80 bp, Homo sapiens
cgccgcggctgcccccaccgggaccgagtgcctccggagccagcgtggtggccatagacaacaagatcgaacaggccatg

SEQ ID NO: 421684 - DNA, 83 bp, Homo sapiens
ctcgtggcgagagaaggaaaatgcgcgtcccgggcgcgggtagggcgaactttctgaccaagtatacaactacccagagggcc

SEQ ID NO: 421685 - DNA, 75 bp, Homo sapiens
attgacatttaattttagggtcctttatatagaagggagagtaggatcccctaacaacagtgagagagcaatgcg

SEQ ID NO: 421686 - DNA, 50 bp, Homo sapiens
catcaactacgtccctctgaaggcagagctgcaaccctcttgtcctcttt

SEQ ID NO: 421687 - DNA, 82 bp, Homo sapiens
gccttaaacagaaagacttgaccctcttaggtgtcatacctaagacatctttccaggaacagcgtgaggaggacagaagcac

SEQ ID NO: 421688 - DNA, 100 bp, Homo sapiens
ccaagaggaatcctcggcagataaactggactgtcctctacagaaggaagcacaaaaagggacagtcggctctatcaaagaaagcaagagatggaaaatt

SEQ ID NO: 421689 - DNA, 90 bp, Homo sapiens
ctggaggataagcaggaccagatgataccatgaagagaagtttacaggccctctattgccaactgttaattgattatggaagattcccac

SEQ ID NO: 421690 - DNA, 100 bp, Homo sapiens
cttggatgtgagctgaatggattttcaaatttcacagaaggagcctccatgctggagaaagtatgtgcaggtcttctgaacaaatgcctcctgaggattt

SEQ ID NO: 421691 - DNA, 47 bp, Homo sapiens
ctgcaacttgggccccttttcagaaccctgaaggaggcctgtacctg

SEQ ID NO: 421692 - DNA, 75 bp, Homo sapiens
attttgctcggctctctaaattgaatcaattgcaggatgatgaacgacagttgtcaaaatcttcccaagatcaat

SEQ ID NO: 421693 - DNA, 80 bp, Homo sapiens
cctcggagtccttggggacggagcagcgcgtcgtggggcgagcggcagccggtggctgctggcagcggaatcccccagat

SEQ ID NO: 421694 - DNA, 73 bp, Homo sapiens
ccacacctaccactacccgtgtgccagcgatgcagtattcaagtcaaacaacgttgaaatggattgggtgttg

SEQ ID NO: 421695 - DNA, 75 bp, Homo sapiens
cttcaagcagcgccgcaccttcgctttcatccatcccaggggaatcacttacctatgccagcacaactttcaaac

SEQ ID NO: 421696 - DNA, 90 bp, Homo sapiens
ccggacccgatgagctcgggagtccaccatcgctctgcaagccgcagttgtttttcagaggcaccaaataatgtcatctgaaatgttgcc

SEQ ID NO: 421697 - DNA, 85 bp, Homo sapiens
aagtcgcagcgccagacccaaggcccccgagtgagcgcgggcgccgaggccaggtcagagcagcccaccatgggatggggagggg

SEQ ID NO: 421698 - DNA, 100 bp, Homo sapiens
tgaggttgtggaaaaggaagattactcagagattatagggagcatgggtgctggagaatctggtaaaagcaccattgtgaagcagatgaggatcctgcat

SEQ ID NO: 421699 - DNA, 96 bp, Homo sapiens
ctgtccttattatcggaccccgaggatcaggaaaaactatgatcaacaataaggctgcaactggagaggaggttccccgtaccattattgtaacca

SEQ ID NO: 421700 - DNA, 90 bp, Homo sapiens
gccagctggagaattgaagtttgagccaccttccccagccagcagattgttgctggatcaagtgggcatgaaagagaatgaagacaaata

SEQ ID NO: 421701 - DNA, 100 bp, Homo sapiens
tgcagcatcaaagaggcaggagaccccaccaacaactgaacgctttggtcaggctgctacaatggaaggaattggggcaattggtggaactcctcctgca

SEQ ID NO: 421702 - DNA, 51 bp, Homo sapiens
cagtcaatgccggtgtggctgagcggggtgctgataagactgtgaaaggcc

SEQ ID NO: 421703 - DNA, 103 bp, Homo sapiens
attcagctacagggtgaccaacgcaagaacatatgccagttcctcgtagagacccgtccaagaagcagggaccatggctggaggaagaagaagaagcctatgg

SEQ ID NO: 421704 - DNA, 75 bp, Homo sapiens
ggaaaagtagctccagctcaaccatctgaggaaggaccaggaaggaaaggcatccgtgtcattctggaccttact

SEQ ID NO: 421705 - DNA, 100 bp, Homo sapiens
gtgcggggctccaatggcgctttctacaagatgagctctgtgaaaatgttacagcctcgtctcagtagtatcctgttcaagctcacatttgaagaacaca

SEQ ID NO: 421706 - DNA, 75 bp, Homo sapiens
cgtgtctggagcagtggagcccaaagacccctggagacatggtttgtcctggttgtggtcaagactggatgatgt

SEQ ID NO: 421707 - DNA, 100 bp, Homo sapiens
atctggaggcctggacactgtcacactcaacatcacctctcaggaactgcctcctgagcgtggagcctgccattagcaccaagcacctcccttaccagag

SEQ ID NO: 421708 - DNA, 73 bp, Homo sapiens
cctggggacgaagagctgcagctcctcctgtgcgggaatcaaacattttaagtccagtgcaggatggaacaaa

SEQ ID NO: 421709 - DNA, 80 bp, Homo sapiens
gttaccgctgctgcccctgctgtcgctcctggtcggcgcgtggctcaagctaggtatttgaaatatctcaccaaaaaata

SEQ ID NO: 421710 - DNA, 100 bp, Homo sapiens
ggacgcccatcccggtgctcacgtgaatcaggtctaggaaaatcgactctcataaacagcctattcctaactgatctgtacccagaaagagtcatacctg

SEQ ID NO: 421711 - DNA, 99 bp, Homo sapiens
gatcactgataaatcctacagtggaatggaagttggatacactttgtgacttgtacgagacactgaccattacacaggctgttatttttctcaatacga

SEQ ID NO: 421712 - DNA, 89 bp, Homo sapiens
gagtctggtcaggcgtcaggctagtccgacgaagagtggaatcagcatgattcttcagaggctcttcaggttctcctctgtcattcggt

SEQ ID NO: 421713 - DNA, 51 bp, Homo sapiens
gaaattaaaagaggcacgaagctggatgctttaatctggatcccaatagag

SEQ ID NO: 421714 - DNA, 78 bp, Homo sapiens
gactttgtctctgatgagctgagaaacaaagccacccagccaatgaagagcctgccctcgcaaaacccgatcttgaag

SEQ ID NO: 421715 - DNA, 97 bp, Homo sapiens
gtttgcagcaaaacctcctgcacgaaaggctctggaaagatgtggtgatggggcattcttgctaacaacgaggaataaacatggtgtgtctcgaaag

SEQ ID NO: 421716 - DNA, 75 bp, Homo sapiens
ccgccggcttgccacagtccacatgtcccggactcccacgtgggacaagatggtgtcttcggcgcagatgggctt

SEQ ID NO: 421717 - DNA, 96 bp, Homo sapiens
tagactttggtttacatacaggaaaaactttccagccattggagagaagagaatagttttgatagagacacaattgctcctgagcctcctgccaag

SEQ ID NO: 421718 - DNA, 100 bp, Homo sapiens
ctctgatgagctgagaaacaaagccacccagccaatgaagccgtgcttcctcaaagactgggaaatgcacgtccacttcaaagtccacggcacagggaag

SEQ ID NO: 421719 - DNA, 100 bp, Homo sapiens
gaagcccgcgggagcggggaatctgggattcagcaaaccagtccagctacgggggcccagccagccagcagctgagtgggggttacggaggcggctacgg

SEQ ID NO: 421720 - DNA, 73 bp, Homo sapiens
tcaagctcatattttgaagtgtttacggcacgttcatcattgagaagcagcctcctcaggtcctgaagaccca

SEQ ID NO: 421721 - DNA, 50 bp, Homo sapiens
acaggcatcatggactgtgcgcccaagccgtgttgaaatccttgtctcct

SEQ ID NO: 421722 - DNA, 75 bp, Homo sapiens
acatgcgtttcatacagaagtacctgcttcagagacatgagaagattcatactgctagagatgatcgctatggaa

SEQ ID NO: 421723 - DNA, 100 bp, Homo sapiens
ggactacaagacggctgaggagaagtacatcaaggggccttcgctgagctaccggtgtttccccccgggccggcctgccgtgacgatcacagccctgccg

SEQ ID NO: 421724 - DNA, 100 bp, Homo sapiens
ctttattgtggtggagtccaccccgctgtggtttttcacgactgaaaacaacatagcaaaataagccaagatgtctgtggatccaatgacctacgaggcc

SEQ ID NO: 421725 - DNA, 156 bp, Homo sapiens
tgtggccataactgttcatattgccaaacaaagttctgtgctcgttgtggaggtcgagtgtcattacgctcaaacaaggctaaaagagatgctaagagaatgcctgcaaaagaagtcaccattaatgtaacagatagcatccaacagatggacaga

SEQ ID NO: 421726 - DNA, 97 bp, Homo sapiens
gcttcctccatcctggtattttttggagcttccatcctggttcttccaaagtgcccggacccaaaacaggaagtgtcatggagaaactccagctggg

SEQ ID NO: 421727 - DNA, 74 bp, Homo sapiens
cttcgttgcattgcctgagaggagcggagtctgccaggtggtgtccatcatgagcgatatctgaagtggctctg

SEQ ID NO: 421728 - DNA, 50 bp, Homo sapiens
tcgattacactttgttcacggatggatatggcagtggacgtggatttggg

SEQ ID NO: 421729 - DNA, 96 bp, Homo sapiens
taccctttcagtgccgaatgtgtctgaaggaattgtgaggcaacacttccccagatcaaaaggagccaacacctttcatcatcgagtggatcccag

SEQ ID NO: 421730 - DNA, 100 bp, Homo sapiens
ctggaccccaactcagccttcctgcataccctggaccagcagaaacctagagtggtgcacacatcttgaccaactcagcagcaaggtggattttctttgt

SEQ ID NO: 421731 - DNA, 98 bp, Homo sapiens
ctggctgtgcgcgctggcgctgagcctgcagccggccctgccggagcaggccgggctctcgccatgggtcactgtcgcctctgccacgggaagttttc

SEQ ID NO: 421732 - DNA, 100 bp, Homo sapiens
cttcacactgcagaactgggttctggactttgggcgtcccattgccatggtgccaaaattgccagcagagctggtcacaatcaacgtatttttgtggcag

SEQ ID NO: 421733 - DNA, 100 bp, Homo sapiens
gcgggctggcggtggctccacggcctcattgctacgatttcagagtaccctggtaatagctgagcatgcaaatgattccctagcacccattactttaaat

SEQ ID NO: 421734 - DNA, 75 bp, Homo sapiens
cgggatttcactggcaaagtggttgtggtcactggagctaattcaggaatagctgatcctacagttaaagactta

SEQ ID NO: 421735 - DNA, 75 bp, Homo sapiens
acagacacagccggggtcgggagccgcccggggcagggctcgggagagcgggtacatgtcccagagcaagcacac

SEQ ID NO: 421736 - DNA, 83 bp, Homo sapiens
gccccgccggtcacctccgcgcggacaccaggctgctctttggcgtaaattgcaatcgattagggatcgtttctcagaatcaa

SEQ ID NO: 421737 - DNA, 100 bp, Homo sapiens
tactggccttgcccagcgcctaggatattccccgagtccctccggtggctaatggccacccagcagtttgagtctgcaaagaggctgatcctccacttca

SEQ ID NO: 421738 - DNA, 83 bp, Homo sapiens
cccctgacgagcgcagcaaagagggctctatctggaaccaccagatcctgcagctcctgaaaggcaagctggtggtgggtcat

SEQ ID NO: 421739 - DNA, 75 bp, Homo sapiens; identical to SEQ ID NO: 150637

SEQ ID NO: 421740 - DNA, 75 bp, Homo sapiens
gtgaagcccgcttgggagaccccactgccagccaggcattgctggatgcccaaagcctggcacagagtttcttta

SEQ ID NO: 421741 - DNA, 99 bp, Homo sapiens
cagaggtgtgctgacgacctgctacaacagaagctccaaccaggaatggagacgccattggatgttttgtccagggcagcatctctggtgcatgctgat

SEQ ID NO: 421742 - DNA, 76 bp, Homo sapiens
acaaggactggcagtctgctgtagagtgtatcgcagtgttgggaggaagacaatgtgtggcaccctggactacctg

SEQ ID NO: 421743 - DNA, 100 bp, Homo sapiens
aattttgtaaggagaatatttccctcgggaaactccgttagtattttggaattaagaggatggttagaacgagagagcaggtatggtctgcaagcaggac

SEQ ID NO: 421744 - DNA, 75 bp, Homo sapiens
ctgtgaggaatctggattgtcacctttgctgcaaaaaattacgggattatatgcgtcaggcaggagaagtgactt

SEQ ID NO: 421745 - DNA, 83 bp, Homo sapiens
ccggcctatgcccccactaacggggacttcacctttgtctcctcagcagacgcggaaggagtcgttcacgcctactgaggagc

SEQ ID NO: 421746 - DNA, 74 bp, Homo sapiens
gatgaggtgaagtccacaatcaagttccaaatgaagaaggtgtcttatctgacttggggtgtgctgcaggaaag

SEQ ID NO: 421747 - DNA, 75 bp, Homo sapiens
ggcagaatttggacgccgggagattgagattgcagagcaagagatcacaaaatggctcttcttcagatggcaaca

SEQ ID NO: 421748 - DNA, 50 bp, Homo sapiens
tttgattgaagatgtggcatggagagcctacttcagaatcttggttcagc

SEQ ID NO: 421749 - DNA, 97 bp, Homo sapiens
ccctccactggtaacgtattttgatgagccagtcaggagaaattccaggagaaggtgaccaagaatatggcccaggtgaccaaagccctggacaagg

SEQ ID NO: 421750 - DNA, 100 bp, Homo sapiens
atcaaggtcagctggtccacatgaacaggcttccaggaggaaatgagtggaagcatcagttcacagcagtaatgcacactgtacagataagacaattgaa

SEQ ID NO: 421751 - DNA, 90 bp, Homo sapiens
ggccctgcaggtctacggagttgaggtgcccgccgaggtcgaggctgagaagccgtggtggcagatgagatcaccaaagagactacagag

SEQ ID NO: 421752 - DNA, 100 bp, Homo sapiens
ggtagagccccgccggagaggctgggcggctgccggtgacagaatagcctaacatggcagaccagagacagcgctcactgtctacctctggggagtcatt

SEQ ID NO: 421753 - DNA, 100 bp, Homo sapiens
gctgcagcgcgggccccgcagaggaaggaagccggcgggcggggaaacctgtgatctggggaagataaaacctgaggccagacgatacttggaaaagtca

SEQ ID NO: 421754 - DNA, 75 bp, Homo sapiens
acctcagcaccaacactgcagaagacttctatttctctctggagccctctcaggacttaaccaccaccatgtcga

SEQ ID NO: 421755 - DNA, 83 bp, Homo sapiens
aaactatctcatattcgcttagcccttggggtggggagaaccttagagggagaccaagacatcattgttttgaagtttctgaa

SEQ ID NO: 421756 - DNA, 74 bp, Homo sapiens
gcacattcaatcctgctgtgctctcacaggagaagggtcacccaattgacaggtttctcagatcctgtatatgc

SEQ ID NO: 421757 - DNA, 51 bp, Homo sapiens
cctgaatggatccctctgcctttcagagaaatttggagacagacaacttgt

SEQ ID NO: 421758 - DNA, 100 bp, Homo sapiens
tctgctcgtgttccaaatcatcgcctttctggtgggaggcttgattggttcttccaggggacccagccccctaaccatgggagctcaggacactctccct

SEQ ID NO: 421759 - DNA, 75 bp, Homo sapiens
agaggcacccacgctcctacaatgtcctcagccagcagagccacgttccttatgagcaccgtgggtttatttcat

SEQ ID NO: 421760 - DNA, 139 bp, Homo sapiens
gttggtgctgagggcagcagcacatctgtggaggatctgccagggagcaaacctgagcctgatgccatttctgtctgcagggaagcctctctgggagatgttgtgtttctggtggacaccaacatcaacccccaacatg

SEQ ID NO: 421761 - DNA, 101 bp, Homo sapiens
attccagctttctcagtatctacaggtttctgagtcccttcaacatgatcctgggaggaatcgtggtggtgctggtgttcacagggtttgtgtgggcagcc

SEQ ID NO: 421762 - DNA, 58 bp, Homo sapiens
gtgaaacgccaggctctctggaggccaggagatgagccagagcccagaggtggagcag

SEQ ID NO: 421763 - DNA, 100 bp, Homo sapiens
ttcccggcgagtccgcgacggtcgccgcccacggcgagcaacacgggattcccatcccggtcactcccaagaacccgtggagcatggatgagaacctcat

SEQ ID NO: 421764 - DNA, 80 bp, Homo sapiens
gaaaatttcgatattgaagtgtcaaaatccatagatggaaaagatggggatggactatttgggttctcggcaatacgttc

SEQ ID NO: 421765 - DNA, 75 bp, Homo sapiens
atgtgcctttgcaggggagcctgagagccacaggtttacaggaacagatggacctagtggttttggctttgagtt

SEQ ID NO: 421766 - DNA, 99 bp, Homo sapiens
cgaggttgacgggctgggcgtggcccggccgcactatggctaggactacacagaaagtctgctccagctccacgatgctgagattgtgcggttaaaaaa

SEQ ID NO: 421767 - DNA, 90 bp, Homo sapiens
cgtccgcgcgctgcacaatggcggctctgaagagttggctgtcgcgcagcgtaacttcattcttcaggccccttcccagctgcctgcctg

SEQ ID NO: 421768 - DNA, 95 bp, Homo sapiens
ttgtgtcctgagatcaaatggcacttcattggccacctacagaaacaaaatgtcaacaaattgatggagatccatcctgcaaagaaacctaatgt

SEQ ID NO: 421769 - DNA, 104 bp, Homo sapiens
gagaccgtgaccgagagcgtgaccgagagcgcgaatatcgtcatcgttagaagttgatcagatgttttgggaggttatgcagttgagaaaagagatgtcattgg

SEQ ID NO: 421770 - DNA, 86 bp, Homo sapiens
ttcttaatcccaatgttgccctgaaatttatgtccaggattcaaaaagtttaggactgctaaggacttaaccaccaccatgtcgag

SEQ ID NO: 421771 - DNA, 83 bp, Homo sapiens
gggagattcagccgtgaagcaagtgcagatagatggccttgtatcattgcccagtgcctaagatcttttatgttcagctcact

SEQ ID NO: 421772 - DNA, 75 bp, Homo sapiens
atgggccaaggaaaaatcgagcagaaagaatgtctttcaggtatatgtctcgagtccacggtatgcaccctaaag

SEQ ID NO: 421773 - DNA, 82 bp, Homo sapiens
gacagcagccaggagtcatgagcgacagcggcgagcagaactacggcgagcgggaagctcttcgtgggcggtcttgactgga

SEQ ID NO: 421774 - DNA, 101 bp, Homo sapiens
ggaaaatgcaagaagactgatggagcaggcttgcaatattaaaatgcttgtgaccacaccagaaaaatgggatgtagtgacaagaaagagtgttggggatg

SEQ ID NO: 421775 - DNA, 75 bp, Homo sapiens
gtcgccatggggcgaggcagcggcaccttcgagcgtctcctagcggccttgcaggccactcgagccctaatggtg

SEQ ID NO: 421776 - DNA, 75 bp, Homo sapiens
aagaacacgctttgttgcttctaaacctctggaggaggagattgctcgctgtaagcagctcatctgtgaccccag

SEQ ID NO: 421777 - DNA, 100 bp, Homo sapiens
ggcttacagacctgacactggagaccgtctggaatgtctatgacacactcttctgtgaggatgagttccacccgttcatcgaggccctgctgcctcacgt

SEQ ID NO: 421778 - DNA, 75 bp, Homo sapiens
gatctgaagagctatggtgaaacaccactgaagcattgccaaggtgattttcctgcatggattgggagatactgg

SEQ ID NO: 421779 - DNA, 75 bp, Homo sapiens
ccgcacctcctctcccctcccccactcctgcctccgggttccatgccattgcagtgtcaactaggcctcagttac

SEQ ID NO: 421780 - DNA, 89 bp, Homo sapiens
agacattacacacccatatgagttcgatttttacctctgtagccatgctggaatacaggtctatgttaacaatgaatgggcaaccagtg

SEQ ID NO: 421781 - DNA, 90 bp, Homo sapiens
gccagaaggaagatggcggatctggaggagcagttgtctgatgaagagaagaatgccagctgatgaagaccgagaggccgcgacccaaca

SEQ ID NO: 421782 - DNA, 73 bp, Homo sapiens
atcattctcaccaccagtctcttctctgctccatgtgcaagaagcttccggcaaccacctgaacccagagccc

SEQ ID NO: 421783 - DNA, 60 bp, Homo sapiens
agttcgtctggaagagacctccgttgatggagaaccttgtgacctgtctttgaatataac

SEQ ID NO: 421784 - DNA, 87 bp, Homo sapiens
ttagagaattatgggaacgtggtctcactgggatgaccagtgtcccagtgaaggaacgagtgaaggtgtctcagaactggagactgg

SEQ ID NO: 421785 - DNA, 75 bp, Homo sapiens
gctgctcgaggacgctggagcccagcaagcagttcctacagaggttgacagctaccatagcctattccctctaga

SEQ ID NO: 421786 - DNA, 96 bp, Homo sapiens
ggtagaagatctgatcggtcaccaggattctgacaaaagtactctccgaagaggaattgacatagacatagggcctgattacattccaacagagga

SEQ ID NO: 421787 - DNA, 100 bp, Homo sapiens
gggcccaggcgcctccctcttggagccgaaagaagccctcttgggggacagggtgattctgggggtccacttgtctgtaatggtgtgcttcaaggtatca

SEQ ID NO: 421788 - DNA, 100 bp, Homo sapiens
gtgtccctgagctgcctgtgtctctgcctccttccgcatgtggtcccaggtctaaagacattgccctcacagagtgaaatgatggcagaaatatctaaag

SEQ ID NO: 421789 - DNA, 75 bp, Homo sapiens
cccgactcgggcttggcgcggcggccagaggaaccccgagatacctgaaaaaagcggcagtctgcaacccagaag

SEQ ID NO: 421790 - DNA, 98 bp, Homo sapiens
gcaggtgttcgacgtggggccgcgctacaccaacctctcgtacatcggcgagggcgcctacggcatggtgtgactcttccagctggagttggaggctg

SEQ ID NO: 421791 - DNA, 100 bp, Homo sapiens
ttgatcctcgaagagaaggtggtgatcaaaggatcaacagtacaaattctgaagtttgtaaacttgctgatggtggtggtaagccatggcagatgataaa

SEQ ID NO: 421792 - DNA, 50 bp, Homo sapiens
agaaaaacctgaaagatgtctcagttcttgatcaatatgaacgagaagga

SEQ ID NO: 421793 - DNA, 75 bp, Homo sapiens
ggcgccctgctctgcgcacacggtgctggagaatctggtaaaagcaccattgtgaagcagatgaggatcctgcat

SEQ ID NO: 421794 - DNA, 57 bp, Homo sapiens
taaaaaacttcccaaagaactcctgttacgtgggcaaatcaaactagcagattttgg

SEQ ID NO: 421795 - DNA, 75 bp, Homo sapiens
ctggaggatgcctatgtattccctggggatggcgcatcacacaccaaagtgtatccaaagtgtgtacatcagtaa

SEQ ID NO: 421796 - DNA, 100 bp, Homo sapiens
gtatgaaatggtacagcggattctcttgtcaacacgaggttatgtcaacttcgtgaatgaagtatttcaccagggcacttttccaaacacaggagccagg

SEQ ID NO: 421797 - DNA, 78 bp, Homo sapiens
gcaattgatcccaagttgtcgacgaccgacagggtggtgaaaggtattatccaaagagatgagtcacccatggaaaaa

SEQ ID NO: 421798 - DNA, 111 bp, Homo sapiens
atttgttaaggattccaagtaactcttatttggagaacacaaagttatacctcaatttacttgaaatggaatatagtggtgacctcaaacaaaatgaagaaaatatcctaa

SEQ ID NO: 421799 - DNA, 98 bp, Homo sapiens
gcattcttggcacatctaggaagaacgtgcaaggatgcgaattgtgaatcgcttctccaaacatggcagccgattaggaggcctggttacagtgttgt

SEQ ID NO: 421800 - DNA, 100 bp, Homo sapiens
tgcagggcaaaacgctacatttcagtgcattgccacagggagagatgctgtgcataacaagttatggctccaggctaccaaagtgacagcagatggcgag

SEQ ID NO: 421801 - DNA, 100 bp, Homo sapiens
ggcttcttcatgctttttcttctcaccatttctggccaaaactacaaacaagacttcgcagagttgcatgctgagaatttgaaaaatgaagatgatgtag

SEQ ID NO: 421802 - DNA, 100 bp, Homo sapiens
tagtaatacactcttacccttacaggtggttcgagatcagatctctcactgcacagtgaaattgcgccagaccacaggtctcatggagtactgcttggag

SEQ ID NO: 421803 - DNA, 99 bp, Homo sapiens
cgctcgtcatggcctacccgggatacggaggagggaatcagacacaagtttggcagaaggaagtgtcagctgcttagatgaaagtcttggacataacag

SEQ ID NO: 421804 - DNA, 100 bp, Homo sapiens
tgtaagaaggactgtattgtgaccccatatagtgactggacatcatgcccctcttcgtgtaaagaaggtcacatgtgccaatttaacgaacggtggaaag

SEQ ID NO: 421805 - DNA, 90 bp, Homo sapiens
tcagaaggggaacggatctgtgtgcccacagctcctggagccccacagggtctaaggaaaagcagtgaatacagcaggaacagaaagacc

SEQ ID NO: 421806 - DNA, 98 bp, Homo sapiens
ggccgccggtggcgtggagaaggatgccgaggaatgtgacagggctgggagtgtggccacctgccaggccgtcatgcgtgccgtgattgggattggga

SEQ ID NO: 421807 - DNA, 100 bp, Homo sapiens
gcctgatccgggcccgttggcggcgtcactgacgcttcgctccggtcctcggatcccgagcgcggggaggcagaccggcgccaagcccatctttgtgtgc

SEQ ID NO: 421808 - DNA, 51 bp, Homo sapiens
gttatgcagagtgctacccagccacgccagctgtggtggctcacacctgta

SEQ ID NO: 421809 - DNA, 74 bp, Homo sapiens
tgacagaatatgccaaaaatggagaaatttttgggaccagttactctccacaagaaaattcacacaaccacagt

SEQ ID NO: 421810 - DNA, 100 bp, Homo sapiens
cagagtctccactctgggaaaaaattagagacaatgaaaacagagttcctacatgtgaagaggagtccttcaataatgttaaacagtggctgcaggaaat

SEQ ID NO: 421811 - DNA, 75 bp, Homo sapiens
ctggaagagctggggaaccacaaggccttcaagaaggagctgcgacaatattttgatccaaacaatatcttcaag

SEQ ID NO: 421812 - DNA, 75 bp, Homo sapiens
ctgggaccagatgctgcaatcaaccttaccgaccccgatggcgccctggctaaatggcgagctctacactggaac

SEQ ID NO: 421813 - DNA, 100 bp, Homo sapiens
cccttagcggcccggcgttgaattccgggaagtgggagcttcaggctcgctccgtgcgggttttgcacactagggaccaagaagccctcggggacactgc

SEQ ID NO: 421814 - DNA, 75 bp, Homo sapiens
taaatcagctggagaaggagaagtggagaagaaatcagtcagccgcaggtagcagatatcaagagagttaacaat

SEQ ID NO: 421815 - DNA, 73 bp, Homo sapiens
aggaatagcacataaattctttggagctgaaaatagcgtgaacttgaaggctggagtgcaatggcacaatctc

SEQ ID NO: 421816 - DNA, 88 bp, Homo sapiens
atgatactcgagtatatatctgggatccacataatggagacattctgatggaatttgggagacggtggctcagggagtaaaggaaggc

SEQ ID NO: 421817 - DNA, 75 bp, Homo sapiens
aaacaagacgagaatgtaactccgttgaagcaagagatcaaccagctttcactcctagtggaatattaactcctc

SEQ ID NO: 421818 - DNA, 100 bp, Homo sapiens
aagagacatgagatgattgccaaatccccaggattcagtgacttttgatgatctggctgtggacttcaccccagaagaatggactttactggacccaact

SEQ ID NO: 421819 - DNA, 98 bp, Homo sapiens
ggcgcctgaggagcgggatctaacccaggagcagacagagaagctgctgcagtttcagcgtcgtctcggagatgcagccaagaaagccatcagtaaat

SEQ ID NO: 421820 - DNA, 75 bp, Homo sapiens
cgggaagatggcggcgccgctcatccccctctcccagcaggttgatgccggcccaggatggatcagacctgtgaa

SEQ ID NO: 421821 - DNA, 74 bp, Homo sapiens
tgagggtctcggggcgggcgccgcgggacctctccgggccatggcggagctggagtttgttcagatcatcatca

SEQ ID NO: 421822 - DNA, 80 bp, Homo sapiens
ccagcagctggagactcagaaaggcatttcatccttcatgaagccattcaggattttgaattgcatatgagtgcttggct

SEQ ID NO: 421823 - DNA, 51 bp, Homo sapiens
attcgagaatcaaagggccgggagcgatgattcatgttacatgtaaagctg

SEQ ID NO: 421824 - DNA, 90 bp, Homo sapiens
aacctcgctccggaaaggggacacctggttatgaagacagtatggagtttccagaccatagtagacatttgctacagtgtctgagcgagc

SEQ ID NO: 421825 - DNA, 90 bp, Homo sapiens
cgccggggaggcagcgcgggatcccagcctcaggcgtgcgcggacggtgtgcgggaagcctcagttttggagaggaagagccaggcttta

SEQ ID NO: 421826 - DNA, 50 bp, Homo sapiens
cagtaatgtcccggcggatatgagctccacctcagatcaggcgtcccaat

SEQ ID NO: 421827 - DNA, 100 bp, Homo sapiens
ttgcgctctggcttgctgggctgcttggagctggtgggactgtgagcgtcgtctatatctttgggcaccttctctttcatcatcgaaacctggagagagg

SEQ ID NO: 421828 - DNA, 109 bp, Homo sapiens
ggcctcagcaacctgacaattctgtcgtgtcccggtacagcagggaagaactggaaactcagagaaagaaactgcccttccatctacaaaagctgagtttacttctcct

SEQ ID NO: 421829 - DNA, 114 bp, Homo sapiens
tgcaacatccttcttctggataacactgtacaagctttcaaagtcaatctcacgtggaaaatgaagagcagtacacccaggctctggagaagtttggcggcaactgtgtatgca

SEQ ID NO: 421830 - DNA, 75 bp, Homo sapiens
cagccattcccaaatgccccaaggatgaagaacggagacggtgcttttgaagatgatgatatcacgcacgttgaa

SEQ ID NO: 421831 - DNA, 100 bp, Homo sapiens
tcaaaaaggccaagatggccaaggaccgcaagagccgcaagaagcctgtggaggggtatgatatcagctttctgatcaccaacttccacacagagcagat

SEQ ID NO: 421832 - DNA, 98 bp, Homo sapiens
aacgcaaaggaagtgattcagacccatcccaatcccactcactccactccagccaccatcagagccaccagcctccccctccctgagctccactgagg

SEQ ID NO: 421833 - DNA, 100 bp, Homo sapiens
tgcaacatgaccacgtcgttccgcgacggcctggctttctgcgccatcctgcaccgccaccggcccgacctcatgtggccaaggtggaatacgtcaggaa

SEQ ID NO: 421834 - DNA, 90 bp, Homo sapiens
gcggcgcccagacaggcctggagcacagaggaccaggtaaacttccgtggattcatgcgaactttggctcatttccgccccattgaggat

SEQ ID NO: 421835 - DNA, 75 bp, Homo sapiens
ctgggagcacatccatttcattggcaaggaggtcctgcacataggaagcgcccacaaccgaagtgccatgccctt

SEQ ID NO: 421836 - DNA, 75 bp, Homo sapiens
tgctgggtgtcttctccctcgccagctggcatctactgccgaggatgttccaagccgctgtgctgctcgtgcgcg

SEQ ID NO: 421837 - DNA, 100 bp, Homo sapiens
attttttttttaagggagctcaaggtcacaagaagaaatgaaaggaacaatcagcagccctgttcagaaggtggattacaaagctgacgagtggctgatg

SEQ ID NO: 421838 - DNA, 75 bp, Homo sapiens
ggaaggagattttgaagtgggaagcccttcatgctgcgttcagcaggccccgttcacccgctggtcgaccccctg

SEQ ID NO: 421839 - DNA, 90 bp, Homo sapiens
ctggaagattacttgacaaagatactaaaaatgcccatgtatagaaactatcatgccacaggcttcaagcagcaagctcttacagtatcc

SEQ ID NO: 421840 - DNA, 89 bp, Homo sapiens
tgcgttgaggatctttgctcttccatccgcctttgatcgtcttcctcttcagccatccaggagctctttgttcaatgcctagccaccta

SEQ ID NO: 421841 - DNA, 98 bp, Homo sapiens
cgggccctggctggggatgtgcgaggaccagaggagcgagagcagcaagaaccacacccagcagcaatgtcagcggaagtggaaacctcagagggggt

SEQ ID NO: 421842 - DNA, 75 bp, Homo sapiens
gtggagaaagacattacaccatctgaattgcctgcaaacccagtggcctgattccaccaagagaaggcccaggag

SEQ ID NO: 421843 - DNA, 100 bp, Homo sapiens
tgacatcatcaagcgttacatggacggcatgaccgtgggtgctggagaatctggtaaaagcaccattgtgaagcagatgaggatcctgcatgttaatggg

SEQ ID NO: 421844 - DNA, 80 bp, Homo sapiens
cgccgctctagcggccgggactctgaactatggcggtacctgcacatgttgttctttgtcagtgctgtcaagtgtgtgcc

SEQ ID NO: 421845 - DNA, 75 bp, Homo sapiens
ttttcttgaaaatcatgagaaaatgacttctacaaccagatacaactgtgttctcttggcaacagatgtggcagc

SEQ ID NO: 421846 - DNA, 96 bp, Homo sapiens
tttgcagttacagcctgtgcaacaagggaacttcctgtagaaaagcccccaaaacaaaacaaaccttaattgactaaaaagtattgcatgctcaac

SEQ ID NO: 421847 - DNA, 100 bp, Homo sapiens
tcgtggaatttgaagattctacagataaatcaggtgtcatggagaaactccagctgggcccagagattctgcagcgggaaaatccaaggcttatttatgc

SEQ ID NO: 421848 - DNA, 75 bp, Homo sapiens
caacaaccacaaacaaaaagcctggccagcttcttggacacttaatgattgttggcaagaaatgtgctgctgatc

SEQ ID NO: 421849 - DNA, 50 bp, Homo sapiens
cgagatcttcgaccgctacggggaggaagcaaaatgatgcttcaacaccc

SEQ ID NO: 421850 - DNA, 82 bp, Homo sapiens
tccactccgtcccccgcgggtctgctctgtgtgccatggacgggtgtccctggccagtgtccttccacctgtccacaagcat

SEQ ID NO: 421851 - DNA, 73 bp, Homo sapiens
ccagcgttacagtaatgttccagctgttctccatagtggtgttcggctccatcgtgaacgagggctacctcaa

SEQ ID NO: 421852 - DNA, 100 bp, Homo sapiens
cctgggccgcgtccatcacctggcactcaaggttcttttgaagtaaccagtgatcttttttgcttaccctcatcaacagaatggatgaagatagatttga

SEQ ID NO: 421853 - DNA, 83 bp, Homo sapiens
ctgggcggcaccctggccaggaagcggagggcgcgcgaggccctgggcgctgcctatggcacagccaagagcggtaccggcat

SEQ ID NO: 421854 - DNA, 74 bp, Homo sapiens
cgccgctgtccccaccactgcagccatgatctccttaacggacacgcagacttgataaagatgacatggtatac

SEQ ID NO: 421855 - DNA, 89 bp, Homo sapiens
caagagaaatgataaaacatttagaacgatgtgaacatcgaatcatggaatcccttgcatggctctcaccttaattttaaagaccccga

SEQ ID NO: 421856 - DNA, 101 bp, Homo sapiens
tcttttgtttgtcagcagccaaggtgtttccaggaagttcagagagaacaggccactttgcaaaagattgtttcatgcaaccaggtgggactaaatactct

SEQ ID NO: 421857 - DNA, 83 bp, Homo sapiens
cccgctcacctgcgctgtgatgcctgcagagctgtggcttaccagttgcaaatgagtctggaaaaaaaggagaagaagaaaaa

SEQ ID NO: 421858 - DNA, 83 bp, Homo sapiens
ccccgcctctccagcttcacccagcaccaccggcccgtcatcgccgtgcacagcggtgagaagccctaccactgcaactggga

SEQ ID NO: 421859 - DNA, 98 bp, Homo sapiens
caaactggaaagaagatgctaattaaagtgaagtccaagtggtaagaagttcagaagcaagcctcagttggcaaggtacctgggaaatactgttgatc

SEQ ID NO: 421860 - DNA, 75 bp, Homo sapiens
ctggcggggcgggcagcatggttcactccagcatgggggctccaggctaagtcctatcagccatggaaacaccat

SEQ ID NO: 421861 - DNA, 100 bp, Homo sapiens
caggatttggtctccacggtcaacgtggtatactcgcagacaacccaaccggtatacaatgatatttcacattttcaggaacaaaatgatttaaaagcat

SEQ ID NO: 421862 - DNA, 101 bp, Homo sapiens
tcaaaaccccagcgtttgcagaatctgtcacagagggagatgtcaggtgggagaaaggtctggctctgggagaggagtggacagcagctggttgagataca

SEQ ID NO: 421863 - DNA, 100 bp, Homo sapiens
gtggtagcgacgggtgatcttcgctgcggacttggttcggagggacgtccgcttctggtggacagattgagcaaaggtatgtgtacattccagtgggcgg

SEQ ID NO: 421864 - DNA, 75 bp, Homo sapiens
gacaactgattattcgtgatattttacaagatgtgcatgataaggttgaaatcacaaagattagacaccttttta

SEQ ID NO: 421865 - DNA, 89 bp, Homo sapiens
cagtttgggaaatctggatgccaaacgagattggggccatgccaaggactatgtggaggtaagaatgattgatgttggctgatattgga

SEQ ID NO: 421866 - DNA, 100 bp, Homo sapiens
cccagacacaagtcttcactccttcctgcgagccctgaggaagccttgcaaagaggccatgctgcgacagaaggactatgagaccgccaccctctcggag

SEQ ID NO: 421867 - DNA, 75 bp, Homo sapiens
gtcaagacatttcttcggcattctgcaacaggacctcagcagccatgtcgaagccccatagtgaagccgggactg

SEQ ID NO: 421868 - DNA, 100 bp, Homo sapiens
ctggagtacaatgccattggaggttgtgaactaaaggccgacaaagattatcactttaaggtggataatgatgaaaatgagcaccagttatctttaagaa

SEQ ID NO: 421869 - DNA, 146 bp, Homo sapiens
caaagcagcacctcccactgctggctcgatggcaattgaaaagtaccctctggttttctcaccgcagatggtggggttcattgtcggatcctccaaatattgctggcttaagtcatttttgtgaacatatgctttttttgggaaca

SEQ ID NO: 421870 - DNA, 100 bp, Homo sapiens
gctggcagcagcatctcagcccaagagaaggtatgatctcgtgaaaccttgagagaaactgaatgacgaatgaaactattgttcctgtttcacacagaag

SEQ ID NO: 421871 - DNA, 87 bp, Homo sapiens
attactttgttatgcagaaagtgaagcgagcagctgcaaagcatctaatagaacgctactaccaccagttaactgagggctgtggaa

SEQ ID NO: 421872 - DNA, 75 bp, Homo sapiens
tcagtccctaggtatccgcactgctcaggggacaaccctccatatgataagggagccttcagaatcgaaatcaac

SEQ ID NO: 421873 - DNA, 90 bp, Homo sapiens
cggatgatatcaacagacgggagactgaacttgaggatgattttgcgaataatcgagaatttatcacaatggttgtatacaagactgatg

SEQ ID NO: 421874 - DNA, 90 bp, Homo sapiens
ctgctcatggcagccactttcagccctcagggacttgctcagccaggtgtcagctgtgatgcatgtttaaaaggaaattttcgaggtcgc

SEQ ID NO: 421875 - DNA, 87 bp, Homo sapiens
ggccgtgtctcagtccacccaaggtctcctcggatcgcctggagaggcactcggacctggaatgtatcctgtcaggtataatgtcag

SEQ ID NO: 421876 - DNA, 50 bp, Homo sapiens
ctggactggatttattcagtgatgatcccagccctagactcagtgcacaa

SEQ ID NO: 421877 - DNA, 83 bp, Homo sapiens
gcaggagcgaccgtgaggacaggcttttgctctgcgacggctgcgatgcggggtcaaaatgcagatcttcgtgaaaaccctta

SEQ ID NO: 421878 - DNA, 96 bp, Homo sapiens
agcctgggagaagcagcagaggaaggccaagcagatagaacttcagttcactattggcgaagccattaccagtgctgcaataggaactagttctgt

SEQ ID NO: 421879 - DNA, 132 bp, Homo sapiens
gcagtatcaactcgagggaggttcatgacaactgaggaaaaagccaaagtgggaccaggatttgaagaacccaagtgattcagcagtgcacagcccctttacaaagcgccaggcttttaccccatcttcaac

SEQ ID NO: 421880 - DNA, 80 bp, Homo sapiens
atccgcgggctggcgacgtagaggaggacgcctcacagctcatctttcctaaagattgtctaaagccccaggaaaaatgg

SEQ ID NO: 421881 - DNA, 51 bp, Homo sapiens
gaagatggacagtttcagtgcattacagtttatgatgtctctggagcagca

SEQ ID NO: 421882 - DNA, 100 bp, Homo sapiens
ctgatggcgataagtcattaccacaggttccagcaacagatagaaatgctttaagttcactctggggaaagctggcctctgaaatcttaatgcagaattg

SEQ ID NO: 421883 - DNA, 75 bp, Homo sapiens
gcgctgcatcacaatgagaaggagtggcaccagccggatcagttcatgcctgatgcagagcaaagcggcagtccc

SEQ ID NO: 421884 - DNA, 75 bp, Homo sapiens
atccagctactctacctctaacacagtacctgttaacaactgaatattacttcagtgtagaaaatttggaacgag

SEQ ID NO: 421885 - DNA, 100 bp, Homo sapiens
gcggctgctgccgacccctggcacctggcgcccagcgcgcccgtggccgctgccgcctccgccccaggtcagaagggaaaatatgcaagtttgattgaaa

SEQ ID NO: 421886 - DNA, 100 bp, Homo sapiens
ttcaggttgactaaaacatgggcgtcatgcggaggaatccctttggtgtggacatctgctgccggaaggggtcccgaagccccctgcaggaactctacaa

SEQ ID NO: 421887 - DNA, 74 bp, Homo sapiens
ggagaactcaaggtcttcatagaccagaaccttagtcccgggaaagctgatgtagcccagcagttccagtatgc

SEQ ID NO: 421888 - DNA, 82 bp, Homo sapiens
aagcagatgcgcattttgatgggagatgtttcacaaagcagaagaattattttctaaaacaacaaacaatgaagtggatgac

SEQ ID NO: 421889 - DNA, 90 bp, Homo sapiens
gctcctggattatagcctgcacaaggagaggaccggcagcaatcgatttgccaaggtgaagtcccgcttggcttttgggaagcccctggt

SEQ ID NO: 421890 - DNA, 83 bp, Homo sapiens
cctacttgcagcatattacctatcaggagaggaggttcaaaccttgtactactcagctgatcacaagctgcttgatgggaacc

SEQ ID NO: 421891 - DNA, 97 bp, Homo sapiens
agagttcctgctgacttacgcttgtttgaggagaccagttttgattttaaatgttctcaatccagactaaagacaaccaagtattcttctcagaaag

SEQ ID NO: 421892 - DNA, 100 bp, Homo sapiens
agacgagtctttagatacctgagacaaagcttttgttgatttcctgagtgatgaaattaaggaggaaagaaaaattcagaagcataaaaccctccctaag

SEQ ID NO: 421893 - DNA, 100 bp, Homo sapiens
ctgcgacgttcacagaggaacactgccggggcccaaccacaagacgactcaataggaggaagagcactcggccgcagccaagacgggcggctgcttccct

SEQ ID NO: 421894 - DNA, 100 bp, Homo sapiens
tcaaaatagcggaagaaaatggagctgcatttgcaggaggcactagtctgatacagaagctggctcaccctagaagcccaactccaactctgccactttc

SEQ ID NO: 421895 - DNA, 82 bp, Homo sapiens
gagaaagaagtgataggagggctctgtaggctgaactccgagcagctgtgtttttagcactagaggagcaagaaaaagtaga

SEQ ID NO: 421896 - DNA, 75 bp, Homo sapiens
acacagagcagggcggactggaagagcaggaaacaaggttcttttgaagtaaccagtgatcttttttgcttaccc

SEQ ID NO: 421897 - DNA, 83 bp, Homo sapiens
tgcccggagttccgctcctgcgggcttagcaggaaagggtgcctaagcatgatgccttcttctgtagagtgggcgctttgcag

SEQ ID NO: 421898 - DNA, 100 bp, Homo sapiens
cagaaaggaataaaagaggtcagatgatgacagctgtgtccttaacaaccaggccccagcttcctaatgaagatcctgagatttttgatgtttcatccaa

SEQ ID NO: 421899 - DNA, 82 bp, Homo sapiens
cccatccccactttgtgattccctaccgctgcttaggatattagaaatggctactccccagtcaattttcatctttgcaatc

SEQ ID NO: 421900 - DNA, 100 bp, Homo sapiens
ctttgccattggggtgcagcagctgcaccccaccttgatccagcggacttacggcctcctgcccgaaggccacctgaacctaacggctccctgcaacgct

SEQ ID NO: 421901 - DNA, 82 bp, Homo sapiens
ctctagtgcaccaactgcaatcaagcatcagaagagctaacaattgctggaatgacctttacaacttttgatcttggtgggc

SEQ ID NO: 421902 - DNA, 98 bp, Homo sapiens
acaatgtcagtgtttacactgtcaaggatgacaaggaaagtgtccctatctctgataccatcatcccaggagcatccccccggtccttcagaatccaa

SEQ ID NO: 421903 - DNA, 100 bp, Homo sapiens
cccctccggaccatggccgacgacgacgtgctgttcgaggatgtgtacgagctgtgcgaggtgatcggaaaagactgagtcgccctgtgttgcccaggct

SEQ ID NO: 421904 - DNA, 75 bp, Homo sapiens
aggcatccgggccgtgctgctggggcctcccggggccggtaaagggacccagttcctgagggaagacctcaatta

SEQ ID NO: 421905 - DNA, 100 bp, Homo sapiens
atcgcggcgggggaagttatccagcggccagctaatgctatcaaagagatgattgagaactgctacacacttgaatgcaactacaacactggacgctcag

SEQ ID NO: 421906 - DNA, 75 bp, Homo sapiens
tccattgactatgcagcctaatgaatccagcaactatcacaagaatactccttagccacttcaattgggataaag

SEQ ID NO: 421907 - DNA, 96 bp, Homo sapiens
actggccagatatcaaactttacaaaggatatgctgatggagggcacggaggaagtggaaggagctgagagaagataatatcattttaattgaaac

SEQ ID NO: 421908 - DNA, 50 bp, Homo sapiens
catttggctttcggctgtgcagtgtctaccatcagagggagatctctgcc

SEQ ID NO: 421909 - DNA, 82 bp, Homo sapiens
acggcgccgcagctggcgctggcggcagcccatccttgagagagctgcgggcacggatgggctggttggaaggaaaatcatg

SEQ ID NO: 421910 - DNA, 75 bp, Homo sapiens
aggctgatggagagctgaacattactcttccagaagagcattcctctgaatattgatttgctgaatagcccagac

SEQ ID NO: 421911 - DNA, 100 bp, Homo sapiens
atcagtctcaggatgttctgagattgcatcaggatattaatgattataaccggagattctcagggcaacccagatctgatctcccattaaccagtcataa

SEQ ID NO: 421912 - DNA, 83 bp, Homo sapiens
aaaagttatagttcttgtcaataaggtgatgtccttgcaaatatcaatggtgtgagcacagaaggttttacctacaaacaagt

SEQ ID NO: 421913 - DNA, 100 bp, Homo sapiens
cataagagccagcaagatacattccctcaagtgtccagaatttccaattacagacgacaaagtagcactgcagggttttcttaatgctcaaatggtcgcc

SEQ ID NO: 421914 - DNA, 100 bp, Homo sapiens
cgccgcgccctcggcctgcacgggtgactattatatggttaaaaagattttggaggaaaacagttcaggtgacttgaacataaattgcgtagatgtgctt

SEQ ID NO: 421915 - DNA, 82 bp, Homo sapiens
aaggagcacgtggcagcgcaggaaacaggtaccagcctccgaacctcgccatctctaccctctactggaaggcctggcccct

SEQ ID NO: 421916 - DNA, 75 bp, Homo sapiens
cagtgcgcggggagcgttcctacagtgacctacggcatgatgagctccaatgtgtactactacacccggatgatg

SEQ ID NO: 421917 - DNA, 100 bp, Homo sapiens
ggagggcttcgcgtctgcttcggagaccgtaaggcttgctgatgaccgtatggcactggtgtcaggcatcagcttagatccagaagcagcgattggtgtg

SEQ ID NO: 421918 - DNA, 51 bp, Homo sapiens
gctgcccgctgtgagggaaaagctctcgtgctcattcccccatgatcgccg

SEQ ID NO: 421919 - DNA, 51 bp, Homo sapiens
ctccttgaagaggtccttcacatcccttgctggagtgcaatggcatgatct

SEQ ID NO: 421920 - DNA, 100 bp, Homo sapiens
cgtggctgagagctccacagcagaggacgcgctctccatccgctcggagatgatccagcgcaaagatgactgtccaagtgcctccaaagtgtacaaagca

SEQ ID NO: 421921 - DNA, 99 bp, Homo sapiens
tgtgtgtgtgtcccgggcccagacgaattgacctgtcatttactccatcctttatagtgatgctacaggacgaagaggaatggataaaaacattggcga

SEQ ID NO: 421922 - DNA, 100 bp, Homo sapiens
ctcatcttgttctcgagttttctctgccatgttgctattgcaggacggaataacagcgacttgattgcatgtacagtgatcaccaaggatggcggcatgg

SEQ ID NO: 421923 - DNA, 100 bp, Homo sapiens
cgtcagcggcttctgcgagaggaaccgagacgttctcttctccgacctcatagagctgatgcagaccagtgagcagatgaagcctgctgggagcgtgaat

SEQ ID NO: 421924 - DNA, 90 bp, Homo sapiens
cacgggcggcggatggcaacctgctccagcgatcagagcgttaagatttgataatgggctgcattaaaagtaaagaaaacaaaagtccag

SEQ ID NO: 421925 - DNA, 73 bp, Homo sapiens
tttgtatgaacaaaaccagtctgatgtatgtgatgctgatccttcagccttagccaactatgttgtagcactg

SEQ ID NO: 421926 - DNA, 75 bp, Homo sapiens
gaagagtaattgcctgctttgattccctaaagaacattaaccaggtggtatttgttggaaatttcttgagaatta

SEQ ID NO: 421927 - DNA, 100 bp, Homo sapiens
cataaaggtcttagaaacactggttactgttgctgaagaacaccatcgtgacctgaaacatatcacgaagctgaaaccttggggcctttttgaggttcta

SEQ ID NO: 421928 - DNA, 90 bp, Homo sapiens
gcatcaacaagtatgggtctccgtacaccaaaaactcaggcttcgccacctgcgtgcaaagggagtacatcaagacctggcggccacgct

SEQ ID NO: 421929 - DNA, 51 bp, Homo sapiens
cccgaccccacttgtgctggaagccctgcagagcccagggagatggaagac

SEQ ID NO: 421930 - DNA, 141 bp, Homo sapiens
gagtgtctcctgatacccggatgtgaggcgatccgctggcgctagtctgaccctccgccaggcaaaaggaaggtactccaaagattcaggtttactcacgtcatccagcagagaatggaaagtcaaatttcctgaattgct

SEQ ID NO: 421931 - DNA, 100 bp, Homo sapiens
gttgtgagcagggtctgcacgaaataaagctcctgggcaaggggacgtctgcagctgagggatatgcaacgaagcatgttgttgaaggtctggaaccaag

SEQ ID NO: 421932 - DNA, 100 bp, Homo sapiens
cggcgcgggagggctgtgtgatggcctcggagcgcccggagccggaggcgttggagaccagggccagccctggccacaccccaggctgtgtcaccttcgt

SEQ ID NO: 421933 - DNA, 75 bp, Homo sapiens
gggaaccttaagtaaatcagaatgggaagctacaaattgcaacacctgctcggtataccgtgactttgggaggaa

SEQ ID NO: 421934 - DNA, 75 bp, Homo sapiens
gatgaggaaagtgaaaaccaaactgatctctctgggttggcttcagatccaaggttttgccatcaaggggggacg

SEQ ID NO: 421935 - DNA, 98 bp, Homo sapiens
aggatggtggtggatgcggccaactccaatgggcctttccagcccgtggtccttctccatattcgagggtgttttgaatgctgtatcaaatgcctggg

SEQ ID NO: 421936 - DNA, 74 bp, Homo sapiens
aaaggatcttccttattactctggacaacaaaaaggcatatggaaggagcatttctctttgctgttctcctaca

SEQ ID NO: 421937 - DNA, 100 bp, Homo sapiens
gcctatcctgcctttgtgccaggcagtcctcctcatgtgtattacagggaagatcagttttcctgccatccaggctgctccctccttcagcaactcattc

SEQ ID NO: 421938 - DNA, 98 bp, Homo sapiens
ggctcctgccctctcgctttccctctcgcgtctctggctgcaggctgaccccgcactacatctacccaccagccatcgtgcagcccagcgtggtgatc

SEQ ID NO: 421939 - DNA, 82 bp, Homo sapiens
gcttttgtaacttttgatgatcatgatacagttgataaaattgttggatctccaacttgaggaattaaggcagcaggtttct

SEQ ID NO: 421940 - DNA, 100 bp, Homo sapiens
ctacaagattcaggcaattccgacttatgaaaccgtgatgacattttttaagagcacatcaaagctgcccaatgatctgcttgatttgcagcagccaact

SEQ ID NO: 421941 - DNA, 87 bp, Homo sapiens
ctcgcggtagacccgggcagcgcttccattccgcggagctgagctcgaaagagcattccagacacatatgcagagcacctcattgct

SEQ ID NO: 421942 - DNA, 98 bp, Homo sapiens
atattagaagaaattaaagcagaaagaaagctgcggcctgtatcaccagaggagattagacgtagcagattaggtcatgtaatgtttgcagaaataaa

SEQ ID NO: 421943 - DNA, 101 bp, Homo sapiens
tgcacatctgctcttcttgcccattacctgctgggtttaccatggcaatggggatttatactggggtgggattcaaagaagcacacaggctacgtcggctt

SEQ ID NO: 421944 - DNA, 74 bp, Homo sapiens
cggcgacccgggcttctgtgaaacatggcggtaggctgggaccataacacaagatgtcaagccctccaacatcc

SEQ ID NO: 421945 - DNA, 100 bp, Homo sapiens
gtcaaaggttataacgacatttttaccaggcagcaattctgcatttcttcgagtggtaagatgtcgatccttagctgaagaatatggtttggatacaatt

SEQ ID NO: 421946 - DNA, 80 bp, Homo sapiens
gccgggcccacctccccaccaaggaagtgcctccggagccagcgtggtggccatagacaacaagatcgaacaggccatgg

SEQ ID NO: 421947 - DNA, 82 bp, Homo sapiens
aaacaagccgtggaataggtgtatcaagtaatggtgcaaagcctgaagtcattacacctactctgagaatcgtgtggaaaaa

SEQ ID NO: 421948 - DNA, 100 bp, Homo sapiens
attcaagctgataggctgcgctaccggaatgtcatccagcgagtgattagggagaacgtggatttccaggcagtcccggttttcctggtttacagggtcc

SEQ ID NO: 421949 - DNA, 98 bp, Homo sapiens
ggggacgcgcttcttcccacactgtgagcctcagcagctccagccagcggacccgacggctgagaggttcagcagactgtacaggatctttttggcag

SEQ ID NO: 421950 - DNA, 107 bp, Homo sapiens
attctggtggggagatgaacccaacctagtgggtgtaatacatcatgaactgcagggaactgcaagcacatgttgaccagataactgaaatggcagcagtaatgagg

SEQ ID NO: 421951 - DNA, 89 bp, Homo sapiens
cagaactatcagaactacatcttaaggggaattgcttacttaggaggtgtgtgcagtgctaagaggaagtgtgtgcttgccgaagacaa

SEQ ID NO: 421952 - DNA, 100 bp, Homo sapiens
cggtgtccccaccgccatccctgacccatggcgctgaagaggattcagaaattgaatggatcgcagcagttaccattgctgctgggacagctgcaattgg

SEQ ID NO: 421953 - DNA, 75 bp, Homo sapiens
gaatgattactaacctatgactcccaacagtatgacagaaactgttcaggttccattatcaaaacgagcaaaatt

SEQ ID NO: 421954 - DNA, 76 bp, Homo sapiens
ctacgttcattcagggcctgctgtggaagaccagccccaaagggtttgtgtttagtgaatcagagggatctgcatt

SEQ ID NO: 421955 - DNA, 75 bp, Homo sapiens
cgggagcggaaacagcggcagccagaggtgaccattgtgaggtagatattttgttctaattttccagatgaggaa

SEQ ID NO: 421956 - DNA, 74 bp, Homo sapiens
gaagttgaagagtggcagcacagggaggagatgttaaagtaacccatcttgcaggacgacattgaagattggtc

SEQ ID NO: 421957 - DNA, 100 bp, Homo sapiens
agccctcccctccccccgtcctgcaagatcttatgcggctaggtgcctgggaagtaacagcaagaggattcactccttctccagttgcacagccacaccc

SEQ ID NO: 421958 - DNA, 82 bp, Homo sapiens
aatggagccgggcagctggagggggaaagcgtcttggatgatgtcatcatcagatttgaaatatttaaagtggatacaaaac

SEQ ID NO: 421959 - DNA, 90 bp, Homo sapiens
ggagcatctcatgggggcccccaggactctgaccggggtgaagagaatcttctaccagaacgtgccctctccagcgatgttcttccagcc

SEQ ID NO: 421960 - DNA, 83 bp, Homo sapiens
ctcttctgacctccgcgcgacgtacccgccgccgccgttggctggagggaaatcgtggaacacatggtccagcactttaaaac

SEQ ID NO: 421961 - DNA, 75 bp, Homo sapiens
caagaagatcttcgagttcaaagagaccctcggaacgtgactgtggccttcccccagatgtacctaatgcccagc

SEQ ID NO: 421962 - DNA, 51 bp, Homo sapiens
gagtgaggaaaggaggtactgtagtatttgcaaccacgtggcttcacgagt

SEQ ID NO: 421963 - DNA, 50 bp, Homo sapiens
aaatcttccaagtccaaggatgtggacaagaatccttcaagaaacaggaa

SEQ ID NO: 421964 - DNA, 109 bp, Homo sapiens
aaaatattgttgccctggaagacatttatgaaagcccaaatcacctgtacttggtcatgcagctggatgatccaccaacacattctcagccagacagtgatgatgaagc

SEQ ID NO: 421965 - DNA, 89 bp, Homo sapiens
ctgcggagttgctgggtccaccgacccttaccctcagcgagagaagtaacctgtttctgaaagatctatccagcactccgatggccagc

SEQ ID NO: 421966 - DNA, 100 bp, Homo sapiens
gggagctgcagcacagtcgggggtgtaggttatggggatgaataatacggcagctagtccaatgtctactgcaacttcaagtagtggaaggagtacaggg

SEQ ID NO: 421967 - DNA, 88 bp, Homo sapiens
cagattcgcagtggtcgcttcttctccttggtatctttaggtggtgttgatcttacagtccgggtgctcacgacaggatattggccca

SEQ ID NO: 421968 - DNA, 74 bp, Homo sapiens
acacacattttcagcacagactgccttttttccggctgctgaacttgcgcaagctgggcctgagcgacaacgag

SEQ ID NO: 421969 - DNA, 75 bp, Homo sapiens
tgcctcgatgccatccagcaagacttcgtgatttttaacagagaaaaagcagccagacacagtctccaacgccac

SEQ ID NO: 421970 - DNA, 131 bp, Homo sapiens
acagggaaagcaactctaatcaatgtgtctatgctgcacacaactctgtcatagtagatgaatgcaaggctgctgatactttggctgtgaggcaaaaaaggagaatttatgatatcaccaatgtcttagag

SEQ ID NO: 421971 - DNA, 100 bp, Homo sapiens
aaatatttacagtcggaggagtactcggtgaaatcctgtcctgaagactgtaaggaactttttacccctgaatgcaagtttaaagaatctgtttttgaaa

SEQ ID NO: 421972 - DNA, 101 bp, Homo sapiens
gaagaccgcgcgcagggcctgcagcgggagctggacggcgagcgcgagcggcgcgagaaagctgaaggggatgctaagggagataaagcaaaggtgaagga

SEQ ID NO: 421973 - DNA, 89 bp, Homo sapiens
ccagcttcccaggacagaattctgcaggtgttggatcccagaacaagaatgattttattcaagatgttgactagaggaatcataacaga

SEQ ID NO: 421974 - DNA, 75 bp, Homo sapiens
cgcggccatggctcacctccggggatttgccaaccagatccagagacaatggccccgatgggatggagcccgaag

SEQ ID NO: 421975 - DNA, 100 bp, Homo sapiens
gtttctgccagtgaaaaccaccaaaacaatccagctgttccctcagatgatgctggagggtcttgaaatctttacagtaaaacctgcaacttgaaaacta

SEQ ID NO: 421976 - DNA, 100 bp, Homo sapiens
atgatgtcacccaatggatccattcctcccattcatgtgcctccaggttatatctcacagggactgttgacattcagggatgtggccatagaattctctc

SEQ ID NO: 421977 - DNA, 98 bp, Homo sapiens
ccacatcactcggaagccccccatcaagatgtcagtattgaatatggtggtgaggcgtgaccctggcaacactgaacctgtgaaagccaaggaagagc

SEQ ID NO: 421978 - DNA, 96 bp, Homo sapiens
taggatctttgagtatttgcaactcagcctagaagagcctgggtcctctggtggtcaaagtgaaggagtaccaggtggagaccattgtggacaccc

SEQ ID NO: 421979 - DNA, 103 bp, Homo sapiens
cttgagaagaggagccaaaacatcatagttgaaccgtcctggaatagaaattgcttccaagtatgatcatcaggcagaagaagatcttcgcaattggatagaa

SEQ ID NO: 421980 - DNA, 75 bp, Homo sapiens
gacatcctggaagctgggaaatggtttcacagatggcagtgttacattgaacaaaggagacatcacccgggaccg

SEQ ID NO: 421981 - DNA, 99 bp, Homo sapiens
ggaacttgcagaaatcacattggaccctcctcccaactgtagcaatggctgccatccggaagaaactggtgattgttggtgatggagcctgtggaaaga

SEQ ID NO: 421982 - DNA, 98 bp, Homo sapiens
ctgcctccactactacaactgttactgctgtcactgctgaagtggatctctttggaggacagtcattttgtttactcattcagccctgttgcaggtcc

SEQ ID NO: 421983 - DNA, 75 bp, Homo sapiens
ctcgccacagcggcctcggcctccccttggattcagacgccgattcgcccagtaatctatgccagcaattatgac

SEQ ID NO: 421984 - DNA, 51 bp, Homo sapiens
agcaactctacatcatgtcagagaggcagatgggcttaggtcacgagcaag

SEQ ID NO: 421985 - DNA, 116 bp, Homo sapiens
ccgcggccgctcgcgcctctcgatgggcagctcgcacttgctcaacaagggcctgccgcttgacaatgcagatcttcgtgaagactctgactggtaagaccatcaccctcgaggtt

SEQ ID NO: 421986 - DNA, 73 bp, Homo sapiens
gcagagtgggcccgagagcgcagcgcacgggacagactgatgagcgagactcagtgactatctcttcacgcta

SEQ ID NO: 421987 - DNA, 100 bp, Homo sapiens
tgccagaggctggactttctgctgggctccgtggtccatgaggaaagtgatgaagcattgggcccaacaatgatgagttggaatgcagttgaaaagttat

SEQ ID NO: 421988 - DNA, 101 bp, Homo sapiens
atatagatgccagtcataatagatttcgagacaacagtggccttctgatgaatactttaagatcagctcagctactatttaataaaacaaaatctgtagaa

SEQ ID NO: 421989 - DNA, 98 bp, Homo sapiens
tgctttagcatttatcacttccttccttactttgtcttggtatactacatggcaaaatgggaaaggtgatgatgaacagtctacacagatggctgcaa

SEQ ID NO: 421990 - DNA, 74 bp, Homo sapiens
gttaaggattccaagtaactcttatttggctgtgaagcttcatggaggtatcgatatcctagtctccaatgctg

SEQ ID NO: 421991 - DNA, 123 bp, Homo sapiens
acattaggttgcagtatgtggccagttatttgcctcagtaaaagagagattacctggggcaattgatgttatcggtcagactataactatcagccgagtagaaggcaggcgacgggcaaatga

SEQ ID NO: 421992 - DNA, 75 bp, Homo sapiens
gcaccctggggctcctgaaactcacatggttgaaggggcccggccaggactcggggaagggtggcctgagagcag

SEQ ID NO: 421993 - DNA, 90 bp, Homo sapiens
cagagattcatctttcatgcagtgacatgttgataaaaaatgatgggagtgcatccgccccaacccttttccccctcgtctcctgtgaga

SEQ ID NO: 421994 - DNA, 100 bp, Homo sapiens
caagaagattcagccctgtcatcttgtgcaaaaccatcgggaaggtgctgatgcagtatgcagacatcttgtcaaaggacttcccagcctattgcacaaa

SEQ ID NO: 421995 - DNA, 100 bp, Homo sapiens
gaaagccagttatccacggactggaagatcaaaagagggatcgacgagaacgtgctaggagcccagctggacgttgaggccgcccattcagagatcctca

SEQ ID NO: 421996 - DNA, 96 bp, Homo sapiens
aggccgggcacctccgagcgcaaggacagcgcgaggtccgcgcagcccagcgcagccatgattttttatcaagcagaaatgcatcgaacaacgaga

SEQ ID NO: 421997 - DNA, 100 bp, Homo sapiens
tgctgtccattgcgggggtgcttgttggatctggattcctcaggcccttctgcgatgttttacctggctgcggctgtgtcagatttctatgttcctgtct

SEQ ID NO: 421998 - DNA, 98 bp, Homo sapiens
ggggacattattgcgcgtggaacggctgcttttggaagatctaagctggaaccagaaccaaatacaaagacaagagaatccacatcttctgagaaagt

SEQ ID NO: 421999 - DNA, 82 bp, Homo sapiens
gttgctgcaggcagagggagccacagcggagctggagtttgttcagatcatcatcatcgtggtggtgatgatggtgatggtg

SEQ ID NO: 422000 - DNA, 78 bp, Homo sapiens
ctcaatagacagcccatggagggtagatctcggtcatgccttgactgcattggtaaaaattctatcatgttagaaagt

SEQ ID NO: 422001 - DNA, 83 bp, Homo sapiens
gctcttccctgaccattttctactgtccctgcgcgagtgaaggaagcccatcccccagaattgagctgctgcataatattgac

SEQ ID NO: 422002 - DNA, 75 bp, Homo sapiens
agaaccaaaggctattggatcagctcagcagggtatggagagtgcaatcacgctgtggcagttcctgttgcagtt

SEQ ID NO: 422003 - DNA, 96 bp, Homo sapiens
tctacccaattagaaatgcaacttgagaaacccaaacctgtaaaaccagtgacgttttccacaggcatcaaaatgtaggataagttctgaacgtcg

SEQ ID NO: 422004 - DNA, 74 bp, Homo sapiens
tgatgagcccctgtggaggtgaagacattgtgggagctgggaatcccaagtgcaaaattgcaattgttttggga

SEQ ID NO: 422005 - DNA, 82 bp, Homo sapiens
ttttctctgcgttctgctcctactgcttcgcgtccagacaggtgatgtgtccaatctagatcccaacttctcatttgaaggc

SEQ ID NO: 422006 - DNA, 100 bp, Homo sapiens
cggcagacttgtggctacacttctggccagtttgacctggaattcaattcgtcataatctgtccctacacagcaagttcattcgtgtgcagaatgaagga

SEQ ID NO: 422007 - DNA, 98 bp, Homo sapiens
gcagctgcagccgcctgaccacggcgactggacttacgaggagcagtttaagcaggtctggtgaagctgggggttcactgcgtcacctgccagaaggt

SEQ ID NO: 422008 - DNA, 82 bp, Homo sapiens
gcgcaccagcgggtgaagtacaccaaggaccatactgtgcgctctactgactcaaagtcctctggctcacagcctctcagcc

SEQ ID NO: 422009 - DNA, 74 bp, Homo sapiens
ctgcctcctctccgaccacgtggacaagaggatcctggatgctgcaggggccaacaaatatgatgaggcagcca

SEQ ID NO: 422010 - DNA, 75 bp, Homo sapiens
ccggagctgctggtttcattcgaggtttcgggccgctattgtggatgctgatggaagaatttatattcggaactg

SEQ ID NO: 422011 - DNA, 50 bp, Homo sapiens
agcagtggtgaaacagttggatctggagctgacctcaagagaatttgcaa

SEQ ID NO: 422012 - DNA, 90 bp, Homo sapiens
tggatttttgcatgagacgcttctggacagaatgattacggacctgaagccaaagaacaagatgcgctagtggacagattgctgaccagg

SEQ ID NO: 422013 - DNA, 83 bp, Homo sapiens
cgccgctcaccccgcggccgcaccttcccgccttctcaggttaattatagaaaatgccaagtaggaaatttgccgatggtgaa

SEQ ID NO: 422014 - DNA, 50 bp, Homo sapiens
catcgtggtagttattgtaagtgctcaggaacagcccatggaagaatcat

SEQ ID NO: 422015 - DNA, 100 bp, Homo sapiens
gctctgaccactctccagcaccagcttccagttagtggatatagcacaccatccccagccattctgggaggtgatcagtgatgaacatggcatcgacccc

SEQ ID NO: 422016 - DNA, 75 bp, Homo sapiens
tgcgcgggcccgaggccggaggaacccggactccggcgtagcgatgttcctcctgctgatcaagagaagcttttt

SEQ ID NO: 422017 - DNA, 100 bp, Homo sapiens
aggctgagatcgtcaaaaggctgaacgggatttgtgcccaggtcctgccctacctctcccaagaggtctcggcgcggaagatggccggcggcgtggacgg

SEQ ID NO: 422018 - DNA, 51 bp, Homo sapiens
tgcctgccccatgggcaagactggggccgcgcatagctccgactacagcat

SEQ ID NO: 422019 - DNA, 100 bp, Homo sapiens
aaaatggaagtgaatccccctaaacaggagcacctgctggcgctaaaaggcgaacagctgcttggagaactacaagtgaagaaaagaaagcattagatca

SEQ ID NO: 422020 - DNA, 100 bp, Homo sapiens
cctgccttgtcttctccactgttcctggaggaatccgagaagagcagagcggagggagccccagacacgaaaaatggctacaaacttcctagcacatgag

SEQ ID NO: 422021 - DNA, 50 bp, Homo sapiens
ggctcacctgtgcgggatggaacaaaagatttttgatcaccatactgaag

SEQ ID NO: 422022 - DNA, 82 bp, Homo sapiens
cttggactgagtcctgcaggacacagctgagatctgtatctgtggacctgaatgttgatccctcgcttcagattgacatacc

SEQ ID NO: 422023 - DNA, 76 bp, Homo sapiens
ctcccgcggcccacagagcacagctcttccacattgactttggacatattcttggaaatttcaaatctaagtttgg

SEQ ID NO: 422024 - DNA, 85 bp, Homo sapiens
tctcgtgccgccagcaggcggccaacctcatccaggagatgggacagcgtctcaatgttggcctggacaatgctggaaagacaac

SEQ ID NO: 422025 - DNA, 75 bp, Homo sapiens
cagcaggatgagcatgccaatttaactgagagagacaagagagacacctccaacttcgacaaagagttcaccaga

SEQ ID NO: 422026 - DNA, 100 bp, Homo sapiens
cgccgctgccgccgctgccaccatccgcgaggcaggagagaggaggaggagtgcggcgcggcggccccgggaccaaggagctgtgagccgtgagctttga

SEQ ID NO: 422027 - DNA, 100 bp, Homo sapiens
ttgctgccttatctttctgactctaagtggcattcaagttcctcagcactttgtttgcccccttaaactttgtcatggagaaagtggagagcatcctccc

SEQ ID NO: 422028 - DNA, 82 bp, Homo sapiens
cacgggggccgccgcagcaccatggcgaccaccgtcagcactcagcgcgggccgtgtcaacagcatctccaccctggagcct

SEQ ID NO: 422029 - DNA, 75 bp, Homo sapiens
gcggaacccttcgctggcgggagcgcggttcggggccgcagaggtgggagatgagggagcaggccacttcgtgaa

SEQ ID NO: 422030 - DNA, 80 bp, Homo sapiens
agcacctagtcgtggccggaggagtctcagagctgtcagaaagatagtcagaacattatgcctttttctgactccagcag

SEQ ID NO: 422031 - DNA, 75 bp, Homo sapiens
gactgcgccgagctgcacgtcctcgaacgcgaggccaacagccccgggtctcactctgtcaccaggctggagtgc

SEQ ID NO: 422032 - DNA, 101 bp, Homo sapiens
gagtctctgtccgggggcctggctaaggaaaccctattacctccagcaaacatgtctgacaaagagctaaagaagctacgtaataaacaaagaagagctca

SEQ ID NO: 422033 - DNA, 77 bp, Homo sapiens
caaacggcaagatgtccagtaatgtcccggcggatatggtttttacccagtcttgctaggtcagcattagaaaaaaa

SEQ ID NO: 422034 - DNA, 100 bp, Homo sapiens
ctgaagcagcgacggcacagcgggaagaatgtgagcaagaagaacccatcaggtgattgtcaggcctctgagcccaagctaagccatcatatgccctgtg

SEQ ID NO: 422035 - DNA, 83 bp, Homo sapiens
actcgacgcacgtcatcaggtttccactaaatggctactgtcacctcaactcagtccagttccagggtcacccccgagaggac

SEQ ID NO: 422036 - DNA, 75 bp, Homo sapiens
cctatgatgtgtcttccattctaacatccatacagataataccagaagatttcagcatagcagataaaatacagc

SEQ ID NO: 422037 - DNA, 82 bp, Homo sapiens
caagctcgtagcctgccactccgtgcgtctgtgacaagcagggaacaaggcaacggacggcgcaacccagccccggctgacg

SEQ ID NO: 422038 - DNA, 51 bp, Homo sapiens
ttttacttcaagcaggggctgatttagttcaaaccttgtactactcagctg

SEQ ID NO: 422039 - DNA, 60 bp, Homo sapiens
gaaggatgacatcttccgaatctacattaaaggacccttcaaagttgtacaagaaagcag

SEQ ID NO: 422040 - DNA, 100 bp, Homo sapiens
ggcgctggagaaatacaacatagagaaggacattgcggctcatatcaagaagccagctgaagatgagtggggtaaaaccccagacgccatgaaagctgcc

SEQ ID NO: 422041 - DNA, 75 bp, Homo sapiens
ttgtggagaagctgcaggcgcgcctggccgcgaacccggaccctaagaagtttggaaattttagcattcaggtgc

SEQ ID NO: 422042 - DNA, 100 bp, Homo sapiens
tttcaactctacttcaacccgcaccttgtgttccggaagttccagacaatgcagatcttcgtgaagactctgactggtaagaccatcaccctcgaggttg

SEQ ID NO: 422043 - DNA, 98 bp, Homo sapiens
tccttatgtctccaacatggaccgcctgggggactcggaactgctactttgacgcacacgctcttgccatggacttcatgagcataggattccgagag

SEQ ID NO: 422044 - DNA, 100 bp, Homo sapiens
gatctcccgtgatgagctgttacagaagtcacctgcaccggtgcccgtgacgtacgagctgcccacactgtataggacggaggactattttcctgtggac

SEQ ID NO: 422045 - DNA, 100 bp, Homo sapiens
ccacattcatctgggcatgcctgcagtactcttggcccatggacctgaaggagaagcacctgcctccttttctgaaagagttcggaacatgtcgcctgat

SEQ ID NO: 422046 - DNA, 50 bp, Homo sapiens
tggcggctgacagtcgggaggagaaagaaactggcagacctttcacttcg

SEQ ID NO: 422047 - DNA, 90 bp, Homo sapiens
gaaggagtacaaatgcggggacctggtgttcgccaagatgaagggctacccacactggccggcccggtcaactgtcccggcccccaactt

SEQ ID NO: 422048 - DNA, 131 bp, Homo sapiens
ggaacaccgccgagcccgcgttccccccccgcccagagtcatggcggcagcagccgctctgagggcgcctgctcagatatccctcctaaatgtacaatcaaggatttgctaccaaaagagaagagcagtac

SEQ ID NO: 422049 - DNA, 102 bp, Homo sapiens
cacagtatgcatccatgaaggaagagtctgtcttccgggaaagtatggaaaacccaaattgatgtgatgctgatccttcagccttagccaactatgttgtag

SEQ ID NO: 422050 - DNA, 89 bp, Homo sapiens
ggcaaggccatcggcgtcctgaccagcggcggcgacgcgcaagactgtgccctgtccacggtgcctcctgcatgtcctgctgccctgag

SEQ ID NO: 422051 - DNA, 50 bp, Homo sapiens
gacagtgagcccaagtgtgtggaagcttttgtctggtcctctgagcccca

SEQ ID NO: 422052 - DNA, 74 bp, Homo sapiens
cggcttccgtcccggacagagcccgtggtcgcgcaggggaactgtgtcaatctgacagaagcactgtcgctcta

SEQ ID NO: 422053 - DNA, 99 bp, Homo sapiens
tgacatggagagaatttcactatattcagcgatctagggcagccctgcagaggtacctgttctactgtaatcgctatatgaaccacatgcagagcctgc

SEQ ID NO: 422054 - DNA, 100 bp, Homo sapiens
tctggtgagcgagggggacctgctgaaggaccagagagggagccctgcctacatcagtcccgacgtgctcagcggtggtcaagtaccccctgcacgccat

SEQ ID NO: 422055 - DNA, 101 bp, Homo sapiens
cttcggttcgggtgcgctgctcaaggacacggtctacaccgacttcgacgggagtgcatccgccccaacccttttccccctcgtctcctgtgagaattccc

SEQ ID NO: 422056 - DNA, 96 bp, Homo sapiens
cttgaggttcacagatgatacctttgatccagaacttgcagcaacaatagatttgctgctgcttccaggagaagtggagcaggatgtaagcaccag

SEQ ID NO: 422057 - DNA, 90 bp, Homo sapiens
cgcccctccccctcggcctcgcggcgacggcggcggtggcggcttggacgactcggagagccggattttttatcaagcagaaatgcatcg

SEQ ID NO: 422058 - DNA, 80 bp, Homo sapiens
ccagtatgggaaagatctaccttctggaagctactactacgtggtgcttggaaaggaaaagctgaatctcagttgtatcc

SEQ ID NO: 422059 - DNA, 76 bp, Homo sapiens
caacagtttttaccagttcatccacaaaatcctggatttgttcagaatccttcagcaactagaagccatttgtgtc

SEQ ID NO: 422060 - DNA, 100 bp, Homo sapiens
tgtcccacaggtatgggctctacgtgtgcttcttgggcgtcgttgtcaccatcgtctccgccttccagttcggagagacggtgtgaagggagacctgctg

SEQ ID NO: 422061 - DNA, 75 bp, Homo sapiens
agaagaagatgatgcagagtccaggctctccacacaaggagatgcaagtcaggtgattgggcctcttactgaagg

SEQ ID NO: 422062 - DNA, 105 bp, Homo sapiens
cgggcggccacagtccgcagggatgaacctcgagttgctggatctgtgtgccaatgtcagtggaatttgaggaactcctgaaggctcgagagaatccaagtgaag

SEQ ID NO: 422063 - DNA, 74 bp, Homo sapiens
ctgtaggctccttcaacccgtggctgatagctgaaagttttcggctttgtgagaaaccttaccatcaaacacga

SEQ ID NO: 422064 - DNA, 54 bp, Homo sapiens
ccaggatggtctcaatctcctgaccttgtgatccacccatctcagcctcccaaa

SEQ ID NO: 422065 - DNA, 50 bp, Homo sapiens
gggtcgcctaatcatcgaatttaagtagagatggggtttcgccatgttgg

SEQ ID NO: 422066 - DNA, 80 bp, Homo sapiens
cgcgtctctctgctgcggcgcggggaccgctgtgctctcgtgctactatatcggggccacagatgatgcagccaccaaaa

SEQ ID NO: 422067 - DNA, 75 bp, Homo sapiens
acaggaacttggtagtagtcaatcagcaggttccatttagaaatgtaatgacagctttgcagtttccgaagataa

SEQ ID NO: 422068 - DNA, 98 bp, Homo sapiens
agctgattacctcagcagatgaaatacatgaaggagacctagtggaagtggttctttcaggagatcaaagacgctggccttcagacctgatcagactc

SEQ ID NO: 422069 - DNA, 90 bp, Homo sapiens
gaacctggaagttgtgctttttaaggaaagaccacagcaagattctttcattcgtctcctcctagcctgggggaccaggctcgaactgac

SEQ ID NO: 422070 - DNA, 50 bp, Homo sapiens
tggctgtgattatctcccaaaggttttatataaccgatccttaaacgaat

SEQ ID NO: 422071 - DNA, 100 bp, Homo sapiens
ctaaaccagaagaggaggttgcccagaagaaaaaggctcctatggatattccaggtttaaacctgagtcaacaagaatactacccctatgtgtactacaa

SEQ ID NO: 422072 - DNA, 101 bp, Homo sapiens
tgctgctcaaagctgctgccgccccttgggctaaaaggaatgtatcctgtcaggtataatgtcagtgaatggcaagaaagttcttcatatggatcgaaacc

SEQ ID NO: 422073 - DNA, 100 bp, Homo sapiens
atgaaaacaaatttctttggtacccgagatgtgtgcacagaattactccctctaataaaaccccaaggaagagccaatgttttccacccataatcctttc

SEQ ID NO: 422074 - DNA, 74 bp, Homo sapiens
agaagttccacatcctgaacaatacgggggcccggctcatcccagagatggaccagatcttcactgaggtggag

SEQ ID NO: 422075 - DNA, 76 bp, Homo sapiens
cagaaattgtgaactttgtccagaagattgtggacaacggttacggcactgctcagcacgcaggcatgtgaggaag

SEQ ID NO: 422076 - DNA, 97 bp, Homo sapiens
gctccgtcgtggaagcaggactgcgccgcgtcttcctcaagggcaaagtgcacctggagctgcggctgagcgaggtcatcacagacactggggtcgt

SEQ ID NO: 422077 - DNA, 98 bp, Homo sapiens
gagcccacgagaggcagcgccatggcggagcagacctactcgtgcttatgttcctgaggaagaattgaaggcagcagaaatagatgaagagcacgtgg

SEQ ID NO: 422078 - DNA, 100 bp, Homo sapiens
ctgcacacccgcccctctcctgtgccagaatcctgccgcctttgacttcctgctgcagcgggttgagaagaccttgcgccacgcccttgaggaagaggag

SEQ ID NO: 422079 - DNA, 100 bp, Homo sapiens
gctttcagcatcgcacaggatgccctgcacatccccaggctcctggagccagaagacaaagaaacagccttggtataatagcacgttagcatcaagacga

SEQ ID NO: 422080 - DNA, 82 bp, Homo sapiens
aaataccaggctaccatggtctacaagactctcttcgctctttgcatcttaactgcaggaatctgagaaaaaggggttgatt

SEQ ID NO: 422081 - DNA, 73 bp, Homo sapiens
gccgcgcacgctacagtacaagaaaaatggctacaaacttcctagcacatgagaagatctggttcgacaagtt

SEQ ID NO: 422082 - DNA, 98 bp, Homo sapiens
cctgggaggccgaatgtgcaggatcaccgaggggaaagtgagcttgacaggaatgggatgtttctggggagctgaaaggaaattctgggtcttgaaag

SEQ ID NO: 422083 - DNA, 89 bp, Homo sapiens
accctacccctatccccagtggagccggagtgcgggcgcgccccaccaccgccctcaccatgatttgaggcttaagcaacttcttccgg

SEQ ID NO: 422084 - DNA, 100 bp, Homo sapiens
ccagtgtggagagcgccgtggacacgctattgcagtacaaggcagacatcaatgcagtgaatgaacacgggaatgtgcccctgcactatgcctgtttttg

SEQ ID NO: 422085 - DNA, 100 bp, Homo sapiens
gaagatgaccttgtgcccacagcaccttctgacagtcattttgtttactcattcagccctgttgcaggtcccaataaactcttcataaggttgacagaag

SEQ ID NO: 422086 - DNA, 96 bp, Homo sapiens
gctggttggccctgtgatccctcaagactggtccacggagtgtatgaccacaaacagccatcaagcctttgaagtaaattttatggatgatgtagg

SEQ ID NO: 422087 - DNA, 90 bp, Homo sapiens
gtggtgggcgcatatcctgggtagcctctaggaagcgctagacacatggtaagcttgatgattaccaggaacgaatgaacaaaggggaaa

SEQ ID NO: 422088 - DNA, 100 bp, Homo sapiens
gcttccgagtcctggtggtgtcggccaagttcgaggggaaaccgctgcttcagagacacaggtcccgctccccgaggcgcaggtcccccgtgcgccggag

SEQ ID NO: 422089 - DNA, 100 bp, Homo sapiens
ggtgaccaaccccaaggaggacgagggccggttgccgggcgcgggcgagaaaggatactgctattgttcatccagttcccattcgtatgactccaagcaa

SEQ ID NO: 422090 - DNA, 82 bp, Homo sapiens
gtactacagccagtcttctatgtttccacatcggtcagaaaaagataaaactttagaaactgttcctttggagaggaaaaag

SEQ ID NO: 422091 - DNA, 100 bp, Homo sapiens
agaacagctgctgcagcggattcctgagttcaacatggcagccttcaccacaacattacagaggtagattgggaagtggagctggccgtggtcattggaa

SEQ ID NO: 422092 - DNA, 100 bp, Homo sapiens
gattactgagagtcttcagttactagaccctgagacagggaagacctgtctgctgaaagccatgctcaacctgcacgacggacagaacaccaccatcccc

SEQ ID NO: 422093 - DNA, 75 bp, Homo sapiens
gttagtcacccacctacatgttgagtttaattagacacttcagaattttgatcacctaatgttgatttcagatgt

SEQ ID NO: 422094 - DNA, 110 bp, Homo sapiens
ggccctggagcggctctgctcggtcctcaaaggtgtgttccagagaacaagccttcagacatttgctatattgacgctgagctgtcaggggactcaggcttatgaggagg

SEQ ID NO: 422095 - DNA, 82 bp, Homo sapiens
agaaaaagtgggactgaagtacactgaagcagggatcaagcatgaattgcaagcaaactgctacgaggaggtcaaggaccgc

SEQ ID NO: 422096 - DNA, 88 bp, Homo sapiens
ttttttgtggcttccttcgttattggagccaggcctacaccccaggttttaaaatcaaagatgggaaaatcggagaaaattgcccttc

SEQ ID NO: 422097 - DNA, 98 bp, Homo sapiens
aatgaagagctgccagatcccacaggccctggtatgcgtccaccactaggcttaagagaatttgcaccaggcgttccaccaggaagacgggacctgcc

SEQ ID NO: 422098 - DNA, 100 bp, Homo sapiens
ctaatgcagtcatggaatatgagaaaatagcagaaacagattttgagaagcgagattttcggaagattggagctggagtgagccttccaggaattttggc

SEQ ID NO: 422099 - DNA, 100 bp, Homo sapiens
gggacctcagttccaagctgacctcagcaacctgcacttgaaccggcactgtgagaagagagcgagaacccgagcagcgccatgagcaacactaccgtcg

SEQ ID NO: 422100 - DNA, 106 bp, Homo sapiens
tgatacggcgtcttgccaccgggcctgtcagttgacctaccccttgcacacctaccctaaggttgaagctccattcataccaaagtttagaggctctggagatacc

SEQ ID NO: 422101 - DNA, 100 bp, Homo sapiens
ccgtgttgaccggtttggttgaagttggagaagtatccaatagggatattgtagaaactgtctttaacctgatttggattcaagatgtgaaataatcagc

SEQ ID NO: 422102 - DNA, 75 bp, Homo sapiens
gccaccatgagcaccaagcagatcacttgcaggaatcagagaagatcattgctgagttgaatgaaacttgggaag

SEQ ID NO: 422103 - DNA, 101 bp, Homo sapiens
ttttccgggaagttcaaattatgaagatgctttgccacccccatatcatcaggctctaccagctacctctgacttttgaggatgttgctatttatttctcc

SEQ ID NO: 422104 - DNA, 100 bp, Homo sapiens
gggaccggcggcgctggaggagcgaggcagctgtactaggactgggaacggctcatgatggagcagtccaagaagtcctccctcatggtggcccgcagta

SEQ ID NO: 422105 - DNA, 100 bp, Homo sapiens
ggacctggtgcagagcgccgtctggagccgagatggagccctggtgggcacggcgtgcaagaggctgggaggcggcagaatgcagccagaggagggcaca

SEQ ID NO: 422106 - DNA, 51 bp, Homo sapiens
cagaccgatatgtcaaaatcaagcgtaactggcggaaacccagaggcattg

SEQ ID NO: 422107 - DNA, 82 bp, Homo sapiens
tttttgcctttgttgattaactggacaaattcaggtatgaaattgaaggctgtgaagtgatttgggccattaaagataaagc

SEQ ID NO: 422108 - DNA, 83 bp, Homo sapiens
tccagagccaaggtccagggggcaaggtcgtgagaagaaaactacgcctcagccctgagcaatgtagtaacttttatgtggaa

SEQ ID NO: 422109 - DNA, 75 bp, Homo sapiens
ggattggcgctgaggtggcccgtggggcagcatgggtggtaaagtaccacctgctactcagaaagctaaatcaga

SEQ ID NO: 422110 - DNA, 100 bp, Homo sapiens
attagtttccagctgggagaagagtttgatgaaaccactgcagatgatagaaactgtaaggagtgcctctttagatgtagagcctatctacacatttagg

SEQ ID NO: 422111 - DNA, 100 bp, Homo sapiens
gcaaggtccaaatctcagcaacccctgtgcttctccccaggtccagccaatgcattcagaagccaaaatgcacagtgcctggcacattatcggcacttga

SEQ ID NO: 422112 - DNA, 100 bp, Homo sapiens
agttatgcactttaccctttttaatattggccaatcatcaagacaagccagcagctcgctcagtacaagaggaaacgttttgatggtaaattacaatcag

SEQ ID NO: 422113 - DNA, 49 bp, Homo sapiens
accgcctcgaaaacggagaagcagaggctaagaatattgtacacaaaga

SEQ ID NO: 422114 - DNA, 100 bp, Homo sapiens
gttctacttcacactgcagaactgggttctggactttgggcgtcccattgccatggctgaccggttccctgatgtgttacctgcttctgctactgatcca

SEQ ID NO: 422115 - DNA, 75 bp, Homo sapiens
attcggccatctttgctcctccctgcaactaactccattcttaattggagtctactcttcatcttgtgttgagac

SEQ ID NO: 422116 - DNA, 74 bp, Homo sapiens
tcccctgcaccatgagctggggcaccgagctctgggtaaatatgcagaggacatttttggagagctctttactc

SEQ ID NO: 422117 - DNA, 75 bp, Homo sapiens
aagtctgtgtcaaacatccatatcataagtggaattttggagatattcaaaggttccttcaatggtgccttagct

SEQ ID NO: 422118 - DNA, 80 bp, Homo sapiens
ccgacactactgattctagtcaagtgggacacagcaggccaggaaagatttcgaacaatcacctccagttattacagagg

SEQ ID NO: 422119 - DNA, 98 bp, Homo sapiens
ccaaatatgaataacgacccatacatgtcaaatggatctctttctccacccatcccgagaacaggaactgctcgcagaaagaagaaggtggttcatag

SEQ ID NO: 422120 - DNA, 82 bp, Homo sapiens
gataggctgcgctaccggaatgtcatccagcgagtgattagggctacttctacaagtccgaacagccagtccagcaaaatga

SEQ ID NO: 422121 - DNA, 100 bp, Homo sapiens
ctgaaggcacagggaacagtccagcttgaagttgtgggtgccctaatgcatgagttatcaaatgatggtgctcgtagacaatttgaattttatctggaag

SEQ ID NO: 422122 - DNA, 75 bp, Homo sapiens
aaccgtccagataggatagacaagctggacacagagtatagaaaaaaatgggatgccctggtaatcaagctggag

SEQ ID NO: 422123 - DNA, 75 bp, Homo sapiens
agccaaacctgtagtgagcgattttgacagcgatgaggagcaggatgaacgtattgtccagaacatcgtgggcac

SEQ ID NO: 422124 - DNA, 100 bp, Homo sapiens
cgaaattctgggccgaaatgatccgcctgcctcagcctccaaagtagctgagactacagttctgaaaatccagaatggcttgatgtttacatgcacattt

SEQ ID NO: 422125 - DNA, 75 bp, Homo sapiens
tgaggttcatgttcctacctaagtcctgtggcataagaagggactggctgtgttattctgcatattgcagttctt

SEQ ID NO: 422126 - DNA, 50 bp, Homo sapiens
agacaacaggatcgtctcgtccaaggtgattgaaatctctgaatatcgaa

SEQ ID NO: 422127 - DNA, 100 bp, Homo sapiens
gcctggggctgcctgccgggcggccgggcgcggcgagcccaggcttcaagcactttcctgaagcggggattcattatccagacagtaccacaggagatgg

SEQ ID NO: 422128 - DNA, 74 bp, Homo sapiens
cccatcactgctgatgactacttggagctttcgctaaagctaagaaaaggcacttgctgctggaggagtagggt

SEQ ID NO: 422129 - DNA, 75 bp, Homo sapiens
gagacgagaagcctgaaaagtcgcagcgagctggagccgccggagtcactcaagactgcttgcaactgattgcag

SEQ ID NO: 422130 - DNA, 82 bp, Homo sapiens
taaagcatttgaagcacttctttccaacattgtcaaaccagtgcaggacagaaggagcaagctgtggaatggtataagaaag

SEQ ID NO: 422131 - DNA, 100 bp, Homo sapiens
cctggagctgctgcgccgcctcaagaagcagaacaccgcgccaggcgcgctgccgcccgacacactggccgagccgaatttgccacatacctgaatttct

SEQ ID NO: 422132 - DNA, 95 bp, Homo sapiens
gtgatcgcggactatgagagcggacgggccatacccaataaccaggtgcttggcaaaatcgagcgggccattgggacccagacatggagctgcgg

SEQ ID NO: 422133 - DNA, 99 bp, Homo sapiens
ggcggtgcaggagtcggcggctcagttgtccatgaccctgaaggtccaggagtacccgaccctcaagtacttgattctaaagctcgaaaggcctgctat

SEQ ID NO: 422134 - DNA, 90 bp, Homo sapiens
gtgctttgcaacgctaattagactcatgccacttgagctgataccccaatgtccttctttgactttgtggttgatcctcattctttcccc

SEQ ID NO: 422135 - DNA, 136 bp, Homo sapiens
gatgaaagggggtaacctagacctgaatgggcttgaccatctcacaactgctcgcgtgacgaccgcattcgtggcagtttttcagaagaagtgaagtcaagatgaagaaccatttgcttttctggggagtcctggc

SEQ ID NO: 422136 - DNA, 100 bp, Homo sapiens
ctgcagtacctgcagaaggtctctggagacatcttcagcaggtggatgaagacctgatcattgaagttcaccagttatttttctcaagaatgtgaataac

SEQ ID NO: 422137 - DNA, 75 bp, Homo sapiens
gaatcgctgagcgatatcacagaacacaagattaatcaatgtcaactgacaggcatgtggagaccccaaggcaaa

SEQ ID NO: 422138 - DNA, 100 bp, Homo sapiens
gtgtgggcgcggctgcggtttaacccgcggtggcggcggcgacggcggccctggcaggttttgttaaaggccttcatagcgaacctgaagtcaagctccc

SEQ ID NO: 422139 - DNA, 98 bp, Homo sapiens
tggaatatgccaaggaaaaactggagagcttcatcaaaaatagtgatagctttgataaatggagtgaaggtacctgagcgcaggaaccatggtcttca

SEQ ID NO: 422140 - DNA, 87 bp, Homo sapiens
cggagtgaggctgaagggagtggatcagagcactgcctgaggatgaccatgaaagctgtggttctaattctaccaaccgtagtactg

SEQ ID NO: 422141 - DNA, 75 bp, Homo sapiens
tgacccaccaatggaagcagctggcttcactgctcaggcatttccagcagtgaggagacagccagaagcaagctt

SEQ ID NO: 422142 - DNA, 75 bp, Homo sapiens
cactctgggcgaaaattggatgtgaaaatgaagccagaccgaggttggtcaaagaaaaagtgatgtatgaaaaag

SEQ ID NO: 422143 - DNA, 98 bp, Homo sapiens
gtcaagtcacaggacaccgaagaaaccatcacgtacacgacgacatccctattcgtacctggttccccaaggaaaatcttttcagcttccagacagca

SEQ ID NO: 422144 - DNA, 100 bp, Homo sapiens
ggcaggttgggaggagcggccgaaggacttgaaagaggagattgatattcgactctccagggttcaggatatcaagtatgagccccagctccttgcagat

SEQ ID NO: 422145 - DNA, 75 bp, Homo sapiens
ctgaaggagtgacagtctagggaggaaggcagactgcaggctgaccggttccctgatgtgttacctgcttctgct

SEQ ID NO: 422146 - DNA, 71 bp, Homo sapiens
acgtcaagattgaagaggtgattggtgcaggaagggcctgtcccagtcggctttaccctatcgacgcagcg

SEQ ID NO: 422147 - DNA, 101 bp, Homo sapiens
agagccgaccttcatagaccctgaggccatcaagtacttccgggagagattagaagcccaggacccaggaaggagacacaggaaatttattcaaagtcccc

SEQ ID NO: 422148 - DNA, 90 bp, Homo sapiens
gaaaatctccatcgaagggaacatcgggagagctggtgacggcctccaaggccatcattgaaaaggagtaccagccccacgtcattgtga

SEQ ID NO: 422149 - DNA, 125 bp, Homo sapiens
aggcagtggacacacagcatggagaaatccttcgcaatgtcaccatcctacgagttcacacaaaagatgttggacaatttctacaattttgcttcatcatttgctgtctctcaggcccagatgac

SEQ ID NO: 422150 - DNA, 93 bp, Homo sapiens
gagaagctgtctctgatccgcaagcatgctcagaccttcattgctctgtgtgccaccggtttggtgcacctcgatttggaggaagtagggcag

SEQ ID NO: 422151 - DNA, 75 bp, Homo sapiens
gcttcatgtgcaaccttgactgccaggaagagccagattcctgcatcagcaaaagactgttgaagtagagagcat

SEQ ID NO: 422152 - DNA, 75 bp, Homo sapiens
gaggagaaaacagcaggcacccaagcgggcggcagatctcccttgagtttagaaatctggctgagaaataccaaa

SEQ ID NO: 422153 - DNA, 74 bp, Homo sapiens
tggctgccgcgccgccgctacgggaccgcctgagctttctacaccgggtatcttggagatggccgcttccatct

SEQ ID NO: 422154 - DNA, 75 bp, Homo sapiens
gcggcaaccaactgcagagcatcccggctgagatcgagaacttgcagaggaactaattctgaagcatcaaatgct

SEQ ID NO: 422155 - DNA, 82 bp, Homo sapiens
gggacagttagggcggcggatggaggtcagcggtggtgctcgctgcctgcaagctttcttcctggtggcagatgacatcatg

SEQ ID NO: 422156 - DNA, 100 bp, Homo sapiens
gcttcgcagtcctctcacctccataccccggatttggagtgccaggcttcccgtatccagcagccaccgccgcggccgcctaccgaggggcgcacctgcg

SEQ ID NO: 422157 - DNA, 75 bp, Homo sapiens
tgacaaatttggatcctgtgttcctcgaatcaaccctcaaaagcgtattgagtgccttatggaatttgtcagcac

SEQ ID NO: 422158 - DNA, 97 bp, Homo sapiens
ggaagggtgatgtggctgcggcatcgccggcctcgctatgtcttgaaagcgccacaagcagcagctgctgagccatggctgaaggggaaatcaccac

SEQ ID NO: 422159 - DNA, 76 bp, Homo sapiens
ctgttttgtctgtgtgcacagaggaatcatcacctccaaatactggtcccacggatttggacgtggcagagggaga

SEQ ID NO: 422160 - DNA, 133 bp, Homo sapiens
caacagcttccggcgtgacgcagtagaaaaggtggcgtggctggcgattcgtgttcgtgagggccttttctggtgtcatggagaaactccagctgggcccagagattctgcagcgggaaaatccaaggcttat

SEQ ID NO: 422161 - DNA, 100 bp, Homo sapiens
cgcgaggccctggaggctgccgagcgtgaggagactcagcagaaggtgcagctacacttctggaaaattcagtatggacagtctccgacttaggattttt

SEQ ID NO: 422162 - DNA, 75 bp, Homo sapiens
cgatattgaagtgtcaaaatccatagatggaaaagatggagcatattaatgaaaagtgccataaactgaaaaacc

SEQ ID NO: 422163 - DNA, 75 bp, Homo sapiens
aaattgcgctggaccgtcgccttgctcctcgccgcggcggggactgcagggaagaaggagaaagggccaacccct

SEQ ID NO: 422164 - DNA, 83 bp, Homo sapiens
aaactttggggcccgcgccgcgcgccggcggcaccatgaagtcagcggaggaaggtccctggtgctgaaccgcctgcgtccag

SEQ ID NO: 422165 - DNA, 101 bp, Homo sapiens
agacaaataaacatggagtccatcttccacgagaaaggctcattatcctggaacccattcagcaaaagatgcaaagttgactgggaagaagctttggtctt

SEQ ID NO: 422166 - DNA, 100 bp, Homo sapiens
ccgtgctgtcctacgaaagcctggtccacgccgtggccggagccgtgcctttagaagaagccacactctctgaattaaaaactgtcctcaagagcttcct

SEQ ID NO: 422167 - DNA, 71 bp, Homo sapiens
gcggcggcccacgcgcagcgacagggagaggcacttccgttccggcgcccctccggtcatcaacccgctgg

SEQ ID NO: 422168 - DNA, 100 bp, Homo sapiens
tggagccaaggaaacaggatgctgatagtctccagcgggcctggactgtgggctggtgtgtggaactggagcagcagccaagctggacagatgacctgcc

SEQ ID NO: 422169 - DNA, 101 bp, Homo sapiens
ctcagactgtgcttcttgtgcaagtaatcagtctttgacaagtgatgagaagctgtcggagcttcccaagaatatggttgagccccttatacccacgaatt

SEQ ID NO: 422170 - DNA, 75 bp, Homo sapiens
gggaattctcttcactagaatatggagactgttcaatcaccaggtgttgttacagatcttataacagtcggttta

SEQ ID NO: 422171 - DNA, 99 bp, Homo sapiens
gacccaccccaggcgtcaggagttccgcgcccggctctccggtgtcatgaggagcttcaaaagagtcaactttgggactctgctaagcagccagaagga

SEQ ID NO: 422172 - DNA, 100 bp, Homo sapiens
acctggagagaggggaagcaccatggggcccagatccctgggacaccgagattctgagaggcatcagtcaaggcttggagaaccccctgcctgagcgtcc

SEQ ID NO: 422173 - DNA, 90 bp, Homo sapiens
gcctgatcactccccagacgtggtcagcaacgcacagctatcttgacccacccttgcattgatatgaaccatggacaagtatattctgct

SEQ ID NO: 422174 - DNA, 75 bp, Homo sapiens
acacagtattgaaatgcatttgccttatacagctaaagccatggaaaggtgtttgctgactagcactttggagag

SEQ ID NO: 422175 - DNA, 101 bp, Homo sapiens
ctgagcttgccccgccaggaacccctgaggctgctgtatgtttccaggaaacttctaggacagaggctattcaacaagctcatgaagatgaccttctatgg

SEQ ID NO: 422176 - DNA, 100 bp, Homo sapiens
ctggaaagctcgggacaggatggaacgaatgcaggaatttgggaactgagctgtgcaagtgctgaagaaggagatttgtttggaggaaacaggaaagaga

SEQ ID NO: 422177 - DNA, 100 bp, Homo sapiens
gtatttatgatgatgatcctgaaatcataacattggaaagaagagaatttgaattcagtaattggatcataacgagacttctgcggattgcagcaactcc

SEQ ID NO: 422178 - DNA, 100 bp, Homo sapiens
ccggcagtgaccgtgtgtcagaacaatcttgaatcatgaagctactaaccagagccggctctttctcgctgagtcagtgctgattctctcaaatagagct

SEQ ID NO: 422179 - DNA, 50 bp, Homo sapiens
aagaatgaagccgcggaccctcctgacagcaccagttgcccttgaagcag

SEQ ID NO: 422180 - DNA, 50 bp, Homo sapiens
gtacttcgtgcagggcatgggatacattgagatgaaacggcaactacggc

SEQ ID NO: 422181 - DNA, 100 bp, Homo sapiens
ggcctgttggaggaagccttgttctatggtactcggaccatggagccatacagggaggaaataatgctggccatacagttgttgtggattctgtggaata

SEQ ID NO: 422182 - DNA, 83 bp, Homo sapiens
gttgaggttgatctcttcacctcaaaaggattcactccttctccagttgcacagccacacccttcagctggccttaatgttga

SEQ ID NO: 422183 - DNA, 100 bp, Homo sapiens
ctttaagacggtctacaaaggtctggacactgaaaccaccgtggaagtcgcctggtgtgaactgcaggtcatcatcagatttgaaatatttaaagtggat

SEQ ID NO: 422184 - DNA, 80 bp, Homo sapiens
ccgcggccggcgtccggagcatggcggacccccagagctggtgagaagccctaccactgcaactgggacggctgcggctg

SEQ ID NO: 422185 - DNA, 100 bp, Homo sapiens
agtctgtaaaagcaatatataattctggtcaagcatttaaatcaaacggtattgagatggattgggttatgaaacataatggtccaaatgacgctagtga

SEQ ID NO: 422186 - DNA, 50 bp, Homo sapiens
ccagaggccgcggacaccgacctggagcactattcctgatcagagaactc

SEQ ID NO: 422187 - DNA, 98 bp, Homo sapiens
gggcggccgggagccatggagcgcggccctggggcccgggggcgcgggccggggtgcccgagcgggaagaagttccgcagcaagccgcagctggcgcg

SEQ ID NO: 422188 - DNA, 75 bp, Homo sapiens
cagcggagcacgatgattgatagctgaagaaatcaggggagaaacccctgcttggtggaagcctgatggaatatg

SEQ ID NO: 422189 - DNA, 82 bp, Homo sapiens
cttcagggtgtccaagttccggcacaccgaggctcggccgccccgccgcgaggtaactaggatttctacctcaaccgcgaga

SEQ ID NO: 422190 - DNA, 52 bp, Homo sapiens
gtgttatgtgtatgtaagagagagaagatttgacaagatcaaagctgcagga

SEQ ID NO: 422191 - DNA, 75 bp, Homo sapiens
tcggagcaacgagcgcagcgccgaaagatcaactgaaatcggcaaacttctgagttcctacttgcaaaagaaaag

SEQ ID NO: 422192 - DNA, 78 bp, Homo sapiens
ttgctgcccttccggagtccgccccgtgaggagaatgaccagaatccgtagaagctagccctgtggtagttgagaaat

SEQ ID NO: 422193 - DNA, 101 bp, Homo sapiens
ctgacgtgtcatttctaagtactttctcctactccataaagacttcaagtggttggaggcaaagtaaagaagcccggtaaacgtggtcggaagccagccaa

SEQ ID NO: 422194 - DNA, 75 bp, Homo sapiens
acaagactggggctgctcccatcattgatgtggtgcgatcgatctcacattcttgaaggtggcattgaagagcac

SEQ ID NO: 422195 - DNA, 75 bp, Homo sapiens
caagatacgaaatgagacttttgaagtgcctttgatttctggcaatgtaacacacacccgtttgacaatgaggta

SEQ ID NO: 422196 - DNA, 74 bp, Homo sapiens
tggaaccaaaggaaatacatttgtacacgatcccaagatagaagcagatttgggatatcctggaggtaaagcaa

SEQ ID NO: 422197 - DNA, 83 bp, Homo sapiens
tgaatgggctgaaggaggaggacaaagagcccctcatcgagctcttcgtcaagaccctgtattcagtggatcagctggcacca

SEQ ID NO: 422198 - DNA, 101 bp, Homo sapiens
agctcctgtagtcttacatcaggaatttcttggaagagatttgtggattaaacagatcggagaggaagctgcagtaaaggaagatgaagaagaagtttcag

SEQ ID NO: 422199 - DNA, 50 bp, Homo sapiens
ggaggagaagaaagcattcatggtacgaggtacttaagatagccgctgac

SEQ ID NO: 422200 - DNA, 90 bp, Homo sapiens
atctttacgagaattcttgacagacttctggatggttacgataatcggcttagaccaggactgggaggtttgaacttgttctggaagctg

SEQ ID NO: 422201 - DNA, 75 bp, Homo sapiens
caggacctccagctatcctgggagcagcgttacagtgtttctgccacctctgtacaaaagacaattttacttgtg

SEQ ID NO: 422202 - DNA, 50 bp, Homo sapiens
ccatatccatcaaacttggatcaagtgtatgtcgagagtaccaacgtggc

SEQ ID NO: 422203 - DNA, 75 bp, Homo sapiens
gtggggacggccgcctagagtggttcagccacaaggagaaaacccgctacgagacctacgtgcagctgctggtgg

SEQ ID NO: 422204 - DNA, 100 bp, Homo sapiens
gatgatggatgtgtggggaggagagaacctagaatcagaaactatccctcttgtgatgaaagctgtctctgggtccattgtccttgtcattgtgctggct

SEQ ID NO: 422205 - DNA, 142 bp, Homo sapiens
actgtattcaccaagtagaactagaaaggttaaaaatcaaacagctcgaagaggataaacaccgccttcagcaacagctggagaatgctggaggagaccttaaggatggccaccaccactatgaaggagctgttgtcattct

SEQ ID NO: 422206 - DNA, 97 bp, Homo sapiens
cccatcacgtgccacatttgcttggggaaggaaaggccgagggggacggcaagatgcacatcaccctctgtgacttcatcgtgccctgggacaccct

SEQ ID NO: 422207 - DNA, 50 bp, Homo sapiens
ttcaagctgttcctgcctgaagctgcacagttggggatcttcaaaccaag

SEQ ID NO: 422208 - DNA, 83 bp, Homo sapiens
ttgtgctctgcaaggaccacgtgcgctctctgcagaaggaggggttttgcaccccagccctatccctttacgtcatccctgag

SEQ ID NO: 422209 - DNA, 100 bp, Homo sapiens
ttcggtacatcctcgacggcatctcagccctgagaaaggaggtctggctctgggagaggagtggacagcagctggttgagatacatccccatctggagac

SEQ ID NO: 422210 - DNA, 100 bp, Homo sapiens
catatccaggcatgctgtgctctaactggcgaggggtatggcctcacaagtcttggtctacccaccatatgtttatcaaactcagtcaagtgccttttgt

SEQ ID NO: 422211 - DNA, 100 bp, Homo sapiens
aagtgattaagcagagaatggagaagaaggttgattccagagattgggtcttgctctaggatgcagtgcagtggcacgatctcagatcactgcagcctcg

SEQ ID NO: 422212 - DNA, 73 bp, Homo sapiens
aaaggaagcacaaagattgcgctatatggtttagataaatatgggatatcttctggtgatgctggaagtacct

SEQ ID NO: 422213 - DNA, 50 bp, Homo sapiens
ccggacagagcccgtggtcgcgcagaggcgtggagctatttcctatgaca

SEQ ID NO: 422214 - DNA, 80 bp, Homo sapiens
atggtttgaaacatcagcaaaggtattgcaggcaatgggatatccaacaggctttgatgcagatattgaatgtatgagtt

SEQ ID NO: 422215 - DNA, 101 bp, Homo sapiens
gcgggccgggaggggacggccgccggagccgcgaggccaaagacaagaggagcagcagcggcaccgcccctcaccctggagggtcctgtacaatctcatca

SEQ ID NO: 422216 - DNA, 83 bp, Homo sapiens
ccagattcaacaggctgccaataaaggagcaagatggctaggggaaagagccagacttctcagaggtcagtctgttcaacaag

SEQ ID NO: 422217 - DNA, 74 bp, Homo sapiens
taaaggagtggacattgctagcaatgagctcccaaagccatccaggctgttgccaaaatggttcaacagtgctg

SEQ ID NO: 422218 - DNA, 97 bp, Homo sapiens
gcaggagtgttcgtgtcctctatggcgctgtcaataaagaacggcagtttgaatcggtgctgaacaggtgtggagggcgcagctttccagagccgac

SEQ ID NO: 422219 - DNA, 94 bp, Homo sapiens
ggaagtggtcctaactcctgcagagctcattgaaagattggagcaggtgcaagtgaaagtgtaggaaaacatatgcttgaagcgtgcaacaata

SEQ ID NO: 422220 - DNA, 82 bp, Homo sapiens
cctggctgtgctcatatacacctggtacccaggcactccagctgatttcaatcctggttctttagcatgttctcagcttcag

SEQ ID NO: 422221 - DNA, 83 bp, Homo sapiens
ccgcgccgacggctgctcaaacatcagggtttggtgcacctcgatttggaggaagtagggcagggcccttatctggaaagaag

SEQ ID NO: 422222 - DNA, 98 bp, Homo sapiens
tttggtgttcacttggcaatatttactaagaggtaaatgacgcaaggaaagtgaaaaggtttctgaatatccagcagtgattgtggagccagttccaa

SEQ ID NO: 422223 - DNA, 100 bp, Homo sapiens
ggctattcctgaccaagaagatctaaagagaacgtctctgaaatcaagtccggatgaaggctctgctgaccgagatgatggaaaggtgtaagaaactagg

SEQ ID NO: 422224 - DNA, 82 bp, Homo sapiens
ccgctcgctgggagagaggtacctctccttttccctctccctttccctaagacatttatgcagtgtgtgattctttctaaaa

SEQ ID NO: 422225 - DNA, 83 bp, Homo sapiens
caaagacaaaaggagattctgatgaagaagttattcaagatggaactgtggctgcaccatctgtcttcatcttcccgccatct

SEQ ID NO: 422226 - DNA, 75 bp, Homo sapiens
ggcaaagggtaaaagcaccaccttaacgcaggcgacctgtccttcgacaacagtgacctggtgatgctgaaatcc

SEQ ID NO: 422227 - DNA, 75 bp, Homo sapiens
catgaggaaagaattctccgaggtgacaaagttgttgtcacgtactccaaaggttatccgtgtggtggaaataag

SEQ ID NO: 422228 - DNA, 99 bp, Homo sapiens
ggaagtggaggaggcggctataataatagcaaacatcgatggcctactggggataacattcatgcagaacatcagatgccttggttcaagggatggaaa

SEQ ID NO: 422229 - DNA, 90 bp, Homo sapiens
caactctacctgtcatcattaaaaggtcatactccctgtcacaaactccagctgaactaacttggaggaggatcttccctgacagctctg

SEQ ID NO: 422230 - DNA, 100 bp, Homo sapiens
aggagctgatagcggagctgcagggtgtgggccgaagatatgctcatgtggtgttgaggaaagcagacattgacctcaccaagagggcgggagaactcac

SEQ ID NO: 422231 - DNA, 82 bp, Homo sapiens
caaatcaaactgcaaatctgggatacgcaatggctgccatccggaagaaactggtgattgttggtgatggagcctgtggaaa

SEQ ID NO: 422232 - DNA, 73 bp, Homo sapiens
ttcagtcggcccaagaaatcaaaataaaggaaacacatttcatatactgcagtgacaaatggcctacagctgt

SEQ ID NO: 422233 - DNA, 51 bp, Homo sapiens
catcaacaagtgcattgggaggaacgtggcctccatgaaccagcgccgtgt

SEQ ID NO: 422234 - DNA, 100 bp, Homo sapiens
gttccatgctgtctgttcagacttcagcttggtttcaacctggtgtgtgctgactcctggaagctggacctctttcagtcctgtttgaatgcgggcttct

SEQ ID NO: 422235 - DNA, 75 bp, Homo sapiens
cctcgagtccctgcgcccgtgcgtccgtctgcgacccgaggcctccgctgcgcgaaccgggctgtgggtcggccc

SEQ ID NO: 422236 - DNA, 96 bp, Homo sapiens
cgacattgccgtcgacggcgagcccttgggccgcgtctcctttgaggaatttgctgacacaatatcttccgcctggtgctgggcatatcctaagaa

SEQ ID NO: 422237 - DNA, 76 bp, Homo sapiens
gaaaggctttctttctgagatttcacttccctgtcaactcttcagctcgggagatgcacttatttacatggaacca

SEQ ID NO: 422238 - DNA, 98 bp, Homo sapiens
ctactggacatgtcagtgtcctttcacacccatgtgaaagaggatgaagctccacccgcccttcaggatgcaaagccctcctctataaagtgcatgcg

SEQ ID NO: 422239 - DNA, 100 bp, Homo sapiens
ggagatggctggccacgtgccaaatcgcctaacggctctagcagtgttaattggccaccagtatgccaagtacatggaaaaccatagcattgaaggagtg

SEQ ID NO: 422240 - DNA, 96 bp, Homo sapiens
gtcctgagctccctgctgcccgtgctgggcgtggccaagcaggacacggtgcgcgtggccttctgctccggtgtcttcctgcccccgtccccagca

SEQ ID NO: 422241 - DNA, 82 bp, Homo sapiens
ttcggtggactccttcggcagtccacccaccgccgccgcctcccagaggctgtgatcaatagccaggaatggactttgagcc

SEQ ID NO: 422242 - DNA, 75 bp, Homo sapiens
tatactcctcccagtgacgggtctggagtgcgtgggggaccggctgttggcgggaccgtggcaaggaggtgtaca

SEQ ID NO: 422243 - DNA, 74 bp, Homo sapiens
taatgaacgcgtagagcttctgcaaaggcagtgggaagaactatgccaccagatgaggtggaggaccatcctgc

SEQ ID NO: 422244 - DNA, 74 bp, Homo sapiens
caagagatggcagctgggttctttactgctggatcgcagccttttggtccagtgggatttatgaaaagtgccat

SEQ ID NO: 422245 - DNA, 74 bp, Homo sapiens
gcgtacatccacaggttcactaacgggggcaaggtggcctgcatgcagtttataaatgcccttgtcacttctcc

SEQ ID NO: 422246 - DNA, 74 bp, Homo sapiens
cctcccaagtagtcgggactacaggttggtttgacttccacaaatgcagaagtaagaggatttatagatcagaa

SEQ ID NO: 422247 - DNA, 88 bp, Homo sapiens
caaagggggagatatcatgctctggaattttggcatcaaggacaaacccaccttcatcaaagggggctgcaagtggaattcatcaacc

SEQ ID NO: 422248 - DNA, 75 bp, Homo sapiens
ttcatctcaaaaacaaaattctgaactcaggacttggcaagtggataagattgtggaccagctgcagcagttaat

SEQ ID NO: 422249 - DNA, 83 bp, Homo sapiens
ggttgggctcgcggcgagcggacggggtcgagtcagtgcgttcgcgcgagcgagggcggcactgctcacaggacggctaccca

SEQ ID NO: 422250 - DNA, 100 bp, Homo sapiens
gacatgcactgaacttctgaagataatcgagaaataccagctaagactcaatggcctcggaactgggaatgacctcagcgttttacaagtacatcctcac

SEQ ID NO: 422251 - DNA, 82 bp, Homo sapiens
catgaggcgccagcctgcgaaggtggcggcgctgctgctcgggctgctcttggaggtgaaaggtgtagcagtcactcggcct

SEQ ID NO: 422252 - DNA, 78 bp, Homo sapiens
cacggccgggggcgtctttcagagcattacgaaactggcgatggaatatgagaggagccctctggaaagaaaaggaca

SEQ ID NO: 422253 - DNA, 100 bp, Homo sapiens
ccgaagatgtggacttgccctgcaccgccccctgggatccgcaggttccctacacggtctcctgggtcaaggactcgctcagcagcagcctgaaaacttg

SEQ ID NO: 422254 - DNA, 75 bp, Homo sapiens
gaagagctatggtgaaacaccactgaagcattgccaaggaactgtggctgcaccatctgtcttcatcttcccgcc

SEQ ID NO: 422255 - DNA, 83 bp, Homo sapiens
ctttccgcttcttgaatttctctctgtaaaggaggaaggttgtgcaggaccagcgttccctgtgcaggcgccactgcgtttcc

SEQ ID NO: 422256 - DNA, 75 bp, Homo sapiens
gactttccttacctgtttttccagctcacccactgccagcagagagttgatctctctaatgtattagatcttcat

SEQ ID NO: 422257 - DNA, 50 bp, Homo sapiens
attagagtgaatgtagttgcaccagatgcttttactgactctgctatcag

SEQ ID NO: 422258 - DNA, 74 bp, Homo sapiens
tcaaagtcagttttcaattcatgcatcttcaaatgtcaacaagcaagaacattctagtatgccagtagaaaaaa

SEQ ID NO: 422259 - DNA, 90 bp, Homo sapiens
cgagaaactcccaccgacccacagagggtttacagagtccacggggaatgggatgcaagccagaagctgtatgtagtcacattattattg

SEQ ID NO: 422260 - DNA, 97 bp, Homo sapiens
gcgcgtcgactgcccagagtccgcggccggggcgcgggagggccaattcctgtccccccagcagcatggcatcgtgtgctgaaccctctgagccctc

SEQ ID NO: 422261 - DNA, 83 bp, Homo sapiens
ctgaaaaactgagtgaatatgatcagatttctccaccaaattctcagcctgataaggacaaatttacatgtattggagaccag

SEQ ID NO: 422262 - DNA, 100 bp, Homo sapiens
aggctgctactttcaaccagtttggatgccaaggatgagttagaggaggacttgaaagaggagattgatattcgactctccagggttcaggatatcaagt

SEQ ID NO: 422263 - DNA, 74 bp, Homo sapiens
gcaaaaagctccgcaacaagatagcagggacaaagcaggacctcataaggaaatctacccctatgtcatccagg

SEQ ID NO: 422264 - DNA, 75 bp, Homo sapiens
ggggctgcctgccgggcggccgggcgcggcgagcccagatctgactgcagccatgagcagcaatgagtgcttcaa

SEQ ID NO: 422265 - DNA, 96 bp, Homo sapiens
gccgcggccagcggagccctgggctggggcaggagccggttgacaggactgaggtgattcgcacctgcataaacccagtgtactcaaaactgttta

SEQ ID NO: 422266 - DNA, 95 bp, Homo sapiens
ggacctggacccggacccaaagtgccatgtctttaatggacggcccaggtggcaggatgtcctggtctggccttctccatggcctcaacacgtcc

SEQ ID NO: 422267 - DNA, 99 bp, Homo sapiens
tttcctggagtcctgtggatgagattcttcaaatccctccactctcttcaactgcaactctgtaattataaagtggactgtgcctgtcacaagggaaac

SEQ ID NO: 422268 - DNA, 90 bp, Homo sapiens
ccacgctgcgggcccgggccatggccgccgccgatgccgaggtgctgttggcagcagcggtctgcacaaaagcaggaaaggctattgttt

SEQ ID NO: 422269 - DNA, 50 bp, Homo sapiens
tccagaattcatacaaagagtgaagctggaagacttccgattagagaaag

SEQ ID NO: 422270 - DNA, 80 bp, Homo sapiens
cgtcaggaacgtggccgacgacaccagaactcccccactggaaaggattctgaaagaaatgaagtcagccctcagaaatg

SEQ ID NO: 422271 - DNA, 74 bp, Homo sapiens
cctgaatgccctcggtgccgctggcaacttctctgtggactctcaggtctgggaggggctgaacgtggtgaaga

SEQ ID NO: 422272 - DNA, 82 bp, Homo sapiens
caaagggcacgtatagcattggtaaagaacgatcgtccagtggagttactccacaggatccgctgaacataggatgttgcca

SEQ ID NO: 422273 - DNA, 75 bp, Homo sapiens
aggtgtccatccccgtgctgaggaatgaagccaagagtgatgaaagaagctgtatctactccatcacgaatggcc

SEQ ID NO: 422274 - DNA, 51 bp, Homo sapiens
gttaaacctactcaaactattggtttctaagcatgaattgaggaacagaag

SEQ ID NO: 422275 - DNA, 80 bp, Homo sapiens
aaagacgtggcagcaagcgggagtcggggatagtgtcatcggttcggtgtccctggccagtgtccttccacctgtccaca

SEQ ID NO: 422276 - DNA, 100 bp, Homo sapiens
tctcgattcgctgtcggaggagaatgagaccctggtggagtttgctattgctggacacctgttctgctgttgtgtcctgccattctcctgaagaacagag

SEQ ID NO: 422277 - DNA, 75 bp, Homo sapiens
atgggttttccggaagccgccaggtccagctgggagctccccgacctccaggagggcaagatccaagccatcagc

SEQ ID NO: 422278 - DNA, 51 bp, Homo sapiens
ggacttgcatcaggagtagcaagccctcgggaccaaggatcacgtcatgac

SEQ ID NO: 422279 - DNA, 97 bp, Homo sapiens
ggaggctcaacggcagaagcttcaccacaaaagcgaaatgggcacaccacagatgggttgttgttgtcccagagtcgccaacgcattgtctgcctca

SEQ ID NO: 422280 - DNA, 90 bp, Homo sapiens
gcataatgacattgtggacagtgacagcgatgctgaggatcgaggaacgttgtctgcctttgaagtaaattttatggatgatgtaggtca

SEQ ID NO: 422281 - DNA, 51 bp, Homo sapiens
caggaggacagcaagcccatcacgctgggctaaccttgccgcgggccgagc

SEQ ID NO: 422282 - DNA, 101 bp, Homo sapiens
cgctggtgctgcgctactgcgagaacaagtttaacgacaagcacatcaccactctgcaggccaaacttccagatctgcaaccatttccttctccagatggt

SEQ ID NO: 422283 - DNA, 97 bp, Homo sapiens
cacctgtgcgggatggaacaaaaggtacaccaggggttggaaaaaccacactaggcaaagaacttgcgtcaaaatcaggactgaaatacattaatgt

SEQ ID NO: 422284 - DNA, 99 bp, Homo sapiens
atggagtcgggcaagatggcgcctcccaagaacgctccgagagatgccttggaccaagaatcgccttcagccctgtctggtgcatccttggcagaaagt

SEQ ID NO: 422285 - DNA, 100 bp, Homo sapiens
ttgtcagacttaactaagcagatttcccgagactacggtgtgctgttagaaggttctggtcttgcactaaggaattatgtttcgcagaaaagtgtcccca

SEQ ID NO: 422286 - DNA, 75 bp, Homo sapiens
gctgaagactgattacaagaatcctatagaccagtgtaataccctgaatccccctgacattgagatggcttgggc

SEQ ID NO: 422287 - DNA, 97 bp, Homo sapiens
gagatactgacactgcctcctgtcagccagtgcagtgagcttagacattccattggttcagacagtaactttaattccaggagatggtattggccca

SEQ ID NO: 422288 - DNA, 104 bp, Homo sapiens
cctggcccctcaccatcaccatcctcatctctcttgggtgatgggcgctactcccttttgggccagccattacagtacaatctgtccatctgccctcccttgct

SEQ ID NO: 422289 - DNA, 71 bp, Homo sapiens
tgcttggaaaatatggaatgtcatctacgaagaaaactgttttaagcgcagtaacagtatctccaagtccc

SEQ ID NO: 422290 - DNA, 98 bp, Homo sapiens
gtgggcgtcgtggccttcggcctggtctacgtgctgaaccacgctgaggggctgggagccgcgcacaccaccatcactggcctggacaatgctggaaa

SEQ ID NO: 422291 - DNA, 95 bp, Homo sapiens
ctaattcatatactttcaactgaaagtcatactcccagcctgcagtttctctgcatctgcagcctggcatacacagaagcaggacagacagttat

SEQ ID NO: 422292 - DNA, 100 bp, Homo sapiens
gtctatctcagatttggaattttcatcagattttaccctgaaaatcacaaggacatccatgtgcacgtgccaacaatatgcccaagcaggtggaagtgcg

SEQ ID NO: 422293 - DNA, 100 bp, Homo sapiens
tcaagcacgagctgcggactggctcgggttatgtatgattttgctgctgaacctggaaataatgaactgacggttaatgaaggagaaatcatcacaatca

SEQ ID NO: 422294 - DNA, 101 bp, Homo sapiens
ctccttgctcagcctgtcgtgcctggcgctttccgtgctgctgctggcgcagctgtcagacgccgccaagcctaactctggtgaactggatcctttgtatg

SEQ ID NO: 422295 - DNA, 82 bp, Homo sapiens
gcctttgaaaatcaacgacaacttgagcacagggcgtgatggtgggcatgggtcagaaggattcctatgtgggcgacgaggc

SEQ ID NO: 422296 - DNA, 75 bp, Homo sapiens
cagggttacgtcctcgtgggattcgttggcggtggctgagttttcggctttgtgagaaaccttaccatcaaacac

SEQ ID NO: 422297 - DNA, 90 bp, Homo sapiens
tgttaccggctccatcaacacgctctcggcaaactatacacagaatgggattttacatatgctggacagaaataagagaatcaagccccg

SEQ ID NO: 422298 - DNA, 75 bp, Homo sapiens
gagaaaacgaaaccttcgtgatgagattgactgtagccgagggttcgatacaagaggctgttttcctagcgtggc

SEQ ID NO: 422299 - DNA, 100 bp, Homo sapiens
aatgagcgacagttcaaggaggagaagcttgcagagcagctgaaacaagctgaggagctcaggtatgtcctggatgatgaatacacaagctcagtaggct

SEQ ID NO: 422300 - DNA, 82 bp, Homo sapiens
cgggaggtgaggacgaggaggaagcgagcagcccagacagcggccacctcaagacaatgcagatcttcgtgaagactctgac

SEQ ID NO: 422301 - DNA, 100 bp, Homo sapiens
ttctggccaagctgtggatgattttaagaataactgaagtgaagtgatggactccgatttggagagtagtaagacgtgaaaggaatacacttgtgtttaa

SEQ ID NO: 422302 - DNA, 78 bp, Homo sapiens
cagcacgtaccttagaactctatggagttgaattccactatgcaaggatattgaagcacagattcgagaaattcaagg

SEQ ID NO: 422303 - DNA, 90 bp, Homo sapiens
cggagcctgtggcggatggtgggactctccggccctgtgcagtgttactataacaacagtaccaaggtggctgtgaaaaccctgaagcca

SEQ ID NO: 422304 - DNA, 100 bp, Homo sapiens
tagaacatttcttttatcacaggaccagttactctccacaagaaaattcacacaaccacagtgctcttcatagttcaaattcacattcttctaatccaag

SEQ ID NO: 422305 - DNA, 98 bp, Homo sapiens
gtagatcatggcaaccatagaagaaattgcacatcaaattattgaacaacagatgggagagtgaaaagttggaagactgttcacgcaagttaataaaa

SEQ ID NO: 422306 - DNA, 89 bp, Homo sapiens
agccaccactgggatgactacaaagctttttatgagatatgaagagcattttaagaggtgcagcctctggaagtggatcaaactagaac

SEQ ID NO: 422307 - DNA, 90 bp, Homo sapiens
gtggctttccagttgtttgacaagagtggaaatggagaggtgacatttgagcaccatgtggcggagcacactgctgagagctacatgctg

SEQ ID NO: 422308 - DNA, 100 bp, Homo sapiens
tgctgcgccacatgggactttttgaccatgctgcaagaattgaggctgcgtgttttgctacaattaaggacggaaagctccagaacctgggtatcaaccc

SEQ ID NO: 422309 - DNA, 76 bp, Homo sapiens
ctcagagtcaaagaagaaaccgtgctcagaaactagccagattgaagctagttgctacattgcctgatgatgttca

SEQ ID NO: 422310 - DNA, 100 bp, Homo sapiens
tctggattgtagccataagtggacttaatgcctaccgcaggaatgggatggcttttctagcctgctgatgtgacaactgtgatgtgcctgcaacaacagg

SEQ ID NO: 422311 - DNA, 100 bp, Homo sapiens
tgatcgtgtgtcggatgaggagaagctgctggagccagttctgcttctcggcaaggagcgatttgctggtgtagacatccgtgtccgtgtaaagggtggt

SEQ ID NO: 422312 - DNA, 100 bp, Homo sapiens
accgtggagatgcgggatggagaggatgaatctcctccgaaacaacagctgcctctccaaaatgaagaattccatggcttccatgtctcagcagctcaag

SEQ ID NO: 422313 - DNA, 101 bp, Homo sapiens
tcggccgaccagggacctgcccgcctgcggctgctccggatgaggaaactgaggcttggtgaagttacgaaacttgtccaaaatcacacaacttgtaaagg

SEQ ID NO: 422314 - DNA, 75 bp, Homo sapiens
gctgtcctatgtcagcaaaaactggagcagaaattggaggctcagcataggtacgacaacaattccacgatgcca

SEQ ID NO: 422315 - DNA, 100 bp, Homo sapiens
tcgtcttccacttgcacgaaagctttcctaggccaaaaagagggccgttgctccagggagaactgcaaatatcttcatccacccccacatttaaaaacgc

SEQ ID NO: 422316 - DNA, 82 bp, Homo sapiens
caggaaggacaccgattatggattggcaacctggaccccaaaattaccgaattaccagttgaccagtgcagagctctcctcc

SEQ ID NO: 422317 - DNA, 75 bp, Homo sapiens
gcttcaggtgaagaaggcagctctcactcaggcaaagatagtagagctgaagctggagcatgaacaggagaagac

SEQ ID NO: 422318 - DNA, 75 bp, Homo sapiens
cgcgcagccctcatcgcaactgggcccgcgcgcagaagatggctgtgccacccacgtatgccgatcttggcaaat

SEQ ID NO: 422319 - DNA, 83 bp, Homo sapiens
cggagaggcacggaggagccgctggggctgccgccacggccgcccggaggttaaccccaaagattggctttccttggagtgaa

SEQ ID NO: 422320 - DNA, 100 bp, Homo sapiens
ccgggagctattgggacctgcgggaactggtgctcctatgtggtgacccgcaccatctcatgccatgtgcagaatggcacctaccttcagcgagtgctgc

SEQ ID NO: 422321 - DNA, 75 bp, Homo sapiens
tgggaatgaggacagtcctggccagggtgagcaggcggaagaagaggaagataaggctttcaagcagaaacaaaa

SEQ ID NO: 422322 - DNA, 85 bp, Homo sapiens
cgggccgcgccgccgctgccgccgccgcgcgcgggtctctgagcggcccctgatgttcctgttggacactcctggcgtgctggct

SEQ ID NO: 422323 - DNA, 88 bp, Homo sapiens
gttctccaggaaccgaaaaggcgaggagtatagtacggcaaaaaactgtcgtgataaatgctgctcattctttctacaatggaacaac

SEQ ID NO: 422324 - DNA, 80 bp, Homo sapiens
cacacaggtgaatttaaaggagcagccctggtgtcacctatcagtaaaaggaaatgggtcctgatgaatatgaagagatg

SEQ ID NO: 422325 - DNA, 75 bp, Homo sapiens
gatttatgcaaacttgggccaaaggacagttagaagacagtaggttatcaatactctggctgaccatcatcatcg

SEQ ID NO: 422326 - DNA, 100 bp, Homo sapiens
cctgtatgcatggtgtggggttggtgtgattagcttcgcagtctggaaagctttaggagttcacagtagcccagaacgcttcctccagcttggcgccaag

SEQ ID NO: 422327 - DNA, 100 bp, Homo sapiens
ggagccatagtacctacagcagcactccaggttgattcttcaccacactgaaaccattaggaaaaatccttgtggttaacagcagaggcttcagagtgta

SEQ ID NO: 422328 - DNA, 100 bp, Homo sapiens
cacctactttgacatctatacggcaggacctgagggcactcgctttgctcctgtcagtacacactcccaaacagttaaacccagctctaattccaactct

SEQ ID NO: 422329 - DNA, 50 bp, Homo sapiens
caacagtagcccccgggcccccgtcagcgctgataaagcagtttgtgtcc

SEQ ID NO: 422330 - DNA, 75 bp, Homo sapiens
accatgtgatgcacctgctccaggtaagtcagtaatgttgtatgcagcagaaatgatacctaaactaaaaacaag

SEQ ID NO: 422331 - DNA, 83 bp, Homo sapiens
caaccattgacgccatgtcgggttattcgagtgaccgagaccgcggccgggaccgaggcgtccgtctccaagagagtatgaag

SEQ ID NO: 422332 - DNA, 90 bp, Homo sapiens
tcgtgatccagaagtccagagctgaggactgcctgtttgcagagacagggcagggcattgttcatgcactgaccgacctcagcagccccg

SEQ ID NO: 422333 - DNA, 100 bp, Homo sapiens
acagttgacaacaaagacaaactggaggaaacctctggactgaaaattcttcaaaccggagtcgggtcggttgtggcagcactgcctgaaggtatgagac

SEQ ID NO: 422334 - DNA, 101 bp, Homo sapiens
caaatatcgaagaacagaaagaagaaaagaaagatgcagaggaagaggaaagcgaactgcattaacaacagtgtcttcagtgttcgctttttcagaactac

SEQ ID NO: 422335 - DNA, 80 bp, Homo sapiens
agatcgagagcctaactttgcaaccattggtctgcaggacatcactttagatgatggccctcgggaccaaggatcacgtc

SEQ ID NO: 422336 - DNA, 100 bp, Homo sapiens
gatgccctgctggtgggtgttccagctggaagtaaccccttccgggagcctagatcctgtgctttactctgaagactcgccatcaagccctgtcgtccta

SEQ ID NO: 422337 - DNA, 100 bp, Homo sapiens
ggaaggacggacttcaggggcaggcagcttgaaaactccaggagggagcagcgtgggcatgctggacttgggcggaggatccactcagatcgccttcctg

SEQ ID NO: 422338 - DNA, 76 bp, Homo sapiens
cttgctccgagagggagtcctcgcggacgtcagccaaggctaatgtaatgcttgaatatgatattgatgaagctca

SEQ ID NO: 422339 - DNA, 75 bp, Homo sapiens
gctttattgacctcgactcccatgcgaggcttggaatagttaaatgactttggtcttgtccaaggttagatggag

SEQ ID NO: 422340 - DNA, 90 bp, Homo sapiens
aatggccgagggaatgccgcccatgcagcgaccgtggcagccatgtattacagctactacatgctaccggacggcacttactgcctggcg

SEQ ID NO: 422341 - DNA, 101 bp, Homo sapiens
ggagaatctgctgtcgcctgcagctgctcgcctgtctccgtcggaagggagcccaagctttgcagagatgcacccactgggcctatgtaataacaatgacg

SEQ ID NO: 422342 - DNA, 50 bp, Homo sapiens
cagtctccactggaaaaaaagatcttgaactgataaatttcaaacggaag

SEQ ID NO: 422343 - DNA, 100 bp, Homo sapiens
tgaccgcctgattaacgagcctagtaatgactgggatatttactactgggccacagctccgacagttagttaatatgtgcatcaacccagatccagagaa

SEQ ID NO: 422344 - DNA, 109 bp, Homo sapiens
gagagtaaccccagtttggtccacaaggcttgctgcccaatctttgccaacaggtttgcctgcaatgagatttcattctctacatttaaaggacatcctttctgagctg

SEQ ID NO: 422345 - DNA, 100 bp, Homo sapiens
gtaccttcttcaagagaaatggagcccttctccaaggaagttctccagcagctgattgtaatgaatttgcccaatgttttgatgattggcagagacccac

SEQ ID NO: 422346 - DNA, 85 bp, Homo sapiens
ccacttaatattgaagaggctaaagaccgtctccgcattctgatgcttcgcaaacacccaaggtggacccccaaaagtacaaggg

SEQ ID NO: 422347 - DNA, 89 bp, Homo sapiens
gatttccatatttcaagtcattcaaagacagatggtaaactttcctgagaatggctttctctctcctgataaactgtctttgctggaaa

SEQ ID NO: 422348 - DNA, 87 bp, Homo sapiens
gacgaactacgaacccctggacgggagagtctgccggcggagaatataaggtgcaaaacgaattctagagcttgaccagtttaaggg

SEQ ID NO: 422349 - DNA, 82 bp, Homo sapiens
ctttggatggcttacatcttcctgaatcgagcagagaaactgctaaagaacgtgccaatggaatggagcttgatgggcgtag

SEQ ID NO: 422350 - DNA, 99 bp, Homo sapiens
aagatgaaaaagtcaccttgtctttccctagtactctgcaaacaggcatccgtgtcattctggaccttactcccaactaccggggtgagaactcgtggt

SEQ ID NO: 422351 - DNA, 100 bp, Homo sapiens
acagaggaagatacccctttgaaaccttcagcacaaaccacagttgtaactagccaggaaacagagcaaatgcagcgttacaatcaaagacttattgagg

SEQ ID NO: 422352 - DNA, 75 bp, Homo sapiens
gcacatctcagccacagccagcatggccgtcccactgctggagttcctgtccatagagacggggtttcaccgtgt

SEQ ID NO: 422353 - DNA, 97 bp, Homo sapiens
atgtaacaagaggcataaaacagttctcactgaactacaggtgttgacttcaaaatcaaaactgtagagctaagaggaaagaaaattagattacaga

SEQ ID NO: 422354 - DNA, 100 bp, Homo sapiens
gtagcgtccctccctctcaaccacaataacaggcggagggtcggcgtaggctttatgaaggcaaagaacagatggagtttgaagaatccatgagacggct

SEQ ID NO: 422355 - DNA, 101 bp, Homo sapiens
ggagcggatcagaagcaagacccagcggctctccaaggccccaaggcccagaagaaatttaagcgtcttatgctgcatcggataaagtgggatgaacagac

SEQ ID NO: 422356 - DNA, 75 bp, Homo sapiens
tgagcaggcactccttggagcaaaagcccactgacgctccaccgaaaggtgttggggatgtcctttgcactgacc

SEQ ID NO: 422357 - DNA, 75 bp, Homo sapiens
gaaagaaaccgctgaggcttatttgggaaagaaggtctcggtccagctcgacttccagctcaggctccagcacca

SEQ ID NO: 422358 - DNA, 75 bp, Homo sapiens
agcttggttaacttgggagaaagtttcatctgtggatggagtattgaaatggctcagggaactgttggaggcgtg

SEQ ID NO: 422359 - DNA, 75 bp, Homo sapiens
atccgtttgaggcctggctctgaattacatctgacccccaaagctcagcaggctgctctttggcgtaaattgcaa

SEQ ID NO: 422360 - DNA, 110 bp, Homo sapiens
caatgccagtgtttcagtcccagacagcagtggccccgagcggttatgatggagggtggtcgcagcaaagggtttggttttgtatgtttctcctccccagaagaagccac

SEQ ID NO: 422361 - DNA, 100 bp, Homo sapiens
ggaaagaggcctggagtatgaagagacatgagatcatggtggccaaacccacaggtcacgcaatatttaaactcacgtatctaagcaatcacgactataa

SEQ ID NO: 422362 - DNA, 75 bp, Homo sapiens
ggactcattgatgaaatttatggcattcagaacactccgccgcatgcaagagatgattgcaaggatgcaggcgca

SEQ ID NO: 422363 - DNA, 100 bp, Homo sapiens
aaccagctcgggggccaactctgaggagtccactgcagcaggttgtctgcattcaaaagagcattctattaaagctaccttaatttggcgcttatttttc

SEQ ID NO: 422364 - DNA, 76 bp, Homo sapiens
tcagcctggaccgcatccctcgtgaccacccctacatccagtacagaggctgtgacattcaaggatgtggctgtgg

SEQ ID NO: 422365 - DNA, 98 bp, Homo sapiens
aggatggctactcgtatccctccacacatgatcatcagtatttgcctcctgtgtcccaaccggcctgagtcaaaatgaggacctaatttgcttcaaag

SEQ ID NO: 422366 - DNA, 90 bp, Homo sapiens
atctgtaaggtgcggccgccgccgacaggggcaagtgtccgagtggtgaatcagctacttacagagatggatggtctggaagcacgccag

SEQ ID NO: 422367 - DNA, 100 bp, Homo sapiens
ctacaaggctgattgtagagttattggaccaccagttgtattaaattgttcacaaaaaggagaggatgtgagctgcaatgaaattcaaactataccttcc

SEQ ID NO: 422368 - DNA, 75 bp, Homo sapiens
atccatacccttgcaacagcagctccttgtcttaaaagaagaagcatctgattaccttgaattggatacaattaa

SEQ ID NO: 422369 - DNA, 100 bp, Homo sapiens
acgaggaggaagaggtggccataccgttgaccgctcctccaactaaccagcctgtgatacttgggctgtgatcctctagagccagcttggactcacatca

SEQ ID NO: 422370 - DNA, 75 bp, Homo sapiens
tgtcgcgttacgggcggtacggaggaggagccttcacgtaaatgggtccagtcatgcctcccagtaagaagccag

SEQ ID NO: 422371 - DNA, 83 bp, Homo sapiens
attgacaatgatggctttgaaggagctcagtctgaatattcttggagaaagatgctgagtggcattgcagccttcctacttgg

SEQ ID NO: 422372 - DNA, 80 bp, Homo sapiens
tggcagatcactctcttagcagacaatgcagatcttcgtgaagactctgactggtaagaccatcaccctcgaggttgagc

SEQ ID NO: 422373 - DNA, 82 bp, Homo sapiens
gcggatggccccaggtgtaagcgcagaaagcaggcgaacccgcggcgcaataacggatggagagcaatacatcatcatcttt

SEQ ID NO: 422374 - DNA, 100 bp, Homo sapiens
ggggaattttgcaaaagtaaaattggcaagacatatccttacaggcagagagtttccaacatggctagatccatcagaaactgaagccgtggagaacgct

SEQ ID NO: 422375 - DNA, 74 bp, Homo sapiens
ttgcccactcccatggtcctgcagagccctgaccatgtactcgatcaggatggagaattcgacctggatgagac

SEQ ID NO: 422376 - DNA, 83 bp, Homo sapiens
cgagtacctgatccgcctcttccaggagtgggagacaatgcagatcttcgtgaagactctgactggtaagaccatcaccctcg

SEQ ID NO: 422377 - DNA, 75 bp, Homo sapiens
tcctgctctggccggattccagactcgtgggggaaaggctgcttctccaaacaggctggtgtacagggagcaaca

SEQ ID NO: 422378 - DNA, 117 bp, Homo sapiens
cgacagactgaaggacagcggcaccgccagacggccagaaagttccgccatgagctggggcacggagctgtggatgcctttgaagatgagaaacccccaaagaagagccttctctcc

SEQ ID NO: 422379 - DNA, 88 bp, Homo sapiens
ttgaactctgccgaattcctgtgccacctcctcctttagaaaactgatcttaatacaggctccataaaaatacagactcaccagttcc

SEQ ID NO: 422380 - DNA, 74 bp, Homo sapiens
taacctagggctactgttgattttgactatcttcttagtggccgggatcacatgcagtggtctaaggaagaaga

SEQ ID NO: 422381 - DNA, 100 bp, Homo sapiens
ctgcggggacctacgcctggatggcgccggaggttatccgtctctccctcttctccaaaagcagtgatgtctggaggagcagtacatcttcattcatgat

SEQ ID NO: 422382 - DNA, 98 bp, Homo sapiens
ccgctgcggacggacgctcgcctgccggctgagatgatagtatttctgctgcaagtacttctgatgttcaagatcgcctgtcagctcttgagtcacga

SEQ ID NO: 422383 - DNA, 90 bp, Homo sapiens
gggattctggcatcagggaggctttcagccggagaagcgagtttcagctggtgctgtcctggagccgagagctgccttgcgcttggcgcg

SEQ ID NO: 422384 - DNA, 75 bp, Homo sapiens
ggccgagccccggccggacatgtttcgggcacagcagcttcagggtttccaggcctgaggtgcccgccctggccc

SEQ ID NO: 422385 - DNA, 51 bp, Homo sapiens
tttccaaaaggtcaaggttcacaaggtgaaagaaaagatgttgtcccggtt

SEQ ID NO: 422386 - DNA, 100 bp, Homo sapiens
gtttcttcatctacaacccgcgcttctggccgcgggaaggagaggttttctgtctcaactggtctctgacaagcctctgactgaatgtatccgtgctggc

SEQ ID NO: 422387 - DNA, 100 bp, Homo sapiens
cctgccccagctctacccactgcggcccttgcaggaggacaagatgcaatacctgcagaactgaagcagattacctggctcagtgtcacagggctgctga

SEQ ID NO: 422388 - DNA, 100 bp, Homo sapiens
agcgccaggcatcagctgggaagctggcgtgggcaggccagctgtacctggcctggagctccagccaagacttggacaatcttattaaagtgaaaccttc

SEQ ID NO: 422389 - DNA, 100 bp, Homo sapiens
ggaagaattactgtggcctaccaggtcattgacgagactctggatgttaaggaaatgattttcaatgccgagagagttggaggcctcgaggaagagcggg

SEQ ID NO: 422390 - DNA, 75 bp, Homo sapiens
aacttggtgctgctagaatgcaggaacagcagaagatgcttataagacccaggtcaggattgacaatgagccagc

SEQ ID NO: 422391 - DNA, 100 bp, Homo sapiens
caagaacgtgagcaagcccaggcacagccgacgccgcgggaaatgggcaagttcatgaaacctgggaaggtggtgcttgtcctggctggacgctactccg

SEQ ID NO: 422392 - DNA, 51 bp, Homo sapiens
gacggtgctgcaggaacccgtccagatccacagaccagcatggctgccact

SEQ ID NO: 422393 - DNA, 100 bp, Homo sapiens
agccaccatcaagctgtctaagtccaaagatttttacccaggggtgagcccctccagactccgaataggagatcaagagtttgattcattgcctgcttta

SEQ ID NO: 422394 - DNA, 74 bp, Homo sapiens
gtttcttcatctacaacccgcgcttctggccgcgggaaggagagggtgtccgcaatgttgccagtgtctgtctg

SEQ ID NO: 422395 - DNA, 88 bp, Homo sapiens
accttgagctccaggagttcgtctcttacgtctgcggaagtgcagctgcctcagttcttagcgcagtgtgatccgccttattatgcag

SEQ ID NO: 422396 - DNA, 50 bp, Homo sapiens
cgatctggagcttttcccctccccgggccaccagcccctcgggttccaag

SEQ ID NO: 422397 - DNA, 75 bp, Homo sapiens
ctcccaaggtgctgggattacagagtatcgagatcgttatgattcagaccggtatcgggatgggtatcgggatgg

SEQ ID NO: 422398 - DNA, 100 bp, Homo sapiens
cctcgtagcctcagctcgccaacagtaactttatctgccccgctggagggtgtccgcaatgttgccagtgtctgtctgcagattggctacccaactgttg

SEQ ID NO: 422399 - DNA, 100 bp, Homo sapiens
ggctcaggaacagggacagcacctcatcccctggatgggggaccacaagatcctcatcgacaggagacagtgtttcacaaaatgattttccttctgaagc

SEQ ID NO: 422400 - DNA, 82 bp, Homo sapiens
gcctcgcctttgccgatccgccgcccgtccacacccgccgccaggtggtgcaaaggatcaaggctgtggaggggcagactcg

SEQ ID NO: 422401 - DNA, 100 bp, Homo sapiens
ataaatccccttggaggaaaatgcggagcgggcactggacacaatgaactttgagatgctcaaaggccagcctattcgcatcatgtggtcccagcgagac

SEQ ID NO: 422402 - DNA, 82 bp, Homo sapiens
tgaagagtgacttgtttctggatgattctaagaggtgcagcggaactgctgcctgacgctctgcaacttcagcatccccgag

SEQ ID NO: 422403 - DNA, 100 bp, Homo sapiens
ccagcatctggctgtcaggcggaagctgcattcatggaagaagagtgtgtggacactccaaaggtcgtagttcccccgctccctgggaaagcgtttttgc

SEQ ID NO: 422404 - DNA, 101 bp, Homo sapiens
gaaaggaagaggcggcaatcgtggcagagaatgtggagtattgctcctggaaaatccaaaaggtgacaataggttggaccttttaaagctgaagagtgttg

SEQ ID NO: 422405 - DNA, 82 bp, Homo sapiens
gcagctgcttagacgctggatttttttcgggtagtggaaaaccagatgtcatgtggcctgtgttttggaccgtggttcgtac

SEQ ID NO: 422406 - DNA, 100 bp, Homo sapiens
acttttgaagaataatggaagattaccaagaccagatggatgcccagatgaggcaatgaatcgctccctggctaatgtgattcttggaggctatggcacc

SEQ ID NO: 422407 - DNA, 96 bp, Homo sapiens
tggagcgttgcgagcgcgaatggcacgagctggagggagaatttcaagaactgcagacaatgcagatcttcgtgaagactctgactggtaagacca

SEQ ID NO: 422408 - DNA, 82 bp, Homo sapiens
ccgagaatagctccgtccagcagtgcttttttaggaccaaaggatatatttccttactcagaaaataaggaaaagtatggca

SEQ ID NO: 422409 - DNA, 75 bp, Homo sapiens
ggggcaaagcagcaaatgcattccacgtgtatcagcagccaacagagcagtcagcagagcagccacgatgatgat

SEQ ID NO: 422410 - DNA, 100 bp, Homo sapiens
cagccctgacgggacagagccagggcactcaccaggctgcaagaacagtgctgggatcaagatgactgtgctcctgtgggatgcagcatgtatgctcggt

SEQ ID NO: 422411 - DNA, 87 bp, Homo sapiens
gaagaggtcggcggcccctgcgggcgccagtcagggtcatctttctgaaggattggttactaaatggtacagatctccacgtctttt

SEQ ID NO: 422412 - DNA, 50 bp, Homo sapiens
ttacgccccctatcctatccgcaaacagagcttgaagaaatccgcaaatg

SEQ ID NO: 422413 - DNA, 80 bp, Homo sapiens
cagagctttcacgaaggcaccgacgtcatcatgctgaccaccaatcagatccgtaaggcaaaggccggcgtgtgcagccc

SEQ ID NO: 422414 - DNA, 90 bp, Homo sapiens
ttttcctgtatgaagcggttggcaccactgaagtgaccgaatgagcattagtgccagcagtagttcccaagggctgtctcagccatccac

SEQ ID NO: 422415 - DNA, 100 bp, Homo sapiens
cgggctctgcgccgccctctactggcgccggaaacagcgcaaagagctcagccactacacggtttgaggggattcccacatatccggacgtgaaccgcct

SEQ ID NO: 422416 - DNA, 75 bp, Homo sapiens
gccagatagtaccatgatagctgtatcagaaggaaaatcacctcggcagtgtttgaaggaaggatactgcaactc

SEQ ID NO: 422417 - DNA, 50 bp, Homo sapiens
gaaggactatgtggctactgggcaggtccgagctatacctgtggacattg

SEQ ID NO: 422418 - DNA, 75 bp, Homo sapiens
ggggcaccctaccaccaaggacatttattaacaggaatgctgcaggttatgaaacttggaaatcccgagattgcc

SEQ ID NO: 422419 - DNA, 82 bp, Homo sapiens
cgcgcgcagggcctgcagcgggagctggacggcgagcgcgagcggcgcgagaaaattgtctaaagccccaggaaaaatggtg

SEQ ID NO: 422420 - DNA, 100 bp, Homo sapiens
acctgtaggaattgctgcctgttccctgcctaggcgccagcactcaagtggattttagccgaatcccttaaaggcaattgttctcttaactgaattaatt

SEQ ID NO: 422421 - DNA, 90 bp, Homo sapiens
cagaagtttttgaacacactactaagccaattcttcgtagttttttgaatggatataattgcacagagagctatttgtccaagaactctg

SEQ ID NO: 422422 - DNA, 100 bp, Homo sapiens
cccagagcggagacaacagcagtgagcaagccaacatcccatgcaccatcgtggagactggctggatgccctgtgctctatcagggcatgtcagaccaac

SEQ ID NO: 422423 - DNA, 80 bp, Homo sapiens
cccagccccacagaccagcccagcattcagggcgaccattgacgaggtggagacggacgtggtggagattgaggccaaac

SEQ ID NO: 422424 - DNA, 90 bp, Homo sapiens
aaaaaggaagctggaagaggcagcccagcgtctggagtatctatatgagaagctctgtgaggggacacgcttggtgttcgatattcctgt

SEQ ID NO: 422425 - DNA, 83 bp, Homo sapiens
tcggtggactccttcggcagtccacccaccgccgccgcctcccagaccgcgctgagcacgttcttccaagaaaccaacattcc

SEQ ID NO: 422426 - DNA, 100 bp, Homo sapiens
gacggccacctgcctggcctggtgccatgacaacaagtcccggctccggaagatgaaggtgttggggatgtcctttgcactgaccctgaactgccagatt

SEQ ID NO: 422427 - DNA, 100 bp, Homo sapiens
cacctgtaagaacagaaaatcgtcttatagttgagaatttatcctcaagagtcagctggcagaacgacaccgtaactatccgcactagaaagttcatgac

SEQ ID NO: 422428 - DNA, 96 bp, Homo sapiens
gctggacttcttggctggatgcgcgggggtgtactaatggtcacttgatgtgcgctggctgttttatccacctactagcagatgcccggctgaagg

SEQ ID NO: 422429 - DNA, 101 bp, Homo sapiens
tggggctactgctggcaacattcctcccatcatcttcgtttcggacagagcaaacagcaacaaggagctgggtgtggaccaggagtcagaggagggcaaag

SEQ ID NO: 422430 - DNA, 101 bp, Homo sapiens
gtgcctgagcccgtgcctgtcttcagatcttcacagcacagttcctgggaaggtggagccaccagcctctccttgggtatagttaataaagtgtcttctag

SEQ ID NO: 422431 - DNA, 74 bp, Homo sapiens
gaacttgtacaaacaggacctgcctaattaccttcaaacctggtgtcactgacgtttgaggatgtggctgtgct

SEQ ID NO: 422432 - DNA, 98 bp, Homo sapiens
gcatcaacaagatgttgtcctgtgctggggctgacagagagaagaagaaggaggttcctgctgtgccagaaacccttaagaaaaagcgaaggaatttc

SEQ ID NO: 422433 - DNA, 142 bp, Homo sapiens
ctcagctcgggataagtgatctttggggcccgcagaggacgtctccccaagacccagtggcaaccgggagaccaggcacctggatgagatgaagtcggccatgcggaaaggccacaacctgctgaagaagaaagaggagaag

SEQ ID NO: 422434 - DNA, 82 bp, Homo sapiens
acggtcatcaaccagcaggaggactccagcgaggtacggacattgctgcaggagaagaggttgccatcaagcttgaatgtgt

SEQ ID NO: 422435 - DNA, 95 bp, Homo sapiens
ctgaaagaggagaagccaaagaagagtaaaacatctggtgcctccaaaacaaagggcaagagcaagctcaagatgtacagttacccagcacgtgt

SEQ ID NO: 422436 - DNA, 100 bp, Homo sapiens
ggggattctagaagcagttcggttatacctggagcttggggcttccttggtcgcacccaccacctgcctgcccactggtcagccttcagggaccctgagc

SEQ ID NO: 422437 - DNA, 95 bp, Homo sapiens
ccagaaaatctttcctctaaagtcaaactgttgaacaagagatttttcaatcaagactttggaactacgaagatggaagagatttgaagagggat

SEQ ID NO: 422438 - DNA, 75 bp, Homo sapiens
cacaaagctgctagcagaaaatcaaaacgctgattaaaagaagcacggaaccacgtgaatgttgagggggcgaca

SEQ ID NO: 422439 - DNA, 82 bp, Homo sapiens
aggaaaagtattgcaagcaacagtagtcgctgttggatcgggttctaaaggaaagatgagagctattgttcacataactcaa

SEQ ID NO: 422440 - DNA, 88 bp, Homo sapiens
gcgcaggagcctcccggagctgggctgaaatctctttaatgatggagggaagcaggcagacgcgagtgtctcggccatacaagatcag

SEQ ID NO: 422441 - DNA, 100 bp, Homo sapiens
gcgcttgcagacgcactgctacaaggtccatgaccatctcacgccacctgggcaagatgtatagtgagatgatcttcgtcaatggcttcgtgcactgcga

SEQ ID NO: 422442 - DNA, 75 bp, Homo sapiens
gtcccagctggattcggtgcgggtctggctgggcaagcactacaagaagtggaagatagatgataagcctgtaaa

SEQ ID NO: 422443 - DNA, 100 bp, Homo sapiens
aaagcctcagcacccggggagctgactccattgcatgtgggaccttcagccgtgaactgctccccgcagccaccgccacccattggaatggccaacaggg

SEQ ID NO: 422444 - DNA, 100 bp, Homo sapiens
gtttcatgtggcctgggtagatcctgaggatccttacaaggttcatctctaacaagtatttagtgaaacgacagagcagagactatgatgtggaatgggg

SEQ ID NO: 422445 - DNA, 100 bp, Homo sapiens
gaaggtcttttgagggctaaaaaggtcctgtaagaagcggcatagcacccgtggtgcatgtgttctaagaacggaagcatctgggctggatggaatttag

SEQ ID NO: 422446 - DNA, 100 bp, Homo sapiens
aatcttccaagtctaatagacctaaagccacagtcttcaagagcccacggacaccacctcaacgaagatgtatgcaaccagcccttactccgaccccgtg

SEQ ID NO: 422447 - DNA, 90 bp, Homo sapiens
tgaccctagccagactcagggatcaaagagcaaacagattcagtggcctgcattgatgccttcaattaagttgcagagttctgatggaga

SEQ ID NO: 422448 - DNA, 75 bp, Homo sapiens
agcagtgattgttgcttttacgggcgcctgcattactcaagtgttagacaaacccagtaggctaactgaaaagga

SEQ ID NO: 422449 - DNA, 100 bp, Homo sapiens
ccgcgaggtggcgtccggcgctgccaggatccgcggggagaccttgggcatcatcggacttggcactgaacttcccagccctgccgtggaagctgcctgc

SEQ ID NO: 422450 - DNA, 50 bp, Homo sapiens
gaaactcgctcgccttcagaagacagaggaagctcaccagtgtgggaagg

SEQ ID NO: 422451 - DNA, 83 bp, Homo sapiens
tcgtatcgtatgtccgctatccagaacctccactctttcgttccagggtctccctccactgctgtagtaacccgggtccgggg

SEQ ID NO: 422452 - DNA, 75 bp, Homo sapiens
atcggaaagaatcccggccagacgtgcgaacagctccagctgggtgcttgaggaatccaaagccctcgtgcgctg

SEQ ID NO: 422453 - DNA, 75 bp, Homo sapiens
tctcaccaagcgcaagttacatcgtgaacccatccaaacagttgtgggatattctgtgccgtctggagcatacaa

SEQ ID NO: 422454 - DNA, 98 bp, Homo sapiens
ctaacaataaccccatggcttgtctgtttcagaactttcagattttgtatcagattgtaccatctcataaattgatgttggaattccatacattactt

SEQ ID NO: 422455 - DNA, 100 bp, Homo sapiens
tggagttcatcgacaacaagctgcggcgctacacgaccttcagcaagaggaagacgggcatcatgaagaaggtagatggccccctcagggcaggcccggc

SEQ ID NO: 422456 - DNA, 100 bp, Homo sapiens
gttacgtgccatgcacaaggctgtggtggatgcaggaatcactaccaagcttctgaccatccaacttagaaataatgtttcattcaagataaggctcgtg

SEQ ID NO: 422457 - DNA, 82 bp, Homo sapiens
ttatctggagtgaggtggccggttcttggtgggatctgagcagacactggagagcagcgtcctgtgccaggagaaaggcttg

SEQ ID NO: 422458 - DNA, 50 bp, Homo sapiens
gaggcgggagcgacagcagaaggctccgagcaagctataccagagaatca

SEQ ID NO: 422459 - DNA, 83 bp, Homo sapiens
cctaagcagaggtcgctaactacaagaaatgttacactcgggggatatgagactttctactcggaatatcctgagtgttgcgt

SEQ ID NO: 422460 - DNA, 83 bp, Homo sapiens
caggggaccaagctggagatcaaacgtgtggacactgccagcggctgcagccgacttggaatgacctgggagacaaatacaac

SEQ ID NO: 422461 - DNA, 100 bp, Homo sapiens
gtcccttcctggtccaaagtgaaccagggtctcatccgcatgtataaggccgagcgtccgtctccaagagagtatgaagagagtgcgtctgtagggcagg

SEQ ID NO: 422462 - DNA, 97 bp, Homo sapiens
gaggatttgcatctctaacaaaaattcctaggcgatgctcacactgttggtgtaaggatggttccaatccctatacattgaagctttgcttttctac

SEQ ID NO: 422463 - DNA, 83 bp, Homo sapiens
gggatgagtatgcggaggacagctctgatgaggaggccaccagcttgggctccccacggagggcagcaagtgggacttgggga

SEQ ID NO: 422464 - DNA, 82 bp, Homo sapiens
aagtggggctgaccctgtgaccagtgtggggaaaaggaccaagaatcgccttcagccctgtctggtgcatccttggcagaaa

SEQ ID NO: 422465 - DNA, 75 bp, Homo sapiens
tttggcattgctgctaagtacatgctggattgtagaacttctctctctgctctactgaagaaacacgaagctttg

SEQ ID NO: 422466 - DNA, 101 bp, Homo sapiens
tattcctctgagaagcactatggtcgtgagagtcgtcagtgccctattccttcacatgtaattcagaaattagggacagtgagatggaagattttcgaggt

SEQ ID NO: 422467 - DNA, 82 bp, Homo sapiens
gaggagccgagaggagctgagcgagcgcggaagctaaagggtgaatcatgtttaagaaggtcaacaggattgagcacaagag

SEQ ID NO: 422468 - DNA, 88 bp, Homo sapiens
aagacttcatgatccaaggaggtgacccaacagggacaggtttccaagctagactcagtcgccttcatggaatgtcttcaaagaatat

SEQ ID NO: 422469 - DNA, 100 bp, Homo sapiens
ccaagctcttaagcatcgtggcgctggtggggggagtcctcatcatcatcgcctcctgcgtcatcaacttaggcgggagaagaaatgggtgaccgttggt

SEQ ID NO: 422470 - DNA, 82 bp, Homo sapiens
cacaatattcctcagtaaatctcagacggacgatttcaacactacacttgcacaatgtctttgaaaccaagagtagtagatt

SEQ ID NO: 422471 - DNA, 89 bp, Homo sapiens
cagctgctgaagacagcactcaaaggcgtttactgaagcatttgaaagggaactaagaagacataaagttcaagagaatattggacctc

SEQ ID NO: 422472 - DNA, 90 bp, Homo sapiens
ggataaactctctcctcaagggaggcaggtggaagtcatcataaagtttctgtttcacccgtcgtccatgttcgaggactctgtgaatct

SEQ ID NO: 422473 - DNA, 100 bp, Homo sapiens
cagcattggttttccaaaaaatgtgagactttttcttggacgaattcaggaacatcatcttcagcgggctatttcagcacagcaggtgtatggcgagaag

SEQ ID NO: 422474 - DNA, 100 bp, Homo sapiens
gcacccagctttcttcactcttccggcctctccttccgatgaaaagagaaaggaagaatggactacagccaccaaacgtccctagtcccatgtggacaag

SEQ ID NO: 422475 - DNA, 82 bp, Homo sapiens
tctccactttcgccagcccgtgccgcgagcgcggcctgcaggagaattaaatgtgagggagtctgacgtaagagtttgtgat

SEQ ID NO: 422476 - DNA, 87 bp, Homo sapiens
ctttgccaccattccttcaaatgagcttgagaattgtaactacgcggtagaattggggaagaatcaagcgaagttctccctggttgg

SEQ ID NO: 422477 - DNA, 100 bp, Homo sapiens
tcaagatgaggctgtgggacctgcagcagctgagaaaggagctcggggactcccccaaagacaagtgtgctacatctcagccttggtcttgtcctgctta

SEQ ID NO: 422478 - DNA, 83 bp, Homo sapiens
gaagcccctatcgccgagctcgttggagcttgaacccattgtcacccctccggtaatagcctgcagctggtgttttgagaagc

SEQ ID NO: 422479 - DNA, 90 bp, Homo sapiens
agaacattgaagatgagtacaaaaatcccaggagaaatctaagagttaaacatgaagtttctggagagacagtggtatttcaagggggag

SEQ ID NO: 422480 - DNA, 100 bp, Homo sapiens
tggcagtgcccgtcggcgggctgggggcggcacgactggaggcacaaggaggacgccggcgtcttctgctcaggttcttcagacccagaagaagaaagtg

SEQ ID NO: 422481 - DNA, 83 bp, Homo sapiens
tgcgacaacgcggcgcagaaaacactctgctccagccaaggtggtgagggcagctgttcctaaacagcgcaaaggcagcaagg

SEQ ID NO: 422482 - DNA, 50 bp, Homo sapiens
gtcgtccgcggctccggtcacgtcaccgtctgccagggacctggtgagca

SEQ ID NO: 422483 - DNA, 82 bp, Homo sapiens
ggatatcgacgtcgtgatccagaagtccagagctgaggactgcctgtttgcagtgcagagcagagcgggcggaggaccccgg

SEQ ID NO: 422484 - DNA, 100 bp, Homo sapiens
agctggcctatggtttctgcattttgttaagaagcacctcatgcaagcgagggacctgggactgctcacagccaggaaggatatggagtaatagtactaa

SEQ ID NO: 422485 - DNA, 100 bp, Homo sapiens
tgatgacatctatcggaacacttcatgggataatgcaggttttaaaggctatggaatacagatagagcagagcatggatcattttgatgacattggtccc

SEQ ID NO: 422486 - DNA, 83 bp, Homo sapiens
aaggaagaggagaaggaaattgtcccgaatccctgcagatgcctcgtctgtggctagattactgccagttcctcatggaccag

SEQ ID NO: 422487 - DNA, 92 bp, Homo sapiens
ggcagccaagctcgtggcctgcctctgcgtgcactagacgcttgaagcaaagctgccatcccagaagacgacatgctctcagcaacccccct

SEQ ID NO: 422488 - DNA, 100 bp, Homo sapiens
aactgggatttcaacctgaaagtggaggctgcgaaaatagaaggtgacaaagtacaatttgaagaatttgcaaaagtagtaaggaatatgcgtgatgctg

SEQ ID NO: 422489 - DNA, 75 bp, Homo sapiens
gggatggcggaggcgcctcctgtctcagaagaagcgcacgctgaaggggtccattgagctctcccgaatcaaatg

SEQ ID NO: 422490 - DNA, 100 bp, Homo sapiens
aggcagtgcagcatgtagtgattgggcccagtagcctgattgtgcatttcaatgaagtcataggaagagggcacttttccaaacacaggagccaggatca

SEQ ID NO: 422491 - DNA, 82 bp, Homo sapiens
ggagcgcaacactcgcttggttggggagatcggcgcttggccgcggagctggagtttgttcagatcatcatcatcgtggtgg

SEQ ID NO: 422492 - DNA, 83 bp, Homo sapiens
tcatcacaggccttccactggacaaccccagcgtgctttcaggccccatgcagatgaggctgctgtcatttgtggtgttggct

SEQ ID NO: 422493 - DNA, 75 bp, Homo sapiens
caccagcactcctttaaagtgggcactgcaaaagtggtctatgttaacaatgaatgggcaaccagtgttggggaa

SEQ ID NO: 422494 - DNA, 98 bp, Homo sapiens
attgaagctgtttatagtagactgaatccacatagagaaagtgatgggacatcaactagtcaggcagtcttccgtctccagtctggcatctgccatct

SEQ ID NO: 422495 - DNA, 101 bp, Homo sapiens
cacagatatgcacttatacccataccattagcagtaattacaacatgtattgtgctgtatatgaatgttctgcgagcagctgtgcccaagaatgtgtctgt

SEQ ID NO: 422496 - DNA, 98 bp, Homo sapiens
cagagagccagtagacttacagaaaaagaagaagcggaaacaacgttctcccgcaaaaaacctaaaggcagacccagaagagctttttacaaaactag

SEQ ID NO: 422497 - DNA, 75 bp, Homo sapiens
gcagacgccaaacaagcaaatctggctatcttctccatccagcttccttcaaaatgtctactgttcacgaaatcc

SEQ ID NO: 422498 - DNA, 89 bp, Homo sapiens
gtctttgcagcgtagcccgagtcggtcagcgccggagaggaccgaaagctgtttgtggggatgctgggcaagcagcagggtgaggagga

SEQ ID NO: 422499 - DNA, 75 bp, Homo sapiens
tctactaggcaagcatggagttggcaccccaaaagaaaggttcttcacacacccccattcggcgtagtacccaga

SEQ ID NO: 422500 - DNA, 123 bp, Homo sapiens
ccgtgtgtcagaacaatcttgaatcatgaagctactaaccagagccggctctttctcggaggagcaaatacgacatcctcatggagaagctttcggtcatgctgagcacacggactaaccaca

SEQ ID NO: 422501 - DNA, 100 bp, Homo sapiens
agaagacatacaaaagcctcttctgaaggaaaagacagtgtagtcctgcaaaacattttgagccaagaaggatcaagaaggtggagaagaaaagaaatct

SEQ ID NO: 422502 - DNA, 88 bp, Homo sapiens
cagcgccgtcccgtccgacagccaggcccgggagaagtagtatagatcaatcagtgttaaaagaattaccccctgaactcctggcaga

SEQ ID NO: 422503 - DNA, 89 bp, Homo sapiens
cgacgctttcaaagatgcactgcagagagcccggcagatcatacctcactcctgttagggatgaagagtctgaatcccaaagaaaagca

SEQ ID NO: 422504 - DNA, 100 bp, Homo sapiens
gctctcggtgccctctccttttcgtttccggaaacatgctcctgtccaaatatgacccccagaaggaggcagagctccgcacctggatcgagggactcac

SEQ ID NO: 422505 - DNA, 100 bp, Homo sapiens
gatggtcaacagaaaagattttgctgtcaaagttgtgtcagtgaatacaaacagatctccagatcacactaagtttgtgggaagcttcaaaaccaaacaa

SEQ ID NO: 422506 - DNA, 75 bp, Homo sapiens
catcaacgggcagtttgtcgaacgatgttggactcatagtcactgccagaaagcccaagaagatgaaaggattgt

SEQ ID NO: 422507 - DNA, 75 bp, Homo sapiens
gtcagtttctgaggaatttcatcaggttttgcatgcagaaatgtgtcagtctggtgcctggcgtcacactggatt

SEQ ID NO: 422508 - DNA, 87 bp, Homo sapiens
gctggaacagatctatgaatgcatatgaaaacaaagttgcagtacgtgacagagtggcatttgcttgtaaattccttagtgatactc

SEQ ID NO: 422509 - DNA, 100 bp, Homo sapiens
ccaggcccttccagcggtggccacacgtcacacagtggggacaacagcagtgagcaaggatgagaaccacaagcatgagaacatgaggataaatacactt

SEQ ID NO: 422510 - DNA, 82 bp, Homo sapiens
gcacaggagtcagagagggggaaccgccgtcccaacatcacaaaaagacaaatttacatgtattggagaccagaccagaagc

SEQ ID NO: 422511 - DNA, 75 bp, Homo sapiens
gatgattacgagcctataatcacctaccaatttcccaagatgaggtttatataactttccaagacaaggaagttg

SEQ ID NO: 422512 - DNA, 75 bp, Homo sapiens
gctctgatgacgatttggatgaatatacccttagaaaaaatgtggcagtccatgaagatggacctacagctaaaa

SEQ ID NO: 422513 - DNA, 100 bp, Homo sapiens
ggtggtgatggaagcaggtggaattatgccctgttggttccaatgctgggattggctgcttttctgcaccaattccagctggacatcactgtgaaaatgg

SEQ ID NO: 422514 - DNA, 99 bp, Homo sapiens
aacacaacctttaatgttgagtctaccaaaaagaatgaaccgcttgcttcttatttagatgaccgcacctcgagcaggagtggggatgccacgtctgcc

SEQ ID NO: 422515 - DNA, 101 bp, Homo sapiens
accatgagggaaatcgtgcacatccaggctggtcagtgtggcaaccagatcggtgccaagggtctgactggaagccctggcagccctggtcctgatggcaa

SEQ ID NO: 422516 - DNA, 100 bp, Homo sapiens
tcgtccagacgccccaaacaaacaggccatgttctgcaacgatttaaaggaaaagtatgagaaaaggatcattattaaaggggttgatgctgagaccatg

SEQ ID NO: 422517 - DNA, 100 bp, Homo sapiens
attggaaccagcacaagtacaagtctgtcgagttgcttatgaaattatgcaaacactacatcctgatgcctctgcaaacttccattctttagatgacatc

SEQ ID NO: 422518 - DNA, 96 bp, Homo sapiens
gaagcagctgagtgatgggcagcccccaccacccgcccaggccagccccagcagcaacagcagcacagtgaacagcagagaatttcaaaggacctt

SEQ ID NO: 422519 - DNA, 156 bp, Homo sapiens
caagcgcttctcaacgttcagtgcctcgaaagaacttccgtacgacctcgaggatgccatggtgttctggatcaacaagatgaagaagtcgagatgacgcggatggcggtccagtttgagctggaggacctgaacctgcggcctgacccagagcca

SEQ ID NO: 422520 - DNA, 134 bp, Homo sapiens
tgaagggaaggaaatcatgtcaagcgaagccttgaaaaagctgccctgagacggtgtcccgccgaaaggtgctggagaatctggtaaaagcaccattgtgaagcagatgaggatcctgcatgttaatgggttta

SEQ ID NO: 422521 - DNA, 100 bp, Homo sapiens
aaggacaaaagatctttctcgggtgtttcattcttacagtccatatgatcacaaggttaatggaaaaggttccttatggtgtgttgatccggaatataaa

SEQ ID NO: 422522 - DNA, 100 bp, Homo sapiens
tcaggatttacacagacgtggggcgatgcttgtgaccctgcagctcctcaaaagataattgacgaccttgccaacctagtggagaacacagatgaaaaac

SEQ ID NO: 422523 - DNA, 80 bp, Homo sapiens
cgggatcgacgcggacagcgggctggagcctgacgagctggcggcaggagcattggtttgaaaaggccctacgagacaag

SEQ ID NO: 422524 - DNA, 100 bp, Homo sapiens
cacgggaagaagcagctggacccgctcaccatctacggcatccggtatcaacaggcggtccttcgggtcggagtggacatcggatggtggcctggaagag

SEQ ID NO: 422525 - DNA, 80 bp, Homo sapiens
ggggctccaatggcgctttctacaagccaaaacctattgatgtacaagtcattacacaccacatgcagcgatatgcagtt

SEQ ID NO: 422526 - DNA, 87 bp, Homo sapiens
cggacaggcgacagcgacctgcggcagattcaagaaatccatggtgaaaggtttggattcctatgaagaaaaggaggataaagtgat

SEQ ID NO: 422527 - DNA, 101 bp, Homo sapiens
agcagctgtggctccagtatcagaaaggaaggaaaatcacctcggcagtgtttgaaggaaggatactgcaactctttgaagtacgcattttttgagtgtaa

SEQ ID NO: 422528 - DNA, 95 bp, Homo sapiens
acaacaaggccattttctcaaacgagagtcagcctttaacgacccaacatgagtgaagtttcctgcaagaaacgggacgactatttggaatggcc

SEQ ID NO: 422529 - DNA, 75 bp, Homo sapiens
ccttttctctgccttgcttgcttgagcttcagcggaattcgaaatgatccagctatgggacacagcaggacaaga

SEQ ID NO: 422530 - DNA, 90 bp, Homo sapiens
ggaaaatggccgccgccgccgccgccgcgccgagcggaggaggaggaggaggcgaggaggagagactcgtgttgactgattttgagggga

SEQ ID NO: 422531 - DNA, 100 bp, Homo sapiens
cctttttccgctgtaaataattaagaagaccaagtagcatccaaggtttggtgcctggaatgctgacctagatctggaaactagcccagatgaaagcaag

SEQ ID NO: 422532 - DNA, 100 bp, Homo sapiens
cgtcaccctgcctcccctgcgtcccgccaccggccgcttctgtcctcgcatcgagagtaaacatgaggttacgatcctgggaggacttaatgaatttgta

SEQ ID NO: 422533 - DNA, 75 bp, Homo sapiens
agatgatgaggagcaagaggaccctgcggactactgcaaaggagcgagaacccgagcagcgccatgagcaacact

SEQ ID NO: 422534 - DNA, 74 bp, Homo sapiens
tgctctcaactacaacatcgtttcaggtcttaaaatccttgcacgtttgatgactgccaaattcttgcatacag

SEQ ID NO: 422535 - DNA, 132 bp, Homo sapiens
gcctaatcaatatgttcaaactatactaaaacacctacagaatctttttgtaccaaggtaaaacttccttttcctgtagatcaaatcacagatcttccaaggaacgatttccagatgatgattaaaatgcac

SEQ ID NO: 422536 - DNA, 75 bp, Homo sapiens
gtcctggagcttgacgcgctggagcttgagagagtcatgtgctgttcctggggcttggatgatgtaggggaagca

SEQ ID NO: 422537 - DNA, 96 bp, Homo sapiens
ccccagacccgaccccaaaggcctgagactggggtgactgggacctaagagaatcctgagctggaggtgatggtaatgcccgaaggagcagacacg

SEQ ID NO: 422538 - DNA, 100 bp, Homo sapiens
actaggaagagggacgagcactcatgatggaattgccattgcctatgctacacttgagtatttcatcagagatgagtcttttagtcctgctatacagctg

SEQ ID NO: 422539 - DNA, 83 bp, Homo sapiens
cgccagggcctcaagtgcgatggaggatttgatgaagatgttaaagcgaaagtggagaaccttctcgggatttccagcctgga

SEQ ID NO: 422540 - DNA, 100 bp, Homo sapiens
aaagggtgaccaagaactccacgccgcttacaaacacgcagatggcaagaagattgatggcaggagggtccttgtggacgtggagaggggccgaaccgtg

SEQ ID NO: 422541 - DNA, 90 bp, Homo sapiens
gttggaccttccggagcttctcagaagacagagggttttcttttgagggttcaggataagtttgaggtgctgaattacacaagcattcct

SEQ ID NO: 422542 - DNA, 96 bp, Homo sapiens
agtttaagtctggagcaggcactgagctgtctgtgcgcgatgatgaggagtctgatgaggaagctgtgaagaaaaccaacaaatgtgtactagtct

SEQ ID NO: 422543 - DNA, 101 bp, Homo sapiens
tccctgggcgcgtcagaacaggcgctgcggctgatcatctccatcttcctgggccgagacgcatccagagctttcgtgaccggggactgttctgaagcagg

SEQ ID NO: 422544 - DNA, 96 bp, Homo sapiens
ggaaattctaatctttcacagacacagggtggatttctgcatgatgaaattatgagactcacccgtaatacgctggaaaaactgatggccttacct

SEQ ID NO: 422545 - DNA, 100 bp, Homo sapiens
gcagagcctaagagaactatggcaacatcaggtgactgtcccagaagtgaatcgcagatctgcattctgcccctcctgatgtcaccacgggcctcgtgga

SEQ ID NO: 422546 - DNA, 75 bp, Homo sapiens
gcctggagaagagcgaccagctcactaagaacatgatggagtctcccaggcgggaatgcaatggtgcgatctcga

SEQ ID NO: 422547 - DNA, 76 bp, Homo sapiens
agccggttcaccagcctggacaaaggagagaatgggactctcaggctgacttcaaaatttctgaggagtgcatcgc

SEQ ID NO: 422548 - DNA, 75 bp, Homo sapiens
ctccggctgaagctccaggagctgaagattgattcatggtgcaaagatcatagctacgtgattgctggttattat

SEQ ID NO: 422549 - DNA, 75 bp, Homo sapiens
ggcgaagctggccgagcaggctgagcgatacgacgacggccgaagccctgcagcccacgctacagccggagatgc

SEQ ID NO: 422550 - DNA, 100 bp, Homo sapiens
cagatcgggatttacgtggagatcaagcgcagcgatgtcaggtcaattcagtgaagatatgatacccacagtgggcttcaacatgaggaaggtaactaaa

SEQ ID NO: 422551 - DNA, 100 bp, Homo sapiens
gaagagagaaagcagtgaacagattcatcttcccttctatatctgaaaggataagcaggctgtgctttccagagtgctggagaatctggtaaaagcacca

SEQ ID NO: 422552 - DNA, 83 bp, Homo sapiens
cctgttaaacaagaaccagagactgtacctactccagcactattaaatgtgaggatatggctcgtggacagcagaaaattcag

SEQ ID NO: 422553 - DNA, 100 bp, Homo sapiens
atgcctgggtcaaccgctcttccatgaccttcttaacccgtcagggccggatcgtggcacccagaggctgccaggactttggctgggacccctgctttca

SEQ ID NO: 422554 - DNA, 100 bp, Homo sapiens
aaacaaaacaaatatgaactatgataagctgagcagagccctgcgatactattatgacaagttgctggatttgtgcgactcggtgaaggatgatgcccgg

SEQ ID NO: 422555 - DNA, 75 bp, Homo sapiens
tcagttggaagcagccgatccagcctgcggagcctgtggggcagagctggtggagttgagatctataatggagat

SEQ ID NO: 422556 - DNA, 99 bp, Homo sapiens
gattttgaaccattaaaagaaaaggaatgccttgaggggagcaaccagaaaagtctcaaggaagtatcaccttttgccatgatagcatttctttcattg

SEQ ID NO: 422557 - DNA, 89 bp, Homo sapiens
ctaccaccctctcctgcgcccctgagagaggctgaccacctggtggcccatggtagaatggcagaaaaggaggcacgtcggaagttcaa

SEQ ID NO: 422558 - DNA, 90 bp, Homo sapiens
acaacctgcaccaggttcacggacgagtatcagcttttcgaggagcttggaaagtaaaccagcaaatttggctcgataatatcgctggcc

SEQ ID NO: 422559 - DNA, 75 bp, Homo sapiens
ttcactgcgcgcctgcgtctacaacaacaccctcaacaacgccatgcctgtgtctgcagtgctgtgtgatgatga

SEQ ID NO: 422560 - DNA, 100 bp, Homo sapiens
gtgaagggaagtccgaagatgagcctgacaccattccgacatccgtcctcctgcaggtggtggagctgctaggttaatgactccagagagtaagatcaga

SEQ ID NO: 422561 - DNA, 96 bp, Homo sapiens
aaggggattgcctggcaggacgtgaaggggaagaggcccaccctggagtaaccctcactggagaatccagagaacctcaagaaggcatgaagccag

SEQ ID NO: 422562 - DNA, 100 bp, Homo sapiens
caccgtggcgcctcaggaactgaaccctcgcggccgcaacgtgtgccgtgctcccgggacccagatcaacttcactgtggccattgatttcactgcctcc

SEQ ID NO: 422563 - DNA, 99 bp, Homo sapiens
ataagcaaccaacgttcagagcactctatgaagcaatacgggatgcacttcaggtggcaagacagctccttcttcagcagcaacagcagcagcaagtta

SEQ ID NO: 422564 - DNA, 95 bp, Homo sapiens
ggctcgtccaactggtccctcagtcacacatgccagagattgctcaggaagcaatggagagtcgagagaaagaacttatgggtttcagcaaatcg

SEQ ID NO: 422565 - DNA, 75 bp, Homo sapiens
tctctagtctttatgggaaacctcagcttgatgatgtatctcaggttgctgatcagctctgtgccaagtatagca

SEQ ID NO: 422566 - DNA, 75 bp, Homo sapiens
cgggggtggtgacagcaggtctgagcactcctgtaggaggcctgctgatggcatttcagaagtactctggtgaga

SEQ ID NO: 422567 - DNA, 83 bp, Homo sapiens
gaggtgtatgcaggtcggcgggaatgccaatgcggcatctcccctcagatggaagtcacatgtgtgcccacgcccacaagcac

SEQ ID NO: 422568 - DNA, 95 bp, Homo sapiens
agactagccactttgcattgactggaaacaatggcatttacagaaagagtcaacagcagtggcaacagttacagaatgtctgaaggggacagtgt

SEQ ID NO: 422569 - DNA, 98 bp, Homo sapiens
gcctcctccgggaccctccccttggaccgagccgatcgccgcggggcagttcgggccggctgtcctggcgcgatgttcgcacacaagccatgtaccag

SEQ ID NO: 422570 - DNA, 51 bp, Homo sapiens
ccgctcgcagagagccggcttgcaggagtctactcttcatcttgtgttgag

SEQ ID NO: 422571 - DNA, 95 bp, Homo sapiens
aggcacctgtcggcagactggtgacttcacttttgagtgcaactgccttccaggaatgctgtctctgcaatttgagaggaggtgctcttaagcaa

SEQ ID NO: 422572 - DNA, 75 bp, Homo sapiens
aatgcacgtattttaaactcccgggcctgcggacgctatgcacaggacacaactcagatgggaagttcatcgccc

SEQ ID NO: 422573 - DNA, 49 bp, Homo sapiens
tggcggagcagacctactcgtgtatacgctcaacggcaagaaagtggaa

SEQ ID NO: 422574 - DNA, 50 bp, Homo sapiens
ccggccgctagcgtcagcgccagccaggggatcatggaagctgataaaga

SEQ ID NO: 422575 - DNA, 105 bp, Homo sapiens
caatatctgtcttcggtggactccttcggcagtccacccaccgccgccgcctcccagatgagcagcaccagcagtaagagggctccgaccacggcaacccagagg

SEQ ID NO: 422576 - DNA, 90 bp, Homo sapiens
tgttaaggattccaagtaactcttatttgctaccgagtctattgcttgctgggagacggggagctgtcagagggctctgtatgggaggcc

SEQ ID NO: 422577 - DNA, 75 bp, Homo sapiens
aacctgcagcacatcagcgaccgggagaacatagacggcaacgtgttggaccttccggagcttctcagaagacag

SEQ ID NO: 422578 - DNA, 100 bp, Homo sapiens
ttgcggaaaggatgttggcggtccctgtgacctgtggagacacggccagatctgccctccagttgggggccgtcccgctcctaaggcaggaagatggtgg

SEQ ID NO: 422579 - DNA, 51 bp, Homo sapiens
aaggattccaagtaactcttatttgaaagttcaggagccctggaaaggaga

SEQ ID NO: 422580 - DNA, 100 bp, Homo sapiens
tggctcggccagtgaaaccaacatcgaagagaaggtgctggcatccagtcccatcatggaggtgccatccttggtaggaagctttattagaagccaaaat

SEQ ID NO: 422581 - DNA, 74 bp, Homo sapiens
tgcctgctacaccaaactcctggagttccagctggcactcaagcaagacttcaaggactgcattcgtaggcaaa

SEQ ID NO: 422582 - DNA, 98 bp, Homo sapiens
gcagagcaccaggcccaccgtgaaaggtttggacatatttgactcttttccccccaggttgaattgaccaaagcaatggtgatggagaagcctagtcc

SEQ ID NO: 422583 - DNA, 83 bp, Homo sapiens
ccaatgagaaagccctgaagcagaagggcatcaccgtgaagcagaagaggattttttatcaagcagaaatgcatcgaacaacg

SEQ ID NO: 422584 - DNA, 74 bp, Homo sapiens
atttgtgagaactatttatgcagctttgaaactcagaggaatggactggtgtttatctatgacatgtgtggttc

SEQ ID NO: 422585 - DNA, 100 bp, Homo sapiens
cagcattcctgaaatacatccaggaaagacatggagattctcttaaaaagagtaatcaagtcagaggattatatgacttttatctgcctagagaagaact

SEQ ID NO: 422586 - DNA, 100 bp, Homo sapiens
gagaagaaagatgttttgcctactgttgatccgttttcggctttgtgagaaaccttaccatcaaacacgatggccagcaacgttaccaacaagacagatc

SEQ ID NO: 422587 - DNA, 74 bp, Homo sapiens
cggtccagacccagcaccccatacggaagggtctgcatcacaagctgcaagctttcttcctggtggcagatgac

SEQ ID NO: 422588 - DNA, 100 bp, Homo sapiens
ttctctgctgcaccgacctcgacgtcttgcctgtgtcccacttgttcgcggcctatagggcagcgggtggcatgagacgtgggaacatgggccacctcac

SEQ ID NO: 422589 - DNA, 98 bp, Homo sapiens
ggatctgccccagagaaagtcctcgctcgtcaccagcaagcttgcgggagctcactctactctggatgaggacctggaaagatggctgcagccacctg

SEQ ID NO: 422590 - DNA, 100 bp, Homo sapiens
ttctctgtatggcacagaagaatatttgagccagagcccagaggtggagcagttagggagggttgtggaactggacagtgacatggtagatatcacccag

SEQ ID NO: 422591 - DNA, 82 bp, Homo sapiens
gccgatccagcctgcggagcctgtggggcagggtactgcgttcaacagatcctgatcgcttccaggtaatgttctgctactt

SEQ ID NO: 422592 - DNA, 95 bp, Homo sapiens
gcgggaccttggcggcgcccggagccggcgtggcgctcatcgagggacgcccggcccaagtgtcaagtcctaattcgaagcagagtcctcaggga

SEQ ID NO: 422593 - DNA, 50 bp, Homo sapiens
caatgattgaattcctcagattactgactgtcggaaaaggtaacagaaga

SEQ ID NO: 422594 - DNA, 75 bp, Homo sapiens
gccagacccagttgaggagaccagacaccatgcaggtttgcccttgcatctcatttcctctggggactgtggtcc

SEQ ID NO: 422595 - DNA, 75 bp, Homo sapiens
cgcttcgggagccgcggcttatgctgtatgaactggacggtgatcctgaaaggaaagagttcctggatgacctct

SEQ ID NO: 422596 - DNA, 95 bp, Homo sapiens
ccaataaggaaaatatggaaacaggaacaggactgactccagtgatgacgcaggccttaaggagaaagtttcagtttcctggagacagcgtggtc

SEQ ID NO: 422597 - DNA, 60 bp, Homo sapiens
gtcgcatttggccgcctccctaccggtcctggtccgcgccagagcccagcgcgcctcgtc

SEQ ID NO: 422598 - DNA, 86 bp, Homo sapiens
ttgtgatggcccaggttcttcaaaagattgaggatgaggatgatgaccttcagtatgccgatcatgattatgaagtaccacaacaa

SEQ ID NO: 422599 - DNA, 96 bp, Homo sapiens
tgatgcatgtgatctgggccgcactggcatttgcagctattcaggtatctgcccaaactggaacttatgctgtagacatttctttgtggtttatct

SEQ ID NO: 422600 - DNA, 51 bp, Homo sapiens
tagtggatatagcacaccatccccagccaatgagattgtggggaacctggg

SEQ ID NO: 422601 - DNA, 90 bp, Homo sapiens
cgcctcagccgccgccgccgccgttttcgcctgcagctgctcaccggtcccgcctgactccgctctggaaagtccttttgaagaaatggc

SEQ ID NO: 422602 - DNA, 76 bp, Homo sapiens
ggatggcccccggtgcaagaggcgcaaacaagccaatcccaggaggaaaaacggctcccggcatctccaaagggga

SEQ ID NO: 422603 - DNA, 90 bp, Homo sapiens
gcatcagatgccagctctgaaaaactcttcaacactgttattgtaaacaaagacccaacatgagtgaagtttcctgcaagaaacgggacg

SEQ ID NO: 422604 - DNA, 74 bp, Homo sapiens
agggccctagtgaactgtcaatatagttcagcgaccttcagcacaggtgtagcaagtaatactatccaacctac

SEQ ID NO: 422605 - DNA, 100 bp, Homo sapiens
tcagagggaagatctttttcctcaattgaataactgaagtgaagtgatggactccgatttggagagtagtaagacgtgaaaggaatacacttgtgtttaa

SEQ ID NO: 422606 - DNA, 101 bp, Homo sapiens
gcgggcgagtgcagccggtgacccggcgagaggcggcgccgctcccaagatgtcgcagacggccatgtccgaaacctacgaattaaacaaccaccatgtcg

SEQ ID NO: 422607 - DNA, 100 bp, Homo sapiens
ctacaaggcttttgcagcaatccctacaaacacattgcttttggaacagaagaaatctggatggagaagcagtatttatctcaaagagaagtggacctag

SEQ ID NO: 422608 - DNA, 83 bp, Homo sapiens
ctggaaggtgcgtgtggggctgggtctcggagtgggagacgtggagtgcagcccaagaagatgaaaggattgttcttgttgac

SEQ ID NO: 422609 - DNA, 98 bp, Homo sapiens
tccccgtgtgatccgaaaagtgctggcaaaatgcggctgctgcttcgcccgggggggacgtggtgtctttcctgaagactatcttcccgtctcaaaat

SEQ ID NO: 422610 - DNA, 98 bp, Homo sapiens
tgaagattcaccaaataagctatatactttggttacctatgtacctgttaccactttcaaaagtgatttgaagatattaaagctagaaattggaacta

SEQ ID NO: 422611 - DNA, 90 bp, Homo sapiens
caatccagatatatctgggactcccacgtcaccagatgatgaagttcgatcaatcatcgggagtaagaatattccaacccgggaccggct

SEQ ID NO: 422612 - DNA, 100 bp, Homo sapiens
ctgtgcaggaagaaaacgagccagtgatttacaatagagcaagtgacttttttgaacgaaccattctgtgcaacagccttgtgtggagttgtgctgtgac

SEQ ID NO: 422613 - DNA, 75 bp, Homo sapiens
tttttctcatggatgttcttcttcgagtatttgtagaaggtcaccaggagactaaagtccatcaaaaacatccag

SEQ ID NO: 422614 - DNA, 118 bp, Homo sapiens
gctagaagaaaaggtgtacttgcaagaaacctcaggacttgagtaacagcaacatgttgacctgttaggcttgttaaattggcgttccaactcccagaacattaaacacaacctaaag

SEQ ID NO: 422615 - DNA, 75 bp, Homo sapiens
agcggctggaatttgcgttttatgtcattgaacagattatagcatttgatgagctgaagactgattacaagaatc

SEQ ID NO: 422616 - DNA, 99 bp, Homo sapiens
tgcaggcaaagccggctgttaccctgcacagccgtcaccctcaactttcccttcagtgccctgtactctgtggggatgacggcagtgggcctggccatc

SEQ ID NO: 422617 - DNA, 75 bp, Homo sapiens
cccccatcgagaaaaccatctccaaagccaaagggccaaatatcataaactgaagtttgggacagacctgaacca

SEQ ID NO: 422618 - DNA, 124 bp, Homo sapiens
agcatggaatgaaggttgtccttatcagcagatcaaaggataaacttgaccaggtttccagtgaaataagtaattgtcatgagaaaaccctggacaacagccatgacaaacagaaatattttga

SEQ ID NO: 422619 - DNA, 100 bp, Homo sapiens
ctggacctggttctgccttctggacaatctttccgcgcgttccttcacctcgggcagaataactttgcagaagcccacaggttcttcacagagatcttaa

SEQ ID NO: 422620 - DNA, 51 bp, Homo sapiens
caggagtgacctggagcactgtgaaatgcaatggcacatcgtgattctgag

SEQ ID NO: 422621 - DNA, 82 bp, Homo sapiens
cacttgttccctccaagacaactgaatgggatcgactacaagaccaccaccatcctgctggacggccggcgcgtgaagctgg

SEQ ID NO: 422622 - DNA, 103 bp, Homo sapiens
gtcttcagcctgagacccatccctaggaggaagtctaacaggagctgtatttaatccagctttggcactttcgctacatttcatgtgttttgatgaagcattc

SEQ ID NO: 422623 - DNA, 133 bp, Homo sapiens
caagagtcacttctttacttggtgcaggaaggcagtctttgctacgtacagcaaaagaaacctctgtagaggagcaggatgcaaccgacaggctgtggccggacagctgctgcccagcacatggagcctgcac

SEQ ID NO: 422624 - DNA, 96 bp, Homo sapiens
cttaactctatgcatgctggatcctgagagatgagaggcagcctaaatagacctctttcctgcccttccagaggagtctactcttcatcttgtgtt

SEQ ID NO: 422625 - DNA, 74 bp, Homo sapiens
ccaagtcaaacgcagaaggactgcctcactgagcaaccaagatatttgagaacacagtggctacggtgatggct

SEQ ID NO: 422626 - DNA, 74 bp, Homo sapiens
tgtggaaggctctggataaggaccagtacctgcccaggaaactggtagtaagcattaataatgtctttcatctt

SEQ ID NO: 422627 - DNA, 75 bp, Homo sapiens
ttgccttgagtcagtgcgccgctctccagcccgcttgaacggtgggtgcctgaacctgcctttcaaagagggttt

SEQ ID NO: 422628 - DNA, 100 bp, Homo sapiens
tggactgaaacgatcctctcatctcagcctccaaaagtgctggcattacaggtattttgaaggtggcgtctcatctgtctacctctgggatctggatcat

SEQ ID NO: 422629 - DNA, 99 bp, Homo sapiens
gcttcagaaatcagaaaaacatttgggaggtgtctagcccagtggaccttctgaagggataggatgggatctgcactgatgattgaaacagcaagaaac

SEQ ID NO: 422630 - DNA, 101 bp, Homo sapiens
aggcttcagcagtgcacagagccggaggatcgcgtcccttcaccgatgttgtcaccaccaacctaaagcttggcaacccgacagaccgaaatgtgtgtttt

SEQ ID NO: 422631 - DNA, 100 bp, Homo sapiens
aggaactggctaccgttcggactatttgtagtcatgtacagaacatgatcaagggtgttacactggcacggaatgatttcctgaagagacaaaagacggg

SEQ ID NO: 422632 - DNA, 83 bp, Homo sapiens
gcgagcctccttcgccgcgccccacttgctcgtgcactttacacacatgagttgaagattcctgtctctggatccaaatcaga

SEQ ID NO: 422633 - DNA, 97 bp, Homo sapiens
cagaagaaggacttcggaatgcactacaacaggaaaatcatattatagatggagtaaagtttcaggtttagctgtgcctcccagtgactataatgac

SEQ ID NO: 422634 - DNA, 100 bp, Homo sapiens
cagccatcaggtaggctgcgttgaggatctttgctcttccatccgcctttgatcgtcttcctcttcagccatccaggtatcagaagcatgtgcacacgta

SEQ ID NO: 422635 - DNA, 100 bp, Homo sapiens
tctatagaaatggctgaaggaaaacctccttatgctgatatacatccaatgagggaaaatgtttataggaggccttagctgggacactacaaagaaagat

SEQ ID NO: 422636 - DNA, 100 bp, Homo sapiens
gaaggttacaatagcatacattatgctgccgcctatgggcacaggcagtgtctggaattggaccatggccaacctggagcgcaccttcatcgccatcaag

SEQ ID NO: 422637 - DNA, 82 bp, Homo sapiens
ttctggggaccaacagctggccgaggctcagggatagagacggctgctccagctaaagagttgatctctctaatgtattaga

SEQ ID NO: 422638 - DNA, 100 bp, Homo sapiens
ccagaatgtcacaggtccagggcagaggaccaacatgggcattttgtttatgagcaaggtggataactcctcgctcactggtgaatcagaaccccagact

SEQ ID NO: 422639 - DNA, 100 bp, Homo sapiens
ccgaccttgagctccaggagttcgtctcttacgtctgcggaagtgcagctgcctcagttcttagcgcagacagaccccgtgcggctgacacagctgtatg

SEQ ID NO: 422640 - DNA, 83 bp, Homo sapiens
ccgttgacaaggcactgctttttcatgacgacctgatggccaaaagaaaggaagaaaatttttcctctcctaaaaatgccaaa

SEQ ID NO: 422641 - DNA, 100 bp, Homo sapiens
attctgccttattacgccgtctccaagatgtagctaatgaccgtggttcccactgaggtcttcaaagcttcacctttctccaaaggcagatgtgaagaac

SEQ ID NO: 422642 - DNA, 88 bp, Homo sapiens
gccagggattgggaaaatctcttcagggacacagacagaattatttgttcaactaacattcttcataaaactgatcagacactccgaa

SEQ ID NO: 422643 - DNA, 100 bp, Homo sapiens
ccgacagtgccctgagggccttcgagagctaccgcgccagacaggtgtggacactgccagcggctgcagccgacttggaatgacctgggagacaaataca

SEQ ID NO: 422644 - DNA, 99 bp, Homo sapiens
aggacatccataaaaattcatcagagagcattttactactgagctgcaaagactgacttccttttggtagtactgcgtgatgttgttcaggcttatcct

SEQ ID NO: 422645 - DNA, 82 bp, Homo sapiens
cttgaagacacgcacttatcattcagtggggtggatcatttgtacacattctttgttcagtggtctcccgatgtctatggaa

SEQ ID NO: 422646 - DNA, 100 bp, Homo sapiens
ttactgtggattggatattctcaaggaaccacacatgtattaagatttgcccatcaaagctcctgagtcagtttccactataatcactgcagaatcaatc

SEQ ID NO: 422647 - DNA, 101 bp, Homo sapiens
cagaaacagaaacgattgtggaaacagggtgtatctgccgtacagcaaaagccgtcttctcttcctccagcaccttgtccttcagagatccagacagagcc

SEQ ID NO: 422648 - DNA, 75 bp, Homo sapiens
atttttttgtggagtggtttgaatatcgtaagcgcacgtttaaacatctcaagacttcacatgtatcattctccg

SEQ ID NO: 422649 - DNA, 49 bp, Homo sapiens
tcctctctgagtcaaatccagtggtggcagggcccagccccgaaccaga

SEQ ID NO: 422650 - DNA, 101 bp, Homo sapiens
gcggccccagcactcccagctgcgcagggcctgccaggtggcgctcggaatttatcatggcatccagcattgaccactacaagtaaaatgcgaattccaca

SEQ ID NO: 422651 - DNA, 100 bp, Homo sapiens
gaactcatcaactggaaacagcatttacagattcaaagaagacgtattttagcagatgaagcactcaagctgggcattctagataaagttgtaaactcag

SEQ ID NO: 422652 - DNA, 82 bp, Homo sapiens
gtttgagtccgcatcgccacagctgaaggctgcgagggactaagagcagagttcgagaacttgtcttggacaattgcaaatc

SEQ ID NO: 422653 - DNA, 100 bp, Homo sapiens
atgaatacaaggtcatcagcacaggatatgccttgtcagatctgctacttgaactaccctaactcggacctcagcagccatgtcgaagccccatagtgaa

SEQ ID NO: 422654 - DNA, 100 bp, Homo sapiens
ccgagttcaacatcctcctggccaccgactcctacaaggtcctagcttactctgccaccactgcccggcaggaggaagttccccagcagacagtggcccc

SEQ ID NO: 422655 - DNA, 100 bp, Homo sapiens
aacaagaaggagggtatctgcttcacggagggcaagagccggagggtctcagaggacagacagtgccaggtgctgactgggttacttttttaaacactag

SEQ ID NO: 422656 - DNA, 75 bp, Homo sapiens
ccggagacagcccaaatatcctcggaagagcgctcccaggagaaacaagtggatccataaagaacccagccaacc

SEQ ID NO: 422657 - DNA, 50 bp, Homo sapiens
ctcaagtccttcagataaaaaggtgttctggcactccagcacccatgtcc

SEQ ID NO: 422658 - DNA, 100 bp, Homo sapiens
tgtgagaaacatgtattggttattctaacagacatgagttcttatgctgaagcacttcgagaggacgcacaagaccagccactgctaccgcatcacgtac

SEQ ID NO: 422659 - DNA, 83 bp, Homo sapiens
agaggtcccaatcccccactctttccgccctaatggaggtctccagtttcggtgtttgagaagtcccccctgcgggtgaagaa

SEQ ID NO: 422660 - DNA, 101 bp, Homo sapiens
ggaaaaagcaccattgtgaagcagatgaagctcatcagattcaagagatgtttccccaggttccataccatctggtactgcaggacctccagctgacacgc

SEQ ID NO: 422661 - DNA, 75 bp, Homo sapiens
ccgcagaccccttcaagttctagtcatggtggagataagtaattaacatttcgaaacaggaaatgaaaggattta

SEQ ID NO: 422662 - DNA, 100 bp, Homo sapiens
caaagagtggacatttgtcatagaaaatattcaaccctatgaaaagataaaggccaggggcttgcctgataatatatcttccgtgttgaacaaactagtg

SEQ ID NO: 422663 - DNA, 100 bp, Homo sapiens
gcgagagcagctcctcctggaaaaagcaagctgaagacatcaagaagatcttcgagttcaaagagaccctcggaaccattcgcaacgacaggcgcctcct

SEQ ID NO: 422664 - DNA, 100 bp, Homo sapiens
taacagtctgcactttcacccgtttcagaacacacgaggagatgccacagagcatcgtggaggccacctctaggcttaagaccttcaacttgatcccggc

SEQ ID NO: 422665 - DNA, 97 bp, Homo sapiens
ctctgccctgcgctactattgggatgaatacaaggcttccaatcctcatgcttccttcagtgagggccgggcgcagtggctcacacctgtaatccca

SEQ ID NO: 422666 - DNA, 98 bp, Homo sapiens
ggagaatgactgaggagccattgatgtgtggcttccgagtggacctgccaatcaagtcggcccgctaccgtggccagtacaacacctatcccatcaag

SEQ ID NO: 422667 - DNA, 100 bp, Homo sapiens
gccccccactctgaactcaagtcaccgtggagctccgccgccccgaaactttcaccgcgagcggctctggattaatcgaattacagctgctagccaggaa

SEQ ID NO: 422668 - DNA, 83 bp, Homo sapiens
gccctggggccggcgatgtgccaccgaggctgaggatgatggtagattgccagggctgccagaggaacccgaccagaacctgt

SEQ ID NO: 422669 - DNA, 75 bp, Homo sapiens
gaaacttaaaagatctggctcaccgaatagccagtggcgaagaggactggaatgtcacgtggaataccagcaacc

SEQ ID NO: 422670 - DNA, 75 bp, Homo sapiens
aaaagaagtgttaagaattgcctttgggactctgaaggctgaaggtttgtggtaaatatgccagctctagaacac

SEQ ID NO: 422671 - DNA, 50 bp, Homo sapiens
cgagtatgaaagtcaagtcaaaggtgaccattgtgaggtagatattttgt

SEQ ID NO: 422672 - DNA, 99 bp, Homo sapiens
gtatcactgggggtttcctcctgccagagaccttcctggagcagtcgaaaacccgatttaacaagaactacaaggggatgagtctatccaaaatcacca

SEQ ID NO: 422673 - DNA, 48 bp, Homo sapiens
cagtcaagccttgcccatgtaaaatttttactactggagatgtcaaca

SEQ ID NO: 422674 - DNA, 98 bp, Homo sapiens
aatgaggtggtgggcggaacggattccagcatggacgtcttccacctggagggcatgactacatctgtcatggcttcctgtgtccagtaccggttagt

SEQ ID NO: 422675 - DNA, 100 bp, Homo sapiens
ctgcgggacaggaagtggccgtagcggcttgttggataaggctgctgatactttggctgtgaggcaaaaaaggagaatttatgatatcaccaatgtctta

SEQ ID NO: 422676 - DNA, 75 bp, Homo sapiens
cctacccacgctgaacgagagggacacggagcagtgactacctgtttaagctgcttttgattggcgactcaggcg

SEQ ID NO: 422677 - DNA, 76 bp, Homo sapiens
ccagcgtccgccgcgcctcggccaaggttgcttatggaaccacagagaacagtcccgtgacattcgcgcacttccc

SEQ ID NO: 422678 - DNA, 100 bp, Homo sapiens
gagagcattaaggaactagaacaagaagaagaggagaggaaaaaggaagagagcactgcagccagtgaaaccactgagggtatcgggtgctgcttcggta

SEQ ID NO: 422679 - DNA, 82 bp, Homo sapiens
tcgcccctggcctcgcgggccgtgtctccggcatcatgtgtgattctgatacagagcgtctgtgagacgatggtgccaaagc

SEQ ID NO: 422680 - DNA, 74 bp, Homo sapiens
aatgatttatagctaagactccaggacacccctgaagccgagaaatgcaagaaagtacgactatcagcagccac

SEQ ID NO: 422681 - DNA, 80 bp, Homo sapiens
tggggctcagggccagtgctcactcttattggtaaacagtgttgacctcagagctgctagtcatgagcaggcagcagctg

SEQ ID NO: 422682 - DNA, 82 bp, Homo sapiens
accaggtggatatgacttcagccacagaaagagaggcccagaggggacttagacctgatgttcatcatcagaagcagcacct

SEQ ID NO: 422683 - DNA, 129 bp, Homo sapiens
cgcggctacggcgtcatggaggagatccggcggcagggcaagctgtgcgacgtgaccctcaagcaatggctgccatccggaagaaactggtgattgttggtgatggagcctgtggaaagacatgcttgc

SEQ ID NO: 422684 - DNA, 75 bp, Homo sapiens
ctctagaaatgaatgtttccatctcttcagagatgaaccagaccaatgatgccttaggagccacctggaattggc

SEQ ID NO: 422685 - DNA, 75 bp, Homo sapiens
gccgggtgtgagctgcctgaaaatgcactcggatgccgccgctgtcactgatgcttttttcaaagccgctataag

SEQ ID NO: 422686 - DNA, 82 bp, Homo sapiens
acccgcaggcggtccacccgaatccccgggacagatgctcaagctcagatctccagcaccctgccggtggcactactgagag

SEQ ID NO: 422687 - DNA, 51 bp, Homo sapiens
tggaggctcaagctgggtctactcaagagacgggatttcaccatgttggcc

SEQ ID NO: 422688 - DNA, 97 bp, Homo sapiens
cagagacaagactattaagatgtgggatgtcagtactggcatgtgccttatgaccctcctgagatctgtatctgtggacctgaatgttgatccctcg

SEQ ID NO: 422689 - DNA, 101 bp, Homo sapiens
ggaccacatgaagctgaaggtccagggcatggagatctgtgacttcctccgcggagccacagtccatagaatcctcggccagcaggtcccctatgccacca

SEQ ID NO: 422690 - DNA, 83 bp, Homo sapiens
ctggaccgtcgccttgctcctcgccgcggcggggactgcagatgctgctgctaggggtggtgggagcagccgtgggacgcgtg

SEQ ID NO: 422691 - DNA, 98 bp, Homo sapiens
ctgacaagtgaggaggtcggagcagacttggagcaggttgaggtgctccagaagaagtttgatgacttccagaaggagactccagacccctggcagag

SEQ ID NO: 422692 - DNA, 74 bp, Homo sapiens
agcagcaccaaatccaagatggcggccagcaggaggctgatgaaggttaacacagaaatctgcctcctgggcca

SEQ ID NO: 422693 - DNA, 90 bp, Homo sapiens
gcggagatctctctcatctcgctcggctgcgggaaatcgggctgaagcgactgagtccgcgatggaggccatcgaagacggcaatttgga

SEQ ID NO: 422694 - DNA, 50 bp, Homo sapiens
caaaattaacaccatcttcatatccaaggacaggacatccagcccaaaag

SEQ ID NO: 422695 - DNA, 89 bp, Homo sapiens
taaggattccaagtaactcttatttggattgtggctgcacggctcaacggttcccttgatttcttctccttggagacccacactgccct

SEQ ID NO: 422696 - DNA, 100 bp, Homo sapiens
tggggccgcgtccggtgtgaagacagggagacgctgctgcagctccgggacacctggggccgccgaggcaaagcttctcaataggtttggcatggacaag

SEQ ID NO: 422697 - DNA, 87 bp, Homo sapiens
cactacctggacgacaagaggaagtaacctcaagaatagaattccttttggggaagaaagaggaatactctgaagatagtaactccg

SEQ ID NO: 422698 - DNA, 75 bp, Homo sapiens
gttctgtatgagacgtatcatggcgtgtttgtcaacattcagggcctgatcaagatccggggggaccggtgctgg

SEQ ID NO: 422699 - DNA, 100 bp, Homo sapiens
agtatcacagatccagcagcacaaagaccagtataatcttcttaaaatacagctagctcatatttctgaacatccaaatcagcaacccagtcacaaaatt

SEQ ID NO: 422700 - DNA, 74 bp, Homo sapiens
ctgggggcctacatccaggagagcgccaccttccttgaagctaaagatgtgattaaagagattgaagactttga

SEQ ID NO: 422701 - DNA, 100 bp, Homo sapiens
ggatatctgtgataaagttggtcagtctcgcactggcctcaagtactacagccttccagcagccttcccagacccacagatcacacccagggaaaactaa

SEQ ID NO: 422702 - DNA, 100 bp, Homo sapiens
atgctaatgacaagcctgagaaggaaaaaccacctccggtcaataagcaggagaatgcaggcactttgaacatcctcagcactctctccaatggcaatag

SEQ ID NO: 422703 - DNA, 101 bp, Homo sapiens
tgggaagattttggtagagaagaatgaacattgtattgagaacaatatagatttgcaggcattacctgacactcagatcaccagttatgcagcaactttac

SEQ ID NO: 422704 - DNA, 99 bp, Homo sapiens
gctgaggcgggcgttttcttggatgaattgcttgctttggagccctccagaatacccatcatatagcccctgaggtggcatggtgatgtctccatgagg

SEQ ID NO: 422705 - DNA, 90 bp, Homo sapiens
gcggcgcgctgctggacgaagagctctcctccttcttcctcaactatctcgctgacacgcaggctgaccaactgactgaagagcagattg

SEQ ID NO: 422706 - DNA, 74 bp, Homo sapiens
ttttcatggatgcccctgtttctggtggttctaagctggtctatgtccatcaccttcttggagaaggagccttt

SEQ ID NO: 422707 - DNA, 75 bp, Homo sapiens
attgtcaccagaaaaatattgtacacagggacctgaaggggtcactcccattgatggagctccccaccgatcata

SEQ ID NO: 422708 - DNA, 100 bp, Homo sapiens
catgaacccgagctatagagaaaggagatgagatctctggaaacatggctacagaacatgttaatggaaatggtactgaagagcccatggatactacttc

SEQ ID NO: 422709 - DNA, 87 bp, Homo sapiens
aaacttgaacgcaaagagatccagcccccttataagccaaaagctatgccatggacaatattaccaggcagaaccaattctacgata

SEQ ID NO: 422710 - DNA, 75 bp, Homo sapiens
ccagtctcgactggattacaattggctttttttacagaaaagtacttgcaggagcatcctgaagaccaggagaag

SEQ ID NO: 422711 - DNA, 120 bp, Homo sapiens
aaggcattttatgctccagtacatgcagatgacttgagagaaggtgcacagtatttgatgcaggaaattcgaaatgagtcccatgactatcctcatagagtggccaagtttccagaaaac

SEQ ID NO: 422712 - DNA, 50 bp, Homo sapiens
tgatgtggaggaagaagagctcaggcgaacctgggagacctgccttccct

SEQ ID NO: 422713 - DNA, 100 bp, Homo sapiens
aaagacaagagttctttagtttcatctctctataaagttatccaggagccacaaagtgaggaattcatgaagcataatagtccacagcagaataagaatt

SEQ ID NO: 422714 - DNA, 101 bp, Homo sapiens
cctcagagtaaagctgctggacaacaccatggaaatatttgacattgagatacttgccagaactaatacagctgatgaaatacctgaccttttctgctcca

SEQ ID NO: 422715 - DNA, 82 bp, Homo sapiens
gccttcctcaacgacgcggacatggtcatgagctttgtgaacctggttccagggtctccctccactgctgtagtaacccggg

SEQ ID NO: 422716 - DNA, 100 bp, Homo sapiens
ggtgaagatcggccactacattctgggtgacacgctgggggtcggcaccttcggcaaagtgaaggaaccgagattaagcgtagctcctgaaatggatatc

SEQ ID NO: 422717 - DNA, 75 bp, Homo sapiens
tgaagccacacagtgtccagatacgagggctgtaacagaagacaagtacgaaatactgcaatctgtcgacgatgc

SEQ ID NO: 422718 - DNA, 100 bp, Homo sapiens
cggagccgcggggcgcgggcggcggacagattgaccttcagagcgagagcaaatcatggaggaagataaaaaacatggtgcactggtctcccttcgtcat

SEQ ID NO: 422719 - DNA, 82 bp, Homo sapiens
tggctgcggagcggcgagggacctcgcagggagccatccgatgctttatcctgtggataaacgcagagtgaacgagtttggg

SEQ ID NO: 422720 - DNA, 99 bp, Homo sapiens
tgaaaatggaagagtaattgcctgctttgattccctaaagttgatggagaaccttgtgacctgtctttgaatataacctggtatctgaaaagcgctgat

SEQ ID NO: 422721 - DNA, 99 bp, Homo sapiens
cgcagccaggccctgggccagtcggcgccctcgctcaccgccagcctggatgattgtagagttgtcttggcaaaacaggaaattacaaggttactggaa

SEQ ID NO: 422722 - DNA, 50 bp, Homo sapiens
gccaagatggcggtgctgtcaggggcctgtgaagcctccctggcctgctc

SEQ ID NO: 422723 - DNA, 100 bp, Homo sapiens
ccagcagacagtggccccacagcaacagaggcacagcttcaagggggaggagtgtccagcagtgtcttgggacaaggtgcgcattcctggtgtgctgcag

SEQ ID NO: 422724 - DNA, 74 bp, Homo sapiens
tgcataccagaggtactacagtttacagtctgactactggaaggtgatgctgtggagtcttcaaaaagcccgac

SEQ ID NO: 422725 - DNA, 75 bp, Homo sapiens
ccaggaggccgtggagatggcagagaagatagctcgctgggaggagtggaatcttccacaatctgtaattgaaaa

SEQ ID NO: 422726 - DNA, 119 bp, Homo sapiens
gacgtccccaacaccgccagcgcccaccctggctcaccgtgcggatctgcctccgcagaagacaatgcagatcttcgtgaagactctgactggtaagaccatcaccctcgaggttgagc

SEQ ID NO: 422727 - DNA, 75 bp, Homo sapiens
ccgagaagatgcatgctcgagatttcactgtatccgccatgcgtgagtgcatctccatccacgttggccaggctg

SEQ ID NO: 422728 - DNA, 100 bp, Homo sapiens
ccacttggttctgccagatgttcctggggttactgtaaatgggaaggacaggcagagctaaacaagatatggaatatatgaacgctgtcgagaattggtg

SEQ ID NO: 422729 - DNA, 109 bp, Homo sapiens
tgaagacgacttcgaccctgcccagcacgaccagctcatgcagtgtccagctctgaagggcaaagtgcagaagatcctaatctggaagtggggtcagccaccatctccc

SEQ ID NO: 422730 - DNA, 74 bp, Homo sapiens
cgccgcggacctccctgcgaccgtcgcggaccatgggcgacaaagggacccgctttgtcacccgaaagaaccgc

SEQ ID NO: 422731 - DNA, 100 bp, Homo sapiens
ctcctaagcggcactcagtgcaaataacaatagcaactcccccagcagtaggagagaagtttgctgaggaatgccttcaagcacaaagtgatgaatgact

SEQ ID NO: 422732 - DNA, 99 bp, Homo sapiens
agaatcgtcactgaggttgcagttggcgtgaagtctgatgccaatgcaagttacttaagagcagctcgagctggacaccttgaaaaggccctcgactac

SEQ ID NO: 422733 - DNA, 123 bp, Homo sapiens
gaagaagcctattctaaggaaaagtcttcaaagaaagggaaggggaaaaagaagcagtatctatgcccatcccttttccccacgactctgaaagaggacagcgttcccaatgtcccagtttaa

SEQ ID NO: 422734 - DNA, 75 bp, Homo sapiens
tttgcggaggatggcgtctaatgagcgcagttgattcgaggcctcagagaaccatggctactgccaagggaatcg

SEQ ID NO: 422735 - DNA, 90 bp, Homo sapiens
aattcagaaggtggctcaatgcaggtattcaagcagatttttaaagagcgagaagaagatttgaggcgtttgtctcgcccattggaatgt

SEQ ID NO: 422736 - DNA, 100 bp, Homo sapiens
ctgcctcagcctcccgagtggctgggattacagattgcagcaattctccggaaacggaaattagactattatttacacaaactactccctgagatcctac

SEQ ID NO: 422737 - DNA, 101 bp, Homo sapiens
gccggcttctcccctacgcgctacacaagtggagctccttttcctccacctaccttcccgagtttttcgttggaatatacgttgcacatttatggcgattc

SEQ ID NO: 422738 - DNA, 82 bp, Homo sapiens
taagaaagaagatgttaactttcaggaagaagttgaagctttgatatgagtaaacaagtatctctacctgaaatgattaaag

SEQ ID NO: 422739 - DNA, 50 bp, Homo sapiens
caagaagcagcttgattccaaaggagtcagtggatcggtggggaaaatgc

SEQ ID NO: 422740 - DNA, 90 bp, Homo sapiens
ctccactccgtcccccgcgggtctgctctgtgtgccatggacgggcctccggtgtggctgtctctgatggtgtcatcaaggtgttcaacg

SEQ ID NO: 422741 - DNA, 99 bp, Homo sapiens
acacaggcaaactgtcagaaaagagtagcctgggctgtctggaaatctgagcggctatgtgactacgtttgtgacctcctcttagaagagtcaaatgtt

SEQ ID NO: 422742 - DNA, 98 bp, Homo sapiens
tgttctcgctccggagccgctgcacatttcgccatcgactacagtgacagcgccatgctccaagctcagcagctgctcctggggctgggctctttcct

SEQ ID NO: 422743 - DNA, 104 bp, Homo sapiens
aaaacattcaagttgagcagatgacaaaacttcaagccaaacatcaagcagaatgtgatttgcttgaagatatgaggttaccccacagcctatccagcagctgc

SEQ ID NO: 422744 - DNA, 100 bp, Homo sapiens
tgaccacaaactgcagcaagtgatcagagataatctctacttgagaaccattccatatcatacatctgtcggtggcctgggagacagtttttatgaatac

SEQ ID NO: 422745 - DNA, 100 bp, Homo sapiens
aagaagaccattcagatgggatctttccggatcaatccagatggcagccagtcagtggtggaggtacggttcctggagcagcagaacaagatgctggaga

SEQ ID NO: 422746 - DNA, 100 bp, Homo sapiens
ggcctggcacggaatgcagtttttacataagttttttcagataactattatcgtgcagaaatgattgatgccctggccaactctgttacacctgcagtca

SEQ ID NO: 422747 - DNA, 82 bp, Homo sapiens
cgccgctcaccccgcggccgcaccttcccgccttctcaggtccctgactatggctccccagagcctgccttcatctaggatg

SEQ ID NO: 422748 - DNA, 108 bp, Homo sapiens
ttgtaacaaatcggaaaagaagaccatctcaccagagcatgtcatacaagattgcttatgcccgtatagagggggatatgatagtctgcgcagcgtatgcacacgaac

SEQ ID NO: 422749 - DNA, 98 bp, Homo sapiens
cctaaactggggcctggaaaaggagctaaagttgcagacaagatccagctcatcaataatatgctggacaaagtcaatgagatgattattggtggtgg

SEQ ID NO: 422750 - DNA, 82 bp, Homo sapiens
ttcttcggggtctggtggaaaaacaagcccaagtggctcctccagggcatctacaatgcagatcttcgtgaagactctgact

SEQ ID NO: 422751 - DNA, 100 bp, Homo sapiens
cttggagacagttattcaccatgtacacagcctgtacccttctgctcctttcctggcagcaggggtttcaatgggagggaccttgcagatgcttcgggag

SEQ ID NO: 422752 - DNA, 90 bp, Homo sapiens
cccagaaccactgcctacaaaccaccctctcctgaccctgaagaactgtgcgcttctatgcagccacatcacggcaactgaagcggctgg

SEQ ID NO: 422753 - DNA, 97 bp, Homo sapiens
ggtgttgaagctgttaaaaatgaactgcggaggcaagaagaagctcattcacacagaagacccatttaatgatgaacatcaggagaggcaagaggtg

SEQ ID NO: 422754 - DNA, 59 bp, Homo sapiens
gggaaagaagattccattatggaggaagagaggtcagtaacagatccaagagatggaaa

SEQ ID NO: 422755 - DNA, 90 bp, Homo sapiens
gaagattcgaagaccagaggtgagaagtatcatcgagaaaggagaagaacactgtggacatctaattgaggcccacaaggaatgcatgag

SEQ ID NO: 422756 - DNA, 90 bp, Homo sapiens
gaccaattactgggagagctgcagccaggagcaggaggtcaagcagagaggcgtttccatcaaccagttttgcaaggagttcaatgagag

SEQ ID NO: 422757 - DNA, 90 bp, Homo sapiens
gaagaatcaaatattcagtgggatacaaatgagacgaagtttcatcatgttgtccaggctggtgtcaaactcctgacttcaggtgatcca

SEQ ID NO: 422758 - DNA, 74 bp, Homo sapiens
ccagggtccctgaagagggaagacacgcggaaacagggtggtgacttcacacgccataatggcactggtggcaa

SEQ ID NO: 422759 - DNA, 100 bp, Homo sapiens
cgccgtcgcgccactcctccgagatctttcgaagatggtttggctgccttggagatttggagatctgatgccacgatgaggactcacacacggggggctc

SEQ ID NO: 422760 - DNA, 82 bp, Homo sapiens
gctaagacgccgtgacaccttctacaaggagcagctggagcgtattgagaggaaggtggacgacatccttggagaaggcagc

SEQ ID NO: 422761 - DNA, 75 bp, Homo sapiens
aacaacctcaatgagaagatcaagaaggatgaaatttctgaataaattggcagaagaacgcagacagaagaagga

SEQ ID NO: 422762 - DNA, 109 bp, Homo sapiens
ctcagttggaagcagccgatccagcctgcggagcctgtggggcaggtggtgctgtgggtcggcctgggcgtcctggtggtgagcactgtcaccacactgtctgtgagcg

SEQ ID NO: 422763 - DNA, 98 bp, Homo sapiens
gccgggagcacccaaggcaggaaaatgagtggaagatagatgataagcctgtaaaaattgacaagtgggatggatcagctgtgaaaaactctttggat

SEQ ID NO: 422764 - DNA, 83 bp, Homo sapiens
ccttgtggagccggagctgggcgcggattcgccgaggcaccgaggcactcagaggaggtcgcgtggggcaggcagtggcgctg

SEQ ID NO: 422765 - DNA, 98 bp, Homo sapiens
gaaatcgacttcggtttcagttggagttggaatttgtgcaatgtttagccaacccaaattaccttaattgtgatgatgaacagtctacacagatggct

SEQ ID NO: 422766 - DNA, 75 bp, Homo sapiens
gaacaaacgcaaaaggacagtaaactgtggaccttgaagttagcaggaagctcttcgtgggcggtcttgactgga

SEQ ID NO: 422767 - DNA, 96 bp, Homo sapiens
gtacccactggaccgtggttttgcaggaaatgtgaatctcaggagagagcagccagagtgggcacttggaacgggccctgggtgtccactgaggtg

SEQ ID NO: 422768 - DNA, 98 bp, Homo sapiens
ctacaccacagtactgcgtctgtttttgttaccccacaaggaccagcgccagatgttctttgtgggtggtgacttcacacgccataatggcactggtg

SEQ ID NO: 422769 - DNA, 80 bp, Homo sapiens
gaagacgaatcgttaaacatcttaggtcaggaggctgatccgatagagtaatacctaattatatcaccatgagatggcaa

SEQ ID NO: 422770 - DNA, 96 bp, Homo sapiens
gtctcactgacttcaagaatgaagccacggacccttgcggttgaaatcacaaagattagacacctttttagataggtgttcttcagcaccactgac

SEQ ID NO: 422771 - DNA, 100 bp, Homo sapiens
gaccccaagaagaccattcagatgggatctttccggatcaatccagatggcagccagtcagtggtggagtctataggatcgggtgaaccaccaaccggca

SEQ ID NO: 422772 - DNA, 75 bp, Homo sapiens
tggtgtccgccccgcccgaaagaacaagttgaaatcatcgcagaaggataaagttcgtcagtttatgatcttcac

SEQ ID NO: 422773 - DNA, 50 bp, Homo sapiens
cactatcccaagactgctggcaacaggtggcaattttggaggtagccccg

SEQ ID NO: 422774 - DNA, 51 bp, Homo sapiens
ttctggctttgatgaagatgacaaggctagttcaggggatacgataaaaga

SEQ ID NO: 422775 - DNA, 118 bp, Homo sapiens
acacgatccagatccggcaggactggagacacctgggagtcgcagcggtggtttgggatgcgatgtggacgaatgtcagcagaacccaaggctctgtaaaagctacggcacctgcgtc

SEQ ID NO: 422776 - DNA, 83 bp, Homo sapiens
gtgctggagagaccccgcggctgggcgttcatctaccacgctttcgtagttcctggaataactattgctacagatattatctg

SEQ ID NO: 422777 - DNA, 98 bp, Homo sapiens
ggggcgcgaccgcggatccgcagttcccgggccagcctggggcggccggccaggaaccacccgttaaggagacatggaaatttacactacagaaggca

SEQ ID NO: 422778 - DNA, 90 bp, Homo sapiens
taaaattggactcagagtttccattgacactgatatgatctgcttggctttgaggaagagtggcagtactgcctcactgcataagggatg

SEQ ID NO: 422779 - DNA, 100 bp, Homo sapiens
cggcagccttgactccccagggaagcaggcaatctgaaagcaaatcctgtttagatgcaggcgaaggttcctggtgacccaggctctcaccttaccgtcc

SEQ ID NO: 422780 - DNA, 100 bp, Homo sapiens
aagaagtgggaaggatctgcgcgggtgccactatgcacgtgaagaagtacctgctgaagggcctgcatcggctgcagaagggccccggctacacgtacaa

SEQ ID NO: 422781 - DNA, 75 bp, Homo sapiens
gcccaggaacgtggcgctcatcaccggtatcacaggccagattgctggactcgctgaagagagactacgcaggaa

SEQ ID NO: 422782 - DNA, 75 bp, Homo sapiens
tcccgcttcagcctctagagtagccgagaccacagagcttactcacatagcatattggtatatcaaaatgaaatg

SEQ ID NO: 422783 - DNA, 90 bp, Homo sapiens
ctagctccaggttaggccgagctttgcgggaaagcagcggtgacagagttagtccttgataattgcctgtgtgtcaatggggaaattgaa

SEQ ID NO: 422784 - DNA, 100 bp, Homo sapiens
cacatcaggacagctgttccttggccatcccaaagctattctgggggcaacagaggaggtatatcgaattccaaagaaaagtcaaactgaaaaggaaaac

SEQ ID NO: 422785 - DNA, 83 bp, Homo sapiens
ttcatgctcttggacttcccagcctcaagaactagagacaagagagacacctccaacttcgacaaagagttcaccagacagcc

SEQ ID NO: 422786 - DNA, 74 bp, Homo sapiens
ctggaccagcctcttctgaaacactggggagatgaccaggatagtgaaaagtcaaaaccagcaggctcagatgg

SEQ ID NO: 422787 - DNA, 83 bp, Homo sapiens
ccgcctggtcatggcgcagccgggcccggcttcccagcctgacgttgcagaggaaagtggtcgcttatggtcagaggagcagc

SEQ ID NO: 422788 - DNA, 51 bp, Homo sapiens
agctgagagagactttgaacatccaccaaaaccctcaacaggggcatctct

SEQ ID NO: 422789 - DNA, 73 bp, Homo sapiens
gccaacagctccctgctcggaggcggtggcggtcttgggcgtctttggtactggcttttttaggggtctgcct

SEQ ID NO: 422790 - DNA, 100 bp, Homo sapiens
acacatcaaactccgggccacaggaggaaatagttctggatgcgggtacccttggtggcaccagaggacctgagagatgatataattgagaatgcaccaa

SEQ ID NO: 422791 - DNA, 90 bp, Homo sapiens
gacccctaacaacccagcagccacagatttgaaagaagccaacactaaaccacaaatatacaacaaggccattttctcaaacgagagtca

SEQ ID NO: 422792 - DNA, 75 bp, Homo sapiens
tcaaatggcacttcattggccacctacagaaacaaaatgtcaacaaattgatggatggagtctggctctgtcgcc

SEQ ID NO: 422793 - DNA, 82 bp, Homo sapiens
atctcagacttccagccttcagaactgtgtgttccagagaacaagccttcagacatttgctatattgacgctgagctgtcag

SEQ ID NO: 422794 - DNA, 100 bp, Homo sapiens
ttgctggacggccagtgggagagcgaggcctgagcctctgcgtctagatacagtttatgtaacttgatggaagaaaatggaattactccaaaaagacaag

SEQ ID NO: 422795 - DNA, 75 bp, Homo sapiens
aatgggcagcatatgaaagtggattatggtgctatgctggaaaatgagaagaagaagcgtgaaatggcagagaag

SEQ ID NO: 422796 - DNA, 101 bp, Homo sapiens
caggagaagtttttatcaacaaaggcaaaggattcggatttattaagcttgtcgggtcggcagcggttctggtcggaacctgtgggtcagcgggctgtcct

SEQ ID NO: 422797 - DNA, 100 bp, Homo sapiens
tcgacaccaagaagccctgcacccggtctttgacatgcaagggcttttttgaagaagaagaaggtaaagagtatatttataaagagcctaagctgacagg

SEQ ID NO: 422798 - DNA, 75 bp, Homo sapiens
tttcattgtgggagagatgaagaacctgagtcaggacgtaaatggaaccctggtgaatctggattgggaaagtcg

SEQ ID NO: 422799 - DNA, 106 bp, Homo sapiens
accggcgacagcagccaggagtcatgagcgacagcggcgagcagaactacggcgagcggatgatatcatcaagttgaatcgaaaggaagggaagaagcagaatttt

SEQ ID NO: 422800 - DNA, 100 bp, Homo sapiens
ctcccgccggccgtctccttaacaccgaacaccgaatttataagtatttgaccgtactcaaaatgtgcaaggaagaataatggaagcccctgaatacctt

SEQ ID NO: 422801 - DNA, 82 bp, Homo sapiens
cctcccaaagtgctgtgattacagatgagttttgatcatcctgagaaaaatgggccttggcctgcagacccaataaaccttc

SEQ ID NO: 422802 - DNA, 78 bp, Homo sapiens
atacaaaagttttgcagtactatttcaatctaggattgcagataaatgcatgggggcaagatggcagataggaggcag

SEQ ID NO: 422803 - DNA, 150 bp, Homo sapiens
aggtgttcaaacagcactgccaaatagcagaagaataccatgaggtcaaaaaggaaatcaccctgcttgagcaaaggaaatctttaatctcatgaagtacgacagctacagccgcttcttaaagtctgacttgtttttaaaacacaagcg

SEQ ID NO: 422804 - DNA, 82 bp, Homo sapiens
tgctactgccctctgcgctcctgcatctgcctccccatgtatatgaatggcacctgcccagaaggaaacagctgtaaatttg

SEQ ID NO: 422805 - DNA, 100 bp, Homo sapiens
ttcgaggcggcgggggacaagtcggcgccccagagcggacgaggatgatgatgctgaagctatccttgctgcagacttcgaaattggtcactttttacgt

SEQ ID NO: 422806 - DNA, 74 bp, Homo sapiens
cgagggaggatgtacacacttgagtgaggtaatctcagccaggaaaggagagtttgaaactggatttgaaaaag

SEQ ID NO: 422807 - DNA, 100 bp, Homo sapiens
ccggcatcctgcacacgtggatagtttgttcttttttgaagggagatccaacatgttggcagataaattgaacatgactccagaagaagctgaaaggtgg

SEQ ID NO: 422808 - DNA, 75 bp, Homo sapiens
ctgctccacaagcggcgccgcgccctcggcctgcacggtgatggaatggggagaagatattaaagcagtttcaaa

SEQ ID NO: 422809 - DNA, 82 bp, Homo sapiens
tgaggacttaaatgaagccactgattagcaatttaaagatcctctccaaggaagaagaaattgtcgagacgaataacatgag

SEQ ID NO: 422810 - DNA, 75 bp, Homo sapiens
cttggactgagtcctgcaggacacaggaataatcaagctgggaaggtggaaccctctccccctcagttatgtgac

SEQ ID NO: 422811 - DNA, 75 bp, Homo sapiens
tttgtgttcctggaggcgatgtacaaccagggattcatccgaaagcagtgtacttaagagattatggcatcagaa

SEQ ID NO: 422812 - DNA, 50 bp, Homo sapiens
ccggagcacccgacccctgaagaaaccctaaagcaggcagcagctcagaa

SEQ ID NO: 422813 - DNA, 82 bp, Homo sapiens
gaagaatcttcaatggatgaggaacagtcaaagtagtttatgccaacgtgacttcattcatacagatgaaccaaggatcggg

SEQ ID NO: 422814 - DNA, 120 bp, Homo sapiens
gaacgaaaacgtagggaccacatcaaagacagctttcacagtttgcgggactcagtcccatcactccaaggagagaaggatgtaatccctgttcattactacttaatacctccaccaaca

SEQ ID NO: 422815 - DNA, 100 bp, Homo sapiens
ttgctgcgccctctcagcttcccaagaaagaccatggcaaaagttataaccaccgtactgaagttccctgatgatcagactcagaaaattttggaaagag

SEQ ID NO: 422816 - DNA, 98 bp, Homo sapiens
ggatacagcagtttggtcaatattgtcttaacatgcttcaaataaatcagcatgttggcagataaattgaacatgactccagaagaagctgaaaggtg

SEQ ID NO: 422817 - DNA, 88 bp, Homo sapiens
tttgtggaaagaagatacacagcagttgtcttaaacaggttcttcacacacccccattcggcgtagtacccagagagctcaagatgtg

SEQ ID NO: 422818 - DNA, 100 bp, Homo sapiens
tgagacagctgtggccctggatacggagatccctaatggtgggagcaggtgctccgtgtcggcagttaacctgcccaaacacgtggactctataatcaac

SEQ ID NO: 422819 - DNA, 82 bp, Homo sapiens
ctgaaatgattcatttctggaagcattctacttaaagcccaatctgcaggtgttgcgagcccgattctctgagatcacaccc

SEQ ID NO: 422820 - DNA, 75 bp, Homo sapiens
gcctgtgccaggcaggctacgagaaggtggaggatgcctgccaggtggaatctaatcagaaaagctcattccaag

SEQ ID NO: 422821 - DNA, 100 bp, Homo sapiens
cgacccagatcccagcggaaaggagcgcgcctctttttggcttggggagctgcagcgttcgagtacatccagaaatacgccacggaggaggcgctgaaag

SEQ ID NO: 422822 - DNA, 100 bp, Homo sapiens
ggcaaagaacaagagaagacctcagatgtgaagtccattaaaggttaacgtccctaaaacccgccggactttctgtaagaagtgtggcaagcaccaaccc

SEQ ID NO: 422823 - DNA, 96 bp, Homo sapiens
gtcaaaggaaaactaggcagacttctgggcatatttgagatttccacatggaagaggcactggattggcctggagtatacttgttaccaggccagg

SEQ ID NO: 422824 - DNA, 83 bp, Homo sapiens
gggtgcgagattcctgcccagctactaggccacgactgggtctcggcgcggaagatggccggcggcgtggacggccccatcgg

SEQ ID NO: 422825 - DNA, 75 bp, Homo sapiens
taagcctgtcactcaacaggtacgacaagactttgaagattatccaatgagaattttatatgaccttcattcaga

SEQ ID NO: 422826 - DNA, 100 bp, Homo sapiens
ttttgcctcagatactattttgaaggaatttatcaaagagctgctttctcggataagaggcatgaggaaactgagccctccgcagaagaagagtgtatga

SEQ ID NO: 422827 - DNA, 82 bp, Homo sapiens
ccagaccctggagcctcagttggaagcagccgatccagcctgcggagcctgtggggcaggagtagcccatcgaagccagagc

SEQ ID NO: 422828 - DNA, 100 bp, Homo sapiens
ctctggatggaagccatggatggccgggaacctgtggtttgtcctgattgtagtgatgagattgctgtaaaaaaggacaatattcttgttcgatctttca

SEQ ID NO: 422829 - DNA, 100 bp, Homo sapiens
tcccagcagtgcaaacagacttcggagtacctgcgctatgaagacacgcttcttctggaagaccagccaacagaggaggctgcggaggaggaggaggaag

SEQ ID NO: 422830 - DNA, 75 bp, Homo sapiens
tagacaggctacgcctggacaaatactatatgtctaacttctccctggccatcctgaatgtgggggccccggcgg

SEQ ID NO: 422831 - DNA, 100 bp, Homo sapiens
ctggaagaagcggaagaagatggcgctcaccagatgctttcttcacatgtcgaaaaaatgtccttctggcgaacagctcatccccccaggtagagggcga

SEQ ID NO: 422832 - DNA, 73 bp, Homo sapiens
aaaagagatgagagaccactctttccccaaattggtccagaaaagggcgtggtgcacctggcgacagcggccg

SEQ ID NO: 422833 - DNA, 98 bp, Homo sapiens
gacagagacaagctgagcttgccgcacaaaaagctagagaggaggtgaattagttatccctcttcttgtagaagaccctttagctacccctcctattg

SEQ ID NO: 422834 - DNA, 75 bp, Homo sapiens
cccagaccttcagcccgtggcccggatgcaggacagacccctcaggaaggaaaatcacctcggcagtgtttgaag

SEQ ID NO: 422835 - DNA, 50 bp, Homo sapiens
gagatgctgtggttcggggggtgctcgaacccagcgggtgccgcttctcc

SEQ ID NO: 422836 - DNA, 98 bp, Homo sapiens
gacagaaggcgtctcatggcgttggaataccggctctcagcggctgatgagttccacccgttcatcgaggccctgctgcctcacgtccgcgccttcgc

SEQ ID NO: 422837 - DNA, 80 bp, Homo sapiens
aaacaggccatcagcatccgggaccatatgaatgccagtgcccagggccacagggggtccactggacggggcctgagcta

SEQ ID NO: 422838 - DNA, 73 bp, Homo sapiens
agttatcgggtgtgaccgccgccgcccaggtattgctattaaggagtcagcaaaagtgggtgatcaagctcaa

SEQ ID NO: 422839 - DNA, 82 bp, Homo sapiens
agggtctgaggtcatcggggatgtggacgaaggggccgacctcctagaaaaatggctacaaacttcctagcacatgagaaga

SEQ ID NO: 422840 - DNA, 75 bp, Homo sapiens
tcggaggtctcatctttgaactactgccggagcttctgccaggtcagcacctcatctatgggcactttaccaaag

SEQ ID NO: 422841 - DNA, 100 bp, Homo sapiens
agcgagctgagtggttgtgtggtcgcgtctcggaaaccggtagcgcttgcagcatggtgtgacagcatggagaagctaaaggctcttctgccaagactgg

SEQ ID NO: 422842 - DNA, 100 bp, Homo sapiens
gataattggatcaaagatgctgtgtgttaacagggcacaaccattatgtgatgtgtgctcagttccaccccacagaagacttggtagtatcagccagcct

SEQ ID NO: 422843 - DNA, 49 bp, Homo sapiens
cggaggcaggaccagctgcagctgctggtgatagcacactcagataaga

SEQ ID NO: 422844 - DNA, 75 bp, Homo sapiens
ggagtctttggctggctatgcagacatctttctggcaatttgaatcaacccatagaagtgacagcgctgtattca

SEQ ID NO: 422845 - DNA, 82 bp, Homo sapiens
cggcgagcgcgagcggcgcgagaaaccctgctggtttaccgtgtcttcaggaacgaagctaaacgcaccaccaaggtcctgc

SEQ ID NO: 422846 - DNA, 75 bp, Homo sapiens
tcctcctttgacagggacatcagtggagccttctcagacccacaggtggacgtctgatttatgaagctccccatc

SEQ ID NO: 422847 - DNA, 100 bp, Homo sapiens
aaacaaatttggaaagaaaaagaatggcgtccgtttcaggtatgtcgagagtaccaacgtggcaattgcaaccgaggagaaaatgattgtcggtttgctc

SEQ ID NO: 422848 - DNA, 90 bp, Homo sapiens
tcatgtcaagcgaagccttgaaaaagctgccctgagacggtgtcccgccgaaaggagttcaaagaaggacgcagagccagccacacagcc

SEQ ID NO: 422849 - DNA, 75 bp, Homo sapiens
cctggattggtgaaactgaatcacaggagatatttccaggctatcaagtactagctccaactgcctattatgatc

SEQ ID NO: 422850 - DNA, 90 bp, Homo sapiens
gcaaaggtgtcgtggtggtcattaagcggagatccggctcatcatatgcccgaagctcagtggttacggctgtgaaatttacaatttctg

SEQ ID NO: 422851 - DNA, 82 bp, Homo sapiens
tgccctggtcttgctcggccgatgaagtgcagaggtttttttctgctgaagacctaactgcagcatgtctgtatttggagat

SEQ ID NO: 422852 - DNA, 100 bp, Homo sapiens
aacagccgcaagtttgagtttgaaactagtccagactataaaagcttcgatgatgaagaatcagtggatggaaataggccatcatcagctgcatcagcct

SEQ ID NO: 422853 - DNA, 100 bp, Homo sapiens
gaagacaagagagaacgcaaacagtttgaagctgaggattttgtgtgatccctcacatccacaaatctctgattggaaagaagggacagcagaaaactgc

SEQ ID NO: 422854 - DNA, 82 bp, Homo sapiens
cccgctgccgtcgccgccgccaccatgcccaagagaaagttgattatggaagattcccacaagagtaccacgtcagagacag

SEQ ID NO: 422855 - DNA, 75 bp, Homo sapiens
cacgactcttatcgagcccattcgtcttggaggcatctcttccacgggtttttaatgaccacaacaagcaagcat

SEQ ID NO: 422856 - DNA, 80 bp, Homo sapiens
agatatcagtgtggattttgcaactgtgtgaatgatggctctgaaccaagttgtcctatgggacaagattgttttgagag

SEQ ID NO: 422857 - DNA, 95 bp, Homo sapiens
gcccgaataccaccccgacgcctcagcccaaggtaacacaagtggcaagacagccgggaacccctaccccatccccttattcagcacatgaaata

SEQ ID NO: 422858 - DNA, 90 bp, Homo sapiens
aaaagagccctggaatgtgaagagacaggaggcagcagacggacatccaggtatctagaagagcagaagacagagaatggaaaagataag

SEQ ID NO: 422859 - DNA, 100 bp, Homo sapiens
agccaaaggaataatgggcgcctccgcccccgggccgggcagatgcggtttcctcccgactcgcgatcaaaatggttgtcgagatgtccacagaaggagg

SEQ ID NO: 422860 - DNA, 90 bp, Homo sapiens
ccagcttctttgactcagatgaggatgactccaccagcagatcctgcagctccaccaaagaaaccgcctcgccctggagctcccggtcat

SEQ ID NO: 422861 - DNA, 96 bp, Homo sapiens
tgagccgagacgccacggccacccctccctcctccccatctatgagcagcgccctggccatcgtgggaaatatcttcccttccaacctggtgtcag

SEQ ID NO: 422862 - DNA, 100 bp, Homo sapiens
agcccgggcccaggccccggcagcgcctgggacaagtttgtcccatgaggagcacccccatagccatcctctctatggacatggtgtatgcaagtggcca

SEQ ID NO: 422863 - DNA, 100 bp, Homo sapiens
ctggaatctaaggagtggtttgtgcagctctattaccacgggaagttttgagtatccgaggagcccaggaggaggaacccacagacccccagctgatgcg

SEQ ID NO: 422864 - DNA, 99 bp, Homo sapiens
catctcccttcatgtctgggtcatgggggctcgaatggttcgtgaactctttgaaatggccagaacaaaaaaagcctgccttatcttctttgatgaaat

SEQ ID NO: 422865 - DNA, 50 bp, Homo sapiens
cccgcagtacaagaactggagagaggatggcattccctgtggatatgctg

SEQ ID NO: 422866 - DNA, 88 bp, Homo sapiens
cgcaaccattgacgccatgtcgggttattcgagtgaccgagaccgcggccgggaccgaggccttatgccagcctggaccatcttggag

SEQ ID NO: 422867 - DNA, 50 bp, Homo sapiens
cctgaacctggaagttgtgctttttaagatatggtccggaaaaagaaccc

SEQ ID NO: 422868 - DNA, 90 bp, Homo sapiens
ggcagctgcaatatttaattcagcctttggaagttttttggcagacatctggtccctgggcataacagctattgaacttgcaagagggga

SEQ ID NO: 422869 - DNA, 88 bp, Homo sapiens
tgttttgcaggatcttccacctaaaattattcaagactattattgtactcttagtcctctccaggtcttaacccatatttaactttga

SEQ ID NO: 422870 - DNA, 75 bp, Homo sapiens
cagtacgcgaaggatatcggtttcattaagttccatgccattgcagtgtcaactaggcctcagttacttttcagt

SEQ ID NO: 422871 - DNA, 83 bp, Homo sapiens
gtggaagcaggactgcgccgcgtcttcctcaagaccctgtgtgagcagcttcggaaggagaacgaggctctgaaggccaagtt

SEQ ID NO: 422872 - DNA, 82 bp, Homo sapiens
accttcagagcgtcacggcgtacgccctcatggggaaaatctccccggtgactttcaggactcagaattcatgattgaagaa

SEQ ID NO: 422873 - DNA, 90 bp, Homo sapiens
ccgtggccaggcagaggtctgtggagtggagaggcgaggcctcacggtggaactctcagataggtgtgctctgaacaagccgagacgggg

SEQ ID NO: 422874 - DNA, 90 bp, Homo sapiens
cagggagtcgccgctggagaggggctcggcgcccggcggggactgcaggtaaagtcagtgataaatcttttgtttgctgcatatactgga

SEQ ID NO: 422875 - DNA, 75 bp, Homo sapiens
gcccagacaagtccccagggaatgccacagcatcctccagcacctcagttggtgttggtattaggagatctgcac

SEQ ID NO: 422876 - DNA, 75 bp, Homo sapiens
aaggattccaagtaactcttatttgaaattccaacagaatgggtttcctgaaacggatttgcaggaattcctgaa

SEQ ID NO: 422877 - DNA, 51 bp, Homo sapiens
aaggctgatgccccaaaaggcactatatgatgcttcctggtgtgtttagtg

SEQ ID NO: 422878 - DNA, 100 bp, Homo sapiens
gacaatcaggaagtccaagccacaatgatcctgccaagaatcctccagtgcttttttaggaccaaaggatatatttccttactcagaaaataaggaaaag

SEQ ID NO: 422879 - DNA, 74 bp, Homo sapiens
ccggaggcgccagctcaaccgtttgacatctacaggaaggtgcccaaggaccttacgcagccaacgtacaccgg

SEQ ID NO: 422880 - DNA, 90 bp, Homo sapiens
ctgagggaaaagcgaggcaaggcaggcggattcgtcttctggatgtctaaaagcctcaactaatcagggtgccatagatgtttatgtcag

SEQ ID NO: 422881 - DNA, 102 bp, Homo sapiens
agattcaagtggaaagctcctctctggccgacatttgcagggcgcaccatgccgttgtcgggcgcatgcaggaacgtggaggaactctgccgcttccctgag

SEQ ID NO: 422882 - DNA, 90 bp, Homo sapiens
ggagttgtttgacttagtggaggaggtgcagctcaacttctaccagttcctcggggtgcagcagatgcagagagaacttgtttatgcaag

SEQ ID NO: 422883 - DNA, 82 bp, Homo sapiens
caccgggcaggatgaaggcagagcgtgtggcatctccacctcaagggacctgctgaagttcccatgatgtcacccaatggat

SEQ ID NO: 422884 - DNA, 75 bp, Homo sapiens
ggttccccaggaatatcgatacaacaccaacaggtggagtctttcattttggatcaggatgatttggaaaatcca

SEQ ID NO: 422885 - DNA, 96 bp, Homo sapiens
aaggaatcagaggttgaagatgttgaaacagacagtggtaattcacctgaagatttgaggaagcttgaattcggagtgatttaccactgcacagag

SEQ ID NO: 422886 - DNA, 75 bp, Homo sapiens
agggagttggatcccgacgcccggagctggcaagatttgggccgtggaggccaagtataaggagcgagggacggt

SEQ ID NO: 422887 - DNA, 100 bp, Homo sapiens
tgaaaatggccatactgcccaaggaagatgcaatcacacccaatgataagacccttttccctgatgttgattggttaatcggtaaccattctgatgaact

SEQ ID NO: 422888 - DNA, 74 bp, Homo sapiens
tatgatatgctaagaaagaatcttgtcactttagccactgctactacaggaggagatgttaaagtaacccatct

SEQ ID NO: 422889 - DNA, 98 bp, Homo sapiens
gacaaccctggcgggggttcgctggctgcggccccggctccggcccccgcaggagcaggtcctggctataagtcaccatggcacagcaagctgccgat

SEQ ID NO: 422890 - DNA, 100 bp, Homo sapiens
gtcatcgcggatttgcaccccgtggggtggtgcacacagaacaacaaggtgttgatgccgccggacgcttggtgtaaaaattgccaaagcagttgcctgc

SEQ ID NO: 422891 - DNA, 100 bp, Homo sapiens
gggctgcagctgcaggggctgagctggctgggcaagcgcgggccgcggaggaggtctcaggggatgacttgtcaagctcgaacatcatatactgaagatg

SEQ ID NO: 422892 - DNA, 90 bp, Homo sapiens
ctggctgtgctgcgcggcccccgcgcatggcaccactggatcataccagtgacaagtcacttctcgacgctaattttgagccaggaaaga

SEQ ID NO: 422893 - DNA, 98 bp, Homo sapiens
gcggctgcggggcttccctgcggctggaggttcgaatcgtcctcccatgccatcagtatgagcgcctatctgcgagaacagagaagggagctctatag

SEQ ID NO: 422894 - DNA, 100 bp, Homo sapiens
gaggaaccagggtgctagttaaaccaactgtcggaaaaggtaacagaagatggaactcgaaatcccaatgaaaaacctacccagcaaagaagcatagctt

SEQ ID NO: 422895 - DNA, 83 bp, Homo sapiens
gtggtcggcgggggcggcgtgggcaagtcggcgctcaccatccagttcatccagcttgaacagatggatttggaagtccgaga

SEQ ID NO: 422896 - DNA, 138 bp, Homo sapiens
gtatctgaagtatcattggccttgaggaagaagacatgctctacagtgctcagtctttgagattgaaaatggaagccctgactgacagggaacatggaatgatagaccctgacagcggagatgaagcccagcttaatg

SEQ ID NO: 422897 - DNA, 50 bp, Homo sapiens
aattatctctggtgctgcagctcttaatggaggggaaagttccagtcgca

SEQ ID NO: 422898 - DNA, 100 bp, Homo sapiens
ctctgattgagctctgggaaggcctgacagtggatgacgtacagaagagtactgggtgtgattttgcataacaacatgctgtaccccaaggaagacaagg

SEQ ID NO: 422899 - DNA, 75 bp, Homo sapiens
gacaaagctaaggatggagttgcaggtgtccagcggatttgtacacacagatatgacgaaagacttgaaagaaga

SEQ ID NO: 422900 - DNA, 51 bp, Homo sapiens
cggagcggtccgcgagccaccgaggcccagaatgccagaggattcaacatg

SEQ ID NO: 422901 - DNA, 100 bp, Homo sapiens
atgcaccccactccgagggcgacatgcacgtacactgaggaggggacggctccgtcttcacattgtgcacagatctgaggatgggattagcgaagctgtg

SEQ ID NO: 422902 - DNA, 75 bp, Homo sapiens
caaagcccatctggtccgccgagcaggtccggcctctttggcctacccccgttggctccgctgccccaggtcgat

SEQ ID NO: 422903 - DNA, 89 bp, Homo sapiens
tgctgaatcacacgccgccatccgggaggcccagggaagtcgtggcattcctggtggctttccatcagaacaagcagctcatcggtgac

SEQ ID NO: 422904 - DNA, 83 bp, Homo sapiens
tggctgcggccgtcgcccaggagtcatcggacgccagaatctgtctctgctttctatccgtcaagatgataaagtcgtgtgcc

SEQ ID NO: 422905 - DNA, 78 bp, Homo sapiens
ggcggcaccgggaggccgggccgagcgaggttgacggatatattcagacgttacgacacggatcaggacggctggatt

SEQ ID NO: 422906 - DNA, 100 bp, Homo sapiens
ctgccatcagctgagcaagtccaccaacagtttctgtgtcccacttcatctttaataaggttcaccctgaaaatgaagattggacctgttttgaacagtc

SEQ ID NO: 422907 - DNA, 98 bp, Homo sapiens
ccccggcgccggcaaggggacccagtgcgcccgcatcgtcgagatcgtcagtatttaaacagatcacatcatgcgtgagtacaagctagtggtccttg

SEQ ID NO: 422908 - DNA, 83 bp, Homo sapiens
gcagacagtggggaggaagaatgccggtcacagcccaggagcaaatgcagccctgaggatttggctactgcatataacaacag

SEQ ID NO: 422909 - DNA, 100 bp, Homo sapiens
tccgtatggatctgtaaagaagagtcccacttcagtcaaagacagtagattatgagagaatctggacgaggctagagaacagaaagaaaagagtcctcca

SEQ ID NO: 422910 - DNA, 76 bp, Homo sapiens
ttggaaatggatctgtctttggtaaagatcagccatggccctacgctaccctatggccgtgggcctcaacaagggc

SEQ ID NO: 422911 - DNA, 75 bp, Homo sapiens
gggcacataccatgcctggaagctctggattaatcgaattacagctgctagccaggaacatggactgaagtatcc

SEQ ID NO: 422912 - DNA, 75 bp, Homo sapiens
tggaggaaaaggtcgcctctttgctgcaccaggtgtcctggagacagacatgcaagaaagcacttcagccaagca

SEQ ID NO: 422913 - DNA, 74 bp, Homo sapiens
catcattactaacaggatattcctcatgacattgctgtctgacacagggaatatggaggttctgcacctgtatg

SEQ ID NO: 422914 - DNA, 100 bp, Homo sapiens
cgggtgttctctactccagagctccgacttatttctgtgggcagacattaacattcagaagccctgtcaatgaagacaatcaagatggtgtcacgcactc

SEQ ID NO: 422915 - DNA, 98 bp, Homo sapiens
ttggacgagaaccgcaccccgcctcccattccggacctcgttgaggtggagagcagcgtggggtggtattaaagataatcaaacattatcaagaagaa

SEQ ID NO: 422916 - DNA, 100 bp, Homo sapiens
caaggagccaaggacagtttggaaacaagcaggatccaaaataccagtagctggttgtcggcactggagagtaccaaatggctgcagcacttgtcggtga

SEQ ID NO: 422917 - DNA, 75 bp, Homo sapiens
cttgggggtcgagcacataacggggttcgggtgtctcgtgtgtgaacatcacagaaaccaaggtgtatgttggta

SEQ ID NO: 422918 - DNA, 96 bp, Homo sapiens
cagccaaaaattcttcctgggacacaacgacgacattatcaggccacagggaaaatggacgaaaaccagttcgtggctgtgacaagcacaaacgct

SEQ ID NO: 422919 - DNA, 100 bp, Homo sapiens
ggaagatcctggaggtggatctgaagaacggtttctgtagaaaatgtttcctgactgcaatgagggaaagcggagcacattgtcccctatgtcgtggaaa

SEQ ID NO: 422920 - DNA, 98 bp, Homo sapiens
gtggaatggaaggcactgcagctcgagtgaagggccatgatccaaaggaaccagagcagttgagaaaactgtttattggtggtctgagctttgaaact

SEQ ID NO: 422921 - DNA, 100 bp, Homo sapiens
tggacaagaccaacaaattcatcaaggagctcatcaaggacgggaagtcactcataagcgcgctcaagaaaggacagaataacgggctcccagattcaca

SEQ ID NO: 422922 - DNA, 100 bp, Homo sapiens
gcaacaccctggtccagcaggccatgatgagtccagtgtcgtgctgctgcaggagcacccctgcctggtggagctgctgtcccatgtgctgaaagtccag

SEQ ID NO: 422923 - DNA, 100 bp, Homo sapiens
gaaacatctgaatatgctcaaggaggagatgctgagctcaggagtagcagccaaggttcccaaaaaatagtcgaggagttgcaggaacctgtctctccag

SEQ ID NO: 422924 - DNA, 75 bp, Homo sapiens
ccgtcccgtccgacagccaggcccgggagaagaatactcccccagttgcaagaggcgcaggaccgtggaagactt

SEQ ID NO: 422925 - DNA, 75 bp, Homo sapiens
cagcagtatggcttccagtacccccttgccatggcagcaaagtggtctacatagcctgctccttcaccacggtct

SEQ ID NO: 422926 - DNA, 73 bp, Homo sapiens
cttctaactcattgtattcctcctgagataataatgaaggttttcctttggaatatggataaatacaccatga

SEQ ID NO: 422927 - DNA, 82 bp, Homo sapiens
gggtctggagtgcgtgggggaccggctgttggcggaactggtcatgctgctggagtggtggtcctgcacggagtgtacactg

SEQ ID NO: 422928 - DNA, 82 bp, Homo sapiens
ctctcgggagaagcagcgcctgttcccggggcagatccaggttcagtgctgaagctgctgaaagatggcagaagaagtggtg

SEQ ID NO: 422929 - DNA, 100 bp, Homo sapiens; identical to SEQ ID NO: 229782

SEQ ID NO: 422930 - DNA, 83 bp, Homo sapiens
gggatccacacagctcagaacagctggatcttgctcacactctttcaagagaagcttccttgataacgaggaaatattctgaa

SEQ ID NO: 422931 - DNA, 75 bp, Homo sapiens
tgtggggatggtgctactggtggaagatcctgaggaggatgaaggggctggccctggaggccgagagtgagctgg

SEQ ID NO: 422932 - DNA, 73 bp, Homo sapiens
aggaagatggcggatctggaggagcagttgtctgatgaagagaaggttgcagtccatgagctgggaaaggagg

SEQ ID NO: 422933 - DNA, 97 bp, Homo sapiens
ccgagatcctgaagaagagagcactcctggacaaggatctgcaaattgaagtgcaggtacaggtttgcagattccgccagcagcacagcaagctcta

SEQ ID NO: 422934 - DNA, 100 bp, Homo sapiens
tggtcccagcgccttcccacggagcagcactcttcaccctgcacagccttgttagatgtgaagacatggtagatgtgcgaaggttaaagatgcttcagat

SEQ ID NO: 422935 - DNA, 82 bp, Homo sapiens
gttaaggattccaagtaactcttatttggcagacctgttatcctaaactaggtgagtcagcttttggtacatgtgatgattt

SEQ ID NO: 422936 - DNA, 100 bp, Homo sapiens
cacagctgaaggctgcgagggactaagagcagagctcatgctgaagattcggttatggaccatcatttccggaagccagcaaatgatataacgtctcagc

SEQ ID NO: 422937 - DNA, 83 bp, Homo sapiens
ggaggagcagatagaatacctacagaagaagctagccatggccaagcagcctagtgtgttaattgtaacctacaaggagcctg

SEQ ID NO: 422938 - DNA, 98 bp, Homo sapiens
gctgaatagctggggctacaggcgtgtgtcactgcgcccagatgaccgcacctcgagcaggagtggggatgccacgtctgcccccagcgcccggccct

SEQ ID NO: 422939 - DNA, 83 bp, Homo sapiens
cctggatcttcgaacttttgacacggctttggaaacgacgtcatgtgttaggaaataatgcaaaaggtgtcccaaggctcctg

SEQ ID NO: 422940 - DNA, 100 bp, Homo sapiens
ttgcaggactctttctgttcaggccagaccctctgggagcttctcagccattttccacagatcagaacaccttccaccatgaccacctcagcaagttccc

SEQ ID NO: 422941 - DNA, 90 bp, Homo sapiens
gcgaccgagggaatgatccttactaaccacgaccatcaaatccgtgtcggagtccttacagccgttggacataccagatggtcgaagagc

SEQ ID NO: 422942 - DNA, 97 bp, Homo sapiens
acggtgaccttcgcttggtgtcctcctggcctcagcaacctgacaattctgtcgtgtcccgatccagtttgctgaccagaagcaagaattcaacaaa

SEQ ID NO: 422943 - DNA, 100 bp, Homo sapiens
tgagattatacggaaccagaagcagattgccaacattgaccgtattacaaattattgtagctttaatagacagaatgggagatgccaaagacaaggttcg

SEQ ID NO: 422944 - DNA, 83 bp, Homo sapiens
ctctcgcctcgggtctcgggggccgctctgggatcccggccaccagcaattgtccggtgttgacttcaaaatcaaaactgtag

SEQ ID NO: 422945 - DNA, 100 bp, Homo sapiens
cagagttgtcgctactggagaagtccctgggactgagtaaggggaataaatacagtgctcagggcgagcgacagatacttggcatatcgaaattttatga

SEQ ID NO: 422946 - DNA, 50 bp, Homo sapiens
cgacagggacgtcctcattgtcctcgcctggctcccaccatgagtgctga

SEQ ID NO: 422947 - DNA, 90 bp, Homo sapiens
gaagcgaccaaagcgcctgaggaccggcaacatggtgcggtcggggaataaggagtggcagaagctcaactatgatatccataccctgcg

SEQ ID NO: 422948 - DNA, 97 bp, Homo sapiens
ggatctcccaggtatcattgaaggtgccaaggatgggaaaggtagaggtcgtcaagtcattgcagagtcaagaaacccccccttcttgagctattta

SEQ ID NO: 422949 - DNA, 100 bp, Homo sapiens
ggtagccggctgcgcgtggctggggaggcgaggccggacgcacctctgtttgggggtcctcaggtgaccatagccgatgactactcagatccctttgatg

SEQ ID NO: 422950 - DNA, 75 bp, Homo sapiens
tacaaatcacacgcataatggatgaaaggaaccgacagtgtgctggaattgatgttcgtctgtgtgatgttggtg

SEQ ID NO: 422951 - DNA, 75 bp, Homo sapiens
ggtttgacgagcacaaagaattatggtaaaaccatccttacaaagatcatgctaaagaggaaaggacagtgtgct

SEQ ID NO: 422952 - DNA, 109 bp, Homo sapiens
cagcgctctcgtcttctgcggctctcggtgccctctccttttcgtttccggaaacatgctgagctgactgctgcccactttggaggaggcggtgggctccttcacaaga

SEQ ID NO: 422953 - DNA, 74 bp, Homo sapiens
cctcgccctcttgccccccggagccgcgagcacccaagctcgagttaaccttcagctacttggagattcatggc

SEQ ID NO: 422954 - DNA, 100 bp, Homo sapiens
cggtgctggaccacctggtcggggaggagaccatggctgactacctgctgtacaccctcaacaaacaccagcgctttggagaggaagcagtgcattggtg

SEQ ID NO: 422955 - DNA, 82 bp, Homo sapiens
cgagcgcgagcggcgcgagaaaggaagaaggccgtgctgggttccagtcctttcctgtccgaggccaatgcagagcggatcg

SEQ ID NO: 422956 - DNA, 90 bp, Homo sapiens
ttactgaaggcagtgaagcgaagaaaaggatcccagaaagtttcagatgatatcatcaagttgaatcgaaaggaagggaagaagcagaat

SEQ ID NO: 422957 - DNA, 98 bp, Homo sapiens
tatcagctctgatgccttcttccctttccgagataacgtagacagagctaaaaggagacgctgcggatcccagaggcttaactggcagctggaacgag

SEQ ID NO: 422958 - DNA, 75 bp, Homo sapiens
tctgaatgttttggtggagagatgacgattcaagatggaaaaggtgatgtaaccattacaaatgatggtgctacc

SEQ ID NO: 422959 - DNA, 97 bp, Homo sapiens
gttcaatgtatgggacacagccggccaggagaaattcggtggactgagagatggctattatatccaagagatttgaaattggataacttattgctag

SEQ ID NO: 422960 - DNA, 100 bp, Homo sapiens
cctgagaatacttttaaaggaacctgttgataaatgcaaaacagtggctgttgcaggtatctgctgtgcgtttcagtcaacaatacagcttgtgttcgac

SEQ ID NO: 422961 - DNA, 89 bp, Homo sapiens
agcatctccagtgacgggcgcccactagagaggcggtattgggagagttgctgctacatctttaggaaatttgactaaccatggttctg

SEQ ID NO: 422962 - DNA, 100 bp, Homo sapiens
gcccgaggcccctctggaccccagggccccggcggccctcctggtcccaagggtaacagcggtgaacctggtctcagaggtgaaattggtaaccctggca

SEQ ID NO: 422963 - DNA, 90 bp, Homo sapiens
gtctgagtctcacagcttgtaaaggacagtcattttgtttactcattcagccctgttgcaggtcccaataaactcttcataaggttgaca

SEQ ID NO: 422964 - DNA, 100 bp, Homo sapiens
tttcaacctgacatcattatcagcgcaagccaaggcattgaatgccccagaggagcccgaaacctcccaggcttggtgcaggaaggagagcccttcagcg

SEQ ID NO: 422965 - DNA, 82 bp, Homo sapiens
gggagggaacaaagcccacaagcaccggttttggcacaaataccagtgggaatagtatttttggaagtaaaccagcacctgg

SEQ ID NO: 422966 - DNA, 137 bp, Homo sapiens
ggggcagctgaactgagcgtatgtgccacgccgcccaggagacccctctgctgcaccacttcatggcagaggggcttccacacgtttgtgctgaggccacactgtggggaggctgggcccatccaccacctggtgtc

SEQ ID NO: 422967 - DNA, 100 bp, Homo sapiens
gcttcatcaaaaatagtgatagctttgataatttgggagagcccatggtgactgcgtgagtggagcccagctgtgtggatgccccagcatggatgactac

SEQ ID NO: 422968 - DNA, 100 bp, Homo sapiens
ctcggggcaacccagacgtgcaacaaagtgcgatgatcagctggacatcatctccatggcggagacaaccatgatgccagaggagattgagctggagatg

SEQ ID NO: 422969 - DNA, 101 bp, Homo sapiens
ctgtagcattcaagacttcaaactggtatttcattaatcacggagccagtgtaggtattgtcaatagtgaaggtgaagttccctctgaccttgcagaagag

SEQ ID NO: 422970 - DNA, 87 bp, Homo sapiens
ccggggaagccgggcgcgtgctgccgctcgtggcgggccgagaacatgccgagtttttgcactgcaagtccaaaaagtttacagact

SEQ ID NO: 422971 - DNA, 75 bp, Homo sapiens
cgaacttcagggtttccaccgttcgttcaagggagtctgaagatacagtattgctcgtcctcaaagagatctacc

SEQ ID NO: 422972 - DNA, 108 bp, Homo sapiens
gccactgcgccgtggtggacggaaacttcctctacgtgtgggggggctacgtgcactattcctgatcagagaactccagttgcttcaacacacagtatcagtagtgca

SEQ ID NO: 422973 - DNA, 100 bp, Homo sapiens
gtgagaagtagaacatgtcaaggagtagaaattggtatgcttagaagcagattctaaaagcagtttctcttcagaacatcttttttcataccacttgata

SEQ ID NO: 422974 - DNA, 100 bp, Homo sapiens
gagaagaaatagttacctatgatcaggagctgagcctgagtggactctgccagtgcctggtggaactgtccacccagccggccactgtgtgtcatggctc

SEQ ID NO: 422975 - DNA, 90 bp, Homo sapiens
cctccccgggcccctgagccatgcccatcgcagccgccccgaaggagccagtttgtgaagtgtggatatgcaggctctaactttccagaa

SEQ ID NO: 422976 - DNA, 100 bp, Homo sapiens
tgtgactcatccacaatgatttctccagtgctcatcttgttctcgagttttctctgccatgttgctattgcaggacggaatatgagggaaggcaccattg

SEQ ID NO: 422977 - DNA, 100 bp, Homo sapiens
gcagacctgctgaagctgagtttgaagcgtcgctcagacaggcaacaatttctaggaaaaccagtagattcccagacatcgcgaagtgaatctgaaattg

SEQ ID NO: 422978 - DNA, 100 bp, Homo sapiens
gggtcgtcatggctggctacgaatacgtgagcccggagcagctggctggctttgataagtacaagatgcgagtgtctctctggcttatgtggtttccccg

SEQ ID NO: 422979 - DNA, 87 bp, Homo sapiens
tcgggcctccacgttactgcgggacgaagagctcgaggagatcaagaaggagaccggctgacaaagcaggacctcataaggaaatct

SEQ ID NO: 422980 - DNA, 78 bp, Homo sapiens
aaaaacacagtcatgggcagagttcttgaggaagccagtcttattgttacaggtatcgctgtgctgctcggagccaga

SEQ ID NO: 422981 - DNA, 82 bp, Homo sapiens
agtctatataaaggctttttaccatcttggctgagaatgagtatctgcacaaccaccactgcatttttgcactttttcttcc

SEQ ID NO: 422982 - DNA, 50 bp, Homo sapiens
catacagtcgcctctgacaagccaggcctcgaaggagctccagcaagccc

SEQ ID NO: 422983 - DNA, 100 bp, Homo sapiens
tgctccagtttgagaaacctggatctgcgatctgtttgtgatgctgaagttccgaacagtccatgggggcctgaggctcctgggaatccgccgaacctcc

SEQ ID NO: 422984 - DNA, 98 bp, Homo sapiens
agagagaaagagtggatttcagcctgcacggatggtcttgaaacacaaatggtttttggcatgaatgctttacagttgcagaacctggcgacgctggc

SEQ ID NO: 422985 - DNA, 100 bp, Homo sapiens
cggccatccgggctgtggaccgcaccctgagcggatggacacagaggggcagtagaggctgcaggcgtctccacaaccccagcgcagaggggcccgggcc

SEQ ID NO: 422986 - DNA, 82 bp, Homo sapiens
agtcgtcttccacttgcacgaaagctttcctaggccaaaaagagactctgctaacaccagatagtggaaagaaaccatgtgc

SEQ ID NO: 422987 - DNA, 96 bp, Homo sapiens
gacaagccgctggcagccgcggatctcaccgccgctcaggaaatgcttcggttacccacagtctttcgccagatgagaccggtgtccagggtactg

SEQ ID NO: 422988 - DNA, 75 bp, Homo sapiens
aggaattgagccacagagtaattatattccagtttggaaattttagcattcaggtgccaggaatgcagatgggac

SEQ ID NO: 422989 - DNA, 100 bp, Homo sapiens
agtcaaacgcagaaggactgcctcactgagcaaccaagagcgctgaattgcattatggaaatggtagagaaaacaaggcgctctatggcagttctgcggc

SEQ ID NO: 422990 - DNA, 75 bp, Homo sapiens
cgacaagtccgggagctgggcggccatttaccaggtctcagccttagatccaaggacagtccaaggaagtcctaa

SEQ ID NO: 422991 - DNA, 80 bp, Homo sapiens
cgcaaccccagatccatttacactttacaaccatcccaatctggcaaaacaagccacatggggctgctcgaagtgtagta

SEQ ID NO: 422992 - DNA, 83 bp, Homo sapiens
ggacagagtcagtgatttccataaattgaagcaaaaagtttgcctgcaatggtactgtaattgagcatccggaatatggagaa

SEQ ID NO: 422993 - DNA, 75 bp, Homo sapiens
gctgccagggtccctgaagagggaagacacgcggaaacaggcttcttttgggacacataaagatccatatgaaga

SEQ ID NO: 422994 - DNA, 100 bp, Homo sapiens
gctcgcgatgagtggtctcggcaggctcttcgggaaggggtgatcttgatactgcagcagtaaaagtggaatttgatgaagaattcagtggagcaccagt

SEQ ID NO: 422995 - DNA, 50 bp, Homo sapiens
ttcgacttgcgtgtgatgttgatcagctccctgtgctgtcaggaatctac

SEQ ID NO: 422996 - DNA, 96 bp, Homo sapiens
cggattgtactgtatggggactccaattgcttggatgacagtcaccgacagaagggtggggaagctgaggcaggaagccctttagtcacttgccga

SEQ ID NO: 422997 - DNA, 100 bp, Homo sapiens
cagccacctgcctccacgtctggaataatgggtactctttcctcgtggaatttgaagattctacagataaatcaggagtcagtggatcggtggggaaaat

SEQ ID NO: 422998 - DNA, 90 bp, Homo sapiens
gattccagcttcggaacaagagaccctgatgagacgtgcaggtaccatcaggaagcagcgggataagctgataaaggaaggaaagtacac

SEQ ID NO: 422999 - DNA, 83 bp, Homo sapiens
ttctcaatcttggaacagcacccccttctttaagggcacacgtgtttcacgttgacaggtttgcttgggacgctagtaaccat

SEQ ID NO: 423000 - DNA, 100 bp, Homo sapiens
ggaaaaaggaagagagcactgcagccagtgaaaccactgaggtatgatctcgtgaaatcttgagagaaactgaatgacgaatgaaactattgttcctgtt

SEQ ID NO: 423001 - DNA, 90 bp, Homo sapiens
cttttacacggttttccaacatccagctacgactggtacaagatccggagttaggtgttggcacgctaccagaacatgacagccaggatg

SEQ ID NO: 423002 - DNA, 90 bp, Homo sapiens
ggagccgagatgtgggggcctgaggcctggctgctgctgctgctactgctggcatcatttacaggtttacaggtacatacattacacccc

SEQ ID NO: 423003 - DNA, 90 bp, Homo sapiens
ggacggccagctctaagaattcctgctacgacactgaattcaaccaggagacttaattcagtgcacaaatgagatgaatgtgaacatccc

SEQ ID NO: 423004 - DNA, 107 bp, Homo sapiens
ttggcttatactggttttgtgaaactcactgaagtactaaacagacaggtgatttggcttctgcacagttaggaggagcaccaaaccgatgggaggttttgtcagcc

SEQ ID NO: 423005 - DNA, 97 bp, Homo sapiens
ccggacgcggtcccgctctccttctcacactcgacctagacggcgccatagatcccgatcaagtaatctatgccagcaattatgacaatgttagcag

SEQ ID NO: 423006 - DNA, 82 bp, Homo sapiens
ctggttctggcgatggttgagacgcctcgattgcggcgtgtaacgggaaaaaatgcatttttcaaagacctaacttcaattc

SEQ ID NO: 423007 - DNA, 80 bp, Homo sapiens
catggcgacgtctaatctgttaaaggtactaggttttgacaagcttgcatcatgcgtgagtataagctagtcgttcttgg

SEQ ID NO: 423008 - DNA, 97 bp, Homo sapiens
agccatgatttaaatatcggcgttaaggaagaagaagaattttcagttcttgccagctgcctgggacttctgccaacgttttaccaaacagaacatc

SEQ ID NO: 423009 - DNA, 100 bp, Homo sapiens
ttcaccttgaattaaaactgaatgaactgataacggagaatggaactgtatgccagcagcttgttgtacaggttttgtctccacaattatccgtttactt

SEQ ID NO: 423010 - DNA, 100 bp, Homo sapiens
cgcttctcccgcttcaacgaagaccgagactttcagttttcggctttgtgagaaaccttaccatcaaacacgatggccagcaacgttaccaacaagacag

SEQ ID NO: 423011 - DNA, 75 bp, Homo sapiens
ccttgcagctgcttagacgctggatttttttcgggtagtggaaaaccagctgtttgcagacaaggtcccaaagac

SEQ ID NO: 423012 - DNA, 100 bp, Homo sapiens
tttcttcaagcggaaaataatgatcaagcggcacgaggtggagcagcagaacattcgggaggattccagtgagagtagctcctctgcaccagccacacag

SEQ ID NO: 423013 - DNA, 89 bp, Homo sapiens
aggaaatgtgaaacgaataacatgatggaatatgatagtgacaacctctggtgggacgcctttgccactgaattttttgaagatgacgc

SEQ ID NO: 423014 - DNA, 75 bp, Homo sapiens
caaagcttgcgaggtggcgttagaataactgaagtgaagtgatggactccgatttggagagtagtaagacgtgaa

SEQ ID NO: 423015 - DNA, 82 bp, Homo sapiens
cggcctccggcgcagcccggaaatgtccggcaagatcgagaaagcagttcaaaaggtgatgacctatcaacagccattctca

SEQ ID NO: 423016 - DNA, 107 bp, Homo sapiens
gtggaagcctcagcttggctttaaccgtgaccggaggcctgtgcacctggatcaggcagccttcaggactttgggacctggacaaacaccagactcagacgtaccga

SEQ ID NO: 423017 - DNA, 100 bp, Homo sapiens
acagggaagtctataagctttgcaacagaattacagagtatgatatgtacagtgggagaaatcacagatgccctgaaaaaggtatttggtgaacataaag

SEQ ID NO: 423018 - DNA, 83 bp, Homo sapiens
gtgtgcagaacattctcaaaattggcttcctgaatgacaagatggtgatggaatttcctgataatgtgttaaatctcgatgga

SEQ ID NO: 423019 - DNA, 100 bp, Homo sapiens
ggcggggaacgactgcggcgcgctgctggacgaagagctctcctccttcttcctcaactatctcgctgacacgcagggcaggctgtccctgcaggatccc

SEQ ID NO: 423020 - DNA, 75 bp, Homo sapiens
gggctttatccctcttgtgatttacctggactgcctgcgctgctgacttaaggccccaacaccaaacacagaagc

SEQ ID NO: 423021 - DNA, 100 bp, Homo sapiens
tgttgaatgacatgggagacacgccgcttcatcgagctgcctttacaggacgaaaggagaagatttacaaatctctgcctggatgctgtttgtggttacc

SEQ ID NO: 423022 - DNA, 89 bp, Homo sapiens
ggagattatagctctgtatgagaaggacaacacctacttagcaaaccagtccagctacgggggcccagccagccagcagctgagtgggg

SEQ ID NO: 423023 - DNA, 83 bp, Homo sapiens
tcgcggttttaatcgacgagctccgcaatgaagacgtgcagggggatatgagactttctactcggaatatcctgagtgttgcg

SEQ ID NO: 423024 - DNA, 99 bp, Homo sapiens
gcagcaaacaactccgcaaacgaaaaagaacgacatgatgcaatcttcaggaaagtaagagggtagtaagcattaataatgtctttcatctttgagtgg

SEQ ID NO: 423025 - DNA, 51 bp, Homo sapiens
caggagtgaagctacagaccttcgcggtctcattctgtcgcccaggctgga

SEQ ID NO: 423026 - DNA, 100 bp, Homo sapiens
ctggagcagggtccagggcggggatcctgcgctgccagccgtgtgctcatgacctgtgcacaccgatatgaggcaaggcagcgagtggaccagatcctgg

SEQ ID NO: 423027 - DNA, 75 bp, Homo sapiens
catgtctgtacacctgtccccctgcttcaggatgaagctggaggcagattcgtcgctttctctggagaaggacag

SEQ ID NO: 423028 - DNA, 100 bp, Homo sapiens
ctcaccaaggggggcaggttttacatcactggaatcttccaaattcttgctggtcatcatcagatttgaaatatttaaagtggatacaaaactatttcag

SEQ ID NO: 423029 - DNA, 82 bp, Homo sapiens
gcgttcctcccgccggccccaaagacgctaaacgtgccctactctgccccgggggagagaaggtgttgagctggcgagttcg

SEQ ID NO: 423030 - DNA, 83 bp, Homo sapiens
cgagaactgatcctggacctggagaagaatgaaacactctgctccagccaaggtggtgagggcagctgttcctaaacagcgca

SEQ ID NO: 423031 - DNA, 106 bp, Homo sapiens
aacaaagctctgctcacgtttcccttcctccatatttactggacagagtgctgtgcttgtccagccggaagccctgagggcagctgttcccactggctctgctgac

SEQ ID NO: 423032 - DNA, 50 bp, Homo sapiens
caggtcaagagcctctgcgagaagtgggtaattccagaattgattggcca

SEQ ID NO: 423033 - DNA, 83 bp, Homo sapiens
cagtgacctcctggacttcagcatggcgtccgagctgggccacagcctgaacgagaacgtcctcaagcctgcgcaggagaagg

SEQ ID NO: 423034 - DNA, 101 bp, Homo sapiens
ccggcaggatggcggcggacacgcaggtggtatcacggaaaacttgacagaacgatagcagaagaacgcctcaggcaggcagggaagtctggcagttatct

SEQ ID NO: 423035 - DNA, 50 bp, Homo sapiens
atacacaggaactttaaatcttgacaggagcaggctggcacagagaagag

SEQ ID NO: 423036 - DNA, 74 bp, Homo sapiens
gcggtggtgaagctggcgcggcatcgagtcaccaaaacgcagagcgatcgtcttctgatcaaaggaggtaaaat

SEQ ID NO: 423037 - DNA, 89 bp, Homo sapiens
catgcttcaggctcctctctttactgctgaagctttacttcgagctcatgccaatgttttcagttgcaccaagcttagccaccaatgca

SEQ ID NO: 423038 - DNA, 82 bp, Homo sapiens
accaagttcatgagacaaatccattagaaatgttgaggatggatagaatgacagaagatgctcttcgcttgaatctgttgaa

SEQ ID NO: 423039 - DNA, 82 bp, Homo sapiens
agtatgaagtcatcggtaattactattcgtctgagagaatggctgccacctggacgtcaaatgattgccatcagaaagagac

SEQ ID NO: 423040 - DNA, 106 bp, Homo sapiens
tcatggagaaatgttgtagagggaaggaacaaagtctactgtgcatccagcaaggtgagcgctttagagaagaccaagaaaaagatcagccactactatgaacacc

SEQ ID NO: 423041 - DNA, 83 bp, Homo sapiens
gtcgtttgtttctccaaggtttgaaaagcagctggcctgcaagcgtccgtctccaagagagtatgaagagagtgcgtctgtag

SEQ ID NO: 423042 - DNA, 97 bp, Homo sapiens
tagtgtgcctctgcgaatttaaagctcatgaaaacaggattttgtgaaaatggaaaattatgaggcattggtaggctttgatctctgtaatacaccg

SEQ ID NO: 423043 - DNA, 82 bp, Homo sapiens
gtggaaaatgcgctcgggctggaccagcaggtggtgatcgtggcagaggtggccctggtggcatgcggggaggaagaggtgg

SEQ ID NO: 423044 - DNA, 88 bp, Homo sapiens
catttggcacagaagtgctgccaggagaaactaagttgctgaacgggtatctttcagatgaaggcattgaagcttgcacaagctctcc

SEQ ID NO: 423045 - DNA, 75 bp, Homo sapiens
tgaataaagctgttttggaactgtcaggtacctcaaagcaccgattattgaccgacctattcgaggtcgtggtgg

SEQ ID NO: 423046 - DNA, 115 bp, Homo sapiens
catgggggcctcaaacgtggagatcaactcctctctgttaatggagtggttagcatggcctcattgaaagaactagatcaaagactctttgaaaattacatcgagttgaaagcag

SEQ ID NO: 423047 - DNA, 98 bp, Homo sapiens
aagaagagcctgaaagagccaaatcttaccttctggaccatggatcccatgacagattctgttgtcacgtctccttacagagtttgagcggtgctgaa

SEQ ID NO: 423048 - DNA, 90 bp, Homo sapiens
acttcgcattttggcattgacatttaattttagggtcctttatatagaagggagagtaggacatgaaccatacgaattcatatgggatca

SEQ ID NO: 423049 - DNA, 90 bp, Homo sapiens
tttatgaagcactgagaaatgaaacccttttccaaagagaaatgaagaagaaaactgtatgtaccctaaatatgggagataagaagtatg

SEQ ID NO: 423050 - DNA, 75 bp, Homo sapiens
cggaggcaatgagggccagcaggagtctcgcgcgcctgcgacgcggagttttgcggcctccaggtggtggatcca

SEQ ID NO: 423051 - DNA, 100 bp, Homo sapiens
cagcttccttgagtggcgagatctgaagattgtttacaaaagcttgcattcacaagagatgggctctgtggtctgtggaatgaaatggttaaagatggag

SEQ ID NO: 423052 - DNA, 75 bp, Homo sapiens
tctgactttgaccgactccgcacggcactgccgacctccgggagcagcgcaggctacacacaacccagctgtacc

SEQ ID NO: 423053 - DNA, 89 bp, Homo sapiens
gggttttccagagatgcaaaaatgcaccctactccagcatcgcaccccaagaaaccaggttttgcactgattgcaaaaataaagtcctc

SEQ ID NO: 423054 - DNA, 50 bp, Homo sapiens
ctgctcgaggacgctggagcccagcaagggatacaccaacatcagctgga

SEQ ID NO: 423055 - DNA, 97 bp, Homo sapiens
cctttgcctcatcccaggttgccttggaaaatgccaacgccgtgtctgaagaacctgcacttgttgccaagtcttccatcttactagatgtgaaacc

SEQ ID NO: 423056 - DNA, 100 bp, Homo sapiens
cgaccaccggataattctttttatgtgcgaacatgtaacaagaatccaaagaaaacaaaatggtggtatcatgccgtccatcatcagggctcggcctcag

SEQ ID NO: 423057 - DNA, 82 bp, Homo sapiens
ggatgtgaggcgatccgctggcgctagtctgaccctccgccaggcaaaaggaagacaatgcagatcttcgtgaagactctga

SEQ ID NO: 423058 - DNA, 83 bp, Homo sapiens
cttccgcggggcgctgggccgccagcctcggcaccgtcctttcctttctccctcgcgttaggctctacagattctcccctgcc

SEQ ID NO: 423059 - DNA, 50 bp, Homo sapiens
tcaacatatctacaatctcggtactacagttactccacaggatccgctga

SEQ ID NO: 423060 - DNA, 76 bp, Homo sapiens
gttatggctcatagttcaccccagagcattttagatgatgttgccatggggcaatgaaaactattctaggtgatca

SEQ ID NO: 423061 - DNA, 76 bp, Homo sapiens
aactgtgcatgatgagagctgacttgcgcattgctgcctgcctttaatctatgccagcaattatgacaatgttagc

SEQ ID NO: 423062 - DNA, 82 bp, Homo sapiens
gaaggccctacgggagaaaaccgggcgcaaggtacaatgactcttcttgcttttcacctaagttgaataagcaccctgtgca

SEQ ID NO: 423063 - DNA, 50 bp, Homo sapiens
acaaccctggcgtccatgagcctggagaggaaaattctcagaatttaaag

SEQ ID NO: 423064 - DNA, 74 bp, Homo sapiens
tatccttaaccatgggaggctctcgggtatgttagagcccaccaaggaaccactgaaaccactttctgctgcag

SEQ ID NO: 423065 - DNA, 99 bp, Homo sapiens
gattaaactctcagattatgactcttcagaggaagcaattcgtacgcttgatcagggcttttttgaagaagaagaaggtaaagagtatatttataaaga

SEQ ID NO: 423066 - DNA, 100 bp, Homo sapiens
ccaccatcagtgtaagatgtgacttgcttctccttgtcttctgccacgattgtgaggcctccccaaccacatggaactgaaagaccacagcaagattctt

SEQ ID NO: 423067 - DNA, 90 bp, Homo sapiens
acaagagaaagaaggttaagctggctgtcctgaaatattataaggtggacatgttgagtgaaattaacattgctccccggattctcacca

SEQ ID NO: 423068 - DNA, 50 bp, Homo sapiens
gggcggcagagcagggcggcggcgactcgacgggctcatcttcgcttgtg

SEQ ID NO: 423069 - DNA, 98 bp, Homo sapiens
tgggccgcgacactaagaaacatctagtggtgccgggggatacaatcactacggacacaggattcatgcgacccccagggtggccagcggcagagcca

SEQ ID NO: 423070 - DNA, 83 bp, Homo sapiens
cttttcttgttcctgttctgaagtaaatgtaactgctatcctctggagattctgacaatggagatattaattatgattatgtt

SEQ ID NO: 423071 - DNA, 75 bp, Homo sapiens
aaagaattgaaaccctccaaaccacgtcatctgattataacaacgaacttgatgcaagtgataggtttgccaagg

SEQ ID NO: 423072 - DNA, 82 bp, Homo sapiens
gcagcccagtctggtgtttggaatgacgacagtatgatttctgcccctttgtccgaagagccaaaaatgaccaagtccctgg

SEQ ID NO: 423073 - DNA, 74 bp, Homo sapiens
cttacatgtgggaaccccaggagcttgcatcagaagagctaacaattgctggaatgacctttacaacttttgat

SEQ ID NO: 423074 - DNA, 100 bp, Homo sapiens
cggagacttttgatggtggaagtggtgaaacccaaacaacatctcctgctattccttgggctgcctttcctgcagactccagggattagagctcgatctg

SEQ ID NO: 423075 - DNA, 97 bp, Homo sapiens
ctacgtcccgctgccgtcgccgccgccaccatgcccaagagaaagatgtgaagttcatttccaatccgccctccatggtggcagcggggagcgtggt

SEQ ID NO: 423076 - DNA, 100 bp, Homo sapiens
cattgttcatcgtgatttaaaagctgaaaatttacttctggatgccaatctgaatatcaaaatagcaggagacggtggctcagggagtaaaggaaggcca

SEQ ID NO: 423077 - DNA, 85 bp, Homo sapiens
gagaatgtcactgatgtctccttagggatctcttcaaatgagcaggaccaagaaaacaatggactgctcttcctggagacctcag

SEQ ID NO: 423078 - DNA, 80 bp, Homo sapiens
gaagtttttatcaacaaaggcaaaggattcggatttattaagctttgtaaagaaagaatgaggcctgttaaagcagcttt

SEQ ID NO: 423079 - DNA, 98 bp, Homo sapiens
cccgcgccccgagaccgccgtcgctcggacgctcctgctcggctgggtcttcgcccaggtggccggcgcttcagtctgcagatctccaggggagccca

SEQ ID NO: 423080 - DNA, 75 bp, Homo sapiens
ttgtagaaggttgtgaaaaaactactaggatcacgcggcatgtattgagagaagatggcgaattagaagatggtg

SEQ ID NO: 423081 - DNA, 75 bp, Homo sapiens
gttccacaggatgtgccaccagaacccaagaagattccgataagaaacacgcatcagacaacagtcagcgctttc

SEQ ID NO: 423082 - DNA, 73 bp, Homo sapiens
gcgcttcaagcaggagggtgtcctgaacagcaaggacaagatcgcagaggaaggtgggcggcgggagtgccca

SEQ ID NO: 423083 - DNA, 75 bp, Homo sapiens
cttgctcgcaaggcgggggaggcggcggcccagccacgatgtttgtttatcaagcctggattactgatcctaaaa

SEQ ID NO: 423084 - DNA, 90 bp, Homo sapiens
gccagtgagaagaatgagtataaaggatgggttttaactacagacccagtctctgccaaagtgtcaatccatatctacaaggacagagac

SEQ ID NO: 423085 - DNA, 83 bp, Homo sapiens
tgaagagcgagaaggagcagcgccggcggctggagatatggatcagaaactttcgaagttggtagaagagctcacaacttcag

SEQ ID NO: 423086 - DNA, 74 bp, Homo sapiens
gcgaaccccgggcagcccgggaaatctccaagtcagaaagcggttgatcgacaagaccaaggtgacatatctga

SEQ ID NO: 423087 - DNA, 97 bp, Homo sapiens
ggttcagcaagtatgttctcagaagctatacactcattatctgatacttgtaatcaggtgaccaagaatatggcccaggtgaccaaagccctggaca

SEQ ID NO: 423088 - DNA, 90 bp, Homo sapiens
tcaacttccatgggcgcgtcacacaggcctccgtgaagaacttccagatcatccatggcaatgaccattatttatgtaaacccgaagaca

SEQ ID NO: 423089 - DNA, 50 bp, Homo sapiens
cggagcccgcgcgccgagccccacgatgacgtagctttgccaaagactta

SEQ ID NO: 423090 - DNA, 96 bp, Homo sapiens
cggcggcggtggcagcggcggaaaccgaaggggagccatggcggctgacagtcgggaggagaaaggtgttgttgaagtgtacagggtaaccaagcg

SEQ ID NO: 423091 - DNA, 111 bp, Homo sapiens
cgcctctgcggctccaggagggcgcaggagcgggactgagagcgcctggaggctcgagcggaggctgaccatactccctggagccttctcccgaggtgcgcgggtgacctt

SEQ ID NO: 423092 - DNA, 74 bp, Homo sapiens
cgacacgctgcgctaccaggccaacaactgccccatctgccggctgctgagtgagatcattggccgagacctga

SEQ ID NO: 423093 - DNA, 101 bp, Homo sapiens
cggcggcgagcggacggctgcatttacggggtctcccggagggccagagtcgcagccattgtttgatgtcctgtgactgagaaaccaggctttaaacttta

SEQ ID NO: 423094 - DNA, 74 bp, Homo sapiens
atttctagctcgaaggtttaagctgcaagctttcttcctggtggcagatgacatcatggattcatcccttaccc

SEQ ID NO: 423095 - DNA, 82 bp, Homo sapiens
tgcacagtcaaggaagaagtgggctgaagaatttaatgatgaaactaatgtgagcattttgaaagcgaagcagaagccgtag

SEQ ID NO: 423096 - DNA, 90 bp, Homo sapiens
gcaacagcctctgattacgacatggctgagatcaccaatatccgacctagctttgacttggcttcaaccaactcaggacatagcgattgc

SEQ ID NO: 423097 - DNA, 98 bp, Homo sapiens
gaagaagaccagcccttgcctgcccgacggctctcctctgactgcagcgtcactcagggctacttctacaagtccgaacagccagtccagcaaaatga

SEQ ID NO: 423098 - DNA, 75 bp, Homo sapiens
acgcggcgatatggaagaggagggcaagaagggcaagaaggtatctcagatgaagacatcatcaacattactctt

SEQ ID NO: 423099 - DNA, 75 bp, Homo sapiens
ccacaatggagacgccgccgctgcctcccgccatgcttcatgatgatccaagcagaagaattcctgctgaaatgg

SEQ ID NO: 423100 - DNA, 97 bp, Homo sapiens
ggcaacccccagcggcttaagccatggcagtcagcgtgggagaaattgtaacgagaaaccaacaaatgtcaggaaaagaaaattcattaacagagat

SEQ ID NO: 423101 - DNA, 75 bp, Homo sapiens
cgacaagtggaggcgccgctctagcggccgggactctgaactatggcggcggtgcgtctttctacgtgaatagga

SEQ ID NO: 423102 - DNA, 82 bp, Homo sapiens
gcacagccaatttcatgctccactataggtatccgttacagcactgatgtgagtgtagatgaagtaaaagctttggcttctc

SEQ ID NO: 423103 - DNA, 100 bp, Homo sapiens
tgacaaaaatcaggactcagttgtaaatggcacagaggctgaagttaaagagacagcaatgattgcctctgaacagcaacatggggtgcaaagtcctgct

SEQ ID NO: 423104 - DNA, 75 bp, Homo sapiens
ggctacacttctggccagtttgacctgggctgttttgacagaatacaaattaaaagcaattgaatatgtgcatgg

SEQ ID NO: 423105 - DNA, 51 bp, Homo sapiens
cctcctgagtagctgagaccacaggagttgatccctgaattttattatctc

SEQ ID NO: 423106 - DNA, 100 bp, Homo sapiens
caagcggatactggtcttctcgtcggattgcccatgcacttgttgcagaaacagccaaggaggcactggctacaattaggcttctcgacgtcctgtgcga

SEQ ID NO: 423107 - DNA, 75 bp, Homo sapiens
gtcggccgaggtcaagaaccgggtcaaaatgcagatcttcgtgaaaacccttaccggcaagaccatcacccttga

SEQ ID NO: 423108 - DNA, 96 bp, Homo sapiens
ctgccgccagcacacaccggcacctaccgcacgagcacagcttatagtgatttaggatactacattatcaataaactgcaccatgtggacgagtcg

SEQ ID NO: 423109 - DNA, 90 bp, Homo sapiens
acatccgcacccacacgggcgagaagccctacgagtgcaacatctgcaaggtccgcttcaccaggctcccacatcaggacgagaaggagc

SEQ ID NO: 423110 - DNA, 83 bp, Homo sapiens
ctccactccgtcccccgcgggtctgctctgtgtgccatggacggacggccgaagccctgcagcccacgctacagccggagatg

SEQ ID NO: 423111 - DNA, 100 bp, Homo sapiens
tctacacaacagtgaagtggggagacagccacagttccacaatggcgagtctgaggagagccacgagcagttcctgaaggcgctgcagaacgccgtcacc

SEQ ID NO: 423112 - DNA, 75 bp, Homo sapiens
ctgccacaacctgcgcagcagacaggttcatcgtgaagaataaatgagataagctacctcaagtgcctgtaccaa

SEQ ID NO: 423113 - DNA, 82 bp, Homo sapiens
caccgttacttgaagatgctttaatggatagcccaagaagatgaaaggattgttcttgttgacaacaaatgtaagtgtgccc

SEQ ID NO: 423114 - DNA, 100 bp, Homo sapiens
tggagctggaggcgcggcgccggtgagctgagggtggagagattcaaccagttagcgtgaaagttggagataaagttcttctcccagaatatggaggcac

SEQ ID NO: 423115 - DNA, 90 bp, Homo sapiens
ccttgaaaaagctgccctgagacggtgtcccgccgaaagtgatgtcttggcattgcccattttcaagcaggaagattccagccttccatt

SEQ ID NO: 423116 - DNA, 75 bp, Homo sapiens
agcacctcatcccctggatgggggaccacaagatcctcatcgacagcatctactacaagccttagtgggtctgat

SEQ ID NO: 423117 - DNA, 90 bp, Homo sapiens
gggacacctcggcacgcagcggagatgcctctttttgccaccaatcccttcgatcaggatgttgggcaagaatatcacggcatgggcatg

SEQ ID NO: 423118 - DNA, 90 bp, Homo sapiens
ccgggaagtacatggccggcctgaatctccatccgcacccgggtctagtgacggagcccgcgcgcggcgccaccatgcggcagaaggcgg

SEQ ID NO: 423119 - DNA, 75 bp, Homo sapiens
gccgtgtgctccctgcctctcacgctgacagagcggcttcgggacgcggagaacgaatccatggccaagattgca

SEQ ID NO: 423120 - DNA, 100 bp, Homo sapiens
cacctgcccctgcatcatgactcagaatttctgtgagaagttctgccagtgcaacccagactggtgtccacccaattgtggttgtgcagccagatgcctg

SEQ ID NO: 423121 - DNA, 100 bp, Homo sapiens
ctactcccagatgcatccgtgtcagttacagaatcagagtgtgcaccaatcccaaccacgggtattggaggtagagactactccaggatccttgagaaat

SEQ ID NO: 423122 - DNA, 83 bp, Homo sapiens
cagacacttcaggcgggaatcttgtgagaaagatcagtctaaagaaaaggagaagaaagtgaaaaaaacaattccttcctggg

SEQ ID NO: 423123 - DNA, 75 bp, Homo sapiens
aagaagctaatcttgtacttcaagaggaggaatcacgctcggaaacaatgggaacggcgtgagcgagaacagcag

SEQ ID NO: 423124 - DNA, 100 bp, Homo sapiens
ctgcgaaggccgggacccggttccccggcccacagtgggggtgtgcaaacccgagagaactggagtcattttcagagcacatggatgatagcaagcaaga

SEQ ID NO: 423125 - DNA, 88 bp, Homo sapiens
gaaagctagaagaaaaggtgtacttgcaagaaacctcaggacttgagtaacagcaacatgaggctgctattccaaaaagctttcaact

SEQ ID NO: 423126 - DNA, 74 bp, Homo sapiens
gagggagactgggggcaaggaggaggatgatcggctgaatgtaacagaggaactaacgtccaacgacaagacga

SEQ ID NO: 423127 - DNA, 75 bp, Homo sapiens
ctcctgcctcagcctcctaagtagctgggactacaggaagaagccatggatttaataaatagagaaacaatgtct

SEQ ID NO: 423128 - DNA, 100 bp, Homo sapiens
gtcagtggagaattgtccagaagacttggctcagggctatcgcaaagtgatcatttcaaccaacatcgctgaaacctccataaccattacaggaataaaa

SEQ ID NO: 423129 - DNA, 100 bp, Homo sapiens
ccaagttactgcagaatggatggtgtgtgcacagctgtggactgggtttttaccaagctggcagtctctgtttaggtgaatctggattgggaaagtcgac

SEQ ID NO: 423130 - DNA, 82 bp, Homo sapiens
ctgttacaatcaaggtctatgaaggattggcctaatgaagaagttcaacctggagagatggaaaatcagctctcataactaa

SEQ ID NO: 423131 - DNA, 101 bp, Homo sapiens
ctgaggcatctgagtcaacaacggatgaaaatgaagacgacattcagtttgtcagtgtgaatgccaaagatgacgaaggtgtcctcgttggatcctgggac

SEQ ID NO: 423132 - DNA, 75 bp, Homo sapiens
atttgcaccacgagatgtcactccagaggtggagccgccaccaaaatgcagattttcgtgaaaacccttacgggg

SEQ ID NO: 423133 - DNA, 101 bp, Homo sapiens
gatggattccaacatcctgctagacttgttaagtcacgtgaactggaaatttcagtttattggcgtgattggcggtctctgtgtgctgtaaaatttctgag

SEQ ID NO: 423134 - DNA, 75 bp, Homo sapiens
cctgatgccgatattcaacgctttcggtaccgaggagaaggcattgtatatgggacactagaggaggtgtgggac

SEQ ID NO: 423135 - DNA, 87 bp, Homo sapiens
gagcgttcctcatggagctggcccgcaggaaagggttcagggttgaaaatgagctcagtccagaacacatattacataatggagccg

SEQ ID NO: 423136 - DNA, 100 bp, Homo sapiens
tctatcttattcattttccagtgtctgtaaagggtaaaaaacttgttgctgcaagtcaagctgccttaggcttataacatcacatttaaaagcatctcag

SEQ ID NO: 423137 - DNA, 101 bp, Homo sapiens
ttagaaattccgcgggcggtgtagaggcggcggacgggccggagggaggatgttaaagccccgcggaagaattttaaatcgtttctccaaagacattggac

SEQ ID NO: 423138 - DNA, 83 bp, Homo sapiens
cccaggagcctgccccgccctggggacgaagagctgcagctcctcctgtgcggtccagaacacatattacataatggagccgg

SEQ ID NO: 423139 - DNA, 100 bp, Homo sapiens
tctgccccccgcccccaagccgcggccatggacctggcggatccggcctgccctggcccagctcaacacctgatttcgctttgcccgaagtttttacata

SEQ ID NO: 423140 - DNA, 50 bp, Homo sapiens
ccttgcacctgaagaccccacctttcctgtggttggcacttaccatggtt

SEQ ID NO: 423141 - DNA, 75 bp, Homo sapiens
tataaaggaacaaggattccgcgatgaagaacgatacagatacagggaatatgcagaaagaggttatgagcgtca

SEQ ID NO: 423142 - DNA, 100 bp, Homo sapiens
ggcgcggagtcccgcggagtctcgggccccggagacgggcgaggagcacggcagcagccagatggactagaggcttttaccagatttcttaaaactgaat

SEQ ID NO: 423143 - DNA, 100 bp, Homo sapiens
cggacgggttgtgcctggaggtggaggggaagatggagaacttaatgttctggatgatattttaactgaagtaccagaacaagatgatgaactgtataat

SEQ ID NO: 423144 - DNA, 98 bp, Homo sapiens
tgggaaatatagcagcaatttgggcaactttaattatgggttacaagtgtataacaagtgttggaagtttgagcattgcaatttcaacgacgtcacaa

SEQ ID NO: 423145 - DNA, 98 bp, Homo sapiens
gcgcgcctggccgcgaacccggaccctaagaagattgtgaataagtggaatacagctctcattggccttatgacatactttcgggaggctgtggtgaa

SEQ ID NO: 423146 - DNA, 98 bp, Homo sapiens
tgtgttcgagtggacaaaatggcgaagatcgccaagactcacgaaggttcgatacaagaggctgttttcctagcgtggcttgctgcctttggtaagaa

SEQ ID NO: 423147 - DNA, 105 bp, Homo sapiens
cagagctaaatgggggcctctccagggagtgctctgttcacggctccatcgctgttactttaccgatttgttacaactcaagcaagggccagcagaaattctctt

SEQ ID NO: 423148 - DNA, 138 bp, Homo sapiens
attttcacctcgcgtcgcgcccgggaggaaggaacgaggcaaggagctaaagcagcgtgcgttcagccctggggagatcatgaatcagacagataaaaatcaacaagaaatcccatcataccttaatgatgaaccacc

SEQ ID NO: 423149 - DNA, 95 bp, Homo sapiens
ggagccttcatagggacagccgcccctggtgcacacaccctcgtattctcctgcccttccccaggtctctttaatgtggggaacaagctgctggt

SEQ ID NO: 423150 - DNA, 75 bp, Homo sapiens
ccaagatggcggcgcagaggaggagcttgctgcagagtgtattctctactgccgctgatggtcaaacgcaagtgg

SEQ ID NO: 423151 - DNA, 83 bp, Homo sapiens
cgggcaccttccgggtggagttcagtgaaagggcaggcacggaatgttaacactggtgaattagcagcaattaaagtaataaa

SEQ ID NO: 423152 - DNA, 100 bp, Homo sapiens
gccgcacggtcaacaccttctcccagagcgtcagcagcctgttcggcgaggacaacgtgcgcgccgctcagaaggtctcctctgagcctccggcctccat

SEQ ID NO: 423153 - DNA, 98 bp, Homo sapiens
ttggatttaaaagacagtcctcgtcagcactgactttcagctatggaatcggcagctgtgcctcctgctgaatgcggagaacatcttccactcaatgg

SEQ ID NO: 423154 - DNA, 75 bp, Homo sapiens
ttttaggaccagaagatctgagttaccaaatatatgatgtttccgatatgagggaaggcaccattggagatatgg

SEQ ID NO: 423155 - DNA, 90 bp, Homo sapiens
cctgcgtccgagtctccgccgctgcgggcccgctccgacgcggaagtccacaggtcctggctaccctgggaagagacaagaagtaaatga

SEQ ID NO: 423156 - DNA, 80 bp, Homo sapiens
ctccttctcaatcttggaacagcacccccttctttaaggttgctccttgagggcaggacagttcttatggctttatccgt

SEQ ID NO: 423157 - DNA, 98 bp, Homo sapiens
agccggtgcagcagccttcagcttttggcagcatgaaagttagcaattgggctaatggatactacagacaacagagaaaacttgttgaagagattggc

SEQ ID NO: 423158 - DNA, 74 bp, Homo sapiens
cccgcgcggcgccgggcgctgactgagattttgcctgcctgagctcctctagtagtggccacaattgccagaga

SEQ ID NO: 423159 - DNA, 76 bp, Homo sapiens
cttggtggccaatgttcctgatagttttaatgaagggtgaatctgtaaaatatttcctggataacttggataaact

SEQ ID NO: 423160 - DNA, 100 bp, Homo sapiens
gaccatctcagaggccccgggatcacccgaacagcctgggaatggagaatattggtggaatctttgtggttcttatttgtggcttaatcgtggccatttt

SEQ ID NO: 423161 - DNA, 82 bp, Homo sapiens
aaccctggtcaccgtctcctcagtgccctataaggactgccaggcaataatgaaggttcttttactgaaggatgcgaaggaa

SEQ ID NO: 423162 - DNA, 98 bp, Homo sapiens
agaagacaaacttgccaaagctacaagagacagacaggggcaagtgtccgagtggtgaatcagctacttacagagatggatggtctggaagcacgcca

SEQ ID NO: 423163 - DNA, 75 bp, Homo sapiens
agagccaaggatgagtatgagagggaaacaggaagagcgagtacagcaagtacgcaagaaattggaagaagcact

SEQ ID NO: 423164 - DNA, 74 bp, Homo sapiens
attttgttgaagatgactcggacattttacatggaattcctcctgatcagcagagactgatctttgctggcaag

SEQ ID NO: 423165 - DNA, 82 bp, Homo sapiens
gtaagatcgtcgagatgtctacttcgaagactggcaagcacggccacgccaaggcatgaggctcagagactggagcaggaag

SEQ ID NO: 423166 - DNA, 100 bp, Homo sapiens
cttccgaggttctcacagagttcaggcagcgcccggttaccacatggccaagctgatcatcaagttggtcacctccatcggcgacgtcgtcaatcatgac

SEQ ID NO: 423167 - DNA, 100 bp, Homo sapiens
catccccgaccgccctcttctgtcttgctcaatgaacagaacctcatccaggaagtccccaacatctggcaacgtgaagttggctaggaggaaggaagtg

SEQ ID NO: 423168 - DNA, 83 bp, Homo sapiens
tcggtgtgacaccaagtggcaacattggagccaatggggttgcaatttttgagtcggttcggtgatgctgtgaaaggtaattt

SEQ ID NO: 423169 - DNA, 83 bp, Homo sapiens
aattcctttttgtcctttgcaaagagagagggtgatacaattctggagactggagaagtaattccaccaatgaaagaatttcc

SEQ ID NO: 423170 - DNA, 98 bp, Homo sapiens
ctggagcgacgacggccgctgcctaagctggaaagcagtgaggtcactcaaggagacaatcgaagactgttgggaccaggatgcagaggctcggctta

SEQ ID NO: 423171 - DNA, 75 bp, Homo sapiens
gcgcggaggcagcgggcgaggctgcagggcagtgcgacggcggcggaagcggtaatagcctgcagctggtgtttt

SEQ ID NO: 423172 - DNA, 98 bp, Homo sapiens
atgagaagttacgagactacatctggaacacactcaactcaggacgggagctctctgctcgtgatggggatcctacctttcatacacatcagctgcac

SEQ ID NO: 423173 - DNA, 75 bp, Homo sapiens
gccagctcagcctgcagcacagactgggaaacaccatctgattcagatcacaagaagaagaaaaagaaaaaagaa

SEQ ID NO: 423174 - DNA, 100 bp, Homo sapiens
ctgcatagcagtttttgttggcattaaccacgccagtgctatgtgtcgtggaggccgaatgtttgcaccaaccaaaacctggcgccgttggcatcgtaga

SEQ ID NO: 423175 - DNA, 97 bp, Homo sapiens
ctgcagccgcacctggccaagggatggccaggccatgttatgggatctcaacgaaggcaaacacctttacacgctagatggtggggacatcatcaac

SEQ ID NO: 423176 - DNA, 96 bp, Homo sapiens
tttcagtcactggtttgcagagtccagctacaatcaacctaaattcagccaatgatagctggtttggcagcttaaaggacactattcagcatcagc

SEQ ID NO: 423177 - DNA, 100 bp, Homo sapiens
gcagctgccagatccgctgatctagtgcttctcgaaaaaaaccttcaggcggcccatggacctctgtgagtgaaagccttcagagggaagctgctaagaa

SEQ ID NO: 423178 - DNA, 100 bp, Homo sapiens
aagaatctggttatgatacaatcttgcgtgtcctgggctctaatgtcagagaatttctacagtccatgctccgagggagaggaggttgttacaaacacac

SEQ ID NO: 423179 - DNA, 74 bp, Homo sapiens
catccaaagcagccgtcccctctgcagcctctctgacaagtggtggaacctaacttcttgtggaacaagtgttg

SEQ ID NO: 423180 - DNA, 101 bp, Homo sapiens
gcccagcaatcacagaagccgacaaggcgttcaagcgaaaacatgaccgctgagcccatgagattcagaatggacagtttagaagaacctcagaaaaaagt

SEQ ID NO: 423181 - DNA, 75 bp, Homo sapiens
ccgaggtagaagaagatgaacccacagatttggagctcgaggccatgagcagatataccagcccagtgaacccag

SEQ ID NO: 423182 - DNA, 74 bp, Homo sapiens
aagagggaagacacgcggaaacaggttcgttccaccagtcataaaccagatgaaatctatggcatgattgaaag

SEQ ID NO: 423183 - DNA, 50 bp, Homo sapiens
cgaggactcaccaatctggttcggcttgcctccggagccagcgtggtggc

SEQ ID NO: 423184 - DNA, 74 bp, Homo sapiens
gtggagtccgagctgagatccatctgcaccacggtgctggaagctgccacttttgctagagagcaaggctttga

SEQ ID NO: 423185 - DNA, 101 bp, Homo sapiens
agatgataaagatgcagccaaggtcttagcagaagatgggactggtttggctgaaagacaaagaagcaacacattgtaaactttgtgaaaaggaattctca

SEQ ID NO: 423186 - DNA, 82 bp, Homo sapiens
cttatgcttataagagtggaacaggcgtttacgtgtgtgccaagtgtggctatgagctgttctccagccgctcgaagtatgc

SEQ ID NO: 423187 - DNA, 100 bp, Homo sapiens
gaggttcatttaaccccaaaatcagtgattctacatctcaagctcatattttgaagtgtttacgggactacgagaaagccctgttcttcccctgcaaggc

SEQ ID NO: 423188 - DNA, 75 bp, Homo sapiens
cgcgctctgggcacagccttggaaagtcaggaccgcgacggcagcagagcagtttggtgcacctcgatttggagg

SEQ ID NO: 423189 - DNA, 91 bp, Homo sapiens
agaagtgaagaaattattggtacctgcattttctggatatgccgcagaaggatccgtgccagaagcaagcctgtgagatacagaaatgttt

SEQ ID NO: 423190 - DNA, 75 bp, Homo sapiens
gacaaaggtcgcctttgctactaccgcgactggctgctgcggcgcgagtgatgatgatgatgattttgatgatga

SEQ ID NO: 423191 - DNA, 83 bp, Homo sapiens
gcatcatttattctccgtactgatcactacatcatgcaaatagtagtgatagtgaagaactttcagctggtgaaagtataact

SEQ ID NO: 423192 - DNA, 100 bp, Homo sapiens
agacagtgacgattatagcacaatatcaacctgaaggtattgcgcagcgatgcacggccatcaagtaccacttttctcagcccatccgcttgcgaaacat

SEQ ID NO: 423193 - DNA, 75 bp, Homo sapiens
aaaaaatataataaggctgagtgcggagccaagccacgacaagggacccgaggcggaggagggcgtcgagctgca

SEQ ID NO: 423194 - DNA, 107 bp, Homo sapiens
cagaggccgccatcaaccgccagatcaacctggagctctacgcctcctacgtttacctgtccatgatcacttcagcatcggtgaggttggtctctcaagaacccaaa

SEQ ID NO: 423195 - DNA, 89 bp, Homo sapiens
caattcacctgcctcctatgtcttccatccagacaatgctgaggtcacaagccccaaagtggacgtgttcaatgctaacagcaacctca

SEQ ID NO: 423196 - DNA, 90 bp, Homo sapiens
ctgatttcatgggttctgcatttgtcattctcagtgatcttgagcttaacagttattcattttggacctggagaaagttcttcagaagat

SEQ ID NO: 423197 - DNA, 100 bp, Homo sapiens
ccggctcctacgcatcaagaagagatacatcttcttcaagacaccgagggaggtgaagcctcccgaggacctgcaagacctgggggtacgcttcctgcag

SEQ ID NO: 423198 - DNA, 100 bp, Homo sapiens
ctgtcagtacaggtgccgatatgacaggggcaagtgtccgagtggtgaatcagctacttacagagatggatggtctggaagcacgccagcaggtttttat

SEQ ID NO: 423199 - DNA, 87 bp, Homo sapiens
aggatgagcacagtgcagggagtactatactggcaattgctggagaagattttgcaattgttgcttctgatactcgattgagtgaag

SEQ ID NO: 423200 - DNA, 100 bp, Homo sapiens
acacaatttatcattgaataagtgttttaagaaagtggacaaagagaggagtcaggagagcgaagacctggagaaacagaacgcggctctacgcaaggag

SEQ ID NO: 423201 - DNA, 100 bp, Homo sapiens
ctacttcctggaggagcgcatgcaacagaagtatgaggccagccgggaggacatctacaagcgggatgttgccttatggctgtttagcaacaggagatcg

SEQ ID NO: 423202 - DNA, 75 bp, Homo sapiens
gaccgggggagctcccaggcgcccgggcttgggcactgtttaaaggaaagttccgagaaggcatcgacaagccgg

SEQ ID NO: 423203 - DNA, 97 bp, Homo sapiens
aggtgagaaaagaactcagcagagtcgaccagaggcatcgcgccagccagctccgaaagcagaagaaggaggcgagatctcggctcaccaaattcca

SEQ ID NO: 423204 - DNA, 97 bp, Homo sapiens
cacagcctggttggaaaacccaagatatttatcattcaggatgatggcttggaaaaaagtccaatgaaaaaaaaacagaagaagaaagagaacaagg

SEQ ID NO: 423205 - DNA, 100 bp, Homo sapiens
cgctcatctgcctctgcgcgctgcagttgtcctaccctggtccaagcctggaaagtgaagacttcaacattccaccaattactcctccttccctcccaga

SEQ ID NO: 423206 - DNA, 100 bp, Homo sapiens
cgagagggaagccccttggatattccagtcgatgtatttgtacaccaaatgcttgtgaccacaccagaaaaatgggatgtagtgacaagaaagagtgttg

SEQ ID NO: 423207 - DNA, 80 bp, Homo sapiens
gaatgccacaaatgcaaatacttgtgcactgggagagccaggaggaagaagaggaggatgaggaggctgcctcaaggtac

SEQ ID NO: 423208 - DNA, 90 bp, Homo sapiens
cggcttcatgctgtgcagcaagaacccgctctattaccaggttttaaacttcgccatgatcgtgtcttctgcactcatgatatggaaagg

SEQ ID NO: 423209 - DNA, 90 bp, Homo sapiens
gcggcggccacggaggcaccatgaagaagtcttactcagtttctcctggcggcgctggtcctgtctctcattctgccgaggagcagccag

SEQ ID NO: 423210 - DNA, 83 bp, Homo sapiens
caacgtgagacgcaccgcccggactcaccatgctcgagcccagaaaactatcctctaagaccagacgtgacaaggagaagcag

SEQ ID NO: 423211 - DNA, 101 bp, Homo sapiens
tggcgacttctggcgcggcctcggcggagctggtgatcggctggtgcatattcggcctcttactactggaatgaatctgaagtctgctgcagtaaaacaca

SEQ ID NO: 423212 - DNA, 82 bp, Homo sapiens
tggtggacctgctggccacggacgccgacatcatcagccgctgccagaaacgcttcgttaagggactcaggcagtacgggaa

SEQ ID NO: 423213 - DNA, 75 bp, Homo sapiens
taccacctgccgccggttgccggaggccatcgaggaagtgaagaagtagacccacaacttgtggatggacacctt

SEQ ID NO: 423214 - DNA, 74 bp, Homo sapiens
ccggacaccgacgcgctcatctgctggagcccgggactttgaacatgtcggggatcgccctcagcagactcgcc

SEQ ID NO: 423215 - DNA, 82 bp, Homo sapiens
cagagccccactggagcatggagccagcctagagagggtcagattgggaaaatgaggtacgttagtgttcgcgattttaaag

SEQ ID NO: 423216 - DNA, 82 bp, Homo sapiens
ctgttgcaacaatattctttaacagtggactatcattgaaaacagagcatccggtgaaagacagagatcacatttcaactag

SEQ ID NO: 423217 - DNA, 82 bp, Homo sapiens
cttgctggaaaaagaagctgagtacgtagagaaatcgacactcttaatgaacgtttagctgctgaaggacaagcgattgatg

SEQ ID NO: 423218 - DNA, 100 bp, Homo sapiens
gctaatgtctgtctggctgctgcagtgacccagaccctctcctttccctttgagaccgtgaagagaaagatgcaggccccatcacaggtatatggaggag

SEQ ID NO: 423219 - DNA, 75 bp, Homo sapiens
gaaaatttcaggctgaaggtttagcgggtgccggtttaagaattgtttaagctgcatcaatggagcacatacagg

SEQ ID NO: 423220 - DNA, 100 bp, Homo sapiens
tgcggcagacggcgacagtggcggcggcgccatggcagggcttgcaggtctcctctgagcctccggcctccataagacccaaaacagatgacacctcttc

SEQ ID NO: 423221 - DNA, 74 bp, Homo sapiens
gtcttgtcaggtgcctggggcatgcaaatgtgggtgaccttcgtctcaggctgactgtgctgtcctgattgttg

SEQ ID NO: 423222 - DNA, 151 bp, Homo sapiens
tgaaaatatctccaacttcaacaatgccctggagtcaaagactgctgccagcggggtggaggcgaacagcagaccttctcaaaagtctatggtcctgtgttcaccgtgtattttggcatgaatcccatagtggtgtttcatggatatgagg

SEQ ID NO: 423223 - DNA, 100 bp, Homo sapiens
cagattctaactccaatggcccaaaaggatctgcaaagacttggagaacttcaatctgaattggcaggagtagctgatttctctgccacctatcttcgct

SEQ ID NO: 423224 - DNA, 76 bp, Homo sapiens
cgtattcttaaaggcgaaaaaggtggatttgctaggggacactacacagaaaatgagaactgctcactatcctacc

SEQ ID NO: 423225 - DNA, 100 bp, Homo sapiens
cagtacctgaccactctctcccagtgggtaattccagaattgattggccataccattgtcactgtattactgctcatgtcattgcactggttcatcttcc

SEQ ID NO: 423226 - DNA, 98 bp, Homo sapiens
agatcaagaaagcactctgagctccagaaggagctttccgggccagctttgaggataagctgctgatgagcgaaaacatggtaagaggcttagatgaa

SEQ ID NO: 423227 - DNA, 75 bp, Homo sapiens
gtcccgaacacaggatgaacatccgaagacaatgttctccaaagataaggtgtttgatgtacagaggaaagtcac

SEQ ID NO: 423228 - DNA, 100 bp, Homo sapiens
tcagagcggggcatggcatcgaacagcatcttcgactccttcccgacctactcgccgaccttcatccgcggcaagtgaaccggagcaaacgacttccgat

SEQ ID NO: 423229 - DNA, 75 bp, Homo sapiens
ctgttcgtcaggaacgtggccgacgacaccaggaattttggagagtaaaaggctgaaccttgttaaagagaaaac

SEQ ID NO: 423230 - DNA, 50 bp, Homo sapiens
gtttgactttatggaaaaagagatgcgagtaaaatttggtgccatgactc

SEQ ID NO: 423231 - DNA, 75 bp, Homo sapiens
ctgaagggggctctttatataatgcttcaaaggaatattttggcatctaatcccagggtcacaagattccacatt

SEQ ID NO: 423232 - DNA, 75 bp, Homo sapiens
ttgtgtgctcagtgccgatgtctttgccaggacttccaccagttgagtcaaaatctgctgctgtggttagcgagt

SEQ ID NO: 423233 - DNA, 75 bp, Homo sapiens
ctgggattggaactgtgtttgggagcctcatcattggttatgccaggtttctagagaggaaggatctccccagct

SEQ ID NO: 423234 - DNA, 100 bp, Homo sapiens
tttgaatctcagagtgaagatgagttgacaccttttgacatgagcatccagaaagctctgggtgtgcggcagtaccatgtggcctcagtcctgtgccaac

SEQ ID NO: 423235 - DNA, 100 bp, Homo sapiens
ccctcaccgagtacgaagcgggcgtttgcgaagaatgatatggaacctagcaaagctgttccactgaatgcatctaagcaagatggacctatgccaaaac

SEQ ID NO: 423236 - DNA, 100 bp, Homo sapiens
ctaaaacacaaaataaaaaccagattcattgccaccagcgctcacctcgcctgacttaaaaaaaaggcagcctggcatcctcgctacaacctcattgttg

SEQ ID NO: 423237 - DNA, 107 bp, Homo sapiens
ccggaggcctcggcccggcctcatcgtgccggcttcgcgcgcgaacccggctttcgcatttgggaccctgcaggagaagatggcgaattagaagatggtgaaataga

SEQ ID NO: 423238 - DNA, 74 bp, Homo sapiens
tatggagctgggcgtggaagtatgtatgacagaatgcgacgaggaggtgatggtggatataatggatttggagg

SEQ ID NO: 423239 - DNA, 100 bp, Homo sapiens
atcttgtaaaattggacaatggctctttagagagttatctgagtcgtggagattggtgaaagcgtgagaggggaagatgtctacatcatccagagcggct

SEQ ID NO: 423240 - DNA, 113 bp, Homo sapiens
ccgggtctgagcgcggctgcccaggttgacctttctgcgggagcttccgacttcgactccttaccttaaaagatgctggagtcatatgtaactccaattttaatgagctatgt

SEQ ID NO: 423241 - DNA, 100 bp, Homo sapiens
gttccgactgttgaccttgatgctcaagggagagccagagcaaggaattgactttaaaattaggaccatagagctcgatggcaagagaattaaactgcag

SEQ ID NO: 423242 - DNA, 50 bp, Homo sapiens
gttctgagaaggagaaagacacgttttgcaaaccgtttttcaaaacccaa

SEQ ID NO: 423243 - DNA, 75 bp, Homo sapiens
agactctgcggcgcatggaggaggaggagatggcgggtgaaaaagttgagaagccagatactaaagagaagaaac

SEQ ID NO: 423244 - DNA, 75 bp, Homo sapiens
gctccgtggaatttcctttctctgctttaacgtacttttaaaaggaagctcttcgtgggcggtcttgactggagc

SEQ ID NO: 423245 - DNA, 99 bp, Homo sapiens
cccgcctcggcccgcacgccaagcacgtggtgggctatggccaccttgatcctcgttcctagctgcctgccagcgtcctcggcccggccctgaggatgg

SEQ ID NO: 423246 - DNA, 84 bp, Homo sapiens
ctacgagctgtttctcatctttatactcttccagcttcggaaccaaaaagaagcttcccagagccggggccaggagccccaagc

SEQ ID NO: 423247 - DNA, 100 bp, Homo sapiens
gacttatacttctcaaatcttaatttcctaaagtgtaaacaggaacatcgataagtagtgtaaaaacttgcacaatgaaatccgaagccaaggatggaga

SEQ ID NO: 423248 - DNA, 98 bp, Homo sapiens
agccaggagtcatgagcgacagcggcgagcagaactacggcgagcgggaagggaaaaggccgaggcatcagcgtgtgaagaccgcaaagacgatcccg

SEQ ID NO: 423249 - DNA, 100 bp, Homo sapiens
gtcaaagccaaggacgtcgatgagtacaaactgaaagaccactatctggagtttgaggaattctcacactcaagaaagcaaatgaacttcttctgagcac

SEQ ID NO: 423250 - DNA, 75 bp, Homo sapiens
gtgaaacccaaacaacatctcctgctattccttgggctgcctttcctgcagggaattcggcaccggttgagaggt

SEQ ID NO: 423251 - DNA, 75 bp, Homo sapiens
tgagacatttttcttccttctgtcacatcacacccaatgaacagccctcatgcttgctgtgcactatgactcacc

SEQ ID NO: 423252 - DNA, 71 bp, Homo sapiens
tccatcgacctcaaggacatcaacttccggccgcagatgtcccagtgctcggcgtgggacatggatgcagg

SEQ ID NO: 423253 - DNA, 100 bp, Homo sapiens
tgctgctaacgcggtccccggcacgcaccatctgttgccatcccggccggccgaggccattgcagattgtcactgctgttccaagggcacacgcagaggg

SEQ ID NO: 423254 - DNA, 80 bp, Homo sapiens
tcaaggcgctggccgatgtggaggtcacctacacaggcccaaccgcttgcttatcctccacggcttcctggacgaaaacg

SEQ ID NO: 423255 - DNA, 50 bp, Homo sapiens
tgctgctgctcctggaaaccgcgagacggtcatctgttccagccgggcca

SEQ ID NO: 423256 - DNA, 75 bp, Homo sapiens
ctgcagaacccccagaccatcatccaggggacatgcgccccattgtcccggggcctgtcagcgagtggagcaggg

SEQ ID NO: 423257 - DNA, 75 bp, Homo sapiens
ccagattccaaaacttatgtcaaagagactagcttgcaaaattttcctcatattgaggtggttcggaaaaaagag

SEQ ID NO: 423258 - DNA, 83 bp, Homo sapiens
tgtgctcgcgctactctctctttctggcctggaggctatccagccaaccttggccatggaccagccggctggcctgcaggtgg

SEQ ID NO: 423259 - DNA, 82 bp, Homo sapiens
gcgccgagcggaggaggaggaggaggcgaggaggagagactgtcatcatcagatttgaaatatttaaagtggatacaaaact

SEQ ID NO: 423260 - DNA, 97 bp, Homo sapiens
agttggaagcagccgatccagcctgcggagcctgtggggcagaagccccatgtgccactcccctgatctgcagcttcggtaggccggtggacctgga

SEQ ID NO: 423261 - DNA, 94 bp, Homo sapiens
aaggaacgaggcaaggagctaaagcagcgtgcgttcagccctggggtctattctggataagcaggttttgtgaagacatttattctttcttgga

SEQ ID NO: 423262 - DNA, 100 bp, Homo sapiens
gtcaatgctgctgatgcctttgatattggctcatttgatgaagaggataccaaagggattaagggtgaatctgtaaaatatttcctggataacttggata

SEQ ID NO: 423263 - DNA, 100 bp, Homo sapiens
cctgaaaaaagaagtggtggggaaagacctgctgaaagggtcgctcctcttcacagctggcagagaggctgatgacatcgtgaactggctgaagaagcgc

SEQ ID NO: 423264 - DNA, 87 bp, Homo sapiens
acattgccagaacttggaatactctactggacaaacatttcctccaaggttccttgtggagaagcactggtataagcagtgggaggc

SEQ ID NO: 423265 - DNA, 90 bp, Homo sapiens
aagggacggacgcagcccgggccgccatcgccttctcctttttctccatcttcacctgggcaatttgaatcaacccatagaagtgacagc

SEQ ID NO: 423266 - DNA, 105 bp, Homo sapiens
acctgtccttctacattttcgatagagacgttttccggagggattccatcatagacctgcctgaccagtgcacgcccaacccctgcgataggaaggggacccaag

SEQ ID NO: 423267 - DNA, 100 bp, Homo sapiens
atcagtcacgaggctcccttgacaggcggctttgcatcggaaatcagctctacagttcaggttgacctgacagttcaagaaaaggagaaatatcttaatg

SEQ ID NO: 423268 - DNA, 75 bp, Homo sapiens
gccttccgccgtctcttcgagttcttcgtgctgctcaagtttctctcctgtcacaatggcatgatctcggctcac

SEQ ID NO: 423269 - DNA, 101 bp, Homo sapiens
ctcccaaagagctgggattacagaggagaggagacgccgtgagcgggacgaccagatgtaccgagagcggctgcgcaccttgctggtcatcgcggttgtca

SEQ ID NO: 423270 - DNA, 90 bp, Homo sapiens
gatgttttgtccagggcagcatctctggtgcatgctgatgacgaaaaacgtgtgatcagcactggaaaagatgcctgcccctgctgccac

SEQ ID NO: 423271 - DNA, 76 bp, Homo sapiens
gccagtgctaccccattcacagacatcaaggcagctagtacaccactgaatcctttaagctttcagtgtgaatttg

SEQ ID NO: 423272 - DNA, 90 bp, Homo sapiens
gccatcccagagcccgtggtgagcaggaggccactgtctgcagctcccgtgaagatgtccactccagacccacccctgggcggaactcct

SEQ ID NO: 423273 - DNA, 127 bp, Homo sapiens
ccgaacaagaccgaaatccagactctttttaagaggcttcgcgcagttccaaccaacaagacaatgcagatcttcgtgaagactctgactggtaagaccatcaccctcgaggttgagcccagtgaca

SEQ ID NO: 423274 - DNA, 112 bp, Homo sapiens
cgagcagcgccagcggccgagcgggcggcttcctggcctgggcgctccggtggcggcggagaacccagcgggtgccgcttctccacccgaggcttccacctccaacgagcca

SEQ ID NO: 423275 - DNA, 109 bp, Homo sapiens
tgtggagatggggagcgtcctggggctgtgctccatggcgagctggtttccctgaaacctgggctcttgaagacgcatcactggagcagatggataatggagactgggg

SEQ ID NO: 423276 - DNA, 100 bp, Homo sapiens
atcttcagccagccggcctgcttccctgccaagagtgcctgcgatggaaagtgccaagaccctctcagggatgtgtcttggtgagctagtcattaacccc

SEQ ID NO: 423277 - DNA, 82 bp, Homo sapiens
tgcaaggactggttccacggcagatgagcagcaccagcagtaagagggctccgaccacggcaacccagaggctgaagcagga

SEQ ID NO: 423278 - DNA, 100 bp, Homo sapiens
ctgcaggcctgtctgcagggccagagcggggcagacatggacaagcgggtgggccaattcctgtccccccagcagcatggcatcgtgtgctgaaccctct

SEQ ID NO: 423279 - DNA, 76 bp, Homo sapiens
tgcagctggtacatccagggcgaccgtggtgacatgattaccatcaggcgcacacggactccttgaacaccctcgt

SEQ ID NO: 423280 - DNA, 89 bp, Homo sapiens
tggtcttggtagcggaggcacccgaatgctgcccgggtgagagttcgaaccaacgtggcctcaaccagatttggaatgtcaaaaagcag

SEQ ID NO: 423281 - DNA, 74 bp, Homo sapiens
tttcgaaggaggatgccctggagacacacaggcagacccatactggtgtcatggagaaactccagctgggccca

SEQ ID NO: 423282 - DNA, 87 bp, Homo sapiens
tgaagaccacaataaaagagacctctacttagctcagcaattcttaccttcttcttggacacttaatgattgttggcaagaaatgtg

SEQ ID NO: 423283 - DNA, 90 bp, Homo sapiens
ccatgattctgcaaagccctgtcatgatgatgggcagcgcccgagtggcggagctgctgctgctccacggcgcggagcccaactgcgccg

SEQ ID NO: 423284 - DNA, 49 bp, Homo sapiens
gtgaggcctccccagccacgtgaaactattcctagaggggagtgcctgc

SEQ ID NO: 423285 - DNA, 80 bp, Homo sapiens
ggacagcgcgaggtccgcgcagcccagcgcagccatgccggcgaccaccaggggcctgaggatgaagccaagtctgctgt

SEQ ID NO: 423286 - DNA, 100 bp, Homo sapiens
cctgcctcagcctcacaagtagctgggactacagactgcgccatggggctcagcgacggggaatggcagttggtgctgaacgtctgggggaaggtggagg

SEQ ID NO: 423287 - DNA, 75 bp, Homo sapiens
gtattttgtgatcgcagcgatgaaagggatgtttcagcagcccctgagaaggaagaggaggaagctgagggcccg

SEQ ID NO: 423288 - DNA, 82 bp, Homo sapiens
atttaagaaagaagatgttaactttcagtggtacaggagctgcagcaggccatctccaagctggaggcccggctgaacgtgc

SEQ ID NO: 423289 - DNA, 75 bp, Homo sapiens
cgaggagaccccgcgcagtgctgccaacgccccggtggagaagctgagacaacacaggcagttctacataccggc

SEQ ID NO: 423290 - DNA, 148 bp, Homo sapiens
aaaccagaaagtgtggatttgtgtggagcacacattgaatgggccaaggaaaaatcgagcagaaagaatgtctttcagtatctctcagaagatagaagtgtgcaagaagtactacagaagcatttcaatatcagcaaaaacctgcggt

SEQ ID NO: 423291 - DNA, 100 bp, Homo sapiens
cgagaacgcctccagcggggatgacacagaagtgtgggcgaaatgctgaaaacttcgaccgatttttcacccgccatccaccagtcctaacacctcccga

SEQ ID NO: 423292 - DNA, 99 bp, Homo sapiens
catgagggaaatcgtgcacatccaggctggtcagtgtggcaaccagatcggtgccaaggtggagcagctcctgtacgaaagccctgagcggtactcccg

SEQ ID NO: 423293 - DNA, 83 bp, Homo sapiens
aggaggtcctgccgtccatgcggaagatcgtcgccacctggatgctggaggtcttgagtcaccacgtccgaatataattcttg

SEQ ID NO: 423294 - DNA, 90 bp, Homo sapiens
gttgtgttcctggcttccctctggatgctgacagaaacaaggacttcattatcctggcagtatggggcatgctggctgtaagtggaatta

SEQ ID NO: 423295 - DNA, 82 bp, Homo sapiens
gaatggacaccttgaagcagaggagcagcaggaccaggaattggctattcatcatggctggagacttcctgaatataccctt

SEQ ID NO: 423296 - DNA, 100 bp, Homo sapiens
gccctgcagtacctgcagaaggtctctggagacatcttcagcagccatgccagtgacggtaacccgcaccaccatcacaaccaccacgacgtcatcttcg

SEQ ID NO: 423297 - DNA, 83 bp, Homo sapiens
ctaggcataaggaagaatgtctcatgttcgagtctggggctgtcgctgtgctctacctgcctagagctggaacgttacctcca

SEQ ID NO: 423298 - DNA, 98 bp, Homo sapiens
gcagagcaacgggtgcccctgagtgtgcaactgaagcctgaggtctccccaacgcaggacatcagagatgctgcccccacccccttaggcccgaggga

SEQ ID NO: 423299 - DNA, 75 bp, Homo sapiens
ccggggcaagagcaggagcccggcaccccccgccgacaaggaggctatcatggtgaacttacttcagattgtgcg

SEQ ID NO: 423300 - DNA, 100 bp, Homo sapiens
ctcccttgacaggcggctttgcatcggaaatcagctctacagttcagatgccaattctcggaagcaagaagcagagtggaaagaaaaggcaataaaggag

SEQ ID NO: 423301 - DNA, 100 bp, Homo sapiens
acatacatgttggctcgcacagatatggaaaatcttgaccttttttctatcagtgcttatgtttatgctcagaaaccacaaatggacattcacagtttcg

SEQ ID NO: 423302 - DNA, 100 bp, Homo sapiens
aaagaacattaatgatgtggacactgcattgagtttttaccatatggctggagcatctcttgataaagttggatcacaaggacgagtcataagttttgag

SEQ ID NO: 423303 - DNA, 122 bp, Homo sapiens
cagcagatggcggatgccctgcagtacctgcagaaggtctctggagacatcttcagcaggtatcgagaaccttccctgcgaacttcagaggaacttccagctgatgcgagagctggaccaga

SEQ ID NO: 423304 - DNA, 75 bp, Homo sapiens
cttcgcagtctggaaagctttaggagttcacagtgtagtggatgttgaactccatcgccattctctcggagaaga

SEQ ID NO: 423305 - DNA, 75 bp, Homo sapiens
ttccaaatgaatttgcaaaacttactgtagggtgtccgcaatgttgccagtgtctgtctgcagattggctaccca

SEQ ID NO: 423306 - DNA, 87 bp, Homo sapiens
cactcaggcctcactttatcttccaaggcctccgaccagggagaccttccatcctcctccacctgttccacccagaggacgctgatt

SEQ ID NO: 423307 - DNA, 100 bp, Homo sapiens
aaagtcgcagcgagctggagccgccggagtttgaaaaagtaccagaaggtcctatccctccatctacaccaaagtttgcatatggaaaggtcactttgga

SEQ ID NO: 423308 - DNA, 75 bp, Homo sapiens
gttttctcatccatacaatggagataatggcagcacccactgcttgcgcgagcttcggcctcggctctgtaccat

SEQ ID NO: 423309 - DNA, 82 bp, Homo sapiens
gccgcccgtccccggcacacgcgcagccccggcctctcggcctctgccggagaaacaggtgcgcgcggagccatggttatca

SEQ ID NO: 423310 - DNA, 100 bp, Homo sapiens
gaaccattccacgaatatctggacagcatgttttttgaccgctttctccagtggaagtggttggaaaggcgcattctacattctaaaggggagctcagtg

SEQ ID NO: 423311 - DNA, 75 bp, Homo sapiens
ccgccgcctctttcatctcttctggggcaggggccagggccagacagcaccttgtattctggcctagatgaagtg

SEQ ID NO: 423312 - DNA, 90 bp, Homo sapiens
ctgaccgtgaagacgggcgaggagatcttcggcaccatcggcatgcggcccaacgccaagaacaaccccgagcaggtcggggagctgtgc

SEQ ID NO: 423313 - DNA, 100 bp, Homo sapiens
gtcgccggagctctgatcgccgggaacccttgccgctgctgtcctgcgaccccaagcagagcacaatcattgtggagaagacagttcaagacctcctgaa

SEQ ID NO: 423314 - DNA, 98 bp, Homo sapiens
tttcacaagcacccgcccgtgcagtgggccttccaggagaccagtgtggagagcgccgtggacacgacagaacctccactcaatacaccagaaaacag

SEQ ID NO: 423315 - DNA, 75 bp, Homo sapiens
aagcattgcttcaaagcatggggctaactccagaatcccccattgcctccggcacccacaggccctgaggctcca

SEQ ID NO: 423316 - DNA, 98 bp, Homo sapiens
aatcggtttctgagtccagccaacagcagaagagaaagccagttatccacggactggaagatcaaaagagggcccgatgagagaaagggaaagttaag

SEQ ID NO: 423317 - DNA, 75 bp, Homo sapiens
atatttggcttcaatgtcatattttggtgactcatcaagtgaatattctgattggacagcagatgctggaataaa

SEQ ID NO: 423318 - DNA, 90 bp, Homo sapiens
ggagcagttgtctgatgaagagaaggcttgcttccggcgtcatggctcaaagggccttcccgaatccttatgctgattataacaaatccc

SEQ ID NO: 423319 - DNA, 75 bp, Homo sapiens
ctcaagcaaagaagagttgagcacaatcagggcaccgtcacaagcactgcaacctgtgtccagctgcacaaaagg

SEQ ID NO: 423320 - DNA, 90 bp, Homo sapiens
tcaccaacaggtgaagaaaacctcatgaatagcaatcacagagactcggagagcatcactggacatggatttgattgacatactttggag

SEQ ID NO: 423321 - DNA, 90 bp, Homo sapiens
cacttttgcaagggcgaggtcagccccaaactaccgatttggagtccaggaatgagactaagcatttatctgtaggaaaagatattattc

SEQ ID NO: 423322 - DNA, 100 bp, Homo sapiens
ggacattgatacccgcaaaatcaacaacagtttcctgcgcgaccacagctatgcgaccgaaggtttaactatagatcaacacatcatcttgcatctcatg

SEQ ID NO: 423323 - DNA, 82 bp, Homo sapiens
ccagcgcgccctagagctgctgcacaactgcgtgcaggaactgaagctcttagaaaatcatattctaagaactcagccactc

SEQ ID NO: 423324 - DNA, 83 bp, Homo sapiens
ctgcggttggggcgggaagagccggggccgtggctgacatggagcagggggatatgagactttctactcggaatatcctgagt

SEQ ID NO: 423325 - DNA, 83 bp, Homo sapiens
gtttcgggagccggagtctctccaccgcagacatgacgaagacaagcagaatgatgtggagatcccatctcctacccagaaag

SEQ ID NO: 423326 - DNA, 100 bp, Homo sapiens
tcccagctacgaaggatggaatcttcaatcaatcatatttcacaagtgaaagaacttgtcctggacaacagtcggtcgaatgaaggcaaactcgaaggcc

SEQ ID NO: 423327 - DNA, 93 bp, Homo sapiens
agggcctgcagcgggagctggacggcgagcgcgagcggcgcgagaaagacagagcgggatgccaccagcttgtccaaagggaagttccaggag

SEQ ID NO: 423328 - DNA, 100 bp, Homo sapiens
acaaggcgctgctgaccacctacgggatgaaaactttcggaagagaaagttgcctgtggtaagttcagttgttaaagtaaaaaaattcaatcatgatgga

SEQ ID NO: 423329 - DNA, 100 bp, Homo sapiens
atgttagcagatagccagcccatacaagatcgttactggagaaaatgaaactgggattgacccatcaagatgcttggctcaataagaaaaccacgttagg

SEQ ID NO: 423330 - DNA, 101 bp, Homo sapiens
aagatttctgaagacgtctttctagaaatgactggaaagtttcaagaggcataagatacaggtcacggtctagatcacattctcgatccagaggaaggcga

SEQ ID NO: 423331 - DNA, 112 bp, Homo sapiens
gtttgtgcgggtgaagcgggagcgcgaggtcgatgaggactcggagcctgagcgggaggaccctgatgctcccataagacagaaaatgccccttgatgatctggatagagaa

SEQ ID NO: 423332 - DNA, 100 bp, Homo sapiens
gccaagcgaccacccaaagaagagctggtgatgctgctggagtggtggtcgggcacggaatgcaccatcttcacggacccgcgcgcctacctcaagtatg

SEQ ID NO: 423333 - DNA, 109 bp, Homo sapiens
gacaagtccccagggaatgccacagcatcctccagcacctcagcgatggcaagccggcaggtggatattgcaactcagggctggttcattggtctgatgtgtgctgttg

SEQ ID NO: 423334 - DNA, 97 bp, Homo sapiens
gatcgactgaatccaggctgtttctatcgtttacgagtttactgcatcagtgatggaggacagagtgcggttatcaatactctggctgaccatcatc

SEQ ID NO: 423335 - DNA, 101 bp, Homo sapiens
aggaatagaagtgacctgctttttcgcaagttgtctgcattcaaaagagcattctattaaagctaccttaatttggcgcttatttttcttaatcatgtttc

SEQ ID NO: 423336 - DNA, 100 bp, Homo sapiens
aactctaaaccatctgaattggctcaatgatgagttgcagtatccagtttattgggaccatctcgagttctgtgatggattcagaaaacttttagaccat

SEQ ID NO: 423337 - DNA, 101 bp, Homo sapiens
ggcggcagctgcagtgacatgtccagcatgaatcccgaatagtttgatctgtggatgaaatgaatcatgattttcaagctcttgcattagaatctcgggga

SEQ ID NO: 423338 - DNA, 100 bp, Homo sapiens
caatacactcttatatggaggtgaccttcattctgccttggattggctctgtttaaacctttcagatgctatcagttgagggatttgcagttgataaaat

SEQ ID NO: 423339 - DNA, 75 bp, Homo sapiens
gaatttatcctcaagagtcagctggcagggtttttaatgaccacaacaagcaagcatgcagcttactgcttgaaa

SEQ ID NO: 423340 - DNA, 82 bp, Homo sapiens
tctggagtttatctggagtgaggtggccggttcttggtgggatctgagcagcaaaatgatgcttcaacacccaggccaggtc

SEQ ID NO: 423341 - DNA, 100 bp, Homo sapiens
cagctgcggaatttgcggctttggcaggagctttgtcttatgctgaattgggaacaactataaagaaatctggaggtcattacacatatattttggaagt

SEQ ID NO: 423342 - DNA, 100 bp, Homo sapiens
cgcaggccgctgatgccgcccgcggcgaggtggcccggaccgcagtgccccaagagaggtcagaagttgagtagcaggggcctaggagggctcgaagcct

SEQ ID NO: 423343 - DNA, 100 bp, Homo sapiens
agaaggtggtctaccggcgcttcaccgagatctacgagttccatggacgtccagatcggtgacatcgtcacagtgggcgagtgccggcctctgagcaaga

SEQ ID NO: 423344 - DNA, 96 bp, Homo sapiens
aagctcaccaaacaggtcttaaaggtggtgaataccatatttcatgggcagctgctcagtcagggagccagcgccggcagccaccatggcgtcacg

SEQ ID NO: 423345 - DNA, 90 bp, Homo sapiens
cgagtcgcgagtgtgcgccgtccgccgcccgccggatcccccggaccccccgaccgtgctgcagggtgcacagctgatcgccgtggcctc

SEQ ID NO: 423346 - DNA, 90 bp, Homo sapiens
gagggaagctgcagaccttcgcgacagctcagcagctcctcctcctatagtggggacatcagcaggcaccacaacagcaccgcagaactg

SEQ ID NO: 423347 - DNA, 100 bp, Homo sapiens
attagctgtttgggggccttcagacagttttggggtggtctttctcaggttgatgacaacaagaaactaggagaatgggtaggcctttgtaaaattgaca

SEQ ID NO: 423348 - DNA, 74 bp, Homo sapiens
ctgctcttcgcccagcagatctgcgagccctccagtgccctggtagccgccagtccccgcctggcgttttgagg

SEQ ID NO: 423349 - DNA, 82 bp, Homo sapiens
ttcccctgccgctcctgccggcagctccaaccatgggaggccgcgtctttctcggaatggcatcaccagctgccggatgcgg

SEQ ID NO: 423350 - DNA, 90 bp, Homo sapiens
ctctgaggagtccactgcagcagtctcaaaccatgaattatgtgggacagctggctgggcaggtgattgtcactgtgaaggaactctaca

SEQ ID NO: 423351 - DNA, 50 bp, Homo sapiens
aacccctggaagcctagaaatgtttggtaactctcattcgacatccatct

SEQ ID NO: 423352 - DNA, 98 bp, Homo sapiens
ccgcagtgggctaccataaacacatcaccttgatttttaatcccacgtacaagttgtgcaaagtgaggaagattactgtgggagtgaagggaatccct

SEQ ID NO: 423353 - DNA, 135 bp, Homo sapiens
agtggcacctgcgcgaagctggccaaagcctgcccagacggctcacctgtgcgggatggaacaaaaggggtagagaagatgaagtccatgtcacagcttgcagttttgtcaagacggtggaagccttcagagatg

SEQ ID NO: 423354 - DNA, 100 bp, Homo sapiens
acgcgggtcggacgcgtccggctgtggaagagagcggcggccgctcacaacatgcacagcctggcgacggctgcgcaggtcaatggccagcaaggagggg

SEQ ID NO: 423355 - DNA, 100 bp, Homo sapiens
ttggatcccattcacctgaggcacccgaagaagagaccatccatatttccagagaatagtgacagtggtacaggaaagaaagaaaaagaaaagaaaaaca

SEQ ID NO: 423356 - DNA, 74 bp, Homo sapiens
caccaagtcacatgacaagcagaaataatgcaaaaggtgtcccaaggctcctgaccagtgaacaaagatttgag

SEQ ID NO: 423357 - DNA, 74 bp, Homo sapiens
ctcagcgacaccgcgagctatatctgcgcgtggagctgagtgacgtacaggtcaaaatgcagatcttcgtgaaa

SEQ ID NO: 423358 - DNA, 98 bp, Homo sapiens
gcacgtggccaccaacctggggcgcaaacctcaagaaggcatgaagccagcccctgcagtgccgtccacccgcccctctgggcctgcctgtggctctg

SEQ ID NO: 423359 - DNA, 83 bp, Homo sapiens
tttctcatcagggtcagtcacagccatgtgggctacacactctcctacaacggaagcgagagagtgagagtgaaagtgacgag

SEQ ID NO: 423360 - DNA, 98 bp, Homo sapiens
ctggtctttgcagaagagaaatataataaatcaggtcaattggataaggtcagatgggcagacctggaagagaagaaggatgcagataggaaaagggc

SEQ ID NO: 423361 - DNA, 75 bp, Homo sapiens
caacagccagtgatatgctatacatggtgatcaactgggagaacacgctccacattccagcccaggtgaagctga

SEQ ID NO: 423362 - DNA, 98 bp, Homo sapiens
gtgaggaggttgagggcgccgagggtggggtcgacgacgaagacagcggagaggagagcggtgcggaggactgagtcccaagaggaattacaagagta

SEQ ID NO: 423363 - DNA, 100 bp, Homo sapiens
tcagaactgcttcaagccccgcgagtcgcatctgctcaacgacgaggacctgacgcagctgtgagtacccaggaagctgcaccgtgtggcctggagctgt

SEQ ID NO: 423364 - DNA, 75 bp, Homo sapiens
ttatgcagcaggctcagtatgatcaaccgttagagaaatctacaaagaaaagttgccagacggccagcattgcca

SEQ ID NO: 423365 - DNA, 103 bp, Homo sapiens
aatgcagttgctgtagtcatctacaataataaatccaaagaggagccagttaccatgactcatccagcatcttcatgatacagttaagaggaatcttgacagc

SEQ ID NO: 423366 - DNA, 100 bp, Homo sapiens
cgccaaccgcaaccattgacgccatgtcgggttattcgagtgaccgagaccgcggccgggaccgagggaagccaaattggcagagaatgcttgtaccctg

SEQ ID NO: 423367 - DNA, 100 bp, Homo sapiens
gagaagaccacccgaagaatgtacaacctcttctggaggcacttccgccactcagagaagcggtttgctgtgtttcaaagaagggtgctgaccacagtag

SEQ ID NO: 423368 - DNA, 73 bp, Homo sapiens
aggcctctcccaaagcacctgcgcagtctgcgctcctcagaccaccggcaggtgaacagcctgatgcagaccg

SEQ ID NO: 423369 - DNA, 82 bp, Homo sapiens
gagtcaaaggaattctgtcttcacaagcagaagcactccttgctcaagacccctccccagtacctacccttccaggcccccc

SEQ ID NO: 423370 - DNA, 75 bp, Homo sapiens
gggcctggactgtgggctggtgtgtggaactggacaacgtctgacatgagccgagtgttctgctcacactgtggg

SEQ ID NO: 423371 - DNA, 83 bp, Homo sapiens
gccgaactcgggttctgacaagatggccgggctgccccgcaggatcatcaagatgatttgtcattaattcggaagaacagaat

SEQ ID NO: 423372 - DNA, 96 bp, Homo sapiens
ccctggcagtgcttagagccttcaagcaaggatttgtggagaagatggacaggtggatcccaactgtttcgttttggcacagtccatagtctttag

SEQ ID NO: 423373 - DNA, 96 bp, Homo sapiens
gtggactttttgaatttcaagaacagtaaagttggaacacagcagagggtgtgtaataaaatacagctatcatggtgaacttacttcagattgtgc

SEQ ID NO: 423374 - DNA, 100 bp, Homo sapiens
gccgctgccgctatggatgatcgagaggatctggtgtaccaggcgaagctggccgagcaggctgagcgatacgacgaaaatgtcttctgaggctgatctg

SEQ ID NO: 423375 - DNA, 122 bp, Homo sapiens
ccttgaacagctatgcatgctgcttttgatgtctgacaacgtggatcgttgttttgaaacggttatgtaccgaaggactctaccgtgtcagcgggaataaaactgaccaagacaatattcaa

SEQ ID NO: 423376 - DNA, 75 bp, Homo sapiens
gacttgttctctatcgaacaaaagtagagacaaggcgcctctgtcgaagagccttctgctggtccccagtgccct

SEQ ID NO: 423377 - DNA, 83 bp, Homo sapiens
tcctgcagcgccagcagctggactatggcatctatgttatcaaccagattgccaagcatgcccacggacatggaacacacagg

SEQ ID NO: 423378 - DNA, 99 bp, Homo sapiens
gctggactagttcaactgaaattgtcttcataacagatcaaggaatcgaattttaccaggctctgtatgtggatgtgatccgtgtgaacagctactact

SEQ ID NO: 423379 - DNA, 75 bp, Homo sapiens
aatgtggtggtgcctatgtgaaactgctttctaaaacaccagaactcaacctgcaacggcagcctttaacagttg

SEQ ID NO: 423380 - DNA, 75 bp, Homo sapiens
tacaggccgcttttgagaggacaagcccagattccaaaacttatgtcaagtgaccattgtgaggtagatattttg

SEQ ID NO: 423381 - DNA, 75 bp, Homo sapiens
gaacactggcatcatctgtaccattggtctgccaaaatgtctgaaagatcagatctccttcacttcaagtttgaa

SEQ ID NO: 423382 - DNA, 83 bp, Homo sapiens
ctgagcagaggactgtaccttgtaagaaacgggcctgaatttgaagctaggatccgacagaacgagatcaacaaccccaagtt

SEQ ID NO: 423383 - DNA, 89 bp, Homo sapiens
tctacatcaaaaacggccaaggtttcatcctggtttatagcctggttaatcaacagtcttttcaggtgctggagaatctggtaaaagca

SEQ ID NO: 423384 - DNA, 51 bp, Homo sapiens
gcaaggagggctgggctggccttccccagattcctggtgtttctgcggtac

SEQ ID NO: 423385 - DNA, 100 bp, Homo sapiens
gatattcaaaacgtcagcaaccaaaggcaccggccttgatgaggcaatggaatggtatgaggatacatgggctgcacttcacagaagagccaaagactgt

SEQ ID NO: 423386 - DNA, 90 bp, Homo sapiens
gatcagcaggacgctgcgcacaacatgggcaaccacctgccgctcctgcctgctccagaaacatgacaaggaggactttcctgcctcttg

SEQ ID NO: 423387 - DNA, 100 bp, Homo sapiens
caagatcgtcaacaaaaacaatgtgagatgtctccagcatttttacggacccaatcatgagcactgctttaatagggcatttgcaagtaaaatcactggc

SEQ ID NO: 423388 - DNA, 90 bp, Homo sapiens
agaccctcgaagtgcgcaaacttgacactcaccctgaccggtcacgagaagagaatgccttctagatgcaaaatcacctccaaaccagac

SEQ ID NO: 423389 - DNA, 75 bp, Homo sapiens
gacgctgtttcagagcgtttgggtcctctgaggccccttgaccagtttacttcaacttcagtggaagcaagatct

SEQ ID NO: 423390 - DNA, 100 bp, Homo sapiens
cgcaagtccatgtacacgcgagattataagaagcttgggttcattgtgctgctcccggcagccagcttgctgcagctcatggatgttcggcagaactgct

SEQ ID NO: 423391 - DNA, 98 bp, Homo sapiens
gagcagagtggaccaccccatgaacctcgcatgcttcatgatgatccaagcagaagaattcctgctgaaatggcattgtgcagcccattctttagcat

SEQ ID NO: 423392 - DNA, 88 bp, Homo sapiens
gagccgtgagatgcgtggtccaccatcggtgacctcaccgcctcggttcgccctcagccgccccggccaggtcagagcagcccaccat

SEQ ID NO: 423393 - DNA, 85 bp, Homo sapiens
atcgacttcctcacccgcgcctgcgacctcgtaagactttgaccccgacgcaggcttcagtgattgccgcggatcagaagcctga

SEQ ID NO: 423394 - DNA, 96 bp, Homo sapiens
gagagcgtgaccgagagcgcgaatatcgtcatcgttagaagccggtggtcatgccatgagcagccttatggagaggaccatgtggtaaggaactca

SEQ ID NO: 423395 - DNA, 90 bp, Homo sapiens
cgtaaagtggttggttgcagttgtgtagtagttaaggactatgacatcacccagctccaccgaggtctggaggccaggccggaggtggtt

SEQ ID NO: 423396 - DNA, 100 bp, Homo sapiens
cggaaaccggtagcgcttgcagcatggccctcagcatcctcatgctccctcacaacatcccgtccagcctgagcctgctcaccagcatggtggatgacat

SEQ ID NO: 423397 - DNA, 82 bp, Homo sapiens
tcagggtttccaccgttcgttcaagattttgggaaccagtaggacattgacatacatccgagaacattctgtggtggatcca

SEQ ID NO: 423398 - DNA, 101 bp, Homo sapiens
tgactggtgatcacatccccaccccacaggatctgccccagagaaagtcctcgctcgtcaccagcaagcttgcggggctggagtgcaatggcgcgatctcg

SEQ ID NO: 423399 - DNA, 51 bp, Homo sapiens
acagcgggagcaggagctggaggatagagggaggaatcagcagcttggaaa

SEQ ID NO: 423400 - DNA, 74 bp, Homo sapiens
cgagctgctgctggattgaactcagagaagccggggtactccaaagattcaggtttactcacgtcatccagcag

SEQ ID NO: 423401 - DNA, 75 bp, Homo sapiens
ggctttaagatcctcaactgccaaaaggcaatgggttctccccatgacaccacctgaacgtctcttcctcccaag

SEQ ID NO: 423402 - DNA, 100 bp, Homo sapiens
cggtaggagctgtaatcaattgtgctgacaacacaggactgatcctttgaaatactccagccatgactaaaagagaagcagaggagctgatagaaattga

SEQ ID NO: 423403 - DNA, 100 bp, Homo sapiens
ccgcaaacgaaaaagaacgacatgatgcaatcttcaggaaagtaagaggtttgggtgaaaaaaattgtctgcaggaagggagtcaactaaaggctttaag

SEQ ID NO: 423404 - DNA, 100 bp, Homo sapiens
cgggagggcaacgcagtcgccgttcgcctgtggctggacaacacggagaacgacctcaaccagggaatacagatatggtccagaaatcagtcagcaaaac

SEQ ID NO: 423405 - DNA, 75 bp, Homo sapiens
tttggaagttgcaatcaaaatggttcctgggacatcctgtagcaaagattctccatgcttacaaccctagtaggg

SEQ ID NO: 423406 - DNA, 100 bp, Homo sapiens
ccacttcggtggcaagttacacttggggttcattcagatccgagagaagcttgatcagttgagggcaatgagaagcacgaccttcatgttacctcccagc

SEQ ID NO: 423407 - DNA, 100 bp, Homo sapiens
gggtgaagctggcggagcaggaggatgggcgttggcagatgtgaatggagtcattgaggaggagtttaccatggcccgcctgtacatcagcaagatgaag

SEQ ID NO: 423408 - DNA, 101 bp, Homo sapiens
acgtggtcggttggagaaaatatgtccctccggaggcacattgggaaccctgagtggatatcaaagtattgcagagtgccttagcagccatccgacatgcc

SEQ ID NO: 423409 - DNA, 74 bp, Homo sapiens
gctgcggctgatcatctccatcttcctgggtcttctcgttcgcaactgcaccatcactgccaatgctgagtgtg

SEQ ID NO: 423410 - DNA, 48 bp, Homo sapiens
cctgtacagcctgcagaactgtgccagcgagatttcagattcctgtaa

SEQ ID NO: 423411 - DNA, 113 bp, Homo sapiens
agaacgcgcccaagtggcggggactactggtgcctgcgctgaaaaaggctaactatatgtcagaaagcatcagcttttctcgatggacccattcatctaatgaaatatgcctg

SEQ ID NO: 423412 - DNA, 140 bp, Homo sapiens
ctcaaaaatcctctgccggaagcagaagctgggaaaattgaggagagtcctttcagtgtcgaggtgctacctttttacccacacttaagtgacgcaaaatgcccttcaatggcgagaagcagtgtgtgggagaggaccag

SEQ ID NO: 423413 - DNA, 100 bp, Homo sapiens
tccatctggggagtatgttgcagaagaaatctgtattgctgcttctaaagcttgtgattttgaagccagcttcataaggctattggacaaaataacgaat

SEQ ID NO: 423414 - DNA, 100 bp, Homo sapiens
gacggttttcgtacgggcggccgtgcgcgaggcgaggtgagaagccctaccactgcaactgggacggctgcggctggaagtttgcgcgctcagacgagct

SEQ ID NO: 423415 - DNA, 50 bp, Homo sapiens
gcaggccactcatgatcatgagatccataatgagatggcatcaacatcag

SEQ ID NO: 423416 - DNA, 98 bp, Homo sapiens
ctcggagtgggagacgtggagtgcagctcctggagtggatccggcgcaccatcccctggctggaggaccgtgtgccccaaaagactatccaggagatg

SEQ ID NO: 423417 - DNA, 100 bp, Homo sapiens
ctagaactgtgtcaaaacagctgctacactaacgggcatctttgtcttgttctcagtcttaaaaagactcggggagtacagacagtgaggaaagtacaga

SEQ ID NO: 423418 - DNA, 90 bp, Homo sapiens
ctggagcagtttctgcagcaggagctgctcatcaacatcacggagcacgaggtgtgacaagccccgccaagacagacctgcaagtcttcg

SEQ ID NO: 423419 - DNA, 75 bp, Homo sapiens
aaattctgtatgttcttcgccattatattcagggtctgcggaagagggagctgctgaaggagctgctaccagtca

SEQ ID NO: 423420 - DNA, 82 bp, Homo sapiens
gtgaagttcagaggctacgggaggagaacaagcagttcaaggctgatttggagcaatataaaaaagctttaactgatgcagg

SEQ ID NO: 423421 - DNA, 75 bp, Homo sapiens
ccgttaacgtgtggcggaagaacctgcagtttgacaactttaaacgggtcttcaaggtggtagaggaaatgcggg

SEQ ID NO: 423422 - DNA, 100 bp, Homo sapiens
aaagattcttcaagaatacaccttggcccgaggctgaagccattgctccacaggttggcaatggtcattacacctactctgagaatcgtgtggaaaaaga

SEQ ID NO: 423423 - DNA, 100 bp, Homo sapiens
gagggaccaccccctcctccccgaggctgaggcgtgtgtgcggcaacacctccccgacctctacgctgctgccggggataaaagaatcagagtgtctcaa

SEQ ID NO: 423424 - DNA, 75 bp, Homo sapiens
ggctaagatcaccaacacagacgtgggatgatcatggtgattttactgctgcttgtggctatcgtggttgttgca

SEQ ID NO: 423425 - DNA, 100 bp, Homo sapiens
ttagtacctttggagaagttcttatggtgcagggtattttactggatgaagcctcaggtgtaaacaagaatcaacagcctgtcctccctgccggcttgca

SEQ ID NO: 423426 - DNA, 100 bp, Homo sapiens
cccaaatacagtcctcttgagtttttacgaagggccatggagagtaagttgcttgttggaggaaaaaatatagtagatcatacgaatgaacagcagaaaa

SEQ ID NO: 423427 - DNA, 103 bp, Homo sapiens
ggcggcggctcctgccctctcgctttccctctcgcgtctctggctgcagggggatatgagactttctactcggaatatcctgagtgttgcgtggatgtaaaac

SEQ ID NO: 423428 - DNA, 100 bp, Homo sapiens
gatgaaaccacttctctacatcccatctcaatcagaattactagattttctctcaaactacgaggccaactgagctgcatttccttcccacctaaggaag

SEQ ID NO: 423429 - DNA, 101 bp, Homo sapiens
aagagaagaaatggacatgattgcctaaatcagccaaacacaggatgtacattgaagatgtcagtttctacatgtgggaagtagacattgaaggctttatg

SEQ ID NO: 423430 - DNA, 97 bp, Homo sapiens
gagcctgctcagaagaacctgtacagagaggtgatgctggagaactacaggaacgtggtctccctgggtcagaaagcaacattgaatgcagaagaaa

SEQ ID NO: 423431 - DNA, 50 bp, Homo sapiens
cttcgattgttgcaacatcccttgcgagggctgggttacgacccctacaa

SEQ ID NO: 423432 - DNA, 50 bp, Homo sapiens
gaaggaggagactgtagcaagtcaaaatgcagatcttcgtgaaaaccctt

SEQ ID NO: 423433 - DNA, 100 bp, Homo sapiens
gggtctccacagagaccatcaggatgtcgtattttggggagcatttttgggaccacagaatactggccatggtgcaacttctggttttggcagtgctttt

SEQ ID NO: 423434 - DNA, 126 bp, Homo sapiens
tctccgcggcagccctcgctgtcatcctcattgctactgccctctgcgctcctgcatctgcctccccatggcagctgcaatgactctccgcacggtattattgtcattgcaagcactattggcagc

SEQ ID NO: 423435 - DNA, 92 bp, Homo sapiens
tatttctcaggtctacacacagaatgctgaaatgaggcctcttggttgttctatgtttccagtgtcctctgggtgtttccaagagcaacaag

SEQ ID NO: 423436 - DNA, 100 bp, Homo sapiens
ggagagtttgctccaccaggccaggcattgaatgccccagaggagcccgaaacctcccaggcttggtgcaggaaggagagcccttcagcgaggaagctac

SEQ ID NO: 423437 - DNA, 83 bp, Homo sapiens
gggatttttagcccagcccatgaagaatcctgatgtccatccaacagaagcaactccctcatctactttcactggtattcgac

SEQ ID NO: 423438 - DNA, 97 bp, Homo sapiens
tggaaaactcgccaagggttatgtctggaatggaggaagcaacccacagggcaatgtattccaagatgcagtcttcaatcaaacagttacagttatt

SEQ ID NO: 423439 - DNA, 80 bp, Homo sapiens
ggctgccgtccccgctgctgtgcattgggtacatgtgaagattttttggcagcttagcgtggaaaccattgatcaccctg

SEQ ID NO: 423440 - DNA, 100 bp, Homo sapiens
cgatttcatcactcgtgacttcactcagccatttgcaaagtgcagagcaggcatggattgccaattctggaacagagcaaagccccaacttgccctccac

SEQ ID NO: 423441 - DNA, 103 bp, Homo sapiens
ctgacggcaacctctacaaggccaagttcatctcctccgtcaccagccacatctaccaggtgagaagccctaccactgcaactgggacggctgcggctggaag

SEQ ID NO: 423442 - DNA, 51 bp, Homo sapiens
caatatctctgggctttcacaggagtccttcaataatgttaaacagtggct

SEQ ID NO: 423443 - DNA, 100 bp, Homo sapiens
taaccacacacggcccgtcatcctcgactccgccgtggtcatggaggagggaagtccgggcgaggttcctgtgctggtggagcccccagggttggaggac

SEQ ID NO: 423444 - DNA, 97 bp, Homo sapiens
ggaggccttccagctgtttgaccgaacagggtagcagccgagctctggcgcagcctaagccgtaaccagcgtgtaaatgggcaggtgctggtgcaac

SEQ ID NO: 423445 - DNA, 98 bp, Homo sapiens
ttaatcctactcagaagaacttgtacagagatgtgatgttggagaactatagcaatctggttttcttgggcccgatgagagaaagggaaagttaagga

SEQ ID NO: 423446 - DNA, 100 bp, Homo sapiens
gtcaataaaagagagctcacagaagatggacttgaaaaaaactttgctgccaatactctgggtggggtgaccgctctctgttgggacccagtccagcggg

SEQ ID NO: 423447 - DNA, 50 bp, Homo sapiens
agattttataaacagcttggcagtgcaggatagaatttttgcggcatttg

SEQ ID NO: 423448 - DNA, 100 bp, Homo sapiens
atggacgtgttctccactgatgacctcaccggatttttacagagcaaatcatggaggaagataaaaaacatggtgcactggtctcccttcgtcatgtcct

SEQ ID NO: 423449 - DNA, 76 bp, Homo sapiens
ggacagggtcctctgcagcttcaagatcaatgactcggtcacactcaaattatatccagatcgagagacagaagat

SEQ ID NO: 423450 - DNA, 83 bp, Homo sapiens
cttagctgtgctcgcgctactctctctttctggcctggaggctatccagcaattcaattcgtcataatctgtccctacacagc

SEQ ID NO: 423451 - DNA, 73 bp, Homo sapiens
ccgccgaggccgcgtgtcccaaaggccagttgaagcttcttgtcatgacggggatgaaacaattgaaactatt

SEQ ID NO: 423452 - DNA, 98 bp, Homo sapiens
tcaagatggaggagtacgcgcgagagccttgtgatggtggcctgcgttttggagaaatggaacgagattgtcagattgcccatggagcagcccagttt

SEQ ID NO: 423453 - DNA, 100 bp, Homo sapiens
ggagagggcggtgtggacaccgcctgcaggcgaggagaaggggtggcggagagggtacctggaatgttatggaacagttcaatcctgggctgcgaaattt

SEQ ID NO: 423454 - DNA, 80 bp, Homo sapiens
ctaataatgttggattttggtgaaaaaagggttccattaacttcaaatgatgatgaagatgaagataaagagaaaatgca

SEQ ID NO: 423455 - DNA, 100 bp, Homo sapiens
cagtaaaaaatattggagatattaatcaagatggctacccaggcttaacagcattgcgcagtgatgaagtgattgatttaatgataaaagaatatccagc

SEQ ID NO: 423456 - DNA, 75 bp, Homo sapiens
tatattctttcttgcagaccgaacagaaatgctgtctgagagcaagaatatataaactctcttcacaagaagaaa

SEQ ID NO: 423457 - DNA, 51 bp, Homo sapiens
agattcgcagtggtcgcttcttctccttggcttttatcttgagaacatggt

SEQ ID NO: 423458 - DNA, 90 bp, Homo sapiens
ggcgattccctgagcgcctggagttggagacaattcctggttcagaatttaaacatctttctagtttggtaactctcattcgacatccat

SEQ ID NO: 423459 - DNA, 134 bp, Homo sapiens
gtcgccggccgctcgcagcgttgtggaggggcgggccggacgctgagcggagcagctgcgccacgataagccatcaccaaactcagaaaatgaacaaaattctgttaccctggaagtcctgcttgtgaaagttt

SEQ ID NO: 423460 - DNA, 75 bp, Homo sapiens
ccatcccttcgcagtacagatgacagttgagtgtcaccagagaccaggatgaagatgataaggctccagagccaa

SEQ ID NO: 423461 - DNA, 98 bp, Homo sapiens
acgactcggagatctcctgccacatccagtgagtaaactctctgctgtgcctggaattagcagtgtacatgaagtgcacatctgggaacttgtaagtg

SEQ ID NO: 423462 - DNA, 101 bp, Homo sapiens
cgcggattcgccgaggcaccgaggcactcagaggaggaatactcccccagttgcaagaggcgcaggaccgtggaagacttcaacaaattctgcacctttgt

SEQ ID NO: 423463 - DNA, 50 bp, Homo sapiens
aaaataatgaacgattcaaacgcggcaataggcgaatatgaagaccttag

SEQ ID NO: 423464 - DNA, 50 bp, Homo sapiens
attggatgcaagtcaactctggaggggcttctgaggagaatggcctgcct

SEQ ID NO: 423465 - DNA, 80 bp, Homo sapiens
gaatagtggttcttaactctctttgcctctggctgtgtggcgctgcctgtgttgatgaacatcaaggctgtgattgagca

SEQ ID NO: 423466 - DNA, 97 bp, Homo sapiens
ttgggtttggacctgaaggctgcaaacatgcgcctggagaaggacaggttctctgtcaacctggatgtgaagcacttctccccagaggaactcaaag

SEQ ID NO: 423467 - DNA, 50 bp, Homo sapiens
ggaactctttccagcttgtgtctggacagtcattttgtttactcattcag

SEQ ID NO: 423468 - DNA, 100 bp, Homo sapiens
tgaaaaaggatgttgaccggacaggtggatccataaagaacccagccaacccgcagagggaggggaggggctgagctgtgaggagagcggggcccaagaa

SEQ ID NO: 423469 - DNA, 101 bp, Homo sapiens
gccctcgggctgcgggagccgggctaggacgccgagcggtgactccccgccgctcccgggggccgtgacgagctacagagacttctgaagtggagagtctg

SEQ ID NO: 423470 - DNA, 75 bp, Homo sapiens
gcaccttctcgtccaccaaatgcgacattcgggagccaagcctttgcagacatgatgagctacattgggcccaag

SEQ ID NO: 423471 - DNA, 100 bp, Homo sapiens
gaggagacttccttgcttctttggagaatgatatcaaaccagtggttgtgtcaaaccgattggtgacatctccatgctgtattgtcacaagcacatatgg

SEQ ID NO: 423472 - DNA, 75 bp, Homo sapiens
tcgctactaccccgcagttcccggacatgatcctctccgcctctcgagcccgagggcaacatccttcgagaccgg

SEQ ID NO: 423473 - DNA, 100 bp, Homo sapiens
tgcatttcacaaagtattgtctgaaaaagctcaaaatgaggaaattctgtatgttcttcgccattatattcaggaaagaccacagcaagattctttcatt

SEQ ID NO: 423474 - DNA, 106 bp, Homo sapiens
acttgggagaaagtttcatctgtggatggagtattggatctagtgaaaagccatttgatgtatgcggtcagagaagaagtggaggtcctcaaagagcaaatcaaag

SEQ ID NO: 423475 - DNA, 100 bp, Homo sapiens
gtgcccggtgcggctgcttcaaggtatttacatgaggaatttccagagtcctggtcagttcccaggttggctgaaggctttgatgtcagcactgatgtga

SEQ ID NO: 423476 - DNA, 101 bp, Homo sapiens
cctcactattgatggtgtagcgctttaggggaaggtgctggagaatctggtaaaagcaccattgtgaagcagatgaggatcctgcatgttaatgggtttaa

SEQ ID NO: 423477 - DNA, 100 bp, Homo sapiens
tgtacatcacccccatggaggccctggcagagcagcaagccagggctgagcaggaagaagaattcattagtaacactttattcaagaaaattcaggcttt

SEQ ID NO: 423478 - DNA, 75 bp, Homo sapiens
tccatccaagacttgactgtaactggaacagaacctggtcagaaatacaaacctggtcgatgtgatgatattttg

SEQ ID NO: 423479 - DNA, 83 bp, Homo sapiens
gtaacactcaggctactccagttcaaaggcagccacgtgacagctctagcaaaagccagctgctatgcggtgcggactttcag

SEQ ID NO: 423480 - DNA, 82 bp, Homo sapiens
ttggaagcagccgatccagcctgcggagcctgtggggcagtttctgtagaaaatgtttcctgactgcaatgagggaaagcgg

SEQ ID NO: 423481 - DNA, 105 bp, Homo sapiens
caatatctgtcttcggtggactccttcggcagtccacccaccgccgccgcctcccagaaatgagccgtcagactgctacagcattacctaccggtacctcgaagt

SEQ ID NO: 423482 - DNA, 75 bp, Homo sapiens
gccctgaggcacacagtgtaccccaagcccgaggaatggcaccataaggatgaagtggctggtgacatattcgac

SEQ ID NO: 423483 - DNA, 100 bp, Homo sapiens
agtcatcagactgcataaaatcagggcccaatgtaaaggctgttgctactgctgtggaacagatttacccatttgtgtttgaaagcaggaaagaaatttt

SEQ ID NO: 423484 - DNA, 75 bp, Homo sapiens
gtgcaaaagctggatacaatgtaaagcagggaagaactgctaaagctttgaggtcattacaatttacgaatccag

SEQ ID NO: 423485 - DNA, 100 bp, Homo sapiens
gttgtaccccactgctggggtggtggttccaatgagacagggcacaccaaactccatctggtaagtaaggaggtctctgtaccatggctcgtacaaagca

SEQ ID NO: 423486 - DNA, 101 bp, Homo sapiens
aggaaaggctgtgcctgggatcattgatgaggaaagcagtggaaacaatgcccaatagagccacgaaccccctgaacaaggagctcgactgggccagcatc

SEQ ID NO: 423487 - DNA, 82 bp, Homo sapiens
cgctgccgcacctccgtagctgactcggtgatgtgtccaatctagatcccaacttctcatttgaaggcaccaaactggatgt

SEQ ID NO: 423488 - DNA, 100 bp, Homo sapiens
aaaatcctcaccactagtccatcagatttctttaaaagccatagttatgagggatttgttcgtgttgaccgagattatgtgctgaagtctgcagagctgg

SEQ ID NO: 423489 - DNA, 100 bp, Homo sapiens
tcgtgcttcgggatggaaacctatggttatctgcagagggagtcatgctttcaaggacctcatacgctgaccggaaaggagattgagattgacattgaac

SEQ ID NO: 423490 - DNA, 98 bp, Homo sapiens
tgaagactgggggccgcaggcgcgctagggccaattcctgtccccccagcagcatggcatcgtgtgctgaaccctctgagccctctgccccactgccc

SEQ ID NO: 423491 - DNA, 75 bp, Homo sapiens
ccagccccatctcctttttcttctcgtagagtaatgtttgaaaatgaacaggagaacaaggagactggcatggag

SEQ ID NO: 423492 - DNA, 100 bp, Homo sapiens
atggaagcatcagaatttcttcagaatgcagtttacattaaccttcgacagacaggggcaagtgtccgagtggtgaatcagctacttacagagatggatg

SEQ ID NO: 423493 - DNA, 83 bp, Homo sapiens
acactggtgacaactcaagagcaatcagtaccatctgggcagctcagttctggcaccaaaccaaatccccaggtctactcgag

SEQ ID NO: 423494 - DNA, 97 bp, Homo sapiens
tgtaccgctacgatgggcagcatttcagcctggcgagtattgggaaagggtcgttgtggtgcatagacccagagtatagacaaaatctaattcaggc

SEQ ID NO: 423495 - DNA, 75 bp, Homo sapiens
tcccgggtagctgggactacagttgcttccaagatccggtacttgcaggaatatcataaccgggttctccacaac

SEQ ID NO: 423496 - DNA, 100 bp, Homo sapiens
ctttgttaattattttcgtccccagaggaaggcgtgcaatacagttgacccttggacaacatggattggaaccgtgcaggtctactaactaatacacaga

SEQ ID NO: 423497 - DNA, 99 bp, Homo sapiens
cttgctgatataatggccaagaggaatcagaaacctgaagttagaaaggctcaacgagaacaagctatcagatctagaaatggccattgcctactggaa

SEQ ID NO: 423498 - DNA, 50 bp, Homo sapiens
ggcgttcgctgcgcgtgcacattccgacaacagcagttctgtagagagtt

SEQ ID NO: 423499 - DNA, 82 bp, Homo sapiens
tgtggttcaggactcccgacttgacacgatattttttgctaagcagtagacccaaatgatttgtacattgtagaacccctca

SEQ ID NO: 423500 - DNA, 78 bp, Homo sapiens
actgtaatcaggttgtcaaaccgcaggcatttcaatcacattatgaggaccgaaagctgtttgtggggatgctgggca

SEQ ID NO: 423501 - DNA, 100 bp, Homo sapiens
gcaggatctccttcccagccttcagaaattgccggtctgggagttgggggcaaggagaagatcctggcacctgcttgtgccagagcgagagacactgttt

SEQ ID NO: 423502 - DNA, 74 bp, Homo sapiens
tggttaaaacctgacacttttaacaggtgagccctattcccagaggcaggtggtgctgaccctgtaacccaaag

SEQ ID NO: 423503 - DNA, 50 bp, Homo sapiens
ctgaacctctacgacacggccggcaaaggccggcgtgtgcagccccagtg

SEQ ID NO: 423504 - DNA, 79 bp, Homo sapiens
gtcaaatccgagaacctgggccaaggcgacaagcttggtgctaacagtggtttgcacatcatcatctttgatgaaattg

SEQ ID NO: 423505 - DNA, 90 bp, Homo sapiens
gtttgggccttatgtgggagagcagaggtcaaacctgaaagaccccagttatggatgggaggctaaaataaatgaagctgtagaatgctt

SEQ ID NO: 423506 - DNA, 89 bp, Homo sapiens
tatatcgtggtaccaaaagaagttctgcaagatgctttccttcttcaggaagagaatgtgcgggacacacagcaggtgaccaccctcca

SEQ ID NO: 423507 - DNA, 50 bp, Homo sapiens
acgacgcactggcccaggacctgcacaagatttggagcctggctgccaac

SEQ ID NO: 423508 - DNA, 97 bp, Homo sapiens
atgaagttttaaaggatgatgaacgaaggcagagaggcatgggcataagaatgacagaaccagtatatctcagcccttcatttgacagtgtactgcc

SEQ ID NO: 423509 - DNA, 75 bp, Homo sapiens
caaaagtcctcatttatgacaatgaagccagagaaggcgtgcccctgtgctgtgccaccctgcagtggctccttg

SEQ ID NO: 423510 - DNA, 50 bp, Homo sapiens
ctttgaactactgccggagcttctgccagaataccctctaccatctgctt

SEQ ID NO: 423511 - DNA, 100 bp, Homo sapiens
gcctacttcaagaaagtacctcgtctcaaaacctggctgctatcagagaagaagggtgtttggggtgtgttttacaaagatcctgcagctccaccaaaga

SEQ ID NO: 423512 - DNA, 100 bp, Homo sapiens
caggacagttcccagcgggctccgtttcgtctccagaaccctggacagctcctccaggctgggacgcagagaccggcagcgattcggaggacgggctgcg

SEQ ID NO: 423513 - DNA, 100 bp, Homo sapiens
ggcacgacctgcggatccccttgcacaacgaggacgccttccagcacggcatctgctttgaggccaagcatgcttcatgatgatccaagcagaagaattc

SEQ ID NO: 423514 - DNA, 95 bp, Homo sapiens
caagcattcatgttccctcaccagctgtagataaagatggtgatagagcagttcaccatgcagcttttggagatgaaggcgctgttatagaagta

SEQ ID NO: 423515 - DNA, 75 bp, Homo sapiens
cccgccgtagccgcctccgagcccgccgccacatcctctgaggaatactcccccagttgcaagaggcgcaggacc

SEQ ID NO: 423516 - DNA, 80 bp, Homo sapiens
gtgaaaataatagacaaaactcagctaaatcctaccagtctacaaaagtgacagctggagtatcagccttggaagtatat

SEQ ID NO: 423517 - DNA, 133 bp, Homo sapiens
cgacagtgtggaggggcccaaggaatttccccaggagaagatgtgtctgcggctcttcagagagtattatgagggaggccgaggacttcatgctccggacagagaaacggcgctgggattagggattgccact

SEQ ID NO: 423518 - DNA, 97 bp, Homo sapiens
ctcggagaagatgtggtggcttccgtttgttggtggaggaggtggcaggcctcggcgagtaagccatatcaaagacttcattgaaaaataccaagga

SEQ ID NO: 423519 - DNA, 100 bp, Homo sapiens
gtcacgttgtcaccctggccgctgtgtggcactggcgcaggggacgtcggtgggcgcaggacgagcaagggggggccctcagcctcttggccttgaacgg

SEQ ID NO: 423520 - DNA, 82 bp, Homo sapiens
cgagggtgcagagcctggagagcatgccccggccccctgagcaggggctttgaccacgacctttgaagagcttcattttgag

SEQ ID NO: 423521 - DNA, 101 bp, Homo sapiens
cagcctttgacagaaatgtttaccagttccttctgtaaggaaggagtcaagactgagaacaacgatcatattaatttgaaggtggcggggcaggatggttc

SEQ ID NO: 423522 - DNA, 100 bp, Homo sapiens
ggggatttggcagcagaagcctctacaacctcagggggaacaaaagcatctccatgagtgtggctgggtcacgacaagccattttgcagactctgatcac

SEQ ID NO: 423523 - DNA, 75 bp, Homo sapiens
cctgcattgtggtgggttttacttcaggttatgtacgcttctacactgaggacctccggctagcctgtttcagcc

SEQ ID NO: 423524 - DNA, 100 bp, Homo sapiens
aaccaacctttcgccctggaaatgatcaaatctcgtcagaaaaaggattctcgatttcagacttttgtgcaaaatctgaattatccagaacagaaagttg

SEQ ID NO: 423525 - DNA, 74 bp, Homo sapiens
gtcctgtccagtcgctctgaccaggtacatgttcctggtgaaatggcaggacctgtcggagaaggtggtctacc

SEQ ID NO: 423526 - DNA, 98 bp, Homo sapiens
aacagaatcagctgttccctgcgaaaggcctcgaaaaagcccaagacagcagaagcagacacctccagtgaactagcaaagaaaagcaaagaagtatt

SEQ ID NO: 423527 - DNA, 88 bp, Homo sapiens
acagaagaactgtcaaattctggaatccttaaagccatgtccaaggtgatttggattgtgaaacctgtaccataacacggagtggact

SEQ ID NO: 423528 - DNA, 75 bp, Homo sapiens
tagggtcctttatatagaagggagagtagaatgaacactattcagtgcagagccctcttctgtctccagagtctt

SEQ ID NO: 423529 - DNA, 96 bp, Homo sapiens
gggaagcagcagcggccaggatgaatcccaggtgctctggagctggatggtgaagccgccatggcatcagatgaaggcaaactttttgttggaggg

SEQ ID NO: 423530 - DNA, 74 bp, Homo sapiens
tgacccctcgggcacataccatgcctggaagggtgagtcagatgattccattctccgattggccaaggccgatg

SEQ ID NO: 423531 - DNA, 98 bp, Homo sapiens
gtgcatggggctgctccccaggacctgagcaggaacctggagttttcaggaatctgcaaaacctccttatcctcactgcaattaaggctgaccgtaca

SEQ ID NO: 423532 - DNA, 90 bp, Homo sapiens
tgaaaattggtattgttggattgccaaatgttggggaagctgtgattaagcactcattggtgcataaagtattcttggacttttttacct

SEQ ID NO: 423533 - DNA, 82 bp, Homo sapiens
ccagacgctgcccgcgggcccggccacggcggagccaagcgggctgacgcacgaggcacacaggaaggaggtggagcaggtg

SEQ ID NO: 423534 - DNA, 128 bp, Homo sapiens
ggaattgtggtgccggcgtccgcgctgcagcagggaaacgtagccatggcgacggtggcagtgaagatagtgatccggggagacaggaacacgggcaagacagcgctgtggcaccgcctgcagggccg

SEQ ID NO: 423535 - DNA, 74 bp, Homo sapiens
aaaccaagtgtccgggattcagacctctctgcggccccaagtgttcgtgtgtggacaacagtgagtatatgcgg

SEQ ID NO: 423536 - DNA, 50 bp, Homo sapiens
gatttctggactccactgttgggaaaggcagcaacaggtggaagctgttg

SEQ ID NO: 423537 - DNA, 82 bp, Homo sapiens
caggcgtgtgtcactgcgcccaggttatgatgtgattgctcaagcccaatctgggactgggaaaacggccacatttgccata

SEQ ID NO: 423538 - DNA, 100 bp, Homo sapiens
acttgctcgggcaaaagttgtgcattggcccgatcaagcctgacttctagccaagcatcaagatggtgctcatgtggaccagtggtgacgccttcaagac

SEQ ID NO: 423539 - DNA, 83 bp, Homo sapiens
gctgaattctgactcagccatttactaactgtgtgaccttaggaactcgctttgaacgcttgcttatgagaataggacatcaa

SEQ ID NO: 423540 - DNA, 89 bp, Homo sapiens
ttaaagatgcatgctgatggcgataagtcattaccacagcttcttggacacttaatgattgttggcaagaaatgtgctgctgatctggg

SEQ ID NO: 423541 - DNA, 50 bp, Homo sapiens
cttgacccacggctcaccaaaaagacttcctccgtcaggcagctggcagg

SEQ ID NO: 423542 - DNA, 51 bp, Homo sapiens
ctcacctgtgcgggatggaacaaaagggagtggagcttggtttcgggatct

SEQ ID NO: 423543 - DNA, 90 bp, Homo sapiens
aaagaaagatgctgccgctgtgggtaatcatgttgccaaattgctgcagtccattggccagggcagacagaagttagctcggttcaacgc

SEQ ID NO: 423544 - DNA, 73 bp, Homo sapiens
gggcccttgcggagttccgcgtccgaggtgtgaaggtgaagatcatgacggagaaggaactcctggccgtggc

SEQ ID NO: 423545 - DNA, 80 bp, Homo sapiens
ggactttgtttttcctgggaactgcaggtcagcccaaggccaaccccactgtcactctgttcccgccctcctctgaggag

SEQ ID NO: 423546 - DNA, 90 bp, Homo sapiens
gaatccttgcagcactaaaatttgctccggaccaaaatttaacagtgccatccgaggaaagattgggttgcctcatagcatcaaattaag

SEQ ID NO: 423547 - DNA, 74 bp, Homo sapiens
tccacgtgaaggggcccttctcggtggaggccgacccatccaggcccgcgatgctcccagcccggtgagacctg

SEQ ID NO: 423548 - DNA, 75 bp, Homo sapiens
ctatcatttcacagctgattcctgggagcacatccatttcattggcaaggatgctaaacaccttgacgatcagaa

SEQ ID NO: 423549 - DNA, 100 bp, Homo sapiens
cggagaccccgcgccgacggctgctcaaacatcagggctttcagtccagtgtaaagctgttggagcgcgggagcaaaggtaaagaatgatgtaatgcgct

SEQ ID NO: 423550 - DNA, 82 bp, Homo sapiens
cgacctcgacgtcttgcctgtgtcccacttgttcgcggcctataggtgggctggatgacactttgcacacaattattgatta

SEQ ID NO: 423551 - DNA, 100 bp, Homo sapiens
gctgaagcgcaggctgcggggcgcggagtcgggagtgtcactactccatccagaagggagctgcgtttctgggacttggcaccgacagtgtccgagtggt

SEQ ID NO: 423552 - DNA, 99 bp, Homo sapiens
gaaaagtagaaggaaaaacagaacgttgcaaactctggaaaaaaacttggctaaattctgtccaacgtttaataaatcaatggaggaacagggtaaatg

SEQ ID NO: 423553 - DNA, 82 bp, Homo sapiens
gtgagacggagctatcggcgccgcggcaagagccagggcaaagtgcacctggagctgcggctgagcgaggtcatcacagaca

SEQ ID NO: 423554 - DNA, 99 bp, Homo sapiens
gtccgccgccagggtttgaggatgggggagtagctacaggaagcgaccccgcgatggcaagccccttggatctcccttcgtggagacgacaccggggtc

SEQ ID NO: 423555 - DNA, 100 bp, Homo sapiens
gaatcatacaagcatgaccgagatatagcacttcttgaccttatcaacttttttattcagtgttcaggctgtaaagatcacgcgctgccccatgatcccg

SEQ ID NO: 423556 - DNA, 80 bp, Homo sapiens
ccacatctcctgagattatttgatttcccatcagatatcgctaacaagtctctctcagagaccactgcaacaatgctctg

SEQ ID NO: 423557 - DNA, 82 bp, Homo sapiens
agatggatatgtcacacagacaggtggacataaagggacaagaatccttcaagaaacaggaaaaaactcctaaaacaccaaa

SEQ ID NO: 423558 - DNA, 100 bp, Homo sapiens
acagctattcccagctgctgatgttcccctatgggtacaaatgtaccaagttagatgactttgatgagctgggaccaagttttgaggattaatgtcagaa

SEQ ID NO: 423559 - DNA, 97 bp, Homo sapiens
gcggggccttccacaccccctccgtgggtgtgtgaaccgcatgcacgagtctctcatgctcttcgactccatctgtaacaacaagttcttcatcgat

SEQ ID NO: 423560 - DNA, 96 bp, Homo sapiens
ctaacgcctcccggctctcgtcagcctcccgccggccgtctccttaacaccgaacaccctattcaggattatgaaactgctcaggaacacaatgaa

SEQ ID NO: 423561 - DNA, 74 bp, Homo sapiens
ctggcagcatgtatatcttttgctggagcattggatttgctaaaggagcttaagaatattcctatgaccctgga

SEQ ID NO: 423562 - DNA, 101 bp, Homo sapiens
tcacctatatttttattgtctacctctgaaaccatgtacagtgaactgcctgaagagttgatacaccaaaatcggcaagctatcttaaaccagtttgcagc

SEQ ID NO: 423563 - DNA, 50 bp, Homo sapiens
gacggaaccgccacagcactcaagtaaaagtcttgcagtgaaaaacccga

SEQ ID NO: 423564 - DNA, 51 bp, Homo sapiens
ttttcaggaagcataataagattcctaggcaggaggaagagcgcaggcgcc

SEQ ID NO: 423565 - DNA, 82 bp, Homo sapiens
tcgcctcgactccaaatggttgaaaacagatatacaggaacgaatgcaggaatttgggaactgagctgtgcaagtgctgaag

SEQ ID NO: 423566 - DNA, 101 bp, Homo sapiens
atgctgggatgtgccttagaggattatggcacgcactcctggctttaaagtttatacttgcatttgccatacctgataagccacggcatatccagatgaaa

SEQ ID NO: 423567 - DNA, 100 bp, Homo sapiens
ttggctgagcggagtcgtgcggttggtgggggagccctgccctcctggttcggcctccccgcgcactagaacgaaactcagaggatttcctcatcacaac

SEQ ID NO: 423568 - DNA, 83 bp, Homo sapiens
atacagttcatgacaatgactttgagccctaccttactggacagtcaaatcagcaaaagtactttgactcaggagactacaac

SEQ ID NO: 423569 - DNA, 76 bp, Homo sapiens
ttcaggaagctccgggatggtgatcgattactactttgtaaccagggaggtgatgcagcgtgacatagcagccggc

SEQ ID NO: 423570 - DNA, 104 bp, Homo sapiens
cttcactcgcttagaccttcctactggtgatggccagccatcccttgaaccccctatggctgctgcttttgtcttcctgttaaagtgaggtggaactagatggt

SEQ ID NO: 423571 - DNA, 100 bp, Homo sapiens
gcaatggcacaaagttctctcgatcagggcatacatctttcttcgacaaaggcatgatctatgttttggtgagctcttagaacaacacacagaagaattg

SEQ ID NO: 423572 - DNA, 74 bp, Homo sapiens
atatgctgccaaaattatcaacaccaaaaagctttctgctaggggacgctgacttggctcgtttgctgagctcc

SEQ ID NO: 423573 - DNA, 76 bp, Homo sapiens
cgctgcaggtgctgcgagccagggagcagttgcggcgccgcttcggggacgtgttcagcctgcagctggcctggac

SEQ ID NO: 423574 - DNA, 95 bp, Homo sapiens
ccggatcagcgtttatcaggtgctccaggagcacttgggcaggtgatctgtgaaaatggttcgctattcacttgacccggagaaccccacgaaat

SEQ ID NO: 423575 - DNA, 50 bp, Homo sapiens
aagaaccaccggcgcatccacacagtcgtcattgaattttgagaagcatt

SEQ ID NO: 423576 - DNA, 82 bp, Homo sapiens
actccttcggcagtccacccaccgccgccgcctcccaggttgcaaaacttcctcaagttgttcaacagcaaacacccgtggc

SEQ ID NO: 423577 - DNA, 103 bp, Homo sapiens
gtacagacttctcgtgggcagcctcccctcggaactcgggcatcatggcctcagtgtcaacagcatctccaccctggagcctgtgagccggtgccagcgcctg

SEQ ID NO: 423578 - DNA, 82 bp, Homo sapiens
ggaaggcgcctgaagaggacgaagagtaatcaagtcagaggattatatgacttttatctgcctagagaagaactatggatct

SEQ ID NO: 423579 - DNA, 90 bp, Homo sapiens
ctcacgttggtgtctagagctcaccagctagtgatggagggatcaagcatgaattgcaagcaaactgctacgaggaggtcaaggaccgct

SEQ ID NO: 423580 - DNA, 50 bp, Homo sapiens
ctgatgccaaggggccagtcgcgaggcaatgagaagcacgaccttcatgt

SEQ ID NO: 423581 - DNA, 80 bp, Homo sapiens
ggaatttggagaggatccctggtcgcgcggcagcggcggcggcgcgcgggtgagcgggagccttcacgtaaatgggtcca

SEQ ID NO: 423582 - DNA, 75 bp, Homo sapiens
cagctttgttgaaaagcgaagccgttagtcccttaatacaaagggtagctaaaattggtgctttctgctgtggcc

SEQ ID NO: 423583 - DNA, 82 bp, Homo sapiens
agaagccgagttcaacatcctcctggccaccgactcctacaagggacagagcagaatgggctgatatagatccggtgccgca

SEQ ID NO: 423584 - DNA, 75 bp, Homo sapiens
gttttacatcactggaatcttccaaattcttgctggtacctttgacaggagcgtgaccctgctggaggtgtgcgg

SEQ ID NO: 423585 - DNA, 75 bp, Homo sapiens
ctgcctttgacctttttgaagcctttgcaaaaacttttgtgaatgatgtaaggattccggaacagacttatatca

SEQ ID NO: 423586 - DNA, 100 bp, Homo sapiens
caagttctcttcgagttgccaaaacagatagtaaaactgaagaaaagacagctgctagtgctcctgccaatgtggaagtgggaaaactcttgcctttgcc

SEQ ID NO: 423587 - DNA, 100 bp, Homo sapiens
ggagcgcaaggtcgccctcaaggccatgatcaaaacgtacttggcaaataggtccaaaagacatacactggccatgaccaaccctacagctgagatccca

SEQ ID NO: 423588 - DNA, 51 bp, Homo sapiens
ctgctagagccattattgccccggtctgcggaagagggagctgctgaagga

SEQ ID NO: 423589 - DNA, 100 bp, Homo sapiens
gaagagcgtccaccggcggctccgcaagaagtaccgagaagtgagcatgtttttgaacacattaacaccgaagttctacgtggccctaacaggcacttcc

SEQ ID NO: 423590 - DNA, 90 bp, Homo sapiens
acgggtgaggtacaggctcagtctgcggccaagactccgtcctgcaagcaagagtgagccatggagctacgtgtggggaacaagtaccgc

SEQ ID NO: 423591 - DNA, 82 bp, Homo sapiens
aaacaacttacagacttccacaagcaagtcactaggtaaaattcccccagaaagtacactgatatttaatattgatctcctg

SEQ ID NO: 423592 - DNA, 75 bp, Homo sapiens
gggcgagagctctgtgcgcagccaggaggaccagctgtcacggaggttcacactagaaggccaaaacttccgcaa

SEQ ID NO: 423593 - DNA, 101 bp, Homo sapiens
gcaaagaccaccccacggccgccaccaagatgagcagggcccttgcggagttccgcgtccgaggtgtgaagatactggtagacacagtctgggccctctct

SEQ ID NO: 423594 - DNA, 108 bp, Homo sapiens
gtctgatgtggtccaggaactgctcaaatactcatctgataaagcttacgggagaaaagttcccagtgacctgacagcagaggagcgtcaagaactggagaacatccg

SEQ ID NO: 423595 - DNA, 75 bp, Homo sapiens
aggaggagtacaaggacatcctgcgcaaggccgtgcagaaggagctggaatatcagaagtctcagcccccacagc

SEQ ID NO: 423596 - DNA, 83 bp, Homo sapiens
ggaggggagagttgggagaggctttgctgctgaggaaatttatttggtagattgaagattatggattggatatgtctacttct

SEQ ID NO: 423597 - DNA, 58 bp, Homo sapiens
gcggcggagcgcgagagcttcgagcggactcaggttggtgggacaagtgatgttgaag

SEQ ID NO: 423598 - DNA, 75 bp, Homo sapiens
ccactcggccctgcgccgcgacaagtacgtggccgagttcctcgagtgggtggatgaatacattgccattgccaa

SEQ ID NO: 423599 - DNA, 73 bp, Homo sapiens
agctttccagcagtcagttgaacaagacaacttatttgatcaagcgagacattgagttgctgctgaaactcat

SEQ ID NO: 423600 - DNA, 75 bp, Homo sapiens
ttgtccgagaaataacatttgaaaatggagagagcattagtttggatgaattcaagtcattttgccattttacaa

SEQ ID NO: 423601 - DNA, 82 bp, Homo sapiens
gtgcagccgcgaggaggcgcgggaggtgttcgagaacgaccccgagacgaggctgtgatcaatagccaggaatggactttga

SEQ ID NO: 423602 - DNA, 100 bp, Homo sapiens
agaataaatgagataattcacagaagggacctggagcttttccggaaaaaggtgctgtgactatctaagggaaacagtgcttcttagtcctacgtcagca

SEQ ID NO: 423603 - DNA, 100 bp, Homo sapiens
ttgcagccagtactctatatgaacaatccgtctggatcacggatgtaggaagtggcttcaccggccagaactgtgaggaaaatatcgacgattgtccagg

SEQ ID NO: 423604 - DNA, 76 bp, Homo sapiens
ccagccagtacctgggtgttccccaccttgggcatcatgcaccacaacaaacaggatactgaggaagatgaggagg

SEQ ID NO: 423605 - DNA, 75 bp, Homo sapiens
cacggccgtcagggtggtcattgcaatattaagcctcacagaatgaggttcctgcggcacccctggaagaactgg

SEQ ID NO: 423606 - DNA, 82 bp, Homo sapiens
ccatggaggcgaggtagagttggggtcgcagatgttgctgacaaaaatgcttctaacagaaattctgctggatgtcacagat

SEQ ID NO: 423607 - DNA, 90 bp, Homo sapiens
gatttaaacaagagatttccacagaagccatgcctttcttggacatccagaaaaggttcggccttaacatagatcgatggttgacaatcc

SEQ ID NO: 423608 - DNA, 100 bp, Homo sapiens
gaagaaagctatctagggacgagatctagaatcaactgagagagatgcttaaaaatcaccagttactttaatgagttcccgatatggatgatgaagaagg

SEQ ID NO: 423609 - DNA, 100 bp, Homo sapiens
ggccaaagtggtgtgcttctaccggaggcgggacatctccagcaccctcatcgccctggccgacaagcacgcaagtgagctgctccccggtgtctgccca

SEQ ID NO: 423610 - DNA, 100 bp, Homo sapiens
tcagcgtaaactgcagcatgatgttctgaagcttgagtatgcgttccattttgaggaatcacagatatcgaagagatgccagaacactagaagatgaaga

SEQ ID NO: 423611 - DNA, 82 bp, Homo sapiens
ccagaacggggttgcagaaatacccgtctacatcagaagcagtggactgatcctttgaaatactccagccatgactaaaaga

SEQ ID NO: 423612 - DNA, 74 bp, Homo sapiens
cgtgctgagcaaccgcagcctccgcggccgagagtgcagcgagtgacgcagaagttctccctggtgattgtgca

SEQ ID NO: 423613 - DNA, 96 bp, Homo sapiens
attcctcgaacaagtttgtgaagaccttaaaacggggccagcagcctcccccgatgggtcgtcagcaacgagggtgcctcaggatgtgacgcaggg

SEQ ID NO: 423614 - DNA, 97 bp, Homo sapiens
ggagctgtctggtctggtgattattacagcatggattatcctgtgccacagttcctcaaagatcatccatgaagatggcttctccggagaagacgtg

SEQ ID NO: 423615 - DNA, 100 bp, Homo sapiens
cattggccagaaggaagacttcgaggaagccaggaagaaggcactgaagcttggggccaaaaagtgaaacaaagagtcctcttcgtggaaaagaaaaaaa

SEQ ID NO: 423616 - DNA, 80 bp, Homo sapiens
gtctggagtttatctggagtgaggtggccggttcttggtgggatctgagcaggtgacagagttagtccttgataattgcc

SEQ ID NO: 423617 - DNA, 74 bp, Homo sapiens
gaggcaccaaggacctccaagacaggtactccaaagattcaggtttactcacgtcatccagcagagaatggaaa

SEQ ID NO: 423618 - DNA, 100 bp, Homo sapiens
gaggcggtggggctggagaacccgaagcacctcccggcgccgggacgcttcttctgaccctccatccctcgacacagccatccagcatgccctggcgggc

SEQ ID NO: 423619 - DNA, 100 bp, Homo sapiens
gcggctccggcgtctccgcagcagatcagggaccggctgctgcaggccatcgacccccagagcaacgttctgcggggagtgtctccagccctgcctgcag

SEQ ID NO: 423620 - DNA, 101 bp, Homo sapiens
aagacccctggctctataagctgaattatggcagcccagtcaaggggtttgccaacttgttaataagatggaggagaatactggcaaggttaagcctttca

SEQ ID NO: 423621 - DNA, 75 bp, Homo sapiens
cctggtacaaatcaaacatgaatggagtgagaaaagatgtagtgatgaccaccttttgtggtgacattggatgag

SEQ ID NO: 423622 - DNA, 101 bp, Homo sapiens
aaatgtaaaggccaagatccaggataaggaaggacccaaagcagcagaagatctacgacctattccagaagtcctttgagaaagaaggaagtgatatggag

SEQ ID NO: 423623 - DNA, 75 bp, Homo sapiens
acctcatggccttcagtccaagccttcctcagggtcccacctctacagacaacgaatatattaaaggaatctgtg

SEQ ID NO: 423624 - DNA, 100 bp, Homo sapiens
ggaacaccattcttcgccaggccaggaatgtgttacagggtcttgattatttacataccaagtgccgtatcatccacactgacattaaaccagagaacat

SEQ ID NO: 423625 - DNA, 98 bp, Homo sapiens
atagacctaaagccacagtcttcaagagcccacggacaccacctcaacgatatctagatgatctcaatgaaggggtttatattcagcaaaccttagaa

SEQ ID NO: 423626 - DNA, 99 bp, Homo sapiens
atctgagggagaagcacaagatcatgcacagagccacataaagaagatccctaatagtcatttctcaacaattatatagtcaactgatgtaacaatggt

SEQ ID NO: 423627 - DNA, 75 bp, Homo sapiens
ggcggccgcggcgatgactcggacccaggtggagcagctcctgtacgaaagccctgagcggtactcccgctcagt

SEQ ID NO: 423628 - DNA, 75 bp, Homo sapiens
ccaaaggctagggcgggtgcttcgagctaaaaaagctgtttctggcaaagcctgccgtgtcttacatttgtctct

SEQ ID NO: 423629 - DNA, 100 bp, Homo sapiens
gtgacatccgaggtgcctttctccaaaagacgaagggaacgtcatcgtttggaaagcgtcgcaataagacgcacacgttgtgccgccgctgtggctctaa

SEQ ID NO: 423630 - DNA, 76 bp, Homo sapiens
aacctttgacaagattttcaatcagaaaattggtgagcgagtgctgtgctttcatgggcctcttctttatgaagca

SEQ ID NO: 423631 - DNA, 100 bp, Homo sapiens
cggggagccgagctggagctgccgcggcgcagccaggcgcattggagtgactgtctggcatcaccaagatgacactccacgccacccggggggctgcact

SEQ ID NO: 423632 - DNA, 101 bp, Homo sapiens
gagaggcaggcagacttcacagctgagaagtttccagatgaaaagtatcctgtggtctgaggccatcttcctcgaggcaaggccccagaggaggaccaaga

SEQ ID NO: 423633 - DNA, 83 bp, Homo sapiens
aggatatcgacgtcgtgatccagaagtccagagctgaggactgcctgtttgcagatgataccacgagtcaacccaaaagttgc

SEQ ID NO: 423634 - DNA, 96 bp, Homo sapiens
tttctttctcgctgatcgcctaacttctactgacgaagcttggaagttgcagaaggtggtgtatgaggagagccgcatggtcagcctcacagcccc

SEQ ID NO: 423635 - DNA, 98 bp, Homo sapiens
acaagtgcagcctccagctagcactggacaggagtccttcaataatgttaaacagtggctgcaggaaatagatcgttatgccagtgaaaatgtcaaca

SEQ ID NO: 423636 - DNA, 97 bp, Homo sapiens
ggcaaccgctccggcaacgccaaccgctccgctgcgcgcaggctgggctgcaggctctcggctgcagcgctgggttccatgcctctgcagcggtgcc

SEQ ID NO: 423637 - DNA, 100 bp, Homo sapiens
cccaggctttggtcaccagtgagctggagaagttccaggggggacacagcgattgccacgcgccattggaatgtccctggccaaggagctcatattctct

SEQ ID NO: 423638 - DNA, 101 bp, Homo sapiens
gcttggccccagaggctctcctggccccacgggtcgcccgaatgagctgaaagccagtggtggcgaaatcaaaattcataaaatggagcaaaaggagaatg

SEQ ID NO: 423639 - DNA, 100 bp, Homo sapiens
tcgctacacagcaatgcatcgagttcctctttagagagcaaagaccacctacaggcaccagacacagaggaacacaacacaaagaaattagacaacagtg

SEQ ID NO: 423640 - DNA, 90 bp, Homo sapiens
gcaccccgagaaccgtcagtttgagccagatggccctggctgtggagaatgctgaaggaagaagacgcagaagcaggacgaccctgaaag

SEQ ID NO: 423641 - DNA, 83 bp, Homo sapiens
ggcaaaggcaagagtaacagcagcgccgtcccgtccgacagccaggcccgggagaagctaccggctctctgaccagttccacg

SEQ ID NO: 423642 - DNA, 100 bp, Homo sapiens
agcacctgccaggagcacgtcccgccggcaggtcgcaggagccctgggagccgccgccatgggtttctggaaaagaacaagcagccaaaaatgccatatg

SEQ ID NO: 423643 - DNA, 78 bp, Homo sapiens
cgagacagcgggagccggcgtgcgagcggcagaggctgggaggcggcagaatgcagccagaggagggcacaggctggc

SEQ ID NO: 423644 - DNA, 95 bp, Homo sapiens
agaaataggaattgctgtgggaaataatgatgtaaagttttttgctccactcaagcctgttagaatcaccatggaatacagctccagtgggaagg

SEQ ID NO: 423645 - DNA, 83 bp, Homo sapiens
ccgaagaagaaaggattcgttacagccagagattgtattctagcctggaagccaagctctgccagatagaaagtaaatacctg

SEQ ID NO: 423646 - DNA, 51 bp, Homo sapiens
gccgtggccccgagggcggatccgagattgaaaatcttcaagagcagctta

SEQ ID NO: 423647 - DNA, 152 bp, Homo sapiens
ggagatgctggtgtggtgtttgtgggctggtggcatgagcccttccggttgggcatccgcttttgcaccaatcgcaggttcggagcgaccttggccgttggcctgaccatctttgtgctgtctgtcgtcactatcatcatctgcttcacctg

SEQ ID NO: 423648 - DNA, 73 bp, Homo sapiens
ctctagactttcagcatcacaattacaaggccatgaggaaggaatcttttgggtgagttgtgaggctggcacc

SEQ ID NO: 423649 - DNA, 98 bp, Homo sapiens
gggcctgggccgccgctgctacctgcagcgccgtgtggcacgacacaaaaatcaggaatgggtaccacagaccatgtcatcgtcctggcgtccacgaa

SEQ ID NO: 423650 - DNA, 50 bp, Homo sapiens
ctcaactgctgaccccggggtcaggatctgccactgtgaaggagatgatg

SEQ ID NO: 423651 - DNA, 100 bp, Homo sapiens
tggttctcccggcagcagcccgacgcaaaccaaggatctggggatcttcgcactatcccaaggagccaccttcctcgtcacgtttggaaactcagagaaa

SEQ ID NO: 423652 - DNA, 83 bp, Homo sapiens
ggagatatggcgcaactgcggcgctgaatgagttcacggtgatcaggaagaagttcaagtgtccgtactgcagcttctcggcc

SEQ ID NO: 423653 - DNA, 50 bp, Homo sapiens
gttccccttctactacatgctgaagtgtatgtggtagaagaccaaagaag

SEQ ID NO: 423654 - DNA, 80 bp, Homo sapiens
cccatctcaggagcacctgaatgttctcagggctgcgcagggacctgccgccctcggtgcacctgctcacgctggccagc

SEQ ID NO: 423655 - DNA, 83 bp, Homo sapiens
ctgggagagaggtacctctccttttccctctccctttccctaaggttttaaaatcaaagatgggaaaatcggagaaaattgcc

SEQ ID NO: 423656 - DNA, 74 bp, Homo sapiens
ctttggatcgaattgccaatgtctccatcctgaaggggggcatgtgctctgtgtacctgaaggacagtgagaag

SEQ ID NO: 423657 - DNA, 73 bp, Homo sapiens
ttcaacatggaggcggaggtcgataagctggaactgatggacttaagtgagtttaaagagatgacaacatgtg

SEQ ID NO: 423658 - DNA, 88 bp, Homo sapiens
cctagagtggttcagccacaaggagctgaaaatgtgtgtctgacatgcaagctcagtggggcagagacccgtggattgctgtgccctg

SEQ ID NO: 423659 - DNA, 51 bp, Homo sapiens
ctgcagactaccgcagccagcggatggttcacatttgagtaaagacagggg

SEQ ID NO: 423660 - DNA, 83 bp, Homo sapiens
ctgactcttgcgccgccgccttccacccggagtttctctcctgtcacaatggcatgatctcggctcactgcgacctctgcttc

SEQ ID NO: 423661 - DNA, 100 bp, Homo sapiens
ggcgctgtcagctgtccacagccccaccttctgccaggacgcaaagtaccacatgcagcgctgcattgactctggcctctgggtccccaactctaaggcc

SEQ ID NO: 423662 - DNA, 75 bp, Homo sapiens
gccagcctgaccagtggctctgttttcccacaacaggcagagacatttgtttgggtgaacaatgcatctgcacat

SEQ ID NO: 423663 - DNA, 100 bp, Homo sapiens
cgtcttctgcagcagccaggcagagtgccgactccttcacagccgtgaggaactcttcaggctccagaaatgtgtgcaacagcaccgatcttccggaagt

SEQ ID NO: 423664 - DNA, 50 bp, Homo sapiens
ggcccacgccctccgactgccagtacatgtcccagagcaagcacacggag

SEQ ID NO: 423665 - DNA, 99 bp, Homo sapiens
gagacccttcgagaaatctcgtctcgaccaagagctgaagctgatcggtggtttgtgatgaaaatggttccaagggctatggatttgtacactttgaga

SEQ ID NO: 423666 - DNA, 100 bp, Homo sapiens
aagctgcccagccaccagcaaccccccaggacgtagacaagtttggcaacgagatcacccagctggcccggcccctgcctgtggagtatctcatcataga

SEQ ID NO: 423667 - DNA, 82 bp, Homo sapiens
ggcgtctccttctatgtgctgtgtccggacaacggctgcggcgacaatttttgtcaacagcatctccaccctggagcctgtg

SEQ ID NO: 423668 - DNA, 75 bp, Homo sapiens
cctggagcctcagttggaagcagccgatccagcctgcggagcctgtggggcagggtgaagagggaacagaaatct

SEQ ID NO: 423669 - DNA, 74 bp, Homo sapiens
tacagcaggcgctcaccatgttccctggagccctgctgctgaggccgcgccctccccgccctgaggtgggggcc

SEQ ID NO: 423670 - DNA, 82 bp, Homo sapiens
cggggaggtgggtactacacaaccgtctccagccttggtctgagtggactgtcctgcagagttgcatgctgagaatttgaaa

SEQ ID NO: 423671 - DNA, 101 bp, Homo sapiens
tcacattgctgttcatgagtggaatccatgtttctggacgcggatttttggcctcatactctgttatagataaacaagaggctgacccgcggctgattgag

SEQ ID NO: 423672 - DNA, 95 bp, Homo sapiens
aaacgtttagcatcagtgactcacaaatcagcaacacagaatttctgcaagtaattgccttgagagaacctgggaaatttgatttagtttatcac

SEQ ID NO: 423673 - DNA, 51 bp, Homo sapiens
ggagaacatctcgctgtcggtgaagaagatgtgtcttgctgaatcagggct

SEQ ID NO: 423674 - DNA, 90 bp, Homo sapiens
gttgctgggagcgacgcggggcgggccctgggggtcctcagcgtggtctgcctgctgcactgctttgttggttgaatctggcgatgtgga

SEQ ID NO: 423675 - DNA, 75 bp, Homo sapiens
atggcagatggcaacagaggatgtcaacaattttttggagtgagatggaagattttcgaggtatagcagaagaat

SEQ ID NO: 423676 - DNA, 100 bp, Homo sapiens
gttgtgatggcccaggttcttcaaaagatgtgattcctggggctgccagctaaggtcccttatgatttctgctctggctttgcagttttcagcctttccc

SEQ ID NO: 423677 - DNA, 82 bp, Homo sapiens
cgtgtccaaggcaagaactgaaaactctgagtgatgttcagaagtttgcagagataaatgcttttaataacccacgaccagg

SEQ ID NO: 423678 - DNA, 74 bp, Homo sapiens
cggccgcgccatccccatcaagcagggaccctccattttccatatccaggaaaatgtgatgcgccacaggtatc

SEQ ID NO: 423679 - DNA, 100 bp, Homo sapiens
agaaagaatcttgtcactttagccactgctactacaggtcatgtacgtagaagggactgcagttgtgatgggttttgaagatcccatgctacagacagat

SEQ ID NO: 423680 - DNA, 90 bp, Homo sapiens
ttagactaccccaggaacccgcgccgcgagggctccttccctcaggtaatgaatttgggcatcctgaatggttagacttcccaagaaaag

SEQ ID NO: 423681 - DNA, 141 bp, Homo sapiens
tgcactctcgcgttcattgcagcattattcacagtagccaagatagggaagcaacctaaatgtccatcgatgggagactgacaaactggaagatgagaaatctgggctgcagcgagagattgaggagctgcagaagcagaa

SEQ ID NO: 423682 - DNA, 100 bp, Homo sapiens
tcagaatctcactaaaagaatagatagtcttcctttaactgaaaattggtttgaagaaaagcagcagcaatttgagaatctggatcagcaacttaggaaa

SEQ ID NO: 423683 - DNA, 82 bp, Homo sapiens
cggggttcgggtgtctcgtgtgtgaacatcacagaaagtttcctacactactgaggtttaggggcactgtgaagcaaaagcc

SEQ ID NO: 423684 - DNA, 100 bp, Homo sapiens
cgcagatggcacggctccgacagtcactgtctcagggaaatcctcattgacgattcaatttgttgaaggccaatttgtggactcctacgatccaaccata

SEQ ID NO: 423685 - DNA, 89 bp, Homo sapiens
gctgagttatagctgtgacttctgccctgccaggccgcacacaagctggctgacccgggacagtcattttgtttactcattcagccctg

SEQ ID NO: 423686 - DNA, 100 bp, Homo sapiens
tggggccctcccccagcagtatcctgcatcgggagaaaacaagtccaaggatgaatcccagtccctgttacggtggcactaaggaaaacagatcatctct

SEQ ID NO: 423687 - DNA, 98 bp, Homo sapiens
gggaggacatggccactgttttcagtattttaccagtacctggagcaacatctgaatgaattgatgacgaagaagtggctattagggtcaaacgctgt

SEQ ID NO: 423688 - DNA, 74 bp, Homo sapiens
caccggtttctcccacatcgacctggaactttgcaagttaatgaatctttggacagagagattctgtgctttgg

SEQ ID NO: 423689 - DNA, 97 bp, Homo sapiens
caacaaaccagaaatccgtctacagtctgaaataaatcttctcaccttggaaaagttcagacttggttccttcaacctagagaaagttgaaaaccca

SEQ ID NO: 423690 - DNA, 100 bp, Homo sapiens
actgcaaaggagacccaaggaacagtgccaagttagatgccgattacccacttcgagtcctttattgtggagtgctcaagggaggacccctggatggcac

SEQ ID NO: 423691 - DNA, 51 bp, Homo sapiens
gtacccgccgccgccgttggctggagctgaataccactagaaacatacctg

SEQ ID NO: 423692 - DNA, 100 bp, Homo sapiens
ctgggatcccggccaccagcaattgtccggccaagctataacatcagaaatggtgaatgaatacaagaaaattcttttgctgaaaggatttgagctcatg

SEQ ID NO: 423693 - DNA, 100 bp, Homo sapiens
ggtccatacggcgttgttctggctggtaagcgggcccctcagtgctaccccagttccgtcaactctgccaggactgtgatgctgttcaaccttggcagcg

SEQ ID NO: 423694 - DNA, 102 bp, Homo sapiens
gactggaggaacctctggagcagctatgacaacggcaacacgacaagaagtccttggcctctaccgcagcattttcaggcttgcgaggaaatggcaggcgac

SEQ ID NO: 423695 - DNA, 83 bp, Homo sapiens
ccttctccggcccctccagctgccccctgtgtggcaaacctttcttgagctcagcaagagtgagccatggagctacgtgtggg

SEQ ID NO: 423696 - DNA, 96 bp, Homo sapiens
ctgggacagcgttctgtcatctcagcaaagaatgtggtatactgatgaagaccatggaatagctagcagcacagcacaccaacatatatataccca

SEQ ID NO: 423697 - DNA, 99 bp, Homo sapiens
cccggaaggaagtccaacgaaggatctctgctcatcagccagggcctgacacatttagggaagggcacccttaccctctgcccctaccacagcgaccgg

SEQ ID NO: 423698 - DNA, 82 bp, Homo sapiens
aaatgaaacctatgtgtatataactttcaaaacttctttttcaagaaactaagaggtggctatggaggcttttacaacagtg

SEQ ID NO: 423699 - DNA, 99 bp, Homo sapiens
cagaaaggcaggacaacccgacgcgaggcagggagcttccaggttataggaacgaatgcaggaatttgggaactgagctgtgcaagtgctgaagaagga

SEQ ID NO: 423700 - DNA, 98 bp, Homo sapiens
cccccggattagacagcaggatgacaagatctggcaccactctttctacaatgagcttcgtgttgcccctgaagagcatcccaccctgctcacggagg

SEQ ID NO: 423701 - DNA, 74 bp, Homo sapiens
tttaaggcaggagctgatgaagagagagcagagacagctcgtctgatcactgagttccccaagccagagttcat

SEQ ID NO: 423702 - DNA, 90 bp, Homo sapiens
gggagcagaggaagccttgaggacctactcacagataggaattgaaggacaggaagatgtcacccaagcgcatagctaaaagaaggtccc

SEQ ID NO: 423703 - DNA, 138 bp, Homo sapiens
gaaattgttgaagagttcaactttcccagaagttgttctaacgctgcctttgctttaaaacagtattacttgcgggtacttttgacttcagtgacattgctgtctatatattcaataaacctcctattgatctgttca

SEQ ID NO: 423704 - DNA, 82 bp, Homo sapiens
cacaccagaaactagcaccagccccaaatttcatctatccatactaatggaaatgtaactggaactgactctgatgataaaa

SEQ ID NO: 423705 - DNA, 74 bp, Homo sapiens
cgtaatgctgtggatgagtttttactccttttagacaagggagtatatgcaggtagttccaatttgccagcaga

SEQ ID NO: 423706 - DNA, 100 bp, Homo sapiens
gcctattacttcacggagctgaaggatgaccaggtcaaaaagggttggatgtaagaaaagcatgaatcatgggaaggaaggagtgcctcatgaagccaag

SEQ ID NO: 423707 - DNA, 83 bp, Homo sapiens
aagggaatcttcagtcgcacgtgcagcgagtccactcagagttctgcagaatcagaagatttggcagtacatttatatccagg

SEQ ID NO: 423708 - DNA, 100 bp, Homo sapiens
tgattcgactagaataaagactgaagaagaagccttttcaagtaaaaggtgcttggaatggttctatgaatatgcaggcttaaatgataatcccagcccc

SEQ ID NO: 423709 - DNA, 80 bp, Homo sapiens
gtctggtgaagttccatgcccatccagagaggcttctgggaacttggcagacgcagcttagagagactcaccagcgagcg

SEQ ID NO: 423710 - DNA, 83 bp, Homo sapiens
ctggcctggaggctatccagcaatagcctaacatggcagaccagagacagcgctcactgtctacctctggggagtcattgtac

SEQ ID NO: 423711 - DNA, 51 bp, Homo sapiens
cagggtggctgaatcacggaatggtgcattgacatacaacagagcaacgag

SEQ ID NO: 423712 - DNA, 100 bp, Homo sapiens
tcgctttgattgctaccctggtatatgcacttttcaggtcccagcgactccagtttgatgtctcttcccccaatggcatcttactcttccgagaaaccag

SEQ ID NO: 423713 - DNA, 82 bp, Homo sapiens
gccgcttctagaccctactgcggtctcggatattgccgggtgaaatgacaatggatgctctgttggctcgattgaaacttct

SEQ ID NO: 423714 - DNA, 83 bp, Homo sapiens
ccgcgctccagcctcgctctccgccgcccgcaccgccgcccgcgccctcaccagatgggggctccggaggtggcgcccaggct

SEQ ID NO: 423715 - DNA, 100 bp, Homo sapiens
gagacaagaggaatggttacacaggagaacttgcgcctgtcaggggctggatccagaaacctgtggtgcctccttctcttttggttgttcatggagcatg

SEQ ID NO: 423716 - DNA, 83 bp, Homo sapiens
ggaagggaaccaacccactttctcggcgccgcggctcttttctaaaagtgtgtcctcatgacttctcttgtggaccatgtccg

SEQ ID NO: 423717 - DNA, 76 bp, Homo sapiens
tgagagtccgccgccaacgcgcaggtgctagcggccccttcgccctgcagtcaggtcaattcagtgaagatatgat

SEQ ID NO: 423718 - DNA, 100 bp, Homo sapiens
cgtcacgcacacgctcggcgctgcgatccgcgcatataacgtgtggacaacagtgagtatatgcggaatggagacttcttacccaccaggctgcaggccc

SEQ ID NO: 423719 - DNA, 98 bp, Homo sapiens
gagcctcttctgataactcaggatttacttgaaatgaaaggagattccaacctacttcagggaagctgtacaccactaatggtagcaactctccaccc

SEQ ID NO: 423720 - DNA, 100 bp, Homo sapiens
gcaactcttcggctaacttcaaagttgctgaagtaaaggaaccctgcagccttcccatgctatctgttgacatggaaaacaaggaaaatggctctgtcgg

SEQ ID NO: 423721 - DNA, 98 bp, Homo sapiens
ttcgctgcccggtccgcccgcggtgagaggcaatgaatcgctccctggctaatgtgattcttggaggctatggcaccacttcaacagctggtggaaaa

SEQ ID NO: 423722 - DNA, 98 bp, Homo sapiens
tccgtcacgggcaggggtcgtctgccccacccaacggcgggtcgaattcgcacctcctccacttgcaggtgatggctcagtgttccgagacttggtta

SEQ ID NO: 423723 - DNA, 75 bp, Homo sapiens
gaagaagacgaagaagcagaagcgtctgctcaggttgcagcaggagagagagtgtgtggcaggccccaacatcgc

SEQ ID NO: 423724 - DNA, 100 bp, Homo sapiens
ccggtcctgcacgccctgtctgaaggccaacattgagcgtctggaggaggcacgccagccccacgggcctgctcctgacggtgctggtggccctcaccta

SEQ ID NO: 423725 - DNA, 74 bp, Homo sapiens
catcgtcatcctgctgctgaagatctggaagacgcgctcctgcgccggtatcatgatattagctggtttgacat

SEQ ID NO: 423726 - DNA, 92 bp, Homo sapiens
gggactccaaagtgaaagtggcggtgcggatacgacccatgaaccggcgagaatggtagataacgcagatcatctctggaaaggatattgat

SEQ ID NO: 423727 - DNA, 74 bp, Homo sapiens
aaaagtatgcagaccttgaaaagcggcacgacaacattaaaccatcagatgagattgaaaaggctgtggtgtct

SEQ ID NO: 423728 - DNA, 82 bp, Homo sapiens
aaaggcaacatcctgtcacaggccatgctctggcaaaaacacctagaggatcaagacataatgggagcatttttagacaagc

SEQ ID NO: 423729 - DNA, 100 bp, Homo sapiens
gtgaaaaaggggaagaaagagaatattgttcagttgattatgccagccagatgcagttctctaaaccagtgctgtccagttctctaaaccaaagtctgcc

SEQ ID NO: 423730 - DNA, 75 bp, Homo sapiens
acacatcccagccggtgactgcagtgagcggcaacctttggcactgcatccatgagcatgcccacaggattcggc

SEQ ID NO: 423731 - DNA, 98 bp, Homo sapiens
ccgagcctagtccccacgccgcggcgcgcccgggctccctgctgatcccaggccccttcacagatgtagtcactacaaatcttaaattgcgaaatcca

SEQ ID NO: 423732 - DNA, 96 bp, Homo sapiens
cggatgttgcggacagtatgaggcaagcgcagggggacggggaccagcagctgtcgccgccgctctcaggtcagttgctctcccctgaaggaagag

SEQ ID NO: 423733 - DNA, 75 bp, Homo sapiens
aagcgagactcaaagtcctcagagcaagagatgaccttatcacagttgtggcagcactgcctgaaggtatgagac

SEQ ID NO: 423734 - DNA, 90 bp, Homo sapiens
cagaaatcaagaacttattggtcaacactctatacaccgtcagacattaacagcagcaaagttgtaccccggtttgaaaggtttggcttg

SEQ ID NO: 423735 - DNA, 75 bp, Homo sapiens
cacactgcaatgtttttgtggaacatgaactttcacgatggccgtaaagcacagcagcacatcgagacttgctgg

SEQ ID NO: 423736 - DNA, 100 bp, Homo sapiens
gaagaaccctaaatttatggagaccgtggcggagaaagcgctgcaggaataccgcaaaaagcaccgggaggaggtgaacgagaaactccgggacactccc

SEQ ID NO: 423737 - DNA, 88 bp, Homo sapiens
tggtggatgcacgcaggagtccagctgcccctgccgtctcccaggccctctcaggattgcaggaagcagatgatgccccgagtatatc

SEQ ID NO: 423738 - DNA, 87 bp, Homo sapiens
gaaattggagacaaattcagcagtcgtcatgggcaaaaagaaatctctaccccaaatttgcgtcaccctgggcatcttcaccttgtc

SEQ ID NO: 423739 - DNA, 100 bp, Homo sapiens
tgaacattatgtggaaggatcaacagtcaattgtgtactagcattccaaggatattagaaatggctactccccagtcaattttcatctttgcaatctgca

SEQ ID NO: 423740 - DNA, 75 bp, Homo sapiens
gactgcggggacctggtggccatcgctcagttcctacccccggttgcgagaggagacagagcgaatcgtcaccac

SEQ ID NO: 423741 - DNA, 127 bp, Homo sapiens
cttagctgtgctcgcgctactctctctttctggcctggaggctatccagcataaggagtcaggccagggcgggatgacactcattgattctaaagcatctttaatctgccaggcggagggggctttg

SEQ ID NO: 423742 - DNA, 75 bp, Homo sapiens
ctctacgcctcctacgtttacctgtccatgaaattccgggtagatatgcctggctcaggcagtgcattcatcccc

SEQ ID NO: 423743 - DNA, 98 bp, Homo sapiens
gatctgtggctgggataagagaggccctgaatttatccagttggcgaaggactttgaggatttccgtaaaaagtggcagaggactgaccatgagctgg

SEQ ID NO: 423744 - DNA, 110 bp, Homo sapiens
ttttctgcaggtttaatagatgacaatgatctctaccgatgggaagtccttattattggccctccagatacactttacgatctgaagataaaggttggggacaggcacat

SEQ ID NO: 423745 - DNA, 100 bp, Homo sapiens
gaacaggccctatggggcatacctatggctttattgacctcgactcccatgcgttattccaatggaaacagctggagaacttatatttccgtgagaaaaa

SEQ ID NO: 423746 - DNA, 82 bp, Homo sapiens
tacgagctcaacggcggcctgcctccgggcacacccggctccccggacgcctcgtgcctacaccaactaatgttacaattga

SEQ ID NO: 423747 - DNA, 95 bp, Homo sapiens
cagagattgagaatgtccatggatttgtttctcattctcatatttcaccaataaagggtcccgggattcttgagctgtgcccagctgacgagctt

SEQ ID NO: 423748 - DNA, 82 bp, Homo sapiens
gttgtgactgctttggacgtgggagtcacctgaaagccaggaaatgcagaaaaagtcctacctggagcgaagcgttaaggaa

SEQ ID NO: 423749 - DNA, 75 bp, Homo sapiens
ggagcgcatctcgcccaggagccggagcagcggcactgcctgttactatgcgagtcagaagaaaacatttgaaat

SEQ ID NO: 423750 - DNA, 82 bp, Homo sapiens
gagcggcgagccggagcgcggagcccggctcccgcaccatggaggaggacgacagctacggatgacactcctgtccaggaca

SEQ ID NO: 423751 - DNA, 111 bp, Homo sapiens
aacacgagcatggcatggccccgcaggtcttcacccaggccctggagtgcatgcgcaggggacggcaaaacagaacagaaaggcggagataaaaagaggggtgttaaaaga

SEQ ID NO: 423752 - DNA, 90 bp, Homo sapiens
ctcctataaacacagtggacgtcaataatgaaagctcttcagagaccaagatcactccatggatgaaatgacagctgtggtgaaaattga

SEQ ID NO: 423753 - DNA, 100 bp, Homo sapiens
ggggctgaatgtgcgagtccatagctgaagaggagcgccagatggtggaggaatacacttatttatgaagtcagcttcaggccaccaaatccctctgcca

SEQ ID NO: 423754 - DNA, 100 bp, Homo sapiens
gtttgtcatccttgtacagcaatctcctcctccactgccactacagggaagtgcatcacatgtcaggcgaccatggccttgctgggtaagcgctgtgacg

SEQ ID NO: 423755 - DNA, 100 bp, Homo sapiens
gacactttgttattggagaaacatgcagattatatcgcatcctatggctcaaagaaagatgattatatcaccatctggttcaaggacacctaaaaggtct

SEQ ID NO: 423756 - DNA, 123 bp, Homo sapiens
aactcctaggaagactacgattcccatccagccccacgagtctcgggcaagtagtcctctaagggccacgcctggctgaaagatgacgaagcgacacactgtaggcagtgtgagaaggagttc

SEQ ID NO: 423757 - DNA, 95 bp, Homo sapiens
gatcggctgcggcaacttcggggagctccgcctaggatgatcggctgaatgtaacagaggaactaacgtccaacgacaagacgaggattctcaac

SEQ ID NO: 423758 - DNA, 90 bp, Homo sapiens
gaatgtgcggaaaatgccttcaaatcaggttttgtacagtgttagaatactgtgaaggcaatgacttggatttctatctgaagcaacaca

SEQ ID NO: 423759 - DNA, 100 bp, Homo sapiens
aagtggtaactctttgggtgctgctataggctcagccctcagtggatttggttcatcagcaatcccacagagtattgatgaggaaactgaagtttggagc

SEQ ID NO: 423760 - DNA, 80 bp, Homo sapiens
cggcagggaggatgacggagctgcagtcggcactgctactgcgaagacagctggcaggttttgggatttgagattgacgc

SEQ ID NO: 423761 - DNA, 87 bp, Homo sapiens
cccttgtcggagccggctcggggacgcagagactgcagctgccatcgaagaggaggttatcaatactctggctgaccatcatcatcg

SEQ ID NO: 423762 - DNA, 83 bp, Homo sapiens
aggaatctgcttttcaagtatgccaccaacagtgaagagaaaatgcttggacagaagagatgagtactatttccactaaggcc

SEQ ID NO: 423763 - DNA, 82 bp, Homo sapiens
gcaatgctgatgtttgataaaactaccaacaggcacagaggaacaagatcactcaaggtgaaggataatctactaataccag

SEQ ID NO: 423764 - DNA, 98 bp, Homo sapiens
ttagctccagatttgatggccttcacaatccaagttccacaatatattgactactgccacaattccggaacaagttccagttccagtctaccacccaa

SEQ ID NO: 423765 - DNA, 51 bp, Homo sapiens
tcagccgcacactgtttccagaagtcaaaatgcagatcttcgtgaaaaccc

SEQ ID NO: 423766 - DNA, 51 bp, Homo sapiens
ggcatctttgctcaaaatagacctgagctccctcccatgccccagagctgc

SEQ ID NO: 423767 - DNA, 82 bp, Homo sapiens
gccggttcttggtgggatctgagcagctgtggtcgccaggacccccccagagccaagaccttctccagaaggtgacccttcc

SEQ ID NO: 423768 - DNA, 98 bp, Homo sapiens
cccgtccatcatagtcaactgcgtggaagagaaggttggggcaaacacaatggataatcctttgttgaaatacagtgcaaaggattacttcttcaaag

SEQ ID NO: 423769 - DNA, 98 bp, Homo sapiens
cagagatattacagtttacaggctgactactggaagtttagacactctgcaatatcaccaaaaagttcgctgcatagaaaatcaagaagtaaggacta

SEQ ID NO: 423770 - DNA, 83 bp, Homo sapiens
tctttgcagactttggttggtggaggctgtggcaatggaacaggcttgagaaacagtgctgaagctgctgaaagatggcagaa

SEQ ID NO: 423771 - DNA, 90 bp, Homo sapiens
gtgactggaataaaaacagagtccgatgaaaggaatgggtctgggaccttaacagggagccatgtgtccccctacctcaagagcctgtcc

SEQ ID NO: 423772 - DNA, 97 bp, Homo sapiens
ttgcctcgccgaccgccatttcacatccagcagaggaggcgggggcagccgctgagacggtttttcacaaggggtgagcccctccagactccgaata

SEQ ID NO: 423773 - DNA, 75 bp, Homo sapiens
agagcctcaccagccacgaccccatgaagcagtgggaagtcactagcagggtgtccgcaatgttgccagtgtctg

SEQ ID NO: 423774 - DNA, 50 bp, Homo sapiens
aggggacccagtgcgcccgcatcgtcgagctgcaagtgtccactgcttgg

SEQ ID NO: 423775 - DNA, 83 bp, Homo sapiens
acaccgcacagccgggaaatggtgagaagccctaccactgcaactgggacggctgcggctggaagtttgcgcgctcagacgag

SEQ ID NO: 423776 - DNA, 75 bp, Homo sapiens
aaaagtagctgtcattggtggtggcttggttggtcaaagaaaaagtgatgtatgaaaaagaggcaaaacaacaag

SEQ ID NO: 423777 - DNA, 82 bp, Homo sapiens
ttcaatacacctcccacctgtcctcaggcatatcaaagtactgtcaagatgataagcatggaataaagcttcagaagggtct

SEQ ID NO: 423778 - DNA, 74 bp, Homo sapiens
aaagagtggacatttgtcatagaaaatgctgatttgaacaccagcttttctggggtggatgaacatgcaccgat

SEQ ID NO: 423779 - DNA, 75 bp, Homo sapiens
ggcggcctgccccgccggagcagcatcatcaagctagaacgagtaaatctgtctgcagcccagacactgagagcc

SEQ ID NO: 423780 - DNA, 75 bp, Homo sapiens
gcaggatgtatgtggccttgaggataacctgcactgatcacacctcgacacccaacccctgaaccccacacactc

SEQ ID NO: 423781 - DNA, 100 bp, Homo sapiens
ttggctcttatctactttggaggcctgtctggctcctttctctacacaggaggagtacctggccgtagtcgatgctcctcccctggacctccggttcaac

SEQ ID NO: 423782 - DNA, 83 bp, Homo sapiens
ctggtaggcacgggcggctccgcagtgaccggactcgggggagaaaagttgccagacggccagcattgccactgccagtgcat

SEQ ID NO: 423783 - DNA, 98 bp, Homo sapiens
cctcaccagtccccaatgtagaagaggtgacacttcccaaaacagggcaattgaaggaacagactaaaaatcgtgtcctggaaggaaactacaggtac

SEQ ID NO: 423784 - DNA, 83 bp, Homo sapiens
ctgctattgaaagagagtatgcacagataacaagacctctgccagaagaaccatggctttggaaggcggagttcaggctgagg

SEQ ID NO: 423785 - DNA, 74 bp, Homo sapiens
cggcgccgggcactgagcaccgccaccatggggaaggggactcggtgaaatacctggagtgctcagctctcacc

SEQ ID NO: 423786 - DNA, 75 bp, Homo sapiens
cagctcctaccagaggacctcagaaaggagctctatgaactttgggaagtccatctgaactgtttactgtttgtt

SEQ ID NO: 423787 - DNA, 51 bp, Homo sapiens
caccgtggtgacattgtatcattggttgagatggaagattttcgaggtata

SEQ ID NO: 423788 - DNA, 71 bp, Homo sapiens
acgattgggctgagcagaggacgacatgttgcttttcgtggaggtcacggagctgctggacgtctccatgg

SEQ ID NO: 423789 - DNA, 75 bp, Homo sapiens
caagagcagaagctgaagcacttgacagagccaattcgctattaaaccagactcaacagccttacaggtatctca

SEQ ID NO: 423790 - DNA, 75 bp, Homo sapiens
tcagctgctgcatcaggcagtttcccttcccaagttgaaggagaagagccaggcgtgcggagggaacttggggtc

SEQ ID NO: 423791 - DNA, 98 bp, Homo sapiens
ccggacaccaggaccgcgagccagacagctcccggaagccgcgccgccgccgccagcttaagagttggacagtggaggaccttcagaagaggctcttg

SEQ ID NO: 423792 - DNA, 100 bp, Homo sapiens
agggcccaacggcccctggctccggggtggggggatcgggcctggatcggctgccggtgcctgccagtggggtgctggagaatctggtaaaagcaccatt

SEQ ID NO: 423793 - DNA, 90 bp, Homo sapiens
cttccccaccaagaacaccatttggtttcccccggctgggtctctatttagacctggccgagtgcaagctggtctcctttcccattggca

SEQ ID NO: 423794 - DNA, 75 bp, Homo sapiens
gctggaaccatggagggtgtagacggggatctgacgagcttttctctacttgtgtcactaacggaccgtttatca

SEQ ID NO: 423795 - DNA, 83 bp, Homo sapiens
gagttggcaacgcgacacagagccagtttgacaagtatgcgcccaagctggacagcccctacttccgacattccagcgtgagt

SEQ ID NO: 423796 - DNA, 97 bp, Homo sapiens
tggggtgccctacacctgctgcatcaggaacacgccaccaagcagccctatggagaggccaatgtggagagaaactgaggccttccaccaaaagcca

SEQ ID NO: 423797 - DNA, 100 bp, Homo sapiens
cctctgggtcctcggtcggtacagtctctgcacctcgcgccccagcaggcgaacagctgcttggagaactacaagtgaagaaaagaaagcattagatcag

SEQ ID NO: 423798 - DNA, 101 bp, Homo sapiens
gagtttattcctcgttccttcttcagtcctgctcgtcggaggacccggttgccatggtgaaggaaaaagggaaatcctcattgacgattcaatttgttgaa

SEQ ID NO: 423799 - DNA, 90 bp, Homo sapiens
gctgtttcgtgaaggagagagaggctgaagaaatgtcaacaattgggagttttgaaggattccaggctgtgtctctgaagcaagagggag

SEQ ID NO: 423800 - DNA, 100 bp, Homo sapiens
aaaactgccactgtaaacttcataaccagctatccgggttcatcctacatttttgtgcaagaggtcacgagaagagaatgccttctagatgcaaaatcac

SEQ ID NO: 423801 - DNA, 101 bp, Homo sapiens
attttcctaggtgtcattacagtgatcatcataggcttatgtcttgctgcagggaaggacatggcagctgtgcagaggaccctgatggctttaggcagcgt

SEQ ID NO: 423802 - DNA, 75 bp, Homo sapiens
ttatgaacaatatggaatcctttcagtaccactctgaagaatctcaggcctactgaacttgacgcactggtattt

SEQ ID NO: 423803 - DNA, 90 bp, Homo sapiens
atcccgagcagcgtcatgtacccctggccgcgatgggcctcttggaacattggtgtgttcatctgcattcgatgtgctggaatccacagg

SEQ ID NO: 423804 - DNA, 75 bp, Homo sapiens
cagggatgctggtctggcagtcagagccacataggactctggactgggttgccggatggttcctttttcttattt

SEQ ID NO: 423805 - DNA, 88 bp, Homo sapiens
tacgaccagtgaggcggccgccgcagcccaggcgcgggggcgacgacaggaaaattcacgaattgtgagagtaagagttatagccgga

SEQ ID NO: 423806 - DNA, 74 bp, Homo sapiens
cggatgtggcagccccgagccatggctctcgccgtccgagtcgtttattggacctcagcagccatgtcgaagcc

SEQ ID NO: 423807 - DNA, 100 bp, Homo sapiens
ttcagattctttctctggaactgaaccagaggttcacaaaacaagtgtagtagggaaagctgcacgaccctcagctgatgggaatcattcctcgaattgc

SEQ ID NO: 423808 - DNA, 83 bp, Homo sapiens
gcagccgagatgccgggggagcggggccttccacaccccctccgtgggtgtgtgagaggtggagaagagcgagtacttgagaa

SEQ ID NO: 423809 - DNA, 117 bp, Homo sapiens
ccccggctccatcgacctcaaggacatcaacttccggccgcagatgtcccagacaatgcagatcttcgtgaagactctgactggtaagaccatcaccctcgaggttgagcccagtga

SEQ ID NO: 423810 - DNA, 83 bp, Homo sapiens
ggcagccgcggatctcaccgccgctcagggagctcgaggccatgagcagatataccagcccagtgaacccagctgtcttcccc

SEQ ID NO: 423811 - DNA, 100 bp, Homo sapiens
gaggggggctttgatgcagtactccaggcagccgtctgcaaggctccataaaaatacagactcaccagttcctgctttgatgtgacatgtgactccccag

SEQ ID NO: 423812 - DNA, 75 bp, Homo sapiens
gcagcgcctgtaatgtttggcgagtctggccacgtgctgtacgccgacatcaagatggagaatgggaagtccaag

SEQ ID NO: 423813 - DNA, 83 bp, Homo sapiens
ccgcgcgcagggcctgcagcgggagctggacggcgagcgcgagcggcgcgagaaattctgggaggtgatcagtgatgaacatg

SEQ ID NO: 423814 - DNA, 90 bp, Homo sapiens
ttgtcaccaacaaacaggctgcgccaggctttatcggaccacagcttccctctcacatgataaagctcaccatggatgatgatatcgccg

SEQ ID NO: 423815 - DNA, 100 bp, Homo sapiens
ctcgctgggggaaatgacagcttggaccatgggcgcccgcggtctggacaagcgaggaagtttctttaaggctcgtggtcccaagaagcatctgaagcgg

SEQ ID NO: 423816 - DNA, 83 bp, Homo sapiens
cgcggagccgcgcagccctcggagcacggaaattcgaaatgagtcccatgactatcctcatagagtggccaagtttccagaaa

SEQ ID NO: 423817 - DNA, 95 bp, Homo sapiens
acgcctacaacaacttccggcccaccctggagactgttgactctggcacagagctccagaaagcagtggggcctgagatcaccaagacagacctg

SEQ ID NO: 423818 - DNA, 83 bp, Homo sapiens
attgttacaattttttttcaagaactgccgtcttctttgcctgcactaatggagaacgtatttaccgggcagtcaaagatcta

SEQ ID NO: 423819 - DNA, 82 bp, Homo sapiens
accgcagatgttgtcaaggtggcctaccaggaggccaggggtgtcgccatggtgaacacacagtgttcatcccctcaggagg

SEQ ID NO: 423820 - DNA, 74 bp, Homo sapiens
gggcctacagcagcttcggcggcggcagaggatgtgacactcagtgctctgaacgactccgatgccaacagtga

SEQ ID NO: 423821 - DNA, 75 bp, Homo sapiens
agcaaacgcaaagagctggaaaaaaatatggttgagatggagtttcactcttgtctcccaggctggagtacaatg

SEQ ID NO: 423822 - DNA, 90 bp, Homo sapiens
aggcgtgaggtttgccggtgctgactttgtcttctacaactgcagcgtcctccagtctcaccatccaggggagactccacctctcatcac

SEQ ID NO: 423823 - DNA, 90 bp, Homo sapiens
caatcatgagattcaaaagccacactgtggaattgaaacccctgaacttccagaacctgccagaacatttggaccagttgctacaggtgg

SEQ ID NO: 423824 - DNA, 100 bp, Homo sapiens
cgaatacggcgacgacatgtatgggccagaaaagcgcataaagtcaggcagagatggcagtgggggctcccgtggcaaaagagaaggaagtgctagcggt

SEQ ID NO: 423825 - DNA, 100 bp, Homo sapiens
cagaaatttcatgttgcaccctcccaccaagaaaacacattgtggagcgctatacagagttttatcatgtacccactcacagtgatgccagcaagaagag

SEQ ID NO: 423826 - DNA, 75 bp, Homo sapiens
catgagtggttccatgatgggaagtgacatgggcctgtgcttccttcagagactcacacaagaggtttatcatga

SEQ ID NO: 423827 - DNA, 98 bp, Homo sapiens
cacacctccattggatttaaaagacagtcctcgtcagcactgactttcagctatggaatcgtgtactaatggtcacttgatgtgcgctggctgtttta

SEQ ID NO: 423828 - DNA, 100 bp, Homo sapiens
accacctgcagccgctgctgaagatcaacagtgctgacagggagaagtaccgccggctcaacgagcagagtagcccccttgattttgattgaaaatgaac

SEQ ID NO: 423829 - DNA, 80 bp, Homo sapiens
ctcgccatggccgacgaaaagcccaaggtcttgggcgtctttggtactggcttttttaggggtctgcctggggattaccc

SEQ ID NO: 423830 - DNA, 75 bp, Homo sapiens
agaaactcacatgagacaaatgcgctcagcttcaattgatggagtttcactcttgttgcccaggctggagtgcaa

SEQ ID NO: 423831 - DNA, 74 bp, Homo sapiens
ttcttttggcttcttcaaagagggtgaaagatatttgtcaggatacgaatcaggttctcttcaagtgctgccag

SEQ ID NO: 423832 - DNA, 100 bp, Homo sapiens
gtcgctgtctgcccattgatagaggccagattgtcttggaagttccaaagttgcaacgatttctacaggtgatttggcttctgcacagttaggaggagca

SEQ ID NO: 423833 - DNA, 83 bp, Homo sapiens
cgccaatggggagcagaaggactcggacacaggatttggggtggaaggcaggcatggtcaaacccatttcactgacaggagag

SEQ ID NO: 423834 - DNA, 74 bp, Homo sapiens
ctaaactcactgtggaatgctttctttaaggaaaaacagtagtgctctgcatagtttactgaaacgagtggtca

SEQ ID NO: 423835 - DNA, 51 bp, Homo sapiens
gcccttctgagctctgtgctgaacaagataacgaaggaggcccaacttcat

SEQ ID NO: 423836 - DNA, 100 bp, Homo sapiens
aagagagacttcctggtggacgatgcggaggtcgagcggttaaggctttgggaacgatcactgcagtgcctgtcacgggtcctcaggtcagctccttgca

SEQ ID NO: 423837 - DNA, 100 bp, Homo sapiens
agcactcccagctgcgcagggcctgccaggtggcgctcgggaaatcctcattgacgattcaatttgttgaaggccaatttgtggactcctacgatccaac

SEQ ID NO: 423838 - DNA, 51 bp, Homo sapiens
ggtgactgtcccagaagtgaatcgcaggttgactacagacaaaaagctgct

SEQ ID NO: 423839 - DNA, 76 bp, Homo sapiens
gtggtcgtttgtttctccaaggtttgaaaagcagctggcctgcaagtgagttattctccccacctcagaagtacca

SEQ ID NO: 423840 - DNA, 51 bp, Homo sapiens
tggctctgggaccagcgggcccaccagtctgtcagtttgtcgtctctgtca

SEQ ID NO: 423841 - DNA, 82 bp, Homo sapiens
gcattatgcatcttgctgtatccaggccttattcttatagactatggacattttcatcttagtaaacacttgccatcgtcag

SEQ ID NO: 423842 - DNA, 75 bp, Homo sapiens
cattataatgggagaggatgatgactcacacccctctgagatgagactctgctacaggagctgagagaccctacc

SEQ ID NO: 423843 - DNA, 85 bp, Homo sapiens
agcctgcacagccgcggcggcagcagcagtgagaggcctgggttctgaggaaaacgcaatggtggccatggacttgggctctccc

SEQ ID NO: 423844 - DNA, 90 bp, Homo sapiens
tgtctacctgtttcacggagtcttgggacccagcatcagcccctcccacagccaggtgtatgaggaattgcgggccactggggcggcagc

SEQ ID NO: 423845 - DNA, 106 bp, Homo sapiens
gaaaatcaaaagaaacttttgcccttatcagtaacacctgaggtccctcggcttgtggaaggactgaatggtcataattgttcccaagtggcagctgctaaggatc

SEQ ID NO: 423846 - DNA, 100 bp, Homo sapiens
gacctggtggcacggggttctggcctgggtgaaggagaaggtggattctgaagagccagtctttgaggctgtcatcaactgggtgaagcatgccaagaaa

SEQ ID NO: 423847 - DNA, 89 bp, Homo sapiens
tgagagcccggaaccactctttgtgccgcagcttcgcagatctgaagaagacacttgaatcatgggtgacgttaaaaattttctgtatg

SEQ ID NO: 423848 - DNA, 100 bp, Homo sapiens
ctgagattgacactcagcactttgcgccaccttactctaaccaggtgctgtgagaagccatctttccgacttcaaaaaacaccgagctgctagaattgac

SEQ ID NO: 423849 - DNA, 100 bp, Homo sapiens
ggggtctctcagtaatgctggggaccctgagatcgtcaagtctcccagcgaccccaagcaataccgagactgtgcagttgatccaacttgtgttttgtgc

SEQ ID NO: 423850 - DNA, 137 bp, Homo sapiens
gacgaaactcctgcacctgtatatagggccaagtcaattctggagacctgggtgtgggtcaagcaaccagctccagaagaaaaggaagtcattaaaggacagtatggcaagctcacggacgcgtacggctgcctggg

SEQ ID NO: 423851 - DNA, 120 bp, Homo sapiens
ggagcgggcgagaagctgccgccgaacgacaggacgttggggcggcctggctccctcaggtgtcatggagaaactccagctgggcccagagattctgcagcgggaaaatccaaggcttat

SEQ ID NO: 423852 - DNA, 100 bp, Homo sapiens
cagaaggcagacaagcagcttttcagatgcaaatggttgttggaagaggagcctttggagttgtttgcaaagctaagtggagagcaaaagatgttgctat

SEQ ID NO: 423853 - DNA, 50 bp, Homo sapiens
aaaatggatcaactctcatctggccaagttggtagctggcagtgttgtga

SEQ ID NO: 423854 - DNA, 74 bp, Homo sapiens
gatccagcctgcggagcctgtggggcaggtgaccccagggtttgaagaaaaggagggggagctgctggtgaggg

SEQ ID NO: 423855 - DNA, 100 bp, Homo sapiens
tatatttatggagcgtatagaaaaatatgcacttttcaaaaacccacaggccactacaatggatggagttaacctcagcaccgaggttgtctacaaaaaa

SEQ ID NO: 423856 - DNA, 101 bp, Homo sapiens
actgatgaggatcagcccatgctatttgtcgtagatgtccagacaagccagatcaccaagatccccattctgaaagaccgggagcctggaggtgtgaccca

SEQ ID NO: 423857 - DNA, 83 bp, Homo sapiens
caccaaacaagcccccttggtttgaccagcctcaccccgtggctccttggggccagcagcagacaatgcagatcttcgtgaag

SEQ ID NO: 423858 - DNA, 83 bp, Homo sapiens
gcttatcaacacaaagttggcaacattattgatacaatattataagcgccatggctatggctagtgttaaattgcttgccggt

SEQ ID NO: 423859 - DNA, 74 bp, Homo sapiens
tttagagagtgcttccccttgccgagcactggcaatggctgccatccggaagaaactggtgattgttggtgatg

SEQ ID NO: 423860 - DNA, 100 bp, Homo sapiens
agcctcagcgtcaacgagttcaaagagctggttacccagcagttgccccatctgctcaagggtctgacatttcaggaggtggagaacttctttactttcc

SEQ ID NO: 423861 - DNA, 51 bp, Homo sapiens
ggcagcagctgttacccttaaagtgtgggcagaagaaaaagctagtgatca

SEQ ID NO: 423862 - DNA, 87 bp, Homo sapiens
tatatcgcatcctatggctcaaagaaagatgattatgttacaattcaacaaacatggtgtgttgcgggtagaaggcttcttaacacc

SEQ ID NO: 423863 - DNA, 82 bp, Homo sapiens
gttcagaagtaagcgctctaagaatcaagaaaatggaccagtttgttcgttacgagataatatcgtctactgcattattttt

SEQ ID NO: 423864 - DNA, 96 bp, Homo sapiens
taccacggccacactcaccactccatggccacacagggaaatcctcattgacgattcaatttgttgaaggccaatttgtggactcctacgatccaa

SEQ ID NO: 423865 - DNA, 83 bp, Homo sapiens
cttaaaatacccgcaacagccccttcgtcccaatttggagaccctgacacacccaccttctcacctgggctctgcgtatcccc

SEQ ID NO: 423866 - DNA, 50 bp, Homo sapiens
aagctgcctataccctgcagccccaggtgcgcgctgtgattggaagcacc

SEQ ID NO: 423867 - DNA, 98 bp, Homo sapiens
cgccgcctcggccgaccagggacctgcccgcctgcggctgctccggatatccttggaacagaagatcttattgtggaagtgacttccaatgatgctgt

SEQ ID NO: 423868 - DNA, 107 bp, Homo sapiens
cagctcctgaaccggaactcaaaacagacccatctttggatcttcattcattaagcagtgcagaaacacagatatttggagttcttacaacatggcagacattgaca

SEQ ID NO: 423869 - DNA, 83 bp, Homo sapiens
tatgggaaagatctaccttctggaagctactactacgtggtgcttggaaagtttgaaggatgacctctaggaagaaagtgttg

SEQ ID NO: 423870 - DNA, 102 bp, Homo sapiens
ctgaggcctggaatttgattaactcattcaaggttacccagttgagccagtcttggtgctctgtgttcacctggttcatctgaggagctgcatctaccctgc

SEQ ID NO: 423871 - DNA, 50 bp, Homo sapiens
ttctattgccttgggaaacactggctgctgtgatgcagatccatccgccc

SEQ ID NO: 423872 - DNA, 100 bp, Homo sapiens
gagctcaccaactgcgtgcccggcgtgctggaccgccgcgactccgccgcgctgcgcacgcccaggccaccccagcagacatgtttgccaaggcctttcg

SEQ ID NO: 423873 - DNA, 98 bp, Homo sapiens
ggtcatgggtgttctggacatttatggctttgagattttcgagtgtatgctagcctcaattttggcagtaagacacagcaaacatttggtagtcaaac

SEQ ID NO: 423874 - DNA, 75 bp, Homo sapiens
cactgctggctgcttccagtgttcgccgagaggctggctttgctacagctgaccactccagtcaggagagagaga

SEQ ID NO: 423875 - DNA, 76 bp, Homo sapiens
gacgccggcggcagatgagagcatccaacgataaatttgcgcctcattttggtaagcggaaaaacaaaagagttcc

SEQ ID NO: 423876 - DNA, 100 bp, Homo sapiens
cggatattcagttgcacatccccacatcaatgcactgccaatggtacttcgtactggatttcgaggctggcatcctgcagtattttgtgaatgagcaaag

SEQ ID NO: 423877 - DNA, 75 bp, Homo sapiens
cagatacgcattttctggtgtggccttcaccggtgccaaggaggatgccaaagaagaccatgaaagaacacatca

SEQ ID NO: 423878 - DNA, 75 bp, Homo sapiens
tcgaggcatgggggtccacactgcaatgtttttgtggaacatgatgatgcagtttgcttggcagagctataagcg

SEQ ID NO: 423879 - DNA, 100 bp, Homo sapiens
tcagccgcaagtacccgtccatcatagtcaactgcgtggaagagaagggctggttgatatgtgaagagccaacctgtcgcaatcgaactcgtcaccttcc

SEQ ID NO: 423880 - DNA, 100 bp, Homo sapiens
cgcgaatatcgtcatcgttagaaggccaaagaggtgctgaaaaaatatttggagtccaaggaggatgtggctgatgcacttctacagactgatcagtcac

SEQ ID NO: 423881 - DNA, 87 bp, Homo sapiens
agcaatcagtgagactccgtgggcgtaggactctccaagccaggatgcctttgtggaactgtacggccccagcatgcggcctctgtt

SEQ ID NO: 423882 - DNA, 82 bp, Homo sapiens
ttggctgctgcaggagccattttagctgctgatgcaaggaatcccctgggctcccgtccactccactgctgaccagcccatt

SEQ ID NO: 423883 - DNA, 51 bp, Homo sapiens
aagaaatcttagataagaaggttgagaagaagttcaccatgtctattctca

SEQ ID NO: 423884 - DNA, 98 bp, Homo sapiens
cgttattctgatctcaccaccctggtggcctttccctccagctctgtctatcctaccaaggctaaagtaaataatgccagcctgattggactgggtta

SEQ ID NO: 423885 - DNA, 100 bp, Homo sapiens
ccgaggcagcctccgcggaggagcagaaggactgaaggctcttacctatgttatccaacaggatcctactctggctcttcaacaccagatgacaataatt

SEQ ID NO: 423886 - DNA, 100 bp, Homo sapiens
gactcggactcggagctcgagcagtacttcaccgcgcgaacctcgctagctcgcaggccgcgccgggaccagtgtctttggtgcaacactaacaaggctt

SEQ ID NO: 423887 - DNA, 100 bp, Homo sapiens
ctcccacaaaagagatgagacaagaggaatggttacacagattgtggtggtgccatgcagcaagaatcagagagatgcagagttagagccagaaggcctg

SEQ ID NO: 423888 - DNA, 100 bp, Homo sapiens
ctgagcagtaccagatgcctcagtctccctctccctgcagtccaccacagatgccacagcagtactcagacgtggaacagatggccatcgactggctgac

SEQ ID NO: 423889 - DNA, 90 bp, Homo sapiens
agcattttcggcaaccgctgctggcagttttgccaggtgtttgttaccttgggagaagtttctgcctggattgaaacaaaaaaacacagg

SEQ ID NO: 423890 - DNA, 100 bp, Homo sapiens
gcggcggcggcggcgcagctattgctggacggccagtgggagagcgaggcctgagcctctgcgtctagatttggtgcttccagatgtgagttatcaggtg

SEQ ID NO: 423891 - DNA, 80 bp, Homo sapiens
cacccaccgccgccgcctcccagtgacgcattggccctgcggctggcctgcatcggggacgagatggacgtgagcctcag

SEQ ID NO: 423892 - DNA, 101 bp, Homo sapiens
gcggagccgctcgtctcccgtcttttttaagtacaacaaacacctcttcgtgcacattgggcatgccaaccattcttacagtgacccattgcttgaatcag

SEQ ID NO: 423893 - DNA, 99 bp, Homo sapiens
gacgtttttgaatcaactgagagaaattacggggattaatgacacccagatactacagcaagccttgaagtccaaagtgcttcgggagaaatggctgct

SEQ ID NO: 423894 - DNA, 83 bp, Homo sapiens
tgtgggcgctgctggcgctctggctgtgctgcgcgacccccgcgcatgcaaacggggattcagcgtccgatcctttggaacag

SEQ ID NO: 423895 - DNA, 145 bp, Homo sapiens
gtgagtgcagggaagtggagtatttgctgggccgggtaccatggacgtgggcgaacttctgagctaccagggtgttcctgaaaagaaggtacttccaatcaccgtccccaagtcaccagcctttgcattgaagaacagaattcga

SEQ ID NO: 423896 - DNA, 101 bp, Homo sapiens
agaagactctgagcccccgaactctgcaaagcctccagaggacataccacctccaggatcaggatgcagagattcttcaaacacctaaatgaaagtgataa

SEQ ID NO: 423897 - DNA, 100 bp, Homo sapiens
agtaaccccgagtctgcggaagtggtgacccgtgggacgcggctgagacaggaaattgacaatggcccttcagctatgctaggtctataatgggaagtgt

SEQ ID NO: 423898 - DNA, 82 bp, Homo sapiens
ggaagctgggacacccgggagtcaggaaatggtatctactgagcgtttcagtcaacaatacagctcgtgttcgacaatattc

SEQ ID NO: 423899 - DNA, 90 bp, Homo sapiens
aattgaagaaaaaagtaaactacttgaaaaatttagccttgttcaaaaagagtgctgggattacaagcgtgagctaccacacccagcgag

SEQ ID NO: 423900 - DNA, 78 bp, Homo sapiens
gcctcgatgcaggaggacgaacaggagcatgagaagaggtgttggagtgttgactttaatttgatggatcctaaactc

SEQ ID NO: 423901 - DNA, 98 bp, Homo sapiens
aagatgacaaaagaagagttaaatgccctcaagtcgacaggggatgggaccctagttggtacgccttattacatgtctccagagagaatacatgaaaa

SEQ ID NO: 423902 - DNA, 97 bp, Homo sapiens
ccgggccctgctgcgggggggagagccactgacgccgggaccgggaccgccgccgccgccgccaccatgcctgcggtggaagcacacctcctccctg

SEQ ID NO: 423903 - DNA, 82 bp, Homo sapiens
cgaaggacagctggaagccttgtcactggaggcgagtcagggctctccctacgaccacacacccggcatggcgggctccttg

SEQ ID NO: 423904 - DNA, 74 bp, Homo sapiens
cctggagctgaggaaccggaccccggcagctaatccaactcaagtcggaacagctcttcaggttttctataatc

SEQ ID NO: 423905 - DNA, 78 bp, Homo sapiens
taacatcttcatctaccatgaggacgggaagatacctgaaaaaagcggcagtctgcaacccagaagagggccttactt

SEQ ID NO: 423906 - DNA, 75 bp, Homo sapiens
cttcaagcttaggaccacccaccatgcctatccaggaatcagagatcattgatttcttcctgggggcctctctca

SEQ ID NO: 423907 - DNA, 100 bp, Homo sapiens
caggaatcaccttcaagcctatgtcgtgaggctttggcagaaattaagaaggaaatatctccattttccaacaggatggattcctggtgctggaaggatt

SEQ ID NO: 423908 - DNA, 96 bp, Homo sapiens
ctggagatgtccgagcccaaggcaattgatcccaagttgtcgacgaccgacagggtggtgaaagtgacaccacagccaaagccctatgggaagctt

SEQ ID NO: 423909 - DNA, 95 bp, Homo sapiens
tcctcttgcttgtatcgacatcattcaagagctcttcaaagcatttgttcagatcttcagtactggccaggttcttctgtgtggcagttcagaat

SEQ ID NO: 423910 - DNA, 100 bp, Homo sapiens
ccgaatcctgctttggaaacttgtgcttctgcagagtggtcgagatatccagtctgacggagcacttgctgacggaatgtgacaaaaaagacgggtttgg

SEQ ID NO: 423911 - DNA, 100 bp, Homo sapiens
tggggatggccaccagtttccggacagcttcgtgctgggtttacccaaggtccagcctagcccctaggcaccatgtcggacagtgatctaggtgaggacg

SEQ ID NO: 423912 - DNA, 87 bp, Homo sapiens
gagggagctgtggccacctgagaaggaaggcaacagcccccaggggagcaaccagggagtcaaaatcacaccggaccagcagaagag

SEQ ID NO: 423913 - DNA, 74 bp, Homo sapiens
ccctactgcggtctcggatattgccggggctctcacctttgtgtatccttttggtgccacattgagtgtcatga

SEQ ID NO: 423914 - DNA, 75 bp, Homo sapiens
gctggaggcaacgcagctggaaggggttgcccgaaggatgacgtacccagtgcccctaggcgtttccgagtccgg

SEQ ID NO: 423915 - DNA, 75 bp, Homo sapiens
actttgtgattgtccgcaggcctaagctaaatcgagagaactttccaggtgtcgtgaaaactacccctaaaagcc

SEQ ID NO: 423916 - DNA, 100 bp, Homo sapiens
agaaactgcaccttatcacccggaacctgcagagctcctccaagttccccctgatgacgctgcagctgctggacttctgcctgagcatcctgaccctctg

SEQ ID NO: 423917 - DNA, 83 bp, Homo sapiens
aagaccatttatttctttggagacaaaactatgccaggatttccacaagatcaaattcgattgtggcccatgcaagcaaggag

SEQ ID NO: 423918 - DNA, 50 bp, Homo sapiens
gctttacaaaccctgaatttataactgaatggagtcttgccctgtcaccc

SEQ ID NO: 423919 - DNA, 75 bp, Homo sapiens
ctgggttctggactttgggcgtcccattgccatgggtgtgtccgcagccggccaggtggtatccctgaaggtgtg

SEQ ID NO: 423920 - DNA, 75 bp, Homo sapiens
aactttcgtttccctctgagggaattgggaggtcggcggccccaaaagttctgcttggattctgctagacagacc

SEQ ID NO: 423921 - DNA, 87 bp, Homo sapiens
ctctttctggcctggaggctatccagccggttgtcaccaccaccacatccaccactgtggtgcatgccccttatcctcagcctccaa

SEQ ID NO: 423922 - DNA, 97 bp, Homo sapiens
agaaactgaggcctggaatttgattaactcattcaaggttacccagttggagtatgctgctgctgttccgctttgcgtcctcgctacaaacgcctgg

SEQ ID NO: 423923 - DNA, 75 bp, Homo sapiens
ccactgcacaggctacatcaaggcctggcccccagcaggttgttggcatgaagtgaaggatgaagagtcatcttc

SEQ ID NO: 423924 - DNA, 100 bp, Homo sapiens
cagaaacagctggattggttacaggaggctgttattgaaaatcgagccctgtggatgatgattaaaagatgtttcggctatcagtcaaaaagccagtatc

SEQ ID NO: 423925 - DNA, 50 bp, Homo sapiens
cgtggccgtggggagaccgtctgtatctgctcgctcgtgggaccacaatg

SEQ ID NO: 423926 - DNA, 78 bp, Homo sapiens
gatatttgatcatgagtttacgaagctggtaaaagaacttgaaggtgttatgtctggctgtagctgttggtcacgtga

SEQ ID NO: 423927 - DNA, 83 bp, Homo sapiens
ctcgggtctcgggggccgctctgggatcccggccaccagcaattgtccgactgaaagagcatattccttttgtggaactattg

SEQ ID NO: 423928 - DNA, 101 bp, Homo sapiens
agatttaacgaatggggttgtgatggcccaggttcttcaaaagatgtcctggatgcctcatcccttagtttcaacaccagattgaaatggtttgccatctg

SEQ ID NO: 423929 - DNA, 100 bp, Homo sapiens
tgtccctgtacgcggagggctcggtcaacggcttcatcagcaccttgggctagagacatgacctaacaccctgatgaccactctcagggaccttgagtga

SEQ ID NO: 423930 - DNA, 103 bp, Homo sapiens
atctttccggatcaatccagatggcagccagtcagtggtggagatgggcttccccaaggatttattgacattgctacttgagtgtgaacagttacctggaaat

SEQ ID NO: 423931 - DNA, 100 bp, Homo sapiens
ccaactcagccttcctgcataccctggaccagcagaaacctagagtggctgagctcattggaagtctcacccacaagctggagaccctccaggaggcgaa

SEQ ID NO: 423932 - DNA, 82 bp, Homo sapiens
caccaattatgggagggctggccaacttctgctacagacgactcagaatatgatgaagaatgggctaagaaaattcagagtg

SEQ ID NO: 423933 - DNA, 96 bp, Homo sapiens
atgattgaacgatctgtggtggaagcagcagtccaggaatgcagtcagtctgttgatgaaactatgtagctacagcaagctgggtagcaggcagat

SEQ ID NO: 423934 - DNA, 90 bp, Homo sapiens
tttctgaaagttttccttccatctctgctgctctctcatttgctggccatcggattggggtgaaaggtgtagcagtcactcggcctacac

SEQ ID NO: 423935 - DNA, 100 bp, Homo sapiens
caggctgaagaggaacgatatttccgagtgcggttacgatctgatggagcagccatccccagacgccgaagcgggggcgacacacacagcccgccccggg

SEQ ID NO: 423936 - DNA, 90 bp, Homo sapiens
ccaggaggagagcccacaggtgctaaagagagcagtaccctgatggagtcccttgcagagtgtgaacatggctacgcctcttcattcccg

SEQ ID NO: 423937 - DNA, 114 bp, Homo sapiens
tttaatggaaaatcgcttggttaaaacctgacacttttaacaggttttgcagatgtgaatggttggcaccttcgtttccgctggtccaaggatgctccctcagaactcctgagg

SEQ ID NO: 423938 - DNA, 98 bp, Homo sapiens
caccgggccctctgcgacctggggccctgggtgaagtgctccgtcgcccttgcctccagaggatgatgtggacctggaagccctggtgaacgatatga

SEQ ID NO: 423939 - DNA, 90 bp, Homo sapiens
gaatgagggcccggctacagagtcagaggccccgctggtaacatccaaaggctttgcccagtatgagctctttaagtcctctgccttgga

SEQ ID NO: 423940 - DNA, 90 bp, Homo sapiens
gggggtctctcagtaatgctggggaccctgagatcgtcaagtctcccagcgaccccaagcaataccgtgccctgcaggagtcattaaatc

SEQ ID NO: 423941 - DNA, 128 bp, Homo sapiens
ggagtcaccactggacctccaaggaagccacgtgcagacatctacaaccttcgatctcctgacgacccctgcggatccgccggcttctccgtcccttcttcctgctgcagaactcctctatgatgaag

SEQ ID NO: 423942 - DNA, 87 bp, Homo sapiens
gcatgtactgggggattcgcagggaggatgtcgggacaccccggaagctgggaaatgtaaactgtttcacgttagacctgtaaccca

SEQ ID NO: 423943 - DNA, 82 bp, Homo sapiens
aacaagaaaatggactccctggctgctggagagttgaatgccagccaccagccatggctgatcttgcatctttaatggataa

SEQ ID NO: 423944 - DNA, 80 bp, Homo sapiens
ggattaaacgccggagagagcgtgaatttgcctcggggacgcctctccagattcttctaacagagaaaatgccattgagg

SEQ ID NO: 423945 - DNA, 75 bp, Homo sapiens
gtgattacagcaggagattatgaccttaacatcagtggtaattggggcccccatcttgttgttgtgagaagttgt

SEQ ID NO: 423946 - DNA, 75 bp, Homo sapiens
tggggctggttctctccaggacatctaccaagctcgggttcatgacgctctcgatattcctgtgcagaaacctgg

SEQ ID NO: 423947 - DNA, 101 bp, Homo sapiens
aaatatctcagcaacagtggttagtggtcagcaagtccatctgggcagcgcagagggaccaaaggtgtccatcgttggcctggacgattctggcttcctcc

SEQ ID NO: 423948 - DNA, 50 bp, Homo sapiens
gagaactcagcgaggattctgaggtggatggaagcatgcctaggggaaga

SEQ ID NO: 423949 - DNA, 100 bp, Homo sapiens
gacgacggtccctcagcccagccaccatgagcaccaagcagatcacttgcaggtgaaggttgctatccttaaatacatagaaactctggccaaacagatg

SEQ ID NO: 423950 - DNA, 90 bp, Homo sapiens
tcaacaagttgctgcaatgtctgtgtctaatctatcatggagtctagtaaaagccctaaaacgatgaagaaatttcttcataaaaggaag

SEQ ID NO: 423951 - DNA, 98 bp, Homo sapiens
tggacaaagactctgtgtggcacggatgtggggaagtcctaaaagccaaggtatctgtgcagatcaagtgaaagttttcagctatcatcgctaccaaa

SEQ ID NO: 423952 - DNA, 100 bp, Homo sapiens
ggggttttactctaaagggtggcctggagcacggagaaccattaatcatctctaaggaatgggtaccacagaccatgtcatcgtcctggcgtccacgaac

SEQ ID NO: 423953 - DNA, 99 bp, Homo sapiens
gtggcacctgcgcgaagctggccaaagcctgcccagacggctcacctgtgcgggatggaacaaaagccacagtcagacttgttggggcttattcaggtc

SEQ ID NO: 423954 - DNA, 100 bp, Homo sapiens
gtcttcatcaacatttaatcagcctgttacatgaacagaatatggcaaaaatgagactacttacttttatgggaatggcagtagaaaataaggaaatttc

SEQ ID NO: 423955 - DNA, 100 bp, Homo sapiens
acagtccccgcctgccatggccggctcttcctggagtgttgagaagatggcgaattagaagatggtgaaatagacgatgcaggatttgaagaaatacaag

SEQ ID NO: 423956 - DNA, 85 bp, Homo sapiens
caagtgtccgggattcagacctctctgcggccccaagtgttcgtggcatcaagcatgatggaaccatgtgtgatacctgccgcca

SEQ ID NO: 423957 - DNA, 98 bp, Homo sapiens
ctgatttagaaggaggttcaggctacggtgagccgaagggcagctgcaatgactctccgcacggtattattgtcattgcaagcactattggcagctgc

SEQ ID NO: 423958 - DNA, 100 bp, Homo sapiens
ggctctgggctacggactatgggcgaatagctctgaccacccggcgaagttggttgaatctggcgatgtggaacccatggatatggagggctgactatat

SEQ ID NO: 423959 - DNA, 90 bp, Homo sapiens
ttagaaaaactaggggaaaggaaaccatgcaacagtcaaccttctgagctttcttcagagacctcaggctccagcaggaggaaatggtgc

SEQ ID NO: 423960 - DNA, 100 bp, Homo sapiens
agaaaaagtgcctgggttagccaagagagacagagaacactggatagacttcgaacatttaaacaggcagaaaccactaatactagcctcttgcaggtgc

SEQ ID NO: 423961 - DNA, 100 bp, Homo sapiens
tcaccaagtgggtcaacaagcacttaatgaagctctgcccctgaggactgcacgtccttcagcatcaacgcctccccaggggtggtcgtggatattgccc

SEQ ID NO: 423962 - DNA, 75 bp, Homo sapiens
ctacactgagtcggaggcgaagagtgatcagcagctggactgtgccttggacctaatgaggcgcctgcctcccca

SEQ ID NO: 423963 - DNA, 100 bp, Homo sapiens
tacagaaattccatgctgccttcagcttcctttgccgctctgcatcatgttgtgccggtggtggtgtgcacattgagccccggtatagacagttccccca

SEQ ID NO: 423964 - DNA, 90 bp, Homo sapiens
agcagcatcggaaacacctggagcagtgcgtgcagctgcgccacctgcaggcagaagtgaaacagtctctagtgatccctgaaaagttcc

SEQ ID NO: 423965 - DNA, 82 bp, Homo sapiens
cagaccccccccggaattctgagcaccaaaaggctatgcccactggaagggccaagtgctgaattcagatgagctccaggag

SEQ ID NO: 423966 - DNA, 82 bp, Homo sapiens
ctgcgcctctgcccgcggatctggggcaacctggtacaagatatttggagtctgggagtgatccttttcatgttggtgtgtg

SEQ ID NO: 423967 - DNA, 75 bp, Homo sapiens
tgttactacaacctcgggcgtctggacaaaatccccatggcccagcgccgccgcttcacgcgggtggagatggcc

SEQ ID NO: 423968 - DNA, 82 bp, Homo sapiens
tgaagaaggcgcatcactcccagctgcgcaaagcttgcgaggtggcgttagtaagactttgaccccgacgcaggcttcagtg

SEQ ID NO: 423969 - DNA, 82 bp, Homo sapiens
agcgacgttcggccaccggaggagcgggagccaagcagaaaccaaggtgtatgttggtaacctgggaactggcgctggcaaa

SEQ ID NO: 423970 - DNA, 96 bp, Homo sapiens
gtccccggagaactctaccctggaggagattctggggcagtatcaacggagtctccgggagtcaagggtccagagaaggaggagaagttgagacag

SEQ ID NO: 423971 - DNA, 87 bp, Homo sapiens
tcccagctgagaaggccaagggttctcttccggtcaaataaagtgcccgtggtgcagccatcccatgcggtccatcctctcaccccc

SEQ ID NO: 423972 - DNA, 83 bp, Homo sapiens
cttggaagcaccatgtccggatgagatcgcacttcctgcagtgggcattagccacgtccagtttctattccaaggacaatgaa

SEQ ID NO: 423973 - DNA, 75 bp, Homo sapiens
gcggtcgcgacgtggcgcgctggttcccgggccacatggccaagggtatggacctgtctgccaatcaggacgagg

SEQ ID NO: 423974 - DNA, 75 bp, Homo sapiens
gcggtctggtggagctggagctgcgggatgctgcacttaaaaggatgcttgttttgatgtcctgctcattgtttt

SEQ ID NO: 423975 - DNA, 130 bp, Homo sapiens
agactttaacagaactcaacaaatgctgtggcctttgtgtctgcccatgtaatagctctagaggacaaaatcccagtccttggcacaaactcaggaaatggaagccggagtctgttttttgtggggctgc

SEQ ID NO: 423976 - DNA, 98 bp, Homo sapiens
tgaccttcaaagtgagcgccaatgtccaaaacgtgaccactgaggatgtggagaaggccacaggctccaaccaggaatggagacgccattggatgttt

SEQ ID NO: 423977 - DNA, 85 bp, Homo sapiens
cctccttcagcatcaacttgatacttctgtctccattgaggattttccaagagataacttcaccaagatgtccagtgataggcaa

SEQ ID NO: 423978 - DNA, 102 bp, Homo sapiens
ctggagaaaaagctgaaccaggcccttttggatcttcatgccctgggttctgcccgcacggacccccattactacgagatgtcctacggcttgaacatcgag

SEQ ID NO: 423979 - DNA, 100 bp, Homo sapiens
gaggaataatatttatggagcatatattatggaacacaggggacttgatctcatcttcatgccaggccttgggtttgacaaacatggcaaccgactgggg

SEQ ID NO: 423980 - DNA, 82 bp, Homo sapiens
ctggcaagaggcagcctgggggccacagctgcttcagacttcgcaggtgagcagtaacggaaatcagccccgtttattcctc

SEQ ID NO: 423981 - DNA, 95 bp, Homo sapiens
aacttgtttcacgctatatcaggatgagataactgaaagggaagcagaaccatactatcacaagtgaagctgatgtggaggctgtcatggataag

SEQ ID NO: 423982 - DNA, 75 bp, Homo sapiens
cctcggtgctgtggtgcagagctagttcctctccagctcagccgcacaatgcagatcttcgtgaagactctgact

SEQ ID NO: 423983 - DNA, 73 bp, Homo sapiens
cggcttcgaagaaacggaagatgcctgtgtgccgccggcagaggctgaaggccagcttggagaacagcctgag

SEQ ID NO: 423984 - DNA, 90 bp, Homo sapiens
tggactgctcagggtgccagacctcatcaggagaattctgcctaagccaactcgaaaaagccgtacaaaaaataagcaaaagcgtcccag

SEQ ID NO: 423985 - DNA, 75 bp, Homo sapiens
gggcaggaagaaagatatgaattgctcaatgtcttggagtttaccaggcattaagggatcattgcaagagcagcg

SEQ ID NO: 423986 - DNA, 101 bp, Homo sapiens
ctggaaaacttccagaacctggcctcactagccacagatgaagatatccttgctaaaggaaaacagtccatcaggagtcaggctttaggaaatcagaactc

SEQ ID NO: 423987 - DNA, 101 bp, Homo sapiens
atgaaggaggaaattttggcggtggagaccctttaaagagatcatccttcatcatttatgatataatgaatgaattaatgggaaagagattttctccaaag

SEQ ID NO: 423988 - DNA, 100 bp, Homo sapiens
ggactccagagcagccttaaccctgcagcctttgtgcccatcaccagctctacaggtcatgctttcagaacgaaaaggcacagatgagctctatgctgtg

SEQ ID NO: 423989 - DNA, 99 bp, Homo sapiens
ggaaaccggagtgaccagaggagggacacgaatcatggtgtcatggaaagggatttactttatactgactctgttttggggaagcttttttggaagcat

SEQ ID NO: 423990 - DNA, 100 bp, Homo sapiens
ggaggccctgagtgagctggccactgcatatggaggtaccacatggttctcagagcagcgaaagttttcagtttcaaccaccattacctcctgacactcc

SEQ ID NO: 423991 - DNA, 88 bp, Homo sapiens
cgccgtcggcagcaagaacagagagagaggtggacagatctgagagatactgagcacctgtggaatcctctcaagaggaacagtcatt

SEQ ID NO: 423992 - DNA, 75 bp, Homo sapiens
gcctcaacaaccatttctaagtggttgatatccctgaaagtacttaatagcatcgtgctgttggggaaatcgtgc

SEQ ID NO: 423993 - DNA, 50 bp, Homo sapiens
ttagcagtagactgttggaagtaaggaggaatgccagctcctgagcaggc

SEQ ID NO: 423994 - DNA, 100 bp, Homo sapiens
tggtggactatgagggcaagggccgccagaccatcatccagggcatcctgatgcagctgtcttctcctcagtgctggcgctctgactacccttcccaaag

SEQ ID NO: 423995 - DNA, 75 bp, Homo sapiens
tgagcacaatctgatggaggctggactggagcttgagaaggacttggaggtgaccaaccacataactcgagacag

SEQ ID NO: 423996 - DNA, 76 bp, Homo sapiens
gaggacctgatcaagactgatgatgtcctggatctgagctgtaccagtgcaggtcctcactttaatcctctatcca

SEQ ID NO: 423997 - DNA, 100 bp, Homo sapiens
gctgtttggccaccccctgttcctgcagaacacagcgtatggaccagtttgctgactgctgggcaggagcaaccacatcatgacagaaatgcagggatct

SEQ ID NO: 423998 - DNA, 100 bp, Homo sapiens
cacagccttgcccatgagctcgtccctggcccggagggacccactctagaggtgggtgattgtgttgttacagtgctgcttgctgaagaggacaaagctg

SEQ ID NO: 423999 - DNA, 100 bp, Homo sapiens
cgagtccctcaactctctacgctttgcctccaaggtagaacacctgaaggagaagctcattagccaggcccaggaagtgagccgactgcgatctgagctg

SEQ ID NO: 424000 - DNA, 100 bp, Homo sapiens
aagatgccggaggatgagtccaccccggagaagcgcacagacaagatcttcaggcagatggacaccaacaatgacggtacgagtgcttccatatccattt

SEQ ID NO: 424001 - DNA, 82 bp, Homo sapiens
aggatcctgatttaaggcagttcttggaaagttcagagtcgtcattgaattttgagaagcattctgaaaactttgcatggac

SEQ ID NO: 424002 - DNA, 80 bp, Homo sapiens
cttcaccacgcggctgcacaactgcaggaacaccgtcacgctgctggaggaggtgggcaccatgtccttgaagcttcagg

SEQ ID NO: 424003 - DNA, 100 bp, Homo sapiens
gaaaaccgacaaccttcccagaaagtccaagctcgtgcaagagtgagccatggagctacgtgtggggaacaagtaccgcctgggacggaagatcgggagc

SEQ ID NO: 424004 - DNA, 75 bp, Homo sapiens
gcagcctcgtgcggacgctcgtgcacagatacgtgccctacgagacgctgaacaaacgctttcgcgccgctcaga

SEQ ID NO: 424005 - DNA, 83 bp, Homo sapiens
ctcccgggcggcgaccggggcctgggtccacgccgagggcaggacgaacttcaccaggtgagaagccctaccactgcaactgg

SEQ ID NO: 424006 - DNA, 100 bp, Homo sapiens
ggagaaagtggagtccgagctgagatccatctgcaccacggtgctgatatgttccatttaaggctctgaagatggggagagaattctggatgatccaggt

SEQ ID NO: 424007 - DNA, 99 bp, Homo sapiens
actttcgacacacctgtagacgttcgccaggtaaaggcagaaggagaagacagcctgaagaagatgcagctgatggagcttgcgattctgaatggcacc

SEQ ID NO: 424008 - DNA, 75 bp, Homo sapiens
tgcagatcgggagcgcaaggtcgccctcaaggccatgatcaaaacggtatgttagagcccaccaaggaaccactg

SEQ ID NO: 424009 - DNA, 108 bp, Homo sapiens
gaatctttagaatctcaaacaagacaacttgagctgaaagcgaaaaactatgctgaccagactgaatgcaatatccatacatctccttctccgggaattcaagtaagg

SEQ ID NO: 424010 - DNA, 100 bp, Homo sapiens
cgagggaggtgccgccgtcgcccaggatgggctgggaatgaagcgatgtagccttttaactctcaacagcctgacgggcgagttcaaagggaagtactac

SEQ ID NO: 424011 - DNA, 121 bp, Homo sapiens
agaccactgcctgtgtctcgtcttgtatctctaattggaagcagactctagtatgggattcctttctacctacaatacctcgcccactggccagagtatttcattgttgcagaggcacctg

SEQ ID NO: 424012 - DNA, 100 bp, Homo sapiens
tggattgctgacggcagccctctcaggtgaaatgacaatggatgctctgttggctcgattgaaacttctgaatccagatgaccttagagaagaaatcgtc

SEQ ID NO: 424013 - DNA, 75 bp, Homo sapiens
ctgcggggatgtatttggaacattatctggacagggttgtgtccactgtggtccccgactctgcccacaagctgt

SEQ ID NO: 424014 - DNA, 100 bp, Homo sapiens
cacggatcggattcctcagctacgaggaggcgctgaggagaggaccagaggagcgagagcagcaagaaccacacccagcagcaatgtcagcggaagtgga

SEQ ID NO: 424015 - DNA, 100 bp, Homo sapiens
tcggcttgaccgcattcttcctcccagataacgaaggaggcccaacttcattcaataaggagcctgacggatttatcccagacggtagaacaaaaggaag

SEQ ID NO: 424016 - DNA, 142 bp, Homo sapiens
tttgaaacctcgtcattaattggacacagtgccagagtgtatgcactttactacaaagatggacttctctgtacagcctacagcctggctcccgcgacgccggaggtgaaggtggcttgctccgaagatgtggacttgccct

SEQ ID NO: 424017 - DNA, 75 bp, Homo sapiens
cttcagggtttccaccgttcgttcaagaagtttccaagggtcacttgtgtctcgtccgtgggaagaccgggggag

SEQ ID NO: 424018 - DNA, 100 bp, Homo sapiens
cagaaaacctgcagaagaactggcttcgggaattttaccagggtggcccagttgaaatccttcccttcctctaccttggaagtgcctaccatgcatccaa

SEQ ID NO: 424019 - DNA, 98 bp, Homo sapiens
tctcgctgcttcaggaggacctgcaggaggacgcagacggattttcattcattggctcccatgtactatcgaggctcagctgcagctgttatcgtgta

SEQ ID NO: 424020 - DNA, 74 bp, Homo sapiens
ggctgataatattgcagcattttccagctccatgttgttcactggaattcagacaaataccccagctttgttga

SEQ ID NO: 424021 - DNA, 80 bp, Homo sapiens
gacccttgacccccacaatgtggactacctattggtggatctccagcttgtagctgcatcagcccctcctcctttctcag

SEQ ID NO: 424022 - DNA, 82 bp, Homo sapiens
cttatggcggcgctggagagggggcgctgagctgttggggaacccaagacagaccaggatgaggagcattgccggaaagtca

SEQ ID NO: 424023 - DNA, 82 bp, Homo sapiens
agtacatgagacgatgaagcaaaggtgacttaagagattaaaattaatttggttgctgttggttctgaacaaataatgagtt

SEQ ID NO: 424024 - DNA, 100 bp, Homo sapiens
tgggggtccacactgcaatgtttttgtggaacatgatgaggaaaatgaggcccaaagaagtgatgccacttggttaaggtcccagagcaggtcagaatca

SEQ ID NO: 424025 - DNA, 83 bp, Homo sapiens
ctatcagcaggctccgggctgaagattgcttctcttctctcctccaaggagaccctcctgttcttaactgtgggcgatgagaa

SEQ ID NO: 424026 - DNA, 75 bp, Homo sapiens
cggggagaggcacccgagacccacggagaccgcggtgtccgcaatgttgccagtgtctgtctgcagattggctac

SEQ ID NO: 424027 - DNA, 101 bp, Homo sapiens
caagaagggagacctactaaatgcccattatgacggctacctggctaaagacggctcgaaattctactgcagcttcttggacacttaatgattgttggcaa

SEQ ID NO: 424028 - DNA, 75 bp, Homo sapiens
tttctcatgaacagaaacacctaggaagggagaactggtgtggacactgccagcggctgcagccgacttggaatg

SEQ ID NO: 424029 - DNA, 101 bp, Homo sapiens
ggatcttaaagtgtggtctttagtggaaaaaaagattgaaaaggaagatcaggccaaccccaaagaagaagtgaccaaggaggagtttaaactgaatgaac

SEQ ID NO: 424030 - DNA, 121 bp, Homo sapiens
ctattatcagatcaaccaccaaagtgggaaacattgaaatcaaggtgatggcttggacaacagtgtagcttcccccagcacaggtgacgatgatgaccctgataaggacaaaaagcgtcac

SEQ ID NO: 424031 - DNA, 75 bp, Homo sapiens
gtagcgcttagtgaatatgatcaagttctcgtggagtcagacaatgagtatctacatgaaaatgggattgtccat

SEQ ID NO: 424032 - DNA, 82 bp, Homo sapiens
tcgtgtccctgtacgcggagggctcggtcaacggcttcatcagcaccttgggtccgtgtgaccgccctcgtgtcatcgagtc

SEQ ID NO: 424033 - DNA, 76 bp, Homo sapiens
gaaggagcaagtacctggtttcacaccacgcctggcaatattacaggacttctccagacaggttatgttacctgca

SEQ ID NO: 424034 - DNA, 100 bp, Homo sapiens
atgggacccatgacaaggggctgaaaatatgccggacagtcactcagccaagtccgacagctggaagaacaattaagaataatggatcagaccttgaaag

SEQ ID NO: 424035 - DNA, 100 bp, Homo sapiens
atggcggatctggaggagcagttgtctgatgaagagaaggtcgtcaaagtcctacattttagctttcagtgctgaacttccttctcccttaaattattat

SEQ ID NO: 424036 - DNA, 49 bp, Homo sapiens
ttggtaatttagcagaacttgagattagtactgaagagcagctaaggcg

SEQ ID NO: 424037 - DNA, 50 bp, Homo sapiens
ctcaattatcttcacgatttcctaaagctaacagagaccctgatgctgga

SEQ ID NO: 424038 - DNA, 97 bp, Homo sapiens
tgcagagaatatgatacagatgtattcaaatggatcttcaaaggtgatcccattaagatactaatgccatcactgtctcctacaatggaagaaggaa

SEQ ID NO: 424039 - DNA, 50 bp, Homo sapiens
ttcctggagttcacgactctgagtgctgaattcagaaggaacttgcagaa

SEQ ID NO: 424040 - DNA, 97 bp, Homo sapiens
taaagtcagaggaatagaaactttggaatctgtacccattattggtggtttttgggagactatctttggcaacagagacaccctcatttattagacc

SEQ ID NO: 424041 - DNA, 100 bp, Homo sapiens
gtgtggccaaggcctacagtgttgtgaaagagaaaacatccagtacagacctttctgatatccctgctctccctgcaaatcctattcctgttatcaagaa

SEQ ID NO: 424042 - DNA, 100 bp, Homo sapiens
tctgtggcatagttatgagctgcttgtagaatatgacttaccagcactcctggaccaagagctctttgaggtgtcggttggtggaaatatgaattctgct

SEQ ID NO: 424043 - DNA, 50 bp, Homo sapiens
ttttagaagacacttctctctcaccgatggcgggtgaaaaagttgagaag

SEQ ID NO: 424044 - DNA, 100 bp, Homo sapiens
gagattatgttgacagaggatattattcagttgaaacagttacactgcttgtagctcttaagggatatgaagattggttacggcataactcagataatga

SEQ ID NO: 424045 - DNA, 98 bp, Homo sapiens
aggaaatcatgtcaagcgaagccttgaaaaagctgccctgagacggtgtcccgccgaaagggcaggtaagccccctcccggtttacatctggatgtag

SEQ ID NO: 424046 - DNA, 129 bp, Homo sapiens
ccagaccctggagcctcagttggaagcagccgatccagcctgcggagcctgtggggcagcggacaaggcaaaatctcagcaagttcggacctctagtacaataaggcgaacctcctctttggatacaat

SEQ ID NO: 424047 - DNA, 90 bp, Homo sapiens
tgctgttcgaggatgtgtacgagctgtgcgaggtgatcggaaagataccatacttgcagagctccttcagatacataaagaacacattgt

SEQ ID NO: 424048 - DNA, 99 bp, Homo sapiens
caattatgggagggctggccaacttctgctacagacgactcactggaaccctacatggatgagaacttcatctccagagcctttgccaccatgggggag

SEQ ID NO: 424049 - DNA, 83 bp, Homo sapiens
caggaattgagagtcacagaggaaggacagtggagtctggcatcttattgacatcaaaatttacaagctcttcggatattcca

SEQ ID NO: 424050 - DNA, 74 bp, Homo sapiens
tgggcgacgagctgaccctgggagacatcgacgacctcctgccccccgaggtctgcagtctcctgaacccagca

SEQ ID NO: 424051 - DNA, 80 bp, Homo sapiens
cagccgttcagaatctcctgtatgttctagtagagacgctgtatcttctcctcaggcacgtgtggttctcaaatataggc

SEQ ID NO: 424052 - DNA, 98 bp, Homo sapiens
tcactttcgtccaggacagtatgtggatgtcacagccaaaacgtatgtcgagagtaccaacgtggcaattgcaaccgaggagaaaatgattgtcggtt

SEQ ID NO: 424053 - DNA, 75 bp, Homo sapiens
gctgggcgcggattcgccgaggcaccgaggcactcagaggagaaagtttcctacactactgaggtttaggggcac

SEQ ID NO: 424054 - DNA, 127 bp, Homo sapiens
gtgaatctgggcttatgggatacagctggacaagaagattatgacagattacgccccctatcctatccgcaaacagtcatgcagaaggcttttgtatgatgtgtacaatgcaagcacatattaccca

SEQ ID NO: 424055 - DNA, 90 bp, Homo sapiens
gcgagctgagtggttgtgtggtcgcgtctcggaaaccggtagcgcttgcagcatggcttcagtttcacattcttggtacctcctggtggt

SEQ ID NO: 424056 - DNA, 111 bp, Homo sapiens
ccgggaggaaggaacgaggcaaggagctaaagcagcgtgcgttcagccctgggggtttccaggcctgaggtgcccgccctggccccaggagaatgaaccagccgcagagga

SEQ ID NO: 424057 - DNA, 100 bp, Homo sapiens
gccacggtataataaaaatattcaatgcactgcaagaaacaagagccaacaagcatctgttatatggaagtatggccacggctgcattaccggaaagcgg

SEQ ID NO: 424058 - DNA, 75 bp, Homo sapiens
gccttgctgctgctcaaagctgctgccgccccttgggctaaaagtaagactttgaccccgacgcaggcttcagtg

SEQ ID NO: 424059 - DNA, 76 bp, Homo sapiens
gtcacctgatggaagcaaaatagcagctggctcagccgacaggggacagtcaaaacttcacaggggggaaatcaag

SEQ ID NO: 424060 - DNA, 75 bp, Homo sapiens
cctccaaggaagccacgtgcagacatctacaaccttcgatctcctgacgaatggaattaaattcacctgtctcgg

SEQ ID NO: 424061 - DNA, 75 bp, Homo sapiens
ctcagaggacgccttcaacaccaccttcatctccaccatcggtagctcagtggcatttctgagcaggggccaccc

SEQ ID NO: 424062 - DNA, 75 bp, Homo sapiens
gagccggccggggcttcctccccggccggcagggtggacggtgggctcgtgtgtgccctcttcctgattctggag

SEQ ID NO: 424063 - DNA, 90 bp, Homo sapiens
tatggcacacacagtgggacctagacaaagggagagggtgaccgacatcccaactaggtgttcagtgaatgcgactcctcagcagatgcc

SEQ ID NO: 424064 - DNA, 85 bp, Homo sapiens
ctcactgaacatggcaatgtgaagctcttagaacaagctctggtgattgaggaacagctgcgccgggctgcttacttgaacatgt

SEQ ID NO: 424065 - DNA, 98 bp, Homo sapiens
tcaactctgggaatcaaccaagcaacagagaaaaaaacagataccgagatattcttccattgttattaaggaaaagcgggatgcctatgtgagccgcc

SEQ ID NO: 424066 - DNA, 97 bp, Homo sapiens
cagttggagttggaatttgtgcaatgtttagccaacccaaattaccttaattgttaaagtattgcacaatcagctggtccttttccacaatgccatt

SEQ ID NO: 424067 - DNA, 76 bp, Homo sapiens
tacatcagcttgtaggagacagaggacccagagttcaacaatacagatcagattgacctgtatgatgatgtgctga

SEQ ID NO: 424068 - DNA, 98 bp, Homo sapiens
agaaaaaaagtaaaagaaaactcagctgtgcgagtccttctggaagagcaaggttccttcaatggtgccttagctgctgttcctgtccaggacctggg

SEQ ID NO: 424069 - DNA, 100 bp, Homo sapiens
agagacaatgtcatgtgattcagcctaatatctcaaagctgttgtgaaggcagagcagcatctgctgaagagacagaaaccagccccagaggtgtcacag

SEQ ID NO: 424070 - DNA, 101 bp, Homo sapiens
acaaattctggtgggagaacaaagctgaggtccagatgaaagagaagtttctggtcactccccaggattatgcgcggctggagtgcaatggcgcgatctcg

SEQ ID NO: 424071 - DNA, 74 bp, Homo sapiens
tatctgagggagaagcacaagatcatgcacagaggtacaggtttgcagattccgccagcagcacagcaagctct

SEQ ID NO: 424072 - DNA, 83 bp, Homo sapiens
gactctggctacaccccgatggaccttgccgtggccctgggataccggaaagctcatcaccccacgtcacaacatggagacct

SEQ ID NO: 424073 - DNA, 75 bp, Homo sapiens
tcccgcacgcaatctgcctcggagacgttgataacgatacgaaaaatggctacaaacttcctagcacatgagaag

SEQ ID NO: 424074 - DNA, 96 bp, Homo sapiens
cggacatgatcctcatcttttatacactcttagtgctgtccagggtttagatgtagattctctggtcattgagcatatccaagtgaacaaagcacc

SEQ ID NO: 424075 - DNA, 83 bp, Homo sapiens
ccgcagccttgggcctcgcgccggctatggccgtgccctggggctgagccctcagatcaatgtccgagttaccaccatggatg

SEQ ID NO: 424076 - DNA, 74 bp, Homo sapiens
ttttccttctctccgtgcaacgctggcaagtctcaaagtcgccacagctgctggagccagttctgcttctcggc

SEQ ID NO: 424077 - DNA, 75 bp, Homo sapiens
ctgcaagagcaacatctttcctcaccccaaggtgtcaagttacatcaaagagcaaactcaagaccagtttcagat

SEQ ID NO: 424078 - DNA, 101 bp, Homo sapiens
aaaaaacttcagcatgtgccaggaacacaacctcaccttgatcagatggcccactgcgtgaccttggttcagctgtccatttcctgtgaccatctcattga

SEQ ID NO: 424079 - DNA, 50 bp, Homo sapiens
ttacccacttcgagtcctttattgtggagaggcggacatctaaccatggt

SEQ ID NO: 424080 - DNA, 100 bp, Homo sapiens
atcaagccaaactttgtgattcaggagaactggtcgccatcaagaaagtattgcaggacaagagatttaagtagccggatcgagctgggagatgtgacac

SEQ ID NO: 424081 - DNA, 98 bp, Homo sapiens
gtgggattaaaagcagcgaacctcgagaccaacgtggaggagctgtgggtggaaggttatcaatactctggctgaccatcatcatcgtgggactgact

SEQ ID NO: 424082 - DNA, 82 bp, Homo sapiens
gaagaccgcgcgcagggcctgcagcgggagctggacggcgagcgcgagcggcgcgagaaaatgatgccaggaaagaccaaag

SEQ ID NO: 424083 - DNA, 96 bp, Homo sapiens
tcggaatttgtcttcttcagtggaaaccccgagaagactgatcagttcttcagttctaaaacaatggcccagtgggctcgggatgagtttgaaggc

SEQ ID NO: 424084 - DNA, 100 bp, Homo sapiens
gccaccattgctgaacggagaggtagccatgatgccccacttggtgaatggagatgcagctcagcagtattctaccttgtaaatactgttatttgtatat

SEQ ID NO: 424085 - DNA, 100 bp, Homo sapiens
ccgcagggttcggatgagaccagctgttcgctgatgtggtcctgctctgtcccagtctagcagctttagtgtatggaaaaattgaactaggaattgagtt

SEQ ID NO: 424086 - DNA, 75 bp, Homo sapiens
gttccattgtgtgccaggtgtttccatgaaaataaactgttgagtgccagtgacgggtcagtcttacgagaatat

SEQ ID NO: 424087 - DNA, 75 bp, Homo sapiens
gctggactccgaggtctacaacatgcccctggagagccaggtgggaatggaagtggccccacatctcaaagaaac

SEQ ID NO: 424088 - DNA, 100 bp, Homo sapiens
gccccgctcggtcctccacctgtccgctacgctcgccggggctgcggccgcccgaggaaaaccaattctgtgtcctcggaggaccacagcccagttgggc

SEQ ID NO: 424089 - DNA, 101 bp, Homo sapiens
atcctgcagatgacccggcctgtggtggaggggtccctgggcagccctccatttgagaaacctaatattgagcagggtttcagaagctgccagaggaggag

SEQ ID NO: 424090 - DNA, 98 bp, Homo sapiens
ttgaaaattctggagtccaaagaaaagaatacacagggacccaggatgccgcgaactgctaagaagattgctcgctgtaagcagctcatctgtgaccc

SEQ ID NO: 424091 - DNA, 100 bp, Homo sapiens
gcctcctgagaagctgggactacagtgtgttggcatgcatcagcccagaagcagtgatctctggattaaactgcatgtcatttgctaatgttggcatgag

SEQ ID NO: 424092 - DNA, 73 bp, Homo sapiens
ggaaaactagcatcaaaattcccagcaacagatacaatgaggctactgcagcactggggtgtcagttgttggt

SEQ ID NO: 424093 - DNA, 75 bp, Homo sapiens
ggcgactgggggctgaagagcgcgccgccctctcgtcccactttccaggtttggtgcacctcgatttggaggaag

SEQ ID NO: 424094 - DNA, 106 bp, Homo sapiens
agaaggatatcgacgtcgtgatccagaagtccagagctgaggactgcctgtttgcagcagcccctgtcaaagggaacaggaagcagtccacggagggtgacgccct

SEQ ID NO: 424095 - DNA, 82 bp, Homo sapiens
ctgaaggaggaggacaaagagcccctcatcgagctcttcgtcaaggaaggatttttactgggagaggtaagacaagaggaaa

SEQ ID NO: 424096 - DNA, 100 bp, Homo sapiens
gaaagatgcatcagatctgtgtccttcaccatgagatcatctggcctgctgggtggagggagcaaagtcctgcacactggagtggtgtactagcggatca

SEQ ID NO: 424097 - DNA, 90 bp, Homo sapiens
ctcttcgcagtgttttatacctttggtaatatcgcatcaattgggagaatgtgagcatttgatccgccatatgttggtgttagatcccaa

SEQ ID NO: 424098 - DNA, 83 bp, Homo sapiens
catagcagtggaatcaatgtaaatgcagctccattccaatccatgcaaacggtgaaagcaaacctcgagaaggcaaagcagac

SEQ ID NO: 424099 - DNA, 95 bp, Homo sapiens
cagagggcttttactcctacctgtgtaccgagccagattttgtggaagtataatactttgtcattatgagatgtcgtctctcggtgcctcctttg

SEQ ID NO: 424100 - DNA, 82 bp, Homo sapiens
gggaccaaggtggaaatcaaacaacccagtgacttgattgtaaaaatttacagagcggaatcatatgctggtctccaagagt

SEQ ID NO: 424101 - DNA, 50 bp, Homo sapiens
tcaatctgaactacaaagatttgaacgaaaatcaggaaaatgtttccaac

SEQ ID NO: 424102 - DNA, 75 bp, Homo sapiens
tcgctgcggagccggaggaggaggggagaggcctggaggacaccaacatggatgtacagttacccagcacgtgta

SEQ ID NO: 424103 - DNA, 75 bp, Homo sapiens
atgggagaagaggaatgttccctgacaatttcgttaaggtgggccatgcacagacacagctcatgtctcattaat

SEQ ID NO: 424104 - DNA, 80 bp, Homo sapiens
cgtggacaaagctgttgtctcagggagcacagaagtttggaattacaagcttcggcgctgtcttttcacattgcttgggc

SEQ ID NO: 424105 - DNA, 100 bp, Homo sapiens
taaaaagggagcacttaaggaagagtcatagagctgtatatattggtgttcacgtcccgtttagtaaagagagtcgtcggcgtcataggcatcgcggaca

SEQ ID NO: 424106 - DNA, 75 bp, Homo sapiens
gtcactgcctgcgcagctccggccgcctggctccccatactagtcgccggcatcagaagttgagagacaactctc

SEQ ID NO: 424107 - DNA, 100 bp, Homo sapiens
catgttggcccagcaaatgcaactagccaatgccatgatgcctggtgccccattacaacccgtggccatttcataattctgaatcatgtctgataacgga

SEQ ID NO: 424108 - DNA, 100 bp, Homo sapiens
ctagaaggaaaatcacagaggtaaagcatcatttcatcacatcctgtcaagggcaggtccgatcagaaaacaaagaaaagagtgcagtgatgtcatttac

SEQ ID NO: 424109 - DNA, 100 bp, Homo sapiens
ccaccgtggaaggacagaatgcatggtggggagttatatttcagtgacgtctatacgagccttgaactgccagaagaaatcaggacacacaaagttttat

SEQ ID NO: 424110 - DNA, 82 bp, Homo sapiens
ctcggcaggagcggagagtttgctccaccaggccaggtaaattcgaaccaccattatttcacccgaatgtgtacccttcggg

SEQ ID NO: 424111 - DNA, 49 bp, Homo sapiens
cgcctcttcctcgggcttcgtggcggaagctcctcagggtgctcccact

SEQ ID NO: 424112 - DNA, 100 bp, Homo sapiens
gctgccggaaggggtcccgaagccccctgcaggaactctacaacccaatccagagtgacagaaggaagtcaaggcaccattatgactcggatgagaaatc

SEQ ID NO: 424113 - DNA, 75 bp, Homo sapiens
gtctttgaagggctgggtaatgttgcatctgtggagctaaaaaaaggattatagcagtctttgtgacaagcaacc

SEQ ID NO: 424114 - DNA, 100 bp, Homo sapiens
gacaagtacaagttagaactctttatctttctgtggatccttacatgtgtggagcgttatgatccaagtaaggactcctgggagatggttgcatccatgg

SEQ ID NO: 424115 - DNA, 80 bp, Homo sapiens
aagcagatcaaagttgttttgaggttttcctttggaatatggataaatacaccatgatacggaaactagaaggacatcac

SEQ ID NO: 424116 - DNA, 99 bp, Homo sapiens
tcccccgcctcagccccatccgtgtcatacctgccggggactggttgacagctttaacaaggtcatcgccaccatcccgaccagcagactcaagttcct

SEQ ID NO: 424117 - DNA, 74 bp, Homo sapiens
ttctgctgaacatcatcgaacggctccttcagcagctccaggcgaggaggaggtgactgctgtggatggttatg

SEQ ID NO: 424118 - DNA, 89 bp, Homo sapiens
tcacaaccttcaagaaattcggaaatctcctgcaaagaagctgagccatgcaattagtaaatctttggggtgtgtacccacgagagaac

SEQ ID NO: 424119 - DNA, 82 bp, Homo sapiens
ccttggtgaacttagctgttctttatagccaaatggtagggtgcagcctgaggcttgttcagcagaacaggtgcaagccaca

SEQ ID NO: 424120 - DNA, 100 bp, Homo sapiens
aagctccagagcctgccggaaggctccctcggtcgcgagtatctccgtttcctggatgtgaacgtgaaatgacaatggatgctctgttggctcgattgaa

SEQ ID NO: 424121 - DNA, 100 bp, Homo sapiens
cagattgtcttggaagttccaaagttgcaacgatttcttctgcgctcctcagaccaccggcaggtgaacagcctgatgcagaccgaggagtgcccaccta

SEQ ID NO: 424122 - DNA, 98 bp, Homo sapiens
gcagcatctacaaccctgaagtgcttgatatcacagaggaaactctgcattctcgcttcctggaggtggttgtgtcaaaccgattggtgacatctcca

SEQ ID NO: 424123 - DNA, 95 bp, Homo sapiens
gccgcatggagccccgggcggcggacggctgcttcctgggcgacgtgggtagtaagcattaataatgtctttcatctttgagtggatctacaatg

SEQ ID NO: 424124 - DNA, 75 bp, Homo sapiens
ctggtctctcccaccacacagaggtcctggctataagtcaccatggcacagcaagctgccgataagtatctctat

SEQ ID NO: 424125 - DNA, 98 bp, Homo sapiens
agaattttaagaagattcattttatcaagaacatgcggcaacacgataccaggaatggcagagccgctcccgaggccccggcgcggcgcgagggcgcg

SEQ ID NO: 424126 - DNA, 89 bp, Homo sapiens
ggctcgcccgcggaggagccgcctgcgcatgctccatcgcctggttcataattggacccttgaagacactcttcagtggttgatagagt

SEQ ID NO: 424127 - DNA, 131 bp, Homo sapiens
ctgaattcctgcagctcagcagccgccgccagagcaggacgaaccgccaatcgcaaggcacctctgagaacttcaggcgaggattaaatccaccacacagggtgaaatctatctccatgacaacattcaca

SEQ ID NO: 424128 - DNA, 75 bp, Homo sapiens
atgcacttgctattatgggggaaagcaaggaactagaacagtctttggctagctggactcagaacttgaaagaac

SEQ ID NO: 424129 - DNA, 100 bp, Homo sapiens
gtgatcttggcctgcaggaacatggcaagggcgagtgaagcagtgtcacgcattttagaagaatgggttttagctgaattttgggacatggccactgctt

SEQ ID NO: 424130 - DNA, 75 bp, Homo sapiens
ttttttgcaggggaaaacatccagtgtggtggaaatggtgtgatccctcacatccacaaatctctgattggaaag

SEQ ID NO: 424131 - DNA, 75 bp, Homo sapiens
ctgcgggcagctgtgatgtaccctcgcccttcaaccatcgaccagggatcaagcatgaattgcaagcaaactgct

SEQ ID NO: 424132 - DNA, 50 bp, Homo sapiens
ggacgctgctgcagcacctgcgccagctttaaggaagcctcctatttcag

SEQ ID NO: 424133 - DNA, 82 bp, Homo sapiens
ctgcagcatgtcctcctgcatctcctcctgctccccatcgccatcccctatgcagcggatgcagtggtgcagtatgacgtgg

SEQ ID NO: 424134 - DNA, 83 bp, Homo sapiens
gttcacgcacgggatccagagcgccgcgcacttcgtcatgttcttcgcgccctggtgatgtgtccaatctagatcccaacttc

SEQ ID NO: 424135 - DNA, 83 bp, Homo sapiens
cggcggcgctttcggcgcgggcccgggccccgagcgcccgaacagaggctgtgatcaatagccaggaatggactttgagccgc

SEQ ID NO: 424136 - DNA, 96 bp, Homo sapiens
ctatggcagatttgaaaattcacccttgtagagtcattcctgcctttgagcggactcccttttaaggttatgatgtgattgctcaagcccaatctg

SEQ ID NO: 424137 - DNA, 97 bp, Homo sapiens
attctcaggccacgatgaaagtggccgtcaagatgcttaaatcaaaccagtccagctacgggggcccagccagccagcagctgagtgggggttacgg

SEQ ID NO: 424138 - DNA, 75 bp, Homo sapiens
gtgttggaccttccggagcttctcagaagacagagggttttcttttgaggaatactcccccagttgcaagaggcg

SEQ ID NO: 424139 - DNA, 102 bp, Homo sapiens
tttgcacaacaaaatgtttgagtcaattctgaaagctccggtattattctttgatagaaatccaataggtgtcatggagaaactccagctgggcccagagat

SEQ ID NO: 424140 - DNA, 82 bp, Homo sapiens
ccgatgtctgcgggaataggacctatggcgtggtggcccagtactaccggcccctgcatattacaccaccaccttcactgtc

SEQ ID NO: 424141 - DNA, 97 bp, Homo sapiens
gtgtgcaactgaagcctgaggtctccccaacgcaggacatcaggtttttgtggaaactctggataagtgtttcgaaaatgtgtgtgaattggatttg

SEQ ID NO: 424142 - DNA, 82 bp, Homo sapiens
tggacatgagtgaccggggcatctccaacatgctggatgtcaacggcctctggatcagtgtcgtttagggatgtgactgtgg

SEQ ID NO: 424143 - DNA, 80 bp, Homo sapiens
gcctccctgccccagcccatcctctctaaccaaggtctgagcagagggcggggtgcaggcggaatggccctcgtgcccta

SEQ ID NO: 424144 - DNA, 101 bp, Homo sapiens
agcccaagtgcacctacgtcatccgagtgaatgcagtaaaccccacagtggtgatgacgtccatgggccaggccacctggagtgacccccacaaggccaag

SEQ ID NO: 424145 - DNA, 75 bp, Homo sapiens
ttttcaaatctcactggtctatttcccagtgggtttctaaaccaagttgagttgctatcacattttggatcagag

SEQ ID NO: 424146 - DNA, 90 bp, Homo sapiens
tacacctgacccagagcctacccatgaagtatcctggtgtgaaccagctatcctccagtataggaggattgagtcttcagagttctccac

SEQ ID NO: 424147 - DNA, 73 bp, Homo sapiens
agagacctcacccgctttgtgaaatggccccgctatatcaggtatgcgagaccacccacccatccccatcacc

SEQ ID NO: 424148 - DNA, 75 bp, Homo sapiens
tgggacaggcttttgctttgattccagcaattaccagctctggctgggtcgccacaacttgtttgacgacgaaaa

SEQ ID NO: 424149 - DNA, 74 bp, Homo sapiens
gcttactgcaacctagccaatgctctcaaagagaagggcagtatctcaggaaacaggctcgacagctggaaaat

SEQ ID NO: 424150 - DNA, 100 bp, Homo sapiens
agaatgaagccgcggaccctcgcggaccaggaccagggtgaggcaaacaaggtccctacgggcacagaatttaagaaggcactcactcttgatgaaactg

SEQ ID NO: 424151 - DNA, 82 bp, Homo sapiens
gccgccgctcaccgcagccccctcctggcgacccgcaactattgacctgaaaagtggttctggaaaagtgtaccaaggccct

SEQ ID NO: 424152 - DNA, 50 bp, Homo sapiens
aaattcaagagtgaccagggatggttcggggtgagggcactggcgtgctg

SEQ ID NO: 424153 - DNA, 74 bp, Homo sapiens
accccaggggctgagcttttgaagaaaatctcctcagagtctgtgaaaggaaagcaagccaggatggatattta

SEQ ID NO: 424154 - DNA, 75 bp, Homo sapiens
tagtaagcttcgaaatttgctacatgacaatgagctgtcaggaggagatgttaaagtaacccatcttgcaggacg

SEQ ID NO: 424155 - DNA, 80 bp, Homo sapiens
ctggcacaacagctcacttttcttccaaggataagttgcaagaggcacaagaatagccgcccagtgactgccaagtgagt

SEQ ID NO: 424156 - DNA, 82 bp, Homo sapiens
ttccatggacatgttccacacgcgcttcaagcaggagggtgtcctgaacagcaaggtaactaggatttctacctcaaccgcg

SEQ ID NO: 424157 - DNA, 74 bp, Homo sapiens
ggctagaagaatcagacgtgctccaggaggccagaaggaaatacgtttgtccagaggggttgcgtttatccggt

SEQ ID NO: 424158 - DNA, 75 bp, Homo sapiens
gggctcgaggctggcagccggcgccaagcccgcagccgagagggtgacctctctgggcaaggactggcatcggcc

SEQ ID NO: 424159 - DNA, 75 bp, Homo sapiens
gccgcatcttcttttgcgtcgccagcctgccaggagtgaagaaagctttgggcaaatatggtcctgccgatgtgg

SEQ ID NO: 424160 - DNA, 98 bp, Homo sapiens
ctttcaagtacggaaataacaaattcagtctcaacagacctatagtgaatgaggttgaagctccattcataccaaagtttagaggctctggagatacc

SEQ ID NO: 424161 - DNA, 100 bp, Homo sapiens
gttctcctgcttgccatcaatggagtgacagagtgtttcacatttgctgccatgagcaaagaggaggtcgacagatggagagaccagagaagagaacaag

SEQ ID NO: 424162 - DNA, 82 bp, Homo sapiens
cgcagcagtctccttcctgcgcgcgcgcctgaagtcggcgtgggcgtttgaggaagctgggaaccctcagtgctgcgtctag

SEQ ID NO: 424163 - DNA, 74 bp, Homo sapiens
agtttatactatcagaccttattttcctaaggatgagtcggaattgagatgggcgattggcaggaagtctggga

SEQ ID NO: 424164 - DNA, 98 bp, Homo sapiens
aatctaacaaacggcaaagaacttactgattcttgagggagtgaccttcacaatggcatcataggattcagtgaggagtcccagagtggactagaact

SEQ ID NO: 424165 - DNA, 90 bp, Homo sapiens
aaagagccaaatcttaccttctggaccatgcaagggcaagtattttgtaaccttcccatatccatatatgaatggacgccttcatttggg

SEQ ID NO: 424166 - DNA, 50 bp, Homo sapiens
gccaggtgtccatccccgtgctgagatgccactgccgccaggagccctgt

SEQ ID NO: 424167 - DNA, 96 bp, Homo sapiens
ctaacatcaactggattttataaatgtcttagggtcagtatagaccttctgatttgctgtgccctgagacatatgtttgggtacccattgagcaat

SEQ ID NO: 424168 - DNA, 100 bp, Homo sapiens
agcttttggcagcatgaaagttagcatgtaaacaggaacatcgataagtagtgtaaaaacttgcacaatgaaatccgaagccaaggatggagaggaggag

SEQ ID NO: 424169 - DNA, 89 bp, Homo sapiens
tgcggggtcaggggccgagcggagagggatttgggaatggatgatgaaggagatgatgacccagttcctctaccaaatgtgaatgcagc

SEQ ID NO: 424170 - DNA, 100 bp, Homo sapiens
taaagggatccccgtggatgacactgacaggtttctgctttgggacaaccatacatctaattccttaaagtagttttatatgtaaaacttgcaaagaatc

SEQ ID NO: 424171 - DNA, 101 bp, Homo sapiens
cggagtcggcgagcccccgcggcgacaggtatacccgaaatcttgtggatcaaggaaatggaaaatttaatctgatgattctctgttggggtgaaggacat

SEQ ID NO: 424172 - DNA, 99 bp, Homo sapiens
ttgccatgctgctgctgagctgatcaaggaagtctctctagagtttatgtggccgaggcagacaagtggaattaggccttgctgcaggggacttcattt

SEQ ID NO: 424173 - DNA, 100 bp, Homo sapiens
cttgaagacacttggctcccttatctgacccccaaagatgatgaattctatcagcagcctggcttgctcctcaggctcccaggaacctgcctcaaaacac

SEQ ID NO: 424174 - DNA, 80 bp, Homo sapiens
gagctgaatgggggtcggggtcatgcgtcacggcgaccagaccgacaggttttttattggcacctcagtctcaacatttt

SEQ ID NO: 424175 - DNA, 90 bp, Homo sapiens
aggaggtatgcctggactgggccagggtactagatggaaacttgagaaaggactgcttattgataacagctaaggtattcctggaagcag

SEQ ID NO: 424176 - DNA, 100 bp, Homo sapiens
gagttgcatcagcaagtttgcaagtgaaggctgtttttcttcaaataaagaacatggtgaaactgattcacacattagctgatcatggtgacgatgtcaa

SEQ ID NO: 424177 - DNA, 124 bp, Homo sapiens
tccgccccgcgagcacagagcctcgcctttgccgatccgccgcccgtccacacccgccgccaggtgagaagccctaccactgcaactgggacggctgcggctggaagtttgcgcgctcagacga

SEQ ID NO: 424178 - DNA, 100 bp, Homo sapiens
gtagcagctggctgtattcctctgaccttggagcagaaagaccatgggtttgaggtggcctccacttcccctgaagacgagtcccctggcagtaaccccg

SEQ ID NO: 424179 - DNA, 100 bp, Homo sapiens
gcgcgtcgagcttgcgctctttgctgccgccttcctgtgcggggccgtggcggccgcggcgatgactcggacccagttaagtgggcagaccaacatccac

SEQ ID NO: 424180 - DNA, 48 bp, Homo sapiens
acaagcaccccaataacctcaagccttgaaaagatcttttgaggtcga

SEQ ID NO: 424181 - DNA, 75 bp, Homo sapiens
ggcagcggcggcccaggccagcattcccgcagagtacgagagggcctccaaagtggaccagtttgtgacgcgctt

SEQ ID NO: 424182 - DNA, 100 bp, Homo sapiens
cttgacctacaaggaatctgagggtgccctcaatgagcacatgaccagcttagcttctgtcctaaaggctcaggccacagggtcaccacatacatcgccc

SEQ ID NO: 424183 - DNA, 88 bp, Homo sapiens
tggaatctttggatggcttacatcttcctgaatcgagcagagaaacttcaagttcatccgagaagtaacaccatatatcaagaagcca

SEQ ID NO: 424184 - DNA, 75 bp, Homo sapiens
ctggctccgtgaaccttagggacaacaccgggacacccgcgaggccggaaaatgcaggggaaatgctgtctgtag

SEQ ID NO: 424185 - DNA, 98 bp, Homo sapiens
atttgcaactatggatttgtagggaacgggaggactcagtgtgttgaataactgaagtgaagtgatggactccgatttggagagtagtaagacgtgaa

SEQ ID NO: 424186 - DNA, 75 bp, Homo sapiens
tcatcctttacgagcacggcctcttgcgctacgccctggatgagatgacccaacatgagtgaagtttcctgcaag

SEQ ID NO: 424187 - DNA, 75 bp, Homo sapiens
ttcaagaaaatgtaaacaagtatcagcaagtgaggtacttggaaggctccatcgcccctgaagacaaaggaagct

SEQ ID NO: 424188 - DNA, 76 bp, Homo sapiens
attactgccccttcactcctttctaaagacttaattcagtgcacaaatgagatgaatgtgaacatcccacagttgg

SEQ ID NO: 424189 - DNA, 50 bp, Homo sapiens
cggcggcgagcggttccttgtgggctagacctgcctagagctggaacgtt

SEQ ID NO: 424190 - DNA, 83 bp, Homo sapiens
agtcgcccgcctcgagccagcccgccagcatgccccagtccaaaggagatcccccgagacctcacgctggatgccctgctgga

SEQ ID NO: 424191 - DNA, 75 bp, Homo sapiens
tggaaagcctccagcaagaggcctgcaaactccaccaagagaaggagatgatttttttcccaggaagccatcccg

SEQ ID NO: 424192 - DNA, 100 bp, Homo sapiens
aagcagcacgaaagagagaggtccgtctaatgaagaacaggttttttgcatgtctgacacccatgactccacctggaccttatggctccacccagaagca

SEQ ID NO: 424193 - DNA, 75 bp, Homo sapiens
atgggaagatgttcaatgcactcattcaccgataccggcgagcaattcgaactgcatttaaaaacagaaagcggg

SEQ ID NO: 424194 - DNA, 100 bp, Homo sapiens
gtactcggagacagcgactgcgattgcttacgagcagcacgggttctttgagcagtatgccaagtacatggaaaaccatagcattgaaggagtgaggcat

SEQ ID NO: 424195 - DNA, 82 bp, Homo sapiens
agccaatcgcatggagccgctgtggacaggccgccatggcatcagatgaaggcaaactttttgttggagggctgagttttga

SEQ ID NO: 424196 - DNA, 83 bp, Homo sapiens
cggctagacaagctggatggcaggaaacgggcttgcttccggcgtcatggctcaaagggccttcccgaatccttatgctgatt

SEQ ID NO: 424197 - DNA, 50 bp, Homo sapiens
ggaacttttgccttagcaaatgagttgcaggaccagctctgccccctaat

SEQ ID NO: 424198 - DNA, 75 bp, Homo sapiens
acagaaacaaaatgtcaacaaattgatgggaggtatctttaaaatagcttcctgggcagatctagtaaatgctca

SEQ ID NO: 424199 - DNA, 75 bp, Homo sapiens
tgaggcggacacgttgaggccacctcagctgatggaagtttccgcagtgaacagtcagcccgggcaaggactcag

SEQ ID NO: 424200 - DNA, 98 bp, Homo sapiens
cagagtataatcaagcgatttatatattatgggggcaacaccctccactaaagagtcaagccagccggacgcattctcatctggtgggggaagcaaac

SEQ ID NO: 424201 - DNA, 100 bp, Homo sapiens
ccggccctcaccgccctcaccacccctatccagacggctgcccttcaagtaccaggttcatgctcatcgggagtgacgttaagctgaacagcccctcatc

SEQ ID NO: 424202 - DNA, 75 bp, Homo sapiens
aagcgctctaagaatcaagaaaatggaccagtttgttcgttacgagagtggcagacgaaatgttgatttggattt

SEQ ID NO: 424203 - DNA, 75 bp, Homo sapiens
aagcccgtggaacaattcatcttaccagagactatgtcttcagcagtggtgcagttatatgcagcagatcggaac

SEQ ID NO: 424204 - DNA, 83 bp, Homo sapiens
cctattgattcatcagattttgcattggatattcgcatgcctggggttacacctaaacagaactcccccactggaaaggattc

SEQ ID NO: 424205 - DNA, 78 bp, Homo sapiens
tcaccgacaagatcaccacggacgagatgatcaaacgcctgaaggtacgcatagctgctaaattcatcactcatgcac

SEQ ID NO: 424206 - DNA, 83 bp, Homo sapiens
cggggcggcgaggcgcgaggagctaggggatgttcgtctaaccccagaagactttgctagagctcagaagtactgcaaatatg

SEQ ID NO: 424207 - DNA, 74 bp, Homo sapiens
aactttaaattcatccttcagagaagctcgagaagagctttgacagatccaaatgcttctgctgcccagcaggc

SEQ ID NO: 424208 - DNA, 100 bp, Homo sapiens
aaatacgtggttggagagctcatctggaattttgccgatttcatgactaaccagtccaccctgaagggtcccttcccaagcccttagggaccgcagagga

SEQ ID NO: 424209 - DNA, 100 bp, Homo sapiens
gtatgaacttttcacatacattgagaagagtaaaagtccaccagcgcctagtgtgttaattgtaacctacaaggagcctgcaaaatcatctactcagttt

SEQ ID NO: 424210 - DNA, 100 bp, Homo sapiens
gcgatgtcggtggccgggctgaagaagcagttccacaaagccagccagtgatgcagaagaccacaagcctttgaaaaaaggaagtcgaactccttcagac

SEQ ID NO: 424211 - DNA, 100 bp, Homo sapiens
gagttctacaacctggtgcgcttccggatcgggggcaagcggaaggtgatgcccaagatggaccaggataaaagaatcagagtgtctcaacccttgacaa

SEQ ID NO: 424212 - DNA, 90 bp, Homo sapiens
caaaagtttataccaagtcttctcatttaaaagctcacctgaggactcacactggtatgtggaggggacaagccttacattgcaccttca

SEQ ID NO: 424213 - DNA, 75 bp, Homo sapiens
attagtgcctacctcatcatggaacatctcaagtgaactcaacaaagatcctgttcatcttcatcgacagcgacc

SEQ ID NO: 424214 - DNA, 75 bp, Homo sapiens
ttagtctacttgctgacacaaagctggatctacatttaaagtatgaatcaaatgcaacaggaaaaagagctaaca

SEQ ID NO: 424215 - DNA, 138 bp, Homo sapiens
ctttcagctggtcagcctcattctcaaggaccctgtgcgctggccctcaaccatcagtccctgctttaagggggaagacgttttcatcccgctaatcttgggaataagaggaggaagcggctggcaactgaaggctgg

SEQ ID NO: 424216 - DNA, 100 bp, Homo sapiens
cgccgagagccgactaccctccgggcccagtctgtctgtccgtggtggatctaagctctaagcgaaagacatgaggcctcagcctgaaatgaggttgttt

SEQ ID NO: 424217 - DNA, 106 bp, Homo sapiens
ggcggacggttttcgtacgggcggccgtgcgcgaggcgaggcctccggtgtggctgtctctgatggtgtcatcaaggtgttcaacgacatgaaggtgcgtaagtct

SEQ ID NO: 424218 - DNA, 100 bp, Homo sapiens
agagctaaagcttgatgacattgaagagtttgagaacattcgaaaggacctggaggatgccttccgtgccttccatcaagatctcaattttgtgcgcaag

SEQ ID NO: 424219 - DNA, 52 bp, Homo sapiens
gaccactttagaaactcaattaaataggaatgatgtcacaggtggaagaaga

SEQ ID NO: 424220 - DNA, 100 bp, Homo sapiens
ctctcgccacagcggcctcggcctccccttggattcagacgccgattcgcccaggtgtcatggagaaactccagctgggcccagagattctgcagcggga

SEQ ID NO: 424221 - DNA, 75 bp, Homo sapiens
cgagggggccaaggcttcctccggggtgctggagaatctggtaaaagcaccattgtgaagcagatgaggatcctg

SEQ ID NO: 424222 - DNA, 50 bp, Homo sapiens
gtgagcgctgagcccttggcagatgccttcaattaagttgcagagttctg

SEQ ID NO: 424223 - DNA, 100 bp, Homo sapiens
tttggacaaggtcgagatagaagctcgcttttagatgataccactgtgacattgtcgttatgccagctaagaaatactggggcagcacctactccgtgtc

SEQ ID NO: 424224 - DNA, 50 bp, Homo sapiens
cggatctcaccgccgctcagggaaacccttttccaaagagaaatgaagaa

SEQ ID NO: 424225 - DNA, 101 bp, Homo sapiens
tggatgtcagtgccaattttgccggtcacactggggtccccaaagaggtcaaggtatggaacctggctaactgcaagctgaagaccaaccacattggccac

SEQ ID NO: 424226 - DNA, 101 bp, Homo sapiens
gactatggcaacaagtacaagcggcgggtgccccgggtcaaaatgcagatcttcgtgaaaacccttaccggcaagaccatcacccttgaggtggagcccag

SEQ ID NO: 424227 - DNA, 74 bp, Homo sapiens
tgtgggtactgcattcctaccggtgtgacagcttctccaggcagccaccaactaccacaacgggcacacaggcc

SEQ ID NO: 424228 - DNA, 88 bp, Homo sapiens
ggccagggaaccctggtcaccgtctcctcagacctgcctagagctggaacgttacctccagagcgagccctgctatgtttcagcctca

SEQ ID NO: 424229 - DNA, 82 bp, Homo sapiens
cttggaatgaatccttctagagacgtccacgtgtactaatggtcacttgatgtgcgctggctgttttatccacctactagca

SEQ ID NO: 424230 - DNA, 75 bp, Homo sapiens
tcagacaactacaggcctgctctctggttccagccaccagtgaagactataagctcctggaaaatatgaataaac

SEQ ID NO: 424231 - DNA, 51 bp, Homo sapiens
tcttcttcactgcctctggcatggatgagccttacgaaggatgaatccaaa

SEQ ID NO: 424232 - DNA, 94 bp, Homo sapiens
tctggtcttcacttttttgaggcaggaaggtgttgggctggatcttgatagcagttgttatcatcattcttctgatttttacatctgtcacccg

SEQ ID NO: 424233 - DNA, 82 bp, Homo sapiens
ttgctgcgggggattgtgggagtctccgcgtcccgctcgctgggagagaggaaaaccaattctgtgtcctcggaggaccaca

SEQ ID NO: 424234 - DNA, 100 bp, Homo sapiens
tggagtcgcccgcctcgagccagcccgccagcatgccccagtccaaaggttattcagcttctcaaggctggaaaagcgaaggaagtttcctacaatgcac

SEQ ID NO: 424235 - DNA, 134 bp, Homo sapiens
gtgttctgctctcagctgaggagtttcagaagctcttcaacgagcttgacagaagtgtggttaaagagtacgtcatgtccattgacagcctccagctgggctatgcggaggatgggcactgcaaaggcgacatc

SEQ ID NO: 424236 - DNA, 95 bp, Homo sapiens
cagaatctgccggatggtgctggccacttgcttgggatcctttatcctggtcatcttctatttccaaagtcgccactgggacactgtgaaccagg

SEQ ID NO: 424237 - DNA, 80 bp, Homo sapiens
gtccatcggcatacggagacagcgtcgtctcggagatgcagccaagaaagccatcagtaaattgacaaccaggacagtaa

SEQ ID NO: 424238 - DNA, 100 bp, Homo sapiens
aattgttgtgacttcactaataaagatgaacacagtatagagcatgaatttttttcatcttctctggcgacagttttccttctcatctgtgattccctcc

SEQ ID NO: 424239 - DNA, 75 bp, Homo sapiens
cagggaaccctggtcaccgtctcctcaggtgtgaatcaacttcttgggccttggctctgagttggaaaaggtttt

SEQ ID NO: 424240 - DNA, 75 bp, Homo sapiens
gtccaagccacaatgatcctgccaagaatcctccagggttagaaaaaggttcttggaacatcgggaagaaaccat

SEQ ID NO: 424241 - DNA, 95 bp, Homo sapiens
tgggaattaaaaaaccactccattgtaccaactcactatacattgctgtatacaatcatgagacacgtcaagttcttgaggagctgactgagttg

SEQ ID NO: 424242 - DNA, 90 bp, Homo sapiens
cgcggggccctgcggtagcctcaggcccctcccctggacccgccgcagagccaggaatcactctgcatgatgaacctgtcgactgggcgg

SEQ ID NO: 424243 - DNA, 82 bp, Homo sapiens
gggggctgtgccgggcggagagaactcagcgaggattctgagcgtcgagggcgaggcccccagcagtgagactggcacatcc

SEQ ID NO: 424244 - DNA, 75 bp, Homo sapiens
agctcagcggatggccgaaaatctaggcttcgttgggcctttgaaaagccaggtctctaattaacagaagatggc

SEQ ID NO: 424245 - DNA, 75 bp, Homo sapiens
cgcccctccagccttcgagtcgttcttgctcttcgagggcgagaagaaatctgccgacaccccaggccatcgagc

SEQ ID NO: 424246 - DNA, 51 bp, Homo sapiens
aaactccctctggtgatgatttcagaaatgggcaagttcatgaaacctggg

SEQ ID NO: 424247 - DNA, 100 bp, Homo sapiens
tcttccattcccgaatccagagaggaacttcgtccttccagaagagatcattcaggaggtccgagaaggatctttgatgaagtgatgggctgcttctctg

SEQ ID NO: 424248 - DNA, 100 bp, Homo sapiens
ctcgtgccgctgagcctggcgcagatcggtgtcctctccctccccgcatacttcagcccctacaacggcgggtccctgggccatgacgagcgagccgatg

SEQ ID NO: 424249 - DNA, 75 bp, Homo sapiens
agtggaattttggagatattcaaagctttctacaagttctgattaaagtcagaaatagacacaatgatgtggttc

SEQ ID NO: 424250 - DNA, 100 bp, Homo sapiens
agtcagcagaacttgtacatatagatctaggctagacagcaacaagcagaattggcccaacaggaatggcttcaaatgcagcaagctgcccaacaagccc

SEQ ID NO: 424251 - DNA, 115 bp, Homo sapiens
cttaataatttggcctgtgagtcgatctttttagtctggagagatggccctccacgtggcagctcgctatggccatgctgacgtggctcagttactgtgcagcttcggctcaaat

SEQ ID NO: 424252 - DNA, 75 bp, Homo sapiens
tatcttcacttggcaaactcaacaagggggaaatttcacggattgaaaaggagcaccaagtattacaagaccaac

SEQ ID NO: 424253 - DNA, 100 bp, Homo sapiens
agatgcagagcccatttcagaacctgagaaagtagagactgagcaagccatgggccacagccaggaccggctcaccaccttccaggagaaccaagcccgc

SEQ ID NO: 424254 - DNA, 75 bp, Homo sapiens
ccattatggtgtcattacatgtgaaggctgcaaggcttcatccctccacccctcatcttcggggctggcatcgac

SEQ ID NO: 424255 - DNA, 131 bp, Homo sapiens
ggccgccctgttccccgcgctgcggcctggcggcttccaggcgcactaccgcgacaatgcagatcttcgtgaagactctgactggtaagaccatcaccctcgaggttgagcccagtgacaccatcgagaat

SEQ ID NO: 424256 - DNA, 100 bp, Homo sapiens
gtggaatattgagaaggctgaggaactcagcaaccagctagctactcgagagcaactgcttcgagaacgacagcagatggccagccgtccctttgcttct

SEQ ID NO: 424257 - DNA, 101 bp, Homo sapiens
agctatagacaattaataaaagaaatgaattctgccaaagagaaatataaagaagctttagctaaagtacctaagactaatgctttctgtggacaccactg

SEQ ID NO: 424258 - DNA, 75 bp, Homo sapiens
gggagaggaggacatcgtcaggctggcccaggaccaggaggagatgaagatgacggtcgaaccaaacccattcca

SEQ ID NO: 424259 - DNA, 98 bp, Homo sapiens
ttgaagatgtccttaccagctttgacaatacaggaaatgtttgggcttgcttctgacatgtctgatgagcgcattcctgctgttgctcctggctatta

SEQ ID NO: 424260 - DNA, 88 bp, Homo sapiens
gaaagaaagatatagagacaacgactatgtccaattttcatgctcagataaacctctacttgaaaatggagaaaaaacctaacaaaaa

SEQ ID NO: 424261 - DNA, 75 bp, Homo sapiens
tctgatgatgatgaaagttacacagcagcacaagccagcgaggaggcagtgtcatttcgccgtgaacgcagcaca

SEQ ID NO: 424262 - DNA, 98 bp, Homo sapiens
tcgactgcctcccagaacaaagtgggaaagggaagcttagcccgccgctgccgcctccgagcagcccgccagctcctgtccaaatatgacccccagaa

SEQ ID NO: 424263 - DNA, 83 bp, Homo sapiens
ggtcgccctcaaggccatgatcaaaacggctgaaggcctttcggcagcagctgaggaagaccacgcggaccaaagggtttctg

SEQ ID NO: 424264 - DNA, 98 bp, Homo sapiens
gagcccatgtcctgtgactcagacctgggcacagcaaatgctgaggactcagaccggtctctgcaagactccaaatgagaagatgaagcaagtgttaa

SEQ ID NO: 424265 - DNA, 98 bp, Homo sapiens
cagctatacaagttcctgtgggttggcagcgtcgtgtggatcaaaatggagtgctttatgtcaggcttctgactttggccaggtaggacttgacttag

SEQ ID NO: 424266 - DNA, 100 bp, Homo sapiens
gtcctgcattacggtctctataagaagatgatcttcctctgtgacgagggtgcaggtatctctggggactacatcgatcgcgtggacgagcccttgtcct

SEQ ID NO: 424267 - DNA, 88 bp, Homo sapiens
cgttgcctgctcccggagggagacgcgctgccgaggagaacccagcgggtgatgcagaagatggggaagaatatgatgacccttttgc

SEQ ID NO: 424268 - DNA, 75 bp, Homo sapiens
gctgatcctgcaccacaaggtgtacgatttgaccaaatttctggaagagcctctgaagagccaatccattcagga

SEQ ID NO: 424269 - DNA, 96 bp, Homo sapiens
ggctgcgcaccaagtgcgctgtgtccaacgacctcacccagcaggagatacggaccctggaggatttccctagagattatgacgttgcagccccgc

SEQ ID NO: 424270 - DNA, 75 bp, Homo sapiens
agagctgctaaaaattactgcggtgaacagggatttcagtcataatcggttgtctaactggaacatcagcttgga

SEQ ID NO: 424271 - DNA, 83 bp, Homo sapiens
cagcgatggaagaggatcaggagctggagaggctcctgctccagcccagcccccagagagcagaccccaggtgctggccccgg

SEQ ID NO: 424272 - DNA, 100 bp, Homo sapiens
gttactccacggaaagcagcttcagcagcactccaggtcctctcagggtgcgccatcattgtccgaggtcagcctcgtggtgggcctcctcctgagcggc

SEQ ID NO: 424273 - DNA, 101 bp, Homo sapiens
ggagaagtaccaggaggcgttggccaagggttgtttacattcagagctctatcaataagaggaatacatattacagtgaattcgacaaccgcacaagttgg

SEQ ID NO: 424274 - DNA, 75 bp, Homo sapiens
gacagccacctgctgtcgggccagctgcccacgttgtcatggatgcactggtagaagatgatatctgtattctga

SEQ ID NO: 424275 - DNA, 101 bp, Homo sapiens
tgataactttggaggaactacatcaacaggtgttgaagggaaggggcaagttcgcccaggatgtcagtcaggacagagcagaatgggctgatatagatccg

SEQ ID NO: 424276 - DNA, 82 bp, Homo sapiens
aggaggaggaggaggggctccggctggtctgtggtgagcgtggaggtcctgaataaccatggtggctgctgtttgtcatcag

SEQ ID NO: 424277 - DNA, 75 bp, Homo sapiens
gacctgttcaccagcactgtctccaccctagagcttgtcaaaattcccaaaaatgatcccctcaatgaagttcat

SEQ ID NO: 424278 - DNA, 100 bp, Homo sapiens
ccttttacacagatgctttggttcatgatcctctgtccctcaagctgttaacagatgtcataggaaaggttccagagagattcctggaagttgctcagat

SEQ ID NO: 424279 - DNA, 100 bp, Homo sapiens
ggcgtttacggctaccggccgaggaagcccgagagccgcgagccccagggcgccctggagcgccccccaggcctctctgctgatggtggtgccaagcgcc

SEQ ID NO: 424280 - DNA, 74 bp, Homo sapiens
tcagagatccaagtgcgcgccctggcgggtccggaccaaggaggcaaaaccttcaactgaggacttgggggata

SEQ ID NO: 424281 - DNA, 97 bp, Homo sapiens
ggcgctctgaccactctccagcaccagcttccagttagtggatatagcacaccatccccagccagtgtcatggagaaactccagctgggcccagaga

SEQ ID NO: 424282 - DNA, 74 bp, Homo sapiens
cggcataaaagggcagaaccatagcagggtgcggtctctacccaccaagagccaagctggtgatacagaggcat

SEQ ID NO: 424283 - DNA, 108 bp, Homo sapiens
ctcaatatctgtcttcggtggactccttcggcagtccacccaccgccgccgcctcccaggtatcgagaaccttccctgcgaacttcagaggaacttccagctgatgcg

SEQ ID NO: 424284 - DNA, 100 bp, Homo sapiens
ccagaataaagccaagctcatctctgagacccggaggaggttcgaagctgagtatgtgacaggttgctgctaaatgggaaaaacttagcttagtactgat

SEQ ID NO: 424285 - DNA, 100 bp, Homo sapiens
ctgcccgcggtcctcgctctcgggcggggcggcggcgacgcggacctgcggactagcgaacccggagtgtcggagatgtatgcagtgtgacgccaagttt

SEQ ID NO: 424286 - DNA, 101 bp, Homo sapiens
caaggatggtgctttcctggcggggaccttcatctccaccgtaggcattgacttccgggccaccagcttgggctccccacggagggcagcaagtgggactt

SEQ ID NO: 424287 - DNA, 75 bp, Homo sapiens
gaaacttctcaaatgagccaacctgagtcacaaggtatgtaaccactgaagtacacacacatgacatggagccgt

SEQ ID NO: 424288 - DNA, 75 bp, Homo sapiens
gtgccctgagggccttcgagagctaccgcgccagacagggtgagaactctgtctcagtcgacgggaagtgcagtg

SEQ ID NO: 424289 - DNA, 100 bp, Homo sapiens
ccgcccggggaccggcatgaggaccgccgcggggggacgtctgcggcccgcgtcggcgctggggacaaagcccactgacaaggaactgagagagactata

SEQ ID NO: 424290 - DNA, 90 bp, Homo sapiens
ctggagttgtttgacttagtggaggaggtgcagctcaacttctaccagttcctcggggtgcagcagcagccagtccctcctgcactccag

SEQ ID NO: 424291 - DNA, 100 bp, Homo sapiens
tcaagggtctctccagaaaatcttgtggacaaatccaggggaaggtaccttgtggtctataatcctttagaacaagaccgaatctcgttggtctcagtct

SEQ ID NO: 424292 - DNA, 100 bp, Homo sapiens
aactggggtgaattctggctcaatgaaggtttcaccatgtacgcccagaggaggatctccaccatcctctttggagctgactaaggctttggaacagaaa

SEQ ID NO: 424293 - DNA, 90 bp, Homo sapiens
gacttggtccgcggcatccgtaaccacaaggaggacgaggaactagtcagccggaagctgagtttggttcctggtgcagaagaagtcacc

SEQ ID NO: 424294 - DNA, 75 bp, Homo sapiens
ctggcagtagctgatgctaaactaggaggggtcataaaggaaaatatataccatgatctacaggaacttggtagt

SEQ ID NO: 424295 - DNA, 95 bp, Homo sapiens
cttctttcgatcagagatcggcggagaccctcgaagtgcgcaaacttgacactcaccctgaccgatcctgataacttaagtgactctctcttttc

SEQ ID NO: 424296 - DNA, 100 bp, Homo sapiens
aggaggacattgatacccgcaaaatcaacaacagtttcctgcgcgaccacagctatgcgaccgaagaaggacagaataacgggctcccagattcacaagc

SEQ ID NO: 424297 - DNA, 100 bp, Homo sapiens
cccgaggaggctcggccggcgagagaagtcggacattttattcagaaattaaatcattcagagttccagcactgtcgggggtcatcgggctctgtccacc

SEQ ID NO: 424298 - DNA, 100 bp, Homo sapiens
tccattccatgggttttattcacaggatgtggtggatacccaccctggtctcacgttcctgaaagatgctccagaattccactcccgctacatcaccacg

SEQ ID NO: 424299 - DNA, 75 bp, Homo sapiens
aagttggaagagggaaattacgtttaaaggtcagcaggagacgttgacatttagggatgtggccatagaattctc

SEQ ID NO: 424300 - DNA, 80 bp, Homo sapiens
aaagagctctggtcatcttgcacaacacctgatgaatggtggagagttacgcagaaatttctgaataaattggcagaaga

SEQ ID NO: 424301 - DNA, 75 bp, Homo sapiens
gagtcacacacggtcctaagagctgggcaccaggaagcgaaggctgatcaagaatgctgcagccaatgtccttcg

SEQ ID NO: 424302 - DNA, 85 bp, Homo sapiens
ctggatattcctactgctgctaaatatgaggcaccacctacctatgatgccgtggtacagatggagtaccttgacatggtggtga

SEQ ID NO: 424303 - DNA, 90 bp, Homo sapiens
atgcatttgtcctccaggaaggactgggaaccgctgtcagcatcaggcccagactgcagcccctgtcaaagggaacaggaagcagtccac

SEQ ID NO: 424304 - DNA, 100 bp, Homo sapiens
gccgcccagccctgccagctgcgccgggacggccatttcataattctgaatcatgtctgataacggagaactggaagataagcctccagcacctcctgtg

SEQ ID NO: 424305 - DNA, 83 bp, Homo sapiens
aggcgggagacgagaagcctgaaaagtcgcagcgagctggagccgccggagcatgacccatctgcctggcaccagcacctggg

SEQ ID NO: 424306 - DNA, 75 bp, Homo sapiens
gtgtaaagattgtggtagtagatgaagttatctaccttgcctgctcctatgccacagtgtacctgatctacctga

SEQ ID NO: 424307 - DNA, 90 bp, Homo sapiens
cactgaagggggactacaggttcgagaaagtggggcagcgtgagcaatccactcttcctcccgctgatcccaccacagtctcaagggttc

SEQ ID NO: 424308 - DNA, 90 bp, Homo sapiens
gttagaactgataagcgaagtgattctcttataagatacactgcctctaggactgggacagatagccactgagtacctgcttcaaatcac

SEQ ID NO: 424309 - DNA, 100 bp, Homo sapiens
cggctgcactgcggatgagaccggtgcgactcatgaaggtgttcgtcacccgcaggatacccgccgagggccaaacgtaccaagaaagtcgggatcgtcg

SEQ ID NO: 424310 - DNA, 58 bp, Homo sapiens
cggacacataacaagcagcagtgaggacaccaaaggtggaaaaggattattcatacct

SEQ ID NO: 424311 - DNA, 95 bp, Homo sapiens
cctctgtcccatctgcctgaggaagctgcagcatgtcctgggtttcaggctcatcgagaggtaccagacttcccaagtaagaagcggaagaggag

SEQ ID NO: 424312 - DNA, 51 bp, Homo sapiens
caaatgaatttgcaaaacttactgtagggttgaaaaataccggccacagac

SEQ ID NO: 424313 - DNA, 75 bp, Homo sapiens
gggatgaagatgctgacattgatgaatctgctgaactgtcccaagcaataaacagtggtacattgttatcaaaac

SEQ ID NO: 424314 - DNA, 104 bp, Homo sapiens
aaggattccaagtaactcttatttggcgtcgacattccagatggctatcctgcttcagtacaacacggaagatgcctacactgtgcagcagctgaccgacagca

SEQ ID NO: 424315 - DNA, 80 bp, Homo sapiens
tatgtgacgctgctggaggaaacacctcaggacacggcctacaacaccaagagggagtgcatccgccccaacccttttcc

SEQ ID NO: 424316 - DNA, 99 bp, Homo sapiens
ggtggttacaaccgcagcagtggtggctatgaacccagaggtcgtggaggtggccgtggaggcagaggtggcatgggccccccgtccagctccgacgcc

SEQ ID NO: 424317 - DNA, 82 bp, Homo sapiens
agaggctcccgggctggactcaggcttctcaggcccgatgagagaaagggaaagttaaggatgctggagcagaacaatggat

SEQ ID NO: 424318 - DNA, 75 bp, Homo sapiens
cgccaaatactgtagtgctaagtgtcagaatggacagcaaattatggatgaacctatgggagaggaggagattaa

SEQ ID NO: 424319 - DNA, 98 bp, Homo sapiens
tggctgcgtcaccgccgcccccccagacaagatggacaccgcggaggaaggaatggcggcgctagatagtaaggcatcagggaagatgggaatgcgag

SEQ ID NO: 424320 - DNA, 83 bp, Homo sapiens
ccggaagcggccgggctggatcaggatgagacctgcctagagctggaacgttacctccagagcgagccctgctatgtttcagc

SEQ ID NO: 424321 - DNA, 100 bp, Homo sapiens
ttccgaaagtggctctacaaacccaaggagggtgtgaagacagagaatgaccacatcaacctgaaggtggccgggcaggacggctccgtggtgcagttca

SEQ ID NO: 424322 - DNA, 100 bp, Homo sapiens
ccagcctatattgttacaattttttttcaagaactgccgtcttctttgcctgcactaatgtttggtgccctggttgtcagatgttggaaagcagtaggac

SEQ ID NO: 424323 - DNA, 74 bp, Homo sapiens
tgctagtcgctgcaacactcctctacagtttgaggcagcctggcatcctcgctacaacctcattgttgtgggcc

SEQ ID NO: 424324 - DNA, 75 bp, Homo sapiens
gacaccgcggctctggatgccttctacaacgcggatgaggcctgcctgtgttaatacacctagtgaggagtggag

SEQ ID NO: 424325 - DNA, 97 bp, Homo sapiens
gaaagaatggagaactattaactgcctttcttctgtgggctgtgattttcagaggggaatgctaagaggggttgctgtggcactgaagcaagctatg

SEQ ID NO: 424326 - DNA, 100 bp, Homo sapiens
ccagctgaacaaagtcagccacaaagcagactagccagccggctacaattggagtcagagtcccaaagacatggatgaagatgacgccaacagactcggg

SEQ ID NO: 424327 - DNA, 87 bp, Homo sapiens
gcctttcattactacgttcagatctgtgcagaacccccagtcggatcttcaggcccaggatagatgtcatagaattggtcagacaaa

SEQ ID NO: 424328 - DNA, 100 bp, Homo sapiens
gaggacggggccgggcgacctgggcaccagcaggacccgaggccaggagccaggggcccagaagatctcctgggaggcccccgtggagaagaagactgag

SEQ ID NO: 424329 - DNA, 74 bp, Homo sapiens
ggccccctggagggggcagtcccgggagaacctgcggcggccggagcggtttactttatcatcatcaagaaata

SEQ ID NO: 424330 - DNA, 95 bp, Homo sapiens
cctgagatcaaatggcacttcattggccacctacagaaacaaaatgtcaacaaattgatgggtgagggcttccacaactaccaccactcctttcc

SEQ ID NO: 424331 - DNA, 50 bp, Homo sapiens
ctggcatgtgccttatgaccctctctctgctggatgaaccgaatcctaac

SEQ ID NO: 424332 - DNA, 75 bp, Homo sapiens
agatctgggaccgaaatttgactgctgtgtttgatgtggacaagaagaaagggttgactctgattgagctctggg

SEQ ID NO: 424333 - DNA, 50 bp, Homo sapiens
agccctggtggagctgaaggttgcagacttaattcagtgcacaaatgaga

SEQ ID NO: 424334 - DNA, 88 bp, Homo sapiens
taaggaggcggtggggctggagaacccgaagcacctcccggcgccgggacgcttcttctatcaggatcctcatgaccagccaaagaga

SEQ ID NO: 424335 - DNA, 51 bp, Homo sapiens
atctgtgctttcttaacagataggcaatttgaatcaacccatagaagtgac

SEQ ID NO: 424336 - DNA, 100 bp, Homo sapiens
acgcgatgttccgccggagcttgaatcgttttaaaccgatctgctcctccgtataaaggacatcagtcatttcttaatgcaagacatcgccttcttgtct

SEQ ID NO: 424337 - DNA, 114 bp, Homo sapiens
accagtccccagtgagggtgtacaaatacccctttgaattaattatggctgtgtggaaacaggaagagaactagaactggaagtaaagcattgaagatgtgactgaattgctgc

SEQ ID NO: 424338 - DNA, 74 bp, Homo sapiens
cgtaatgcgactcaaagctgcacggcagtctgtttatgagggtcaaagaattgactgtagatccaactgctgct

SEQ ID NO: 424339 - DNA, 51 bp, Homo sapiens
gtctttggaggcactcaagcagcaggacaaccctccatatgataagggagc

SEQ ID NO: 424340 - DNA, 100 bp, Homo sapiens
gagccacttctcaccgagatgattcatgaagtgtgggcccatcgctggatggatctgtcagaacacggctttgggctggccctgctcaacgactgcaagt

SEQ ID NO: 424341 - DNA, 100 bp, Homo sapiens
gacgggccggagggaggatgttaaagccccgcgaaatctccaaattggacatccagagcagcattcttgttctgtctacgtcttgaattagaaactatca

SEQ ID NO: 424342 - DNA, 83 bp, Homo sapiens
gaaggtgaccgcggatcccagcttcctgcagccaggtgtcgtgaaaactacccctaaaagccaaaatgggaaaggaaaagact

SEQ ID NO: 424343 - DNA, 82 bp, Homo sapiens
gaagatgtcggccttctgagccgactgcggtggtcaagagtcattgaaattatgagactatcattcaaatggaagcattata

SEQ ID NO: 424344 - DNA, 104 bp, Homo sapiens
ggatatccaagcctctcagcttcggagaatggagtcttccatcaatcatatctcacaggcccagtgacgagcaccatccggaagtgaaggctgatgggtacgtg

SEQ ID NO: 424345 - DNA, 101 bp, Homo sapiens
cccgatagcatcgtcgaggtgaagagcaaaggctttatgaaacctttctaaccaatgatgaaccagaatgctgtgacgtcaggagagaagaaaaatcaaat

SEQ ID NO: 424346 - DNA, 96 bp, Homo sapiens
tacctgccttgggatccggagggaggaagctgggacacccgggagtcaggaaatggttcatgtactggacagactggggagaagtgccaaagatag

SEQ ID NO: 424347 - DNA, 96 bp, Homo sapiens
cacagtggccaccagcaggatcataaaatacatgatctgggtcatctctgaatttgagcaatggtgaaacggaatctgtgaaaaccatgattgtcc

SEQ ID NO: 424348 - DNA, 105 bp, Homo sapiens
caatttgaaggactacaaggtggactgcttgctcagctcagtatcaacacttatgggatcccgggtgcaaggggcacaagtttgcacacagtggcctggcttgcc

SEQ ID NO: 424349 - DNA, 80 bp, Homo sapiens
cagacggctgcgaggcgctgggcacaggctctgtgttcagtgctgtcatctctcaaaagccaagcagggatatctgtcaa

SEQ ID NO: 424350 - DNA, 100 bp, Homo sapiens
ctcgggtggctctgaggtcgcctggggaccccagaagtttaccaaacgagaaccagaagatacgaaaagtgcagattctgatcgagatgtttttaatgag

SEQ ID NO: 424351 - DNA, 75 bp, Homo sapiens
cgtgcacagtagatccctcccggcttcccggcttcccgtctcgtcaccctctgatgaggacggggacttggttgc

SEQ ID NO: 424352 - DNA, 75 bp, Homo sapiens
aacggagtgtgcgacggattgggagtcattgaaattatgagactatcattcaaatggaagcattatagttcttcg

SEQ ID NO: 424353 - DNA, 100 bp, Homo sapiens
gtaatgtcggccattgagaaattgttgaggcaggccatggtaggggaggagtgtgtaggtgccatcgtttgcaagttggatatgcacaaaaagatgttcc

SEQ ID NO: 424354 - DNA, 148 bp, Homo sapiens
gcgggcgcggacgcgcagcatggcggtggaggacgaggggctccgggtcttccagagcgtgaagatcaagatcgctccccgcagccaccgccacccattggaatggccaacaggggacctgcatatggcctgagccgggaggtgcagc

SEQ ID NO: 424355 - DNA, 100 bp, Homo sapiens
ttgataaagttatagcaaagtgcacaggatcagctatcaatagccgagaaaccatgtcctgctattgctgcaaactgagtatgaaagaaggtgacccagc

SEQ ID NO: 424356 - DNA, 98 bp, Homo sapiens
aaggccaacgtggaggcctcacgcagctccacagacagccccagctcggtgttcctcaggttttgagagtattttagaagggctttatggaccacggc

SEQ ID NO: 424357 - DNA, 100 bp, Homo sapiens
agcgccgaggacgacgagcgcagctgtcggggccgcgagtcggacgaagacttgcacacctacccctgtggagcgtgcaccctataagggagaagtcgcc

SEQ ID NO: 424358 - DNA, 80 bp, Homo sapiens
gtggggactacatatcccagcatgccgcggcgccggcggagcgaggcgaggcgcgtttggtgccctggttgtcagatgtt

SEQ ID NO: 424359 - DNA, 75 bp, Homo sapiens
gtcattagcgtgaaaaccacaagcaggtccaaagagagagtacaggtttgcagattccgccagcagcacagcaag

SEQ ID NO: 424360 - DNA, 51 bp, Homo sapiens
ggggcgaaggcgggcggcagaggcgatcagcccacagaattcttccagtcc

SEQ ID NO: 424361 - DNA, 75 bp, Homo sapiens
cgcctttccagcatgcaggggctgctcagtttcaccaggtgatatggatcggacacaaattgagcttaatccgta

SEQ ID NO: 424362 - DNA, 98 bp, Homo sapiens
cctgagcttgttgcttttgtcttccctggggaatgttttctttggatccatttggcttttccagctttgccaaagtcatgcatgagacagtgaaggac

SEQ ID NO: 424363 - DNA, 100 bp, Homo sapiens
gaaaatcattcaagtggccaagacctctgctgcacaggtgatgttcacagaagaagatgtcaaattctacttggctgaacttgcacttgctttagaccat

SEQ ID NO: 424364 - DNA, 74 bp, Homo sapiens
cgcaggcagctccgtgtggaggagctggagatgtttgctatgaagattatggaatcagagagagctcttggaga

SEQ ID NO: 424365 - DNA, 96 bp, Homo sapiens
ctgagtgccccacactcaccctactaccttctgtgcacatggaggatggaggcaacctgaaggtgagatccgtgctcagctcacagagcagatgaa

SEQ ID NO: 424366 - DNA, 83 bp, Homo sapiens
tttcttccaaagcacaggaatctcactctgttaaagctggtctgttctaactgagataggtgatcttcagctttgcaaactgg

SEQ ID NO: 424367 - DNA, 73 bp, Homo sapiens
gaagttgaatactttgtggcaggtacacatccatacccaccaggacctgctgtctgtgatcctggaaacatac

SEQ ID NO: 424368 - DNA, 100 bp, Homo sapiens
cgcgaaggagcggaagaatggcagtgctcaaactcaccgaccagatgtctgctccaatgaggatctccctgaagttgagctggtgagtctgctagaagaa

SEQ ID NO: 424369 - DNA, 98 bp, Homo sapiens
ctgtcatcacaaaagagttgattgaaattatctctggtgctgcagctctcagcaagatggaacttattgatgataacaccgtagtcagggcacgaggt

SEQ ID NO: 424370 - DNA, 99 bp, Homo sapiens
gggcgagcgaggaggatggcggagtcggggctcctgacgacacatgcctcactcctgtcagcagttccaccttttcatggttgaggagcacatgtggtc

SEQ ID NO: 424371 - DNA, 83 bp, Homo sapiens
actaatttggttatggccaaggaccgcttacaacttctagagaatgtgatcaatgggcaggactacgaagtgatgatgcagat

SEQ ID NO: 424372 - DNA, 82 bp, Homo sapiens
caagatggcggcccatcaccggcagaacacagcagggcggaggaaagtgcagtgagagggtccaagcctggtaagaatgtcc

SEQ ID NO: 424373 - DNA, 73 bp, Homo sapiens
ctcgaactaaacaaattcatcccagaaatctaagagtcattgaaattatgagactatcattcaaatggaagca

SEQ ID NO: 424374 - DNA, 75 bp, Homo sapiens
ctccggcgcagcccggaaatgtccggcaagatcgagaaagcagagttgtggaaagtaaaaatgtagccctaccaa

SEQ ID NO: 424375 - DNA, 100 bp, Homo sapiens
ctcagatggcagcctttgtgggtactccaaagattcaggtttactcacgtcatccagcagagaatggaaagtcaaatttcctgaattgctatgtgtctgg

SEQ ID NO: 424376 - DNA, 90 bp, Homo sapiens
atgatatgaaaaagtctccagagattatcagtgggcggatgacatttggtggcgctgcaggaggcggctactcccaggtcattcctatgg

SEQ ID NO: 424377 - DNA, 75 bp, Homo sapiens
gaactattccagctttctcagtatctacaggcattacctgacactcagatcaccagttatgcagcaactttacac

SEQ ID NO: 424378 - DNA, 95 bp, Homo sapiens
aaatatatccgtaggaatggagagggaccggatctcaggtttggtgcacctcgatttggaggaagtagggcagggcccttatctggaaagaagtt

SEQ ID NO: 424379 - DNA, 76 bp, Homo sapiens
ccaagactatgtatgaggttttccaaagaggactcgctgtgtctgattttcagctgaactctcatctctcaacact

SEQ ID NO: 424380 - DNA, 75 bp, Homo sapiens
gaattaccactaccaagaagggatctatcacctctgtacagcaaattgaaccatctttgtatcctaagttgtttc

SEQ ID NO: 424381 - DNA, 83 bp, Homo sapiens
ctgggccgggtcctgctgtggctgcagctctgcggtttacccaaggtccagcctagcccctaggcaccatgtcggacagtgat

SEQ ID NO: 424382 - DNA, 82 bp, Homo sapiens
ccctgcgtgaggccgcggagcgccagctcaatgaatgttctgctcagtgtggccttggacagcagatgagaactgtgcagtg

SEQ ID NO: 424383 - DNA, 124 bp, Homo sapiens
agatgaggtgatggcaacggccaacttcggcaagatccagatcgggatttacgtggagatcaagcgcagcgatggtaagaatgattgatgttggctgatattggagtgctcattcacatgaagt

SEQ ID NO: 424384 - DNA, 100 bp, Homo sapiens
tctaacagccaatagaaaagcagaaagccgcctcttggtttgcgtcctgcactgaaaggaaatgacggattttgtcagcggccacctggactatgccaag

SEQ ID NO: 424385 - DNA, 82 bp, Homo sapiens
atgagccacccctacaccatgacaacgccttacccttcgctcccagcccaggccaatagcttcaccgtctcctctgtcgccg

SEQ ID NO: 424386 - DNA, 75 bp, Homo sapiens
agatctcttctgttctccactgctaggttatttaggaggattcgatggcaattttttgtggaacagaattggagc

SEQ ID NO: 424387 - DNA, 74 bp, Homo sapiens
gaaaagatctacttggatatctcaatggtgaagcgtgtgttactgtagatgatcacatgatgaaggtagagaca

SEQ ID NO: 424388 - DNA, 87 bp, Homo sapiens
catcccgtgccctcgctctgagctgcgcctggacctggttctgccttctggacaatctttccgtggtgggggaaaagtagctccagc

SEQ ID NO: 424389 - DNA, 100 bp, Homo sapiens
tgcggatgaggcctctttccctgccgccgccgagtcgcgcggaggcggaggcttggggttgcgagttataaggactcagcatcatgtagaagcacttgtg

SEQ ID NO: 424390 - DNA, 83 bp, Homo sapiens
tgcaccagcacgcctggctaaaggagaaggcagagcccccccaggctatgaatgccctgatgcggttgaaccagctgaagcca

SEQ ID NO: 424391 - DNA, 101 bp, Homo sapiens
gggcagtggaggctggctgctgaaggatgaacggagaggaagaattctttgatgccgtcacaggagtacaagcgcaagctagccagagtttccctggtgcg

SEQ ID NO: 424392 - DNA, 100 bp, Homo sapiens
tctggagcaaggaaaagatccctggaatatgaagagacacagtatggtagccacacccccaggttagctgctgaatcaaagcttcaaacagaagttaaag

SEQ ID NO: 424393 - DNA, 100 bp, Homo sapiens
caccgttgatgacaagatgtccctccggctccactaccggatgaggttacaactgatggaaaaccaaaaatcgttgatatcattgatacaacaggaagtg

SEQ ID NO: 424394 - DNA, 74 bp, Homo sapiens
tcgaccacttggctttggatgaaatcaagaagcgggtgccttcaccagggatggaagaggcaggctgcagcaga

SEQ ID NO: 424395 - DNA, 101 bp, Homo sapiens
ccttgaactgcgggacgtgtagctgcagctgtggggtggaccatggaaacaggtacaggtttgcagattccgccagcagcacagcaagctctacagatgag

SEQ ID NO: 424396 - DNA, 82 bp, Homo sapiens
ccagtagaggaggaggtgaacaaggaggaggtacttcaactcccgcccccacctgtgtcccgctggctcctaagctgccccc

SEQ ID NO: 424397 - DNA, 82 bp, Homo sapiens
gcggggaccgctgtgctctcggtaaaaatgcatttgcaaagggagaaaatgaaggccaaacagaagcaggctccagcttctg

SEQ ID NO: 424398 - DNA, 51 bp, Homo sapiens
gcagagcaggaggccccccgagagtggccacaaactcaaaggtgcgggagc

SEQ ID NO: 424399 - DNA, 74 bp, Homo sapiens
ctcagcctccccagtagctgggactacaggcctgcagaatgatcacaaggcagtgatgaagcaggtggaggagg

SEQ ID NO: 424400 - DNA, 75 bp, Homo sapiens
catctataagacttcagggattacataaacctgtgtaccatgcactgaaagtgaaatttgtctgtcaaactccag

SEQ ID NO: 424401 - DNA, 75 bp, Homo sapiens
ggggattctcgacctgctaacagaactggaccttttcggcacagttggtggatctgaaatctgaactgacagaaa

SEQ ID NO: 424402 - DNA, 75 bp, Homo sapiens
ctagccaggaacatggactgaagtatccagcgctcattgggaatttagttaagctattcaggattatgaaactgc

SEQ ID NO: 424403 - DNA, 87 bp, Homo sapiens
gcggcgccggcctccggggagaaacggtgaatctggattgggaaagtcgacattaatcaactcattattcctcacagatttgtattc

SEQ ID NO: 424404 - DNA, 100 bp, Homo sapiens
gatgtactgctttaaacttaaagacctctttggacccgaaattgtaagattatgtctactttgagaattcctccagcaacccatacctaataagaaggat

SEQ ID NO: 424405 - DNA, 98 bp, Homo sapiens
ctcgaaccttcctggtgtcaggaaagcagcgctccctcgagctccaggccaggtttcagaaggatcccacttggtcagagactggagaccgttatctg

SEQ ID NO: 424406 - DNA, 75 bp, Homo sapiens
gtatgattatgctgggaaaaacaaagttccagagctacaaaagtttttccagggacattccagctacatcacaca

SEQ ID NO: 424407 - DNA, 75 bp, Homo sapiens
ctccgccatcagctcggcagtcgcgaagcagcaaccatgcaggaggatgcattagcacaacaggcctttgaagag

SEQ ID NO: 424408 - DNA, 85 bp, Homo sapiens
ggaaacgctggggccagaacactcaggttgtggcagcactgcctgaaggtatgagaccagattctaatctttatggttttccatg

SEQ ID NO: 424409 - DNA, 90 bp, Homo sapiens
tctggagatgcttccgaactgtgggcaaaaatggcgaccctgagacagggaagacctgtctgctgaaagccatgctcaacctgcacgacg

SEQ ID NO: 424410 - DNA, 51 bp, Homo sapiens
gttggatggtctgttagaagaaaatgaactgaagctctcttcccacgagga

SEQ ID NO: 424411 - DNA, 82 bp, Homo sapiens
cagtgaatgtggaaaggagattgacagtcacaattttgtaataagtttcagaagaggagccccgccgaggcatgagggccgt

SEQ ID NO: 424412 - DNA, 85 bp, Homo sapiens
aggaagagggcatcctcaggcggctgaagaagtatgacaactgcaccctcatcacatgtgtggattctgggattctcagagtctg

SEQ ID NO: 424413 - DNA, 80 bp, Homo sapiens
gatggacttatttttcagcctactggagtggatattccatctattataaccaagaaactattaaaagcagcaatgaagca

SEQ ID NO: 424414 - DNA, 82 bp, Homo sapiens
ggcggcgggatccactgtccggcagagcctaagtggggcctccccatttcttggagacactaagcaagaaacgttagcaaat

SEQ ID NO: 424415 - DNA, 90 bp, Homo sapiens
cagggcttctgcttcaacatcctgtgcgtgggcagacagtccagaagacatgcacagctggattaaggagattggcgcagctgtccaggc

SEQ ID NO: 424416 - DNA, 101 bp, Homo sapiens
gctgttgatgctgtaattgctgaacttaaaaagcagtctaaacctgtgaccacccctgaagaaattgcacaggcatgttatttgaaagcaattgagacgca

SEQ ID NO: 424417 - DNA, 100 bp, Homo sapiens
aaagttactaggcataatattagctaaagctgtaatttctaaacatccaggaacaggacaatcatatcctgattcagcccttcctccacaaaggcaagac

SEQ ID NO: 424418 - DNA, 74 bp, Homo sapiens
gattcatatccttcgaaaacgacggtggcttctggcacagcagcttaattgaccggaacctcattgattatttt

SEQ ID NO: 424419 - DNA, 100 bp, Homo sapiens
ccaaagacatgaggaaatcacaggacacaagatggtgaaggagacccagtactatgacatcctgggcgtgaagcccagcgcgtccccggaggagatcaag

SEQ ID NO: 424420 - DNA, 75 bp, Homo sapiens
gcactgagagcacgagcatgggcggcccctccacagggcccctctcctgcctggacggctctgctggtctccccg

SEQ ID NO: 424421 - DNA, 108 bp, Homo sapiens
gcgtgccccaccatgtcagacgcagccgtagacaccagctccgaaatcaccaccaagtttggtgccctggttgtcagatgttggaaagcagtaggacggaacatactc

SEQ ID NO: 424422 - DNA, 75 bp, Homo sapiens
gtgacttgctgccttgccactatgaaggtggtatggtcaggaaaaagactacaatgtactagtcatggatcttct

SEQ ID NO: 424423 - DNA, 51 bp, Homo sapiens
agatactttgaagtagaagaagctgatgtttccactgtccgcaacagcccc

SEQ ID NO: 424424 - DNA, 75 bp, Homo sapiens
gtggaataggtgtatcaagtaatggtgcaaagcctgaagagtctactcttcatcttgtgttgagacttcgtggtg

SEQ ID NO: 424425 - DNA, 75 bp, Homo sapiens
cgagatcagccagccgaccgaggacatggatttgattgacatactttggaggcaagatatagatcttggagtaag

SEQ ID NO: 424426 - DNA, 100 bp, Homo sapiens
cttcttgaaatactgaaatatccttacttgcttctacatgaacgtgttacagcacagtcagcagcctccattcaagagttgattcattagaaaagtcaaa

SEQ ID NO: 424427 - DNA, 75 bp, Homo sapiens
ggaacagccacagcagcctcccaaggagtctgcaagttgtttggaaattttagcattcaggtgccaggaatgcag

SEQ ID NO: 424428 - DNA, 138 bp, Homo sapiens
ctttgttgctgctgcacattaggttgcagtatgtggccagttatttgcctcagtaaaagagtggaaaacgaagctcattcccaacgtgcaaagccaaggcagcgaccccaggacctcttctggagatggaagcttgtt

SEQ ID NO: 424429 - DNA, 100 bp, Homo sapiens
aagagattcagccagcacactcctcgcgagcaagatccagacatttaatgtggatgcaccatgccagaccgtggaagatttaacgaatggggttgtgatg

SEQ ID NO: 424430 - DNA, 75 bp, Homo sapiens
tagatatcgaaggtaccacaaccccgattgctttcgtgaagatgcctgaaaacttcatgcctcctgttcccatca

SEQ ID NO: 424431 - DNA, 51 bp, Homo sapiens
cattattcaacgcatttggaagaaatgcactcggtgatggaaagagagcca

SEQ ID NO: 424432 - DNA, 100 bp, Homo sapiens
aggcccatgagtgatgaagatcccgaggatgaagacgccttgccagccaggaatgggtaccacagaccatgtcatcgtcctggcgtccacgaaccgagct

SEQ ID NO: 424433 - DNA, 100 bp, Homo sapiens
cgccgcctgaggaggcgagctagccgggagttacaccgccaccgccaggtgctccatatgtttgagatccattttgtcctgctggccacatcccttgaat

SEQ ID NO: 424434 - DNA, 100 bp, Homo sapiens
aggagcttgccttctgagctttgtaccaaagacctgggaaaagtattgtccttcttgtaaaactgattccagtgaagttgtaaaggctggtgaaagactc

SEQ ID NO: 424435 - DNA, 109 bp, Homo sapiens
ctaatttgaaccatgtttggattgaagccgcctctgtattacttaccagattggccttaagagaaggacggagccacatactgctgacggcccagaactggcagagaga

SEQ ID NO: 424436 - DNA, 90 bp, Homo sapiens
gggagaggcgagctcgcgatgagtggtctcggcaggctcttcgggaagggcctctactacgtggacagtgaagggaaccggatttcaggg

SEQ ID NO: 424437 - DNA, 100 bp, Homo sapiens
agatgtgaataaaactgaccatagccagagaacagccctccatcttgcagcccagaagacccaacatgagtgaagtttcctgcaagaaacgggacgacta

SEQ ID NO: 424438 - DNA, 90 bp, Homo sapiens
gataagctgagcagagccctgcgatactattatgacaagttgtctatcaacgtctatgactacaactgccatgtggacttgatcagactg

SEQ ID NO: 424439 - DNA, 83 bp, Homo sapiens
ctgctgagaccgctccggacgtgcgaagcgttcgcggtgcggtaggtacgtacctgtgggcatcatgttccttgttggaagca

SEQ ID NO: 424440 - DNA, 76 bp, Homo sapiens
atcaggagtcccagcctgcttcagagtggggccaagaagaaagcacaggttcgggatgagtatcggcaggactacg

SEQ ID NO: 424441 - DNA, 98 bp, Homo sapiens
cattggtctaaagtctttccaaaaggtcaaggttcacaaggcacaactacaagagcggaatgaccctcagcaactgctattagatgccaagcacatgt

SEQ ID NO: 424442 - DNA, 100 bp, Homo sapiens
tcggtcccagctcggtccccggctcagtcccgacgtggaactcagcagcggaggctggacgcttgcatggcgcttgagatcttactgtgccgagatcgct

SEQ ID NO: 424443 - DNA, 88 bp, Homo sapiens
gtcgtggaagcaggactgcgccgcgtcttcctcaaggttttaaaatcaaagatgggaaaatcggagaaaattgcccttccccatggcc

SEQ ID NO: 424444 - DNA, 98 bp, Homo sapiens
agagcagctcctcactgtcaagcacgagctgcggactggagctgagagaagataatatcattttaattgaaaccaaggccatgctggaggaacagctg

SEQ ID NO: 424445 - DNA, 96 bp, Homo sapiens
gttgcaagttcttctacagccccagttatgtggacgagctgttaaaccagtctgtgatcaaaacagggcgactgctaatcagtcacgaggctccct

SEQ ID NO: 424446 - DNA, 100 bp, Homo sapiens
caccccctccgcgggggtcccccagaggttttgcacactagggaccaagaagccctcggggacactgctgagaaaagactgccgaagggaagaccagcgg

SEQ ID NO: 424447 - DNA, 90 bp, Homo sapiens
cagccctagcgctggccgcgaccccggcgtctgttcggcacttgaagtactccttgtttaagaaatcactactgggcagtgtttcggata

SEQ ID NO: 424448 - DNA, 75 bp, Homo sapiens
gtcatttggaaaaacactagagacagacggctggcaggctgtgtggttccgggtgctggtgctgtggaagtggca

SEQ ID NO: 424449 - DNA, 52 bp, Homo sapiens
tgtaatcccagcactttgagaggccgaggcgggcggatcacctgaggtcagg

SEQ ID NO: 424450 - DNA, 90 bp, Homo sapiens
tgatgcggtttactatactgcttcatatgcaaaagatccacttaataactatgcagtcaaggtgacagtgagggtgatgaagaggagacg

SEQ ID NO: 424451 - DNA, 90 bp, Homo sapiens
agaagaaactagaagctaaggtgaagaagctgcaaggtgacggcggaatcccgctgtaagctgctcagctggctgatcccggtgcaccgc

SEQ ID NO: 424452 - DNA, 100 bp, Homo sapiens
ctccaacacctgggctcaagtggcttggcctcccaaagcgctgggattatagtgccagcgccacagcccttcaatcattttggttgctatccagcttctc

SEQ ID NO: 424453 - DNA, 83 bp, Homo sapiens
tgaggtgcttggttcaggccagtttggcatcgtttatggagcaactggatgatgctcgcaacaaagctgacaatcaagaaaag

SEQ ID NO: 424454 - DNA, 75 bp, Homo sapiens
ctttatgatgatccacttctacttattaaatacattagtgccagcagtagttcccaagggctgtctcagccatcc

SEQ ID NO: 424455 - DNA, 75 bp, Homo sapiens
ctaacctatcgggttctctctccgcgcgttcagattcctcctgcatggaaaaactactttcaaaagattggaagg

SEQ ID NO: 424456 - DNA, 96 bp, Homo sapiens
tgcaatagcccttcagtactgttgtacgcctgatggaatgtgctgcagagcacccaaccattgccaagtcggtggagaacttcgtgaacctggtca

SEQ ID NO: 424457 - DNA, 98 bp, Homo sapiens
aacaggcttactctgacttccctgggcttttcagtgttcccaccgaggaggagagctgggaatttcccttcgtccagacggaagggttgacattagag

SEQ ID NO: 424458 - DNA, 97 bp, Homo sapiens
atttactaccacagaagtcactggcagcaaccactctgtggctgaagcactgctcattttcttggaagccctgccagagccagtcatctgttacgag

SEQ ID NO: 424459 - DNA, 74 bp, Homo sapiens
gtcctggcgcgatgcgtcaagtacactgaaattcatcctgagatgagcctctacggcagacacatgcaggccaa

SEQ ID NO: 424460 - DNA, 90 bp, Homo sapiens
cgcggactgtcctttcgtggctcactccctttcctctgctgccgctcggtcacgcttgacggagtcttgctctgtcacccaggctggagt

SEQ ID NO: 424461 - DNA, 96 bp, Homo sapiens
cagcgacagagccaaaatcagagctggaacctgaggagagagacacatgcctcactcctgtcagcagttccaccttttcatggttgaggagcacat

SEQ ID NO: 424462 - DNA, 50 bp, Homo sapiens
cgggccgtggaggcttcgccgcctaggtccgcgggagagctgtggggctt

SEQ ID NO: 424463 - DNA, 83 bp, Homo sapiens
gtctcaatatctgtcttcggtggactccttcggcagtccacccaccgccgccgcctcccagctggtcagtgagaaggtcggag

SEQ ID NO: 424464 - DNA, 100 bp, Homo sapiens
gtcagttgttgcatcaaatacttcatatttggcttcaatgtcatattttggaacaaattggagctctggcagatcagcatatcattcatgtggcatgtgg

SEQ ID NO: 424465 - DNA, 100 bp, Homo sapiens
aggaggcaccttggataagctggagtctattcctggattcaatgtcatccagagcccagagcagattccaactccacagagtgaccagagagaggacgtg

SEQ ID NO: 424466 - DNA, 48 bp, Homo sapiens
ggattccaagtaactcttatttggggtgagcccctccagactccgaat

SEQ ID NO: 424467 - DNA, 87 bp, Homo sapiens
tggagacatcagaagcttaaaggaagcagaaaatgtgtggcggattactgggacagatgattgtagaaggcatgaaacaaaaaatgt

SEQ ID NO: 424468 - DNA, 99 bp, Homo sapiens
tcgagtgaagcctggcccgtgagtgcctcaacaactgagatgaacgtcgactcgcttgcaggcaagttgtcaaacaccttccaccatgaccacctcagc

SEQ ID NO: 424469 - DNA, 90 bp, Homo sapiens
attctcatgtatccagttctacctcagttcgattttatccacatgatgtggacaatgccgtcttctgtctcgtggggcatcctcctgctg

SEQ ID NO: 424470 - DNA, 124 bp, Homo sapiens
gccatggatgtggaacggagtcgcttcccctactgcgtggtgtggacgcccatcccggtgctcacatgtggtggtacagtgggagctattctgacatgtccactggaagttgtaaaaacacgac

SEQ ID NO: 424471 - DNA, 75 bp, Homo sapiens
ccttccgacgtgggcggtgggccccagccccacagaccagcccagcattcaggagatacaactcgtcaacgaatc

SEQ ID NO: 424472 - DNA, 98 bp, Homo sapiens
agattgttctatgaaaacaagcaaatcgagtgcacctgggatgacaaaaagtcatagtggtgtgacaagtaatctgtaagtcagatgctccaacaggg

SEQ ID NO: 424473 - DNA, 96 bp, Homo sapiens
tcatgaagattcaataacagttgcatttgaaaacaagtttaaggagttcatgagtaaacatgttcacttaatgtgttaccggatctgcgtgcgagc

SEQ ID NO: 424474 - DNA, 75 bp, Homo sapiens
tctagactgattaaaaatcttggtgcttcttggacacttaatgattgttggcaagaaatgtgctgctgatctggg

SEQ ID NO: 424475 - DNA, 100 bp, Homo sapiens
cttgcatcaagctgggcatccagggctcgtacttctgctcgcagagtttatgcgaattccatgtgtggatgctggattgatttcaccactggtgcagctg

SEQ ID NO: 424476 - DNA, 74 bp, Homo sapiens
tcggaagagcgctcccaggagaaacaagtgcctgattattacaaaataattaaaaatccaatggatttgtcaac

SEQ ID NO: 424477 - DNA, 82 bp, Homo sapiens
ggcagggtcccgcatggcggcgcacaggaagcacgatcgcaccccctccctccctggcggagcccctgaaggagctgttcag

SEQ ID NO: 424478 - DNA, 74 bp, Homo sapiens
acttatccaggccacttttcacttctgctgcactgctttcagcatgcaatatctaatgcttttaaaggagcttc

SEQ ID NO: 424479 - DNA, 98 bp, Homo sapiens
tcgccgccatcctcggcgcgactcgcttctttcggttctacctgggagaatccaccgccatccgccaccatggctcagcttgtcaatcggaaacagaa

SEQ ID NO: 424480 - DNA, 80 bp, Homo sapiens
cttcattgaccaggctttggctcaaaagaatggctcacagaacatttcctgcctgttgctcacactctgttgtccacagc

SEQ ID NO: 424481 - DNA, 51 bp, Homo sapiens
aaggcactgctttttcatgacgagctggcctccaccctgctggacgccatc

SEQ ID NO: 424482 - DNA, 75 bp, Homo sapiens
tcgccagcccgtgccgcgagcgcggcctgcaggagatggtcatcatgggccagtgctactacaacgagaccatcg

SEQ ID NO: 424483 - DNA, 100 bp, Homo sapiens
ggctaaccagttagtggtgctcaacgtgtacgacatgggtgattgtgttgttacagtgctgcttgctgaagaggacaaagctgaagatgatgtagtgttt

SEQ ID NO: 424484 - DNA, 145 bp, Homo sapiens
ccgagatgtctcgctccgtggccttagctgtgctcgcgctactctctctttctggcctggaggctatccagcgtttggtgcacctcgatttggaggaagtagggcagggcccttatctggaaagaagtttggaaaccctggggag

SEQ ID NO: 424485 - DNA, 95 bp, Homo sapiens
cttacaaagtccatgctaacctactatgagggtcgagcagagatatgaaactatccatgaagaacaatattatcaatacacagcagtcttttgta

SEQ ID NO: 424486 - DNA, 101 bp, Homo sapiens
gctcgagttaaagttggatgtgctggaacagagtggttaagaaagtagctcaatacatggctgatgtattggaagatagcaaagacaaagttcaagagaat

SEQ ID NO: 424487 - DNA, 75 bp, Homo sapiens
agccgctcttaggcgacacacctggaagcaggtgctggagaatctggtaaaagcaccattgtgaagcagatgagg

SEQ ID NO: 424488 - DNA, 75 bp, Homo sapiens
ctttcacaactgctggtcagagaagaacatgtgatcatccaggccgagttctatctgaatcctgaccaatcaggc

SEQ ID NO: 424489 - DNA, 74 bp, Homo sapiens
agcagttcagaagagccaaggaataaacatgcaatgaacccaaaaggtcttcaccacacccaagaactgctcta

SEQ ID NO: 424490 - DNA, 83 bp, Homo sapiens
ccctgtgggcctgggagctgcctctgaggaacacgccgcagcgtggatgcaactagagagacaaatcgcctaggaagactgat

SEQ ID NO: 424491 - DNA, 74 bp, Homo sapiens
gggaaccctggtcaccgtctcctcagaagaagatagtggtgagctggcaaagccaaagattggttttccagaga

SEQ ID NO: 424492 - DNA, 100 bp, Homo sapiens
ctggaagctgagggcacgtgtttgcggttcagccctttgatgaccgcagcagtgcagttcccaaagataaggacagacagtgctttaaactacgccaagg

SEQ ID NO: 424493 - DNA, 100 bp, Homo sapiens
tgagattcccttgcaaatttacatacgagaatggcttgtgaaatcatgcctctgcaaaggtgatgcagaagatggggaagaatatgatgacccttttgct

SEQ ID NO: 424494 - DNA, 100 bp, Homo sapiens
gcatcatcatagctcactatggccttgatcctcctgccttagcctcccaagcagctggtattacaggctccccgaatgagaaagaatactcggaatcagc

SEQ ID NO: 424495 - DNA, 100 bp, Homo sapiens
gcgcgaagatggcagctgctgaggaggagccgaagcccaaaaagctgaaggtggaggcgccgcaagcgctgagcttgatccagctggaggccttcctgag

SEQ ID NO: 424496 - DNA, 100 bp, Homo sapiens
ggggatgcaaggtccaaatctcagcaacccctgtgcttctccccaggtccagccaatgcattcagaagccaaaatggtgtgatgaatgcagactctgcta

SEQ ID NO: 424497 - DNA, 100 bp, Homo sapiens
ggaaaaagtggttctggaaaagcggggaaaggtttggctccagcagctgctgttgccaccaccactagttcaagcaccatgcagtttacctcaatatcaa

SEQ ID NO: 424498 - DNA, 51 bp, Homo sapiens
aattctgaactcaggacttggcaaggaaatgtttcaacgtgcgcaagcgtt

SEQ ID NO: 424499 - DNA, 80 bp, Homo sapiens
tcctgtgactggtcctgtggctcagctctacagcttacctcctgaagataccgacttgttccttacggaaaccattcata

SEQ ID NO: 424500 - DNA, 96 bp, Homo sapiens
gggacgcctactccaaagcggccgggagtcgcgcttcttccccactcccgagacagatacaaggcagatccaaccatccccaccgtggtcctacga

SEQ ID NO: 424501 - DNA, 83 bp, Homo sapiens
ttacaccgacaactccatcaagcctcaggagctgctgctgcacagttggggatcttcaaaccaagatagatggcttggaaaag

SEQ ID NO: 424502 - DNA, 73 bp, Homo sapiens
atgagggtcatgtttcctgtgtgaaattgcttctgtcaaaggactcggtgcggctgctggcggtggaggcgtg

SEQ ID NO: 424503 - DNA, 100 bp, Homo sapiens
ggtggttccatgtgtgctaaatgtgttcgtgacaggagccctgtaatggccggactgcccttcacctcgcagtggacctgcaaaatcctgacctggtgtc

SEQ ID NO: 424504 - DNA, 100 bp, Homo sapiens
agcagcttcaccactggagccagccggtttgcctcggcagccaaggagggcttgaaaacaccacacactgtgagtttgcctacctgcgggaccttctcat

SEQ ID NO: 424505 - DNA, 98 bp, Homo sapiens
aagcaaatgtaactcagcgaattgtaatggaaagcatatggacaggtctacgccacatcacttagctgagatctgtatctgtggacctgaatgttgat

SEQ ID NO: 424506 - DNA, 100 bp, Homo sapiens
cctttgaaacctcgtcattaattggacacagtgccagagtgtatgcactttactacaaagatggacttctctgtacagcccttgaaggtagtggacccag

SEQ ID NO: 424507 - DNA, 100 bp, Homo sapiens
gcctactggacgctgactttgccctggaccctgacaagctgattgggcagaaagtggcccatgctctggcagagggactcggagtaatcgcctgcattgg

SEQ ID NO: 424508 - DNA, 75 bp, Homo sapiens
gtgacaccaagataagtaacgaaagaacagcagtgtttcaggaattttcacattccagaagaggcgtccttcttt

SEQ ID NO: 424509 - DNA, 51 bp, Homo sapiens
agcccccaaaagcagctattcaggagcaccatactggaccaacacagaaaa

SEQ ID NO: 424510 - DNA, 97 bp, Homo sapiens
gatgataaagatgatgatatccttctcaaccttgtgggatgtgaaaactctgttactgaaggtgtcatggagaaactccagctgggcccagagattc

SEQ ID NO: 424511 - DNA, 101 bp, Homo sapiens
gaacatttctcaactccggtgagggaggatccctggatctggtggactttgtgaggcaacatcggataccactgggtgatggcatcagctgagaagggaag

SEQ ID NO: 424512 - DNA, 100 bp, Homo sapiens
cggcgcccccgcagcccgtcacccacctcatctttgacatggacggacttcttctggcccttgaagataaggatggtcaaacaaaataatatcatacctg

SEQ ID NO: 424513 - DNA, 80 bp, Homo sapiens
gaatgggctgaaggaggaggacaaagagcccctcatcgagctcttcgtcaaggttctctttgttcccagacactggtggc

SEQ ID NO: 424514 - DNA, 50 bp, Homo sapiens
gtcccatcactccaaggagagaagcagcccactcacccagtgtacaacat

SEQ ID NO: 424515 - DNA, 75 bp, Homo sapiens
agagcaaagaagaggcctgcaaagctgtacaagagatcatgcagactgtttgtctgtgggatataaacgcaggac

SEQ ID NO: 424516 - DNA, 75 bp, Homo sapiens
cgaaaaaagcttattgggaagaaggcagcaaatatgaagtctatggaccctgcctcaggttattcaaataacatc

SEQ ID NO: 424517 - DNA, 82 bp, Homo sapiens
ccccagcgcagtgaagtggtgagcctttttgtcactgtacttggaccatgagactgtttcagccactttcatcgacagcagt

SEQ ID NO: 424518 - DNA, 124 bp, Homo sapiens
gagtccgatgaaaggaatgggtctgggaccttaacagggagccatgctgactggaaataccggcatgcaggattgatggccttatctgccattggtgaagggtgccaccagcaaatggaaggaa

SEQ ID NO: 424519 - DNA, 50 bp, Homo sapiens
tgccgccaccatgcccaaaacgtgaggtcaccaagaattccctggagaaa

SEQ ID NO: 424520 - DNA, 96 bp, Homo sapiens
atcatatctgtgaacagacaaggttcaaaaactaagcatccagaggccctgagcagctttcagcactggagaggtggggctggtgtccgagcactt

SEQ ID NO: 424521 - DNA, 101 bp, Homo sapiens
agaagatattgacgaagaaggggatgaggatgaaggtgaagaagatgaagatgatgatgaaggggaggaaggagaggaggagaaggagagtgaggatgagg

SEQ ID NO: 424522 - DNA, 74 bp, Homo sapiens
ggccgcgaacccggaccctaagaaggttaatacaatctgttggaatgacactggagaatatattttatctggct

SEQ ID NO: 424523 - DNA, 100 bp, Homo sapiens
gccgctcctggcgctgctggccgcgctgctgctggccgcacgcggggctgctgcccaaggttctatttcaccaattggcatggaaccaacgacaatgagc

SEQ ID NO: 424524 - DNA, 83 bp, Homo sapiens
aaaaacttgtagaaggttgtgaaaaaactactaggatcacgcggcatgtattgaggaagaaatggacaccagaccgaaggtgt

SEQ ID NO: 424525 - DNA, 90 bp, Homo sapiens
ggagctaaagcagcgtgcgttcagccctggggccctgggaggagcggggacactgaggacctctctccaaattggcctctcaactcacag

SEQ ID NO: 424526 - DNA, 74 bp, Homo sapiens
gtgggcgcggaggcgaccgccatggcgttcctcaaactccgtgaccagggtgaataactgtgtgggattttcta

SEQ ID NO: 424527 - DNA, 100 bp, Homo sapiens
atctggtgagcgagggggacctgctgaaggaccagagagggagccctgcctacatcagtcccgacgtgctcagcggctcagcagggagctgctggatgag

SEQ ID NO: 424528 - DNA, 96 bp, Homo sapiens
cttcatggaatgtcttcaaagaatattaaaaaatctggagggactccaacttcaatggttgccaacttggcctgttccatctcaaataatgaagaa

SEQ ID NO: 424529 - DNA, 100 bp, Homo sapiens
ggcgcgggtttggtggcgcgtttcagcgaagtcgcacgtgaaggatagcagtggcctgagaaaggtttctggtcctcataccgtgtggttgagtgaaatc

SEQ ID NO: 424530 - DNA, 100 bp, Homo sapiens
acacagcaatatctctgggctttcacagcatttcacaggacatgcaacgccagtttcgtcactgatgttcactaccatcagacctcctaatgagagccag

SEQ ID NO: 424531 - DNA, 83 bp, Homo sapiens
gtaaacccgaaaaagaaaatgaagaaaaagaaatacgtgaattctggcacaaatgtcatacccaggctatcccccaacaggct

SEQ ID NO: 424532 - DNA, 100 bp, Homo sapiens
agagtctgcatgtggctgcaggacctctgtcagagaatgaaacactcatcgcatgagcctcagctcaaaggcatcgtcaccaaactgttctgccgccagg

SEQ ID NO: 424533 - DNA, 75 bp, Homo sapiens
aagcagtgacggaggagcttgtaccaccggccaggaatagttgctgaacaccccaggcctgctgaggtccctcct

SEQ ID NO: 424534 - DNA, 82 bp, Homo sapiens
cgccgcccggggcgaggcagggccagcagcaggcgggaggtagcccctgaagaagatgaaaggaaaaagaggcgacgagaaa

SEQ ID NO: 424535 - DNA, 125 bp, Homo sapiens
cggagctaggagctggcggcgacggccacaggggcggcgacggcgcagtgcgaagcgaaacagctccagggcccacaacggcagtgtcctacatgtcggtgaaatgtgtggatgcccgtaagaac

SEQ ID NO: 424536 - DNA, 75 bp, Homo sapiens
gtaaaaacgagtttgcccagagatcagaacaatggcctagctgatcccaaagaactaatcaagatggtcaccagg

SEQ ID NO: 424537 - DNA, 76 bp, Homo sapiens
cagggctgcgttcccgtctcgcgtcccggactgagaaggcatgttatttgaaagcaattgagacgcaaccgaactt

SEQ ID NO: 424538 - DNA, 75 bp, Homo sapiens
gtggttgtgtggtcgcgtctcggaaaccggtagcgcttgcagcatgatgagctgcttcagaaagagcaaaactat

SEQ ID NO: 424539 - DNA, 100 bp, Homo sapiens
ttcctcctgtcccaaaagaccatcctgctctcaactacaacatcgtttcaggcaactccgatccaatatccgagaaattgagaaactttgtttgaaagtc

SEQ ID NO: 424540 - DNA, 82 bp, Homo sapiens
ctgatttggctgatcctccagggaccagtttctgtgggcgtgtattggagcagggcatcatggtgggaggcttgaagaggaa

SEQ ID NO: 424541 - DNA, 83 bp, Homo sapiens
attggatgtgaaaatgaagccagaccgagaataactctgtgtcaccctcggaaagcctccgggccagtgagaagcaccggggc

SEQ ID NO: 424542 - DNA, 100 bp, Homo sapiens
atggggttgtgatggcccaggttcttcaaaagataaggtgacaaagtacaatttgaagaatttgcaaaagtagtaaggaatatgcgtgatgctgccaggt

SEQ ID NO: 424543 - DNA, 50 bp, Homo sapiens
cctcacctgtggagctctgggtacaggtttttcttcacatacctcctgcc

SEQ ID NO: 424544 - DNA, 75 bp, Homo sapiens
ttcgaaagcagctaggccaggaccctttctttggacaaatcccaatctgctgaaatatgggaaaaattgaatttt

SEQ ID NO: 424545 - DNA, 97 bp, Homo sapiens
cccaggtcacgtggcacaagcgtgggggcagcctccctgtccggcaccagatcaggaaacagagctcagtgcagcccactaaattgctcagggccct

SEQ ID NO: 424546 - DNA, 74 bp, Homo sapiens
gcagttcatcagccaccgattcccagaagatcatgatcccaccattgcaaaagatacagatattgtggatgaag

SEQ ID NO: 424547 - DNA, 82 bp, Homo sapiens
caagcgccgcggttaaccacgtctcgtccacgacctccctagccttatgccagcctggaccatcttggaggcagtgtaggat

SEQ ID NO: 424548 - DNA, 75 bp, Homo sapiens
tggtatatttggacacaagccttctccagtgccggtggtggtgtgcacattgagccccggtatagacagttcccc

SEQ ID NO: 424549 - DNA, 101 bp, Homo sapiens
gcagaccctgataggagcatgtagtcctcctgttccgctgctagagggctactactataattccttgacccagcagtacctttactgggatggggaaaaag

SEQ ID NO: 424550 - DNA, 100 bp, Homo sapiens
tcgtggcggcggggaccgtccagcccagcgattctcagtcaggttctcttattcaagtaccttccgttgagagggggaaacttagtaaagttcgcctggg

SEQ ID NO: 424551 - DNA, 50 bp, Homo sapiens
agaggaggaagccatgcgtaggagttcgaaccaacgtggcctcaaccaga

SEQ ID NO: 424552 - DNA, 101 bp, Homo sapiens
agaaaacctgcagaagaactggcttcgggaattttaccaggtcaaaatgcagatcttcgtgaaaacccttaccggcaagaccatcacccttgaggtggagc

SEQ ID NO: 424553 - DNA, 100 bp, Homo sapiens
agaaagcagatgttggatttgcaatggctctgtcaacagactcaatagaaagactcccagtgtataacaaagctgcctggaagcattacaacaccaacca

SEQ ID NO: 424554 - DNA, 100 bp, Homo sapiens
cgggtgaagatcggacactacgtgctgggcgacacgctgggcgtcggcaccttcggcaaagtgaagaagatgtacggcttttaatcttggaatatgcccg

SEQ ID NO: 424555 - DNA, 100 bp, Homo sapiens
tgtacatccccgtgctgccgccgcatctgctggactactgctggaggaggaagccaagaatctggtgagcgaagccatcgcagctggcatcttcaacgac

SEQ ID NO: 424556 - DNA, 100 bp, Homo sapiens
ggaatcggtcgcctggaggaccagtatttcccatggaggggaaatggctcattccaagactagcttttcatgggcaacccctttccatccttgccttgag

SEQ ID NO: 424557 - DNA, 80 bp, Homo sapiens
aggccctcaacatcccggagcagctgccacaatgggacatgtgcaagttgggtttcagtaacacctaattttaaggacag

SEQ ID NO: 424558 - DNA, 100 bp, Homo sapiens
cggcgcggagctggacgccgcgatcgtggggcccgcgaggcgggcagccggggcgtccaggtgccattcagtcctttgctggcttcactgactacttcac

SEQ ID NO: 424559 - DNA, 51 bp, Homo sapiens
gctggattgaactcagagaagccggggtctaaagaccctcattccagagag

SEQ ID NO: 424560 - DNA, 73 bp, Homo sapiens
aaggaaaagtggctctgtatggcaagctggtgcagtcagctcagatacggactcagaggaagacgaagaattc

SEQ ID NO: 424561 - DNA, 101 bp, Homo sapiens
gaaaatctccccggtgactttcagggtgaagatgaagccatgtttgtagaatatagaaaacaactgaagttactgttggacaggcttgctcaagtttcacc

SEQ ID NO: 424562 - DNA, 101 bp, Homo sapiens
ccttccccgcccccgtccccgccccgggggccgccgccacccgcctcccaccatggctctgaagagaatccacaagccatttggtcacaatcaatctcaac

SEQ ID NO: 424563 - DNA, 99 bp, Homo sapiens
catgggaggggtatggagaagtccaaggcaaacttgaagataaatcttttgactccagctctttagaggatctaaagtgaccttgatggacagtggaag

SEQ ID NO: 424564 - DNA, 75 bp, Homo sapiens
cacctcagaaatttatagataacaggatcatttcatctaagacaggtgctctagttcacagctataggggaacag

SEQ ID NO: 424565 - DNA, 100 bp, Homo sapiens
tgcagacttggctagtgcaagccttgtttattttcctcaccactgaatctacagacaccagagactctaccaggacataccaaagcaaaacaaccgtata

SEQ ID NO: 424566 - DNA, 100 bp, Homo sapiens
cggagcctagcgtgactgtgcctctgagaagtatgtctgatccagaccaggactttgacaaagagtttgtttcgacgccggaccgcgtaagagacgatga

SEQ ID NO: 424567 - DNA, 100 bp, Homo sapiens
ggaattagtagaggcaatgaaccacatgtatcacagcctgtacctgaaggtgaaggggaatgtgttcaaaaacaagcggattctcatggaacacatccac

SEQ ID NO: 424568 - DNA, 98 bp, Homo sapiens
ccaacaccatgccgtccgccttctctgtcagctctttccccgtcagcatcccagccgtgctcacgggctttgttcgcgggggtcacagctctcatggc

SEQ ID NO: 424569 - DNA, 82 bp, Homo sapiens
caaccccagatccatttacactttacatttttgaatcagagccgacaggcacttgaattgaaaatggaaaaccctactgctg

SEQ ID NO: 424570 - DNA, 98 bp, Homo sapiens
ctgtgctgggtgtcttctccctcgccagctgggatgcagactcatctgagcgtatcattgctcccatgcgctggggcttggtcccttcttggttcaaa

SEQ ID NO: 424571 - DNA, 75 bp, Homo sapiens
cacgctcctgcgggccccgcggagccattgcggccgagcaaacggggattcagcgtccgatcctttggaacaggg

SEQ ID NO: 424572 - DNA, 82 bp, Homo sapiens
tgcggccgcccgtgtgtgacgtcagattttgcaagaacgaggctcaaggatgtgagggacacagtattgacagctgaagaaa

SEQ ID NO: 424573 - DNA, 100 bp, Homo sapiens
tgaaagacccagtgcaaagacatcaccatgaacactagcagaactttatattgctgttggaatatctggagccatccaacatttagctgggatgaaagac

SEQ ID NO: 424574 - DNA, 82 bp, Homo sapiens
aacctcacctttgtctccccgatctacggggctgacatcagcggctctttgtatgatgacaccaaatacacgctgatcgatg

SEQ ID NO: 424575 - DNA, 88 bp, Homo sapiens
cgggtggcttacagacgctgccagcatcgccgccgccagaatctccggcctgtgaaactgtgaggggattcggccaagacgtcctctt

SEQ ID NO: 424576 - DNA, 90 bp, Homo sapiens
caaagatgctctgcggtttttgggctgtgttgacatcaaggatctaccagggaatgtgaaaaaacttggagacacatacccaagtatctc

SEQ ID NO: 424577 - DNA, 100 bp, Homo sapiens
gcgtcctgttcttcctgggggactggcagtttcagaatggcttcggttattgcctttccttggtgtactcgcacttcttggctaccttgcagttcgtcca

SEQ ID NO: 424578 - DNA, 100 bp, Homo sapiens
ccgcgggcgccaatggggagcagaaggactcggacacaggacgcggtgacctttgacgacgtggctgtggacttcacccaggaggaatggactttactgg

SEQ ID NO: 424579 - DNA, 98 bp, Homo sapiens
cgcttccagagcgcagctatcggtgctttgcaggttacagagaagatcccagtaaggcatttatatacaaaagatattgacatacatgaagttcgtat

SEQ ID NO: 424580 - DNA, 74 bp, Homo sapiens
cgcagctccggccgcctggctccccatactagtcgccgactattgggaagaagttacctgcaactacagcaact

SEQ ID NO: 424581 - DNA, 100 bp, Homo sapiens
gattattgcagattttgataagccttctgggagaaaacttctttttaatgcattaaagcacatggacctgatcttcaggtttgcatatccaaaaagccta

SEQ ID NO: 424582 - DNA, 88 bp, Homo sapiens
actacctcctcctttaccccagaacctcctttacacagtatcagaacatcatggaagggaagtggttgctgtgtatgttactggtgct

SEQ ID NO: 424583 - DNA, 153 bp, Homo sapiens
attcgggccgagatgtctcgctccgtggccttagctgtgctcgcgctactctctctttctggcctggaggctatccagcttccagggtctccctccactgctgtagtaacccgggtccggggcctcggtggtgctcctgatgcccctcaccca

SEQ ID NO: 424584 - DNA, 98 bp, Homo sapiens
cccaataaccaggtgcttggcaaaatcgagcgggccattgtcaaaaggaccatacctcctgaactgcaggagcagctgaagaccgtaaagacgctagc

SEQ ID NO: 424585 - DNA, 74 bp, Homo sapiens
cacagcggcagctccagcccggcccggcagcgacatggaaggtttttagaacttcagccataaaaatgggcaga

SEQ ID NO: 424586 - DNA, 50 bp, Homo sapiens
aaacacctaggaagggagaactgagaagaaatgttcccatgaagcctcca

SEQ ID NO: 424587 - DNA, 101 bp, Homo sapiens
aatataagtatacagcatctgtcctcatagcaggtagacgttacatccaagaggaaataatccaggcaaggaagcacaagctgatcaagatgtgtagttct

SEQ ID NO: 424588 - DNA, 100 bp, Homo sapiens
cccttagtgtatacaaggaagcaattcagaaaatgccaaggcagtttgccccacagagcttgtacaacatgatgggactgaatttgctcttaaagaaatc

SEQ ID NO: 424589 - DNA, 82 bp, Homo sapiens
agggccttcgagagctaccgcgccagacagcggggatctgacgagcttttctctacttgtgtcactaacggaccgtttatca

SEQ ID NO: 424590 - DNA, 75 bp, Homo sapiens
ccaccaccgaccgcgtcatcaaaggaatgaatctgaagtctgctgcagtaaaacacagaaggctttaaaatgttt

SEQ ID NO: 424591 - DNA, 98 bp, Homo sapiens
acacttctcagagctgcccctggacgaccaggtcatcctgctgcgggcaggtgctggagaatctggtaaaagcaccattgtgaagcagatgaggatcc

SEQ ID NO: 424592 - DNA, 92 bp, Homo sapiens
tgctctgtgccggcagggtccctgcgctgctgctctgcctggtaagcaatggcatcaaccattctcctcctaccctgaatggtgccccatca

SEQ ID NO: 424593 - DNA, 100 bp, Homo sapiens
tccgcagcaaacaactccgcaaacgaaaaagaacgacatgatgcaatcttcaggaaagtaagaggaaaaattggaagctccaccacccaccccaggacag

SEQ ID NO: 424594 - DNA, 83 bp, Homo sapiens
cccgaggaggcagccaagctcgtagcctgccactccgtgcctcaccatggatgatgatatcgccgcgctcgtcgtcgacaacg

SEQ ID NO: 424595 - DNA, 100 bp, Homo sapiens
atattgaagaacattgtgccaaaaagaggtgctatacttggtagatcagaaactcaggagtgtcttttctttaatgctaattgggaaaaagacagaacca

SEQ ID NO: 424596 - DNA, 74 bp, Homo sapiens
cggcgaccaagatcaggaacctgccctgcatgactttgttcgacgagaccggccactacgtgtcctcattgacc

SEQ ID NO: 424597 - DNA, 82 bp, Homo sapiens
gctgggtaatgaggatttgactgtgaagatggcagtcttgggcacgtccatctgtaaacctgctgagagctctggtgacaag

SEQ ID NO: 424598 - DNA, 74 bp, Homo sapiens
agggcggcgacggtggtggtgactgagcggagcccggtgacaggatggcttaccactcttctctcatggatcct

SEQ ID NO: 424599 - DNA, 100 bp, Homo sapiens
ttctgttggtacattgttagccaaaatgaagacctgtgttgatacctataccaaccgtttaaggttgcatatggccaagtccttggagttataggatatt

SEQ ID NO: 424600 - DNA, 83 bp, Homo sapiens
gaaaagttaagcatgaagtcttgggcaaagatgcgaagtgtgggaagatccagtgtcagagctctgaggcccggcccctggag

SEQ ID NO: 424601 - DNA, 100 bp, Homo sapiens
agatattaataccttacaagagagacagggtcttctatgttgcccaggctgtctttgaactcctgggatcaagtgatcctcctgcctcagccttcgaagt

SEQ ID NO: 424602 - DNA, 82 bp, Homo sapiens
acatggtgggggccacaccatttgccgtggccaggctagaggaattgaatgatctggcacgggaccctccagcacagtgttc

SEQ ID NO: 424603 - DNA, 75 bp, Homo sapiens
ttggaggcctgtctggaggctgaagaggccggcttgcctctgcagtgtgacccagccttactccctgagcccaac

SEQ ID NO: 424604 - DNA, 75 bp, Homo sapiens
tgggtctccttctggattaattacgatgcttcagctgcaagggtggcattaggtcgggtcacaaatcttcgaaga

SEQ ID NO: 424605 - DNA, 101 bp, Homo sapiens
caagcggcaggtgcgcggcttcccactgctgctgcaggaggccctcaggagtgtcaaggccgaggtccatgtgaaatctgaggtccttgctgtcaagttgt

SEQ ID NO: 424606 - DNA, 100 bp, Homo sapiens
tttggacgtaactgatcaattgaatatggacccaagagtcagcggtatattagttcagttaccactaccaggattgacttggcctctacttcttgttaag

SEQ ID NO: 424607 - DNA, 83 bp, Homo sapiens
gggtgctggcgagacgggggtgatgcccacccgggcgagaaagacttctgcctggtgtcgaaggtggtgggcagatgccgggc

SEQ ID NO: 424608 - DNA, 98 bp, Homo sapiens
ctttcactaactttacatccagacaagaataaagatgaaaatgcagaaactcagtttagacaagtggccacgtcttttattagaacaatagagcttgg

SEQ ID NO: 424609 - DNA, 74 bp, Homo sapiens
attactgaggtcgccctcatgggccacctaagggccatgctatgatagtggaagcttatccaaaataatagatc

SEQ ID NO: 424610 - DNA, 100 bp, Homo sapiens
ggaaactaaaaacgcatctatctaacgtttaccctagcaaaccaatcatggaagggaagtggttgctgtgtatgttactggtgcttggaactgctattgt

SEQ ID NO: 424611 - DNA, 75 bp, Homo sapiens
ggcggcgctggaggagcgaggcagctgtactaggactgggaacggggcgccctgcgtccggcagaggaggcgagc

SEQ ID NO: 424612 - DNA, 82 bp, Homo sapiens
ttcttcaggaatggagacacggcttcccccaaggaatatacaggatcatccagcagctcgtcaacggcatcatcacgcccgc

SEQ ID NO: 424613 - DNA, 98 bp, Homo sapiens
gggcttcacagaagaggtgacaggatttggtgctatggagaaatttttggtagaatataagagtgcagtggagaagaaactggcagagtacaaatgta

SEQ ID NO: 424614 - DNA, 96 bp, Homo sapiens
acatctgctcaaggagatcattctggtggatgacaacagcagtaacggagaatccaaatcctcatatggcattccagaaagttccacggccaacag

SEQ ID NO: 424615 - DNA, 89 bp, Homo sapiens
aaaatagaacctacgctgaaattttgggggcaggttctcttgctaggaagaggaggctgcaaaatgggcccgggaagaagaagaagccc

SEQ ID NO: 424616 - DNA, 100 bp, Homo sapiens
cggcgtcttgccaccgggcctgtcagttgacctaccccttgcacacctaccctaagggtgtccgcaatgttgccagtgtctgtctgcagattggctaccc

SEQ ID NO: 424617 - DNA, 73 bp, Homo sapiens
gcagctggaagatggacgtactttgtctgactacaatattcaaaaggagtccacattccaggagctgtgcgag

SEQ ID NO: 424618 - DNA, 98 bp, Homo sapiens
gccaacttctgctacagacgactcagtctgaatttcctgctgctgttcacaaagatgctttttatctttaactttttgttttccccacttccgacccc

SEQ ID NO: 424619 - DNA, 58 bp, Homo sapiens
gacagacacaggctccaaactccactaagactgggtgcctgcatcgccatggacacca

SEQ ID NO: 424620 - DNA, 98 bp, Homo sapiens
tttgatctcagactgctgtgctagcaatcagcgagactccgtgggcgtaggaccctccgagccaggacctccgggagccggcgggttgccaggacaca

SEQ ID NO: 424621 - DNA, 113 bp, Homo sapiens
gtcccggtgcggctgcacgtctcgcggatcatgctggtgttttgaatgctgtatcaaatgcctggggggcattccctatgcctctctgattgccaccatcctgctctatgcgg

SEQ ID NO: 424622 - DNA, 82 bp, Homo sapiens
gtccggactcccccgatcccaggttcaatgtggcttaattgtggtggcctacaaagatggatcacctgcccacccacatttc

SEQ ID NO: 424623 - DNA, 90 bp, Homo sapiens
ctgcggaagtgcagctgcctcagttcttagcgcagggccgcctgggcagaatgtcacgatggacgagggcggcacgcccctgctccccga

SEQ ID NO: 424624 - DNA, 81 bp, Homo sapiens
tggggccagggaaccctggtcaccgtctcctcaggatttttagactctgaggagcagttggagctaatccacattatggaa

SEQ ID NO: 424625 - DNA, 82 bp, Homo sapiens
ctcgtcatgctctttgtagcgtggtgcttctgttgctcacaggttttaaaatcaaagatgggaaaatcggagaaaattgccc

SEQ ID NO: 424626 - DNA, 98 bp, Homo sapiens
gcgcagggcacggtgggcgcctacctggtgtatactcttgatgtaccagatgcattctattactgttatagtccagaccctggtaatgcaaagggaaa

SEQ ID NO: 424627 - DNA, 75 bp, Homo sapiens
cagagctgccctggatgctgcagccaaggaaatgaccaccaaggacaaaactacaaagcgcatgttggtggagaa

SEQ ID NO: 424628 - DNA, 100 bp, Homo sapiens
gggcaggagctgctttttcaatgagaagaatgaacagacctagtgggcgttgcctttagacccaggctctccctgcatgtcctatccaggccacctgtga

SEQ ID NO: 424629 - DNA, 100 bp, Homo sapiens
aggaggccagaaggaaatacgtggtaaattcactccagcagcaacctcaggctgcatccccttcagtaccagagccccactctttgactccagtggctca

SEQ ID NO: 424630 - DNA, 83 bp, Homo sapiens
acttgtgtgttaaagtaacagatgatttagttgtgcggctctatgagtggacaacagagaaggagctgcgcactgagtgcaac

SEQ ID NO: 424631 - DNA, 96 bp, Homo sapiens
gcgggagctggacggcgagcgcgagcggcgcgagaaagtacctgccgtgggcagatctgagctttcttcttggacaccccatacccacagtcctcc

SEQ ID NO: 424632 - DNA, 50 bp, Homo sapiens
gccgccgggcgccgcgcctttggagtcagatggagttcagtatctccgcc

SEQ ID NO: 424633 - DNA, 75 bp, Homo sapiens
ctcaaggactacagtatgcacttaatgtccctgctgccaggatatcgcagatgaattcagagcacaggagattga

SEQ ID NO: 424634 - DNA, 88 bp, Homo sapiens
ggaaggcgcgagtgaggaaaggaggtactgtagagtttatgtggccgaggcagacaagtggaattaggccttgctgcaggggacttca

SEQ ID NO: 424635 - DNA, 75 bp, Homo sapiens
cctgtgtcaccttctcctgttcaaatgtgctcaagtaaagctctttgtgacagggcttttcagcttaaatcaaga

SEQ ID NO: 424636 - DNA, 75 bp, Homo sapiens
cctgctcggggctctgttcccaggtcaaaatgcagatcttcgtgaaaacccttaccggcaagaccatcacccttg

SEQ ID NO: 424637 - DNA, 100 bp, Homo sapiens
atacaggagacaccaaagaagagaaagacaaggatgaccaggaatgggaaagccccagatatcgctccagtgttcacccagcggccagtggacaccacag

SEQ ID NO: 424638 - DNA, 100 bp, Homo sapiens
tggaaattacgggggatggaaggccacatgcattggaaataatagcgctgtacctggcaaagaattctgcaactttgttcagtgccagcgattatgaagt

SEQ ID NO: 424639 - DNA, 100 bp, Homo sapiens
tgaacgtggacaaagctgttgtctcagggagcacagaactctttcgacgtgtagcagcagctttgccgggaatggaaagcacacaggacagaagcagaga

SEQ ID NO: 424640 - DNA, 100 bp, Homo sapiens
caacttcgacgtggatgacgacgtgctgagaaacacgcctatcaagactcttccacctgctacttctaccgagccatctgtaatcttatcaaaaagtgat

SEQ ID NO: 424641 - DNA, 100 bp, Homo sapiens
gatgatcatgctgggagccatctgtgccatcatcgtggtagttattgtaagagtggaagctggacacactatgtgacttgtatgaaaccctgaccatcac

SEQ ID NO: 424642 - DNA, 83 bp, Homo sapiens
cctcgccctcctctggggatcgctgtgcgccggattttttatcaagcagaaatgcatcgaacaacgagaatcaagatcactga

SEQ ID NO: 424643 - DNA, 100 bp, Homo sapiens
aagaagcccctgaccattgaagaggtggcccccgccccgtcgggcctcacgaggtgattcgcaaggggtggctcaccatcagcaacattggcatcatgaa

SEQ ID NO: 424644 - DNA, 98 bp, Homo sapiens
tgtctgatgtggcatctagactttggtttacatacaggaaaaactttccagccattgccgatgaagaggcccctgattatggctctggcgtccgccag

SEQ ID NO: 424645 - DNA, 82 bp, Homo sapiens
gagacatttgaaatttctacagcaacttggcaaggttgtctgcattcaaaagagcattctattaaagctaccttaatttggc

SEQ ID NO: 424646 - DNA, 95 bp, Homo sapiens
gaaggtctctggagacatcttcagcaggtggccatggtggaggtgcagctggagagtgaccacgagtacccaccaggcctgctggtggccttcag

SEQ ID NO: 424647 - DNA, 100 bp, Homo sapiens
ggaaaaggcagctcactgaagcggctccctggcagagaattttttgtgggcctttccaaaaggacaaatcaacgaggtgctgaaatcttggctgatactt

SEQ ID NO: 424648 - DNA, 100 bp, Homo sapiens
tgatcaagcaaggtacctgcaggacccatttgtgtccattgatctcttggagcagctggggatcatgtccaagtggtaagaagttcagaagcaagcctca

SEQ ID NO: 424649 - DNA, 74 bp, Homo sapiens
ccgagctcgatccgctgctcgcacgggagccagctgggtgagaaaatattctctttggaatgggaaatcctctg

SEQ ID NO: 424650 - DNA, 100 bp, Homo sapiens
gtgatggccccttactggcagctttgaaggcaggccattgggtggtgttggatgaggccataggaaaaggatacagagtagagtttcatgaacctgaaac

SEQ ID NO: 424651 - DNA, 90 bp, Homo sapiens
tctggtagtggtgaaggtggaaaaggctataccaaagaccaagtagatggagttctcagggatttgtcttggctgttactatgacacggg

SEQ ID NO: 424652 - DNA, 100 bp, Homo sapiens
gagaaaacgtgtcatcagtgcatttctaaaatcgccagcaatgctccatgttcatgcatgtcttttaacccggaaacaagaagactgtccataggtctag

SEQ ID NO: 424653 - DNA, 111 bp, Homo sapiens
cgctagggaagatcgcaccgcggacgcccgctgagcttggcgcacgggccgaccaggttttggctacgggcctccacctccaccgccagatcagtttgcccctccgggggt

SEQ ID NO: 424654 - DNA, 95 bp, Homo sapiens
gacctctcgctgcttcaggaggacctgcaggaggacgcagacggatgaggatttgacagctaaggatattgaagaaattattgatgagctcaagg

SEQ ID NO: 424655 - DNA, 75 bp, Homo sapiens
cacagattccagcttcggaacaagagaccctgatgatatcatcaagttgaatcgaaaggaagggaagaagcagaa

SEQ ID NO: 424656 - DNA, 75 bp, Homo sapiens
aaggcgaacgcggtctgcaagctgacgtatgcgcgcctcaagttccccatcgactacccatactctccaccagcc

SEQ ID NO: 424657 - DNA, 100 bp, Homo sapiens
cccatccccacagtataaaaagaactggcattgcccgccttgtcgaggaatctgcaactgcagtttctgccggcagcgagatggacggtgtgcgactggg

SEQ ID NO: 424658 - DNA, 82 bp, Homo sapiens
ccaccagcaaccatgagtggttccatgatgggaagtgacatggctccgagctctgtccagtggtgggagtattacatcccct

SEQ ID NO: 424659 - DNA, 98 bp, Homo sapiens
tcaccatcttggcctactacagggacggggcccgcagtgaccctgtgtccctccgctataccccctgatgccctcaccgtggtggtggatgacctccg

SEQ ID NO: 424660 - DNA, 82 bp, Homo sapiens
ttctcgtagtcctgggagcacagcagaagtatttcctcgtcctgtgactgtggagcccatggaccagttagatgatgaagag

SEQ ID NO: 424661 - DNA, 75 bp, Homo sapiens
cgagtttgaagagttccctgccgaaggtttttagaacttcagccataaaaatgggcagaattttccttgatcata

SEQ ID NO: 424662 - DNA, 98 bp, Homo sapiens
atgtacacctcatccctgtacgggtgcctggcctcgcttctgtcccagtgcagaggacgtggtgatggcgttttccaggtcggagacggaagaccgga

SEQ ID NO: 424663 - DNA, 82 bp, Homo sapiens
gctgggccctgaggctgcaccaagtggcgaaggagccggctccaaggcttgggcactgtttaaaggaaagttccgagaaggc

SEQ ID NO: 424664 - DNA, 100 bp, Homo sapiens
cacgcagccgcggcttccggagccctcggggcggcggactggctcgcggtgcaggtactgtccaagaagctggaacattattatccagcaagaatgttcg

SEQ ID NO: 424665 - DNA, 75 bp, Homo sapiens
cagctcattgcctcagctaaataccgtggccagccagtgacagaaaaaagagtgaatgtgcctttaagaagaaga

SEQ ID NO: 424666 - DNA, 98 bp, Homo sapiens
tgggctgtctgtggacctggagcctgctgtcataggcatgaaggaactgactctcaagcagacctagaagatatcattgttgtattaaacagcttcaa

SEQ ID NO: 424667 - DNA, 100 bp, Homo sapiens
cggggccggggtccgcaaggccggagaaggccgccgggcccgggcatggtggtctggggcaacgcggaaggcggcccgcgccgggctgagtcaccaggag

SEQ ID NO: 424668 - DNA, 98 bp, Homo sapiens
tggtgagcagcggcttccgagaaaacggctcgagcagcgacaacccgtcctctcccgagtttttcatggctctgtacacatatgaagatggctccgat

SEQ ID NO: 424669 - DNA, 97 bp, Homo sapiens
ttgcccggggaaccaaagctctcatggatgaggtggtgaaagccacttctaggggctgcatcaccatcatagacttcacagagaatgcagttgtctt

SEQ ID NO: 424670 - DNA, 100 bp, Homo sapiens
tacggcgcctcggccggggcgctcacggccacggcgctggtcaccggggtctgcctggctacatctggtaccttggctggcattatgggaatgaggttct

SEQ ID NO: 424671 - DNA, 75 bp, Homo sapiens
ctttgaggtgtggaatgcgatgactcgagcaaaatatgctgtgaattccatcaagaagaaagtcaacgacaagaa

SEQ ID NO: 424672 - DNA, 101 bp, Homo sapiens
caggaaccctcactgagaataagatggtttttcgaagatgtagtgtggcaggatttgattactgccatgaagaaaatgactttgacccctggtggacaaac

SEQ ID NO: 424673 - DNA, 98 bp, Homo sapiens
cttattatgaccccaatacccagggtttggacagaggagccaaaggccaaatttccactttcagcagttttatttcagctgttagcccgaagaaagaa

SEQ ID NO: 424674 - DNA, 98 bp, Homo sapiens
gccactccagtcggtgttgagcacggcgagcagtctcaggcctttagtgatgatgatatgtcgtccttcctcggccggtgtgctttgagaagggaaca

SEQ ID NO: 424675 - DNA, 100 bp, Homo sapiens
gacagagaacatccaaggttccattaaatacatcatgcttaaccctagttcacgaatcaaggaggagctgaatgatgctgtgggattttctagagtcatt

SEQ ID NO: 424676 - DNA, 83 bp, Homo sapiens
ccgtcaaaatctttgatgtgcgcaatggagggcagatccttatcgccgacctcagggggactgatgaagcccatgatgcccca

SEQ ID NO: 424677 - DNA, 100 bp, Homo sapiens
aacaccagcaccgcagatgttgtcaaggtggcctaccaggaggccaggggtgtcgccatggaggctctgtcggtggtgagcgacgaccagtccctctttg

SEQ ID NO: 424678 - DNA, 100 bp, Homo sapiens
cctctctgagactgcagctgctatgttaagaaaacataccaatattgttgcacagactaattactccaaaggtttcggcggcaaatacggtatcgacaag

SEQ ID NO: 424679 - DNA, 82 bp, Homo sapiens
gaacgaccaagagggtgttcgactgctagagccgagcgaagcagacaagaggagcagcagcggcaccgcccctcaccctgga

SEQ ID NO: 424680 - DNA, 100 bp, Homo sapiens
actcaaatgcagtcggcttgtcctggctcttgccctcatcctggttctggaatcctcagttcaagctattgacctgaaaagtggttctggaaaagtgtac

SEQ ID NO: 424681 - DNA, 98 bp, Homo sapiens
cacctagtcgtggccggaggagtctcagagctgtcagaaaggaagattactaagcagagctaacactgaaaaatcttatggtattgatgaaaacggga

SEQ ID NO: 424682 - DNA, 50 bp, Homo sapiens
gtctccctcccaggacacaggagtcaaggaatctcggccaagaagacagg

SEQ ID NO: 424683 - DNA, 74 bp, Homo sapiens
tgatgatggatccatttctcctattgaggagtcaacaattttcctgcatggagtgctacatcctcttgttccag

SEQ ID NO: 424684 - DNA, 82 bp, Homo sapiens
ccgagagccgccgacatgaagaaagacgtgcggatcctgctggtgggagaacgggactcgggcaagggtgccgaagatagac

SEQ ID NO: 424685 - DNA, 82 bp, Homo sapiens
ggcaaggagctaaagcagcgtgcgttcagccctgggcttgatcctctcccagaaaaggttttacagcaaagacccaatgcaa

SEQ ID NO: 424686 - DNA, 75 bp, Homo sapiens
agcgctcattgggaatttagttaaggtatatgaagacctgaggtataagctctcgctagagttccccagtggcta

SEQ ID NO: 424687 - DNA, 101 bp, Homo sapiens
gaccgcgcgcagggcctgcagcgggagctggacggcgagcgcgagcggcgcgagaaacctggtggagttgacagaagagatcctgaagctgctgatggaac

SEQ ID NO: 424688 - DNA, 82 bp, Homo sapiens
gattcatttagagctgcggaacaggacgccctctgatctgtgagccgtgagctttgaggcggtgggatgtgtcagcagaatg

SEQ ID NO: 424689 - DNA, 51 bp, Homo sapiens
gaacctggcacttatatcctccctgggaagtggagagactgattttggacc

SEQ ID NO: 424690 - DNA, 83 bp, Homo sapiens
ccctcactcttcatggtcactgtgggcctttggagtgacgctgtgggaactcatgactctgggccagactccctacgtggaca

SEQ ID NO: 424691 - DNA, 75 bp, Homo sapiens
caactttccaagtctggggatggccagggatttactcttcaacccgactatcagactattatcaatcctacatct

SEQ ID NO: 424692 - DNA, 96 bp, Homo sapiens
cgggatcccagcctcaggcctgcacggacggtgttggttgggaattaaacaaccaccatgtcgagcaaaaaggcaaagaccaagaccaccaagaag

SEQ ID NO: 424693 - DNA, 100 bp, Homo sapiens
cttcgccgttctatggaaaacattgagctcgggctgagtgaggcccagcatcagaggctccttgaaatgctagatacagagaaggaactgttaaaagaaa

SEQ ID NO: 424694 - DNA, 100 bp, Homo sapiens
atacaaatcacacgcataatggatgaaaggaaccgacaggaattcgatgtcttctttccgtcctgggagaggacataatgatagtcggaggactgtgttt

SEQ ID NO: 424695 - DNA, 100 bp, Homo sapiens
cagccagaagaacaagaagtaggcattgaccccttgtccagttactctaacaagtctggagagaaagcaaccagcgagatgaatactgctgaggactggg

SEQ ID NO: 424696 - DNA, 90 bp, Homo sapiens
agaactttcacctgatccaggccaacaagatgatgctgaataatcccctatttgctggaaatcctcagcttcaagaacaaatgagacaac

SEQ ID NO: 424697 - DNA, 101 bp, Homo sapiens
aatttcagaattttgaacaaatctttgagtcttatgatgtaatcagcgcgatttcacttcctgaatttcgatgaattctaagacatgggcaagatcgggtt

SEQ ID NO: 424698 - DNA, 100 bp, Homo sapiens
gttcaccgaaaatcagtgaaaaaaggttttgagttcacactgatggtggtcgggatattttgcaccatttccctctgtacttatgccgccagtatctcgt

SEQ ID NO: 424699 - DNA, 82 bp, Homo sapiens
gaaaattggatgtgaaaatgaagccagaccgagggtcctgcagttctgagcttgggttccctttgcctggacaccaaccaag

SEQ ID NO: 424700 - DNA, 90 bp, Homo sapiens
aacaatggaaggtttggcatggctgcggccctggcaggtaccatgagaggcatcattgctaaggcgaaattgttccaactgctggtgttc

SEQ ID NO: 424701 - DNA, 74 bp, Homo sapiens
ctggacccagctgagcgggcggtcattcgcatcgcaggtgtggatgaggtcaccattgtcaacattttgaccaa

SEQ ID NO: 424702 - DNA, 100 bp, Homo sapiens
ttgactgagagaaacccactgaagacgtctgcgtgagaatagagaccaccgaggggttatggttttgtgaaattcacagatgaactggaacagaagcgag

SEQ ID NO: 424703 - DNA, 60 bp, Homo sapiens
cagaactgggcccacgagaaggatccacaggtggagccgccaccaaaatgcagattttcg

SEQ ID NO: 424704 - DNA, 48 bp, Homo sapiens
aaggagctgcttcccaataaggaaacaaagttaaaatgcattttgcta

SEQ ID NO: 424705 - DNA, 90 bp, Homo sapiens
actgccatatcactctgtcagacttttaagcttcccttaacgccagtctttgaagggcttgccttcaaatttccagaactacctacggac

SEQ ID NO: 424706 - DNA, 100 bp, Homo sapiens
ctgtaccgttagaagtttttgagtgaatgaaaactttgccattgatttgatagcagagcagcccgtgagcgaggtggagactcgggtgatagcgtgcgat

SEQ ID NO: 424707 - DNA, 100 bp, Homo sapiens
ccggatgctgcggcgcccgctggccgggctggctgcggccgccctgggccgggccccaccggacgtcctcatcaccgggggcatcgtggccacagctggg

SEQ ID NO: 424708 - DNA, 75 bp, Homo sapiens
gcgcagagcgccgcgcgttcgcgctcaagatcaacaggttacttcctcagaatgttggcctcctgtatgttggag

SEQ ID NO: 424709 - DNA, 96 bp, Homo sapiens
cggcggcggcgcggcgcaggcaccggcccggggagaggcaccatgagcgggtattgatgacgtcactggtgaaccgttagtccagcaggaggatga

SEQ ID NO: 424710 - DNA, 82 bp, Homo sapiens
ccgctcctgccggcagctccaaccatgggaggccgcgtctttctcgttgctgctgacacgccgaccgcctgctgcttcagct

SEQ ID NO: 424711 - DNA, 98 bp, Homo sapiens
gccgtgtgacagtaactgaacattggtctaaagtctttccaaaaggtcaaggttcacaagtgtcttgggacaaggtgcgcattcctggtgtgctgcag

SEQ ID NO: 424712 - DNA, 75 bp, Homo sapiens
gctgagctacccgagcggcggcggcggcagcagcggcagcggcaagcacctgaatgtggtggaggcacttcagga

SEQ ID NO: 424713 - DNA, 83 bp, Homo sapiens
agcagccaagccggggcagtttcagtctccaccccaaatgcaggtataatgggtctctcccaaatggcgatagaggaaggagg

SEQ ID NO: 424714 - DNA, 100 bp, Homo sapiens
accttggcttatgccctttctcctgcatcttccaagccagcaatggtatatttgaaggctcccatgattctgaatggagtctgtgttatctggaaaggct

SEQ ID NO: 424715 - DNA, 75 bp, Homo sapiens
ttaggtgaggaagagattgaacagatgctcgtcaatgatcaggtcatagaaggttatgaaatagcctgcagaaaa

SEQ ID NO: 424716 - DNA, 88 bp, Homo sapiens
gggagccccagaaaagcggaagaatttagacgcacactggatctaccttctgagatatcatccttcttcagggagataaggaaaaaaa

SEQ ID NO: 424717 - DNA, 100 bp, Homo sapiens
aaaaatctggtgaaattgccggcaagagggagttaaggacattccaggcagaggcaaggcaagagggcacattgggagattcagcttgcaagagtcctga

SEQ ID NO: 424718 - DNA, 82 bp, Homo sapiens
gatggtgaggaggaaccctcgcaagggcagaaggttgaagaacaggaggcccgccaagctgccccctgtgtgctattctttg

SEQ ID NO: 424719 - DNA, 118 bp, Homo sapiens
ccgagtccgcgggaagatggcggcgccgctcatccccctctcccagcaggtgctggagaatctggtaaaagcaccattgtgaagcagatgaggatcctgcatgttaatgggtttaatg

SEQ ID NO: 424720 - DNA, 51 bp, Homo sapiens
aggaggaggaggaagaggaggagaaggttctgccggagacttccatttggc

SEQ ID NO: 424721 - DNA, 82 bp, Homo sapiens
gtggggattgacagccacgggaaggtttctgcaaatgcgtgaatgagccggatgccagcctctgtcccctggagcccagcgt

SEQ ID NO: 424722 - DNA, 75 bp, Homo sapiens
attccagcactggactcatggaggctgagcatttattcaggaaccatattacgttcgttgcatcaaacccaatga

SEQ ID NO: 424723 - DNA, 75 bp, Homo sapiens
aacaggaaaatcatattatagatggagtaaagggcgacatggagtccaatgggaaatacatcaccaaatctggaa

SEQ ID NO: 424724 - DNA, 90 bp, Homo sapiens
gtccatcttctgcttagtatgtgtattcagacagggattatcagcatagaaagaaagccttgtaaccatcaggtagatacagcaccaacg

SEQ ID NO: 424725 - DNA, 75 bp, Homo sapiens
ggaaagaggaagcaaatataataatggcagcacagagctacattcgaggttatcttatgatgaggcttttgctat

SEQ ID NO: 424726 - DNA, 100 bp, Homo sapiens
gccacttgctgagaatactcttcaagaatgatgatttcatgaatgcacttttggaaagaacaaacagtggatttgaagaatcagattctggtgctactaa

SEQ ID NO: 424727 - DNA, 100 bp, Homo sapiens
gtacggctccacagcagaaacctctgtagaaattcttgctgatataatacaaaacagcacattgggagaagcagagattgaacgtgagcgtggagtaatc

SEQ ID NO: 424728 - DNA, 74 bp, Homo sapiens
gtgaaatcgcgtggactgcaacacccagcagcgcggagttgtaagacgttcatcgccgtgttatccttgagtaa

SEQ ID NO: 424729 - DNA, 75 bp, Homo sapiens
tacatcctcttcaacccctggtgcccaggtcccgcagcccccggaagccaatagactccctcagggactctcggt

SEQ ID NO: 424730 - DNA, 87 bp, Homo sapiens
agccgcagtggatggctggaggtgcagggccaggaggaacatgagggttgtgagtcccggcccagcccctccacccccctgcccccc

SEQ ID NO: 424731 - DNA, 82 bp, Homo sapiens
gcgtgcactccgcacctcggggacattattgcgcgtggaacggctgcttttggaaggtatgtgaggagcagcgctgtgagga

SEQ ID NO: 424732 - DNA, 75 bp, Homo sapiens
cgattgcctacagcattttatgggacttgaagtttttgatgagaattggcagagggggtcgatttgggaggaaag

SEQ ID NO: 424733 - DNA, 50 bp, Homo sapiens
tcaatgtcatccagagcccagagcaggtgctgacctggaggggaagcggc

SEQ ID NO: 424734 - DNA, 98 bp, Homo sapiens
aagccagaggaaaagggaacccttgacacagttttcatatagattggcctccagggcagacagcaggtatgagaaagtgccagtcatcttggttggga

SEQ ID NO: 424735 - DNA, 76 bp, Homo sapiens
gtgcaagagtccacaaagggacctgatgaagcgaagatcaaggttgagtctccttctcagatggatgttgaattgg

SEQ ID NO: 424736 - DNA, 50 bp, Homo sapiens
tggttctgctgaacaaaggcagatctggaaatagtatattcctatttaca

SEQ ID NO: 424737 - DNA, 80 bp, Homo sapiens
ggtagaggagagcaacgtgcagagggtggactcgccagtcacagacagtcattttgtttactcattcagccctgttgcag

SEQ ID NO: 424738 - DNA, 88 bp, Homo sapiens
ggcagtaccgcctccttcccagccgcgcggcttcctccagacctctcggcgcggacaatgcagatcttcgtgaagactctgactggta

SEQ ID NO: 424739 - DNA, 100 bp, Homo sapiens
aattaatatgaacggaataaataattccagtgggatgagctttgtcaagcaagttggagatggagggagattagttcctgttccaagcctcagtgaagct

SEQ ID NO: 424740 - DNA, 50 bp, Homo sapiens
aactagcagattttgtaagggaacgatgcacaaagcagggtcatcagaag

SEQ ID NO: 424741 - DNA, 83 bp, Homo sapiens
agaagaaggcggaaggcggcggaggcggcggtcgccccggggctccggcggcgggtgtctcgtgcctctgctggaccctgact

SEQ ID NO: 424742 - DNA, 75 bp, Homo sapiens
caccacgcagaacgtcaacaccaagtgcatcaccatccccaggtagttaaaccagagagcaatgacaaagaaaca

SEQ ID NO: 424743 - DNA, 123 bp, Homo sapiens
atgttaatattgatattattcaccggattgatagaactgcaagctatgaggagtgaaaccaatccgtaatctaaatggacattcaattgggcaatatagaatacatgctggaaaaacagtgcc

SEQ ID NO: 424744 - DNA, 83 bp, Homo sapiens
tggaagacttgcccatccaatctgaatccacattcatctcaatggaaggatcctgccttaagtcaacttatttgtttttgccg

SEQ ID NO: 424745 - DNA, 50 bp, Homo sapiens
ctgaggcctccccagccaagctgaactagtatgttggataaaggacattg

SEQ ID NO: 424746 - DNA, 75 bp, Homo sapiens
tttaaagagcagactagacttctcaaggcagcctggcatcctcgctacaacctcattgttgtgggccgataccca

SEQ ID NO: 424747 - DNA, 75 bp, Homo sapiens
aagagggtgttcgactgctagagccgagcgaagccaaccatgtccaagggacctgcagttggtattgatcttggc

SEQ ID NO: 424748 - DNA, 50 bp, Homo sapiens
aaaagagatggatgaagctgctacgcgttttgctgctgacatcatctccg

SEQ ID NO: 424749 - DNA, 100 bp, Homo sapiens
gcggcagggctgtgaggcccgccgctcgcatgagcacctcatacggctgcttctggagaagaaaatagaagcacgagtgtctgctgatgaagacctcaaa

SEQ ID NO: 424750 - DNA, 100 bp, Homo sapiens
gagcaggtccgcggctggagggtacctggccctgctgaagggcagccagataagctggtggtggtatggacccgtcggaaccgacgcatctgctccaagg

SEQ ID NO: 424751 - DNA, 74 bp, Homo sapiens
aactctaagttacctgtggatatccttggaagaatgctgggctcttgcactgtttggtggaaatggtgagacag

SEQ ID NO: 424752 - DNA, 83 bp, Homo sapiens
cttctccgccgcggcactgatccccacagagacaagaggagcagcagcggcaccgcccctcaccctggagggtcctgtacaat

SEQ ID NO: 424753 - DNA, 75 bp, Homo sapiens
tctgtgagatgatcacagatgtagttcctgaggtacatcaggaacgtctctatcaagaatacaatttcagcaagg

SEQ ID NO: 424754 - DNA, 100 bp, Homo sapiens
gtgaggcctccccagccatgtggaactggagatgttaatctctgtggccctaggccaggtgttatccctccttatttgtggaattggcttgactagcaag

SEQ ID NO: 424755 - DNA, 87 bp, Homo sapiens
gccaggactgatgcagatgcccctcctccaccagaggactgggaggagcatgtcaacagaactgataaatttcaaacggaagagagt

SEQ ID NO: 424756 - DNA, 82 bp, Homo sapiens
caaaggtcacctggaaattgccttattggaaaaacatttcttacgtctcaccaacggctttgggggtgcgaggagcgagcag

SEQ ID NO: 424757 - DNA, 83 bp, Homo sapiens
ccgggccccggctccggcccgggacggaggagccggcgctcgacacagagggggatatgagactttctactcggaatatcctg

SEQ ID NO: 424758 - DNA, 75 bp, Homo sapiens
ccgaaaaggcgaggagtatagtacggcaaaaaactgtcgatcctgataacttaagtgactctctcttttccggtg

SEQ ID NO: 424759 - DNA, 49 bp, Homo sapiens
aaacaagagagctacagtcgttagcggttcaaaccttgtactactcagc

SEQ ID NO: 424760 - DNA, 109 bp, Homo sapiens
ctgaggttcaactaacggagctgagacgcacctcccagagccttgagatagaactccagtcccatctcagcatgattgaccctgctacgggaatggttatgaatctggc

SEQ ID NO: 424761 - DNA, 100 bp, Homo sapiens
ggcggttgggtgcccgcggccacttttgccttcccgggtgttacacataatattgcattacttcgagaggtgataatcaactcacgctttgtaaaaggag

SEQ ID NO: 424762 - DNA, 80 bp, Homo sapiens
cgttccatctgtggaaggacctaccaaccaggtatcatgatattagctggtttgacatcaagtcatttgtgagtcatcag

SEQ ID NO: 424763 - DNA, 82 bp, Homo sapiens
cttgccagccccacaatcatgaggagagacttcagcatgcaaaccttcatctgttcggcttgcaccgtcattttcattccat

SEQ ID NO: 424764 - DNA, 100 bp, Homo sapiens
tggttgcaacggagataaattcccggaaccgcgattcggcgtgtcagagttacatccatatgggagaatagtctccagatcactacaatttctagctttg

SEQ ID NO: 424765 - DNA, 99 bp, Homo sapiens
tgtattttcatctgaagaagccaaagataaaaatttcaggatcaccattaacacttaagtttcatgctttgagtggcaaaaatatgtgcaactaccagc

SEQ ID NO: 424766 - DNA, 75 bp, Homo sapiens
cgtgcggatcctgctggtgggagaacattcttggatctcccagtcagcttcatttccccgtaatcagaaacaacc

SEQ ID NO: 424767 - DNA, 100 bp, Homo sapiens
ctagatgatgcaaatctacgcaagaatgaactggagacagagaatagccccatggctgggggttatggagtgatgggtgacgatggttctattgattata

SEQ ID NO: 424768 - DNA, 97 bp, Homo sapiens
aaaacaccacagtactatcgtctatcattggatgaagtggctccggagatgttaccatgccagcaatgattccttttgagtttctgacagaagatag

SEQ ID NO: 424769 - DNA, 75 bp, Homo sapiens
tttctgcttcctgcttccacttccgtgaccgttagggacaagacaggcacctgaatggacagaagaggacctcag

SEQ ID NO: 424770 - DNA, 82 bp, Homo sapiens
cttggtcgccgcgtccttggctggcgtgaccatggccaacctggagcgcaccttcatcgccatcaagccggacggcgtgcag

SEQ ID NO: 424771 - DNA, 82 bp, Homo sapiens
atccagcctgcggagcctgtggggcagagactaaggtgtcagtatgttcttcaagctgctctgctcctgggcccaagctatt

SEQ ID NO: 424772 - DNA, 82 bp, Homo sapiens
tcggcccggacgcgcccgcgcccccgcggctggagggtggtcccctgacaagcccaccaggccccctgctgagatggctgtg

SEQ ID NO: 424773 - DNA, 90 bp, Homo sapiens
ggggcttctgcagcgccgatggctccgacccgctctgggactggaatgaaattgaccccattaaaaagaaagaccttcatcacagcaatg

SEQ ID NO: 424774 - DNA, 100 bp, Homo sapiens
cgctacaaccaagagacaccaatggagatctgcctcaatggaacccctgctctggcctacctggcgggcaagtgtccagagaatggctgggatgaaagta

SEQ ID NO: 424775 - DNA, 100 bp, Homo sapiens
cttccgcccgccgccgggcctactgccgtaaccgagaccactttgccaccatccgaaccgcctccctggctacgaagaacctggtgcctcaggacctcct

SEQ ID NO: 424776 - DNA, 100 bp, Homo sapiens
ctactacatgtggaagaccaccgacagatacgtgcagcagaatggcattgtgcccatcgtggagcctgagatcctccctgatggggaccatgacttgaag

SEQ ID NO: 424777 - DNA, 75 bp, Homo sapiens
gatgtgatggtccagaattatgagaacctggtctctgtagctcagtttggcccgctggcccagctgagcccccag

SEQ ID NO: 424778 - DNA, 83 bp, Homo sapiens
ttgcagatcgggagcgcaaggtcgccctcaaggccatgatcaaaacgtggtggcttggcgggaaggaagcccgcgcccgccgg

SEQ ID NO: 424779 - DNA, 100 bp, Homo sapiens
caaagacttagcaaaaaagttgaaagttttgcagttacagcgggagatacagatgacccaccaagaattactcagaaccctgtgatcaatgggaatgtgg

SEQ ID NO: 424780 - DNA, 107 bp, Homo sapiens
gaacctgaagtagcaaaggcaagaaggcaacgacgttccatctgtggaaggacctaccaaccagtatgccgagattttgctgtcctggaggaccacaccctggctca

SEQ ID NO: 424781 - DNA, 82 bp, Homo sapiens
tgtcttcggtggactccttcggcagtccacccaccgccgccgcctcccagagagcgcctgctcgctgtgcccccgggttatg

SEQ ID NO: 424782 - DNA, 100 bp, Homo sapiens
cgcgactcggcgcccgcccgcggcatgtaatgaatttactacacatgtgatgaaccttctccgagaacagagtagaacacgtcccatttctccaaaagag

SEQ ID NO: 424783 - DNA, 75 bp, Homo sapiens
cttccgggagcctagatcctgtgctttactctgaagactcggtcgtcatgtcaaaacgggccagcttgcagccat

SEQ ID NO: 424784 - DNA, 97 bp, Homo sapiens
tgcagcagtggagccaccagcagcgggtgggcgacctcttccagaagctgctcacccgacgactgccacccatcaaagaagctaagcctcggttaca

SEQ ID NO: 424785 - DNA, 75 bp, Homo sapiens
tctggaatgtgtgctgaaagtcatggcttttgggattctggtgcagattgatgagtacgattactccaagcccat

SEQ ID NO: 424786 - DNA, 96 bp, Homo sapiens
cctaggagcagtgggcgctgagagcagcaaggccagaaaagcagcatctgttatagcaaaatacccacacaaaataaagagtggagctgaagctaa

SEQ ID NO: 424787 - DNA, 76 bp, Homo sapiens
acccgtgcttatgcagatagttactattatgaagatggagctcctgtgtcctaccgacctctccactgtatctggg

SEQ ID NO: 424788 - DNA, 97 bp, Homo sapiens
ggacgatgtattactaagctggaaaacatggggtttcgagtgggacaaggattgatagaaaggaaccctaaggactctgcaatatgaataattccct

SEQ ID NO: 424789 - DNA, 98 bp, Homo sapiens
gtcaatgggcatactttgttggttgcatctgctaaagaggatcctgccaacattttacagagcaagtgataatcaagttactatgagtctgctaaact

SEQ ID NO: 424790 - DNA, 100 bp, Homo sapiens
gatgtgatgctggagaactttgcactcgttagctcactggctgcatatctatgtgagactgaattttcctcttagacttcagctaaaactgtgtattgca

SEQ ID NO: 424791 - DNA, 75 bp, Homo sapiens
agcggttctctaccctgtaaaggaggcaagtgaggcctatctggttggcctttttgaagacaccaacctgtgtgc

SEQ ID NO: 424792 - DNA, 78 bp, Homo sapiens
tacgattggaggatgttgcatgacaggctttccttaaagtttcccatgtctcaatggactcctgaatataacgagctc

SEQ ID NO: 424793 - DNA, 75 bp, Homo sapiens
ctggatttcctggttctgtgggctccgtggcaatgaattcttctgtgaacttctctggacggccgccctggggac

SEQ ID NO: 424794 - DNA, 80 bp, Homo sapiens
ctggtgcagaggatcctggaggcctgggaagccaacgaccacacgcacttccccgggcgctgcctggacaggcctgcctg

SEQ ID NO: 424795 - DNA, 50 bp, Homo sapiens
ggaaaatctccccggtgactttcaggatcacatggtacgagaagaagcca

SEQ ID NO: 424796 - DNA, 100 bp, Homo sapiens
gctgctgctggacgccaaccagctccgcgagctgcccgagcaacatggccaacgccctggccagcgccacttgcgagcgctgcaagggcggctttgcgcc

SEQ ID NO: 424797 - DNA, 83 bp, Homo sapiens
ctcttcttcctcctccgctaccaccaccacaccagaaactagcaccagccccaaatttcaagtcccgggcccagagcccggcc

SEQ ID NO: 424798 - DNA, 80 bp, Homo sapiens
aaccacagggtcccgagggtcccttccagctgtcacattctggagcgtatgagatgaggccttgtttgtatgaagtccag

SEQ ID NO: 424799 - DNA, 71 bp, Homo sapiens
acatccaaaagattgggttggtatattcaaggcagaaagtgaaactcttcactgctcacaacaatatgacc

SEQ ID NO: 424800 - DNA, 97 bp, Homo sapiens
cgacccgggcgcggcgcggggaggctgaagggacgctcgggtaggcaaggccgagacgcatccagagctttcgtgaccggggactgttctgaagcag

SEQ ID NO: 424801 - DNA, 75 bp, Homo sapiens
ggaccatctacagagctgctactcaaaacttaagaaatagagctgaggtcaaaggctggaaagtcatcaggagaa

SEQ ID NO: 424802 - DNA, 75 bp, Homo sapiens
gtgctggtctttctcaacctcatcttctggtgtaaagagaatggcgctttcactgtgcttgttgacaactatgtg

SEQ ID NO: 424803 - DNA, 75 bp, Homo sapiens
gcagaagaaggggaactcctgctgcccactcaggcatttctcattgcaattgtggtaccagatgttgagacatta

SEQ ID NO: 424804 - DNA, 83 bp, Homo sapiens
cgtcagcgagggcgccgagcaacttcgccatgccagtgacggtaacccgcaccaccatcacaaccaccacgacgtcatcttcg

SEQ ID NO: 424805 - DNA, 83 bp, Homo sapiens
ggaaaagcgagcgatcgagcgagcgcgcgcgcgaaaactccgggcagacaatgcagatcttcgtgaagactctgactggtaag

SEQ ID NO: 424806 - DNA, 96 bp, Homo sapiens
ccaagtgctggccagtgagcccatcccgttctctgatttgcagcaggaaacctgtaggaagtgtcagggactctggaaagaacataatggcctcac

SEQ ID NO: 424807 - DNA, 100 bp, Homo sapiens
caggagttcgtctcttacgtctgcggaagtgcagctgcctcagttcttagcgcaggtttctagagaggaaggatctccccagctgtcttcagcaaggccg

SEQ ID NO: 424808 - DNA, 100 bp, Homo sapiens
accaactgtaggttccaggactagagagccagcaatgcctccatgaacaatctcacccaattactctgctcagggatggcatagagtttgcatttaaata

SEQ ID NO: 424809 - DNA, 90 bp, Homo sapiens
gtcctcccgaagctacagactacagatcgggcactttctgtgtctagctgtctgcttttctgtggagactgcgggttgcagacaccagca

SEQ ID NO: 424810 - DNA, 100 bp, Homo sapiens
gacttgcagaagtaccacaacagggacacctggttccagctgcagcacgtggacgctgactcggaagtgcagcaaggacacccaggcccattattttcct

SEQ ID NO: 424811 - DNA, 75 bp, Homo sapiens
ccgctgggagccgttattggctgccgttaaggaccgttacgtttcccgggcatctgggaacaaagtcagtcgcca

SEQ ID NO: 424812 - DNA, 101 bp, Homo sapiens
cgtgctgaggaccgggggtggaggtggtgcctctggcagtgacgaggacgaagtgtccgagggtgtgtttgaccatcgaatgaagtgctggcagaaatggg

SEQ ID NO: 424813 - DNA, 100 bp, Homo sapiens
caagagggatccttcacccgtgtctggaacaacaacctgaccttcctgcggccgtactaccagacggaggagggcgaggagaacccgttcatctgctcct

SEQ ID NO: 424814 - DNA, 100 bp, Homo sapiens
gctgctccgaggggtctggaagccagagaccaacgagatcctgcacatgtctttgccttgctgtctctaaccctgatctgatctcctgccttgagcaaat

SEQ ID NO: 424815 - DNA, 76 bp, Homo sapiens
acaagaatgtttgctgaccctcatggcaagctgcgcaaaccatgcaggatgatttactgatggacaaaagcaaaac

SEQ ID NO: 424816 - DNA, 98 bp, Homo sapiens
tactggagagaaatcctacaagtgtgtttcgttgattgcaaggagtgtggccggaagatgcatcagatttgcgttctgcactatgacatcatttggcc

SEQ ID NO: 424817 - DNA, 96 bp, Homo sapiens
aaggccctgggcaagaacgctgagaaacgagcatcccgagggccccgtcttcggacgaggagtgcttctttgacctgttgaccaagttccagagca

SEQ ID NO: 424818 - DNA, 75 bp, Homo sapiens
aggacagcgagcgcagcagtgacggcgaggaggccgaggatgaagcctgctgggagcgtgaatgacatggccctg

SEQ ID NO: 424819 - DNA, 100 bp, Homo sapiens
tccgaatatctttgcctatgcctgtgatttttctccaagagccattgaatatgttaagcttttagaggaacttgataaaacaccatggcagtatcctcca

SEQ ID NO: 424820 - DNA, 75 bp, Homo sapiens
accttctccaccagaatccagctcacgctgtgaagtaagaactctgctagagaggaaatggctgcttcatcatca

SEQ ID NO: 424821 - DNA, 100 bp, Homo sapiens
gctatgtacgccctcttcctcctggccagcctcctgggcgcggctaaagtccaggaagagattgaatgtgtagttggcagaaaccggagcccctgtatgc

SEQ ID NO: 424822 - DNA, 100 bp, Homo sapiens
catgaaggacagcctcttctcaatgaagaagacctatcaatgcatcaagtgtcagatggttttctacaatgaatgggatattcaggttcatgttgcaaat

SEQ ID NO: 424823 - DNA, 82 bp, Homo sapiens
ccaccgcctgagggcggggtgtacgaaagagaaacccggagggcgccggggtttggtgcacctcgatttggaggaagtaggg

SEQ ID NO: 424824 - DNA, 100 bp, Homo sapiens
tcagtcttcatgattgaagaactcttttgtacaacacaaaggtttgctggttggctcccgagcagacagcaggaaagaagaagcccttcgtgtacaccca

SEQ ID NO: 424825 - DNA, 75 bp, Homo sapiens
ggccacctgcctattgtgatgccaaagaaattaaagatgccatctcgctagaggaagcagagcactttgccatga

SEQ ID NO: 424826 - DNA, 83 bp, Homo sapiens
gctgcctcggcccggacgcgcccgcgcccccgcggctggagggtgatgactcctcctctgagagtggcagcggcaatggctcc

SEQ ID NO: 424827 - DNA, 75 bp, Homo sapiens
gccgtccagagactggcaggcctcggcctaaagctcactgcaaatctaacttcatcatggtgaactaatttagag

SEQ ID NO: 424828 - DNA, 100 bp, Homo sapiens
cagaacagcacgtaccagaggtggaagtccaagtcaaacgcagaaggactgcctcactgagcaaccaagattaaatccagatgtgaatgttttccaacgg

SEQ ID NO: 424829 - DNA, 100 bp, Homo sapiens
agcaaaagaatgaattgttgtcaatggaggctgaagtttgtgaaaaaattgggtgtttgcaaagatttaagattcgagtggtgaatgcatttcgtagttc

SEQ ID NO: 424830 - DNA, 75 bp, Homo sapiens
ctgtgatgcctgcagagctgtggcttaccaggaaggtgctcgggtcttcggggcactgggtcccatcggtccctc

SEQ ID NO: 424831 - DNA, 83 bp, Homo sapiens
tgtggagcagatccgatggagaggctgagctgctccaggacttgggattactgtggcatgatcctccaccattcacactctac

SEQ ID NO: 424832 - DNA, 74 bp, Homo sapiens
gctcgctgggagagaggtacctctccttttccctctccctttccctaagagctgccatcagtcatgctcttaaa

SEQ ID NO: 424833 - DNA, 75 bp, Homo sapiens
tgtgctcctggccgtggccaagctgtgggtgagcgtggaggatgctcagatgcacaccgtcaccatctggctcac

SEQ ID NO: 424834 - DNA, 100 bp, Homo sapiens
gcaggcgccttcgcggaccgagcctgacggagccggaggctgggagccgcggcggcctggggacactttcttcatgagcaacaaaccccaaagatacaaa

SEQ ID NO: 424835 - DNA, 88 bp, Homo sapiens
gagactcctgaccctcagaatggttttaaatgcacagagagcaggatacaaggcagccatagttcacaatgttgattctgatgacctc

SEQ ID NO: 424836 - DNA, 100 bp, Homo sapiens
gcggcagagttaggtgaaatttcagacatacacaccaaattgttgagattcctctgtgacgagggtgcaggtatctctggggactacatcgatcgcgtgg

SEQ ID NO: 424837 - DNA, 51 bp, Homo sapiens
ggcttacgcagaaggacctggccacgctgtgtttcagatgactcggtaaag

SEQ ID NO: 424838 - DNA, 74 bp, Homo sapiens
cgggatgagggactgtggcggcgcggcccgcgcgcagccggccgataagaccatcatcatgtggaaactgacca

SEQ ID NO: 424839 - DNA, 82 bp, Homo sapiens
agcggaagaatggcagtgctcaaactcaccgaccagtaatcctaaattggagagtcagagagtaaataaaaaagtcaataat

SEQ ID NO: 424840 - DNA, 90 bp, Homo sapiens
ggaaagaaagatatagagacaacgactatgtccaattttcatgctcagaaagcatccctggagaacagcctggaggagaccaaaggccgc

SEQ ID NO: 424841 - DNA, 82 bp, Homo sapiens
ccatcgaagaagagtccttggaacaagcaactggctattgaaaagtggagcccacagtgaccatctccccatccaggacaga

SEQ ID NO: 424842 - DNA, 75 bp, Homo sapiens
tagaagccgggattgagcgcatcaaggcctccggtgtggctgtctctgatggtgtcatcaaggtgttcaacgaca

SEQ ID NO: 424843 - DNA, 90 bp, Homo sapiens
attgctttaagttttctcatttattttatatctgcactctttgggtacctcactttttatggtctctaattaacagaagatggcaaagcc

SEQ ID NO: 424844 - DNA, 101 bp, Homo sapiens
tgtggtacagagtgttgagaagtttattcagaaaatctggcagtgtggtggggttctggaaacacacccatgttcccatgttggccatgttttccccaagc

SEQ ID NO: 424845 - DNA, 100 bp, Homo sapiens
ggagggactatggcatcaaacagcctcttcagcacagtgacaccatgtcagcaaaacttcttttgggattcgattacgtatcctccctggcacggagcag

SEQ ID NO: 424846 - DNA, 82 bp, Homo sapiens
tggcggcggcgggtcaggagcagccgcagcgacggcggcgacagcagatgcggcattccaaaagaactcactgtcctgattg

SEQ ID NO: 424847 - DNA, 100 bp, Homo sapiens
gcctctggcatccccgacttcaggtcccaggtgtgacaccttcagcaggtctcagggaagatggcagccctaggggacattcaggagtccccttctgtcc

SEQ ID NO: 424848 - DNA, 76 bp, Homo sapiens
ctgcccacaaggcttcactggacccagctgtgaaacggcattgtttgtgctccccaaacctaaagtgatctcctgt

SEQ ID NO: 424849 - DNA, 82 bp, Homo sapiens
tgggtgcgtggggctgcctcgccgcgtctcgccacggtgagaagccctaccactgcaactgggacggctgcggctggaagtt

SEQ ID NO: 424850 - DNA, 100 bp, Homo sapiens
ctgcaagactgtcgacctaaagcctgactggggcaaggtgacaatctccaatagacttgtgtcttcaccttgctgcattgtgaccagcacctacggctgg

SEQ ID NO: 424851 - DNA, 100 bp, Homo sapiens
agatgtccggctgcagcagcaagtcccatcggaggacctccctgccctgtataccgagggaacagcacggccacatgatttcttcgatgcacaaacactg

SEQ ID NO: 424852 - DNA, 75 bp, Homo sapiens
gaattcccttgtcataagatggttcttgcaacatgtagctcttatttcagggggtgctcaaaggatttaaaggag

SEQ ID NO: 424853 - DNA, 90 bp, Homo sapiens
cccccggcctatgcccccactaacggggacttcacctttgtctcctcagcagacgcggaagaaaagaggcctcaggatgccaagaacact

SEQ ID NO: 424854 - DNA, 100 bp, Homo sapiens
ggaacttgtgattgagcagtttgaagacttgctagttaggattttattactggcagcatgtatatcttttggcaaactctttgattctacaatagctgat

SEQ ID NO: 424855 - DNA, 100 bp, Homo sapiens
ctgcacttcgcattttggcattgacatttaattttagggtcctttatatagaagggagagtagggccatccaggagagcctcctcaccagcacagaaggc

SEQ ID NO: 424856 - DNA, 76 bp, Homo sapiens
cagctccagggggccatgcagcacttcagccaaagattcctctaccaggttctgcggggagtgtctccagccctgc

SEQ ID NO: 424857 - DNA, 98 bp, Homo sapiens
agaattatgcagttgctcgatgtgcctcctggtgaagacaaggggggatatgtgatcaaagcatcagaaggctgtgactctggttttggcaaggagac

SEQ ID NO: 424858 - DNA, 100 bp, Homo sapiens
agatttttgtggatgaagataaaacgggtatcaatattcatttagctaaaaaaatgattgaagatcggagtagagattatatgaatgctagacgtgtagc

SEQ ID NO: 424859 - DNA, 100 bp, Homo sapiens
aggtgatccagcaaggtcggcagagcaaggggcttacgcagaaggacctggccacgtcaggatggctaaaggtgaccccaagaaaccaaagggcaagatg

SEQ ID NO: 424860 - DNA, 98 bp, Homo sapiens
cgaggtgaaggcgccgcgccaggccggggggcggagttcgtgcttctgaaaggctggctgaaatagacatgccatacctcctgaaatatcaacccatg

SEQ ID NO: 424861 - DNA, 100 bp, Homo sapiens
attcctttttgcaccatccgtactaccagggctcaagggttcttgttgatgcacgagataagcttggcattccttggcagtattctgaaaatgagaagca

SEQ ID NO: 424862 - DNA, 100 bp, Homo sapiens
gcgctcgggtgaggagctggtggcgtcggcaggttcgaggcgattcgagtgaacagcagagaatttcaaaggaccttgctaatatctgtaagacggcagc

SEQ ID NO: 424863 - DNA, 75 bp, Homo sapiens
gccaaaattatcaacaccaaaaagctttctgctaggggttttcccatcatatgattcccggtcctcctggtcccc

SEQ ID NO: 424864 - DNA, 107 bp, Homo sapiens
accagggaaacttatacaggccgcttttgagaggacaagcccagattccaaaacttatgtcaaataatgtggatgcaaatgatcttaagcagttttttgagaccaac

SEQ ID NO: 424865 - DNA, 74 bp, Homo sapiens
acccctagaccggtttttagtccattgactatgcagcctaatggtaagaatgattgatgttggctgatattgga

SEQ ID NO: 424866 - DNA, 83 bp, Homo sapiens
agctagagaccatacagacctaccggtctgtcagtgagatggcttctaacaagatgtcatgtggcctgtgttttggaccgtgg

SEQ ID NO: 424867 - DNA, 100 bp, Homo sapiens
tcctttaaatccggagggggaaaaaatcccaaggtctgcaaagcagggagagcaacaagccccggccctcagagctcagccggatgagcgcagcccagag

SEQ ID NO: 424868 - DNA, 75 bp, Homo sapiens
aggaggagggggaagcggcggcggcaaagggatttggagttccatggagtgatgagattttattttcaagataaa

SEQ ID NO: 424869 - DNA, 74 bp, Homo sapiens
ggattctcgacctgctaacagaactggaccttttcggtgccactgattaatgaacttgaatcagcaatacatca

SEQ ID NO: 424870 - DNA, 101 bp, Homo sapiens
cttgaagacggctgagcagacagccagcagatatgaggacttaaaatctccaaatcagagagatgaaattgcaggagcccgagcttcactgaaggagaact

SEQ ID NO: 424871 - DNA, 51 bp, Homo sapiens
agctcagcaattcttaccttcaaatgccagaaaattcttgggaaaaatgca

SEQ ID NO: 424872 - DNA, 74 bp, Homo sapiens
tggccgtgccctggggctgagccctcagtttggcaatgaggagcagcagctggcgtgggccaagcgggagagcg

SEQ ID NO: 424873 - DNA, 100 bp, Homo sapiens
ttttgttttctgcacagtccgacaaagcggctctccagcaagaaggtggcaagggtctccctcttttgtccaaggctggagtgtggtagtgctatcacag

SEQ ID NO: 424874 - DNA, 51 bp, Homo sapiens
acttttgagaagcattcgactgggcaatttggttttgatgctgtgccagaa

SEQ ID NO: 424875 - DNA, 97 bp, Homo sapiens
agcttgccaactacggacactgtgacttttcagccatcacaattgtatctactggaagagacccaaagaaaagatgaagaaatgggatctctgcagg

SEQ ID NO: 424876 - DNA, 74 bp, Homo sapiens
gttcccgctggcggcgggcatcttcttcgtgaggctgctcttcgagcggtagatttcgggcagacaacttgaac

SEQ ID NO: 424877 - DNA, 74 bp, Homo sapiens
gtccagcccaggaaaatggagagggaaaacaaagtgcatgatgaagtcttcagactgtgtcataaagcatgctg

SEQ ID NO: 424878 - DNA, 82 bp, Homo sapiens
gggccagggaaccctggtcaccgtctcctcagacttaattcagtgcacaaatgagatgaatgtgaacatcccacagttggca

SEQ ID NO: 424879 - DNA, 90 bp, Homo sapiens
agctgagagaggcatctggagctgcagcatggaccagcgagagcccctgcctcccgctcctgcagtggacagaggactgcagaaaatcaa

SEQ ID NO: 424880 - DNA, 75 bp, Homo sapiens
gtcctggttcctcttacttcaatttgaacccatttgagtgattcgcctttgccagtctcatctcgtgtctgcttt

SEQ ID NO: 424881 - DNA, 77 bp, Homo sapiens
ggtggcaaacagcagtggtggacgtttccctgaaacctgggctcttgaagacgcatcactggagcagatggataatg

SEQ ID NO: 424882 - DNA, 90 bp, Homo sapiens
gtggaagcagagaactgggaggccaagttaattggccttggtcctcacagctccaaaaagaaacaggatctcgataagctctatgagctg

SEQ ID NO: 424883 - DNA, 82 bp, Homo sapiens
cgggaagacgcggggaagaggaggcggaaaaggacgcaaagttctccggcgagatgcacgtgtttagaggccagctcctgcg

SEQ ID NO: 424884 - DNA, 100 bp, Homo sapiens
tagagctggcttccctcctggttttctgtgagatgcggccagtcctggtcttatggaagtgtatttaaagcaatacacaaggaatccggtcaagttgtcg

SEQ ID NO: 424885 - DNA, 98 bp, Homo sapiens
ccacagtgggggtgtgcaaacccgagagaactggaagaaaggtgagcagccaacaggccagcagcggcggaaacaccagatcacatatcttattcatc

SEQ ID NO: 424886 - DNA, 75 bp, Homo sapiens
ccatgccgtcggagaagaccttcaagcagcgccgcaccttcggtggccagcatcgaaatgttcagccttttagtg

SEQ ID NO: 424887 - DNA, 88 bp, Homo sapiens
ctcggcgcccgcctgccgcctccggagcgcctgtgtgggaactcgaatcatttatgacagaaagtttctgttggatcgtcgcaattct

SEQ ID NO: 424888 - DNA, 100 bp, Homo sapiens
atcagacatcaaagagttcacactgaagagcaaccctgaaaaattactgaatgtgaagaaatctcctggtccatacgcagacatagcagcacttgcggca

SEQ ID NO: 424889 - DNA, 100 bp, Homo sapiens
cccggtgcccgaggaggcagccaagctcgtagcctgccactccgtgcggccgtgggtctggatttccaggaaagcggagacctcgaggtgcaggactgtc

SEQ ID NO: 424890 - DNA, 82 bp, Homo sapiens
ttgcatccttggagagagctgagagctggagatctttaatctcatgaagtacgacagctacagccgcttcttaaagtctgac

SEQ ID NO: 424891 - DNA, 100 bp, Homo sapiens
gtggagaacaaatccaagattagcacaggtcttctccctctggaaacagcaggataactcagggatctctttaaaagtgatccaggaagatggattatct

SEQ ID NO: 424892 - DNA, 75 bp, Homo sapiens
agcgggtggctctttttccgttacttggctattggctcaatggctgccatccggaagaaactggtgattgttggt

SEQ ID NO: 424893 - DNA, 111 bp, Homo sapiens
cgagtaccttccctgtcccatcgcaaacccaaagatccccgttcctggagattctgattgagacaatgcagatcttcgtgaagactctgactggtaagaccatcaccctcg

SEQ ID NO: 424894 - DNA, 89 bp, Homo sapiens
aatcctcactctgagtacggtctcacagacaacgttgagagaggtgagagacttcagaggctgccctttcttttcatctgctgcttgtg

SEQ ID NO: 424895 - DNA, 72 bp, Homo sapiens
ccttcagaaacacagtatatttctgagcccaggcactccacagaaggatgttattatcaagtcagatgcacc

SEQ ID NO: 424896 - DNA, 100 bp, Homo sapiens
ccatctaaagcaccagtaaaatatggtgaactcattgtcttaggttgcaaaggtgcgctgcctcccacaagttcagctggaccctctgcccacgactctc

SEQ ID NO: 424897 - DNA, 100 bp, Homo sapiens
ggtggttttactggagtattggaactcaggaaaaacagcactggaggcaatgtttctataaatcaaagaagagacagtgtgagaatgtcagccctcaact

SEQ ID NO: 424898 - DNA, 87 bp, Homo sapiens
gaaaagttgtcagtccttactgttcaggacgttggtcaggtgatgcctggaggtgtcccaccggccttccgggttccagcgccaggc

SEQ ID NO: 424899 - DNA, 74 bp, Homo sapiens
ttccatgagaccgtgcacacccagctactgggctctgcaacaatggtgtggttggtgaatatggcagaaggaga

SEQ ID NO: 424900 - DNA, 75 bp, Homo sapiens
cgctcctgggtagcccctgtggcaaaggccagccctgcaggctccaagcaaacctgatggccaaaagaaaggaag

SEQ ID NO: 424901 - DNA, 110 bp, Homo sapiens
agggagagcccacccgcgccaggaggccgaacgcggactcgccacccgggtcagcccaaggctgccccctcggtcactctgttcccgccctcctctgaggagcttcaagc

SEQ ID NO: 424902 - DNA, 82 bp, Homo sapiens
ggggagcaaggtgcaagagtccacaaagggacctgatgaagcgaagatcaagggcttaaaagacaaccttcttgcttctggg

SEQ ID NO: 424903 - DNA, 75 bp, Homo sapiens
cttggtgaagagttactagctcaagaggaagctggcgcgtatggcagccgaggagcacactctgcaggacactgg

SEQ ID NO: 424904 - DNA, 49 bp, Homo sapiens
aagggacggatacaacgactagagggcttaaaagacaaccttcttgctt

SEQ ID NO: 424905 - DNA, 100 bp, Homo sapiens
gagacatgactgcgttcaacaagctagtgagcacaatgaaggcaagtgggactttgccttctcagcccaaagtcagctgctctggtctggggtctctctg

SEQ ID NO: 424906 - DNA, 73 bp, Homo sapiens
cacacattaactgaagtggagcttctggcatttacatcaactggtgtcgttcagtatttctacattgaagact

SEQ ID NO: 424907 - DNA, 83 bp, Homo sapiens
ccgccctaatggaggtctccagtttagaactatggtgttctcacaccaaagcatgggctcggccacccatcccctctcctgag

SEQ ID NO: 424908 - DNA, 97 bp, Homo sapiens
agaaagacaaggatgaccaggaatgggaaagccccaggttggtcaaagaaaaagtgatgtatgaaaaagaggcaaaacaacaagaagaaaagattga

SEQ ID NO: 424909 - DNA, 97 bp, Homo sapiens
gcggagactccaggccgcttccagggcggtacaggtttgcagattccgccagcagcacagcaagctctacagatgagtggctctttggcatttggtg

SEQ ID NO: 424910 - DNA, 98 bp, Homo sapiens
ctttgatataatgcctcattcagaacttcattggcagaagttgactgagatcagaggccctgtgatgatcgtgtcagctgtcttttggggagacattg

SEQ ID NO: 424911 - DNA, 75 bp, Homo sapiens
tggaggctctgggggtgcagccgggggctacggaggagctggaggaggccctggccaacgtcaacattgggagcc

SEQ ID NO: 424912 - DNA, 101 bp, Homo sapiens
tatgtgcccaagaatttcatagacatccagtttcccaatgttctggacttggtgcctctttctgttatatgctttcctatttagttgggagaccagttgta

SEQ ID NO: 424913 - DNA, 85 bp, Homo sapiens
atcgtcatcacagtcaactatcgacttggagtactcggtggagccgccaccaaaatgcagattttcgtgaaaacccttacgggga

SEQ ID NO: 424914 - DNA, 75 bp, Homo sapiens
ctcctgtcagtggacagtttggagctcgaggccatgagcagatataccagcccagtgaacccagctgtcttcccc

SEQ ID NO: 424915 - DNA, 75 bp, Homo sapiens
ggtcaggtctggagctcgaccgggccagtgatgatgatgatgattttgatgatgaggaagctgaagaaaaagcgc

SEQ ID NO: 424916 - DNA, 75 bp, Homo sapiens
agaacaagaagtaggcattgaccccttgtccagttactctaacaagtctggagataacgaaggaggcccaacttc

SEQ ID NO: 424917 - DNA, 82 bp, Homo sapiens
tggaggacctggaccgtgtccttaccgtgacgtccaccgacgtgaaaggtgtagcagtcactcggcctacacccacagcatc

SEQ ID NO: 424918 - DNA, 74 bp, Homo sapiens
tagagattgtgaagaagaatttcgatctccgccctggggtcattgtcagaggactactgagcccagccaggctg

SEQ ID NO: 424919 - DNA, 75 bp, Homo sapiens
gactccttcggcagtccacccaccgccgccgcctcccagactccgccgtggtcatggaggagggaagtccgggcg

SEQ ID NO: 424920 - DNA, 75 bp, Homo sapiens
cttcgcctttcccgagccctggaggtggggagaaaaggcaagaggaggaacgacgtagaagagaggaagagatga

SEQ ID NO: 424921 - DNA, 100 bp, Homo sapiens
agttgggaggacccgggacaccgcacagccgggaaatgtatttggcatgatcattactatcggccagtctatcgtgtatgtgatgaccgggatgtatggg

SEQ ID NO: 424922 - DNA, 138 bp, Homo sapiens
ttatgcagttgctcgatgtgcctcctggtgaagacaaggggggatatgtgatcaaagcatcagaagcaagtctggaaaagtttgaaattccagtaaaaattcgtttgagtcctgaaccgtggacccctgaaactggtc

SEQ ID NO: 424923 - DNA, 106 bp, Homo sapiens
gattgcgactgttgacagagctataaactcaacccgaacacatttgtttgacagagaaactccagaaaatcttgccaaacttctgaccaggatgtatttaaaatca

SEQ ID NO: 424924 - DNA, 87 bp, Homo sapiens
atggatgtgatgcctgctagccaaaaggagtgcctggaagagctgggatgtctggttgagtcctatggcatgaatgtttgccaacca

SEQ ID NO: 424925 - DNA, 100 bp, Homo sapiens
tggagaatgtcatcaagcagcacattcaaggttgtaaacatgttaaaggcatcctgttatatggacccccaggttgtggtaagactctcttggctcgaca

SEQ ID NO: 424926 - DNA, 90 bp, Homo sapiens
ccaaaatgagtcgcatcttcaacccccatctaatgccagaggattcaacatgagcatacctatgcctgggcatccagtgaacttctccag

SEQ ID NO: 424927 - DNA, 82 bp, Homo sapiens
gggcgcccagagccgcgccgtccgcgccgcccgttctgttctccaaggagaagtacatcctggactcatcgccagagaaact

SEQ ID NO: 424928 - DNA, 100 bp, Homo sapiens
accagagagagggtttggaggcagcccctaagggcccttcgcgggagagcgtcgtgcacgcgggccagaggcgatttattcaggagattgagcatgctct

SEQ ID NO: 424929 - DNA, 90 bp, Homo sapiens
ctttggaagattatccatgacactgttctgccctgctctgctctaacaacatttagtgcctggtgaagaatgtgatgggatcactagcat

SEQ ID NO: 424930 - DNA, 100 bp, Homo sapiens
gtgggagctgcctaggccgggccctgccagggagcaagtctgcatcgcagaggccaggaggcaccttccactagcaacagtctccccaggcacaacacag

SEQ ID NO: 424931 - DNA, 74 bp, Homo sapiens
tgaacgtggacaaagctgttgtctcagggagcacagaagaggagatgttaaagtaacccatcttgcaggacgac

SEQ ID NO: 424932 - DNA, 83 bp, Homo sapiens
ctacttttcaagacaccaagtgagaggccaaccagaggttgacggatatattcagacgttacgacacggatcaggacggctgg

SEQ ID NO: 424933 - DNA, 75 bp, Homo sapiens
aatttttaaaaatgaattgtcgatacttcaccgatggaaagccttgttatcagctacagctctgaattatctgct

SEQ ID NO: 424934 - DNA, 90 bp, Homo sapiens
gcggcggcggtggacgagtacctggagtaccggagcctactttggggataaaggattatttggtcttctggatttggaggcaatcagcgg

SEQ ID NO: 424935 - DNA, 88 bp, Homo sapiens
ctcggtcccgcgctgcgcatccccgcggacgccacagcgctggcgcggatggcgtcggggcgccccgaggagctgtgggaggccgtgg

SEQ ID NO: 424936 - DNA, 98 bp, Homo sapiens
gggacgtgccgcccctttgcgggtacaggtttgcagattccgccagcagcacagcaagctctacagatgagtggctctttggcatttggtgctgtggc

SEQ ID NO: 424937 - DNA, 96 bp, Homo sapiens
ttaaacacctccaacggggatggctctgaaacagaaaccacctctgccatcctcgcctcagtcaaagaacagaccatgtctcagttggaggactcg

SEQ ID NO: 424938 - DNA, 75 bp, Homo sapiens
agcccatgttgcagcgggactttattaccgctttaccaggaagttttattcagtgtatgggtctggtcaaagagc

SEQ ID NO: 424939 - DNA, 73 bp, Homo sapiens
actatttgtagtcatgtacagaacatgatcaagggtgttacactggtggaagccattatctactgatggaccg

SEQ ID NO: 424940 - DNA, 80 bp, Homo sapiens
caagaaaccccgatcacaaagatacgaatctcttaagggggacttcactatgaccctgtacctgcggcattactggaagg

SEQ ID NO: 424941 - DNA, 100 bp, Homo sapiens
agacgggttcagttcgtcatggggctgtttggaaagacccaggagaagccgcccaaagaactggtagtcggtcttctcttgcccaaccagacactggcat

SEQ ID NO: 424942 - DNA, 101 bp, Homo sapiens
ctctttgctctggagcagagctgcgcccaggtcgtgctgcaggcggccaacgagaggaacgtgtccacgcgccaggctcaccatggatgatgatatcgccg

SEQ ID NO: 424943 - DNA, 100 bp, Homo sapiens
tagaatcacttgggttcattctattcagtgattcgcctttgccagtctcatctcgtgtctgctttgttaagttccatgatccagactcagcagttgtggc

SEQ ID NO: 424944 - DNA, 99 bp, Homo sapiens
cgggaaggcgggagacgagaagcctgaaaagtcgcagcgagctggagccgccggagggccatcgatgcacccctcggagctaatagcggagatgagaaa

SEQ ID NO: 424945 - DNA, 75 bp, Homo sapiens
gtttgtcccagattttcagtctgataaccatgatcatgacgcagtcctgaggtttaatggggcacccacagccaa

SEQ ID NO: 424946 - DNA, 120 bp, Homo sapiens
acagccattctggcgttcctggtcaatcatgacttcacccctctggaggggatccagttcttggtggagaatgaactgctgcagaacacacccgaggagatcgcccgcttcctgtacaag

SEQ ID NO: 424947 - DNA, 100 bp, Homo sapiens
aatcagcggagctataaacagaaaaagaaaaggcgacgtattaaggttcaagaagattcatccagtgaaaacaaggtgttatcttcaggaaggcacactg

SEQ ID NO: 424948 - DNA, 74 bp, Homo sapiens
ggagacccagtcgctacgggagcagccagaggcacctggacgatgacggattaccgcacgggttctgcacagtc

SEQ ID NO: 424949 - DNA, 98 bp, Homo sapiens
aggacagcacctagtcgtggccggaggagtctcagagctgtcagaaagaagctgccagtaactcagattctagccatgaaggtcaagaggaatcttca

SEQ ID NO: 424950 - DNA, 83 bp, Homo sapiens
caccaggagacgcaactcatcggagagcagccctgagtctccagtgaccattacagagccctaccggaccctctcagggcata

SEQ ID NO: 424951 - DNA, 99 bp, Homo sapiens
gtgggcagccgcacactggagacccagctggatgccctcttggctgcactgcactcccaggttctgaatcaaacggaggatcaccgccagagggttctg

SEQ ID NO: 424952 - DNA, 97 bp, Homo sapiens
tcgacggtcagtgcgcacgttgtaatcagctgaggccatgtcaggagacggagccacggagcaggtcatcatcaagaatatgggctggaatctcgtt

SEQ ID NO: 424953 - DNA, 74 bp, Homo sapiens
ttaccgagagtttgaaagtgcgattgtggaagctgctcgggttgcagtgagagcagatgctggcaagaagcact

SEQ ID NO: 424954 - DNA, 90 bp, Homo sapiens
tttacatcatagactttcagctacttgaagatagccatcagccgctacgtgactcttttctccagggagattctccaactaaatggcgga

SEQ ID NO: 424955 - DNA, 100 bp, Homo sapiens
acttacagcatccatgtctaccctggctacggcattgagatccaggtgctggctgctgtctacaaggctctgagtgaccaccacatctacctggaaggca

SEQ ID NO: 424956 - DNA, 82 bp, Homo sapiens
ctcgtcagcctcccgccggccgtctccttaacaccgaacaccgcggtgcgtctttctacgtgaataggattttgtggctggc

SEQ ID NO: 424957 - DNA, 100 bp, Homo sapiens
gcagctaggggcgacgaggcgggacgtcatggaagtggctccttggtaatgaccagtctaagggattaggaccagcatcagaacagtcagagaatgaaaa

SEQ ID NO: 424958 - DNA, 74 bp, Homo sapiens
aatgttcaagtttaccaaaagagaggcaccgctggaacactaatgaggtgtgtgccctcttcctgattctggag

SEQ ID NO: 424959 - DNA, 74 bp, Homo sapiens
gcgccccggagaacaccttgcccactcccatggtcctgcagaggttcgtgctggccgtgggcagcgccgtcttt

SEQ ID NO: 424960 - DNA, 75 bp, Homo sapiens
ccccaaaatcagtgattctacatctcaagctcatattttgaagtgtttacgggtccaggaggtgcagcccatcac

SEQ ID NO: 424961 - DNA, 88 bp, Homo sapiens
tccacttacgtggaggagctcaaggggatgtcgctgctggttcgggcagagtccgacggtgaccctggcagcaaccccaacaaacgcc

SEQ ID NO: 424962 - DNA, 100 bp, Homo sapiens
tgagatcaaatggcacttcattggccacctacagaaacaaaatgtcaacaaattgatggtatgtggccttcgcctccctcttcttcatcctcatctccat

SEQ ID NO: 424963 - DNA, 75 bp, Homo sapiens
accgcagagctggagcccttggctgatggacaggtgtcccagaccgacgaggttgcactccaggacttgcagacg

SEQ ID NO: 424964 - DNA, 83 bp, Homo sapiens
gaagattcgaggcggcgggggacaagtcggcgccccagagcggacgaggtccagtggcattgcagagcacggatggttgcagg

SEQ ID NO: 424965 - DNA, 96 bp, Homo sapiens
caacaatggccaagctgacagaatccatgaagaccgtccaggctggacttgaactccttcctcggctgaagtgatcctcctgcctcagcgtcctga

SEQ ID NO: 424966 - DNA, 147 bp, Homo sapiens
gaggactcagaggaggtgagggagcagaaacacaagaccttcgtggaaaaatacgagaaacagatcaagcactttgtggtggttgtgaaagacagggagacccagagatctcggggatttgggtttgtcacctttgagaacattgac

SEQ ID NO: 424967 - DNA, 87 bp, Homo sapiens
caccagcaccccagatgggtgagagatgtgatcactggtttcgtggcctgaccaaggacctccaagctgcaggactcatgcacacgt

SEQ ID NO: 424968 - DNA, 51 bp, Homo sapiens
aatggcggcgcggtggagctctaggggtcttttcaaacatagacaatcatg

SEQ ID NO: 424969 - DNA, 100 bp, Homo sapiens
cttctctgtgagctcttcattagggcaccaaagcgaaggtgaaaggtgtagcagtcactcggcctacacccacagcatcgaccttgtgaacccagcgacc

SEQ ID NO: 424970 - DNA, 75 bp, Homo sapiens
gtgctttttcaagggagctgataaagaacttcttcccaaaatggctatatgaagcaccggctccctcttcatttt

SEQ ID NO: 424971 - DNA, 83 bp, Homo sapiens
cctggaggagccgcagtgggtcccggacaaggaggagccttcacgtaaatgggtccagtcatgcctcccagtaagaagccaga

SEQ ID NO: 424972 - DNA, 100 bp, Homo sapiens
tatgggagatcccccttcgcagagggaacctctgccagaaccttcaataacattatgaatttccaggtgaatgcacaatatttgcagctgttcgtgattt

SEQ ID NO: 424973 - DNA, 75 bp, Homo sapiens
ttgctccagcctggcttaatttccctactccaccatcatcaacaaaggaaacactgatgggaaagtatggggaag

SEQ ID NO: 424974 - DNA, 82 bp, Homo sapiens
ctgcagcgacatggagggagctgctttgctgagagtctctgtcctctgcatctgcaaaatgatgcttcaacacccaggccag

SEQ ID NO: 424975 - DNA, 49 bp, Homo sapiens
gtgtggcacgacacaaaaatcagctcaggggaccccaggtatggctcca

SEQ ID NO: 424976 - DNA, 146 bp, Homo sapiens
tgtgacaatgttcagcacactcaggttctttgaaggattttgcctggctggaatcattctcaccttgtatgctttacatagcaaagccattgtggatgggaacctgaagctcatcttgggtctggtgtggacgctgatcctccact

SEQ ID NO: 424977 - DNA, 100 bp, Homo sapiens
tgccaacgctccctgtcggtgctcagcccccgccaaccagcccagaaccgagagtccaccctgcacctggtgttgcgcctgcgaggtggcattattgagc

SEQ ID NO: 424978 - DNA, 88 bp, Homo sapiens
aataagcacaagagaaagaaggttaagctggctgtcctgaaatattataagaaaaatggctacaaacttcctagcacatgagaagatc

SEQ ID NO: 424979 - DNA, 99 bp, Homo sapiens
ctcctttaccttgtggaaatgatttcctcaggactccagattatctacaacactgatgagcatgattccacctttccactgatagactcaagttcccag

SEQ ID NO: 424980 - DNA, 75 bp, Homo sapiens
accatccataaaatactcattcccctctcagatgcctgtgaggagccaccaacatttgaagctatggagctcatt

SEQ ID NO: 424981 - DNA, 80 bp, Homo sapiens
tccattggatttaaaagacagtcctcgtcagcactgactttcagctatggaatcgagacgaggtcttgctacattgtcca

SEQ ID NO: 424982 - DNA, 50 bp, Homo sapiens
gccacccattgtgtcttctcaagaagataacgaaggaggcccaacttcat

SEQ ID NO: 424983 - DNA, 100 bp, Homo sapiens
gagaagtcacaggaggtgccatctccagcattagtgccagcagtagttcccaagggctgtctcagccatccacccagacgactcagtatctgagagcaga

SEQ ID NO: 424984 - DNA, 76 bp, Homo sapiens
gagcctgttggaggaactggcccggaaacaggaggacggagtggacatccgccataacaaggaccgaaaggttcgg

SEQ ID NO: 424985 - DNA, 96 bp, Homo sapiens
aattgctccaaagaactcgactgttacattggtcccagaacagtgtttgattgcatcgaggtctatgcccctggcttcaaggactctgtggttggc

SEQ ID NO: 424986 - DNA, 74 bp, Homo sapiens
tgaagcagtggccgacatcaagttttcctctgcaggacctatttcccattttcctgctcttgcctgaaccagtt

SEQ ID NO: 424987 - DNA, 75 bp, Homo sapiens
ccaagaccccagcaccaaccagacctggcatcctagaatacgtttccacacgggtcttgtggatgcccacctcta

SEQ ID NO: 424988 - DNA, 98 bp, Homo sapiens
ctggaaagtcggccaagaaagacaaagacccagtgaacaaatccgggggcaaggccaaaaagaagatgagaccaacaggagttgcacaggtacgatct

SEQ ID NO: 424989 - DNA, 58 bp, Homo sapiens
cagagactgcatcagagccactgtctgagcgcaagcaccaggaaatccgagccatgag

SEQ ID NO: 424990 - DNA, 82 bp, Homo sapiens
cggagcgtgtggatttgagccgccgcattttttaaccctagatctcgctgactacacagacttagtcttctccactccgtgt

SEQ ID NO: 424991 - DNA, 106 bp, Homo sapiens
cggccgcggctctttcagcagtttggcctcaccaaggacactgtggttctcttcaagaaggcgcagcccagcctcgaaatgcagaacgacgccggcgagttcgtgg

SEQ ID NO: 424992 - DNA, 49 bp, Homo sapiens
ccccttataagccaaaagctgcctgaagctgcccagcaggcattccaag

SEQ ID NO: 424993 - DNA, 77 bp, Homo sapiens
aggctgctattgaaagagagtatgcacaggatggcactggatctttaaaacgcagtggttcctttagcaaactccgg

SEQ ID NO: 424994 - DNA, 73 bp, Homo sapiens
acataaaccagtcacccaagtgcattgcctttggaaacgagtttggctgtagcagcaattcctgaaggtctcc

SEQ ID NO: 424995 - DNA, 90 bp, Homo sapiens
gaagaggttggagatgggaccacatcagtaattattcttgggccaggaaggaatactgggagaatcttcggatagcctcaggccggccat

SEQ ID NO: 424996 - DNA, 87 bp, Homo sapiens
ggcatctgctgacttgaagggcgggttggaaataccaagtaaggaattaacatatatgatgctggaaacttgtagaggctcatgatt

SEQ ID NO: 424997 - DNA, 99 bp, Homo sapiens
ctgaattctgcaatttctcagctgatgggactcagcaatgccctctcgacgaaatctcacaaaactgtcccttatcttcagtcacatgctggcagaaat

SEQ ID NO: 424998 - DNA, 75 bp, Homo sapiens
ctccctcaagaagggagggaggctggtggagaaggctctctggagtccacagaacccatatatgtctacaaagca

SEQ ID NO: 424999 - DNA, 83 bp, Homo sapiens
ggagattttttaaaaattaaacttcaacacaatgaggtgagccagccatgagagggtatcttgtggccatattcctgagtgct

SEQ ID NO: 425000 - DNA, 97 bp, Homo sapiens
cttgcaaaactttcagatggagtggctgtgctgaagatttcctttcctggatgaaaatgttgtctcctttctaaattctctgccgatttgggaaaaa

SEQ ID NO: 425001 - DNA, 51 bp, Homo sapiens
ccgaagacgagggcctggaggaaacaggaggatacgaagcgttttcggctt

SEQ ID NO: 425002 - DNA, 88 bp, Homo sapiens
accatgctccaaggcagctaagaatagactgcatatatattgggattttaaaccggtgagtggcagtgtgatgagtgtttatagtgga

SEQ ID NO: 425003 - DNA, 100 bp, Homo sapiens
cttcctctcctaggcgacgagacccagtggctaggcaagaggaggaacgacgtagaagagaggaagagatgatgattcgtcaacgtgagatggaagaaca

SEQ ID NO: 425004 - DNA, 83 bp, Homo sapiens
attgaagaggccatctccacattcagaaccaaggttatgaagacagtatggagtttccagaccatagtagacatttgctacag

SEQ ID NO: 425005 - DNA, 100 bp, Homo sapiens
agagaagctgaagcattgcttcaaagcatggggctaactccagaatcccccattgctaccaagtcaggattgttacccccaccacctgcgctccctccaa

SEQ ID NO: 425006 - DNA, 49 bp, Homo sapiens
acttttactactgtgacaacattaacggctggagtgcagtggcacgatc

SEQ ID NO: 425007 - DNA, 78 bp, Homo sapiens
ttggcactaagccagatggcagccccgatgagcgctggtgcttcagcctgagaatctcttatacacctccaaaaggcc

SEQ ID NO: 425008 - DNA, 100 bp, Homo sapiens
ctttcctccaagagcacattgcctggtaagatggtactggatgtaagcagagaaggcaaagaagaagtattctatgggcctacactcccttttgcttcca

SEQ ID NO: 425009 - DNA, 100 bp, Homo sapiens
cacacttatagatcttctgcactgtttacaggcacaggaaatagtctagtaagcttaacctttcatttatttagtcttcatggattaattgagtacttcc

SEQ ID NO: 425010 - DNA, 82 bp, Homo sapiens
tgatgttggagaactacagaaacctggtctccctaggacactgcccatctctaagataagaacctggaaaggggactctgtt

SEQ ID NO: 425011 - DNA, 100 bp, Homo sapiens
tcctactccctccccggactccgcgggagggagcctgcgagcaaacgaggtggaaactggagtgcacaagtgctggaatgggctgtctgccttccacccc

SEQ ID NO: 425012 - DNA, 96 bp, Homo sapiens
caacaagaattggataaaaaaaaagaggaattccagaagggccaccccgacctccaagggcagcctggaaaaccaattctgtgtcctcggaggacc

SEQ ID NO: 425013 - DNA, 51 bp, Homo sapiens
ctcgggtatgaagatcgggcggattggcctgcccatccaggttcgtgacgc

SEQ ID NO: 425014 - DNA, 120 bp, Homo sapiens
gctccggagctgcccgcgccatgtccgcgcacaatcggggcaccgagctcgcagtagccatcctaatggatatgggttggttcctgttttctatttggaactttaaaaaaaattaaagca

SEQ ID NO: 425015 - DNA, 97 bp, Homo sapiens
tggacgtggttggtgattggcaggatcctggtatccgctaacaggcactactgcagtcttcagttaagcaacaagtagaagctattgaaaaacagta

SEQ ID NO: 425016 - DNA, 73 bp, Homo sapiens
acaattcattttcctacagactaccccttcaaaccacctaaggctgtggacatactcaagacagagcggctgg

SEQ ID NO: 425017 - DNA, 82 bp, Homo sapiens
atagaggcagcagaagccagggcagctgaaagacagagaccttcagctagatgctggtgtgccagaaaaaataagcctgatt

SEQ ID NO: 425018 - DNA, 83 bp, Homo sapiens
gcagcttccgtgtttgctgcgcccgcactgcggttgatgataattagaagcatgctttccactgaacttcccgacaacatttg

SEQ ID NO: 425019 - DNA, 74 bp, Homo sapiens
taaaagcaagctggttctctgggatataaataagttgttcaggggatgaaggaagctcaggaaaggctgacggg

SEQ ID NO: 425020 - DNA, 100 bp, Homo sapiens
cagattgtaggaccgagcgcgggcaggcgggaggcaacggagctaccagccgaacatggttggtgcgggagaggtggatgaagacttggaagttgaaacc

SEQ ID NO: 425021 - DNA, 98 bp, Homo sapiens
gcactgctaggggttctgctgctgggtgcggcgcgcctgccgcgcggggcaggtagaagatagcaccatgccgattcgtcgaactgtgaattctaccc

SEQ ID NO: 425022 - DNA, 83 bp, Homo sapiens
tctgctggacagcaaccctctgcagagtccacctgcccagctacaacctcctgttctttgcgtctggaggaggcaagtttaac

SEQ ID NO: 425023 - DNA, 98 bp, Homo sapiens
tttggttcactgatgtctgctacagatccagacctgatggccaaaagaaaggaagaaaatttttcctctcctaaaaatgccaaaaggccaagacaaga

SEQ ID NO: 425024 - DNA, 82 bp, Homo sapiens
atctacatctcccacaggaagtgtcacacagcagtcaagtatgtcccaaacgtctgaagcccagaattcccacgtgtactgg

SEQ ID NO: 425025 - DNA, 75 bp, Homo sapiens
gggttcctgagttacctgaaaagggctgcaaattattatacaaacaggattttgccagacgtttaggattgagat

SEQ ID NO: 425026 - DNA, 75 bp, Homo sapiens
aaagtgggactgaagtacactgaagcagatgctgcaatgtacaacaactctgaagccctgcccacctctcctatg

SEQ ID NO: 425027 - DNA, 89 bp, Homo sapiens
ggaagatcattttattgacattgctgaagtggagacagcggagattctggagctggctggcaatgcagcgagagacaacaagaagggac

SEQ ID NO: 425028 - DNA, 82 bp, Homo sapiens
gcttcctctgaacttacttcggatgaatctggttatagatggacaagagacgatcattctgcaagcaggcaacctgaataca

SEQ ID NO: 425029 - DNA, 98 bp, Homo sapiens
ggcgcccgcgcgcggggaccccacggggtgccactgattaatgaacttgaatcagcaatacatcagctgtacaaacagcgagcttcccgccttgtcca

SEQ ID NO: 425030 - DNA, 100 bp, Homo sapiens
gagcgggcatttgtgttccctcaaatggcggtgtgaagagagttcgcctgagccagatcccagtttgtggggacattcatggacaattctttgatttgat

SEQ ID NO: 425031 - DNA, 82 bp, Homo sapiens
tgtttgtggatcgctgtgatcgtcacttgaagcatcagatggtgaaggagaaggagacacagaagtgatgcagcaggagaca

SEQ ID NO: 425032 - DNA, 90 bp, Homo sapiens
gttggcggatggaagggaggagactcctgaccctcagaatgggacaggccttcagtatttggcatcacctttacatggagcacaaagatg

SEQ ID NO: 425033 - DNA, 100 bp, Homo sapiens
gggaagcactacaagggtcctgaagtcagttgttgcatcaaatacttcatatttggcttcaatgtcatattttggagatccgtgctcagctcacagagca

SEQ ID NO: 425034 - DNA, 75 bp, Homo sapiens
agagtcggagccgaataccaagctcggatccctgaatttgatccagcaaactgtgctcacaggagaaactagagg

SEQ ID NO: 425035 - DNA, 51 bp, Homo sapiens
agcgactttggtgagactctggtggacccaagtggagagattgtggaactg

SEQ ID NO: 425036 - DNA, 100 bp, Homo sapiens
attcactaaaagtagttctgaatgaatgttatttaatggtgccaatgatgttggaggatacctgtggcaggatgacgcaaaacacggtgattgtgaatgg

SEQ ID NO: 425037 - DNA, 100 bp, Homo sapiens
cgacaaggaagtgaagaaggcgcatcactcccagctgcgcaaagcttgcgaggtggcgttagttggctggggaacagaccagggaattggtggatttgga

SEQ ID NO: 425038 - DNA, 75 bp, Homo sapiens
gtcactacagattgcatgatacaagaccaaggagttaacagagcagtttcataaagttgaatctcaactgaataa

SEQ ID NO: 425039 - DNA, 80 bp, Homo sapiens
cgggggtgctgcagaggacacgaggcggcgggctggagacatggaccgcggcgagcaagaaattgcttcccaagaagaag

SEQ ID NO: 425040 - DNA, 100 bp, Homo sapiens
ggaactgatgtttaaaatcattggaccatttagtaagaagaattccagtcttataaacccctgggaatcgtggcggatataataggaggggcaacatgcc

SEQ ID NO: 425041 - DNA, 82 bp, Homo sapiens
cgaagcttcaagactttgacatgtgtgaaaacatgaaatgagtcagcgtgggagaaattgtaacgagaaaccaacaaatgtc

SEQ ID NO: 425042 - DNA, 90 bp, Homo sapiens
ctcggcgggctgtggggcctccgcgccgcggccgttagtcatgtcggagcgtttcagtgggtgtcccagctacctgtcagcggcgtgttg

SEQ ID NO: 425043 - DNA, 75 bp, Homo sapiens
ggccgccatcagggactcgcaggcaatgggtactacgacagattctggctgtgactcagtcactgacactgagcc

SEQ ID NO: 425044 - DNA, 50 bp, Homo sapiens
gtccaacagcaggcctatggaatgcttgataaagatgacatggtatacat

SEQ ID NO: 425045 - DNA, 100 bp, Homo sapiens
accaaagacgggcgcctatcagtacacaataaggtatggcatgcagctgtaccagaattatatgcatccatatcaaggtagaagtggctgcagttcacag

SEQ ID NO: 425046 - DNA, 96 bp, Homo sapiens
ccccagttcgggagacatggcgggcgttaaagctggataacgcagatgaacaagcagcccagatcagaagggaacttgatggccggctgcaattgg

SEQ ID NO: 425047 - DNA, 76 bp, Homo sapiens
accacttcctctagtgctcccttcacccagccattgtcttccaatgagattgtcagaagcttcagttctggtaaaa

SEQ ID NO: 425048 - DNA, 101 bp, Homo sapiens
ctgtcttttggcatgtgctcttctgcattagtgaaaacagagctgtatcctcaggacctagtttactaactgtcttcctgggagtggtgtgcattgcagcc

SEQ ID NO: 425049 - DNA, 75 bp, Homo sapiens
gttcattcatgtgttctctcatatttcttactctcaactggttccgagaggcctgggtcccaacatgtcctcaac

SEQ ID NO: 425050 - DNA, 98 bp, Homo sapiens
tactgaaattgatgcaagaaaaagaaactggacttaatgtgttcttattggatatgtgtaggaaaagaacatccagtcatcaagttccaatgtgttgg

SEQ ID NO: 425051 - DNA, 101 bp, Homo sapiens
gaacctccgaaagctcagcacacactcccgcaggatcccgccattgttcaggcttctccagctcacacaactccacagacccaaagtacaagtggtcgtcg

SEQ ID NO: 425052 - DNA, 75 bp, Homo sapiens
tagagattactatgaatgcactggaatctataaagagagcattggggagtcagcaatgtccgttgtgttaaatca

SEQ ID NO: 425053 - DNA, 96 bp, Homo sapiens
ttcgtactcgggggccggacttgtacacccgcacgaggagcggggacggcgggcgcaggtggacgtcctgtactccagggtctgcaagcctaaaag

SEQ ID NO: 425054 - DNA, 100 bp, Homo sapiens
caccatgagcgtcccggccttcatcgacatcagtgaagaagatcaggccaacatagccgaggtagaggtctccatccctgccaagctgcacaactccctc

SEQ ID NO: 425055 - DNA, 100 bp, Homo sapiens
tagtgtcctatggcaacaccttctttgtggttctcattgtcatccttgtgctgttggtcatcgacccccaggcaatccctgagctggaaggcattgaaat

SEQ ID NO: 425056 - DNA, 82 bp, Homo sapiens
tggagaattatggaaacctggtctcactggtactgccaaatctgtcgaaagggagataatgaagaactgcttcttctttgtg

SEQ ID NO: 425057 - DNA, 98 bp, Homo sapiens
gtacctcactgcagaggtgctggagctggcagtttcttgcagaacataaattattaggaaacattaaaaatgtggccaagacagctaacaaggaccac

SEQ ID NO: 425058 - DNA, 98 bp, Homo sapiens
agtatatcaataccctgttcccaaccgagcaatgtgcaccggcacagacatgaagctgcggctccctgccagtcccgagacccacctggacatgctcc

SEQ ID NO: 425059 - DNA, 100 bp, Homo sapiens
acctgctcacgctgacggagtacaagtgccgctgcccgcccggctggtcaggtacaaggatggaaaggcactgtccgggcgccacagtccacatgccctg

SEQ ID NO: 425060 - DNA, 83 bp, Homo sapiens
gatttactgcctgaacatctgaaattgacagtagttgatgtcacttggcgatattcctgcaaacatgaagaggtgattgccag

SEQ ID NO: 425061 - DNA, 83 bp, Homo sapiens
ggagtttctgtagatggaaaagaagtctggtcagaagatctgcttggctttgaggaagagtggcagtactgcctcactgcata

SEQ ID NO: 425062 - DNA, 100 bp, Homo sapiens
ttcaagcttaggaccacccaccatgcctatccagcttctgcagaaagccgtcattacacctgattttgaaaaaaaccactgtgttccaccatatagtgaa

SEQ ID NO: 425063 - DNA, 101 bp, Homo sapiens
ggccgccgatattcaccaagcgcttcgctacaagctgtcttttggggagacattgccttagatgaagatgacttgaagctgtttcacattgacaaagccag

SEQ ID NO: 425064 - DNA, 82 bp, Homo sapiens
ctccccagcatgtcagcatgaccaagcgcctctactacctctggatgtggctctctaaatacgtacagattctgcgataatg

SEQ ID NO: 425065 - DNA, 123 bp, Homo sapiens
ttagcagcagcttgtgccagccgggatggatatccaattatttcacccgacagctacaaagtgcaagataagaaaaatgcctccagccgccctgcctctgcaatttcaggacaaaataacaac

SEQ ID NO: 425066 - DNA, 75 bp, Homo sapiens
actcttctaaggatcgctgtcctgacagaagagttttcggctttgtgagaaaccttaccatcaaacacgatggcc

SEQ ID NO: 425067 - DNA, 97 bp, Homo sapiens
atcgaaggggagtttccacagtgattgatgctgcctcagccttttggccataaccagtctcagcaagacatcctacaagagaatacgattcttaaag

SEQ ID NO: 425068 - DNA, 131 bp, Homo sapiens
cttgaccctgcccgggcgcgccatgttcgcgcgtgggtcccggaggcgccgctccgggcgtgcggggcctgacggatgagtctgagatcctgcggttcctgcagcatggcaccctggtggggctgctgccc

SEQ ID NO: 425069 - DNA, 100 bp, Homo sapiens
cttctggaaagggtggagtcggaaaatctactacagcagtgaacagcagagaatttcaaaggaccttgctaatatctgtaagacggcagctacagcaggc

SEQ ID NO: 425070 - DNA, 82 bp, Homo sapiens
ggggaaggcggcggggccggaatgtgagcggaggtggagccggcggcagagtacctggagtagaacagaaaaattattatgt

SEQ ID NO: 425071 - DNA, 106 bp, Homo sapiens
aacatctgggagaatatttaatggaaaatcgcttggttaaaacctgacacttttaacagtccaatatcagatggaaatgatgcggagccttcgccatgtaaacatt

SEQ ID NO: 425072 - DNA, 50 bp, Homo sapiens
gatttctccgcctcagcccaacggggaggagaagagctaaccttgggtag

SEQ ID NO: 425073 - DNA, 95 bp, Homo sapiens
ctgccgccaggagctgtcaccatgacgctggaccaagctgactgaaagattcttcaagaatacaccttggcccgaggctgaagccattgctccac

SEQ ID NO: 425074 - DNA, 80 bp, Homo sapiens
agaagaaaaggaaccctggcctgaggcacgtgtggttctcaaatataggcattctgatgggaacttgtgtgttaaagtaa

SEQ ID NO: 425075 - DNA, 100 bp, Homo sapiens
tctcacattggccggcaacttgttccaggtgacccccatgcctcaacagtacagttttcaaattctaccacctcagtgctggctacccttgcagctcttg

SEQ ID NO: 425076 - DNA, 98 bp, Homo sapiens
cttcagataacttctgtgaagctgatggtatgttcgcaattcgtgctgatcatgattttgtagtacaggaagacttcatgaaagcagtcagaaaagtg

SEQ ID NO: 425077 - DNA, 100 bp, Homo sapiens
ccctcgcgggcgccttcggctcctccttcctctacggctacaacctgtcggtggtgaatgcccccaccccgaaggcctttgagccctacttagagatttt

SEQ ID NO: 425078 - DNA, 50 bp, Homo sapiens
agaggatcctgtagccataaagattgcagatcggcgcctacttcggggcc

SEQ ID NO: 425079 - DNA, 128 bp, Homo sapiens
tccgggagggaggtggggggggtcagccccccgcccggccagccgccccgtccgggaggtgtcgaagcaggccaaggagtttctggagtacgtgtacgaagagccgctcatcgacatccagcaggaga

SEQ ID NO: 425080 - DNA, 125 bp, Homo sapiens
gggaaggaggccgagccgggatctcaggtcctcgggggcggcggccacgccaaggacggcactgtgacttctgccgtgttcaccgtgggagacaacgtggtttcaggcagcgatgaccgcacggt

SEQ ID NO: 425081 - DNA, 96 bp, Homo sapiens
gcgactcgagggtgacgctcgctccgctcgtcccgctcgtcatggcctacccgggatacggaggagggatccgagcagttggcagactaaaaagag

SEQ ID NO: 425082 - DNA, 83 bp, Homo sapiens
gcgggccggacgctgagcggagcagctgcgccacggcctcgtgggctgtgcggctatcctggagacagatgacagctctccct

SEQ ID NO: 425083 - DNA, 100 bp, Homo sapiens
aggaagagaagaggatggggtcgctcggtttgcggggtgctggagaatctggtaaaagcaccattgtgaagcagatgaggatcctgcatgttaatgggtt

SEQ ID NO: 425084 - DNA, 75 bp, Homo sapiens
gtcagccttcccagtagctgggaccacaggctccgtgtgtttgacagtggcgtcatggtaattgagcttcagtct

SEQ ID NO: 425085 - DNA, 75 bp, Homo sapiens
ggaagacacaaaagatggcatctggctggttcagatggcccactgcgtgaccttggttcagctgtccatttcctg

SEQ ID NO: 425086 - DNA, 75 bp, Homo sapiens
ccaagctatgagtacctctataatttgggaactaagcgtcttgtagaaggaactattaatccaggagaaacctgt

SEQ ID NO: 425087 - DNA, 74 bp, Homo sapiens
ctcgtgagtccagggatctaagattgcttatgcccgtatagagggggatatgatagtctgcgcagcgtatgcac

SEQ ID NO: 425088 - DNA, 75 bp, Homo sapiens
ggatgtcttcacgtggtctttaccgtttgttggagaaaaaggcctggttggtttacacaacattggacagacctg

SEQ ID NO: 425089 - DNA, 100 bp, Homo sapiens
atacacacatcactaaaaattatccctactacaggactgcggacaagggctggcagtgtcctctacaagcctggtgatgcccacacaccacttacttcgt

SEQ ID NO: 425090 - DNA, 98 bp, Homo sapiens
cggcgtcggcagctgctgctccgagtcttcgtgtgcccagggaccctgcagaaggtgctggagcccacctcgacacacgagtcagagcaccagtctgg

SEQ ID NO: 425091 - DNA, 82 bp, Homo sapiens
aagaagcacggcaccaaaaacaagcgcgatgtccagctcgccgctgtccaagaaacgtcgcgtgtccgggcctgatccaaag

SEQ ID NO: 425092 - DNA, 50 bp, Homo sapiens
gggatgtgccttagaggattatggaaaatgtcactgaaattcacaaatgc

SEQ ID NO: 425093 - DNA, 142 bp, Homo sapiens
tctatgcaagatttgctgggtatgaataatgactttcctccaagagcacattgcctggtaagatgcatcaacaaagagagcattgtggatgtagaaggtgttgtgagaaaagtgaatcagaaaattggaagctgtacacagc

SEQ ID NO: 425094 - DNA, 74 bp, Homo sapiens
aaatgtgattttattacccaagtggaagaagagatttcccgacactacagaaatgtagacaaccaatttcctgg

SEQ ID NO: 425095 - DNA, 98 bp, Homo sapiens
ctgtttctatagaaactgggttggaagtcagagctgcacaaagggaaaggggctgatggagttatgagaacaatgaacacagaaaaactcctaaaaac

SEQ ID NO: 425096 - DNA, 100 bp, Homo sapiens
aaagaggagtcagacacggggcaggctgagttcctcttgctcacagagctctgtaaaggggccaccaaggacatggggaagatgctggggggtgacgagg

SEQ ID NO: 425097 - DNA, 82 bp, Homo sapiens
ctgcagaaccagatccgggagcacgtcatcgccatcgaaggaactgtggctgcaccatctgtcttcatcttcccgccatctg

SEQ ID NO: 425098 - DNA, 76 bp, Homo sapiens
cagtacctgcagaaggtctctggagacatcttcagcaggttctaaatggcttctaagaagttgggtgcagattttc

SEQ ID NO: 425099 - DNA, 100 bp, Homo sapiens
ttgggagcctgcaagttgttgctccgcttgttggactgctgctgcaaaacttttctagctgttgaaggatttattcgagacaaatatgagaagaagaaat

SEQ ID NO: 425100 - DNA, 98 bp, Homo sapiens
gcggcccctagctttctccttctggtgtggggcccgaggactcacaccacccggcaagaactgctcactacggctccctgccccagaagtcacacggc

SEQ ID NO: 425101 - DNA, 101 bp, Homo sapiens
attcagatgaagaagaggacttttttctgtgattcgcaaggggtggctcaccatcagcaacattggcatcatgaaaggcggctcgaagggatactggttcg

SEQ ID NO: 425102 - DNA, 73 bp, Homo sapiens
gtttccacagtgattgatgctgcctcagaaagttcaggagccctggaaaggagaaggaataagacggcaggag

SEQ ID NO: 425103 - DNA, 82 bp, Homo sapiens
cctggcgtgcactccgcacctcggggacattattgcgcgtggaacggctgcttttggaagatgaagcccggggcaagaactg

SEQ ID NO: 425104 - DNA, 80 bp, Homo sapiens
cacccattgcctgaagtgttagcaccttcactccggattttttatcaagcagaaatgcatcgaacaacgagaatcaagat

SEQ ID NO: 425105 - DNA, 74 bp, Homo sapiens
tctagaatcaactgagagagatgcttaaaaatcaccagttactttaatgagagttgtatcccgcattttgtatt

SEQ ID NO: 425106 - DNA, 100 bp, Homo sapiens
tttactgggaacgaagttggttttttcaagcccatatcttgccgaaatgttgggctcgggatgagtttgaaggcctcttcaagcagccagcagaaaatgt

SEQ ID NO: 425107 - DNA, 82 bp, Homo sapiens
ttgaagaagatcctgaaatttccttagctatgctggcatcaccatctacatcaggtcagctgtctcagtttggggcaagttt

SEQ ID NO: 425108 - DNA, 75 bp, Homo sapiens
ggatcgctgtgatcgtcacttggttaaagctgaagctcaacaaagatatagtgatctctgtgggcatttataatc

SEQ ID NO: 425109 - DNA, 75 bp, Homo sapiens
cttttgggcgaagtgctgcattggaagaagtgttgtcgacaacagtagcaactgggcagtgtgtgggaaaagctg

SEQ ID NO: 425110 - DNA, 51 bp, Homo sapiens
gagatcttatccctatatgatgctgagaagacacccactgcagacccccag

SEQ ID NO: 425111 - DNA, 87 bp, Homo sapiens
aagatcaatgtgtcccggcagacattgtttgaagattccttccaacaggtaatgggaaacccaggaactttcaaaagaggcctttta

SEQ ID NO: 425112 - DNA, 90 bp, Homo sapiens
tattgatgccctttgcctttttctttctggaatcagaaggctttgctggcctgaaaaaggttatcaccaatctagtgaaaatgttgaagt

SEQ ID NO: 425113 - DNA, 102 bp, Homo sapiens
gctcgcgctactctctctttctggcctggaggctatccagcaagtcccgggcccagagcccggccagcaggagcagttggtcttcggcagcggggatgctgt

SEQ ID NO: 425114 - DNA, 100 bp, Homo sapiens
gggaggtggagtcgttgctgttgctgtttgtgagcctgtggcgcggcttctgtgggccggaaccttaaagtgttcagactgcatcacagtgcttccgata

SEQ ID NO: 425115 - DNA, 75 bp, Homo sapiens
ggtgggcactgtgatctcagacttccagccttcagaactgtcccccacggcccttcaggatgaaagctgcggtgc

SEQ ID NO: 425116 - DNA, 101 bp, Homo sapiens
ttcccaagagcagcggaaaatgatccagtcacagtgaaacctgatcctccacatattaaaaacctctccttccacaatgatgacctatatgtgcaatggga

SEQ ID NO: 425117 - DNA, 90 bp, Homo sapiens
cgccgaagaagcatcgttaaagtctctcttcaccctgccgtcatgtctaagtcagaggtgccatggagaactgggaccttgttacttata

SEQ ID NO: 425118 - DNA, 82 bp, Homo sapiens
caaaacagttcattcatattcagcagccccccaagatgaacccagtggtggagccactgtcctggatgctgggcacctggct

SEQ ID NO: 425119 - DNA, 100 bp, Homo sapiens
tccctcctcccattcacaaggcagtggtcccagcagtggttccccagagagagatgacagatttgaagatctggaagaggcaaatccattctcttttaga

SEQ ID NO: 425120 - DNA, 75 bp, Homo sapiens
tgcagcattgcagccgccaagacggttcgagaacttgtcttggacaattgcaaatcaaatgatggaaaaattgag

SEQ ID NO: 425121 - DNA, 75 bp, Homo sapiens
aagatgaatttagcctctgaaccccagtatggcatgcagctgtaccagaattatatgcatccatatcaaggtaga

SEQ ID NO: 425122 - DNA, 76 bp, Homo sapiens
cacccatcccggctgcttttgctgcgccctctcagcttcccaagaaagaatcttgtggaagaagaatgaagttgct

SEQ ID NO: 425123 - DNA, 100 bp, Homo sapiens
gaaggacgttgccaagattaaccaggacccccaggttgctccttgagggcaggacagttcttatggctttatccgttgcgtaagcacagagaggtctgcg

SEQ ID NO: 425124 - DNA, 99 bp, Homo sapiens
cctgctgcccggccttgaagagggctccgagatctccgacagatgaccacctaagaaaggaggaacagaaaagtactaacattgaagatcttcatgttt

SEQ ID NO: 425125 - DNA, 75 bp, Homo sapiens
cccagcatgtctggagccggggaggccccagaaccagctctggacgcaaccatcggcttgatcaggaatctggcc

SEQ ID NO: 425126 - DNA, 100 bp, Homo sapiens
gctcatctgtagagactgatttgcaacccttccgggaagccatagctctgcatgctcttcatgtggatgtctgagctcatatcaggtgtctgaaagaggc

SEQ ID NO: 425127 - DNA, 100 bp, Homo sapiens
atgctttttcagaaagttgctggtgaataaaagcattcggcagcgtcgtcgcttcactgtggctcatacatggtggacgaggcggggctggaactgcgtg

SEQ ID NO: 425128 - DNA, 74 bp, Homo sapiens
ccacatgcccatttgtgtcagttttgcctttttccagcaaggatgggacaccaggtccaataccacctccaagc

SEQ ID NO: 425129 - DNA, 50 bp, Homo sapiens
gaggaggaggaggaggaggaagaggagctttttaatagatacgagagagc

SEQ ID NO: 425130 - DNA, 51 bp, Homo sapiens
ccctgtctcacgccatcactctggtggacatcttcaataaggagctactgc

SEQ ID NO: 425131 - DNA, 99 bp, Homo sapiens
gcggaggcagaggtggaggcgctttgaaagggttatacaaacaagggtatgaagattgcctgcacccaaccccggagagtggctgccatgagtgtggcc

SEQ ID NO: 425132 - DNA, 122 bp, Homo sapiens
gtggaactgaaccagaagatgggtatagcactgttacattaaatctgggctcaaaatgcagagaactcaaagatattcatttcggccagtgttacaagatctcagatgaaggcatgatcgtc

SEQ ID NO: 425133 - DNA, 100 bp, Homo sapiens
ttgttccaggcattgctggagatggatctgctgaccgatcatatctgaagatattagtgagctacaaaagaatcaaactacatctgtagccaaaattgca

SEQ ID NO: 425134 - DNA, 96 bp, Homo sapiens
aagaacttatcagagattgagaatgtccatggatttgtttctcattctcatatttcaccaataaagaatatgagttggaagtaaagagggtgcaag

SEQ ID NO: 425135 - DNA, 100 bp, Homo sapiens
tctgtttacgttattatcaacacaggaccagccccgtgacccccagcacaccagggagcccgccagtgagtcctgggcctttgtcaccaggggggacgcc

SEQ ID NO: 425136 - DNA, 80 bp, Homo sapiens
ggaagaatgtctcatgttcgagtctggggctgtcgctgtgctctgcaagtgaaccggagcaaacgacttccgatccagtc

SEQ ID NO: 425137 - DNA, 98 bp, Homo sapiens
gacctcggctacagactgctggctgtgtgtgctgcaaaccgagacaagttcaccccgaagtctgccgctgcatcttcctcccgtgaggctggccgagc

SEQ ID NO: 425138 - DNA, 100 bp, Homo sapiens
accgccccacgcgcgcgcgctcgcgcaccacgcgccccgcgcggcccgcccggatcgtggcctctcgagagcaagggacatttttgaagaagataattac

SEQ ID NO: 425139 - DNA, 83 bp, Homo sapiens
cagagctttacgatgtcacttgggaagctgtggcagaggtaaaacttcgagatgatcaatatacactggaacacatgcatgct

SEQ ID NO: 425140 - DNA, 87 bp, Homo sapiens
tcagtcaaccaaacctcaagtatacaattaaatggatgaagtgtcctcttgctagcaccaataaaagatttctaattaacacaatta

SEQ ID NO: 425141 - DNA, 51 bp, Homo sapiens
cgctcccagagcagctgcggccagatcacatctccatgatccataggccct

SEQ ID NO: 425142 - DNA, 82 bp, Homo sapiens
acatcagccacgcatctgaccttgttggccatgactgctccctgcgtctctggagcctggacaacaaaacgtgcgtgcagga

SEQ ID NO: 425143 - DNA, 75 bp, Homo sapiens
gcggctgaagggcatgtccctgcttgtcagggctgagagcgacggtggaattctttgaacccttttgggacagtg

SEQ ID NO: 425144 - DNA, 74 bp, Homo sapiens
cgatctccgccctggggtcattgtcaggggactcattctcacagttccggtttgctgaggagaaagaatgggat

SEQ ID NO: 425145 - DNA, 75 bp, Homo sapiens
gtgggacacccgtttgacacggtcaagtggctggatctctgctctggtggtgccgaagggcaacacagcagtatc

SEQ ID NO: 425146 - DNA, 75 bp, Homo sapiens
ggggggattctcgacctgctaacagaactggaccttttcgcgttggctccaacttttgaaatgaatcctatgaag

SEQ ID NO: 425147 - DNA, 83 bp, Homo sapiens
gtattcatctgcagcagaacaacttctggcagagtacttagagagctgttacaacttctaaatgggaattatttgaccagcat

SEQ ID NO: 425148 - DNA, 50 bp, Homo sapiens
atctccttgcaaacgtagatgtcataccctaatgatcccagcaagataat

SEQ ID NO: 425149 - DNA, 100 bp, Homo sapiens
actactggccgaaggggcgtctgcggctctccgccgtccccagccctgcctctccctgggctctgggattttatattggaagacatggatcttgctgcca

SEQ ID NO: 425150 - DNA, 90 bp, Homo sapiens
gaagagtgacttgtttctggatgattctaagagggactttgaacatgtcggggatcgccctcagcagactcgcccaggagaggaaagcat

SEQ ID NO: 425151 - DNA, 100 bp, Homo sapiens
cggggccgccgctcgaggagggctcagcctcctgtcccagggagaatccgaggaatcttctgcacaggatgattgccgccgtggacacagactccccccg

SEQ ID NO: 425152 - DNA, 82 bp, Homo sapiens
gagcgcgagcggcgcgagaaaatgttccaggtcatccagccagagcgtgcgctgtacatccaggccaacaactgcgtggagg

SEQ ID NO: 425153 - DNA, 98 bp, Homo sapiens
cgccatgtacttggagcactatctggacagaaactactttgcttcgcactttttcatgggaggagagaaattcgacaccccccaccctgaaggttacc

SEQ ID NO: 425154 - DNA, 100 bp, Homo sapiens
caagcaacaacaatcatagctggctaaatttattgtgaagaaatcagaagatgaagaagacgccgctaaagatacttatattattgaatgccaaggaatt

SEQ ID NO: 425155 - DNA, 74 bp, Homo sapiens
tcaaccgggaccccagcttttcagaactgcagggaaacagccatcatgagcccgtgctttgaagaagaggagca

SEQ ID NO: 425156 - DNA, 97 bp, Homo sapiens
agcccgacgcaaaccaaggatctggggatcttcgcactatcccaagcattgacaagatatctaaagtcacctctcctgtgttggtcattcatggtac

SEQ ID NO: 425157 - DNA, 83 bp, Homo sapiens
ggaagctggaccagaggccgggaggcgaggaaaccgtggaagctgcactgcaccaggaattacatccacctgaacctgttcct

SEQ ID NO: 425158 - DNA, 75 bp, Homo sapiens
tgatgctcaagggagagccagagcaagagcctctggatttgtgtttactcgtttggatggttccatggcccaaaa

SEQ ID NO: 425159 - DNA, 73 bp, Homo sapiens
aggcattgaccccttgtccagttactctaacaagtctggaggtggcagagagcctccagctggtgacagtaca

SEQ ID NO: 425160 - DNA, 100 bp, Homo sapiens
tgcaattcataatggagctactgtactggctattggaaggaggagattctgaagataaggaggaagatgataagatcagatgggcgtctagatgggacta

SEQ ID NO: 425161 - DNA, 83 bp, Homo sapiens
cagcgatagcccagtggatggccattccagagcatcactttgggtcctcaggaatgacattacatgaacgctttactaaatac

SEQ ID NO: 425162 - DNA, 82 bp, Homo sapiens
aggatctggtgtaccaggcgaagctggccgagcaggctgagcgatacgacgccgccaccggcacggccaggccagcatggtg

SEQ ID NO: 425163 - DNA, 100 bp, Homo sapiens
cctcgcgtcgcgcccgggaggaaggaacgaggcaaggagctaaagcagcgtgcgttcagccctgggtaatctatgccagcaattatgacaatgttagcag

SEQ ID NO: 425164 - DNA, 51 bp, Homo sapiens
ttcgcagtggtcgcttcttctccttggttgagagcaccattggatgcttac

SEQ ID NO: 425165 - DNA, 100 bp, Homo sapiens
ccttggcgtttcagctcctcgttgtctaggtgatcatggaggaagcactttactcccaccaaatgtcacaaatgaatttccagaatatgggaccatggag

SEQ ID NO: 425166 - DNA, 100 bp, Homo sapiens
cgctgctggccctcgggctgcgggagccgggctaggacgccgagcggtgactccccgccgctcccgggggccgtgacggatgtgatcttcgtggtggaaa

SEQ ID NO: 425167 - DNA, 100 bp, Homo sapiens
ccggcggtggcggcggcgaggccgggactcgggcttagggcctgctgtggaggcagcggcggacgccgagctaagcagttacgagaagtttctgagaagc

SEQ ID NO: 425168 - DNA, 75 bp, Homo sapiens
aggcgcgagtgaggaaaggaggtactgtaggaaatttctcctcttctctccatggaggctatggcatttgttact

SEQ ID NO: 425169 - DNA, 51 bp, Homo sapiens
cacaaagctgttcttttcaaaatgggtggagccgccaccaaaatgcagatt

SEQ ID NO: 425170 - DNA, 96 bp, Homo sapiens
cacccgtccatcttcgggatcttcgacgggcacgggggagagaaccttcggctcgcgtgcttctgagctgctgtggatggcctcggctctctggac

SEQ ID NO: 425171 - DNA, 90 bp, Homo sapiens
ggggtactacggctacagcaaggacaactacacctttgcccaacctgggattcaaatgaaagtgaaaatgttagaagaactcgtgagccg

SEQ ID NO: 425172 - DNA, 100 bp, Homo sapiens
acggacaacctcagaggacaacgaagtgttcggtatagacacgtgtggccgtttacgctgtaggatcctcattcccactggctttgaacattttggggac

SEQ ID NO: 425173 - DNA, 100 bp, Homo sapiens
ctcttacgaaagtatctgaatagtgaagtatttatcactcatcacagtaacttacggagtgagctgagtcgacagaaacttcatacccaagagctgcttt

SEQ ID NO: 425174 - DNA, 96 bp, Homo sapiens
aaccatggacaatggaagatgaaaggcacagtcgaatctgtccagggtgtatgtacaaagacttttgaagaggtgtgggagcacacatgatttaaa

SEQ ID NO: 425175 - DNA, 90 bp, Homo sapiens
ctttgaccgacacctccaccctacaagtactgaaaaggcacaggtatgatctcgtgaaatcttgagagaaactgaatgacgaatgaaact

SEQ ID NO: 425176 - DNA, 75 bp, Homo sapiens
ccgctgtctgcgaaggcctaaagatcgaacaccagggggacaagctggagatggcgagagagaaacatcaggctt

SEQ ID NO: 425177 - DNA, 82 bp, Homo sapiens
aaaacaagtggctgcggccgtcgcccaggagtcatcggacgccagaatctggtgtcgtgaaaactacccctaaaagccaaaa

SEQ ID NO: 425178 - DNA, 83 bp, Homo sapiens
gagaaagccgaagatggcggtccccgcggcgctgatcctacgggagagccccagacaatgcagatcttcgtgaagactctgac

SEQ ID NO: 425179 - DNA, 100 bp, Homo sapiens
aagcacacactatggcgctgaaacggattaataaggtggagccgccaccaaaatgcagattttcgtgaaaacccttacggggaagaccatcaccctcgag

SEQ ID NO: 425180 - DNA, 83 bp, Homo sapiens
caactgtcctcaccagccctcgcctcccgagtcactgcagccaacccttcagcaaggtgtcgtgaaaactacccctaaaagcc

SEQ ID NO: 425181 - DNA, 74 bp, Homo sapiens
aagaactcgtcatgctctttgtagcgtggtgcttctgttgctcacagctggagaatgctggaggagaccttaag

SEQ ID NO: 425182 - DNA, 98 bp, Homo sapiens
tcacattggccggcaacttgttccagatgccaacgtccggcggtacctccagctgacacagtcagaactcagcagctaccatagaaaagagaagcagc

SEQ ID NO: 425183 - DNA, 51 bp, Homo sapiens
tggcaacggaggcacagtctacaagcccgatgagagaaagggaaagttaag

SEQ ID NO: 425184 - DNA, 75 bp, Homo sapiens
cctgcttccagatcctcctagaagtagttacttggaaagtccaagaggcccaagagaaaatctctgctggcttta

SEQ ID NO: 425185 - DNA, 75 bp, Homo sapiens
ccacagcatctttgtctagccccagtgcaggttcttcagacccagaagaagaaagtgttctctactccaaccgag

SEQ ID NO: 425186 - DNA, 151 bp, Homo sapiens
tttttacgtgacaaaagatgggaagaggtcagaggtgccctgatgtctgctttcagtcctgaaaagctgaacgaggcaggaagagtgaggaagagaacctttttgagatcatcacagcagatgaagtgcactatttcttgcaagcagccac

SEQ ID NO: 425187 - DNA, 75 bp, Homo sapiens
cggggagaaaaggttgcgctgcgattctcaagatctctggacctggatgccttcaattaagttgcagagttctga

SEQ ID NO: 425188 - DNA, 80 bp, Homo sapiens
gagcagcgtcatgtacccctgctctgaaccaagttgtcctatgggacaagattgttttgagaggtgataatccgaagctg

SEQ ID NO: 425189 - DNA, 100 bp, Homo sapiens
aaagctgaactgaatgagtttcttactcgggagctggctgaagatggctactctggagttgaggtggcagggcccagccccgaaccagacaagggacccc

SEQ ID NO: 425190 - DNA, 89 bp, Homo sapiens
gctttgttgaggcggcagtatgaccgggtttctttgatgcgacctcaggaaggagatgaggactgtagaagcggccaggaagaaaacca

SEQ ID NO: 425191 - DNA, 110 bp, Homo sapiens
gtttcacattgctgatctgtggttgagctggaattccaaccctgtctgaaggactgtggagctctcgggaattgaatgatctggcacgggaccctccagcacagtgttca

SEQ ID NO: 425192 - DNA, 100 bp, Homo sapiens
cgtcaccgccatggcaggcatcaaaggtaattcatttgcacacctgttagcaagaaacagaagttgaaggactggaacaagtgaactaggaaagagggaa

SEQ ID NO: 425193 - DNA, 124 bp, Homo sapiens
ctgccgtcttcctatccttacccgacctcagatgctcccttctgctcctggtgtgttccagagaacaagccttcagacatttgctatattgacgctgagctgtcaggggactcaggcttatgag

SEQ ID NO: 425194 - DNA, 100 bp, Homo sapiens
gaagggcaatcattccttctcacttggcctatggaaaacggggatttccaccatctgtcccagatgagcgggatcgtgtgcagaagaaaaccttcaccaa

SEQ ID NO: 425195 - DNA, 95 bp, Homo sapiens
gctctcctgtaggaagcaaccagtctcgatctggcccaatctctcctgcaagtatcccagctgtggaaatacaaagaactctgaatcaacttgga

SEQ ID NO: 425196 - DNA, 101 bp, Homo sapiens
tggtacagctcagcatggatttcagctcctactacaaccgggtacccagagagtgagcagctccacgcgggactgtgcacggtggccgacacccgcaggga

SEQ ID NO: 425197 - DNA, 100 bp, Homo sapiens
gcgccagtgcacggaagtccatctgaacgcgagcccagcattgacctgctgcaggccttcgtggagcactggaagggcatcacgcactactacatcgaga

SEQ ID NO: 425198 - DNA, 75 bp, Homo sapiens
cgagtccggaggggctgccgcgggaggaactttatattgctgttggaatatctggagccatccaacatttagctg

SEQ ID NO: 425199 - DNA, 51 bp, Homo sapiens
ctcgtatgcaacctcaggcttcagccagtgcctccgaagaagccctaagtg

SEQ ID NO: 425200 - DNA, 99 bp, Homo sapiens
gaggactttcttccagcttctgctgtccttctttgtggagagcaaggcttaccactcttctctcatggatcctgataccaaactcatcggaaacatggc

SEQ ID NO: 425201 - DNA, 75 bp, Homo sapiens
tcggtcatctaaaggaggttttaaacagtataacagctttgcccgaagtttttacatacaaattctactagtcac

SEQ ID NO: 425202 - DNA, 88 bp, Homo sapiens
ggaagcggagaaaccgctcccgtgaccgaaagaagaaggatgtagctgagctgattcgggccagagcctgccagagggtggtggtcat

SEQ ID NO: 425203 - DNA, 100 bp, Homo sapiens
cttgaaggccctacgcagttccgacaaaggtcgcctttgctactaccgcgactggctgctgcggcgcgagatctgactgcagccatgagcagcaatgagt

SEQ ID NO: 425204 - DNA, 51 bp, Homo sapiens
acatggaacagggactcactggggagccccacagtcttcgttataacctca

SEQ ID NO: 425205 - DNA, 83 bp, Homo sapiens
cgcgctgctcctcgccctcaagttcacctgcagggaagaaggagaaagggccaacccctgaagaagcaatacagaaactgaag

SEQ ID NO: 425206 - DNA, 110 bp, Homo sapiens
accacctcctcctaccaaaatttggtttggagcgaccattctcaggtgcaacccagtttatgcctgaccccaagctcatggatcacgggcagtcccacccagaagatata

SEQ ID NO: 425207 - DNA, 96 bp, Homo sapiens
cctgccccagggccagttctcttgggtccctctgggtttatgggagattccaacatgccatgggaggagtacctgcctgggcagagactactaagc

SEQ ID NO: 425208 - DNA, 100 bp, Homo sapiens
agaatatgaaatgagtctggaaaactgggccaaagcagtgaaacgctccatgaattgtcacagccctttcagacaacataaaaccaaagacaagcatgaa

SEQ ID NO: 425209 - DNA, 82 bp, Homo sapiens
tccctgcttgacgacgagctcatgtctctggctgcctgggaggggtggctgtatccctgtcccacatcagaaactgatcctc

SEQ ID NO: 425210 - DNA, 118 bp, Homo sapiens
cgaagttggaagtgtctcttagcagcgcgcggagaagaacggggagccagatcctgcccctgagctttcatgagctgttgaaccatctggaattcacaggcctgtcatgagagacacg

SEQ ID NO: 425211 - DNA, 100 bp, Homo sapiens
gcgactgcggaggccgggcgaggccggtgaggacgcggcgggcgagcgagaggccgagggtgtcatggagaaactccagctgggcccagagattctgcag

SEQ ID NO: 425212 - DNA, 75 bp, Homo sapiens
aaagatgcagatcctcatttccatcatttcctgctaagccaaacagagaaggacctgggatccagttggaggacg

SEQ ID NO: 425213 - DNA, 100 bp, Homo sapiens
cgtacacactgggtctccaggcagcggccgtcgccgcatccccggcagcagctccaggcaaagtgacaggtgctggagaatctggtaaaagcaccattgt

SEQ ID NO: 425214 - DNA, 73 bp, Homo sapiens
atccttctcaaccttgtgggatgtgaaaactctgttactgaagagaggaaaatatgatgttcccaagtggctc

SEQ ID NO: 425215 - DNA, 75 bp, Homo sapiens
gaccggctgaggcggcgcggcagcggagggacggcagtctcgcgcgaaattattcttgacagaagtattttaaaa

SEQ ID NO: 425216 - DNA, 100 bp, Homo sapiens
gcagctgccccctgggctacactgggaaaaactgtcaggatgggcttctttctcaaggttattctgattttataaataggatgcacaatcagattcctca

SEQ ID NO: 425217 - DNA, 127 bp, Homo sapiens
gccgccgccaagctcctggccctggccctgatcatcctgctgggcttcgtccagatcgggaagggtggccaaggtggaatacgtcaggaagaagccaaaattaaaagaagtccaggtgaggttagag

SEQ ID NO: 425218 - DNA, 51 bp, Homo sapiens
gcctggcctacagcgaggctgtatgccgagattttgctgtcctggaggacc

SEQ ID NO: 425219 - DNA, 100 bp, Homo sapiens
atgaatcaggttgggattgtgctgaacgtacagcaaggccaaacggttagaccaattacactagttccaggcatgttatttgaaagcaattgagacgcaa

SEQ ID NO: 425220 - DNA, 100 bp, Homo sapiens
attattattactcccagttcctaagggaagagtttctaaaccctccaattcagtacttcctcctgtgctggttccaagacacagcgaatataatcctcag

SEQ ID NO: 425221 - DNA, 74 bp, Homo sapiens
tgcggggcttccctgcggctggagctattcaggattatgaaactgctcaggaacacaatgaaaatgatcagcag

SEQ ID NO: 425222 - DNA, 100 bp, Homo sapiens
caagggcttcctggccctctaccaaaccgtggggttatgtaccgaaggactctaccgtgtcagcgggaataaaactgaccaagacaatattcaaaagcag

SEQ ID NO: 425223 - DNA, 75 bp, Homo sapiens
acgccatgcagctgctgacggcagtctggatgtggatagtgaagctaagaaactattgggtttaggacagaaaca

SEQ ID NO: 425224 - DNA, 82 bp, Homo sapiens
ggagactcctgaccctcagaatgttttcggctttgtgagaaaccttaccatcaaacacgatggccagcaacgttaccaacaa

SEQ ID NO: 425225 - DNA, 75 bp, Homo sapiens
agcttgggcttccagctcagcagggaaccctgcaggtgatgtacagttcattgattatgaatattctggatacaa

SEQ ID NO: 425226 - DNA, 74 bp, Homo sapiens
ggagcccaggcaccatactgtcttttcgagcgcggggtgtcctgtcctcgccatgaggccgcagcaggcgccgg

SEQ ID NO: 425227 - DNA, 96 bp, Homo sapiens
gagccaggagaaggaatttcacaagatggatctgagaacgctgtctgggcttggtaccaagagctggtatttcacagcagcgaccgcctcacagac

SEQ ID NO: 425228 - DNA, 82 bp, Homo sapiens
gtccgagctgagatccatctgcaccacggtgctggtagaggaagaagaacccactggatacattcgattcgaaaaatttctt

SEQ ID NO: 425229 - DNA, 82 bp, Homo sapiens
accgctgccctcagctccgagtccagggcgagtgttatagttttgccgctggactcttccctcccttcccccaccccatcag

SEQ ID NO: 425230 - DNA, 96 bp, Homo sapiens
gctgcaatcacatgcagtgtgctaaggaagaagttgaagctttgatatgagtaaacaagtatctctacctgaaatgattaaagactggaccaaaga

SEQ ID NO: 425231 - DNA, 90 bp, Homo sapiens
aaaactgtgcttcttgtagggggcttacccttacccccacagctttatcgtctgcaacaacatgttaagttgattatggaagattcccac

SEQ ID NO: 425232 - DNA, 82 bp, Homo sapiens
cgcccgccctctccccgtggcgcggcggcggggaggcgagcgtcgtctcggagatgcagccaagaaagccatcagtaaattg

SEQ ID NO: 425233 - DNA, 82 bp, Homo sapiens
agaccctggagcctcagttggaagcagccgatccagcctgcggagcctgtggggcagcacagcccgttcttcgccgagcagc

SEQ ID NO: 425234 - DNA, 100 bp, Homo sapiens
acaaaggaaagaccagtagaagagaaagaaaccaaaaacagcaagcgcagagccaaacagccaggcagactggtcttctgaggacctctgccctctacac

SEQ ID NO: 425235 - DNA, 101 bp, Homo sapiens
tgtatgaacaggtgcatcctgatgacgtggagaagctgagagagcaactgtgcacctcagaaaactcaatgacagggggacttgatctcatcttcatgcca

SEQ ID NO: 425236 - DNA, 101 bp, Homo sapiens
agtcatgtggcagtggaaaatgcgctcgggctggaccagcagatgtccagctcgccgctgtccaagaaacgtcgcgtgtccgggcctgatccaaagccggg

SEQ ID NO: 425237 - DNA, 83 bp, Homo sapiens
ggaaaattggcaaatctgttactgcagacagatgggaaaaatatttgatcaagacccttctcaggtgcagccagagagacact

SEQ ID NO: 425238 - DNA, 101 bp, Homo sapiens
ctgaactgagcgtatgtgccacgccgcccaggagacccctctgctgcaccacttcatgagccacactgaaggatgggaggaaaatctgcctggacccagat

SEQ ID NO: 425239 - DNA, 100 bp, Homo sapiens
ctgtactccttgtctttgcaaacaaacaggatgggactgaggaagacccacaggcagaactggccatcattcatggtcagatggcttatattctgcagct

SEQ ID NO: 425240 - DNA, 100 bp, Homo sapiens
tgctgatgaaacttgggactctgcaatagatacatggagcccatcagaatggcagatggcttatgaaccacagaggaatgcagtagcatggatagttgat

SEQ ID NO: 425241 - DNA, 99 bp, Homo sapiens
ctgtagatggtgtggctcctcgagcaaaaatgaaccagcagcgtgggaggcgttttaggattctggttgatctgaaaaatgaagtttggtatcaaaaat

SEQ ID NO: 425242 - DNA, 89 bp, Homo sapiens
gctgcttccaaagctcattgacttttctgctcagctgcaagctttcttcctggtggcagatgacatcatggattcatcccttacccgcc

SEQ ID NO: 425243 - DNA, 100 bp, Homo sapiens
gagatcttcaactgccacctgcagcggccgctgagcagtggagccagccccagcgcgaggagcccaaggtgggcatcaagaccatcaaggtgtactgcca

SEQ ID NO: 425244 - DNA, 100 bp, Homo sapiens
gtcaccaagagaggctgagagaccagagtgtgaacatggctacgcctcttcattcccgtccatgccgagcccccgactgcagcattcaaagcccccacgg

SEQ ID NO: 425245 - DNA, 50 bp, Homo sapiens
tggtgagcctttttgtcactgtagtttatgccaacgtgacttcattcata

SEQ ID NO: 425246 - DNA, 76 bp, Homo sapiens
cggctggggccacttgtggtcgccgggaggtcccgctcccggtcccctcggaggagagcccactcccctgagagac

SEQ ID NO: 425247 - DNA, 100 bp, Homo sapiens
gcaccgttgtcctacttccagaatgcacagatgtctgaggacaaccacctgagcaatactgtacgtagccagaaatcctaagtaatgcactgaagagagg

SEQ ID NO: 425248 - DNA, 75 bp, Homo sapiens
gaaaccaccgtggaagtcgcctggtgtgaactgcagaggtcaaccagaatcaagatgtctgggactgaggaagca

SEQ ID NO: 425249 - DNA, 96 bp, Homo sapiens
actacccttgcagatctattccggccacccattgatttgatgcataaaggcagctttgaaacagattcctagatgaggttatgaagaagtatggca

SEQ ID NO: 425250 - DNA, 96 bp, Homo sapiens
cagcaaacagagattcgggttctgccgcttatcttcaggagcgaagagctgcttctgtatcttaaggcccggcttgggacattgttcacttcccct

SEQ ID NO: 425251 - DNA, 90 bp, Homo sapiens
cgcctgcaagtgccatctcaaacaaagaggcaagcagtggctctgaccattgccctcttgaacatttaccgtaaccctcaaaactcttcc

SEQ ID NO: 425252 - DNA, 75 bp, Homo sapiens
gattaatccagtgccgcctggaggcagccggtccaacgtcgacatttataactcagaccccctgatctgccgggc

SEQ ID NO: 425253 - DNA, 75 bp, Homo sapiens
ggggaaactaggtcgatggtcggcggcgcccggatgggcagctgagtttgaaggatgacctctaggaagaaagtg

SEQ ID NO: 425254 - DNA, 101 bp, Homo sapiens
caggttcttcatcttcaaaaatgaacagtttggagaacctccatttctaccagaatcctttgaccgaattcttctggatgcaccctgtagtggaatgggac

SEQ ID NO: 425255 - DNA, 83 bp, Homo sapiens
gtgcatccttggcagaaagtgaggaggaaaacacccccattcccatgactgaagagttgctgaaacaacaaaagctgaattca

SEQ ID NO: 425256 - DNA, 98 bp, Homo sapiens
actgtttgaaaagagtacaggacttcctcacaaaggttgttatggagttgatggagagagtgactctattatgagttcagcttctgaaaactccactg

SEQ ID NO: 425257 - DNA, 100 bp, Homo sapiens
gtacctatttcaaggcattgctaggccctcgagcgtggggtagagcagcggctgccatgctcttctgtggcttcatcatcctggtgatctgtttcatcct

SEQ ID NO: 425258 - DNA, 100 bp, Homo sapiens
agctgaacagggatctccacgggttgcagatatcaagaaagtcaacaacttcatcagagaacaagacttatatgctttgaaatctgttaagattccagtg

SEQ ID NO: 425259 - DNA, 75 bp, Homo sapiens
caagcaacagtagtcgctgttggatcgggttctaaaggaaagtctgtatttagaaactatgatcacgaccatgat

SEQ ID NO: 425260 - DNA, 90 bp, Homo sapiens
gaggaagcgtagacttgaggatgcattcattgtgatatccgatagtgatggagagatggctattcatatgaaaaggaagcaatggaaaat

SEQ ID NO: 425261 - DNA, 83 bp, Homo sapiens
tcgacacacaaagaatagagttgagcctgtgggacacttcgggattatatctgtccaagatgcgagtctggttttatcgagga

SEQ ID NO: 425262 - DNA, 100 bp, Homo sapiens
taattgaaggtggaggaacaaaatttgtctgcaaacctggagccagaaacattaccgtcatattccacccattactaagtaacttaggggtaccgccagg

SEQ ID NO: 425263 - DNA, 91 bp, Homo sapiens
gaagtagatactcgggagtccttggtcaagttttttggacctcttagctcagtgatctggtggcccttgtgcgggggaagctgtcccgcat

SEQ ID NO: 425264 - DNA, 97 bp, Homo sapiens
cctgcccttcgacgggcacaacctcaaggttggatggcaagcatgtggtgtttggcaaagtgaaagaaggcatgaatattgtggaggccatggagcg

SEQ ID NO: 425265 - DNA, 83 bp, Homo sapiens
gccgaagtactcgtcaaaaatagccaggagtgcctgtgaagaaaacggggtattgccctgaggcttatattctgcctcagttg

SEQ ID NO: 425266 - DNA, 100 bp, Homo sapiens
acaggactgtatgtcagagaagagacggcgcttggacgccaggaatcctctgaagcaggagactgccctatccagtctcttttagcatcctctgagtggc

SEQ ID NO: 425267 - DNA, 90 bp, Homo sapiens
actacagctgctcagaagcaccactggaaactcagatctatccatactaatggaaatgtaactggaactgactctgatgataaaatcaag

SEQ ID NO: 425268 - DNA, 89 bp, Homo sapiens
ggaagctcgggcgctccggctgtaaggagccgcggcggggggaaaatggagcccttcaccaatgtacaagttgtgcaaagtgaggaaga

SEQ ID NO: 425269 - DNA, 52 bp, Homo sapiens
ccaaagagacacagcccatttttttagccaaaactggacaagccaaggcatc

SEQ ID NO: 425270 - DNA, 74 bp, Homo sapiens
gcagaacctgtgctgcaggatcctgggcaggagcgaagatgtcagtattgaatatggtggtgaggcgtgaccct

SEQ ID NO: 425271 - DNA, 100 bp, Homo sapiens
tggccatgtcccagctggtggaatgcgtccccaacttttcggaggggaagaaccaggaggctgaaggggatgctaagggagataaagcaaaggtgaagga

SEQ ID NO: 425272 - DNA, 100 bp, Homo sapiens
acatcctcagccgaagatctcacttcctcccagaggcctttgctgactgacccctcagtggaaagaggcaaaacctgatgaattaatggattccaaattg

SEQ ID NO: 425273 - DNA, 80 bp, Homo sapiens
cgccctcaaggccatgatcaaaacatgtgaggtgaggatgagccgcagccctttcctgggacatggatgtacatggcgtg

SEQ ID NO: 425274 - DNA, 87 bp, Homo sapiens
gggaatgagacccaaactgctcatacagaattacgcatttccacttctaatgacctcggaatatacagaactggatgacagtaactt

SEQ ID NO: 425275 - DNA, 82 bp, Homo sapiens
gctgaagcgactgagtccgcgatggagatgtgcactcccagcaacacccctgccacgccgcccaacttccccgatgcgctgg

SEQ ID NO: 425276 - DNA, 75 bp, Homo sapiens
ttcgccaaagagcttttcctaggcaaaatcaagaaggtgaatgaaaactttgccattgatttgatagcagagcag

SEQ ID NO: 425277 - DNA, 75 bp, Homo sapiens
cagcgcgagagagcgcggccctcaggagcaaggcgccctgggcgctgcctatggcacagccaagagcggtaccgg

SEQ ID NO: 425278 - DNA, 100 bp, Homo sapiens
ttcggagagacaaggctaccagcaacatctgtacagctcagacatttctcttgggaagttgtgcatctgacaggaatatagtactgtacgatatgaggca

SEQ ID NO: 425279 - DNA, 100 bp, Homo sapiens
ggtccggggcccagttttccggagttgcggcagggcaagaatcctttcgttccatcacaaggtcgtattacagaggtgcagcaggagctttactagttta

SEQ ID NO: 425280 - DNA, 82 bp, Homo sapiens
ccagccctggggtgttccccgtcactgtgtatgtctgattgacccgggctgcttccgagaaattgatgagctaataaaaaag

SEQ ID NO: 425281 - DNA, 99 bp, Homo sapiens
aatcagctcgtacttacttggagagacatatgtctgaatttatggagtacatatctgaagagatggattaagaatgctttggattaaggattgtggagc

SEQ ID NO: 425282 - DNA, 75 bp, Homo sapiens
cttttcctccacctaccttcccgaggggcttggagtacccataatacagtgagcccaccttcctggtccccagac

SEQ ID NO: 425283 - DNA, 98 bp, Homo sapiens
gaggagggagaagacgaggatgatgcggaaattaaccccaaggtgttacacataatattgcattacttcgagaggtgataatcaactcacgctttgta

SEQ ID NO: 425284 - DNA, 82 bp, Homo sapiens
cagacacctcgctggagaccccatgacaatgcagatcttcgtgaagactctgactggtaagaccatcaccctcgaggttgag

SEQ ID NO: 425285 - DNA, 74 bp, Homo sapiens
tgaagaggatgatgtttttggtgaagctgtgttggggtggaagaggaggaggcgcccgacatcgacatatacca

SEQ ID NO: 425286 - DNA, 100 bp, Homo sapiens
gaggcggaggcagaggtggaggcgctttgaaaggatgaagatgagctggattcccacaccatggtgaagactagtgtggagagtgtgggcaccatgcggg

SEQ ID NO: 425287 - DNA, 82 bp, Homo sapiens
ttgcagagctgtgggctgtgttccacaagttcaaagatctatgggagtcgtcagattatactggagaaagaggaaacagaag

SEQ ID NO: 425288 - DNA, 82 bp, Homo sapiens
gcaaccattgacgccatgtcgggttattcgagtgaccgagaccgcggccgggaccgaggagcttacaagaccctatgaaaaa

SEQ ID NO: 425289 - DNA, 100 bp, Homo sapiens
cggcgggacagagcgcctgcgaccccagtcggtgctccggggaggtcacctgacgaggagggacagagcagaatgggctgatatagatccggtgccgcag

SEQ ID NO: 425290 - DNA, 117 bp, Homo sapiens
acaacctgctgcgggatcccaaatcggaagtgaattcggattgtttgctggtactccaaagattcaggtttactcacgtcatccagcagagaatggaaagtcaaatttcctgaattg

SEQ ID NO: 425291 - DNA, 75 bp, Homo sapiens
gaaagatcctactggacatgtcagtgtcctttcacacccatgtgaaagaggtgaatgaaaactttgccattgatt

SEQ ID NO: 425292 - DNA, 51 bp, Homo sapiens
tgagagttcccaattaataatgaagcagtttgtgaagtgtggatatgcagg

SEQ ID NO: 425293 - DNA, 115 bp, Homo sapiens
gccaattcatgaagcagcttatcacaactctgtagaatgtttgcaaatgttaattaatgcagactctcagcgttctcatctctcttccttcaccatgaagctgatggacaaattc

SEQ ID NO: 425294 - DNA, 100 bp, Homo sapiens
agaactccagaaagtgaagaagaaaatgtagaatgggaaactaatagagatgataattcatcaccttcgactgagcattcacaaggccttgagaagcaag

SEQ ID NO: 425295 - DNA, 96 bp, Homo sapiens
accgagtgccccggggaagccattccccaccccccaggataagttctgaacgtcgaaaagaaaagtctcgagatgcagccagatctcggcgaagta

SEQ ID NO: 425296 - DNA, 97 bp, Homo sapiens
gaactgatagcttatggttctccattgtgatgaaagcacatggtacaggcccgtgggagtcagcatgccgcgtggctgggccgcccccttgctcctg

SEQ ID NO: 425297 - DNA, 83 bp, Homo sapiens
ctctctttctggcctggaggctatccagcggtgctttcttctgcgacctggtactcatctacctcatcaaaaagagagagttt

SEQ ID NO: 425298 - DNA, 84 bp, Homo sapiens
tggatgtgggatccggttccttggtgtcatccagccttagcaaaccagagggaaactgaacagccaagactcctataacaattt

SEQ ID NO: 425299 - DNA, 90 bp, Homo sapiens
gcctcctgagtacctgggattacaggtatcgaaggatgatcgcagtgatgtggagagcagctcagaggaagaagatgtgaccacctgcac

SEQ ID NO: 425300 - DNA, 100 bp, Homo sapiens
caatgacaagctgtatctctaccttcagctcccctcaggacccaccactggagacaaaagagcaaggctgaagaggacgtggagtctggggaggatgccg

SEQ ID NO: 425301 - DNA, 50 bp, Homo sapiens
agaacgagtcgggcagccgctccaatgaataaaagccgccctcattctag

SEQ ID NO: 425302 - DNA, 80 bp, Homo sapiens
gcggcgcggcggccccgggaccaaggaggtgaacctgagcaaggtgggcgagtattggtggaacgccatcctggagggag

SEQ ID NO: 425303 - DNA, 94 bp, Homo sapiens
ccgcagccttgggcctcgcgccggctatggccgtgccctggggctgagccctcagctcaccatggatgatgatatcgccgcgctcgtcgtcgac

SEQ ID NO: 425304 - DNA, 75 bp, Homo sapiens
gttgacctaccccttgcacacctaccctaagccattggaaaagaagtttgttcgagtttcaggagaagcaactat

SEQ ID NO: 425305 - DNA, 100 bp, Homo sapiens
ggatgaggcccgcaggatgatccgttccgcccagcaggtgtccccaggtgtcattgccaacccctttgcggcaggcatcggccaccggaacagcctggag

SEQ ID NO: 425306 - DNA, 75 bp, Homo sapiens
gtggccagggtcagaaagtgcagaaggttatggtgcagcccatctcaaatgaattccttcgaaatgtatttgaac

SEQ ID NO: 425307 - DNA, 75 bp, Homo sapiens
aacacagtagtggaagatgtaaagcaatatttcgagcagtttggcaagtgtcctctacaagcctggtgatgccca

SEQ ID NO: 425308 - DNA, 100 bp, Homo sapiens
tggcgcagacattcccgtttgtagatgacaatgagcaaatggttatgagccttagagtttctgaactccaagtactgttgggctacgccgggagaaacaa

SEQ ID NO: 425309 - DNA, 89 bp, Homo sapiens
ctgcagcacgtggacgctgactcggaagtgcaggattttttatcaagcagaaatgcatcgaacaacgagaatcaagatcactgagctaa

SEQ ID NO: 425310 - DNA, 75 bp, Homo sapiens
ctccctcatttcatcttgggggaccagcagttggaccaagaggaaatctggcgccacccttgaacaagctgaagc

SEQ ID NO: 425311 - DNA, 83 bp, Homo sapiens
tactctctctttctggcctggaggctatccagcgatagtaatgatgacactgaagatgtttcactgtttgatgcggaagagga

SEQ ID NO: 425312 - DNA, 76 bp, Homo sapiens
agggaaggagccctggatggttgtgagggaagagacaggaagatggtgcccaggctcctgtgacgtttgatgacat

SEQ ID NO: 425313 - DNA, 82 bp, Homo sapiens
gtgaagcaacccactggagtgagcattgctgcatttggagagtcagatgccattttggtatgatctcgtgaaaccttgagag

SEQ ID NO: 425314 - DNA, 90 bp, Homo sapiens
cgcacctctgggcagcagcggcagccgagactcacggtcaagctaaggcgaagagtggcttttaacctggagacttgccggcttatggtt

SEQ ID NO: 425315 - DNA, 90 bp, Homo sapiens
gtgtgacaagcacaatgcttccgtggaaaaatcacaggacgtgttcctcatgatccggcgccacaagaccaccatcttcacggacgccaa

SEQ ID NO: 425316 - DNA, 101 bp, Homo sapiens
ccgtccgcgcccggcggcggcgggagcccaggagcctgccccgccctggggacgaagagctgcagctcctcctgtgcggagagacaagagagacacctcca

SEQ ID NO: 425317 - DNA, 100 bp, Homo sapiens
gataatactagtgaagccgagaatgggttctccctggaggaagtgttacggctcggaggcaccaagctttggacatcagacagtgcaggagaagaatgtg

SEQ ID NO: 425318 - DNA, 85 bp, Homo sapiens
accgcgtctgccactgcaactgtggccggaaagaccacagcaagattctttcattcgtctcctcctagcctgggggaccaggctc

SEQ ID NO: 425319 - DNA, 83 bp, Homo sapiens
acacagtggatgtcgagaacggtgcttctatggcaggatatggggttgtgtccactgtggtccccgactctgcccacaagctg

SEQ ID NO: 425320 - DNA, 75 bp, Homo sapiens
tctacgcctcctacgtttacctgtccatgttggtggcagttctgagagaagtcaagtatttgaatttccagcaac

SEQ ID NO: 425321 - DNA, 83 bp, Homo sapiens
cggcagatgcaacgcacagcggtgaccaatggcagcaagaattattgccaagttagcagcttggggaaaagaactgatggaag

SEQ ID NO: 425322 - DNA, 100 bp, Homo sapiens
tgggagagtagttgagccaaaacgtgctgtagcaagagaggaacacagcagctacactttgacagtagaagcaagagatggcaatggagaagttacagac

SEQ ID NO: 425323 - DNA, 82 bp, Homo sapiens
cgcccagagactgctgagcccgtccgtccgccgccaccacccactccggacacagatcgagggcacccagaaactgctcaac

SEQ ID NO: 425324 - DNA, 83 bp, Homo sapiens
tagagctgccagaggttccctccgagccccttcctgagaagatcccagggaaatcctcattgacgattcaatttgttgaaggc

SEQ ID NO: 425325 - DNA, 100 bp, Homo sapiens
tgcctctttttgccaccaatcccttcgatcaggatgttgggaccagttactctccacaagaaaattcacacaaccacagtgctcttcatagttcaaattc

SEQ ID NO: 425326 - DNA, 75 bp, Homo sapiens
ctgattaaaaagataactaatcacttagagagagtctcaaaggagctgcagttctcaaaagtctatggccctgtg

SEQ ID NO: 425327 - DNA, 90 bp, Homo sapiens
atttagtggaaaagctgagaaagtttcgttttcgcaaagaaacgaacaacgctgctattataaaccttcccctcctccaatgagtcccgc

SEQ ID NO: 425328 - DNA, 100 bp, Homo sapiens
agcaccacaaggccctggatgagaaggtcccgcagcccccggaagccaatagactccctcagggactctcggtccctcagctactcgcctgtggagcgtc

SEQ ID NO: 425329 - DNA, 100 bp, Homo sapiens
actcattcaaggttacccagttggcccagctgagagccagcctggaggttacccagcagcaggccacccaggccgaaggccagctactagagctgcgcaa

SEQ ID NO: 425330 - DNA, 82 bp, Homo sapiens
ggcggcggtggcggcttggacgactcggagagccgatgtgaagttcatttccaatccgccctccatggtggcagcggggagc

SEQ ID NO: 425331 - DNA, 98 bp, Homo sapiens
aagagcatgtctggggccagccccaaagagtcaactaatccagagaaggcccatgagtatgttcatgcggatgctcctaccaataaaacactggctgg

SEQ ID NO: 425332 - DNA, 83 bp, Homo sapiens
tgaaggacctgaaaatcatatagagaaagacagatggaagtctttaagggcatcattgcagaatacaacaaaatcaatgatgt

SEQ ID NO: 425333 - DNA, 113 bp, Homo sapiens
ccggaggagccatggactgcagcctcgtgcggacgctcgtgcacagatacaccttcacggcatggtgcaactcccacctgcggaaggcaggcacacagatcgagaacattgat

SEQ ID NO: 425334 - DNA, 100 bp, Homo sapiens
gagtgtatgaccacaaacagccatcaagggcagtgactaattgtgagtctttggtgaaggacttctactccaagctgggactacaataccgggacagtag

SEQ ID NO: 425335 - DNA, 75 bp, Homo sapiens
tcgcagggtcccatgaactgggacaggactatgagcatgtcacgatccgggatcagttgaaggaagaggagatcc

SEQ ID NO: 425336 - DNA, 75 bp, Homo sapiens
cttcaaccaacatcttctgccctgggtcaagtgtacaaccgtcttcagatctcaaaaacctatacctgctgaacg

SEQ ID NO: 425337 - DNA, 100 bp, Homo sapiens
tcccttggaaacacgctggcaagcaagattataatcaggaagtggatgcctccatttttaagattgacttgatgcacaacatcacaaaggcgatttttga

SEQ ID NO: 425338 - DNA, 83 bp, Homo sapiens
caacaatgagagagtggttgtaaaaatcctgaaggctgctctttggcgtaaattgcaatcgattagggatcgtttctcagaat

SEQ ID NO: 425339 - DNA, 90 bp, Homo sapiens
ctcatctctgagacccggaggaggttcgaagctgagtatgtgacagccttgaaaagatcttttgaggtcgaggaggtcgagacacccaac

SEQ ID NO: 425340 - DNA, 98 bp, Homo sapiens
cctcaaagtgggacaatatcctctgtggagaacacccccccatggaggcgaggtagagttggggtcgcagggccggcaaattgaatatatagatatag

SEQ ID NO: 425341 - DNA, 99 bp, Homo sapiens
ttcgtttacagctgttgcaacagcagaactagaattcgacctccgacatttctgctcaccagagggcatgaactgctgacggagtttcgctcttgttgc

SEQ ID NO: 425342 - DNA, 51 bp, Homo sapiens
cttggagtctttgtccaggacgaatctgaatctgaagctgaagaaggtgac

SEQ ID NO: 425343 - DNA, 75 bp, Homo sapiens
caggactccaaaatggcgtcagttgaggaaccgctgctgctggccgaactcaagcccgggcgcccccaccagttt

SEQ ID NO: 425344 - DNA, 101 bp, Homo sapiens
tcagacgcgacacagcctcttgaaagtcagaatttttctcctgtggtgagagatctaccactgctaagagccatctccaccagaagcctggccagacctgg

SEQ ID NO: 425345 - DNA, 90 bp, Homo sapiens
ccacgcccacgtcctgggcgactacagccaggtcttatttgagagatccaaaattaacgggacaggctcttattccaggatcagtaatat

SEQ ID NO: 425346 - DNA, 97 bp, Homo sapiens
ccccggggagtagagagagagaaactcactccccgagtccccgaccctccccaagcaaggattcgctaaatattgtaatggatcaaggagatacacc

SEQ ID NO: 425347 - DNA, 82 bp, Homo sapiens
cagagcgccgaggaggctttcctgctggtggcaaccgcctacgagacactcaaggtagcctttccagtaaatatatgactca

SEQ ID NO: 425348 - DNA, 98 bp, Homo sapiens
aacagacacgggtgaatgctgctaaaaacaagactggggctgctcccatcattgatgtggtgcgatcggctgaccaactgactgaagagcagattgca

SEQ ID NO: 425349 - DNA, 75 bp, Homo sapiens
ttcgatcttttaacatcacatcacatgctgacagcacaagaagtttgaaagatgatgacagtggggaccatgatc

SEQ ID NO: 425350 - DNA, 90 bp, Homo sapiens
ccacgctggcgttgcagctaggccagcggctcggcggtgagatcgtcagcgctgactccatgcaggcgttggagaccagggccagccctg

SEQ ID NO: 425351 - DNA, 90 bp, Homo sapiens
aacattgacctcacaaccgagcaaattgaagagacgttaaaatacttccggtgatcagcccatgacctaaacctccagacaaaataaaac

SEQ ID NO: 425352 - DNA, 75 bp, Homo sapiens
tgccgagtcactgtcctggtacaaggatgaggagggcgccatgttttggaagtttgacctgcacacaagctcgca

SEQ ID NO: 425353 - DNA, 75 bp, Homo sapiens
aagccctacagcagatgctggacagggacaagaatccttcaagaaacaggaaaaaactcctaaaacaccaaaagg

SEQ ID NO: 425354 - DNA, 107 bp, Homo sapiens
aaaatcctttggtgcaatcagataacatacctacccgcctcatgtttgccaggcacctcattgagaagtcagtgcgtaagatcgtctccttgctggcagcgtccgag

SEQ ID NO: 425355 - DNA, 98 bp, Homo sapiens
gatgccgcagtaccagacctgggaggagttcagccgcgctgccgagaagctttacctcgctgaccctatgaaggctgttcacggaagaccaggatgta

SEQ ID NO: 425356 - DNA, 100 bp, Homo sapiens
cggcagagcagggcggcggcgactcggtatgatcgggtacggcatggccaagggtgctgttcaccagctctgccagagcctggctgggaagaacagcggc

SEQ ID NO: 425357 - DNA, 105 bp, Homo sapiens
gagccagccttcaatgtgtcctacaccaggcagcccccaaatcccggcccaggtgtggatgaggtcaccattgtcaacattttgaccaaccgcagcaatgcacag

SEQ ID NO: 425358 - DNA, 75 bp, Homo sapiens
agcatgtttgtgcttctgcccaacgacatcgatggcctggagaagcaaaggaaggagtctgaaactcagtgtcaa

SEQ ID NO: 425359 - DNA, 75 bp, Homo sapiens
catttggctttgcctttctggacacagaagtatttgtgacagtagtattattgattccacagaatacagccaacc

SEQ ID NO: 425360 - DNA, 90 bp, Homo sapiens
aaacaccactgaagcattgccaaggtatggtgtcagtcgtggaactgaaacagagttcagtaatgcaacgattgcttacaggctggatgc

SEQ ID NO: 425361 - DNA, 75 bp, Homo sapiens
ctcagcaggcggggaagatgaaaggggggtgaagccagccagttttgacaaagtagcaattcctgaagtgaagga

SEQ ID NO: 425362 - DNA, 75 bp, Homo sapiens
aggccaagagggatccttcacccgtgtctgcactctcgagtggaccctgaggagctcttcaccaagctcgaccgc

SEQ ID NO: 425363 - DNA, 120 bp, Homo sapiens
cgccgcaggaggaggtgccgctgccgtggccgcccggctgccgggagccgacagcttcgcgccgggctgctgatactttggctgtgaggcaaaaaaggagaatttatgatatcaccaatg

SEQ ID NO: 425364 - DNA, 100 bp, Homo sapiens
ggcgacctcaagaagcagctccacgaaaggcagccgcggatcgccgcgctcagcgacaaacaagctgacggggtacgggatccaccactgctttgccagg

SEQ ID NO: 425365 - DNA, 100 bp, Homo sapiens
gttcattccgggggcacaccctctcagcggttcgaccttgaaactacaagagtgaatctgaaagttagttcaaaaagtcaaacgggttcacagcagccaa

SEQ ID NO: 425366 - DNA, 75 bp, Homo sapiens
cccctcattagtgatgacattgtggacaagctgcagtactctcggatgaagccaaggaggagttcctggatctgc

SEQ ID NO: 425367 - DNA, 83 bp, Homo sapiens
cattcttatactgcttttcgtggccactttggacaagacggcaaatggatacatcttgttttttcatattacatctacaagag

SEQ ID NO: 425368 - DNA, 100 bp, Homo sapiens
cggaaattaagtggagaccaaataactttgccaactacagttgattattcatcagttcctaagcagactttgagaatcactacaagaaaaactccttgtg

SEQ ID NO: 425369 - DNA, 100 bp, Homo sapiens
gccaagaccagcgcgagggccctgggcaaggcccgacagttctgggaagtcatcagtgatgagcatggcatcgaccccagcggcaactacgtgggcgact

SEQ ID NO: 425370 - DNA, 95 bp, Homo sapiens
cggccgcccagatgatgcggtggtgggggacctgccggcacgcgactccccccgggcccaaagtccggcctctttggcctacccccgttggctcc

SEQ ID NO: 425371 - DNA, 115 bp, Homo sapiens
gtgaaggggaagaggcccaccctggagtaaccctcactggagaatccagagaatttacatagtacatgacgaagttaaggataaagcttttgaactagaactcagctgggttggt

SEQ ID NO: 425372 - DNA, 98 bp, Homo sapiens
gctcaccttgggcttggtggcctgcgtgtcggcggagtcggctggagcattggatttgctaaaggagcttaagaatattcctatgaccctggaattac

SEQ ID NO: 425373 - DNA, 82 bp, Homo sapiens
gggcggcttcctggcctgggcgctccggtggcggcggagagactggctccagctttccttgaaatcctgcagagccttcatt

SEQ ID NO: 425374 - DNA, 100 bp, Homo sapiens
catcattgggagaaatccccactcctccaagaaccaacccccaaattggctgggacagattctgaaaaagagttccacgtcctcccttatcgagtctttg

SEQ ID NO: 425375 - DNA, 100 bp, Homo sapiens
cttcggaaagactgttccaaaaacagtggataattttgtggccttagctacaggagaggaagcacaggacgtatgtctatgtgctcattgtcactgaagt

SEQ ID NO: 425376 - DNA, 109 bp, Homo sapiens
gggagcaccaggatctcgggctcggaacgagactgcacggtcatcatcagatttgaaatatttaaagtggatacaaaactatttcagcaatgcagacaattaagtgtgt

SEQ ID NO: 425377 - DNA, 90 bp, Homo sapiens
ctgaaacaggagatggtgcggacagatgtcaacctggaaaatggcctggaacccgctgaaacccacaggaattgaatgatctggcacggg

SEQ ID NO: 425378 - DNA, 83 bp, Homo sapiens
tctctttcaatgacaaaaagtttgtcattaaacccatcgacaagaaggcacctcttgagtgtgcgtcagaatcccctgaagag

SEQ ID NO: 425379 - DNA, 85 bp, Homo sapiens
ccacttgcagcatggagtcgcccgcctcgagccagcccgccagcatgccccagtccaaagccctgggcgctgcctatggcacagc

SEQ ID NO: 425380 - DNA, 100 bp, Homo sapiens
ccttcagccaaagaaacaagccgtggaataggtgtatcaagtaatggtgcaaagcctgaagtagacaagggcgtggtccccctggcagggacaaatggcg

SEQ ID NO: 425381 - DNA, 90 bp, Homo sapiens
ctcatatccttttcagactacattttcctcacaactgttctttccagaactcgatcaaaatgccactgaaaaagtccagacaatgttcac

SEQ ID NO: 425382 - DNA, 82 bp, Homo sapiens
cggggctgctggtgggccgcgtcgaagacatggaccagggctacggaggaacggcagagtcgaaacaaacaatgagggcgaa

SEQ ID NO: 425383 - DNA, 95 bp, Homo sapiens
ggctgaaattggcagatacccatttaagggtctgcttggtgagctcattctcttacaacaacaaattcaagagcatgaagaggaagcgcgcagag

SEQ ID NO: 425384 - DNA, 90 bp, Homo sapiens
gccagatttgcagatggctctgctgtagtacagtatttcagacaacttttaagaggtgcagaatcaccaacacgcaattcaaaattgaac

SEQ ID NO: 425385 - DNA, 75 bp, Homo sapiens
ctgtgattggtggtcgcttggggtgatcatgtatgagatgctcatcgtcaccaggagactaaagtccatcaaaaa

SEQ ID NO: 425386 - DNA, 75 bp, Homo sapiens
tgcagccacatactatccgtttgttcaggaaccaccagtgacagagatctcttccacattcctccttcttataag

SEQ ID NO: 425387 - DNA, 100 bp, Homo sapiens
cagcgcttcctgcggaccggggcggccgtcaggggaaggtgtggctcattgactttaatccatttggtgaagtcacagattcactgctgttcacctggga

SEQ ID NO: 425388 - DNA, 98 bp, Homo sapiens
actcccagctgctccaaatcctgggctcaagcaatcttcctgcctcagcctcccaaagtgctaggaatgcaggcttctcgtcagtgcctcgcaggatg

SEQ ID NO: 425389 - DNA, 96 bp, Homo sapiens
acgagctgagcttcaaaaggggggacatcctcaagttgctgtctctgctggccttcatctgtgaagaagttgtatcacaatgtactttatgtggag

SEQ ID NO: 425390 - DNA, 74 bp, Homo sapiens
tcggtggtaacgacggcctcagcaggcggggaagatgaaaggggttatatcctgtgttgtgacctcatggttta

SEQ ID NO: 425391 - DNA, 74 bp, Homo sapiens
tgccttacaactacaaccagctggaaggcagattcaagcagctgcaagaacattctagtatgccagtagaaaaa

SEQ ID NO: 425392 - DNA, 99 bp, Homo sapiens
ctgctggtccttctgtggcatcttctacaaacccatttcagaccaatgccagaggagcaacaggaggaaaaggcttctcttttacatcgtactcaggaa

SEQ ID NO: 425393 - DNA, 83 bp, Homo sapiens
cgaggagtggctggagtgccagaagaggatcgacgcctatgtcgacgagcagtctgaagatgatgagaaactgaaaaagagga

SEQ ID NO: 425394 - DNA, 87 bp, Homo sapiens
aggctacatcgcggcatgagatgaagctgtgacaggttgcatcataaatacaaaggactgaagttataaaagagaaaagagaagttt

SEQ ID NO: 425395 - DNA, 82 bp, Homo sapiens
gcagttcttgtttgtggatcgctgtgatcgtcacttgactcgtttgtgaacagccaggagtggacgctgagccgctccgtac

SEQ ID NO: 425396 - DNA, 51 bp, Homo sapiens
ggcaaggaagcctctctgctaaaccccctatgcgtctgttactagagtgga

SEQ ID NO: 425397 - DNA, 75 bp, Homo sapiens
tattgaaagatgtattgagtacattgaagccacaggatcacagaagaactgcagcttcctggggagcagtttcac

SEQ ID NO: 425398 - DNA, 100 bp, Homo sapiens
gagatggacggtcactcagcctatggagttcaacaacatgttgctgtactgtgtgcccaaattcagcttggtaggctctaaattcacagttcgaaccagg

SEQ ID NO: 425399 - DNA, 82 bp, Homo sapiens
tcaaggagggaaaagaaagaatgtatgaggagaattctcagcctagatcgtaaagctgaaaattgaaatcatgaaagtagac

SEQ ID NO: 425400 - DNA, 83 bp, Homo sapiens
tgggccctctctctgctcctgggggttgccagggagtgcatccgccccaacccttttccccctcgtctcctgtgagaattccc

SEQ ID NO: 425401 - DNA, 90 bp, Homo sapiens
catccaactcagcgaatctccctgccttctctgcacctgccccagagctgctaatatttgtgatgattcctgcgtattccaagaaccggg

SEQ ID NO: 425402 - DNA, 100 bp, Homo sapiens
ccaaggaatcccagaaagtggagttgagtgaatccagccagggcaacatggtgagacctcatctctacaaaaactgaaaaataaaaaacttttaaaaaat

SEQ ID NO: 425403 - DNA, 48 bp, Homo sapiens
ccagttccaaagtgtcttaaagttaatcagctgtgttcagcgaatact

SEQ ID NO: 425404 - DNA, 90 bp, Homo sapiens
cctggccgccaaaccccagctggaactccggccacagccagcatgcaggtgagaagccctaccactgcaactgggacggctgcggctgga

SEQ ID NO: 425405 - DNA, 100 bp, Homo sapiens
cctcctggggaacccgttcagcacaccagtggggcagtgcctcggtgtggccgacgacgatgccctcgctgaggagcgcatgcggagaggccagaacgcc

SEQ ID NO: 425406 - DNA, 101 bp, Homo sapiens
aagttgagcagttggattcaagagcacttcccctttgccttcatcaggtgggaacctaaattattctgcaagacaaagggaagaaataaaattttcccata

SEQ ID NO: 425407 - DNA, 82 bp, Homo sapiens
aaaacgtttttcctgataactggaaagttcctcaagatggagactttgactttatatggctcgtggacagcagaaaattcag

SEQ ID NO: 425408 - DNA, 98 bp, Homo sapiens
agcagacagccaataaggtggaaattgagaaaattcggggaagaaggagaaagggccaacccctgaagaagcaatacagaaactgaaggagacagaga

SEQ ID NO: 425409 - DNA, 100 bp, Homo sapiens
ggaattatggtaccctccctcagcactattggaaataattatgaaaaatggaagcacggctggaaatagccctcattgccgaaaaccatcaggtagtggc

SEQ ID NO: 425410 - DNA, 75 bp, Homo sapiens
gaagctggccgagcaggctgagcgatacgacgtgatcagggccaaagcggtcagtgagaaggaagtggactctgg

SEQ ID NO: 425411 - DNA, 50 bp, Homo sapiens
gcagcgcggccgcagcagccctgaatttagataatgggctgtgtgcaatg

SEQ ID NO: 425412 - DNA, 75 bp, Homo sapiens
gcctacttggcccctaccttgttttcatggcatccaccatcaatggacccaagcaccagccgccgcttcacacct

SEQ ID NO: 425413 - DNA, 75 bp, Homo sapiens
cagagagagaggccaaagagcagcaccagaagctgtgggaagagcacctactgtgccaccatggtccagcactgt

SEQ ID NO: 425414 - DNA, 101 bp, Homo sapiens
tcttcattcatgactccagacagatgacatcttctccactggtatccaggctaagacaaccaaaccaaaaagccgatctgcacaggccgcacctgaaccaa

SEQ ID NO: 425415 - DNA, 101 bp, Homo sapiens
cacggaccagtttcagttcgccgatgggaaacccggagaccaaatccttgtgaacagagtatctgccaagcccgggcttccgtgatggtctacgatgacac

SEQ ID NO: 425416 - DNA, 88 bp, Homo sapiens
agagatgaagggtgcaggggacgttgctgggtgctggagaatctggtaaaagcaccattgtgaagcagatgaggatcctgcatgttaa

SEQ ID NO: 425417 - DNA, 83 bp, Homo sapiens
acttgctcgggcaaaagttgtgcattggcccgatcaagcctgacttctagccaaggctgaaggtgatgtggccgccctcaacc

SEQ ID NO: 425418 - DNA, 90 bp, Homo sapiens
ggcacctggagaccttcgagcaccccaacgtggtcagaaactatgttccaacttcctgtcaacaatcttggcagtttaagaaaagcccgg

SEQ ID NO: 425419 - DNA, 73 bp, Homo sapiens
acggatgttgcagatgttttacttcaagcaggggctgatttagtgtgtcgtttggactggtgatgagcgggtc

SEQ ID NO: 425420 - DNA, 100 bp, Homo sapiens
aaagattgaggagtctgaaacaattgaggattctagtaatcaagcagcagccagagaatgggagtgcagaatacagaaactgcagccatgaccacgcacg

SEQ ID NO: 425421 - DNA, 96 bp, Homo sapiens
cctgcttctgtcaattactgaagctataaggagattttttaaaaattaaacttcaacacaatgaggtcacagggattatggacccagaacagatgc

SEQ ID NO: 425422 - DNA, 101 bp, Homo sapiens
acgcactttcgtggcagccgacgggaaatcctatcaagtgccaatgctggcccagctctccgtgttccggtgtggattaatgcagtatcgaatggacaagt

SEQ ID NO: 425423 - DNA, 83 bp, Homo sapiens
ctttgatcttgaatattatgtccatcaggactgggcacttggagtcctgcatgccaaaatcattgcagctataacattgatgg

SEQ ID NO: 425424 - DNA, 90 bp, Homo sapiens
gcgcaggcgccgagactgacaacgcggtcccacagcttggtgctaacagtggtttgcacatcatcatctttgatgaaattgatgccatct

SEQ ID NO: 425425 - DNA, 83 bp, Homo sapiens
ctacaacgaccccatgtcagggcctgtttccttggctttgaagttgccatgaagttccttaattgggccacccccaacttgtg

SEQ ID NO: 425426 - DNA, 83 bp, Homo sapiens
accatgccgctcctaagcctgcacagccgcggcggcagcagcagtgagagttggaaaatggatataccttatttgattatgat

SEQ ID NO: 425427 - DNA, 80 bp, Homo sapiens
cttggactgagtcctgcaggacacagaagaggactgtcagaaggacgtagaaggcacggttttactgtgaggagcaaaga

SEQ ID NO: 425428 - DNA, 83 bp, Homo sapiens
gggcgcgctgctgctggcgctgctgctgcacgggcggctgctggcgacaatgcagatcttcgtgaagactctgactggtaaga

SEQ ID NO: 425429 - DNA, 105 bp, Homo sapiens
caggagaaagaagacagccatcatttgaaagcttagaccatgctcagcctccaagcagccttgtcatcgacaaagaatctgaagtttacaagatgcttcaggaga

SEQ ID NO: 425430 - DNA, 75 bp, Homo sapiens
tcaacatcatcagtttttcgattaggaggaacatatgcagcagaaaaaagaggaggaagaagttcttaaagaagt

SEQ ID NO: 425431 - DNA, 98 bp, Homo sapiens
tgggaggagcacattttctggaagtgtcctagaaaatttcatatgggagaagaagctcattcacacagaagacccatttaatgatgaacatcaggaga

SEQ ID NO: 425432 - DNA, 100 bp, Homo sapiens
agaaggggcttataaatgcgtggacagctgcagaaaatgacagatggccgtggattcaggctcatgcacaattagttcgagaagttgatgtggagaaggt

SEQ ID NO: 425433 - DNA, 100 bp, Homo sapiens
acatggcccaggcagaccttgcagtcaaaagctgtgccaggcctgaagctcaagattgctgggaaatctctacccacagagaagtttgccatccggaagt

SEQ ID NO: 425434 - DNA, 98 bp, Homo sapiens
agagctgctcaaagattataagccaggagataaagtcctcctgcttcacctcgaggaaggaaagtagaatttcagaatggcttctggaacatgtttcc

SEQ ID NO: 425435 - DNA, 101 bp, Homo sapiens
ggacaagcccagattccaaaacttatgtcaagtttattacccagaactctttgtctgggtcagtcaagaaccatttccaaacaaggacatggagggaaggc

SEQ ID NO: 425436 - DNA, 100 bp, Homo sapiens
caatggtggactatccttatgcctctaactttttacagcctttgcctgcttggcctatcaagcactatgttggccatggaaatgctatcaatgagctgaa

SEQ ID NO: 425437 - DNA, 97 bp, Homo sapiens
ggatccagagtaggagggagcctttggtggggcccacccacccccatcagatccgtcctggccccacagccttctaccagcaactctcaacgcctgc

SEQ ID NO: 425438 - DNA, 75 bp, Homo sapiens
gttcaacgttcacagcaagctcaagctggtggacccaagtggagagattgtggaactggcgaaaggtgcatgtcc

SEQ ID NO: 425439 - DNA, 90 bp, Homo sapiens
ggagactgtacaggttatggagccagctgtgtcagtagtggacggccagacagagtccccggaggaatagctctccagacccccagctgg

SEQ ID NO: 425440 - DNA, 83 bp, Homo sapiens
tccagtccagcgtgcgacgacttactggcttcatgaaatacactttcgggaaatggcctctaaatcctggctgaattttttaa

SEQ ID NO: 425441 - DNA, 97 bp, Homo sapiens
ggagacctgtagataccagcctttcaaaccatgtgacaacatctggggtgatggaaagtatgaagaaagtcaagaaggtgaccaacggctccgtgga

SEQ ID NO: 425442 - DNA, 82 bp, Homo sapiens
gagtacctgatccgcctcttccaggagtgggagatgtgaagttcatttccaatccgccctccatggtggcagcggggagcgt

SEQ ID NO: 425443 - DNA, 74 bp, Homo sapiens
aagcagtgacggaggagcttgtaccaccgcaagaaaagcctaggcttctcgagcctttggattatgagactgtc

SEQ ID NO: 425444 - DNA, 101 bp, Homo sapiens
atccagactgaggaagacccggaaacttaggggccacgtgagccacggccacggccgcataggttaagcaaccttttccacgggatggataagaatactcc

SEQ ID NO: 425445 - DNA, 50 bp, Homo sapiens
ctgacaagggtccagcctccgatgtgctacagaatattttagaaacagaa

SEQ ID NO: 425446 - DNA, 82 bp, Homo sapiens
ccgtccgccgccaccacccactccggacacagagagcgcctgctcgctgtgcccccgggttatgacgacccccaataaagga

SEQ ID NO: 425447 - DNA, 100 bp, Homo sapiens
cctgcttctgacccatgtggctgacgcctggggcgtggagctgcccaagcgtggctatccccctgggtgccagccgggccgccgatgacgccgagcggga

SEQ ID NO: 425448 - DNA, 100 bp, Homo sapiens
gcagacaggagctgcctgctggcacacgtccaccgcctccaccacgagggcaggttcagagaaccgtagggtgtgtgctgtccgggctcacggggaccct

SEQ ID NO: 425449 - DNA, 90 bp, Homo sapiens
ctgtggatgactgagtacctgaaccggcacctgcacacctggatccaggataacggaggctgggagccagcaccgctctttgaccttgcc

SEQ ID NO: 425450 - DNA, 97 bp, Homo sapiens
gaaataaggacaaaagccaagaggaggacagttcgctacacagcaatgcatcgaggtttatgtgagattaagaccatttttcagggaattcctggaa

SEQ ID NO: 425451 - DNA, 75 bp, Homo sapiens
cagcagtggagccaccagcagcgggtgggcgacctcttccagaagctggtgggtgtttctctatgagaagggcta

SEQ ID NO: 425452 - DNA, 98 bp, Homo sapiens
ccggccctccctcatgacacagctatctctgggccactccactatgccccttaccacaggagctctgcacagaaacaaacagtcgttgctgtcaaaaa

SEQ ID NO: 425453 - DNA, 75 bp, Homo sapiens
ggagtccgagctgagatccatctgcaccacggtgctggacacggagttgcagaggaagctagaccatgagatccg

SEQ ID NO: 425454 - DNA, 82 bp, Homo sapiens
tgacgggtctggagtgcgtgggggaccggctgttggcggtgtggacgaatgtggaacctcgctctgtggctgtgttcccttg

SEQ ID NO: 425455 - DNA, 99 bp, Homo sapiens
ccctgcaaggaagactacttggcggtttgtgggctaaaggaggaagaacgtgcaaaacgtgaggagctagagcgaatactggaagagaataaccgaaaa

SEQ ID NO: 425456 - DNA, 104 bp, Homo sapiens
cagagaccaataaaaataaactgcttgaacatcctttgactggttagccagttttcggctttgtgagaaaccttaccatcaaacacgatggccagcaacgttac

SEQ ID NO: 425457 - DNA, 87 bp, Homo sapiens
agaaacccactgaagacgtctgcgtgagaatagagaccaccgagggcgtctctggccgagcctctttttgtggaaaacgacagcagc

SEQ ID NO: 425458 - DNA, 98 bp, Homo sapiens
acagaggaacactgccggggcccaaccacaagacgactcaataggaggaagagaacccaccgcctgcccaaggagatgacccccgtggaacccgccac

SEQ ID NO: 425459 - DNA, 97 bp, Homo sapiens
agggctccagcggaagctacttcgtcaaggaccctcagggggtctcagagccactcgaccagctttcatgtgtcaccgaaggcaggccatcaaactc

SEQ ID NO: 425460 - DNA, 82 bp, Homo sapiens
ttggattgaagccgcctctgtattacttaccagactccgtgggaaggaggcttgtttaaactacggatgcttttcaaagatg

SEQ ID NO: 425461 - DNA, 100 bp, Homo sapiens
cggcccctggctcctgctcctggtctctggcatctctatcccctatgaggcaccacgtaagacctcctgcccttagctctcttgctcaccacccaagaac

SEQ ID NO: 425462 - DNA, 105 bp, Homo sapiens
ggaaaagtcattcaactcaagcagatcaaagttgttttgagaacgagatgctggaggagggccaagaatatgctgtcatgctgtacacctggaggagctgctccc

SEQ ID NO: 425463 - DNA, 96 bp, Homo sapiens
gctgtgttggagcccattcagagcaccagtctacctgctgagggatgcccaagaagttccagggtgagaacaccaagtcggcagcggcccgggcac

SEQ ID NO: 425464 - DNA, 74 bp, Homo sapiens
tcacgccgggagctggtacacagcctcaggtttgaattttgggaagattttgaagaagaccatgggaaggggag

SEQ ID NO: 425465 - DNA, 82 bp, Homo sapiens
cttcgtagacattgtctcccaagacaacttcctcaccagcaccttacagggcaccatgccggtggaaaggatgcgcatgcgc

SEQ ID NO: 425466 - DNA, 100 bp, Homo sapiens
gttccaccagcaaccatgagtggttccatgatgggaagtgacatgcaatcccacagagtattgatgaggaaactgaagtttggagcgatcacatcatttt

SEQ ID NO: 425467 - DNA, 73 bp, Homo sapiens
ggactcttcctaagcaagtccgaaagctgcaggagacacagatgtccaccacctcaaagctggaggaagctga

SEQ ID NO: 425468 - DNA, 90 bp, Homo sapiens
cgggctgaagcgactgagtccgcgatggaggttggacgcgtgtatccccaagcggtctactttcccatccggaccctgtacctgaccctg

SEQ ID NO: 425469 - DNA, 90 bp, Homo sapiens
ctcccccaggctttaagtctgagttcacaggaccaaccttcgagctctgcaccgaggagctgccctggacttgagtcccttgcatcggag

SEQ ID NO: 425470 - DNA, 78 bp, Homo sapiens
ccagggcccgcggcctacaacgtggatcaggtgagaagccctaccactgcaactgggacggctgcggctggaagtttg

SEQ ID NO: 425471 - DNA, 82 bp, Homo sapiens
ccgcggccgcaccttcccgccttctcaggttgtggcagcactgcctgaaggtatgagaccagattctaatctttatggtttt

SEQ ID NO: 425472 - DNA, 100 bp, Homo sapiens
gaagagttctacaacctggtgcgcttccggatcgggggcaagcggaaggtgatgcccaagatggaccagagctacattcatgggagcagccaggctcagt

SEQ ID NO: 425473 - DNA, 76 bp, Homo sapiens
gaaaccagaaactttaaatcttgagaaaagaagattgtctatcatgaaggaggtcattcccaaaagcaagttcgtc

SEQ ID NO: 425474 - DNA, 51 bp, Homo sapiens
aacaaatgaaagtagctcttgtcagatgtaccaacagtaccagcaacaggc

SEQ ID NO: 425475 - DNA, 75 bp, Homo sapiens
actgaattgctcaggaaagggaagtgagaaagatcagtctaaagaaaaggagaagaaagtgaaaaaaacaattcc

SEQ ID NO: 425476 - DNA, 82 bp, Homo sapiens
acatgatttaaacaagagatttccacagaagattagaagcccaggacccaggaaggagacacaggaaatttattcaaagtcc

SEQ ID NO: 425477 - DNA, 83 bp, Homo sapiens
tcagcgccaggatcgcctcacagtgggggtgtacgagtcggccaagttgatgaatgtttcccagtgacctgacagcagaggag

SEQ ID NO: 425478 - DNA, 100 bp, Homo sapiens
cgcacaggcggcggagccggtatgggcccgcctgaccctgggcgccgcgccgcacgagcaccagcctagagccagttaagtgggcagaccaacatccacc

SEQ ID NO: 425479 - DNA, 100 bp, Homo sapiens
cgccttgggctcccgcggccactcggatccctgcatgtcactgagtccaccatgctttacagaagaagacagatttagtctggaagctcttcaaacaata

SEQ ID NO: 425480 - DNA, 82 bp, Homo sapiens
aacagaccgctggttcgtggacagatcagattttcagctgaactctcatctctcaacactggcaaatattcataagatctac

SEQ ID NO: 425481 - DNA, 95 bp, Homo sapiens
tacttttggagctgatgtagtcagtaaatttctgaatcgtcatgatttagatttgatttgtcgagctcatcaggcaaacacagagcagcccaagc

SEQ ID NO: 425482 - DNA, 100 bp, Homo sapiens
cttgtactcgggctggtgctgccattaatcctgtgggccgacagaagtgcagggcatgtcagagacctttgagacattacacaacctggtacacaaaggg

SEQ ID NO: 425483 - DNA, 100 bp, Homo sapiens
gttcctgtggtctctgcacctcctttctattcccaaatgctggaaaatcctctttgctaagttgtgtttctcatgcaaaacctgcaattgcagattacgc

SEQ ID NO: 425484 - DNA, 75 bp, Homo sapiens
ctcaactgccgcctcgcctactcactctggagccccttgataaatttgctgaagttccttatgtcaaatgagact

SEQ ID NO: 425485 - DNA, 98 bp, Homo sapiens
cacgctggttccgggacagctgtctaccttcaagtacctgcagctcgtgtgacaaccagggcatccccatcatgtccagcatcaagctgaaagaggag

SEQ ID NO: 425486 - DNA, 90 bp, Homo sapiens
gtttgccataaaagttgatggagattacctttgggatcgagcggtccacggaccaggtcatcaagcctgttaacctggaagcgctctcca

SEQ ID NO: 425487 - DNA, 50 bp, Homo sapiens
ccggagggaaggggaagcggcggaagcggatgcggggtccagggaaggac

SEQ ID NO: 425488 - DNA, 101 bp, Homo sapiens
atttaatgatggtaaagttggatttattacaccagtgtcaagtagatttactgcagaggaaattgaacttagctcattaagggaagctttgtctttcgtgt

SEQ ID NO: 425489 - DNA, 88 bp, Homo sapiens
ggagccgcagtgggtcccggacaaggagcaatgtctcaggctgtgcagacaaacggaactcaaccattaagcaaaacatgggaactca

SEQ ID NO: 425490 - DNA, 90 bp, Homo sapiens
acgtgaaacatgtgaacactcaagtgaagcaaaagccttccatgattacgtgtatgcaacagcgttattgcaacaggctaacgaaaacag

SEQ ID NO: 425491 - DNA, 98 bp, Homo sapiens
aaacctcgtcatcctctgatgacagttgtgacagctttgcttctgataattttgcaaacacggttcaccctgaaaatgaagattggacctgttttgaa

SEQ ID NO: 425492 - DNA, 74 bp, Homo sapiens
gagtttctttccaagatctagacacagctaaattactgagtgcagaccgagtgtgtcagcagccaggactttct

SEQ ID NO: 425493 - DNA, 88 bp, Homo sapiens
ataaaatttcgtggagaagaaggccttgactatggaggcgttgccagagaagatggcgaattagaagatggtgaaatagacgatgcag

SEQ ID NO: 425494 - DNA, 50 bp, Homo sapiens
gagcaggccgagccggatggcacagaagagttagagaaggaacggcagcg

SEQ ID NO: 425495 - DNA, 50 bp, Homo sapiens
ctcacacagacttttgatggacaggagaatgagtccctggaacgccagat

SEQ ID NO: 425496 - DNA, 76 bp, Homo sapiens
cttcatgttcctggtgtttgacctaaaaagttggtgattcaaggaaagcacattgcaatgcattatagcaatccca

SEQ ID NO: 425497 - DNA, 83 bp, Homo sapiens
ttctctgctgcaccgacctcgacgtcttgcctgtgtcccacttgttcgcggcctataggcgtttacgtgtgtgccaagtgtgg

SEQ ID NO: 425498 - DNA, 50 bp, Homo sapiens
ataacaggatggggtgacacaggttctgcacttttaaaagaaaagcaaag

SEQ ID NO: 425499 - DNA, 75 bp, Homo sapiens
gaaaaaccattcttgaaagaaataatttcactgacttcacgaatgtgagatgtcatgtggcctgtgttttggacc

SEQ ID NO: 425500 - DNA, 101 bp, Homo sapiens
gtttccctaacaagtccttcagctcctccaacatctcgaactgattctgataatcctgaccttcgagaccggggctatatttattggcgccttctctcaac

SEQ ID NO: 425501 - DNA, 74 bp, Homo sapiens
ctggcccttacccagacctgggcggtattttcatctcagcctagtgacgatgaatcaagtagtgatgaaaccag

SEQ ID NO: 425502 - DNA, 100 bp, Homo sapiens
ggcattcatcattttctaatcatcagcatttacatgacagaaatcacctatgtttacagcgacaggttttacttgtaatggacacaaggacagaacagac

SEQ ID NO: 425503 - DNA, 99 bp, Homo sapiens
ctacatattccctctgagcattgccctggctgccttccataagtgtgggaataagacgagttggaagaagacctgatcaacaacttcagggtgaaggga

SEQ ID NO: 425504 - DNA, 96 bp, Homo sapiens
cagaaggaaagcgcccatctgaaaatcttggtcaggtactattcggggaaagaattgaaccttcaccatataagattgagaggatccagaatccag

SEQ ID NO: 425505 - DNA, 82 bp, Homo sapiens
ttctctcgatcagggcatacatctttcttcgacaaaggtgctccctaccctcacctcaagacgaccatggccaccatcccag

SEQ ID NO: 425506 - DNA, 90 bp, Homo sapiens
gtaatcagtgacgaggtccgctacgtaaatccctttgcggcgggactccaacctgtctgtgcacacagaaaacccggacctcactccctg

SEQ ID NO: 425507 - DNA, 50 bp, Homo sapiens
cgaagaggcctgcagtgggagagcaggggagtgcatccgccccaaccctt

SEQ ID NO: 425508 - DNA, 82 bp, Homo sapiens
aggcactgctttttcatgacgcaaaatgatgcttcaacacccaggccaggtctctgcctcggaagtgagtgcttctgccatc

SEQ ID NO: 425509 - DNA, 75 bp, Homo sapiens
caccatatagtagtattactgtggaagtacctacaacttcagatgccttcaattaagttgcagagttctgatgga

SEQ ID NO: 425510 - DNA, 78 bp, Homo sapiens
tgtcgtggctgctccgcttggccaccttctgccatctgactgtcctgctggctggtagaacacctgaaggagaagctc

SEQ ID NO: 425511 - DNA, 100 bp, Homo sapiens
gcatcgtggcacctggcaagggcatcctggctgcagatgagtccactgggaggcacggtgattggaagtgcccggtgcaaggactttcgggaacgagaag

SEQ ID NO: 425512 - DNA, 98 bp, Homo sapiens
gcggccaggacgacgaggagcagggcctgactgcgcagtcgcagccgatgatgccagtgtcaaggcccatgggccctgtccccaacccccagcccatc

SEQ ID NO: 425513 - DNA, 100 bp, Homo sapiens
gcgttcccctccatccttctggatctggccaacaccaccggcacagtgacggcttcagaggatgaccttccatcagtgcccgtgtttgacagaactctgc

SEQ ID NO: 425514 - DNA, 51 bp, Homo sapiens
aaaatcttgttcgaactttcaggagaaaagcctttcagctgtagctggaaa

SEQ ID NO: 425515 - DNA, 89 bp, Homo sapiens
cgcttctgcatctgtgggccgaggcacttccaggttggcttaaagggttaccctaggccagcagtcagctcagtcagggtggtgaccaa

SEQ ID NO: 425516 - DNA, 100 bp, Homo sapiens
tacggagcataggaggaaaattcatcatctgattgatagagctacattctcctgatagcaggaacacgttgatcctacgctgcaaagatacagccacagc

SEQ ID NO: 425517 - DNA, 74 bp, Homo sapiens
tgtggaattcgcgctgctcgccgacaaggctgcacaacaggaaatggcaactgctgacaggaagtttggcatcc

SEQ ID NO: 425518 - DNA, 101 bp, Homo sapiens
acaagtgatgagaagctgtcggagcttcccaaggttgaaaatgtccgcttggtagatcgagtgtctcctaaaaaagcagctctaggtactttgtatttgac

SEQ ID NO: 425519 - DNA, 82 bp, Homo sapiens
ccgggattcgcggcccggagctcgggaccgatattgcggtggtggagatgagcgatgccttccggcagccgtccttgtttta

SEQ ID NO: 425520 - DNA, 101 bp, Homo sapiens
tagcttttctgagaatacttgctgaaaaggaagttttctggaatgggaacgtcaaggtcgtgggaaataaaaggcagttctacacagactgcagcaacggt

SEQ ID NO: 425521 - DNA, 73 bp, Homo sapiens
tgcaccagaagaaggagattgcccggcagatgaaggtgacaggccgctgcggctctgtgctggtacgcctcat

SEQ ID NO: 425522 - DNA, 97 bp, Homo sapiens
taggggagcggaaaaggaagtcaccaccgtggcctgcgacgatgctggcccgcgagagacattgatgcattttgctgtgcggctgggactgctgagg

SEQ ID NO: 425523 - DNA, 96 bp, Homo sapiens
cttccccggccggtccctcgcctcccggccgagctgacgaaggccttacgaccggatatgggctataatacattagccaactttcgaatagaaaag

SEQ ID NO: 425524 - DNA, 83 bp, Homo sapiens
ggaggccggggagccgacgcctggaatccttcaactgctttctaccaagcgttccatttgaacacgttaaaggaatcaaagag

SEQ ID NO: 425525 - DNA, 75 bp, Homo sapiens
cggatcctgcttttgcagaatgacccctgtcttttaccagaggtgcataaggcaaatccaatacgcaagtaccag

SEQ ID NO: 425526 - DNA, 83 bp, Homo sapiens
cgggactgtgatggccagagagatgacgatcttagcttccatgaggcaggctgaacctgcagatatgcgcccagagatatgga

SEQ ID NO: 425527 - DNA, 100 bp, Homo sapiens
gtgaagcagtgcttcgtggtgactgaaaaagatggtgaatgtgtaccacgtacatcagcattcctgcttcctgtaccttggcagtatccttgtggatgaa

SEQ ID NO: 425528 - DNA, 74 bp, Homo sapiens
gccaggagaggagcactttgaggacatggcctccgacgaggacattctcatgcaagtggcaaactccggaagaa

SEQ ID NO: 425529 - DNA, 100 bp, Homo sapiens
cacagagcctcgcctttgccgatccgccgcccgtccacacccgccgccaggtacatgtcccagagcaagcacacggaggcccgggagctcatgtactcgg

SEQ ID NO: 425530 - DNA, 100 bp, Homo sapiens
ttttccactgtatttggagaagaatggaaagagaagactgatagagacttcgttaagattgtcagtggctgctatgcagcaggtgcagcctggtctctca

SEQ ID NO: 425531 - DNA, 115 bp, Homo sapiens
gaccgcgcgcagggcctgcagcgggagctggacggcgagcgcgagcggcgcgagaaagccctgggctgcatcttgtacctgctgtgcttccggcagcacccttttgaggatggag

SEQ ID NO: 425532 - DNA, 75 bp, Homo sapiens
cagagctgcaggagctggaggctgtatacgaacggctctgcggcgaggaggtagatgacattaatgctgataaga

SEQ ID NO: 425533 - DNA, 100 bp, Homo sapiens
gggctgaatcttcaacctgtcaaagccttcttaattatgtctgagaaaagctcagaccatgaccgacttcataccttggtaactgaacactgttttccag

SEQ ID NO: 425534 - DNA, 75 bp, Homo sapiens
ccggactccatcgactcccccggctcttagactatctcagaccagtatccttcaggggttctcttactctgattt

SEQ ID NO: 425535 - DNA, 97 bp, Homo sapiens
cggcggcgaatgctgggagagtccgacgagcgctgcactaacgcaggatccggctgccgaaggtcctcgccagattgccaccaaggagccaatgaat

SEQ ID NO: 425536 - DNA, 73 bp, Homo sapiens
tccctgcactctcatcgctctcggcctcggcctcggcctccgacacgctggaatagtcaaatgatttcagttc

SEQ ID NO: 425537 - DNA, 75 bp, Homo sapiens
agaagtttcagtgagcgggagctggcagagaataatcatgggccagactgggaagaaatctgagaagggaccagt

SEQ ID NO: 425538 - DNA, 100 bp, Homo sapiens
ctcgtttcttttcggaggcgaattctacagttactacaagtgcaagctggcgctggagcagcagcagcgaattgactttaaaattaggaccatagagctc

SEQ ID NO: 425539 - DNA, 112 bp, Homo sapiens
tcgtaagaagaggtcccaatcccccactctttccgccctaatggaggtctccagtttcggtgacttaagagattaaaattaatttggttgctgttggttctgaacaaataat

SEQ ID NO: 425540 - DNA, 100 bp, Homo sapiens
gactaaagcagatattgaacaacttccttcttatcggttcaatcctaacaaccaccagtcagaacagactttgtgccgctcagtggaattggatctcaac

SEQ ID NO: 425541 - DNA, 75 bp, Homo sapiens
gtgacctgcagaacttagccaagagtctgggtctccgggccaacctgagggacataagcagctctatgaccaata

SEQ ID NO: 425542 - DNA, 83 bp, Homo sapiens
ggcttttgccactgcacgcttgaacttctccggacagaggaacatctgtaccctctcaacctgacacttcctccatggcccat

SEQ ID NO: 425543 - DNA, 75 bp, Homo sapiens
tttacaagatccactacctggacaccaccaccctcatcgagcctgcgcccagatttggcagctgatcggaagctc

SEQ ID NO: 425544 - DNA, 75 bp, Homo sapiens
attaactttgcgctcagacgagtaacttcggcaaagggatggggagagattttatttggagagaagcaagcatct

SEQ ID NO: 425545 - DNA, 75 bp, Homo sapiens
tttgggagcggccccgagacgcgcctggcgcgggtttggtgcacctcgatttggaggaagtagggcagggccctt

SEQ ID NO: 425546 - DNA, 75 bp, Homo sapiens
agtgctcttctactttgatgaggttgtacgtggacactataaaggtcagcaaattggcaaagtagtccaggttta

SEQ ID NO: 425547 - DNA, 100 bp, Homo sapiens
gtgaaaatgcagttgatatctttgatgtgaactccatggaatggattcagactcttcctctcaaaaaggccttggtaacccagacatgccttcagtcagc

SEQ ID NO: 425548 - DNA, 98 bp, Homo sapiens
tagtctccagcgggcctggactgtgggctggtgtgtggaactgtgccggtggtggtgtgcacattgagccccggtatagacagttcccccagctgacc

SEQ ID NO: 425549 - DNA, 50 bp, Homo sapiens
gcctacccgggatacggaggaggggtgcaaagtccttcgtggatgcaacc

SEQ ID NO: 425550 - DNA, 75 bp, Homo sapiens
gctgctgctgctgacgctgctgctgcccggcctcgggcaaattcaacacccaacagcttccttaatagcaaaggt

SEQ ID NO: 425551 - DNA, 82 bp, Homo sapiens
ctcgtagcctgccactccgtgctgttatagttttgccgctggactcttccctcccttcccccaccccatcaggatgatatga

SEQ ID NO: 425552 - DNA, 83 bp, Homo sapiens
cgtccagcacctacgtcccgctgccgtcgccgccgccaccatgcccaagagaaagaacactatggctatgcatcctccaacgt

SEQ ID NO: 425553 - DNA, 100 bp, Homo sapiens
cagtaacactgaaggcagcttcaaatgtctgtgtccagaagggttttccttgtcctccagtggaagaaggtgccaagatgtggatgagtgtgccagccgg

SEQ ID NO: 425554 - DNA, 90 bp, Homo sapiens
actgcctcctcccacgccgtgcttagggatgatggcttggaaaaaagtccaatgaaaaaaaaacagaagaagaaagagaacaaggagaac

SEQ ID NO: 425555 - DNA, 100 bp, Homo sapiens
tccgcctggcatgaggggctccccgggtcctccaggccctatcctggcaggctgggaaccacagcgccttctggggcatgaccctggatgagggcattcg

SEQ ID NO: 425556 - DNA, 50 bp, Homo sapiens
ggctggcgttaactgtgcggaggcagagaattaccttttccagggacggc

SEQ ID NO: 425557 - DNA, 100 bp, Homo sapiens
aagcggcggagctgcgcctcggcccgctcttctccctgcttaacgagaaccatagagacggggtctgactgtgttacccaggctggtcttcaactcttgg

SEQ ID NO: 425558 - DNA, 98 bp, Homo sapiens
cggaggcctcggcccggcctcatcgtgccggcttcgcgcgcgaacccggctttcgcatttgggaccctgcagggcacttaaggaaagcttcataaaag

SEQ ID NO: 425559 - DNA, 90 bp, Homo sapiens
acagaacgattgatgaagtagttgacgttctcccggggaagtacttggaagagatcgccacacagatgcgcacgcacagcatcaacgcgc

SEQ ID NO: 425560 - DNA, 99 bp, Homo sapiens
gccaggcccagggctcccctctcagtagccctgtgcacttggatttttcttcagattggctctaccagtgcacctggacagggaggaatcctggctcag

SEQ ID NO: 425561 - DNA, 100 bp, Homo sapiens
cgggagaagaaggctgccgagtgcaaggtggacagcatcgggagcggccgcgccatccccatcaagcagccagctgaagatgagtggggtaaaaccccag

SEQ ID NO: 425562 - DNA, 100 bp, Homo sapiens
ccccgccgagccgccaccgcaggtcgaggacggtcggactcccgcggcgggaggagcctgttcccctgagggagattcttcaagcaatcactatgtcaac

SEQ ID NO: 425563 - DNA, 75 bp, Homo sapiens
gcgaggggaacggaggccagagctgcgttaagtgggcagaccaacatccacctcagcaaaaacttcttcctgacg

SEQ ID NO: 425564 - DNA, 103 bp, Homo sapiens
ccagcatatcatgaaatcctccccacttatgtttgtaaatgtgagtggaagccatgaggccaaaggcagttgtattggtgtgtcgtttggactggtgatgagc

SEQ ID NO: 425565 - DNA, 97 bp, Homo sapiens
ttagcgtgagtgatcactctcaatcccggagtcatgtgctgttcctggggcttggatgatgtaggggaagcaaggtgaaagtggtatcccgtggttc

SEQ ID NO: 425566 - DNA, 75 bp, Homo sapiens
aaccaagttgcttttggtgtacagggtctgggatgggtgtacgaaggaagcaagtcttgtgaaaatgccattgtg

SEQ ID NO: 425567 - DNA, 46 bp, Homo sapiens
tccagggttctttggggcccgagacctgcaaatccaagagacacat

SEQ ID NO: 425568 - DNA, 75 bp, Homo sapiens
agttttgccaggtgtttgttaccttggtgttggagcgggccggagagaagtagagtgggctgcgaggagaaggaa

SEQ ID NO: 425569 - DNA, 101 bp, Homo sapiens
tgactcctcgatcttcagttgaggctgttttggagtcagcggaagatcaccaaggccagggagtggttccaccgcactgtgaagattgactcggacctggg

SEQ ID NO: 425570 - DNA, 50 bp, Homo sapiens
aggatgtgcaaccctccaagtggaagatataattgacactggcaaaacaa

SEQ ID NO: 425571 - DNA, 82 bp, Homo sapiens
taaagcagcgtgcgttcagccctggggtttccacttgagcggcacagtgacagaacctgcaatacaatcggagccagaaact

SEQ ID NO: 425572 - DNA, 100 bp, Homo sapiens
ctccataaactattggattcataacctgctccatgcttgaaaacatggggattggaattcggtgaaatgtaaatctgggatccatagtcaagatatcata

SEQ ID NO: 425573 - DNA, 75 bp, Homo sapiens
gatgtgccaccagaacccaagaagattccgataagaaacacggagactttgcagcaattgatcatgatgtcgttg

SEQ ID NO: 425574 - DNA, 100 bp, Homo sapiens
ccttctcatctctcccttcgcccagttccctgcatcctaagactcgaaggcagcacaggacctggaaaaattacatggttcgaaaccgccaagtcttttg

SEQ ID NO: 425575 - DNA, 89 bp, Homo sapiens
gttaatagtggcatggaagatccatttgctgtggtcgccaggacccccccagagccaagaccttctccagaaggtgacccttccccccc

SEQ ID NO: 425576 - DNA, 100 bp, Homo sapiens
tggatgtcgagaacggtgcttctatggcaggatatgatgctcagcctacagaaggagagagagaaatctggaaccagatcagcgccgtccttcaggattc

SEQ ID NO: 425577 - DNA, 82 bp, Homo sapiens
gcctttttgtgctccactttggaacaaatcggaagctagggccttccagttctgggaggtgatcagtgatgaacatggcatc

SEQ ID NO: 425578 - DNA, 97 bp, Homo sapiens
ggctccggggacactttgcgttcgggctgggagcgtgctttccacgacggtgacacgcttccctggattggcctgtctcgatatagattgaagttta

SEQ ID NO: 425579 - DNA, 50 bp, Homo sapiens
gtcaagacgatcatagtcactggctgtctgcggacctggtttcagcgctg

SEQ ID NO: 425580 - DNA, 100 bp, Homo sapiens
aaaacatggtggccaaagtggatgaggtgaagtccacaatcaagttccaaatgaagaaggagcatggcctgttcttattgatgactttgtggaatttgca

SEQ ID NO: 425581 - DNA, 117 bp, Homo sapiens
aattctccagggccgggatttcactggcaaagtggttgtggtcactggagctaattcaggaataggtggcctccatgaaccagcgccgtgtggatttctaccttgcctccatcgaag

SEQ ID NO: 425582 - DNA, 75 bp, Homo sapiens
agcagagggagcttgccttgaaggacaagaacagcgccgtcaccagcaggaggcagtggagaaggtgacacagca

SEQ ID NO: 425583 - DNA, 87 bp, Homo sapiens
aatagctacaaaccatactaaattattccatttgcaacttatccccaacaggctgccgcgggcggacacgccagaggaggaggccgg

SEQ ID NO: 425584 - DNA, 117 bp, Homo sapiens
gggatcaaagagcagtgggggttgctgacccagaggagagttctccaaacatgatcgtttactgcaaagccgaatacatcaagcaatggtaacatctttaaatgaagataatgaaag

SEQ ID NO: 425585 - DNA, 113 bp, Homo sapiens
tgacctcacctcaagcacacccaatggacagcatgcctcaccaagtcacatgacaagcagcgaggattaaatccaccacacagggtgaaatctatctccatgacaacattcac

SEQ ID NO: 425586 - DNA, 75 bp, Homo sapiens
cttgaaatgctacatttccaagatgaaccaaggatcgggatagcagtataaaattagaatcaagacagctgactg

SEQ ID NO: 425587 - DNA, 96 bp, Homo sapiens
tgcctgtgaatgacagcttttgtgagaaaattttgccgtggttggacaaatcagtagatttcattggtgaccaggcattgatgcacccccaggaag

SEQ ID NO: 425588 - DNA, 82 bp, Homo sapiens
atttgaagtctgtgtcaaacatccatatcataagtggaattttggagatattcaaaggaactgtggctgcaccatctgtctt

SEQ ID NO: 425589 - DNA, 76 bp, Homo sapiens
cactggccttgtgggattggctgtgtgcaatactcctcacgagcaataagagctaactgccatcaagagccatcag

SEQ ID NO: 425590 - DNA, 88 bp, Homo sapiens
cgtctgaaaagattcctcatttgtcttactactttgaccgcgatgatgtggctttgaagaactttgccaaatactttcttcaccaatc

SEQ ID NO: 425591 - DNA, 100 bp, Homo sapiens
cgggtggctggtgcagccgaggtcttcgggaattccagcgagggtctctaattaacagaagatggcaaagcccagccacagcagctatgtccttcagcag

SEQ ID NO: 425592 - DNA, 82 bp, Homo sapiens
tccagactcgccgtggtcaagttcaccatgagagggttatggaaacaaaggacatgctttacatcgtcactgaatttgctaa

SEQ ID NO: 425593 - DNA, 82 bp, Homo sapiens
tttgcccaatgttttgatgattggcagagacccactgtctgcaaaacgtcatattatttcacaaaaagcccagcgatttcac

SEQ ID NO: 425594 - DNA, 120 bp, Homo sapiens
tgaagtggaaggcgcttttcaccgcggccatcctgcaggcacagttgccgattacaggtggatgaaaatactaggaaaagtttatttaagttacgttctacatgggatgaaatattccct

SEQ ID NO: 425595 - DNA, 101 bp, Homo sapiens
ggctgaggactatggggtcatcaagactgacatgttccagactgttgacctctttgaaggccaagactaaggggctgcagagcggggtggacattggcgtc

SEQ ID NO: 425596 - DNA, 75 bp, Homo sapiens
gaacgctctcatccggaggcaggaccagctgcagctgcttctctgctggatgaaccgaatcctaacagtccagcc

SEQ ID NO: 425597 - DNA, 87 bp, Homo sapiens
gtcggactcccgcggcgggaggagcctgttcccctgagaattcagaaggagctggcggacatcactttagaccctccacctaattgc

SEQ ID NO: 425598 - DNA, 88 bp, Homo sapiens
tccttacaaaagaatttggatgccacagtcaccgcacttaaagaacaggcattcgcttcaagagacaagcagtttagaatcaggcaga

SEQ ID NO: 425599 - DNA, 123 bp, Homo sapiens
ggctgcggtttgctgggaacggagggctgcagcgcccaccctgcgccagagaccagataaaacaatgcagatcttcgtgaagactctgactggtaagaccatcaccctcgaggttgagcccag

SEQ ID NO: 425600 - DNA, 97 bp, Homo sapiens
catcaacaaaaatggtcttcaagcctcaagctgtgaagttcctttacactggatgggttctctacctggcctgtgccttgttgcctgttcctttact

SEQ ID NO: 425601 - DNA, 74 bp, Homo sapiens
gacaagagacaagtttccaaggaacggggagaaaagctatttcagagatgccttatgaaggttttgcacattga

SEQ ID NO: 425602 - DNA, 85 bp, Homo sapiens
gcggcgcctgcttcgccagatcgtcatccagaatgagaacacgatgccacgcgcgtacgagcgcggcatctcgctgttcaagtgg

SEQ ID NO: 425603 - DNA, 75 bp, Homo sapiens
acgtggaggagctgtgggtggaaggacggggaggtttactgcatcgacgcgcggttctacgggaacgtcagccgg

SEQ ID NO: 425604 - DNA, 83 bp, Homo sapiens
tgtctgcccctattgtaagtgcagatggaacacaacagggggatatgagactttctactcggaatatcctgagtgttgcgtgg

SEQ ID NO: 425605 - DNA, 74 bp, Homo sapiens
tggaaagagaagactgatagagacttcgttaagggagaagtctgttggaacttggaggaaacaatgccattatt

SEQ ID NO: 425606 - DNA, 111 bp, Homo sapiens
aggctgccctctgcctggagaacttctcctcccaggttgtggaacgacacaacaagccggaagtggaagtcagcaaaccctcctggggcttgcccatagatgctgttcagt

SEQ ID NO: 425607 - DNA, 90 bp, Homo sapiens
ttcaacattcttctgcctccaattatttttcatgctggatacagcttaaagaagggtgaagttgaacaaattgctatgatgaaaccaaaa

SEQ ID NO: 425608 - DNA, 100 bp, Homo sapiens
cctgccctccgagggcttcagtctggagccgcccagaggaaagatgaatgggagggctgattttcgagagccgaatgcagaggttccaagaccaattccc

SEQ ID NO: 425609 - DNA, 100 bp, Homo sapiens
actgtgcttcttgtgcaagtaatcagtctttgacaagtgatgagaagctgtcggagcttcccaaggcagttatacttaagcatgaacattgacgacaaac

SEQ ID NO: 425610 - DNA, 89 bp, Homo sapiens
gggatgaacacagttctgccggcagatatgtttcaagacgctgtaaacctctgaaggtggttgtgtcaaaccgattggtgacatctcca

SEQ ID NO: 425611 - DNA, 100 bp, Homo sapiens
agggcttcagtctcttcgtaacagaacacctctgcagagatgtgggcagctggtcaggatggccattcgggctcagcacagcaacgcagcccagactcag

SEQ ID NO: 425612 - DNA, 75 bp, Homo sapiens
gagctatggtgaaacaccactgaagcattgccaagcactggaagatcaattcttttatcatccatactttagagg

SEQ ID NO: 425613 - DNA, 82 bp, Homo sapiens
ggcgtccgtcggtctccgtccgtcggtccggggcaaacggggattcagcgtccgatcctttggaacagggactcacgtgaag

SEQ ID NO: 425614 - DNA, 88 bp, Homo sapiens
gactgttgttcccggagatgcggcgcgcaggtgaccattgtgaggtagatattttgttctaattttccagatgaggaagctgagaccc

SEQ ID NO: 425615 - DNA, 100 bp, Homo sapiens
ggctcggcccgaggcccccaggacctccatctcccaatgttggaggtgggctttgggctggagcatgtgtcccgcgagcagatccgggaagtggaagagg

SEQ ID NO: 425616 - DNA, 75 bp, Homo sapiens
agaaaatacaaatcacacgcataatggatgaaaggaaccgacaggtaacttacgacctatttctccgtggcgttg

SEQ ID NO: 425617 - DNA, 90 bp, Homo sapiens
tgcaaagagttcgtgttcacaggacctgggaagcagcggagtagaaaggaagtgaccgatcctgagaaaggatttatagatgatgacaaa

SEQ ID NO: 425618 - DNA, 100 bp, Homo sapiens
gacaatgttcagcacactcaggttctttgaaggattttgcctggctggaatcattctcaccttgtatgctttacgaaatggaagttccagtattaccgaa

SEQ ID NO: 425619 - DNA, 90 bp, Homo sapiens
gctgaagctgccgccgttgcctccgccgccaagagtgagcgagcggacccgcgatgggagatgacttacagtctcttctgtttcactttt

SEQ ID NO: 425620 - DNA, 100 bp, Homo sapiens
gtccaagtcaaacgcagaaggactgcctcactgagcaaccaagactatccagtcagttcgctgctattcccatgggtcacaggagacagatgaggagttt

SEQ ID NO: 425621 - DNA, 98 bp, Homo sapiens
gcgacccgctgctcagcgtcctcatgtggggggtaaaccactcgatttgaacatggaattcaatccttcagatcatcctcgggccagcacaatattcc

SEQ ID NO: 425622 - DNA, 82 bp, Homo sapiens
gttgtcaaggtggcctaccaggaggccaggggtgtcgccatgctcagcgatgcctgccgctttcaagaggatcaggagatgg

SEQ ID NO: 425623 - DNA, 95 bp, Homo sapiens
actgacgctgccattagatatgctgtcaacatgctgggctcttgcactgtttggtggaaatggtgagacaggatttgagcaaaattctacttatt

SEQ ID NO: 425624 - DNA, 90 bp, Homo sapiens
ccaaccagataacattcaggactcagggatgattcttcaagagacccttcaaacttgggtagagtttacagctctgactttacactcggc

SEQ ID NO: 425625 - DNA, 74 bp, Homo sapiens
cgcaaccagagccgccgccacgagagcagagccactgccagaaggaaggggacaagacccagcaggacaccttc

SEQ ID NO: 425626 - DNA, 100 bp, Homo sapiens
acctgacgggcctgcgagggttgaagattgtgaagcaatagcctaagtggaagcaagcaatttcttcaaccgtccttggaaaagtaatagttcaaccaga

SEQ ID NO: 425627 - DNA, 50 bp, Homo sapiens
cccgcctccctgggagctccgcacgggggggacacagcgattgccacgcg

SEQ ID NO: 425628 - DNA, 83 bp, Homo sapiens
cttgggcgggggatgtgagcgctgagcccttggcagggggatatgagactttctactcggaatatcctgagtgttgcgtggat

SEQ ID NO: 425629 - DNA, 75 bp, Homo sapiens
aaggatgggcacttggatcgagatgagttcgctgtggcagtaccaccgggctctggtggcggtgctcctgagccg

SEQ ID NO: 425630 - DNA, 101 bp, Homo sapiens
gtaaggactgggacaatgaatactgcagcaatgagtgtgtggtgaagcactgcaggtggatgaaccgcatcaaagacttccagaagccactccagtgacca

SEQ ID NO: 425631 - DNA, 100 bp, Homo sapiens
ccggtggaggaatttgtggctggctggatctctgggaaagaatatggcaaagctgatgcaagatgggtttattttgatccaaccattgtgtctgtggaaa

SEQ ID NO: 425632 - DNA, 90 bp, Homo sapiens
cgcaggcctcgtgccgttacggccatcacggcggccgcagtggcgtcctggagccctcctcagtgcatccactctgggagagcgtggacc

SEQ ID NO: 425633 - DNA, 83 bp, Homo sapiens
ctcctgaggaggacccagagcaggacagcggcccggaggacctgcctctcgtcaggtgggaggaggagctcgccaagcgcatg

SEQ ID NO: 425634 - DNA, 98 bp, Homo sapiens
atgaaaacttggtgactatactggggaccagcctcttaatcggatgtatcttgtattcatgggtgtccgcaatgttgccagtgtctgtctgcagattg

SEQ ID NO: 425635 - DNA, 82 bp, Homo sapiens
tgaccaccgtgaacggacagtcccccccaggtgtggacactgccagcggctgcagccgacttggaatgacctgggagacaaa

SEQ ID NO: 425636 - DNA, 98 bp, Homo sapiens
ctctgctaaaaggctccttcagtgagcaaggcatcaacgagtttctcagtggtggtcgtggtgacaggactggccgctatggagccactgaccgctcg

SEQ ID NO: 425637 - DNA, 106 bp, Homo sapiens
gttctggggctgggattggaactgtgtttgggagcctcatcattggttatgccagaaaagactcgttaaagtcagaacctgctggacaagaaggcctatggcaaat

SEQ ID NO: 425638 - DNA, 76 bp, Homo sapiens
cagagatttattcgtaatgcgactcaaagctgcacggcagtctgtttatgagggcatttttctggctggtctccct

SEQ ID NO: 425639 - DNA, 82 bp, Homo sapiens
attaccttcaagtatggaaatagcagtgcttcaggaatagaaatcttggcaatcgaaaggaatgctttaattctccatatgg

SEQ ID NO: 425640 - DNA, 83 bp, Homo sapiens
ccacgcaaccccagatccatttacactttacaacaggtgatttggcttctgcacagttaggaggagcaccaaaccgatgggag

SEQ ID NO: 425641 - DNA, 75 bp, Homo sapiens
gggtgaccttcggaggccagatcaccgatgaggtgccaaaaagctgaccaataaggccaccctgtggtatgtgcc

SEQ ID NO: 425642 - DNA, 73 bp, Homo sapiens
agaagttgagaccgagaatgtggaaacaggactgaagccaatattaaagcaagtcaaccaaaggttctctggt

SEQ ID NO: 425643 - DNA, 75 bp, Homo sapiens
caaaataaccacttaccccttctcaccgaggaagagcgggagaaagggaagctgaaaaatgaactcttagaagca

SEQ ID NO: 425644 - DNA, 100 bp, Homo sapiens
tggctttaatcctgaaagccatgcagcggacatgaagaggagcatcggcggcgtgaggaagaaatgatccgacacagagaacaggaggaactgaggcgac

SEQ ID NO: 425645 - DNA, 82 bp, Homo sapiens
ttgaacatcatgaaacatgactcgttttgacaggagccattcaagtagcagacaaagtttcttcagggaagagttcagtgct

SEQ ID NO: 425646 - DNA, 90 bp, Homo sapiens
caaaacaagcattgcaagaaattgttattcttccttctctgaggcctgaggagcattccggaagagtttttcgactacagtttgatgaat

SEQ ID NO: 425647 - DNA, 90 bp, Homo sapiens
atctcctggcaccttgatcttggattttacagcctccagaactggccaaggagattaagatcaagttgggaattctcctccagaagccag

SEQ ID NO: 425648 - DNA, 100 bp, Homo sapiens
agattttggtgcagctagagaattagaagatgatgagcagtttgtttctctgtatggcacagaagaatatttgtagacccaaatgatttgtacattgtag

SEQ ID NO: 425649 - DNA, 51 bp, Homo sapiens
cctttctggacacagaagtatttgtgacagaagaggtgcagtatattcagg

SEQ ID NO: 425650 - DNA, 71 bp, Homo sapiens
gccgcccagctcacgccgcgcccgcgctcccaggctccggttctttctacaacttcaacaggctgcactgg

SEQ ID NO: 425651 - DNA, 98 bp, Homo sapiens
gctggtcttcggcgacgtcgagaacgacgaggacgcgttgctgcggcgtctgcgaggcccgagggttacggcctccgctgccacagggccatcatcac

SEQ ID NO: 425652 - DNA, 76 bp, Homo sapiens
acctcgccttcctcccggcgtggcagatgctccagttctgggaggtgatcagtgatgaacatggcatcgaccccac

SEQ ID NO: 425653 - DNA, 100 bp, Homo sapiens
agacccccaggtcctgcgggcgcggtactccaaagattcaggtttactcacgtcatccagcagagaatggaaagtcaaatttcctgaattgctatgtgtc

SEQ ID NO: 425654 - DNA, 100 bp, Homo sapiens
aggagtcagagtggaggctgcagactgtggagccgggagccggcagctccaccgggggacggctacgtgcaggcggacgcccggggccccccggaccacg

SEQ ID NO: 425655 - DNA, 100 bp, Homo sapiens
cctcttgacactgcagctgcagtcaacctcttccccaatttcaatgcgcctcctgacaaggtgatccgggcgggccccgcaggaattttatcccctcacc

SEQ ID NO: 425656 - DNA, 101 bp, Homo sapiens
cgaggagctgcggctctaccccccggaggctgatcccttatccaacatggttctaaccttcagtactaaagaagatgcagtttcctttgcagaaaaaaatg

SEQ ID NO: 425657 - DNA, 100 bp, Homo sapiens
agcagctattcttcttatggccagagccagaacagctccttctcctgaaaaagccgaggaggagagtgagaggcttctgagggaactctatttgtttgat

SEQ ID NO: 425658 - DNA, 90 bp, Homo sapiens
gttggttgtagccacagagaagaatgtgattgcagcattaaattcccgaactggggagatctgttgagttgttacaacaaaagttgagag

SEQ ID NO: 425659 - DNA, 100 bp, Homo sapiens
cagccagggctgaacccccgcagcactgcaggagtttgtgaccaagaacttcaagagtcaagacagaaggaagccaagggagcagtgcaatggatttctc

SEQ ID NO: 425660 - DNA, 80 bp, Homo sapiens
ttaactgggaaggcttaagaaaaggtaccttgacacctcctataataccaagtgaatatgtgtgtcttctgatcaaaatc

SEQ ID NO: 425661 - DNA, 51 bp, Homo sapiens
gccagcaggaaatacagcatgtttaacaatgcatgcatcaattcttgcata

SEQ ID NO: 425662 - DNA, 100 bp, Homo sapiens
agaggacgccttcaacaccaccttcatctccaccatcggccgagacgcatccagagctttcgtgaccggggactgttctgaagcaggcctcgtggatgac

SEQ ID NO: 425663 - DNA, 96 bp, Homo sapiens
ctactgccgagggcatttgagtgtgggacccatgccctgcatttcttcgctaccccacagcttctgctcatgtatacctgaggtgcaccggaggtg

SEQ ID NO: 425664 - DNA, 101 bp, Homo sapiens
ccgcagcgctcgccccacgggccgcgcgtggagggtcccgggaatgaaagctactggttgattttaaagtgcctgggcctcacaggtttggagatgtccca

SEQ ID NO: 425665 - DNA, 51 bp, Homo sapiens
agacggcagacagtcacaggcaggatagtaatgatgacactgaagatgttt

SEQ ID NO: 425666 - DNA, 73 bp, Homo sapiens
ttgcaataacaatggaaaggtcatttcaaggaggttatattcaaaagaaaaaggaactgtggggaatctgtat

SEQ ID NO: 425667 - DNA, 100 bp, Homo sapiens
aggagtttggtcaaagcaaccgaaaaggagagtttcctggcctcagctccccggattctcaacgtgtgactgcctgcaccgtgacaccatggctgccgac

SEQ ID NO: 425668 - DNA, 50 bp, Homo sapiens
gttccacctcattttagagtatcaagcagattcttacgctgtatgacagt

SEQ ID NO: 425669 - DNA, 75 bp, Homo sapiens
tgtcgcccgttggccgcgcggcgccgcgctcggcggccgccattgcaggttgggggccgtcccgctcctaaggca

SEQ ID NO: 425670 - DNA, 101 bp, Homo sapiens
cgtggatatttacctggagcaactggagccagacggactgctggtgtgggtcctggcaggcgccctggggctcagcctcgtcttctccctggtctcagtcc

SEQ ID NO: 425671 - DNA, 100 bp, Homo sapiens
caggcatcgtggggatcttggcagcgctgcagggtatctgatgtgtagccatgcagaagacctacgtgcaaaagcagaatgggaaggcaaagggacagct

SEQ ID NO: 425672 - DNA, 100 bp, Homo sapiens
tgggattttcagctcgatacaatttcacacctgccccactgtgttctccttgcctcaaaagaaaactcggcacctgttaaacttggaggctttggggtag

SEQ ID NO: 425673 - DNA, 100 bp, Homo sapiens
atggactccaaagagctaactttgtaccattcatagcagtcttgaagattcccacctcgggttgggagaggaccacggtggccaaaattcttagcttctt

SEQ ID NO: 425674 - DNA, 75 bp, Homo sapiens
cctcaccctcggggagcaacatggggccggtgcataaacttctcccgagttccatctcagtaaaagggaagcagg

SEQ ID NO: 425675 - DNA, 75 bp, Homo sapiens
cgtcttatagttgagaatttatcctcaagagtcagctggcaggagaatgtgatccgagaatttaacttaaatgag

SEQ ID NO: 425676 - DNA, 100 bp, Homo sapiens
aaatgcattgccaaggaggccctggagggcaaggaaggcagcatggagaatgagattgctgtcctgcacaacgcacaggcgatgccaagcccagcttctt

SEQ ID NO: 425677 - DNA, 75 bp, Homo sapiens
ccgtgaccgagagcgtgaccgagagcgcgaatatcgtcatcgttagaaggcttgggaacaatgggccgaggcatt

SEQ ID NO: 425678 - DNA, 100 bp, Homo sapiens
cagctccatcctgaaggaactgaggcgggtgcagaaacagctggaagatgctgaagcctctttggaaagcagcagtggcccccacatggccatgctccat

SEQ ID NO: 425679 - DNA, 100 bp, Homo sapiens
tattactcatgtgtcagatgtaccagccctggcacaaaaactgtttccgatgtgcaaagtgtgggaagagtcttgaatcaacaactctgactgaaaaaga

SEQ ID NO: 425680 - DNA, 82 bp, Homo sapiens
aaaaatattatggtctttgtgcacatttacatcaaggtctcagctcgcgtacatggacatagggtactctgggaggaggtag

SEQ ID NO: 425681 - DNA, 90 bp, Homo sapiens
ttgctggagaaacctaactcatcagtggctgcaaaggccaaattggaaacacagagtctgagctgaagaaacttgctgaagaaaacccag

SEQ ID NO: 425682 - DNA, 87 bp, Homo sapiens
ccccgtggcatggacaagcttattgtagatggcagagacaggtgcagttcaggagcagatgagatccaagggaaaccgagataggcc

SEQ ID NO: 425683 - DNA, 90 bp, Homo sapiens
agaggaaggaacaaaaggtcccggaccccccggatctgacggggcgggacctggcgccaccttgcagatgccatggacaatattaccagg

SEQ ID NO: 425684 - DNA, 100 bp, Homo sapiens
agaatgccggtcacagcccaggagaaactggcgatggaatatgagaggagccctctggaaagaaaaggacagaccctgtgctttcatgaaagtgaagatc

SEQ ID NO: 425685 - DNA, 100 bp, Homo sapiens
tacagttctccagtccttctctttcggaccctttagatcctacaagatcagtgattgtgatccgctccctggtagcagatggtgtagcagaaagaagtgg

SEQ ID NO: 425686 - DNA, 80 bp, Homo sapiens
cggaccggcgtccccggcgcgaagaggctggactcggattcgttgcctgagcatctggaatcaagagacccatggcatct

SEQ ID NO: 425687 - DNA, 95 bp, Homo sapiens
ctcttccctccgtgagcgctggcctgggggaaccaaggccccctgatgttgaggtcttgggcgtctttggtactggcttttttaggggtctgcct

SEQ ID NO: 425688 - DNA, 100 bp, Homo sapiens
caacagtcctggtcattcagactgcagttccccaggtggctgtgaaaaacaatatcgatgtcttctacttcagctgcctcatcccactcaatgtgctttt

SEQ ID NO: 425689 - DNA, 75 bp, Homo sapiens
gcacatatggggcggtcaagagaagaccccgctgggatgggtatcgaaggatgatcgcagtgatgtggagagcag

SEQ ID NO: 425690 - DNA, 100 bp, Homo sapiens
tccagttcgcagtcaagatctcgttccagttccagagaacgttcgagatctcgtgggtcgaaatcaagcaacaaatctgacacgctgcccctggccactc

SEQ ID NO: 425691 - DNA, 76 bp, Homo sapiens
aggccggatgagggctgggaagccagagactcatcgccacatttccagagacttcagaacccactcctgagaacag

SEQ ID NO: 425692 - DNA, 100 bp, Homo sapiens
catgagagggaaggaaacaagccaggatggaagagtgtagaaagtgtcccaaagttggtgtctgaatatatgtccaaaaagataaaagttgatgaatttg

SEQ ID NO: 425693 - DNA, 83 bp, Homo sapiens
ggaaagtttacaccaaaagctcccacttgaaagcacaccagcggacgcacacagggaaggatggagacgctgaaggataagac

SEQ ID NO: 425694 - DNA, 100 bp, Homo sapiens
cgccgagtgggaggatggcggaactgggctcgcgccccgcccaccccgcggggattggctgcgaacgcggaagaaccaagcccacgccccgcgcccgcgc

SEQ ID NO: 425695 - DNA, 100 bp, Homo sapiens
cagtgcttaatgctgtcttaactagtgtaggaaaacggctcaacccaccgctgccgaaatgaagtataaggtaaaataccatgaagattttgaaaaaaca

SEQ ID NO: 425696 - DNA, 82 bp, Homo sapiens
gagaccgtcctggcgcgatgcgtcaagtacactgaaattcatcctgagatgagattttaccaaatgttgcaagaactctgga

SEQ ID NO: 425697 - DNA, 83 bp, Homo sapiens
gcctgcagagctgtggcttaccagaactgccattggatgtccagaatcccctgtagttgataatgttgggaataagctctgca

SEQ ID NO: 425698 - DNA, 75 bp, Homo sapiens
atgaagaagttgcggagaactttgtcggagagtttcagtcgcattggaggagatgaccgccgggttctgctatgg

SEQ ID NO: 425699 - DNA, 100 bp, Homo sapiens
ccgggatagagaacgggaccggcaccactgagaaaggtgagtcctgcaaatgttaagtgatttgctcaaggtgcccatttcgcaggaattggagcccagg

SEQ ID NO: 425700 - DNA, 83 bp, Homo sapiens
actgtcggcttcaaagagaaaaggcaacatcctgtcacaggccatgctctggcaaaaactatgtaaagaattcttgaaccgat

SEQ ID NO: 425701 - DNA, 75 bp, Homo sapiens
ttttgctcctggtggaacagttgttgcagcaagcgattcagaaccaaggaaagcatgtaccactcactgacatat

SEQ ID NO: 425702 - DNA, 100 bp, Homo sapiens
ccgccagctgcggacccagggctttggaggtgctgccaaataccgccagatcctacagaaggtggagccgaggattgtcatagtggaagaagctgcggaa

SEQ ID NO: 425703 - DNA, 82 bp, Homo sapiens
ctcattcacttctagacgacaaaatgcaaaaaaggaggccaaagactttagtcatcttagtgggatttggggaagcaacagg

SEQ ID NO: 425704 - DNA, 101 bp, Homo sapiens
gtgcttgccactatgcccaactaatatttggaattttcgtatacgtggattccagaggggtgacagcaaaacttactctttcaacctgatcagaacgcacc

SEQ ID NO: 425705 - DNA, 100 bp, Homo sapiens
caggaaggacttgtggaacactgcaaattattccatagcacggataccaaatctgtggatgaagaggaagccggcttattggagctcttaaaatcccaga

SEQ ID NO: 425706 - DNA, 90 bp, Homo sapiens
gttttttcatattacatctacaagaggggacaagtacctttatgaaccagtgtatcccaagagtaaacatggaagtactaacttcattcc

SEQ ID NO: 425707 - DNA, 100 bp, Homo sapiens
cggcgcggaggcggctgaggtgcgagccggaaacattggcaaatttggagcgacagatctatgcttttgagggaagctacctggaagacactcagatgta

SEQ ID NO: 425708 - DNA, 100 bp, Homo sapiens
aagatcacaagcaactctggatgggattgcaaaatgctctgagaaagtggccgaaagaaaagaaactgaattttttagctctttacccctgaagatgaac

SEQ ID NO: 425709 - DNA, 82 bp, Homo sapiens
gaaggctgtagaccagagtatcgagaaggccagtccctgagacgaataggaccttgtccctggatgaggtgtaccttattga

SEQ ID NO: 425710 - DNA, 75 bp, Homo sapiens
agctcaacgccaggcgccgctcctttacagttccaagaaactatgatcctgctttacatccttttgaggtcccac

SEQ ID NO: 425711 - DNA, 101 bp, Homo sapiens
ggatgaccagccccgcggccgctcaaagccgggagatcgactgtttgagcccggaagcgcagaagctgggtctaggtgctggagtgcgcacggaggccgat

SEQ ID NO: 425712 - DNA, 82 bp, Homo sapiens
ccgatccagcctgcggagcctgtggggcaggcatttgtaaaggatgttcatgaagattcaataacagttgcatttgaaaaca

SEQ ID NO: 425713 - DNA, 100 bp, Homo sapiens
attctgaactcaggacttggcaaaaactccaagatgggagaataacaataagggagttctttatacttctccaggtccacatcttgatacagaaaccccg

SEQ ID NO: 425714 - DNA, 75 bp, Homo sapiens
tctggtgtaccaggcgaagctggccgagcaggctgagcgatacgacgatgagtcctgccggcggtgaccatcttc

SEQ ID NO: 425715 - DNA, 100 bp, Homo sapiens
caacgccgtatccagcgactacgcggccgcggagacctacctgcggcgtcggcagctgctgctccgagtttaaaattggtggtgaatggtggacatggat

SEQ ID NO: 425716 - DNA, 108 bp, Homo sapiens
caaaattgaaaaaatggttgacctcacccaggtatgctgccccacaaaaccaagcgaggccaggccgctctggaccgtctcaaggtgtttgacggcatcccaccgccc

SEQ ID NO: 425717 - DNA, 100 bp, Homo sapiens
gagacacacaggcagacccatactgacacgatgaggcgagtggtacgacagagcaagtttcggcatgtatttgggcaagcggtgaaaaatgaccagtgct

SEQ ID NO: 425718 - DNA, 93 bp, Homo sapiens
aggaggggccccagcagcccccgaaggccctatcaggacatggagtatgaaagacgaagccatgcagtgacacccgctaagacttgttggtag

SEQ ID NO: 425719 - DNA, 74 bp, Homo sapiens
aagttccccaacggctccccgtcgtcctggtgctgcagcggtctctgagcggcccctgatgttcctgttggaca

SEQ ID NO: 425720 - DNA, 126 bp, Homo sapiens
cagaaagtgccttcccacagaattctgtgatgcccttgaccgtttctccagtttctacagccagaaaaaatggctacaaacttcctagcacatgagaagatctggttcgacaagttcaaatatgac

SEQ ID NO: 425721 - DNA, 90 bp, Homo sapiens
cgggagcgggagcgggagcgggagccggagcgagagcgcgcgggcgcggccgacaggttggtcaaagaaaaagtgatgtatgaaaaagag

SEQ ID NO: 425722 - DNA, 78 bp, Homo sapiens
gaaatcgcagctgtgatttctcctgaactggaggcaactttggctttggggattcacgtggtggcggtggaaatttcg

SEQ ID NO: 425723 - DNA, 83 bp, Homo sapiens
agccggagaagcgagtttcagctggtgaaccgggtttatgtgattttcgatctgcctaccaccgtgtcaatgatcaaactgtg

SEQ ID NO: 425724 - DNA, 100 bp, Homo sapiens
tgcagaagcagcttgacagcctcacagccaggaccccatcagaaggggaggcagggactcagaggcaacaaaagatgttgctgctgctgctactggcgcc

SEQ ID NO: 425725 - DNA, 90 bp, Homo sapiens
agtctccccagaagaggaagtttatgcctttgagtaatggacagatgggccagcctctcaggcctcaggcaaattatagtcaaatacatc

SEQ ID NO: 425726 - DNA, 75 bp, Homo sapiens
agaaggcccagccaatgaagatgaagacataggaggttttctgtctcaactggtctctgacaagcctctgactga

SEQ ID NO: 425727 - DNA, 101 bp, Homo sapiens
aagccacctgccaaaatgtgcaaaggacttgcagctttgccccactcatgcctggaaagaattatatccagatcgagagacagaagattctgaaagggttc

SEQ ID NO: 425728 - DNA, 75 bp, Homo sapiens
gtctgtggacattagtgggcttcagttagccttggccggtagcaatgtacagataaagagtactttaacgcccat

SEQ ID NO: 425729 - DNA, 100 bp, Homo sapiens
ttaattgttctagtctccaggcccagtacatggatgcttgttggatgaattaatgaaccttgacccacaccaagttgatcatggccttgccaggttggtg

SEQ ID NO: 425730 - DNA, 89 bp, Homo sapiens
ctgacggccaatgaaacccccaagatgggcatctattacattccagctaaagtaaataatgccagcctgattggactgggttatactca

SEQ ID NO: 425731 - DNA, 75 bp, Homo sapiens
ggagtcttcaagtgccctgaggaccagcttcctctggactatgccaagctggaggagcagctgagccgccttcag

SEQ ID NO: 425732 - DNA, 90 bp, Homo sapiens
cacactctgcacctcgaaggctgacaagtcatctgggaaccaaggtcatccatctccagccccacctgaccagctcaacaccagcagtgc

SEQ ID NO: 425733 - DNA, 103 bp, Homo sapiens
tgctgtcctatgtcagcaaaaactggagcagaaattggaggctcagcatagcctcaactcaatacagttgtttttatacttctttttcaagtgaaaggtaaaa

SEQ ID NO: 425734 - DNA, 110 bp, Homo sapiens
aggtgcgtgtggggctgggtctcggagtgggagacgtggagtgcagtgactacaggtatgtggcagctgctttggctgtcatgagaaatgtgactcagcagatcaacgaa

SEQ ID NO: 425735 - DNA, 83 bp, Homo sapiens
gacagccgcgcgctgagggtctcggggcgggcgccgcgggacctctccgggccatgggctgctctttggcgtaaattgcaatc

SEQ ID NO: 425736 - DNA, 80 bp, Homo sapiens
attgcttgaacaaaataattgggacttagtggataacttcaaactaatgtgtactaatgccatgatttacaataaaccag

SEQ ID NO: 425737 - DNA, 100 bp, Homo sapiens
aacggctcccacagccgggcgttgggggaaagggtgtccgcaatgttgccagtgtctgtctgcagattggctacccaactgttgcatcagtaccccattc

SEQ ID NO: 425738 - DNA, 82 bp, Homo sapiens
actaatgaaaatcacagcttttggtctatcaggtgtttgaaagtgtggctaagaagtatgatgtgatgaatgatatgatgag

SEQ ID NO: 425739 - DNA, 100 bp, Homo sapiens
gttgaaggaaggtcggcagatcaaaccttataccctcatgagcatggtggccaacctcttgtatgagaaacggcaggaaactgcatatcttctggtttac

SEQ ID NO: 425740 - DNA, 75 bp, Homo sapiens
caagacctcatcaacaattaagacgttgagaaagaagggccttaatggctgtgacagcccagaccccgatgcgga

SEQ ID NO: 425741 - DNA, 100 bp, Homo sapiens
agcgagtctcggagaagatgtggtggcttccgtttgttggtggaggaggtggcaggcctcggcgtggatgattcaacagccacacaaagcagcaacattt

SEQ ID NO: 425742 - DNA, 50 bp, Homo sapiens
tcctgagtagctggtattacaggctttgtagctgagcagtttctaaataa

SEQ ID NO: 425743 - DNA, 75 bp, Homo sapiens
cgagtccggaccggagactttggggcctaactaggcaacttcaaagtgggagttcacattgctgacgtgagttac

SEQ ID NO: 425744 - DNA, 83 bp, Homo sapiens
aatgtccagatgcagctcgtggatacgaaggcgggatagccctggtcctttctccatgtaattgcttactcggtcatcgtggg

SEQ ID NO: 425745 - DNA, 80 bp, Homo sapiens
cctcacagcgaaacgccgcgcactcggagccggcacggctcggcggtcagcccaaggccaaccccactgtcactctgttc

SEQ ID NO: 425746 - DNA, 71 bp, Homo sapiens
ccaccctcatagatgtcctcttctactcgcacagacaccaaatggattgcttctgactccgagtccactgc

SEQ ID NO: 425747 - DNA, 101 bp, Homo sapiens
ggggctggcaacgaaaatgagcctcgcgaggccgacaagagccacccggagcagattctgcttctcagaagatgcactattatagatactctaacgccaag

SEQ ID NO: 425748 - DNA, 96 bp, Homo sapiens
gagcccctgtggtgactgcgaaggcttcgacgtgcacatcatggacgacatgattaagtaaaggcatgacttcctggcaccacagggaaaatcggg

SEQ ID NO: 425749 - DNA, 74 bp, Homo sapiens
tcaagcccaggctttggtcaccagtgagctggagaagttccaggtaatacgaggaaatagtatcatcatgttag

SEQ ID NO: 425750 - DNA, 96 bp, Homo sapiens
ccctgagagcctgaggaatgacggggactccatcgaggacgtgctgacccagatcgacagcgagcccggtctgggcccctgctgctgacatccccc

SEQ ID NO: 425751 - DNA, 100 bp, Homo sapiens
tactatccgtttgttcaggaaccaccagtgacagagtgcggtacttagaggaagagagaccttttgcaattgagcaagttactggaatgctgttagccaa

SEQ ID NO: 425752 - DNA, 128 bp, Homo sapiens
cctagacaggcgagtggatccaagtgggcgagagacattttaatctggaagagtcttgtgatttgggagacagaagatggcagtgaacgtatactcaacgtcagtgaccagtgataacctaagtcgac

SEQ ID NO: 425753 - DNA, 75 bp, Homo sapiens
cagctgtcctaatcctcactgccgaaagtatttaggtcagttaacgtccataccaggatacctgaatccctccag

SEQ ID NO: 425754 - DNA, 122 bp, Homo sapiens
tcaatatgtgccgccagtgtttccgtcagtacgcgaaggatatcggtttcattaagtttgggcttcctgtagacacccttttcctgcgcaacagagctgggcctccctttctctaatttccc

SEQ ID NO: 425755 - DNA, 75 bp, Homo sapiens
tggagcgcccagaggcgagccctggtggaggaagaggttaatttggagtggcccctggagtcagtttcctacacc

SEQ ID NO: 425756 - DNA, 75 bp, Homo sapiens
cggagaaccattaatcatctctaaggaatgttttaaaggaagttgggctactcacaagttactacataagaaagc

SEQ ID NO: 425757 - DNA, 98 bp, Homo sapiens
ggaagcgcggagggagccgcgggatggaccgcagatcgcctcaggcatggcgtacgtggagcggatgaactacgtccaccgggaccttcgtgcagcca

SEQ ID NO: 425758 - DNA, 75 bp, Homo sapiens
gtgtaaatgttgagcctttttggcctggcttgtttgcaaagacctcagttggatgaacccattccactgtatgag

SEQ ID NO: 425759 - DNA, 89 bp, Homo sapiens
gaaggaacgaggcaaggagctaaagcagcgtgcgttcagccctggggtgagcatgggtttatgcgtcttaggcattattgtgatggcga

SEQ ID NO: 425760 - DNA, 90 bp, Homo sapiens
aggcttgaggtatattcattcaatgtctttggttcacatggatataaaacctagccttggacaagattcgctatgagagcctgacagacc

SEQ ID NO: 425761 - DNA, 83 bp, Homo sapiens
gttgctcttctccgccgcggcactgatccccacaggtgaaatgacaatggatgctctgttggctcgattgaaacttctgaatc

SEQ ID NO: 425762 - DNA, 112 bp, Homo sapiens
cgccactttccccggagctgggccgcgaacacctcactattgatggtgtagcgctttaggggaaggtaagaatgattgatgttggctgatattggagtgctcattcacatga

SEQ ID NO: 425763 - DNA, 97 bp, Homo sapiens
attaactataaaggagagcgccaaaccattactgatgatgtggaggttaacagctatctttctgcacagaccccacaggctcctcggacactgggtc

SEQ ID NO: 425764 - DNA, 75 bp, Homo sapiens
atcacagcctttgtacccaatgacggttgcttgaactttattgagatctacagacagtcaatgtggatgagaact

SEQ ID NO: 425765 - DNA, 100 bp, Homo sapiens
tgcagcgcaaccacgagacggccttccaagaaagatgtagcacttaagcctcaggaacgtgtggagaaacgccagacgcccctgaccaagaagaaacgag

SEQ ID NO: 425766 - DNA, 96 bp, Homo sapiens
ggccaggggcccctcgcctcccctctgaggaccgaagatgagcttcctcttgtgctggagaatctggtaaaagcaccattgtgaagcagatgagga

SEQ ID NO: 425767 - DNA, 100 bp, Homo sapiens
ctgtgctccaggactccctcaataatgtggcaatggccgcagccagagccttgggggatgtgacagtccttgggtctctactgctccagcatctgctgca

SEQ ID NO: 425768 - DNA, 75 bp, Homo sapiens
ctgaggcctggaatttgattaactcattcaaggttacccagttgggggcggaggaaagcgcaaagggaaaagcaa

SEQ ID NO: 425769 - DNA, 90 bp, Homo sapiens
ctccagtgtcccacttgcatcaagctgggcatccagggctcgtacttctgctcgcaggcactatgtcgtccgaggcccagagatgacccc

SEQ ID NO: 425770 - DNA, 100 bp, Homo sapiens
cctgcctggactggtcctgagattcctgaatcaggttttggccacttgaccaggcagctgatgaccctggcagggggccgggtggtgctggccctggagg

SEQ ID NO: 425771 - DNA, 75 bp, Homo sapiens
cggcgttctggatctcaaagcggccttcctggatgctctgcagaaccaggctgaggccagcagcaagatcatcgg

SEQ ID NO: 425772 - DNA, 83 bp, Homo sapiens
aatgtgcggcttattgaggtggagcgcagttgctctggcgctgcttcagcaccgtggtcatctttctgttcctgctggacgag

SEQ ID NO: 425773 - DNA, 90 bp, Homo sapiens
tcgccagaaggaagatggcggatctggaggagcagttgtctgatgaagagaagcgagtgatagacagccaagcagagaaactgaaggagc

SEQ ID NO: 425774 - DNA, 101 bp, Homo sapiens
ggtgaagcatctgatgcacgttccatccggcgctcagctgggcttgaggtgtggacactgccagcggctgcagccgacttggaatgacctgggagacaaat

SEQ ID NO: 425775 - DNA, 75 bp, Homo sapiens
gcagcaggctgctcctacagatcctgacttaccaccaggaggaggagaacggggctgaggaggaagaagaagaaa

SEQ ID NO: 425776 - DNA, 100 bp, Homo sapiens
aaggaagtgcctatccaccgtgttgcagatatatctggggtgacttaagagattaaaattaatttggttgctgttggttctgaacaaataatgagttctt

SEQ ID NO: 425777 - DNA, 49 bp, Homo sapiens
ctgaggagcgccgctgcctcgcctcggtccctgtgcgttttattgcgac

SEQ ID NO: 425778 - DNA, 74 bp, Homo sapiens
gaatgccacagcatcctccagcacctcaggccctgggaggagcggggacactgaggacctctctccaaattggc

SEQ ID NO: 425779 - DNA, 74 bp, Homo sapiens
aacctggcttctcctggctgtcagcctgatactcctctatctaaacctgccaaaccacttatatctgttccttg

SEQ ID NO: 425780 - DNA, 100 bp, Homo sapiens
gacccggcgaagacgcgaccgcggcgcgagtcaccatgtgcttagatgagtacgaagatgatgaagcagggcagaaagagcggaaacgagaagatgcaat

SEQ ID NO: 425781 - DNA, 51 bp, Homo sapiens
gagcaacatctttcctcaccccaagggagctgagcacataacgacttacac

SEQ ID NO: 425782 - DNA, 121 bp, Homo sapiens
ggaccagggcccaggggcttgccaggagacgcaggtcgtgaagggttcccaggacccccagattgcttccaagtatgatcatcaggcagaagaagatcttcgcaattggatagaagaggtg

SEQ ID NO: 425783 - DNA, 100 bp, Homo sapiens
cggacactttgttattggagaaacatgcagattatatcgcatcctatggctcaaagaaagatgattattctcccctctgctattagagtgaagcaggagt

SEQ ID NO: 425784 - DNA, 75 bp, Homo sapiens
cgtctgcggaagtgcagctgcctcagttcttagcgcagagattcagttgtggaaattctttttgaacaagataat

SEQ ID NO: 425785 - DNA, 90 bp, Homo sapiens
gttcgtcatggggctgtttggaaagacccaggagaagccgcccaaagaactgtgggtaattccagaattgattggccataccattgtcac

SEQ ID NO: 425786 - DNA, 132 bp, Homo sapiens
tgcggagacttttgatggtggaagtggtgaaacccaaacaacatctcctgctattccttgggctgcctttcctgcagtttccgttactatggcaatgacggcagggactacaacaacctttcctatgagcaa

SEQ ID NO: 425787 - DNA, 48 bp, Homo sapiens
ctggcttagctattcattgcatgcagggtccttggcagtgtctgtggc

SEQ ID NO: 425788 - DNA, 50 bp, Homo sapiens
aaattcgtcagatcaaagaacaaggaatctggtggacagtaacaaacttt

SEQ ID NO: 425789 - DNA, 83 bp, Homo sapiens
cgccggccttgcgcggcgcgcccagggaaggcatttccagcccgcccacccaggtcagaagttgagtagcaggggcctaggag

SEQ ID NO: 425790 - DNA, 95 bp, Homo sapiens
acaagctgaagccctggctgatcgaggggtgagcccctccagactccgaataggagatcaagagtttgattcattgcctgctttactggaattct

SEQ ID NO: 425791 - DNA, 80 bp, Homo sapiens
cagcggaggcaggttgatgtgtttgtgcttccttctacagccaatatgaaaaggcctaacaatgcagatcttcgtgaaga

SEQ ID NO: 425792 - DNA, 100 bp, Homo sapiens
ctcagctcaaatggaatattgtcgcaccccatgcactgtcagttgcaatattcctgtggtgtctggcaaaggacccatggatgaaggaccagatcttgat

SEQ ID NO: 425793 - DNA, 82 bp, Homo sapiens
accatacaggaacagggcagacgttagcgtgagtgatcactctcaatcccgggttttagctaaagaagatactgaggcagct

SEQ ID NO: 425794 - DNA, 100 bp, Homo sapiens
ggctgagctgaagaagcttcggaagaagagccagggcagcaagaatcctcagaagtactcggacaaggagctgcagggtggactccgacgaccagtgggg

SEQ ID NO: 425795 - DNA, 50 bp, Homo sapiens
atttactgcacctaaagacaaagcgtcctggggcatttgctatttacctg

SEQ ID NO: 425796 - DNA, 82 bp, Homo sapiens
gttatgtacacttcgggaccatcagagcgtcagcctcgagtttgaccagcagcaggggtcggtgtgtccctctgaatctgag

SEQ ID NO: 425797 - DNA, 75 bp, Homo sapiens
cccagcgcagtgaagtggtgagcctttttgtcactgaattacggatccagatcaggagatttgaggagctgctgc

SEQ ID NO: 425798 - DNA, 50 bp, Homo sapiens
ggaggagcaacaatgtgggactatacgaaactggcagacctttcacttcg

SEQ ID NO: 425799 - DNA, 80 bp, Homo sapiens
gctgagtggttgtgtggtcgcgtctcggaaaccggtagcgcttgcagcatgtacaagcaaatgctggtgaatgctttcac

SEQ ID NO: 425800 - DNA, 80 bp, Homo sapiens
attctatataaaacacgattcttaccactcaggatcctaagcacttcaagtcagagaagacaggacggggacagttgagg

SEQ ID NO: 425801 - DNA, 100 bp, Homo sapiens
tgatttataccatagaagatgttcctccctggtacctgtgtatatttctggggctacagaaactggcgatggaatatgagaggagccctctggaaagaaa

SEQ ID NO: 425802 - DNA, 100 bp, Homo sapiens
cagggtctctggaaatttgacacagagtgctataaaaagtatggaaaaatgtggggaatgcagtaatagtggccttgtcttcaaaatcatgggatgtaga

SEQ ID NO: 425803 - DNA, 98 bp, Homo sapiens
tctcttgacaaccaagggcctccgtctggatttccaaggaagaatttcctctgaagcaccgccggtggctgctggcagcggaatcccccagatcaagt

SEQ ID NO: 425804 - DNA, 99 bp, Homo sapiens
gggacagggtcgggggacacgcaggatgagccccgcgaccactggcacattcttgctgacagaatgtgaaagatgttgcagaagtgttccagaagtggc

SEQ ID NO: 425805 - DNA, 90 bp, Homo sapiens
aaagaagagggtgtccatgattctgcaaagccctgtttatgaactgacgttacatcatacacagcaccaagaccacaatgttgtgaccgg

SEQ ID NO: 425806 - DNA, 109 bp, Homo sapiens
ctactgatgagacaagatgtggtgatgacagaatcagcttttgctaccggctctctgaccagttccacgacatcctcattcgaaagtttgacaggcagggacgggggca

SEQ ID NO: 425807 - DNA, 96 bp, Homo sapiens
tgtcttcggtggactccttcggcagtccacccaccgccgccgcctcccaggtgccagaaccctgtggagcatcatgaactgggaagagtagctgag

SEQ ID NO: 425808 - DNA, 100 bp, Homo sapiens
cacagttttccttgaagacagcagcgctaagagtgtttgatcttcctctgacttggtactattctctctcccaggatgcctggtgtgcaggagtatatac

SEQ ID NO: 425809 - DNA, 100 bp, Homo sapiens
actgttcctggaggaatccgagaagagcagagcggagggagccccagacacggcgggatgtagctcattttgggatacgagtctccatcgtggagcctgg

SEQ ID NO: 425810 - DNA, 99 bp, Homo sapiens
tagctacccctgctgtcagcctcgagctaaagaattacctccaaagccattgtcaagaccacagcagtcatctgcaccagtccagctgaactctggctc

SEQ ID NO: 425811 - DNA, 96 bp, Homo sapiens
ggagaccatggctgactacctgctgtacaccctcaacaaacaccagcgctttgggtgtcatggagaaactccagctgggcccagagattctgcagc

SEQ ID NO: 425812 - DNA, 100 bp, Homo sapiens
ggcagtggaggaagtgggggttatggtgggaggagccgatactgagcttcttcctatttgccatggtgaccaggctgaggcccgcaggtctaagaccaag

SEQ ID NO: 425813 - DNA, 100 bp, Homo sapiens
cagtcttcccgcgtccgccgattcctcctccttggtcgccgcgtccttggctggcgtgggaagtcatctacaataagaccgaccgagccggctgccattt

SEQ ID NO: 425814 - DNA, 99 bp, Homo sapiens
ttgcatttgtgtatgaagctcaagatgtggggagtggcagagagtatgcattaaagtgttctaagaacggaagcatctgggctggatggaatttagcat

SEQ ID NO: 425815 - DNA, 50 bp, Homo sapiens
ctgccctgagacggtgtcccgccgaaaggctgaccaactgactgaagagc

SEQ ID NO: 425816 - DNA, 75 bp, Homo sapiens
ggcaacgccgaggcgcttctgcatctgtgggccgagcataagctgtggccatgactactgaagtaggctctgtgt

SEQ ID NO: 425817 - DNA, 100 bp, Homo sapiens
gcaagaggtgctgatatcaacacggtcaacgtggacggcttgacagccctgcaccaggtgtcatggagaaactccagctgggcccagagattctgcagcg

SEQ ID NO: 425818 - DNA, 100 bp, Homo sapiens
ccaagccatgcacaccccgggggatgcagccggagagaacacggccgaaggaaggatggatcgataaagaattggctagtggtgaatactttttgaaggc

SEQ ID NO: 425819 - DNA, 75 bp, Homo sapiens
cgccttcaacaccaccttcatctccaccatcgggtaacgccatcctctgaaaatcctaatggtgctacttctagt

SEQ ID NO: 425820 - DNA, 75 bp, Homo sapiens
gttcagcatccccaagcagggggagaatccagcaactatcacaagaatactccttagccacttcaattgggataa

SEQ ID NO: 425821 - DNA, 75 bp, Homo sapiens
aatccgagaagagcagagcggagggagccccagacacggccgagacgcatccagagctttcgtgaccggggactg

SEQ ID NO: 425822 - DNA, 101 bp, Homo sapiens
gccatgaaagcgctagaatccatcttcaagttcatcgtgcgctccaggatcctgttcaatcaaaagtcattgggtggtacagattccggcgcaatacgcag

SEQ ID NO: 425823 - DNA, 100 bp, Homo sapiens
tcaacgagttgaagttggatgacaatgaagcacttatagagaagttgaaacatgctgggaagacacttcagatctttaatattgagatgaagagtaaaat

SEQ ID NO: 425824 - DNA, 50 bp, Homo sapiens
ccgcgccgcgcctcagctctggtgcatgaatacctcagaagtaaactctg

SEQ ID NO: 425825 - DNA, 83 bp, Homo sapiens
gaactgttgacaattgaagacagaaaccgggtgaggaaaatagcagctgaatactatgacaacctccctcactacaattcctg

SEQ ID NO: 425826 - DNA, 90 bp, Homo sapiens
agattctccggggacccttccgtatctgcctaggcattttgctgtctcctcctaatacggtgatgcaggcccagtgtgtcaaaacagaaa

SEQ ID NO: 425827 - DNA, 74 bp, Homo sapiens
ataggctccctcctgctgtcaggctacatcagcaaagggaactttccatgactggatcacagggaaaaaccgac

SEQ ID NO: 425828 - DNA, 75 bp, Homo sapiens
cgacgggccgagcctgccactgttaatgttcgtgaagaaattgaagagttttttccaagaatgtggaagataaat

SEQ ID NO: 425829 - DNA, 50 bp, Homo sapiens
cgtgcaacatggggcttgagaaaggtgaggatgaggatgatgaccttcag

SEQ ID NO: 425830 - DNA, 97 bp, Homo sapiens
gaacagagccaatggcttggaatgagtgttatccaagataaattctgtgggattataaacatttcagtagaaggcctgcatgatgtcatgacggaag

SEQ ID NO: 425831 - DNA, 75 bp, Homo sapiens
cccaccgcgcactcggagatgcagccgctggtgtcgtgaaaactacccctaaaagccaaaatgggaaaggaaaag

SEQ ID NO: 425832 - DNA, 83 bp, Homo sapiens
cttggatatctcaatggtgaagcgtatggtccagtagtctatgcagcatatttaaaaatggagcacagtgacgagaatattca

SEQ ID NO: 425833 - DNA, 74 bp, Homo sapiens
ttgtaactaagagtaaaagagctgaaaaattgactgaactttcaggggtttgttaaagttgttaagaataaggc

SEQ ID NO: 425834 - DNA, 75 bp, Homo sapiens
ataccacctcatgttgttaaagtaccagcttcacaggcatggattccgtgaaggaacaacacctaaacccaagag

SEQ ID NO: 425835 - DNA, 82 bp, Homo sapiens
ggctcggacgccagcggacacgcgggcgaggttttaaaatcaaagatgggaaaatcggagaaaattgcccttccccatggcc

SEQ ID NO: 425836 - DNA, 101 bp, Homo sapiens
gattccctgtgttctgcttttttcattgttccactggacgctcatcagagggaagatctttttcctcaattggattatttatgaggatggcctgtgcaaaa

SEQ ID NO: 425837 - DNA, 100 bp, Homo sapiens
cctccactggcaaagagtcacctaaagttaggcggcactccagccccagctcgcattagtgccagcagtagttcccaagggctgtctcagccatccaccc

SEQ ID NO: 425838 - DNA, 100 bp, Homo sapiens
aaggggcgtctgcggctctccgccgtccccagccctgcctctccctgggctctgttttaacggtgactccctgatgatcattccttggcatgaacataaa

SEQ ID NO: 425839 - DNA, 74 bp, Homo sapiens
tgcgcttggggatcctctgtacgcccgttcactgggtttgtggatgcacttagatgtttgcaatgagcactgtg

SEQ ID NO: 425840 - DNA, 50 bp, Homo sapiens
aagagacagcctgctggatactcatccagcattcagagagaagaatcgac

SEQ ID NO: 425841 - DNA, 82 bp, Homo sapiens
ttccacatcattgacttactgctttgtgagatgggtagcctatgaaaatcctgacttcacaggagaacagtatatactggat

SEQ ID NO: 425842 - DNA, 100 bp, Homo sapiens
gcatcgcgctctacgacaaggcgctaggctacgggcagcagtttgtgaagcctggagctgagaattcaagagactaccctgacttggcagaagaagcagg

SEQ ID NO: 425843 - DNA, 74 bp, Homo sapiens
cttccagcagtcccatgtgcacgatcctggctctgcagagagaacagcccagaaaagaaagttccccagccctc

SEQ ID NO: 425844 - DNA, 100 bp, Homo sapiens
attcacaccccagcaggggctgcggtcctggacccaagccagaagcctctgcaaagcttccttccagacctgcagataactatgacaactttgtcctacc

SEQ ID NO: 425845 - DNA, 83 bp, Homo sapiens
ctgctgtttctcttcgccgacgtctcatggatccattatggcttcttcacatggcttgagtcttgccaacgaggaccttacag

SEQ ID NO: 425846 - DNA, 78 bp, Homo sapiens
ttacaaatatattttgaatgatttaccaagacttaattcagtgcacaaatgagatgaatgtgaacatcccacagttgg

SEQ ID NO: 425847 - DNA, 90 bp, Homo sapiens
cgtgtgcctgatgatcacgcagctggctggcttcagtggaccaagtcctgtgtatggaaactcacatgagtcagctcagtctagaagggt

SEQ ID NO: 425848 - DNA, 99 bp, Homo sapiens
ctggatccgccgtcagccgggcccggggctttcgacatgccccccaggccctgggcagtgacggggttcgggtgaccatggagagtgcgctcaccgccc

SEQ ID NO: 425849 - DNA, 75 bp, Homo sapiens
ctgcagagtgctgaagacggggtagccacgagatttcgatggggtcctctatcatatttcaaatcctaatggaga

SEQ ID NO: 425850 - DNA, 75 bp, Homo sapiens
gcaggatcatcttataaaagaaacacctgatacactcagtgacccgcagaatctaggtaaaaatggcttatctaa

SEQ ID NO: 425851 - DNA, 50 bp, Homo sapiens
ctcagctctcggcctgctgatgccaagattctacattgctcatctgggca

SEQ ID NO: 425852 - DNA, 98 bp, Homo sapiens
catgcttagcattcgagagaacaaaattaaacaactacctgctgaaattggcccctgagatgctcatgcccttggattaaacccctgcagtgctggaa

SEQ ID NO: 425853 - DNA, 100 bp, Homo sapiens
ctcagcagtcggatgggggaggactgctttatggacttgcatcaggagtagcaagagaggcagatgcgaaccagaacaatgggacctcctctcaggacac

SEQ ID NO: 425854 - DNA, 82 bp, Homo sapiens
ctgggtcccgccagacacgccgccgccgcagcacaggaagtcctggagaacctgaaggaccgctggtaccaggcggacagcc

SEQ ID NO: 425855 - DNA, 105 bp, Homo sapiens
ctcagttggaagcagccgatccagcctgcggagcctgtggggcaggtgactgtaggacgaggatttggtgtcacataccaactggtatcaaaaatctgccccctg

SEQ ID NO: 425856 - DNA, 96 bp, Homo sapiens
caggaccacctggaagcctagaaatggcgcatattaaatttcctattgactacccctattcaccacctaccttcagattcttgaccaaaatgtggc

SEQ ID NO: 425857 - DNA, 75 bp, Homo sapiens
cacctatcacttgttccctccaagacaactgaatggaacagattatcagtctggtcaatcagatctgcggcaaag

SEQ ID NO: 425858 - DNA, 100 bp, Homo sapiens
gacagtttagcagaacagcctccgcggctccggggagaaggtgaaaattagttctgctgtgcttaaagctgcggcccatcactatggagctcaatgtgat

SEQ ID NO: 425859 - DNA, 100 bp, Homo sapiens
ctggtggcccttctatcacttctatgcagggtgtggacgaatcaggagccagtagattcacagtgctgtttccatcagggactcctttgccagctcgaag

SEQ ID NO: 425860 - DNA, 115 bp, Homo sapiens
tccagaaccatagggattattggagctcctttctcaaagggacagacttaattcagtgcacaaatgagatgaatgtgaacatcccacagttggcagacagtttatttgaaagaac

SEQ ID NO: 425861 - DNA, 88 bp, Homo sapiens
gcggagatctctctcatctcgctcggctgcgggaaatcgggctgaagcgactgagtccgcgatggagccctccagaatacccatcata

SEQ ID NO: 425862 - DNA, 90 bp, Homo sapiens
gcagtaccagacctgggaggagttcagccgcgctgccgagaagctttacctcgctgaccctatgaagtgatcattcaggatatgttcgtc

SEQ ID NO: 425863 - DNA, 75 bp, Homo sapiens
ctggactgcctcccataaagcccaatcctcctcgccctctgactaatatgaatgacaccatggttagccacatgt

SEQ ID NO: 425864 - DNA, 82 bp, Homo sapiens
tctccagcgctctcagcaccaaacccctctgccatgaaccagtccatcccagtggctcccaccccaccccgccgcgtgcggc

SEQ ID NO: 425865 - DNA, 98 bp, Homo sapiens
tggacaggctccaacggagaagggtcacacacggacggcatgaaagaattactgatgtccttgatcaaaaaaattatgtggaagaacttaaccggcac

SEQ ID NO: 425866 - DNA, 98 bp, Homo sapiens
ttttaaccgaggcacggacaacatcaccgtgaggcagggggacacagccatcctcagggttgagctccaaagaatgaaaatttcccggcccctgcctg

SEQ ID NO: 425867 - DNA, 98 bp, Homo sapiens
gataatattatcaacattgatctcctatttttggcttcaagattttgtgccaaccagacaagagaacaatgccctggacatggctccagagatccaca

SEQ ID NO: 425868 - DNA, 142 bp, Homo sapiens
ggtaaaaaacatgaagcagatgagttgagtggagatgcttctgtggaagatgatgcttttatcaagatgaaattgacagttcttcaatgtcagatgatgatagaaaagaggttgtaaacattcagacttggataaacaaacc

SEQ ID NO: 425869 - DNA, 82 bp, Homo sapiens
atgtggcagtggaaaatgcgctcgggctggaccagcagacctgaaggaaaagattatgcccttcattggctagtgctgggga

SEQ ID NO: 425870 - DNA, 98 bp, Homo sapiens
gagggcgccgccgagccggagttcggaggaagcagcgcggccgcttgcaaaccatactgggtacatcaaagttgactggcaacgagtggagaaggaca

SEQ ID NO: 425871 - DNA, 90 bp, Homo sapiens
ctacgacaagggcctcgcttggtaccggcgcagtgagcctgcaggccgacctcactcgtggcacacaactaaatctggggagaagcaacc

SEQ ID NO: 425872 - DNA, 97 bp, Homo sapiens
tgcccaccggaatggagaaggaagaggagtcgttttctggatatgccgcagaaggatccgtgccagaagcaagcctgtgagatacagaaatgtttac

SEQ ID NO: 425873 - DNA, 83 bp, Homo sapiens
ttgtgccctagcaccccgagaaccgtcagtttgagccagatggcagctgttgaagacagagctggggtccttcttcacggagt

SEQ ID NO: 425874 - DNA, 88 bp, Homo sapiens
ggccagggaaccctggtcaccgtctcctcagaggtggggctggtgtccgagcacttctcgcaggccccgcagaggctgtccttctaca

SEQ ID NO: 425875 - DNA, 75 bp, Homo sapiens
taccctccagtagacattaccctccaaggaggacaaaggcctgccccatggcaatgtctctgcccggaaggtgct

SEQ ID NO: 425876 - DNA, 88 bp, Homo sapiens
ctgacacagaaaatccttgtgcaaataaatgcttagtattgttgcagcatctggcagtgagactgaggatgaggacagcatggacatt

SEQ ID NO: 425877 - DNA, 100 bp, Homo sapiens
aagggtgcaagaagaatcagtgattactcttgtctctgctgctcctgggaaagtgatttgtgaaatgaaagtagaagaagagcataccaatgcaataggc

SEQ ID NO: 425878 - DNA, 98 bp, Homo sapiens
aggaggtgctgaagagcgaggaggccagctgcgggccgtccagcggctgtgccacttctacagcgccgtcatgcccagcgaggcccagtgtgtcatct

SEQ ID NO: 425879 - DNA, 100 bp, Homo sapiens
gctgaaaataaatagggaagatggagacaccctctgggggtcctctctgagtcaaatccagtggtgtcagctgtgatgcatgtttaaaaggaaattttcg

SEQ ID NO: 425880 - DNA, 100 bp, Homo sapiens
tttaaaggagttcttctgatctcttaggagctttacattttgaagaacatggatggatgagaaacttgatgtggattgattgaggccatcaagctacaga

SEQ ID NO: 425881 - DNA, 100 bp, Homo sapiens
caagaagttcgtgtgggaggcggcgcgcgactacgggctccagcctgactccgaggttgcagaggctggccgctgcctggaagtgttctttgagggctgg

SEQ ID NO: 425882 - DNA, 101 bp, Homo sapiens
gttgggctccatctttcagcagttggcacacatggttaaggaacaggaggaaaccattcagaggtttgccaagatggtggataagaatatttacatcattc

SEQ ID NO: 425883 - DNA, 97 bp, Homo sapiens
gctccgtgtttctggaaagtgacagcaggaaggaagcagccaccctcgccatggcctccccgcccgcctgcccctcggaggaggacgagagcctgaa

SEQ ID NO: 425884 - DNA, 122 bp, Homo sapiens
aagatgagctgtcctttcaggaaggagccattatttatgtcatcaagaagaatgacgatgatttggagcaagaggtggtggtggccttcccccgaagaaatttggtaatcctggggagcgtt

SEQ ID NO: 425885 - DNA, 100 bp, Homo sapiens
cagactcagaccaccaccagaaccatcacctcggagacccagacaatcacagtgtggcaaaggagcagagaactttgacaagttcttcacacgaggacag

SEQ ID NO: 425886 - DNA, 75 bp, Homo sapiens
tatcgagcaaaactttgggcttgcaacttttgttaccaaaggaatcagtatgccaagtacatggaaaaccatagc

SEQ ID NO: 425887 - DNA, 100 bp, Homo sapiens
gatcttcacagcacagttcctgggaaggtggagccaccagcctctccctgataatatcgtctactgcattatttttggctgcaaaagtggaagaacaggc

SEQ ID NO: 425888 - DNA, 98 bp, Homo sapiens
atggccccagacttgtcgcacggatgcagaaaacttaatggaggaggctgagcttccagctgatcttaccaagatgcatctcacagaaaaccctcatc

SEQ ID NO: 425889 - DNA, 76 bp, Homo sapiens
cagctgcgatggccgtggccgtggggagaccgtctggacaaactacaaggcattcgatgctcaacaaatacttgtg

SEQ ID NO: 425890 - DNA, 75 bp, Homo sapiens
tgtgaaagtcagtttctgaggaatttcatcagaacatacaacctcctcttcagtgtcaaaaaagccacggttaga

SEQ ID NO: 425891 - DNA, 96 bp, Homo sapiens
agttagatgccgattacccacttcgagtcctttattgtggaggacacattggcgtgagacctgggagtacgttgtgccaaatcattgccacttgcc

SEQ ID NO: 425892 - DNA, 115 bp, Homo sapiens
ttttaatactgctggtggaaaaggaaatcgtgatgcagcttcctcaaagttgcttcaagaaaaggatgagactgtgatgcctggatgtacagccatctgttgaccataatactga

SEQ ID NO: 425893 - DNA, 78 bp, Homo sapiens
gcctcagcagctccagccagcggacccgacggctgagagtttccctgaaacctgggctcttgaagacgcatcactgga

SEQ ID NO: 425894 - DNA, 86 bp, Homo sapiens
atttggaaccttcgggcaaacaggattccacagtgtcctctggaaaatgatccctgcatgtcactgagtccaccatgctttacaga

SEQ ID NO: 425895 - DNA, 80 bp, Homo sapiens
ctgcaacaggaggacattgaaaataagatggaacccatccacataaggaaagcagctgtgtgaggaggagcgccgggcca

SEQ ID NO: 425896 - DNA, 82 bp, Homo sapiens
ctcgcacccgcttcgcagacaggcgcacgcagtggagagggcgaccattgacgaggtggagacggacgtggtggagattgag

SEQ ID NO: 425897 - DNA, 90 bp, Homo sapiens
agccagtgtcaacacgacaccggataaaccaaagacagcatctgagcacagaaagaagatgaatccggcctcggcgccccctccgctccc

SEQ ID NO: 425898 - DNA, 50 bp, Homo sapiens
tgaacttcaaaaaattggggacttcagaggatgattccgaagaagacgga

SEQ ID NO: 425899 - DNA, 100 bp, Homo sapiens
gcagagcaccaggcccaccgtgaaaggctgctttgaatgctgcatcaagtgtctgggaggagtcccctacgcctccctggtggccaccatcctctgcttc

SEQ ID NO: 425900 - DNA, 133 bp, Homo sapiens
tgtcaagtatgtggagtgatgctacagtttgaatcacaaagaatttcacattatgagaatgccgtatatgtagtagcacttttcaaagaaggaagaaaggtgggagtcatttccagggtaattttgacaagag

SEQ ID NO: 425901 - DNA, 98 bp, Homo sapiens
tgacccagctagccagatcccggacccaaaccatgttccctgtgaaggtgaaagtggagaaatcaggtgaatacatcaagacctggaggccacggtac

SEQ ID NO: 425902 - DNA, 100 bp, Homo sapiens
ctcacgtccactctgcgagaatgggctgtcatctggcgaaagctctacgtgatcccacttccagccgggcccctcatgtatccactggccgaccgcagag

SEQ ID NO: 425903 - DNA, 83 bp, Homo sapiens
ggcagagggaggaacctggacgccggaagccgggaaatggaggctactcacagtcgaactacaactccccggggtccggccag

SEQ ID NO: 425904 - DNA, 100 bp, Homo sapiens
gaggattaccacacgctcaccaactacaaagccttcagccagttcatgagagcaaaatatgctgtgaattccatcaagaagaaagtcaacgacaagaacc

SEQ ID NO: 425905 - DNA, 75 bp, Homo sapiens
ccaatttggagatgtacatcaaggcatttatatgagtccaattacataccggttacggcacctccttcgtgcaag

SEQ ID NO: 425906 - DNA, 89 bp, Homo sapiens
tctggaagaggtgaagttgggaaactgcggattgccaaggaacttatagaaatgctggcaatttcaagaaaccaaaagttgttacaggc

SEQ ID NO: 425907 - DNA, 100 bp, Homo sapiens
cagggactccacggccagagccctggatgtcatttggaaaaacactagagacagacggctggcagaattcagcttagagaactatcaacacaggacaatg

SEQ ID NO: 425908 - DNA, 50 bp, Homo sapiens
gcggaggaaggactcctcgctctatatagcacaccgttccggaaggcaaa

SEQ ID NO: 425909 - DNA, 107 bp, Homo sapiens
tcttgggcaaggtgactctggacgtgaccatgggaactgcctgctccttcctgcaggagtctgtgggtttggtctccatgttccgaggcctgggcattgaaacagtt

SEQ ID NO: 425910 - DNA, 83 bp, Homo sapiens
acgcgaggcagggagcttccaggttatagaagggagagaaggtacccaaagggaaaaagggaaaagctgatgctggcaaggag

SEQ ID NO: 425911 - DNA, 50 bp, Homo sapiens
gccctgagacggtgtcccgccgaaagatgccacttcaaatgaacaacaag

SEQ ID NO: 425912 - DNA, 100 bp, Homo sapiens
tcagaaaccaggctgctttcaggaacattgctgtggattcccaggtgcctcctatactccttgataagcagttctctgaattcactccagacattacacc

SEQ ID NO: 425913 - DNA, 90 bp, Homo sapiens
ccactatatcagataagcttgacattacagccaagatggtgctgtcccagagacaacgagatgaactaattaaacaaccaccatgtcgag

SEQ ID NO: 425914 - DNA, 75 bp, Homo sapiens
ggagcctgccccgccctggggacgaagagctgcagctcctcctgtgcggatgaagagcatgatctagaagaggat

SEQ ID NO: 425915 - DNA, 83 bp, Homo sapiens
ggaggaggtggcggcggcgggaagatactccgtgggaaggaggcttgtttaaactacggatgcttttcaaagatgattatcca

SEQ ID NO: 425916 - DNA, 83 bp, Homo sapiens
ggacaagcaggagctgggagccccaggtgaatgaaatcctgtgccgttcttcagtctggagtgccttcaaagatcagaaacat

SEQ ID NO: 425917 - DNA, 75 bp, Homo sapiens
tgcagttccaatttcccaaaaagaaacatccatgatagcagtcttctgtaaatcgaacttttcaagaattctctg

SEQ ID NO: 425918 - DNA, 74 bp, Homo sapiens
agaacacagccagcctttggaggaactactcaggtgtgtgacatatatataaattataaccttccattagtggt

SEQ ID NO: 425919 - DNA, 100 bp, Homo sapiens
agagtccttcaaaaatgccagaaatcaacgccaaggtggcacttactcaaaagcatctactcctaatggttatgataatggcattatttgggccacttgg

SEQ ID NO: 425920 - DNA, 97 bp, Homo sapiens
attcctttgcctccccagatcttcaatgaggagcagtactgtggggtgatcactgtgttcagtgttgttggaatggattcagactggctaatggggg

SEQ ID NO: 425921 - DNA, 101 bp, Homo sapiens
gccgctatggatgatcgagaggatctggtgtaccaggcgaagctggccgagcaggctgagcgatacgacggtaagtaaggaggtctctgtaccatggctcg

SEQ ID NO: 425922 - DNA, 87 bp, Homo sapiens
cccagaccctggagcctcagttggaagcagccgatccagcctgcggagcctgtggggcagggggaaactcggccgatatcctccttg

SEQ ID NO: 425923 - DNA, 107 bp, Homo sapiens
ctgaagaaagacagcaaacacctgaggtggtacctgatgattctggaactttctatgatcaggcagttgtcaggatacttttgtggaactctatgggaacaatgcag

SEQ ID NO: 425924 - DNA, 100 bp, Homo sapiens
gtgattgaggacaagaccatcgagctcatggccgaatacatcaagcaatggtaacatctttaaatgaagataatgaaagtgtaactgttgaatggataga

SEQ ID NO: 425925 - DNA, 90 bp, Homo sapiens
aagacagcttgctggatcattgtattactcatcacagatcggaacggaggcctgtgggcaattgaaggaacagactaaaaatcgtgtcct

SEQ ID NO: 425926 - DNA, 82 bp, Homo sapiens
ctggcctgggcgctccggtggcggcggagaaggatatggccctgaagccacatgagcggaaggagaagtgggagcgtcgtct

SEQ ID NO: 425927 - DNA, 82 bp, Homo sapiens
cggacatcggcttctgcctggtgctctgcgtcctcatcgggcttatgttcgagccgagattcgggccctccaccctctacag

SEQ ID NO: 425928 - DNA, 50 bp, Homo sapiens
ggattccagactcgtgggggaaaggctggggataaaaacattcagatggc

SEQ ID NO: 425929 - DNA, 98 bp, Homo sapiens
ctcaggttgtggtagaggcggaggctcaggcagcttgagcttggtgatccagctatttttcctgccgtaattgtggaacatgttcctggtgctgatat

SEQ ID NO: 425930 - DNA, 100 bp, Homo sapiens
ttaagcctgatctaacccctagaaacagggagatgcacttatttacatggaaccagagaaacaagtgatgtccaggtcgtcagatgaatgtgttgtggct

SEQ ID NO: 425931 - DNA, 78 bp, Homo sapiens
agctgctgaagcccaccgaattaggatcagatgtggccgcccagcagttgtgcacataggaggagaaggggccaggtg

SEQ ID NO: 425932 - DNA, 100 bp, Homo sapiens
ctgggacttaggagggcaggaagagctgcagtctttgtgggacaagatctctgttgaggagctggcgcggaatctggtcatcaaggtcaacagggatgct

SEQ ID NO: 425933 - DNA, 100 bp, Homo sapiens
catatttgagtcatttccttcgtacccacagtgcttcatgagaggcgtggtgaccaagatgaagatgcagaggaccattgtcatccgccgagactatctg

SEQ ID NO: 425934 - DNA, 119 bp, Homo sapiens
tggaggtgaatggcagcaaggtgggcccggacggcacaccctacgttaccgtgctcaagacaatgcagatcttcgtgaagactctgactggtaagaccatcaccctcgaggttgagccc

SEQ ID NO: 425935 - DNA, 75 bp, Homo sapiens
ccaggaactgtcggaacagaaccaaaggctattggatcagctcagcaggggatttgtatcgttgtgcccgtgtca

SEQ ID NO: 425936 - DNA, 78 bp, Homo sapiens
tcagggcttccactgattctacattatggtattaatcaagaagagctatgaccggaccaaacgtcagcgtcgtagaaa

SEQ ID NO: 425937 - DNA, 100 bp, Homo sapiens
agtaactgaacattggtctaaagtctttccaaaaggtcaaggttcacaaggcccttcataacacaaggcttttatctgcttattccgccattgatcccag

SEQ ID NO: 425938 - DNA, 75 bp, Homo sapiens
tcagcatgattttcgaaccccggagttttgatcggcatgttggtaaaatttattccaaatgttcttcttttctgg

SEQ ID NO: 425939 - DNA, 99 bp, Homo sapiens
cggtgggtcggggatcggtcgcctgagagccctgggcgctgcctatggcacagccaagagcggtaccggcattgcggccatgtctgtcatgcggccgga

SEQ ID NO: 425940 - DNA, 83 bp, Homo sapiens
gacggtttcgccggcagtctcgggcttttttccagacttcaagctcccattccaacagtaagagcttcttccacatcacagcc

SEQ ID NO: 425941 - DNA, 100 bp, Homo sapiens
ctaaagattgtcctcgacacttttgtataccaaataccaagaagaatttttatccagttaatgaaaagaggtcctgctgtactagccaccaaagcagctg

SEQ ID NO: 425942 - DNA, 97 bp, Homo sapiens
atgaagatgccacagggatcctaaaatctaaacgctatgtattagaggaagctgagcaactggagcctcgagttagtgctctggaagaggacatgga

SEQ ID NO: 425943 - DNA, 100 bp, Homo sapiens
ttttaggggccagcagatgcaggaaaatttcgatattgaagtgtcaaaatccatagatggaaaagatggtgatttgaagatattaaagctagaaattgga

SEQ ID NO: 425944 - DNA, 75 bp, Homo sapiens
ttgggctcacttccacaaattatggtttgaagtggtgaacatggatttttctcggcttcacatgtacagtcctcc

SEQ ID NO: 425945 - DNA, 74 bp, Homo sapiens
tttttggacctgaaacagaaattctggaacacctatatggataaaagaatcagagtgtctcaacccttgacaag

SEQ ID NO: 425946 - DNA, 90 bp, Homo sapiens
cttcgaggggctctggaaagaccgggtccaggtggccattaaggtgatttctcgagttgtggaagatatcaataagcgcagagagccgct

SEQ ID NO: 425947 - DNA, 98 bp, Homo sapiens
tgggcagcatgcagtgctttctggacagccttttgattgattatcaatttaccttcagcttattacaggaagatgatcgccaccatactgccataaac

SEQ ID NO: 425948 - DNA, 83 bp, Homo sapiens
tccagcccggcccggcagcgacatggaaggtcatcatcagatttgaaatatttaaagtggatacaaaactatttcagcaatgc

SEQ ID NO: 425949 - DNA, 100 bp, Homo sapiens
gaaagaattgactggtgacatgcagttgtccaaaagtgaaattttacgaactcaggtgggagtgttaccatacaagaagaatcaataatagaaaaaggga

SEQ ID NO: 425950 - DNA, 50 bp, Homo sapiens
agaagggccttactccttcacagatcgaaagttactgtggcccatgtcct

SEQ ID NO: 425951 - DNA, 50 bp, Homo sapiens
ccagcacctggaggatacctgctacctactatctgttatagtccctgggt

SEQ ID NO: 425952 - DNA, 100 bp, Homo sapiens
cagagaaaatctaaacaaggatctattgactggtgctgcaggaggcttctcacatgctttgggatatcttcagggaaatacgctcttaatagaaactgag

SEQ ID NO: 425953 - DNA, 75 bp, Homo sapiens
tggctacactagcccccattctctggtggaatccgcaggctggaggctcccaggggaggcaaacgcctggccctg

SEQ ID NO: 425954 - DNA, 100 bp, Homo sapiens
cggcatttaacaaggcggtgtggtttactccatgcagttgtcaggagttggcagatgacttgatctccgacattttcaccactattggctcagtgactgt

SEQ ID NO: 425955 - DNA, 100 bp, Homo sapiens
agaaaggggaaagttgcacatttatatcctagagggaagcgacagcagtgcttctccctgtgctgaggtacaggcaatggatcacttggagtcctttatt

SEQ ID NO: 425956 - DNA, 100 bp, Homo sapiens
ggcgtcactcgctgggctgctcttcctgaggttttcctaagccatcccctggcggaaccgcccccaggcaacatcagatgctgacctgaaagaacatatg

SEQ ID NO: 425957 - DNA, 90 bp, Homo sapiens
cccccgagagccgccgacatgaagaaagacgtgcggatcctgctggtgggagaacaggttgttggatggatgtatgggaactaatgtcgc

SEQ ID NO: 425958 - DNA, 98 bp, Homo sapiens
gaggcgcgcgccatggcttctggagccgatttattcacctcgatgatgattgcgtaacagaactttctgtacatcacagaaacaacaggcaaacaatg

SEQ ID NO: 425959 - DNA, 102 bp, Homo sapiens
ggcgctcatggacggaagacccctggctctataagctgaattatggcagcccagtcaaggtaagaatgattgatgttggctgatattggagtgctcattcac

SEQ ID NO: 425960 - DNA, 100 bp, Homo sapiens
ctggtagacctcattgcctttcttcgtagcacctttgctgtattcacacaccttcctcggagattctggagctggctggcaatgcagcgagagacaacaa

SEQ ID NO: 425961 - DNA, 100 bp, Homo sapiens
tctggactggcaggatattgtttcctttgttcacgagaacattgagacatttctttcgattccttcacttgtccctcaccaaggacgggacaaacagaac

SEQ ID NO: 425962 - DNA, 75 bp, Homo sapiens
cttgttatttcttctttgagaaaaacctgaaagatgtctcagttacactcctcttcctgggtccaattattcaga

SEQ ID NO: 425963 - DNA, 100 bp, Homo sapiens
ctggatgacttctcagacggggatgtctttggcccagagctggacaccctcctggactcgctgggtgaatttaaggtgtcagagagatacctcaccatgg

SEQ ID NO: 425964 - DNA, 75 bp, Homo sapiens
ggaggaataatatttatggagcatatattatggaacacagtatcgtcagatcctggaaaaagccattcagttatc

SEQ ID NO: 425965 - DNA, 96 bp, Homo sapiens
ggaactttgagcacggcttccgtgtgcatggaaagaactttcacctgatccaggccaacaagatccagctccaggtcccacaggggctcttcttcc

SEQ ID NO: 425966 - DNA, 100 bp, Homo sapiens
aaaatctacaagatgatgcagggaggagaatggatgatgaacttgttgttggacatagtgcaagatcagacatctccagcttcccttgtacatctggctt

SEQ ID NO: 425967 - DNA, 101 bp, Homo sapiens
gaggagaccaaaataaaactaacagtctatgatgtcaaggataagtctcatgacaccgtgcagttttgccaaggagtgctaaagaacttagatgtcagtgc

SEQ ID NO: 425968 - DNA, 100 bp, Homo sapiens
cctgtccatgtcagagcaccatgggtgtccctttgaaagtatctcctacagcaaagccttctagacaagctcagtggaatctgaagggcccaccccatgg

SEQ ID NO: 425969 - DNA, 100 bp, Homo sapiens
cgggatggcgacgtctacactgagtcggaggcgaagttacagaatgtctgaaggggacagtgtgggagaatccgtccatgggaaaccttcggtggtgtac

SEQ ID NO: 425970 - DNA, 101 bp, Homo sapiens
ggaggatcgcggagtcccaatgaaacgggcagccatggccctccacagcccgcaggatctttaatgacttgctactgtgggaaccaacagctccttcacca

SEQ ID NO: 425971 - DNA, 49 bp, Homo sapiens
ggcctcccaatgcattgggattacagatcctccccggcgtgaaggtcat

SEQ ID NO: 425972 - DNA, 83 bp, Homo sapiens
aggaacgaggcaaggagctaaagcagcgtgcgttcagccctggggattgtcagtggcttcgccccgaggagagctgactgccc

SEQ ID NO: 425973 - DNA, 100 bp, Homo sapiens
ggagacgagaagcctgaaaagtcgcagcgagctggagccgccggagaaactgccagaggcatgcagcattggtgatggaaagccctttgtcatgaatctg

SEQ ID NO: 425974 - DNA, 75 bp, Homo sapiens
cctggtactactgcttgctgtggcatttggacatgctttagagagaggacaaattggaccaattggtgagaaggg

SEQ ID NO: 425975 - DNA, 96 bp, Homo sapiens
ctggcttgggacgaaagtgtcaaggcattacggctcccattgagtactggtgcgataccagcgggaggatggcaaagtccacgccgtgaacctaca

SEQ ID NO: 425976 - DNA, 101 bp, Homo sapiens
ctcgctgttgctggtctctggctccctcctcccagggccaggcgccgctcagaacggaaacttggatttaactggccagaagcaggtattcaaagcagaga

SEQ ID NO: 425977 - DNA, 101 bp, Homo sapiens
gcattcatgaagcatctgaaaaagctgtggaaggctctggataaggaccagtacctgcccaggaaactggaatgaagccaagagtgatgaaagaagctgta

SEQ ID NO: 425978 - DNA, 83 bp, Homo sapiens
cttaagcaaacgggaattctcgcgacagaagtggcggttgctgacgcctggaaattcccctgaaggtggagcaccacccaacc

SEQ ID NO: 425979 - DNA, 96 bp, Homo sapiens
ctgctgagctacccgagcggcggcggcggcagcagcggcagcggcaagcaccctgactgcctgcatccacgggtctgcggcgatgctctaccccat

SEQ ID NO: 425980 - DNA, 100 bp, Homo sapiens
ctggaggacacacctaaacatgtggaatcccaatgccggaacagcaagctctaccaaagcaaggtctcctctgcttcctcagactgccgaccagtgctga

SEQ ID NO: 425981 - DNA, 90 bp, Homo sapiens
gcggccggggcctggggctgcctgccgggcggccgggcgcggcgagcccagctctaagcgaaagacatgaggcctcagcctgaaatgagg

SEQ ID NO: 425982 - DNA, 83 bp, Homo sapiens
cgctcgtcagtggcttcagttcacacgtggcgccagcggaggtgttggagagcacaatggctgaacaagtccttcctcaggct

SEQ ID NO: 425983 - DNA, 115 bp, Homo sapiens
aggcgctggagctgggtcagtccgccgctcaccccgcggccgcaccttcccgccttctcagggggggccctcagcctcttggccttgaacgggctgttcatcttgattcacaaac

SEQ ID NO: 425984 - DNA, 88 bp, Homo sapiens
caacattgaacatgccttcatcctctataacaagtatatcactaatctatgccagcaattatgacaatgttagcagaccatgcagctc

SEQ ID NO: 425985 - DNA, 99 bp, Homo sapiens
cgaaagccgccgcagcacaccgagaggccacggggagccccagagcacttctgcttccagaacctcggaggcgggcgggtcacagaaagtcgagagagc

SEQ ID NO: 425986 - DNA, 90 bp, Homo sapiens
ttggagcaaggagaagagccgtggtcagtggagcaggcatgtcctcaacgcacttgtccagaggcatgatcaaggacagggttgcctgcc

SEQ ID NO: 425987 - DNA, 75 bp, Homo sapiens
tttctcggcgaatgacagcacagctcattgctatggacagtgctatcaccctgtggcagttccttcttcagctcc

SEQ ID NO: 425988 - DNA, 80 bp, Homo sapiens
agacggtgctgctcttggccgaccagatgctctgcttatgataatgtcaacaaagttcgagtagctatcaagaaaatcag

SEQ ID NO: 425989 - DNA, 75 bp, Homo sapiens
tgaaggttgtgagtctctacagccatttgaactgcctatgaattttccaggcggtatatattgcacccctaaaag

SEQ ID NO: 425990 - DNA, 98 bp, Homo sapiens
actgggtgctcctgcccgctggcccctcgcgcgtgaggatctatctcagatgccttcaattaagttgcagagttctgatggagagatatttgaagttg

SEQ ID NO: 425991 - DNA, 83 bp, Homo sapiens
gcttgatgggatgccggcagtcagagtcaaaacagagcttttggaatctgaacaagggatccataaatggactaggacaaatc

SEQ ID NO: 425992 - DNA, 75 bp, Homo sapiens
aatctgttggattctaatgcagttcatcacatcattcatgattttcagagagcagcacttgaggcatgtcacaag

SEQ ID NO: 425993 - DNA, 90 bp, Homo sapiens
atatcatggaaatcagcagctggggtggcaaacctagtcccttttcaaagctggatcccaaggacttccaatagtagtcagacattatca

SEQ ID NO: 425994 - DNA, 82 bp, Homo sapiens
cccccgtaacctgcgcgctgccctagggcccggccgacccgcggcccgacaatgcagatcttcgtgaagactctgactggta

SEQ ID NO: 425995 - DNA, 76 bp, Homo sapiens
gttcaacgacttactggggagagaaagaaaaggaacgggagctgagagaccgagacaacacttggactcagttcat

SEQ ID NO: 425996 - DNA, 74 bp, Homo sapiens
aaagacttgtgaatccaggaagagagactgactgggcaacatgttattcagttgctagtgatatctcgctaaca

SEQ ID NO: 425997 - DNA, 100 bp, Homo sapiens
caggattccacagtgtcctctggaaaatgacctccttaactacgtgttttgctcaagaaacttttgggaaacagtacaaacaaactataggactggattt

SEQ ID NO: 425998 - DNA, 75 bp, Homo sapiens
atatcccaccattgccacgggcattctccatctccttgcagccaatggagatcttcgtggatgatgagacgaagt

SEQ ID NO: 425999 - DNA, 90 bp, Homo sapiens
cgtcttatgctgcatcggataaagtgggatgaacagacatctaacacaaagggagatggctcagcagggagctgctggatgagaaagggc

SEQ ID NO: 426000 - DNA, 104 bp, Homo sapiens
gcacaccttggccagcagtggggattgcaaagcgaactacatatggaggagtgtctggtcgattgagctatccacatccaggaactgacaatctgttgatgtta

SEQ ID NO: 426001 - DNA, 50 bp, Homo sapiens
ctccggcggcgccctggaggaggaggtgacagagctgaatgaacctctct

SEQ ID NO: 426002 - DNA, 75 bp, Homo sapiens
aggaccaggatgctgccttcttcaaggcctgctccgggaagttcatgcccatcatgcagtggctatactttgatg

SEQ ID NO: 426003 - DNA, 74 bp, Homo sapiens
ctttaccaaaaaggcctcgcacattcagttggacagctctgctgtagctgccactgagaagaaggcggtgactc

SEQ ID NO: 426004 - DNA, 83 bp, Homo sapiens
agaaataagaatggctgtagaggaacttcagtctataataaagagatgtgagtcgatagcagcagttggtgacgagatggcac

SEQ ID NO: 426005 - DNA, 100 bp, Homo sapiens
tgaagctgcagctaccagattaaaaggaatagtcccattagcaaagggcagccccgagaaccacaggtgtacaccctgcccccatcccgggatgagctga

SEQ ID NO: 426006 - DNA, 90 bp, Homo sapiens
gactgactggggttctgagactccctgtcccggaccgcagatccagcggaggccctgcagctcccaatggactatgtccagcgggtcaag

SEQ ID NO: 426007 - DNA, 96 bp, Homo sapiens
cacccatttcgaaagcgaaaatgacccaaattactaaggcagccatcaaagctattaagacacatcatctcagagttggagcacctgacgtttgtc

SEQ ID NO: 426008 - DNA, 82 bp, Homo sapiens
gccttgcttccttccactcgatctgcagatctccaggggagcccaccagcctagtcaacatggcctcggaagacattgccaa

SEQ ID NO: 426009 - DNA, 82 bp, Homo sapiens
gcagccgatccagcctgcggagcctgtggggcaggcctttgcccagtttgatgctgagggtgatgggacagttgatgccgag

SEQ ID NO: 426010 - DNA, 82 bp, Homo sapiens
ggtgcagtgtgtctggtcttatgagaataccgtagcagtaggcaggacagttccaattcaacaaaaacctctttaccctggc

SEQ ID NO: 426011 - DNA, 101 bp, Homo sapiens
ggagccgcgccccaccccgccagctccagagccactagccatcctaatggatatgggttggttcctgttttctatttggaactttaaaaaaaattaaagca

SEQ ID NO: 426012 - DNA, 100 bp, Homo sapiens
gggcgatgccttccatcagtcggatacacacatattcatcatcatgggtgcatcggttccagcaacagatagaaatgctttaagttcactctggggaaag

SEQ ID NO: 426013 - DNA, 75 bp, Homo sapiens
cgcctagccctaccggactacgagtatctggcttatgtccctgatgccaaaaatgcacctactctttcctctaac

SEQ ID NO: 426014 - DNA, 98 bp, Homo sapiens
aagatcttagtcgggactagccggccaaggatgaagcctcacttcagaggaacttcctgaagtgctccgaagacaacccgctctttgccggcatcgac

SEQ ID NO: 426015 - DNA, 82 bp, Homo sapiens
gtgttcgctaagatgaagggctaccctcactggcctgccaggccgcggcgagtcctttgcacatgttggcaacacacgcatc

SEQ ID NO: 426016 - DNA, 100 bp, Homo sapiens
gtgagctgggcggagctattgattttggtgccgcatatgtgttggagcagccgattcgaagacagtctcttacacctcctcctcagaacactattacatg

SEQ ID NO: 426017 - DNA, 75 bp, Homo sapiens
ccgaagaagactcccccacatctgggtaatctgtaagtcagatgctccaacaggggatgttcttcttgatgaagc

SEQ ID NO: 426018 - DNA, 100 bp, Homo sapiens
aggcactgggactcggatttctctatctgatagagcatttatataactctgcagccttcaaagctcgaaccaaagctagaagcaaatgtcgagataagag

SEQ ID NO: 426019 - DNA, 51 bp, Homo sapiens
agcctcccgagtggctgggattacagggtgaagagggaacagaaatctttg

SEQ ID NO: 426020 - DNA, 83 bp, Homo sapiens
gctccgtgtttgcatcggtggacaaggtgccagatattaataaggcagcggaaagaagaaatatgaatacggctccatcaaga

SEQ ID NO: 426021 - DNA, 125 bp, Homo sapiens
attgctatgggatttcctgcagaaagacttgaaggcgtatacaggaacaatattgatgatgtagtaagaaaatgacagatggcgagacctggacaggaaatgccctcttcagattgaccaaccga

SEQ ID NO: 426022 - DNA, 101 bp, Homo sapiens
ctaggcggagacagtgcagggaagagagaccttagaaaggatcaggactggcggctcagagtcaagatctccactgaagttggcatcacaaatgttgatct

SEQ ID NO: 426023 - DNA, 98 bp, Homo sapiens
tccagaccttctgctaccagaaaaccttctccaccagaatccagctcacgctgtggcttacagaagagacgaaatgtggtctgagggacgatatgaat

SEQ ID NO: 426024 - DNA, 110 bp, Homo sapiens
cagattcgtggttgagctgcagcagagggagcttgccttgaaggacaagaacagcgccgtcaccagcaggaagctcttcgtgggcggtcttgactggagcacgacccaag

SEQ ID NO: 426025 - DNA, 74 bp, Homo sapiens
gccacccatgaggttttccagcagcagctaccgctcttcttggagagatgttttgagagattacagaagaggag

SEQ ID NO: 426026 - DNA, 75 bp, Homo sapiens
ctcctgtgtggcgatggtcttcctgctggggctcatgtttgaggaactgtggctgcaccatctgtcttcatcttc

SEQ ID NO: 426027 - DNA, 108 bp, Homo sapiens
tgccactccaagaaaagatggtcccaaacgttctgtactgtccaagtcagttcctgggtacaagcacttttctgtagaaggtcagttggaattcagggcattgctatt

SEQ ID NO: 426028 - DNA, 90 bp, Homo sapiens
catctggaggaggcgttgccgtgagggctcttatcacgcgatggcatccactgtggaaggaggcgacacagctctgctcccagaattccc

SEQ ID NO: 426029 - DNA, 100 bp, Homo sapiens
ctgggaaaggtggaaaccagctgcgctgtcctaaatgtggcgacttgtgcacacatgtagagacctttgtatggttttcagagaaagatgctgatgaggt

SEQ ID NO: 426030 - DNA, 75 bp, Homo sapiens
gttcgtcaggaacgtggccgacgacaccagatgaagggcgccctaatggagatcatccagctcgccagcctcgac

SEQ ID NO: 426031 - DNA, 82 bp, Homo sapiens
ctccgccgcccgcaccgccgcccgcgccctcaccagatgcctgctctgtgcctgtatctgagatcatcgccgttgaggaaac

SEQ ID NO: 426032 - DNA, 101 bp, Homo sapiens
acaatttatcattgaataagtgttttaagaaagtggacaaagagaggagtcagtaagactttgaccccgacgcaggcttcagtgattgccgcggatcagaa

SEQ ID NO: 426033 - DNA, 74 bp, Homo sapiens
tcagaacagttggatcttgctcagtctctgtcagaggaagatcccttggtgcatggaggactgcaacagaggag

SEQ ID NO: 426034 - DNA, 100 bp, Homo sapiens
ttctggcttcagtctggaagatccccagacacatgctaacaggatctacaggatgatcaaacttggtctgggaagcgaaatgtggtgattttaaagctgt

SEQ ID NO: 426035 - DNA, 82 bp, Homo sapiens
ggtgttcgagaacgaccccgagacgaaaacctcggatcaattctcagctggtggcacaacaagtggcacaacagtatgccac

SEQ ID NO: 426036 - DNA, 101 bp, Homo sapiens
agatgatgcggtggtgggggacctgccggcacgcgactccccccgggcccaaagagcccagcagccggggccgccctattacaccgacccaggaggaccgg

SEQ ID NO: 426037 - DNA, 74 bp, Homo sapiens
cctgcctcagcctcccgagaagctgggattacaggtaccttgccgaatggatggtacatggttatccctcagaa

SEQ ID NO: 426038 - DNA, 75 bp, Homo sapiens
ctggggcagtatcaacggagtctccgggttcccagtgacctgacagcagaggagcgtcaagaactggagaacatc

SEQ ID NO: 426039 - DNA, 82 bp, Homo sapiens
caacagcccagtgcttctgtctcgactgcactttgagaaggcctcaggagtgcaagtagctgatgaagtatgtcgcattttt

SEQ ID NO: 426040 - DNA, 99 bp, Homo sapiens
tgctgatagtctccagcgggcctggactgtgggctggtgtgtggaactggcgttggagaccagggccagccctggccacaccccaggctgtgtcacctt

SEQ ID NO: 426041 - DNA, 75 bp, Homo sapiens
ataaaggaaagacctcagagtgttctcattggggaatggcggtcaatgtgtattctacctcgataacccaagaga

SEQ ID NO: 426042 - DNA, 100 bp, Homo sapiens
gggtggcccagcccgcctctgctcctgggtccagggcttctgttcaggaaaggtgtctgtgaggagacgtctggagcttatgagaaaacagatactgatg

SEQ ID NO: 426043 - DNA, 95 bp, Homo sapiens
ttctgttgtgacagacacttcacatactgctgatgtgtttgatgggcatttgctgggatccacagacagccaagtgaaggaaaagtcaaccatga

SEQ ID NO: 426044 - DNA, 75 bp, Homo sapiens
gctagtgggccggcgtggacccctgcaagtggccttcaccattaagggcatctacagctgcttcagcggggtgca

SEQ ID NO: 426045 - DNA, 82 bp, Homo sapiens
gcggcgggggactgcggggccagcctcagatgagaacacagacattgctgaaaacctctatcagaaagttagaattctttgc

SEQ ID NO: 426046 - DNA, 50 bp, Homo sapiens
ttcgcagtggtcgcttcttctccttgctttttagttggagaaggagccta

SEQ ID NO: 426047 - DNA, 93 bp, Homo sapiens
tccatcaggaccccagatgtctgacagccctgtgtgacaccaagataagtaactgacattctgaaagttcccaaacctgaacctataccagag

SEQ ID NO: 426048 - DNA, 100 bp, Homo sapiens
gcaagattaacgatgaggacaaacagaagattctggacaagtgtaatgaaattatcaactggcttgataagaatcaggtcctggtccgcgccagagccca

SEQ ID NO: 426049 - DNA, 130 bp, Homo sapiens
tcaggctgtattcctgaaaatcatggtgaggacatgaggaaaatgtccttccagcgctgcgcccggacagacaagggagcatttcctgaagacgtagtcatgcagcacgtcagcagctcccagagcagcc

SEQ ID NO: 426050 - DNA, 74 bp, Homo sapiens
gcccaggctgcacatcaggggactgcctcgggagaaaacatggagatatgaatgactgtgtggagcagaaccca

SEQ ID NO: 426051 - DNA, 100 bp, Homo sapiens
ctgggcgtcctgactggacctgcattgtggtgggttttacttcaggttatgtacgcttctacactgagcattggattcaaaggctaacaatttgtccagt

SEQ ID NO: 426052 - DNA, 82 bp, Homo sapiens
gctggccgggctggctgcggccgccctgggccgggccccaccggacggggcaacaccctccactaaagagtcaagccagccg

SEQ ID NO: 426053 - DNA, 97 bp, Homo sapiens
aaacaccatggctgcggcggcccagctctctctgacacagcatgattccacctttccactgatagactcaagttcccagaaccagattagaaaacgc

SEQ ID NO: 426054 - DNA, 75 bp, Homo sapiens
gttacaataagtaacattaagagcccagctgccagcctggccaacatggtgttcaggcgcttcgtggaggttggc

SEQ ID NO: 426055 - DNA, 98 bp, Homo sapiens
attttgataactcaagtttaggcctttgtccaggcacggaatgatttcctgaagagacaaaagacgggaagattcgcaactgcagaagaaatagccat

SEQ ID NO: 426056 - DNA, 100 bp, Homo sapiens
cagacccgtagctaagacgccaggatttcctggaagcagagaaatgactctcagcgttctcatctctcttccttcaccatgaagctgatggacaaattcc

SEQ ID NO: 426057 - DNA, 100 bp, Homo sapiens
caggaccagctgggagccgctgtggtcgccctcaacagcgtctgaccaaacacaccaagttcgtgcgggacatgattcgggaggtgtgtggctttgcccc

SEQ ID NO: 426058 - DNA, 94 bp, Homo sapiens
tggattccagatttgtattcgatagaccactgcctgtgtctcgtcttgtatctctaattggaagcataatagctcttcaagtctgcaataaaaa

SEQ ID NO: 426059 - DNA, 75 bp, Homo sapiens
agcatttgtgcattcagatgctgctaaacaaagtaccaagtatggtgtccttggaagagacaaagttgtatactg

SEQ ID NO: 426060 - DNA, 82 bp, Homo sapiens
gccatgtcgggttattcgagtgaccgagaccgcggccgggaccgagggcgtcacaatgtagcagggaccccaggcgtcgtgc

SEQ ID NO: 426061 - DNA, 83 bp, Homo sapiens
tatcagcaggctccgggctgaagattgcttctcttctctcctccaagacctgcctagagctggaacgttacctccagagcgag

SEQ ID NO: 426062 - DNA, 100 bp, Homo sapiens
gccatgttggcccagcaaatgcaactagccaatgccatgatgcctggtgccccattacaacccgtgggcaagaatatcacggcatgggcatgagtagctt

SEQ ID NO: 426063 - DNA, 82 bp, Homo sapiens
ggccagtatgaagtggtgaaggagtgtgtgcagcgggactggttcttgaagggaaacctcctcatcatcatcgtcagtgtgt

SEQ ID NO: 426064 - DNA, 76 bp, Homo sapiens
ccagctcaagcagttcaccaccgtggtggccgacacgggcgacttccacgaagcgtaaaagatgtgttgttttcaa

SEQ ID NO: 426065 - DNA, 100 bp, Homo sapiens
tggagaagagcaaggcgaccccggccgcccgcgccagcaagaggatcgtcctgccggagcccaggagctccaaatggaccagcaggcaaagaaacatctg

SEQ ID NO: 426066 - DNA, 111 bp, Homo sapiens
aggctcggagaaacaggcgccgcgggctccgcgcccggccggacccgggcccgagctgtgagccgtgagctttgaggcggtgggatgtgtcagcagaatgtctcctgcccc

SEQ ID NO: 426067 - DNA, 76 bp, Homo sapiens
cagccaaagtaaatccatgatcctcaccgatgtcgggaaggtcactgaacctggagcatgataaagatccagaaag

SEQ ID NO: 426068 - DNA, 100 bp, Homo sapiens
tgcaaatcatttttatctgcaaggggttatctggctgtaacccttacataagcaaggtcctgctcaatctggaattttgtcagatcgtgaagtggtaaac

SEQ ID NO: 426069 - DNA, 98 bp, Homo sapiens
cttttttgacaaagcactactggctattggaaatgtatatgactgatgggatgttacttcgtgaagctatgaatgatcccctcctggagcgttatggt

SEQ ID NO: 426070 - DNA, 76 bp, Homo sapiens
gaaaatgatgcttaatatcgatggtgatgagctatatttagaagattcagactttttggaaaatcttatgtctact

SEQ ID NO: 426071 - DNA, 100 bp, Homo sapiens
taaagaagatgaagaagtcttcaggggagattgtctactgtgggcagatgacacctttgaggccctgtgcatcgagccgttttccagcccgccagagctg

SEQ ID NO: 426072 - DNA, 83 bp, Homo sapiens
gtccttgctggtgcatgcgtcgtcggcctctgggcagcaggtattaatctctggagaagacacatccacagttagcactttct

SEQ ID NO: 426073 - DNA, 83 bp, Homo sapiens
agtaaatcaccagatgatgctgtgttccaacaaatagcactttcttattccaagccagagagatgacacgggggaaattcctc

SEQ ID NO: 426074 - DNA, 97 bp, Homo sapiens
ccactttgcattgactggaaacaatggcatttacagaaagagtcaacagcagtggcaacagcaattgtctggtttgtggtaccacaatcgaacccac

SEQ ID NO: 426075 - DNA, 100 bp, Homo sapiens
gcgaaggagctgcagcatccagaatgagctgaaagccagtggtggcgaaatcaaaattcataaaatggagcaaaaggagaatgtgcccccaggtcctgag

SEQ ID NO: 426076 - DNA, 101 bp, Homo sapiens
cgggcgctggctccgtctgccagggaagaaccggacccggcgaacctggaagtggaccatgatttcttccaggacaaggtgtggccccatttggccctgag

SEQ ID NO: 426077 - DNA, 74 bp, Homo sapiens
gatgcagatgtgctgcctgctgagcgtgatgacttcatcctgggggtggaggcaatgcccagagctgtggcagc

SEQ ID NO: 426078 - DNA, 96 bp, Homo sapiens
ctgacaattctgtcgtgtcccggtccgactgcagacacagccaccgagtttgcctggacaacctcccatgtactctgggacctttgactgtttccg

SEQ ID NO: 426079 - DNA, 50 bp, Homo sapiens
ctctttacaagacgcacccacagtctcaagtattcccatgtgttttaaaa

SEQ ID NO: 426080 - DNA, 101 bp, Homo sapiens
ggaaattcccagaggactttggagaccagatcatatactcctatgaaaggaggaatctccaatgtatggtttgacagatttaaaataaccaatgactgccc

SEQ ID NO: 426081 - DNA, 75 bp, Homo sapiens
cctgctgcagatggggcaggtgtggagttggttaccacagagaagcgcttcctcaaagacagtttgtacaatgaa

SEQ ID NO: 426082 - DNA, 51 bp, Homo sapiens
gagaagatgaaagtcctggaggagaagagagaagggcacagttacctaagt

SEQ ID NO: 426083 - DNA, 77 bp, Homo sapiens
gagaccccttctcccaggaggggagggagtgcatccgccccaacccttttccccctcgtctcctgtgagaattcccc

SEQ ID NO: 426084 - DNA, 83 bp, Homo sapiens
catggaaagcgaccccggggtcttcaccgagctcattaaaggattcgaggctgggaggcggcagaatgcagccagaggagggc

SEQ ID NO: 426085 - DNA, 82 bp, Homo sapiens
gcggcagcaccgggagtcagcagagtgaagcaagagtgagccatggagctacgtgtggggaacaagtaccgcctgggacgga

SEQ ID NO: 426086 - DNA, 100 bp, Homo sapiens
gctaggtggcatctcctctcacggatgcctcgttacagaatgtctgaaggggacagtgtgggagaatccgtccatgggaaaccttcggtggtgtacagat

SEQ ID NO: 426087 - DNA, 83 bp, Homo sapiens
attgtttctctccctctgcccccccttccccacgcaaccccagatccatttacactttacagctgatcagctgaccgaagaac

SEQ ID NO: 426088 - DNA, 75 bp, Homo sapiens
cttattgtggcattgcgccgtacattcgagagtttgagtttgtgtttaaggagaaactaacaatgaaaacggcct

SEQ ID NO: 426089 - DNA, 132 bp, Homo sapiens
agaatttgtaaaagttctgtgcaccaaccaggttctcattactgccagggctgtgcctacaaaaaaggtttgatctgtggatgaaatgaatcatgattttcaagctcttgcattagaatctcggggaatggg

SEQ ID NO: 426090 - DNA, 83 bp, Homo sapiens
caaggatgagattttgccagagaaaggacgagcagcaagtcagggagcttaagctggagaagcgactggaggagtggttgggg

SEQ ID NO: 426091 - DNA, 75 bp, Homo sapiens
atccagtcggttcgtggagaggagaggaattgaatgatctggcacgggaccctccagcacagtgttcagcaggtc

SEQ ID NO: 426092 - DNA, 87 bp, Homo sapiens
ggccgcggagacctacctgcggcgtcggcagctgctgctccgagatggcccactgcgtgaccttggttcagctgtccatttcctgtg

SEQ ID NO: 426093 - DNA, 75 bp, Homo sapiens
gaacctggagggcctcaatgatggcggcgacttccctagggagctgctcaaggttcgtgctggccgtgggcagcg

SEQ ID NO: 426094 - DNA, 98 bp, Homo sapiens
catggatatcctccataatgttggctgtcatgtatggtggaggaggtactccaagaagtctgtctgccattgatagggctggagcagaggtgaagagt

SEQ ID NO: 426095 - DNA, 75 bp, Homo sapiens
tcgacccgtacttgaagccctacgccgtggacttccagcgcagaattcagaagatcccgcggttgttggtgggtg

SEQ ID NO: 426096 - DNA, 100 bp, Homo sapiens
aggaggtcgagctgccgccggggcgatgctggaggagctggagtgcggggcgcccggcgccaggggagccgccacagggggagtcggtgaagtacttcct

SEQ ID NO: 426097 - DNA, 83 bp, Homo sapiens
ccgaagaagactcccccacatctggcaaaagctggcaggctgacagaggcggcctcaggacggaccttctggctactgaccgt

SEQ ID NO: 426098 - DNA, 100 bp, Homo sapiens
gggcgcacgtgtgaggaatgcaacttcaaggtcaagatggtggacgagcttaagagagggtttggtaaaggctccagtgtggtggcctatgaaggacaat

SEQ ID NO: 426099 - DNA, 74 bp, Homo sapiens
cgaggccctcatgtaccacacgcttacgaggaaatatttcagtaaaagcagttaaaaaagaagtagaaaagaaa

SEQ ID NO: 426100 - DNA, 98 bp, Homo sapiens
ccttacacagccactccgattgaccacgattacgtcaaatgtaaaaaaccccaccagcaggcaacgccggacggtccacattggccaactgtattcaa

SEQ ID NO: 426101 - DNA, 100 bp, Homo sapiens
agtacgagcgagcccgcgtgctgggcacccgagcgctccagattgcggtgctacagttcgtaatgaaatggactctgtcatcattagccggatagtaaaa

SEQ ID NO: 426102 - DNA, 73 bp, Homo sapiens
acggacggaagaaaaggtctggccggtaaagtcagtgataaatcttttgtttgctgcatatactggagatgtg

SEQ ID NO: 426103 - DNA, 96 bp, Homo sapiens
ccgaggagctgaaggccttcagagtccttggggtgattgacaaggcactttgtgagtgtgccctccagactccttatgacagcttaaaactaggga

SEQ ID NO: 426104 - DNA, 100 bp, Homo sapiens
caaatcttgcggcaacgcccccgggacatgcatcgtcccctggactctctcaacgcctgaattctgctattatctatgaccgagatttctcttacaatta

SEQ ID NO: 426105 - DNA, 100 bp, Homo sapiens
actctgaatgcagttgcttcagtacccataatgtattcttggtctcccctacagcagaattttatggaaaatgtttcaacgtgcgcaagagttgcggtgg

SEQ ID NO: 426106 - DNA, 100 bp, Homo sapiens
aacaattcagattgctgtcatctgtgtggtggtcctctgcatcacaaggtgtttgtggccagtcctcacaaaacacagcctattgtggagatcctgttaa

SEQ ID NO: 426107 - DNA, 75 bp, Homo sapiens
ccgacctcgacgtcttgcctgtgtcccacttgttcgcggcctatagagcatgaataatctttcatttagtgagct

SEQ ID NO: 426108 - DNA, 51 bp, Homo sapiens
aggaagcaaacaccattgctaagggaaattggattccaagatccatcaagg

SEQ ID NO: 426109 - DNA, 75 bp, Homo sapiens
gttccgtggcctcgcccaggccgacggacactggaagaattgtcttaccaagctcttgccctgttttctggagca

SEQ ID NO: 426110 - DNA, 108 bp, Homo sapiens
ggtccagggcagaggaccaacatgggcattttgtttatgagcaaggtgggacgagctatggccattgcagccctggacatggcggaatgtaatccgtggccccgaatt

SEQ ID NO: 426111 - DNA, 50 bp, Homo sapiens
aggatattcctcatatatcatgtaaaactgccattcaatgcacaacggat

SEQ ID NO: 426112 - DNA, 87 bp, Homo sapiens
aaatatgaataacgacccatacatgtcaaatggatctctttctccacccatcccgagaacaggcccactggaaaatgacttggtagt

SEQ ID NO: 426113 - DNA, 101 bp, Homo sapiens
gggtatctgaaaaatggatcagccattaacaggccagatatcacagacacggaaatggaaactgttatggacactatagttgacagcctcttctgcttttt

SEQ ID NO: 426114 - DNA, 51 bp, Homo sapiens
gcccgtgagcctgttgtcggggccagggtcacggagactcaccagttggca

SEQ ID NO: 426115 - DNA, 82 bp, Homo sapiens
cgacctctcggacacggtgcaggcaggtttggtgcacctcgatttggaggaagtagggcagggcccttatctggaaagaagt

SEQ ID NO: 426116 - DNA, 50 bp, Homo sapiens
tgccgagcagcgcttctccatggaggctattactcgtggaggagcccagg

SEQ ID NO: 426117 - DNA, 75 bp, Homo sapiens
caacagctctgccggctggaaggtcgcaatggaagaagagatcgccgcgctggtcattgacaatggctccggcat

SEQ ID NO: 426118 - DNA, 96 bp, Homo sapiens
gatgaccagccccgcggccgctcaaagccgggagatcgactgtttgagcccggaagcgcagaagctgggtaaaggcagcagtaatgctaacgctag

SEQ ID NO: 426119 - DNA, 82 bp, Homo sapiens
taggaggcctggttacagtgttgtgcttctttttcaatcatggagaggtgctggaaacatgcatgaagagctgcggcaagcg

SEQ ID NO: 426120 - DNA, 74 bp, Homo sapiens
cggaggagagcgacatggacaaagccatcaaggcagactcagtgggatcctcctacttgggaaagcccaggaga

SEQ ID NO: 426121 - DNA, 74 bp, Homo sapiens
ggacaaactcagacatcgtggagagcagcccgacggccatggaggctgaagagacgatggaatgccttcaggag

SEQ ID NO: 426122 - DNA, 74 bp, Homo sapiens
ttttgatgatgaccttgaagatgatgcccttgatgctgatgagaaaggctcgtgaagaagaaatgactgcaaaa

SEQ ID NO: 426123 - DNA, 50 bp, Homo sapiens
cgtgaaggaccgcgctgcggtgcggagaggctgggaggcggcagaatgca

SEQ ID NO: 426124 - DNA, 74 bp, Homo sapiens
tgtattgatggttttgcactatttacaaactttctgatatgatctccatcagtgagaagcctttggcagaacag

SEQ ID NO: 426125 - DNA, 75 bp, Homo sapiens
agcaccgcacgccctgcaagggagaacaactctgctcatggtgattacatgcaaaataacgagagcagcttaata

SEQ ID NO: 426126 - DNA, 89 bp, Homo sapiens
gacaccgagaaaccatgagtgtaaggttaccccagagtatagacagtggacagaggactgcagaaaatcaacctatcctccttcaggac

SEQ ID NO: 426127 - DNA, 75 bp, Homo sapiens
cagacgtcaacgtcaaggacttcgcaggcgtccgagctgggccacagcctgaacgagaacgtcctcaagcctgcg

SEQ ID NO: 426128 - DNA, 100 bp, Homo sapiens
aaagatgatgatatccttctcaaccttgtgggatgtgaaaactctgttactgaagcaaatgatgtgcttgcttttggaacattggtcagtacttccaata

SEQ ID NO: 426129 - DNA, 96 bp, Homo sapiens
gtggatgggagtgaaggacggaagaggccctgcggaggcggcggtgcagcgctccggttgcacactgggccacagaggatccagcaaggatgaaga

SEQ ID NO: 426130 - DNA, 95 bp, Homo sapiens
ctcctcgccagcagccgtccggagccagccaacgagcgttggttgaatctggcgatgtggaacccatggatatggagggctgactatatacacca

SEQ ID NO: 426131 - DNA, 88 bp, Homo sapiens
agctggaccggcaaattaaagcaattatgaaagaagtcattccttttttgaaggtgtcagcagttgagtctttggagggccccctgct

SEQ ID NO: 426132 - DNA, 75 bp, Homo sapiens
agaagccaagcacgctgacgaggttctgtgagagcatggcggcgactggcggcgcgatggacctgaccgggctcc

SEQ ID NO: 426133 - DNA, 83 bp, Homo sapiens
tccgcttcctgcgtatcatccccagcatgaaggtgagaagccctaccactgcaactgggacggctgcggctggaagtttgcgc

SEQ ID NO: 426134 - DNA, 82 bp, Homo sapiens
agctaacctcggggaccgagatgcaggtctctgagcggcccctgatgttcctgttggacactcctggcgtgctggctcctcg

SEQ ID NO: 426135 - DNA, 83 bp, Homo sapiens
acatcatgcgcctccgggagaataaagcccaatctgcaggtgttgcgagcccgattctctgagatcacaccccatgccgtcag

SEQ ID NO: 426136 - DNA, 100 bp, Homo sapiens
actggagtgaagaagcaagtgggatcacctatgaagataatattgatgaatgttcagaacaaccctcagtgtgtgggagccacacaatctgcaataatca

SEQ ID NO: 426137 - DNA, 50 bp, Homo sapiens
tgttggtctcggccctgcggaagagggtatattacctctctctggaattt

SEQ ID NO: 426138 - DNA, 72 bp, Homo sapiens
ctgggcgctgccgctgctgctgctgctgctgcgcctgggccaggcgcagctcgtgtatactaccaatatcca

SEQ ID NO: 426139 - DNA, 92 bp, Homo sapiens
ttcccagccatggcagattcctccgggcagcagggtgacgcggcgcacggcgcggatggtggccgagtggcagtgtgtgggcttctgccacg

SEQ ID NO: 426140 - DNA, 100 bp, Homo sapiens
ttcagactttccgcagagaccatgatcgtttctgggtcctagctgctcaccctaaccttaacctctttgcagcagccggcattttgcacagaggccgtgt

SEQ ID NO: 426141 - DNA, 90 bp, Homo sapiens
gctgcccagtgactccgtgctgcacggaagaatatcagctccaggtgctggagaatctggtaaaagcaccattgtgaagcagatgaggat

SEQ ID NO: 426142 - DNA, 100 bp, Homo sapiens
aaaaaaccttcgactatgcagagacatgagatggtagccaacccctcagaccgagacatgggtgcccggcaccgcgcccgagcccactccattcagatca

SEQ ID NO: 426143 - DNA, 101 bp, Homo sapiens
gaagacagcgccccagcatttgccatcttcaagtttgttcaggtctatgttaacaatgaatgggcaaccagtgttggggaaggagggagctttggagaact

SEQ ID NO: 426144 - DNA, 82 bp, Homo sapiens
ggctgccgtccccgctgctgtgcattggcacacgtcacatggagatgggcgtcaagaagttacctctcgtaccagccgctca

SEQ ID NO: 426145 - DNA, 90 bp, Homo sapiens
ccgtgcctgacgaaatatcacaatatttggcagaatccagagaccacatttgaagtatatgttgaagtggcctatcccaggacaggtggc

SEQ ID NO: 426146 - DNA, 83 bp, Homo sapiens
cctgcctcccctgcgtcccgccaccggccgcttctgtcctcggcagttgtgaaaaacttcaggacaaaaatgtttcatttaag

SEQ ID NO: 426147 - DNA, 97 bp, Homo sapiens
ttttgcctttgttgattaactggacaaattcagtgttctaagaacggaagcatctgggctggatggaatttagcatcaagcagagtcccctttctgt

SEQ ID NO: 426148 - DNA, 98 bp, Homo sapiens
gttctttgtttccccggtgtctgttgcagcttgcgtttggggctttcgacatgacaggtcactagaggaaacacatatcatgcataccttcaaagagg

SEQ ID NO: 426149 - DNA, 78 bp, Homo sapiens
ccggctccggaggcttggtgactccagtggcccaggaacactttggtcttagtaacctgactggaatgaactgcctgg

SEQ ID NO: 426150 - DNA, 100 bp, Homo sapiens
ccttattggtgtggacgttgtctaaatttcggtagccatggcacaagaatatagcccagtgacgagcaccatccggaagtgaaggctgatgggtacgtgg

SEQ ID NO: 426151 - DNA, 100 bp, Homo sapiens
gttttctgactctcatgcagaagtaatttctgggaaacaagaagatcaaggatctggattttgcataactggtaaaatagaagctggttatatccaaact

SEQ ID NO: 426152 - DNA, 100 bp, Homo sapiens
gcaaatgcatctgtccaccttatagaaacatcagtgggcacatttacaaccagaatgtatcccagaaggactgatatcgtggccacggtggagaatgaag

SEQ ID NO: 426153 - DNA, 71 bp, Homo sapiens
ctgctgctcgttcgagtcgcagggcatccgcttcgatcctgaaattccgcaaacactacgactagagtttg

SEQ ID NO: 426154 - DNA, 74 bp, Homo sapiens
gaatatttaatggaaaatcgcttggttaaaacctgacacttttaacaggtgtctgacttccagcaactgctggc

SEQ ID NO: 426155 - DNA, 99 bp, Homo sapiens
ctggagcaggagagctgtctggatggctgggagttcagtcaggacgtctacctgtccaccattgtgaccgagatacatgttataaagccagttttacca

SEQ ID NO: 426156 - DNA, 100 bp, Homo sapiens
taagggatcactactcaagcataaggtactagcaaaggccagacgtcttactcaacaacttccctgccaccacctccaccatcccatccggccagccaac

SEQ ID NO: 426157 - DNA, 75 bp, Homo sapiens
gcggcgcagcggcggcagcggagagcgagagaggggagcagatacactctgtgcagttttagagagagacacact

SEQ ID NO: 426158 - DNA, 82 bp, Homo sapiens
tgggggtggcacagcccaccggggcacagccagagcagcacccagcaaacggggattcagcgtccgatcctttggaacaggg

SEQ ID NO: 426159 - DNA, 51 bp, Homo sapiens
agcagcttcggaaaggagccaatgaggatgccatggacaatattaccaggc

SEQ ID NO: 426160 - DNA, 50 bp, Homo sapiens
tggatagcctgaaggcagccattcagagcttctttgaagggcagtctgca

SEQ ID NO: 426161 - DNA, 100 bp, Homo sapiens
caggatcgtccccacccagcctggacacattgactgaactgttttctaggacactgcctcttggggcctgcggtgcatgcagtgtaagaccaacggggat

SEQ ID NO: 426162 - DNA, 51 bp, Homo sapiens
ctcctagggcagcgcctagagcacagcaagaaaggcagagaattgtgcagc

SEQ ID NO: 426163 - DNA, 100 bp, Homo sapiens
ctttggtggcataggtgtcgtcgtgggccatgagctgactcatgcttttgatgatcaagtgtacacgctgtggtcctatcctgatcttctgccaaccttt

SEQ ID NO: 426164 - DNA, 75 bp, Homo sapiens
cggagcgccagctcaatgaaagaccgtcaatgtgcccgcgtgctggccgacgagaggtctccccagccaggggct

SEQ ID NO: 426165 - DNA, 75 bp, Homo sapiens
cagaaattgaaaggcttcaaagctagcagagcatttgccaagcggcagcagcagcttaccgccatgaaggtcctc

SEQ ID NO: 426166 - DNA, 100 bp, Homo sapiens
cagaaaagaaaatccccgttgtttttcgattgcaagagctgagatctgtatctgtggacctgaatgttgatccctcgcttcagattgacatacctgatgc

SEQ ID NO: 426167 - DNA, 83 bp, Homo sapiens
gaagaagtggtccacctcacagaggaatgatgatgtgcctgcagatatggttgcagaagaatcaggtcctggtgcacaaaata

SEQ ID NO: 426168 - DNA, 100 bp, Homo sapiens
cctgcacacctggatccaggataacggaggctggagggatctttcagggcacaagaatattgtgggttacattgattctagtatcaacaacgtgagtagc

SEQ ID NO: 426169 - DNA, 116 bp, Homo sapiens
tttttgcttgcagcgtccatgaagcagtgtttgaggcacgagagcagaaggatcgagatgaccacagccacccctctgggggataccaccttcttctcactgaacatgaccaccag

SEQ ID NO: 426170 - DNA, 82 bp, Homo sapiens
gggcgaggagcgcagaggagtcagaggagcgagctggacgccactgtggggctctgagagtcctgaattcttactgggttgg

SEQ ID NO: 426171 - DNA, 100 bp, Homo sapiens
cataatcacagaagaaatgccactgttggaggccgaatacatcaagcaatggtaacatctttaaatgaagataatgaaagtgtaactgttgaatggatag

SEQ ID NO: 426172 - DNA, 100 bp, Homo sapiens
gtaccccaagctgtacttgtcacctcgaattgagcatcttacttctcgtttgccaaaaactggagaaaccatccatggacataagttttttattggcttt

SEQ ID NO: 426173 - DNA, 98 bp, Homo sapiens
ctgccccaacacagatccatttctggttaattaccatgctcagcattaccatctcactccatttacagtcatcaatattatgtacagtttcaacaaaa

SEQ ID NO: 426174 - DNA, 51 bp, Homo sapiens
atctggaaatgaggcttcctgaatgcagtgcgtcataatcttagtcttcac

SEQ ID NO: 426175 - DNA, 76 bp, Homo sapiens
ccctggctgcgtgcacagcgccttgttccagcagggcctgatccagctccttcgagaactcatagaacggaagacc

SEQ ID NO: 426176 - DNA, 76 bp, Homo sapiens
gtgacaattgtggcattacagtccatgaagatacattccaccgttgatctgggggaaaagtggacacatccagaca

SEQ ID NO: 426177 - DNA, 100 bp, Homo sapiens
gggcttggagttcgcctcagacgcggtggagccgccggagtctgagaaggccaccccagtccaccccctgaaaaaaaggagctgaggaaagtggcccatt

SEQ ID NO: 426178 - DNA, 90 bp, Homo sapiens
cgctgcctacggaggtggcagccatctccttctcggtatcctgtggtctgaggccatcttcctcgaggcaaggccccagaggaggaccaa

SEQ ID NO: 426179 - DNA, 83 bp, Homo sapiens
cctccccaggtgatgcctgaagctcaagggactgtgtccaccctcagatggcggctgcagaggctgtgcatcacatacacctg

SEQ ID NO: 426180 - DNA, 90 bp, Homo sapiens
caactattcaacatggaggcggaggtcgataagctggaactgatgattcatgatgttgctatcaaaagttgagaaattgtcagaagaaat

SEQ ID NO: 426181 - DNA, 87 bp, Homo sapiens
gcgtcaatcagagcgtcctgtgcggatgataatgaagataattcaaatgatgggacccagccatccaaaaggaggcgaatgggctca

SEQ ID NO: 426182 - DNA, 82 bp, Homo sapiens
aacagatgtcagcaatgtcgcttcaaaaagtgtctgtctgttggaatgtcaagagatggggtattccctcagcggatactac

SEQ ID NO: 426183 - DNA, 90 bp, Homo sapiens
acaaggtgatctggggaaccaaagactctgggactcttggtgccaacagagttactctggtacttttgacttcagtgacattgctgtcta

SEQ ID NO: 426184 - DNA, 83 bp, Homo sapiens
ggacgcacagatgagagcgctccgaagactggtgagaagccctaccactgcaactgggacggctgcggctggaagtttgcgcg

SEQ ID NO: 426185 - DNA, 88 bp, Homo sapiens
catggaacaacactaaacgtctagctacaattcatgagcttatgcacttttgtacgagtgttttaatccaggtgctggtttgccaact

SEQ ID NO: 426186 - DNA, 98 bp, Homo sapiens
ccccagctcagctcttactgcgggccgctccgacggcggtccatcctggctatgtccaaactgggtcttcggcaggttacaggagttactagagtcac

SEQ ID NO: 426187 - DNA, 88 bp, Homo sapiens
cccactgtggtgtacctgaccaagtccagccccagcatggcactccaggattgggaggaccaggtccgctgcgacatccgccagttcc

SEQ ID NO: 426188 - DNA, 51 bp, Homo sapiens
caagtggccctcagggcatccccgttttcgattgtacaagaatctccattc

SEQ ID NO: 426189 - DNA, 100 bp, Homo sapiens
cagtgatctagtgtctgacttttctagggaatccaatcaataaaattgaagactggctgcaggattgcgggacctggccatgggcacagatgctgaggga

SEQ ID NO: 426190 - DNA, 74 bp, Homo sapiens
ccccgcgtcatgcggctcctcggctggtggtgtcgtgaaaactacccctaaaagccaaaatgggaaaggaaaag

SEQ ID NO: 426191 - DNA, 100 bp, Homo sapiens
tctctggagacatcttcagcaggtgtatgtggaatttgatgatcttgaatgggataaacgagagtgggttaaagtttatgaagatttttcaactttcttg

SEQ ID NO: 426192 - DNA, 75 bp, Homo sapiens
cgggatcctttctggaatggaggtcttatgagctgctattgaacacggcaggaatagcgggttttgcagcaattg

SEQ ID NO: 426193 - DNA, 87 bp, Homo sapiens
agttcgagaccagcctggctaacatggaaaaatatattcagggggaagagatgtaatagatttcacattatggcagttactaaagaa

SEQ ID NO: 426194 - DNA, 89 bp, Homo sapiens
ccggagcccagcagctgtgggagccccgagaacgcctccagcggggatgacacagaagtgccggtggtggtgtgcacattgagccccgg

SEQ ID NO: 426195 - DNA, 74 bp, Homo sapiens
ttccccacgcaaccccagatccatttacactttacagaaccaggtgcagatgggtctcttccttcctgccccca

SEQ ID NO: 426196 - DNA, 100 bp, Homo sapiens
cgctggaacagttgcagggtcacagaaacatcgggaatctaagggaggaaattatcaactgtgcacaaggaaaaaaatagatatgtgaaaggttcacgta

SEQ ID NO: 426197 - DNA, 100 bp, Homo sapiens
agaccttggaagaaaaataacatcagcattacgctcgttgagcaatgccaccattatcaatgaagaggtatcatgatattagctggtttgacatcaagtc

SEQ ID NO: 426198 - DNA, 98 bp, Homo sapiens
ccggatctgacggggcgggacctggcgccaccttgcagatcgagctgggagcattagtacccttgattctttagactttgcaagatattcagatgatg

SEQ ID NO: 426199 - DNA, 90 bp, Homo sapiens
gcggctgatttagaaggaggttcaggctacgaatgctgaccccctgaaggtgtacccgccactgaaggggagcttcccggagaacctgag

SEQ ID NO: 426200 - DNA, 100 bp, Homo sapiens
tgatctttcaaagagtccagaggaaaagaaaacagcaacacagttacatagtaaaaggaggcctaaaaaccagggtggttatgaccgctactcaggagga

SEQ ID NO: 426201 - DNA, 101 bp, Homo sapiens
cgggagagtgagagaaaggctggaagacgagtcggtcttggcagctgttgtaattgccaacctgaaagggatgtttatgcagctgtgtgacattcctcgtc

SEQ ID NO: 426202 - DNA, 100 bp, Homo sapiens
caagaactcaagagcagaatctccgcttttctataggagaaaaccaaaaggactaagtggtgccttgcaggaagtaggaatagaattctcaggacgagaa

SEQ ID NO: 426203 - DNA, 88 bp, Homo sapiens
aagcatctgaaaaagctgtggaaggctctggataaggaccagtacctgcccaggaaactgagagagcaggagattcggatgggtcaga

SEQ ID NO: 426204 - DNA, 51 bp, Homo sapiens
agattgtgaagcaatagcctaagggactctgtaagctcggttcggctggag

SEQ ID NO: 426205 - DNA, 74 bp, Homo sapiens
ggtcctgctgtgcgcgctgctcagctgtctgcttctcacaggtaagaatttcatcatggccaaaggagaaacca

SEQ ID NO: 426206 - DNA, 100 bp, Homo sapiens
cttggcctctcctgggatcggcccaaggccagttctccgcagggggcttgtacatgacagctggaatagcctccagttgaggggcttggtggtgctcctt

SEQ ID NO: 426207 - DNA, 82 bp, Homo sapiens
atggtcagaatcaacaagattgggaagaagttcggcctgaagtgtgagctctgtgacaaagttgttgtcacgtactccaaag

SEQ ID NO: 426208 - DNA, 82 bp, Homo sapiens
gggagctggacggcgagcgcgagcggcgcgagaaagaggaattttgttgtcagagaataaaaggaggttgtccataattgac

SEQ ID NO: 426209 - DNA, 95 bp, Homo sapiens
gatcctgatggacagccccgaagacgccgacctcttccactccgaggaaatcaaggtatgtcaccacgccgactgccagcagctgcaccgccggg

SEQ ID NO: 426210 - DNA, 74 bp, Homo sapiens
gaggctttggggaccgggaccgggatcgtgaccgtggagggttgtctccaaacaccatggtgacacctcacaag

SEQ ID NO: 426211 - DNA, 50 bp, Homo sapiens
cagtcctgaaaagctgaacgagggagatacttcaggggattaccggaaga

SEQ ID NO: 426212 - DNA, 88 bp, Homo sapiens
tggcatccagtaagaaaggagagcccgtcagtgccgaagatctgctgagtcagtgctgattctctcaaatagagcttgaaggataaat

SEQ ID NO: 426213 - DNA, 75 bp, Homo sapiens
gtgttgtaagactaggttttggctaaggaagataaggctttcaagcagaaacaaaaagaggagcagaagaaactc

SEQ ID NO: 426214 - DNA, 100 bp, Homo sapiens
aggctgggttctctgaagatgattacacggcattaatctcccaaaatattctagaaggggaaaagctacttcaaggtcccttcaccgatgttgtcaccac

SEQ ID NO: 426215 - DNA, 98 bp, Homo sapiens
aggcattttggggcagaatacagagatatggaatcagatgctttcttcacatgtcgaaaaaatgtccttctggcgaacagctcatccccccaggtaga

SEQ ID NO: 426216 - DNA, 83 bp, Homo sapiens
gtccgccgcccgccggatcccccggaccccccgaccgagcaggccgggctctcgccatgggtcactgtcgcctctgccacggg

SEQ ID NO: 426217 - DNA, 74 bp, Homo sapiens
gccgagtagtcaccaaggcctataagatgcgtctgaagaaacatcgctggtataagaaaatcctcaagtcccga

SEQ ID NO: 426218 - DNA, 99 bp, Homo sapiens
ccgcctctgcctgggtcccttcggccgtacctctgcgtgggggctgcctccccggctcccggtgcagacaccatgcatgaaaagtacaccagccagctg

SEQ ID NO: 426219 - DNA, 100 bp, Homo sapiens
cctgctttcattctggtgtactgtatgttctgcccatcaaggaaccatctttttatcattaaaggatgttcaccatgacaagagccatggaagaggctct

SEQ ID NO: 426220 - DNA, 95 bp, Homo sapiens
agcgttacaaggccttctacattaccgttctgggaggtgatcagtgatgaacatggcatcgaccccaccggcacctaccacggggacagcgacct

SEQ ID NO: 426221 - DNA, 87 bp, Homo sapiens
aatgtttcctagtaagacagcaactcaggctgcagttcatggagctcgtttcaaagggcaagatctaaaactggcatggaataaacc

SEQ ID NO: 426222 - DNA, 78 bp, Homo sapiens
tcaccagccctcgcctcccgagtcactgcagccaacccttcagcaaggcggctgcaggcttcagcctgcgctggttgg

SEQ ID NO: 426223 - DNA, 101 bp, Homo sapiens
gaaggaagcaattttacaagaaaagccatacttgttttctctggggtatgattctaatatgcctgccctcaagtatgtgttgtatacattggttggctttg

SEQ ID NO: 426224 - DNA, 90 bp, Homo sapiens
gtcttttccatcatgtacacaggagcaccagtaaaaacaggccctggacagcacttaaaccacagtgaattggcaattctactaaaccta

SEQ ID NO: 426225 - DNA, 100 bp, Homo sapiens
cgacgacggctcctgggaggtcatcgaaggctaccgggcccagcacagccagcaccgcacgccctgcaagggaggtttgtggtaaatatgccagctctag

SEQ ID NO: 426226 - DNA, 75 bp, Homo sapiens
atcagtcactgtcagcgacagacccctcggggtgtccatcacaaaagccgagtctcttcaagaaaatgaggagga

SEQ ID NO: 426227 - DNA, 50 bp, Homo sapiens
caccaggctcctcctttccccgctgtgccctaaccatttctaatattcag

SEQ ID NO: 426228 - DNA, 75 bp, Homo sapiens
gaagtttgtaactcaagcagaaggaggtacagcatgtgtactgaccgggcagccctttgacacaatgaaagtgaa

SEQ ID NO: 426229 - DNA, 100 bp, Homo sapiens
cggccagaaagttccgccatgagctggggcacggagctgtgggctatggagttactagtagagaaagcaatcagcagtgcttctagccctcagagccctg

SEQ ID NO: 426230 - DNA, 100 bp, Homo sapiens
ctgggcatcgcagccttctacttgtcccatgagtcagccataatggcaggtgaagaaattaatgaagactatccagtagaaattcacgagtatttgtcag

SEQ ID NO: 426231 - DNA, 88 bp, Homo sapiens
tctcaccgaggaagagcgggagaaaggggggagtttgttgcttgtctcctgtccctattacgacaaatgacagatagacattatcaac

SEQ ID NO: 426232 - DNA, 75 bp, Homo sapiens
ccagcaccgcccctcctggaagaaggaagaggaccgtataatagacgctggccccaaaggaaactactctcgatt

SEQ ID NO: 426233 - DNA, 96 bp, Homo sapiens
gggcacacaagaatggtcactggttttggccaaattgggcgagggcacaaaataaccacttaccccttctcaccgaggaagagcgggagaaagggt

SEQ ID NO: 426234 - DNA, 104 bp, Homo sapiens
gaatcccaatgaaccttgggtgatttgttctgtatcagaagacaatatcatgcaagtgtggcaaatgccagagactgctgctactttgaaacgtacgatagagg

SEQ ID NO: 426235 - DNA, 75 bp, Homo sapiens
ctagtcggacaaagccctcgcgtcggacccttgccagaactgtgctggagaatctggtaaaagcaccattgtgaa

SEQ ID NO: 426236 - DNA, 51 bp, Homo sapiens
agacactgcgaaagcaaaccgaggaggttcgagaacttgtcttggacaatt

SEQ ID NO: 426237 - DNA, 75 bp, Homo sapiens
ataccacctcccctacctcctaaggaacaggagtacagctgtgtagtaaagatgccttctggtgaatttgcacgt

SEQ ID NO: 426238 - DNA, 50 bp, Homo sapiens
ctggaaacatgatacaatctgcaaatgggctccacgtgttccccacgttt

SEQ ID NO: 426239 - DNA, 75 bp, Homo sapiens
cctagaggagctctacgacttattcaaggaaactcccagtacagccagcagcaggccgggtaccagcagggtgcc

SEQ ID NO: 426240 - DNA, 100 bp, Homo sapiens
atcgacaggtacaagagatggaaggccgagcagagccatgacgactcgagctccgaggattccgacgcgtgaaaggtgtagcagtcactcggcctacacc

SEQ ID NO: 426241 - DNA, 74 bp, Homo sapiens
aattgtctgccacgagtgcacattctgaaaacagggaagaaacccttttttcttggagccagcaataattatca

SEQ ID NO: 426242 - DNA, 80 bp, Homo sapiens
gtcgggtgatgcccgtgtggcgctgattggatttccctctgtgggtaagttatcagtgaagaactgcttcattcggggct

SEQ ID NO: 426243 - DNA, 82 bp, Homo sapiens
tttgcagtgaacggcattctcttcaatcatgagagtcccagaagaggtgagaagccctaccactgcaactgggacggctgcg

SEQ ID NO: 426244 - DNA, 111 bp, Homo sapiens
tggaaactctctaaacaacaggatgaaacccataaattggtaacttgggtttttactcctgtaacaactgaaataacaagtcttgatacagagaatatagatgaaatttta

SEQ ID NO: 426245 - DNA, 100 bp, Homo sapiens
gataacgttgcctggtggaggcggatgcagaaggcactattatcaaaagtcaaaatatgactcaagtgtgagtggtcaatcatcttttgtgacatcccca

SEQ ID NO: 426246 - DNA, 83 bp, Homo sapiens
cctgctgctggaggaggataacaagttttgtgcagattgccagtctaaaggtctcggcgcggaagatggccggcggcgtggac

SEQ ID NO: 426247 - DNA, 83 bp, Homo sapiens
caaaaagctgatgaagttgtttgggtacgtgcaagagttcatacaagcagagctaaagctttttatgcagattgaagctctct

SEQ ID NO: 426248 - DNA, 82 bp, Homo sapiens
gcgaaccccgggcagcccgggaaatctccaagtcagaaagctgtgtcagcgtgttatgatgccgtcccgtaccaacctggct

SEQ ID NO: 426249 - DNA, 100 bp, Homo sapiens
tcaccttgcccagccaactgggagccagtcaccacctccagggtctaagaggccagttctacgtcatgatgacgccccaggatgtgcttcagacaggaac

SEQ ID NO: 426250 - DNA, 75 bp, Homo sapiens
gttttctttactctggggtcccggctgccctgtggcctcgctcctcggaggagtttttggtcatgaagaggaaga

SEQ ID NO: 426251 - DNA, 83 bp, Homo sapiens
ctgtaacttacgtgtactttaccaacgagctgaagcagttttcggctttgtgagaaaccttaccatcaaacacgatggccagc

SEQ ID NO: 426252 - DNA, 90 bp, Homo sapiens
ggcaacaattgactcctaacaaccactataagcttggaagatgatccctccccagctgatccttcaggttggagtgcagtggcacaatca

SEQ ID NO: 426253 - DNA, 74 bp, Homo sapiens
ttggcagtagcagcttatgaggatggtaaccatgtgcgaccgaaaggccgtgatcaaaaatgcggacatgtcgg

SEQ ID NO: 426254 - DNA, 51 bp, Homo sapiens
ctgatagttgttccttgtgcagaaggaatggaaactgaaagtggaaatcag

SEQ ID NO: 426255 - DNA, 75 bp, Homo sapiens
atcaaccagctgacgccggagcagctcctaacccaggtggatcagctcaagctcaaagtgagtcggctggaggaa

SEQ ID NO: 426256 - DNA, 82 bp, Homo sapiens
gccagccgctgttttgccggaggagcccctcaggccgacccagatgatgtggtaccagttggccaaagaagagcctggtgtt

SEQ ID NO: 426257 - DNA, 100 bp, Homo sapiens
gatgctgaagacaccgcggtgggattccagctgtctgattaatgagaaacataatgtattttggcagatggctcggtgagctgcaagaggacagactgtg

SEQ ID NO: 426258 - DNA, 75 bp, Homo sapiens
cgctgagcctgcagccggccctgccggccgccatggcatcagatgaaggcaaactttttgttggagggctgagtt

SEQ ID NO: 426259 - DNA, 83 bp, Homo sapiens
gcttccttcaaggtcttagcaggggacaagatttttgcacgataagaatagcagggaattcctctactacaggaagaaggtgg

SEQ ID NO: 426260 - DNA, 82 bp, Homo sapiens
tccggaagggacacgctgaacaggtttggtgcacctcgatttggaggaagtagggcagggcccttatctggaaagaagtttg

SEQ ID NO: 426261 - DNA, 82 bp, Homo sapiens
gaagagaaagacaaggatgaccaggaatgggaaagccccagaaccttctgataacttaagagagattctccaaaatgtggcc

SEQ ID NO: 426262 - DNA, 100 bp, Homo sapiens
ccagtataccatctaacagaattaaaacagacggtgctggtttaccgacaagactgtgaaactttcgggatggtggtgaaaatgctgattgaaaaagatc

SEQ ID NO: 426263 - DNA, 100 bp, Homo sapiens
aaaatggtgttctgctgtgtgaatattaataaggcagcggaaagaagaaatatgaatacggctccatcaagacccagccccacacgaaggtaaagtaccc

SEQ ID NO: 426264 - DNA, 50 bp, Homo sapiens
atgacaggcatgttgtataaatgtacaggagcgagaacccgagcagcgcc

SEQ ID NO: 426265 - DNA, 100 bp, Homo sapiens
ccgaaagtaaagaagaagaaaacttcagtgaaacaagaatgggatatgaagatgaggagagtgaggaatcaagtgaagaagaatctagcttggagagtga

SEQ ID NO: 426266 - DNA, 100 bp, Homo sapiens
gtcgaagcaccgcagcctggtgcagatcatctacgacgagaaccggttcttggccaggctgactgagagatttgtgctgggagtggatatgttcgtggag

SEQ ID NO: 426267 - DNA, 82 bp, Homo sapiens
catgcagaacagatatgtacaaagtgatcctcagtttgtggtctgccagctaaaggtgaagatatattcctccaattcagga

SEQ ID NO: 426268 - DNA, 97 bp, Homo sapiens
ctgcttactggtgggaaatcaagtcgtaaaaacaggtcaagtgcatgcagcagaactgattaaaacagtggcatctcgctatgatgaatatgttaat

SEQ ID NO: 426269 - DNA, 51 bp, Homo sapiens
agccactctgcatctttccaacattccgctccacaaggctgacttcaggac

SEQ ID NO: 426270 - DNA, 82 bp, Homo sapiens
agaagagccgcagtgagttgggcaggttcttggccaagcagcaattctgtggtgttcttggtcacacatttatggagtttct

SEQ ID NO: 426271 - DNA, 153 bp, Homo sapiens
agctgcactctattcagctgcagcttcatgctaaaactggtcaaagtgctgactctggtaccattaaggcaaaattgggtgaaatcaaaattgctgtttctattgaagatgaagccaacaaggacctgcctccggccgctctgctctataggc

SEQ ID NO: 426272 - DNA, 74 bp, Homo sapiens
cgggcaccgaggactccgctcctgcccagcaataggcgaatatgaagaccttagagcagagaaccagaaaacaa

SEQ ID NO: 426273 - DNA, 80 bp, Homo sapiens
ccggctcctgctcaagatctcagagaaggaggaggtgaccacgcgcgagtttgatgaaggccggaacaactttgaagggg

SEQ ID NO: 426274 - DNA, 82 bp, Homo sapiens
cagcgggactttattaccgctttaccaggtggtggaggtggatacagcagtcggagaacatctggcagagacaaatacggac

SEQ ID NO: 426275 - DNA, 74 bp, Homo sapiens
ctgaggaccagcagatggccagtcacgagaacccagatgcggtgacctgccagcacctgccgcagccttcgtcc

SEQ ID NO: 426276 - DNA, 75 bp, Homo sapiens
agcccatcagaatggcagatggcttatgaaccacaggaataaaattgaagggtgtttttcttagagaacatcatt

SEQ ID NO: 426277 - DNA, 100 bp, Homo sapiens
gtctcatgagaagtgcctgaagcacgtgaggatcccgtgcacgagtgtggcacccagcctggtccgggtggggaagctgaggcaggaagccctttagtca

SEQ ID NO: 426278 - DNA, 96 bp, Homo sapiens
gtcagctcagtcccggcagccgccgcgcgaggaaatggccgaggggccggagccacagacaatgcagatcttcgtgaagactctgactggtaagac

SEQ ID NO: 426279 - DNA, 100 bp, Homo sapiens
agttcctccaggtttgccatcttcaattgaggaaacttgaatatttttgtatcctgaagggagaaatggatgaagaagaaatggatgaagaagaccgaag

SEQ ID NO: 426280 - DNA, 75 bp, Homo sapiens
agacacttcgggaacccgaggcggaccgggcgacgagaatgaggagaaacctgtgcaaatgatgtttaagcaatc

SEQ ID NO: 426281 - DNA, 50 bp, Homo sapiens
gcttcgccaaggctggcgcagtcgcttggatttacactgggcaacgtggt

SEQ ID NO: 426282 - DNA, 80 bp, Homo sapiens
tacttgagcagtcacctggcacaggtctcagccttagatccaaggacagtccaaggaagtcctaagaccatggagttggt

SEQ ID NO: 426283 - DNA, 100 bp, Homo sapiens
tcgctgcttcgggacgcgctctctgcggctctgtgagcgcccctgagcgccggcagcggccgcggtgggttcttcagctgcatatctatgtgagactgaa

SEQ ID NO: 426284 - DNA, 75 bp, Homo sapiens
gagggccctgtgggtgctgggcctctgctgcgtcctgctgaccttcgtgatcagggccaaagcggtcagtgagaa

SEQ ID NO: 426285 - DNA, 93 bp, Homo sapiens
agcagccgatccagcctgcggagcctgtggggcagggtttccaggcctgaggtgcccgccctggccccaggagaatgaaccagccgcagagga

SEQ ID NO: 426286 - DNA, 90 bp, Homo sapiens
atcattgatgccccaggacacagagactttatcaaaaacatgattacagggacatctcaggtgtctttaagagtgattgaagagaataat

SEQ ID NO: 426287 - DNA, 98 bp, Homo sapiens
gtggaggatgtggtgctgcccgagaaggtggacgtgctggtgtctgagtggatggggacctgcctgctgcttcttaatgaagaggataactcagaatc

SEQ ID NO: 426288 - DNA, 74 bp, Homo sapiens
gccgcccctgttgggggtgagcgccgcgcggctgcagcatgcaatggctgccatccggaagaaactggtgattg

SEQ ID NO: 426289 - DNA, 100 bp, Homo sapiens
gtcgaaggtggagaggtcctttacttggtgcattactgcggatggaatgtgagagtaacagattccctggataccctttcagaaatttcttcaaataaac

SEQ ID NO: 426290 - DNA, 87 bp, Homo sapiens
ccgccgccgccttgctgctgctcaaagctgctgccgccccttgggctaaaaggtttctgcatatgaagtgtgtaaaatagattgctt

SEQ ID NO: 426291 - DNA, 74 bp, Homo sapiens
tctttaccctgttcattgggccagaggaaaacagttcctcctgaggatttcagagaagagctggacttcctggc

SEQ ID NO: 426292 - DNA, 51 bp, Homo sapiens
aagaaactcaatgatcgtgtcatgagagctcatgctgaagattcggttatg

SEQ ID NO: 426293 - DNA, 100 bp, Homo sapiens
ttttactgtcaagacatttcttcggcattctgcaacagcatttgacattgtgcagcaaagaaatggttatggagaagcccagtccgctgcttgtagggcg

SEQ ID NO: 426294 - DNA, 100 bp, Homo sapiens
tccatctgtctccttgagcaaaaaagaaaagttgtttcctccaacattgatgttcctccagcaaggagcagacgcctccgcctagacctgaagcctaccc

SEQ ID NO: 426295 - DNA, 87 bp, Homo sapiens
gaaagtgactgaagagcttctgaccgataatagggcaactccaacaacattgccaccgtggacatctccgcaggcttcgtgggctta

SEQ ID NO: 426296 - DNA, 60 bp, Homo sapiens
ggctcctgattacgatgctttggatgttgccaacaaagaaggaaaatcacctcggcagtg

SEQ ID NO: 426297 - DNA, 90 bp, Homo sapiens
ctggcacttatgtcctccctgggaaagtaatggaccagtgaaggtgtggggaagcattaaaggactgactgaaggcctgcatggattcca

SEQ ID NO: 426298 - DNA, 82 bp, Homo sapiens
cggattctacattgcctccggagcaaattgtggctactaatttgccccctgaagatcaagatggctctggggatgactctga

SEQ ID NO: 426299 - DNA, 83 bp, Homo sapiens
gtggaaaatgcgctcgggctggaccagcagttaccggtattgtaagaacaagccgtacccaaagtctcgcttctgccgaggtg

SEQ ID NO: 426300 - DNA, 50 bp, Homo sapiens
agcgagtgggactggatggagttcggtagctacagcaagctgggtagcag

SEQ ID NO: 426301 - DNA, 90 bp, Homo sapiens
gaaaaccgagctgctgggagaagtgccggtggtggtgtgcacattgagccccggtatagacagttcccccagctgaccagatcccaggtg

SEQ ID NO: 426302 - DNA, 98 bp, Homo sapiens
gctgctgtcgcccagcgccgccccgtcgtcgtctgccttcgcttcacggcgccgagccgcggtccgagatacattaattgtttggtcagaagcagaga

SEQ ID NO: 426303 - DNA, 101 bp, Homo sapiens
tttctctaggatattggcttggcatatataaatcacctggtggagagaggagactatgacatagcagcacgagtttgtgatcctacgagatgagaaatggg

SEQ ID NO: 426304 - DNA, 95 bp, Homo sapiens
gaccctggagcctcagttggaagcagccgatccagcctgcggagcctgtggggcaggactctccttcagcaactccagaagcttcagactttggt

SEQ ID NO: 426305 - DNA, 75 bp, Homo sapiens
ttctcagaaagcagaggctcagagcttggagacagacgcactgctcagcacgcaggcatgtgaggaagctgggct

SEQ ID NO: 426306 - DNA, 90 bp, Homo sapiens
ggtgtacacactgctgtttaccttggcgaggcctttcaccaagtccatggcctcccgaggagcccagacagctgcagccacagctccccg

SEQ ID NO: 426307 - DNA, 82 bp, Homo sapiens
ccagaccctggagcctcagttggaagcagccgatccagcctgcggagcctgtggggcagaatggactgctgaattatgaagt

SEQ ID NO: 426308 - DNA, 100 bp, Homo sapiens
cggggagacggacgcgtttggcaacagcgagggcaaagagctggtggcctcaggtgaaaaaactgcagttaatccctggggtctgtggattccgaatttc

SEQ ID NO: 426309 - DNA, 98 bp, Homo sapiens
cgcaaagtcatggaggaaaacaacatcgtacaccaggctcgcttcttcaggtaaagaagctaagtggaagagtgtttcctcctctggccgtaaagcag

SEQ ID NO: 426310 - DNA, 75 bp, Homo sapiens
tgaagttcgagcactaatatttaagaaagaagatgttaactttcagggggatatgagactttctactcggaatat

SEQ ID NO: 426311 - DNA, 100 bp, Homo sapiens
gaggtgcagaaagccaggaccaagagacaggcagctcaccagggtggacaaatcgccagagatgtggatatgtttgccttcatgggcagcctggatacca

SEQ ID NO: 426312 - DNA, 89 bp, Homo sapiens
gttgccggtgccggcctagcgtcctggaattacttcaatcaacccacagaacttaattgcccaatctcagtctggtactggtaaaacag

SEQ ID NO: 426313 - DNA, 96 bp, Homo sapiens
ggacttcgtcgccaagctggccaacaacacgcaccagcaggtaattgctgccatggaaacacaactgtctaatgggccaacttgcaataacacagc

SEQ ID NO: 426314 - DNA, 51 bp, Homo sapiens
ccagcatgtggtcgtcattcactgcaggctgcatagatgaatggtttgaag

SEQ ID NO: 426315 - DNA, 100 bp, Homo sapiens
tggaatcatcaatatttttgatattgcaactggaaaacttctgcataccctggaaggccgccctccccactgttaccaacatgaagctgctcgcagcaac

SEQ ID NO: 426316 - DNA, 100 bp, Homo sapiens
ggatgcctgcactcattgtggctgtgtcagctgcagtagactacaggagttatggaacagataaagtaccagcatctcagacatgtcgaaaaagatgttt

SEQ ID NO: 426317 - DNA, 75 bp, Homo sapiens
gatcatcttgggagtgatttgcgccatcatcctcatcatcatcataggctgccctgaggatctgtgtttggtgaa

SEQ ID NO: 426318 - DNA, 51 bp, Homo sapiens
agaagctgcagccgcacctggccaagggtgatgatgaacagtctacacaga

SEQ ID NO: 426319 - DNA, 100 bp, Homo sapiens
gtaatcagtctttgacaagtgatgagaagctgtcggagcttcccaagttaatgtccatcagtgtgttggcagtttctgcttggatgagggactacctaaa

SEQ ID NO: 426320 - DNA, 52 bp, Homo sapiens
tgtggactacaatggaaaccttccagaatgaactctggaagcccagccaggg

SEQ ID NO: 426321 - DNA, 75 bp, Homo sapiens
cagcctgcgggatctgaagacctcaccaagcatcttcctcatcgaccacgcctggacgtgccgtgtggagcacgc

SEQ ID NO: 426322 - DNA, 90 bp, Homo sapiens
tctgggctcgcggcgtctccggggaaagccgtggccccgagggcggatccgagaggatggcattccctgtggatatgctggaaaattgca

SEQ ID NO: 426323 - DNA, 100 bp, Homo sapiens
agcagttctgtgaggcagcctagtttgcatatgagtgctgctgcagcttcccgagacatcaccttggtggactgtgcattgtcacttattcgacttggga

SEQ ID NO: 426324 - DNA, 76 bp, Homo sapiens
ccaggctatcatatcatgttgcctttcattactacgttcagatctgtgcagcgagaaccctctgcccacagtggag

SEQ ID NO: 426325 - DNA, 50 bp, Homo sapiens
ttggcctcccaaagtgttggaattacaggcatgagccaccacgcccggcc

SEQ ID NO: 426326 - DNA, 75 bp, Homo sapiens
ggcggcgatcggccgcggccgctctctgaagaacctccgagtacgaggtacaccaggggttggaaaaaccacact

SEQ ID NO: 426327 - DNA, 100 bp, Homo sapiens
agatcctctttccatcaccttcatggaccaacataactttagtccaagatgtcatcagactagtgctgagtcttggggtactggcagagctgtggctcga

SEQ ID NO: 426328 - DNA, 75 bp, Homo sapiens
tatttagaggacattatcatggggtgtccgcaatgttgccagtgtctgtctgcagattggctacccaactgttgc

SEQ ID NO: 426329 - DNA, 75 bp, Homo sapiens
ctcattctcaccaataatagtctcgtggaactgaatcattgcgatgatgagtccagaggacagctgggtctccaa

SEQ ID NO: 426330 - DNA, 100 bp, Homo sapiens
atgtatcaacgccagcagctccctctgccctatgaacagcttaagcacttttaccgaaaaccttctccccaggagcttctggaagaggtgaagaaggaat

SEQ ID NO: 426331 - DNA, 51 bp, Homo sapiens
gcagaagtaaagaagtggggagtttaggatgacatctgaactggagagcag

SEQ ID NO: 426332 - DNA, 90 bp, Homo sapiens
ggataaactgttacgcatatatgacttgaacaaacctgaagcagtatcttcaaccaatcttgtcactcctccagcagttgtcagtagtca

SEQ ID NO: 426333 - DNA, 101 bp, Homo sapiens
gaggccgcaagcagcgccgcggggtgtggggcggacccaggagatgaaatgacaacgtcaaccctccagaccccagagtcagaaggagtgagaaccctgac

SEQ ID NO: 426334 - DNA, 83 bp, Homo sapiens
acttccgtcaggagaggtgaggcaggctcgagtgcacggagcgtcccttccatcaggagagcaaactgtcatcaggagcttaa

SEQ ID NO: 426335 - DNA, 100 bp, Homo sapiens
ctctgcgtgggcagaagatgatcatatgcttatacagaatgaatattgtaatgaaataccctgatgtattaggagaatgaagatttaaaaacaaaatttt

SEQ ID NO: 426336 - DNA, 75 bp, Homo sapiens
aacatccctcgaagcatctccagtgacgggcgcccactagagaggcgctcgagaggagaatgtggccactttccg

SEQ ID NO: 426337 - DNA, 100 bp, Homo sapiens
gaggaggaggaggaggaggaagaggatgaggaagaagagtccagtaggcaggaaaccgaagagaaaatactcctggatccaaatagcgaagaagtttctg

SEQ ID NO: 426338 - DNA, 75 bp, Homo sapiens
tgctctcagtgcctgccacctccccaaaggcaaatttgtgatggacgcctctgaccccacccagctctctgcatc

SEQ ID NO: 426339 - DNA, 100 bp, Homo sapiens
cgcgcagccgccggcgtcgccgccatggacctaggaaaagaatttcctccctgcgccattgaggtctataaaattatagagaaagttgattacccccggg

SEQ ID NO: 426340 - DNA, 74 bp, Homo sapiens
cgccgctgctggttgctgtccctgttttagaaagagcgttttcgctacgtaaagcacattcgataaaggatatg

SEQ ID NO: 426341 - DNA, 155 bp, Homo sapiens
ctcggagcggagacggcaaatggcggacttcgacacctacgacgatcgggcctacagcagcttcggcggcggcagaggtgctggtgctgctgatcctcaccctcaggcgccaccacaagagccacctgagctcggacgaggatgaagacatgcgg

SEQ ID NO: 426342 - DNA, 100 bp, Homo sapiens
gcgttatttcaaaggccacaaagctgcgatcacctccttggacctcagccccaacggcaagcaacttggtggcttcagtaagttccaagccgagttctcc

SEQ ID NO: 426343 - DNA, 100 bp, Homo sapiens
gatgttcagcttcgaaggcgacttcaagacgcggcccaaggtgtcccttggcggcgcgagcaggaaggaattgcttacttaggaggtgtgtgcagtgcta

SEQ ID NO: 426344 - DNA, 87 bp, Homo sapiens
gaccgcaaggctgccaaagtcctggaggaacgcatccacgaggaattcaagctgagatctgtatctgtggacctgaatgttgatccc

SEQ ID NO: 426345 - DNA, 95 bp, Homo sapiens
gagctactaacatcctttttcgacaacagaaacacctcagtgatgccattgtggaagttgcagtgagagcagatgctggcaagaagcacttacca

SEQ ID NO: 426346 - DNA, 88 bp, Homo sapiens
ttcctctttagatagttctgtgacttcatcttctgatataaaagaccagtgtcttaagtaccagtctcgtttcctctcagtccatcca

SEQ ID NO: 426347 - DNA, 83 bp, Homo sapiens
ctattgccttattttttctcatggatgttcttcttcgagtatttgtagaaggctttggcagcatgtaagcagctgtttgccaa

SEQ ID NO: 426348 - DNA, 100 bp, Homo sapiens
cctgcgtcgccgggaccctcgcgcgcgaccgccgaatcgctcctgcagcagaggttttgggatttgagattgacgcggtgaactctgtccagttttcaaa

SEQ ID NO: 426349 - DNA, 74 bp, Homo sapiens
aaaagctttcttctgttcgtcagaaatttgatttgcttttgaaatcagaaagtcagtgcagggttgtagtgttg

SEQ ID NO: 426350 - DNA, 75 bp, Homo sapiens
gaagtcaacttgaaacctacaagagacagaaactggaggaagcagcatctcgtgcagcagaagaggaaaagaaac

SEQ ID NO: 426351 - DNA, 82 bp, Homo sapiens
agcgggagctggacggcgagcgcgagcggcgcgagaaaggttcccttctggagaagagtcaccgggtttggttctgtttccc

SEQ ID NO: 426352 - DNA, 100 bp, Homo sapiens
agtaacgattttgaaatgctaaatggtgccttgtactgtctccttggaaatcacagtggtgtgtgcttggcaaaccttcatgattgggactgtattgtac

SEQ ID NO: 426353 - DNA, 100 bp, Homo sapiens
cgggctcggcggcggcggccaggtccctgctgaatcacacgccgccatccgggaggcccagggaaggcctcattgctacgatttcagagtaccctggtaa

SEQ ID NO: 426354 - DNA, 74 bp, Homo sapiens
aaaagtccttctggggcaggatgaggtgagggtcccgatgtcctggtgtacagcttggactttggtgggcatct

SEQ ID NO: 426355 - DNA, 98 bp, Homo sapiens
cagtccgttgctttactttttgcttcaccgacatagtcattatgccgaagagaaagaactccatccggcacaacctgtcactgcatagtcgattcatg

SEQ ID NO: 426356 - DNA, 96 bp, Homo sapiens
ggggaaccatggctgccccgagagcctgcacctgtaggctctcgggggagaggaacgcctgcttatcctgaaagtacgtttggaagcagaaactat

SEQ ID NO: 426357 - DNA, 50 bp, Homo sapiens
acccacaacaatctgtccagtggtactgttggttagtctgctgctaattg

SEQ ID NO: 426358 - DNA, 75 bp, Homo sapiens
tggcctggagtccgcggctggccgcgtgagtagatctcagtgaccagctgctggaggtggtcggcttggaaggag

SEQ ID NO: 426359 - DNA, 75 bp, Homo sapiens
gtaaagtcgagtatctggtgaagtggaaaggatggcccccaaagttgaaatcacaaagattagacacctttttag

SEQ ID NO: 426360 - DNA, 83 bp, Homo sapiens
ggcgacagggccgattccggagtggaataccaagctgctattttacacttgaagagggagcacaaagaagaaattgaaaacct

SEQ ID NO: 426361 - DNA, 75 bp, Homo sapiens
atgtccggcaagatcgagaaagcagcttccatgaggcaggctgaacctgcagatatgcgcccagagatatggatc

SEQ ID NO: 426362 - DNA, 96 bp, Homo sapiens
cagcctggtcaatttgtacctgcaggcctcctacacctacctctctctgatctatgaagactccatcgtcttgcagtcggtcttcaccagcgtgcg

SEQ ID NO: 426363 - DNA, 100 bp, Homo sapiens
cgtgatgctactgcgcgccaagacgggtggcgcctacggcgaggacctgggcgcggactacaacctctcccagggaatgggtactgttcaaaaaggaatg

SEQ ID NO: 426364 - DNA, 110 bp, Homo sapiens
cgtggacgtggtcaagtacgagagtggccctgacggaggggaggaagtgagtatgagcgtagagtggaacggggttcgaaccagtgtcctaccagaacataaggatcccc

SEQ ID NO: 426365 - DNA, 90 bp, Homo sapiens
ggggctcccaggacctccactaatcaccagaacaaaatgtgcaggttttcctcctccaccaggcgctccacctccatctcttataccaac

SEQ ID NO: 426366 - DNA, 100 bp, Homo sapiens
gcccgagggcggggaccggcggcgctggaggagcgaggcagctgtactaggactgggaacggtaattcgccaaaatgacgaacacaaagggaaagaggag

SEQ ID NO: 426367 - DNA, 74 bp, Homo sapiens
ctcgatccgcccacagacctcaaattcaaaggcccctacaaaggcttcagagtagatatctctgccaacatgag

SEQ ID NO: 426368 - DNA, 87 bp, Homo sapiens
tggagtcacacaagctaaagacgggccattttccagacctcatccagacaagtgggtttggactcggatgaacccttcgggggtcaa

SEQ ID NO: 426369 - DNA, 80 bp, Homo sapiens
cagcctccacccaccggcccaccctacatttagcgcatcatgtgatccgggaatgttttaaaggaagttgggctactcac

SEQ ID NO: 426370 - DNA, 82 bp, Homo sapiens
gtgatctctggtgcaggaaaaatgttcactgcagtggctagaaagtttgaaatggtggggagaggggatgctgatctcggca

SEQ ID NO: 426371 - DNA, 73 bp, Homo sapiens
aaaggacctgcccccagagagaaaacccaagtctgatatggtgaggacttcccttcgtttactgacgtccagt

SEQ ID NO: 426372 - DNA, 97 bp, Homo sapiens
aacgtgcaaggatgcgaattgtgaatcgcttctccaaacaacctgcaggctgggacaatgaaaagaaaatagctattttacatgaaaattttacaac

SEQ ID NO: 426373 - DNA, 75 bp, Homo sapiens
gttcctgctgccctcaaggtcgtgcgtctgaagcctacaagaaagtatgccaccacgggctgttccctgaccctg

SEQ ID NO: 426374 - DNA, 82 bp, Homo sapiens
actctgggattcagacaccgcaagctgctttcggaagggcttcaggagggggttatcctgaatacatgtctaacaattttcc

SEQ ID NO: 426375 - DNA, 49 bp, Homo sapiens
aaagactcttcagctctcacataaggtgctaacagacatcaaagctgac

SEQ ID NO: 426376 - DNA, 100 bp, Homo sapiens
tcctgacatgtgacaatgaaattgaattgaagaaaattgcacgtaatcacccaaatgccaatttgaacacctggaccctcagaaccagcatacattcgag

SEQ ID NO: 426377 - DNA, 101 bp, Homo sapiens
cagaactaaggcatttctgaaaatcattgctgtttggaccatatcagtaggtctcagccaatttcttctccagtcatcctccagtttggtcatgcagagac

SEQ ID NO: 426378 - DNA, 97 bp, Homo sapiens
tgctgatagtctccagcgggcctggactgtgggctggtgtgtggaactggttaccatggggaagaaagtggccatcattggagctggtgtgagtggc

SEQ ID NO: 426379 - DNA, 51 bp, Homo sapiens
ccgtgggcgtaggaccttccgagccaggactcaactattgttactccaatt

SEQ ID NO: 426380 - DNA, 82 bp, Homo sapiens
gagttaaagttggatgtgctggaacagccaagacaatgcaaactccagtgaacattcccgtgcctgtgctccggctgccccg

SEQ ID NO: 426381 - DNA, 100 bp, Homo sapiens
ctacctggggatattatcaaatctactactgttcatggcaggttttcaaatggaacattttgatgcatcacttagtacctatttcaaggcattgctaggc

SEQ ID NO: 426382 - DNA, 98 bp, Homo sapiens
cgcagcgccccccagagagagccctcaacaggaaggcatgcatgtgacacctcagccacatcaacaggaagacacaatatgagaacccggttctagaa

SEQ ID NO: 426383 - DNA, 89 bp, Homo sapiens
agcgtgaccgagagcgcgaatatcgtcatcgttagaaggaatcccttggcaccatgtcctgtgtgcattataaattttcctctaaactc

SEQ ID NO: 426384 - DNA, 101 bp, Homo sapiens
tggtggaatgtatccgggaggtcaacgaggtcatccagcagagaccacgcagaggctgcctttggatcaagtccaggaagtgcttcccccaattccagaac

SEQ ID NO: 426385 - DNA, 100 bp, Homo sapiens
cggtgcgctgggggccggggcgcgtcgcaggtactccaaagattcaggtttactcacgtcatccagcagagaatggaaagtcaaatttcctgaattgcta

SEQ ID NO: 426386 - DNA, 100 bp, Homo sapiens
tgcatcgccaacgtgggcagccgggagatgggcgaggcctttgccgctgacatcccccgcatcctggtggccggtgagaaagatcagtctaaagaaaagg

SEQ ID NO: 426387 - DNA, 87 bp, Homo sapiens
ctgactccataaactattggattcataacctgctccatgcttgaaaacatggggattggaattcggctgagtatgagtttatcagct

SEQ ID NO: 426388 - DNA, 86 bp, Homo sapiens
gcagcggagcccacgagaggcagcgccatggcggagcagacctactcgtgctgtcacaagatgaaggtagaggcacattatacaaa

SEQ ID NO: 426389 - DNA, 50 bp, Homo sapiens
cttgaagaacagagttgttgaacatatcgttcagaaagaggcagagcggg

SEQ ID NO: 426390 - DNA, 87 bp, Homo sapiens
tgctccccggaaaagggcactcgtctccgtgggtgtggcggagcgcgcggtgcatgctgggagaaccaccacagacgacgagctaga

SEQ ID NO: 426391 - DNA, 96 bp, Homo sapiens
ccgcgctggtgcagccaccctcgctccctctgctcttcctcccttcgctcgcaccatggtgatgtgtccaatctagatcccaacttctcatttgaa

SEQ ID NO: 426392 - DNA, 87 bp, Homo sapiens
acgatgcgcaaggagctgcagttggaagaggccgagtctccagacatcaccgggccaatccgagcctacatccttgcccacaaggat

SEQ ID NO: 426393 - DNA, 99 bp, Homo sapiens
tattcaagatgcagaaaagacaaggatattgcagttattgccgtgtgcagtataataacctggaacagaaaacctacagagatttccgattgcaagggg

SEQ ID NO: 426394 - DNA, 83 bp, Homo sapiens
gcagtggagcccaaagacccctggagacatgatgaagatctccttcaacgacaaaagcctgcagaccacatttgagtaccctt

SEQ ID NO: 426395 - DNA, 75 bp, Homo sapiens
ggggcggacggcgacgcagcccgcggcagaagatgcctgctctgtgcctgtatctgagatcatcgccgttgagga

SEQ ID NO: 426396 - DNA, 97 bp, Homo sapiens
tcctgtacagcctgcaaaactttcatggaatgtctgatgattggtcgggatctcgtaagactacttcagaatgttgctaggataccagaatttgaac

SEQ ID NO: 426397 - DNA, 96 bp, Homo sapiens
cacgaaggagttcccctgccctgggagcgggttcaggaccgcggatcggaagtgtggatgaggtcaccattgtcaacattttgaccaaccgcagca

SEQ ID NO: 426398 - DNA, 100 bp, Homo sapiens
tgcgtgtggacttctacaatgcagacgagctcaagtactatactggcaattgctggagaagattttgcaattgttgcttctgatactcgattgagtgaag

SEQ ID NO: 426399 - DNA, 98 bp, Homo sapiens
ccccaagatgggcatctattacattccatgggagccaagaagaaaggtttgctcccgggtggaacagggattatcctcctcctccccttaagagtcat

SEQ ID NO: 426400 - DNA, 98 bp, Homo sapiens
gcaagttatcctttggaaatgtgctcacactgccaaatttgagtttcatcatggtgactatgaaaaacagtttctgcatgtactgagccgcaaggaca

SEQ ID NO: 426401 - DNA, 98 bp, Homo sapiens
cttgtggaggatatgcagagagagcttgggagactgagacaacagatggtatagctgcatgctgggaaagaaatgcagcctggcgcctctgaaggagg

SEQ ID NO: 426402 - DNA, 89 bp, Homo sapiens
ggcggcggttgcgggggggaagtgactgggcggtgccggcgccggagacgatgccgttcattcggcatcaacagcattttatatcagcg

SEQ ID NO: 426403 - DNA, 100 bp, Homo sapiens
cccaaggcaattgatcccaagttgtcgacgaccgacagggtggtgaaagaaagtgagtgagaaggttggaggagctgaaggaaccaagctagatgatgac

SEQ ID NO: 426404 - DNA, 90 bp, Homo sapiens
gaggaagctaaggccgcgttggggtgagaccctcacttcatccgagtttgccttctgccaggtggatgcctccatcgctctggccctggc

SEQ ID NO: 426405 - DNA, 97 bp, Homo sapiens
tcgaagcgagggtctgaagttcacgactactagaaggggaggggagtggaaaggctctcagtgaaaaaggcataagatgcacatttttctgctctgg

SEQ ID NO: 426406 - DNA, 100 bp, Homo sapiens
ggctgtgatgctcgggagggagactgttgttcccggagatgcggcgcgcaggacgtcttgcatggctggtatacttagttgggacagttgtaggaggaag

SEQ ID NO: 426407 - DNA, 101 bp, Homo sapiens
acgatctcaccttccttcgaattcgctccaagaaaaatgaaattatggttgcaccagcctgacaggagcaatggccaccagcaggtgaagggcatcgctgc

SEQ ID NO: 426408 - DNA, 99 bp, Homo sapiens
ctgcccctgcccggctcccggcggccccagctgtcaccgctcctgatgataattcattattgctgctgcgggcggagttatatttgaccatgaagaact

SEQ ID NO: 426409 - DNA, 82 bp, Homo sapiens
cataatgtcgacctgccggagtcgaggattccagggtcgaacactcggggacggcaaaacagaacagaaaggcggagataaa

SEQ ID NO: 426410 - DNA, 87 bp, Homo sapiens
atattggacatgccaaagccatcaatttcaactttggctatgccaaggtgctccgagagatgctccctctcccctcatgctccctcc

SEQ ID NO: 426411 - DNA, 102 bp, Homo sapiens
cttcgtgggcggtcttgactggagcacgacccaagagctggtggagttgagatctataatggagatcgtaaaataaaggtttccaacaccctggaaagccgg

SEQ ID NO: 426412 - DNA, 100 bp, Homo sapiens
aggaagtgcggagccagcctgagttgggagaagagctccagagattgattatggaagattcccacaagagtaccacgtcagagacagcacctcaacctgg

SEQ ID NO: 426413 - DNA, 98 bp, Homo sapiens
gaagatggcggccggcaagagcggcggtagcgcaggggagattacttttctggaagctcaccatctgctacctggatatgctgatgaccagtgaggag

SEQ ID NO: 426414 - DNA, 98 bp, Homo sapiens
catacaggaacagggcagacgttagcgtgagtgatcactctcaatcccggccttagccccgtgggccccacggagtgagcggcatgcagcacccccgg

SEQ ID NO: 426415 - DNA, 75 bp, Homo sapiens
gcagcagcccagacgcggcacagagagggcctgggagcttgctgcagcttcagtgatgaacggcagcagccactc

SEQ ID NO: 426416 - DNA, 100 bp, Homo sapiens
cttgggtgacatctgcctgagagatctccaagaattacaggtgactctcctattccatctgtttcttcgggatcatcttcacctctttcagccacttctg

SEQ ID NO: 426417 - DNA, 99 bp, Homo sapiens
ccggcctcgagcgccccggcgggagattgaggaagacacatggcagaaatactacttggaaggagtctcaaatgaaatgtacacagaatatctctccag

SEQ ID NO: 426418 - DNA, 96 bp, Homo sapiens
gcgaagcgctggtggcgggcccgggctgcggcgtgtgcgcgcccgccagctgctccggagatacgctacgagttccagggagctctgtcctggtga

SEQ ID NO: 426419 - DNA, 101 bp, Homo sapiens
ggacatgcccgggatgccttttcatttggaacattggtggaaagtttgctcacaatcttaaatgaacaggatacaaaagttgggactacaagcaagtgaca

SEQ ID NO: 426420 - DNA, 103 bp, Homo sapiens
cgacaccgccggccgcggcggcggccgccaccggctctagtttcatcgcaaaccagaaaaggttagaaatcatcaacgaagatgatgttgaagcttatgtggg

SEQ ID NO: 426421 - DNA, 75 bp, Homo sapiens
cccttccgtatctgcctaggcattttgctgtctcctcctaatacggttgttatggagttgatggagagagtgact

SEQ ID NO: 426422 - DNA, 76 bp, Homo sapiens
caagcacagatttgcttttacaccaagtgatggagaggtgattgaacaaattataagcctgcaaaccaatgataat

SEQ ID NO: 426423 - DNA, 100 bp, Homo sapiens
gcagctgatggttggagttgatgtcagtggggccagccagcagccagcttcgggtgtagcctattctcatccaactacagttgctagctacactgtccat

SEQ ID NO: 426424 - DNA, 100 bp, Homo sapiens
ggtgctaatagtagctggccatcacaactggattgtagctgcatatgcccattttgctgtgtgttacaggttggtgaaacagagaccaggctggagtgtt

SEQ ID NO: 426425 - DNA, 75 bp, Homo sapiens
agtaaagctgctggacaacaccatggaaatatttgacattgagatttcagaggctttgaaaaaatttggtatctc

SEQ ID NO: 426426 - DNA, 96 bp, Homo sapiens
tgattcctccagaggggtccctcttgcaggcatgaagaactcttgactgacagaaacggagggtgtgtccaaagttttgaggacggccgagcggcg

SEQ ID NO: 426427 - DNA, 76 bp, Homo sapiens
gccagccaacccagatgaaatcggcaactttataattgagttacatgggaataggactctcggctcaaggcgtcaa

SEQ ID NO: 426428 - DNA, 75 bp, Homo sapiens
agacgacgttcccgaagcaaaagtccattcagaaaagacaagagccctgtgagcaccagtatgcatgagcgggtg

SEQ ID NO: 426429 - DNA, 83 bp, Homo sapiens
ccctgatggaggaagtgctcctgctgggcctcaaggaccgcgagggtggcccagttgaaatccttcccttcctctaccttgga

SEQ ID NO: 426430 - DNA, 88 bp, Homo sapiens
agaaatggagacgagatcagcaaattgagtcaactagtgaattcaaacaacttgaagttggcgagctttagcccctctcctccttctc

SEQ ID NO: 426431 - DNA, 83 bp, Homo sapiens
cggagatggtgcagaagatggaggagcagcccctgtcaaagggaacaggaagcagtccacggagggtgacgccctagacccac

SEQ ID NO: 426432 - DNA, 90 bp, Homo sapiens
gaaaatttctccaaaaaggatgtcatgttcctggcctgagcagttgaagacatctcttcatcgaggactaacccctacagttatgcaatg

SEQ ID NO: 426433 - DNA, 82 bp, Homo sapiens
gcgacaagccgctggcagccgcggatctcaccgccgctcaggaattcagaaggagctggcggacatcactttagaccctcca

SEQ ID NO: 426434 - DNA, 90 bp, Homo sapiens
cgagcagctgaacgagtgcaagcagctgtccgagtcccaggtcaagagcctctgcgagaagcaatggcaccagcatgatatcattgatca

SEQ ID NO: 426435 - DNA, 100 bp, Homo sapiens
cttgtggatattatggctaataacacaacaagtttagggagtccatggccagaaaacttttggggagtcaaattgactttatcagctttaatcgatggga

SEQ ID NO: 426436 - DNA, 100 bp, Homo sapiens
ctgacttcaagaatgaagccacggacccttgcgattttcagctgaactctcatctctcaacactggcaaatattcataagatctaccacacccttaataa

SEQ ID NO: 426437 - DNA, 75 bp, Homo sapiens
tttatcagcgctccacagccatcttcttctactgtgaccgcggcacccagcggcttgaattcggagtgatttacc

SEQ ID NO: 426438 - DNA, 98 bp, Homo sapiens
aaaagagccaaactcagctcgcccggtttctcggcgaatgacagcacagggaaatgatcttcattggttagcatgtgccttatatgtggcttgcagaa

SEQ ID NO: 426439 - DNA, 75 bp, Homo sapiens
tggggaaaatctccccggtgactttcagttgacttagatgccatcccaagtgctaaagtacgagagcaaagaatg

SEQ ID NO: 426440 - DNA, 75 bp, Homo sapiens
atgtgaaaactctgttactgaagaacagtccactttggaaagtgaagaatggaatccttgggaaggagatgaaaa

SEQ ID NO: 426441 - DNA, 90 bp, Homo sapiens
ggcacgattctccctctcctagaggcgacagtgatgtgtgttctgaaattgtgaaccatgagtctagtacttaatgatctgcttatctgc

SEQ ID NO: 426442 - DNA, 101 bp, Homo sapiens
ttctgcccgggagacctaaccgccgaatgcgttcggaggtccagggagtcggtagtaagggatggcgggacgtcaccacctttttttcggggaaagcagag

SEQ ID NO: 426443 - DNA, 98 bp, Homo sapiens
ctatcctcggtgctgtggtgcagagctagttcctctccagctcagccgcgtagctggtaatgccgctgtcatcaaatatgaggagaaacctccaaaac

SEQ ID NO: 426444 - DNA, 77 bp, Homo sapiens
tatggggtcatcgcagaggctttgctcaggttgcaattgatgcaaaagtgttgatcgaatctacagatgcagaaccc

SEQ ID NO: 426445 - DNA, 90 bp, Homo sapiens
gctgttcgacttcgatgatttactgaaatttgatgacctagatggaacacatgctctgatgtaacagagtatgcaagaggaggagacctg

SEQ ID NO: 426446 - DNA, 90 bp, Homo sapiens
tgaaagactgacccgtcctggttcctcttacttcaatttgaacccatttgagattgacgagatgcctgaggctgccgtgaaatcaacagc

SEQ ID NO: 426447 - DNA, 97 bp, Homo sapiens
aacaagaaataccgtgccctgaggttggacgtggggaatttctcctggggctcagagtatgtatatagctctgtcttcagtccatgctctgatcctt

SEQ ID NO: 426448 - DNA, 100 bp, Homo sapiens
ggaaggagtgttcccagcttgcaaactccagctttgcctgtgagaggaacaagcgtccctgatccagaaggtgtcatccgtccttggctcaggatttgga

SEQ ID NO: 426449 - DNA, 83 bp, Homo sapiens
gccgtccttctccactttcgccagcccgtgccgcgagcgcggcctgcaggaggttggccgactgcgatgtgagtgacagcagc

SEQ ID NO: 426450 - DNA, 50 bp, Homo sapiens
agaaaagcgagaccgcgtgcgaggaccgatgaaggatttgggggcagagc

SEQ ID NO: 426451 - DNA, 75 bp, Homo sapiens
gaacagatctttgactgggtagaggagcaatttacagcaatgagggatttatacatgaaaaatggacaaggattt

SEQ ID NO: 426452 - DNA, 89 bp, Homo sapiens
gaattcctcaatgactgccctctaaaggaagaggttatgatgtgattgctcaagcccaatctgggactgggaaaacggccacatttgcc

SEQ ID NO: 426453 - DNA, 88 bp, Homo sapiens
cagccgtcccctctgcagcctctctgacaagtgggtacaggcatccttcacctgctattgttgcaagaacagtcagaattttacatac

SEQ ID NO: 426454 - DNA, 95 bp, Homo sapiens
acgccgcagcatggatgtgtcgcgccagaatcattaagcagcttcgagtctggaaaatttgttgaatgtactgagcaattagaattgttaccagg

SEQ ID NO: 426455 - DNA, 80 bp, Homo sapiens
ggtctttgccaatgggaaaaccatagagaacttcctggtggtgaacaaggtgcttttctcaaactttcctgatcctgcgg

SEQ ID NO: 426456 - DNA, 75 bp, Homo sapiens
gaatttggaaacacatgtgggacatacaagcgttggatatagaggtgggattgttcctccagcagctcaacagct

SEQ ID NO: 426457 - DNA, 85 bp, Homo sapiens
ggaggctccgttgcctgctcccggagggagacgcgctgccgaggagaacccagcggctggaggaacagcagaccttagaggaggc

SEQ ID NO: 426458 - DNA, 100 bp, Homo sapiens
ggcgatcataaagaaaatcgacttggactcagatggctttctcactgaaaccctgaatcgtgtgcacttacttgggcgagtgggtcaggaccctgtcttg

SEQ ID NO: 426459 - DNA, 74 bp, Homo sapiens
tgaagccccccttccccgcagacgtgggagacgcaggtgcccgcgctgctggaggccggcttccggagggagaa

SEQ ID NO: 426460 - DNA, 100 bp, Homo sapiens
cgggccatacccaataaccaggtgcttggcaaaatcgagcgggccattgtcaggatggctaaaggtgaccccaagaaaccaaagggcaagatgtccgctt

SEQ ID NO: 426461 - DNA, 100 bp, Homo sapiens
gctatttcccgcaccaatgagaatgacccgttcatggcctcccacgggaacgacgccgcgagagccaggtttgagtccaaagtaccctccttctactacc

SEQ ID NO: 426462 - DNA, 50 bp, Homo sapiens
aaggagaaataggcgagggcctgtggattgtgcagactggtgcttaaaat

SEQ ID NO: 426463 - DNA, 80 bp, Homo sapiens
gactccttcggcagtccacccaccgccgccgcctcccagatcaaaaaccatttctccattgcatttatcatctataaatt

SEQ ID NO: 426464 - DNA, 76 bp, Homo sapiens
gtgttcaccatcctggccccggaagaacatgccgagtttttgcactgcaagtccaaaaagtttacagactttgatg

SEQ ID NO: 426465 - DNA, 75 bp, Homo sapiens
tctcatctttcttcagaagttacaaagtgacagctatattgtgcgtgtcaaggctgtggttatgaccagagatga

SEQ ID NO: 426466 - DNA, 100 bp, Homo sapiens
gttcgaggccctgcggagctgcttcgccgctgcgggacctcaggatggaaaccagcagcctgcaccgcccgagaaggtcggctgggtccggaaattctgc

SEQ ID NO: 426467 - DNA, 83 bp, Homo sapiens
ggggtgttccacgctatgttgggagtgttcgctttcgaggctcagaaatcctggatagaaagagcattttataaaagagaatg

SEQ ID NO: 426468 - DNA, 83 bp, Homo sapiens
gatctacaagaaaatccacaagaacgcactttcctcccagagacaagaggagcagcagcggcaccgcccctcaccctggaggg

SEQ ID NO: 426469 - DNA, 98 bp, Homo sapiens
ctcggctacctggtgcaggtgaagcccatggcaggtatcctgtggtctgaggccatcttcctcgaggcaaggccccagaggaggaccaagagcgtgga

SEQ ID NO: 426470 - DNA, 90 bp, Homo sapiens
ctcctcctgctgctactgtgtccagcgcagctagtatgttcaacacaccaggaatgcagagcttgttgcaacaaataactgaaaacccac

SEQ ID NO: 426471 - DNA, 101 bp, Homo sapiens
tgctgtttgcaagggaatcaaagaagtaggagatgatacttcctcttcttgacagccttatggttaagccatgaagtcggggggcacgcagctgaagctca

SEQ ID NO: 426472 - DNA, 98 bp, Homo sapiens
ggaggagctgcagcaagcgggagaccaggagctcctccaccaggccaaagacttcggcactaccaagtcaggattgttacccccaccacctgcgctcc

SEQ ID NO: 426473 - DNA, 100 bp, Homo sapiens
atacaaaagacaaggaagatgagctgtcctttcaggaaggagccattatttatgtcatcaagaagaatgacgatgatgctcttcccgagggagatgctag

SEQ ID NO: 426474 - DNA, 100 bp, Homo sapiens
agagctgggaaaatgtaaaatggcaggatggcagcagatgaaagctcacagaacactttgcggctccagttcaaggcaatgcaggagatgcagcacaaac

SEQ ID NO: 426475 - DNA, 82 bp, Homo sapiens
gtactgactctaggaagggctggagttgttttgaatgggcgcccgtaagagaggcaccatgactcctgtgaggatgcagcac

SEQ ID NO: 426476 - DNA, 82 bp, Homo sapiens
ggaagctttggatcagacttttgtgttgcagttcggcactgccagtgaaagatgtagaagataaacctgaacaacaaaccag

SEQ ID NO: 426477 - DNA, 123 bp, Homo sapiens
ggccagcgctcctgggcatagtcctcgccgcttggctccgcggctcgggtacaccaggggttggaaaaaccacactaggcaaagaacttgcgtcaaaatcaggactgaaatacattaatgtgg

SEQ ID NO: 426478 - DNA, 74 bp, Homo sapiens
ggctgcaggggtcagtgatggagctgcttcaggctgacttatccttgtataatgaattccgattgtggaaggat

SEQ ID NO: 426479 - DNA, 90 bp, Homo sapiens
actggaggagcgatttgccatcgtgctgttatgtcacgcatctgatgaagcgaattcagagaggcccagtaagaggtatctccatcaagc

SEQ ID NO: 426480 - DNA, 75 bp, Homo sapiens
aagcaaacacaggattcaccacagtacttcacatcgtcgttcacatggggaggaagaacgtgcaaaacgtgagga

SEQ ID NO: 426481 - DNA, 75 bp, Homo sapiens
ctcaactccaaccacgacggggccgacgagacctcagacaatgcagatcttcgtgaagactctgactggtaagac

SEQ ID NO: 426482 - DNA, 98 bp, Homo sapiens
tttactggagtaggtgttagtaaggtcgcccggctcatggagatgggattttccagaggtgatgctttggaagccctgagagcttcaaacaatgacct

SEQ ID NO: 426483 - DNA, 95 bp, Homo sapiens
ccagagtatgtcctggcctatattgactatctttctcacctcaatgaaagtgaaattcgttattctacatggaagaaagctgtgatgaagtcaat

SEQ ID NO: 426484 - DNA, 108 bp, Homo sapiens
tacaacagtttggcgtgcaacatggggcttgagaaaggtcttccccagctcctcaggaggggtcggagcagcccgccagcccagcctctcccctcagcagccgccaga

SEQ ID NO: 426485 - DNA, 96 bp, Homo sapiens
gcgtactatgagcacattcaccaggcggtccggctttacaatctgccaggtggagttggcatgaacttaacagcagcagatactgtgatttttgtt

SEQ ID NO: 426486 - DNA, 83 bp, Homo sapiens
ggcgaggtggccggagccgtgtggaccaggaggagcgctgacgtgatgcctgggccacggcaggagctgctctgtgccttctg

SEQ ID NO: 426487 - DNA, 75 bp, Homo sapiens
tcctacctggctgagttcctgctggagaaaggctatgaggtgttcaggcgcttcgtggaggttggccgggtggcc

SEQ ID NO: 426488 - DNA, 80 bp, Homo sapiens
tccctccaagacaactgaatggacaccatggatacccagggaccagtctcccagccttttcagcagcctgagaaacctgg

SEQ ID NO: 426489 - DNA, 100 bp, Homo sapiens
cttttggccatggtagtaaccagtttgggcttcctgtagacacccttttcctgcgcaacagagctgggcctccctttctctaatttcccccttaacatgc

SEQ ID NO: 426490 - DNA, 76 bp, Homo sapiens
ctagtttcgcagatagattgtggaagacccggcactacgtgggctcagcagctgcttttgcagggacaccagagca

SEQ ID NO: 426491 - DNA, 82 bp, Homo sapiens
acacggcctctgatttcatagaagcaaatggttatgagccttagagtttctgaactccaagtactgttgggctacgccggga

SEQ ID NO: 426492 - DNA, 82 bp, Homo sapiens
ctggagtaccgagtcttcctcagtcagcccaaggccaaccccactgtcactctgttcccgccctcctctgaggagctccaag

SEQ ID NO: 426493 - DNA, 90 bp, Homo sapiens
atggcctcaatatgtgccgccagtgtttccgtcagtacgcgaaggatatcggtttcattaagtacctggctttcctccgcaagcggatga

SEQ ID NO: 426494 - DNA, 100 bp, Homo sapiens
cagaagcctcagtggctgttgacagatttaagcattagtgccagcagtagttcccaagggctgtctcagccatccacccagacgactcagtatctgagag

SEQ ID NO: 426495 - DNA, 76 bp, Homo sapiens
aaacgcaggcactgcctgctctgaaaagatttcaaataccgagtcatgtgctgttcctggggcttggatgatgtag

SEQ ID NO: 426496 - DNA, 90 bp, Homo sapiens
gcgaccggacgggtctaggtgagacagaagccaaacaggaggaggaagtggaggaaagatgtagcacttaagcctcaggaacgtgtggag

SEQ ID NO: 426497 - DNA, 100 bp, Homo sapiens
gaaaaccaaggctgaaggggatcgtctaaaagaggagtcagcaagaccagcccctcctcctcctcagccctactcaacatgaagatgatgaggatgaaga

SEQ ID NO: 426498 - DNA, 87 bp, Homo sapiens
atatgtcacgaggaatttacaaagtcactgctagttggattgaagcacacctgccagatgattctaaagacacatggaagaagaggg

SEQ ID NO: 426499 - DNA, 75 bp, Homo sapiens
acaagatccgcctgaacaacgccatctggagggcctggtatatccagtaatctccaatgaaaactatgttcctca

SEQ ID NO: 426500 - DNA, 90 bp, Homo sapiens
cacattttgcacaagggcagtcaccatgaaagtgttctaagaacggaagcatctgggctggatggaatttagcatcaagcagagtcccct

SEQ ID NO: 426501 - DNA, 96 bp, Homo sapiens
ggcggcaccctgtccccgaggaggggaccatgacacagtggaagttaaacgagctgagcctcgggacagcaagagccaagcgccgggacagccagg

SEQ ID NO: 426502 - DNA, 101 bp, Homo sapiens
ggagaagagaaatcaggatcgcttgaggaggagagaggagagggaacgggaggagcgtctgagcaggaggctgggcggggagcgtcggaccagaagagaat

SEQ ID NO: 426503 - DNA, 50 bp, Homo sapiens
atcgagccagaagcagtatttgtcctgggttttggccaaattgggcgagg

SEQ ID NO: 426504 - DNA, 100 bp, Homo sapiens
agatcaaagaaaacagatcttctccagattggcagaaagttgatataggtggacttttttacagatcatggaagggaagtggttgctgtgtatgttactg

SEQ ID NO: 426505 - DNA, 89 bp, Homo sapiens
tggacatgaacaaccctcaggactttattgattgcttcctgatgaaaatggagaaggtctgcaataatttccctgctctcatcgattat

SEQ ID NO: 426506 - DNA, 74 bp, Homo sapiens
acccgggagtaggagactcagaatcgaatctcttctccctccccttcttgcaacttcccagccagaagacagtc

SEQ ID NO: 426507 - DNA, 100 bp, Homo sapiens
atgatgagggtccagtgtccaaccagggctacatgccttatttaaacaggttcattttggaaaagaattatatccagatcgagagacagaagattctgaa

SEQ ID NO: 426508 - DNA, 130 bp, Homo sapiens
ctggacgtggagaagtggatcgacgggcgcctggaggagctgtaccgcggcatggatgacgacagatatgagcaggcgagtgacgtccgggcacagctcaagttttttgaacagcttgatcaaatcgaaa

SEQ ID NO: 426509 - DNA, 99 bp, Homo sapiens
gtctggggctgcctggccaccgtgtccacccacaagaaggtgaaaggtgtagcagtcactcggcctacacccacagcatcgaccttgtgaacccagcga

SEQ ID NO: 426510 - DNA, 50 bp, Homo sapiens
atttacccagaagtagtccatatgagctaatgtcaaaccccgaaattcca

SEQ ID NO: 426511 - DNA, 133 bp, Homo sapiens
attggaaataaacctgtggagactatcggttttgactctattatgaaacagcaaaggcctgcactgcccaaagtcttggaaacttgctggatatgatgtaccgggagccagcacgatggtcctacacattcca

SEQ ID NO: 426512 - DNA, 100 bp, Homo sapiens
agaaaacagaaatcgaaacagatacagagatgtaagcccatgggtagaaatatttctgtcatggctcattcaaagactaggaccaatgatggaaaaatta

SEQ ID NO: 426513 - DNA, 82 bp, Homo sapiens
agaaactagagcaaataaccgttttgaaattgacccccaggcccacctgggatagtaattgttgaggaaataaccgaaagta

SEQ ID NO: 426514 - DNA, 75 bp, Homo sapiens
cagaagtgtctggagtggttgattcacaggaaatctgaaatagagtactatgctatgttggctaaaactggtgtc

SEQ ID NO: 426515 - DNA, 50 bp, Homo sapiens
cgtccccgaccttgcctgaacaagtgaagaaaatatttggaagctctgtg

SEQ ID NO: 426516 - DNA, 75 bp, Homo sapiens
cgctgccagtttgcacagcagcagggcggcgactggcggcgcgatggacctgaccgggctcctgctggacgaaga

SEQ ID NO: 426517 - DNA, 100 bp, Homo sapiens
cgaaaacggaagcgcagggagaaggaagaggtgtttgaaaagccaaggccacctttgatgccatttctaagacctacagctacctgacccccgacctctg

SEQ ID NO: 426518 - DNA, 100 bp, Homo sapiens
ctggcgttccaccagcaaccatgagtggttccatgatgggaagtgacatggatctatctggttcaatagatgacctccccatggggacagaaggagctct

SEQ ID NO: 426519 - DNA, 100 bp, Homo sapiens
aagactggggctgctcccatcattgatgtggtgcgatcgagtgctccaagctcccgaagccgaagtctcactttgctcccacatggaacacccaattctg

SEQ ID NO: 426520 - DNA, 75 bp, Homo sapiens
gcctctggtccacggactcagccgaggagatctggaatatgaagaccacagaatgttcaaatacctttaaatccc

SEQ ID NO: 426521 - DNA, 87 bp, Homo sapiens
gatgtactgtgcttggctggaaaaccccaaaagtgtacataagatgtccctggtagatttgggaaagaagcttttagaagcggcacg

SEQ ID NO: 426522 - DNA, 100 bp, Homo sapiens
accaagcgatggctgcttacttcacagcagcacagctgatgaaagggaaacctggacaagcatgaagaactagaggagcttgtagcaaggttcttaggag

SEQ ID NO: 426523 - DNA, 75 bp, Homo sapiens
gccgaaggacctgcggcatctgcgggcctgtttgctgtgttcgctggtcaagatgaagacagagagggttgataa

SEQ ID NO: 426524 - DNA, 100 bp, Homo sapiens
atcgagatgacaggtccacagatcgcctgccttcagctcacacatggaactgtggctgcaccatctgtcttcatcttcccgccatctgatgagcagttga

SEQ ID NO: 426525 - DNA, 121 bp, Homo sapiens
tcagaggtagtcggacctttcccgctggcgcgcagcctcagctaggtatgcagtggaactgatgaagaccctgatgataaaaacgcaccctttcggcaacggccattttgcaaatataaag

SEQ ID NO: 426526 - DNA, 90 bp, Homo sapiens
ccaaaattgtggaaaagtcactctggctgtgggtgagcgtggaggatgctcagatgcacaccgtcaccatctggctcacagtgcgccctg

SEQ ID NO: 426527 - DNA, 143 bp, Homo sapiens
actgtgcagctccagagagacgtgaaacatgtgaacactcaagtgaagcaaaagccttccatgattacgtactaggttttgacaagcttgcatcatgcgtgagtataagctagtcgttcttggctcaggaggcgttggaaagt

SEQ ID NO: 426528 - DNA, 98 bp, Homo sapiens
cgagggcgagacacgcctgggcccaggtgtggcgtctctgtccccatctggttttagcaattctgtggtgttcttggtcacacatttatggagtttct

SEQ ID NO: 426529 - DNA, 123 bp, Homo sapiens
gagctggggggagagaggcagtccagccgcaggggccacccgaacagtctctcctcctcacagaagcctggccagaacacaaagcgtgaatccggaagaaaagttcaatctggaaacatcaat

SEQ ID NO: 426530 - DNA, 90 bp, Homo sapiens
ggagggccggcggggaccgccgggagcgcgcggatgtcggtgttcctggggccaggtgctggagaatctggtaaaagcaccattgtgaag

SEQ ID NO: 426531 - DNA, 90 bp, Homo sapiens
gtacctgcagaaggtctctggagacatcttcagcagagcaaacgaggcccctgagagctccacctagttcacaggataaaatcccacagc

SEQ ID NO: 426532 - DNA, 75 bp, Homo sapiens
ggaaagccgtggccccgagggcggatccgagcgtggggtagagcagcggctgccatgctcttctgtggcttcatc

SEQ ID NO: 426533 - DNA, 100 bp, Homo sapiens
tcaaaggataaccaaatgtgccgtgatgtatgtgaacaggtccatctcccatttgcagtggttggcagcaccgaagaggtgaagattggcaacaagatgg

SEQ ID NO: 426534 - DNA, 100 bp, Homo sapiens
tcgttacccgcagcggcgccattttgcccaaaccggtgaaacccagggcagtgttgctgcatattgcatggatgaaaggctgaaggctgcctcctcttgc

SEQ ID NO: 426535 - DNA, 83 bp, Homo sapiens
ctcagtgatctgccttaagggcagtcaatggtcagatattgaagagttctgcaatcacaggtgatttggcttctgcacagtta

SEQ ID NO: 426536 - DNA, 83 bp, Homo sapiens
gctttccactcggctcctgtcgtccgttctctcaggctcccgttcaggtgagcgagtgctgtgctttcatgggcctcttcttt

SEQ ID NO: 426537 - DNA, 100 bp, Homo sapiens
gctggacagtgggggaaactgaggcctgagcggaccatggcagccgtgaccatgtcggtgcccgggcggaaggcgccccccaggccgggcccagtgcccg

SEQ ID NO: 426538 - DNA, 97 bp, Homo sapiens
agaccgtacaggttgagggatgggactggaaatcaaatgttacaggctggaggctctcaggtcatttttaccaacccattggagatagtgaagattc

SEQ ID NO: 426539 - DNA, 80 bp, Homo sapiens
cttccgtttgttggtggaggaggtggcaggcctcggcgatcccatgagctgcgttccaaggtggtttccctgcagctgct

SEQ ID NO: 426540 - DNA, 80 bp, Homo sapiens
aagtggttcatcgagcagaggctgctcatgttctccttcgtcaacgaccggagtacgagagggcctccaaagtggaccag

SEQ ID NO: 426541 - DNA, 75 bp, Homo sapiens
ctcaagcaaagaagagttgagcacaatcagatcaaatggggagcctgcggccttgtgttggcaggcaatgcagtc

SEQ ID NO: 426542 - DNA, 101 bp, Homo sapiens
tgaaagtcagaatttttctcctgtggtgagagatagctccaaacgagaatggaagccgctggaggaccgtagctgcacagacataccatggctgctgctct

SEQ ID NO: 426543 - DNA, 100 bp, Homo sapiens
gatgacacatcagcatttgtttcccttagccagcccgagcaagtaaagattgtctcccttgagaatgttttgctggatgtcaaggagctccagaggggaa

SEQ ID NO: 426544 - DNA, 100 bp, Homo sapiens
ctccagtttggggtgtctacttctctgtggaagtattacactagccctgggaaatgcacagaaattgccaaaaggtgacttaagagattaaaattaattt

SEQ ID NO: 426545 - DNA, 50 bp, Homo sapiens
cctcctaagtagctgggactacagagtgccagctgatgaagacggagcgg

SEQ ID NO: 426546 - DNA, 74 bp, Homo sapiens
aagttggttggagatgtggattttgaagcctcctgacaaggtgatccgggcgggccccgcaggaattttatccc

SEQ ID NO: 426547 - DNA, 100 bp, Homo sapiens
ggattccaaaccgatacttaggccagcccagcccctttacacacccacacctcctcagaccagggatacctttcgtccctgcatttaaaggctttcactt

SEQ ID NO: 426548 - DNA, 75 bp, Homo sapiens
gcggggggatggacagttttttgctgtgagtgttgtttgcccagaaacaggacagtaataccccacttttattcg

SEQ ID NO: 426549 - DNA, 76 bp, Homo sapiens
gcgttggttcccctctttgacctggtaaatgcaggcttttatgcgagaggtagcacaggcggagtgcagcggaggc

SEQ ID NO: 426550 - DNA, 74 bp, Homo sapiens
gtcacgcaaacaacttatcagtagtgacttacagtaaggattttctattgcagcagaccatgctacgagtgaag

SEQ ID NO: 426551 - DNA, 100 bp, Homo sapiens
ccaggagctaaacatggaaatattcaagtgggatgtgtagactgttcaatgcaacaaggcaagggaacgagcagccgccaacaaattagtccgtcgcact

SEQ ID NO: 426552 - DNA, 75 bp, Homo sapiens
gtgccaggcccgcggcggccgaaatccgcggtattgcattcctgctgaggaggagaacaagctggaagatgtggt

SEQ ID NO: 426553 - DNA, 100 bp, Homo sapiens
ttgaagaaacagaggtcaaaggaaaaagaaaaaggggtcgtcctggccggcctccacagagagtgaggaagaagatgaaatggaagttgaagaccaggat

SEQ ID NO: 426554 - DNA, 100 bp, Homo sapiens
cttaggaccattctgcagccactcagtgaccttggctagaaaccaatggctgtgcggcgtgagacagagattgcgaagagactgaacacaattttagcac

SEQ ID NO: 426555 - DNA, 75 bp, Homo sapiens
tggagtacatcacccgctacatcgccagtctgaagcaggcatgttatttgaaagcaattgagacgcaaccgaact

SEQ ID NO: 426556 - DNA, 100 bp, Homo sapiens
gcaatgataattcccaggacagtcagtctggtactaacaatgcagccagagactgctgctactttgaaacgtacgatagaggccctgatggacagaggag

SEQ ID NO: 426557 - DNA, 78 bp, Homo sapiens
aagaggagaaggagcagtccgtgctcaacattttcttcctctcgcaaatctggaatgttcaccaaacattgaaacttt

SEQ ID NO: 426558 - DNA, 90 bp, Homo sapiens
cggggaattgtgaggcggactgcgagggaaagggggccttgttgagtccgccagaacattaaccaggtggtatttgttggaaatttcttg

SEQ ID NO: 426559 - DNA, 82 bp, Homo sapiens
cgggacaactcggggcggccactcttgccaggaggcataacgaaggaggcccaacttcattcaataaggagcctgacggatt

SEQ ID NO: 426560 - DNA, 76 bp, Homo sapiens
tacaagatttaaaaagcatcgtagagactattgggaagaagttacctgcaactacagcaactccagactcatcaaa

SEQ ID NO: 426561 - DNA, 89 bp, Homo sapiens
tctgaacctttgctgtctatggatctgctctaaaccttatagcctgcttatgggggaaggtcttctggatttggcgacatcttactgtg

SEQ ID NO: 426562 - DNA, 100 bp, Homo sapiens
gaacctgacagaatggatagaaattttaaagactgttgtgaacagggatgtacctaatgggaaatcagccttatggtcccacctgttacattatcaggac

SEQ ID NO: 426563 - DNA, 97 bp, Homo sapiens
gccgccgcccccgggctcgcggcctgcagtgaattttgaagattgcaccggtcgacaaaggacagcctatttttccctcgacacccgattcaaagtg

SEQ ID NO: 426564 - DNA, 101 bp, Homo sapiens
ttgggcttcatcatggaggactacctgcagggttgtcgagctgctctgcaggaatatgatgaagaatgggctaagaaaattcagagtgaaaagtttcgctg

SEQ ID NO: 426565 - DNA, 74 bp, Homo sapiens
tactcctctagtgaccgagaataatcagcttaaaatggctcgtttcaccattgtggatgggaagatggggaaag

SEQ ID NO: 426566 - DNA, 75 bp, Homo sapiens
aagaccggcatgccctattctgtgggcttccgcgaagcagttgcagtggtgcagaatggctgacctcagtcttgc

SEQ ID NO: 426567 - DNA, 90 bp, Homo sapiens
caactgtcaccttgatgctggcgatgctgagctccctactggctgagggcagagactctcccggtactccaaagattcaggtttactcac

SEQ ID NO: 426568 - DNA, 83 bp, Homo sapiens
aggactcagtgatctgccttaagggcagtcaatggtcagatattgaagagttctgcaatcgtctccgtgaggccgggtgacgc

SEQ ID NO: 426569 - DNA, 90 bp, Homo sapiens
gtcatgtctcgctacacgaggccccccaacacctccctgttcatcaggaacgtcgcggacgccaccagctccctctcactggcagcacct

SEQ ID NO: 426570 - DNA, 100 bp, Homo sapiens
ggaagtcataccctattcaggcagtagaggaagaggcctcagactccctgggtgggggccctgagggcccgtgcttctgccccaccccctgcaacctgac

SEQ ID NO: 426571 - DNA, 100 bp, Homo sapiens
ctccactgccgtcaactcctgttctcctcagagcctgatgtgtatatctcatgattgatatggagaaactagtcatgggccaaaggtcaagatacttctc

SEQ ID NO: 426572 - DNA, 51 bp, Homo sapiens
ctacaatcacctaatgcccacaagagtaacagttacccctcaatgagcgac

SEQ ID NO: 426573 - DNA, 75 bp, Homo sapiens
attcgcagtggtcgcttcttctccttgcttcataaacaagcagatatgcaagaagagaaaaaccgaatcgaaaga

SEQ ID NO: 426574 - DNA, 98 bp, Homo sapiens
accagtggatgaggaagccttcgtgacaaatatgccagaggattatcctgatcagttcgatgatgtcatggattttattcaagccaccattaaaagac

SEQ ID NO: 426575 - DNA, 83 bp, Homo sapiens
cgcgcccgcgccctccgcgcgacgccaggtgtcgtgaaaactacccctaaaagccaaaatgggaaaggaaaagactcatatca

SEQ ID NO: 426576 - DNA, 60 bp, Homo sapiens
taacaaatttacattgtatcctgctgtgaattcagtatccttagggaaaaatggagttgt

SEQ ID NO: 426577 - DNA, 82 bp, Homo sapiens
gatggtcggcggcgcccggatgggcagctgagtttttcagaagaagtgaagtcaagatgaagaaccatttgcttttctgggg

SEQ ID NO: 426578 - DNA, 83 bp, Homo sapiens
tataaacatgtggtacagagtgttgagaagtttattcagaaatggaagacttataaccctgccttctcccggttggaaatctg

SEQ ID NO: 426579 - DNA, 98 bp, Homo sapiens
ttttctttactctggggtcccggctgccctgtggcctcgctcctcggagggatgaacgtgaagccagagaaaatgtgaagagagagcaagatgaggcc

SEQ ID NO: 426580 - DNA, 100 bp, Homo sapiens
aagatgagattatgcctgaggttgtggaaaaggaagattactcagagattatagggagcatggagatggagtttcactgtgtcagccaggatggtctcga

SEQ ID NO: 426581 - DNA, 74 bp, Homo sapiens
ctctcagcaccctcaccgtctactgccaagaagacgctggagggaggctgttaggagggactctgagcttcaca

SEQ ID NO: 426582 - DNA, 98 bp, Homo sapiens
gagaacagtgcggatactgggggcgatggggagagctgcctatctcaacaggacggagcagcagcagtgagcggggttcccggagaggccagcgtggg

SEQ ID NO: 426583 - DNA, 74 bp, Homo sapiens
gtccggacccgctgtggccacgttaagcactatcctttgtactccctcaacgtggcctccatgtggttgaagct

SEQ ID NO: 426584 - DNA, 101 bp, Homo sapiens
gcaagatgatgcagtgcgcacagtgcgatcactgggtgcatgccaagtgcgaggggctctcagataagtatgctgtgcgcttcatccctcgggagaatggc

SEQ ID NO: 426585 - DNA, 75 bp, Homo sapiens
tgtcggaaagatgttttaatgattcttccatatgtggcaattgtccaagaaaagagaaagagtgtttatctacat

SEQ ID NO: 426586 - DNA, 82 bp, Homo sapiens
ggcgagcgaggaggatggcggagtcggggctcctgacggttgtactcagactatctctactttgcaagttcgaataaatccg

SEQ ID NO: 426587 - DNA, 90 bp, Homo sapiens
gagaccatttttcccaatactttatgtaataagctcccttccaggtcaatccaaactggagctcaactttcagaagagaaagacgcccca

SEQ ID NO: 426588 - DNA, 75 bp, Homo sapiens
tgcctgccacctccccaaaggcaaatctctagtgatccctgaaaagttccagcatattttgcgagtactcaacac

SEQ ID NO: 426589 - DNA, 96 bp, Homo sapiens
atcaactttacccctcgagtattcccaacagctcttcgtgaatcacaagtagcagaagaggaggagatatgtgcagcgggggctacagcgagtggg

SEQ ID NO: 426590 - DNA, 100 bp, Homo sapiens
gcggagccaagatgcgaatggggacttcagatgagtcaaaaccccatcctagtcctttcaggagcttccttgatgtttttgtggaacttgtcatgaaaga

SEQ ID NO: 426591 - DNA, 90 bp, Homo sapiens
gtctagtgccagccaagtgattgctcctactcaagtgacagtggccataaaatgcagtaaaaacaaatccagttcccaagaagctgtaca

SEQ ID NO: 426592 - DNA, 74 bp, Homo sapiens
ccggcacttggcggaggagctgcggttgctcctgcctcgagtgcgggacagtggtcttgaggtgttagcagtgc

SEQ ID NO: 426593 - DNA, 100 bp, Homo sapiens
aatggattttccaaaaatccctagagagagcatcacaatataatattaggggtgttacgtataggctcactcaagaaagggctaagaactctgtgtatag

SEQ ID NO: 426594 - DNA, 80 bp, Homo sapiens
gctgtccctgaatggctttggtggcatctgcctaacgttcacttcactcacgtgtcacaccatgtctgaccggaaggcag

SEQ ID NO: 426595 - DNA, 76 bp, Homo sapiens
aggagctaaagcagcgtgcgttcagccctgggtttcccacagtcaaatcactcgcctctacagccggttcaccagc

SEQ ID NO: 426596 - DNA, 75 bp, Homo sapiens
gtggccatcaagaaaatgtcttatagtggaaagcagtctactgaggagtatccaacccttacaaccttcttcgaa

SEQ ID NO: 426597 - DNA, 90 bp, Homo sapiens
cttccgcaaggaccctttggaaggccgggtgggccgagatgctgcattcctggcccgagagaaagcgaaagcagatgctgaatattatgc

SEQ ID NO: 426598 - DNA, 83 bp, Homo sapiens
ttgttgaaagactcagatggttattaatacgttttagcggaacaacatcaagcctttttgtatcagttaatgcaacatcacca

SEQ ID NO: 426599 - DNA, 50 bp, Homo sapiens
gaaacgcttacttatttgaaccaagggagtaatgtggtcattgcatcccg

SEQ ID NO: 426600 - DNA, 76 bp, Homo sapiens
atgatatccctgtatctgctgctgctgctcatatgatcgaactgtgagaatttggaaggctcgcaatttgcaagat

SEQ ID NO: 426601 - DNA, 100 bp, Homo sapiens
atgtgagggtgaaggctgtgctgctgggagccacattcctcattgagtacgaccccagcaaagcgacctttgtgaaggtggtgccaacccccaacaatgg

SEQ ID NO: 426602 - DNA, 90 bp, Homo sapiens
ttgaagcttggaattacatagctggaaaggatcttacagctgagatctgtatctgtggacctgaatgttgatccctcgcttcagattgac

SEQ ID NO: 426603 - DNA, 75 bp, Homo sapiens
atcaccacgcagaacgtcaacaccaagtgcatcaccatccccaggtcccttctcataccgtcgtggcccgaagta

SEQ ID NO: 426604 - DNA, 100 bp, Homo sapiens
accagcaggagcagccaaccagcagcagccatcatggagaggcggggtttcaccatgttgcccagactggtcttgaactcctgagcttaagcaatccacc

SEQ ID NO: 426605 - DNA, 101 bp, Homo sapiens
atcatggaggactacctgcagggttgtcgagctgctctgcagaataactgaagtgaagtgatggactccgatttggagagtagtaagacgtgaaaggaata

SEQ ID NO: 426606 - DNA, 75 bp, Homo sapiens
ttccaagggagatgacccagaggatgccaaggcaaaggaaacccagcgtttgctggcagaaccagttcctggcat

SEQ ID NO: 426607 - DNA, 90 bp, Homo sapiens
ttcgcagtggtcgcttcttctccttgcatcttcatgatacagttaagaggaatcttgacagcgccacttcccctcagaatggcgatcaac

SEQ ID NO: 426608 - DNA, 50 bp, Homo sapiens
ggaacttcctgttctgatagcgtggaagcaaaacaagctatcgatcaggg

SEQ ID NO: 426609 - DNA, 80 bp, Homo sapiens
ccactgaagacgtctgcgtgagaatagagaccaccgagatgtgaagttcatttccaatccgccctccatggtggcagcgg

SEQ ID NO: 426610 - DNA, 83 bp, Homo sapiens
ccatggagacccgctacaacctgaagagtccgggttacttcctcagaatgttggcctcctgtatgttggaggttatgaaagac

SEQ ID NO: 426611 - DNA, 75 bp, Homo sapiens
cgcaggatctcacagctgcagtctaatagtaacacagaggaatttgtttcctcggagtctgtcactccagaagat

SEQ ID NO: 426612 - DNA, 100 bp, Homo sapiens
tcaagacggaaaaagtcgatctggagcttttcccctccccgggttaaataggattgcgaatcaggtggccattcagcggaagaagcagtttgtggagcga

SEQ ID NO: 426613 - DNA, 96 bp, Homo sapiens
catctcagaacagaagggtgggaagccagagccgcctgccatgccccagccagtccccacagcataacagaacatgaacgattggatgcccatcgc

SEQ ID NO: 426614 - DNA, 97 bp, Homo sapiens
caggaatgagcatacaggttctcagcagacatgtacgcctctgtctatttgatggtaataaggtgctttacaaggccaagtacggtccaatgtggat

SEQ ID NO: 426615 - DNA, 98 bp, Homo sapiens
acaagctgaaccccaaacccaaattcttcgttctgtgcggcgacctcatccacgccatgccaggtaaaatgaaaggcctggcatttattcaagatcct

SEQ ID NO: 426616 - DNA, 82 bp, Homo sapiens
cgtgggggaccggctgttggcggcgccgtgccgtccctgcagtgacaccgaggtgctcctagccgtctgcaccagcgacttc

SEQ ID NO: 426617 - DNA, 82 bp, Homo sapiens
catagacatttacgcggatgtcggcgaagagttcaaccagagtcccctttacttggtaaatcacggcgagagtggaccagtc

SEQ ID NO: 426618 - DNA, 83 bp, Homo sapiens
catcatcacatgaccaaagcattcctcttctatggaactgtggctgcaccatctgtcttcatcttcccgccatctgatgagca

SEQ ID NO: 426619 - DNA, 100 bp, Homo sapiens
ctgactgaggctagtgggaagcttcacctgctggataagctactagcattcctgtattctggagcctaaaaccattggccaaccgtcacgcaactgccag

SEQ ID NO: 426620 - DNA, 75 bp, Homo sapiens
ggaggctcatgcgggatttcaagcgatgacgaagatgatcctgcagaagctgaaaaggagggaaatgaaatggag

SEQ ID NO: 426621 - DNA, 98 bp, Homo sapiens
cctactcatccctttcactgaagaagtggggaaaacaaggctcagacaggattatgtctactttgagaattcctccagcaacccatacctaataagaa

SEQ ID NO: 426622 - DNA, 100 bp, Homo sapiens
tgggatttcggagaggccgcaggagtcatttcggtgtgaccgagtgttatgagtgtcatcctaagccgacccagagaacctttcctggctgtacaattcg

SEQ ID NO: 426623 - DNA, 100 bp, Homo sapiens
cttcccgcaggctgaggacctctatctcgcttttcccctggccttctgtatcttcatggtgcggctcatcttcgagaggcaagtgtcaattgaggaggga

SEQ ID NO: 426624 - DNA, 87 bp, Homo sapiens
ggcgcaccttccccaagcgcggccagacctgcgtggtgcactacaccgaatccagcaactatcacaagaatactccttagccacttc

SEQ ID NO: 426625 - DNA, 100 bp, Homo sapiens
catagagtggccaagtttccagaaaacagaaatcgaaacagatacagagatgtaagcccatctgagctgcccctcctggacctgatgaagctgtacgaag

SEQ ID NO: 426626 - DNA, 75 bp, Homo sapiens
tcatcagcccgccaagatggcgatgcaagcggccaagagggcgaacgaataagttcccctgtcagtggaggatgg

SEQ ID NO: 426627 - DNA, 74 bp, Homo sapiens
gcttgccagcccgctactgccaggcgcaactcccgtggcaggtaccaggtcatcagtacaccatctgatatttt

SEQ ID NO: 426628 - DNA, 96 bp, Homo sapiens
cctgcccaacagaatttatatagagatgtgatgttggagaactacagaaacctcgtctccctgggttcgatacaagaggctgttttcctagcgtgg

SEQ ID NO: 426629 - DNA, 82 bp, Homo sapiens
atccagcaaggtcggcagagcaaggggcttacgcagaaggacctggccacggtcaccgacgatgagggcgcacctgctgtcc

SEQ ID NO: 426630 - DNA, 75 bp, Homo sapiens
ctggacgccactttccggggtgcacagcaagtggctaaaataaatgaagctgtagaatgcttactgtccctgaag

SEQ ID NO: 426631 - DNA, 74 bp, Homo sapiens
taaaggaagaacaacagatggatcccttcaggagacacagcaggtccccacagaggaagtgtccttggaagtgc

SEQ ID NO: 426632 - DNA, 110 bp, Homo sapiens
aatggcctacgtcgtcataccgggcttccttgccctgtccgggatccctcatgtccatgatccggaaacgatcccaccccagtggcagtggtgctaagaaagaaaaggca

SEQ ID NO: 426633 - DNA, 142 bp, Homo sapiens
gctgcacgaggcggtgcgggccgtgcagagcagcacctccatcaggtacaacctcgaggagctctaccagagacacgctgtgaacaagacaggccttccccaaccacagcgccccctgcgccacccagcccctcgccctcac

SEQ ID NO: 426634 - DNA, 51 bp, Homo sapiens
gaggaactgagacgtttcgaattccagatacgaccatatgtgggatgtttg

SEQ ID NO: 426635 - DNA, 50 bp, Homo sapiens
aaaagttgctgaagaagaagaagattccttacatggcttgacagatggag

SEQ ID NO: 426636 - DNA, 100 bp, Homo sapiens
ccgccgggctcggggcctccgcagcgacaacatggaggccgtgaagaccttcaatagcgaggctgaggctgaggtggcctccttgaaccgtaggatccag

SEQ ID NO: 426637 - DNA, 90 bp, Homo sapiens
gcgcgccctgcctgagaaggagcccctcgtcagtgttctaagaacggaagcatctgggctggatggaatttagcatcaagcagagtcccc

SEQ ID NO: 426638 - DNA, 100 bp, Homo sapiens
cttgttcctatggcctaatgaacaacttccaggtccatcttgagtggcctcttcccacccagtggtggctctgccttcatcctgggccacgacgtccgct

SEQ ID NO: 426639 - DNA, 50 bp, Homo sapiens
gaggattgctgagaaaaggcagagagaagatgactgaggaatacaaccac

SEQ ID NO: 426640 - DNA, 115 bp, Homo sapiens
ctgacatcgcgacgctgctcaaaacctcgctccggaaaggggacacctgtcaccaggagactaaagtccatcaaaaacatccagaaaattaccaagtctatgaaaatggtagcgg

SEQ ID NO: 426641 - DNA, 87 bp, Homo sapiens
gacaatgtgtttgccctaaaggaatatgccattcgactgaacaattttgaaacaaagttatgtcagatattttcagacctcaatgcc

SEQ ID NO: 426642 - DNA, 100 bp, Homo sapiens
agttttgaaagatctgaaattgatcagtgataaaattggatcacttggattaggatccgggatgccttgcgcagtatcctcaccatatctcgacatggca

SEQ ID NO: 426643 - DNA, 75 bp, Homo sapiens
gtgcctcttcatattggcgatcctgttgtgtctgtacaacccaccctacagtgctcagtcacaccctgctgcaaa

SEQ ID NO: 426644 - DNA, 96 bp, Homo sapiens
gccgaccgggccctgggctggaggtaaaaccccacgtccaaacaggagctttacagaaatgcactgtatgagtggccattccaattttgtatcttg

SEQ ID NO: 426645 - DNA, 75 bp, Homo sapiens
gcgcgctgccccgcgggtgtgcctgagcctccgcgccccgcaggccctggccattgagacccagagcagcagttc

SEQ ID NO: 426646 - DNA, 82 bp, Homo sapiens
gcgtcacactggatttgatagaaaaatcatggaagggaagtggttgctgtgtatgttactggtgcttggaactgctattgtt

SEQ ID NO: 426647 - DNA, 90 bp, Homo sapiens
aatgctaccctgctttttctggtgtcctgaacctggaagttgtgctttttaaggcctggcgcaagcgctggtttgtcctccggcgaggcc

SEQ ID NO: 426648 - DNA, 75 bp, Homo sapiens
tggatcggaatggtggagaacttcaaccaggcactcaaggcaagagaacaccttggaggggaatcctattatttg

SEQ ID NO: 426649 - DNA, 134 bp, Homo sapiens
ccagcgttaccatgcatcctgccgtcttcctatccttacccgacctcagatgctcccttctgctcctgtcaagtccatcatctccagaaccagctagtcttcctgcagaagatattagtgcaaactccaatggc

SEQ ID NO: 426650 - DNA, 83 bp, Homo sapiens
actatcccaagactgctggcaacaggttggatggcaagcatgtggtgtttggcaaagtgaaagaaggcatgaatattgtggag

SEQ ID NO: 426651 - DNA, 100 bp, Homo sapiens
cgtggcgctggtggggggagtcctcatcatcatcgcctcctgcgtcatcaacttaggcggtatgaacgctgccgtccgtgccgtggtgcgcatgggtatc

SEQ ID NO: 426652 - DNA, 75 bp, Homo sapiens
gcaaagtgggaaaaataaagtgttgagtaaacagaccaagttggttaatggccagccaagaccccttgaatcaag

SEQ ID NO: 426653 - DNA, 100 bp, Homo sapiens
tgtatcttcatggtgcggctcatcttcgagagacgaggacctattaaacttggaatggctaaaatcacgcaagtcgactttcctcctcgagaaattgtca

SEQ ID NO: 426654 - DNA, 82 bp, Homo sapiens
ggggctgagcccgccgtctacccgtggccgctgccggtctacggctgggttacgacccctacaaccctgagctgcccaagcc

SEQ ID NO: 426655 - DNA, 95 bp, Homo sapiens
gagccgcagccgcgagaagcacgccctgctggaggggcggaccaaggagctgggctacacggatgaatttttagatgtgatctactggttccgac

SEQ ID NO: 426656 - DNA, 95 bp, Homo sapiens
caggtcttgtagcagcgcctcctcggctggttatgatggtgagagtatcggaaattgcccgttttctcagcgtctctttatgattctctggctga

SEQ ID NO: 426657 - DNA, 82 bp, Homo sapiens
atggagtggaaacgcttgtagggtttcaccaggcaactttttgctccttcctacacagaaacccattatacttcaagtggta

SEQ ID NO: 426658 - DNA, 75 bp, Homo sapiens
tttgagtcacataaggatgaaatattccagtcccatgaagctgaggtcttgaagcagctggctgagaaacgagag

SEQ ID NO: 426659 - DNA, 76 bp, Homo sapiens
ccttcagtgcacacaacaggagagaggagaaagaagaaacgctagtaattccatgcctacaccaactaatgttaca

SEQ ID NO: 426660 - DNA, 75 bp, Homo sapiens
actgaggtgctggatcacaatgaatgtctaattatcacaggagaacctccatttctaccagaatcctttgaccga

SEQ ID NO: 426661 - DNA, 100 bp, Homo sapiens
ggggagcggcgttggaggccaccgtttccagatggactcaccctgtcacccaggttggactgcactggcctcaacctcctgagttcaagtgatcgtccca

SEQ ID NO: 426662 - DNA, 100 bp, Homo sapiens
caacggatcgctctcgcccaccgcccgaaccctcttcagtgggtcatctgtgtgtcacagcctcagaagaccagcgagatggctgccaacaagagtaagg

SEQ ID NO: 426663 - DNA, 74 bp, Homo sapiens
cacggtttggccaaagaagcccccatactcccggtgaaaaagtaccaaatatgccccaacagcggcaagaccag

SEQ ID NO: 426664 - DNA, 50 bp, Homo sapiens
cccggcccggcagcgacatggaaggatgacactcctgtccaggacactaa

SEQ ID NO: 426665 - DNA, 100 bp, Homo sapiens
gcggccgtcctccaccgtttcctccaggacagcacctagtcgtggccggaggagtctcagagctgtcagaaagggttcccagcaccatgagggcctggat

SEQ ID NO: 426666 - DNA, 75 bp, Homo sapiens
aaaatcagagctggaacctgaggagagagatttccatggtgtcagtgattcatattcctgataggacttataaac

SEQ ID NO: 426667 - DNA, 98 bp, Homo sapiens
tattccactggattgggaaagaccatggcagaatctgtccctctgtacagctgccctcatgtatatactgagtagagatcgtttgaacatggatcttg

SEQ ID NO: 426668 - DNA, 75 bp, Homo sapiens
aagaagggctccctcgtgaagaacctgaaggacacactagatccagacatttaatgtggatgcaccatgccagac

SEQ ID NO: 426669 - DNA, 50 bp, Homo sapiens
ctggtgaaaagcttctccgagaggtaaaaagaacgtattctcatggtact

SEQ ID NO: 426670 - DNA, 75 bp, Homo sapiens
ccgccgcccaccatggcttccgaggagctgtacgagcttagaccatgctcagcctccaagcagccttgtcatcga

SEQ ID NO: 426671 - DNA, 100 bp, Homo sapiens
ccgcggccaacatgagcttcttgttggaacaacctatcttcagcactcgagctcatgtcttccaaattgacccaaacacaaagaagaactgggtacccac

SEQ ID NO: 426672 - DNA, 100 bp, Homo sapiens
gagggcgagcggagacgcaggccgaaccgcccagcgtggggccctagccggcgtcccctgcctccagaacgcgctgtttgcagacaaggtcccaaagaca

SEQ ID NO: 426673 - DNA, 100 bp, Homo sapiens
tggaacaacaacttgcagctcatctctattgatgactatcggtggtccatgtcaagtgatagttcacaagtgggagactcatctacaaccacgatcaata

SEQ ID NO: 426674 - DNA, 100 bp, Homo sapiens
tcatccaacccttccctccccaacctctgtcatcacacaggctccaccatccaacaggcaaatgggagtacaggggctcaggtccaggtggcaggggata

SEQ ID NO: 426675 - DNA, 49 bp, Homo sapiens
atccaatcccttgtccttaaaagaactgataaatttcaaacggaagaga

SEQ ID NO: 426676 - DNA, 75 bp, Homo sapiens
gcgggaggcagagggaggaacctggacgccggaagccgggaaatgccttatgccagcctggaccatcttggaggc

SEQ ID NO: 426677 - DNA, 100 bp, Homo sapiens
tcatctcacgagtttggagctgagggcccgtggggcaacatggccgaaggtaaaaagatggcctatcagaaggtccatgcagatcaaagagctccaggac

SEQ ID NO: 426678 - DNA, 75 bp, Homo sapiens
gtgaccctttgtggacatctccaccatggcaaggtgacttgatggagggtgagctctattctgctctcaaggaag

SEQ ID NO: 426679 - DNA, 75 bp, Homo sapiens
cgtagtcctgggagcacagcagaagtagtgtgaacatggctacgcctcttcattcccgtccatgccgagcccccg

SEQ ID NO: 426680 - DNA, 75 bp, Homo sapiens
ctgctccttccgataccattacccgtgtgccattgatgcagggcatatcgatgcatttacttcaaaactttttct

SEQ ID NO: 426681 - DNA, 100 bp, Homo sapiens
gcgacgtcgagaacgacgaggacgcgttgctgcggcgtctgcgaggcccgagggtaaaccgtcctattggcagggtacagatcttcactgcagacttatc

SEQ ID NO: 426682 - DNA, 50 bp, Homo sapiens
cgcagtggtcgcttcttctccttggcttgcacagaaatctggaggcagta

SEQ ID NO: 426683 - DNA, 74 bp, Homo sapiens
gtgaagcccaacccgctgcaggacgcgaacctctgctcacgcgtgttcttctgcaggaggatgcattagcacaa

SEQ ID NO: 426684 - DNA, 99 bp, Homo sapiens
cgcaattattcctttaccaacaatcaaatggaaacccttaattcgaactgtggctgcaccatctgtcttcatcttcccgccatctgatgagcagttgaa

SEQ ID NO: 426685 - DNA, 75 bp, Homo sapiens
cgagaagagcagagcggagggagccccagacacgcagttggaattgatcacaccttttcagttgtacttcaatcc

SEQ ID NO: 426686 - DNA, 100 bp, Homo sapiens
gtggcgagctgaggtggaggcaggctgcggcagacggcgacagtggcggcggcgccatggcagggcttgcagcgccgtgccgtccctgcagtgacaccga

SEQ ID NO: 426687 - DNA, 90 bp, Homo sapiens
ttgcccgtgaccgtcgctagaactcagttgtgcgttgcggccagtcgccactgctgaatatgaagacaaggctggaagacctagcaagcc

SEQ ID NO: 426688 - DNA, 141 bp, Homo sapiens
gtcgcccagcgccgccccgtcgtcgtctgccttcgcttcacggcgccgagccgcggtccgaatggaatcagtgtgagtggctttcccctgtccagtccttttcggcaggtcgttcggccccgagtggagggcaaacctgtg

SEQ ID NO: 426689 - DNA, 98 bp, Homo sapiens
agggagatacacccaactgggaggtattttcaaccaccaggaacttggatacagtgtgctttagaatccagggaacttcttgctttgtgcttgaaaaa

SEQ ID NO: 426690 - DNA, 98 bp, Homo sapiens
agctggggcaacctgatctcggctgtcggagtgggtgtcctcaagaaagagggccaagatgggtcgccgagctcaacaggagtcagcgcaggccgaga

SEQ ID NO: 426691 - DNA, 90 bp, Homo sapiens
aagtgatcattaataaagcttttcttggttccttcagtggtgttggtagtaaaatgatttgccaacattacaacaaaggagatggacccc

SEQ ID NO: 426692 - DNA, 80 bp, Homo sapiens
ctcctcccgggggaagctggctgaacgcgacatcgtccaggaatccagacgctctgcagtgtcccatcgtcttatgcgga

SEQ ID NO: 426693 - DNA, 98 bp, Homo sapiens
atggattagccaattccatttcttcctaccttattaaaccagttcagcgaataacgaagtatcagctccttttaaaactgcaagctttcttcctggtg

SEQ ID NO: 426694 - DNA, 83 bp, Homo sapiens
agaagagtatgataacgaaccacaaatacctggctatattgtcgatgattcagtcagagtgtgctggaattgatgttcgtctg

SEQ ID NO: 426695 - DNA, 83 bp, Homo sapiens
ccgctgccgctgccgctgccgcacctccgtagctgactcgtgtactaatggtcacttgatgtgcgctggctgttttatccacc

SEQ ID NO: 426696 - DNA, 90 bp, Homo sapiens
ggcgacctgaggggagagggaacgcagctgaaagcgtgaactagataaagaagccaccagtggcccccaagcccaagtttgttgtggcaa

SEQ ID NO: 426697 - DNA, 100 bp, Homo sapiens
agcggttgtcccagcgcctcaaagtgcccaaggagcgcctggctcttctccacaaagacacttccagggtctccctccactgctgtagtaacccgggtcc

SEQ ID NO: 426698 - DNA, 75 bp, Homo sapiens
cagctgttgcaatcaaggccatggcaaaataactggctcccaggtgccaaatgtgacatccagatgacccagtct

SEQ ID NO: 426699 - DNA, 75 bp, Homo sapiens
ggtcaccctgagcttcctgcggagcgtcgtcgaggcgcaggtaagaatgattgatgttggctgatattggagtgc

SEQ ID NO: 426700 - DNA, 75 bp, Homo sapiens
aaagattatttgccttatgttatgggctatttgtgtagcagaaggtatgctaaaggttacccaccttattctcca

SEQ ID NO: 426701 - DNA, 75 bp, Homo sapiens
acatagtaaaaggaggcctaaatcccagctctcctgttggcttcgtgcttggggtagatcttcttcacatattcc

SEQ ID NO: 426702 - DNA, 88 bp, Homo sapiens
gcaagagtccacaaagggacctgatgaagcgaagatcaaggtgaagtcccgcttggcttttgggaagcccctggtggagcagggcaca

SEQ ID NO: 426703 - DNA, 83 bp, Homo sapiens
ggaagatcagagctgggagctggcacttggaactcaacaaatagtgattcatggcaggggacgtggaaggattctgttcctcc

SEQ ID NO: 426704 - DNA, 75 bp, Homo sapiens
gttaaagtcattgaggactttccagcaaagacatgatcccagagaacgctctagaggagatcaccaaaaacatgg

SEQ ID NO: 426705 - DNA, 100 bp, Homo sapiens
gtgctctccgggcacgtcaaccccttcctcccgtatatcaggtgcaggtggtaccattataacgaattttgagaggttggtaaaaggagattggaaacca

SEQ ID NO: 426706 - DNA, 82 bp, Homo sapiens
ccgccgcgggagccgctgcccgaactcccggcccgaactccagggagtgcatccgccccaacccttttccccctcgtctcct

SEQ ID NO: 426707 - DNA, 75 bp, Homo sapiens
tggaagaatttgtaccccatagcaagggcatacataatcttgctgctatgcttcgaagctgtagtctgaatcaac

SEQ ID NO: 426708 - DNA, 98 bp, Homo sapiens
gcctcgttgcggccatcgccctgccggaccgcgcctcaggctcccccaggatcaagtcttccataccagggaccaggccaaaaccagactgccactgc

SEQ ID NO: 426709 - DNA, 98 bp, Homo sapiens
aatgctaccctgctttttctggtgtcctgaacctggaagttgtgctttttaagaatgcgtaatcctggatctcttgttcgcaaatcgacagcctgaag

SEQ ID NO: 426710 - DNA, 88 bp, Homo sapiens
catgtcgacgcaaaccagccttcagcagtcggctacgaaacagcagcggaagtagccggctggtaacatcaggagtcagttcctatca

SEQ ID NO: 426711 - DNA, 83 bp, Homo sapiens
ccttgatcttcgctgtggcatggcggacgaggggaagtcgtacagcggaatgggtaccacagaccatgtcatcgtcctggcgt

SEQ ID NO: 426712 - DNA, 75 bp, Homo sapiens
tagatattgcacgacagactgcacagggcatggagaagcgttgttgacgaccatggacatcatccacgatggatt

SEQ ID NO: 426713 - DNA, 100 bp, Homo sapiens
tggccgtcatggataggcagaagaaagaagaggagaaggagcagtccgtgctcaagcgtgcaatggaattgagttttgccctggtaaatgggaataatat

SEQ ID NO: 426714 - DNA, 100 bp, Homo sapiens
ggcctccacctcggccgccctgcccagctgcctgcccccggaggtgcccacgcagctgcctggacaagtcagcccaaggccaaccccactgtcactctgt

SEQ ID NO: 426715 - DNA, 75 bp, Homo sapiens
gcaatatgcattagcagcagctcagcagccacatataggtaattcgtgcctttctgctctttccaacaattgaac

SEQ ID NO: 426716 - DNA, 50 bp, Homo sapiens
tataaaagaccagtgtcttaagtaccaggcactgcctccttacctgtgag

SEQ ID NO: 426717 - DNA, 75 bp, Homo sapiens
cctgaggtgggccggacctgggagtggcagaaaactgtcgctgaaaagcaggagaagagaaatcaggatcgcttg

SEQ ID NO: 426718 - DNA, 82 bp, Homo sapiens
ttactggaaactggatgcagcaaggaaataggatttaaccgctctctgcctcccaggaaatctggcattttttaaagtttgc

SEQ ID NO: 426719 - DNA, 75 bp, Homo sapiens
acctccctgttcatcaggaacgtcgcggacgccaccagtattccctgggcctccgatttgcagttccacgtcttg

SEQ ID NO: 426720 - DNA, 140 bp, Homo sapiens
ttggaagcaatgtttgaacaaactcgaagaacagctgtggaaagaagttgcaaaacactgggtgatgtggaagaattagaaattcaagaaaaacctgctctgaaagtgttcaaaaatattactgtaatacaagaaccagg

SEQ ID NO: 426721 - DNA, 75 bp, Homo sapiens
ggggaggcagcgcgggatcccagcctcaggcgtgcgcggacggtgtgcggctgatcttgcatctttaatggataa

SEQ ID NO: 426722 - DNA, 82 bp, Homo sapiens
cctggcgtgcactccgcacctcggggacattattgcgcgtggaacggctgcttttggaaggcttgggcactgtttaaaggaa

SEQ ID NO: 426723 - DNA, 100 bp, Homo sapiens
cgtttccgaggtgaaggcgccgcgccaggccgggcgggcggatctgcaactgtatctttccaacctagccaaccagatagaccgggaaacaggaattggg

SEQ ID NO: 426724 - DNA, 89 bp, Homo sapiens
tgcatggactcagtggaccagctgctcaaaaacttgcaattctggaacccagagcagacacagcttgcactggtttccgcctccgacct

SEQ ID NO: 426725 - DNA, 88 bp, Homo sapiens
tgccctgcagtacctgcagaaggtctctggagacatcttcagcagagtgaccgccttctgatcagaggtgggaggatcgtgaatgacg

SEQ ID NO: 426726 - DNA, 87 bp, Homo sapiens
cctcaaactgaatcctctaaaggccccatacaatgaagtagacattggtggaaacatttacctacagcctggctcccgcgacgccgg

SEQ ID NO: 426727 - DNA, 96 bp, Homo sapiens
ttcagaaggagctggcggacatcactttagaccctccacctaattgcagtaccgccagctctctgctctccacagggctccccgccccacccggcc

SEQ ID NO: 426728 - DNA, 82 bp, Homo sapiens
tggacagccgggtcctgaacgctgtgaaatgattttttatcaagcagaaatgcatcgaacaacgagaatcaagatcactgag

SEQ ID NO: 426729 - DNA, 83 bp, Homo sapiens
cggagagcgagagcgcgaaggaaatctggccgccgccgccgcgagcgctcccgttcaaggagcagggacaagttacaggaatg

SEQ ID NO: 426730 - DNA, 82 bp, Homo sapiens
tgcctacataaaggaatggtttgaagagagcttgttccagtgtctcgccccatcctcaccctcagggttcccagggcccagg

SEQ ID NO: 426731 - DNA, 90 bp, Homo sapiens
gatgaacatgggcaggataaatgaaactggcgatggaatatgagaggagccctctggaaagaaaaggacagaccctgtgctttcatgaaa

SEQ ID NO: 426732 - DNA, 75 bp, Homo sapiens
gtgcccccgaagtgaaagagatggcctggtggaaagcctggtgccctataaggactgccaggcaataatgaaggt

SEQ ID NO: 426733 - DNA, 100 bp, Homo sapiens
ggagtgaaggcctcgttgagagaaggtctcattcggtgttttgggaagagagtcgtgtgggcccaggcgcagacggggaagcggagccaacatgccagtg

SEQ ID NO: 426734 - DNA, 100 bp, Homo sapiens
tgtccgagcccaaggcaattgatcccaagttgtcgacgaccgacagggtggtgaaagagcatctgctgcacccaagcctgagccggttcctgttcaaaag

SEQ ID NO: 426735 - DNA, 100 bp, Homo sapiens
cctaccaaggcaagaagaacatcccgcggatcacgggtccctgatgccgcttcccgatgggaatgggctggaagacggcaatgtccgccacctggtgcag

SEQ ID NO: 426736 - DNA, 82 bp, Homo sapiens
tccacaacctccccctttccaatctggcaatcccagtcctcctgcatatgcccaagaggattgggagtggaatggacaccag

SEQ ID NO: 426737 - DNA, 96 bp, Homo sapiens
cagagacgacgcctgcagcaaggagaccaggaaggggtgagacaaggaagaggtgaaggttgctatccttaaatacatagaaactctggccaaaca

SEQ ID NO: 426738 - DNA, 100 bp, Homo sapiens
tcctttgacagggacatcagtggagccttctcagacccacagaggctgacccgcggctgattgagtccctctcccagatgctgtccatgggcttctctga

SEQ ID NO: 426739 - DNA, 100 bp, Homo sapiens
ttttgatggccatggcataaggaactctatcccaggaatacagctttgcattaggtactatttcttgatcatccaaaaaagaagattcgggacacacaga

SEQ ID NO: 426740 - DNA, 82 bp, Homo sapiens
agggcctgcagcgggagctggacggcgagcgcgagcggcgcgagaaacctggcccctgccaatggctcggcgccctgtggga

SEQ ID NO: 426741 - DNA, 97 bp, Homo sapiens
acaggaggcagtgccgcttcggccgaaggcccgagcgcccgaggcgtctgggatggtgtgggaccggcctcagaagaggaaagtggaaagcctttcc

SEQ ID NO: 426742 - DNA, 100 bp, Homo sapiens
cgagaaggcccagcgcttcctgcagaaggccgagaagctctacccactgccctcggcccgcggagtacaagatcctcagcatgagagaattattactgtg

SEQ ID NO: 426743 - DNA, 90 bp, Homo sapiens
caggatcctcttggagcagaagaagcaggaccgcggggagctgaagctgctgcttttggcaatacgtttggtttaatattggcagtgtgg

SEQ ID NO: 426744 - DNA, 101 bp, Homo sapiens
atcttggcaaagcttctccctcagtatttagaccagacaaaattgcttacccagtacatattaaatctcggcaagtatgatcaaaactacgacatcagaga

SEQ ID NO: 426745 - DNA, 83 bp, Homo sapiens
tggcagcagcccccggggcaagagcaggagcccggcaccccccgccgacaaggagggagccttcacgtaaatgggtccagtca

SEQ ID NO: 426746 - DNA, 90 bp, Homo sapiens
tctgtggacccgtgagcaagcataagctgccaaaccaaggtgaaatgacaatggatgctctgttggctcgattgaaacttctgaatccag

SEQ ID NO: 426747 - DNA, 74 bp, Homo sapiens
atgtgatcactctgggactcgtggggctgcagcaccgtgcaaacttggatgaggaggcacaggctggtaccagt

SEQ ID NO: 426748 - DNA, 50 bp, Homo sapiens
ttgtactggcctgctgctggcccgcaggatagatcagatactgattcatc

SEQ ID NO: 426749 - DNA, 75 bp, Homo sapiens
aggagaaggggaagcccaagccccgctccccgcagccgccaaggtttgggaaaagttcttaagttctgaaacgcc

SEQ ID NO: 426750 - DNA, 100 bp, Homo sapiens
aagaagtgaagaaattattggtacctgcaggttatgtggtccgaatcagtggtgggaacgacaaacaaggtttccccatgaagcagggtgtcttgaccca

SEQ ID NO: 426751 - DNA, 75 bp, Homo sapiens
tgagcctttctggacagaccaacctgtcagtgctgcaatctgaagttgcagccggagtgaagaagagcggaccgc

SEQ ID NO: 426752 - DNA, 76 bp, Homo sapiens
gggctacaggcgtgtgtcactgcgcccagctggaatagtcaaatgatttcagttcgtgaagccaaagccattccaa

SEQ ID NO: 426753 - DNA, 98 bp, Homo sapiens
tctggagtgccgtccccggccttctcgcggccgtgatgcacctccctctgcggtggggtccgggacatggcagtgacagcatccactaccagatggtg

SEQ ID NO: 426754 - DNA, 98 bp, Homo sapiens
gggtgatcaccatgaacgaggagtacgagacgaggttcctgtgcaactcttcacagtcttgctggtggatgccctccttactccccaatatatacgtc

SEQ ID NO: 426755 - DNA, 75 bp, Homo sapiens
ggccctctcgcgctgcactgtctctccgacgcaagactgtcccggcccgggtaattcatttgcacacctgttagc

SEQ ID NO: 426756 - DNA, 54 bp, Homo sapiens
ccgcggccgagaccgcgcagccggcggagagcgaaatgtcatcagtgcagtcac

SEQ ID NO: 426757 - DNA, 95 bp, Homo sapiens
ctggcctcagcaacctgacaattctgtcgtgtcccgctagtatgttcaacacaccaggaatgcagagcttgttgcaacaaataactgaaaaccca

SEQ ID NO: 426758 - DNA, 50 bp, Homo sapiens
ctcaggagaggctcagggagactgaggtctctggacctctgactgacact

SEQ ID NO: 426759 - DNA, 75 bp, Homo sapiens
gggacctgtgacagggctggtagcagcgcagaggaaaggcggcttttagccagtgggtaattccagaattgattg

SEQ ID NO: 426760 - DNA, 75 bp, Homo sapiens
atagtgaggctgacagaaattccatgcatgtagatatggttatggtggagaattcagactttaccccctcacaag

SEQ ID NO: 426761 - DNA, 90 bp, Homo sapiens
gcttgtcgcaatattgtcttcttcgctttagacaagagtagatcccataatagatcacgttcaagacagaaagacagacgtagatctaag

SEQ ID NO: 426762 - DNA, 76 bp, Homo sapiens
acgagggccggttgccgggcgcgggcgagaaagaaggactccatgaaagatgacagaagaagttattgtgatagcc

SEQ ID NO: 426763 - DNA, 83 bp, Homo sapiens
ccgcgaaccgcagtatcatgctggccaagaagatcatcattaaggacggaggcacgtgcctccggagccagcgtggtggccat

SEQ ID NO: 426764 - DNA, 90 bp, Homo sapiens
cagtgtcatcagtggctgcatcacgggaggagctattggtttcagagaactggctgcggctttatggctacctgcctcagcccagccgcc

SEQ ID NO: 426765 - DNA, 100 bp, Homo sapiens
ggcctgcccggacggtgttcgggggttgggcatgttccaggatctgtctatcgacttctctcaggaggaatgggagggcctggacactgctcagaaggac

SEQ ID NO: 426766 - DNA, 75 bp, Homo sapiens
tcgacatgtgtgaaagaggcgcatagagaacatagcttccatttcagaagttaaaatgcattttgctaatcagtc

SEQ ID NO: 426767 - DNA, 88 bp, Homo sapiens
tggtactgccataaaatgggctcagcagttagatctgatcatagagaggtggacatatgattgaagtcaggttgaacagtcattcccc

SEQ ID NO: 426768 - DNA, 83 bp, Homo sapiens
cgcctggcagcagagaccaccagaaggacctgcctagagctggaacgttacctccagagcgagccctgctatgtttcagcctc

SEQ ID NO: 426769 - DNA, 101 bp, Homo sapiens
agcaacagcctctgattacgacatggctgagatcaccaatatccgacctagctttggtttcatagcggcagacattaaaggtacaggttcctggactcagc

SEQ ID NO: 426770 - DNA, 90 bp, Homo sapiens
tttacaagtcttagaatgtgaacgtaatcaaaccctggttcaaactgcctggtatatgtctcgagtccacggtatgcaccctaaagagac

SEQ ID NO: 426771 - DNA, 50 bp, Homo sapiens
cgggcaccgaggaccagctcaatgacagcattacagacatctttagtttt

SEQ ID NO: 426772 - DNA, 88 bp, Homo sapiens
gggagccctcgcgacgcgcccggcccggagcccccagcgcagcggccgcgggcaacatgcaggttctggtgacttacggtggcgatcc

SEQ ID NO: 426773 - DNA, 50 bp, Homo sapiens
atggctgtggaaggtgttttaaagctagatgctggtgtgccagaaaaaat

SEQ ID NO: 426774 - DNA, 91 bp, Homo sapiens
cggatcaatccagatggcagccagtcagtggtggaggtattgcactatgtggagaaacccagcacatttatcagtgacatcatcaactgcg

SEQ ID NO: 426775 - DNA, 75 bp, Homo sapiens
caggtctttgctaaacttggcacagatgtagtggaaccaaaggagaggggcaagctcctagccacccagacagca

SEQ ID NO: 426776 - DNA, 50 bp, Homo sapiens
taaaaatcaccagttactttaatgagtcatcatcagatttgaaatattta

SEQ ID NO: 426777 - DNA, 98 bp, Homo sapiens
agaaaacaaaagaccaacccttgagggaagagaattatctctaagtctattatcctcccagtccacaacgctgaaccgtggctggacgaatgtttgag

SEQ ID NO: 426778 - DNA, 90 bp, Homo sapiens
cggaagctgaggccttatggagctccagtggatgatctcttcagggaagcagatatcgaacccaatggcaaagtgaagtatgatgaattt

SEQ ID NO: 426779 - DNA, 95 bp, Homo sapiens
gatacgactgccataaacaaaagctattacaatgtggtggagccccctgagctgcccgctgatctgcagcactggatctcctacaacgaggccag

SEQ ID NO: 426780 - DNA, 75 bp, Homo sapiens
gacttcttgcaacaggttaacgtgtatggcgtgtgcgtgccaggttatcaatactctggctgaccatcatcatcg

SEQ ID NO: 426781 - DNA, 100 bp, Homo sapiens
ctcactattctcttgctcgatggctactctgtaatggcagtgttatccaagataaattctgtgggattataaacatttcagtagaaggcctgcatgatgt

SEQ ID NO: 426782 - DNA, 100 bp, Homo sapiens
gcaatcctcacattcaagctgataggctgcgctaccggaatgtcatccagcgagtgattagaagtgtatgctgacttgtaaagtgaagaagccagtggtg

SEQ ID NO: 426783 - DNA, 75 bp, Homo sapiens
ctcgaagaacagctgtggaaagaagttgcaaaacactggggggaccttaccacccctcagagtgctgcttcacct

SEQ ID NO: 426784 - DNA, 100 bp, Homo sapiens
aagacgacattcagtttgtcagtgagtctccccaggacagtgctatcacccgggatattaaccgaacattcccagcccatgactactttaaggacacagg

SEQ ID NO: 426785 - DNA, 100 bp, Homo sapiens
aggccagacctgcttcagcctggagggctcgtgcaatccgcttcagacaggatggtaacgaagccgtcggaggattcttctctcagattgggcagctgta

SEQ ID NO: 426786 - DNA, 100 bp, Homo sapiens
tggcgagcccgctactgcagggacctatgggaaatcctcattgacgattcaatttgttgaaggccaatttgtggactcctacgatccaaccatagaaaac

SEQ ID NO: 426787 - DNA, 100 bp, Homo sapiens
caaaaccagtctattagacggccaagtcgacagcttgccccaaacaaacctagattattcagagctgggagagcttcccccacgatctcctttagaacca

SEQ ID NO: 426788 - DNA, 100 bp, Homo sapiens
cggcctggagctcccagggccgaggtaactgcatcctgcccagcatgacggccccctgcccgccgccacctccagacccccagtttgtcctccgaggcac

SEQ ID NO: 426789 - DNA, 100 bp, Homo sapiens
tgatgtcctggaggaagcatataccacagaacattggctggtcaggatatacaagcccaccttgggacaccttgactccaagcccagcagtaagtccaac

SEQ ID NO: 426790 - DNA, 75 bp, Homo sapiens
agagcgccaaggcctcttctttgacatggaggcctatttgcctaagaagaatggtagagatggggtttcgccatg

SEQ ID NO: 426791 - DNA, 100 bp, Homo sapiens
ctggtaaaagtctgtgccccaatggttcgatattcaaactctccacacaaggagatgcaagtcaggtgattgggcctcttactgaaggacagagaagaaa

SEQ ID NO: 426792 - DNA, 73 bp, Homo sapiens
ttacaagccttcaaaaatgaagtaggagtactcagcatttttcagttgaaggacagttggaattcagagccct

SEQ ID NO: 426793 - DNA, 100 bp, Homo sapiens
tggctcttagtggccgggatatggtgggcattgctcagactggctctgggaagacgttggcgtctaccctgatgggagagtctgcatttccatcctccac

SEQ ID NO: 426794 - DNA, 50 bp, Homo sapiens
ccgagacccaccgaggcagcccagtggttatggccagtgagaatgtgcgg

SEQ ID NO: 426795 - DNA, 98 bp, Homo sapiens
agcatctgaaaaagctgtggaaggctctggataaggaccagtacctgcccaggaaactggttggtgttcgaggaagagacattgttgttcttggtgtg

SEQ ID NO: 426796 - DNA, 82 bp, Homo sapiens
cttgccttgagtcagtgcgccgctctccagcccgcttgaacggctgtctgtccccagaccccagagcacgtccggcaccacc

SEQ ID NO: 426797 - DNA, 80 bp, Homo sapiens
cgttgtgccagcgactaaaaagaggataaagatggtgatagagcagttcaccatgcagcttttggagatgaaggcgctgt

SEQ ID NO: 426798 - DNA, 75 bp, Homo sapiens
ccctgctgctgtcttcaaagaagcgacatctcgaatcagcgatgcacacttggcagacacaatgattggcaaagc

SEQ ID NO: 426799 - DNA, 98 bp, Homo sapiens
ttttggaggacggagccaggcggcagcacttttagctgctgcacaggttctggaacctctggcggtctcagattgagcagaaaaaggaaagagagctg

SEQ ID NO: 426800 - DNA, 83 bp, Homo sapiens
ctgctgtatgggaagaaatagtaggagaatcaaatgataaactgcgaggacagagccactggttggctagagatttactacat

SEQ ID NO: 426801 - DNA, 100 bp, Homo sapiens
gcggcatcacctcctccaagaccgtgctggtctttctcaacctcatcttctggttctctctttccagacgtagtgaactgtatgcagactgacaatctgg

SEQ ID NO: 426802 - DNA, 82 bp, Homo sapiens
tcttggaaggtgcatctgcagtacaggatatgaagaaattgagggttcttgccatggatacaacttcagtattaaaggagga

SEQ ID NO: 426803 - DNA, 101 bp, Homo sapiens
tatttgaatttgctagtaacgtcatggaggatgaacgacagagcttttcatcctactataaaggaggatttgaacagaaaatgagtaggcgagaagctggt

SEQ ID NO: 426804 - DNA, 88 bp, Homo sapiens
ccaaaatgggaaaggaaaagactcatatcaacattgtcgtcattggacacgtagattcgggttctgccattacaggaccagtagcaaa

SEQ ID NO: 426805 - DNA, 75 bp, Homo sapiens
tcctattccagtgctcctccggtagcagggaggcgacagaaggtgtgaccatgaagctcatggatgaggtcgccg

SEQ ID NO: 426806 - DNA, 83 bp, Homo sapiens
cgacaagccgctggcagccgcggatctcaccgccgctcagggtactggctgtgatcgaacttctcaaccctcagagacttaga

SEQ ID NO: 426807 - DNA, 75 bp, Homo sapiens
ccagggcagcccttcaggagctccttagtaaagggaggagtagaagatgaagtgaccctctccgcctatatcacc

SEQ ID NO: 426808 - DNA, 82 bp, Homo sapiens
tacttggcagatcactctcttagcagttggttgaatctggcgatgtggaacccatggatatggagggctgactatatacacc

SEQ ID NO: 426809 - DNA, 82 bp, Homo sapiens
ttctcacagaaggaagataaactccacatatttctagctccacgcaggagatcggtgaggagctgatcaacggagtcatcta

SEQ ID NO: 426810 - DNA, 100 bp, Homo sapiens
gggacagagaaccatccaggttgagaattctcacttaattctaacaggagctggagccctcaacaaagcagcagaagatgtcgttttcattggacctgac

SEQ ID NO: 426811 - DNA, 75 bp, Homo sapiens
tgcgcgcacgcgccgacagacagcgccgttccagccctcgcccgatgcacggacgttggacctctcgaacaacca

SEQ ID NO: 426812 - DNA, 96 bp, Homo sapiens
gccaatatggagcacgaaaatcaaattcaggagttcaagaaacgagatgcacaggctgttgtagtgactgatggagagagaattctgggtcttgga

SEQ ID NO: 426813 - DNA, 110 bp, Homo sapiens
ggcaaccttgtccctggcccggccctccttcagtttagttgaggataccacattagagccagaaggtaccaaagcagtcagactcacagcctaattctgataacctaagt

SEQ ID NO: 426814 - DNA, 100 bp, Homo sapiens
gaagttgttcattgtttgtcaccacaaaaaggacagggaggtggggaagacagggctccagctaccacaggacgggctctgggtatagccgttccagtca

SEQ ID NO: 426815 - DNA, 100 bp, Homo sapiens
ccgccgccgccgcggacaatgagagatttctttaaagactcgtgcagcacatcattatcgctggatgcccggacatgtaatacacctgacagcatgtgaa

SEQ ID NO: 426816 - DNA, 83 bp, Homo sapiens
cctggaggagcctgtccctgactctggactccacaaggagaacaggagacccccaaaagggccagagcctaagcctggagacc

SEQ ID NO: 426817 - DNA, 73 bp, Homo sapiens
aaggaatatatcctgactgattcgcgccgcgattcaccagcctggtcccttctgcggagagcgatgccgcttc

SEQ ID NO: 426818 - DNA, 73 bp, Homo sapiens
ggaggatgatggtgaggcaggagaggaggacgaagagattgggaaggtggcggcggcggtgcctgtcatcatc

SEQ ID NO: 426819 - DNA, 100 bp, Homo sapiens
tcaagaaatctccacaaagtgacagtgaatgatggagggggagttctcagagtcattacagtatgctggtatcctcctgggcatcacaaatacatttgcc

SEQ ID NO: 426820 - DNA, 100 bp, Homo sapiens
aaaagtcagaccgctcatcacgaacatcatcgtctgatgaagaagaggaagcatcctggccagaacaagccaaggagccaagacgagagggacacacgga

SEQ ID NO: 426821 - DNA, 113 bp, Homo sapiens
caaacagcccgcccgaccccgtcccgaccctggccgccccgagcggagcctggaggtgtccctggccagtgtccttccacctgtccacaagcatggggaacatcttcgccaac

SEQ ID NO: 426822 - DNA, 100 bp, Homo sapiens
actgtgacgtctgaggctggagaaaatgatgaaagatattggtgctggaaaaggcaaatactatgctgtcaattttccaatgagagatggtatagatgat

SEQ ID NO: 426823 - DNA, 83 bp, Homo sapiens
ctcttcaagtacatcataatcggcgacacaggaccacatggtgacaatgcatgatgtgcttgatgctcagtggctgtatgata

SEQ ID NO: 426824 - DNA, 100 bp, Homo sapiens
cgacttcgacagtctttggtcatgcttcaaggtttgtgacccgcttcattgagctggagggcttgacctgtctgctaaatttcctccggagcatggacca

SEQ ID NO: 426825 - DNA, 121 bp, Homo sapiens
gcgtgttgtccacccaagatggagttcctcctggggaacccgttcagcacaccagtggggcagtgcctcggagtccgcatgtgtgaaagtggtggctgctgtgagcatgtgggatgtgtgc

SEQ ID NO: 426826 - DNA, 100 bp, Homo sapiens
ggatatcgggtggcggctcgggacggaggacgcgctagtgatggtgtcctctccctgcacgcaggcaagctcacggacttgctcccgtatcctgggactg

SEQ ID NO: 426827 - DNA, 100 bp, Homo sapiens
attaagaccacaagctctggagccaaactgcctggttcaaatcccagctccaatacagtctattatcctcccagtccacaacgctgaaccgtggctggac

SEQ ID NO: 426828 - DNA, 101 bp, Homo sapiens
tttgcatctgcctgtccagccagcatggaaccaaagcggatcagagagggctaccttgtgaagaagatattgctggaattcctctgcctcagaacctgagt

SEQ ID NO: 426829 - DNA, 75 bp, Homo sapiens
ttagccaactggtcactgacttctctctcctagtgaatgatgttttagaagaatgtatgtctcttcccaagctat

SEQ ID NO: 426830 - DNA, 98 bp, Homo sapiens
acaaagtcagcccaggcagacctccaggttgtctgcattcaaaagagcattctattaaagctaccttaatttggcgcttatttttcttaatcatgttt

SEQ ID NO: 426831 - DNA, 100 bp, Homo sapiens
tttgtgaaacagagaaagataggcggccatggtccaaccttgaaggtctgaaggggcgtctcgattacctgagctctctgaaggtgaagggccttgtgct

SEQ ID NO: 426832 - DNA, 90 bp, Homo sapiens
tgcccacccctcctgtaacccagcctgtttcacttcttgatctcaaagacggaattagattggttccttcaagatttggaaagagaaatt

SEQ ID NO: 426833 - DNA, 74 bp, Homo sapiens
tccatggttccctggcccgtgctggaaaagtgagaggtcagactcctaaggatatacacatgacaccatccact

SEQ ID NO: 426834 - DNA, 100 bp, Homo sapiens
ctactcctacttccacttcgtgttcttcctagcttccctgtatgtgatgatgaccgtcaccaactggttcaagttatagaaacattatcacgactttctc

SEQ ID NO: 426835 - DNA, 98 bp, Homo sapiens
gttccgtaaaaacaacaactactagtcggccgaactccaagcgtgaccagctttctgttgggaacactcaaagctgcagaaccttggcctgaaaatgc

SEQ ID NO: 426836 - DNA, 75 bp, Homo sapiens
actcctggtgaccagcattcaaggaatggtctggaacacggacctggtggagaccctggagctgcagaacctgat

SEQ ID NO: 426837 - DNA, 75 bp, Homo sapiens
tctggaccaggagaggcccgcggtgaccgaggcctgggccccggtgccggtggtggtgtgcacattgagccccgg

SEQ ID NO: 426838 - DNA, 83 bp, Homo sapiens
ggaagaactacgaggcctccatgtcccacgtggacaagttcgtcaaggcgtgatggtgggcatgggtcagaaggattcctatg

SEQ ID NO: 426839 - DNA, 100 bp, Homo sapiens
acaacgaaggtgaagccacggaagataagacatgggaaagcggaaccaccaaaaggagtgatgatcaacgatctcatgataaatctggatgctagttctc

SEQ ID NO: 426840 - DNA, 115 bp, Homo sapiens
aggactgtgctgtgctgcagcagtcttccctcagtagtcagtttgaagcgggtatgcacaaagatagctggcttctggattgtggcggaatacagataggtgacagtggagtgat

SEQ ID NO: 426841 - DNA, 100 bp, Homo sapiens
tgtgattaccatggcgaggagtctctgtccgggggcctggctaaggaaaccctattacctccagatgttctcgtccgtggcgcacctggcgcgggcgaac

SEQ ID NO: 426842 - DNA, 90 bp, Homo sapiens
gaaggaagatccggcgcggggcacaggatccggagctggagcccccaggtgtgaccatgaagctcatggatgaggtcgccgggatcgtgg

SEQ ID NO: 426843 - DNA, 100 bp, Homo sapiens
ccagctttgactatgaatgcacaactacagcatgctacaagtgaaaactgatgagaaactgaatgtgtctgatgagaatacagcaagttgccctttgagc

SEQ ID NO: 426844 - DNA, 83 bp, Homo sapiens
ctggactggaacctctgggcccacggcagctggtggaatttttgaagaaaatggaatctcgaggccccctttcgtgcgacacg

SEQ ID NO: 426845 - DNA, 100 bp, Homo sapiens
cttgtcctggctcttgccctcatcctggttctggaatcctcagttcaagctcctcaagagttactgatctatgaaatggcagagaatggaaaaaattgtg

SEQ ID NO: 426846 - DNA, 78 bp, Homo sapiens
acagcgacgaggacgatgagctggacagcgtgcagcacaagaagcagcgtgtgaagaatctatgtactttcatcagcg

SEQ ID NO: 426847 - DNA, 100 bp, Homo sapiens
caacctggtccgctgcctcttcggccatggaagctgccggcagccctgcggctacggagacaggtatgaaaatgaaagtcttcagaatggaaggaagtca

SEQ ID NO: 426848 - DNA, 98 bp, Homo sapiens
cggccgcagcagcagcggcagtcacaggcacatcagcaaagaggaaaaccagtagattcccagacatcgcgaagtgaatctgaaattgtgccaaaagt

SEQ ID NO: 426849 - DNA, 101 bp, Homo sapiens
tctcccctgaagaggcagtgaaatggggtgaatcatttgacaaactgctttcccatagaggaagtgtttggattgtgagctatttcagaactgttctcagg

SEQ ID NO: 426850 - DNA, 100 bp, Homo sapiens
cttctagtgttgctttggatcttgtggaaagtcagagtaatatatgctttaaacactaaaaatgatgagcatgaatctgcaattcaagccctcaaagatg

SEQ ID NO: 426851 - DNA, 96 bp, Homo sapiens
gctctgccatattgtgtcttccccggccggtccctcgcctcccggccgagctgacggatacattaattgtttggtcagaagcagagaactatgatt

SEQ ID NO: 426852 - DNA, 97 bp, Homo sapiens
caacctgaccgggcacgaggagaaggaagttattccaacttttgacatggctgtcaatgaaatcttctttgaccgttaccctgactcaatcttagaa

SEQ ID NO: 426853 - DNA, 96 bp, Homo sapiens
aagggagactacaaggacagcagcgactttggggcccgtcaccctcaggttgcccgaagctcagcagagagtcggaggctgctttttaaacctgat

SEQ ID NO: 426854 - DNA, 90 bp, Homo sapiens
ggcagcgatgcctgcccggctgttggggtggcggtgacgacaggcagcaaaagaccaggaagagacctgggaaattaagtttcttgcgga

SEQ ID NO: 426855 - DNA, 83 bp, Homo sapiens
ccccaaatattgaccaactggcatcccacagcctcctcttccagaatgcctttgcgcaggtggagtctttcattttggatcag

SEQ ID NO: 426856 - DNA, 100 bp, Homo sapiens
catcgtccttgacacggatatcacctttgccactgacattgcagagctgtgggctgtgttccacaagttcaaagttccacttacttacatgatcatttcg

SEQ ID NO: 426857 - DNA, 100 bp, Homo sapiens
cccagcagcgcggcgccgtgttcgtggacaaggagaacctcaccatgccgggcctcaggttcgacaacatccagactgaaatcgccaagagattgaatac

SEQ ID NO: 426858 - DNA, 90 bp, Homo sapiens
caggttccctacacggtctcctgggtcaagtcaagtgcttctgctcctgatgtggatgacccagaggcattcccagctctggcttaactg

SEQ ID NO: 426859 - DNA, 75 bp, Homo sapiens
tgagcagaggacgacatgttgcttttcgtggaggaccggggcttctgcgtggaggtgaacacggcctttgaggac

SEQ ID NO: 426860 - DNA, 96 bp, Homo sapiens
gagaggtttgttccctgacaactttgtaagaacttgtgcaccatggacaattttgctgagggagatttcactgtggcggattatgccttgttagaa

SEQ ID NO: 426861 - DNA, 95 bp, Homo sapiens
gaagggagacgacgctgctgggtccgctgagcggggcgacccgaggtgacgcatccaaagaagacattgacactgctatgaaattaggagccggt

SEQ ID NO: 426862 - DNA, 100 bp, Homo sapiens
tttccccaaatctgcctcgatctccccaggaacctcacaggtacctggaatggaaacacaaaagtagccataaagactcttaaaccaggcacaatgtccc

SEQ ID NO: 426863 - DNA, 100 bp, Homo sapiens
agccaccacagcatctttctgaagccgggagagggcctgtagggataacgaaggaggcccaacttcattcaataaggagcctgacggatttatcccagac

SEQ ID NO: 426864 - DNA, 83 bp, Homo sapiens
cgcatagaagccgggattgagcgcatcaaggtgttcctgcatgaagccaccgtgcgcctgatggcaggagccagccccacccg

SEQ ID NO: 426865 - DNA, 78 bp, Homo sapiens
aaggccacgacccacgagatcatggggcccaagaaaaagcacctggactgttcactgctggcctataatacaacctcc

SEQ ID NO: 426866 - DNA, 75 bp, Homo sapiens
tggtggtgttgttactacagccttctatgatccaagaagtctgggtcatatgcaaacacagagctctccttttgc

SEQ ID NO: 426867 - DNA, 74 bp, Homo sapiens
gcagacagaacctacaccatccgtgaggagcttcaggatggttcgtactaagacatggaccctgaagaagcact

SEQ ID NO: 426868 - DNA, 100 bp, Homo sapiens
cctgaaggctgtcaagtatgtggagtgttctgcacttacacaggcagttccggcgaggggggagcctcagcaggattgctgtgtgaaaaccgagctgctg

SEQ ID NO: 426869 - DNA, 100 bp, Homo sapiens
aacagaaaaagttaaaatcaccaaggtgtttgattttgctggtgaagaagtaaggctggtccgggagttcgtggcccagaacaataccgtgcaaatcaag

SEQ ID NO: 426870 - DNA, 75 bp, Homo sapiens
cccggcccggagcccccagcgcagcggccgcggtcacctcatcatctcaaggaggagcattcccctgggctaagg

SEQ ID NO: 426871 - DNA, 101 bp, Homo sapiens
aaccggcttgttgtcttcaattaaaaaatttattaaaggaagcacacctaaggtttgaagatgccgcatttggattggatgaattccaaattctgcttgct

SEQ ID NO: 426872 - DNA, 96 bp, Homo sapiens
gccgactactacgccaaggaggtcacccgcgtgctaatggtggaaacccacaacggtgagaagccctaccactgcaactgggacggctgcggctgg

SEQ ID NO: 426873 - DNA, 75 bp, Homo sapiens
tacgccctcatggggaaaatctccccggtgactttcaggggagctgaatatgtatctgcaagagagtggatgagg

SEQ ID NO: 426874 - DNA, 89 bp, Homo sapiens
ctggctttgtagctcgctcaagatggcggcgcagccaccccgcgggatacgcctcagcgcgattgggtgagatacaattccatggaatt

SEQ ID NO: 426875 - DNA, 50 bp, Homo sapiens
aaatgacatccagcgacaaggactttaggagcaatttacagcaatgaggg

SEQ ID NO: 426876 - DNA, 100 bp, Homo sapiens
ctgcgctatgccctgctgtagtcacaggagctgtagagaggaccccggtacatctgaaagccgggaaatggcattctgtgaaactttagaagagacaaac

SEQ ID NO: 426877 - DNA, 96 bp, Homo sapiens
tcagccttcccagtagctggaactacaggtgaaggttgctatccttaaatacatagaaactctggccaaacagatggatccaggagattttataaa

SEQ ID NO: 426878 - DNA, 82 bp, Homo sapiens
aaaacctctcaccccgtcgttgcctccacttggcccgtccatagagccagggatcgtgggactttaccagatcggtttgtaa

SEQ ID NO: 426879 - DNA, 82 bp, Homo sapiens
gcccttttcagggcccccaaactgtcacagaaagagctgttaacacttcctagataacggactgaggctgatgtgaatccaa

SEQ ID NO: 426880 - DNA, 95 bp, Homo sapiens
cggagtcgcggtatccgcaggctctggtgtgttaccaagaggggattgatctgctcctgcaggttctgaaaggtcatagcaaatgacagaagtcc

SEQ ID NO: 426881 - DNA, 95 bp, Homo sapiens
atcctgcgggtgcctttgaaaatcaacgacaacttgagcacagaaattgcctgtgttctacctgtactgatggatggcatacagagtcaccccca

SEQ ID NO: 426882 - DNA, 76 bp, Homo sapiens
ttccgttgcgagctgcagctgcgatctctgtggtaggcccagatgcaatcttcttaccgcgaagaagccaggggaa

SEQ ID NO: 426883 - DNA, 98 bp, Homo sapiens
cttggtgtctttagtgcttggattggtgggatgtttcggaatgggcattgtcgccaattttcagaactgttgtaattgggtctctagctcagaaccat

SEQ ID NO: 426884 - DNA, 109 bp, Homo sapiens
tgagaagttgctctgtgtgctgagcgttctaaaggaaggcgtccgttggccttcgtacccgtcttgattgagattctgcctgatcaatgcaggagtcctgtacctctac

SEQ ID NO: 426885 - DNA, 82 bp, Homo sapiens
aacgcaggaaacctctgcaacctcaactatggttcgagaacttgtcttggacaattgcaaatcaaatgatggaaaaattgag

SEQ ID NO: 426886 - DNA, 100 bp, Homo sapiens
cctcaatgaccggattgagatgtggagttacgcagcaaagaccaagatacttggtagtgaccgggtgaagctgatggagagtctagtggttggagacatt

SEQ ID NO: 426887 - DNA, 100 bp, Homo sapiens
ggcgactagcggcggcgggagcggcgccgagaggccgtgcgggacgcgggcgccaggaccggccgaacgcagagtgaacagagtatctgtcaggcaagag

SEQ ID NO: 426888 - DNA, 82 bp, Homo sapiens
tgcgtgttcgcgggtgtgtgctgcgttcacaggtgtttctgcggcagccattttgcagactctgatcacagtgaaacgttcc

SEQ ID NO: 426889 - DNA, 83 bp, Homo sapiens
ccaacaccgacaaccccttcggagacaacaacctgctgggcaccttcatctggaataagagcctcagctcaaaggcatcgtca

SEQ ID NO: 426890 - DNA, 97 bp, Homo sapiens
cctggagcctcagttggaagcagccgatccagcctgcggagcctgtggggcaggtggatcagtacaagggaaagcgggatttggagtcactgaggga

SEQ ID NO: 426891 - DNA, 75 bp, Homo sapiens
gcaaagtctttgagaatttcctgcacaactccatcttcgtgcccaggctgagggtaaaaagctgggattggtagg

SEQ ID NO: 426892 - DNA, 100 bp, Homo sapiens
cgccttcccaggaccctcagggagagcgggcagccttccaggtggacaggtccccgcggaagccgcggtgtcggcgccatggcggagctgacggctcttg

SEQ ID NO: 426893 - DNA, 82 bp, Homo sapiens
ttcagcgggccaggaagcgcatccaggagggtggattatgatcgcatcagggatgttggccctgacagggcggcatccgagt

SEQ ID NO: 426894 - DNA, 100 bp, Homo sapiens
agtagcaaataaggacatcatctgctataacctacaagcagttggacagcggaaagtgaccagaagaggtgtgcagtttccaggcctggcccatacagac

SEQ ID NO: 426895 - DNA, 75 bp, Homo sapiens
accgcaactctcagttcgagagtaaaggtgtgagatgcacaatgcgaaacctaggccccagcttttacaccatga

SEQ ID NO: 426896 - DNA, 93 bp, Homo sapiens
cgtggcggcgctggaagggatgtcgtctcagcagtgctcgggcgcagatgatatcatcaagttgaatcgaaaggaagggaagaagcagaattt

SEQ ID NO: 426897 - DNA, 96 bp, Homo sapiens
agaaccctgacaacctgtcagacttccgggaggaggtcagccgcaggctcaggccattttaaatggaatagacagcataaacaaagtgctagacca

SEQ ID NO: 426898 - DNA, 100 bp, Homo sapiens
tccagtacacagacgagcatggggaaggtgtgattcgctcactgcacagcctgggccgcctggagcatgccttctgcacagagacccggccctacaacca

SEQ ID NO: 426899 - DNA, 141 bp, Homo sapiens
cggggattacaaagcctgaagaccccggagcccctttagccatgtggatacctacggagcacgagaaatacggcgtgggaaatctggcattttttaaagtttgcgccccacaaagaggaaatattccaaaggtactcagga

SEQ ID NO: 426900 - DNA, 75 bp, Homo sapiens
aaggcacggcaatctatttaccagtgaaggaagcccatcccccagaattgagctgctgcataatattgacccgaa

SEQ ID NO: 426901 - DNA, 90 bp, Homo sapiens
aagagatatctgcaatgatgtactgggaggtatatcatacaaagagaatgcaacatgttatctgtgtaaaatggacttctgacagcaagt

SEQ ID NO: 426902 - DNA, 75 bp, Homo sapiens
ggagaatatttaatggaaaatcgcttggttaaaacctgacacttttaacagaatcattgcgatgatgagtccaga

SEQ ID NO: 426903 - DNA, 98 bp, Homo sapiens
aaggatagaaatatcagcctccagtggcagcagggaaaggccagcagcaatccctatagaaatcaaaagcattgatgatacttcaaattttgatgact

SEQ ID NO: 426904 - DNA, 75 bp, Homo sapiens
cggggtctcccggagggccagagtcgcacccagtttcatgtatttgaatcgacaagacagctccctcgattctcc

SEQ ID NO: 426905 - DNA, 98 bp, Homo sapiens
acctgtcagagtacctgctgaaccacaaacaatgatttggggatattccctgcccaaaaaattcctggaaaattgactagtattaagtgtgagtaaaa

SEQ ID NO: 426906 - DNA, 96 bp, Homo sapiens
tcatgctagcactgcattaagtgatgcatacagcttcttctcagcctgttgataaccatgttagcccatcttccttcttgggccagacaccagcat

SEQ ID NO: 426907 - DNA, 75 bp, Homo sapiens
gccgcgacctgctgcacaggatcaaggctgaagccgacgtagcttctctgaacagacgcatccagctggttgagg

SEQ ID NO: 426908 - DNA, 100 bp, Homo sapiens
cccaccactgccacaaacgccgcaccaggtcttgtagcagcgcctcctcggcaaacagaccttgctgactgaaggcaaagactcctccatcccacctgcc

SEQ ID NO: 426909 - DNA, 78 bp, Homo sapiens
catcgtggccctgtacgacttccaggctggtgtgtgacagctctgtgctgctgtgcctcaagaagagatttcacctgg

SEQ ID NO: 426910 - DNA, 51 bp, Homo sapiens
ccactttccggggtgcacagcaagtgctctcaggagaagtgattttgcaaa

SEQ ID NO: 426911 - DNA, 115 bp, Homo sapiens
ctgtggttttggatcctggagtacctgtctggtacctggtacccggcacactgtgagttcctggacatcaagggctgaactcttgatgtttcagtgagctttaatggaggaaaat

SEQ ID NO: 426912 - DNA, 75 bp, Homo sapiens
gaaatttttgactgcattgactttcgtagtacttgtcattaggttaatttggagtggcccctggagtcagtttcc

SEQ ID NO: 426913 - DNA, 75 bp, Homo sapiens
agatgctgttagcctttgcagtctcgacataagtgtgcagtggcttctatgttttgggttgatgctgaattaggg

SEQ ID NO: 426914 - DNA, 82 bp, Homo sapiens
cccagcatgaagaccccggcggacacagcctgcctgctccgcttcagcggactctcgctggtctacctgctcttcctgctgc

SEQ ID NO: 426915 - DNA, 75 bp, Homo sapiens
aaggaggtgacccaacagggacaggaggagacctctgaacagatcacaaatgttacgtgagctttttcctgtttt

SEQ ID NO: 426916 - DNA, 107 bp, Homo sapiens
agagttgccatttcgctgggatttttgggtggtgcaaagttaatcagctgtgttcagcgaatacttatgaacagaaggctccagcagcagtacaatcagcagcaaca

SEQ ID NO: 426917 - DNA, 98 bp, Homo sapiens
agcctggcctgggccgcgtccatcacctggcactcaaggagccattgagcttcaaggacgtggctgtggtcttcactgaggaggagctagagctgctg

SEQ ID NO: 426918 - DNA, 83 bp, Homo sapiens
ctcgcgccggctatggccgtgccctggggctgagccctcagcacttgcacctcctgcgccgccgccccccatccaaggatatg

SEQ ID NO: 426919 - DNA, 74 bp, Homo sapiens
gtcctggctcttgccctcatcctggttctggaatcctcagttcaagggaaaagcttcactctgaccatcactgt

SEQ ID NO: 426920 - DNA, 82 bp, Homo sapiens
cggcgaccacggatgagcccggcctcccttttcatcaggacgggaagggactggtgattgcagctggaagtgcccatgaccg

SEQ ID NO: 426921 - DNA, 75 bp, Homo sapiens
agttttcttggaaactacttgcataagatgcacatttttctgctctggagccgggaatgaaatattcttgagttc

SEQ ID NO: 426922 - DNA, 75 bp, Homo sapiens
tctctgaggacatctctgcaaaggccccagcggcccagtttgaagaaaacaggtctgaaacaaggtcttaccccc

SEQ ID NO: 426923 - DNA, 83 bp, Homo sapiens
ccgggatttgggtcgcagttcttgtttgtggatcgctgtgatcgtcacttgacccctttgctgatgcaagtaagggtgatgac

SEQ ID NO: 426924 - DNA, 75 bp, Homo sapiens
ttatgtatttacctacggagtcagattcctgaaaaaggatttgaatttgttgaaatgagcagtcgtaaatcaaag

SEQ ID NO: 426925 - DNA, 90 bp, Homo sapiens
cccgtccatcatagtcaactgcgtggaagagaaggttatgatgatggttcttcctttattgatatttgtgcttctgcctaaagtggtcaa

SEQ ID NO: 426926 - DNA, 100 bp, Homo sapiens
cccagcccaaaccaggagattgcgagggagcgatgcggtgcagcgcgatattgaaatggattccaggcgtgtgcctcgagacaagctggcctgcatcacc

SEQ ID NO: 426927 - DNA, 101 bp, Homo sapiens
tgaaactccttcggatggccctcagtggacagcagggtctcactcttgcccgggctggccttgaactcctgggctcaagccatctacctgcctcgacctcc

SEQ ID NO: 426928 - DNA, 100 bp, Homo sapiens
ctttgttttcaatgacaccaagttggacgctatgctggaagaatttaagaaagatttttcggacgccgcccgatactacattccctgagcccacctgcct

SEQ ID NO: 426929 - DNA, 75 bp, Homo sapiens
acagaatgctgaaatgaggcctcttggttgttgaatccatcaacagcatcaagtccagactaagcaaaagtgggc

SEQ ID NO: 426930 - DNA, 97 bp, Homo sapiens
cgttacgggcggtacggaggagacctgtgacatccggggcagtctgcaggaggacagccaggtcactgtggccatcgtgctggagaacaggagcagc

SEQ ID NO: 426931 - DNA, 75 bp, Homo sapiens
tcccaaattaccggaaaggactgttcttgaggtattcagcaaacccgctggttcagaaccaacacctaagtcacg

SEQ ID NO: 426932 - DNA, 76 bp, Homo sapiens
ttgttttccctaacatcaagaatgtgtaatgttcaagctcagaaatgccttatgtggatcgtcagaatcgcatttg

SEQ ID NO: 426933 - DNA, 82 bp, Homo sapiens
ctcgcggaccggcgtccccggcgcgaagaggctggactcggattcgttgcctgagaaagaaatgaccgcccggatgtgccac

SEQ ID NO: 426934 - DNA, 108 bp, Homo sapiens
ccaatacccagaactgcctcccgattttatctttggagaagatgctgaattcctgccagacccctcagctttgcagtttgaaggaagaaagtactgtgaacatgactt

SEQ ID NO: 426935 - DNA, 75 bp, Homo sapiens
taccttaaaccttttaagcaaggaaattgaactaagaaatggagagcttaccctcttctccacctgctccccggc

SEQ ID NO: 426936 - DNA, 100 bp, Homo sapiens
cagcaagatgcggaggctgcctcggcggagcagaggaaccacacgctgatcatgtttttggctttcacccccaaccagtgaccaaagacttgaccactca

SEQ ID NO: 426937 - DNA, 101 bp, Homo sapiens
gctccgccgagcgccgggcgacggcagcatcacttaggagctgctactccagaaaatccagaaatagagctgcttcgcctagaactggccgaaatgaaaga

SEQ ID NO: 426938 - DNA, 100 bp, Homo sapiens
cccggattggggatgagtatgcggaggacagctctgatgaggagccaggacggcaaccttcccaccctcatatccagcgtccaccgcagccgccacctcg

SEQ ID NO: 426939 - DNA, 75 bp, Homo sapiens
atcaggcagttttgtgtccatgtgaacaactatccttatgtgaagattcatctgatgcagaatggtaagaggctg

SEQ ID NO: 426940 - DNA, 75 bp, Homo sapiens
ctttgtacagaaattgaaaggcttcaaagctagcagcagggtctgaattattcaaacgtagtctcatgtctggat

SEQ ID NO: 426941 - DNA, 100 bp, Homo sapiens
tgcttcatccgggaagtgcttggggatggagtgcctccaaaggttgctgagacggaagtgaaaatgtgacaggattggacctttcagatttcccagcatt

SEQ ID NO: 426942 - DNA, 100 bp, Homo sapiens
gggggatatccacagttcgatcaagtgaaactggaacgccaagctgaagaagaacgaatacggaagcacaaagcagctgctgagaaagctttccaggaag

SEQ ID NO: 426943 - DNA, 100 bp, Homo sapiens
gatcattactggagtggctattttacatccagacccttttacaaacgaatggacagaatcatggaatctcatttaaggtctgtaaacagatttggctagg

SEQ ID NO: 426944 - DNA, 50 bp, Homo sapiens
cagtatcaacggagtctccgggatttgacaagatcaaagctgcaggaaaa

SEQ ID NO: 426945 - DNA, 100 bp, Homo sapiens
gtttgtaccagactatcaggctgaaagttgcatggaggagtgacggcaggaactttctgtgctctgacaacccttatgcaccaactagaaaaagaaaatt

SEQ ID NO: 426946 - DNA, 100 bp, Homo sapiens
agcgcggcgggcaggcgctacgagctggctccaaggctgcatctctccactggactagcgagagggttgtcagtgttttgctcctgggtctgcttccggc

SEQ ID NO: 426947 - DNA, 100 bp, Homo sapiens
caggaagcgatgaaagagatgtctgcatttgcgaatgagctactgttatgcgaagtttgaaggaggaaagtgttcatcacccaaatccagaaatcactcc

SEQ ID NO: 426948 - DNA, 83 bp, Homo sapiens
tggcatcaaatgtcagccctggagttccatgataccacacgaacacagacctctggggccggagagtctcctgcttcgtggag

SEQ ID NO: 426949 - DNA, 98 bp, Homo sapiens
gtcgctagaactcagttgtgcgttgcggccagtcgccactgctaactccatccggcacaacctgtcactgcatagtcgattcatgcgggtccagaatg

SEQ ID NO: 426950 - DNA, 100 bp, Homo sapiens
tagcactgaaaattctggataatggtgaatgggcagactgccagattcacttacagccccagctaattccaccaaacatggaggagtacatgaacagcct

SEQ ID NO: 426951 - DNA, 88 bp, Homo sapiens
aaacagaaaaatgcacaacagagggacaacaaaagcctcctacaagagtcctaccaaaaacccactccggatacttctccagcctgta

SEQ ID NO: 426952 - DNA, 75 bp, Homo sapiens
gtgaaaatgaaagccggctgtagcatcgtggaaaagccagaaggaggtggaggctgcctctaagaatcaaacttc

SEQ ID NO: 426953 - DNA, 127 bp, Homo sapiens
ctttttactgccaagttcccactctgcatggtgttccacatcattgacttactgctttgtgagtaacaaatgtggcaattattttggatctatcacctgtcatcataactggcttctgcttgtcatc

SEQ ID NO: 426954 - DNA, 100 bp, Homo sapiens
ctagcttaaaaaaggaatttatggaccttactgcagaacgtcccaattcttcaggccaaggtaaatttgatgaagtctatgaagcactaactcacgctca

SEQ ID NO: 426955 - DNA, 82 bp, Homo sapiens
cgctggctgcagggacccggtgacagcgtgagagccctgggcgctgcctatggcacagccaagagcggtaccggcattgcgg

SEQ ID NO: 426956 - DNA, 101 bp, Homo sapiens
ggaggacgaggacctggggcagatcttcaccatccgcaggtgcccctccacggacccaggtgtttcagtcacctccagtaacacgggcgtgccagatatct

SEQ ID NO: 426957 - DNA, 100 bp, Homo sapiens
ggaaccctggtcaccgtctcctcagcgggagatacagatgacccaccaagaattactcagaaccctgtgatcaatgggaatgtggccctgagtgatggac

SEQ ID NO: 426958 - DNA, 74 bp, Homo sapiens
gacgaggagagacagaagaagctggaggccggcaaagccaaggtctcagtggcccttagcagcagctccattcg

SEQ ID NO: 426959 - DNA, 75 bp, Homo sapiens
acatggacggacttcttctggggtgcaaaaatgcagagtaataaaacttttaacttggagaagcaaaaccatact

SEQ ID NO: 426960 - DNA, 97 bp, Homo sapiens
ccccaagactgcgactctaaacggactcatgtactttgtcaggtacatgtacccctccatggatcagctggctgaaatgcttcctggagtccttcaa

SEQ ID NO: 426961 - DNA, 100 bp, Homo sapiens
gacaccctcctgatccgagcatcctacgcccagcagcccgctgagagcaggtactggctcctgtatcacccagctctggagttgaaagagctcttcattc

SEQ ID NO: 426962 - DNA, 98 bp, Homo sapiens
gtctcttacgtctgcggaagtgcagctgcctcagttcttagcgcagggaacgcagctgttgttctccggagtcggctgaaggtcagggtggtgaagga

SEQ ID NO: 426963 - DNA, 120 bp, Homo sapiens
ccgggtcaccgacctggccgagctgcccagcgagatcctcggggccccagaggccgcggacaccgacctggagcctagatattatcctactgaagatgtgcctcgaaagctgttgagcca

SEQ ID NO: 426964 - DNA, 75 bp, Homo sapiens
gactttgagaaagtgcaggagcaactgggaaatgatggtaaggttgataacggcaaaacaaaggatctatatcgc

SEQ ID NO: 426965 - DNA, 90 bp, Homo sapiens
ttcgaattctgcttcaagttcccggctcccaggtttattctcccatagcatgtggtatgggctacgtgagttcgtggtgattgcccctgc

SEQ ID NO: 426966 - DNA, 88 bp, Homo sapiens
caaggaagtgactcaaactgtgagaacttcaggatcttaagattgaaagtgatgttcaagaaccaactgaaccagaggatgaccttga

SEQ ID NO: 426967 - DNA, 100 bp, Homo sapiens
ctgccctcctggacgcggagcctgtataagcagtttagccaaattttgaagaacattggagaaaatgaaggtggtattgataagttttccagaggctatg

SEQ ID NO: 426968 - DNA, 90 bp, Homo sapiens
cgaccttgttgctgttgtggttcactgtggaaggttcctgatgttattagcagcataaggcaattatctaaagcggccatgaaagaggat

SEQ ID NO: 426969 - DNA, 75 bp, Homo sapiens
gaggctgctgggcaggtcatgagtcaccatggttttaaatactcttgaaagtactcaagccagcttgtattttgc

SEQ ID NO: 426970 - DNA, 82 bp, Homo sapiens
ccggtccccaggctgcggggcaggccagaggccctgggacacacgggcagggtgcacattcaggttcccgagcacaaacatc

SEQ ID NO: 426971 - DNA, 101 bp, Homo sapiens
cgcagtctggaaagctttaggagttcacagtcttgaagtacaatcttgttgtgtgtttattccaaatgatagcctgccttccccaagtacaattgtatctg

SEQ ID NO: 426972 - DNA, 123 bp, Homo sapiens
gaagaccgcgcgcagggcctgcagcgggagctggacggcgagcgcgagcggcgcgagaaacttccccgggcgctgcctggacaggcctgcctgcgtgctgggacatgtctggcctccaaggac

SEQ ID NO: 426973 - DNA, 86 bp, Homo sapiens
cacaggaatcatgactcctggagaacggatcaagtgcttattacaggtgtctgacttccagcaactgctggcctgtgccagggtgc

SEQ ID NO: 426974 - DNA, 100 bp, Homo sapiens
cgacggcctcctgtattggacgagtcttggattcgtgaacagaccacagtggaccacttctgggcaaaccagtccagctacgggggcccagccagccagc

SEQ ID NO: 426975 - DNA, 82 bp, Homo sapiens
aagatggtttacatctcgaacggcacgcttaaaaaggcctcttaagagccttgatggtgctctatatgatgatgaagatgat

SEQ ID NO: 426976 - DNA, 100 bp, Homo sapiens
atgagagacagagccaggatttgaaaccagaacccagcaagcgtagtcgaggagccctggggtccatcgccctcctgggcttggtgggcacaactgtgtg

SEQ ID NO: 426977 - DNA, 98 bp, Homo sapiens
actaagagaagtcacaaaacagcagatttcccaagagcagcggaaaatgatccagtcacaggtaaatattgggaagatggattcacccattgaaaagt

SEQ ID NO: 426978 - DNA, 155 bp, Homo sapiens
aggcaaggacgagaagtgtggctcagaggtgaccactccggagaacagttcctccccagggatgatggacatgcatggacccaaaaggggggaacatgcctggacccacagactgcgtgagagaaaacagctggtgatttatgaagagatcagcg

SEQ ID NO: 426979 - DNA, 76 bp, Homo sapiens
agatggcggagcgcgggtacagcttttcgctgactacattcaggacttgattattcttagaaatgcacttgacctg

SEQ ID NO: 426980 - DNA, 82 bp, Homo sapiens
cagcttgccaccaaagacctgcgactttgctcaggggcagaaccccttcgagctggccttctccctagaccagcccgaccac

SEQ ID NO: 426981 - DNA, 100 bp, Homo sapiens
gaaaaatgaggactcagtggaactgctggtgttgggaagcctgtctagcagtccagaggagatgtctggagctgaagaggggagggagacatcctcaggc

SEQ ID NO: 426982 - DNA, 95 bp, Homo sapiens
tgaagacatcaagaagatcttcgagttcaaagagaccctcggaacgtgagaagccctaccactgcaactgggacggctgcggctggaagtttgcg

SEQ ID NO: 426983 - DNA, 100 bp, Homo sapiens
gaagcgcagggagaaggaagaggtgtttgaaaaggttactttccgcaccagaatctatcactgcaacatcaacagtcagggagtcatctgtctggacatc

SEQ ID NO: 426984 - DNA, 75 bp, Homo sapiens
ggagctcatcgatctccggggaccgctctgggtgaaccaggaggatgaggtggaggaggggcccagcgatgtgca

SEQ ID NO: 426985 - DNA, 101 bp, Homo sapiens
cagatggagagagaaaggattcgaatgcgccaagaggagctcatgaggcaggagttcaaagaaggacgcagagccagccacacagccccacaggtcctctt

SEQ ID NO: 426986 - DNA, 100 bp, Homo sapiens
aagctaaagaggctgcccagaaagcagttaacagtgccaccggtgttccaactgtttaaagcttttttgctgagtagctgcttgaaaaagatgatctcag

SEQ ID NO: 426987 - DNA, 80 bp, Homo sapiens
cagggaaccctggtcaccgtctcctcagctcctgcccctcctaaagctgaagccaaagcgaaggctttaaaggccaagaa

SEQ ID NO: 426988 - DNA, 83 bp, Homo sapiens
ccgggaacccttgccgctgctgtcctgcgaccccaagcaggagtgtggccatctggggccgtgtggtatttgccactcaggag

SEQ ID NO: 426989 - DNA, 100 bp, Homo sapiens
ggcgtactttgggcttcatcatggaggactacctgcagggttgtcgagctgctctgcagggtacagccaaagaccggagctttggagagatgaagtttaa

SEQ ID NO: 426990 - DNA, 97 bp, Homo sapiens
agcctgtgggaagtctccatggtgaagtataggctgaggctacctgtgaacagtacgcagtgaatgttctattgacctgaaaagtggttctggaaaa

SEQ ID NO: 426991 - DNA, 100 bp, Homo sapiens
actggttcctcttcagaaagaaaaaagaagaagtccccgagttcaccaaaattcagacattacctgaaccactatcccgtgtttgtgggcagcgggcccg

SEQ ID NO: 426992 - DNA, 119 bp, Homo sapiens
caagatggcagccctcatacctcaagggttctcttgtttatcgagggttttgggctggtggtctcggcaggagtctactcttcatcttgtgttgagacttcgtggtggtgctaagaaaa

SEQ ID NO: 426993 - DNA, 74 bp, Homo sapiens
ctgaaaaactcccagagtggaaatgccctcacagcatatgccttgtttaagctctgctatgttatgccatcatc

SEQ ID NO: 426994 - DNA, 75 bp, Homo sapiens
tatgttttccttacatctcaatgaagcaagggactatgaagcctaactatgggacagctttacgagaaggaaaaa

SEQ ID NO: 426995 - DNA, 100 bp, Homo sapiens
cgcatggtcagtgccatttcgcctttatcgtggtggagtccaccctggctgtggtaagaatgattgatgttggctgatattggagtgctcattcacatga

SEQ ID NO: 426996 - DNA, 75 bp, Homo sapiens
agagtgcgcagaaggattccgggagcacagttccgccgaggagaaagagagagcgcgaaagagagaggatgtctc

SEQ ID NO: 426997 - DNA, 73 bp, Homo sapiens
gccaaagaaaaagataaaactgagaaagaattgcccaaaatgagccagagagatcttggtagaggagagcaac

SEQ ID NO: 426998 - DNA, 80 bp, Homo sapiens
accggcaggtgagaggcggatctacagacatagggggatatgagactttctactcggaatatcctgagtgttgcgtggat

SEQ ID NO: 426999 - DNA, 100 bp, Homo sapiens
aaggattccaagtaactcttatttgaattaaacaaccaccatgtcgagcaaaaaggcaaagaccaagaccaccaagaagcgccctcagcgtgcaacatcc

SEQ ID NO: 427000 - DNA, 100 bp, Homo sapiens
gaagatgataaagcatgtcagggaacttgctgagcaactattcaaaaatacacccatcatactgactccaagccccttgctctccagtatccacttctgg

SEQ ID NO: 427001 - DNA, 98 bp, Homo sapiens
agcaaggcgacgaaccttggagagaggagaacgaacatcttctggacctttgtccaggcattgcggcctcatttgctgtcaagcttttcaaagcatgg

SEQ ID NO: 427002 - DNA, 82 bp, Homo sapiens
cacaatgattaatccagtgccgcctggaggcagccggtccaacgcagcctaaggttcccatcgtgagtttcaggaagggaaa

SEQ ID NO: 427003 - DNA, 83 bp, Homo sapiens
cttccctggtcgaacagttttttctaatggctattcaaggaatagaaggacagtctgtggaagtttccaatattgtggacatc

SEQ ID NO: 427004 - DNA, 83 bp, Homo sapiens
tgagaagagctttgatagaagggctactcgtgaggtttctgaaggattgtcattcttgcatagcagtgtgaaaatggtgcatg

SEQ ID NO: 427005 - DNA, 88 bp, Homo sapiens
agagaaaagggctatgaacgattaaaagaagaactcgcaaaagctcagaggctcctacgactttcctgctcttcagtcaaaagagtgc

SEQ ID NO: 427006 - DNA, 100 bp, Homo sapiens
cctccataaaaacaagtgtgtgcatctggctgttagaagaattcatgctcatccggtaccataacagcttgggggaaagaccatgaaaaagatgcttttg

SEQ ID NO: 427007 - DNA, 50 bp, Homo sapiens
tccttacccttgtctgccagttgtaccagcgagcatgtttgcggtgggct

SEQ ID NO: 427008 - DNA, 100 bp, Homo sapiens
aacgagaccatcaccatgccccacgcgggttcttgctcaagtaccaactctatggacccaggacaggtttgtcccatgacctgctgtgaacagtgtgttg

SEQ ID NO: 427009 - DNA, 83 bp, Homo sapiens
gggagacgtgctggacacactggaggcgctggggacctcagcagccatgtcgaagccccatagtgaagccgggactgccttca

SEQ ID NO: 427010 - DNA, 107 bp, Homo sapiens
agattgcttggccatcaaaactgaagatcggagccaaatccaagaaaggtatactgcaacatccagatggcacagttttgaaacagttacaaccacctccaaggggc

SEQ ID NO: 427011 - DNA, 100 bp, Homo sapiens
tgatttgtgttttagagtgttcagcctgaccccgcctcaccaatacacgccttaatctgcttggtagacaaaaaatcaggagaaaaaagtaagacccgac

SEQ ID NO: 427012 - DNA, 100 bp, Homo sapiens
gatcaccattcccgtgcagaccttctccaacctgcagattcgagctccagctaggatgatcgaggttgtttgcaacgaccgtctggggaagaaggtccgc

SEQ ID NO: 427013 - DNA, 75 bp, Homo sapiens
ggcatttacagaaagagtcaacagcagtggcaacagggagcgacagtgcccaggggtctgagtctcacagcttgt

SEQ ID NO: 427014 - DNA, 100 bp, Homo sapiens
tcaaaggaggagctgccaaacttcagctttgtcacccgaaagaaccgccaagtgtgtgccaacccagagaagaaatgggttcgggagtacatcaactctt

SEQ ID NO: 427015 - DNA, 74 bp, Homo sapiens
gagcgtctcacctctgtctccagctccgttgactttgaccaaagggacaatactttggggttcttcatgaaaga

SEQ ID NO: 427016 - DNA, 87 bp, Homo sapiens
ggaaccctggacaaacccggcaagcagtccaaactgcaggatccccgccaatatcgtcagcatcagaggctccttgaaatgctagat

SEQ ID NO: 427017 - DNA, 100 bp, Homo sapiens
tttccttcaaaacctgtctcaagagaagaccaatgttcatataaatggtggcagaaataccagaagatgacctgagaattaatttatggcacttagaaat

SEQ ID NO: 427018 - DNA, 75 bp, Homo sapiens
gccgctcccgggggccgtgacgccaagaagtatgatgcgtttttggcctcagagtctctgatcaagcagattcca

SEQ ID NO: 427019 - DNA, 100 bp, Homo sapiens
tggaatgatactgtgagaaaacaatcagaatcttcttttatctcaggtgacatcaatagcacttcaacacttaatcaagacttaccagcgttataggcca

SEQ ID NO: 427020 - DNA, 76 bp, Homo sapiens
agatcaggcggctgcagcagcactgcacaggtcttcaaagcttcacctttctccaaaggcagatgtgaagaacttg

SEQ ID NO: 427021 - DNA, 83 bp, Homo sapiens
ttttgccacctttccctttatttccggagtgctgctcacggccgtgaactgctacagcgtgaaggccgccacccgggtccagg

SEQ ID NO: 427022 - DNA, 51 bp, Homo sapiens
ccatgaaagaaataaggcttcccaagctggagtcttttgtgcaattgtttc

SEQ ID NO: 427023 - DNA, 88 bp, Homo sapiens
cggcctgggctgctgactgcgcacttggaatagtagcaggcggcggcggcggaacgccaggcagacagagctgtgaaccaaccccgct

SEQ ID NO: 427024 - DNA, 50 bp, Homo sapiens
cggcgtcggcagctgctgctccgaggttcgatacaagaggctgttttcct

SEQ ID NO: 427025 - DNA, 82 bp, Homo sapiens
cgtctgccgcagagtcggcacctgaaggacatggagtgaagcctggtgttcggtacagagaattgggaaacattatccagaa

SEQ ID NO: 427026 - DNA, 82 bp, Homo sapiens
aaaattgctgctttgacactagtcttgaatacaactaagggagaacattgagcaattcttcaccaaatttgtagatgagggg

SEQ ID NO: 427027 - DNA, 98 bp, Homo sapiens
atggagatggagcaggtgtttgagatgaaggtcaaagaaaaagttcaaaaactgaaggactctgaagctgaggtcgatgaaacaggtgtagaagttaa

SEQ ID NO: 427028 - DNA, 98 bp, Homo sapiens
tgagggcttcagtgcagacgcagtggtggccctggagcagtatgccagcaaggagtcaaattgactttatcagctttaatcgatgggaagaacttcag

SEQ ID NO: 427029 - DNA, 83 bp, Homo sapiens
gcgggcccgggctgcggcgtgtgcgcgcccgccagctgctccggagatacggtgagaagccctaccactgcaactgggacggc

SEQ ID NO: 427030 - DNA, 80 bp, Homo sapiens
ggactatgtggtggacttggacacgtcccagctctctctgggcatctggaaagcattttgaaagcgaagcagaagccgta

SEQ ID NO: 427031 - DNA, 75 bp, Homo sapiens
ctgcaactaactccattcttaattgcgtcaagggttccacactgttgggagtcgctgcaagaatcggacaggcgc

SEQ ID NO: 427032 - DNA, 95 bp, Homo sapiens
ctgaaatgtccatccacttatccagacccaatggaacatcagcaatgcttctggaaatgtgtctctcctcttctgcctgcaccttgccaacagag

SEQ ID NO: 427033 - DNA, 71 bp, Homo sapiens
cagacgccgtgctcagccttgacgaggacacggtgctttcaacaacagagtagagacggggtttcgccgtg

SEQ ID NO: 427034 - DNA, 100 bp, Homo sapiens
acatgtatggagaatggctggtctcctactcccagatgcatccgtgtcaggcaggctgtccctgcaggatcccacgtacggctgaatcttcagactgggg

SEQ ID NO: 427035 - DNA, 100 bp, Homo sapiens
gatatgctagcaatattgcttacagagtggatgaggatcgcagtacggaacctgaccgattgcaggtgtttcacaagagagccatcatgccttacggtgt

SEQ ID NO: 427036 - DNA, 100 bp, Homo sapiens
agataatgctagtgggcgcagaagcgttgtcactgcagcaactgctggttcagaagcagtttgcagtactaccctctgggtggggcagctggacaaaaga

SEQ ID NO: 427037 - DNA, 98 bp, Homo sapiens
gcccagacggctcacctgtgcgggatggaacaaaaggctccctgaaacaacagtaacctacccctgtgggtcatcatcatgccctccgacctggccaa

SEQ ID NO: 427038 - DNA, 103 bp, Homo sapiens
ctgtcttctcttcctcctccaccgagtcgtgctctcgccccaacccgcgcgccagtcgtggcattcctggtggctttccatcagaacaagcagctcatcggtg

SEQ ID NO: 427039 - DNA, 88 bp, Homo sapiens
gactcagacgcttcctatccctacaaagccatgatgtgggacctaggaaaaggcctgaagattccccagctataccagtctggagtgg

SEQ ID NO: 427040 - DNA, 100 bp, Homo sapiens
tacaaatcaggattcactcagacagccaaaatgaagtttaatccctttgtgacttccgaccgaagcaagaatcgcaaaaggcatttcaatgcaccttccc

SEQ ID NO: 427041 - DNA, 108 bp, Homo sapiens
ggaagaggattatgaagatgacaaggatgatgatattagtgatactttctctgaaccagaaagaagagattttatcgacatcgaaagtaaatttgccctaaggacccc

SEQ ID NO: 427042 - DNA, 98 bp, Homo sapiens
taaggtgctgcggagcgacgcggcctgggaggataagtttcatgatcaacatgggagactcccacgtggacaccagctccaccgtgtccgaggcggtg

SEQ ID NO: 427043 - DNA, 82 bp, Homo sapiens
cgaaagcgacgttcggccaccggaggagcgggagccaagcagctgggagtgtccactcgccttccaccagcatggcaacgtc

SEQ ID NO: 427044 - DNA, 83 bp, Homo sapiens
cttcgaaataatgaatccaaaatccttcatttacaggtttttagaacttcagccataaaaatgggcagaattttccttgatca

SEQ ID NO: 427045 - DNA, 83 bp, Homo sapiens
ctggagttcttgaagagagataaagatgtcatgtggcctgtgttttggaccgtggttcgtacctatgctccttatgtcacatt

SEQ ID NO: 427046 - DNA, 75 bp, Homo sapiens
tatgcagaagttgactgctgagatgcctgaccagtttgaaatcgcaggacagtcattttgtttactcattcagcc

SEQ ID NO: 427047 - DNA, 90 bp, Homo sapiens
ctaaatgaagattttaggcggtatcaaatggaaagtttttccaaatattcatctgtacagagtgtgaacatggctacgcctcttcattcc

SEQ ID NO: 427048 - DNA, 100 bp, Homo sapiens
gctctacaagctcctcagtgaggacttcctgcctgagatctgcaacatgatcgcccagaagccacccctgaatgctcaaatgttggcacaacgtcagcgg

SEQ ID NO: 427049 - DNA, 119 bp, Homo sapiens
agctgcacccacctccaccctcacctgtgactcaggaccacagaagcaaaagttctcactcaaactggtacccaggatggaggagaaggaggccctggtacccatccagaaggccacgg

SEQ ID NO: 427050 - DNA, 99 bp, Homo sapiens
ttcctgttcgcagctgcggcagatgaatttcacccattcatcgaggcacttcttccacatgtccgtgcaattgcctatacttggttcaacctgcaggct

SEQ ID NO: 427051 - DNA, 90 bp, Homo sapiens
cgctcccctcaaggcctgggtgcttctactgcagaaatatcagctagaaccatgcagtcaagtgctggagaatctggtaaaagcaccatt

SEQ ID NO: 427052 - DNA, 90 bp, Homo sapiens
gccaacccggactggatcaacaccggggagtctgcggaactcaacagtgacaattgaggaattccactgtaagctccaagaagccacaaa

SEQ ID NO: 427053 - DNA, 75 bp, Homo sapiens
ttgagcaagcagcaagtcggctttcagatcagggcagcggcagtgatgacacggagctgcggtactcgtcccagt

SEQ ID NO: 427054 - DNA, 98 bp, Homo sapiens
cttatctcatctgcacaggaagcaggtctaaggtttgtttctgcgtcacatgatcttggcctacagtaagctttctttcagccaagtgtttaaactgt

SEQ ID NO: 427055 - DNA, 100 bp, Homo sapiens
ttgatatggtggaggacacagaagcttattgcaggagtgaccaggacactacctcctagaagtaatgcccacagaaagcgcaagttgttcgactgctcgc

SEQ ID NO: 427056 - DNA, 101 bp, Homo sapiens
ggagggattaagaagaactcttaggagcagcttggcctaaaggggaacctccacaaggagctcattttctttccagaagtctagatgatgccttaaaactt

SEQ ID NO: 427057 - DNA, 88 bp, Homo sapiens
aaacatcaggaatttgataaccatatcaactcctatgatcatgcacacaagcaggtattggcatactccacacatctgtaccattctt

SEQ ID NO: 427058 - DNA, 51 bp, Homo sapiens
gcctgggagaatgttgactctactgcagtgtcaacctaagaaaaagtctac

SEQ ID NO: 427059 - DNA, 80 bp, Homo sapiens
actttctccttcaagtacttggcagatcactctcttagcaggtgcctggaatacttattaagaaacgatgcaaatccagg

SEQ ID NO: 427060 - DNA, 96 bp, Homo sapiens
gccgtcttcccggcgagtccgcgacggtcgccgcccacggcgagtgatgtaaattggagtcaaccaggtgaaaagaagttaactgggggatctaac

SEQ ID NO: 427061 - DNA, 127 bp, Homo sapiens
tccagatgaggtgatggcaacggccaacttcggcaagatccagatcgggatttacgtggagatcaagcgcagcgatggaactttatattgctgttggaatatctggagccatccaacatttagctgg

SEQ ID NO: 427062 - DNA, 99 bp, Homo sapiens
ccaaggaaaccataggttacatcgttctggatttaagaaccgctcaagaaacaaagcagggtgtgtttgaccatcgaatgaagtgctggcagaaatggg

SEQ ID NO: 427063 - DNA, 76 bp, Homo sapiens
gtcaccctacctggcagccagtgataagttcaactttagttggcttaccaagagtgaagcgtgacaagtactcagt

SEQ ID NO: 427064 - DNA, 105 bp, Homo sapiens
ggattatgaagtattaattcttccactgatatctcaaaaggtgatctggacaaaggaacaggtatctcagacaaatcttcctattttcaagctgaaagaatctac

SEQ ID NO: 427065 - DNA, 100 bp, Homo sapiens
gccaggactgatgcagatgcccctcctccaccagaggactgggaggagcatgtcaacagtgattcgcctttgccagtctcatctcgtgtctgctttgtta

SEQ ID NO: 427066 - DNA, 83 bp, Homo sapiens
agtcgctggagcgggcggagctgtgcgagagcctcctcacttggagaggacatgtactcccaggattccatagatctccttgc

SEQ ID NO: 427067 - DNA, 74 bp, Homo sapiens
ccgcggggacctcggagggagcccggcggcttcgggctcgcgatgcctctacacaagtatcccgtgtggctctg

SEQ ID NO: 427068 - DNA, 75 bp, Homo sapiens
cggcaggttcgaggcgattcgaggataaagtggccagtgtgtacgaagccccgggctttttcctggacctggagc

SEQ ID NO: 427069 - DNA, 75 bp, Homo sapiens
tcttccagtcctcctaggcatcttattgatcctccagtcgagaaactggcgatggaatatgagaggagccctctg

SEQ ID NO: 427070 - DNA, 100 bp, Homo sapiens
tcgccggctttacgttcacctcggtgtctgcagcaccctccgcttcctctcctaggcgacgagacccagtggctaggcgtggaggaaccatggtaaccta

SEQ ID NO: 427071 - DNA, 122 bp, Homo sapiens
cacagtttaggtctcaaggcaagcctattgagttaacacctctgccgctgctaaaagtactatactggcaattgctggagaagattttgcaattgttgcttctgatactcgattgagtgaag

SEQ ID NO: 427072 - DNA, 109 bp, Homo sapiens
caactattcaacatggaggcggaggtcgataagctggaactgatgttagcagacttgaagaaagagaagcagaactgaagaaggaatataatgcattacatcaaagaca

SEQ ID NO: 427073 - DNA, 83 bp, Homo sapiens
ggcaccgaggcactcagaggagggcagcccaatggatccaatggtgatgaagagacctcagttgtatggcatgggcagtaacc

SEQ ID NO: 427074 - DNA, 50 bp, Homo sapiens
cccaggcaatggagtgaccaccaggattttcagtcaatgcatcatcggag

SEQ ID NO: 427075 - DNA, 74 bp, Homo sapiens
ggggacaccagcagctctgctgcggagcgggaggaggaccgaaaggtttttagaacttcagccataaaaatggg

SEQ ID NO: 427076 - DNA, 50 bp, Homo sapiens
ctccctggagaagcagatggaaaagtcggccgtatactaacaaggtaatt

SEQ ID NO: 427077 - DNA, 100 bp, Homo sapiens
gagcgcgccgccctctcgtcccactttccagaggtaaataccggattgtatacgtaactccagaatactgttcaggtaacatgggcctgctccagcaact

SEQ ID NO: 427078 - DNA, 100 bp, Homo sapiens
cctcaagatggatgaagacggcggcggcgagggtggtggcgagtgtgaacatggctacgcctcttcattcccgtccatgccgagcccccgactgcagcat

SEQ ID NO: 427079 - DNA, 50 bp, Homo sapiens
cagggagccaagcgtcctgcccggcccaatggctgccatccggaagaaac

SEQ ID NO: 427080 - DNA, 90 bp, Homo sapiens
acagcgggtagcacaggcctttcgggagggagagaatacccagccttgatacatcatcaaaggcatagcctttccaagatggtttatcag

SEQ ID NO: 427081 - DNA, 48 bp, Homo sapiens
tctgaaatagaagatcttgcaagggaattggtggtaaagaccctgatt

SEQ ID NO: 427082 - DNA, 50 bp, Homo sapiens
tggagaagtgctggaagctcatggacaagatgatttgtcattaattcgga

SEQ ID NO: 427083 - DNA, 74 bp, Homo sapiens
ccagatgatggaaggaaaagctttcttaccagagagagtgatcagcagctggactgtgccttggacctaatgag

SEQ ID NO: 427084 - DNA, 50 bp, Homo sapiens
ggaaaaagtaccatcatttgaaacagatttctcacattggcaaactgaga

SEQ ID NO: 427085 - DNA, 49 bp, Homo sapiens
atcaaaaatagtgatagctttgataattcttcaccaaaggacatggatg

SEQ ID NO: 427086 - DNA, 75 bp, Homo sapiens
ataaattttggagccagatctctcagggccatctcagctataaacacaagtgtaccacatgaaggaagatggttg

SEQ ID NO: 427087 - DNA, 50 bp, Homo sapiens
ctcggcatggctctcctggtgctcggaggagcatattatttaatatctag

SEQ ID NO: 427088 - DNA, 100 bp, Homo sapiens
gacatatcgttggacccagaattgaggtggatattccatctattataaccaagaaactattaaaagcagcaatgaagcatatagaagtgatagttaaagc

SEQ ID NO: 427089 - DNA, 100 bp, Homo sapiens
ccaacatcgtgatagtacccaaggacgggacgggatgggcaaacaagcaggatcagcaagacccaaagagtagagacggggtttcgccgtgttagccagg

SEQ ID NO: 427090 - DNA, 98 bp, Homo sapiens
agatgtggacttgaaagaagctgcagcggaggaaggcgagattttctaccctagcaaggatggtacgaagattccaatgttcattgtgcataaaaaag

SEQ ID NO: 427091 - DNA, 87 bp, Homo sapiens
ccagtcaagtgtctacatttctgatttccattcttcttatagtctatggtagtttcaggacagagcgggatgccaccagcttgtcca

SEQ ID NO: 427092 - DNA, 101 bp, Homo sapiens
gtttggattccagatttgtattcgatagaccactgcctgtgtctcgtcttgtatctctaattggaagcaatgaaatccacgatgggatgaacctggagctt

SEQ ID NO: 427093 - DNA, 82 bp, Homo sapiens
tccattttattttccttcatctgagccccttaaaactaatgtgttactgacctttccaaagtgaaactgatgagatttgatg

SEQ ID NO: 427094 - DNA, 50 bp, Homo sapiens
tatagcacaccatccccagccaaccaagatcactccatggatgaaatgac

SEQ ID NO: 427095 - DNA, 100 bp, Homo sapiens
ggatagcgtggagtgacggtgccaccgcggcgcaattcagtttgcctgttctgtatgcaagttccgtagctttgatgacgaagagatccagaagcatctg

SEQ ID NO: 427096 - DNA, 79 bp, Homo sapiens
atcaaaatcaaccaggatcccttaggcatccagggacgcaggattcacaagtagagacggggtttcgccatgttggcca

SEQ ID NO: 427097 - DNA, 74 bp, Homo sapiens
gtgtatcaagtaatggtgcaaagcctgaagttgatgccggcccaggatggatcagacctgtgaactacccagaa

SEQ ID NO: 427098 - DNA, 83 bp, Homo sapiens
atgcgggccctgctggaccagctcatgggcacggctcgggacggccacggcgtatgcctccgaggacggggtcctgaccgagg

SEQ ID NO: 427099 - DNA, 74 bp, Homo sapiens
aggtcgcagcattatcaaaggcggagtttaagagagctgtgaaagtagcaacaggacaagaactctcaaacaat

SEQ ID NO: 427100 - DNA, 100 bp, Homo sapiens
taatccaagatttaatcaactactgtctgagctacattgcgaaaattaaactcccgaagaagaggaagttaaaccgaatttaacagagagaattcaggac

SEQ ID NO: 427101 - DNA, 100 bp, Homo sapiens
aagaggatggagatgaagatgaggaagctgagtcagctacgggcaagcgggcagctgaagatgatgaggttgttttggaaaccgaaataacaaataagtc

SEQ ID NO: 427102 - DNA, 100 bp, Homo sapiens
gtcagccagttccgctcctgtcaggttccagcaacagatagaaatgctttaagttcactctggggaaagctggcctctgaaatcttaatgcagaattggg

SEQ ID NO: 427103 - DNA, 101 bp, Homo sapiens
acagccaggacctgcccccaggagcctctcaggggtactccaaagattcaggtttactcacgtcatccagcagagaatggaaagtcaaatttcctgaattg

SEQ ID NO: 427104 - DNA, 75 bp, Homo sapiens
tccttccatctctgctgctctctcatttgctggccatcggattggggcacacatccatagttgtgcacaaggatg

SEQ ID NO: 427105 - DNA, 50 bp, Homo sapiens
actcagtctctaaaaagctaaggagttaagcccagagtcaacacatccag

SEQ ID NO: 427106 - DNA, 75 bp, Homo sapiens
gatgatgtgcagatcaatgacatttccctgcagggtcagttaaatgaaagcatggaccatgggggagttggacca

SEQ ID NO: 427107 - DNA, 100 bp, Homo sapiens
ccgccatgggggcctgcctgggagcctgctccctgctcagctgcggtgattctgggggcccacttgtctgtaatggtgtgcttcaaggtatcacgtcatg

SEQ ID NO: 427108 - DNA, 75 bp, Homo sapiens
tgcactccagcatgccgatagttcaaacttctatatcacagaaaaggctcagctgtcgcaggccctggaggagct

SEQ ID NO: 427109 - DNA, 100 bp, Homo sapiens
gcgatgtcaccctgagagtgaccggcgaggtgcacattggaggcgtgatgcttaagctggtggagaaactcggaaaatgactcaggcactttggacacgg

SEQ ID NO: 427110 - DNA, 78 bp, Homo sapiens
gacgcatccttacagatcccaaagcgttgaataaacggttgtacaaagagggaagacatgtaaggaatttgcataaga

SEQ ID NO: 427111 - DNA, 98 bp, Homo sapiens
agaacacaggctaattgccaggtatgcggcaaggctggcagcagagtcctcttcgtctgaagcagtgtggttcctctccaacatcactgcaggaaatc

SEQ ID NO: 427112 - DNA, 75 bp, Homo sapiens
ttccgtgtaccgctacccgcccaagtccgtgccggtggtggtgtgcacattgagccccggtatagacagttcccc

SEQ ID NO: 427113 - DNA, 100 bp, Homo sapiens
gtgccattgaagatattatcacagttagtgattggcaactttggcctcagctggaatcagcaagtaactcagatggccctctgggctatcatggctgctc

SEQ ID NO: 427114 - DNA, 50 bp, Homo sapiens
ccgagagaagcttgatcagttgaggttcgatatctcaatgcctatactgg

SEQ ID NO: 427115 - DNA, 75 bp, Homo sapiens
ctatggaatgaggaggacgaaatggacatgacttggccatgctggagtatctgccaacatgatgaagaagaggac

SEQ ID NO: 427116 - DNA, 78 bp, Homo sapiens
gttaggattttattactggcagcatgtatatcttttgccctgtctctgcccctggtggtcatcgtccatggcaaccaa

SEQ ID NO: 427117 - DNA, 76 bp, Homo sapiens
accgggcctacctgccgtccaggctgtgtatcaaaagacacagataatgtacaagtggatagagcccaaaatctgc

SEQ ID NO: 427118 - DNA, 100 bp, Homo sapiens
ctgaatgagcaggtgacacaagaacaacctctgaagaacctggtgaagcgccaaaaaattctcctagcatactagctatgctggaaacactacaaaatgc

SEQ ID NO: 427119 - DNA, 98 bp, Homo sapiens
tttagtatcaatatctgctacaacatcacattttcatgcatcattttttcaaaatagggagaatcagatgagagggaacaatcaaaattggaagttaa

SEQ ID NO: 427120 - DNA, 100 bp, Homo sapiens
ctggggaccctgagatcgtcaagtctcccagcgaccccaagcaataccgaaggccttacgaccggatatgggctataatacattagccaactttcgaata

SEQ ID NO: 427121 - DNA, 100 bp, Homo sapiens
agacggggcagctggacgagctggagaaggccatcaccacgcagaacgtcaacaccaagtgcatcaccatccccaggacgagaagctcactgtgacccag

SEQ ID NO: 427122 - DNA, 76 bp, Homo sapiens
gtgctgttattgcacctgttcaggacttacacatattattgaaactcgaaaagtccttgatttaaggataaatctg

SEQ ID NO: 427123 - DNA, 96 bp, Homo sapiens
ccatcttggatccgcgggacaagaaaattcatgcggtgctggagaatctggtaaaagcaccattgtgaagcagatgaggatcctgcatgttaatgg

SEQ ID NO: 427124 - DNA, 74 bp, Homo sapiens
gccctggagccccgagggggcttctccttcgagaactgccaaaggctactatgtgggcatgtgccttgcggctt

SEQ ID NO: 427125 - DNA, 94 bp, Homo sapiens
gattgcggtcgcagcttcactcattgatgcccatgcaggaggactaggtaagaatgattgatgttggctgatattggagtgctcattcacatga

SEQ ID NO: 427126 - DNA, 80 bp, Homo sapiens
cggagatggtgcagaagatggaggaggtcggaagcctgtgtccatcgtgtccccggagccagggaccacccgtgacgtgc

SEQ ID NO: 427127 - DNA, 99 bp, Homo sapiens
tggaggaatcctgatactgagcggttcatgggcgggggtggtgagagctgcagcctcatcgcggaaggactcagcacagccttgcagctgtttgatgac

SEQ ID NO: 427128 - DNA, 141 bp, Homo sapiens
tcggaaatgcattgcacaggtgaccccgatctggtgtccgagggccgcaaaagcttccccagcatccattcctccttacctggagtagaacagaaaaattattatgtctgtgttcccttgggactcattggaaattgtaca

SEQ ID NO: 427129 - DNA, 101 bp, Homo sapiens
gcctgctgctgctcgggcgccgggcgccgggcgccgcggccgccaggagcggctccgcgccgcagtccccaggttacacttccaggggctccccactcagt

SEQ ID NO: 427130 - DNA, 75 bp, Homo sapiens
attttttcagggatataaccgactgacctggatagtagttgttcttcaggcctttttgcaaatgtgtaacttgcc

SEQ ID NO: 427131 - DNA, 74 bp, Homo sapiens
gcgcgagctggagcactcgcggctgaagaagatgcagagcagcctgaagctggtggactgtatcatcgaggtcc

SEQ ID NO: 427132 - DNA, 98 bp, Homo sapiens
cttacgtgtactttaccaacgagctgaagcagaatttctagaaggaggagttggccatgttgaaatgttatttcgctgcaactatttagctttagttg

SEQ ID NO: 427133 - DNA, 118 bp, Homo sapiens
ctcaagctcatcgacttcggttcgggtgcgctgctcaaggacacggtctacaccgacttcgacggtgtcgtgaaaactacccctaaaagccaaaatgggaaaggaaaagactcatatc

SEQ ID NO: 427134 - DNA, 82 bp, Homo sapiens
ggcaccgttccgcggacgtgctcgaccatggtgaatccgggcagcagctcgcagccgcccccggtgacggccggctccctct

SEQ ID NO: 427135 - DNA, 100 bp, Homo sapiens
agcagcgctccgcgcctgcacgagcagcgcgtgcgggacatccagaagcaggatcttagaaatgaagttgaaaaattacgcaatgaagtgaatgaaagag

SEQ ID NO: 427136 - DNA, 83 bp, Homo sapiens
accccctccgcccagcagcagtatggcttccagtacccccttgccatggcagcaaagtgacttaagagattaaaattaatttg

SEQ ID NO: 427137 - DNA, 98 bp, Homo sapiens
gtaatgaggatgaagattcaccaaataagctatatactttggttacctatgtacctgttaccactttcaaaagacatgtctcaggaaggctatggaac

SEQ ID NO: 427138 - DNA, 82 bp, Homo sapiens
attcccattgctgtgcctacaccttcgccacccactattggaccaggtggtgtaactgtcacactccctcaggcaggaccat

SEQ ID NO: 427139 - DNA, 113 bp, Homo sapiens
tgatttatcatggaaagctgaactgctgccaacaattaagatcaacaacccctccccgtcgtaaacgctgaggaatgatgtggcaagaatgccatgatgttctttaaaaaaat

SEQ ID NO: 427140 - DNA, 75 bp, Homo sapiens
gaagcaagagaaaaagaacattactgtcttggtacagcaatcatttgaaactccaagggccaaagctcaaatgcc

SEQ ID NO: 427141 - DNA, 75 bp, Homo sapiens
cagtaccaccttccagagatgaattacatgaatgacagtcttcgaaccaatgtgtttgttcgatttcaaccagag

SEQ ID NO: 427142 - DNA, 102 bp, Homo sapiens
gcagcaagtcttagcagtggacgcgagctcagcccacccttcaagccccaggtcacgtcggagactgacaccaggtattttgatgaggagttcacggcccag

SEQ ID NO: 427143 - DNA, 98 bp, Homo sapiens
gccgccgcctgggaggggacccggacatccaggcagaaattgatgcccacaatgacatatttaaaagcattgacggaaacaggcagaagatggtaaaa

SEQ ID NO: 427144 - DNA, 74 bp, Homo sapiens
gaccctctgactcccagtgcggctgccctggcagtgcagccagaagcggagccggcggcccaagatgcgccctg

SEQ ID NO: 427145 - DNA, 100 bp, Homo sapiens
atctttgtctttgcagtggtcatctatttccagatgcctgaaaacttcatgcctcctgttcccatcacatcaccaatcatgaacccgttgggtgaccccc

SEQ ID NO: 427146 - DNA, 50 bp, Homo sapiens
actactattatgaacaacattgttatttgcattttgaaagcgaagcagaa

SEQ ID NO: 427147 - DNA, 95 bp, Homo sapiens
tcctcctagccaaattgctcaactaagaccaagtcctcgctggactgctcagggtgccagacctcatcaacctaaggaaattagtggtcatactt

SEQ ID NO: 427148 - DNA, 50 bp, Homo sapiens
accgtcatattccacccattactaaggtttcgacacagccccaactgctg

SEQ ID NO: 427149 - DNA, 83 bp, Homo sapiens
cgataattgagggttccatttcccaggtaaaccgtcctattggcagggtacagatcttcactgcagacttatctgaaataccc

SEQ ID NO: 427150 - DNA, 100 bp, Homo sapiens
gtggacaacctgtcatcactgacttctgaaaattgttggtgaaaaagagaaaatcagtggcactgttaatatccgcacaagagacaataaggtccacggg

SEQ ID NO: 427151 - DNA, 90 bp, Homo sapiens
gatgaagaagaggaagaggatgatgaggatgaagaagagatcgaggttgaggaggaactctgcaagcagatttgccaacattacaacaaa

SEQ ID NO: 427152 - DNA, 76 bp, Homo sapiens
ctgccgctggccatcagcctcttcccgcaaatgtcagagatggagaaggatgaaactgtgagtgactgctccccac

SEQ ID NO: 427153 - DNA, 100 bp, Homo sapiens
ccacgcagcccgtggcaagggtcctggtgcccaaaaggctttaaaggagatagatgaagttggggacctattgcagctgaagtattcccgtcatcggttg

SEQ ID NO: 427154 - DNA, 82 bp, Homo sapiens
accaggctaccatggtctacaagactctcttcgctctttgcatcttaactgcagacttcccaagtaagaagcggaagaggag

SEQ ID NO: 427155 - DNA, 75 bp, Homo sapiens
ttgacatttaattttagggtcctttatatagaagggagagtagatacattatggtgccgagtggtaacatgggag

SEQ ID NO: 427156 - DNA, 90 bp, Homo sapiens
gtgattaagactgagggagccactctaagtttattgaagtcaaactgtgatggctggctgcttggaacatcatcatctattaaaaagcac

SEQ ID NO: 427157 - DNA, 100 bp, Homo sapiens
gtcagattccactgccgcccgccacagcaggtggaaagcgtaaagatagtgtgtggggctctggaggtgggcagcaatctgtcaatcaccttgttaaaga

SEQ ID NO: 427158 - DNA, 98 bp, Homo sapiens
gctggcttagcctcagtggagccttatgttccagaatttacagtctccccatttgcagtgcaaaaactttccaggaactggcatttgatccatatgaa

SEQ ID NO: 427159 - DNA, 82 bp, Homo sapiens
cagcctcagagtcagatgcaggaataccgtagcagtaggcaggacagttccaattcaacaaaaacctctttaccctggcact

SEQ ID NO: 427160 - DNA, 100 bp, Homo sapiens
ctgacgtcccgtggacttttggaaaaagacttccaaaaagtagcccactttattcacagaggtcggagtggctggcgctgtcggccggccggggaggtcg

SEQ ID NO: 427161 - DNA, 83 bp, Homo sapiens
gacaagatgtggtgatgacagaatcagcttttatcatggaagggaagtggttgctgtgtatgttactggtgcttggaactgct

SEQ ID NO: 427162 - DNA, 100 bp, Homo sapiens
gccgcctgaagtgcgggcgcagctggcggagctggagctggagctctcggagggctgctgacttgagtaaaccaatagataaaaggatatacaaaggaac

SEQ ID NO: 427163 - DNA, 100 bp, Homo sapiens
cagactcagaaaattttggaaagagaagatgctcggctgatggtccagacatcatctggtctccctgaacctgaaatcacaccatggatgattttgagcg

SEQ ID NO: 427164 - DNA, 82 bp, Homo sapiens
gctcacttcaacctggatgagagtggcgtgctcagtctagacagggtcctggagtacaatgccattggaggcaagtataacc

SEQ ID NO: 427165 - DNA, 83 bp, Homo sapiens
gaaagctcaccagtctcactctgcaaattgttggccacctgtattatctggggggatcagtccttgcattatcattgaaacac

SEQ ID NO: 427166 - DNA, 82 bp, Homo sapiens
gtgcgcgctggcgctgagcctgcagccggccctgccggttgaagaagcctcagcggaggcgatacggcctcctcgccaacac

SEQ ID NO: 427167 - DNA, 98 bp, Homo sapiens
cgcgtccgaggctcgcgggcggcgggcccggaaatgcattcgatttaacccggatgccacagtgtgggttgcaaagcagcggatcctgtgtacattaa

SEQ ID NO: 427168 - DNA, 90 bp, Homo sapiens
ctacaccttgcagaataacctccagtatgttgccatctctaacctaccagctgccactttccagccatggttgggtgggtgaggccagaa

SEQ ID NO: 427169 - DNA, 100 bp, Homo sapiens
caggagcaggagcgggagcgggagatggctggccgagctctcaagcagactggcagcaggagcatcgaggccgccctggagtacatcagcaagatgggct

SEQ ID NO: 427170 - DNA, 100 bp, Homo sapiens
ggcaatctgaggtacatagctgagaagactgaatttttcaaggtttctaagcatgaattgaggaacagaagaagcagagcagatgatcggagcagcattt

SEQ ID NO: 427171 - DNA, 85 bp, Homo sapiens
acactatttcattagcctcagaacgatatgataaagacgatgaagccccctctgatggaacttgccacatcagactcagattccc

SEQ ID NO: 427172 - DNA, 74 bp, Homo sapiens
ctgcaccatgagctggggcaccgagctctgggtccagctgggagctccccgacctccaggagggcaagatccaa

SEQ ID NO: 427173 - DNA, 83 bp, Homo sapiens
gggcaaagctcaagatggcggacaaaacgccaggcggatctcagaaggccagttcaaaggtactccaaagattcaggtttact

SEQ ID NO: 427174 - DNA, 82 bp, Homo sapiens
gcggcttcctccagacctctcggcgcggctgctctgttaaaagcgaaaatgaaacaattgcctgcggcaacagttcgactcc

SEQ ID NO: 427175 - DNA, 100 bp, Homo sapiens
aaggatatagttgctgctatacaacacaattataaaatgtcagcttttaagggtacaacttggccaagtagaaatcaaatgccccatcacagagtgtttt

SEQ ID NO: 427176 - DNA, 50 bp, Homo sapiens
acctcactgagttagaatcagagtgtggcccagagttgctcagaattgga

SEQ ID NO: 427177 - DNA, 97 bp, Homo sapiens
gatgaaggcggcgcttattggtgttcaccaaaacaccagcatggtgtaccagctttggctagatgatgctcagatggagtctcgctctgtcatccag

SEQ ID NO: 427178 - DNA, 83 bp, Homo sapiens
aacacctcaggacacggcctacaacaccaagaggagcacgtgaattgcctctgcttacgttcaggccctgtcctaaacccagc

SEQ ID NO: 427179 - DNA, 100 bp, Homo sapiens
gaaaaactggagagcttcatcaaaaatagtgatagctttgataaaatccagactccaaaatgatgcaaatcaacctgactggatttttgaatggaaaaaa

SEQ ID NO: 427180 - DNA, 100 bp, Homo sapiens
gagattgaagcatgctctggaaatgttcccagaacattgcacgatgcctcctgcaccgagcttatgagcaggcattaaacttgtacactgagttactaaa

SEQ ID NO: 427181 - DNA, 98 bp, Homo sapiens
accggcccacgccctccgactgccacccacagcccccatcccgtagcccttcctggatctggagagagcagctgctgctgccccaccacctgccaggc

SEQ ID NO: 427182 - DNA, 100 bp, Homo sapiens
cagatgtgcagccccagcagagcaggaatgtatcagggacagtggcggatgtgcactgctacaggactctactatggagctggtgccgacaagaaagccg

SEQ ID NO: 427183 - DNA, 75 bp, Homo sapiens
tggcgattctgcaaccaagcacctgaaacagcaggagttgatccctgaattttattatctccctgagatgtttgt

SEQ ID NO: 427184 - DNA, 75 bp, Homo sapiens
caactgagaattacaagcaccgggggatcctccctcgtgccctgcagcagatggagtctcgctgtcgcccaggct

SEQ ID NO: 427185 - DNA, 100 bp, Homo sapiens
cctggctcaggaacagggacagcacctcatcccctggatgggggaccacaagatcctcatcgacagtttggtgccctggttgtcagatgttggaaagcag

SEQ ID NO: 427186 - DNA, 88 bp, Homo sapiens
catcccactattattttggcacaacaggaagcggagcgtgctttggacaccatgaattttgatgttataaagggcaagccagtacgca

SEQ ID NO: 427187 - DNA, 82 bp, Homo sapiens
ttggcttcctagccttcgtcagcagcaaatctgaggtcagaagagatcaattctacagaaatttccagtggttctgttgagg

SEQ ID NO: 427188 - DNA, 50 bp, Homo sapiens
aaaatctcctggctgcagctgcaagatatcagaaaaccaggactctgcag

SEQ ID NO: 427189 - DNA, 98 bp, Homo sapiens
acgctgctggtcagccagttccgctcctgtcagttgaggctgtgaagctgggcagggtttcagctgagctgaggttggaagtccctgaccttcagctg

SEQ ID NO: 427190 - DNA, 90 bp, Homo sapiens
agatgacaaaacttcaagccaaacatcaagcagaatgtgatttgcttgaagatatgaggttctccagcatttggctcaaggccccaaggg

SEQ ID NO: 427191 - DNA, 82 bp, Homo sapiens
tcgtcagcactgactttcagctatggaatcggccaaatttgagtttcatcatggtgactatgaaaaacagtttctgcatgta

SEQ ID NO: 427192 - DNA, 97 bp, Homo sapiens
aggagatcgtcaggctggcccaggaccgggaggagatgaaggtggatggaagcatgcctaggggaagatctgcctcccaccacagaactggaggagg

SEQ ID NO: 427193 - DNA, 100 bp, Homo sapiens
gagaaagccagcctaatccaaagactgtggaacttttaagtggagtggtggatcagaccaaagatggaatgcaggctcaacagtaccagcagcagcgtcg

SEQ ID NO: 427194 - DNA, 74 bp, Homo sapiens
tcagttggaagcagccgatccagcctgcggagcctgtggggcagacagcccacctgaggatattgaccataagg

SEQ ID NO: 427195 - DNA, 83 bp, Homo sapiens
ctcttagcagcgcgcggagaagaacggggagccagctggagaagcgactggaggagtggttggggaggacattgcctggcagt

SEQ ID NO: 427196 - DNA, 75 bp, Homo sapiens
cccgaagccccctgcaggaactctacaacccaatccaggtcagcgacatcaaattccaggcacccaccggggagg

SEQ ID NO: 427197 - DNA, 49 bp, Homo sapiens
tgtttcaaagggtggtgaagaactaagattcccgacagttaagcaatgg

SEQ ID NO: 427198 - DNA, 87 bp, Homo sapiens
accagcccagagtggcttctctaggggaaactccccgctcagctgtcgtcattgaattttgagaagcattctgaaaactttgcatgg

SEQ ID NO: 427199 - DNA, 100 bp, Homo sapiens
cctcacggctcagctgcctctctggtctccaactagtattatgagaggagtcaatcagagaaatgcactcggtgatggaaagagagccactattctgaag

SEQ ID NO: 427200 - DNA, 75 bp, Homo sapiens
accgtggctcacgagctgcagggagtgcaccaggtgtcgcgcatcctgaggaaggcggcggcggagcgcagcgcc

SEQ ID NO: 427201 - DNA, 83 bp, Homo sapiens
ggccccggaacccgagctggagctgaagcgcaggctgcggggcgcggagtcgggagcagcccctgtcaaagggaacaggaagc

SEQ ID NO: 427202 - DNA, 75 bp, Homo sapiens
tgaagattttgaacggcttacgaaaatttgtgcaacacatcaagacaattcaattaaaccccagctatatcaggg

SEQ ID NO: 427203 - DNA, 80 bp, Homo sapiens
ctgcagaagaatccattgggatatctggagaggaattaagtagactggctggacagattcgaaggttgtatggttcaaac

SEQ ID NO: 427204 - DNA, 82 bp, Homo sapiens
agttggaagcagccgatccagcctgcggagcctgtggggcaggctgaactcacgggaatcaaatggcgtaggtacaattttg

SEQ ID NO: 427205 - DNA, 96 bp, Homo sapiens
actctggacagtctgggacatccaggggaagagaaggtggactttgagaagaaaggaaatactcctttacaccttgctgtgatgttaggaaataaa

SEQ ID NO: 427206 - DNA, 96 bp, Homo sapiens
atcttgctcagtctctgtcagaggaagatcccttgacaccattcgcttttcacccaagatgatttgatgtcttataaaactctgatgaaccatgat

SEQ ID NO: 427207 - DNA, 75 bp, Homo sapiens
gtcagcgatggtgcccggcgaggagaaccaactggtcccgaaagagtacacacaaaagtattttctggaagcagc

SEQ ID NO: 427208 - DNA, 82 bp, Homo sapiens
cgcggttgccaagcgctcggcgcttggcgctggcgctggccaaggcggtgagaagccctaccactgcaactgggacggctgc

SEQ ID NO: 427209 - DNA, 96 bp, Homo sapiens
ggagttcagcagccatcagaaccaagatcaatgagctgagcaatgttcctgttcctgtcatgctaatgccagatgacttcaaagcctacagcaaga

SEQ ID NO: 427210 - DNA, 100 bp, Homo sapiens
caagatgatgtgcggggcgccctccgccacgcagccggccaccgccgagacccagcacatcgccgaccaggtgaataagtctgatgacacagcagaacat

SEQ ID NO: 427211 - DNA, 123 bp, Homo sapiens
ggccttagctgtgctcgcgctactctctctttctggcctggaggctatccagcgtgaaagaacttgtcctggacaacagtcggtcgaatgaaggcaaactcgaaggcctcacagatgaatttg

SEQ ID NO: 427212 - DNA, 75 bp, Homo sapiens
atgctacagagaatcaatgctttcattgaaaaacagtttgctaatccagactttacacaacctatctcagaagtt

SEQ ID NO: 427213 - DNA, 96 bp, Homo sapiens
ccctacatcaggaatttcatggcaaggtctaccctgatgggagagtctgcatttccatcctccacgcgccaggcgatgaccccatgggctacgaga

SEQ ID NO: 427214 - DNA, 75 bp, Homo sapiens
tcgcacacaagagagagagacgcaggacgagattgaggagctgcgggccgagatgctggagatgcgggacgtcta

SEQ ID NO: 427215 - DNA, 75 bp, Homo sapiens
gaaagccgctgaggacaagtgcaagcagtctgcgctcctcagaccaccggcaggtgaacagcctgatgcagaccg

SEQ ID NO: 427216 - DNA, 100 bp, Homo sapiens
gtgcggcgagacaattgcttatcgccaagcagcatggaagaggagatggttcgtgttacgcagtggccgtttaactggagatccagatgttttggaatat

SEQ ID NO: 427217 - DNA, 100 bp, Homo sapiens
cagcaagcccaggctcattatcagccagaataaaagctacttggccgtaaggctaaaagaccaagatctgagagattcaaggcaacaagcagcacaagcc

SEQ ID NO: 427218 - DNA, 131 bp, Homo sapiens
agagtggaagagaaaattgtgaactaaggccccctgcccccttttcctggtgcatgtgaagttatcaaaaacagtactatactggcaattgctggagaagattttgcaattgttgcttctgatactcgatt

SEQ ID NO: 427219 - DNA, 75 bp, Homo sapiens
ctgatttttagaactccacatttgagattacatctcgtttagcagatgtgttcaaccaaaggtgtgaggtgaacc

SEQ ID NO: 427220 - DNA, 97 bp, Homo sapiens
caccaccatctccatcacccaccaacaacaccacaataatccacagccaagccgcttacaaacacgcagatggcaagaagattgatggcaggagggt

SEQ ID NO: 427221 - DNA, 75 bp, Homo sapiens
gcgggccctgggggtcctcagcgtggtctgcctgctgcactgctttggaatagccaggccagaagaaggaaggcc

SEQ ID NO: 427222 - DNA, 90 bp, Homo sapiens
cgaggagggcgtccgcgtgtacagccagctcaccatgcagaaggccttcctggagtgtggacgaatgtggaacctcgctctgtggctgtg

SEQ ID NO: 427223 - DNA, 75 bp, Homo sapiens
cccagtggctgaagtggcatatgaattatgaagttggatcatttggaatgaatgcagtggaaattggaacatttg

SEQ ID NO: 427224 - DNA, 83 bp, Homo sapiens
ccccatggctactacccagggagcccagaggagacaggagcccagcacgtccaggctgatcagctgaccgaagaacagattgc

SEQ ID NO: 427225 - DNA, 89 bp, Homo sapiens
gggagccgcacgcggcgatatggaagaggagggcaagaagggcaagaaggtcaaaatgcagatcttcgtgaaaacccttaccggcaaga

SEQ ID NO: 427226 - DNA, 75 bp, Homo sapiens
cacagaaagagctgttaacacttcctagataacgggtgacttaagagattaaaattaatttggttgctgttggtt

SEQ ID NO: 427227 - DNA, 90 bp, Homo sapiens
ccccgcaaggtcaacctgggagtgggaggtagaggaaatgaaggagtcaaagcttccaggtgataaaggacttgtgttgatgtctcgggc

SEQ ID NO: 427228 - DNA, 74 bp, Homo sapiens
cctgttgccagctcctgcgccctccggactaacctcaaaaaccagggtcgagctgtgcagttttagcgggtaca

SEQ ID NO: 427229 - DNA, 113 bp, Homo sapiens
gttgatccatcaagagcagttgaaattcttaaggatgctttcaaatcaaatgactcacagcagcctatatatgcaaacagatttgcagtaccaacctatgcagccaagcaacc

SEQ ID NO: 427230 - DNA, 137 bp, Homo sapiens
cggaagaccgcgcgcagggcctgcagcgggagctggacggcgagcgcgagcggcgcgagaaagagaactacgatgacccgcacaaaacccctgcctccccagttgtccacatcaggggcctgattgacggtgtggtg

SEQ ID NO: 427231 - DNA, 112 bp, Homo sapiens
taatcttttacttcctgctgctgtcagtggtaataataataataagtattttcaatgtggagttctatgcagtgtttcaggctgcatgtaccaagtagttcagacgattggc

SEQ ID NO: 427232 - DNA, 100 bp, Homo sapiens
cggtgacagagtggagccatggctagaggctggcgcccatgcggctctacacgctctccaagcgccactttgtcctcgtgtttgtcgtcttcttcatctg

SEQ ID NO: 427233 - DNA, 90 bp, Homo sapiens
ccaaaacccacagaagttgtattagatgatgacagagaagatctttttgcagataactggagtgccaaggctaaaagacgaaataccacc

SEQ ID NO: 427234 - DNA, 96 bp, Homo sapiens
gcgggatcccagcctcaggcgtgcgcggacggtgtgcgggtgtcccgacccaggctaagcttgagcatggctgagcaggagcccacagccgagcag

SEQ ID NO: 427235 - DNA, 100 bp, Homo sapiens
caggtggaccccaagaagaccattcagatgggatctttccggatcaatccagatggcagccagtcagtggtggagccctctttgattccatgcacagcag

SEQ ID NO: 427236 - DNA, 74 bp, Homo sapiens
aaaagtggcagtggatgatagtgagttgggtatccctggtcagtaagaattatgagattgaacggactattgtt

SEQ ID NO: 427237 - DNA, 100 bp, Homo sapiens
aaaatcaagcagttttgtaaaacctgcaacactcaaacggaatcagtccccaatgcctggaaattcctcattggattactgtgttttaaacagaatttcg

SEQ ID NO: 427238 - DNA, 89 bp, Homo sapiens
tcgaattacttcttagacatttaaaggcattaggatttcctgaaggacttgtgatacaagcgtattttgcttgtgagaagaatgagaat

SEQ ID NO: 427239 - DNA, 90 bp, Homo sapiens
agggtgtgacctccgcagccgcagaggaggagcgcagcccggcctcggatctaccgctaccagtctcatgactatgccttcagtagtgtc

SEQ ID NO: 427240 - DNA, 90 bp, Homo sapiens
ctggagaagctggcagaacgcttcctggccaagacatgcagcaccaaggaccagcaattcaatcgtccagcatgctctgcccaccccacg

SEQ ID NO: 427241 - DNA, 134 bp, Homo sapiens
aactcagtgagacacaatttatcattgaataagtgttttaagaaagtggacaaagagaggagtcagggtctagacagtttcaaagtgaaacagaagttcttcgctggcagccaggagccaatggccacctttcc

SEQ ID NO: 427242 - DNA, 90 bp, Homo sapiens
gtcacaggcccagagatgcccagctgtgaccagtgctccgcttgcaggggagctgatggagctgatccgcagagagggcaggaggatgac

SEQ ID NO: 427243 - DNA, 102 bp, Homo sapiens
gatgaaaagtggaaggaagcaattttacaagaaaagccatacttgttttctctggggtatgattctaatatggttcaagcaataaatgcgggagtgtttttc

SEQ ID NO: 427244 - DNA, 90 bp, Homo sapiens
ggttcagtcaccgacaagcccttgagccagggtaactcaggaaggaaaggcctagttccccgagagcgttcagacagtgggggctcaagc

SEQ ID NO: 427245 - DNA, 74 bp, Homo sapiens
ggatcgatgtttcaatattggaagcgctttgatttacagcagctgcagggcacggccgagcagatgaggactgt

SEQ ID NO: 427246 - DNA, 87 bp, Homo sapiens
ctgtgcaactgcagctacagtggaaaaaagcaaactgctcttgatcccagtgctcagagcatgaaaattttctgctgtctttggaac

SEQ ID NO: 427247 - DNA, 100 bp, Homo sapiens
ggagctgaagagggccatctgcggctttgatgccctcgccgtggccacgcagcatttctttagaaaggaaggatgataaagactatgctttaaaacaaat

SEQ ID NO: 427248 - DNA, 100 bp, Homo sapiens
cccagcgccggacgcgccgcgccctggcggctctagggaccccccccgcgcctgcacttagccccgcgcccgaggtagtgtgccagtatttgaaaaatcc

SEQ ID NO: 427249 - DNA, 75 bp, Homo sapiens
aacctggataatgatgaaggattgaaaatcgctgctaaacattaccagctgaaaaaattaggtgtgatgcccccg

SEQ ID NO: 427250 - DNA, 75 bp, Homo sapiens
agtacggcccctgggtccacgtggcgcgaaagtaggagtacctgatggagggcagctacaacaaagtgttcctgg

SEQ ID NO: 427251 - DNA, 115 bp, Homo sapiens
gtgaaaaatctcaagaggtcttaaagttgctggagagtaaaggactcctactgaaaacaatttcattcggctcctaaagaagtagcagtgtccaaggaacaagaagagaaatctg

SEQ ID NO: 427252 - DNA, 74 bp, Homo sapiens
ctcgtggtctaaagcttcggcacaagggcccaactggaattccacttacggggcactcccacaatgctttgtct

SEQ ID NO: 427253 - DNA, 75 bp, Homo sapiens
cggcacctgagcggcggagacggctgtagcacaaggtgactcctgcacctgcgccggctcctgcaaatgcaaaga

SEQ ID NO: 427254 - DNA, 83 bp, Homo sapiens
caatggagaaagagtaattcacgcagagccggctttgcagggtactagatggaaacttgagaaaggactgcttattgataaca

SEQ ID NO: 427255 - DNA, 75 bp, Homo sapiens
ctgaagttgccaggcttcccaacattcttgtctgtgatatttcagcagttgaatcagttgaattcacttcatcaa

SEQ ID NO: 427256 - DNA, 100 bp, Homo sapiens
ccaaaagagaaagtggatgctctatcacagtttgatctcaacaattatgcaatgatggaatggggagaagatattaaagcagtttcaaaagatgaagcag

SEQ ID NO: 427257 - DNA, 75 bp, Homo sapiens
ggaacttgcagaaatcacattggaccctcctcccaactgtagatttcacctgtgtacacgatggcgagagtgagg

SEQ ID NO: 427258 - DNA, 78 bp, Homo sapiens
gctttcaggtcacctacctcccagtgcagaagagtgggatcattgacctaaagacttcgaaagatgacctgctgttga

SEQ ID NO: 427259 - DNA, 90 bp, Homo sapiens
ttcagaatctggacaccaaacagattgagacgaagatcagaacactgaggctcagagaagttaactactccaaagtcatatagccagtat

SEQ ID NO: 427260 - DNA, 100 bp, Homo sapiens
cgggtgatttctgcatttccaactgagtctttccatctacagcccactggcactccaggcacctacctacttcaaacaagctcaagccaaggccttcccc

SEQ ID NO: 427261 - DNA, 75 bp, Homo sapiens
cgttcctggagattctgattgaggaaagatgaatgggagggctgattttcgagagccgaatgcagaggttccaag

SEQ ID NO: 427262 - DNA, 98 bp, Homo sapiens
ccttgctgtggttggtggtggcgatggagactacagagcaccagagcgagccgagactgtctgaagctgggcccacctgctgagggagaagtcgtcca

SEQ ID NO: 427263 - DNA, 87 bp, Homo sapiens
caagaggaatgacaaacaaccagctcttcaggtgtgttccagagaacaagccttcagacatttgctatattgacgctgagctgtcag

SEQ ID NO: 427264 - DNA, 128 bp, Homo sapiens
gcccaagggctgggaagtggattccacccaggaaggagctgtgtatttcatcaaatgcctgtgaggagccaccaacatttgaagctatggagctcattggtaaaccaaaaccctactatgagattggt

SEQ ID NO: 427265 - DNA, 50 bp, Homo sapiens
gcctcaccgttctgcccccagaactaggggaaggtgtggctcattgactt

SEQ ID NO: 427266 - DNA, 51 bp, Homo sapiens
agaagatcatcattaaggacggaggcacgggaccagttactctccacaaga

SEQ ID NO: 427267 - DNA, 100 bp, Homo sapiens
ccctcacctgtctgctccgaggactgccactgcccggggatggggggtgctgtgccgttcctggtcagtgccacctctggcaccactgtgctaggggcct

SEQ ID NO: 427268 - DNA, 73 bp, Homo sapiens
ggagccgtgaacccagccgcgccaggagctggaggatcttcagaagaagcctcccccatacctgcggaacctg

SEQ ID NO: 427269 - DNA, 82 bp, Homo sapiens
ccctgcacctgcctcttcccccattctcaatgatgattattccccaccttctaagagacaaagaccaacgagccaccacagc

SEQ ID NO: 427270 - DNA, 96 bp, Homo sapiens
ggacggagtgcctgaaccgcctgcaacagcactcagacacagagaagcatgagggggagaaacgacagctggtcaattcgggagaggatgtcctcg

SEQ ID NO: 427271 - DNA, 90 bp, Homo sapiens
tgggagagaatcaaacttacagggttgccaccagaattaaacaaccaccatgtcgagcaaaaaggcaaagaccaagaccaccaagaagcg

SEQ ID NO: 427272 - DNA, 87 bp, Homo sapiens
ggaggaagacctggaagacagatctggtgacaaaaggtgagacactcacctagaacagtgccgtgctgctgctgggaagttgcttta

SEQ ID NO: 427273 - DNA, 100 bp, Homo sapiens
ctgccaagctggatcttgatgcgggacttcagtcctagtggcattttcggagcgtttcaaagaggtacatcaggaacgtctctatcaagaatacaatttc

SEQ ID NO: 427274 - DNA, 109 bp, Homo sapiens
agcttaagtggcttttgatgcatttccaagtagaataagatgtgtgtgcttggatgacaaggaaagatggagtccccagcagttgttgaaacacagctttataaatccc

SEQ ID NO: 427275 - DNA, 151 bp, Homo sapiens
agctctcgcagtcggagaggcggctaaggaaaggtgccacagcagagacgcgaaggagaggccctagaaccgaactcgaatcatttatgacagaaagtttctgttggatcgtcgcaattctcccatggctcagaccccaccctgccacctg

SEQ ID NO: 427276 - DNA, 82 bp, Homo sapiens
gaacttgtgtgttaaagtaacagatgatttagttggttacacatcattttggaatgactgtatatcatctggattacgtggc

SEQ ID NO: 427277 - DNA, 83 bp, Homo sapiens
caaagtaccatgagaaatgtcggttcagatatgatatcatcaagttgaatcgaaaggaagggaagaagcagaattttccaaga

SEQ ID NO: 427278 - DNA, 100 bp, Homo sapiens
gatgagttaatgggccgggaccgaaacctagccccggacgagaagcgcagcaacgtgcggtgggaccacgagagccctgggctggaagctcttctacgtc

SEQ ID NO: 427279 - DNA, 96 bp, Homo sapiens
ggggctcctgacctgtcgggaatgggaaactttgtgaccaacacacatctcggtcatcaacttctatgcaggagcaaaccagagcatgaatgttac

SEQ ID NO: 427280 - DNA, 73 bp, Homo sapiens
tccacaacctgcttctcacctacctgatagcacctgtggaatcctctcaagaggaacagtcattgtgtgaagg

SEQ ID NO: 427281 - DNA, 83 bp, Homo sapiens
gttggatatccacaccatccttctcgctgcaggatcatgcatgccccgcggtccagggacaggttcacagcgccgtccttcat

SEQ ID NO: 427282 - DNA, 101 bp, Homo sapiens
gccgtggctctcttggcagccttcctgatttctgcagctctgtgtgaagatgaacaagagaactgggcaacccatgatccacatctacctggacaaggaaa

SEQ ID NO: 427283 - DNA, 74 bp, Homo sapiens
gcggcttttgtctacttggctgacctcctgatgcctcacttgagatcctgcagatcattcagctggacctagac

SEQ ID NO: 427284 - DNA, 50 bp, Homo sapiens
gtggaagttcacaggctgctcaggctgtgtgggtacccccccttctacga

SEQ ID NO: 427285 - DNA, 51 bp, Homo sapiens
caaatgatatacaacttctaaggtcgaaggtagatcagattcaagagattg

SEQ ID NO: 427286 - DNA, 134 bp, Homo sapiens
cctgaagtagcaaaggcaagaaggcaacgacgttccatctgtggaaggacctaccaaccagggtgaagtaccatgcaagcatttcttaaaggtacatccatcagtactaaacccccgctgaccaaggatcgagg

SEQ ID NO: 427287 - DNA, 83 bp, Homo sapiens
ccaaggacggcgttctggatctcaaagcgacaatgcagatcttcgtgaagactctgactggtaagaccatcaccctcgaggtt

SEQ ID NO: 427288 - DNA, 90 bp, Homo sapiens
ggaagaaagaagagcttattttgacttgcagacacatgaagccagttgagggaagttctccatgaatgtacgtcacaatgatgatgaccg

SEQ ID NO: 427289 - DNA, 75 bp, Homo sapiens
gttaaggattccaagtaactcttatttgcaatcatttggggaagaatctacagttgctgatggacagagtggatg

SEQ ID NO: 427290 - DNA, 129 bp, Homo sapiens
gtcatgcagggtgtgagcagggctgagatgggcaccgcggatctggggccgtcctcagaaagtattaatgaagcttagaaaacctagaattacagctacaatttggtcctcaggaaaaattatttgcac

SEQ ID NO: 427291 - DNA, 88 bp, Homo sapiens
acagtatcgagaatatggccttcatgccgctgggctttactttttgctactagaagtaccagaaaatggtgtgaatggaacattaact

SEQ ID NO: 427292 - DNA, 98 bp, Homo sapiens
tggcgtattccacatagcaaacaggagatgcagaaactaccagaggccgttcagctaattgagaaggccagcatgatgtatctagaaaacggcacccc

SEQ ID NO: 427293 - DNA, 100 bp, Homo sapiens
agaacatcttgaagggatggaacctggacagaaagtccatgagaaggtacaggatctcagacatatctccatgggctacaaaatgaagctgtacttccag

SEQ ID NO: 427294 - DNA, 101 bp, Homo sapiens
actgacacctcagggacaaagagatctggacagaatcgccggacagaaggcagatgggacctgtaacaccaacttcaagaagacgcaggcactggagcagg

SEQ ID NO: 427295 - DNA, 76 bp, Homo sapiens
gttcctgctccttctacatctgcagataaagtggagaggataagggagatcttgaaggcatctcgaaagttgcaag

SEQ ID NO: 427296 - DNA, 76 bp, Homo sapiens
agccggccgagcggcgacggaccgcgagggttccgaggccacatggttggaccaagccatccagtgcgtggctgag

SEQ ID NO: 427297 - DNA, 101 bp, Homo sapiens
agtgatcaatcccggggcgatttacagatgcaggatcggaaagaatcccggccagacgtgcgaacagctccagctgggtccacctcattcatttaaccgag

SEQ ID NO: 427298 - DNA, 100 bp, Homo sapiens
acctgcacgacacatggaaattggactaaattaccagaatgcaggggactatacaggctccaacccaagttccagtggttgtgtctcctaggaatcagca

SEQ ID NO: 427299 - DNA, 78 bp, Homo sapiens
taagaacccagaaacccgacccagtgccgcgcagctgctggagtcaccttcaggccattcagaggaggaaagagaggg

SEQ ID NO: 427300 - DNA, 75 bp, Homo sapiens
tgtcgagggatttattcccaagaactacatccgcgtcaagccccatccgcactggtgaggtggattgatgatgaa

SEQ ID NO: 427301 - DNA, 97 bp, Homo sapiens
acagtcttccgcaggaaggagatgtgcagggtttccaggcctgaggtgcccgccctggccccaggagaatgaaccagccgcagaggatggcgcctgt

SEQ ID NO: 427302 - DNA, 82 bp, Homo sapiens
tggccacttgcttgggatcctttatcctggtcatcttctatttccaaattcaaatctgaacatcaatgatgtactagggaac

SEQ ID NO: 427303 - DNA, 111 bp, Homo sapiens
ctgtggctcagcccgttcgctggactgcaaaccgagctcccgtctgccttgcagtgtctctggagaatggttcgactgttgcctgataccatcaatagcattaacctagac

SEQ ID NO: 427304 - DNA, 100 bp, Homo sapiens
ctgatgatgagaacacagccacgcttacgctctggtagctgaagaacatctcacagtggacgccagggtctattcctacgctctagcactgaaacatgca

SEQ ID NO: 427305 - DNA, 100 bp, Homo sapiens
gcgatgatgaatcttttcttcttgaaattaggcagactcttcaaaacgcactcattcagtttgctactagatgacaagagcacctcaaaggcagcagcct

SEQ ID NO: 427306 - DNA, 102 bp, Homo sapiens
tgggggctggccgcgtcctcagcgcgaccctggagctggggggacaagaatccttcaagaaacaggaaaaaactcctaaaacaccaaaaggacctagttctg

SEQ ID NO: 427307 - DNA, 90 bp, Homo sapiens
cttcttcccttagaagaactgctgaaccgactctgagaaatttgggatacccacccaccatcccagggtctacaacatccacagccggac

SEQ ID NO: 427308 - DNA, 75 bp, Homo sapiens
ttcgaggccggcacggtggccacgctggttgtcactcagcccagtccatcagtttctcagcccagtacttctcag

SEQ ID NO: 427309 - DNA, 75 bp, Homo sapiens
gagatcacttatcgtagatcaagtccaaaagctgacttccttggatgaaacacttcaagttgaagaagatgatcg

SEQ ID NO: 427310 - DNA, 78 bp, Homo sapiens
gcgagaaaggtcccactgcagccctccaagcagtaagactttgaccccgacgcaggcttcagtgattgccgcggatca

SEQ ID NO: 427311 - DNA, 100 bp, Homo sapiens
acattttgccttctgattctaactgcaaaggttgcattttggacacttgcatacgtcctttctcatcctgatatccacaaggccattatggaaggcatat

SEQ ID NO: 427312 - DNA, 100 bp, Homo sapiens
aaatgcttcaagacttgcaagctgctggatttgatgagggaagacgagcacgccctcatccagcagtattgccaaacactcggaggagagtccccagtga

SEQ ID NO: 427313 - DNA, 74 bp, Homo sapiens
cacaatattaaaactttacctgggaattcctagaggacctgtgcaacaacctcttgaggatcgaatcttcactc

SEQ ID NO: 427314 - DNA, 75 bp, Homo sapiens
agcagaagatattcaaggagatgaccgatggatgtctcaggccaagatcaaggctcgagatcttcgcgggaagaa

SEQ ID NO: 427315 - DNA, 80 bp, Homo sapiens
ggtgaaggcagacagcgagtggcgacgatcaaacggggattcagcgtccgatcctttggaacagggactcacgtgaagct

SEQ ID NO: 427316 - DNA, 87 bp, Homo sapiens
ccctcgcgacgcgcccggcccggagcccccagcgcagcggccgcggacttgtcagtcacatctgtaacctgctcactgaaactgcca

SEQ ID NO: 427317 - DNA, 89 bp, Homo sapiens
ggggatgtctttggcccagagctggacaccctcctggactcgctggtgaaaggtgtagcagtcactcggcctacacccacagcatcgac

SEQ ID NO: 427318 - DNA, 75 bp, Homo sapiens
tgtctccttcgacttggagtctttgtccaggacgaactgccattggatgtccagaatcccctgtagttgataatg

SEQ ID NO: 427319 - DNA, 100 bp, Homo sapiens
gggccactcagagtcgcccgagaagatgaatcaggcgccaaccgtgggctttgagcaggatgttggcagccgaaccacccaccatttcatgtaccctgag

SEQ ID NO: 427320 - DNA, 75 bp, Homo sapiens
cctccaactgcaaaaccaacttatatggctcgtggacagcagaaaattcagtctcagcagaaaaatgccaaaaag

SEQ ID NO: 427321 - DNA, 75 bp, Homo sapiens
aaagagcaagcctaactcaagccattggcacacaggcacagaaaactgaatctgtagataacgagggagaatgaa

SEQ ID NO: 427322 - DNA, 51 bp, Homo sapiens
tccacaccatccttctcgctgcaggcctctactcttcatggatcttttgga

SEQ ID NO: 427323 - DNA, 82 bp, Homo sapiens
aaaagaaatcatcttggtggatgactacagcaatgatcagagtaaaacttgtctcggcacagagtcaagtaaagaaagccaa

SEQ ID NO: 427324 - DNA, 90 bp, Homo sapiens
atcactgcatgaggctgatcgggttctcagagagggccctggcactcatgaaggcccgctctagattgaaaatgtcaactccagacatca

SEQ ID NO: 427325 - DNA, 99 bp, Homo sapiens
ctggcctgttgcagccatggtgcattgcagttgcgtgttgttcagaaaggctgctctttggcgtaaattgcaatcgattagggatcgtttctcagaatc

SEQ ID NO: 427326 - DNA, 98 bp, Homo sapiens
gggagcacacccgttctctcggctggatgttctcatcgtccctgccaactttccaagtctggggatggccagaaagaatgctattggctccaaggtgc

SEQ ID NO: 427327 - DNA, 100 bp, Homo sapiens
cagctggaagccgtggctgcgctctcttccctctgctgggcgtcctgttcttccaggtctttcccagggaactccgatgaagtgttccaacaaaatgagc

SEQ ID NO: 427328 - DNA, 97 bp, Homo sapiens
tggccaacatacacgcccatggaagtgcacttaaccccagaaattgttctctggggccggactgagaaatgcctgaaggagacgacggaggagatcc

SEQ ID NO: 427329 - DNA, 51 bp, Homo sapiens
cgggagactggagtcgaaggccgtgaggatgtatatggaatgttactcaat

SEQ ID NO: 427330 - DNA, 82 bp, Homo sapiens
gtaatgggccagatgacaatcttgtgtcttcccactctgagttccactggacaacaccttccatccacatatgggacgccat

SEQ ID NO: 427331 - DNA, 90 bp, Homo sapiens
caacctgcccatggtgcagctgtgggccgcccacgcccatgaaggtatggacctgtctgccaatcaggacgaggagaccgaccaggagac

SEQ ID NO: 427332 - DNA, 100 bp, Homo sapiens
cggcatgctgaaactcagagagggaagatgtcttgcaagtacagcagccacacccagcagccatggcaatgacaggctcaacaccttgctcatccatgag

SEQ ID NO: 427333 - DNA, 75 bp, Homo sapiens
ttacactgttgagaaagtggaagttcatcgtctgattaggttggatggcaagcatgtggtgtttggcaaagtgaa

SEQ ID NO: 427334 - DNA, 75 bp, Homo sapiens
ctcggcagaaacccgtgggggagagagggcaccccaggtgctggagaatctggtaaaagcaccattgtgaagcag

SEQ ID NO: 427335 - DNA, 113 bp, Homo sapiens
gcctccccagcaaatcgagaaaaacctcagcgacctgatcgacctggtgatggcttggacaacagtgtagcttcccccagcacaggtgacgatgatgaccctgataaggacaa

SEQ ID NO: 427336 - DNA, 82 bp, Homo sapiens
gccgccaccatgcccaagagaaagcagcgtcaccctttacaccagaaagctggcgggcactatggggaaaaaacaaaacaag

SEQ ID NO: 427337 - DNA, 100 bp, Homo sapiens
tccaagaccagtttaatgaccttgttatcagtgatggctcttctctggaagatcttgtggtcatgattgttgtgaaacagtgaaggtgcagctctgtgct

SEQ ID NO: 427338 - DNA, 143 bp, Homo sapiens
tacagaagaggagaaaacggaatctaatcaggaggttgctaacccagaacactatattaaacatcccctacagaacaggatgtaattaaaaccattgtgcagagtggtggcatcaagcatctagttaccatggcaactagtga

SEQ ID NO: 427339 - DNA, 106 bp, Homo sapiens
tacaagcaagctgaatggaggccagatagtaccatgatagctgtatcaatatgtcttctccgactactatgaagaagcctgaaaagccattgttcagctctgcatc

SEQ ID NO: 427340 - DNA, 82 bp, Homo sapiens
tgacatccaggtacagtcctccagggtatacttcgtggcctgcaccatcgacccgccttcgggaccccgctcccagctctga

SEQ ID NO: 427341 - DNA, 83 bp, Homo sapiens
cacaccctcgtattctcctgcccttccccagggacatgaattttataatccccagaaaaaaaattacattttcctgcgtaatg

SEQ ID NO: 427342 - DNA, 89 bp, Homo sapiens
cggccatgagctcgcggaagctgagcgggccgaaaggcaggaggctcaggacatgaaccatacgaattcatatgggatcatcagaggcc

SEQ ID NO: 427343 - DNA, 74 bp, Homo sapiens
caagaacagttggccaatactggtgcccaagcctggattaaaaaggtaaaaagcagcttcctgattcaaatgag

SEQ ID NO: 427344 - DNA, 83 bp, Homo sapiens
gccacgtgcagacatctacaaccttcgatctcctgacgagttggggaccagattctagaagtgaatgggcggagctttctcaa

SEQ ID NO: 427345 - DNA, 83 bp, Homo sapiens
aaaagaaggacgtatgctctacaaggtgatcgtgcagtccggccgccaccccacagtgctgcagaagctctgccagttgccct

SEQ ID NO: 427346 - DNA, 100 bp, Homo sapiens
tagcagcctttatgggcattactatgttagttggaataactggactcttttacactcaactaattggcatcatcacaatcatgcatgcattttcagttgc

SEQ ID NO: 427347 - DNA, 99 bp, Homo sapiens
aaagatgcggcaccgggaggaggaggagatcgtcaggctggcccaggaccgggaggagatgaaggaagcagaacatcagagagccatgcagagacgtgc

SEQ ID NO: 427348 - DNA, 75 bp, Homo sapiens
atttatgcttaaaagaaacagtgaggtcacgagaagagaatgccttctagatgcaaaatcacctccaaaccagac

SEQ ID NO: 427349 - DNA, 88 bp, Homo sapiens
attctttctcgatatcacttttacaccagaatatcccttcaagcctccaaagttggactaaatgctcttccttcagaggattatccgg

SEQ ID NO: 427350 - DNA, 75 bp, Homo sapiens
ttaagggctacgggaagatcctggaggtggatctgaagaacgggcacccagattggctgaaaacttctgtgtctg

SEQ ID NO: 427351 - DNA, 129 bp, Homo sapiens
cggcattgaggtcaatcaggagattgtggttatcaccaccaaaggagaagcaatctgcatggaaaaacgtttcttcatttcaactcaaacttgctgctaaagcgcctaaatctgaaaaggaaatggacc

SEQ ID NO: 427352 - DNA, 51 bp, Homo sapiens
ccacttctcaccgagatgattcatgaaggcagctgcaatgactctccgcac

SEQ ID NO: 427353 - DNA, 75 bp, Homo sapiens
cgggtccaggtggcagaacatcctaggtaagaatgattgatgttggctgatattggagtgctcattcacatgaag

SEQ ID NO: 427354 - DNA, 74 bp, Homo sapiens
gacggcgtcgggagagcgcgcctagccggctcgcgatgagtgatagttgcttcaggaatcttgcagaagaccgc

SEQ ID NO: 427355 - DNA, 116 bp, Homo sapiens
gcgggcccctgctgaaagaccggcatgccctattctgtgggcttccgcgaagatttaagtgccctgtatgctcaaaatttgtatcctcagatgaaatggatttgcatcttgtaatg

SEQ ID NO: 427356 - DNA, 83 bp, Homo sapiens
ccggccgctctgcgggactctgaggaaaagctcgcaccagaagaagctcattcacacagaagacccatttaatgatgaacatc

SEQ ID NO: 427357 - DNA, 100 bp, Homo sapiens
gttctcgacaaagaccgaaaagaagatgatacaaatgaatttgttagtgctgtgtgctggagggcactaccagatggggatttgtactgtgttcgcagtg

SEQ ID NO: 427358 - DNA, 75 bp, Homo sapiens
gcagccgtggatgccgtggcccgggtcactggccagcaccccgaggaggtggtccaggccacgctggtggtcctg

SEQ ID NO: 427359 - DNA, 50 bp, Homo sapiens
ctgggtttttgcactcgtggtggtgctggagaagaagcaggcgctccctc

SEQ ID NO: 427360 - DNA, 75 bp, Homo sapiens
tttcctctcgggaagagatagatcatgcagagtattacctttacaaaaccatccgggtatggctgaaaagagaca

SEQ ID NO: 427361 - DNA, 100 bp, Homo sapiens
ctgcgctggccgctcgcggagggagaggctgcagagcgagggcaggaggtgtcatggagaaactccagctgggcccagagattctgcagcgggaaaatcc

SEQ ID NO: 427362 - DNA, 75 bp, Homo sapiens
tttcaggaccaaaattgtggaaaagtcactctggaggggctccgaactttgtgtgttgcttataaaaggctgatc

SEQ ID NO: 427363 - DNA, 74 bp, Homo sapiens
tgtcacgccaacgtcatccgctacatcgtgtgcaggttatcaatagtctggctgtctatcgtcatcgtgagact

SEQ ID NO: 427364 - DNA, 87 bp, Homo sapiens
ggcaacgtgttggaccttccggagcttctcagaagacagagggttttcttttgagcccctcatatggaaaatttgaaatgcagaggg

SEQ ID NO: 427365 - DNA, 83 bp, Homo sapiens
ctggcggcggcggcggcggcggcggcggcgctgctcccgggggcgacgggcggcaagtacgtgccccgcgccgtgctcgtgga

SEQ ID NO: 427366 - DNA, 99 bp, Homo sapiens
tgccgaggctggcccaggcagccgcgcttcgaaggacgccgccgggagctgcggaggcaattactaaagatatgtttgaagaagcactgcgtgccctgg

SEQ ID NO: 427367 - DNA, 51 bp, Homo sapiens
tctggtcatactaaagaacacatctggaagtattcatgtgattgaacggcg

SEQ ID NO: 427368 - DNA, 88 bp, Homo sapiens
cttgctgtaaattatgagaaagaagaagaattcctcactaatgagctctccagaaaattgatgcagatcttttatgacctagtgcggc

SEQ ID NO: 427369 - DNA, 96 bp, Homo sapiens
atggacttaaatgccacaaacagttaagtccattggcttggagatgacaagcacgagtttctggtagtcttggagagcccgtggcctagcagtacc

SEQ ID NO: 427370 - DNA, 101 bp, Homo sapiens
ctacagtctgcggaacggagcagtatttcaatgtggaggttcggaacctcacttacatggtgacccgcagggaaaagattaaacggtctgtgtgcaaagtc

SEQ ID NO: 427371 - DNA, 76 bp, Homo sapiens
cgggggtcctggaagccacaagctcattgaggccatccgaagagccagtaatggagaaaccctagaaaagatcacc

SEQ ID NO: 427372 - DNA, 115 bp, Homo sapiens
gcgattcaagccaagctgaccaagaagccaaagaactggctaggcaaataagctttaagaatttcgaggatgtcagatgtaaatgtatctgccctccctataaagaaaattctgg

SEQ ID NO: 427373 - DNA, 100 bp, Homo sapiens
cagacaacactgaaatctcagacggtggcccggaaccggagtggggtcacaaatgtcaaaatgcagatcttcgtgaaaacccttaccggcaagaccatca

SEQ ID NO: 427374 - DNA, 100 bp, Homo sapiens
atctatgaggagaccaaaataaaactaacagtctatgatgtcaaggataagtctcatgacaccacgtgccaaatactggtgtaagcaaacctagagtttc

SEQ ID NO: 427375 - DNA, 100 bp, Homo sapiens
cgtgaccgtcgctagaactcagttgtgcgttgcggccagtcgccactgctatccggacaaaggacagagtctttgacagtatcagccacctcatcaacca

SEQ ID NO: 427376 - DNA, 82 bp, Homo sapiens
actatggaattctaatttgaaccatgtttggattgaagccgcctctgtattacttaccagaccaaatacacgctgatcgatg

SEQ ID NO: 427377 - DNA, 100 bp, Homo sapiens
aatggagaagagaaagcacaaagcatggagaccctccctccagaatacagattctgttcatcttgctctgaaattaaataattctgaactcatggggaga

SEQ ID NO: 427378 - DNA, 100 bp, Homo sapiens
ggggcaaccactgcgagtactgcttcaccagaatgtgagcatttgatccgccatatgttggtgttagatcccaataagcgcctctccatggagcagatct

SEQ ID NO: 427379 - DNA, 75 bp, Homo sapiens
ggtttattcatagcaacttcaaggtactccaaagattcaggtttactcacgtcatccagcagagaatggaaagtc

SEQ ID NO: 427380 - DNA, 102 bp, Homo sapiens
gcgtcatgcggctcctcggctggtggcaagtattgctgtgggtgctgggacttcccgtccgcggcgtggagggagctgtccaagatcacgatgccaatcgcc

SEQ ID NO: 427381 - DNA, 100 bp, Homo sapiens
gggtcctcgctgtggggcaatccgggcttgcagacgagtgtgcaggagaagagaattgggtggacagcaggaccatctacgtgggacacagggagccacc

SEQ ID NO: 427382 - DNA, 82 bp, Homo sapiens
ctctctagtcaacttccgacttggactccgaagatcgggggatatgagactttctactcggaatatcctgagtgttgcgtgg

SEQ ID NO: 427383 - DNA, 90 bp, Homo sapiens
cccagactgacttgttcacatgtggcaaatgtaaaaagaagaattgcacttacacacaggatgtctcccgtgctaagctagcagctataa

SEQ ID NO: 427384 - DNA, 74 bp, Homo sapiens
gcgaggaaaatggcggcgggaggttcatcatgcctagtggcgtataagaagaccccgccaccggtccctccacg

SEQ ID NO: 427385 - DNA, 100 bp, Homo sapiens
agcgtttccgaggtgaaggcgccgcgccaggccggggggcgccacagacccctttgcttctgtttttgggaatgaatcatttggaggtggatttgctgac

SEQ ID NO: 427386 - DNA, 82 bp, Homo sapiens
cgctgccgtcgccgccgccaccatgcccaagagaaagggtatttgtggtgcagcagattcccaacagtaacctcctcctcct

SEQ ID NO: 427387 - DNA, 75 bp, Homo sapiens
gttcatcattctgttgaagaaacgcttaacccagtcatgcaagacaagataatctgccttccgaaaagagtgcag

SEQ ID NO: 427388 - DNA, 75 bp, Homo sapiens
gaaggtgtactcctttctattttaaagagccaagcctcagagagtaactaaatgaccatggaatctggagccgag

SEQ ID NO: 427389 - DNA, 96 bp, Homo sapiens
gtgaagactttgaacgcactcctcagagtccgactctcccacctgctaaggtggatacccttcgccatgttatcagccagacaggaggatacagtg

SEQ ID NO: 427390 - DNA, 79 bp, Homo sapiens
gtcaatcgaacttgcaaacatcagggatgaagttggcacttggaggtgtcccaggaagtcagccattactccccagtgg

SEQ ID NO: 427391 - DNA, 100 bp, Homo sapiens
tgcgtcacgacgcacataaagacgtacgaagccgtcgccaacatgcttttcacttccactgcatctctcgctggctcaaaacacgacaggtgtgtccatt

SEQ ID NO: 427392 - DNA, 82 bp, Homo sapiens
aggggaagagtacactcgagatgaaggaatacggggtgctttgcattcaggaatacagaaaaaacagcaaagtggagtcaag

SEQ ID NO: 427393 - DNA, 74 bp, Homo sapiens
tgcaggcttgccgaagaagggaggatgggagtcccagcttctggagacggggttcctggggatcttcctgtgcc

SEQ ID NO: 427394 - DNA, 75 bp, Homo sapiens
caggacctggacccggacccaaagtgccatgtctttaatggagtatgagcctgatgtgggcagaatccagatgag

SEQ ID NO: 427395 - DNA, 100 bp, Homo sapiens
gggagctagtggaagttactgccgcgccaccgagtccggaccggagactttggggcctaactagatcacctctgcagcctgcacagccgggcctttggac

SEQ ID NO: 427396 - DNA, 100 bp, Homo sapiens
ccggcggcagatgagagcatccaacgccactgccaaaaaatatggtgtctcgtctttgtgaatctaaaaaggtttgtgctgcagctgatatgcaacttca

SEQ ID NO: 427397 - DNA, 73 bp, Homo sapiens
gccgaagacgcagcagaagtccagaccggagacgtcgctgacaggtctccaattgagaaacatggcactgttt

SEQ ID NO: 427398 - DNA, 100 bp, Homo sapiens
aagagactgttcaaaccactgaggatcagattttgaagagagatatgccaccagcatttattaaaatgtcatacccaggctatcccccaacaggctaccc

SEQ ID NO: 427399 - DNA, 50 bp, Homo sapiens
atcatgtcaaaaactcttggaagaaacttccaattgaagacactgagctg

SEQ ID NO: 427400 - DNA, 101 bp, Homo sapiens
ggagatgtctatacatttggttatgggcagcatgggcagctaggacatggagatgtcaactccagcaacaagctttagaactagctttggatcgtgcagag

SEQ ID NO: 427401 - DNA, 86 bp, Homo sapiens
tgatggtcgactacaagaagagggcggagcggagacgggagtattatgaaaagatcggtgtcttttatgaataatcaaaagcagca

SEQ ID NO: 427402 - DNA, 90 bp, Homo sapiens
ttcagacagcaattaacaaagaccagccagctaaccctacagaagatgaacaagagaactgggcaacccatgatccacatctacctggac

SEQ ID NO: 427403 - DNA, 80 bp, Homo sapiens
ttattggaaaaacatttcttacatctcctgggaggcccccgtggagaagaagactgagtgtatccagaaagggaagaaca

SEQ ID NO: 427404 - DNA, 75 bp, Homo sapiens
gaaaattactccagactcctatgcactcaactggaagcctaaagaaactgttccaactcttgctccaaaaactct

SEQ ID NO: 427405 - DNA, 100 bp, Homo sapiens
agcaccaggagctgctgctgaaacagctggctgagggacgacaggctcaggttggcagttggaaggttgataacactgatgctgaggggaggctcatact

SEQ ID NO: 427406 - DNA, 137 bp, Homo sapiens
tggaagggcaggacgaggtgtcggcgcgggagcagcacttccacagccaagtgcgggagtccacgccatccttacccgacctgggatggagatcaccaaagatggcttccacctggttattgagctggaggacctgg

SEQ ID NO: 427407 - DNA, 88 bp, Homo sapiens
aaagctaccaaagacgtagaaagaaatcttagcaggtgaccattgtgaggtagatattttgttctaattttccagatgaggaagctga

SEQ ID NO: 427408 - DNA, 101 bp, Homo sapiens
ctaaaccagaaatccctgtgattgtggaaaataactccacggatgtcttggtagagagtttcactctgtcacccaggctcgagtgcagtggcgtgttctcg

SEQ ID NO: 427409 - DNA, 83 bp, Homo sapiens
ggacccggaggacggtatcccgagcccaccgtgctacgcagacttaattcagtgcacaaatgagatgaatgtgaacatcccac

SEQ ID NO: 427410 - DNA, 75 bp, Homo sapiens
gacagcatgcctcaccaagtcacatgacaagcaatcacccggaagttcaggctgaattctgaaggcaaacttgag

SEQ ID NO: 427411 - DNA, 88 bp, Homo sapiens
tgtccttcctgaccttccacctccaccaggtattgttgcagcatctggcagtgagactgaggatgaggacagcatggacattcccttg

SEQ ID NO: 427412 - DNA, 75 bp, Homo sapiens
gtgaccttggaagtggatccttcccccgaaagcccggctttcaggttatgatgtgattgctcaagcccaatctgg

SEQ ID NO: 427413 - DNA, 154 bp, Homo sapiens
agtctgtgaggaacatgtcctgctctatcaacaacaccctgctcggccagaagaaagaaagtgtcatttttattccagcttcctccctcccaaggctgactccctggatagtggctgtggctgtcatcctgatggttctaggacttctcaccat

SEQ ID NO: 427414 - DNA, 74 bp, Homo sapiens
cctgggctgcatgggctctatcaaggaaaacaagtgtctgcttatgtcggaaggtgtcttgctgcaggtaacta

SEQ ID NO: 427415 - DNA, 96 bp, Homo sapiens
ggaggctccgttgcctgctcccggagggagacgcgctgccgaggagaacccagcggtggaatcccccaaagaaggtaaagggagcaagccttcccc

SEQ ID NO: 427416 - DNA, 101 bp, Homo sapiens
ttcaaggaggccttccagctgtttgaccgaacaggacagagcgggatgccaccagcttgtccaaagggaagttccaggagctcctggtgggcatcgttgtg

SEQ ID NO: 427417 - DNA, 75 bp, Homo sapiens
tttatgtatggcttggctcgtggaccatgaacggccggtttgtgggcgatgctgaccttgaaagacagaaatttt

SEQ ID NO: 427418 - DNA, 96 bp, Homo sapiens
ccgccatgctgtctctagactttttggacgatgtgcggcggatgaacaagcggcagtttgcagagaaattccaggaggtgaaagaagctgccaaga

SEQ ID NO: 427419 - DNA, 74 bp, Homo sapiens
caaccacaataacaggcggagggtcggcgtaggggctgcgtattgtcagtttatggacatgctgttccctggct

SEQ ID NO: 427420 - DNA, 98 bp, Homo sapiens
tgacatggaggatgatttcatgtgcgatgatgaggaggactacgacctggatgggaaggccattgtgactatgtggtgattacagttgtcttactact

SEQ ID NO: 427421 - DNA, 75 bp, Homo sapiens
tggaagcagaagaagctgaggatgaagaagatggattttatggaagaccttgggttatggaacagagaaaagaac

SEQ ID NO: 427422 - DNA, 50 bp, Homo sapiens
ggtgacagagtggagccatggctagagctcgccaagaatattgggaatgc

SEQ ID NO: 427423 - DNA, 100 bp, Homo sapiens
catgcagcgtggaacctcataaaatctccaagaaacatcattcacccatactgactagtttcacatctctttggaaatggctagtgatgagctgaaagag

SEQ ID NO: 427424 - DNA, 126 bp, Homo sapiens
actgaccagcgcgcaggacagcgccttcctcaacgacgcggacatggtcatgagctttgtgaacctggacctgcctagagctggaacgttacctccagagcgagccctgctatgtttcagcctcag

SEQ ID NO: 427425 - DNA, 101 bp, Homo sapiens
tgtggagaagtttggggaagaaaatattgagaaagcatgctctgaattgccatcggatgaagcctgctctgttcagcgtgctctgtgagatcaaggaaaag

SEQ ID NO: 427426 - DNA, 83 bp, Homo sapiens
aaagtgaatctgtgccatcgaaaggggtagaagagccatccaaaaaacgagttatagaaggaaaaaacagttctgcagttgag

SEQ ID NO: 427427 - DNA, 83 bp, Homo sapiens
ggatcatgtctgcgagccaggattcccggcgatcagtgggtgaccgcggctgcgagggactttgtcatccgtcctccaggatc

SEQ ID NO: 427428 - DNA, 74 bp, Homo sapiens
tgtcgtcgtggtggccaacaagcagtgcacagccagagaacaacacatcacacacaggaaacagttgtgctcat

SEQ ID NO: 427429 - DNA, 100 bp, Homo sapiens
gtgttcgtgagggccttttctgggaagtcgagacaacatgagtgtgattttgatctgttttccaaatgcacccaaagtatcgccagaagcagtgaagaag

SEQ ID NO: 427430 - DNA, 95 bp, Homo sapiens
aagtgttattatttctgccctttgtacccttacaaggcatcccgggcccaaatcctagacaaagccacagaatatatccagtatatgcgaaggaa

SEQ ID NO: 427431 - DNA, 76 bp, Homo sapiens
agaaattcggagggtggccctggactcgttggtgctgcagtgtttgattgcatcgaggtctatgcccctggcttca

SEQ ID NO: 427432 - DNA, 75 bp, Homo sapiens
caagtcatattatacagtgcgacagctagaattggaaaaccttacaccaaaccaaacaggaagcttacttttctc

SEQ ID NO: 427433 - DNA, 90 bp, Homo sapiens
ggccatgtgagatacaaggctacacagagacagatcaaagcagctcctaaattgtgagcgcccccatggcagggacctggactccccctt

SEQ ID NO: 427434 - DNA, 82 bp, Homo sapiens
agctaacatggcaacagaataatgttcagagattgctagtgcaactactgctccatcgatcccttcacatttgtctcctggt

SEQ ID NO: 427435 - DNA, 87 bp, Homo sapiens
aagctcaagatggcggacaaaacgccaggcggatctcagaaggccagttcaaagatatgaggccccaggattcctggcgaggtcctc

SEQ ID NO: 427436 - DNA, 100 bp, Homo sapiens
cagccatcacgaggatgatttcggaacctggagaaaatcttcctgcctgacacagctcacttcaagaagtgcacaatgtcagaacgtggaattaagtggg

SEQ ID NO: 427437 - DNA, 116 bp, Homo sapiens
cgcgctccctccgccgccgccgccttgctgctgctcaaagctgctgccgccccttgggctaaaaggtactccaaagattcaggtttactcacgtcatccagcagagaatggaaagt

SEQ ID NO: 427438 - DNA, 99 bp, Homo sapiens
gcagttcaacgagaatgaagccatccaatggatgcaggaaaactgtgccggtggtggtgtgcacattgagccccggtatagacagttcccccagctgac

SEQ ID NO: 427439 - DNA, 100 bp, Homo sapiens
ctcagccatgatttagtccaagaagctattgaccatgcacaggaccttcaacaagaagctaatgaattgagcaggccggcgaccaccaggggcctgagga

SEQ ID NO: 427440 - DNA, 95 bp, Homo sapiens
aggtgtgctgcctcctctcctgccaggtgtgtggctgcacaggagtcttgctgatgaaactggcgatggaatatgagaggagccctctggaaaga

SEQ ID NO: 427441 - DNA, 100 bp, Homo sapiens
caagctgttcgcggcgaccggagagagtttatgtggccgaggcagacaagtggaattaggccttgctgcaggggacttcatttccttctcagtactggac

SEQ ID NO: 427442 - DNA, 74 bp, Homo sapiens
gcccaggcataaaatcatctccatattctcaggcacagagaaagcatggcttctcgctgtttctgggatgctga

SEQ ID NO: 427443 - DNA, 80 bp, Homo sapiens
gtttatctggagtgaggtggccggttcttggtgggatctgagcagctggtaggtgagtgctgtcctcggctcactttcct

SEQ ID NO: 427444 - DNA, 82 bp, Homo sapiens
gacacgggaggcgctacgccaggaccgacgggaaggaattcctcctgatcagcagagactgatctttgctggcaagcagctg

SEQ ID NO: 427445 - DNA, 100 bp, Homo sapiens
cctctgcctggcggcagtcacggccaaggtatctgtggaccaaacagccactcctatgttggacggcaccagtttgggcatatgcacaggccaatccatg

SEQ ID NO: 427446 - DNA, 83 bp, Homo sapiens
gctgatgaagatccacacctcactgcagtcgaagtgagacggtttaagcggaagcatcttactgccattgactgccagcattt

SEQ ID NO: 427447 - DNA, 75 bp, Homo sapiens
tttccaggaagcagcaggatgcgccgctccactgtcggtagcaacaagcccaataggggcacaaaacgtccccgg

SEQ ID NO: 427448 - DNA, 75 bp, Homo sapiens
ggatttgcttttgtaacttttgatgatcatgatacagttgataaaattgttggactctccagaatccgatgctga

SEQ ID NO: 427449 - DNA, 50 bp, Homo sapiens
ccagaacattgcacgatgcctcctgtgcctccggagccagcgtggtggcc

SEQ ID NO: 427450 - DNA, 100 bp, Homo sapiens
ttgggacaaaaatgcaaaagactgctaaagtgagagtgaccaggcttgttctggatccctatttattaaaggtgtgatgaatgcagactctgctaccatt

SEQ ID NO: 427451 - DNA, 74 bp, Homo sapiens
agtgaggaagtggtcctaactcctgcagagctcattgaaagattggagcaggccctggccaacgtcaacattgg

SEQ ID NO: 427452 - DNA, 87 bp, Homo sapiens
ttcacgaaggcaccgacgtcatcatgctgaccaccaatcagatccgtaagttatcagggaataccaagagcagagagagcatccagg

SEQ ID NO: 427453 - DNA, 97 bp, Homo sapiens
catggccccgcgggggcggcggcggccgcggcctcacaggtctgagggacagttcagaaacggcaggacatgaagctgattgtcacctcagccacct

SEQ ID NO: 427454 - DNA, 100 bp, Homo sapiens
tctaccaacagcccttaccaacgagcttgactggccccaactctctggtgctacaggatttctggactccactgttggttgtggacatcggatacccaag

SEQ ID NO: 427455 - DNA, 100 bp, Homo sapiens
gcaaccagccttctagggcggcggagagtgaagacatttccacctggacacctgaccatgtgcctgccctgagcagcgaggcccaccaggcatctctgtt

SEQ ID NO: 427456 - DNA, 75 bp, Homo sapiens
actgcacttactggcatgctcaaggaatgggctattaagactcacagatgaatgcttctcacccggaaacaaact

SEQ ID NO: 427457 - DNA, 87 bp, Homo sapiens
tcaccatccatgcctacgtgggcttcaccatggacaagctggtgcagaacattgcgcggcaggccctgggcagtgacggggttcggg

SEQ ID NO: 427458 - DNA, 50 bp, Homo sapiens
aaggccacgtgaagatgctgcggctggtcccagtagggatggcacaatca

SEQ ID NO: 427459 - DNA, 100 bp, Homo sapiens
cgagcccaaggcaattgatcccaagttgtcgacgaccgacagggtggtgaaaggttatgatgtgattgctcaagcccaatctgggactgggaaaacggcc

SEQ ID NO: 427460 - DNA, 123 bp, Homo sapiens
gcctggaggctccgggcgcggggaagtcatgctcgcttcacggaggcaatagctagccggaactttatattgctgttggaatatctggagccatccaacatttagctgggatgaaagacagca

SEQ ID NO: 427461 - DNA, 100 bp, Homo sapiens
tatggtgctgagtttcctggtagagccggccgagctgaggcggtcgcggccatgaaggtgccaaaagaacatcttttagtctcgattcctctcttgatta

SEQ ID NO: 427462 - DNA, 97 bp, Homo sapiens
gcgttggtgctgtttgcggatgctgatgcagcggggatctgatgagcttctttcttctggcatcattaacggaccttttaccatgaatagttctact

SEQ ID NO: 427463 - DNA, 101 bp, Homo sapiens
taccttctctatcagatgctgtgtggaatcaagcaccttcattctgctggaattattcatcgggtccaggtcaagacctcgtctccgttctcatagtcgta

SEQ ID NO: 427464 - DNA, 100 bp, Homo sapiens
agcctctcttactaccactcacccgcagactccttctccagcatgggctcgcctgtcaacgcgcaggaaagaccacagcaagattctttcattcgtctcc

SEQ ID NO: 427465 - DNA, 100 bp, Homo sapiens
aagcgttgaggatcctgcagaatgagcccctgccagagaggctggagagggagcactatgtctgcggaagtccccgaggcagcctccgcggaggagcaga

SEQ ID NO: 427466 - DNA, 100 bp, Homo sapiens
cctcagtatgggctggaacctgacacttggcatgacagtgctggagctccgttactctcatggggactttgagaatggtatctgggtgttatggatcatg

SEQ ID NO: 427467 - DNA, 102 bp, Homo sapiens
ctttgatgatacccttgttgctattgacacctaaacgttcagtgcctgtagccactgtagaactggaagaaaagaggttcagaactctgcctttagtgccaa

SEQ ID NO: 427468 - DNA, 100 bp, Homo sapiens
cctcaagccgcccaaacccaccttcaggtcctacctcctgccaccgccccaggtgtccctacctgcaccggacgacgggggacacagaacgcaagtacca

SEQ ID NO: 427469 - DNA, 50 bp, Homo sapiens
aaaaagacctttagaagatggaggtgtccgcaaatatggtaaagattttc

SEQ ID NO: 427470 - DNA, 82 bp, Homo sapiens
gaaatatctttggcttgcagccaacaatgggagctggaagtcgagtgtgctactcaactcaggagatttggagacaaactga

SEQ ID NO: 427471 - DNA, 75 bp, Homo sapiens
ggaactggagcgggccttccagaagacgcactacccggacgtcttcaccagtcgagtaatcctgcctgtgtctgt

SEQ ID NO: 427472 - DNA, 83 bp, Homo sapiens
aaaccacagacatgactgagtcctccatgaagaccttatgccagcctggaccatcttggaggcagtgtaggatcatggaagaa

SEQ ID NO: 427473 - DNA, 90 bp, Homo sapiens
accttctcaactgttgtcctcatgatgtcctttctggaactgaaagcaatctcccgggcaggcctccagcatctggctcctgcacatccc

SEQ ID NO: 427474 - DNA, 75 bp, Homo sapiens
gttagcggtggcaggggctgactgagagcgtctgcttgaatacttcagagagtcagagttgtgccagaagtctct

SEQ ID NO: 427475 - DNA, 96 bp, Homo sapiens
gactacgacatccacttctaccccaccttccggcttctttcatcggaagaaaactactacagcacttcttacagccagtcagatagtcagtgtggt

SEQ ID NO: 427476 - DNA, 74 bp, Homo sapiens
aacgccgtgttcgacatcctggccgtgctgcaggagtggctaagcaggttcggttacctgcccccggctgaccc

SEQ ID NO: 427477 - DNA, 105 bp, Homo sapiens
ctgcatcggatcaccggcgtgccccaccatgtcagacgcagccgtagacaccagctccgaaatcaccaccaaggcatgagccatgagcccaagtccccttcgcta

SEQ ID NO: 427478 - DNA, 82 bp, Homo sapiens
ttcgtctcttacgtctgcggaagtgcagctgcctcagttcttagcgcagactccactccacttggctgtgatcaccaaccag

SEQ ID NO: 427479 - DNA, 100 bp, Homo sapiens
aggccgagttccgagagcctctgattctcctgtgccagactgaacccggtgcctggctcctaccccacacagagctgccaccctcacctgtccccaagcc

SEQ ID NO: 427480 - DNA, 80 bp, Homo sapiens
cgcctctccttgctgcagccatggagtactaggttttgacaagcttgcatcatgcgtgagtataagctagtcgttcttgg

SEQ ID NO: 427481 - DNA, 82 bp, Homo sapiens
aataaccaggtgcttggcaaaatcgagcgggccattgggtgaggtggctttgaccccgggttgcccggccagcacgaccgag

SEQ ID NO: 427482 - DNA, 99 bp, Homo sapiens
gtgtacacatctggaacacgcaggctcaggctagatgtcatagaataggacagagcaaatctgtgaaaatctacaggctgattacaagaaattcctatg

SEQ ID NO: 427483 - DNA, 75 bp, Homo sapiens
aagcatttttatggacaacgaccacaggaatctggaattttattaaacatggagaggagaggcagcagcatggcg

SEQ ID NO: 427484 - DNA, 87 bp, Homo sapiens
caggaggaggaggaggggctccggctggtctgtggtgaggtctatgctccatcagcaagcactgccgactacaatagggactcgcca

SEQ ID NO: 427485 - DNA, 101 bp, Homo sapiens
cagagtcaccagtggccctggaggaggccaaggcatagaatgtcaagctaaccaggcgtccgctacttcagaagagtgtactgtcgcatggggagtctgta

SEQ ID NO: 427486 - DNA, 100 bp, Homo sapiens
attaggatataaccctgagacaaggacttagttattcgtctgactgatgacacggatccattttttttatataaccttgttatatctgaggaagattttc

SEQ ID NO: 427487 - DNA, 100 bp, Homo sapiens
tggtcgaagagttgaagttaatggagaacatgcaacagtacgttttgctggtgttgtccctcccgtggcagtgaacagcagagaatttcaaaggaccttg

SEQ ID NO: 427488 - DNA, 87 bp, Homo sapiens
gcggaaagtttggctgcgcgggttcccccgaagttcaggccgccatggcatcagatgaaggcaaactttttgttggagggctgagtt

SEQ ID NO: 427489 - DNA, 83 bp, Homo sapiens
caaagcaataccaggatagctgttgtttcagagaaaggtggactgtgcattgtcacttattcgacttgggatggagcggaata

SEQ ID NO: 427490 - DNA, 100 bp, Homo sapiens
ccttcccccaagaccaggcgccagggcgagaccctggaggaggagctatttgggaacaatgaggagagcccagcttttaaggagttcttggacctgctgg

SEQ ID NO: 427491 - DNA, 75 bp, Homo sapiens
tacatgggctttagtctcggagcgcgttctgccagctgatgttctaatcatgtcagataaagatgatattgagac

SEQ ID NO: 427492 - DNA, 100 bp, Homo sapiens
cccacctgtgtcctggttgagggtctccagggttctttggggcccgagtttcaccactctgattgcctttcaacctggctacttcatttcattgctacta

SEQ ID NO: 427493 - DNA, 83 bp, Homo sapiens
aagttcatcagcgagactctgcggcgcatggaggaggaggagacaggccgacggtcgcaaggtcctacggtcaagcatccggg

SEQ ID NO: 427494 - DNA, 74 bp, Homo sapiens
gacccgaagacaggaaagctgaggacttcaccagcgctggatcttttgccagaaatgagggcatactggcctga

SEQ ID NO: 427495 - DNA, 49 bp, Homo sapiens
gttttaccggccgggaacagacggaccaagatcactccatggatgaaat

SEQ ID NO: 427496 - DNA, 51 bp, Homo sapiens
agattggcacagatggaacccaagtctgtcagtttgtcgtctctgtcaacg

SEQ ID NO: 427497 - DNA, 75 bp, Homo sapiens
caacgttttacttatacaccaggttacaggaggttccagtggcatcgggaagtgcattgctatcgagtgctataa

SEQ ID NO: 427498 - DNA, 49 bp, Homo sapiens
ggctgtgctgcgcgacccccgcgcatgcccgagcgggaagaagttccgc

SEQ ID NO: 427499 - DNA, 100 bp, Homo sapiens
gtcgggtgccgagatttgggagagacgctctgaactgactgccccgcatcaccggagcgtcccagctgcgaggagctttgtgatggtctgaggtccatga

SEQ ID NO: 427500 - DNA, 90 bp, Homo sapiens
gtggactgaaggccgctatgatcgaattggtggaaaggttgaagttcaagagctcagaccctaaagatggagctatgacattgaagagag

SEQ ID NO: 427501 - DNA, 74 bp, Homo sapiens
tctgcagaaaaagaggctcttcctcctcctcccgcgacggatggactcagggtcccgaggcaagtcagactgtt

SEQ ID NO: 427502 - DNA, 150 bp, Homo sapiens
caccgccaggccgagggctgggggccagaagacaagagagacggcgaggcgcgctccctgcccggcagcgactcggaggctggaggagattgatggattctttgcgagaaataacgaagagtacctggctctgatctttgaaaagggagg

SEQ ID NO: 427503 - DNA, 137 bp, Homo sapiens
aactgccaaagtttaccaactaggtggcaccagaacaaacaaagggctgcaactacggagtctttgttgctggctatgaaagcctgaaaaagaatgaaattcttcatctgaaattacctctcagactttctgtaaag

SEQ ID NO: 427504 - DNA, 80 bp, Homo sapiens
atcttccgggaacgggacgagttcgtcatccgtgctgaggacatcccttccctcaaggcctgacctctcgggacacaccc

SEQ ID NO: 427505 - DNA, 100 bp, Homo sapiens
gaggagttgtgtctatcaaaggagtgtgtgctaaccgttacctggctatgaaggaagatggaagattactggcttctactggtcgaattgacaaatctta

SEQ ID NO: 427506 - DNA, 82 bp, Homo sapiens
gagcggcggccacggcatcctgtgctgtgggggctacgaggaaagtgtatgtggtagaagaccaaagaagagatgagctagg

SEQ ID NO: 427507 - DNA, 99 bp, Homo sapiens
gcaccgttggcgctggacgcttcctccttggaagcgcctctccctcagttgccttgttgaaggggatgctaaagaagaaatactgcagccaccggaacc

SEQ ID NO: 427508 - DNA, 100 bp, Homo sapiens
tggagatctacctggaacccttgaaggatgcaggtgatggtgttcgatacttgctcagagctatcagcttcccagtttgcacaattcatcaagaaattat

SEQ ID NO: 427509 - DNA, 90 bp, Homo sapiens
ctacccactattcagccattgggtcacaagcgatgaaaagagcaccttgaaggtccctggtgctgaaccgcctgcgtccagttgccagcg

SEQ ID NO: 427510 - DNA, 97 bp, Homo sapiens
agacaggaggcagtagccaaacacccagactgttcgccatggatttccctatcaaccctcagccctggcctttgatcctgtacagaagatcctggca

SEQ ID NO: 427511 - DNA, 90 bp, Homo sapiens
agctggcccggaatggggagggttcgaagaaaacatccaggtcagtcccttgttccaaaaattggaaaatgaccagattgaaagtttaag

SEQ ID NO: 427512 - DNA, 100 bp, Homo sapiens
aaaaatgtgtttaacgccctgattcgaatcacccgggaagagggtgtcctcacactgtggcgggcaggggtgtggggaagaacgaggaactgcgtcttta

SEQ ID NO: 427513 - DNA, 100 bp, Homo sapiens
catcggtcggctcaggacttacggaaacagactgtgccctgtccacggtgcctcctgcatgtcctgctgccctgagctgtcccgagctaggtgacagcgt

SEQ ID NO: 427514 - DNA, 99 bp, Homo sapiens
agcggctgcagtgcccctttgagcaggagctgctgagacggcagcagaggctgaaccagatagcaaagccattgtggatgggaacctgaagctcatctt

SEQ ID NO: 427515 - DNA, 50 bp, Homo sapiens
ggccttctgatgaatactttaatggcagcatggaacctgcatttcataga

SEQ ID NO: 427516 - DNA, 82 bp, Homo sapiens
ggcggaggcagaggtggaggcgctttgaaagaaatctgagtggatgacaacaacctgcaatcacgcactttatgctatttgt

SEQ ID NO: 427517 - DNA, 100 bp, Homo sapiens
agagaaccaagaaattcatccggcaccagtcagaccgatatgtcaaaatcaaggccagagtggagccgggaataactgggccaagggccactacacagag

SEQ ID NO: 427518 - DNA, 90 bp, Homo sapiens
cgtctaccgcgtgtataatcgacaccagtatccatttgttgttcttaacatttctgttgattcaggcctgtctcctccctcctacacatt

SEQ ID NO: 427519 - DNA, 50 bp, Homo sapiens
tcctcctccgatacttcccgcagtcgtgagaaagatcagtctaaagaaaa

SEQ ID NO: 427520 - DNA, 90 bp, Homo sapiens
cagcagatgaagatccattggtaaattgatcaggatttttggcctaccctccaaagaaaagtggacagaggactgcagaaaatcaaccta

SEQ ID NO: 427521 - DNA, 74 bp, Homo sapiens
agcagcaagtgcaattttacgaaacgatgtgttcagagcaacattgttttgttgacacaagcatttagaagaaa

SEQ ID NO: 427522 - DNA, 100 bp, Homo sapiens
atgaaaaatgcacaaaagcatattttcacatgggaaaagccaacctggccctgaagaactacagtgtggatctaccgctaccagtctcatgactatgcct

SEQ ID NO: 427523 - DNA, 83 bp, Homo sapiens
cagggaaccctggtcaccgtctcctcagagaagagtttagtgactgaggccgaaaattcacagcaccaacagaaggaagaggg

SEQ ID NO: 427524 - DNA, 75 bp, Homo sapiens
aatagagcatcacctgagatagtgggaaaagaaacagattgtctcagtttacctagctttgaaaatgccataccc

SEQ ID NO: 427525 - DNA, 100 bp, Homo sapiens
gcgacttcagcgtcctgagtgcgctcaacgagctgtatttctatgtcaccaagtaccgccaggaggccaagcacctggctagccagtactgggggtgcag

SEQ ID NO: 427526 - DNA, 97 bp, Homo sapiens
tcccccgggggcccgtactgcacatcgtggtggtcggatttcaccacaagaagggctgccagaggttggcgatttgaaggagctgcagacactagac

SEQ ID NO: 427527 - DNA, 100 bp, Homo sapiens
tgccaaaggaaacaaccgtgggagccgtcacagtgacacacaaacaacttacagacttccacaagcaagtcactagggtcatgctgctgatgtgtttgag

SEQ ID NO: 427528 - DNA, 88 bp, Homo sapiens
gcagtggtcgcttcttctccttgctccagatgaagatgagtgagcgggccgcctcgctgagcaccatggtgcccctgcctcgcagcgc

SEQ ID NO: 427529 - DNA, 76 bp, Homo sapiens
catcaataaataatattcatgaaatggaaatacagctgaaagatgtatctgctgtgcgtttcagtcaacaatacag

SEQ ID NO: 427530 - DNA, 74 bp, Homo sapiens
taacctcaactgcgggcctgtgctcacctggatggagaccctgctctcagcggcccacgaggtggagttgcagc

SEQ ID NO: 427531 - DNA, 75 bp, Homo sapiens
tatcttgctgggagtggacttttccagtaaggaaagatggatagctcccagttgatccattgtcgggagcttgtg

SEQ ID NO: 427532 - DNA, 100 bp, Homo sapiens
caacgcccgctataaactgctgatccacatgagagtccactctggggagaagcccaacaagtgtacggtcatgatgatgggcagcgcccgagtggcggag

SEQ ID NO: 427533 - DNA, 98 bp, Homo sapiens
aggccaccgctcccagaaatgcatgcgaccgatccccttctcccggaccccaggagccggcgcccccgccctgtagaatccaattctcagttttgaac

SEQ ID NO: 427534 - DNA, 75 bp, Homo sapiens
gagtactcattcctgtaatagctgtgtattttaaccacatcagcatcgaggactcgcgggtctacgagctgacca

SEQ ID NO: 427535 - DNA, 75 bp, Homo sapiens
ccatccccagaagatcctggtcccctgctttaaccatcgaaaatgaggaagcatgagtgggaaaagcatgggacc

SEQ ID NO: 427536 - DNA, 138 bp, Homo sapiens
cctctggacaaatacaagattcaggcgatcgacgccaccgactcttgtatcatgagcattggatttgatcacatgggtattgggagagttgctgctacatctttaggaaatttgactaaccatggttctgaagattta

SEQ ID NO: 427537 - DNA, 75 bp, Homo sapiens
ccgcggcgaccaagatcaggaacctgccctgacaccattcgcttttcacccaagatgatttgatgtcttataaaa

SEQ ID NO: 427538 - DNA, 95 bp, Homo sapiens
gtgatgctttcaaacagtgtcaatacaaagatactctccccaagatggagtttcactcttgtctcccaggctggagtacaatggcatgatctcag

SEQ ID NO: 427539 - DNA, 98 bp, Homo sapiens
cccctttggaacctaaggagccctgccgaggagctgaaggccttcagagtccttggggtgattgacaagggtcatggaggacgctggcggcggcgagg

SEQ ID NO: 427540 - DNA, 98 bp, Homo sapiens
ttccaggtagcccaagagctatcaggggaagatatgcatcagttccatcgagccattactacagattcaattagcagagcctcacagacaatggccaa

SEQ ID NO: 427541 - DNA, 96 bp, Homo sapiens
cttactcatcaactggagtgtacccaaaacaaagatctagccaatcaagtctctgtgtgcctggagaggttgaagaagaggatgaacttgaatctg

SEQ ID NO: 427542 - DNA, 100 bp, Homo sapiens
ctggagcagttgtatgtgtagaaagtgaaatcagaggagatgtaactatcgaacgctgtaaatgtaagcctattagagctacacagaagacctatttccg

SEQ ID NO: 427543 - DNA, 74 bp, Homo sapiens
tttcccaaaacggtttgccagctgaacagggatctccacgggcatccagtaccctgctgactctgacatgcccc

SEQ ID NO: 427544 - DNA, 83 bp, Homo sapiens
gcggattcgccgaggcaccgaggcactcagaggagtaaagtcatcacctggccttggtcctgtggaactggcagctgtcattg

SEQ ID NO: 427545 - DNA, 87 bp, Homo sapiens
caaatatattaccagtggcaaggacactgccttaggaaaaccacgagaggtgtttcgacttcctacagatttgacagcatgtgacaa

SEQ ID NO: 427546 - DNA, 100 bp, Homo sapiens
ctctgagggagggtccgagccagccgctgttttgccggaggagcccctcaggccttcccagtgacctgacagcagaggagcgtcaagaactggagaacat

SEQ ID NO: 427547 - DNA, 83 bp, Homo sapiens
cccagatatagccgttggtacaaaggtctcggcgcggaagatggccggcggcgtggacggccccatcgggatcccgttccccg

SEQ ID NO: 427548 - DNA, 98 bp, Homo sapiens
tgctgaagcctttaaatgcagcatctgcgatgtgaggaaaggcacctccaccaggccaagacccatgttcttgacattgagcagcgactacaaggtgt

SEQ ID NO: 427549 - DNA, 83 bp, Homo sapiens
cccgggacagcgaggagctgagggaccctgtctcaccaacggctttgggggtgcgaggagcgagcaggagccgggcggcggcc

SEQ ID NO: 427550 - DNA, 50 bp, Homo sapiens
caaaagatgaatgcaaggaaaaggagggtccatatacttttgttcagcaa

SEQ ID NO: 427551 - DNA, 97 bp, Homo sapiens
aaatatagaacactaaagtgttacatgacagatgtatgaggtgtcatggagaaactccagctgggcccagagattctgcagcgggaaaatccaaggc

SEQ ID NO: 427552 - DNA, 73 bp, Homo sapiens
ccagagccaagtgcgagcccagcgggagaaaatcaaggagattgcccccgaggaattagcacttgttcacaac

SEQ ID NO: 427553 - DNA, 51 bp, Homo sapiens
agataatgatagtgatgaagcttttgaatatccctttaagatgtaccatga

SEQ ID NO: 427554 - DNA, 90 bp, Homo sapiens
taaagaagcgctttgcttacctgtccggccggtctaattgaagccaacggagaactcaaggtcttcatagaccagaaccttagtcccggg

SEQ ID NO: 427555 - DNA, 98 bp, Homo sapiens
cacccaatggtgggcaagtggctggagaaacaagaacagctttggtctgctctaaacttatccatctctgtccattactggaacaactccgcaaagtc

SEQ ID NO: 427556 - DNA, 96 bp, Homo sapiens
aaccttctagttgcttattgcaggaaatgaacaatatgtcatcagcagcagaatattacaaagaagttttgaaacaagacaatactcatgtggaag

SEQ ID NO: 427557 - DNA, 100 bp, Homo sapiens
gtgcagctgcctcagttcttagcgcaggagagcgacttgcagttgtggaggtacagtgtgaacggctgaggatgctctaccgggactgtgctcggccccc

SEQ ID NO: 427558 - DNA, 100 bp, Homo sapiens
tttggaaatgcggaagaaagctttgtttattcttccctttgtttctgtggctaaagagaagaaatactacctccagcacaagctccgggtggataaggca

SEQ ID NO: 427559 - DNA, 98 bp, Homo sapiens
tctcaccaagggtacccacaccggaatttccaggaagaaatagagtttcttaatgcaattttcccaagtcatcttatgcagatatgctacatgacaaa

SEQ ID NO: 427560 - DNA, 95 bp, Homo sapiens
ctttctgtctctatgaatgtgactaccctggttacctcatatgcaccagattctccagccccaggctgtcagccaggccgagccgaaaacgtaca

SEQ ID NO: 427561 - DNA, 100 bp, Homo sapiens
gttgtggggaccataactgatgatgtgcgggttcaggaggtacccaaactgaagactacgtctactttgagaactcctccagcaacccatacctgatccg

SEQ ID NO: 427562 - DNA, 100 bp, Homo sapiens
caattttctttctcagaaagcagaggctcagagcttggagacagacgaatcagcatgattcttcagaggctcttcaggttctcctctgtcattcggtcag

SEQ ID NO: 427563 - DNA, 100 bp, Homo sapiens
cgaagccggggcggagcacgcgagctatgcacatgattaagtaccggtacatcccgttcacacatgggaagagaaggtacagaggcaaggaggatgccgg

SEQ ID NO: 427564 - DNA, 83 bp, Homo sapiens
ctctgaatgagtctgaaatatgtgctggggctgaaaagattggatcaggaccatgtgagagctgttcctttgggtaccatgct

SEQ ID NO: 427565 - DNA, 90 bp, Homo sapiens
ttcgtggtgaaggtccggggcttgccctggtcttgctcggccgatgaagtgcagaggtttttttctgaaatgaccatggttgacacagag

SEQ ID NO: 427566 - DNA, 82 bp, Homo sapiens
ccctctgtctgcctgtgtccctgaccatggctccctgcagtaccctttaacggtggtgaagcagtattttccaatttgaaga

SEQ ID NO: 427567 - DNA, 85 bp, Homo sapiens
cgagctcatcagtgatgaggcccaggccgacctggcgctgcggagcttttgtctggtcctctgagccccagtgagagtttcctga

SEQ ID NO: 427568 - DNA, 95 bp, Homo sapiens
taaagacagggatatgagtgaagaaaacacagagccaccctggaaaggggagtgatgctgaagaaggggattcagagtctgaaattgaagatgag

SEQ ID NO: 427569 - DNA, 100 bp, Homo sapiens
atgtagagagaaagtacttcaagggcaggctgtccctgcaggatcccacgtacggctgaatcttcagactggggaaagagaggcaaaactccaatatgag

SEQ ID NO: 427570 - DNA, 83 bp, Homo sapiens
cgccgccgccgctgccgctgccgctgccgcacctccgtagctgactcggtttacccaaggtccagcctagcccctaggcacca

SEQ ID NO: 427571 - DNA, 74 bp, Homo sapiens
gcttaagatgtcctgcctgaaaggtcagcccaaggccaaccccactgtcactctgttcccgccctcctctgagg

SEQ ID NO: 427572 - DNA, 101 bp, Homo sapiens
ccccgcaggacggggaggattctgtacagatgagcataacttacaaatcttcctattttcaagctgaaagaatctactgttagaagaagatacagtgactt

SEQ ID NO: 427573 - DNA, 90 bp, Homo sapiens
atggacagctgggaattgctgaattagaactgcagaggttcctctacagcaagcctcatctagttgaatctgaagatgtggacctgctga

SEQ ID NO: 427574 - DNA, 90 bp, Homo sapiens
tgaggatgaagattcaccaaataagctatatactttggttacctatgtacctgttaccactttcaaaactggcagccggtcaagttcccc

SEQ ID NO: 427575 - DNA, 98 bp, Homo sapiens
gaatttccatgtcaacatagtcctggggtggcactgaatcaacaagacaagcaactcaattgattaatgctttgatcaaggatccagacaaagaaatt

SEQ ID NO: 427576 - DNA, 90 bp, Homo sapiens
aaagatcacagcagtgttccaagttctaaagagtgggctcgggatgagtttgaaggcctcttcaagcagccagcagaaaatgtcaaccag

SEQ ID NO: 427577 - DNA, 90 bp, Homo sapiens
tatttggagaactcactgatgaaactcaaatccagtacctcaagcaagtccagcagccgagcgttgcccaactgagatcaacaatggtag

SEQ ID NO: 427578 - DNA, 96 bp, Homo sapiens
aagtttgcagatcgggagcgcaaggtcgccctcaaggccatgatcaaaacggagactgcattgcttattgatccaaaaaattcctgttcttcatcc

SEQ ID NO: 427579 - DNA, 75 bp, Homo sapiens
ctgggcagaaaggctaccatcaccgcactgagatcaacaagaagacagcgacagctgtggcgcactgcaaacgcg

SEQ ID NO: 427580 - DNA, 88 bp, Homo sapiens
cctggtcttgctcggccgatgaagtgcagaggtttttttctgatagcagaccccacgttagctgaaatgggaaaaaacttgaaggagg

SEQ ID NO: 427581 - DNA, 100 bp, Homo sapiens
caggaattattggaggccaggtttactggagtaggtgttagtaaggaaccctctggatattgatgcctcgggtgtggttggactgtcatttagtggacac

SEQ ID NO: 427582 - DNA, 89 bp, Homo sapiens
ccaagatggcagattcaatctttttaaggaggataagatcaatgccctcattaaagcagccggtgtaaatgttgagcctttttggcctg

SEQ ID NO: 427583 - DNA, 83 bp, Homo sapiens
gcgcagggaaggagggcgtccgagtcaacaaccgcttcgagctgggacagaagatgagcctgtcggtcctggagggtatgggg

SEQ ID NO: 427584 - DNA, 90 bp, Homo sapiens
aaaagttgaatgatgtatttgatcctgattctacccaagtacatatgatttcagctgcaatggcaggaaagaccacagcaagattctttc

SEQ ID NO: 427585 - DNA, 90 bp, Homo sapiens
ggccggggtgctcagccaggccgactacctcaacctggtgcagtgcgagacgctagagggatgaccgagtgggagacagcagcaccagcg

SEQ ID NO: 427586 - DNA, 100 bp, Homo sapiens
ctgcagtcgcctccaacacccgctgctgcccgcccgctgcctgcctgcctggcatctctctctcccgatcccagcatggtgagtgcctacatgtacccag

SEQ ID NO: 427587 - DNA, 71 bp, Homo sapiens
atatcatgacccctctggttgcgctgctaaaagaggagatcttcgggcctgtgctgcccatcgtgtgcgtg

SEQ ID NO: 427588 - DNA, 83 bp, Homo sapiens
gatggaattcggctctataattcactgaagtcaaggagttgatccccctcatattgtgtacagcatgtctacatcctgagcct

SEQ ID NO: 427589 - DNA, 75 bp, Homo sapiens
ggacaactactgcgtgactgtgtctgctagtgccggcattggacctgaaggagaagaaggagaaggtggaggaga

SEQ ID NO: 427590 - DNA, 75 bp, Homo sapiens
ctcgacttgaccggcgccaaacagaacacaggagtgtggctagtcaaggtagaaaatctttatcctcaaattggc

SEQ ID NO: 427591 - DNA, 100 bp, Homo sapiens
tcttccacttagttctgaggtgaagacagatcatgggactgataaattgctccttcgagaactcatagaacggaagaccagctccttggatcccaacgat

SEQ ID NO: 427592 - DNA, 83 bp, Homo sapiens
accaagctggacaaccactgtgagcattttgaaagcgaagcagaagccgtagaatcagcggcgagcctgttgaaagaacccac

SEQ ID NO: 427593 - DNA, 75 bp, Homo sapiens
cgggagagtgagagaaaggctggaagacgagccaaaagaatgcaatggtgtaaagattccagttgatgccagtaa

SEQ ID NO: 427594 - DNA, 100 bp, Homo sapiens
atctcagagcggtatccctgtctcagcgaagtggtgaaagagcatcagcggagctccctgggtcctcagcagtgaggctggcctccctgcgtgacctgcc

SEQ ID NO: 427595 - DNA, 90 bp, Homo sapiens
gctgaagaccctggcccgggaccttggcatggcagtggtgtttcttgcagaacataaattattaggaaacattaaaaatgtggccaagac

SEQ ID NO: 427596 - DNA, 82 bp, Homo sapiens
aagcaaaaaaacaccgtggtcaggacctgacgtataaatgtttggatgaatcctctaatcatattaggtatgtaaatcgtgt

SEQ ID NO: 427597 - DNA, 90 bp, Homo sapiens
cgcacgtcggcctgcgcctgcagcccgtgaacagcaccttcagccccggcgacgagagttaccaggagagcttagaagcaaagttaagag

SEQ ID NO: 427598 - DNA, 100 bp, Homo sapiens
cttgaaagaagctgcagcggaggaaggcgagacagcaccagttgcccttgaagcagaaaacagaggtgaaatgaaactagctctccagtatgtcccagag

SEQ ID NO: 427599 - DNA, 75 bp, Homo sapiens
aaaagatacattgaactcttcaggagcacagcagctgaagttcagcagagatgtacagtcttactacgtctttgt

SEQ ID NO: 427600 - DNA, 100 bp, Homo sapiens
agacggttcgccgtcggtgccgagaccccatcaacgtggagggcctgctggttccagcaacagatagaaatgctttaagttcactctggggaaagctggc

SEQ ID NO: 427601 - DNA, 88 bp, Homo sapiens
gaagtcggagtttgagccccggaggcagagcggctgccatgggctggagcggctctgggctccggaatcgcccgcagccggtactgcg

SEQ ID NO: 427602 - DNA, 50 bp, Homo sapiens
ccctggacacttctggaagtcagctgacactgagattatgaggctctggc

SEQ ID NO: 427603 - DNA, 75 bp, Homo sapiens
agaaaaggggcattatcccgctggatgcacactgctgcgtggaggtccggtgtctaaaagactatggagaatttg

SEQ ID NO: 427604 - DNA, 50 bp, Homo sapiens
tttggaactgataagtgagagagataaggaagcttgctgtcttcgatacg

SEQ ID NO: 427605 - DNA, 100 bp, Homo sapiens
agcccagagagcgtcccagggcctgggactaccctcatggagatctattgggaaactgattataaccactcgggcaccatcgatgcccacgagatgagga

SEQ ID NO: 427606 - DNA, 83 bp, Homo sapiens
gagcctcagttggaagcagccgatccagcctgcggagcctgtggggcaggtcttgttgcagtaggagaaagagcacaaaagag

SEQ ID NO: 427607 - DNA, 101 bp, Homo sapiens
gcgcagggcggtcctggagctgctgcagcggccggggaacgcgcgctgcgcggactgcggcgccccgggtccacgctgcttttatgagctgtaacactcac

SEQ ID NO: 427608 - DNA, 100 bp, Homo sapiens
ggctgaggcggcgcggcagcggagggacggcagtctcgcgcgacctgcgaccgcatcaagcagtccgccagcggaaccaagcggcgcgtgttcatcatcg

SEQ ID NO: 427609 - DNA, 97 bp, Homo sapiens
ggagggcggcaaggcgccggccagcagcctgcacacccaggaagcagggcggtccctcatcaagaagattatgtttgagaccttcaacaccccggcc

SEQ ID NO: 427610 - DNA, 75 bp, Homo sapiens
cggctgcagcgagcgctggacggagaggaaagcgcttccacagcgcggcacctgtacctccggggtggcgctggg

SEQ ID NO: 427611 - DNA, 100 bp, Homo sapiens
tccattgagaatgtcctgcaggacagcagccccgagcactgtggccgaggcccacctgctgacatctacctgccagctgcatcttcctcccgtgaggctg

SEQ ID NO: 427612 - DNA, 82 bp, Homo sapiens
aagagttggatactcagcgtcgctggcagccgctgtacttgctggtcagtgagaaggtcggaggggccgaggggaccaagct

SEQ ID NO: 427613 - DNA, 101 bp, Homo sapiens
tgcagcggctgcagcgttatgtgggacttcagatagcttctgagtagtcaagcagtgattcctcttctcctgtaaatgaccacagaggaagacaatgaatg

SEQ ID NO: 427614 - DNA, 90 bp, Homo sapiens
tttccttcgtacccacagtgcttcatgagagatgttaactcattccagcaaactacaaagtggattgatgatgtcagaacagaaagagga

SEQ ID NO: 427615 - DNA, 100 bp, Homo sapiens
tgaagatggtgaaagaagagctatgataactcctgctctccgagaagcccttactaaacaaggtgcagtagacattgttgcaatcatgatcggcaatctg

SEQ ID NO: 427616 - DNA, 51 bp, Homo sapiens
cctgggaaagcttgtgcagactcagagcactggcagcagcgacccctactg

SEQ ID NO: 427617 - DNA, 100 bp, Homo sapiens
cctgcctccccagcaaatcgagaaaaacctcagcgacctgatcgacctggtgaaaggtgtagcagtcactcggcctacacccacagcatcgaccttgtga

SEQ ID NO: 427618 - DNA, 100 bp, Homo sapiens
tcatggagaggtcatctcagttccacacaagatcatcacccaccttcgaaaagagttctcctgtgcctcctgttggctctctttgcatctggcctcatcc

SEQ ID NO: 427619 - DNA, 75 bp, Homo sapiens
tctacctgtggctctttctgctgggcctgcccttcaccctctacatggaatgttgaaaacccccagtcccagccg

SEQ ID NO: 427620 - DNA, 95 bp, Homo sapiens
gcgggaacgattgggctgagcagaggacgacatgttgcttttcgtggagcttagaaatgttggacaaagttgagcctccaactatacctgaaggt

SEQ ID NO: 427621 - DNA, 75 bp, Homo sapiens
gaggcaaggagctaaagcagcgtgcgttcagccctgggagctcagagttctacagagtcaccactgaacaatatc

SEQ ID NO: 427622 - DNA, 102 bp, Homo sapiens
aggcctgatagactgattaaaccacagtgctcaagtaaagctctttgtgacagggcttttcagcttaaatcaagatattcctgctttcaaggaacatttaag

SEQ ID NO: 427623 - DNA, 75 bp, Homo sapiens
gagaagggattgcccagtcagcaaaggttcagccctccaaggaggagatgttaaagtaacccatcttgcaggacg

SEQ ID NO: 427624 - DNA, 82 bp, Homo sapiens
ttctacagttactacaagtgcaagctggcgctggagcagcagcagcccgagaggccccagcaacatgcagctacaattccag

SEQ ID NO: 427625 - DNA, 100 bp, Homo sapiens
cggacctactcctgctgaccccccatcctcccgccccgggtctgacgggggagtgcccgtggctcgggggcatggcctatctgcacgcgcagcactacat

SEQ ID NO: 427626 - DNA, 98 bp, Homo sapiens
caccgcggatctggggccgtcctcagaaactgttcaggttccattatcaaaacgagcaaaatttgttggacctggtggctataacttaaaaaaacttc

SEQ ID NO: 427627 - DNA, 98 bp, Homo sapiens
cgcaaggcgaagaccagtactatctgcgggtcaccacggttactttgacgcgcacgcccttgctatggactatcggagtttgggatttcgggaatgcc

SEQ ID NO: 427628 - DNA, 98 bp, Homo sapiens
cgcttctcagtgggacaccgggaagttccagggtctccctccactgctgtagtaacccgggtccggggcctcggtggtgctcctgatgcccctcaccc

SEQ ID NO: 427629 - DNA, 99 bp, Homo sapiens
ccccttgacaagtcccttctacttcgttgcagcaactgggatgctgagactctcacagaggaccagggtggtccaggactccgaggaccaaagggccag

SEQ ID NO: 427630 - DNA, 75 bp, Homo sapiens
gattcgcagtggtcgcttcttctccttggtcaagctgaactagcagaaattccagaaggctatgtcccagaacac

SEQ ID NO: 427631 - DNA, 82 bp, Homo sapiens
ttcaagaatgatcaggatacttgggactacacaaaccccaatctcagtggacaagaatccacactggtgatagaccatacaa

SEQ ID NO: 427632 - DNA, 114 bp, Homo sapiens
acggacacggctgtgtttgatgtccggctgagtgggaagaccaagacagtgcctggataccttcgaatagggtttactcctggcttgggggcattaggaagcactggaggctct

SEQ ID NO: 427633 - DNA, 100 bp, Homo sapiens
agtctcctcctcggcgggagccctcgcgacgcgcccggcccggagcccccagcgcagcggccgcgtcaacgaaacggaatattccaatgctctttgtccg

SEQ ID NO: 427634 - DNA, 75 bp, Homo sapiens
cacagcagcaacacggataacattccacctgaaagacccatcagccacaccccgtcttactgtgatgagtcgctg

SEQ ID NO: 427635 - DNA, 74 bp, Homo sapiens
aatcttggagaagggtctaaagcttcgccgacacgaggtgaccatctgcaattacgaagcatctgccaacccag

SEQ ID NO: 427636 - DNA, 96 bp, Homo sapiens
ccggcccggagcaccgagctcgcggcacggcatggagtcctgtggcatccacgaaactaccttcaactccatcatgaagtgtgacgtggacatccg

SEQ ID NO: 427637 - DNA, 81 bp, Homo sapiens
gacagagccgggcctagcccagagacatggagagttgctacaacccaggcagggtgccatttgccgtgcctgacaaagtgc

SEQ ID NO: 427638 - DNA, 75 bp, Homo sapiens
ctgatggacaggtgtcccagaccgacgaggcccagagcaagagaggcatcctcaccctgaagtaccccatcgagc

SEQ ID NO: 427639 - DNA, 100 bp, Homo sapiens
tctgggtgatcatggttcagcgctttagcctcaggaggcagctatccaagaggcggggtttcaccatgttgcccagactggtcttgaactcctgagctta

SEQ ID NO: 427640 - DNA, 75 bp, Homo sapiens
gatgtgagcgagaaagccgttgcctccagcaccacttctaatgtgtacagtattttctccaaggtacactccgat

SEQ ID NO: 427641 - DNA, 95 bp, Homo sapiens
caagatcttcacattctggatctcagctgctcttgaaggggttgcagatggtgtaggaggctggagagactatggagttgatccatctcaattct

SEQ ID NO: 427642 - DNA, 82 bp, Homo sapiens
cccggagccctaggccggtgggtcatcatcagatttgaaatatttaaagtggatacaaaactatttcagcaatgcagacaat

SEQ ID NO: 427643 - DNA, 51 bp, Homo sapiens
tggtcaaaagcgcactaaatcgtctccaagaaactggcgatggaatatgag

SEQ ID NO: 427644 - DNA, 100 bp, Homo sapiens
gacagtgtcagagcaggctgtaaaaaatgtggctaccgtgctcctgatccaacagcaggtgctagtatagatgatgaaaactgctggcacttagatgaag

SEQ ID NO: 427645 - DNA, 90 bp, Homo sapiens
cttccgtacttccgctttccggcccagccagcgcccgcgatgcttatcaaatatggagttattagcactaacgttctgattgaagatctc

SEQ ID NO: 427646 - DNA, 51 bp, Homo sapiens
tcatgagttaagaaacatatttctacaggatttggtgctatggagaaattt

SEQ ID NO: 427647 - DNA, 75 bp, Homo sapiens
ggacatggagtatgaaagacggtttgatttcctctgcatgcctgtcttccatccgcgtttcaagagggagttcat

SEQ ID NO: 427648 - DNA, 75 bp, Homo sapiens
ccgcaccatggaggaggacgacagctacggagtccaaaactacttacctggaagaccttccaccaccccctgagt

SEQ ID NO: 427649 - DNA, 111 bp, Homo sapiens
cttgcagaagaccgcagtgggataaatctcaaagatctcgtacaagatccttctttgctttgcttcacctctgggtcatgattgttctgttgacttacacaccagaaatgc

SEQ ID NO: 427650 - DNA, 98 bp, Homo sapiens
gcgcttcgggggtccccgaacgttactggggccgcctcctgcacaagctggagcacgagttcaaccttcacttgactggagacatccacgccatcacc

SEQ ID NO: 427651 - DNA, 75 bp, Homo sapiens
aaaaaaacaaaatgaatatggaccaccagcctcccaagaatgagtccttggagacttacccagtgatgaagtata

SEQ ID NO: 427652 - DNA, 98 bp, Homo sapiens
agggacgtcttcctgtatagagcgtacctggcgcagaggaagcggctgctgagattactaggaagctggagaaacaggagaagaaacgcttaaagaag

SEQ ID NO: 427653 - DNA, 100 bp, Homo sapiens
cgagagaggcaccgggatcgtgaccgagaccgtgaccgagagcgtgaccgagagcgcgaatatcgtcatcgttagaagatggagtctccctctgttgccc

SEQ ID NO: 427654 - DNA, 75 bp, Homo sapiens
cagtttacagttcattttttgcttggtttggaaaaatttcattagagggtgccaaagcatgctttctgcgggaca

SEQ ID NO: 427655 - DNA, 75 bp, Homo sapiens
ggagaatttgaaaagattatgcaactttcagaaagtgagttctctggtgatgttgatagcctggaactgggggac

SEQ ID NO: 427656 - DNA, 100 bp, Homo sapiens
ttcagagccaaccaccttttctataaaagttgctgtttactgttgctgtccgtaaactggaacctctgttcactcaagatccccctgcagtggaaccagc

SEQ ID NO: 427657 - DNA, 98 bp, Homo sapiens
ctgaggacagcatagacgacaccttcctcccagtgcctgccggtggacaaccagcaagccatggtgcgcagggagtctgtggtcaatctggagaactt

SEQ ID NO: 427658 - DNA, 85 bp, Homo sapiens
gcgagcccttgggccgcgtctcctttgagctcttagaacaagctctggtgattgaggaacagctgcgccgggctgcttacttgaa

SEQ ID NO: 427659 - DNA, 75 bp, Homo sapiens
ctagagaatgaattttcaccattgaatatattagaaccattctgccttgttggaagatgctggctcaagtagttt

SEQ ID NO: 427660 - DNA, 82 bp, Homo sapiens
catgctttagctatctgaacgaaacttccctttggggagttaagttttccagtacgagctcaactggaggcagtcctgtgcg

SEQ ID NO: 427661 - DNA, 60 bp, Homo sapiens
tgcagtgtggctctggatagcaccttatggacagagtaaagctaaaacattttgagaaat

SEQ ID NO: 427662 - DNA, 50 bp, Homo sapiens
cgcgtgttgggggcccccggagagccgagcctcttgaagccattcttaca

SEQ ID NO: 427663 - DNA, 135 bp, Homo sapiens
acaaatgaagacaccaaggcgcagagaggtgactcagcctgccctcagtcacctatctgcatcctggcactgcaggctcgcacttagccctggatacccagattcatcctcctcccctgggatggcatagaagag

SEQ ID NO: 427664 - DNA, 74 bp, Homo sapiens
cttctgctgggaaatcccagtacagatcggggcagctggcattttatgctatgtgggagcctatgtcttcatca

SEQ ID NO: 427665 - DNA, 100 bp, Homo sapiens
ctgagcaaggagttcctgacggaggagtggtcagcaagtccatctgggcagcgcagagggaccaaaggtgtccatcgttggcctggacgattctggcttc

SEQ ID NO: 427666 - DNA, 85 bp, Homo sapiens
aaggagctaaagcagcgtgcgttcagccctggggcggtgcgtctttctacgtgaataggattttgtggctggccagatacactgc

SEQ ID NO: 427667 - DNA, 87 bp, Homo sapiens
gccagcctgcgaaggtggcggcgctgctgctcgggctgctcttggagcttccatgaggcaggctgaacctgcagatatgcgcccaga

SEQ ID NO: 427668 - DNA, 100 bp, Homo sapiens
gcagtcagccggggacctcgtccgagcccacccgcctttggaggcgttggagaccagggccagccctggccacaccccaggctgtgtcaccttcgtcctg

SEQ ID NO: 427669 - DNA, 75 bp, Homo sapiens
agagcttggttaacttgggagaaagtttcatctgtggatggagtattggtgctgctgctgcctccactgtactca

SEQ ID NO: 427670 - DNA, 87 bp, Homo sapiens
cggagcaaagtcgccgggggtgtggggtgttccacgctatgttgggagtgttcgctttcgagagtactgggatttaatgaatttgtc

SEQ ID NO: 427671 - DNA, 100 bp, Homo sapiens
tcatcatagctggcaccagcgcctatgctcgcctcattgactacgcccgcatgagagaggtgggatgcagatcttcgtgaagaccctgactggtaagacc

SEQ ID NO: 427672 - DNA, 75 bp, Homo sapiens
ggtccgggcgcttgtctatgggcaccacggggatccagccaaggtcgtcgatgactacctgtttaagctgctttt

SEQ ID NO: 427673 - DNA, 104 bp, Homo sapiens
attcgcagtggtcgcttcttctccttgatatcaacctgaattctcctaacaaaggtctgctgtctgactccatgacggatgttcctgtcgacacaggtgtggct

SEQ ID NO: 427674 - DNA, 82 bp, Homo sapiens
cagagagggaagagattcagccagcacactcctcgcgagcaaggattttgacacttcatgacatgtcattatttagagcaat

SEQ ID NO: 427675 - DNA, 101 bp, Homo sapiens
gaaacccaagccgccgcgtaggagcgtgcgttcgggccctcttctcccacctgttcggtattatagctgcaaatgtccttgtattctgtttatggagagta

SEQ ID NO: 427676 - DNA, 74 bp, Homo sapiens
gaccgccctgcgcttcgtgcaccggggcggtccgttgccaaagccaggccagcaaaaaggagcgttttctccag

SEQ ID NO: 427677 - DNA, 100 bp, Homo sapiens
agctggaccacgagaggaagctgagggagacctaatctatgccagcaattatgacaatgttagcagaccatgcagctcgtcagctgcttgatttcagcca

SEQ ID NO: 427678 - DNA, 80 bp, Homo sapiens
tggccgagcaggctgagcgatacgacggatgagacctgcacgcagtggctcacagcagcacgatttgtgacagcccgagg

SEQ ID NO: 427679 - DNA, 75 bp, Homo sapiens
ctggtggcgtcggcaggttcgaggcgattcgaggatccagatgaagaaatggccaaaatcgacaggacggcgagg

SEQ ID NO: 427680 - DNA, 50 bp, Homo sapiens
gcctggacgtgctacagtcctggatcaagcaccccaacattgtagccctg

SEQ ID NO: 427681 - DNA, 82 bp, Homo sapiens
gaaactttatgtgcctgtaaaagaatacccagatgaacgtcaaggtcgtgggaaataaaaggcagttctacacagactgcag

SEQ ID NO: 427682 - DNA, 100 bp, Homo sapiens
cctcaacaagcctttgctcagtgttataggatattccaagataaatgcatgaatactaccttgacggaatgtgatttctcaagtctttccaagtatggtg

SEQ ID NO: 427683 - DNA, 98 bp, Homo sapiens
attgttcagttgcaaaaagaaactggagccaccatcaagctgtctaagtccaaagatttttacccagagaccgcgtggcgcgcattgggctgggcgtg

SEQ ID NO: 427684 - DNA, 90 bp, Homo sapiens
atgaatgtttccatctcttcagagatgaaccaggcactttgtgagtgtgccctccagactccttatgacagcttaaaactagggatgttg

SEQ ID NO: 427685 - DNA, 75 bp, Homo sapiens
ggagaagtggtgaagcttcatccccatgaactaaataatctcctgtctaaagttcatactttggaaacaaaagag

SEQ ID NO: 427686 - DNA, 98 bp, Homo sapiens
gccctgcctgcctcctgcgccgcgcagccctcgcgagcgccccggatggcgctttacccctaggaccggtgtctgcttttggggcagagttttcatcg

SEQ ID NO: 427687 - DNA, 82 bp, Homo sapiens
gcagaaatggaagtcaagagggaatcttatgcaagagaaagaaggttgctgagtcattaggaatcacagaattcctacggaa

SEQ ID NO: 427688 - DNA, 50 bp, Homo sapiens
tgaaaccagcagacagaatttgtcaggccctcgggaccaaggatcacgtc

SEQ ID NO: 427689 - DNA, 100 bp, Homo sapiens
atattcctttccgcttccgggaccctgacctccggcagatgtttggggttgctattggcagaacagacattgaagacttagacctttatgccacatctcg

SEQ ID NO: 427690 - DNA, 90 bp, Homo sapiens
cttttgcagatgatcgccgggtgtcgatccttttccctccagtcaggcataagggccatgtgttctgaaattattttgaggcaagaagtt

SEQ ID NO: 427691 - DNA, 100 bp, Homo sapiens
agctggaaacagtcagagccaccagccaatgatcttttcaatgctgcgaaagctgccaaaagtgacatgcaggtcacccctcctaatttctcagtgtcac

SEQ ID NO: 427692 - DNA, 75 bp, Homo sapiens
gctctcagccacttccctcccaaccctggtgtgaatcaacttcttgggccttggctctgagttggaaaaggtttt

SEQ ID NO: 427693 - DNA, 82 bp, Homo sapiens
gtcactttgcctggacaggaggaacccttggatgatctcttcagggaagcagatatcgaacccaatggcaaagtgaagtatg

SEQ ID NO: 427694 - DNA, 101 bp, Homo sapiens
gactggggagagcagccaagctgaagagaacatagtatcagcagcgtcgccagcaggagaatatgcagcgccagagccgaggagaacccccgctccctgag

SEQ ID NO: 427695 - DNA, 75 bp, Homo sapiens
cttatccacagactccaggcatatcttgaagaacatgatgaagaactggtggatgtttctgcatctgtcttacca

SEQ ID NO: 427696 - DNA, 100 bp, Homo sapiens
caggggaagttagattgtccggtgctggtcaagatgtccaaggaacaagtgtgattgcaaatctcccatttttgatgcgacagaatcccactgagacgct

SEQ ID NO: 427697 - DNA, 75 bp, Homo sapiens
gcggacggctgcgtcgcccgaggcgaggaggagcgctggcgatgccttcaattaagttgcagagttctgatggag

SEQ ID NO: 427698 - DNA, 50 bp, Homo sapiens
cggcaagctaatgagaagctagataatccagtgtgaaaaaagccagtatt

SEQ ID NO: 427699 - DNA, 75 bp, Homo sapiens
cacttattcatctgtccagcatgactcatccccgggagtgttgagtgcagagtccagtggtgacatggatgttct

SEQ ID NO: 427700 - DNA, 82 bp, Homo sapiens
ttaaaaaaacattggaattctgcttatctagccctacctgaacccatccttccatccctccaaaaaatttacccagtaagtg

SEQ ID NO: 427701 - DNA, 100 bp, Homo sapiens
ccgagagcaacaaagcaggcgactacagccacgtgaaggtctagatgttgatggaatatatcgagttagtggcaatctggcaacaatacagaagttaaga

SEQ ID NO: 427702 - DNA, 101 bp, Homo sapiens
cgcggaggaagcgaaggaggcgggagcggagacctcgctgcgctcatggcgtcgcccggctcatcgagcggtccccccgcaccctgccacgctccatcacg

SEQ ID NO: 427703 - DNA, 90 bp, Homo sapiens
aatgatagaatgaagaccacaataaaagagacctctacttagctcagcaattcttaccttgtgtcctctccctccccgcatacttcagcc

SEQ ID NO: 427704 - DNA, 50 bp, Homo sapiens
atcaccaccggatcaacttcgacaaatacaaaattcctgcctttctaaat

SEQ ID NO: 427705 - DNA, 82 bp, Homo sapiens
ctggcagccgcggatctcaccgccgctcagggattctgaaaccttccttgtatccctcctgagacatctttgctgcaagatc

SEQ ID NO: 427706 - DNA, 75 bp, Homo sapiens
gtccccagaagatggagccagcacagcactcattgcaggtgctggagaatctggtaaaagcaccattgtgaagca

SEQ ID NO: 427707 - DNA, 82 bp, Homo sapiens
ttggactgagtcctgcaggacacagatgtggaagatgtcaagtttgtgatcaactatgactatccaaacagctcagaggatt

SEQ ID NO: 427708 - DNA, 100 bp, Homo sapiens
cgagagcttcgagcggactcagaggaattaaggaatttgcaagagcaaatgaaggccttacaagagcagctaaaagtaacaacaattaaacagacagcaa

SEQ ID NO: 427709 - DNA, 107 bp, Homo sapiens
gtgtaagcagctgaacgagaaccaagtgcggacgctgtgcgagaagatatgagtaaaattagcctaatcagaatgttagttcctgaaaacattgacacgtaccttat

SEQ ID NO: 427710 - DNA, 83 bp, Homo sapiens
ctcggcccgcgggggagccccgggagccgcacgagctttcagcagaggccaaggcagcattgcttgaatttgaagaaagggag

SEQ ID NO: 427711 - DNA, 106 bp, Homo sapiens
ttcctccatgagaatgagtatgttcatggaaatgtgacagctgaaaatatctttgtggatccagaggaccagagtcagatgctgtacccctcaaggatttaaacta

SEQ ID NO: 427712 - DNA, 75 bp, Homo sapiens
caacatggcggaacgcaggagacacaagaagcggatccagaaacgttaatggacaccagaacggctactgcagag

SEQ ID NO: 427713 - DNA, 51 bp, Homo sapiens
gccatctggagggcctggtatatccagtgccttcccttcttcttggtggtg

SEQ ID NO: 427714 - DNA, 75 bp, Homo sapiens
ctggaacagagtaaaatggacaagggacgaggggtatcatcttatttcgtccttcacatctcactaacaagtttg

SEQ ID NO: 427715 - DNA, 100 bp, Homo sapiens
gtcccgggggcgcagggaaggagggcgtccgagtcaacaaccgcttcgagctgaaggaagaggcccagcagaagggactcgctgagccaccccccgcccc

SEQ ID NO: 427716 - DNA, 98 bp, Homo sapiens
gagtctcagagctgtcagaaaggtaagaatcaggccttattggagacattcaagcaaaggttggacaactacttttccagaacagaaaggaaactcat

SEQ ID NO: 427717 - DNA, 100 bp, Homo sapiens
caaggcagctcgctctgggagcctagaatgcatcagtgcccttgtggcgaatggggctcacgtcgattattcgacaacgaagagaagcagatgctgcatt

SEQ ID NO: 427718 - DNA, 84 bp, Homo sapiens
ccgccgcccgtccacacccgccgccagatagcctgggctggaagctcttctacgtcacaggctgcctgtttgtggctgtgcaga

SEQ ID NO: 427719 - DNA, 100 bp, Homo sapiens
cctcaacatctctcagagacgaaaggttgctatcaagatcatagataagacccagctggatgaagaaaacttgaagaagattttccgggaagttcaaatt

SEQ ID NO: 427720 - DNA, 74 bp, Homo sapiens
gaggaccccagacaccggagactgggaaatgggacaaactctgcctgggcgagtccttttcctgcgttatgtcg

SEQ ID NO: 427721 - DNA, 100 bp, Homo sapiens
cggccgtgccctccgacagccaggcccgcgagaacttttctgggagaagaggctacaaggacttagtgcatcagatgtaacagaacaaattataaaaacc

SEQ ID NO: 427722 - DNA, 75 bp, Homo sapiens
actggacttacgaggagcagtttaagcagaggctgtggccaggccagctgggctcggggagcgccagcctgagag

SEQ ID NO: 427723 - DNA, 100 bp, Homo sapiens
atggccaccagtttccggacagcttcgtgctgggacttggatgttgtgggtgatggtatgcagtgtcctccttcacctttgctttttgatccttcactaa

SEQ ID NO: 427724 - DNA, 73 bp, Homo sapiens
ggctacgcgcccacttggcgggccctggctggggatgtgcgagggcgtctctggccgagcctctttttgtgga

SEQ ID NO: 427725 - DNA, 80 bp, Homo sapiens
aacattggaaaagaaatcctgataagaactgctttgtggtattaaagataatcaaacattatcaagaagaaggacaagga

SEQ ID NO: 427726 - DNA, 80 bp, Homo sapiens
accaagagaacaatgggaaccagtctttcaaaatttggttgaatctggcgatgtggaacccatggatatggagggctgac

SEQ ID NO: 427727 - DNA, 50 bp, Homo sapiens
gaagatcatcgagcatttcaaacgctgtttgcagacaaggtcccaaagac

SEQ ID NO: 427728 - DNA, 74 bp, Homo sapiens
cagtttgccctggggacaggactcagaggagatgagccacttctgccccaccaacgttgggccaaccaaaagga

SEQ ID NO: 427729 - DNA, 115 bp, Homo sapiens
cggcgttggtgttatgctctgggccattcctgagctcgggatgtcggaggagatcatcacgccggtgtactgcactggggtgtcagcccaagtgcagaagcagcgggccagggag

SEQ ID NO: 427730 - DNA, 51 bp, Homo sapiens
gttatcatgctcattgggaataagagagctaaagttgcagacaagatccag

SEQ ID NO: 427731 - DNA, 76 bp, Homo sapiens
gaaaagagaaaaatctcagctattcggtcatatagagatgtcatgaaggttaaaaggacaactctggtggatagca

SEQ ID NO: 427732 - DNA, 100 bp, Homo sapiens
ccccaaccgctcggctccccttgtgccgtgccgcggcggctggcgctacgcccaggcccactccaccatcgtcagcgagtccacaggtcctggctaccct

SEQ ID NO: 427733 - DNA, 101 bp, Homo sapiens
gaaaatggcagacgatattgatattgaagcaatgcttgaggctccttacaagaagcactggcttagtgatgtgaaggacaagaattcagtgttttcagtcc

SEQ ID NO: 427734 - DNA, 75 bp, Homo sapiens
ggtgtaccaggcgaagctggccgagcaggctgagcgatacgacggctatgactttgcagccgtcctggagtggtt

SEQ ID NO: 427735 - DNA, 83 bp, Homo sapiens
cgcgaagctgccaaagccttagacaaataacgaaggaggcccaacttcattcaataaggagcctgacggatttatcccagacg

SEQ ID NO: 427736 - DNA, 83 bp, Homo sapiens
atcgaagctctagaaatgaatgtttccatctcttcagagatgaaccagcttccccgggcgctgcctggacaggcctgcctgcg

SEQ ID NO: 427737 - DNA, 75 bp, Homo sapiens
tgaaaagccttcagagctgagagggctgctaaggaagcaaaaaaggctaagcaagcatctaaaaagactgcaatg

SEQ ID NO: 427738 - DNA, 100 bp, Homo sapiens
aggagtggacattgctagcaatgagctcccaaagccatccagacacgaatgcagagtttgagtccagatcccaaagcccagtacacaagtatctacggag

SEQ ID NO: 427739 - DNA, 82 bp, Homo sapiens
cggagggaaaaaggaagaggagaaggaaattgtcccgaatccctgcagtgggtgaggctggaggacccccacgggaagccat

SEQ ID NO: 427740 - DNA, 90 bp, Homo sapiens
cggaggaggaggggagaggcctggaggacaccaacatggacagtgatatcgaagcgttggccaggtgtttggaaaatgtcctgggttgca

SEQ ID NO: 427741 - DNA, 100 bp, Homo sapiens
tggcggcgccgctcatccccctctcccagcagagaaacagcacccaggactatcttccaaagagttctggatatcctaaagaaatcttctcatgctgttg

SEQ ID NO: 427742 - DNA, 90 bp, Homo sapiens
cacaatttatcattgaataagtgttttaagaaagtggacaaagagaggagtcagaaaatgtcactgaaattcacaaatgcaaaacggatt

SEQ ID NO: 427743 - DNA, 96 bp, Homo sapiens
ccgcgattccttcgggcgatgctgggggctttccggtcggggccgcagccgcttccggagccgcgggcgagagcacgaacttccaggagccggtgc

SEQ ID NO: 427744 - DNA, 75 bp, Homo sapiens
ctggaaatgttcccagaacattgcacgatgcctcctgctttctaaaaccaatttttccaacaacaacgatttccg

SEQ ID NO: 427745 - DNA, 75 bp, Homo sapiens
atggatttcgttatatcccctttagaatatatcaggaaataaagtctttgcttttgctttttggaggtcagtttg

SEQ ID NO: 427746 - DNA, 76 bp, Homo sapiens
acttgaggaaccttcaaaggcacttcgtggggtcacaggaggaagacaatggtcctataatgcccttggataagaa

SEQ ID NO: 427747 - DNA, 97 bp, Homo sapiens
gaaagatcctaatatgaaaggtgcaatgcttaccaacactggaaaatatgcaataccaactatagatgcgtgtctcccggaggacccagaaattcgg

SEQ ID NO: 427748 - DNA, 100 bp, Homo sapiens
gcccgcggggatcccgtcagccgctgtatccagcatgctccaaggccacagctctgtgttccaggccttgctggggaccttcttcacctgggggatgaca

SEQ ID NO: 427749 - DNA, 100 bp, Homo sapiens
ggctcgcgcgctttttggaattcagttatcaagctttagagcctggctactcacagttgaagcctgattgcaggctctgtggatagcaactggatcgtgg

SEQ ID NO: 427750 - DNA, 90 bp, Homo sapiens
cgtttgggtcctctgaggccccttgaccagagtgggaagctttggggtggccggtttgtgggtgcagtggaccccatcatggagaagttc

SEQ ID NO: 427751 - DNA, 75 bp, Homo sapiens
gagagggcctgggagcttgctgcagcttcagggcctgatcaagatccggggggaccggtgctggcgagacctcac

SEQ ID NO: 427752 - DNA, 100 bp, Homo sapiens
ttccgcagagcagacaagaatgatacgcacaagtggttcacaccccgagtgtcagggacagttcctggggcccgggatggacattcagcctgtgtcctag

SEQ ID NO: 427753 - DNA, 104 bp, Homo sapiens
ccatcctgctggacgggcggcgggtgaagctgcagctctggatgctttgcgtgtgggatggaaaatggattccgagtctataacactgatccactaaaagaaaa

SEQ ID NO: 427754 - DNA, 96 bp, Homo sapiens
caccatccacgccagccgcaccatgccgctcctaagcctgcacagccgcggcggcagcagcagtgagagcaccctcagctggctttggagggagcc

SEQ ID NO: 427755 - DNA, 75 bp, Homo sapiens
aacccgggacccacttcactccagtgcctccgacgcctcctgatgtggttcctctggagattaaatgtacttcac

SEQ ID NO: 427756 - DNA, 101 bp, Homo sapiens
catgggctcctctgtcaatgacgctttaaagagagataaagatgccatttatgggcgaccacctccatcggctcccgcacgacctttcttctgagcttcgt

SEQ ID NO: 427757 - DNA, 90 bp, Homo sapiens
cctggcaggaatcccaatttgcctccacttagtgagcggaagaatggtgtggatgaggtcaccattgtcaacattttgaccaaccgcagc

SEQ ID NO: 427758 - DNA, 90 bp, Homo sapiens
ctttgggatccggccagatgattacttggtaaaacatggctaaaagcttacggagtaagtggaaaagaaagatgcgtgctgaaaagagaa

SEQ ID NO: 427759 - DNA, 90 bp, Homo sapiens
cccactgcagatgctatggtggcaacagatgtatgctcatcagtattatatgcagtagtgaatctggattgggaaagtcgacattaatca

SEQ ID NO: 427760 - DNA, 75 bp, Homo sapiens
ctggatgtaccatttaaagttaaagttggtcacataggttatcaatactctggctgaccatcatcatcgtgggac

SEQ ID NO: 427761 - DNA, 83 bp, Homo sapiens
gggcgacctgggcaccagcaggacccgaggccaggagccaggggcccagaaggtggtgcgcgtgggcagggcgcggggacatg

SEQ ID NO: 427762 - DNA, 75 bp, Homo sapiens
gaacaagggatgttgctgaacagttggagaagatctatgggtcagacagaattgactcagaattcatgattgaag

SEQ ID NO: 427763 - DNA, 100 bp, Homo sapiens
gatggcaacggccaacttcggcaagatccagatcgggatttacgtggagatcaagcgcagcgatgtgcaccaattccagctggacatcactgtgaaaatg

SEQ ID NO: 427764 - DNA, 100 bp, Homo sapiens
agccacccatcaaatcagagagaaggaatccaccttcttacgctatggcaggcagtcgatgatgtgaagaaaggttacatcaaagcagaagaaaagtcct

SEQ ID NO: 427765 - DNA, 98 bp, Homo sapiens
agccctttttggaaacatacaggatatctaccacttcaatagcaccaaagactctgcacagaagcagaagaactcgcctctgttgagtgtaagtagcc

SEQ ID NO: 427766 - DNA, 76 bp, Homo sapiens
gctggaatctcctatagatccacagcctctcaggtctacttccccagcaggacagcatcattctcctatatcttct

SEQ ID NO: 427767 - DNA, 90 bp, Homo sapiens
attatgggataacaaggtggccccaccagctgtgctgaatgatatctctaagaaatgacgactgggtttggattcagaagaggattatta

SEQ ID NO: 427768 - DNA, 51 bp, Homo sapiens
ctattttcacgttttaatgccgagagggttattttggagctgttggagcac

SEQ ID NO: 427769 - DNA, 114 bp, Homo sapiens
ggcttctgctgttgctcttctccgccgcggcactgatccccacaggtgctggagaatctggtaaaagcaccattgtgaagcagatgaggatcctgcatgttaatgggtttaatg

SEQ ID NO: 427770 - DNA, 75 bp, Homo sapiens
aagaaagcctattttctgtatatgtattccagatatctgacggaaacgaggtgaaaagggagaagtggtggaaac

SEQ ID NO: 427771 - DNA, 100 bp, Homo sapiens
ggcgagacgcgcgtgtgtgagcgcgccggaccaagcgggcccagaagcggcctcctgacaaggtgatccgggcgggccccgcaggaattttatcccctca

SEQ ID NO: 427772 - DNA, 75 bp, Homo sapiens
ggttctggaatcctcagttcaagagcccgcggagctgagcagcggggagacggaagagttacagaggatcaagtg

SEQ ID NO: 427773 - DNA, 50 bp, Homo sapiens
ccgggcccaggtcccttcctccgaaggatggcttcctggccttccaaact

SEQ ID NO: 427774 - DNA, 83 bp, Homo sapiens
cagggtttgaacataatctttcatgtagctttggctctcctaaagcaaagtaaagcagcggttcggctgaaagaagacatgaa

SEQ ID NO: 427775 - DNA, 75 bp, Homo sapiens
aagcccaacaccgagcccatcaccgccaagattcacacaaaagatgttggacaatttctacaattttgcttcatc

SEQ ID NO: 427776 - DNA, 97 bp, Homo sapiens
cacaccaccagcgctggacccccagacagagcccctcatcttccaacagttggagattgaccattatgtggacctcctgacagtgagtgagactgcc

SEQ ID NO: 427777 - DNA, 100 bp, Homo sapiens
cactgaggctctggaacttctgcccagctctccttggtactactgagcgagtgtgcttgatccagggaacggttgaagcactgaatgcagttcatggatt

SEQ ID NO: 427778 - DNA, 83 bp, Homo sapiens
cggagcccgagcagccgccgccatggcaagagattagcagaggcatttcatatcagtgaggattctgatcctttcaatatacg

SEQ ID NO: 427779 - DNA, 100 bp, Homo sapiens
agctgagctcagagcatggaggagacgtccagatctgttaccattgggatgataacctgaggacccccactggaaatctcccatcttttgaaaaacctgg

SEQ ID NO: 427780 - DNA, 97 bp, Homo sapiens
gatatacacagccccctacagatctgtgggactggtttgaatccttccttgatgatgaagagatcccgggggcataactgctggcagcaccgacgaa

SEQ ID NO: 427781 - DNA, 87 bp, Homo sapiens
gtagtagggaggcattgcaaaagctcattgacgatcaagatatcagtcaagctgaactagcagaaattccagaaggctatgtcccag

SEQ ID NO: 427782 - DNA, 100 bp, Homo sapiens
agctcaccgacaccaccctcgagcaggtccgcggctggagggtacctggccctgctgaagggggcactatggcagacaaagttaggaggcagaggccgag

SEQ ID NO: 427783 - DNA, 76 bp, Homo sapiens
acatggcggcagctgtggctgtggctggcggaggccgagcagaaagctctgggtgtgcggcagtaccatgtggcct

SEQ ID NO: 427784 - DNA, 100 bp, Homo sapiens
aaggatgacatcttccgaatctacattaaagagatgatttacacaatgaagaaagtacatgcactttgggcttctgtatgcctgctgcttaatcttgccc

SEQ ID NO: 427785 - DNA, 100 bp, Homo sapiens
aacagataactggcaaaggtgcttcggggacattccaggaccagctttatccagggactctaccattcccacccctttggccccactccacgacaaccac

SEQ ID NO: 427786 - DNA, 50 bp, Homo sapiens
tggggcccgggcagtccctggagtctattatcctcccagtccacaacgct

SEQ ID NO: 427787 - DNA, 95 bp, Homo sapiens
ggcatgggttaccgctgctgcccctgctgtcgctcctggtcggcgcgtggctcaagctagggtcactggtggggagctctttgaagacattgtgg

SEQ ID NO: 427788 - DNA, 50 bp, Homo sapiens
cccgacgcaagatggcgagtaaagagaaattcaattcgtcataatctgtc

SEQ ID NO: 427789 - DNA, 75 bp, Homo sapiens
ggaggctgcctcggcggagcagaggaaccacacgctgatcatgatatggaatgtgcagatgtcccactattaact

SEQ ID NO: 427790 - DNA, 88 bp, Homo sapiens
tcctcggcgggagccctcgcgacgcgcccggcccggagcccccagcgcagcggccgcgttacagaatgtctgaaggggacagtgtggg

SEQ ID NO: 427791 - DNA, 75 bp, Homo sapiens
gttgcatgctgagaatttgaaaaatgaagatgatgtagacactggactattagaagctccaccatgaggcgaggt

SEQ ID NO: 427792 - DNA, 131 bp, Homo sapiens
taaaaggcaactgctggcagagagacagaagcggattgagcagcagaaagaacagaggcgacggctagaagagtcagaagaagaagttgtagaaggagagaaggaagtcgaggctttgaagaaaagtgcgg

SEQ ID NO: 427793 - DNA, 97 bp, Homo sapiens
gagacccggtttctaatccctgctctgtcactaacaagctgcgtgatcttcgggcactccacagaaggatgttattatcaagtcagatgcaccggac

SEQ ID NO: 427794 - DNA, 100 bp, Homo sapiens
gtaacatacagcactttgtggagaaagtcgtcttccacttgcacgaaagctttcctaggccaaaaagaggacaggcgacactaacaggtgaagatctcgg

SEQ ID NO: 427795 - DNA, 50 bp, Homo sapiens
caaccagaaagagattgggtacttaatggacagtcattttgtttactcat

SEQ ID NO: 427796 - DNA, 100 bp, Homo sapiens
gaattgggagactgactgcctatgaatttgctaaacttaaaagcaagctggttctctgggatataaataaggggatggtggatccaggagagaagattag

SEQ ID NO: 427797 - DNA, 75 bp, Homo sapiens
ggagatccacagctaagacgccgggactccctggaaacctagaaatgggtggagccagccatcctgagacgtccg

SEQ ID NO: 427798 - DNA, 49 bp, Homo sapiens
tttgcagtgcaaaaactttccagttgctgccaaacaaggtgaatccgac

SEQ ID NO: 427799 - DNA, 143 bp, Homo sapiens
gtttttttcgtaaacatctgggtgtatatcaaacggcaagatgtccagtaatgtcccggcggatatgttccagctcaaccaagataaaatgaatttttccacactgagaaacattcagggtctatttgctccgctaaaattac

SEQ ID NO: 427800 - DNA, 100 bp, Homo sapiens
aaaacaatagctcaaggaaacctttccaacacagatgtccaagctgccaattattaccccattcaagttgacaactgaggcaacgcagactccagtctcc

SEQ ID NO: 427801 - DNA, 100 bp, Homo sapiens
ggaagactattcagacagaacaatcagtgatgaagatgaatcgcaaaagtactttgactcaggagactacaacatggccaaagccaagatgaagaataag

SEQ ID NO: 427802 - DNA, 101 bp, Homo sapiens
caagttttctctcacccatccatgggaagccctgctactgctggattagcgccaggttttggagattttaggtaagaagtttcctgttactgagaactcaa

SEQ ID NO: 427803 - DNA, 100 bp, Homo sapiens
catgaaacatggctatccacttattatttatgatgtgttccctgatgcctgcaaagagtttcaagatgcaggtgaacagttctgcaggctgtacaggaag

SEQ ID NO: 427804 - DNA, 75 bp, Homo sapiens
gcagagaccagcatccttggagaagctcagagtcaagatctccactgaagttggcatcacaaatgttgatctttc

SEQ ID NO: 427805 - DNA, 100 bp, Homo sapiens
tatttcatcacaaaactgtcccgggtgggaagaggaacagcctatgtgggcttccacggagtgggattttagtgtgcactgatgtgatggcccggggaat

SEQ ID NO: 427806 - DNA, 51 bp, Homo sapiens
gcagccctcagtgcctgccatggactggatccagagctggtgcggaacatc

SEQ ID NO: 427807 - DNA, 80 bp, Homo sapiens
gcttcgtttaccacttcgccgtccccacagagcaggtgttgccaatgctgcggttcgtgcagaagcggggaaactcaacg

SEQ ID NO: 427808 - DNA, 101 bp, Homo sapiens
cacaccagtggggcagtgcctcgtgtggcaaagcgctccctggcctttcaaagcaagaggactgctgtggaactgtgggtacctcctggggctttaacaaa

SEQ ID NO: 427809 - DNA, 77 bp, Homo sapiens
tctagaatcaactgagagagatgcttaaaaatcaccagttactttaatgagatgttaccaagttgacgccactttca

SEQ ID NO: 427810 - DNA, 50 bp, Homo sapiens
ggcctacttcgtgcgtgagcgagaacatccagtcatggataaaaatgagc

SEQ ID NO: 427811 - DNA, 100 bp, Homo sapiens
gctgggagccatcacgcccagctagccatcttctaattttcattccttcaaagattttggaagatggcaaagttcatgacacccgtgatccaggacaacc

SEQ ID NO: 427812 - DNA, 100 bp, Homo sapiens
gagaccagcatccgagagttgcatgagatgttcatggacatggctatgtttgtggagactcagggaaatcctcattgacgattcaatttgttgaaggcca

SEQ ID NO: 427813 - DNA, 143 bp, Homo sapiens
ccgtgcgttgcgttccaaggcatctgtgagcccgcggagtatacaccatgagcaaagctcaccctcccgagttgaaaaatgccatctccctcttctacgagctctcggagaatgacttgaacttcatcaagcagagcaaggac

SEQ ID NO: 427814 - DNA, 95 bp, Homo sapiens
gaacacaggagggctgtggaaaaacttattgaagagcgtcgccaacaattccttgcagacaaaaacctcattaagcaaatgccagagccagagca

SEQ ID NO: 427815 - DNA, 126 bp, Homo sapiens
cctgccggtcgaccccagccagcgcagcgacggggcgctgcctggcccaggcgcacacggaagtgaagttggtgagatggcaaagcagtatatagagaaaagtcttttggttccagaccatgtgat

SEQ ID NO: 427816 - DNA, 98 bp, Homo sapiens
gaaagcattaccgggttcgctaggctcacaggttagtcagtggaccaggctatgtgaactcaccatccctttggctattgagaattttctcagagaat

SEQ ID NO: 427817 - DNA, 75 bp, Homo sapiens
tctttcccaggaaccattggataaggataaaggtggatttgacatggaagtgaaaggttggggtggagaagatgt

SEQ ID NO: 427818 - DNA, 100 bp, Homo sapiens
cttgacaatacaaaaagctgatgaagttgtttgggtacgtgcaagagttcatacaagcagagctaaagagataattgacgaccttgccaacctagtggag

SEQ ID NO: 427819 - DNA, 83 bp, Homo sapiens
gccaagtctcgcagcctgtctgcctcgcccgccctggggagcaccaaggagttcagtgtccttgaatccgacccctactttgg

SEQ ID NO: 427820 - DNA, 119 bp, Homo sapiens
atatattatcagtgatctggcttctgcaagaattattgaacaagatgctgtagtaccttcagatgagaccctttttgctcttcctgctgcatctgagcctgtgatacgctcctctgcag

SEQ ID NO: 427821 - DNA, 75 bp, Homo sapiens
tatgatgggaaatacaaatgaaccaagcacacgtgtccgagtctgaagctgcgttggaccaggaacagattactg

SEQ ID NO: 427822 - DNA, 75 bp, Homo sapiens
gtgggaagaccaagacagtgcctggataccttcgaatagggcaagaggaggaacgacgtagaagagaggaagaga

SEQ ID NO: 427823 - DNA, 98 bp, Homo sapiens
tgctaagcaagtaaacagtgcacttaaacagaaaatggaaggtggaattgaagaattcaaacctcctgagatgcctgtgaggagccaccaacatttga

SEQ ID NO: 427824 - DNA, 98 bp, Homo sapiens
acgtcttgcctgtgtcccacttgttcgcggcctataggatccttgccacggctggaactgacttcgacctgcgaacactgagggctgtgcgtgtgctg

SEQ ID NO: 427825 - DNA, 100 bp, Homo sapiens
tgacaccacagccacccttggtgatgagcctcggaaagtgctcctgcggctgtatggagcgattttgcagatgatgtgggaagaatatcctgatgtttat

SEQ ID NO: 427826 - DNA, 76 bp, Homo sapiens
ataagtcagatgactttctgtgttgcaaaagcttctcatttcagagagatgccaggatcctaagtgcctgccaaac

SEQ ID NO: 427827 - DNA, 90 bp, Homo sapiens
aggagcgggactgagagcgcctggaggctcgagcggagggagactacctaggtggagaagcgtactgggccggcggcctgcacctctaca

SEQ ID NO: 427828 - DNA, 90 bp, Homo sapiens
atcgctgtctgtggtcactactgtgtggggagttggcaacgcgacacagagccagccagctgaggtgggtgtcctggttggcaaagaccg

SEQ ID NO: 427829 - DNA, 90 bp, Homo sapiens
cctgtatccctgcaagactgcgttggaaagactgaagagggccttctgctgaagggccacagaggaacaccaggctgggatggattcagg

SEQ ID NO: 427830 - DNA, 100 bp, Homo sapiens
accagccaagcagttacagatcccacagcagctgatttgaataggatgcacagacaaaatatagatgcctaccataacccagatgcaagaacatatgaag

SEQ ID NO: 427831 - DNA, 80 bp, Homo sapiens
catttctactggacttcatgcttagatacatgtataacaagtttgtgaagtgtggatatgcaggctctaactttccagaa

SEQ ID NO: 427832 - DNA, 100 bp, Homo sapiens
actagaagaagtgcgcaggcgagaagacagcatggctgacaactcacagcatttgcaggggtgctacatccattgtgtacagatgcaaacagaaggggac

SEQ ID NO: 427833 - DNA, 75 bp, Homo sapiens
gtaaaaaccttagtattagcatacagctctgcagtttccagcaaaatggatgatgccaataatgacccacagtgg

SEQ ID NO: 427834 - DNA, 75 bp, Homo sapiens
aacccaaacaacatctcctgctattccttgggctgcctttcctgcagctgctgcagaagaatattttgcctgctg

SEQ ID NO: 427835 - DNA, 82 bp, Homo sapiens
ccccggtgcagtcgggcctgcccggcatgcagaatgcctgttattaaaccagacatagccaactgggagctctcagtaaaat

SEQ ID NO: 427836 - DNA, 82 bp, Homo sapiens
cgcttcgaaatcgcctgctacaaaaacaaggtcgtcggctggcggagcggcgtttggattggatgctgctggcaagacaacc

SEQ ID NO: 427837 - DNA, 73 bp, Homo sapiens
tttgatcgtcttcctcttcagccatccagggtgttgaaagcagcaggggcctagaagacattaaaccgatacc

SEQ ID NO: 427838 - DNA, 80 bp, Homo sapiens
atagaagctgtggatgaatttgcttttctggaaggtgagaattatgaagatgatgacctagtaaattctgatgaggttat

SEQ ID NO: 427839 - DNA, 51 bp, Homo sapiens
gtgcccgagaatagctccgtccagcaggaccctaataggagtattcatacc

SEQ ID NO: 427840 - DNA, 95 bp, Homo sapiens
gggaccgggaccgccgccgccgccgccaccatggaaggagtggaggccctggtgcccggcccttggtgctgagtatccagcaagagtgaccgggg

SEQ ID NO: 427841 - DNA, 100 bp, Homo sapiens
taagccagaagatgattttccagataattatgaaaagtttatggagactaaaaaagctggtggagctgtctaaggctcaagatatagaagcaggagatgg

SEQ ID NO: 427842 - DNA, 102 bp, Homo sapiens
cccgggaggaaggaacgaggcaaggagctaaagcagcgtgcgttcagccctggggcagttgtgaaaaacttcaggacaaaaatgtttcatttaaggacttgt

SEQ ID NO: 427843 - DNA, 98 bp, Homo sapiens
ccgcttgtcattgggaggcgccgaaggtggagaggtcggctcggaaggaaaaggttgctgaaaagccaggagtcaaaatgactgagcgctttgactgc

SEQ ID NO: 427844 - DNA, 50 bp, Homo sapiens
gagctggatccggcttccggaagcttccccgggcgctgcctggacaggcc

SEQ ID NO: 427845 - DNA, 83 bp, Homo sapiens
cccccatacctggcctgccgtctcctggctgctgcttgcatatgtgtagacggggcactgccttcagagcaggtcctgccagc

SEQ ID NO: 427846 - DNA, 100 bp, Homo sapiens
cccccacgtccttcctgatgggctgccatctcgaccacttcgaagaagtcagcaaggacgtagacaagtttggcaacgagatcacccagctggcccggcc

SEQ ID NO: 427847 - DNA, 90 bp, Homo sapiens
ggtttaataatgatagaatgaagaccacaataaaagagacctctacttagctcagcaattcttaccttcacatcaaccccgtggccgcct

SEQ ID NO: 427848 - DNA, 75 bp, Homo sapiens
caaggagctaaagcagcgtgcgttcagccctgggggcttcccacggcacgacatggagacctgtggttgcgaggc

SEQ ID NO: 427849 - DNA, 89 bp, Homo sapiens
ctcaaggttggcgtgggacatcggttggatgcccaggcttctggagtacttggctgccctgaggatctgtgtttggtgaaaaggagcca

SEQ ID NO: 427850 - DNA, 75 bp, Homo sapiens
tctgtcagctctttccccgtcagcatcccagccgtgctcacggacatggatttgattgacatactttggaggcaa

SEQ ID NO: 427851 - DNA, 100 bp, Homo sapiens
gaaaattttggtggagaattatccaacaagaaaaagacctgtggctattaagataggacactgcccatctctaagataagaacctggaaaggggactctg

SEQ ID NO: 427852 - DNA, 97 bp, Homo sapiens
ccactttctcggcgccgcggctcttttctaaaagtgtgctggagaatctggtaaaagcaccattgtgaagcagatgaggatcctgcatgttaatggg

SEQ ID NO: 427853 - DNA, 101 bp, Homo sapiens
ttcctttaataagtgttgcgctggttcaaggttgggcattgggtggaggagcagaatttactacagcatgtgatttcagtatgaagtgtaacagaacagac

SEQ ID NO: 427854 - DNA, 90 bp, Homo sapiens
atttggaaacgcggagtgagtttttccgtgctgtgtaggcctgatcttttggccagaaggagattaaaaagatgcccctcaagatggctg

SEQ ID NO: 427855 - DNA, 90 bp, Homo sapiens
ggcctccaaatgccccaagtgcgacaagaccgtgtacttcgggggggccctcagcctcttggccttgaacgggctgttcatcttgattca

SEQ ID NO: 427856 - DNA, 100 bp, Homo sapiens
gacattatctcatccacagacaaacttggtgaatgtcctatactccataattcccagccagtaagccagcttccttccctgaggcctgaacatcatcact

SEQ ID NO: 427857 - DNA, 100 bp, Homo sapiens
gagcctgcaggacggcgcggcagagtccccgtacgcctacagtaacggacctgaaggagaagaaggagaaggtggaggagaaggcaagccggaaagagcg

SEQ ID NO: 427858 - DNA, 73 bp, Homo sapiens
gaaggttaatgttcttcagaagaagaccattcctcaagaattttgtatccaaggcccaaaagtttgttaccca

SEQ ID NO: 427859 - DNA, 75 bp, Homo sapiens
atttctcctagctgttgacgttggtgctcgtgacctctttatggatgtgtactctggcacacccaccaaggtgag

SEQ ID NO: 427860 - DNA, 90 bp, Homo sapiens
ctggaggagcagttgtctgatgaagagaaggacaagagaatgattcaacgaagaatgaaataaaaattgaaacagaatcgcagagctcat

SEQ ID NO: 427861 - DNA, 100 bp, Homo sapiens
ctgggcacagcaaatgctgaggactcagaccagtctctgcaagaggcgactacgtgcacaagtctgtgtttatcattttcttccaaggcgatcagctgaa

SEQ ID NO: 427862 - DNA, 75 bp, Homo sapiens
aaaatctacaagatgatgcagggaggagatggctctgagagattcctctgcgaatctgtttttagctatcaagtg

SEQ ID NO: 427863 - DNA, 100 bp, Homo sapiens
ctgggatccagtacgagttgaatcattgttcaaataaggattctggactctacttataatatccctaactgctggattctcctgttgcagcttttcttgg

SEQ ID NO: 427864 - DNA, 83 bp, Homo sapiens
cggcatctttttgaaccaaattatgctgcaaatcaattctgtggtgttcttggtcacacatttatggagtttctgaagggcag

SEQ ID NO: 427865 - DNA, 83 bp, Homo sapiens
ctcggagcgcggtccctgtattggtctcctgctcctagagggtatttgaagtataccatacaactgttttgaaaatccagcgt

SEQ ID NO: 427866 - DNA, 75 bp, Homo sapiens
aggcgacgccggagagaacgaagcctcggctgggagcgattttctaccctagcaaggatggtacgaagattccaa

SEQ ID NO: 427867 - DNA, 75 bp, Homo sapiens
gagaatctcatacacctgtctctattcaggaagagataggccgctttgtagttcagaatgtttctgcacagaaag

SEQ ID NO: 427868 - DNA, 75 bp, Homo sapiens
gagtccggacatctgaaacttgtaatgatgtagacatggaaacagatcactactccaatggagttggagaaactt

SEQ ID NO: 427869 - DNA, 98 bp, Homo sapiens
ggggccactgcactgggtgattcacgtgtgcccaggccctgaggtgggccggacctgggagtggcaggggagctcatattgatgtacgtaacaagaag

SEQ ID NO: 427870 - DNA, 75 bp, Homo sapiens
gtccgagaaattataggtgatgaactagtccagagaagatggcgaattagaagatggtgaaatagacgatgcagg

SEQ ID NO: 427871 - DNA, 100 bp, Homo sapiens
aagaagaccattcagatgggatctttccggatcaatccagatggcagccagtcagtggtggaggaacgtcaaggtcgtgggaaataaaaggcagttctac

SEQ ID NO: 427872 - DNA, 83 bp, Homo sapiens
cgagcacaacaggagctacgaggagttggttatggaaacaaaggacatgctttacatcgtcactgaatttgctaaaaatggag

SEQ ID NO: 427873 - DNA, 74 bp, Homo sapiens
ggagaaaatcagaagtacagttttatctagccacatcttggaggtgtgtgtaactggtgtgtgcaccgtttcga

SEQ ID NO: 427874 - DNA, 82 bp, Homo sapiens
aacaacgatggtgaaaagggtcctcctgctcacagtgtgaataacagagacggtctcgccacattgcccagactggtctgaa

SEQ ID NO: 427875 - DNA, 51 bp, Homo sapiens
gcgagacagtgcctggggaacatcagtttggggattctcagcagttgcggc

SEQ ID NO: 427876 - DNA, 100 bp, Homo sapiens
caacactacaagctatacgagtttatgttctactctgccagggaagaaattgtgataggaactgaggctgctggtcttggtcgtatgaagccaaacacac

SEQ ID NO: 427877 - DNA, 88 bp, Homo sapiens
agaaactacattttagtcgtccacagacgcagacaagatccaaagtgaggtggagactgttccagaagcaggacgacatgaagagctt

SEQ ID NO: 427878 - DNA, 75 bp, Homo sapiens
gtgtggtcgcgtctcggaaaccggtagcgcttgcagcatgcatcctgaggttagcattacacttctcccagtgga

SEQ ID NO: 427879 - DNA, 100 bp, Homo sapiens
cattcttccacttcctcagaatgtgaaggattatttactcgatgatggaactctggtggtttcaggaaggtttccacttcaagcgtgacccttttgcctg

SEQ ID NO: 427880 - DNA, 133 bp, Homo sapiens
cccaacacacggtccacagctcatcatgatggacttggagctgccgccgccgggactcccgtcccagcaggattttttatcaagcagaaatgcatcgaacaacgagaatcaagatcactgagctaaatcccca

SEQ ID NO: 427881 - DNA, 89 bp, Homo sapiens
gaaaaaactactaggatcacgcggcatgtattgaggggttatggttttgtgaaattcacagatgaactggaacagaagcgagccctgac

SEQ ID NO: 427882 - DNA, 102 bp, Homo sapiens
agcatgtcggtggcggggctgaagaagcagttctacaaggcgagccaggtttttagaacttcagccataaaaatgggcagaattttccttgatcatatcggt

SEQ ID NO: 427883 - DNA, 97 bp, Homo sapiens
tgggcctgcgggaggacctgctgcggggcatctacgcttacgagttagcacgacatcagtatgagctggtcaccttccctgacaacgcagacatgtg

SEQ ID NO: 427884 - DNA, 100 bp, Homo sapiens
ccgtgttcccctgaccctcctagtgcacaacttggccgggctcactgggctcctgcaccactgcctgtcagcacagtccagaagcgtgagctggtgaatc

SEQ ID NO: 427885 - DNA, 97 bp, Homo sapiens
cccttgttcccccaaatgtctgactctgactctcggactgagaaacgcaaggttgacatcatggacatatgtgagtccatcctggagaggaagcggc

SEQ ID NO: 427886 - DNA, 83 bp, Homo sapiens
cgctggtgcagccaccctcgctccctctgctcttcctcccttcgctcgcaccatggaatggcatcaccagctgccggatgcgg

SEQ ID NO: 427887 - DNA, 83 bp, Homo sapiens
gtcaatggtcagatattgaagagttctgcaatcgtgtgagttcttgatacgaatgaaaggccaagagtttgttgatgagattc

SEQ ID NO: 427888 - DNA, 75 bp, Homo sapiens
accgagatgtgatgttggagaactacaggaacatggtcttgctggagtgcttgtgcacagagctcgaaaactagc

SEQ ID NO: 427889 - DNA, 85 bp, Homo sapiens
aaggaagaatttgaaaaagccagtatggatgtggctaaagaattacctccaaagccattgtcaagaccacagcagtcatctgcac

SEQ ID NO: 427890 - DNA, 98 bp, Homo sapiens
tgttcgcctgctccaagtttgtctccactccctccttggtatcgaaggatgatcgcagtgatgtggagagcagctcagaggaagaagatgtgaccacc

SEQ ID NO: 427891 - DNA, 83 bp, Homo sapiens
tgggatcccgctgtggtacttctcgcagtccccgcgcgtggtcatccagatcatggaagggaagtggttgctgtgtatgttac

SEQ ID NO: 427892 - DNA, 96 bp, Homo sapiens
taccaacttaaaaaacagttttgcctcagcccttcgtgccctgtctctgcccctggtggtcatcgtccatggcaaccaagacaacaatgccaaagc

SEQ ID NO: 427893 - DNA, 98 bp, Homo sapiens
gaaggactcctgaaccagctcgtcctggagcacctgcagctggcgcctctgcagtgggggagagcgaggcctggatggattccctgggaagcctgggg

SEQ ID NO: 427894 - DNA, 100 bp, Homo sapiens
ggggacaagaaactagagcaaataaccgttttgaaattgtactttggaagttcgtcttatgggctgccaagatatcctagagaatgtccctggacggtca

SEQ ID NO: 427895 - DNA, 75 bp, Homo sapiens
ctccactccgtcccccgcgggtctgctctgtgtgccatggacggggacccagacatggagctgcgggaagaagcc

SEQ ID NO: 427896 - DNA, 83 bp, Homo sapiens
ctatgatcccacatctggaatctggaatgaaatcttccaagtccaaggatgtgatgtgggtactgccattgtttcagatacta

SEQ ID NO: 427897 - DNA, 75 bp, Homo sapiens
aaaatcctaggagaaacctaagctacctctacccagatggaaagacccacaacccagacctgactgagctcggcc

SEQ ID NO: 427898 - DNA, 88 bp, Homo sapiens
aaatagaacttccaactactgtggatgacgtagtagatgaaagtgatgacaacgatgatattgatgtagaagctgaaaacgaaactga

SEQ ID NO: 427899 - DNA, 83 bp, Homo sapiens
tgggctacgcgtatgtgaacttccagcagccggcggacgacaatgcagatcttcgtgaagactctgactggtaagaccatcac

SEQ ID NO: 427900 - DNA, 82 bp, Homo sapiens
caacatcgaccacaagttccacaggcacctcattgggaagagcggtgccaacacactgctgaagctgtactacaggaaatgg

SEQ ID NO: 427901 - DNA, 98 bp, Homo sapiens
ttattgctgaggcagttggaagttatgacaccatggatctcttcaggcacactacagaactaaatatgcatcttcgccgacacgaggtgaccatctgc

SEQ ID NO: 427902 - DNA, 98 bp, Homo sapiens
ccgcgaggaggcgcgggaggtgttcgagaacgaccccgagacggagaaccaggtgcatcagcgcattgcggagctgaggaaagcaggtctgtggtccc

SEQ ID NO: 427903 - DNA, 99 bp, Homo sapiens
cgactaccaccgcagcgacgagcagtgtatatgaagtgggtttatggtttaaagcaagacgtgggaatgaatttgatcataagaagtccttggagaagt

SEQ ID NO: 427904 - DNA, 101 bp, Homo sapiens
atcacccaccaacaacaccacaataatccacagccaagacaacatctggggaagatgtacgagacttcacaaaggtacttaagaacaagttcaggtcgaag

SEQ ID NO: 427905 - DNA, 98 bp, Homo sapiens
ctgggccatcgccagcgacgacttggtcttcccagggttcttcgagctggtcgtgcgagtgctgtgggtgtacaactatgagcctttgacacagctca

SEQ ID NO: 427906 - DNA, 100 bp, Homo sapiens
aaaacggcaaagttgttggctggtacaccggctggagagcagacaggccttttgccatcgacatggcaggtgttttggggaacgagtttagtatattaaa

SEQ ID NO: 427907 - DNA, 100 bp, Homo sapiens
cagcattctatcatggaaggaggagatgaagggcaagggccaaaatgatggtattcagcatgtttttggagactctagtggatttcatacaagtccacaa

SEQ ID NO: 427908 - DNA, 101 bp, Homo sapiens
gtctgcgttgctcttgcttttcctcgctggggtgtacggccgagacgcatccagagctttcgtgaccggggactgttctgaagcaggcctcgtggatgacg

SEQ ID NO: 427909 - DNA, 50 bp, Homo sapiens
caaacaggccatgttccactatttccaggctgtctgtccccagaccccag

SEQ ID NO: 427910 - DNA, 100 bp, Homo sapiens
agggctcttgcaaggattcaaggaataatgtatttgtggccttggacatgaggcagtcagtcctctgttgctgttaacataaggtcagggactgatgagg

SEQ ID NO: 427911 - DNA, 100 bp, Homo sapiens
gccacgggccccccttgtcccctgccatccgggtgcaggaggtggcgtggaagctcagctccaacaggtgccagctgctgcccgtgctggtgccattgcc

SEQ ID NO: 427912 - DNA, 83 bp, Homo sapiens
aaagaagattgtctatcatgaaggagaactgtcaagtaatccacctctggctaccatccttattcctcctcatgctcggattc

SEQ ID NO: 427913 - DNA, 75 bp, Homo sapiens
tgtttgaacaaactcgaagaacagctgtggaaagaagttgcaaaacactggcagcaaaccctctgctttgctcca

SEQ ID NO: 427914 - DNA, 75 bp, Homo sapiens
ttacatccttgctgaattcaggaggattggaggagccatacccactgtgttctcgtactttgctgaagtcctggc

SEQ ID NO: 427915 - DNA, 82 bp, Homo sapiens
atcacagcaacaaagagagaaacagcagcaacatttttgaaaaaggtccggcgccagctgccagtcgaggaaccgaacccag

SEQ ID NO: 427916 - DNA, 90 bp, Homo sapiens
acaggaggcaccttggataagctggagtctattcctggattcaatgtcatccagagcccagagcagggttgctcatcacccatggtggta

SEQ ID NO: 427917 - DNA, 51 bp, Homo sapiens
aagagggtgtccatgattctgcaaagcccttgttctaagaacggaagcatc

SEQ ID NO: 427918 - DNA, 75 bp, Homo sapiens
aaatcttccaagtccaaggatgtagagctagcaatctagagaatagtacctatgacctgtacaccatccctaaag

SEQ ID NO: 427919 - DNA, 101 bp, Homo sapiens
ggaagagggattataatttggtgctgtttgtagagatgacaacactgataaaatccactcattgctggtctcctaaaaacccagaacagaagatcattaag

SEQ ID NO: 427920 - DNA, 96 bp, Homo sapiens
ttcttgtcctcaagtgatcctcccaccttagcctcctaagtagctgggaccacagaaccgagagctgcagatcatgcgtaagctggaccactgcaa

SEQ ID NO: 427921 - DNA, 100 bp, Homo sapiens
atgctgcccggtttggcactgctcctgctggccgcctggacggctcgggcgctggagatattctctaagccgctttcatcatgggagaaatagagcagag

SEQ ID NO: 427922 - DNA, 51 bp, Homo sapiens
agaagcttgggctcacttccacaaatcaagcgagacattgagttgctgctg

SEQ ID NO: 427923 - DNA, 59 bp, Homo sapiens
aaacaactcctgagtatgttcacgatcggggtcaggaatatattaaaggaatctgtgaa

SEQ ID NO: 427924 - DNA, 83 bp, Homo sapiens
ccgccgcttaccccggggtctatggaagtaatggaaggacccctcaacctggtggaagttaaacgagctgagcctcgggacag

SEQ ID NO: 427925 - DNA, 100 bp, Homo sapiens
ccagagctatgtgtgcgcgctcattgccatgatggcccgaatggaagtggatgcagatggaaatggtgctaagatatttgcctatgcctttgacaagaac

SEQ ID NO: 427926 - DNA, 100 bp, Homo sapiens
tgggatggatcagctgtgaaaaactctttggatgattctgccaaaaagcaatggccaatgtacatggtggactatgccggcctgaacgtgcagctcccgg

SEQ ID NO: 427927 - DNA, 74 bp, Homo sapiens
gtccagaccctgctgctgtcttcaaagaagaacaactctgctcatggtgattacatgcaaaataacgagagcag

SEQ ID NO: 427928 - DNA, 114 bp, Homo sapiens
gagggattgctactgcacggtgaacctggaccaggaggaggttttcaggaccaaaattgtggaaaagtcactctggtttatggagaagggctgttgctaatgctaaaagcattg

SEQ ID NO: 427929 - DNA, 75 bp, Homo sapiens
ggcgccgggagctattgggacctgcggacatatggcatccaggagaaagatgtcttgccccttctccagataatg

SEQ ID NO: 427930 - DNA, 108 bp, Homo sapiens
tggtggtgcaggcgctgcgccgcaacgccgagcgcaccgacatctgcctgctcaaaggtgagaagccctaccactgcaactgggacggctgcggctggaagtttgcgc

SEQ ID NO: 427931 - DNA, 74 bp, Homo sapiens
tgcacctcccgcgccgcacggtggacgagtattctaccttgtaaatactgttatttgtatatactgtaaatgat

SEQ ID NO: 427932 - DNA, 75 bp, Homo sapiens
ctggctacgaatacgtgagcccggagcagctggctggctttgataagtacaagggtatgagtattatagaacaat

SEQ ID NO: 427933 - DNA, 50 bp, Homo sapiens
gtttccagataagcgctgtttgcatagagcactccgctggtccaggcggc

SEQ ID NO: 427934 - DNA, 88 bp, Homo sapiens
ctgcatggagcccggccgcggcagcgcctctcctccgcgggatccgcggggtcttgggcgtctttggtactggcttttttaggggtct

SEQ ID NO: 427935 - DNA, 100 bp, Homo sapiens
tgatgtggcagactttgctccctggcaaaagttcttagcatgataatcaacgcagcctacaagcctggaagggtattaagagaattacagctggtagaag

SEQ ID NO: 427936 - DNA, 83 bp, Homo sapiens
gccgagcgcaccgacatctgcctgctcaaaggtgtcgtgaaaactacccctaaaagccaaaatgggaaaggaaaagactcata

SEQ ID NO: 427937 - DNA, 100 bp, Homo sapiens
gttttatattgctctggtattcatgccaaagacacaccagccctcagtcactgggagaagaacctctcataccctcggacttgcaccttcgagatcccct

SEQ ID NO: 427938 - DNA, 75 bp, Homo sapiens
caaaacgctggggccaagtcagcgaggcctacgtgagcctcctagatgactgccaggggcatgaaggggatgtgc

SEQ ID NO: 427939 - DNA, 100 bp, Homo sapiens
ggaggcggcagcggcgggcctgaggcgaaggagcggccgggagcccgccgcgctggtagcgatggcccactgcgtgaccttggttcagctgtccatttcc

SEQ ID NO: 427940 - DNA, 100 bp, Homo sapiens
cagcaagaagaagagcccagctagcaccttcgccctctccagccaggtacctaatgagtccctggaacgccagatgcgtgaaatggaagagaactttgcc

SEQ ID NO: 427941 - DNA, 99 bp, Homo sapiens
cggctgggggtcgccggggtcgcgggccgggcctgcaggagccgggccgccgaggtcgggagtgtattgaagaagagggaccaagttcaagcagagtat

SEQ ID NO: 427942 - DNA, 100 bp, Homo sapiens
ccgccattgagttgggtgaagagacctgcactttccgcatctatggggagaaaatgtggacacagacttgccaggcagcctggggcagagtgaagagaag

SEQ ID NO: 427943 - DNA, 80 bp, Homo sapiens
ccaggcacagctcctgagcactcatgaccagccctccgtgcaggccctggcaggtgagaagccctaccactgcaactggg

SEQ ID NO: 427944 - DNA, 99 bp, Homo sapiens
gccttccttctctgcagcttccccgcaggcccacggatgacagtaaccagcccccgggccggggtgtcctctccatgcatggactgacctatggggtca

SEQ ID NO: 427945 - DNA, 89 bp, Homo sapiens
acagctcatcatgatggacttggagctgccgccgccgggactcccgtcccagcagcttcgagagctgtgcccaggagtgaacaaccagc

SEQ ID NO: 427946 - DNA, 101 bp, Homo sapiens
caaacgtctacactgtacatgctttttattacaagactacggagcataggaggaaaattcatcatctgggcaattgaaggaacagactaaaaatcgtgtcc

SEQ ID NO: 427947 - DNA, 100 bp, Homo sapiens
acatttctgtcttccttcctgggtcagtgattcccggaccctggaagagaagagggtggctaatgattaagatatcagttttagagaatgtggcgtggag

SEQ ID NO: 427948 - DNA, 100 bp, Homo sapiens
gctggagacatgagcaagaaaagcctctgggagcagaagggaggctccaagacctcatcaacaattaaggaatggttccccaaggtgaggccaactttgc

SEQ ID NO: 427949 - DNA, 76 bp, Homo sapiens
cttctcatggcaatcgagttgagtacttggatagacttatacctcagaatctacctgttactcgtattttggacaa

SEQ ID NO: 427950 - DNA, 96 bp, Homo sapiens
caagtttttggaaatggtcctgttactccagagaaaattgagcagctcagtctcaaagaagatggagcaggaaccccctatgacaaggaatccaca

SEQ ID NO: 427951 - DNA, 100 bp, Homo sapiens
gcggattctacattgcctccggagactcggtgaaatacctggagtgctcagctctcacccagagaggcctgaaaaccgtgttcgacgaggccatccgggc

SEQ ID NO: 427952 - DNA, 99 bp, Homo sapiens
gaagaatagagccataaagaaagcaaagcgcagaaatgttggatttgaagtgagcacctgcggatctgtccccagggctacacctgctgcaccagcgag

SEQ ID NO: 427953 - DNA, 83 bp, Homo sapiens
ctccactccgtcccccgcgggtctgctctgtgtgccatggacgggtggcctgtgagtacggcatggtgcacgtggtctcccag

SEQ ID NO: 427954 - DNA, 88 bp, Homo sapiens
cgccacctgcaagagcctgcagcagtcgcttctccgcagcttcgagagctgtgcccaggagtgaacaaccagccctacctctgtgaga

SEQ ID NO: 427955 - DNA, 75 bp, Homo sapiens
agcgaataaagtttatcacgccgggtatgctcaggcttcagaagaggctcgcctctagtgtcctccgctgtggca

SEQ ID NO: 427956 - DNA, 100 bp, Homo sapiens
actctgtcgctcttgtgccctagcaccccgagaaccgtcagtttgagccagatggaagatgatccctatgatcttgaagatgtttctgcacagaaatgag

SEQ ID NO: 427957 - DNA, 82 bp, Homo sapiens
cgcctcgcgccggctgctctttccggggcgtgatggtgggcatgggtcagaaggattcctatgtgggcgacgaggcccagag

SEQ ID NO: 427958 - DNA, 100 bp, Homo sapiens
cagtcatatcatttggatcaaaaaatagaacaatcggagttgcagccaaaaatcagaaaactctctgcagaggaattagagcgaaaacggcaagagatga

SEQ ID NO: 427959 - DNA, 75 bp, Homo sapiens
cggccgggggacgagctcggagcagcagccaggcattcctgcatcgcatccggcagaacgtggccgactcagtgg

SEQ ID NO: 427960 - DNA, 50 bp, Homo sapiens
ggcagttcaagcactctgagaagtcagaaaaagtggacagggcagtgctg

SEQ ID NO: 427961 - DNA, 75 bp, Homo sapiens
aaaagaggctccattgtctctaaattgctggcttccatgatgtgcaaagctgatacaaactggactctcaggaca

SEQ ID NO: 427962 - DNA, 83 bp, Homo sapiens
gccccagccggaggtccagagatcctgagagcccgagcgcccagcgccgcgccgggaggttatgaagacagtatggagtttcc

SEQ ID NO: 427963 - DNA, 90 bp, Homo sapiens
gcctcccgagaagctgggattacagggaaatgaagaatattgatccaaaagcagcagatacaaaaaaggcaaaccacatgttcatcccac

SEQ ID NO: 427964 - DNA, 80 bp, Homo sapiens
ctgtattggtctcctgctcctagagagtatcctgagctccagctggaccctaaattggatcctcttcctgctgagagtcc

SEQ ID NO: 427965 - DNA, 50 bp, Homo sapiens
gtccacaacgccgcttcggggctcctaggcatagaatgtcaagctaacca

SEQ ID NO: 427966 - DNA, 80 bp, Homo sapiens
gccctttggttcacaaaccaggatgttcctccacgaagttgccagggcctgtccagggggatatgagactttctactcgg

SEQ ID NO: 427967 - DNA, 88 bp, Homo sapiens
agtcgctggcccgagttagaggccagctgagaagtcttcgtgcttcagtaaaccctgtgagcatctccaaggcactgaggacaaaaat

SEQ ID NO: 427968 - DNA, 100 bp, Homo sapiens
cagccaagttccccaacggctccccgtcgtcctggtgctgcagcgtttctctgcaggtggatattgttcccagccagggggagatcagcgttggagagtc

SEQ ID NO: 427969 - DNA, 90 bp, Homo sapiens
catcaacgagaatttaaaccttacgtggtacgactagcaaaacttcttcggaaaagagcaaagagcgttatccagactagcgagtgggag

SEQ ID NO: 427970 - DNA, 100 bp, Homo sapiens
cgccaagcataatatgtatgccaaagcagcagccttctcgacagccttttactgtgaacaggtttctgaaggattgtcattcttgcatagcagtgtgaaa

SEQ ID NO: 427971 - DNA, 96 bp, Homo sapiens
gcggtgacgacaggcagcaaaagaccaggaggctgtaggagtgcaattggaacctgagcgcttggtcaagatcctagaggtgcttcgggaactccc

SEQ ID NO: 427972 - DNA, 90 bp, Homo sapiens
ctctggctcaagttttcacttatcatctattccaccgtgttctgggctggacaacgttcatggctctcgggtagaacctagtgaaacggc

SEQ ID NO: 427973 - DNA, 100 bp, Homo sapiens
tatctggaaacgggcattgcctgcgaggctggccgagaaatcccgtgagtctccccaggacagtgctatcacccgggatattaaccgaacattcccagcc

SEQ ID NO: 427974 - DNA, 100 bp, Homo sapiens
ccgccagagctgcggccgccaagtgatgtcttggttcgtgtccccactgctttctggaattatgtctggaattttattcttcctggttcgtgcattcatc

SEQ ID NO: 427975 - DNA, 49 bp, Homo sapiens
agctgaaggatgaccaggtcaaaaagcgggcctccccttcctcatcatc

SEQ ID NO: 427976 - DNA, 100 bp, Homo sapiens
gggttcggtgcgtgccccgacggggcgcgcgcgaagcgagcgagaaggcacggagtcgccgcggagcgcaggtatcgagaaccttccctgcgaacttcag

SEQ ID NO: 427977 - DNA, 100 bp, Homo sapiens
gcagcagcagcagcagacacaagtggctgtggcccagggttaaagcacgaattgggagctctcagcgacatcaccagtcagcagccaaagacctaactca

SEQ ID NO: 427978 - DNA, 98 bp, Homo sapiens
cctacgtcagtaacagccaccaagcctcttatacctagaagtcccacaagcagcgttgccacgccttccagcaccatcagtacacccaccaaaagaga

SEQ ID NO: 427979 - DNA, 101 bp, Homo sapiens
ctcgtcggcggcgccctgcaccgcgcctcgcaaaactgggactcttcaattaatctgacatttcacaaatccaaaattgccgtggatgaactctttacttc

SEQ ID NO: 427980 - DNA, 100 bp, Homo sapiens
ccagccaagtgaataggtcagagaagagaggtgtcatggagaaactccagctgggcccagagattctgcagcgggaaaatccaaggcttatttatgccag

SEQ ID NO: 427981 - DNA, 75 bp, Homo sapiens
gacctgctaacagaactggaccttttcggccactttggagttgtctaccacggagaatacatagaccaggcccag

SEQ ID NO: 427982 - DNA, 96 bp, Homo sapiens
gtctcaatatctgtcttcggtggactccttcggcagtccacccaccgccgccgcctcccaggcgccatgtcagaaccggctggggatgtccgtcag

SEQ ID NO: 427983 - DNA, 100 bp, Homo sapiens
cctccacgtctggaataatgggtactctttcctcgtggaatttgaagattctacagataaatcaggcaaatacgccatgcgagacctagtccacaggctt

SEQ ID NO: 427984 - DNA, 50 bp, Homo sapiens
gcactattttggattagtcaattgctgggattacaagcgtgagctaccac

SEQ ID NO: 427985 - DNA, 100 bp, Homo sapiens
ttgattaccgtcgatatgcagaaacactctttgacattctggtggctggtggaatgctggagccactccatccccaaattcaagattagaaagatccctg

SEQ ID NO: 427986 - DNA, 75 bp, Homo sapiens
acagccggggccttcgtgagaccggccaagtcctgtatctgccatgtctgtggcgtccacctcaacaggctgcat

SEQ ID NO: 427987 - DNA, 87 bp, Homo sapiens
tagaaaagcagaggctatactttaagactgtgaaagagttcaaggaggtaaagtaccttttattcatgtgggaaatcaagtagtatc

SEQ ID NO: 427988 - DNA, 83 bp, Homo sapiens
ctgtctctgatccgcaagcatgctcagaccttcattgctctgtgtgccaccgttggttgaatctggcgatgtggaacccatgg

SEQ ID NO: 427989 - DNA, 101 bp, Homo sapiens
caagacccagggggctgtcgcccgaatgcaggaagaccgtgatgggagctgcagcacagtcgggggtgtaggttatggggaaaaggagaacaacttcccgc

SEQ ID NO: 427990 - DNA, 83 bp, Homo sapiens
gttcttgtttgtggatcgctgtgatcgtcacttggtacaccaggggttggaaaaaccacactaggcaaagaacttgcgtcaaa

SEQ ID NO: 427991 - DNA, 75 bp, Homo sapiens
ggcatcatagttgtgtatgatgtgacagatcagccgagcctcttgaagccattcttacagatgatgaaccagacc

SEQ ID NO: 427992 - DNA, 82 bp, Homo sapiens
acctaaatcctggatggaagatagcttgaacagggctgacaacatttttccttttccggtggagtacatcctgctgcttcaa

SEQ ID NO: 427993 - DNA, 100 bp, Homo sapiens
gcggatgccctgcagtacctgcagaaggtctctggagacatcttcagcaggttttaagctctgcagcgtcactccctggctctgaactcccctcctccag

SEQ ID NO: 427994 - DNA, 100 bp, Homo sapiens
ctccccagctggtggctggagcgaccccttgttctttggtggcgctgttggttgaatctggcgatgtggaacccatggatatggagggctgactatatac

SEQ ID NO: 427995 - DNA, 96 bp, Homo sapiens
gattttaagctggcaaagtgggaaaaataaagtgttgagtaaacagaccaagttggaagcatcagatggtgaaggagaaggagacacagaagtgat

SEQ ID NO: 427996 - DNA, 100 bp, Homo sapiens
gtggaaaagaaggagagagaatactctgaacagctaatcgataatagctcagaggacgaatcaaaatgggtagaagaactcatgaagatgcacacagcta

SEQ ID NO: 427997 - DNA, 100 bp, Homo sapiens
agattggcaatccagtgccctataatgaagccttttccgaaacagagcagacaaagttggcgatgctgtcggggattctgctgggcaatggcaccctgcc

SEQ ID NO: 427998 - DNA, 83 bp, Homo sapiens
agaattgggagacatcagtaagcttgccaagtttgacggaactgtggctgcaccatctgtcttcatcttcccgccatctgatg

SEQ ID NO: 427999 - DNA, 101 bp, Homo sapiens
gatcactacaatttctagctttgtaggagcatggcttggagcacttcctattccactggattgggaaagaccatggcaggaatgttacgttcataacttac

SEQ ID NO: 428000 - DNA, 98 bp, Homo sapiens
ttaatcctgaaagccatgcagcggagctctgagctcttcaccctgacctatggtgccctggtcacccagctatgtaaggactatgaaaatgatgaaga

SEQ ID NO: 428001 - DNA, 82 bp, Homo sapiens
aaggaaccactcattcacttctagacgacaaaatgcaaaaaaggaggccaaagactttgatctgaagaagctgaagaaaaac

SEQ ID NO: 428002 - DNA, 108 bp, Homo sapiens
tcctcagcgcgacgtcgtgtcgagttcccaaaaagctccgcaggggctgtagggagattcgagtgagggttgaaaaggatccagaacttggatttagcatatcaggtg

SEQ ID NO: 428003 - DNA, 74 bp, Homo sapiens
cgccaactcggctgctctgggggattcgtgcgcggtccttgaatgggcaagagggcacatgaagtacggcgtcc

SEQ ID NO: 428004 - DNA, 83 bp, Homo sapiens
ccagcaccacgagcctcagcttcacctccatgggcatcaacatggctgaaggggatgctaagggagataaagcaaaggtgaag

SEQ ID NO: 428005 - DNA, 74 bp, Homo sapiens
cgacaccggataaaccaaagacagcatctgagcacagaaagaccatcttgattcaaaacatctatcgtaatccc

SEQ ID NO: 428006 - DNA, 80 bp, Homo sapiens
gtggaaaggatggcccccaaaaaatgagccgtcagactgctacagcattacctaccggtacctcgaagtgtccaccatcc

SEQ ID NO: 428007 - DNA, 75 bp, Homo sapiens
ctgcctccgggcacacccggctccccggacgcctcggctactgcagcactggggtgtcagttgttggtccgaccc

SEQ ID NO: 428008 - DNA, 96 bp, Homo sapiens
ttgctgtaaaaaatttcaggattggtactacaagctctctggtggctgtgagctgacagtggtgatccatgacttcaccgcttgcaacagcaacga

SEQ ID NO: 428009 - DNA, 96 bp, Homo sapiens
tggatgaaatgaatcatgattttcaagctcttgcattagaatctcggggaatgggagaggtagtaaacctattgatggcaattttgctgactgtgg

SEQ ID NO: 428010 - DNA, 86 bp, Homo sapiens
tatatttggtgtcctgtaaaatcacagattatggtagtgacagctactgaaacacttgccttagggatccacatgccatgcaaatc

SEQ ID NO: 428011 - DNA, 50 bp, Homo sapiens
caaaacgctgattaaaagaagcacgtttcagctgtgagttcaacatggag

SEQ ID NO: 428012 - DNA, 50 bp, Homo sapiens
ccgaagtacagaaaccatatttacaggtccagagccaaacccgtcactga

SEQ ID NO: 428013 - DNA, 74 bp, Homo sapiens
agttttaccgtgacaagaagtacgaggaagtgaggtaactaggatttctacctcaaccgcgagacctatgcaag

SEQ ID NO: 428014 - DNA, 100 bp, Homo sapiens
ggtccatcagtcttctggagccctccttggagctggagagcacctcagagaccagtgacatgccagagggtgattctgggggtccacttgtctgtaatgg

SEQ ID NO: 428015 - DNA, 82 bp, Homo sapiens
tcgaatccctcacgcgggcgcggatcgaccggagcagagagctggcgagcaagcgccgtgccgtccctgcagtgacaccgag

SEQ ID NO: 428016 - DNA, 75 bp, Homo sapiens
gtgacaacctgtaccttctccaagcagcataatcaccagcaacacccgggacaataatacgggggccacctaccc

SEQ ID NO: 428017 - DNA, 97 bp, Homo sapiens
atttgttaaggattccaagtaactcttatttggtggcgacatgtctaagaatgtgagccagtcacagatggcaaaattgaaccaacaaatggccaaa

SEQ ID NO: 428018 - DNA, 100 bp, Homo sapiens
ccactgtcgtttttcagtgcgggaccggcaaccgtagctgctgccgaccggtccaaatggcacattccgataccgtcggatggatcttctcctgaactcc

SEQ ID NO: 428019 - DNA, 75 bp, Homo sapiens
ctggggctatcttaggctggccattcagtgcagctcttggataggagcatgctgctatgtggaatgttcagcttt

SEQ ID NO: 428020 - DNA, 74 bp, Homo sapiens
ggcgacggcgaccatagctctcgtgtttgagaagtcccccctgcgggtgaagaacttcgggatctggctgcgct

SEQ ID NO: 428021 - DNA, 83 bp, Homo sapiens
cgaattaattgcatccctgaccagccgccaacaaagatatcaaagctcagctctttgaaacatccagcaagacaggccagagt

SEQ ID NO: 428022 - DNA, 100 bp, Homo sapiens
ttgaggaaactgaggaaagaggctgcagcgaggaaaggtcatgaacaacactgaagaaacgtcaaagtgaaccaaatcattgtttttattttacaaaggc

SEQ ID NO: 428023 - DNA, 50 bp, Homo sapiens
cagggcacgtcactgcaggccaggaaatggaagttccagtattaccgaaa

SEQ ID NO: 428024 - DNA, 89 bp, Homo sapiens
aggagggctctgatccccccctgccggggagggcccagcgcatccgacaggaagctcttcgtgggcggtcttgactggagcacgaccca

SEQ ID NO: 428025 - DNA, 89 bp, Homo sapiens
catgggcagcgcccgcgccccgccgctgagccgtcgcggagccgcgcagccctcggagcacggcctcatgcattgtgcgtcagcagcaa

SEQ ID NO: 428026 - DNA, 83 bp, Homo sapiens
cccccccttccccacgcaaccccagatccatttacactttacagtatgaggatacatgggctgcacttcacagaagagccaaa

SEQ ID NO: 428027 - DNA, 78 bp, Homo sapiens
agcacaagagcaccatactttgaggtttcaggtgaaccaagattcccgagccatctttttctggaacagcgaagtccc

SEQ ID NO: 428028 - DNA, 100 bp, Homo sapiens
ttgggggagcacgattggatttgccgaagattaggaagaatccactgatagaaatcatttccatcaataccggcacaacctccaagagggaaaacatttc

SEQ ID NO: 428029 - DNA, 100 bp, Homo sapiens
ctggacatggaaccccagggctgcctggtggctgagctttgcttgtgccatctgcccccatcgaccggtactggacaccctggccatgctgactgcccac

SEQ ID NO: 428030 - DNA, 51 bp, Homo sapiens
accaaattgtcgccattaagaaaatttattcctgacgacattgaatgccac

SEQ ID NO: 428031 - DNA, 98 bp, Homo sapiens
agaattgcctgatgctgtgggacctattgttcagttacaagagaaactttatgtgcctgtaaaagaatacccagatatggagtcttgctctgtcgccc

SEQ ID NO: 428032 - DNA, 82 bp, Homo sapiens
acaaagatgctctgcggtttttgggctgtgttgacatcaaggatctaccagatgaagcattggatgatttaaaatcccagag

SEQ ID NO: 428033 - DNA, 51 bp, Homo sapiens
agtggatccgacctttggcttcagtgttggctctggaattaagggatgggg

SEQ ID NO: 428034 - DNA, 100 bp, Homo sapiens
tctgacaagtaaaattaaaagtcgtcttggagacaaggaagcagttctcaacagggctataccaagtccatcgacatctggtctgtgggctgcattctgg

SEQ ID NO: 428035 - DNA, 86 bp, Homo sapiens
gtaggaccgaattcctgtgccgaagaggcctgcagtgggagagcagggttttgtagtgcatccctgagcatgagcacagaatgaag

SEQ ID NO: 428036 - DNA, 80 bp, Homo sapiens
cgtggagtgacggtcacaccgcggcgatatctcttccaaacacatgatgaaggaggtcttgtcaacagggcaaggcaata

SEQ ID NO: 428037 - DNA, 51 bp, Homo sapiens
ttggagaatcatgagaaatgagcacttgcacctcctgcgccgccgcccccc

SEQ ID NO: 428038 - DNA, 75 bp, Homo sapiens
gccccatcgtccccgggatctttcccatccaggaactgtgaatggctagaagaaggagctcagtaaactagaagt

SEQ ID NO: 428039 - DNA, 98 bp, Homo sapiens
gaaaacaagcggaacgccgtccacgtgaaggggcccttctcggtggaggccgacccatccaggaagggaaaaggccgaggcatcagcgtgtgaagacc

SEQ ID NO: 428040 - DNA, 100 bp, Homo sapiens
gacgtcgggggacgcctgcaacctggagcagggtctctgcggctgtgtggaggaaaccggggcctgcccttgcaaggacggcgggacccggaggctggag

SEQ ID NO: 428041 - DNA, 82 bp, Homo sapiens
cccagctcggcccgcgggggagccccgggagccgcacggataatttcttgagaggagataactcccgtaaagttcagcacca

SEQ ID NO: 428042 - DNA, 96 bp, Homo sapiens
ggaaacagctatatgggaacaacatacagtgacgcttcacagggtatggcccatctcctgtacgcttggagcgacctttggctacgtggctggcct

SEQ ID NO: 428043 - DNA, 83 bp, Homo sapiens
cttcgctgtggcatggcggacgaggggaagtcgtacagcgacaactgatcaatactgggttccatgtttacatgatgaaactg

SEQ ID NO: 428044 - DNA, 76 bp, Homo sapiens
gtcgtttgtttctccaaggtttgaaaagcagctggcctgcaaggtgtgatccctcacatccacaaatctctgattg

SEQ ID NO: 428045 - DNA, 98 bp, Homo sapiens
acatgccgggcccagcttcgcggccagcatttctacgccgtggagaggagggcatattgcgagggctgctacgtgcttctgacaaggcttctaaagag

SEQ ID NO: 428046 - DNA, 98 bp, Homo sapiens
cggacccataccagagaattatgatcaacttcaaccctcacttcgatttggaggacagagactgcaaggtgaaaatcctatttataagagtgccgtaa

SEQ ID NO: 428047 - DNA, 100 bp, Homo sapiens
attccagaatgatgaaattgtgtgagtgctccagttgtaacatctaccactcaggaaaagccgaaggatagcgatcagtttgaatgggtgaccattgaac

SEQ ID NO: 428048 - DNA, 98 bp, Homo sapiens
gggtctggagggctgagcagtcaactcaaatgcaagtccaagaggaggaggaggcggaggtccaagcggaaagaccccaagactgcttctgagacaga

SEQ ID NO: 428049 - DNA, 98 bp, Homo sapiens
tgaaagaggagtgggtaccggaacttaaggaatacgcaccaaatgtaccctttttattaataggaactcagatgaagatttcgaaacagctgtcaaga

SEQ ID NO: 428050 - DNA, 90 bp, Homo sapiens
cttttccgttgccggtgccggcctagcgtcctggaattacttcaatcaattttaaccgtgattggagataccacaaagaagaacgagtat

SEQ ID NO: 428051 - DNA, 100 bp, Homo sapiens
gagatgctgatgttgaagacgacaccacggattgttttaagaaaatggcagacaaaccagacatgggggaaatcgccagcttcgataaggccaagctgaa

SEQ ID NO: 428052 - DNA, 88 bp, Homo sapiens
gagctccggcccgggcgagcgggtgcgtctgccgcagagtcggcacctgaaggacatggaggtggaatgaatcttacttgttgaatat

SEQ ID NO: 428053 - DNA, 87 bp, Homo sapiens
ctgctcaagatctcagagaaggaggaggtgaccacgcgcgagagaggaccctcatgctgcccctgaccgagggctcgctgcggctgc

SEQ ID NO: 428054 - DNA, 73 bp, Homo sapiens
aggaaaaacgagccaaacttcgtgaaattgagtgccacaccagaggaatataatacagttgtacagaagccaa

SEQ ID NO: 428055 - DNA, 75 bp, Homo sapiens
cctgcgaagccatcaggacctgaatgcccttttgcttgaggacagtcattttgtttactcattcagccctgttgc

SEQ ID NO: 428056 - DNA, 74 bp, Homo sapiens
ccttctcaattttctttctcagaaagcagaggctcagagcttggagacagacgttaagccttcaggtgcgagat

SEQ ID NO: 428057 - DNA, 96 bp, Homo sapiens
tgcggggatgtatttggaacattatctggacatggcccgttgccgacaagccctggtgccgcgtgccttccatgcttcagctgtggggctaaggtc

SEQ ID NO: 428058 - DNA, 100 bp, Homo sapiens
ccagaacgtgccatggagacgcttaacggaacactgtccattggcatggggaaatataaacttgtttgattacacagacactctagtatctggaaaaatg

SEQ ID NO: 428059 - DNA, 83 bp, Homo sapiens
gtcctgggagcacagcagaagtgcaggtgacagcagggacatgtctcgggagatgcaggatgtagacctcgctgaggtgaagc

SEQ ID NO: 428060 - DNA, 76 bp, Homo sapiens
ggagacagcccaaatatcctcggaagagcgctcccaggagaaacaagtggtttttccccatcatcggccacatggg

SEQ ID NO: 428061 - DNA, 100 bp, Homo sapiens
atctaaagaagaagttggaaaatgaggtggaacaaaggcatacacttactagaaatctagatgttcaaaccttgtactactcagctgatcacaagctgct

SEQ ID NO: 428062 - DNA, 98 bp, Homo sapiens
gccggccttcgggtcgggcgtctccgccggctactgccgcttcagttctcccggtgtggccacgagtcggatccccagctcaagggtatagtgaccag

SEQ ID NO: 428063 - DNA, 107 bp, Homo sapiens
actgtgcatctttatgataattggatcaaagatgctggtcgttgaggacttccacatggagattggcacaggaccagactcaagacacacaactcataacagttgat

SEQ ID NO: 428064 - DNA, 100 bp, Homo sapiens
tgaaggaatcctctccatctggttcgaagtctcagcggtattctggtgcttatggtgcctcaggaagtgggaaaactcttgcctttgccatcccaatgat

SEQ ID NO: 428065 - DNA, 100 bp, Homo sapiens
aagctaacaagaatctgattttgaaggctatatctgaagctcaagaatccgtaacaaaaacaactaactactctacagacggagtctcactctgttgccc

SEQ ID NO: 428066 - DNA, 75 bp, Homo sapiens
tctaacatgtttaaccctcaaactgcgagggctggaggcctggcagaatgggtgctgatggagctacagggggag

SEQ ID NO: 428067 - DNA, 83 bp, Homo sapiens
tagacgggtttctaatcataagaagactacatgaggaaataattgacttttataacttcatgtccccttgtcctgaagaagca

SEQ ID NO: 428068 - DNA, 100 bp, Homo sapiens
gaatgtcattggagaacctattgatgaaagaggtcccatcaaaaccaaacatggtggacttgctttgtgaagagacagttcatgaacaagagtctttcag

SEQ ID NO: 428069 - DNA, 75 bp, Homo sapiens
ctgaaggaagggctccctcgagttctggtgtgaagagataaatcaccagataaacaggggtcacatgacgacaga

SEQ ID NO: 428070 - DNA, 100 bp, Homo sapiens
aaggccactgactcctacttcctctgtatagagcaactgttgaactcagctgcctgtagtgccggtggtggtgtgcacattgagccccggtatagacagt

SEQ ID NO: 428071 - DNA, 75 bp, Homo sapiens
ctcagtcagagtaggaaataattttcacaaccttcaagaaattcggtgatcccagggcaccgccgtgtgaatata

SEQ ID NO: 428072 - DNA, 100 bp, Homo sapiens
cgggaagatggcggagctgcgcgtgctcgtagctgtcaagagggtcatcgactacgccgtgaagatccgagtgaatgcagtaaaccccacagtggtgatg

SEQ ID NO: 428073 - DNA, 100 bp, Homo sapiens
ctggacgctcatcagagggaagatctttttcctcaattgtactatactggcaattgctggagaagattttgcaattgttgcttctgatactcgattgagt

SEQ ID NO: 428074 - DNA, 100 bp, Homo sapiens
atcctgctttacgagtgaatggaatttgggctttaatgatagagaagcagaggcggatagaacggataaagcagaagcgggcccagctgcaagaacttct

SEQ ID NO: 428075 - DNA, 100 bp, Homo sapiens
tttactgcatttgcactgcagtatcacctatggaagaatgaggtgcataaggcaaatccaatacgcaagtaccagggtctggagataaagtcaagtgacc

SEQ ID NO: 428076 - DNA, 82 bp, Homo sapiens
ccagcctggcttcatcccaccacacatgagtgcagatggcacctacatgcctccggtcatcacccgtagcatccggttaaga

SEQ ID NO: 428077 - DNA, 100 bp, Homo sapiens
gtccggctacgccttcgtggactaccccgaccagaactgggccatccgcgccatcgagaccctctcggacgctcttcctacttctggctttgcaatgcac

SEQ ID NO: 428078 - DNA, 90 bp, Homo sapiens
acctgcaaccgtttccgcctcctgctagagcggcgaaccgtgggcagtgagcctggtccgacccccagtggcactaacgtgggatcctca

SEQ ID NO: 428079 - DNA, 100 bp, Homo sapiens
ttcaaaagaacaggaccccgtacgtcactaccactgtctctgctcacagtgccaaggttgcccgacatgtgagtgccattccttggggcatttctgccac

SEQ ID NO: 428080 - DNA, 75 bp, Homo sapiens
tcttgttataggagatcacaaatcaacatctcacttccgaaccggtcatacagcagatggaacaaaaaaaattac

SEQ ID NO: 428081 - DNA, 50 bp, Homo sapiens
ctgcaagcaggcaacctgaatacagaaacagaagcctatcagttgctgaa

SEQ ID NO: 428082 - DNA, 75 bp, Homo sapiens
ttgaaaagacaagccatcaaaactgccttcagaagcaaaagggtccgcaagcaggtggtgaacatcccgtccttc

SEQ ID NO: 428083 - DNA, 147 bp, Homo sapiens
tagcgcagaaagtgaagctgtttcgggccagcgacccgctgctcagcgtcctcatgtggggggtaaaccactcggtcaaaatgcagatcttcgtgaaaacccttaccggcaagaccatcacccttgaggtggagcccagtgacacca

SEQ ID NO: 428084 - DNA, 89 bp, Homo sapiens
gttgccattatagagctggaattaggcaaatatggacaggcaaaggcagctcgagcatctcatctgacgtgagttcaagtacagatcac

SEQ ID NO: 428085 - DNA, 88 bp, Homo sapiens
actacaatcttcgcatgaaatggaagagagggtggtgcggatagcttgaggaagacaagttggatggcttgaggactggtactaaaag

SEQ ID NO: 428086 - DNA, 50 bp, Homo sapiens
agtgcgtcaatcagagcgtcctgtgcgggtttccaggcctgaggtgcccg

SEQ ID NO: 428087 - DNA, 100 bp, Homo sapiens
gcaagaagggcgctgttttcgacaggtgtgcaggtttcggcacatggagattgatcttgctcagtatgaaccacctcaggaggagaagcgtgctgaatag

SEQ ID NO: 428088 - DNA, 113 bp, Homo sapiens
ccgcgcgcagggcctgcagcgggagctggacggcgagcgcgagcggcgcgagaaacttcgagagctgtgcccaggagtgaacaaccagccctacctctgtgagagtggtcact

SEQ ID NO: 428089 - DNA, 100 bp, Homo sapiens
tggggggggtcagccccccgcccggccagccgccccgtccgggaggtgattggagttgtgcttcaaaaatttcagaaattcagcagtattttatctgcca

SEQ ID NO: 428090 - DNA, 82 bp, Homo sapiens
gaggaacttcaaggctgtcccctgcgggcctcccgctctgcttctgcgaaggattttttatcaagcagaaatgcatcgaaca

SEQ ID NO: 428091 - DNA, 95 bp, Homo sapiens
ctgagacgcattgctaagtgcaatgggaaatacctctcatcaaattactcagaggctgaagccgacgtagcttctctgaacagacgcatccagct

SEQ ID NO: 428092 - DNA, 98 bp, Homo sapiens
tggctggaaggagaactaaatgggagaagaggaatgttccctgacaatttcgttaagacagagtctagctctttcacccaggctggagtgaagtggtg

SEQ ID NO: 428093 - DNA, 97 bp, Homo sapiens
taaacccgggacccacttcactccagtgcctccgacgcctcctgatggctgctctttggcgtaaattgcaatcgattagggatcgtttctcagaatc

SEQ ID NO: 428094 - DNA, 83 bp, Homo sapiens
tggaggcggcccgcttcctggaatggcaagcgcagcaacaacagagagcacgtggagctgttcacccgctcactggctgagag

SEQ ID NO: 428095 - DNA, 98 bp, Homo sapiens
cagtgagtttgtggaagcctcgcccgcatcctacagcccagacgagttagactgggactcttcaattaatctgacatttcacaaatccaaaattgccg

SEQ ID NO: 428096 - DNA, 100 bp, Homo sapiens
ccggccgccgcccgagcgctcgagaaagtcctctcgggagaagcagcgcctgttcccggggcagatccaggttcaggctgatcagctgaccgaagaacag

SEQ ID NO: 428097 - DNA, 75 bp, Homo sapiens
ggggattctcgacctgctaacagaactggaccttttcggtttgtggtggtgtgtggtgatggggagtatatcatc

SEQ ID NO: 428098 - DNA, 83 bp, Homo sapiens
ctccgcctgaaaaaacgccagccaagaagcatgtgcgactgcaggagagaatgccgaactggggaggaggcaagaaatgtggg

SEQ ID NO: 428099 - DNA, 90 bp, Homo sapiens
ctacgggccacgcctgggccttgctgccaggaagcttcggccccgcagctcggcttgctgcggtctcagatgagaagcccaaggtcaacc

SEQ ID NO: 428100 - DNA, 90 bp, Homo sapiens
agaagactcaagaaacagtccaaagaattcttctagaaccctataaatacttacttcagttaccagattcatgatgttgctatcaaaagt

SEQ ID NO: 428101 - DNA, 49 bp, Homo sapiens
ggaagaaagaagcagctgccagttccagggtcacccccgagaggacaac

SEQ ID NO: 428102 - DNA, 98 bp, Homo sapiens
ctcaagcagcaggagcagcccgcggcgaccaagatcaggaacctgccctggcatttattaatacagcaaaagaaatttatgaaaaaattcaagaagga

SEQ ID NO: 428103 - DNA, 100 bp, Homo sapiens
aggaggaagtgatccgaaaatctgggctaagtgctggcaagagcgatgtctactacttcaggagctgcggcgccaagatgagtggagaggagaacccagc

SEQ ID NO: 428104 - DNA, 88 bp, Homo sapiens
cagggtctgggatgggtgtacgaaggaagcaagtacaaacctccagggaacctggctggctagaagggactctgaacggcaagagggg

SEQ ID NO: 428105 - DNA, 85 bp, Homo sapiens
accgagaccgtgaccgagagcgtgaccgagagcgcgaatatcgtcatcgttagaagtgcctccggagccagcgtggtggccatag

SEQ ID NO: 428106 - DNA, 75 bp, Homo sapiens
ctgctgcagaaggctatcagaaaccaggcgtgcagtttgcagaagctgtttgctgtggaagaggagtttgaagat

SEQ ID NO: 428107 - DNA, 98 bp, Homo sapiens
gcctccacgtgcgcggcgctcctgattctgctgtgggcgctgacgaccgaagatgattccttcagggttaccagaacttacaagtattcaagatttga

SEQ ID NO: 428108 - DNA, 75 bp, Homo sapiens
gaaggtttacacttgtcaacttcctcttcagtcatcagttggccagggcagtgaagaaggggaggtgctccttta

SEQ ID NO: 428109 - DNA, 96 bp, Homo sapiens
gagtcctgttccaccttcagagcgtcacggcgtacgccctcatggggaaaatctccccggtgactttcagctgtccctttccccccaacacatcgc

SEQ ID NO: 428110 - DNA, 75 bp, Homo sapiens
caattgtgcagacgctgtaaggccaaaacgaggatttgtgttgtgagatggagttttaacattgaatgcggagaa

SEQ ID NO: 428111 - DNA, 75 bp, Homo sapiens
cagaagccaaagaaagagtcaacggcaattcttgagaaaccaggggactccaacttccaatcagaagactataca

SEQ ID NO: 428112 - DNA, 83 bp, Homo sapiens
cgggagcccgccgcgctggtagcgaaagaagcttccggttctgaggtcctggaggtgccatttccctctctgttgaagcaaag

SEQ ID NO: 428113 - DNA, 111 bp, Homo sapiens
ggccggcctgcggaacgaaagtgaacaggagccgctcttaggcgacacacctggaagcaggccatttcataattctgaatcatgtctgataacggagaactggaagataag

SEQ ID NO: 428114 - DNA, 51 bp, Homo sapiens
taccctaaaattagggcatgattaagttggtacgccttattacatgtctcc

SEQ ID NO: 428115 - DNA, 75 bp, Homo sapiens
ttggaaatagtcagcatacctgtatttgagaacacagtggctacggtgatggctctgcgcagggagaagatgttc

SEQ ID NO: 428116 - DNA, 98 bp, Homo sapiens
ctctgcagatggccgtacgtgtgaagggattaaagcctgtggtttccacagaagcaccacctatcatatttgccacaccaactaaactgacctccgat

SEQ ID NO: 428117 - DNA, 100 bp, Homo sapiens
tgaggcttcttcaagcattcttagaacgcggttcaaacacaatagcaagtgctgcagctgacaaaattatccagctccaggtcccacaggggctcttctt

SEQ ID NO: 428118 - DNA, 75 bp, Homo sapiens
atcatcatctacttcacaggaattgccatttgttttgcgtgtgaagctgtgtggaaatgtgaaatactaccagtc

SEQ ID NO: 428119 - DNA, 135 bp, Homo sapiens
gctcttcccggcgctctcctggctcccttctgccccagctccgtctcggcggcggcgggatcaagattataggaccggcccaagtgaggagaaacccagcaggcttattcgattaagtggggtacctgaagatgc

SEQ ID NO: 428120 - DNA, 74 bp, Homo sapiens
ggcagccgagcccgcccgcgcgccgagtgcctggtgaagaatgtgatgggatcactagcatgtctgcggagagc

SEQ ID NO: 428121 - DNA, 74 bp, Homo sapiens
tcgctcggctgcgggaaatcgggctgaagcgactgagtccgcgatggaggctcatgctgaagattcggttatgg

SEQ ID NO: 428122 - DNA, 100 bp, Homo sapiens
ggaacctccaagcctaattctggaggagactttaactcggccagattacctgtccctaatactgagcagaagctggtgaatgaaacaggagatccctcag

SEQ ID NO: 428123 - DNA, 100 bp, Homo sapiens
attcacaatgaagttgcagtctcccgaattccagtcacttttcacagaaggactgaagagtctgacagggtgactgtcgttcctacagttacgtgtgtgg

SEQ ID NO: 428124 - DNA, 75 bp, Homo sapiens
gatacctttgatccagaacttgcagcaacaataggtttcatatacactggagaagtcgtacatcgaatgctaaca

SEQ ID NO: 428125 - DNA, 75 bp, Homo sapiens
ctgtagtgatgatgtccatatggccatatctccaaaagttatgagttgcagaaacgaattgctgaaatggaaact

SEQ ID NO: 428126 - DNA, 100 bp, Homo sapiens
gccaccaaacacaagctcatagagatcgccaactatgttgataagaaagttcaggagccctggaaaggagaaggaataagacggcaggaggaagagagag

SEQ ID NO: 428127 - DNA, 75 bp, Homo sapiens
ggcgcagcccgttcgcttcagcagtgctgcagaaattggggaaagctgtagaaaccaaagatgaacgatttgaac

SEQ ID NO: 428128 - DNA, 97 bp, Homo sapiens
atccagatggcagccagtcagtggtggaggttttggcttggtttgaagaaggtgaagaaacaattacagcctttgtagaaccttttgtaattttact

SEQ ID NO: 428129 - DNA, 98 bp, Homo sapiens
ctcaatttaagcctgatctaacccctagaaacagggcaagtgtccagagaatggctgggatgaaagtacacttgaactctttttacatgaacttgcaa

SEQ ID NO: 428130 - DNA, 90 bp, Homo sapiens
accctgcccagcagaatttgtatagagatgtgatgttggagaactacagaaacctggtctccctagatgccatggacaatattaccaggc

SEQ ID NO: 428131 - DNA, 51 bp, Homo sapiens
aggggctgactgagagcgtctgcttggagtgtacctcacagccttctagga

SEQ ID NO: 428132 - DNA, 74 bp, Homo sapiens
ggactgagagatggctattatatccaaggtgttggggatgtcctttgcactgaccctgaactgccagattgaca

SEQ ID NO: 428133 - DNA, 76 bp, Homo sapiens
aaccaagaagcccagagactgggaggaaagcaggtttggaaagaaatcccggcctgcaatgtatgatgtgagcccc

SEQ ID NO: 428134 - DNA, 50 bp, Homo sapiens
gaacggcccccaaggggcgggcgctgtgtgatctagaacaacttcgaaaa

SEQ ID NO: 428135 - DNA, 95 bp, Homo sapiens
aagttcatctccttctgcatccttaactgagaatgagatgccatggacaatattaccaggcagaaccaattctacgatacccaagtcatcaaaca

SEQ ID NO: 428136 - DNA, 99 bp, Homo sapiens
ctcaggacggacaagcacagtcttcggaagtcatccgtccttggctcaggatttggagagcttgcaccaccaaaaatggcaaacatcaccagctcccag

SEQ ID NO: 428137 - DNA, 82 bp, Homo sapiens
gcgcagcaacgtgcggtgggaccacgagagcccagatgaaaactcgctggatttttcctcctgtatgttacggcctgggatt

SEQ ID NO: 428138 - DNA, 98 bp, Homo sapiens
cggctgccgagaaggagggaggggaaacacaaagccggctacgcgctgcgagggatgtgtctgcaggccttcgtagaagctttctttttcctggctca

SEQ ID NO: 428139 - DNA, 75 bp, Homo sapiens
cagattcgcagtggtcgcttcttctccttgtgagttattctccccacctcagaagtaccagcttttggtgtatca

SEQ ID NO: 428140 - DNA, 101 bp, Homo sapiens
caaggactcgccctccgtctgggccgccgtccccgggaaaacgttcgtcaacatcacggccgagacgcatccagagctttcgtgaccggggactgttctga

SEQ ID NO: 428141 - DNA, 83 bp, Homo sapiens
gggggagctcatcggcactctgaacgcggccaaggtgccggccgacaccggcgtccgagctgggccacagcctgaacgagaac

SEQ ID NO: 428142 - DNA, 76 bp, Homo sapiens
ccttttgccctggtgggattattatggattaattgcctctgaaggagccataagtcccgatttcttcaatgattac

SEQ ID NO: 428143 - DNA, 74 bp, Homo sapiens
tcgggagccgtggggcagaggctgcggagccccagaaggaaaaatggctacaaacttcctagcacatgagaaga

SEQ ID NO: 428144 - DNA, 101 bp, Homo sapiens
cggaaccggacccagtccctgagccgcccctacacccacaggctacctcggacctgaacagctgcctgactgcctgaaaggttgtgatgtggtagttattc

SEQ ID NO: 428145 - DNA, 75 bp, Homo sapiens
tcggtcctgtttcgacagcgaacatgtcgcggcctgtcagggctaccagggcatggtggacggaggctcaaacat

SEQ ID NO: 428146 - DNA, 90 bp, Homo sapiens
gagaaagagaatgatgaagagaaaggcccggagactacagccagctaaaggtgtggatgagcaaatacggctggagtgccgacgagtcgg

SEQ ID NO: 428147 - DNA, 74 bp, Homo sapiens
ttttagggtcctttatatagaagggagagtagactttcttgtctgcacagaaagtcccagtacaacttccattg

SEQ ID NO: 428148 - DNA, 96 bp, Homo sapiens
tgttttagagctggcagcagcatctcagcccaagagaaggtgctggagaatctggtaaaagcaccattgtgaagcagatgaggatcctgcatgtta

SEQ ID NO: 428149 - DNA, 74 bp, Homo sapiens
aaacttgcagcaaagccattcgggttggagtaattgagtcatgtgctgttcctggggcttggatgatgtagggg

SEQ ID NO: 428150 - DNA, 90 bp, Homo sapiens
aggactgcgcccccgggagcgggcgcccagagatggagaaatcaaggcatagagagattaagtgactttgccacagtcacaagctggaga

SEQ ID NO: 428151 - DNA, 82 bp, Homo sapiens
ggaaaaataaagtgttgagtaaacagaccaagttggtctcatataatggcagcaaaggctgtagcaaatacaatgagaacat

SEQ ID NO: 428152 - DNA, 100 bp, Homo sapiens
gccacttcatgttccagtgcctcgagcgctcaggatggaggaagactcgatccgcctgcctgcgcacctgcctagagacatgacctaacaccctgatgac

SEQ ID NO: 428153 - DNA, 80 bp, Homo sapiens
aattactagattttctctcaaactacgagaacgctgtaaatgtaagcctattagagctacacagaagacctatttccgga

SEQ ID NO: 428154 - DNA, 83 bp, Homo sapiens
ctgagtggttgtgtggtcgcgtctcggaaaccggtagcgcttgcagcatgggcgtgatggtgggcatgggtcagaaggattcc

SEQ ID NO: 428155 - DNA, 100 bp, Homo sapiens
tctgtgacctgctggcattgaatgatttatagctaagactccaggacacccctgaagccgagaaatgctgggatctagcaattgggaggcagcagacttg

SEQ ID NO: 428156 - DNA, 75 bp, Homo sapiens
tcgggggccacactgcaggcctccgcgctcagtggtctgctggagtttgctggaggtccactccagaccctgttt

SEQ ID NO: 428157 - DNA, 90 bp, Homo sapiens
gccatgtccacgttcaggcaggaggacgtggaggaccattatgagatgggggaggagctgggcagaaccacaccttcatcaagcggtccg

SEQ ID NO: 428158 - DNA, 88 bp, Homo sapiens
tgttcttgtgaggctgagggtctgggaggagcaggagcggcttcgcttggagcaggagcgagagcaggaacagaagaaggccaatagc

SEQ ID NO: 428159 - DNA, 98 bp, Homo sapiens
gtgagaaggtggtgaggcttcccgtcatattccaggcaaacatgctgaagacatatttggtgagttgtttaatgaggctaacaacttctacatcagag

SEQ ID NO: 428160 - DNA, 100 bp, Homo sapiens
gaagattcaccaaataagctatatactttggttacctatgtacctgttaccactttcaaaaatacgcctggctgcaactcaggggtggcctcatcctccc

SEQ ID NO: 428161 - DNA, 90 bp, Homo sapiens
ctgccgggtcaaggcattcatcctctagctgaggtggggctggtgtccgagcacttctcgcaggccccgcagaggctgtccttctacagc

SEQ ID NO: 428162 - DNA, 101 bp, Homo sapiens
gatttgtatttgactgagagaaacccactgaagacgtctgcgtgagaatagagaccaccgaggtattgatgtcaagctgaaccatcgtaggaagttgaaag

SEQ ID NO: 428163 - DNA, 96 bp, Homo sapiens
gggatattatcaaatctactactgttcatggcagggaaggatcgaatcatatttgtaaccaaagaagatcatgaaactccaagcagtgcagaattg

SEQ ID NO: 428164 - DNA, 100 bp, Homo sapiens
caaggggattgcctggcaggacgtgaaggggaagaggcccaccctggagtaaccctcactggagaatccagagaatttggaggttttggttcagttagtg

SEQ ID NO: 428165 - DNA, 100 bp, Homo sapiens
ggtttcagttggagttggaatttgtgcaatgtttagccaacccaaattaccttaattgttaaaaaggccttctttgctttggtagccaacggtgtccgag

SEQ ID NO: 428166 - DNA, 101 bp, Homo sapiens
gggagcagagctcagacatgttctcaccacccttggtacgacaacaattccacgatgccaaattcatggcagacattgatctggatccaggctgtacattg

SEQ ID NO: 428167 - DNA, 50 bp, Homo sapiens
ggtcgccctcaaggccatgatcaaaaccctcctccagctggtgatctcgg

SEQ ID NO: 428168 - DNA, 75 bp, Homo sapiens
gattttgccaagattattaacaatacagagaatcttgtgcgggaattgctagtaaccagagagcacagagaaatg

SEQ ID NO: 428169 - DNA, 75 bp, Homo sapiens
caactttgagtcagacctgtaggcctgatagactgattaaaccacaggaatctggtgaacagtaacaaactttgg

SEQ ID NO: 428170 - DNA, 95 bp, Homo sapiens
gaggcatgggagttgtcatgttgggaacatgctagacctcagtatccttgagatctgggttggaatttgcccctgacaaataataaaatgatgag

SEQ ID NO: 428171 - DNA, 100 bp, Homo sapiens
gctttgaggcagtcatgaggattcggtgcaccaaagacgttccagaagtagagagagagacagaagccgagagcgaagaagatctcgaagtagagacagg

SEQ ID NO: 428172 - DNA, 100 bp, Homo sapiens
ggggctcgcaactcggcagcctccacccaccggcccaccctacatttagcgcatcatgtgatccgggtgtgtgtctggggaagagacttacagaagtgga

SEQ ID NO: 428173 - DNA, 90 bp, Homo sapiens
gcagggtgcgggagagccccttgcagaagacgccgtacgagacttaattcagtgcacaaatgagatgaatgtgaacatcccacagttggc

SEQ ID NO: 428174 - DNA, 82 bp, Homo sapiens
ggctccgacaagaggctgagtgaaggccgggggctgccccctccccccaggcggctatgagaggttttcctccgagtaccca

SEQ ID NO: 428175 - DNA, 75 bp, Homo sapiens
cagcgagtgccaggaactcttctggggagaccccgacgtggagtgccgaggtatggacctgtctgccaatcagga

SEQ ID NO: 428176 - DNA, 97 bp, Homo sapiens
ctcctggacagttggaaagacctaaaggcacacaagtctctgaattttgtctcaacactgctccagattactatgtcggaacagctggatttacctg

SEQ ID NO: 428177 - DNA, 90 bp, Homo sapiens
ctaagagaagtcacaaaacagcagatttcccaagagcagcggaaaatgatccagtcacaggtaatcaaatgcaaagcagctgtgctatgg

SEQ ID NO: 428178 - DNA, 98 bp, Homo sapiens
cactccgcacctcggggacattattgcgcgtggaacggctgcttttggaaggcccgatgagagaaagggaaagttaaggatgctggagcagaacaatg

SEQ ID NO: 428179 - DNA, 76 bp, Homo sapiens
aatgcattcaaaaggactaataccatactgcaccatttgtgttgcatctgagccaagaaaactttatgaaatgcca

SEQ ID NO: 428180 - DNA, 75 bp, Homo sapiens
gttttagggctcttcgagaggataatgcctactgtgaaggtgtgataaagcggaattgggaatatatatgtagcc

SEQ ID NO: 428181 - DNA, 100 bp, Homo sapiens
ttggaaaatgtgataaaaacaaggtggaagattcttccaaggaaccagtgcgaaggttatttccagaaagaagagaatggcaaagtatgagaaggctgag

SEQ ID NO: 428182 - DNA, 100 bp, Homo sapiens
tttgcccaacctgggattcaaatgaaagtgaaaatgttagaagaactcgtgagccggattgatggtgagcgagtgctgtgctttcatgggcctcttcttt

SEQ ID NO: 428183 - DNA, 75 bp, Homo sapiens
tttctggcctggaggctatccagcgaccatgaatggcacctacaacacctgtggctccagcgacctcacctggcc

SEQ ID NO: 428184 - DNA, 89 bp, Homo sapiens
cagaagttcatggatgctgtcaacaagaagagcagttcccaggatctgcataaagaagaaggaggtcttcgaggggagaagaggaaacg

SEQ ID NO: 428185 - DNA, 89 bp, Homo sapiens
aagaagagcatgatcggcatgtccaccaaggcagggactttgaacatgtcggggatcgccctcagcagactcgcccaggagaggaaagc

SEQ ID NO: 428186 - DNA, 100 bp, Homo sapiens
cagaaaaatgactgaagaatttgatgagatatgcacccaatgtccagggagcgtgcaaaatttgtcaaaagtggccttttattgtaaaacgacacgagag

SEQ ID NO: 428187 - DNA, 100 bp, Homo sapiens
tgaatcagaagatgaagtcaaattggccctgaaaaaagacagagaaactatgggacacagatatgttgaaggacatggatttgattgacatactttggag

SEQ ID NO: 428188 - DNA, 75 bp, Homo sapiens
ctgcgtccgcatccctgccctccagagagagtctacaaggagattgaacaggtggttggcccacatcgccctcca

SEQ ID NO: 428189 - DNA, 100 bp, Homo sapiens
ccgttgccgcctccctgccggcaagtgtgtgaagaagaagctgagcgttgtcgccgccgctatggggtgaagatagtgatccggggagacaggaacacgg

SEQ ID NO: 428190 - DNA, 98 bp, Homo sapiens
catgatgccccacttggtgaatggagatgcagctcagcagaaatgggacgtcggtcatcagatactgaagaagaaagcagaagcaagagaaaaaagaa

SEQ ID NO: 428191 - DNA, 100 bp, Homo sapiens
ctgatcaagctgaacttttccaagaacagtgaggctctggaggctgccatcgagaacctcaatgaagccaagaactattttgcaaaggttgactgcaaag

SEQ ID NO: 428192 - DNA, 100 bp, Homo sapiens
acttcctataaatctcgcccaaacaggaaaggtacttttaggttgaaatacgcccctccagcagaaagtctggactccacagattgatatttttctctgg

SEQ ID NO: 428193 - DNA, 50 bp, Homo sapiens
ggcttacgcagaaggacctggccacggaatccctgaggactccaaggtag

SEQ ID NO: 428194 - DNA, 90 bp, Homo sapiens
gaaatgcagaaaaaagatcacaagcaactctggatgggattgcaaaatggtacggttcctggagcagcagaacaagatgctggagaccaa

SEQ ID NO: 428195 - DNA, 89 bp, Homo sapiens
gaagatctccattcctgaggaggagggctggacatggaggaaggcaaggaaggaggcacatggctgggcatcagcacacgtggcaagct

SEQ ID NO: 428196 - DNA, 82 bp, Homo sapiens
cggcgcggggtgagcgtcgaggaggcgcaggagactgaccgcaacggcaggattgtagaaggcatgaaacaaaaaatgtgga

SEQ ID NO: 428197 - DNA, 100 bp, Homo sapiens
caggcttctccggaaggaacagattttagctgtggccaggtggtccagctgctcacctgtgacctgctactgtcgctacggacagcgctctggcaaaaac

SEQ ID NO: 428198 - DNA, 74 bp, Homo sapiens
gaacagttaatcctcaatttaagcctgatctaacccctagaaacagattcatgatgttgctatcaaaagttgag

SEQ ID NO: 428199 - DNA, 97 bp, Homo sapiens
accggagaccccgaaaacggaagcgcagggagaaggaagaggtgtttgaaaagtccttttcagtggagagggaactacaggataacagcagttaccc

SEQ ID NO: 428200 - DNA, 101 bp, Homo sapiens
gcctgtcttctggcccctcctgaaagctgtcacccacaagagtggattagaacaagatgacatgagaattttatacaaataccttaccacctcccttttcc

SEQ ID NO: 428201 - DNA, 98 bp, Homo sapiens
ggcctgcacgcggggcgcgggccccgaaggctctccatcgaaggcaacattgtccagcctagggtgaatgtttccccctccaagaaggggcccttgca

SEQ ID NO: 428202 - DNA, 95 bp, Homo sapiens
gaagaaactgaggcctggaatttgattaactcattcaaggttacccagttgggcgaactttctgaccaagtatacaactacccagagggcctagg

SEQ ID NO: 428203 - DNA, 80 bp, Homo sapiens
accttcgcattcagaatttgaccatcttggtgagaaacattaagacctactaccagcaaaatgatgcttcaacacccagg

SEQ ID NO: 428204 - DNA, 100 bp, Homo sapiens
aaggagaagagccatggaaacaggaggaagaattcccaagccaaagctttccagagcgtttcccaaagtgtattctgcggaactagcacctactgtgttc

SEQ ID NO: 428205 - DNA, 100 bp, Homo sapiens
cagcccttcgcgaagcgccgggcagctcgggaacatggccctggagcggctctgctcggtcctcaaagattagaagcccaggacccaggaaggagacaca

SEQ ID NO: 428206 - DNA, 83 bp, Homo sapiens
caacgggcagtttgtcgaacgatgttggactcatagtcactgccagaaagtgcaggcctgagtgttccttccagcatgtcgga

SEQ ID NO: 428207 - DNA, 100 bp, Homo sapiens
cgcctcgcgccggctgctctttccggaccccaactccagagaccttcctgaccacaatccgggatgagccagaggttccggtgagtggggggcccagtgg

SEQ ID NO: 428208 - DNA, 100 bp, Homo sapiens
ctgtcagacatctggatggtcacttactgagcagcctaaatgcgatggccaggtattactgacacaagtgtggaagcgtttaaacctggtagaatgtgac

SEQ ID NO: 428209 - DNA, 129 bp, Homo sapiens
gtcttttgaaaggtgtactgcaaggaacaaaatgtttgtaaattctccttttaccaagacgagccaaactcaggctgtaccttgagcagctcaagcaactggtgcccctgggccccgacagcacccgcc

SEQ ID NO: 428210 - DNA, 100 bp, Homo sapiens
atttcccaagagcagcggaaaatgatccagtcacagctgcgctactatgactcaggtgaggacacaagctgtaaaggccacattgatctggctgaagtag

SEQ ID NO: 428211 - DNA, 75 bp, Homo sapiens
ggaagaacaactgacttgtccaagcataataccacttcagccaaaggatttctgtccccaggatcacgtagccct

SEQ ID NO: 428212 - DNA, 75 bp, Homo sapiens
ttcagcagttggcacacatggttaaggaacaggaggaaaccattcagagcgtgagtgcatctccatccacgttgg

SEQ ID NO: 428213 - DNA, 91 bp, Homo sapiens
catcttcctccctgtgtactttccatttgccttcctggagtgaaccagaggaaatgcctccagaagcaaagatgaggatgaagaatattgg

SEQ ID NO: 428214 - DNA, 99 bp, Homo sapiens
cgtttgtggaactggattgaattaaacaagacgtgcaaagcaagtggttcacgagctgtcgcctggttgggcccggaaatgggacgtcgcgctttctca

SEQ ID NO: 428215 - DNA, 97 bp, Homo sapiens
ggggcatccgggtctcttggtggctgcttctacccccggagctcagctgatcttcccttccagactacgagggtgctgccccacgtcccccaccaaa

SEQ ID NO: 428216 - DNA, 100 bp, Homo sapiens
cgacctgctaacagaactggaccttttcggagaacttgcgcctgtcaggggctggatccagaaacctgtggtgcctccttctcttttggttgttcatgga

SEQ ID NO: 428217 - DNA, 82 bp, Homo sapiens
ggtgaccacttttggaccaaaggcctgtgtgctgcagaacccccagaccatcatgggcggctgacggggctgggcggagagg

SEQ ID NO: 428218 - DNA, 100 bp, Homo sapiens
cacgggcccggctgccggcccccgctctgccctgtttcacatccatcatgcaagaaagcataagggtaaatccatccatggttactaaactcagagctac

SEQ ID NO: 428219 - DNA, 90 bp, Homo sapiens
attccaagtaactcttatttgggggaagcgagtagcattatctgatgatgagacaaaggaaactgaaaacatgaggaaaaagaggagaag

SEQ ID NO: 428220 - DNA, 100 bp, Homo sapiens
tcgtgcctcagcctcccgaatagctgggattacagtgggcatccccaccatcagatggtgcggggcagagggggactacaacgtcatggtgatggagctg

SEQ ID NO: 428221 - DNA, 75 bp, Homo sapiens
cctgatggaggaagtgctcctgctgggcctcaaggaccgcgagctagagaccgttggatggcagcttaaccttca

SEQ ID NO: 428222 - DNA, 100 bp, Homo sapiens
ttgaccaattctttgtgatgaagtcgagcttagggatacaggtgaattttgaagtcttcatcagtatatccatattaaaacgagatgacagaagccaaag

SEQ ID NO: 428223 - DNA, 100 bp, Homo sapiens
gttagcgttgtatcttgggagaaagacacagtctccatcatcccaggcaggaagaagctccgactgtttgaataccttcacgaatccctgtataatccgg

SEQ ID NO: 428224 - DNA, 75 bp, Homo sapiens
cagggctcaagcacctcttactgcctcctcactctggaaccaaatgccttactaagtcatcaatgggcagcatgt

SEQ ID NO: 428225 - DNA, 75 bp, Homo sapiens
agcctattgagttaacacctctgccgctgctaaaaggttcaaaatgagcctgtttggaacaacctcaggttttgg

SEQ ID NO: 428226 - DNA, 98 bp, Homo sapiens
cggaggcagcggggccgggatggaggacgttaactctaacgtgaacgcggaccaggaggaaccatcactgttgctggaggcacctgacaaatcctagc

SEQ ID NO: 428227 - DNA, 101 bp, Homo sapiens
ccccaagaagcctctggctgtgacaggcagcgatgaccgctctgtcagtttctcagctacctcagtgcctgtgaccgcctgttacgtcagggatatgagga

SEQ ID NO: 428228 - DNA, 76 bp, Homo sapiens
ggcaacaccatggctgggtagttcgaggggtttttgcggacttgattattcttagaaatgcacttgacctgctttt

SEQ ID NO: 428229 - DNA, 98 bp, Homo sapiens
cttcgatggacctgttgaaaaaaatctgggaggttgaacttattaatactctaaaatagagctcaagcttgagaagagagaaccactaaagggcagag

SEQ ID NO: 428230 - DNA, 95 bp, Homo sapiens
ggagcctcagttggaagcagccgatccagcctgcggagcctgtggggcagagtttgctctccaaagctcggggaattgattccagctctgttaaa

SEQ ID NO: 428231 - DNA, 129 bp, Homo sapiens
cttcactgtcactgtcctgcctgtcaatgaccaaccccccatcctcactacaaacacaggcctgcagcgaaatttgacacacatgcaagatgaagtaaatgtgaagtcacatcagagggagcatcaaaa

SEQ ID NO: 428232 - DNA, 75 bp, Homo sapiens
gccccacatcagctccaaggtcagggtgattaagctgtcaggtgggggaaatcctcattgacgattcaatttgtt

SEQ ID NO: 428233 - DNA, 98 bp, Homo sapiens
aggagcagccctggtgtcacctatcagtaaaagataggtgatcttcagctttgcaaactggatgaactagattgcttgatcaaaggaattttatacat

SEQ ID NO: 428234 - DNA, 90 bp, Homo sapiens
tggcgccaggacgaaggccctactgggcaagcagattccagagtcattaaaaagtatcacatggcagagattgggaaaaggcaattcagg

SEQ ID NO: 428235 - DNA, 83 bp, Homo sapiens
agaaggagcagcccacagtcaaatctgtccagaaaacagggaatatactgctgaaataatgtttgagtccttcaatgttccag

SEQ ID NO: 428236 - DNA, 92 bp, Homo sapiens
gtgggccccagccccacagaccagcccagcattcagggggatatgagactttctactcggaatatcctgagtgttgcgtggatgtaaaaccc

SEQ ID NO: 428237 - DNA, 74 bp, Homo sapiens
tggagaagtaggaccatactgagtacaagcatccttgaattcttttaaaaagcaggtcagcgggactatgatct

SEQ ID NO: 428238 - DNA, 75 bp, Homo sapiens
ccaagaccttcacgaccaccaccacccaccccacgtagaccaggaaggtgtcttgctgcaggtaactaatgaaga

SEQ ID NO: 428239 - DNA, 99 bp, Homo sapiens
caggcctcaggccccctcaccatcctagaggtcaagatcagctctggctaggtttggcgtgagtgagctcgttcacctgtgcgaacaggtgcctattgc

SEQ ID NO: 428240 - DNA, 105 bp, Homo sapiens
ggctattctttacaactgtacccggacagcgaccgtcaagaggtgctgataagactgtgaaaggcccagatggactgaccgcctttgaagccactgacaaccagg

SEQ ID NO: 428241 - DNA, 74 bp, Homo sapiens
gatgaggaagaccaggctctgggggctgctgtggatgctctttgtctcagcattttgaaagcgaagcagaagcc

SEQ ID NO: 428242 - DNA, 75 bp, Homo sapiens
aaattaaagcgcttcaaaaccaaaatggctcagatgagacacttcttccatgagatttaagcgagtggtattgca

SEQ ID NO: 428243 - DNA, 100 bp, Homo sapiens
aatctctcctcttatctcctatgctggagaatcatccgtccttggctcaggatttggagagcttgcaccaccaaaaatggcaaacatcaccagctcccag

SEQ ID NO: 428244 - DNA, 100 bp, Homo sapiens
atcctggccacaggcagtacggcatggtgctcggatcacagaagaactgcagcttcctggggagcagtttcacctccacaggcatcgcttcatactcctc

SEQ ID NO: 428245 - DNA, 90 bp, Homo sapiens
cttcctctaatcaggagaaagctgctccaaatgagaagatgaagcaagtgttaaagaagactatagaagaagccaaagcaataatatcta

SEQ ID NO: 428246 - DNA, 75 bp, Homo sapiens
ttcatttgtctgttggtacagaccactttatggagctttcagtggccacagatgtctttaattccaaaaacctgg

SEQ ID NO: 428247 - DNA, 75 bp, Homo sapiens
tgactaaagcttgaaatgctacatttccaaggcattgaatgccccagaggagcccgaaacctcccaggcttggtg

SEQ ID NO: 428248 - DNA, 100 bp, Homo sapiens
ctgtgccgggcggagagaactcagcgaggattctgagtcatctcaactcgaactccacctccaccttcaccgttgccatttccaacacaagctatccttc

SEQ ID NO: 428249 - DNA, 75 bp, Homo sapiens
ctacatgtttgagtacccggagtatcagagctcttcagaaaccaggctgctttcaggaacattgctgtggattcc

SEQ ID NO: 428250 - DNA, 106 bp, Homo sapiens
ccctgagtcactgcctgcgcagctccggccgcctggctccccatactagtcgccggatgttgagaaagagaaggaaacccacagttacctcagcaaagaggagatc

SEQ ID NO: 428251 - DNA, 98 bp, Homo sapiens
gaaggacctctggccacccggattgttcctactgacatgaatgaccagaatctagaagagccatccagatatgccaaagatgaagaggaagcctttct

SEQ ID NO: 428252 - DNA, 74 bp, Homo sapiens
agaaatttgatatgatcaaggatcaatttttaaagcccctgcagatcaagtcagtagtggcaccagagcatgtg

SEQ ID NO: 428253 - DNA, 117 bp, Homo sapiens
cttactggaggttttggctctgcgtgagtgtggtctacgagctgtttctcatctttatactcttccaggtgtacgtgaacggagagtgggtgaccaacatcagcgagggaggcagct

SEQ ID NO: 428254 - DNA, 83 bp, Homo sapiens
gtcctaaggaagtcagctctttggaactacgccggaaatcactgtggaaaatcttcccagttatttcagacttcagaaaccat

SEQ ID NO: 428255 - DNA, 90 bp, Homo sapiens
gttctttccattgtgtctgccagcagggtttctcaatctctgcagatggccgtacgtgtgaagctggttggtggagaatttgaactggag

SEQ ID NO: 428256 - DNA, 109 bp, Homo sapiens
ctcccctccagcgggagacagcgggctcctgtctcgggacgctgggacacctgtcgcctatatgattctataacagactcttccagaaatgatatgaagaggaaatttg

SEQ ID NO: 428257 - DNA, 100 bp, Homo sapiens
caagggcgagatcctggagagcctgcaggacggcgcggcagagtccccgtacgcctacagtaacggagcttctacctggccctctacaagcagatgagct

SEQ ID NO: 428258 - DNA, 100 bp, Homo sapiens
cagaccaaacatttccacatcaagtgtttcacctgcaaagtttttatggaaacgagccctcaaagatcgctttaaatatgttcgaagacccatagaagat

SEQ ID NO: 428259 - DNA, 100 bp, Homo sapiens
gccgtcttccccaggcctgcgtccgagtctccgccgctgcgggcccgctccgacgcggaaggtactccaaagattcaggtttactcacgtcatccagcag

SEQ ID NO: 428260 - DNA, 100 bp, Homo sapiens
ctaccgcaagctgcagaatttcctctacaacgtgctggagcggccgcgcggctgggcgttcatctaccacgcctacgttgtggacgaatgtggaacctcg

SEQ ID NO: 428261 - DNA, 75 bp, Homo sapiens
gaactttcaattgaaacaagaggctctcccagaaaagaggtattttcagtgtcaacccaaatatggcttgttcgc

SEQ ID NO: 428262 - DNA, 100 bp, Homo sapiens
ggacaaaggaacaggtatctcagcatttttgaaacgttggggttgttggagtggttggattttccctggaattgagtgagaaattcagaagactgaagcc

SEQ ID NO: 428263 - DNA, 50 bp, Homo sapiens
cctgaacggcagccccaagaacggaaagcttccccgggcgctgcctggac

SEQ ID NO: 428264 - DNA, 98 bp, Homo sapiens
tgaaagaaaggtttaaagacaaaaaacatctggataaattctcttcttatcatgtgaaaactgccttctttcacatggagtctcggtctgtcgcccag

SEQ ID NO: 428265 - DNA, 83 bp, Homo sapiens
cggacactggcggccatggaactcaccggtcaatggagtgacagttcacggagccacacccctcttcaatgcttgctgcagcg

SEQ ID NO: 428266 - DNA, 74 bp, Homo sapiens
tattgcagtgattaatgcgcttttcctgaaggctcctgatgagaggaggcagaaactggcgatggaatatgaga

SEQ ID NO: 428267 - DNA, 74 bp, Homo sapiens
tggatttcagcctgcacggatggtcttgaaacacaaatggtttttggtggagattcacattttatttatgtata

SEQ ID NO: 428268 - DNA, 101 bp, Homo sapiens
ctttgatgagctgtgtttgaagacaggctccagtgatcattctacatatattgtacaaacactagattttcacctgggtcataatactatggttaccaaac

SEQ ID NO: 428269 - DNA, 100 bp, Homo sapiens
gagcctggaggattgtcactccaacctcttttcgctgggatgtgtttggccaaatgggagagtggttacaacacacgagctacaaactacaatgctggag

SEQ ID NO: 428270 - DNA, 80 bp, Homo sapiens
cagaagatgcctctgattggtctgggtacctggaagagtgagcctggtcagctttagccacagtagaagacttccagatt

SEQ ID NO: 428271 - DNA, 100 bp, Homo sapiens
gtggacgaggtgttggcggaaggaggcaggtggaagtcatcataaagtttctgtttcacccgtcgtccatgttcgaggactctgtgaatctgtggtggaa

SEQ ID NO: 428272 - DNA, 90 bp, Homo sapiens
tatttagttctggggagcgcctcgtcgacatgagtgatgtggaggaaaacaacttcgagggcagagatgtacagttacccagcacgtgta

SEQ ID NO: 428273 - DNA, 80 bp, Homo sapiens
gcaaggcggcgattttcccttctgtcagtgtgggccaaactgaaattgcagaaggcttcagaacgatggcagcctgacac

SEQ ID NO: 428274 - DNA, 75 bp, Homo sapiens
gaaccatgctcaccgaccctgatgatgacctggaagaaggtgaagtgaaggaccccagtgacaggaaggtgaggc

SEQ ID NO: 428275 - DNA, 100 bp, Homo sapiens
gtgaaaatgaagccagaccgagacagccgctcaggaagcaatcttgcatgcgtctggaaatggcacaaccaaggactactgcatgctttataacccttat

SEQ ID NO: 428276 - DNA, 90 bp, Homo sapiens
gagaagcagtgcgccgtggccaagaactccgcggcctaccactccaaggccttacataggaagtccttctaaagagctgcctgccagctg

SEQ ID NO: 428277 - DNA, 100 bp, Homo sapiens
acctcaaatcagtactgaggggagaagaatttggattggtttcctcggatgcgagccatgtccctcgttagcaatgaaggcgacagtgagcaaaatgaaa

SEQ ID NO: 428278 - DNA, 99 bp, Homo sapiens
gggacggggcgcgaagccggaggctccgggacgtggatacaggattgttcaagtttagaagaatacaacattgccgcagcattactccctttgaccagt

SEQ ID NO: 428279 - DNA, 75 bp, Homo sapiens
gacatgtctgatcccttgctcccatccctgcagcatgaacaagagttttccagaaaaagaccttctgcactgtcc

SEQ ID NO: 428280 - DNA, 100 bp, Homo sapiens
cacgggatggcggaggcgcctcctgtctcagcggccctccaggcactgaagcgtaagaagaggtatgagaagcagctggcgcagatcgacggcacattat

SEQ ID NO: 428281 - DNA, 75 bp, Homo sapiens
gcgacccaagcgccgcggttaaccacgtctcgtccacgacctccctaggtttgtcctggttgtggtcaagactgg

SEQ ID NO: 428282 - DNA, 83 bp, Homo sapiens
cagttatcagtcccgtgggcaatagagtcactgtatttgaccttaaaaaataagaccatcatcatgtggaaactgaccaggga

SEQ ID NO: 428283 - DNA, 75 bp, Homo sapiens
gggaggaggaaaatcatcttatcagacgaaggcaaaatgtatggagaccaagacacattccaccccagtgggggg

SEQ ID NO: 428284 - DNA, 113 bp, Homo sapiens
agaaactttggggcccgcgccgcgcgccggcggcaccatgaagtcagcggaggaagacaatgcagatcttcgtgaagactctgactggtaagaccatcaccctcgaggttgag

SEQ ID NO: 428285 - DNA, 83 bp, Homo sapiens
ccaggcagaaggcctctctcctgatacagcaggcgctcaccatgttccctggaggtttgttgataagccggggcccttcgtgg

SEQ ID NO: 428286 - DNA, 74 bp, Homo sapiens
gatgtgaaaactctgttactgaagctccaaaaggaattcttcatttgtctcctgatgtttatcaagagatggaa

SEQ ID NO: 428287 - DNA, 83 bp, Homo sapiens
cgccgtcgcacgagtctttccttagtaacctgggcgatagctgacaatgcagatcttcgtgaagactctgactggtaagacca

SEQ ID NO: 428288 - DNA, 100 bp, Homo sapiens
ctcttctaggagacgagagagcgaacgccagggaccctgtgcaggcctgctcctccgtttgcaagactgtcttctgaagattgatgtctatttccttgag

SEQ ID NO: 428289 - DNA, 75 bp, Homo sapiens
aggcctgatgggatttaggagaggaggattgcagaagagcaatatgttaaggatacctgtaagaaaggccttagt

SEQ ID NO: 428290 - DNA, 83 bp, Homo sapiens
cattccttctcacttggcctatggaaaacggggatttccaccatctgtcccagatcatggattcctgatacctctcactcaag

SEQ ID NO: 428291 - DNA, 101 bp, Homo sapiens
ggattttcacgtgctcttgctaaagaggtagcaagaaagaaaattagagtgaatgtagttgcaccagcagtcctatgcaccagctccccaccccatggctc

SEQ ID NO: 428292 - DNA, 80 bp, Homo sapiens
ggacaaccagccccgagacatcggactgcaggcctgctcaaggtggtgttcgtggtcttcgcctccttgtgtgcctggta

SEQ ID NO: 428293 - DNA, 98 bp, Homo sapiens
tcgataagaaattaactacccttgcagatctattccggccacccattgatttgatgcataaaggcagctttgaaacaagttcccgattttgaaatgct

SEQ ID NO: 428294 - DNA, 102 bp, Homo sapiens
ggccatcgaggccctgctgcacgacctcagctcccagaggatcaccagcgtgggacccttgaacatctgtgaagaaatgactattctgcatggaggcttctt

SEQ ID NO: 428295 - DNA, 101 bp, Homo sapiens
cagcaatccagcaacgagcaatcaagcagatcatcaaagggagagatgtcatcgcacaggaaaaagacctcgatgaagttctgcagacccactcagtgttt

SEQ ID NO: 428296 - DNA, 75 bp, Homo sapiens
cggagaatggaactgtatgccagcagcttgttgtacaggtatttgaagtataccatacaactgttttgaaaatcc

SEQ ID NO: 428297 - DNA, 100 bp, Homo sapiens
tcaggaatgtgtttcactgtgaggcacacagaattctctacatttgtgaaagtcagtttctgaggaatttcatcagttgcaggcagaggcaccaaggctg

SEQ ID NO: 428298 - DNA, 74 bp, Homo sapiens
ttttggagcctcgccccccggggaagcggtggatgcggagctccctgggtcctcagcagtgaggctggcctccc

SEQ ID NO: 428299 - DNA, 105 bp, Homo sapiens
tcgagcagaggcctatttgatagaggaaatgtatgatgaagatgatgataattccgaagaaggcttccacactattcattcaggaaggcatgaatatgcattcag

SEQ ID NO: 428300 - DNA, 83 bp, Homo sapiens
gcggcccgcttcctggaatggcaagcgcagcaacaacagagagcacgtggctccccacaggtgcaggaagccgccgcccagcc

SEQ ID NO: 428301 - DNA, 50 bp, Homo sapiens
cgacaagggtgttcccgaactagagtggagtgcctggtgaagaatgtgat

SEQ ID NO: 428302 - DNA, 75 bp, Homo sapiens
cgcgcatgcagtacgccccgaacactcaggagagaagatgactgaggaggaggtggagaccgttctggcaggaca

SEQ ID NO: 428303 - DNA, 100 bp, Homo sapiens
cctccttgaagtatttggctgaggagttttcaatcccatcactcagcctctgaagaagcttcgggttcagactcaggcagtcagtcggaaagtgagcagg

SEQ ID NO: 428304 - DNA, 80 bp, Homo sapiens
ggcccgggcagcctgcgcgagctgcgggcgcgcgagttcagccgcctggcagatggcccactgcgtgaccttggttcagc

SEQ ID NO: 428305 - DNA, 100 bp, Homo sapiens
aaactgtacgtccctctggaccaccactttccatcatgccccaattttctagaccttttgtccccgggcaaggtgatgatgaacagtctacacagatggc

SEQ ID NO: 428306 - DNA, 90 bp, Homo sapiens
gtgctagcacaagaggaatcagccaggaccaatgctgaaaaacagtgtaaaacctgttctgagccaaaaaagataaccagttcctctgcc

SEQ ID NO: 428307 - DNA, 74 bp, Homo sapiens
agtaacacagctttcacaagaggcaacatcagatgctgacctgaaagaacatatggttggaatcatattcagca

SEQ ID NO: 428308 - DNA, 98 bp, Homo sapiens
ggcggcggcggcgcgcgggggcgacgcgcgggaacaacgcgagtcggcgcgcgggacgaagcatctggcgaggccccaatgtgaactgcacagacagt

SEQ ID NO: 428309 - DNA, 99 bp, Homo sapiens
ctcgggaagagatagatcatgcagagtattacctttacaacatcaaagctaagccagaagatttatcacattttcatcatcagctacaggattagaaag

SEQ ID NO: 428310 - DNA, 83 bp, Homo sapiens
cttcaaggataagggcgacagcaacagctctgccggctggaaggcttgggcactgtttaaaggaaagttccgagaaggcatcg

SEQ ID NO: 428311 - DNA, 50 bp, Homo sapiens
ctcaggttgcaattgatgcaaaagtgggttgcattcagctttactacgtc

SEQ ID NO: 428312 - DNA, 75 bp, Homo sapiens
atcggacatgatcctcatcttttatacactcttagtgctgtccagatgctgcagtctgaagagacttccagcacc

SEQ ID NO: 428313 - DNA, 75 bp, Homo sapiens
accttgtgggatgtgaaaactctgttactgaagataggagaaagaattcgagtcatcttggacatggaagataag

SEQ ID NO: 428314 - DNA, 100 bp, Homo sapiens
ccggcgccaagccgccgtcatcttcttcctgtgccagatttaggtcgatctcgagaactacagtatgtatacgtggataacaacattcacctgaaaggct

SEQ ID NO: 428315 - DNA, 90 bp, Homo sapiens
cggcgcgggagcagcacttccacagccaagtgcgggagtccacggtgtgctgggcatcaaggtgaagatcatgctgccctgggacccaac

SEQ ID NO: 428316 - DNA, 51 bp, Homo sapiens
ccttgctggggacgtggagacccatgtatgaggatacatgggctgcacttc

SEQ ID NO: 428317 - DNA, 51 bp, Homo sapiens
cttcaccactggaacaagcacaaggaattggattcaagtacgtggctctgg

SEQ ID NO: 428318 - DNA, 74 bp, Homo sapiens
acccaagttccttcagattttcagaaactttctccctttatccacagactgactgaacatgtgcaagataaaag

SEQ ID NO: 428319 - DNA, 99 bp, Homo sapiens
agacatagaggaaattatccgagatgtggacctcaatggggatggacgagtggactttgaaggagttcatgatcaagtgttgcccacaccaaatgcttc

SEQ ID NO: 428320 - DNA, 82 bp, Homo sapiens
cgggggcgggccggggtcaccacgcctgccccagggaaccgcacaggattttttatcaagcagaaatgcatcgaacaacgag

SEQ ID NO: 428321 - DNA, 100 bp, Homo sapiens
ggagttccgcatggagaagttgaaccagctgtgggagaaggcccagcgagctctccctgcatgtcctatccaggccacctgtgaggctgcttccaaggag

SEQ ID NO: 428322 - DNA, 50 bp, Homo sapiens
ctcgctctggccgacgagtggagaaagccaccagcccctcgggttccaag

SEQ ID NO: 428323 - DNA, 95 bp, Homo sapiens
gttccctaaatctatagaaacacctaatgtcagggcagaccccttcaaagaactaaggaaagtgagggatgctactggagttgatatcaacatgc

SEQ ID NO: 428324 - DNA, 100 bp, Homo sapiens
atggtgagtgtgtcggggggcttggcggcttttctcctcagttttctggagtgctttggaggagaggtgactctcctattccatctgtttcttcgggatc

SEQ ID NO: 428325 - DNA, 51 bp, Homo sapiens
agtcggcacctgaaggacatggagaggcacagagctttggcctgctggatc

SEQ ID NO: 428326 - DNA, 82 bp, Homo sapiens
agcagatactgaatgtaaaccctgcaggattattcaagatcaggttgtagccattttcaacaaggatcactgatcaaaattt

SEQ ID NO: 428327 - DNA, 98 bp, Homo sapiens
ggccactctctttgaccctcagcttcacgatggctcgtgcatctgtgaacgagtggcctccattgtagacgggtgattctgggggtccacttgtctgt

SEQ ID NO: 428328 - DNA, 100 bp, Homo sapiens
ctttggggagcggtttggaggtggaaacccagaactgctgacacagatggtgtccaagggcttcctagattccagaatgactatcttgacttaccccttt

SEQ ID NO: 428329 - DNA, 82 bp, Homo sapiens
agactccagctcagactcagacttcgagccatcccagaaccacagccaaggcgtccgagctgggccacagcctgaacgagaa

SEQ ID NO: 428330 - DNA, 100 bp, Homo sapiens
ctggagcgcaccatcaacctattgtccccagctacggaaaacaagctccggctgcattaccgtagggccctcaggaacaatacagatccctacaagcggg

SEQ ID NO: 428331 - DNA, 100 bp, Homo sapiens
cttcagcagaggcggcagcctggagagtcgaagcagcagctctcgctccagaagcttcactttggacattgagatctgctggttggagatcttagtgccc

SEQ ID NO: 428332 - DNA, 90 bp, Homo sapiens
ctgcagcgaggacggcgaggcgctcaacggcgagccagagctggacctcaccagcaagaaagctctgggtgtgcggcagtaccatgtggc

SEQ ID NO: 428333 - DNA, 75 bp, Homo sapiens
tctggctgtgcggttctcagatggtggcactcaatttccagacggcagggagtgcatccgccccaacccttttcc

SEQ ID NO: 428334 - DNA, 50 bp, Homo sapiens
cactggaaccgcttccgagacgtctctaattaacagaagatggcaaagcc

SEQ ID NO: 428335 - DNA, 74 bp, Homo sapiens
cgaggagtcttctttctaaacagcacccttaatgtcccgagcaaccccgcccagtctgcgcagtcacagtccag

SEQ ID NO: 428336 - DNA, 83 bp, Homo sapiens
tgaaattcctatcactaaaggatttcctctgcagaagaaagatcagcaactggagcctaaaaaaagtaccagccctaaaaaag

SEQ ID NO: 428337 - DNA, 74 bp, Homo sapiens
ttgattgactatggtctctccggctaccagccatattttctgctcttaagaatcttcaagataagattcgacgc

SEQ ID NO: 428338 - DNA, 100 bp, Homo sapiens
gacgtcttgcctgtgtcccacttgttcgcggcctataggcctttggacaagcacacacaaaccacaagaaggtggctgctgacggagagagccgggagga

SEQ ID NO: 428339 - DNA, 100 bp, Homo sapiens
agtctcaagggcatagggtccttatctactcccagatgaccaggatgatagacctactggagattgtatctgaggaaaggaagaggggaaaccagaatct

SEQ ID NO: 428340 - DNA, 74 bp, Homo sapiens
ctgacacccataccttttgggcttcagaatgcagtgttttcgggatttgtggaactgactatatttcccacagt

SEQ ID NO: 428341 - DNA, 75 bp, Homo sapiens
tcatagtgggacagcattaccgacaagcaaggtcgagcctcttaggcagagtttaacacatgggagctgcctgcc

SEQ ID NO: 428342 - DNA, 50 bp, Homo sapiens
cagctcagcagggaaccctgcagatgcctgaggaaacccagacccaagac

SEQ ID NO: 428343 - DNA, 98 bp, Homo sapiens
tcacggtcctcctggctgtgctcatatacacctgctgcaagctttcttcctggtggcagatgacatcatggattcatcccttacccgccggggacaga

SEQ ID NO: 428344 - DNA, 83 bp, Homo sapiens
taccaaggcaccgggtccctcgcccaggtccccttggacaaatggacaatgcagatcttcgtgaagactctgactggtaagac

SEQ ID NO: 428345 - DNA, 74 bp, Homo sapiens
atcggtggtaacgacggcctcagcaggcggggaagatgaaagggaccacatggtgacaatgcatgatgtgcttg

SEQ ID NO: 428346 - DNA, 75 bp, Homo sapiens
ttgctgtgaatgtgaagaatcagaaatctttactgattccaatgtacaacgaatattattggaattggacatgca

SEQ ID NO: 428347 - DNA, 100 bp, Homo sapiens
ggctggtggtgcttccaactgcgggacaggaagtggccgtagcggcttgttggataagggcacacgtgtttcacgttgacaggtttgcttgggacgctag

SEQ ID NO: 428348 - DNA, 75 bp, Homo sapiens
cagatttgagctttcttcttggacacctaatacccacagtcctccaggccagctgcgggccgtccagcggctgtg

SEQ ID NO: 428349 - DNA, 83 bp, Homo sapiens
gcggaagatcgtcgccacctggatgctggagatgaagatctccttcaacgacaaaagcctgcagaccacatttgagtaccctt

SEQ ID NO: 428350 - DNA, 113 bp, Homo sapiens
gcttcctgaagcagttctgtgtatccaacattaatcagaaggtgaagtttcaggatgtgaccgcgtgcctgccagaatgggaggatgggcatttttaccttgccaagtactat

SEQ ID NO: 428351 - DNA, 101 bp, Homo sapiens
cgggaggagcctgttcccctgagagctacagagacttctgaagtggagagtctgcgacctcctcggttcttcaatgaagatggagttatcagaccgtacag

SEQ ID NO: 428352 - DNA, 74 bp, Homo sapiens
ggagccgaaggcggcgggagccagagtcgccgccggcgtcggcgccgatgctggtgggctgcgcggacaggacg

SEQ ID NO: 428353 - DNA, 76 bp, Homo sapiens
ataaaactgaccatagccagagaacagccctccatcttgcagcccagaaggtgaatcagctcccggccgactttag

SEQ ID NO: 428354 - DNA, 115 bp, Homo sapiens
ctttgaccgcgctaagatggcgactcccatgcatcggctaatagcccggagacaagcggtaagatgatcatgcaggataaactggagaaggagcggaatgatgctaagaacgcag

SEQ ID NO: 428355 - DNA, 82 bp, Homo sapiens
cggttcttggtgggatctgagcagggtggcccagttgaaatccttcccttcctctaccttggaagtgcctaccatgcatcca

SEQ ID NO: 428356 - DNA, 75 bp, Homo sapiens
ctaactattcatcctttgaaagactacgtggcaacaggccaggctgctgatactttggctgtgaggcaaaaaagg

SEQ ID NO: 428357 - DNA, 101 bp, Homo sapiens
aacgactcgagtcccagcgcgaagctgagtggaagaaggaggaggagcggcttcgcctggaggaggagcagaagttgctgagacaaaggaaaacccactcc

SEQ ID NO: 428358 - DNA, 118 bp, Homo sapiens
agtaaaacgccggaattgtcctttccaacatccagagctgcatcattccttggggcaaaatgtggacaagggtatgaggatacatgggctgcacttcacagaagagccaaagactgtg

SEQ ID NO: 428359 - DNA, 90 bp, Homo sapiens
gcttcaaaaggcatttcatactatattggagcccagtcaaattttacaaaacttaaggaagctgagtctctagtgatccctgaaaagttc

SEQ ID NO: 428360 - DNA, 51 bp, Homo sapiens
aacaaccgcttggaatgctgcaacaatgccctggtacctgacagtgtaaag

SEQ ID NO: 428361 - DNA, 98 bp, Homo sapiens
aggagagcaattagtgagacagagaatatgccttctgcatcctgtgatacactactggatgacatcgaagatatcgtgtctcaggaagattcaaaacc

SEQ ID NO: 428362 - DNA, 75 bp, Homo sapiens
aagagaagaatctaacaaacggcaaagaacttactgattcttgagggcatgaaaatcaacatggacaagaatcgg

SEQ ID NO: 428363 - DNA, 97 bp, Homo sapiens
atttcccacccagaatctttaggtaaatgaggagcccatcatggcgacgccccctaagcggcgggcggtggaggccacgggggagaaagtgctgcgc

SEQ ID NO: 428364 - DNA, 100 bp, Homo sapiens
ctttcagagtgtaaagtaatcttggaatataaagacactggccaaaagaagaccctagacaagaaagatggaagacgaatgtcttttcagaaacctaaag

SEQ ID NO: 428365 - DNA, 75 bp, Homo sapiens
cacagagccagggcttccactgcccaccagtgtggccttagcctctagttcgttagtcaaaacgtgaaaaaaaag

SEQ ID NO: 428366 - DNA, 101 bp, Homo sapiens
ggggctaagcgaggcggaggcgatcggtgctgattcggcgcgatttgaggagctgctgctgcagatggcctgatatgaaggagtcacgcctcccgcctccc

SEQ ID NO: 428367 - DNA, 75 bp, Homo sapiens
tgctgcagaagtttgttcaaaacaagtggctgattgaggaattcctggtgactggaagggggagtgactcaggcc

SEQ ID NO: 428368 - DNA, 100 bp, Homo sapiens
cttgcagagacagctcaacacggcacttccacagagagaaaaggaacagttccgtaagctctttattggtggcttaagctttgaaaccacagaagaaagt

SEQ ID NO: 428369 - DNA, 74 bp, Homo sapiens
ggcgactgaggccggacggggcggacggcgacgcagcccgcggcagaagatattcttactgattctccgggctc

SEQ ID NO: 428370 - DNA, 50 bp, Homo sapiens
cctccagacctctcggcgcggatgcctgtgaggagccaccaacatttgaa

SEQ ID NO: 428371 - DNA, 101 bp, Homo sapiens
atggtgacagactatggggcctttatcaaaatcccaggctgtcggaagcaagatgagaagcatgaggctgagagaggaggagtcacccggacccagccaca

SEQ ID NO: 428372 - DNA, 100 bp, Homo sapiens
atgggccctccccagagtccaatggatcaacacagccaaggatgctgctggcaaggtgctggaccgctgggccatcatgtctcgagaagaggaaatcatc

SEQ ID NO: 428373 - DNA, 100 bp, Homo sapiens
gaacgctggggaggttgggctgaactgcagtgggagaggagaagagatgctggcgtgaaggggtgtcatggagaaactccagctgggcccagagattctg

SEQ ID NO: 428374 - DNA, 96 bp, Homo sapiens
cttccgtgctgtcctacgaaagcctggtccacgccgtggccggagccgtgcatgcttttcacttccactgcatctctcgctggctcaaaacacgac

SEQ ID NO: 428375 - DNA, 123 bp, Homo sapiens
tgggcgctgctggcgctctggctgtgctgcgcggcccccgcgcatgggaagaggaagaacgtctgagaaataaaattcgagctgatcatgagaaggccttggaagaagcaaaagaaaaattaa

SEQ ID NO: 428376 - DNA, 83 bp, Homo sapiens
gcagccgcgaggaggcgcgggaggtgttcgagaacgaccccgagacggagggagccatggatttgctgcgggagctgaaggcc

SEQ ID NO: 428377 - DNA, 90 bp, Homo sapiens
caaagataaatccaaatactgcatatcagaaacaacaggtgctggagaatctggtaaaagcaccattgtgaagcagatgaggatcctgca

SEQ ID NO: 428378 - DNA, 75 bp, Homo sapiens
gccccctcgggaggcccgacgcgactgggcccctcaggatattagaaatggctactccccagtcaattttcatct

SEQ ID NO: 428379 - DNA, 82 bp, Homo sapiens
taaactaccgaagtctgcttctgcttccaaaggagaaccgcagtgaaagttgcagagtgggcaggatcttaagacccgatag

SEQ ID NO: 428380 - DNA, 100 bp, Homo sapiens
ccccggcgggccgcgcctggtgatcggctccttaccagctcacctctcaccgcgcatgtttggaggttttggtatcaaggttatgctggttcctaaaaag

SEQ ID NO: 428381 - DNA, 74 bp, Homo sapiens
gcagagcgcctcaaaaccgaaggctctgtggatagcaactggatcgtgggtgccacgctggagaagaagctccc

SEQ ID NO: 428382 - DNA, 93 bp, Homo sapiens
cactgtggttcctgcatgaagacagtggctggcggtgcctggacgtacaaggccatcgatgcacccctcggagctaatagcggagatgagaaa

SEQ ID NO: 428383 - DNA, 75 bp, Homo sapiens
tgtttgacccctttgacctcttcgatgtgcgagactttggaaaggacgtgtttgagatgaggtttgccaagatgc

SEQ ID NO: 428384 - DNA, 98 bp, Homo sapiens
atttacttgaaatgaaaggagattccaacctacttcagactaggactcaatgaaattgctgcccccatgttcctgaggctctgcaagctgaagcttat

SEQ ID NO: 428385 - DNA, 75 bp, Homo sapiens
ggaggccgaggcaggtggatcacttgaggtgaacgggcagaatgtggagggactgcgccatgctgaggtggtggc

SEQ ID NO: 428386 - DNA, 50 bp, Homo sapiens
cagaggtggaggcgctttgaaaggtcctgagggagtctaacaagttagca

SEQ ID NO: 428387 - DNA, 74 bp, Homo sapiens
ccagattcacagatttattgtgaacactctgaaagacggaaggttggcaaaagcagcttttgatgatgcaattg

SEQ ID NO: 428388 - DNA, 100 bp, Homo sapiens
gagcctgcactttaagaaggcgctcttgttttgaatacgtagtctgtcctgttctttcaaagttgttattgatgccttcagattgatcaatgctaatatg

SEQ ID NO: 428389 - DNA, 100 bp, Homo sapiens
gcaagttcttaggcatgtcaataggcgtgacaatggttggagaaggtatttgggattcaattgaaggaaattgataagaatgaccacttgtacattcttc

SEQ ID NO: 428390 - DNA, 100 bp, Homo sapiens
cgcctcgtcgacatgagtgatgtggaggaaaacaacttcgagggcagagtatcattgcccagtgcctaagatcttttatgttcagctcactgtaggaaat

SEQ ID NO: 428391 - DNA, 97 bp, Homo sapiens
tgcagtggcgcctaaagtctgagagagggaagtcgcctctgtgctcgtgagtgcatggggtataagcaaagcttcgaggcgcaccaggacgaggcag

SEQ ID NO: 428392 - DNA, 82 bp, Homo sapiens
cccttgggaggtgatgacactcagcactgtcgccatgtgctgtcagcagcactctccccgactggcacatcccagtggaagt

SEQ ID NO: 428393 - DNA, 100 bp, Homo sapiens
gtacaacaatgagccttcaaacatatttgaggttaccagccagtcttgtctggtcaacagggattccaaggcctaataggagtgcagcagccacctcaga

SEQ ID NO: 428394 - DNA, 87 bp, Homo sapiens
ctcaggctggaacttgccctgtctcctcgcagatgaggtgctggagaatctggtaaaagcaccattgtgaagcagatgaggatcctg

SEQ ID NO: 428395 - DNA, 100 bp, Homo sapiens
ttttggagcatctccacccaggaacctcgccatccagaagtactccaaagattcaggtttactcacgtcatccagcagagaatggaaagtcaaatttcct

SEQ ID NO: 428396 - DNA, 75 bp, Homo sapiens
cgttggccttgggcgcccttccaggcttccttctgaaaggccggctccagcagcctagatattatcctactgaag

SEQ ID NO: 428397 - DNA, 100 bp, Homo sapiens
tgaagttcagtgtttttctattcatgattggacatgtcctagacatcacttagaggttttctgtctcaactggtctctgacaagcctctgactgaatgta

SEQ ID NO: 428398 - DNA, 99 bp, Homo sapiens
atcggaatgtgatcacagagcctatttacccagaagtagtccatatggccttggacaagattcgctatgagagcctgacagacccttcgaagttggaca

SEQ ID NO: 428399 - DNA, 74 bp, Homo sapiens
aggaaacctttccaacacagatgtccaagctgccaatgagcctttgaatacatctttatcaatgaccagtgcag

SEQ ID NO: 428400 - DNA, 90 bp, Homo sapiens
ggagtccttggtccccaatgcactggattacatccgcacggtcaagctggtgctgtccgccctgcagtccccacaggaggccctccatac

SEQ ID NO: 428401 - DNA, 88 bp, Homo sapiens
cttttctgatgattctgacctgcagttagcaaccacacagaaattccggaaactgctctccaaaggcacagaaaactgaatctgtaga

SEQ ID NO: 428402 - DNA, 100 bp, Homo sapiens
aggatggatctggttggtggatgaacaagtgtcacgctggccatctcaatggagtttattaccaagtgtgcgattctctcaccagcatttaaagtgcgtg

SEQ ID NO: 428403 - DNA, 90 bp, Homo sapiens
ccaacagccagtgatatgctatacatggagctcttgtccctggcaaagcgaaagcgcagtgactctgaggagaaggagccgcctgtgagt

SEQ ID NO: 428404 - DNA, 100 bp, Homo sapiens
cctggcgtgcactccgcacctcggggacattattgcgcgtggaacggctgcttttggaagataaagcatatgatggctttcattgaacaagaagccaatg

SEQ ID NO: 428405 - DNA, 97 bp, Homo sapiens
aggcgcggccggggctctcctcgtctatgatatcaccagcctcaatatcatcctaatatccatcccagccagccccggtggcatcctcactctccaa

SEQ ID NO: 428406 - DNA, 82 bp, Homo sapiens
ggtggttgttggcgtgtccctgcagcgaaggatcctggttgatttggtcgtattgggcgcctggtcaccagggctgctttta

SEQ ID NO: 428407 - DNA, 100 bp, Homo sapiens
ctgagcctgttgagcctttaaaggagactacctacactgaacagagccatgaagaacttggagaggaaatagttgacaaacagggacataccaaagtatt

SEQ ID NO: 428408 - DNA, 136 bp, Homo sapiens
gaaaagcttctgcagcgagaagtgctttgcggcctgccgacgagcctacttcaagagaaataaggtctaccaggtccagaaggtcctccaggtctccctggaaatggaggtattaaaggagagaagggaaatccag

SEQ ID NO: 428409 - DNA, 105 bp, Homo sapiens
ctgaaagctggcaacgtgctgatgaccctcgagggagacatcaggctggttgctctaggtcgtaaccagcctttgaaaaaggagaaaccaaaatggaaaagcgat

SEQ ID NO: 428410 - DNA, 74 bp, Homo sapiens
caacacctgtgaagagagaacgcagtggcacagagtagcaggatgaccatgaaagctgtggttctaattctacc

SEQ ID NO: 428411 - DNA, 83 bp, Homo sapiens
gttctcgcgagagtcgtctcctcgataccaagtcatgcaagacaagataatctgccttccgaaaagagtgcagcctgctcaga

SEQ ID NO: 428412 - DNA, 100 bp, Homo sapiens
gtcaatgccactaaccagatgggaagcagtttctcggatgaactttatgtggacgtgacttacatagcatgctaggaacttactctgatgaatttgggaa

SEQ ID NO: 428413 - DNA, 115 bp, Homo sapiens
gagtgctccatcatcgggagaatccaagcaggaccgccatggaggaaggtcaatattcagggtgtcttggccatggtcccctggtgctgcaactcctctccttcacgctcttggc

SEQ ID NO: 428414 - DNA, 75 bp, Homo sapiens
caacgcttctctttctggtcaaaatggctggtaagcaggccggagggccctcctggacccgggagcggaccctgg

SEQ ID NO: 428415 - DNA, 131 bp, Homo sapiens
cctgagtgagtgttacaacgagaaggggggcatcccaggcaaggcagctaccaagcacaggtgtgaaggttaccttccgaacaagaatctatcactgtaatattaacagccaaggtgtgatctgtctggac

SEQ ID NO: 428416 - DNA, 75 bp, Homo sapiens
gatgctcatccataaaactgaagatgtgaatactctgtttctggcccccaaagacaaaccaagtggagacacagc

SEQ ID NO: 428417 - DNA, 75 bp, Homo sapiens
cagacataagtaacaggaaaatggctaaactatacatggtcgctttgctgttcgtgatatgagacagacagttgc

SEQ ID NO: 428418 - DNA, 100 bp, Homo sapiens
aatttggtccaatctccagtatcgatgcaatgatccaacttagaaataatgtttcattcaagataaggctcgtggcttaggagattgtgacctggcttgc

SEQ ID NO: 428419 - DNA, 101 bp, Homo sapiens
ccctgctgggggtgctgggcgacctgcaggcagcaccggaggcccaggtctccgtgcagcccaacttccagcaggacaagagaggtccaccgggagagcgg

SEQ ID NO: 428420 - DNA, 100 bp, Homo sapiens
tgtttggtgcgaggaggtcacgaaatcatccttgctgcctttgacaatttcaaagaggcagtcgatgatgtgaagaaaggttacatcaaagcagaagaaa

SEQ ID NO: 428421 - DNA, 75 bp, Homo sapiens
cactgacacaaaaagttcaagctggtgcctatcctacagaaaagattcgacacctcttagaggctgcaatcccag

SEQ ID NO: 428422 - DNA, 80 bp, Homo sapiens
tgaagatgtcggccttctgagccgactgcggtggtcaagaggttgattcttcaccacactgaaaccattaggaaaaatcc

SEQ ID NO: 428423 - DNA, 101 bp, Homo sapiens
attttccccagagaatacctccttcaacagatccacctgtattcacttgccgacctgcagcaggtctgtgagctggatattatctttaattttgaaaaggc

SEQ ID NO: 428424 - DNA, 75 bp, Homo sapiens
ttgcagcacttgttccccaaacaagtgctcctacattctgacccaacatgagtgaagtttcctgcaagaaacggg

SEQ ID NO: 428425 - DNA, 100 bp, Homo sapiens
cctcagcggtctgcgcctggcagcagaacaccgaaaatctctcccagcactttagaaaggggaccctgactgtgttaaagaagaagtgggagaacccagg

SEQ ID NO: 428426 - DNA, 51 bp, Homo sapiens
ccagaagctgccaccgaaccaagtggaagatagatgataagcctgtaaaaa

SEQ ID NO: 428427 - DNA, 100 bp, Homo sapiens
gttggctttgatgctgttactggagaattcactgcgaaattacaagagtccattgaatatgaagacttggggaaaaataattctgtaaaaacgattgcac

SEQ ID NO: 428428 - DNA, 74 bp, Homo sapiens
tgctcctgtcgccttcgcctcctaatccctagccactatggccctgggctgcatcttgtacctgctgtgcttcc

SEQ ID NO: 428429 - DNA, 82 bp, Homo sapiens
gttataatgtggaacctggatgaatgtagagagaaagtacttcaagacaatgcagatcttcgtgaagactctgactggtaag

SEQ ID NO: 428430 - DNA, 82 bp, Homo sapiens
gtgcatatagctggagcatacctcttaaagtggctattatcatggaaaactaatttttcccagagaatttcctttcaaacct

SEQ ID NO: 428431 - DNA, 100 bp, Homo sapiens
gaaaaataggctgccagcaaacagtcttccgcaggaaggagatgtgagaattcagcctcagcccccagatgaagatggggatcacagtgacaaagaagat

SEQ ID NO: 428432 - DNA, 50 bp, Homo sapiens
cacccgggcagccctcaccctgcctcccgcgacgatgcccctcaacgtta

SEQ ID NO: 428433 - DNA, 49 bp, Homo sapiens
cacagtcgggggtgtaggttatggggactcattctccaaggttaattcc

SEQ ID NO: 428434 - DNA, 90 bp, Homo sapiens
ggcgtccgagcggctccctaacaggcccgcctgtctgctcgtggccagcggcgccgccgaagaaccgactgggtctccagtagtctctga

SEQ ID NO: 428435 - DNA, 154 bp, Homo sapiens
gtcgcccaaagttccgtgagttgatcatcgaattctccaaaatggcccgagacccccagcgctaccttgtcattcaggtgcgaggatagctacaagccatggactttctgtcctgcttcttgtttgtggctttgtgaagggtgctttgctttaa

SEQ ID NO: 428436 - DNA, 82 bp, Homo sapiens
ggggactgcacgtagcccggcgctcggcatggctctcctggtgctcggcttcacaggctgctcaagaagccgagatcaatgc

SEQ ID NO: 428437 - DNA, 98 bp, Homo sapiens
ctgcagcagaaatggagctatgaagacaaaggcatgaaagatggccagaagataacattccatggtgaaggagaccaagaaccaggactggagccagg

SEQ ID NO: 428438 - DNA, 100 bp, Homo sapiens
tggactctgctcagagagatttgtatagagatgtgatgttggagaactatagcaacttggtatcactagggtctcctatggacagaagtgcgggcaagga

SEQ ID NO: 428439 - DNA, 98 bp, Homo sapiens
acaaatatgtggaagcacaatataaagtttcatcaacttccataccgggagatggagcatttgagacagttgaggagctcaagcttgggaaaatggtg

SEQ ID NO: 428440 - DNA, 74 bp, Homo sapiens
cgacagcgaagctgagcgtaaaggagctatgaagacatgattggtgaggaggtgccatcggatcaatactactg

SEQ ID NO: 428441 - DNA, 100 bp, Homo sapiens
tggagcacaggcttgtccggggagcagtatgccggaagctggttttcaggccacaaatgctttcacagatctccagtctggctcagctgccagtggtggg

SEQ ID NO: 428442 - DNA, 83 bp, Homo sapiens
gatgagacgctcaagtttgtggcccgcaactacctggaacctggtataatgggtctctcccaaatggcgatagaggaaggagg

SEQ ID NO: 428443 - DNA, 100 bp, Homo sapiens
caaagtatcttataacttctggctggaattaagggccacaacacacagtgatcttgttctaagagcaacaaagctgggaattccttatagagttattcac

SEQ ID NO: 428444 - DNA, 90 bp, Homo sapiens
tgcagacgttgttgcttgggcgcttctccgctgcgtgtaggtgaagggggcttcctgaccgagatgctgagggttggaaaagcaaaagca

SEQ ID NO: 428445 - DNA, 124 bp, Homo sapiens
gtgaaacaaggcttcttgtatcttcagcagcagcagacgtttggaaagatttcaggtatgctgctgaaagtgggaatcctctacattggtgggcagctggtgaccagtggggctgtaagcagtg

SEQ ID NO: 428446 - DNA, 75 bp, Homo sapiens
cgcccagcctgctcctatgcggtacttgaaggatggcgaagaggtcgcgcagtgttctccgtggcccgatgcccc

SEQ ID NO: 428447 - DNA, 82 bp, Homo sapiens
ccaagatccaggataaggaaggcattccccccgaccagcagaggttgatctttgctgggaaacagctggaagatggacgcac

SEQ ID NO: 428448 - DNA, 82 bp, Homo sapiens
gccgcgtagacctccgctcccccagaaccaaaaacttttgctagaaaatcagcttttacgagagaaaactcatggccttgta

SEQ ID NO: 428449 - DNA, 97 bp, Homo sapiens
gccaacatacacgcccatggaagtgcacttaaccccagaaatgaaatcatgcaccaggacatcgtcccgctctgtgctgccgacatccaggaccagc

SEQ ID NO: 428450 - DNA, 51 bp, Homo sapiens
ggagtaaccctcactggagaatccagagaaagcatgctctgaattgccatc

SEQ ID NO: 428451 - DNA, 98 bp, Homo sapiens
ctcgctccatctgtctccttgagcaaaaaagaaaagttgtttcctccaacattgatgttcctccagcaagtaatccttcccctctaccaccggatatg

SEQ ID NO: 428452 - DNA, 100 bp, Homo sapiens
tctctctttcgctctttggactaatgggagttgcttttggaatgaatttggaatcttcccttgaagaggcaatgaagggctattggcctgtcagctgctc

SEQ ID NO: 428453 - DNA, 75 bp, Homo sapiens
gccaaacggttagaccaattacactagttccaggtgtctttcaggttgcagaaaagatggaaaaaaggacatgtg

SEQ ID NO: 428454 - DNA, 75 bp, Homo sapiens
ccggagggagacgcgctgccgaggagaacccagcggttcccagaggtccacttgggccagtggtactttatcgca

SEQ ID NO: 428455 - DNA, 101 bp, Homo sapiens
aacacatcctggagctgcccggagttccgctcctgcgggcttagcaggaaagggtgcctaagcttcggaaccaaaaagaagcttcccagagccggggccag

SEQ ID NO: 428456 - DNA, 99 bp, Homo sapiens
cgcgcggatgtcggtgttcctggggccagatgggcctttgggtccccgaggattagctgaagctacagagatgtgcactcaagagtgcttggttttggg

SEQ ID NO: 428457 - DNA, 83 bp, Homo sapiens
gcagagcggagggagccccagacacgagttcaaggcccaagctacaagcagcttgctccagcatccaggaggtccggtggtgc

SEQ ID NO: 428458 - DNA, 74 bp, Homo sapiens
ctggaagaagattatgatgagacctacattcctagtgagcaagctcaccgtctacctgggaaagcgggactttg

SEQ ID NO: 428459 - DNA, 90 bp, Homo sapiens
gcatcgagcctcggctgaaggacttccaccagctcctgctcaacccgcccaaggacctgaagcccggcaacctggctgtgaacgaagact

SEQ ID NO: 428460 - DNA, 90 bp, Homo sapiens
ggccttctcagtcagctaactttcctgagttctcctttgacttcactagggaacaggaagtggcagtttttgtctttgataaaaaactga

SEQ ID NO: 428461 - DNA, 82 bp, Homo sapiens
tgacatatttttggacctgaaacagaaattctggaacacctatatgcaaacggggattcagcgtccgatcctttggaacagg

SEQ ID NO: 428462 - DNA, 51 bp, Homo sapiens
ctgactttcagctatggaatcggcttctattctgctgcttgaagtcagaac

SEQ ID NO: 428463 - DNA, 80 bp, Homo sapiens
aaatgataccttagaccccgaacctgcactatatgttgtggatctgaagaagtttaggaaaatagctgctggtgacagac

SEQ ID NO: 428464 - DNA, 98 bp, Homo sapiens
agctgtggctgtggctggcggaggccgagcagggtgtgggccgaagatatgctcatgtggtgttgaggaaagcagacattgacctcaccaagagggcg

SEQ ID NO: 428465 - DNA, 100 bp, Homo sapiens
cgcgcagggtcgcgatgctgcccggtttggcactgctcctgctggccgcctggacggctcgggcgctggagaacctaaaggcagacccagaagagctttt

SEQ ID NO: 428466 - DNA, 83 bp, Homo sapiens
ccgaggagaagtaccaggaggcgttggccaagggatctcattttgcccaacggtggtactccagcaggtacttcaagtccagc

SEQ ID NO: 428467 - DNA, 100 bp, Homo sapiens
aggaggaataatatttatggagcatatattatggaacacaatcctgataacttaagtgactctctcttttccggtgatgaagaaaatgctgggactgagg

SEQ ID NO: 428468 - DNA, 73 bp, Homo sapiens
gacagccctgtgtgacaccaagataagtaacgtgaaccatctgaaaagaccagtcagtggagtgggggacgct

SEQ ID NO: 428469 - DNA, 75 bp, Homo sapiens
gatcgcgctgatgttcctggcctggggggaagggtcttactgaagtaacacaaagcttaaaaatggaaaatgaag

SEQ ID NO: 428470 - DNA, 75 bp, Homo sapiens
cctgcaggcgttggttcccctctttgacctgaatcttgtggaagaagaatgaagttgctgattatgaagctacaa

SEQ ID NO: 428471 - DNA, 76 bp, Homo sapiens
aggctgagtatggagattatcaaccagaggaacatggacgttttgttctcatttcgtgatggagactgcagtaaag

SEQ ID NO: 428472 - DNA, 99 bp, Homo sapiens
cagcacctttcggcttctgagacggcggcagcagcggcattcaggaatgtctgatcacagatacggggatggtggctctactttccagagcacaacagg

SEQ ID NO: 428473 - DNA, 100 bp, Homo sapiens
ttacagaccggtggatcctgtccttcatgcagtctctcattggcttctttgagactgaaatggcaggcagttgtgaaaaacttcaggacaaaaatgtttc

SEQ ID NO: 428474 - DNA, 90 bp, Homo sapiens
tctgcccgtctgctgaagcatgtagtgagatgttaccttcgactttcagataaccccaggtcttgtggatgagcagcagaaagttcggac

SEQ ID NO: 428475 - DNA, 100 bp, Homo sapiens
ggagtccggacatctgaaacttggtgattgcccacagtgagtatcaaaagtccaaaagaatttccatctttctgagcatgcaagatgaaattgagacaga

SEQ ID NO: 428476 - DNA, 101 bp, Homo sapiens
cctctgtggcagccttctctcattcagagctgtctacttccccagcaggacagcatcattctcctatatcttctagacatcactcatcttcctcacaatca

SEQ ID NO: 428477 - DNA, 83 bp, Homo sapiens
cccggattggggatgagtatgcggaggacagctctgatgaggagctgagctgactgctgcccactttggaggaggcggtgggc

SEQ ID NO: 428478 - DNA, 89 bp, Homo sapiens
ctgatgcgagtctgggctctgcctcaccacttgtctcagagtcgttgcagttcgataaggagcagatggtcgcggtcacagaggccaat

SEQ ID NO: 428479 - DNA, 100 bp, Homo sapiens
cccggggcgatttacagatgcaggatcggaaagaatcccggccagacgtgcgaacagctccagctgggatttctctgcctcttccaaacttttcctccct

SEQ ID NO: 428480 - DNA, 100 bp, Homo sapiens
caacaatggaggccagtggctggtctcagggtgacgagaacaagtcagtgcgcgaccgtttcaacgcccgccagttcatctcctggctccaggacgtgga

SEQ ID NO: 428481 - DNA, 100 bp, Homo sapiens
agacttgtggctacacttctggccagtttgacctgggctctgtgtgctccgggatggagcaggtgtgcagagggtgagaacccagctctgggaccaagtc

SEQ ID NO: 428482 - DNA, 96 bp, Homo sapiens
agagcgcgaatatcgtcatcgttagaagtgaactccggagacggcattgactacagccagcagaagagggagaacattggggacttgatccaggag

SEQ ID NO: 428483 - DNA, 80 bp, Homo sapiens
caagttcatggtcacggagaaggcagcctacataggattttttatcaagcagaaatgcatcgaacaacgagaatcaagat

SEQ ID NO: 428484 - DNA, 83 bp, Homo sapiens
ctctgttcacggctccatcgctgttaattacacagatgaatcttgcactttcaagatatcattgcgaaatttccggtccatct

SEQ ID NO: 428485 - DNA, 100 bp, Homo sapiens
tgtaacacagattctcctctgcgctatgtggacattgccatcccatgcaacaacaaggactatggactacgtggcttcttccaaggtggcatcccccgag

SEQ ID NO: 428486 - DNA, 97 bp, Homo sapiens
gatcgcagcctctctaggagcagattacagggaactcaaagttggcattcccgtcacggatgagaatgggaaccgcttgggggagtcggcgaacgct

SEQ ID NO: 428487 - DNA, 100 bp, Homo sapiens
ctctgagagaatatactcaactgtcctgctgtgattaaacaagactgctgtattttgtgctggagaatctggtaaaagcaccattgtgaagcagatgagg

SEQ ID NO: 428488 - DNA, 50 bp, Homo sapiens
gcattatccactatgccggcaaggcattgaacctggccacatcccaggta

SEQ ID NO: 428489 - DNA, 87 bp, Homo sapiens
aagtgctgttccaccaactagtcccgttgcaggtgaaatgcaaagactgtgaggagaggtatcgagaaccttccctgcgaacttcag

SEQ ID NO: 428490 - DNA, 89 bp, Homo sapiens
ctatcacccccgcccctcgcctctgcccgtgagcgtgagattattgaagatggagaaagttctgaagttaaagctgtgttaaatgatga

SEQ ID NO: 428491 - DNA, 74 bp, Homo sapiens
tcttctatgctgtgttcagtcggagccagtaaagcagtaaaaatgttgtacatcagctctcagtaaccctagaa

SEQ ID NO: 428492 - DNA, 51 bp, Homo sapiens
cctccatctgggccatggatggctgctgcctattcacactctgaggcttgg

SEQ ID NO: 428493 - DNA, 75 bp, Homo sapiens
aacagggcagacgttagcgtgagtgatcactctcaatcccggcaatactacatcctgctgatcctgacggacggc

SEQ ID NO: 428494 - DNA, 100 bp, Homo sapiens
gcggggaggcgcggagcgcgcgtgtggtccttgcgccgctgacttctccactggttcctgggcaccgaaaggaattaagtagactggctggacagattcg

SEQ ID NO: 428495 - DNA, 80 bp, Homo sapiens
attcgcctccatctgtaccatggtgcagattcactttataggaacagcttcagcttcagtgatgaaaaactgaattctcc

SEQ ID NO: 428496 - DNA, 113 bp, Homo sapiens
cggggctggagaaacgactctgcgccgccgctgcctccatcctgggcaaacctgcggacgacccccacgtggaccagtatgaggccaaagagtggacatttattattgaaaat

SEQ ID NO: 428497 - DNA, 82 bp, Homo sapiens
gaattgggaggggggcagctggagcctcaggcggcagcgcttctagcatcaaggcatgccatgggttgcctctcataaatgg

SEQ ID NO: 428498 - DNA, 100 bp, Homo sapiens
ttcacttgaaaaatgcctgtgtaaagaacaaaggacaacgccattattgacgagatcactcccaagcggattggagattgtcccaatatttagacctata

SEQ ID NO: 428499 - DNA, 98 bp, Homo sapiens
agcggatcccacacttctcagagctgcccctggacgaccaggtcatcctgctgcgggcagggcgtctctggccgagcctctttttgtggaaaacgaca

SEQ ID NO: 428500 - DNA, 51 bp, Homo sapiens
ccgggggagaccaggactcgcacaggttcttcacacacccccattcggcgt

SEQ ID NO: 428501 - DNA, 100 bp, Homo sapiens
gagcagtagacttctcacatctttttgtcacttcatcgtttgactggacagtaaagctttggacaactaaggagaaaatgctgagaagcttctgcagttc

SEQ ID NO: 428502 - DNA, 117 bp, Homo sapiens
ccgggggacaggataaactgttacgcatatatgacttgaacaaacctgaagcaggtttttgccaatccagaagactgtgtagcatttggcaaaggagaaaatgccaagaagtatctt

SEQ ID NO: 428503 - DNA, 75 bp, Homo sapiens
ccaagatggaacgatgttaactgcgctgcatagttatatggatggtgaccaagaatatggcccaggtgaccaaag

SEQ ID NO: 428504 - DNA, 74 bp, Homo sapiens
gccatgcccctcaggctggaacttgccctgtctcctcgcagatgagatagtgctgcaagagggaaattcccaaa

SEQ ID NO: 428505 - DNA, 100 bp, Homo sapiens
ggtcgcgctggtccccggccggccggagcggcggcggtggcggcgcgaggcggcatgagggagccgctcggtattgttgcagcatctggcagtgagactg

SEQ ID NO: 428506 - DNA, 100 bp, Homo sapiens
cagaatacaacatcatgtttgctgatgaacttattagtcctaaagacattgatcctgtccagcgctatgtcccactaaaggatcaacgtaacgtgagcat

SEQ ID NO: 428507 - DNA, 125 bp, Homo sapiens
ctccttgacaaggactggaatattttcagcaagaactgcaacaacagctttgctgaatgctccagccaagagctagagccggtgcaggccacgcagaacaagacagggaagtatgtgccgccgag

SEQ ID NO: 428508 - DNA, 76 bp, Homo sapiens
ggtgatggcaaatgtcgtggacatgtttccagagatgaatgatatgctgagagaaaaggtaactggaagaaaaacc

SEQ ID NO: 428509 - DNA, 73 bp, Homo sapiens
aactcaaaggcggtggcgtggaacacgctggtcaggacaggtacagcacaggcagcgacagtgcgagctttcc

SEQ ID NO: 428510 - DNA, 100 bp, Homo sapiens
gaccggcacccagacaggtggcgacggcagaggaagcgcatcagcgaggaggtggggctgctgcagctccttggggaccccccgccccagcaggtcaccc

SEQ ID NO: 428511 - DNA, 98 bp, Homo sapiens
cagaatagccctcagaagaaagattctggaggaaaggtttacaagcaggccacgattgaatctctgaaggttcttttgaagtaaccagtgatcttttt

SEQ ID NO: 428512 - DNA, 74 bp, Homo sapiens
tgttttgaagagaaggggaataagactgcatctgttcatatgagactgtacctaaaaagcaagttgtggccaag

SEQ ID NO: 428513 - DNA, 82 bp, Homo sapiens
cacacgcataatggatgaaaggaaccgacagtgatcctggtggagggattgaaatgtctgagttcatccgagaggccacacc

SEQ ID NO: 428514 - DNA, 83 bp, Homo sapiens
gtgaccaaggaggagtacaaggacatcctgcgcaaggccgtgcagaagacagattacatcaatgccagtttcatggatggcta

SEQ ID NO: 428515 - DNA, 88 bp, Homo sapiens
tcctgttccaccttcagagcgtcacggcgtacgccctcatggggaaaatctccccggtgactttcagatggcgtctcactcttgttgc

SEQ ID NO: 428516 - DNA, 100 bp, Homo sapiens
gaatgcagcagatatgcctgctaacatggataagcatgccctgaaaaagtatcgtcgagaagcctatcatcggtgcgagaagatgtactaaattcattga

SEQ ID NO: 428517 - DNA, 75 bp, Homo sapiens
tcgactccgaagacttctctacgtcggaggaggacgaggactacgtgccgtcggtgacaaccatgagtggaaaaa

SEQ ID NO: 428518 - DNA, 80 bp, Homo sapiens
ggcttggacgaagatggggagaaggaagcgagactcatacgcaacctcaatggtttacccaaggtccagcctagccccta

SEQ ID NO: 428519 - DNA, 107 bp, Homo sapiens
ctgaggtggcagcggcaggagagtccggccgcgacaggacgacatgccttgaattggaacgctacctacagacggagccccggaggatctcagagacctttggtgag

SEQ ID NO: 428520 - DNA, 101 bp, Homo sapiens
cgggagttgtgtggtggtccactctgactgcaagcacccctttcttgaaccgaacagagtcaagtggaatcaaagttaccttatcccatatcacacaactg

SEQ ID NO: 428521 - DNA, 51 bp, Homo sapiens
cctgtacagcctgcagaacttaacaacatgctgtaccccaaggaagacaag

SEQ ID NO: 428522 - DNA, 83 bp, Homo sapiens
ctgggtttcccgggagatcccaggcggtgacagagtggagccatggctagagcccgcggcgccatggctcacgtcggctcccg

SEQ ID NO: 428523 - DNA, 75 bp, Homo sapiens
acatggagaacgaattctactatcgctacccaagtgtggatgaggtcaccattgtcaacattttgaccaaccgca

SEQ ID NO: 428524 - DNA, 98 bp, Homo sapiens
ctgcgctctccgcaccgcggcttaaatgatgtattttgtgatcgcagcgatgaaaggatggcggcccaggtgactctggaggacgcgctgtccaacgt

SEQ ID NO: 428525 - DNA, 72 bp, Homo sapiens
gcccggacatcctggaagctgggaaatgagtatcctgagctccagctggaccctaaattggatcctcttcct

SEQ ID NO: 428526 - DNA, 82 bp, Homo sapiens
ttgacgaggctgcggtgtctgctgctattctccgagcttcgcaatgctatgtgatgcgcatgaaggagtttgagcgggagcg

SEQ ID NO: 428527 - DNA, 100 bp, Homo sapiens
cggccgcgcaggagggaaagttcagcgacggcggcagcggccggagccgggccgggcagctagcagggcgcttcggattatctcaactttggtctcctgg

SEQ ID NO: 428528 - DNA, 100 bp, Homo sapiens
gtgcagctgcctcagttcttagcgcaggttcttgatagtccacaatgggtgaaccacagcaagtgagtgcacttccaccacctccaatgcaatatatcaa

SEQ ID NO: 428529 - DNA, 98 bp, Homo sapiens
aacatccatatcataagtggaattttggagatattcaaaggttctccccatgacaccacctgaacgtctcttcctcccaagggtgtgtggcaccaccc

SEQ ID NO: 428530 - DNA, 85 bp, Homo sapiens
ggaacctgtccagcgatgatgccaatgtcctggtgtggcacgctctcctcctaccctttggcctgtcactgctcctcatcctcct

SEQ ID NO: 428531 - DNA, 100 bp, Homo sapiens
gtgtactttgccctcagcatctcccttcatgtctgggtcatgaatgcccttctgcctgcagggttccggcagaagaaccagacatcaaagtccaccacag

SEQ ID NO: 428532 - DNA, 98 bp, Homo sapiens
cggccgccaccaagatgagcagggcccttgcggagttccgcgtccgaggtgtgaaggtgatccgggagccgaagccacgttcagcccgctggctcagc

SEQ ID NO: 428533 - DNA, 74 bp, Homo sapiens
gggagtgggagagattggactgggagactcagcagtttgcagaaaaaacttcagcatgtgccaggaacacaacc

SEQ ID NO: 428534 - DNA, 75 bp, Homo sapiens
gcaaccccagatccatttacactttacaacatatctgaagagatggattaagaatgctttggattaaggattgtg

SEQ ID NO: 428535 - DNA, 75 bp, Homo sapiens
ccacggggtgctgcagatcctgttccaggtgcagaggccaagaccgttttgcccaagaaggagaaaatgaagctg

SEQ ID NO: 428536 - DNA, 74 bp, Homo sapiens
agaccatgaggcaagaaagatgtatgatgatgctattgaggaatccatcaacagcatcaagtccagactaagca

SEQ ID NO: 428537 - DNA, 95 bp, Homo sapiens
ccgctcgcatgagcacctcatacggctgcttctggagaaggcattcccatcaagagcaccatggacaaccccaccaccacccagtatgccagcct

SEQ ID NO: 428538 - DNA, 75 bp, Homo sapiens
ttggagtgaaggctgttagtcgccgcacaatgcagatcttcgtgaagactctgactggtaagaccatcaccctcg

SEQ ID NO: 428539 - DNA, 74 bp, Homo sapiens
ccagcgcctcttctaccggggcaagcaggttgcacagagcattgaggatcaccatcaggaagtgattggtttct

SEQ ID NO: 428540 - DNA, 100 bp, Homo sapiens
ggcgagcgaggggctaacttcagcggtggcaccgggatcggttgccttgagcctgatttgctatgggatcatttatggaatgggagctaaatctttggga

SEQ ID NO: 428541 - DNA, 101 bp, Homo sapiens
ccagggcagcggagcacgcgggctgctcatcgtcagcagggagaggctggcctcaggcccaggcccaaggccaagtgagagagcccaggccacaggacatg

SEQ ID NO: 428542 - DNA, 100 bp, Homo sapiens
tgcctttcttctgtgggctgtgattttcagaggggaatgctaagaggcttgttagcagtggcacaagatcttacagaggatgaagaaacagtagaagatt

SEQ ID NO: 428543 - DNA, 76 bp, Homo sapiens
agtttcctgtatgcattggatggaagtgacagtagaaagcaggtatatgactgatgggatgttacttcgtgaagct

SEQ ID NO: 428544 - DNA, 74 bp, Homo sapiens
ccgaaaaattgcagaagcacaagccaaactgcagatgatgctacagctgacagtcgcaaaacttacactctaac

SEQ ID NO: 428545 - DNA, 90 bp, Homo sapiens
ccaagggacggggcgttcccaggtgggagcctggagggcaaagcgtggtgcgagcagcttccgccctgcgctgccagtctcctacctgca

SEQ ID NO: 428546 - DNA, 82 bp, Homo sapiens
ggttccccggctcgcggggcccggcgaagggcagtgccctctggtggtcagaagatgctgtgctgtctcgttaggatgaatg

SEQ ID NO: 428547 - DNA, 88 bp, Homo sapiens
gactgccatcgcccggcccggccgcgcccgcggaaccagaccaggccatgctggagtatctgccaacatgatgaagaagaggacatcc

SEQ ID NO: 428548 - DNA, 75 bp, Homo sapiens
cgacggtccccactttcccctgagcctcagcacctgcttgtttggaagggaaatatcggctcatcaaattggggt

SEQ ID NO: 428549 - DNA, 75 bp, Homo sapiens
gaagagcccaaaacctattacgaactcaaaagtcaaccgctgaagagcaggagggagccatggatttgctgcggg

SEQ ID NO: 428550 - DNA, 74 bp, Homo sapiens
cggctgaggagcgccgctgcctcgcctcgcgagcatgtttgcggtgggctgcagcatgggtcccttcctgcact

SEQ ID NO: 428551 - DNA, 100 bp, Homo sapiens
aagaccaaaaaacacaataccaggcatacatttggcagaataaatgaaccaggttgccaaggaaagtgtactgcagttttacccgaaagctaatatcgtt

SEQ ID NO: 428552 - DNA, 75 bp, Homo sapiens
ctcctttggcacaagattctccttcccagggcggcgactggcggcgcgatggacctgaccgggctcctgctggac

SEQ ID NO: 428553 - DNA, 80 bp, Homo sapiens
gggggcaccgctgccgttccgagaacatccagtcatggataaaaatgagctggttcagaaggccaaactggccgagcagg

SEQ ID NO: 428554 - DNA, 82 bp, Homo sapiens
ctgcagtggtcaccgactgagaacacgtatgctcaggcttcagaagaggctcgcctctagtgtcctccgctgtggcaagaag

SEQ ID NO: 428555 - DNA, 74 bp, Homo sapiens
tagcagtcttagaaaagaccctccccgaaatgcgagcccatcaaggacatggacatcttccagcaacagatctc

SEQ ID NO: 428556 - DNA, 50 bp, Homo sapiens
gaaacacagcaacagcccagccatggggtgctacaagttgaccactgcag

SEQ ID NO: 428557 - DNA, 100 bp, Homo sapiens
tttgtgcaatgtttagccaacccaaattaccttaattgttaatttggagtggcccctggagtcagtttcctacaccatccgaggccccacccagcacgag

SEQ ID NO: 428558 - DNA, 100 bp, Homo sapiens
ccctggcagggagcctggtggggtggcggagggggagactgtgccgtggagggcctcgccatgtcctgctgcccgcttgtactcccagagtacctcatcc

SEQ ID NO: 428559 - DNA, 82 bp, Homo sapiens
gggaaccctggtcaccgtctcctcagtccaaaattgaagacattagagcagaacaagagagagaaggtgagaagctgatccg

SEQ ID NO: 428560 - DNA, 83 bp, Homo sapiens
agagagcagtaccctgatggagtcccttgcaggaccatgaatggcacctacaacacctgtggctccagcgacctcacctggcc

SEQ ID NO: 428561 - DNA, 75 bp, Homo sapiens
ggtcctgggcctggatcctaagtcctgacctttcatgagttgaggagaacaggagatggagaaagcaagtggaag

SEQ ID NO: 428562 - DNA, 98 bp, Homo sapiens
cctgacatgcaagaacagggtccagtgcacccccaaggtggactttccccaggaccagctgacagcactcactgggcggatccaggaggccggcacgg

SEQ ID NO: 428563 - DNA, 75 bp, Homo sapiens
ggaagagggcggcgacggtggtggtgactgagcggagcccggtgacaggatggataaaaactggatatgcatcta

SEQ ID NO: 428564 - DNA, 50 bp, Homo sapiens
agttactctaacaagtctggagactggtgatgtacatcgagagagacagc

SEQ ID NO: 428565 - DNA, 88 bp, Homo sapiens
catgacatcatccataccaaggagacgctgacacttgtgtttgaatatgtgacagcaatggatcaacttcatatgcacttcacccaag

SEQ ID NO: 428566 - DNA, 74 bp, Homo sapiens
gcggacgacgaccggctcaacaagtggccaacagtgttgcaaacaggaacccgaggttttcacttcactgttga

SEQ ID NO: 428567 - DNA, 96 bp, Homo sapiens
cacaatatctatattctggcccatcaggaatcccagtcagaagttccagcctgccactgttctctgatgccatgccagcaccaactcaactgtttt

SEQ ID NO: 428568 - DNA, 83 bp, Homo sapiens
ctcagccacgaagtacagccggagaacgggctcatgtcggggctgatgcagatgctgctgctgaaggtgtctgcacacatcac

SEQ ID NO: 428569 - DNA, 99 bp, Homo sapiens
agagagcaacgccagagcccaggtgcccagaggactttcttccagcttctgctgtccttctttgtggagagcaaggatttaaataagcggttatcactg

SEQ ID NO: 428570 - DNA, 75 bp, Homo sapiens
aggccctccttccgagccgtcattcgtgacctcaatagcctcatctcttcagagcacgaacttccaggagccggt

SEQ ID NO: 428571 - DNA, 100 bp, Homo sapiens
ttcaaaagtacggacacctcctgtcagatggcgggactaagagatacctacaaggattccatcaaagcatttgcagaaatggcacctcgaaaggggaagg

SEQ ID NO: 428572 - DNA, 75 bp, Homo sapiens
aacagcagccacaggaaccttgagtttcctatgttattcgagatgaagtggagaagtacaaccgaaatggagtca

SEQ ID NO: 428573 - DNA, 75 bp, Homo sapiens
gcaccctgtccccgaggaggggaccatgacacaggggatatgagactttctactcggaatatcctgagtgttgcg

SEQ ID NO: 428574 - DNA, 50 bp, Homo sapiens
ccaagtaggtaggaccacaggtgtacagagggagacgtggtgggcggtcc

SEQ ID NO: 428575 - DNA, 100 bp, Homo sapiens
gccctctcctaagagacccaggggaagacccaaaggcagcaaaaacaagagtccctctaaagcagctcaaaagtgttctaagaacggaagcatctgggct

SEQ ID NO: 428576 - DNA, 75 bp, Homo sapiens
ggaaccctggtcaccgtctcctcagccagagactgctgctactttgaaacgtacgatagaggccctgatggacag

SEQ ID NO: 428577 - DNA, 75 bp, Homo sapiens
agaaaaaagcgtccgcttccagctttgcgcaggccatcccaccacactcgtcccacctggcttgtgtcaatgttc

SEQ ID NO: 428578 - DNA, 112 bp, Homo sapiens
ccagaaagttccgccatgagctggggcacggagctgtggagactctacaggggcaggtaattcactggtccacaagcggtctcctttacgtcgaaaccaaaagaccccaaca

SEQ ID NO: 428579 - DNA, 75 bp, Homo sapiens
tagagactgccggtgccttcatgggcaggactaggccgaaaactccccagggtcttcctgagagctatcaacaag

SEQ ID NO: 428580 - DNA, 74 bp, Homo sapiens
gtctttgccattattctcggggctttcatagcagctggacagttcagtttgttcagggaatttttgttgaaaaa

SEQ ID NO: 428581 - DNA, 110 bp, Homo sapiens
ccgcagtcgcccgcaaccggggcgaatcatggcggccgccaagtgagcatgtttttgaacacattaacaccgaagttctacgtggccctaacaggcacttcctcactaat

SEQ ID NO: 428582 - DNA, 76 bp, Homo sapiens
acataagaagttcttcgatgtatctaaacttggcaccaagtatgtgattcgcctttgccagtctcatctcgtgtct

SEQ ID NO: 428583 - DNA, 89 bp, Homo sapiens
tgattactcagtctctaaaaagctaagacctgtcgcgaaatcgcctttcagaaattcctatagaagcatgtcactttgtttctctggaa

SEQ ID NO: 428584 - DNA, 100 bp, Homo sapiens
gtttaatgagaggaatatactcatcatcagtctatttagaagaggaaacctcgacctgtctcccagttggttgcacagcaggttactcagcagtttgtgc

SEQ ID NO: 428585 - DNA, 82 bp, Homo sapiens
tgggattcagcttcttcttcaacatgctcttcgtctacgacgaggacttcaaccatgagccgtgtcagaggaagggccacaa

SEQ ID NO: 428586 - DNA, 100 bp, Homo sapiens
cttttctccactcagcgagcctgagagtgcggaagtctccggctggtggggcatggcccaggagcactgtgtggggttagccaccagaaaactgggaaat

SEQ ID NO: 428587 - DNA, 100 bp, Homo sapiens
ctgggatgtgaagtagatgataaagatgatgatatccttctcaaccttgtgggatgtgaaaactctgttactgaaggattggattcagcatcaaaataca

SEQ ID NO: 428588 - DNA, 75 bp, Homo sapiens
ggaaatgttaaagtgctttagcctggattgcacagcaggatgcacaggaacaaacgagggaatatgcctcctatg

SEQ ID NO: 428589 - DNA, 75 bp, Homo sapiens
atggccggggacacccagtggtccaggttgaaggggcccggccaggactcggggaagggtggcctgagagcagcg

SEQ ID NO: 428590 - DNA, 82 bp, Homo sapiens
agacccggtttgctgatcgccccagggatcaggaggctattcagcttgaccctgaagaaactcgtcatgctaaaagaaatgg

SEQ ID NO: 428591 - DNA, 50 bp, Homo sapiens
aaccagaaacatatctattatatcacagttgacaggatcagttttggaag

SEQ ID NO: 428592 - DNA, 50 bp, Homo sapiens
cctaaactagcagtttagggtgtcagtttcctctcccctgaggctgcctc

SEQ ID NO: 428593 - DNA, 75 bp, Homo sapiens
cctggctccccatactagtcgccgacatggagaagggctgtcacttcctgcacatcttggcctgtgctcgcctga

SEQ ID NO: 428594 - DNA, 98 bp, Homo sapiens
gctcttcttcttcttccagggactcagcacctggcagaacctcaagaaggcatgaagccagcccctgcagtgccgtccacccgcccctctgggcctgc

SEQ ID NO: 428595 - DNA, 100 bp, Homo sapiens
gaacatctgttgagaagaaaaacgctttttgcatacaagcaggaaaatgagatgttatccagaatcgcctaccatttggtgcaagcaaaaagcaatcagc

SEQ ID NO: 428596 - DNA, 98 bp, Homo sapiens
taccccggatttgctccaagctatggctatcagttcccaggtgtggatgaggtcaccattgtcaacattttgaccaaccgcagcaatgcacagagaca

SEQ ID NO: 428597 - DNA, 80 bp, Homo sapiens
ccatacccaataaccaggtgcttggcaaaatcgagcgggccattgtctggggagcagggaggagccctgtgccctgtccc

SEQ ID NO: 428598 - DNA, 76 bp, Homo sapiens
gaagaaaagagaagaaccagaatttcctgagccttccaaacaatctgcaggagcatgtacagctgcagcattcctg

SEQ ID NO: 428599 - DNA, 88 bp, Homo sapiens
cagcatgagcgaaagctacacgctggaggctgaaggtgatgtggccgccctcaaccgacgcatccagctcgttgaggaggagttggac

SEQ ID NO: 428600 - DNA, 102 bp, Homo sapiens
ctcaagtacacggagtacaatgagccacacgagagccgcaccaacgccgacatcatcgaggttggcaaaagcagcttttgatgatgcaattgcagaactgga

SEQ ID NO: 428601 - DNA, 93 bp, Homo sapiens
tcagagcccggggacggcgaggccctcatgtaccacacgtactaaggctcgtacgtctgcatcgattatcttacgtggggcaaatgatttcat

SEQ ID NO: 428602 - DNA, 100 bp, Homo sapiens
tccgagcccggtgcgttccaaccgccgccgaaaccggtcatcgtggacaagcaccgccccgtggaaccggaacgcagatcctgtttgaccaaactcagag

SEQ ID NO: 428603 - DNA, 100 bp, Homo sapiens
ttcagatgtggtggaatatgccaaggaaaaactggagagcttcatcaaaaatagtgatagctttgataaattggctcaagctacccaggaaagaacggat

SEQ ID NO: 428604 - DNA, 100 bp, Homo sapiens
aaccacttacaccgttctacaaaatgaaggatttggaactagctctggttttggatgcagcaccacaggggcctccacatttggatttggaacaacaaat

SEQ ID NO: 428605 - DNA, 100 bp, Homo sapiens
actgtgacactgaccaccaggccaacttaacatcagcagatatcctgtctcagatgaagagctgattttcacacccgctaccactgtggctgctgtacag

SEQ ID NO: 428606 - DNA, 75 bp, Homo sapiens
gcgctcaccccggccccaggacctgatccgactctatgacatcatcttacaggaagaggagcaggacttggatgg

SEQ ID NO: 428607 - DNA, 100 bp, Homo sapiens
cggcgggccgaggagccgggcgcaatggagcggaagagctctcgtggcattatccttcagtggggctattggactgacttttcttatgctgggatgtgcc

SEQ ID NO: 428608 - DNA, 74 bp, Homo sapiens
ggatgagtacgataccgaagcgggctgtgtgccccttctccacccagaggttatccggtgttggctcctgctgc

SEQ ID NO: 428609 - DNA, 83 bp, Homo sapiens
catttggagagtcagatgccattttgggagccagttgataatctgagtcctgaggagcgtgatgcccgcacagttttctgtat

SEQ ID NO: 428610 - DNA, 101 bp, Homo sapiens
gttgcaagtgggagcactggaagtacgggcagttgcagtgttggagctaaagtaagaagagttcctgggtcaagtggtcaccttcataaaaccgaagacgg

SEQ ID NO: 428611 - DNA, 75 bp, Homo sapiens
cagagctgggccgacccgaaaggcgaccattgacgaggtggagacggacgtggtggagattgaggccaaactgga

SEQ ID NO: 428612 - DNA, 100 bp, Homo sapiens
agcatctgccagatctgtggcttcaatcaggctgaggagagcacagattgcaggcctaagtctacctcttcctcccaaaaaattgattggtaacatggat

SEQ ID NO: 428613 - DNA, 100 bp, Homo sapiens
ccacagggggattggccggctttttcggagccggcggagcaggttactcgcacgcggatttggctggcgtcccgcctatgtgttctcatttcacccaaga

SEQ ID NO: 428614 - DNA, 100 bp, Homo sapiens
ggaggtgcagaaagccaggaccaagagacaggcagctcaccagggtggacaaatcgccagagatgtgaagaagaggaggttacttcaaacagaacctggc

SEQ ID NO: 428615 - DNA, 75 bp, Homo sapiens
tccatgttcatggcggggggcagcgactgcctcatcgtcggggttcagtcggctgccgtcaatgtcatctgcgag

SEQ ID NO: 428616 - DNA, 101 bp, Homo sapiens
aggaccgagagtgttgggaagaggagcgcgtccccggggaaatgagatggagaacttaatgttctggatgatattttaactgaagtaccagaacaagatga

SEQ ID NO: 428617 - DNA, 71 bp, Homo sapiens
gagcgctggacggagaggaaagcgacaaggcgcctctgtcgaagagccttctgctggtccccagtgccctc

SEQ ID NO: 428618 - DNA, 83 bp, Homo sapiens
ccgggagaacctgcggcggccggagcgtaagaagaggaggaggccaggcaggcaaaaggagtcatggcttctgatgctagtca

SEQ ID NO: 428619 - DNA, 100 bp, Homo sapiens
ctgttccaatctttgtcttgtaaggagcacctgactacggtactcgataagacccaacatgagtgaagtttcctgcaagaaacgggacgactatttggaa

SEQ ID NO: 428620 - DNA, 100 bp, Homo sapiens
ttattttgatggctgaagaatatttcctagtgtatgtatatgagagtttcttgatctctttatctgtggatgaacaggagttaaagaggattgcactgcc

SEQ ID NO: 428621 - DNA, 100 bp, Homo sapiens
atggcatcaacctgaatgacatcgagaaggtccttccagcctggcaggtacaagggatttaaaggcaactgttccatgaccttcattgatcagtttaaag

SEQ ID NO: 428622 - DNA, 100 bp, Homo sapiens
tatgcccaccctccaactttgcgacggaaatgtgtcatcgaaagccaggtgcagcggaactgctgcctgacgctctgcaacttcagcatccccgaggagc

SEQ ID NO: 428623 - DNA, 82 bp, Homo sapiens
atgctggccaagaagatcatcattaaggacggaggcacgggaaatcctcattgacgattcaatttgttgaaggccaatttgt

SEQ ID NO: 428624 - DNA, 75 bp, Homo sapiens
gccacttctgctgccaggctcataggattaatgcagtatcgaatggacaagtccgaggtgatagttacagtgaag

SEQ ID NO: 428625 - DNA, 75 bp, Homo sapiens
cgaatatcgtcatcgttagaagatagtcgtgcaagcactgcagtgttcccattattcgattctttggcagttggt

SEQ ID NO: 428626 - DNA, 75 bp, Homo sapiens
gctctcaggacaagaacaaagtgtgctggtaccagcaactaaggtttcagagctgaaccctaatgcagaagtgtg

SEQ ID NO: 428627 - DNA, 83 bp, Homo sapiens
agacggagccccggctcgcccgtgtgcagaggtcccacgtacctcggagatttatgtccaccgaagtggtcgaactgctcgag

SEQ ID NO: 428628 - DNA, 110 bp, Homo sapiens
acctctacaacgaaggtgaagccacggaagataaggtctccgtgaggccgggtgacgctccagaatgggagacaagccaatttgggagcagattggatccagcttcattc

SEQ ID NO: 428629 - DNA, 51 bp, Homo sapiens
agtaatttgccttctggattgggtcgaactggaaaaattagagtgcagagt

SEQ ID NO: 428630 - DNA, 97 bp, Homo sapiens
cttcaactaccaggtcgccaccaagcagctcctgttccgactgctggccggccaagctcgctgaggccttcaagtacttcgtgcagggcatgggata

SEQ ID NO: 428631 - DNA, 50 bp, Homo sapiens
atcacctatgtttacagcgacaggagcatctttccttgaagaagtacatt

SEQ ID NO: 428632 - DNA, 100 bp, Homo sapiens
ccgcgtcaactgctcgggccgcgggctgcggacgctcggtcccgcgctgcgcatccccgcggacgccacagcgctggctccttcacctaccaaacgcaaa

SEQ ID NO: 428633 - DNA, 100 bp, Homo sapiens
agacatgagatggtagacaaaaccccaggccgagacgcatccagagctttcgtgaccggggactgttctgaagcaggcctcgtggatgacgtatccgacc

SEQ ID NO: 428634 - DNA, 132 bp, Homo sapiens
ggcggcaggagcgggtagtgccagctacggtccgcggctggggttccctcctccgtttctgtatccccacgaggagtaaaagtccctcgcaatttccgactgttggaagaactcgaagaaggccagaaagga

SEQ ID NO: 428635 - DNA, 82 bp, Homo sapiens
gggggacttatgaatgatgatgtggggaatgaagcattgcagtgtcgagatggctatgaaccctgtgtaaatgaaggaatgt

SEQ ID NO: 428636 - DNA, 95 bp, Homo sapiens
aacaacaatgaagaggtaattcacttgaacaactttcactgccatcggggacaagggaagaaggagaaagggccaacccctgaagaagcaataca

SEQ ID NO: 428637 - DNA, 98 bp, Homo sapiens
tgtctggagcaaataaaagagccctgcaatttgaagatacatgagacagcagccaaacccccagctaaaccatttacacagctggtgaaagaaatgca

SEQ ID NO: 428638 - DNA, 82 bp, Homo sapiens
cccgggatgtattcgtccccgctctgcctcacccagtggtgctcatcggggactcaggcgtgggcaagagcaacctgctgtc

SEQ ID NO: 428639 - DNA, 75 bp, Homo sapiens
tcagactcagaaagcagcagctccctcagcagtgtggatgcttccgatgccaaagccagggagcgggggaggggc

SEQ ID NO: 428640 - DNA, 75 bp, Homo sapiens
gtggtccgcggcttctcggagcttcattcctgggagatggtcgggaagaagaagggagtctcaggccagaaggat

SEQ ID NO: 428641 - DNA, 97 bp, Homo sapiens
ttgcttctgtagaccagctccaacaggattccatggtagctgggatgttagggctcaggtttaccgacaagactgtgaaactttcgggatggtggtg

SEQ ID NO: 428642 - DNA, 90 bp, Homo sapiens
gtgaccaaaaagtcatctacatttcaggtacttcttgcaagggatatgcattagcacatactcaagaaggggaagaaaagaagcaaactt

SEQ ID NO: 428643 - DNA, 99 bp, Homo sapiens
atcacacaaaatgtgctggttgatggtgttaagaaactctcagtttgtgtttctgagaaaggtctccaaagcggcgtctgacctcatgagctactgtga

SEQ ID NO: 428644 - DNA, 114 bp, Homo sapiens
tcgcccagttccctgcatcctaagactcgaaggcagcacaggacctggaaaaattacatatggccctgctgtggcaccagtgaccaacgggaacacaacggtgccacccctgaa

SEQ ID NO: 428645 - DNA, 74 bp, Homo sapiens
ttttccggggccctctcagcaagaacgggaacaaaactctgctgtctgtggttcatgagaaaaaatcccaagaa

SEQ ID NO: 428646 - DNA, 80 bp, Homo sapiens
ctgttccaacaagaaggctttgcttaagttcaaaccaggagccagagccaggatttaagcgcctggcttggggccagcct

SEQ ID NO: 428647 - DNA, 97 bp, Homo sapiens
ctccctgcaccgggggagcgctacgagtcccagcggagcgccgcagcacagcgccatggacaaactgctgtggacgtggctggaggagctgcagaag

SEQ ID NO: 428648 - DNA, 75 bp, Homo sapiens
tctggtgatgaacttagcagcagctccactgaacagataaggggccagctctcaatgttgcaagaaaaaatagac

SEQ ID NO: 428649 - DNA, 100 bp, Homo sapiens
agaaaaaagtggatcatgaattggatgacgtgtttgggatttgaaactggacaacatccttctggatgcagaaggtcactgcaagctggctgacttcggg

SEQ ID NO: 428650 - DNA, 75 bp, Homo sapiens
gagaggggaagatggggacaaagccgctccacctcccatgtcggcacagaccaagatcactccatggatgaaatg

SEQ ID NO: 428651 - DNA, 75 bp, Homo sapiens
gcttctatgtcctgtacacaatcttcatgaaaggatttaagaggggtgcagatcccggaatgcctgaaccaactg

SEQ ID NO: 428652 - DNA, 100 bp, Homo sapiens
ggaaatgctgcttagattaaatgcgttgttgggcatggtgctgatgtgaaatgtgtagactggcatccaaccaaagggttagttgtttcaggaagtaaag

SEQ ID NO: 428653 - DNA, 74 bp, Homo sapiens
ggaaacatgatacaatctgcaaatgcactcgactatgacatcaacattgaggagattgggtgaagacattttta

SEQ ID NO: 428654 - DNA, 100 bp, Homo sapiens
gagggagcctgccctcgcatggtggccagggcacgtcactgcaggccaggaccaagaatcgccttcagccctgtctggtgcatccttggcagaaagtgag

SEQ ID NO: 428655 - DNA, 87 bp, Homo sapiens
gagaatgagcgcctggcctctgtggcccaggagctgaaggaggaatttgaccctctagggcatgaatactgtgctgttcagttctga

SEQ ID NO: 428656 - DNA, 82 bp, Homo sapiens
gtccagcctgggcgtcattgaggcggttgctcagatcacggtgaaatgtcgcagcagttgtggtagaaatttctgggttagt

SEQ ID NO: 428657 - DNA, 75 bp, Homo sapiens
caactgatccgagcagggaaaccttaccagctccagcaatggcagatgagtctggggaccagcgaagaccaccag

SEQ ID NO: 428658 - DNA, 83 bp, Homo sapiens
agaaggaagttgtggaagaggcagaaaatggaagagacgcccctgctaacgggaatgctgtttttagaacttcagccataaaa

SEQ ID NO: 428659 - DNA, 82 bp, Homo sapiens
ctcctgagtagctgggattgcaggatgctgaaatttctggaaaagacaatggaaatcaggggcaggaagagaacagtgtggg

SEQ ID NO: 428660 - DNA, 98 bp, Homo sapiens
cccagccaggcgtggaggaagaggcattgaggactttccttacctgtttttccagctcacccactgccagcagaggctcactcagtaacttgatggat

SEQ ID NO: 428661 - DNA, 51 bp, Homo sapiens
aggacttgggaccttccttctgggtgggtgatttctaacctagaagcaaga

SEQ ID NO: 428662 - DNA, 75 bp, Homo sapiens
cattttcgtttttctcctgagtactagggcagctaaagatgtgattaaagagattgaagactttgacagcttgga

SEQ ID NO: 428663 - DNA, 100 bp, Homo sapiens
gttcacctccatcccctgatactgccctcaaaaatattgtaaaagtcattcgaccccaggagatcatgaatcagacagataaaaatcaacaagaaatccc

SEQ ID NO: 428664 - DNA, 74 bp, Homo sapiens
cctcacaggaatcaggccaaaattatggctgcagcttcgattgccaatattgtaaaaagttctcttggtccagt

SEQ ID NO: 428665 - DNA, 90 bp, Homo sapiens
ctcggaggcggcgtgggcggcagagagcggggcggcggcagtgcaccgtccaggtgaggttagagctggggcatcgcgcccaactgcgca

SEQ ID NO: 428666 - DNA, 100 bp, Homo sapiens
ggattttggctctggcacggaaacacccgtaccttacccaactctactgctgcttccagaccaaggcagaatccagagaccacatttgaagtatatgttg

SEQ ID NO: 428667 - DNA, 100 bp, Homo sapiens
actgcagctgggcaggcacactcctcgcagacccggcgctctccaaggagaaaagaaagttagtgggcttggggccctgctggagacggcgctgacgcga

SEQ ID NO: 428668 - DNA, 100 bp, Homo sapiens
ctggcctgcggcgcctgggcgctctgagaacatatgctgtcaggaggataagagatgccttcagagaaaataaaaatgtaaaggatcctgtagaaattca

SEQ ID NO: 428669 - DNA, 83 bp, Homo sapiens
gcggaagaagctaatcttgtacttcaagaggaggaatcacgctcggaaacaatggctgggagtgtccactcgccttccaccag

SEQ ID NO: 428670 - DNA, 102 bp, Homo sapiens
cagcctcctgagaagctgggattacaggagcctttgatgaagtgacctcatgcctggtgaaggtgccagagaagacagaaggtggcaacaacatggctctgg

SEQ ID NO: 428671 - DNA, 100 bp, Homo sapiens
caaggactagagttcctgacctccaggccagtccctgatccctgacctaatgttatcgcggaatgatggtatcccgagtggacggcactgtggacacgcc

SEQ ID NO: 428672 - DNA, 74 bp, Homo sapiens
gcactctcatccctaagtccagtgacccgtggctggtgagcgttacgtgtacaagtttgtgtgtgagcccgagg

SEQ ID NO: 428673 - DNA, 100 bp, Homo sapiens
gcggggttggcctaggcgaagatccggactctgggtgttttgctaccgtgaccgtttagttacagaatgtctgaaggggacagtgtgggagaatccgtcc

SEQ ID NO: 428674 - DNA, 90 bp, Homo sapiens
ccaaacttattaataggaataccactattccaaccaagaagagccaggtttatgctaaaactatcgatgggcaacagactattattgcat

SEQ ID NO: 428675 - DNA, 101 bp, Homo sapiens
aatgacagccttcatttctctgaacatactgccttatgggacagatcaagggtagaaatatttctgtcatggctcattcaaagactaggaccaatgatgga

SEQ ID NO: 428676 - DNA, 96 bp, Homo sapiens
ggagcttcatcaacgatatatgtcagatctaaagataacaacgaacttgatgcaagtgataggtttgccaaggtcagacctctcatcatccggatg

SEQ ID NO: 428677 - DNA, 75 bp, Homo sapiens
ttcatcccaacattcctgatgttgctgtgtctcagtttacagatgttaagagacaactgaagaattggatgtatc

SEQ ID NO: 428678 - DNA, 100 bp, Homo sapiens
aacatggattacagataccattccccgaagatgtccatttgtgccacagatgggtgatgagggcttaaaagacaaccttcttgcttctgggacatccagc

SEQ ID NO: 428679 - DNA, 75 bp, Homo sapiens
cacaggccctcgttgcccagatgtttacccaaggtccagcctagcccctaggcaccatgtcggacagtgatctag

SEQ ID NO: 428680 - DNA, 50 bp, Homo sapiens
gagccaagcgtcctgcccggccgttgtctgcattcaaaagagcattctat

SEQ ID NO: 428681 - DNA, 100 bp, Homo sapiens
agcgagctgagtggttgtgtggtcgcgtctcggaaaccggtagcgcttgcagcatgatgatagtatttctgctgcaagtacttctgatgttcaagatcgc

SEQ ID NO: 428682 - DNA, 73 bp, Homo sapiens
tcatcctagataatgacgggcgccggctgctggccaaggacgccaagagtgccgaggatgaggctccttccag

SEQ ID NO: 428683 - DNA, 100 bp, Homo sapiens
tgtaaggtgcggccgccgccggttggtgaaaaccctgtgtccttggagaaagctggttcccgttttccagagggggagcccagagcttgaaaggccgcgg

SEQ ID NO: 428684 - DNA, 75 bp, Homo sapiens
gaaatctggaagttttccacctaccatgctctcggagacagtgtttcacaaaatgattttccttctgaagctccc

SEQ ID NO: 428685 - DNA, 100 bp, Homo sapiens
ggttcgcccgcggaggccggggagcagccgaccatggagccccagaaattgtattcccattggagagcagcttcagtcggtgttgggcaattctggatac

SEQ ID NO: 428686 - DNA, 100 bp, Homo sapiens
acatcatggacttccaggttgggaaggagtttgaggaggatctgacaggcatagatgaccgcaagtgcatgtccacctgatcccggtgtcgactcctaag

SEQ ID NO: 428687 - DNA, 74 bp, Homo sapiens
tccctggggccagtgtgtgtggcgggtgtagaaggagctaaaggctctcgaacagtgtggcctgatgaaactat

SEQ ID NO: 428688 - DNA, 74 bp, Homo sapiens
tgggagcacatccatttcattggcaaggtggagtttgaggacgggtcccagctgacggtgaagcgtggggacat

SEQ ID NO: 428689 - DNA, 80 bp, Homo sapiens
tcagccattttccacagatcaggtccctgtgcgttttattgcgacctgccggtgggaactttgtctccgagtcggagcag

SEQ ID NO: 428690 - DNA, 96 bp, Homo sapiens
tcatcccaactacatctcaataattaatgaagatggaaatgaggattatatgcgtcaggcaggagaagtgacttatgcagatgctcacaagggacg

SEQ ID NO: 428691 - DNA, 95 bp, Homo sapiens
gaggtggacaagctggtgcagctgattgagtgccccatcttcacatatcctgataacttaagtgactctctcttttccggtgatgaagaaaatgc

SEQ ID NO: 428692 - DNA, 100 bp, Homo sapiens
ttggagtccggacatctgaaacttgtaacaaatgtggcaattattttggatctatcacctgtcatcataactggcttctgcttgtcatccacacaacacc

SEQ ID NO: 428693 - DNA, 100 bp, Homo sapiens
gctgaacgcactgcagcctcctgagttcaggtacaggagtctaaagcactttaattatgacatctgccaaagctgctttttttctggtcgagttgcaaaa

SEQ ID NO: 428694 - DNA, 97 bp, Homo sapiens
aaatcactgacacaaaaagttcaagctggtgcctatcctacagaaaaggtgatcccaaaacgaaccaacagaccaggcatcagcacaacagaccggg

SEQ ID NO: 428695 - DNA, 100 bp, Homo sapiens
tccctgtgccggctccgtctgcgatgcagggcggcggcctgtaatcccagcgaccgccaggggcccatttgatgttgcccggaaagtgtttgcagctgga

SEQ ID NO: 428696 - DNA, 75 bp, Homo sapiens
gctggatcagatctgaatccagaggctctcggaggaagagctcaggggagtgcatccgccccaacccttttcccc

SEQ ID NO: 428697 - DNA, 75 bp, Homo sapiens
aaactcatcaggacggaagcacaggggccactcagagtcgcccgagaagtcatcactccccaaaatggacgttac

SEQ ID NO: 428698 - DNA, 88 bp, Homo sapiens
ggcgatcggcggcgttgaggcgggatccgggcgagccgagtgaagccgccgccatgtctgcgcatctgcaatggatggtcgtgcggaa

SEQ ID NO: 428699 - DNA, 100 bp, Homo sapiens
cctggaaaggtgcaggtgcaggcctctcagctttcctccctgccacagtgccatcagacaagatcagttgatcagaacagaaagctagctcggaaaatcc

SEQ ID NO: 428700 - DNA, 98 bp, Homo sapiens
caaggagatccgggacgtcacacgggacaagaagctctggaggaccttcttcatctctccaggtgaatgtaaaagctttaaagagaaattcatgaagt

SEQ ID NO: 428701 - DNA, 90 bp, Homo sapiens
agcaaataggaggtggaattcagagcatcacctacacccacaacggagacatcagccgggaggctgccggcgtggaccgcgggaaggcgg

SEQ ID NO: 428702 - DNA, 82 bp, Homo sapiens
cttcttaatcctgccatatggattcataccccagccaagcaaaaagtggatgactgtgagcggtgccgggaatttttcaaca

SEQ ID NO: 428703 - DNA, 114 bp, Homo sapiens
gagatccgctgctgctgaggagaggagcgtcaacagcagcaccatgggtgtcttctctttagggatggtgaggttggaaaaaggctcctgtaaccctcctccaggatgaaccac

SEQ ID NO: 428704 - DNA, 90 bp, Homo sapiens
tcactaaagaaaattatgtctggaaatatgactttggtagatgaactaagtggaatgcagctggtaccattgttggatactggtgacatc

SEQ ID NO: 428705 - DNA, 98 bp, Homo sapiens
cggacatgctgggtggatccggatcgcatggaagacgcagcctggccgcgctctcccaaattaactcctgaggagagagcccaaaagattgccaaagc

SEQ ID NO: 428706 - DNA, 100 bp, Homo sapiens
gtaaaactggatgagcagctcatggaggaaagaccacagcaagattctttcattcgtctcctcctagcctgggggaccaggctcgaactgaccctggaca

SEQ ID NO: 428707 - DNA, 83 bp, Homo sapiens
cctatcctcactgatccgtggacttctgtatgatcagctggaacagctttgggtcttggggttgtgaacatcctccataccat

SEQ ID NO: 428708 - DNA, 108 bp, Homo sapiens
agctgacatagctggaagatactctaacagattgtacacatatgagcctcgggatttacccctatagttgccatggagaaaattccagtgtcagcattcttgctcctt

SEQ ID NO: 428709 - DNA, 100 bp, Homo sapiens
attcgagtgaccgagaccgcggccgggaccgaggactgattcttgctattccaaatcctcttccacgttgacagcccttcagatatttcaacactcctct

SEQ ID NO: 428710 - DNA, 80 bp, Homo sapiens
aatgatgatgtgaaaacagaagctgtggctttgaggagctcaagcttgggaaaatggtgtgcattccttgtatcgtcatt

SEQ ID NO: 428711 - DNA, 75 bp, Homo sapiens
tcgtgctgggcaccggcctgacggcaaaagtcaacaactctagcttaattggagtaggctatactcagactctga

SEQ ID NO: 428712 - DNA, 51 bp, Homo sapiens
cgctgggtggggagaggcccttcaggctgtattcatcaccaaagaaaaaac

SEQ ID NO: 428713 - DNA, 90 bp, Homo sapiens
gaagaagtcatcccaggaactgtatggcctgatctgctatggcgagctgcgcaagaagattgggggctgattgtcagtggcttcgccccg

SEQ ID NO: 428714 - DNA, 83 bp, Homo sapiens
ccacgcaaccccagatccatttacactttacacttccccgggcgctgcctggacaggcctgcctgcgtgctgggacatgtctg

SEQ ID NO: 428715 - DNA, 100 bp, Homo sapiens
ctgcaatggagtacttagagaagaagaatttcatccataggacgcttccattgcacacagattccatgtgatgagagagaaacatcctgaaaaattcaac

SEQ ID NO: 428716 - DNA, 95 bp, Homo sapiens
gatgaggagggcaccaaggcgctgatgagggcccttgaggggaaatggatgctaaagaggctggatgagggagactctgatgtggactcggagct

SEQ ID NO: 428717 - DNA, 100 bp, Homo sapiens
tcaggcgcaaatggtccttgacccccagcccttctgctgaggcccagagacctgagcagctctgcaaggttctaacagattattcactgaccagcgctga

SEQ ID NO: 428718 - DNA, 83 bp, Homo sapiens
tgagaagcgtatggccacagaagttgctgctgacgctctgggtgaagaatggaagggtgccaagtaccggggctccatccatg

SEQ ID NO: 428719 - DNA, 75 bp, Homo sapiens
ttttttctcatggatgttcttcttcgagtatttgtagaagggcgagtctgcggacaccagaactgacctgggagc

SEQ ID NO: 428720 - DNA, 106 bp, Homo sapiens
gatttgttaaggattccaagtaactcttatttgaataactgaagtgaagtgatggactccgatttggagagtagtaagacgtgaaaggaatacacttgtgtttaag

SEQ ID NO: 428721 - DNA, 82 bp, Homo sapiens
gcgccgttacagacgtggctactatggaaggcgccgtggccctccccggaatcctgattttccctacaaagatgacctcctg

SEQ ID NO: 428722 - DNA, 90 bp, Homo sapiens
ctttttgccaccaatcccttcgatcaggatgttggacccagatgatgtggtaccagttggccaaagaagagcctggtgttggtgcatgtg

SEQ ID NO: 428723 - DNA, 97 bp, Homo sapiens
ggtccagcggtcacctacccccagcaccacctccagcccctgcgcctcgcatttaaatcaaacggtattgagatggattgggttatgaaacataatg

SEQ ID NO: 428724 - DNA, 100 bp, Homo sapiens
ccacgggccgtccagtgttgaaatgggccatgagctcttcaaattggcccagatctttttcaacggatttcgggcagacaacttgaacaagctgaagaac

SEQ ID NO: 428725 - DNA, 82 bp, Homo sapiens
gaacgaccaagagggtgttcgactgctagagccgagcgaagcgtagagcaggtctctctgcagccatgtcggccaaggcaat

SEQ ID NO: 428726 - DNA, 100 bp, Homo sapiens
aacatgtggttcaagaaccttgacaagctcatccggctggtaaatgcgcaggtcccccccgcctccagccagcctgtgcagacttgctgcctgctgtgtc

SEQ ID NO: 428727 - DNA, 90 bp, Homo sapiens
gcagtggcgcctaaagtctgagagagggaagtcgcctctgtgctcgacctcagcagccatgtcgaagccccatagtgaagccgggactgc

SEQ ID NO: 428728 - DNA, 88 bp, Homo sapiens
ttttcagcctcatccagcaggcggtgacccgctaccggaaggccatcgccaaggccatggcagggccgggcccaggcccgggggaccc

SEQ ID NO: 428729 - DNA, 88 bp, Homo sapiens
aaagatgctggtgtcaccgtcacactaacggtcattgctgaagaaggaaactaaatatattttgccaactttggaaaaagaattattc

SEQ ID NO: 428730 - DNA, 95 bp, Homo sapiens
tccgcgtcccgctcgctgggagagaggtacctctccttttccctctccctttccctaagtgattcgcctttgccagtctcatctcgtgtctgctt

SEQ ID NO: 428731 - DNA, 100 bp, Homo sapiens
agccccttgtcagccagggctgaacccccgcagatgatgtctttctacctaaagatattgacctagacagtgtggatatggatgagacagagagggaagt

SEQ ID NO: 428732 - DNA, 96 bp, Homo sapiens
gctcggcccgcgggggagccccgggagccgcacgagaaaattcctgttccaagagaaaataaggcaacatcaatgaaggagagaagagccagccag

SEQ ID NO: 428733 - DNA, 82 bp, Homo sapiens
ctgaaacagaaattctggaacacctatatggtggcactgaggagcagcaggcagagtcagagaaggccccgagggagccctt

SEQ ID NO: 428734 - DNA, 100 bp, Homo sapiens
gaggtgcgggcgcggctggcggccacgcagaaatctcctgcaaagaagctgagccatgcaattagtaaatctttggggtgtgtacccacgagagaacccc

SEQ ID NO: 428735 - DNA, 75 bp, Homo sapiens
tcgttatcatgtggcagaagcactatgacattcactactttcactgcctaagaatcctggaccttctcaaaggca

SEQ ID NO: 428736 - DNA, 75 bp, Homo sapiens
tatgtttgtaaatgtccccgaggatttaatgggattcactgtcagcacaggctgatcccttatccaacatggttc

SEQ ID NO: 428737 - DNA, 74 bp, Homo sapiens
aaggaaatgagggcaacttctgaagacttcaacaaggtctcggcgcggaagatggccggcggcgtggacggccc

SEQ ID NO: 428738 - DNA, 116 bp, Homo sapiens
aaactgggagagcttcggaaaaagcactacgagcttgctggtgttgctgagggctgggaagaaggggccagtgtcattcaaagatgtggctgtggatttcacccaggaggagtggc

SEQ ID NO: 428739 - DNA, 100 bp, Homo sapiens
aatgaaggttgatttcatcagactaaaaagttacagggattatggtgtcacacctgaatacatatgtaagcgaaacgaggaaataaagaaagcccaagaa

SEQ ID NO: 428740 - DNA, 87 bp, Homo sapiens
ctgtctcctgcaagaactggctcaagaaatttgcctcgaaaaccaagacacaactcagatgggaagttcatcgcccgggcacagcgg

SEQ ID NO: 428741 - DNA, 83 bp, Homo sapiens
cagaagtccagagctgaggactgcctgtttgcaggtactaactagggagctctggcagtgaaccttattgacgtggaaagttg

SEQ ID NO: 428742 - DNA, 99 bp, Homo sapiens
gtgtagcctgtggaaagcccattcggaacaatgtttttcacttggaggatggtgaaccctactgtgagactgttggaaatggaggatgaagatacaatt

SEQ ID NO: 428743 - DNA, 75 bp, Homo sapiens
gccagatccggagtaagcaaaactggagtcttctgcctgcgcaggaaacaattgaagatgttgaagaaatgctca

SEQ ID NO: 428744 - DNA, 100 bp, Homo sapiens
caggagcgcagacgcccccgcgtaccagcagggccagaaccagctctataacatcaagtcccagcagagcgaggtgacccgaatcctggatgggaagcgc

SEQ ID NO: 428745 - DNA, 100 bp, Homo sapiens
ggatattgatgcgccagtcactgtttcagagtggcagaatcacaccaccccgaagagccccttcaccagatggcttctcaccatatagccctgaggaaac

SEQ ID NO: 428746 - DNA, 82 bp, Homo sapiens
cgtgctggcagtagggggcgtgggaggctgctctttggcgtaaattgcaatcgattagggatcgtttctcagaatcaagtta

SEQ ID NO: 428747 - DNA, 98 bp, Homo sapiens
ggctccatgtctctgaggagcggcgggcggcggcgcgcggacccaggcgcggatggcgaggccagcaggaatccagcactacgccctgccctctactg

SEQ ID NO: 428748 - DNA, 100 bp, Homo sapiens
gatactaacctcttattcagaatgtcccaacagctgccaaatggtgtcacttaccacactggaacatatcaagaccggttaacaaagctacaggataatc

SEQ ID NO: 428749 - DNA, 100 bp, Homo sapiens
caatgagaagaccttggagcactatacccacaacactgtccgagggtgctcttatttctacagctgaatgtggtgcatctgcaacgaataatgaaggaat

SEQ ID NO: 428750 - DNA, 50 bp, Homo sapiens
ccaagaggtgaaccacgccgtggaggtaggtggcaagtgggagaaaccat

SEQ ID NO: 428751 - DNA, 100 bp, Homo sapiens
aagagatcagagaccagggctcctgtggctcctgctggcccaaggagctggatccctctgctgtgctccccttagactgtctgcttgcttttgtgttctt

SEQ ID NO: 428752 - DNA, 75 bp, Homo sapiens
attttgggtttgaagaatcttctacatgcaaaagctgatgaagcattgaaagccaaagaaagaaatgaggaagaa

SEQ ID NO: 428753 - DNA, 95 bp, Homo sapiens
gtgctaggggaaatgaagaggaaagtcttgcctctccattttcttccgttcatgagagcactagacaaactgaatggatttcagttagagaattt

SEQ ID NO: 428754 - DNA, 98 bp, Homo sapiens
cggagtcctgttccaccttcagagcgtcacggcgtacgccctcatggggaaaatctccccggtgactttcagatgctggcccgcgagagacattgatg

SEQ ID NO: 428755 - DNA, 90 bp, Homo sapiens
caaaggaaaacgaggaaagtcccaggatgactactgtgtcaagtgcctgtgtgtatcttaccagctccccagcactgccagactgtgcca

SEQ ID NO: 428756 - DNA, 100 bp, Homo sapiens
ttaacagcagaccgagtcaaaagcttcagtcgggaaagaggttaaagaagacacgcaagtatgatatcatcaccactccagcagagcgagtggaaatggc

SEQ ID NO: 428757 - DNA, 82 bp, Homo sapiens
cgagcacataacggggttcgggtgtctcgtgtgtgaacatcacagcaccatatgaaggcggagtatggaaagttagagtgga

SEQ ID NO: 428758 - DNA, 82 bp, Homo sapiens
cctggagcctcagttggaagcagccgatccagcctgcggagcctgtggggcagccctcccaggcccaatacttcaaagcatc

SEQ ID NO: 428759 - DNA, 85 bp, Homo sapiens
caaacgcagaaggactgcctcactgagcaaccaagaccttatgtttgatcatcggccaaggtcctggcgagaactgcctctgcgg

SEQ ID NO: 428760 - DNA, 83 bp, Homo sapiens
cgacgtcatcatgctgaccaccaatcagatccgtaagggtgctttcttctgcgacctggtactcatctacctcatcaaaaaga

SEQ ID NO: 428761 - DNA, 95 bp, Homo sapiens
tgaacatcgacatcgccagcatcgacatggtttccgaagtcaacatgcccaggatggcggcccaggtgactctggaggacgcgctgtccaacgtg

SEQ ID NO: 428762 - DNA, 50 bp, Homo sapiens
ggctgcctcgccgcgtctcgccacgtttggcaatgaggagcagcagctgg

SEQ ID NO: 428763 - DNA, 95 bp, Homo sapiens
tgcattcaatattccaagtctggacagcatcaagaattattacagctccctgtgctgtcaggaatctacaggacttggctcgtatttacattcga

SEQ ID NO: 428764 - DNA, 50 bp, Homo sapiens
ctctccttttcgtttccggaaacatggctatgactttgcagccgtcctgg

SEQ ID NO: 428765 - DNA, 83 bp, Homo sapiens
gagaaaaccagctgagacagggcgccacttactaggttggggtgactcagtgggaacgccatctgagcggggcatgacctatg

SEQ ID NO: 428766 - DNA, 100 bp, Homo sapiens
gaaaaacactcggtctttgccatgttattcatttctgtgcaaaacaggactggctgatactacgtattccagatgggtggccgtgaattaagtgatttta

SEQ ID NO: 428767 - DNA, 100 bp, Homo sapiens
atgaataaaaacatttcaactccctacagttgtgccatgcgtctgtttctgtcgactgtggaccacttatgtgcgatccgtggaccacttgcgtgcgatc

SEQ ID NO: 428768 - DNA, 97 bp, Homo sapiens
ccgtgccgcgagcgcggcctgcaggaggtccttgaatgggcaagagggcacatgaagtacggcgtcctccacattcacggcctctacacggacccct

SEQ ID NO: 428769 - DNA, 75 bp, Homo sapiens
aaccaggaacagaggacagtgagtcgctctcgtccctccaggaattgaatgatctggcacgggaccctccagcac

SEQ ID NO: 428770 - DNA, 93 bp, Homo sapiens
agaccctggagcctcagttggaagcagccgatccagcctgcggagcctgtggggcagggaggccatcagtctggtgtgtgaggctgtgccggg

SEQ ID NO: 428771 - DNA, 95 bp, Homo sapiens
tggtttgcctatgtcaagatcacaggatgtagtaactggagttagtcccctgctcttcaggaaactcagtaatcctgacatattttcatccactg

SEQ ID NO: 428772 - DNA, 98 bp, Homo sapiens
tcgtctccggacggggccctgacacggccaccctactgcctggaggccggggagccgacgcctggaggataagatcaatgccctcattaaagcagccg

SEQ ID NO: 428773 - DNA, 124 bp, Homo sapiens
aggaggacgtggaggaccattatgagatgggggaggagctgggcaggccttataatgggactaattttacgatatgctacagcaccaactgatattgaaagtggaactgtctatgactgtgtaa

SEQ ID NO: 428774 - DNA, 75 bp, Homo sapiens
ataaaatgcttcaagtagtcctgtgctcaacattgcttatcgtaattatgccaccctcggccctggaccaactca

SEQ ID NO: 428775 - DNA, 99 bp, Homo sapiens
gacttccagcgcagagtgccctacaactacctgcagcgggcctacatcaagggacctcggaccgtcccccagacccactggagccaccgtcacttcctg

SEQ ID NO: 428776 - DNA, 75 bp, Homo sapiens
gcaaaatcgagcgggccattgcacatgattaagtaccggtacatcccgttcacacatgggaagagaaggtacaga

SEQ ID NO: 428777 - DNA, 100 bp, Homo sapiens
atgacgatgacgtctaccgcagcctggaggagctggccgagtcaaaatgcagatcttcgtgaaaacccttaccggcaagaccatcacccttgaggtggag

SEQ ID NO: 428778 - DNA, 75 bp, Homo sapiens
agtctcgttgctgcctctgtgtacgctgaggggggagctattattcatggactatccagtctaacagcttgccag

SEQ ID NO: 428779 - DNA, 80 bp, Homo sapiens
tctacctgacgggcctgcgagggttgaagattgtgaagcaatagcctaaggagaaccaggtgcatcagcgcattgcggag

SEQ ID NO: 428780 - DNA, 98 bp, Homo sapiens
tcggtcctatacaaggagtatgctgaagatgacaacatctatcaacagaagatcaagatttccacaagacggcaccctatgtcgtcactggcagcgta

SEQ ID NO: 428781 - DNA, 75 bp, Homo sapiens
cacattttatgttgtgtcatttcgaaggaaaaagcttgtggtgaaggggggcaaaaaaaagaagcaagttctgaa

SEQ ID NO: 428782 - DNA, 96 bp, Homo sapiens
tccattcctcatcaccatcgaggagaagtccagtttcttggaaggcgctccatgaaatacacgctgtgcagtgacaaccatggcatcaagcccccg

SEQ ID NO: 428783 - DNA, 100 bp, Homo sapiens
agcgcgtccaggcctgacagctctgcggctcgggccctgagcctcctgacaaggtgatccgggcgggccccgcaggaattttatcccctcaccggcctca

SEQ ID NO: 428784 - DNA, 84 bp, Homo sapiens
gaagtgagaaaccaagatagattcatctcgacactgaaattacaggaactgtggctgcaccatctgtcttcatcttcccgccat

SEQ ID NO: 428785 - DNA, 100 bp, Homo sapiens
ctgggccggaggccactgtcttctcttcctcctccaccgagtcgtgctctcgccccaacccgcgcgccaggatcacccagtatactccataccagcctga

SEQ ID NO: 428786 - DNA, 98 bp, Homo sapiens
ggcgagctcgcgatgagtggtctcggcaggctcttcgggaaggagtggtgaaaccagaacaatatctcactttcattatactacctggccagattttg

SEQ ID NO: 428787 - DNA, 83 bp, Homo sapiens
aaaaaaggatatgaaagaacaccaaaagggaactctaaagatttagttggaaaagtaggaagagagaagggcacagttaccta

SEQ ID NO: 428788 - DNA, 100 bp, Homo sapiens
cgcggggacgccgcgtgctcccaacgtcgccccggtttgacgcacacggcaccaaacttaacaatgatgatgttatgttgatttctgtggaaagtcctaa

SEQ ID NO: 428789 - DNA, 100 bp, Homo sapiens
ggttccccaacatgcctcaccctcatctatatcctttggcagctcacaggggagatcgtggtgaaatggtttgaggctgtccagactggcctgcccatgt

SEQ ID NO: 428790 - DNA, 75 bp, Homo sapiens
cgcggcggcgccgggtggtggttaaaccatgttaaggaggattttacagagggccaaagaactgccaactctgaa

SEQ ID NO: 428791 - DNA, 90 bp, Homo sapiens
cacccgcaaggtcgtgcacgatgccaagagctgtaggtaaaacttgcctactgatcagttacacaaccaatgcatttcctggagaatata

SEQ ID NO: 428792 - DNA, 50 bp, Homo sapiens
ctgagcttcctggagaagaggaagaggaacagctgccccctgggttccct

SEQ ID NO: 428793 - DNA, 50 bp, Homo sapiens
ggcctggagccagtgcccaagggccaaaccagtgctcctgccacctctct

SEQ ID NO: 428794 - DNA, 75 bp, Homo sapiens
taaactactcaacatcacaaatccagggttaaagcacgaattgggagctctcagcgacatcaccagtcagcagcc

SEQ ID NO: 428795 - DNA, 80 bp, Homo sapiens
gaagtgcaggactccaagatttacttccttccctttccagcagaattacctgagacgaagcaagtgataatcaagttact

SEQ ID NO: 428796 - DNA, 93 bp, Homo sapiens
ctatgccaaggcaagaaccgcaaatagtcatctctctaatcttgttcttcacggtgatattccacaagatcatcatggcaaaaccagctggtg

SEQ ID NO: 428797 - DNA, 90 bp, Homo sapiens
tccgaagcgatggagccccagctgaaggaaagcggaatcgatctgacaccgagcagtacgctggggaggaggaggaggaagggagcggca

SEQ ID NO: 428798 - DNA, 100 bp, Homo sapiens
ccacagcggggcggcggcggcggcggctgcggcccaatataggttgatgataattagaagcatgctttccactgaacttcccgacaacatttgttatgca

SEQ ID NO: 428799 - DNA, 74 bp, Homo sapiens
ccactgcctacaaaccaccctctcctgaccctgaagaactgtggcatccgtgtcattctggaccttactcccaa

SEQ ID NO: 428800 - DNA, 100 bp, Homo sapiens
agcgaggacttctaccgctgcggctactgcaagaacgagtcgggcagccgctccaatggtgcagcagtaccgcgtcgccatgactgccaaggactgctcc

SEQ ID NO: 428801 - DNA, 87 bp, Homo sapiens
ggaggcgagggtgcgatggcgcggagcccgggacgcgcgtacgccctgctgcttctcctgcttcgagagctgtgcccaggagtgaac

SEQ ID NO: 428802 - DNA, 98 bp, Homo sapiens
gctcgacagaaccttggcgtccacaaaaaggtgcccgggagctgggggagttccatgccttcattgtctcggacctgcgggagctccagggtcaggcg

SEQ ID NO: 428803 - DNA, 83 bp, Homo sapiens
ccaagaagatgagaccgggggaggcgacgctaagttgctgatcgtggcggtacatgtcccagagcaagcacacggaggcccgg

SEQ ID NO: 428804 - DNA, 96 bp, Homo sapiens
cacagcccagctcgggaagtggacagactgggcgtcatgacccttatgcttgctctgtcaaggcacagcctattgtctcctttgctcagtgtgaca

SEQ ID NO: 428805 - DNA, 74 bp, Homo sapiens
agaccaagagcgcgcgggtcaaaggtcgtttggactgggagactcttgtgcacgaaaatctgcccgggctaatg

SEQ ID NO: 428806 - DNA, 90 bp, Homo sapiens
ttccctctgccaccttcctcctatatcctcagtggagccagcgccggcagccaccatggcgtcacgcatagggttgcgcatgcagctcat

SEQ ID NO: 428807 - DNA, 99 bp, Homo sapiens
gtccgtaaggagcagcttccaggatcctgagatccggagcagccggggtcggagcgggtgactgccaacagccagcccaatgtcgaatccagaaatgca

SEQ ID NO: 428808 - DNA, 74 bp, Homo sapiens
cagaaacagatctcagccccgggctcccagctgcccacctcataggctcagcctctgaggaaagaacctgaaat

SEQ ID NO: 428809 - DNA, 98 bp, Homo sapiens
aaagtgggaaacattgaaatcaagaggactactgagcccagccaggctgtatgccattgctgccaaagaaaaagatattcaagaggagtccacttttt

SEQ ID NO: 428810 - DNA, 75 bp, Homo sapiens
agctgagcctttctggacagaccaacctgtcagtgctgcaagagttgtatcccgcattttgtattcacaacggag

SEQ ID NO: 428811 - DNA, 100 bp, Homo sapiens
ccagacagcttccacagcctgacgccgaccttcgcagattttgagaagagggggaaaaaggaagtttgtcctgtcctggatcagtttctttgtcatgtag

SEQ ID NO: 428812 - DNA, 82 bp, Homo sapiens
cgcggattcgccgaggcaccgaggcactcagaggaggcgagaaccactgtctctgatcaacgtgcggaagaggaacgtggaa

SEQ ID NO: 428813 - DNA, 83 bp, Homo sapiens
ggaaggaacgaggcaaggagctaaagcagcgtgcgttcagccctgggttcccccagaagatcaatggaaggtggattccaaag

SEQ ID NO: 428814 - DNA, 132 bp, Homo sapiens
tctgggaaccatctctcacacatcccaggacaagcattctctggtctctacagcctgaaaatcctgtaccagcttcagtcccaggaggagaccaaggagaggcgacattcccataccattggtgggctgcct

SEQ ID NO: 428815 - DNA, 75 bp, Homo sapiens
gagagttgcaaagcacaattaggtactccaaagattcaggtttactcacgtcatccagcagagaatggaaagtca

SEQ ID NO: 428816 - DNA, 90 bp, Homo sapiens
tgtgcattaacctgccgccgcccctcaccagacagatcgctgtcaaaaccctagagttacactgttagaccttatgatagccaagataac

SEQ ID NO: 428817 - DNA, 98 bp, Homo sapiens
agcgactccatctacacgaaaggcaccccggagattgctttctggggaagctatatgttctcctttcagccaagacctttcaccagtgcaggggatag

SEQ ID NO: 428818 - DNA, 50 bp, Homo sapiens
cttatgcttataagagtggaacaggtagcacaggcggagtgcagcggagg

SEQ ID NO: 428819 - DNA, 74 bp, Homo sapiens
tgagatcatcaccaccccgacggagacttgtgacggctacgactggcaaagatgagggaggctgaagcggccca

SEQ ID NO: 428820 - DNA, 83 bp, Homo sapiens
gggacaatggtcaccgtctcttcagcaatgaactgttcagctgaagagactgagaatgaccacagcacagaaacactcactaa

SEQ ID NO: 428821 - DNA, 52 bp, Homo sapiens
aagaaaggcttcggttggagcagcaaaagcttctctgcagaatgtcaaacaa

SEQ ID NO: 428822 - DNA, 80 bp, Homo sapiens
cttctttccatcacttaaaccttcttccagtatagatgaggagaaggtgtttgagctgatgaccagcctccacaccaagc

SEQ ID NO: 428823 - DNA, 50 bp, Homo sapiens
ttatgaaagatccggtcatcgcatcagaatatgtgagatccaggctgttg

SEQ ID NO: 428824 - DNA, 100 bp, Homo sapiens
aagagcaggtggaaaaggaaagggttatgtgcttcacatgatcactactgcagcagaatggtctatgtcattttccttctttggttttttcctgacttac

SEQ ID NO: 428825 - DNA, 100 bp, Homo sapiens
gagctttctggaagaaaggaaatgttaggatcactttattctgtgaatgaactcattcttaaacagaagcaaagatttgaggaaaagaggttcaaattgg

SEQ ID NO: 428826 - DNA, 100 bp, Homo sapiens
caggggctgtggcgccggcgacggaccagcgacccaagcgccgcggttaaccacgtctcgtccacgacctccctagctccctcgtgaaagatgcttctgt

SEQ ID NO: 428827 - DNA, 73 bp, Homo sapiens
gcagagctggtgccaggcagctggcgagggggtcaccctagagtttgctcagagcacgaacttccaggagccg

SEQ ID NO: 428828 - DNA, 100 bp, Homo sapiens
cgagcccggccgcggcctgctggtttcaggagagtagttatcttgatggaattagaagttttgaagtcagctgaagcagttggagtgaagattggcaatc

SEQ ID NO: 428829 - DNA, 90 bp, Homo sapiens
ttctccgtgcccctaatcatcgatatcaagtgcaccaaactctttgtggagtctattgagaacctgcccagtgtatttggaagcaaccct

SEQ ID NO: 428830 - DNA, 82 bp, Homo sapiens
attgggctgcagaacctcctggtgcaggttaaagctgaagctcaacaaagatatagtgatctctgtgggcatttataatctg

SEQ ID NO: 428831 - DNA, 101 bp, Homo sapiens
cgcagcgcgaacatggacgccgtcaacgccttcaaccaggagaccatcatggagcagttcaaccctagcctccggaacttcatcgccatggggaagaatta

SEQ ID NO: 428832 - DNA, 50 bp, Homo sapiens
aagcccctcacgctcagggaggtcgagaatcaggaaacccaggcccaacg

SEQ ID NO: 428833 - DNA, 74 bp, Homo sapiens
tcttcaaggcactgggctgggctggagctgcaccccacggccaccgtgctgaaggcccagttcccgagtgtggc

SEQ ID NO: 428834 - DNA, 100 bp, Homo sapiens
aagaagcaactgtacaaaccatttttcaaagaagaatggaagaaaccatgaagcttgctacgatggaagacacagtggagtactgcctgttcctgatacc

SEQ ID NO: 428835 - DNA, 132 bp, Homo sapiens
gcgcggccgcggccccggccgctctgggcgactgtgctggcgctgggggcgctggcgggcgttggcgtaggaggtgctggagaatctggtaaaagcaccattgtgaagcagatgaggatcctgcatgttaat

SEQ ID NO: 428836 - DNA, 115 bp, Homo sapiens
taggtcgtcacaggctccggctcatggcatcaagtggcatccatcataaggttatcaatactctggctgaccatcatcatcgtgggactgactttggtggaagtccttggttaca

SEQ ID NO: 428837 - DNA, 100 bp, Homo sapiens
gcagagagaaagatgatgatgttgtaagccttagcagccttgatctgaagcaatggccaatgtacatggtggactatgccggcctgaacgtgcagctccc

SEQ ID NO: 428838 - DNA, 100 bp, Homo sapiens
cagctttctaatctacagaaagagctcaccatggatgatgatatcgccgcgctcgtcgtcgacaacggctccggcatgtgcaaggccggcttcgcgggcg

SEQ ID NO: 428839 - DNA, 73 bp, Homo sapiens
cagtcagcctcagaggttgacttctacattgataaggtgacccaggcctctctccggtctcacattggagttg

SEQ ID NO: 428840 - DNA, 95 bp, Homo sapiens
tggcccttggcctcctcctgctgctactgtgtccagcgcagctttccagagtgttgaatcttccaccagaaaacttgatcacatcaatatctgca

SEQ ID NO: 428841 - DNA, 100 bp, Homo sapiens
tgggagtcttggcagactttgggacgtgctcaacttggtttaggagagataatcctggactggagtccagagttgccaccagatgggatattcaaaaata

SEQ ID NO: 428842 - DNA, 96 bp, Homo sapiens
tagagtcttcagagacttcgacttcctagatgtggagctggaggatggagaggcttgggaacaatgggccgaggcattgtcatttcttttgcaagg

SEQ ID NO: 428843 - DNA, 96 bp, Homo sapiens
ccttgctcgcccgcagccccgagaccgcaggtactccaaagattcaggtttactcacgtcatccagcagagaatggaaagtcaaatttcctgaatt

SEQ ID NO: 428844 - DNA, 121 bp, Homo sapiens
ggaacttcgaaccatggaccaggccctcaagtccctgatggcctcagaggaggagagctcgtccgcatggtgctgaatggctgaggaccttcccagtctccccagagtccgtgcctttccc

SEQ ID NO: 428845 - DNA, 98 bp, Homo sapiens
cggagttggcggggccctgcgccggaggaggaggaccaggcccgcgggctcagctctcgccgccagcgggccgcaggtcctactgctctgttggctca

SEQ ID NO: 428846 - DNA, 51 bp, Homo sapiens
atgagtcgcatcttcaacccccatctgaaatcttacctgtattccttaacg

SEQ ID NO: 428847 - DNA, 76 bp, Homo sapiens
ggacagaaatcattatcttagccaccaggtttcatggggaagggtatcgggaaggctatgaagaaggcagtagttt

SEQ ID NO: 428848 - DNA, 82 bp, Homo sapiens
gctgacctcagatgctgagaaatccagggtcacagagtgacagagctgggcctggcagtgaagcgtcttcagaagcagaatc

SEQ ID NO: 428849 - DNA, 83 bp, Homo sapiens
tgtccctctgaaaactgaggaatttgaagtgaccaaaacagcaggctgcgggctgaactaccacaagcgctgtgccttcagca

SEQ ID NO: 428850 - DNA, 100 bp, Homo sapiens
aacactggaaacttcgaaaagttggagataaaattctcggagatctgagctacagaagtgcagttcacacaaaagatgttggacaatttctacaattttg

SEQ ID NO: 428851 - DNA, 82 bp, Homo sapiens
gtccttgcattggcctccggcaggcgccccccgggggcgggaagctgacaatgcagatcttcgtgaagactctgactggtaa

SEQ ID NO: 428852 - DNA, 75 bp, Homo sapiens
gggagttacaccgccaccgccaggaagtgcacggctgtctataacgtgctgccgggtctcaggatggaggagtga

SEQ ID NO: 428853 - DNA, 76 bp, Homo sapiens
cgtcgtgatccagaagtccagagctgaggactgcctgtttgcaggaacaacatcaagcctttttgtatcagttaat

SEQ ID NO: 428854 - DNA, 100 bp, Homo sapiens
aagcactgcttcccgcaggcattttaaaaataaagttccggagaagcaaaaactgttccaggaggatgaagaaggttataacgatggagaggtagatgac

SEQ ID NO: 428855 - DNA, 82 bp, Homo sapiens
cagaccatgctctccatcctgctcttcttccacagaagagtattgggcaactctgcaagaatccactttcagcaaactggtc

SEQ ID NO: 428856 - DNA, 90 bp, Homo sapiens
tgggactacaggcatttgccaccatgctcagactgaatctggatatggatctgaatccagcttgcgtcgacatggctcaatggtgtccct

SEQ ID NO: 428857 - DNA, 100 bp, Homo sapiens
cttatagatcttctgcactgtttacaggcacagtataagccacccgcacttaaaaagtcaaattctcctggaactgcatcatcaggatcttcacgattac

SEQ ID NO: 428858 - DNA, 90 bp, Homo sapiens
gaggaaaacaacttcgagggcagactcgatcaagtcatccgccaaagaagcctgtccagtttggaactgttcctctcctgtgcacagaaa

SEQ ID NO: 428859 - DNA, 76 bp, Homo sapiens
ggcaatccagtgccctataatgaaggtcttgctcagtgtgcagaactctgctggcagctgagaggggaagccggaa

SEQ ID NO: 428860 - DNA, 75 bp, Homo sapiens
atggaaggcgccgtggccctccccggaatgcatcaactgtgaaatctgtgttagaattgattcctgaattaaatg

SEQ ID NO: 428861 - DNA, 50 bp, Homo sapiens
gggaggttgaacttattaatatggcaatcaggaattgtttccctgtgaag

SEQ ID NO: 428862 - DNA, 82 bp, Homo sapiens
tttcacgaaggcaccgacgtcatcatgctgaccaccaatcagatccgtaagagctagagccggtgcaggccacgcagaacaa

SEQ ID NO: 428863 - DNA, 49 bp, Homo sapiens
tctcgaatgggcacacctgtgtagcggcaacctttggcactgcatccat

SEQ ID NO: 428864 - DNA, 82 bp, Homo sapiens
cgtccccggcacacgcgcagccccggcctctcggcctctgccggagaaacaggttgggttaacggcatggagaacagtcacc

SEQ ID NO: 428865 - DNA, 82 bp, Homo sapiens
gaattacgggaacagaaagaaaagtccgaaagagctggtaccttgtggtctataatcctttagaacaagaccgaatctcgtt

SEQ ID NO: 428866 - DNA, 86 bp, Homo sapiens
gggcaacaattttctgtacaccaatggaaagtgcgtcatcctaaggaacatcgacggattaatgaaaatcaagttccatcctcaga

SEQ ID NO: 428867 - DNA, 100 bp, Homo sapiens
aggctcgaacagctcaagtccaaaaagatgcacggattggagaagcagaggccaagagagatgctgggatccggtgcagagcagagcgggcggaggaccc

SEQ ID NO: 428868 - DNA, 108 bp, Homo sapiens
taaatctactacagggacaagtttcagagctgccactcagcttcttggacacttaatgattgttggcaagaaatgtgctgctgatctgggcctgaataagggttatcg

SEQ ID NO: 428869 - DNA, 82 bp, Homo sapiens
ggcatcggaggagttcctgaacggcagggcagtgcgacgttgtggacgtttaccagcgggagttcctggcgctgcgcgatcg

SEQ ID NO: 428870 - DNA, 107 bp, Homo sapiens
agcccccaacccagaccacacccttgagcctgagcccgacattattcctgagcagcctagggcctaggcccgggccaccatggcgctgcctccaggcccagccgccc

SEQ ID NO: 428871 - DNA, 101 bp, Homo sapiens
gagtgctaaagaagcaggatgcattctacaaagaacagctggctagactggaggagaggccccattgacaaaccttcagattctctcagtatagggaacgg

SEQ ID NO: 428872 - DNA, 100 bp, Homo sapiens
tggcagcctgcagctaggactttaatacgctctgctgttgcccgtattcaggagttcttcagacggagaaaagaaaggaaagaaatggaagaattggata

SEQ ID NO: 428873 - DNA, 82 bp, Homo sapiens
ctgtactggctgctgctgccctgcgcgctgctggctgcaattctgtggtgttcttggtcacacatttatggagtttctgaag

SEQ ID NO: 428874 - DNA, 50 bp, Homo sapiens
cagaaaatagtggtgcttttttataaagatgatattccacttagtcgtcc

SEQ ID NO: 428875 - DNA, 75 bp, Homo sapiens
agcagccgatccagcctgcggagcctgtggggcagagcacaaagttatcattgttgggctggataatgcagggaa

SEQ ID NO: 428876 - DNA, 105 bp, Homo sapiens
tcacgcacgggatccagagcgccgcgcacttcgtcatgttcttcgcgccctggaaccatgctgatgctggccgttctgctgccactggccttctttctgctcctt

SEQ ID NO: 428877 - DNA, 50 bp, Homo sapiens
aatgggttaccagaggaagagctaagctatatcgagaagtttactgactt

SEQ ID NO: 428878 - DNA, 74 bp, Homo sapiens
ggaagatgaagatgataaaacagttttggatcttgctgtggttgggggccgtcccgctcctaaggcaggaagat

SEQ ID NO: 428879 - DNA, 75 bp, Homo sapiens
gttaatgtggtcacctcggaaattgcagcccttttagtaaaaccacagaagtactactataattccttgacccag

SEQ ID NO: 428880 - DNA, 101 bp, Homo sapiens
gcggaagcagtctgagggcctcaccaaggagtacgaccgcttgctggaggagcacgcaaagctgcaggcaggagctgggaggaggcggcagcggcggcggc

SEQ ID NO: 428881 - DNA, 88 bp, Homo sapiens
agcctcccactgaggatcatcttctgcagaatactttgtggcctgaagttcaaaaactactgctttgccagcaacatgctcaattccc

SEQ ID NO: 428882 - DNA, 82 bp, Homo sapiens
ccgcacgcggcgatatggaagaggagggcaagaagggcaagaaggcaagtgaaccggagcaaacgacttccgatccagtctg

SEQ ID NO: 428883 - DNA, 100 bp, Homo sapiens
tgggggtcgtgggccggagcgcctccttcgcaggcttcagcagtgcacagagccggaggatcgctagtttatgccaacgtgacttcattcatacagatga

SEQ ID NO: 428884 - DNA, 98 bp, Homo sapiens
cattgctgcccagcagctaggcatcaagtacatcgggatgaggaatgagcaagcgattgggaaaatgaggtacgttagtgttcgcgattttaaaggca

SEQ ID NO: 428885 - DNA, 90 bp, Homo sapiens
ctcgctccagaggacatgagcaaggagcaggcacagttggcgggcagctcccaggtctccatgagtacggcgccgtcgggggctccacac

SEQ ID NO: 428886 - DNA, 90 bp, Homo sapiens
gtggaagcgggaggcagttgcagctttcaggtatgacgctgggcgggatggcttcatcgacctgatggagctgaagctgatgatggagaa

SEQ ID NO: 428887 - DNA, 90 bp, Homo sapiens
cggggagcgtccggagctagctggatcctctaggcagaaaaatcctgggtagaagctggatcagcaagaatgtcactccttatattggtg

SEQ ID NO: 428888 - DNA, 132 bp, Homo sapiens
gtggggccgcgtatggagcccccgccccccggagctgccaacattgccaacgccaccgccacgctacacacaggttttgaagagacaggggacacgctctatgccccctattccacacattttcagctgcag

SEQ ID NO: 428889 - DNA, 100 bp, Homo sapiens
gtttctgacttaagccgatcccagaggctctttgctgctgtcagtatcaccactggtcaagcaggagccaaaaacctgtatatcatctccgtgaagggga

SEQ ID NO: 428890 - DNA, 83 bp, Homo sapiens
cagcatttgccaaggagacatccctcttaggaacgtcaaggtcgtgggaaataaaaggcagttctacacagactgcagcaacg

SEQ ID NO: 428891 - DNA, 100 bp, Homo sapiens
ggaagatctttttcctcaattgcaaaaaatcccagaagtgggatgaaatgaacatcttggcgacgtatcatccagcagacaaagactatggtttaatgaa

SEQ ID NO: 428892 - DNA, 75 bp, Homo sapiens
aaaaatgcagccagcgatgcagaaatgaaccaccggagggaaatcagtcagcttggtttacagtcgtggcttcca

SEQ ID NO: 428893 - DNA, 100 bp, Homo sapiens
tacgtgcctgtcaagaccacgcaagagcctcctgatctagcagccaagactccccctgacctttggccatgtaccccaaccctctcatctactgcacctg

SEQ ID NO: 428894 - DNA, 98 bp, Homo sapiens
ctgggtcggtggcggaggctgaggagaaggaggagcgggccgtggaggcttcgccgcctagaatgcctgttattaaaccagacatagccaactgggag

SEQ ID NO: 428895 - DNA, 98 bp, Homo sapiens
ttcagccatgatgggaaaatgctggcgtcagcatcggaagatcattttattgacattgctgaagtggagacagacttcatctgcagagagaaagagac

SEQ ID NO: 428896 - DNA, 100 bp, Homo sapiens
agccgcctccgaagatgggggatttctacgacccggagcacccgacccctgaactctaaaatagagctcaagcttgagaagagagaaccactaaagggca

SEQ ID NO: 428897 - DNA, 100 bp, Homo sapiens
agacccactctacgtcgcctgcgcccagaagaaatgtttgaaacatgggtctctaattaacagaagatggcaaagcccagccacagcagctatgtccttc

SEQ ID NO: 428898 - DNA, 83 bp, Homo sapiens
gctgcttactggaaactggatgcagcaaggaaataggatttaaccgctctctgcctcccaggccgccatggcatcagatgaag

SEQ ID NO: 428899 - DNA, 97 bp, Homo sapiens
ttcggttgggcatgctgcttaccgcaggatgatggaagcgacggcccgtacaaagacagaagcgttggtttcagtggttgtgtcaaaccgattggtg

SEQ ID NO: 428900 - DNA, 74 bp, Homo sapiens
ttacttatatcaattcctggacacagagatatattcgactttatgggagaaaatttagcaaagaagatcatgtt

SEQ ID NO: 428901 - DNA, 98 bp, Homo sapiens
agctgaggaagtagaagaaataaaggcagaaaaagaggctaaaactcaggctatacttttggagatgtgtgggaagttcactttcacccatccaaccc

SEQ ID NO: 428902 - DNA, 75 bp, Homo sapiens
caaaaatagtgatagctttgataagtaacaaacctgaatttggcaactggcatcataaacagaagcagtgcttca

SEQ ID NO: 428903 - DNA, 89 bp, Homo sapiens
cagatgaagacagcaccaggttccaaatcatcaatgaagcaagtaagggaatgggtactgttcaaaaaggaatgccccacaagtgttac

SEQ ID NO: 428904 - DNA, 100 bp, Homo sapiens
ggatgtgtcagtcaaagcagcctctgaacttctcatgaaactctcaggaacgcttggattttgcaatgaaagaaataatatttgatcttctcagtgttgg

SEQ ID NO: 428905 - DNA, 88 bp, Homo sapiens
caggaactgtcggaacagaaccaaaggctattggatcagctcagcaggttccagtgtctcgccccatcctcaccctcagggttcccag

SEQ ID NO: 428906 - DNA, 96 bp, Homo sapiens
tccagttttcaactatgctgacagcatttatcttcagatactatggggcctttatcatctgctggactcctggattggttttgttacttctagacg

SEQ ID NO: 428907 - DNA, 89 bp, Homo sapiens
tgagaaaacaaagagtcagagagagatggaagagaaatatattgttagtgcctggtacaatatgggcacaagagactatagtccccggc

SEQ ID NO: 428908 - DNA, 75 bp, Homo sapiens
aactccaaccctgtcatggaagcttttgaccccccaaagacacacgtgacccaccaccccatctctgaccatgag

SEQ ID NO: 428909 - DNA, 96 bp, Homo sapiens
caataacaggcggagggtcggcgtaggtcgtttgagttcactcagtctctcccctgccaatcatgaaaaccagccctcggagggcgagcgcatcct

SEQ ID NO: 428910 - DNA, 95 bp, Homo sapiens
gtggtggatgctaggctgaggctcagcgaggagctcagcggcgggaggatcaaggtagaaaattatggcatgccgtttagcagaactgaagatgg

SEQ ID NO: 428911 - DNA, 89 bp, Homo sapiens
aggcttactgtggatctggattctaaggcaacacttccttgaagaaacaagcttacaggcagagaagaggcgatggcggcgatggcatc

SEQ ID NO: 428912 - DNA, 114 bp, Homo sapiens
cacaaatcggggactggcagcccaccggcatcttttcttaaggaatcttccacagcttcctctcgagaaaagcctggaaaactagaagcacaaagtagtaacttcctgtttcct

SEQ ID NO: 428913 - DNA, 100 bp, Homo sapiens
aggtgggccggacctgggagtggcagactgattcttgctattccaaatcctcttccacgttgacagcccttcagatatttcaacactcctctcagcatcc

SEQ ID NO: 428914 - DNA, 75 bp, Homo sapiens
aaggacaaaagccaagaggaggacagttcgctacacagcaatgcatcgaggaagccaaattggcagagaatgctt

SEQ ID NO: 428915 - DNA, 89 bp, Homo sapiens
gcctcctcgctcccgccaccgccggacttcaatgcccagtccccagctcgccagcgttttgcactgattgcaaaaataaagtcctccga

SEQ ID NO: 428916 - DNA, 100 bp, Homo sapiens
ctttctggactaattgaagaaaaaagtaaactacttgaaaaatttagccttgttcaaaaagaggctgctttgtaccgcctcagtggagactggaatccct

SEQ ID NO: 428917 - DNA, 96 bp, Homo sapiens
ggggagcggcgttggaggccaccgtttccaggaactaagcgtcttgtagaaggaactattaatccaggagaaacctgtttaatcattgaagatgtt

SEQ ID NO: 428918 - DNA, 88 bp, Homo sapiens
tgaagttaatggagaacatgcaacagtacgttttgctggtgttgtccctcccgtggcagttgccagagtctgccctccgagacctcat

SEQ ID NO: 428919 - DNA, 100 bp, Homo sapiens
tgggacatggagtgttccttccgctagtgatcctttgcaccctgcttggagacggacttgcttccggtgtttgtaaaatgtatgaagaacatctgaaaag

SEQ ID NO: 428920 - DNA, 97 bp, Homo sapiens
tgggaaggtggagccaccagcctctccttggaagctcctcagggtgctcccactgccgagtgagaactggggagctctagttggagaatggtgttgt

SEQ ID NO: 428921 - DNA, 88 bp, Homo sapiens
gagacttattcatgctgtcagaggacaaatatggtctctttagaaggccttaccaaagtagttgatccttctcagctaactcctgagt

SEQ ID NO: 428922 - DNA, 74 bp, Homo sapiens
ccggctccagggagccccgtgtcaagcaagggatacctttcgtccctgcatttaaaggctttcacttatattaa

SEQ ID NO: 428923 - DNA, 90 bp, Homo sapiens
gtacaccacgctgagcctgctgcgccgtgccaggatgcacatccagtttaattggttggggtcagataagaagaggagtgacaatcaagc

SEQ ID NO: 428924 - DNA, 100 bp, Homo sapiens
caggaggccaggggtgtcgccatgctaatggcagcattagccgctgttgggcctcctaatcctcgggcagatccagagtgctgcagtattctgcatggcc

SEQ ID NO: 428925 - DNA, 87 bp, Homo sapiens
ctccctgccaggctcttcatccaaggtagttgatgtcacttggcgatattcctgcaaacatgaagaggtgattgccagaagaactaa

SEQ ID NO: 428926 - DNA, 100 bp, Homo sapiens
ggagattgtggtccccaaagaggaggacgcagggctttatcctgtggataaacgcagagtgaacgagtttggggagtcctacgaggagaaggccacgcgg

SEQ ID NO: 428927 - DNA, 98 bp, Homo sapiens
ggcagctgtggccaacagcaacagagagagtccagctgacagcagccatggcgagcggcagtggagacagcgtcacccgtcggagcgtggcatcacag

SEQ ID NO: 428928 - DNA, 101 bp, Homo sapiens
tggggacttctgcattcaggttggcaggagacattttcaacattaaagaattgggtgaaagagcttcgacagcatggcccacctaatattgtagttgccat

SEQ ID NO: 428929 - DNA, 100 bp, Homo sapiens
gggagttcgactggcgaactggaaggccacgcctcctcccgcctgccccctcagccctgtggctgggggcagagctcagaataatccagaatggctactc

SEQ ID NO: 428930 - DNA, 100 bp, Homo sapiens
gccgcaccctacggcatcgaaagctggtaggtgagtgctgtcctcggctcactttcctcaagctctccggctgccacggtgtgactgctgacgctctggt

SEQ ID NO: 428931 - DNA, 102 bp, Homo sapiens
tggccaccccgaagagttctacaacctggtgcgcttccggatcgggggcaagcggaaggtgatgcccaagatggaccagctgagatctgtatctgtggacct

SEQ ID NO: 428932 - DNA, 75 bp, Homo sapiens
ctctcactgtgcgggctgctgctccagagggcggaggtcagcaactggttcaagaaccggcgacagcgcgaccgg

SEQ ID NO: 428933 - DNA, 75 bp, Homo sapiens
cttggagcccagagccacgtcaaaaatgaggagaaacctgtgcaaatgatgtttaagcaatctacttttaagaag

SEQ ID NO: 428934 - DNA, 96 bp, Homo sapiens
ccacttgattacccgttaagtcccccaaagatgagatttacctgtgagatgtttcatcccaacagacccatggatgaaggaccagatcttgatcta

SEQ ID NO: 428935 - DNA, 75 bp, Homo sapiens
acatccacagaatagacctgaagacaaaaatccagaagtacaagcagtctggttggactccatgaaagaattgca

SEQ ID NO: 428936 - DNA, 50 bp, Homo sapiens
agcccctgccagagaggctggagtctgaagatgatgagaaactgaaaaag

SEQ ID NO: 428937 - DNA, 76 bp, Homo sapiens
ctcgaaatgaagcggaaagcagatatgcgcgtcagcatactttggcggcggagctggagttcgcccaaatcatcat

SEQ ID NO: 428938 - DNA, 83 bp, Homo sapiens
gaccttcattgctctgtgtgccaccgatcgcaccccctccctccctggcggagcccctgaaggagctgttcaggcagcaggag

SEQ ID NO: 428939 - DNA, 50 bp, Homo sapiens
caagtccagggttaagtacagaagagggtggttcccacttcatcaacacc

SEQ ID NO: 428940 - DNA, 101 bp, Homo sapiens
aagccaggcgctgttcccccaccccagaagaggatggcaaaggtggctaaggacctcaacccaggagttaaaaagtgacagtgatgaaaagcctctcaaag

SEQ ID NO: 428941 - DNA, 97 bp, Homo sapiens
cggagtcgtccggagccgctgcgcgggttgtgagtcccggcccagcccctccacccccctgcccccccgatgcgaccatgggctctggcagtgacta

SEQ ID NO: 428942 - DNA, 90 bp, Homo sapiens
aagctggtcatagggacccctacatccggaggaatacctgaatcaaactttccttgagaaatgagagggcagcccaatggatccaatggt

SEQ ID NO: 428943 - DNA, 100 bp, Homo sapiens
cgggagatcccaggcggtgacagagtggagccatggctagaggttatcaatactctggctgaccatcatcatcgtgggactgactttggtggaagtcctt

SEQ ID NO: 428944 - DNA, 102 bp, Homo sapiens
aaccaaccttaatatacagccagcctgtcatgagacctccaaacccctttggccctgtatcaggagcacagacagcaccagttgcccttgaagcagaaaaca

SEQ ID NO: 428945 - DNA, 87 bp, Homo sapiens
ggaggcgggagaggcgagctcgcgatgagtggtctcggcaggctcttcgggaagggttggcaaaagcagcttttgatgatgcaattg

SEQ ID NO: 428946 - DNA, 100 bp, Homo sapiens
tttgagcagaaaggattccgccttgttggtctgaaattcatgcaatttgatgaaggccggaacaactttgaaggggaggtcaccaaggagaacctgctgg

SEQ ID NO: 428947 - DNA, 95 bp, Homo sapiens
atcatagcagagtacgatactcaggtcaaaggtggatccgatattgaatatctggacttctataagcctgtcgtgtggttctggatccttgtagg

SEQ ID NO: 428948 - DNA, 100 bp, Homo sapiens
gagaagaaagaaagattgaaaccagcaggaaggaagatgtctctcagaaacaaaggaataagtcttgactgggatgaaaagagaccagaatttgttcgag

SEQ ID NO: 428949 - DNA, 100 bp, Homo sapiens
tggagcgaccccttgttctttggtggcgctgattttacatcctgaagtccaaactctagatctacggagctgcgatatatcagatgctgctctcctgcac

SEQ ID NO: 428950 - DNA, 100 bp, Homo sapiens
caacaagaaaaagacctgtggctattaagatagatgcagtggcagaacgtggagcacgttggtgaccagagcccctacgtcacctctgtcattctgcaca

SEQ ID NO: 428951 - DNA, 75 bp, Homo sapiens
ttacgggaggacggggaaaaagcggccaaagaagtgaagctgctgctactcgactgactttaagacagctgattc

SEQ ID NO: 428952 - DNA, 100 bp, Homo sapiens
ctttgtggccagatgggtttgtatggacaggcttgtccatctgtaacttcattaaggggccctcctcgccaaagacagcctagagaggacggcaatgaag

SEQ ID NO: 428953 - DNA, 141 bp, Homo sapiens
tctggcacagcggctgtactgaatcctagatttctgcaggatggcaccgtggaaggctgtttggaacagaggttacttaaatgaccatgatgctgtcaccaaggcaatccaagaagctcggcaaatgaaggagcaactccg

SEQ ID NO: 428954 - DNA, 75 bp, Homo sapiens
gcgagatccgctgctgctgaggagaggagcgtcaacagcagcaccatgggggacggcaaaacagaacagaaaggc

SEQ ID NO: 428955 - DNA, 75 bp, Homo sapiens
aaaagtccagaaactcgccagttaatagtattgtgatctttaaatggatgagatggctaccactcagatttccaa

SEQ ID NO: 428956 - DNA, 75 bp, Homo sapiens
tgaacgctaatgactggaaaaccaatgctgctggttttaagggaattgtggtgcttggaataaacagagcttatg

SEQ ID NO: 428957 - DNA, 100 bp, Homo sapiens
cgtcctcctccatgctgaggcgcaatacaccgcttctgggtcagccacctgtctttaccagtttccaagactatgttactgggcttcagactttaatttc

SEQ ID NO: 428958 - DNA, 86 bp, Homo sapiens
aagaatatgaaatgagtctggaaaactgggccaaagcagtgaaacgctccatgaattggaaggaaaatcacctcggcagtgtttga

SEQ ID NO: 428959 - DNA, 136 bp, Homo sapiens
attggaggtgtcagtgttaaaggaacctctacaacgaaggtgaagccacggaagataaggtggcttctggcacagcagcttaattgaccggaacctcattgattattttgttcccttcctccccctggaatacaaa

SEQ ID NO: 428960 - DNA, 145 bp, Homo sapiens
cgccactgccctggggcagctgaactgagcgtatgtgccacgccgcccaggagacccctctgctgcaccacttcatggagccggcatcatggattccttcaaagtagtgctggaggggccagcaccttggggcttccggctgcaa

SEQ ID NO: 428961 - DNA, 74 bp, Homo sapiens
caagagggtgttcgactgctagagccgagcgaagcggaatatggagccattgatgatgtagatattgatctgca

SEQ ID NO: 428962 - DNA, 134 bp, Homo sapiens
ggacccttaataaagtgtttgcatctcagtggttgaatcataggcaagtggtgtgtggcacaaaatgcaacacgcgatggcaagccggcaggtggatattgcaactcagggctggttcattggtctgatgtgtg

SEQ ID NO: 428963 - DNA, 100 bp, Homo sapiens
agcagcgtgcgttcagccctggggggaatcccggaggcaagacacttgaggagaggcgctccagcctggacgctgagattgactccttgaccagcatctt

SEQ ID NO: 428964 - DNA, 75 bp, Homo sapiens
ctcccgagtagctgggactgcaggaatggacaatcagaccgttctggctgtccagtcattattggatggccaagg

SEQ ID NO: 428965 - DNA, 76 bp, Homo sapiens
gaagttcgtgaccttttgggcaaggatcagacacaaaggttagaggtgcaaattgagcatgacccagaattagaaa

SEQ ID NO: 428966 - DNA, 85 bp, Homo sapiens
atgattgcggagcccgctcacttttacctgtttggattaatatgtctctgttcagtatgccgagattttgctgtcctggaggacc

SEQ ID NO: 428967 - DNA, 88 bp, Homo sapiens
ctgcacttcacctggcatgcgaagtccaagttgccaaaacaaaggggatttggtgatggaggctttgttagaaggaatacaaaatcga

SEQ ID NO: 428968 - DNA, 75 bp, Homo sapiens
aacctggcacggctcttgcttccgcactgaagataaaataccctcatcaacttgatcagaaagtcctggagaaac

SEQ ID NO: 428969 - DNA, 90 bp, Homo sapiens
acaaaataaccacttaccccttctcaccgaggaagagcgggagaaaggggtgctgataagactgtgaaaggcccagatggactgaccgcc

SEQ ID NO: 428970 - DNA, 75 bp, Homo sapiens
tccgcgggtccgtggagctggagcagatcccccagccggctgagacagattatggattggatatgtctacttctg

SEQ ID NO: 428971 - DNA, 80 bp, Homo sapiens
cgacgttccatctgtggaaggacctaccaaccaggatctaccgctaccagtctcatgactatgccttcagtagtgtcgaa

SEQ ID NO: 428972 - DNA, 90 bp, Homo sapiens
agcccaccagaatatgtttcttggaatgggtaccacagaccatgtcatcgtcctggcgtccacgaaccgagctgacattttggacggtgc

SEQ ID NO: 428973 - DNA, 100 bp, Homo sapiens
ccctggccaccgcgcgcgcctcgccccggcaggaacccttaggagaaatcttgagagtggacagcaattgtgaagatcgccagagagttctgtgtttcat

SEQ ID NO: 428974 - DNA, 98 bp, Homo sapiens
cagaacttatgctgactacgaatctgtgaatgaatgcatggaagtctgtggcaagcgctacaagaaccgaccggggctcagctaccactatgctcaca

SEQ ID NO: 428975 - DNA, 75 bp, Homo sapiens
gccgtgctctacctctatccggagtaaaactgcaactttcacggatgccaggatcaggaccatgaatgaagttat

SEQ ID NO: 428976 - DNA, 82 bp, Homo sapiens
aagtgggtcaaccagctgaaataccacatgaccaagcatacagaagctccaccatgaggcgaggtggatggaggaagcgagc

SEQ ID NO: 428977 - DNA, 100 bp, Homo sapiens
gtctgtggttggtcccatgggcctccttgtggtcctgctcgttggaggctgtgcagcagaagctccaccgggggacggctacgtgcaggcggacgcccgg

SEQ ID NO: 428978 - DNA, 83 bp, Homo sapiens
gaataacaccacccgttctccccggcacccgggagtcatcttcaaagccctgaagaatgcaaggccagaaactgtcactaatg

SEQ ID NO: 428979 - DNA, 90 bp, Homo sapiens
gttaggtttttatccaaaatgtttcatccaaatgccatcgacgagtacaagccccaggatgctaccaccaacccgtccctgatcctggcc

SEQ ID NO: 428980 - DNA, 88 bp, Homo sapiens
caagaggaatcagaaacctgaagttagaaaggctcaacgagaacaagctatcaggccctcctccagagttctgcaagtcgaaaaaccc

SEQ ID NO: 428981 - DNA, 90 bp, Homo sapiens
gttttgatggatatatcttccttgacagcaaagtacgtagagaaatcgacactcttaatgaacgtttagctgctgaaggacaagcgattg

SEQ ID NO: 428982 - DNA, 74 bp, Homo sapiens
tagtggagcgcaggggaggcagaagtcatgacaggcgaggtgggttctgagaccccatatcatgtgaacctcct

SEQ ID NO: 428983 - DNA, 96 bp, Homo sapiens
gcggaggcgctgccacgaaactcgtacctgcggctaagagcagtggtggggtcagatgctgtggactctgggacctgcagctctgcctttgctggc

SEQ ID NO: 428984 - DNA, 100 bp, Homo sapiens
attggtggctatccagcgcttcctgcggatgtgggcagtagaacactctctccccagaaatccaacttctcaagttaacaagcacaagccctggctggag

SEQ ID NO: 428985 - DNA, 106 bp, Homo sapiens
cgctccttggaaggtcgctgggaggtggcattcaaaggtcagcccaaggccaaccccactgtcactctgttcccgccctcctctgaggagctccaagccaacaagg

SEQ ID NO: 428986 - DNA, 98 bp, Homo sapiens
cgcgcacatcactcccgagtggaggaagcaatacatccagtatgagatttggactgagcaacaaatttgaatctgaattcccttcttcattaactgga

SEQ ID NO: 428987 - DNA, 100 bp, Homo sapiens
gcaacttcttccttgtggacttcgagcagtcgcacctggaggttcagctgagaaagcttcttgctatctacctccaccatgatgaaagtgtgttaaccaa

SEQ ID NO: 428988 - DNA, 100 bp, Homo sapiens
ccatgcgccaatccaaaccgaaagccagaaggtattctttaggtgatgctagaaggcctcttcatgaaacagcagttttggtagaagatgtggtacacac

SEQ ID NO: 428989 - DNA, 90 bp, Homo sapiens
aatcaatgggccatcttggacggccatcttggcagcaggcagcatgatgcagacccacggggactttgatgttgccctcaccaaatacag

SEQ ID NO: 428990 - DNA, 100 bp, Homo sapiens
gtcatccagccttagcaaaccagagcaatgccaagtgagtacacctatgtgaaactgagaagtgattgctcgaggccttccctgcaatggtacacccgag

SEQ ID NO: 428991 - DNA, 100 bp, Homo sapiens
tactccctctttaagattgcgtacccactgcagagtgctgaagacggggtagccacgaggaaaaccagtagattcccagacatcgcgaagtgaatctgaa

SEQ ID NO: 428992 - DNA, 96 bp, Homo sapiens
gagagaactcagcgaggattctgaggaatcacagccatggcccccaccctccaggatttggtcgatatggcatctgtgcacatgaaaacaaagaac

SEQ ID NO: 428993 - DNA, 75 bp, Homo sapiens
tcctgtccagccccctcacctcatatctcagccatacaacacgaatgcagagtttgagtccagatcccaaagccc

SEQ ID NO: 428994 - DNA, 100 bp, Homo sapiens
atgagatccaggacatctatgagaacagccttgtcttaaaagaagaagcatctgattaccttgaattggatacaattaaaaatctcgtcaaaaaatattc

SEQ ID NO: 428995 - DNA, 118 bp, Homo sapiens
gacctcaagaagcagctccacgaaaggcagccgcggatcgccgcgctcagcgacaaacaatgagtgacctgcaggaagaaggcaagaatgccatcaactcaccgatgtcccccgccct

SEQ ID NO: 428996 - DNA, 74 bp, Homo sapiens
accggctcccattctggttaaaggagcttactccacgggaacagcctctagataatctgagttgttgaaaatac

SEQ ID NO: 428997 - DNA, 100 bp, Homo sapiens
atttttccacactgagaaacattcagggtctatttgctccgctaaaattacagatggaattcaaggcagtgcagcagatgtgtcttgctgaatcagggct

SEQ ID NO: 428998 - DNA, 88 bp, Homo sapiens
gagagtgtgcggctccaggtgggctcacgcgattacaggagcttattaatcataagaaggctgaggacacagagaagaaagatgagcc

SEQ ID NO: 428999 - DNA, 97 bp, Homo sapiens
agtgcgacgcctgcaaggactggttccacggcagtttgcccgaccatctgtaagtcacacggctgcaccgccgaaggcctctgttgccacagcgagt

SEQ ID NO: 429000 - DNA, 74 bp, Homo sapiens
ctggggttactgtaaatgggaaggacaggcagagctaaacaagatgagcaatgtgaagagactacggccacggc

SEQ ID NO: 429001 - DNA, 90 bp, Homo sapiens
agaaggagagcctccatacctcaatgaaaatcccttgaggagtctccgggaccattatggcagtcaagtggacgggtgggcattcttctc

SEQ ID NO: 429002 - DNA, 76 bp, Homo sapiens
ggatttgaagctggcagtctggttccagtttcggagcaacatcccctgtcacctggttgatatctcttgcggatta

SEQ ID NO: 429003 - DNA, 128 bp, Homo sapiens
gaatctaatcaggaggttgctaacccagaacactatattaaacatcccctacagaacaggaaaactcaatgtgagtagtgacactgtccagcatggtgtggaaggattaacgtatctcctcactgaga

SEQ ID NO: 429004 - DNA, 75 bp, Homo sapiens
aaattcatcccagaaatctaagagattctggcaattaaccgtggagaaaatttgaaggtactgacggttaaggtc

SEQ ID NO: 429005 - DNA, 100 bp, Homo sapiens
tttaccgatagcagccatcgtggatgagaagatattctgctgtcatggaggtgagagtggaggtatgcagagtgctgccagtcacctggtttcccaagat

SEQ ID NO: 429006 - DNA, 96 bp, Homo sapiens
cattgaataagtgttttaagaaagtggacaaagagaggagtcaggaatcctacgccaacgtgaagcagtggctgcaggagattgaccgctatgcca

SEQ ID NO: 429007 - DNA, 75 bp, Homo sapiens
tgggaaggtggatcccgccgggaggtactttgctggcctccggaatgccccccgctgctgggcagtgatccagcc

SEQ ID NO: 429008 - DNA, 97 bp, Homo sapiens
gtggctcacttgcatgtatttggaacaaaaaaaggagatgcctggcagccccgctctctgcatttgaaggcatgcataagaatgaagccataagcca

SEQ ID NO: 429009 - DNA, 98 bp, Homo sapiens
ctcagagctcacctgcatcatccactttcccagcaagaaggtccagcagcagctgtggctccagtatcagaaagcaggaatttgaccctctagggcat

SEQ ID NO: 429010 - DNA, 82 bp, Homo sapiens
aggcagagagcagagacatcccgatctggggaagtgtcgtgaaaactacccctaaaagccaaaatgggaaaggaaaagactc

SEQ ID NO: 429011 - DNA, 100 bp, Homo sapiens
gtcaggacccggatgcaggcgcaaggcaggcccgcaagccgtgtgagccgtcgcagccgtggcatcgttgaggagtgctgtttccgcagctgtgacctgg

SEQ ID NO: 429012 - DNA, 74 bp, Homo sapiens
ctgccatggggatatgacattagccaggtggtgattccagatcactgtatctttgccagtaacacatctgctct

SEQ ID NO: 429013 - DNA, 98 bp, Homo sapiens
tgaatgactcaaggattttttggtacctggagtagaacagaaaaattattatgtctgtgttcccttgggactcattggaaattgtacagtgacatctt

SEQ ID NO: 429014 - DNA, 75 bp, Homo sapiens
ggaagcatcagaatttcttcagaatgcagtttacattaaccttcgacaggtttttagaacttcagccataaaaat

SEQ ID NO: 429015 - DNA, 50 bp, Homo sapiens
ctggacaacccccctaagaagttccgtgatggagtctcgctctgtcaccc

SEQ ID NO: 429016 - DNA, 75 bp, Homo sapiens
cacctaaggagcggaccccgcatcttcgccgtctggaaaggggtcaccagtcgttggcacaccaagaagctgccc

SEQ ID NO: 429017 - DNA, 105 bp, Homo sapiens
cgcccccgccggttcgcgtctctctgctgcggcgcggggaccgctgtgctctcgtgattacagtggcgagatcttgaacaactgctgcgtcatggagtaccacca

SEQ ID NO: 429018 - DNA, 100 bp, Homo sapiens
accacagccaccagtcccagaacccgccaatgctggggaacggaaaatgagggagttcaactctggatttgacgggatctgaactatacacccaggcggc

SEQ ID NO: 429019 - DNA, 98 bp, Homo sapiens
ttgtagtgatggagcactgcctcaaacatgggctgaaaggtttttgccaatccagaagactgtgtagcatttggcaaaggagaaaatgccaagaagta

SEQ ID NO: 429020 - DNA, 74 bp, Homo sapiens
agaattattgacctgattgatagagaacagaaagtttcctacactactgaggtttaggggcactgtgaagcaaa

SEQ ID NO: 429021 - DNA, 74 bp, Homo sapiens
aacaccctggaagccgagaaatgtgttcctttctgccgaaattctccattcatatagaaaccaagtatgaggac

SEQ ID NO: 429022 - DNA, 90 bp, Homo sapiens
agcgcttctatgagtccggggccaaccatcccgtctccagcccgggcttacgccccgccgacagctgaatttgtgatcagtcttgctgag

SEQ ID NO: 429023 - DNA, 96 bp, Homo sapiens
tttgggagaaacacagccagaagaactctaagaaggagctgatgtggaggagcagctgagacagttcaagatgacgaccacagtagccacagacta

SEQ ID NO: 429024 - DNA, 75 bp, Homo sapiens
tggcatctataagacttcagggattacataaacctgtgtaccatgcactgagtactcatgcccgactgtctacca

SEQ ID NO: 429025 - DNA, 95 bp, Homo sapiens
ttcagctgcgctccagtcggcccaggcgccgcggcgaggagcgagcgctgcgaggtggcggcctgagggcgcaccctacgacgcgcacaccaccg

SEQ ID NO: 429026 - DNA, 95 bp, Homo sapiens
ccacgctcatgatcgacttcctcacccgcgcctgcgacctcgacagccctcagcgcctttttccaggagaccaacatcccctacagccaccatca

SEQ ID NO: 429027 - DNA, 86 bp, Homo sapiens
cgggtctggagtgcgtgggggaccggctgttggcggggccgagaactactggtggcgtggccagaacacacggacgctgtgtgtgg

SEQ ID NO: 429028 - DNA, 83 bp, Homo sapiens
gggcatccgggtgctacagccacccccagagcaagagaatgtgcagtatgacttcacagagaatgcagttgtcttgacttcag

SEQ ID NO: 429029 - DNA, 100 bp, Homo sapiens
tggcatcactgcagctagtaatttgccttctggattgtgaagtatttgactatttggttgcacatggcaggatgaaggaaaaagaagcaagatctaaatt

SEQ ID NO: 429030 - DNA, 51 bp, Homo sapiens
tttcaaccacagatggcactgccaacagaggagaggagacgccgtgagcgg

SEQ ID NO: 429031 - DNA, 73 bp, Homo sapiens
ccggctgcgtgcggtccagcggaaggcccgctttgccaagctcaagccaccagtggtaaaaacagagatggta

SEQ ID NO: 429032 - DNA, 73 bp, Homo sapiens
ccagatgtctgacagccctgtgtgacaccaagataagtaactggtcgtttttcaatgagctagagaagttacc

SEQ ID NO: 429033 - DNA, 100 bp, Homo sapiens
agcagagacaccaggacagaaaagacagtgttctgctttcatggagttcacagaagagtcgaggagatgacaggccgggaccttctcaaggatcgaagtc

SEQ ID NO: 429034 - DNA, 75 bp, Homo sapiens
gaaaaactggatgttggtagaaaaagcaagagtttgttatatagcaattgggaaaatgaggtacgttagtgttcg

SEQ ID NO: 429035 - DNA, 100 bp, Homo sapiens
tgactatggaaaagttgccaaattgctgagatctgtatctgtggacctgaatgttgatccctcgcttcagattgacatacctgatgcgctcagtgagaga

SEQ ID NO: 429036 - DNA, 87 bp, Homo sapiens
cgcgtccgccgattcctcctccttggtcgccgcgtccttggctggcgtagtgatcagcagctggactgtgccttggacctaatgagg

SEQ ID NO: 429037 - DNA, 83 bp, Homo sapiens
ctccttcggggacatctatttggcgatcaacatcaccaacggcgaggttcaggaacaagtgcatcccactctctcagctaatg

SEQ ID NO: 429038 - DNA, 99 bp, Homo sapiens
cccagatgccgaagggaatccatttgatcattttagtgctggagaatctggtgtggatgaggtcaccattgtcaacattttgaccaaccgcagcaatgc

SEQ ID NO: 429039 - DNA, 87 bp, Homo sapiens
tctgccacttttgcaagggcgaggtcagccccaaactaccgaccatcatcaaagaggggatgctgaccaaacagaacaattcattcc

SEQ ID NO: 429040 - DNA, 100 bp, Homo sapiens
ccttctcagattgcaaacagtggttctgctggattgataaacccagctgctacaggtgttacagggtcttgattatttacataccaagtgccgtatcatc

SEQ ID NO: 429041 - DNA, 122 bp, Homo sapiens
tgaggctcagaggtgcttgtaccgtgatgtgatgctagagaacctggctctcatatcctcgctggatgcggaaaacgccatgcggtacataaatgggacgcgtctggatgaccgaatcattc

SEQ ID NO: 429042 - DNA, 83 bp, Homo sapiens
gctggaacttgccctgtctcctcgcagatgaggcttatctaattaactgtgtttggaactgctataaatacatcaacaaccga

SEQ ID NO: 429043 - DNA, 100 bp, Homo sapiens
aaaccacatggctatctaaagagaggaaatatcattctgcaaaagaagcttatgaacaacttttgcagacagagaatctttctgcacaagtaaaagcaac

SEQ ID NO: 429044 - DNA, 98 bp, Homo sapiens
gagcccaaggcaattgatcccaagttgtcgacgaccgacagggtggtgaaaggatgaagtcattgctgtttccgaaaaggtgattgtgaagcttgaag

SEQ ID NO: 429045 - DNA, 100 bp, Homo sapiens
tagaacaccacgaacaccagcttcccaggacagaattctgcagggtgaggatccacgacctccgcagtggtaacatcgccctgtcgctctccgcccatca

SEQ ID NO: 429046 - DNA, 98 bp, Homo sapiens
ttggcatttttgaatacgcctaccgatgctctggatcaatttgaaattacataccggttacggcacctccttcgtgcaaggtgtgatgcatccccagt

SEQ ID NO: 429047 - DNA, 50 bp, Homo sapiens
ctactcagtctgttctccactcctcatggctgtggaaaatctctgttctc

SEQ ID NO: 429048 - DNA, 98 bp, Homo sapiens
gctgccgctccgagtgccagtgggagcggatccctgagctcgtcaagcagctgtcggccaagctcatcgccaacgagtattgggaaagggtcgttgtg

SEQ ID NO: 429049 - DNA, 100 bp, Homo sapiens
ccagcccccagaaaggattgtgacatatcgttggacccagaattgagattggtttttcagcagcagatgctgtaacaggactgaaattggtagaagaggg

SEQ ID NO: 429050 - DNA, 100 bp, Homo sapiens
tacttggacaagatgaacaacaatatcggcattctgtgctacgaagcaatgcagtcaaccttttaagcaatgttccagtctcttgtttggatgttctcat

SEQ ID NO: 429051 - DNA, 82 bp, Homo sapiens
tctgcgggaggtggagcacctgaagagatgccagcaggtcctgaacgaggctgtgggggccctgatgtaccacaccatcact

SEQ ID NO: 429052 - DNA, 60 bp, Homo sapiens
ctggatgatgatgtcatcctgacagaagtatgcaggtgccttgagagcttcaggggaaat

SEQ ID NO: 429053 - DNA, 100 bp, Homo sapiens
gatgtgcaaccccttctacaacccgggggaccgcatccagtccagggggatatgagactttctactcggaatatcctgagtgttgcgtggatgtaaaacc

SEQ ID NO: 429054 - DNA, 90 bp, Homo sapiens
aacgactctacaatgttgtagtagacacagaagacttgaaagaggagattgatattcgactctccagggttcaggatatcaagtatgagc

SEQ ID NO: 429055 - DNA, 116 bp, Homo sapiens
agttccagatgcctggacccagagtgtgggggaaatatctctggagaagccctcactccaaaggctgtccaggcgcaatcaaagtgtgggatgctgtctcaggagatgaattgatg

SEQ ID NO: 429056 - DNA, 100 bp, Homo sapiens
gacctcaagaagcagctccacgaaaggcagccgcggatcgccgcgctcagcgacaaacaaatgccttattggaggaactggaacgctccacccttcagga

SEQ ID NO: 429057 - DNA, 96 bp, Homo sapiens
ccgccttctaccaggagcctgatccgtgccgcccgccgcccggatgggaccaccagagtgctatcgtcagtatttaaacagatcacatcatgcgtg

SEQ ID NO: 429058 - DNA, 100 bp, Homo sapiens
gaataaaactccaagaagccaggtgttcaaggtgagctgatcaaccttgccatgtactgtgagaggataaggaggaaattttggccagagtggcaccacg

SEQ ID NO: 429059 - DNA, 100 bp, Homo sapiens
cgcagcagtcctgaaggaatacgagctcaagtgccggccaagtgcaaggtggttatcaccttcaaccaaggactccggggtgggcgcgtggtggagctga

SEQ ID NO: 429060 - DNA, 137 bp, Homo sapiens
aaaacatgcatccaagttccagtttgtggcctcctaccaggagctcatggttgagtgtacgaagaaatgtctattgcgtctgcagacatggatttcaaccagctggaggcattcttgactgctcaaaccaaaaagca

SEQ ID NO: 429061 - DNA, 100 bp, Homo sapiens
ctgagatccggagcagccggggtcggagcggggtgagcttgtcggccacagactgctacattgtgcatgagatctacaatggggagaatgcccaagacca

SEQ ID NO: 429062 - DNA, 76 bp, Homo sapiens
gggagaggcgagctcgcgatgagtggtctcggcaggctcttcgggaagggaggttcgtaaagtgaatgaaagcatc

SEQ ID NO: 429063 - DNA, 75 bp, Homo sapiens
gaaccctgtacaatttgatagtcattcgtaatcagcaggccaaagactcagagacaatgcagatcttcgtgaaga

SEQ ID NO: 429064 - DNA, 50 bp, Homo sapiens
ctcgcgtcctgctcctgtaacaaaggaaaccactgattgcttgtgtggag

SEQ ID NO: 429065 - DNA, 90 bp, Homo sapiens
tggaagccaacaaaattagttaaggtgtccaggaagaacatccaagggtatcagatgtagaaggtggtgatggactgcagctcagaaagg

SEQ ID NO: 429066 - DNA, 75 bp, Homo sapiens
ggaggaaatagcttcttttggagaaaggattaagaactggggccacaactttggtgaagaaggatatattcggat

SEQ ID NO: 429067 - DNA, 75 bp, Homo sapiens
ggagatttcattgttccagccagtggtgatgatgtccagcaactctgtgaagcaggagaagaggagtttttggaa

SEQ ID NO: 429068 - DNA, 100 bp, Homo sapiens
cagctgggcctgggcggactcctcggccaatcagcctcgaactgaagcgctgcggcatggcgcgcgcctgcctccaggccgtcaagtacctcatgttcgc

SEQ ID NO: 429069 - DNA, 90 bp, Homo sapiens
caaagaaagttcgaaaagttcctccaggtttgccatcttcagttttgatgatgatggttcagaatttcatgaacatatatttctggagaa

SEQ ID NO: 429070 - DNA, 92 bp, Homo sapiens
ctccgagcgagcgagcggcgcccagcccagcgcctcggccgaacccctccgcagcagacaatgcagatcttcgtgaagactctgactggtaa

SEQ ID NO: 429071 - DNA, 100 bp, Homo sapiens
aggcacagcggagccggcgcggggtccacaaaggacctcagcagccatgtcgaagccccatagtgaagccgggactgccttcattcagacccagcagctg

SEQ ID NO: 429072 - DNA, 100 bp, Homo sapiens
acggtgtggggcggtcccggccccgcaggttgaaccatgattccggtgacagagctccgctactttgcggacacgcagccagcataccggatcctgaagc

SEQ ID NO: 429073 - DNA, 50 bp, Homo sapiens
tctgtgactacccactcatctgaatccaagcaaaaatccctggattgaag

SEQ ID NO: 429074 - DNA, 90 bp, Homo sapiens
ctgtcctgtgcatgagtctgtttgatcaggtgccaagctctcctgatgaaatgtgttctgccccactgggctccagggacagtgtctggt

SEQ ID NO: 429075 - DNA, 90 bp, Homo sapiens
cagcaaatatgcaaggagattcttccatcacttgctcaggtattagtcactgtaccactggctttactacagaaaggtgccattcagttt

SEQ ID NO: 429076 - DNA, 100 bp, Homo sapiens
ggccgcggaaaccgatctgcccgttgtgtttgtgaaacagagaaagataggcggccatggtccaaccttgaagggttggcaatgtttgattgcactgggc

SEQ ID NO: 429077 - DNA, 51 bp, Homo sapiens
atggggatgaagaaccagctcgccagagactgctgctactttgaaacgtac

SEQ ID NO: 429078 - DNA, 75 bp, Homo sapiens
accgcaaccgcatcgtgctgcctttcagtttcgcctggccgtgtgctgctctggttggtgaagaccagcctcttt

SEQ ID NO: 429079 - DNA, 98 bp, Homo sapiens
ccgacagcacagacagaatccctgctaccattacttacaatgcatctttagacgctatcatttccagtacaaccagcaatacaaatagtgtggtgatg

SEQ ID NO: 429080 - DNA, 100 bp, Homo sapiens
gccaggcatgtctcccgaggagtgcaggcgcttcaccacagacgattccaactccacagagtgaccagagagaggacgtggctgaagacaccaaagatgg

SEQ ID NO: 429081 - DNA, 51 bp, Homo sapiens
gttggatttctcgcaaaccaatccagaagcttggaagctgtattacagatc

SEQ ID NO: 429082 - DNA, 100 bp, Homo sapiens
ggtgctaaagagagcagtaccctgatggagtcccttgcagctgcatgaaagcggttacgatgctggcaaagccctgcagcgcctggtgaagaagcctgtg

SEQ ID NO: 429083 - DNA, 75 bp, Homo sapiens
tgcaggaggccaaggacggcgttctggatctcaaagcggaaaatatttgcaatacctgccacgtccaaggttcag

SEQ ID NO: 429084 - DNA, 75 bp, Homo sapiens
attcaaaggacctgcccccagagagacaacaagccctccaagggttgtaacatttgatgaagtgatggctacagc

SEQ ID NO: 429085 - DNA, 75 bp, Homo sapiens
caggcaatgctggatagataccgaattcttatcacaaagattctcagcgctgattttgagatgatgggcttggga

SEQ ID NO: 429086 - DNA, 100 bp, Homo sapiens
atgccagtgcatcttttgcacagcttatccatttgtgttgggactggtgatggccgtggtgttttccaccttggtgtgtctcagcaggctctacactggg

SEQ ID NO: 429087 - DNA, 75 bp, Homo sapiens
cacgtcccagctctctctgggcatctggaaagcttcccagtgatcctgtccatcgaggagcactgcagcgtggag

SEQ ID NO: 429088 - DNA, 83 bp, Homo sapiens
tgtttacggcgaagtctactcaacgtttccaagggccatttctgagcagtggaggtttcaagtaatccactaacaaccagttc

SEQ ID NO: 429089 - DNA, 89 bp, Homo sapiens
ggtgttcttgacgattaatcaacaggttttgattcccaccatggccatcacccagtttcggttatttaaattttgtacctgcctagcaa

SEQ ID NO: 429090 - DNA, 89 bp, Homo sapiens
ggaacttgctgagcaactattcaaaaatgccaaaggtgtccaaactatacagacccacagaatctaacaacagatgtctcaatattcct

SEQ ID NO: 429091 - DNA, 83 bp, Homo sapiens
tggccaagcacgccgtgtccgagggcaccaaggcggtcaccaagtacaccagctcgaacatttgacattgtgcagcaaagaaa

SEQ ID NO: 429092 - DNA, 74 bp, Homo sapiens
gcaaatgagatgaaccatcttcctgcacacagccacgatttgcaaaggctacagaagaagtttccaaaaatctg

SEQ ID NO: 429093 - DNA, 80 bp, Homo sapiens
cctacaccttgcatcatgccagctttgtcaacgggatctgggagtgacactgcatcctgaggttagcattacacttctcc

SEQ ID NO: 429094 - DNA, 98 bp, Homo sapiens
ctcatgccggtaaaggaggagaaggaagaggaggaggaggaggaaacagccaggtaacttactacttccagtcaatatgccgaccttagatgctccag

SEQ ID NO: 429095 - DNA, 100 bp, Homo sapiens
aggatatcactgtgtgtgaacctccgaaagctcagcacacactcccgcaggatcccgccattgttcagggcggcgactggcggcgcgatggacctgaccg

SEQ ID NO: 429096 - DNA, 90 bp, Homo sapiens
ctgagaactgtgtccttccattcctgagtccagcacttcccaggccagcagaaacagtcctgctccagctgtaacagcagcatctgtgac

SEQ ID NO: 429097 - DNA, 83 bp, Homo sapiens
aaagcatttaaccagcatggctacttcatattttggaaagcagtttttaagacaagtcaaaatgcagatcttcgtgaaaaccc

SEQ ID NO: 429098 - DNA, 87 bp, Homo sapiens
ctgcacaagttcccctaccgtatggtgcctgccctgccacccaagagaatgctgggagatcccagctctcctgttggcttcgtgctt

SEQ ID NO: 429099 - DNA, 98 bp, Homo sapiens
ctcgttaaagttgatgcaaagacaaaggcacagctggatgaatggaaagcaaagaagaaagcttctaatgggggcgtggagcgcatcgacgagcccgg

SEQ ID NO: 429100 - DNA, 50 bp, Homo sapiens
atcaaatacaatttggacttctgggtgccctacgagacgctgaacaaacg

SEQ ID NO: 429101 - DNA, 98 bp, Homo sapiens
gcaaactagcttttgggagtgaagcgggtacgcagttatccaacaatgtctggggaaaaaagttgttccatgtagacatgactggcatcagactggag

SEQ ID NO: 429102 - DNA, 75 bp, Homo sapiens
tctaaatcaggaatggattgaaatctaatgaaccgaaactttggagaaaatattctctttggaatgggaaatcct

SEQ ID NO: 429103 - DNA, 100 bp, Homo sapiens
gccggctgagggcacttgctcttgctgtttctgcccctgggtccagtggtttacgtcttggatcttgcagatagactgatctcaaaagcctgtccatttg

SEQ ID NO: 429104 - DNA, 90 bp, Homo sapiens
cggacggttccgaggcgttgccgggagccgggcgcggctctgtgtggactcggagaaacgcgggtggctattatcatggaaaactaattt

SEQ ID NO: 429105 - DNA, 117 bp, Homo sapiens
ttattcagcactcagaatgctccaggcagtgtaatctcattccatcttcattcatgactccagacaggatgtacagttacccagcacgtgtacctcctcctcctcctattgctcggg

SEQ ID NO: 429106 - DNA, 82 bp, Homo sapiens
caggtcgaggttctgcagaaggttgtgactttagtatacaaactgtaagagtaaatgggtccagtaattggaatgactccag

SEQ ID NO: 429107 - DNA, 90 bp, Homo sapiens
cctctgcatgaagctgctattaaagggaagatcgatgtgtgcattgaaagaagagattttatcgacatcgaaagtaaatttgccctaagg

SEQ ID NO: 429108 - DNA, 50 bp, Homo sapiens
agtttcagcaacaccagcaaacagtgacgctgacacagggtggagtgaca

SEQ ID NO: 429109 - DNA, 82 bp, Homo sapiens
gcggagttccgcgtccgaggtgtgaagggtttgccttcccggattgggcctacaagccagagtcgtcccctggctcaaggca

SEQ ID NO: 429110 - DNA, 90 bp, Homo sapiens
gcttgtacaaaggagagtttaaacagccaaaacagttcattcatattcagcgtcaaaggttccgttacagttactatgatgaatcccagg

SEQ ID NO: 429111 - DNA, 75 bp, Homo sapiens
ctggctgcggccgccctgggccgggccccaccggacgaagatgctcatgaagcagcaggaccggctggaggagcg

SEQ ID NO: 429112 - DNA, 75 bp, Homo sapiens
catcccgcctgccatcacccccgggcgagaaccactgtctctgatcaacgtgcggaagaggaacgtggaatctgg

SEQ ID NO: 429113 - DNA, 75 bp, Homo sapiens
ctcgcgtttccacttcagagatctggctccgagctctgtccagtggtgggagtattacatcccctcctctttctc

SEQ ID NO: 429114 - DNA, 97 bp, Homo sapiens
acatggctgcggccgccgcctccgcctcccaggatgagctgaccgattacacctcaacaagaaggcaactgacaaacagccttatagcaagctccca

SEQ ID NO: 429115 - DNA, 75 bp, Homo sapiens
gggacagccgcccctggtgcacacaccctcgtattctcctgcccttccccagcagcctcccgcgacgatgcccct

SEQ ID NO: 429116 - DNA, 74 bp, Homo sapiens
agagaggcagacaaacccatcagccatgatctccttaggtgatgcacagtccaactacctgctaaccaccgccg

SEQ ID NO: 429117 - DNA, 51 bp, Homo sapiens
ccctgctacttcagtgcctggaatgggaaaaaagagggggcatggctggag

SEQ ID NO: 429118 - DNA, 100 bp, Homo sapiens
gcgcccgcggctcgcgcgctcccgaggaagagtgagggcgcgacgcgcaccaacggtggaggaaaaccaattctgtgtcctcggaggaccacagcccagt

SEQ ID NO: 429119 - DNA, 100 bp, Homo sapiens
agcaagtaaatggacagttaatagagcctctgcagatatttccaagaggttatgatgtgattgctcaagcccaatctgggactgggaaaacggccacatt

SEQ ID NO: 429120 - DNA, 89 bp, Homo sapiens
aatttgactacctgaaggaggagtggttcaactcataatgacaagagacagtgatggttatgaaaactcaacagatggtgaaatgtgtg

SEQ ID NO: 429121 - DNA, 100 bp, Homo sapiens
cagaagttcgattcactaatgtcccagaaaggacacaaatagatgtaggcagaatacctttacagaggttaaaattgctggaaaggcagctcatcatgca

SEQ ID NO: 429122 - DNA, 50 bp, Homo sapiens
ctttaagaattactggttacaaaagtgagaaagatcagtctaaagaaaag

SEQ ID NO: 429123 - DNA, 100 bp, Homo sapiens
atccctgtgacagcacagcccagtaaggatgtacatgttgtaaaagagcaaaatccaccacctgcaaggaagttattgccagcgccattttaaacaacaa

SEQ ID NO: 429124 - DNA, 100 bp, Homo sapiens
caccggatcaacttcgacaaatagagctgctgctcaagaggtcatcaaaataatcaccaaacaatttgtaatttttaataatacttacatttacagtggc

SEQ ID NO: 429125 - DNA, 75 bp, Homo sapiens
gcagctacgcagatgcgctgtggtggggggtgatccagagacaatggccccgatgggatggagcccgaaggcgtc

SEQ ID NO: 429126 - DNA, 98 bp, Homo sapiens
tcttatgggcagttgggcactggcaataaaagcaaccagtcctatcctactcctgtcactgtggaaaaggacaggagagccttgaacttaggaattct

SEQ ID NO: 429127 - DNA, 100 bp, Homo sapiens
agacaacctcaccaaatacaagaaaacagtgtccaggttgaatgatcctaaaatgtctgaaacggagcgccagtccatggaaagcgagcgtgcagaccgc

SEQ ID NO: 429128 - DNA, 51 bp, Homo sapiens
ccgctcgttctgtgcgttctcctgtcccagatggcgggtgaaaaagttgag

SEQ ID NO: 429129 - DNA, 90 bp, Homo sapiens
gaagaggggctggagcccacctgctttgagaagagcaatgacattgggggcctgtggaaattttcagtcactactgtttttaatgaagcc

SEQ ID NO: 429130 - DNA, 146 bp, Homo sapiens
gtgagctccagtcagcagcagcccccagtcgctccagccataaccactgaggccacagcacagtgcataccagcctcttcccgagaagtttgtggtaaaaggtgttgtggatcgtttttcagaagagtttgtggagaccagaagaa

SEQ ID NO: 429131 - DNA, 75 bp, Homo sapiens
cttttgccacctttccctttatttccggagcactgacgtcttcatctgcacaagccccatcaagatgttcaagta

SEQ ID NO: 429132 - DNA, 73 bp, Homo sapiens
agaggcataaaacagttctcactgaactacagctcttcacagatggaatcacaaataaacttattggctgtta

SEQ ID NO: 429133 - DNA, 124 bp, Homo sapiens
catgagggaaaagggacgtaggaagaagggcaggacctgggcggaggccgccaagacgacttaattcagtgcacaaatgagatgaatgtgaacatcccacagttggcagacagtttatttgaaa

SEQ ID NO: 429134 - DNA, 82 bp, Homo sapiens
agttgcagatacaaacttggattttttccagtctgatccttttgttggcacctagatattatcctactgaagatgtgcctcg

SEQ ID NO: 429135 - DNA, 100 bp, Homo sapiens
tagcaacgctcgccacacccttgttttgagatcctctctaaggattcctacgccagctacgacgtgaacggcaatgattatgacccatctccacgatatg

SEQ ID NO: 429136 - DNA, 82 bp, Homo sapiens
gtgaggttcagctgatgaagcttctgaaccatccacacatcataaagctttaccagatgtctttggtggacttgggaaagag

SEQ ID NO: 429137 - DNA, 80 bp, Homo sapiens
cggcacaccctacgttaccgtgctcaaggtgcaactgacatgggtgaaccccagggatccatgcggattctagtgacagg

SEQ ID NO: 429138 - DNA, 75 bp, Homo sapiens
aacaacggcttcagggagtcggaccagcttttcaaacaatacaggatgtacagttacccagcacgtgtacctcct

SEQ ID NO: 429139 - DNA, 75 bp, Homo sapiens
aatctggattttggagtctcagacgccgatattcagcgagcagctgatgcagctgtacagtgcgcgccagcggcg

SEQ ID NO: 429140 - DNA, 100 bp, Homo sapiens
aacaattatcaggtcattaggatgctgtcctacggaaggagagctgcatgatctgattgcagaggatgtcgctgctgagcctgccctggctgggcctcag

SEQ ID NO: 429141 - DNA, 100 bp, Homo sapiens
caacgattgagagcatttaaagatgtggaaacaagttaacgtaccagaattttcgtctgaattgggcatggatctcctttgaaaaggaatattacctggt

SEQ ID NO: 429142 - DNA, 90 bp, Homo sapiens
tccccggctcgaagcctggatgaaatagatctctcggctctgagggaaactttgatccaaaagccatgaataatttttatgacaacatag

SEQ ID NO: 429143 - DNA, 51 bp, Homo sapiens
caggggggcctggccgcgcagccggaccaagaatcgccttcagccctgtct

SEQ ID NO: 429144 - DNA, 100 bp, Homo sapiens
cgccaccgtcatcaacgggcagtttgtcgaacgatgttggactcatagtcactgccagaaagatcatggaagggaagtggttgctgtgtatgttactggt

SEQ ID NO: 429145 - DNA, 90 bp, Homo sapiens
catggctgccccgtgtttgctgcggcaaggacgagccggggcgctgaaggtagttcagctacaggaatggatgattaaaagcatcaataa

SEQ ID NO: 429146 - DNA, 78 bp, Homo sapiens
cctttgcagatagtctctgcccatcaacctctcttctgtatcttgggcgaacaggcatccgtgtcattctggacctta

SEQ ID NO: 429147 - DNA, 90 bp, Homo sapiens
tacctcaatattcttccttgccaggtgcctgtctggaaggccagatacacagacaatctctatgggaagcagaaggcaaggaccccggtc

SEQ ID NO: 429148 - DNA, 100 bp, Homo sapiens
gacatctttatggagaccctgaaagacatcgtggagtattacaacgacagtaacggaaaatatgttgtgttcttcttttaccctcttgacttcacctttg

SEQ ID NO: 429149 - DNA, 98 bp, Homo sapiens
accatcttatgccccacctcccaccccagctcctgcaacaacaattgtggcaattaataaagacccagaagctccaattttccaagtggcagattatg

SEQ ID NO: 429150 - DNA, 75 bp, Homo sapiens
ccggacggtacttctgccactgctgctccgtggagatcgtcccgcgcctgccgctggagaagaagcaggcgctcc

SEQ ID NO: 429151 - DNA, 75 bp, Homo sapiens
ctttcctgctggtggcaaccgcctacgagacactcaaggtcctcgatgggcttcctggaatattggtgtgtttat

SEQ ID NO: 429152 - DNA, 85 bp, Homo sapiens
agctcgtggcctgcctctgcgtgcgtgtccttaagtttgctcgcttggtcaagtcctacgaagcccaggatcctgagatcgccag

SEQ ID NO: 429153 - DNA, 82 bp, Homo sapiens
cgacaagccgctggcagccgcggatctcaccgccgctcagggtgagcatgggtttatgcgtcttaggcattattgtgatggc

SEQ ID NO: 429154 - DNA, 100 bp, Homo sapiens
gcggtccgtgcgagaggaccaacggagcgctgaggcgggcgttttcttggatgaattgcttgctttggagctactgtgtgaagacattcacaggacacag

SEQ ID NO: 429155 - DNA, 98 bp, Homo sapiens
ctctgcgccgccggcaccatgaggttatggccacaccgtgcccttgtcagatggaggtaaggccttctgcatcatctactccgtcattggcattccct

SEQ ID NO: 429156 - DNA, 51 bp, Homo sapiens
ccgcggggctgcgcggcggtggcggcggagctgggcaccaccccatgggag

SEQ ID NO: 429157 - DNA, 96 bp, Homo sapiens
actaccatcttccaagatccatctgccttctgcataggccaaacagcagtgcatttgttcggcctgacttggcagttgcaaccagttgaaggagag

SEQ ID NO: 429158 - DNA, 75 bp, Homo sapiens
cgggcgttcagccgctcgctctccgccttccagaaggagggatttgttcgtgttgaccgagattatgtgctgaag

SEQ ID NO: 429159 - DNA, 100 bp, Homo sapiens
aagtgtcacgaaatcttctgctgcccgctgaagcaagtacaccacaaagagaacacagagccggaagtttggagactgccagggaccatgttttgcccat

SEQ ID NO: 429160 - DNA, 100 bp, Homo sapiens
agaatctgaacctcgtctgtattcccacttccttccaggaactgtggctgcaccatctgtcttcatcttcccgccatctgatgagcagttgaaatctgga

SEQ ID NO: 429161 - DNA, 50 bp, Homo sapiens
taaatctcgcccaaacaggaaagtgcacggccagctgtgggggaggcgtt

SEQ ID NO: 429162 - DNA, 100 bp, Homo sapiens
ctggagaatatgcagagcgacttgcgcgccttgtcactggagtgcaagaagaaattcccacctgtcaaagagggtctgcaagtggatgatgagattgtgg

SEQ ID NO: 429163 - DNA, 75 bp, Homo sapiens
tttccttgatggtcaaaagattaagggggtaaaggaagtggtatctttgacgaatcaacccccgtgcagactcga

SEQ ID NO: 429164 - DNA, 83 bp, Homo sapiens
ccagtgcggcatcacctcctccaagaccgtgctggtctttctcaacctcatcttctggctcaccatggatgatgatatcgccg

SEQ ID NO: 429165 - DNA, 100 bp, Homo sapiens
atagaacttaaagtaaaacaaggtgcagagaatatgatacagatgtattcaaatggatcttcaaagagtgaagtcaccctgctgagaaatgaagtggcac

SEQ ID NO: 429166 - DNA, 74 bp, Homo sapiens
tgccaaaagactacctcttgagtgagagtgaagatgaggttggactcttcacagaaattgggcccatgtcttgc

SEQ ID NO: 429167 - DNA, 100 bp, Homo sapiens
tttgtggagaaagtcgtcttccacttgcacgaaagctttcctaggccaaaaagagaacaactcgatcgtgtcgaagaaggcatgaaccatatcaaccaag

SEQ ID NO: 429168 - DNA, 75 bp, Homo sapiens
ccgcctgagctttctacaccggtgacaataccctcccctcccttgggctggacccctctctacagctaggagcca

SEQ ID NO: 429169 - DNA, 100 bp, Homo sapiens
aacaacaactactagtcggccgaactccaagcgtgaccagctttctgttgggaacactcaaaggacagtcattttgtttactcattcagccctgttgcag

SEQ ID NO: 429170 - DNA, 100 bp, Homo sapiens
aggattagatgatccaagtcaccaagaaattactgtctcaagtgatacgagtgcagcagctgccccgagccccgtgcttggcaacattccccccaacgat

SEQ ID NO: 429171 - DNA, 105 bp, Homo sapiens
cttgggggtcgagcacataacggggttcgggtgtctcgtgtgtgaacatcacaggatgtacagttacccagcacgtgtacctcctcctcctcctattgctcgggc

SEQ ID NO: 429172 - DNA, 88 bp, Homo sapiens
cgattctggagtacctcactgcagagcccaaagcagtgtccacaccagcaccagctacaactcagcagtcagctcctgccagcactac

SEQ ID NO: 429173 - DNA, 74 bp, Homo sapiens
cgctggaattacatgaacataccaccctagtaaaggtagtgggcagcagtcagtgacaggtgtaacctctgtgg

SEQ ID NO: 429174 - DNA, 75 bp, Homo sapiens
tttgccaaagaccttgaaatgtttgcaagccaagctctactccaggaagtgaaaatgtgctgcctcgagagccgc

SEQ ID NO: 429175 - DNA, 100 bp, Homo sapiens
ccctgtggctgggggcagagctcaggtcagtactcctgcatttgtaccaacgaaaactcacgtgctgcttcatcgaatgagtggaaaaggactagctgcc

SEQ ID NO: 429176 - DNA, 100 bp, Homo sapiens
agggcctcagggccggctaccactgcggctactgcgattccaaggagggcaaagcgtcctgcgggttcatagtggcgtcatgcacgcagactcctgcaag

SEQ ID NO: 429177 - DNA, 74 bp, Homo sapiens
ggacgcgggcgccaggaccggccgaacgcagaggctgaccccgcactacatctacccaccagccatcgtgcagc

SEQ ID NO: 429178 - DNA, 90 bp, Homo sapiens
gcaagtcctcgtgtggagggacttggacaacccgaggtcgctggccctggatcccaccaagggcaaggatggaacattactgtggacctg

SEQ ID NO: 429179 - DNA, 83 bp, Homo sapiens
ccctcttctagacctcatgagcgacgcccttgtcctcgccaaaatgacaaggtctttactaggtgtatttgaagaagatgcca

SEQ ID NO: 429180 - DNA, 50 bp, Homo sapiens
gccaggacgtcgggaggacctgggatctgaaacttgcccacccttcggga

SEQ ID NO: 429181 - DNA, 119 bp, Homo sapiens
cgcgcgcagggcctgcagcgggagctggacggcgagcgcgagcggcgcgagaaagcttgggcactgtttaaaggaaagttccgagaaggcatcgacaagccggaccctcccacctggaa

SEQ ID NO: 429182 - DNA, 147 bp, Homo sapiens
gagagagtccacctcggcagaagaggacatcattgatggatttgccatgaccagctttgtcacttttgaagcgctggagtttgacatgcaaaggataactctggaagagttgaagcacattctctatcatgccttccgagaccacct

SEQ ID NO: 429183 - DNA, 101 bp, Homo sapiens
tttcggcttctgagacggcggcagcagcggcattcagaacaccgaaaatctctcccagcactttagaaaggggaccctgactgtgttaaagaagaagtggg

SEQ ID NO: 429184 - DNA, 83 bp, Homo sapiens
cgcggctcggagccctggaagcagcagctcaccgaggacggggactcgatttttagactctgaggagcagttggagctaatcc

SEQ ID NO: 429185 - DNA, 100 bp, Homo sapiens
gtctggggatgcgaccaggaccctggggaaagaacatgcttaaggcggtcaatgcgacccagaagcagacagacttggtaaagctccatgaacaagccaa

SEQ ID NO: 429186 - DNA, 100 bp, Homo sapiens
gtcacaggtccagggcagaggaccaacatgggcattttgtttatgagcaagggaggtcttcaggaagttgctgatcagttggatttgcagaggattggaa

SEQ ID NO: 429187 - DNA, 128 bp, Homo sapiens
agattgaaacaacaaaaacttatattcgtgcatgaagagttatccaagcctccaaaatctcttgaaagggatgatgacattgaggtcattgtggatgaaacttctgatcacacagaagagacctctcc

SEQ ID NO: 429188 - DNA, 74 bp, Homo sapiens
ggggaactagggagcgtctccggctgcacagcgctcaggaagatgagaatgtgcctactgctcctgatcctcca

SEQ ID NO: 429189 - DNA, 75 bp, Homo sapiens
tcagcgccctgcagaaggcccaggatgcagcagtctcggccctggctgctctatgcagtgaatattacatgaagg

SEQ ID NO: 429190 - DNA, 90 bp, Homo sapiens
aacttcttaacccctagaccggtttttagtccattgactatgcagcctaatgactgctttgccagcaacatgctcaattcccgatcatcg

SEQ ID NO: 429191 - DNA, 83 bp, Homo sapiens
acaaaccttacctttattggagacaaaaccatgggccaaggttgctcgggtgattggtttactggcttcgcacaaaactgatc

SEQ ID NO: 429192 - DNA, 75 bp, Homo sapiens
accacttccctgcagctcccactattatgtggctgtttacttacctggtcatttcttccacctacttaatgttca

SEQ ID NO: 429193 - DNA, 80 bp, Homo sapiens
ggtcctgctcggggctctgttcccaggcttgggcactgtttaaaggaaagttccgagaaggcatcgacaagccggaccct

SEQ ID NO: 429194 - DNA, 90 bp, Homo sapiens
gttaatctgttggattctaatgcagttcatcacatcattcatgattttcaggaaggaggctgaactggagaaaagtagtgctgctcatac

SEQ ID NO: 429195 - DNA, 50 bp, Homo sapiens
gatgcggtaatgaatccagcagaaggacccatggatgaaggaccagatct

SEQ ID NO: 429196 - DNA, 90 bp, Homo sapiens
actcctgcccgcggcccccgcatgacacccagcgacctgcgcaacctcgacgagctggtctctgcatggattcccccagccctatggacc

SEQ ID NO: 429197 - DNA, 50 bp, Homo sapiens
ggctgccccaaaggatggagtcacaaggctctcagatcgatgaccatgtt

SEQ ID NO: 429198 - DNA, 88 bp, Homo sapiens
cctggggagcaggatggcgatgccatcaagttttatcgtagggctatgcaacttgtacctgatatagagttcaagattacttataccc

SEQ ID NO: 429199 - DNA, 82 bp, Homo sapiens
caccacgcccggggggacgctcttctccaccacaccgggaggcccgggtcctttttgtgctgattgtgctgagccagctcac

SEQ ID NO: 429200 - DNA, 88 bp, Homo sapiens
ggcttcctagtgagtcggcggctgatttagaaggaggttcaggctacggtgagccgaagcctccagggtcgtatagacctccccctcc

SEQ ID NO: 429201 - DNA, 76 bp, Homo sapiens
cgtggagaggctcaaggagtattcagagactgagaaggaggtgggaatggaagtggccccacatctcaaagaaacc

SEQ ID NO: 429202 - DNA, 97 bp, Homo sapiens
aggtggcagagaaggaaggatggcctctggacatccgagtggatgactgtccaagtgcctccaaagtgtacaaagcatcagattcagcagaagcaat

SEQ ID NO: 429203 - DNA, 101 bp, Homo sapiens
agggttccacccacaattggcaacacatcaccgaccaaattggcatgttctgtttcacagggctaaagcctgaacaggatcttgaagcagcctatcacatt

SEQ ID NO: 429204 - DNA, 98 bp, Homo sapiens
cgcggggagaaggccatcacccaggtcagcaagggcacctgcgagcaagagaatgtaactggtcactacatttccccctttcatgatattcctctgaa

SEQ ID NO: 429205 - DNA, 51 bp, Homo sapiens
gtacctcacagatccaaacaatcagcttctgggctggctggctgagaaact

SEQ ID NO: 429206 - DNA, 100 bp, Homo sapiens
caaatgccagaaagaggatttggccagagcgttttgtatgctgtcccacaccccagattctactgtgtcctgtccccagaagcctcagaggatgatttga

SEQ ID NO: 429207 - DNA, 100 bp, Homo sapiens
aaatatcctcgcaaacacgccgtccttatgaacttcctgttcaccatgctgcgggaagagctgcaagctttcttcctggtggcagatgacatcatggatt

SEQ ID NO: 429208 - DNA, 133 bp, Homo sapiens
gtactgggatatccccgatggcaccgattgccaccgcaaagcctacagcaccaccagtattgccagcgtcgctgggagtaactattcccagtcagaggcgctatgtgtattattatagctacctgttaaagaa

SEQ ID NO: 429209 - DNA, 90 bp, Homo sapiens
cggccgtctcccctcgcacaccagtcacccacaaaagctgtatataatgccagacattggaatcatccagattcagaagaactgcctggg

SEQ ID NO: 429210 - DNA, 100 bp, Homo sapiens
gacgtgcccaatgtctcttgtgacatagcagcctccaggagaggtatattcaagagcaaatgaccaagagccatgtgggtggtggttggctaaagttcgg

SEQ ID NO: 429211 - DNA, 100 bp, Homo sapiens
agcctgcaagcctcctggggaacggaacatacatggcctgaagtcctcaaccactgaagaagaagcttgatgcttggctgtcagaagacatgaattacgc

SEQ ID NO: 429212 - DNA, 83 bp, Homo sapiens
gtcgcgtgtctaggtgagtcgcggtgggtcctcgcttgcagttcagcgaccacgccacataaagaagatccctaatagtcatt

SEQ ID NO: 429213 - DNA, 83 bp, Homo sapiens
ctgatgcctttcctgtattggaatatgatgctaaggtgtgaagcttacactctctgctctggtagatgggaagagcattaatg

SEQ ID NO: 429214 - DNA, 100 bp, Homo sapiens
ctcccccagagtctagctggcgaagatagcagaggcagcaggccgtgccgggggggcatgttgctgtaaccagtggcccaggggatgttacggtggacag

SEQ ID NO: 429215 - DNA, 78 bp, Homo sapiens
gcaggcgcactctgccggcaacgccgaggcgcttctgcatctgtgggccgaggttgaaccctcggatacgatagaaaa

SEQ ID NO: 429216 - DNA, 75 bp, Homo sapiens
gctatgtggaggccctacacagttgcctgcagatcctgatcgcggccggtctaattgaagccaacggagaactca

SEQ ID NO: 429217 - DNA, 100 bp, Homo sapiens
cctcaggccagtcgcctccaggccaagagggatccttcacccgtgtctggcgacattgactacagcaccgtgctcctcggcatgctggtgacgcaggacg

SEQ ID NO: 429218 - DNA, 75 bp, Homo sapiens
ccagaagaagggaaggcgcgagtgaggaaaggaggtactgtagaacctatcactgaaacagcttcacctagaaaa

SEQ ID NO: 429219 - DNA, 100 bp, Homo sapiens
agggagaactttcttcagcaattgtacaaatttatggaagatagagtggaatcaactatgaaattataatcatagatgatggaagcccagatggaacaag

SEQ ID NO: 429220 - DNA, 115 bp, Homo sapiens
ttatcaacaaatattcgcccaatgttaggaatcaagcctcatttacaacaaaaagaaccctcaattgatgaaagactgcaaatgaacactggactccatgcatattaaatgaagc

SEQ ID NO: 429221 - DNA, 90 bp, Homo sapiens
gtgtggacgcggaactcagcggagaaacgcgattgaggcttcagggatgacttcttagggggcaggggaggtagtcgcccaggcgaccgg

SEQ ID NO: 429222 - DNA, 100 bp, Homo sapiens
cccagccagccaagtgacgctgacattaaggaccagccagaaaatgcgactgcatttgcctccagacttgtcagacacagtgagccgctcaagcaaaatg

SEQ ID NO: 429223 - DNA, 82 bp, Homo sapiens
aaatgctaggcccattttcttcactccaaaggacaatatgagtattcccctactatccccataaatacggtcctcagggggg

SEQ ID NO: 429224 - DNA, 101 bp, Homo sapiens
ggtgattgaggacaagaccatcgagctcatggtgcagattcactttataggaacagcttcagcttcagtgatgaaaaactgaattctccaacagactctac

SEQ ID NO: 429225 - DNA, 83 bp, Homo sapiens
ctcacaatgaggctccctgctcagctcctggggctgctaatgctctgggtctctgcatcacaggacatggccccctcagccac

SEQ ID NO: 429226 - DNA, 83 bp, Homo sapiens
caaggagaaagcacatttggcatcacaagtagaggctttccttaaagtttcccatgtctcaatggactcctgaatataacgag

SEQ ID NO: 429227 - DNA, 75 bp, Homo sapiens
ggcccagaagaaggaatcagttacctaacggacaagggctgcaatcgaaaacagtgttacaccagaagagcagcc

SEQ ID NO: 429228 - DNA, 95 bp, Homo sapiens
catgcccctgtggcattgcttaatgatataccacagtcaacagaacaggatcagttccatgacaagaccccttatacgattatgtttggtccaga

SEQ ID NO: 429229 - DNA, 101 bp, Homo sapiens
gttgcgaggaactatcttggtgaagcagtgagtcgaaatgcgtctctggaagtggcatgtaaaatcccagaggaatccaaagccctctctttattggctcc

SEQ ID NO: 429230 - DNA, 75 bp, Homo sapiens
aaagcaaacacaggattcaccacagtacttcacatcgtcgttcacatgggagttgatcaagaacttaatggaaaa

SEQ ID NO: 429231 - DNA, 100 bp, Homo sapiens
ggtagggatgccagctaaaccagatggcatcaaacagtgaaatacaggcctggctttcagacttggaaatgtggctttagataatctacagataaaagaa

SEQ ID NO: 429232 - DNA, 96 bp, Homo sapiens
gcagtttatccagtcagttcctgtggctgaagttcttgatacagagggaagcattcaggtagccaaggtgctttggtggtactatttctccaaatc

SEQ ID NO: 429233 - DNA, 75 bp, Homo sapiens
ggcagcctccacccacagagcctcaactgccagtgtctcctgcgtgtgtaccacatgaaggaagatggttgggtg

SEQ ID NO: 429234 - DNA, 98 bp, Homo sapiens
ttatgacccctacgcttatcccagcgactatgatatgcacacagatgacctacttctcaggcctcctggtgatcctggcctttgccgcctgggtggcg

SEQ ID NO: 429235 - DNA, 101 bp, Homo sapiens
ggctgctgtttctcttcgccgacggtgtagtacagcgaatagccgattggcagcctatgaagtccttgtgatgttggctgatagttcaccttcaaatcttc

SEQ ID NO: 429236 - DNA, 108 bp, Homo sapiens
ggcggcctgggctgctgactgcgcacttggaatagtagcaggcggcggcggcggaacgccaggcaggaacgacttagctgaatatcagagaacttgtgaagatcttaa

SEQ ID NO: 429237 - DNA, 102 bp, Homo sapiens
acagctgctcccttcgccttcgccctttccacctcgcggcagttcggtttttagaacttcagccataaaaatgggcagaattttccttgatcatatcggtgg

SEQ ID NO: 429238 - DNA, 101 bp, Homo sapiens
gctcgatccgctgctcgcacgggagccagctgggtgatgttcatgagagcgcagtttgactatgatcccaaaaaggacaatctgatcccttgcaaggaggc

SEQ ID NO: 429239 - DNA, 75 bp, Homo sapiens
gaatggaaatactgtagaggagctagtaactgttgtacacaacgagttcctggggaaaaccccagggcaaaacgc

SEQ ID NO: 429240 - DNA, 75 bp, Homo sapiens
gcgaaactcttcagtttaaagctcaagaggctgggcactcactgcagctggctaatgatgaccatgtggacatgc

SEQ ID NO: 429241 - DNA, 90 bp, Homo sapiens
gcaagggcaacttcgcggtggtcaagcgggccacgcacctcgtcaccaaggccaaggtttggtgcacctcgatttggaggaagtagggca

SEQ ID NO: 429242 - DNA, 83 bp, Homo sapiens
taacatttcgtttgatatttttggtcgcaccaccactccacagcagaccaaagttaaacatgaagtttctggagagacagtgg

SEQ ID NO: 429243 - DNA, 90 bp, Homo sapiens
accgcatgttcgacaagaatctgcaggacttggtccgcggcatccgtaaccacaaggaggacgagggtggattacggaacaacaacgaga

SEQ ID NO: 429244 - DNA, 83 bp, Homo sapiens
ggcaaacagtgtttgcctctggttcagctcatacaacagcttcttagctccgccgcatgcaagagatgattgcaaggatgcag

SEQ ID NO: 429245 - DNA, 90 bp, Homo sapiens
ccggaatggaattggaatccacgagcatgccagcattgacttaccaggcatcaaaggagcttcctggacgatttaacaggtcctcaagcg

SEQ ID NO: 429246 - DNA, 82 bp, Homo sapiens
ggatccgcagttcccgggccagcctggggcggccggccaggaaccacccgttaaggttcattttccagacactgaaagagca

SEQ ID NO: 429247 - DNA, 100 bp, Homo sapiens
caaccagtgggcagatatttttcaggcctctggtgccaaatacattgtcttaacttccaaacatcatgaaggcaaagtgtttcatggatttcaaagctgg

SEQ ID NO: 429248 - DNA, 98 bp, Homo sapiens
agagcttcatcaaaaatagtgatagctttgataagtcctcatgctgataccgccagtggatgccagaatttgcagtgtggttttcgagcctgctgccg

SEQ ID NO: 429249 - DNA, 83 bp, Homo sapiens
cttcgccaccctgcggtggattgactacggcaaagtggccactcagggcatcatggtgggaggcttgaagaggaaacactctg

SEQ ID NO: 429250 - DNA, 100 bp, Homo sapiens
ccgaggaatgaagagaggcggccgggccccgcgctccgccccggcctagggccttgccccgggagcccgcgaggggaaacctcaaatgaattctgaaggg

SEQ ID NO: 429251 - DNA, 82 bp, Homo sapiens
tattattttcaatagaaacagatatacagatgtggagaaggtttgttgataagccggggcccttcgtgggaccctgcggtca

SEQ ID NO: 429252 - DNA, 100 bp, Homo sapiens
gcagtgcgctgagcaggtgcagccgccacgctcacctgcaactgtggagagatccgcacgcagctggtggagcagttcaaatgtctggagcagcaatcag

SEQ ID NO: 429253 - DNA, 50 bp, Homo sapiens
ccttcgtacccacagtgcttcatgagaggctgccaatagctacctgcgag

SEQ ID NO: 429254 - DNA, 100 bp, Homo sapiens
cgaaagggagccgccagcgcgtttggctgtgacctgacggagtatctggaaagctcgggacaggatgcaagaaaagcctaggcttctcgagcctttggat

SEQ ID NO: 429255 - DNA, 100 bp, Homo sapiens
aaatgggagaagaggaatgttccctgacaatttcgttaaggaactaccactgctggaatgaagcatggatgacaaggcctgaccttcctgttggatttgg

SEQ ID NO: 429256 - DNA, 75 bp, Homo sapiens
cgggacccacttcactccagtgcctccgacgcctcctgatgcctcttcacctccaactccttctccgtgattgag

SEQ ID NO: 429257 - DNA, 98 bp, Homo sapiens
gcccagacggctcacctgtgcgggatggaacaaaaggacagctgtgggaagaggccgagcgtggctttatcttgcactcatgcaaaagaaactggcag

SEQ ID NO: 429258 - DNA, 99 bp, Homo sapiens
ggccttcgcgagcgtctgggcgggtggtaggctcgtctgtgtccctgccactctgagttatccagaaaccaccacctacaaatgaggggactcatctag

SEQ ID NO: 429259 - DNA, 101 bp, Homo sapiens
aagtcggcgccccagagcggacgaggaatacaaacagaagcttgcacgagtaacccaggtccgcaaggaactgaaatcccatattcagagcttgccagacc

SEQ ID NO: 429260 - DNA, 75 bp, Homo sapiens
tctctccgctcgattttgtcaccgttatgtgggaagcgaatccagtacctagtcgatagtcgctggttcaaacag

SEQ ID NO: 429261 - DNA, 74 bp, Homo sapiens
gcagtggtcgcttcttctccttggccttggacaagattcgctatgagagcctgacagacccttcgaagttggac

SEQ ID NO: 429262 - DNA, 82 bp, Homo sapiens
acgcccaagccgccctggatggagactcccaggtcaccagtgaaaagttgtgcagagcccaacatgagcttcatttccaagc

SEQ ID NO: 429263 - DNA, 50 bp, Homo sapiens
gtggaaaggagagctaccatcactaagatcagggagcagagaaacatgaa

SEQ ID NO: 429264 - DNA, 75 bp, Homo sapiens
gtggtattcgccggcacgcgaagtggccgcatccgcaagggcgtctctggccgagcctctttttgtggaaaacga

SEQ ID NO: 429265 - DNA, 83 bp, Homo sapiens
ccagaagggcctgaaggatggaactatcttatgcacgccctgtttgtgctcttcgtcctggcctacatccacatcgtcttctc

SEQ ID NO: 429266 - DNA, 75 bp, Homo sapiens
cgtccagcggctttggatctccagtctggattttgatccaaacaatatcttcaaggcattctttggcggtcctgg

SEQ ID NO: 429267 - DNA, 90 bp, Homo sapiens
tttgaacatgctggtgccgctagccaagctgtcctgcctgggcagaaaccactaatactagcctcttgcaggtgcaactggaatgcagtt

SEQ ID NO: 429268 - DNA, 100 bp, Homo sapiens
atccccgagacgatggcggagggagataatcgcagcaccaacctgctgggacggcccaggtggcaggatgtcctggtctggccttctccatggcctcaac

SEQ ID NO: 429269 - DNA, 98 bp, Homo sapiens
aaaccacgcgtcctactacaaagatgctctgcggtttttgggctgtgttgacatcaaggatctaccagatcatggaagggaagtggttgctgtgtatg

SEQ ID NO: 429270 - DNA, 98 bp, Homo sapiens
gtgggcctgctttcccgccagtgcccactcaaagtttcttacggcataggtgctccaacgagaagggctactttgcagtgactgagaaatgctccgac

SEQ ID NO: 429271 - DNA, 100 bp, Homo sapiens
gggcacggctgcagcgtcgcggtgcatcaagaaaaccatgagctgttttccaagagcttcatctccatggaagtgcctgtcatggtagtaaatggcaagg

SEQ ID NO: 429272 - DNA, 115 bp, Homo sapiens
gcagcctgtggctgtgcagggccccgagccggcccgggtcgaggagattacctggggcaattgatgttatcggtcagactataactatcagccgagtagaaggcaggcgacgggc

SEQ ID NO: 429273 - DNA, 98 bp, Homo sapiens
ggcagctgaggagactccggcgctcgccatggccgacgaaaagcccaaggggaacgcccttttgcttgtgactggcagggctgcgacaagaagttcgc

SEQ ID NO: 429274 - DNA, 100 bp, Homo sapiens
ttctgaatttgaaggtggaaaatcaacagtgaattgtaggtgagggtcccgatgtcctggtgtacagcttggactttggtgggcatctgcggatgataaa

SEQ ID NO: 429275 - DNA, 74 bp, Homo sapiens
gcggcgccgcgccctcggcctgcacggaaagtcagaaacatggccctggatgatgtcgtgatcctgaatgtgga

SEQ ID NO: 429276 - DNA, 121 bp, Homo sapiens
aagaccgcgcgcagggcctgcagcgggagctggacggcgagcgcgagcggcgcgagaaaacctcctgccccccgaggtctgcagtctcctgaacccagcagccatctacgccaacaacgag

SEQ ID NO: 429277 - DNA, 83 bp, Homo sapiens
caagaacccccaggagcagaagtccttcttcgccaaatacggtttccaggcctgaggtgcccgccctggccccaggagaatga

SEQ ID NO: 429278 - DNA, 90 bp, Homo sapiens
agctgctctgaaccaggacctggacccggacccaaagtgccatgtctttaatgggtgagcccctccagactccgaataggagatcaagag

SEQ ID NO: 429279 - DNA, 74 bp, Homo sapiens
acaactacaggcacaagccattgaagctggaatgtcctgttgctgaaggtggtcttctgccctgttaaagaagc

SEQ ID NO: 429280 - DNA, 83 bp, Homo sapiens
cgtcaccatgacaacactaggatttgcctgaagacctggataatctccatttttgtcatggactgttaaaacgtttgaagttc

SEQ ID NO: 429281 - DNA, 74 bp, Homo sapiens
catggcttttgtgctcattttggttctcagtttctacgagctggtgtcagcaatacgtttggtttaatattggc

SEQ ID NO: 429282 - DNA, 101 bp, Homo sapiens
ttgttggcgactgtgcttcaagcgatgccaggatagaagaatttgtttatgagaaactggatagaaaagctccaagtcgtataaacaacccagaacttttg

SEQ ID NO: 429283 - DNA, 104 bp, Homo sapiens
cagaagcgggcggcgcgggggagatggagttcaaagaaggacgcagagccagccacacagccccacaggtcctctttagccacagggaacctcctctggagctg

SEQ ID NO: 429284 - DNA, 90 bp, Homo sapiens
cttctactgacgaagcttggaagttgcagaagctctggacttattggacaaaatgttgacattcaacccacacaagaggattgaagtaga

SEQ ID NO: 429285 - DNA, 100 bp, Homo sapiens
gaacacatcgatctgggtatcaaatatgacccaagcattggtatctacggcctggacttctatgtgatcagctgtttcatgtattagccttgcacatgcg

SEQ ID NO: 429286 - DNA, 74 bp, Homo sapiens
agaaagagtcaacagcagtggcaacagacgtaccgtgagcccgtgtcagactaccaggtcctgcgggagaaggc

SEQ ID NO: 429287 - DNA, 100 bp, Homo sapiens
cctggcctgccctccatgtcggggagctatcgtcgtcttcaagtactaggttttgacaagcttgcatcatgcgtgagtataagctagtcgttcttggctc

SEQ ID NO: 429288 - DNA, 96 bp, Homo sapiens
tcctattcggccatctttgctcctccctgcaactaactccattcttaattgatatgatgccagcaaagggatggaaagtctagaggacacctttgt

SEQ ID NO: 429289 - DNA, 90 bp, Homo sapiens
agccctgtctggtgcatccttggcagaaagtgaggaggaaaacacccccattaggcttcgtgacggagttatcagagacattgagaggca

SEQ ID NO: 429290 - DNA, 50 bp, Homo sapiens
cctttgttgattaactggacaaattcagacaattgcagcatgactttccc

SEQ ID NO: 429291 - DNA, 100 bp, Homo sapiens
gatgggggctaccggcccagccccctgggtgactcctgtgaagtgctgtcaggtgtgttcacggatgtggaggcttccctgaaggacatcagagatctgt

SEQ ID NO: 429292 - DNA, 100 bp, Homo sapiens
ggacccactggaagcctagaaatggttttgcactgattgcaaaaataaagtcctccgagcatacaatatccttattggtgaacttgactgcagcaaagaa

SEQ ID NO: 429293 - DNA, 80 bp, Homo sapiens
tcaaggcggcgcggcggccactgggcgcagcacccagaacaagcactgcctgctggaggctgggatcggctgcacaagag

SEQ ID NO: 429294 - DNA, 59 bp, Homo sapiens
gaagaagggcaggacctgggcggaggccgccaagacgggctgaagaagatgcagagcag

SEQ ID NO: 429295 - DNA, 75 bp, Homo sapiens
ctgatggcgagaggctgcggctgtaccagaactctaagaaggagctgatgtggaggagcagctgagacagttcaa

SEQ ID NO: 429296 - DNA, 51 bp, Homo sapiens
aagggccttactccttcacagatcgagtttcagattgccaaaagacaaaac

SEQ ID NO: 429297 - DNA, 100 bp, Homo sapiens
gaaaaggcaacatcctgtcacaggccatgctctggcaaaaacatgtcagtattgaatatggtggtgaggcgtgaccctggcaacactgaacctgtgaaag

SEQ ID NO: 429298 - DNA, 100 bp, Homo sapiens
ccactccagtcggtgttgagcacggcgagcagtctcaggcctttagtgatgatggtcctggacccaagccagaagcctctgcaaagcttccttccagacc

SEQ ID NO: 429299 - DNA, 82 bp, Homo sapiens
ctgtttggggagacgtccgccaagggtcttttccccccaggtcaaggagccacaattggagttgattttatgattaagacag

SEQ ID NO: 429300 - DNA, 90 bp, Homo sapiens
gaaagagtcctgcatggtttcaagggacgtaccaggaggatggtgcccagtgacttctgacagctctctccatggaaggaggcggcggcc

SEQ ID NO: 429301 - DNA, 100 bp, Homo sapiens
cagggctaccaggagatgacgaaggtgcacactatcccatgggacgctccagtcagcccggtcaagcatgacagcaactcaaactcggcaaacttccaag

SEQ ID NO: 429302 - DNA, 100 bp, Homo sapiens
tgtggcatcctgaagttaatggttctatgaaacagtgtatcaaagtgtggactgagactctgtcgcaagccatagtcaaagtggttatcccaacagaaag

SEQ ID NO: 429303 - DNA, 100 bp, Homo sapiens
tgaagtcgcccgtgggggctgagcccgccgtctacccgtggccgctgccggtctacttggaatcgaagcctcttaaaatggcagatgacttggacttcga

SEQ ID NO: 429304 - DNA, 113 bp, Homo sapiens
acagccatgcaaaggcaggggaggaagccacctcgagatgcctggaatgatgtcgtcagtaatgcctggaatgatgatgtctcatatgtctcaggcttccatgcagcctgcct

SEQ ID NO: 429305 - DNA, 100 bp, Homo sapiens
cgaggtctgggtgaaggagcagctcagcaggaggccagtggccaaggtcatggccttagaagacctcagcaaggtgcagttggtgaataatcggtttaaa

SEQ ID NO: 429306 - DNA, 109 bp, Homo sapiens
tgaaaagactgggcttgtccttgctggtgcatgcgtcgtcggcctctgggcagcagaatccacattcatctcaatggaaggatcctgccttaagtcaacttatttgttt

SEQ ID NO: 429307 - DNA, 100 bp, Homo sapiens
tttatttctacgaaagagcaaagtgcatgcaagatatgggaaatactaaagcaagactactctatgaagccaatcttccagagaactttcgaagaccaca

SEQ ID NO: 429308 - DNA, 100 bp, Homo sapiens
gagacagatgcgaggcggcggtcaggaggtgtcattaacttgtcagtacctatagttctgactgcgactcatgaagataaagagaggctggacggctgta

SEQ ID NO: 429309 - DNA, 50 bp, Homo sapiens
ccaaggagtctcgctgcttttgtggaatgtatcctgtcaggtataatgtc

SEQ ID NO: 429310 - DNA, 50 bp, Homo sapiens
cggcttatgaatttgaaaggcatgtttcccaaaccactccttatgatcca

SEQ ID NO: 429311 - DNA, 82 bp, Homo sapiens
tacctgcgctatgaagacacgcttcttctggaagaccagccaacagaaagacgagaatccaggacttgaatcgtatcttccc

SEQ ID NO: 429312 - DNA, 96 bp, Homo sapiens
cagtggcaagatctcatgtccatcatggaaatgcagaaaaagcttgtggtgaaggggggcaaaaaaaagaagcaagttctgaagttcactcttgat

SEQ ID NO: 429313 - DNA, 96 bp, Homo sapiens
caaccacaaccattaatggatccacacatgtactaaggtggtatcacggaaaacttgacagaacgatagcagaagaacgcctcaggcaggcaggga

SEQ ID NO: 429314 - DNA, 90 bp, Homo sapiens
gccggcggtacgggggtggtgccgcgctcctggccccgcgcgggcggacggcggaggcgcctcccaggcaacagcattattgagaaaagc

SEQ ID NO: 429315 - DNA, 100 bp, Homo sapiens
agacggacgaggatgaggaggagggggacgagcagcagcggctcctcaacacccctcgaagccaaaactggacaagccaaggcatctgtagccaaagtaa

SEQ ID NO: 429316 - DNA, 48 bp, Homo sapiens
aaggactcaggtgaggactggagcttcaggatgagttagagaaaggtg

SEQ ID NO: 429317 - DNA, 98 bp, Homo sapiens
gtttttgatgaaattgtagagaactgtcccgcggcagtgctggtggccatggttcccgtagccagaaggagttgcccacagagcccccctacacagca

SEQ ID NO: 429318 - DNA, 82 bp, Homo sapiens
gtccctcgcctcccggccgagctgacggaaataatgcaaaaggtgtcccaaggctcctgaccagtgaacaaagatttgagaa

SEQ ID NO: 429319 - DNA, 100 bp, Homo sapiens
agcatcacaagctcagcctggacagcaacaggtgagtgctccagttgtaacatctaccactcaggaaaagccgaaggatagcgatcagtttgaatgggtg

SEQ ID NO: 429320 - DNA, 100 bp, Homo sapiens
gtagtcatctggggactaagcaacaggtgtttcaaggaactaattctctggcttggtgatccagctatttttcctgccgtaattgtggaacatgttcctg

SEQ ID NO: 429321 - DNA, 75 bp, Homo sapiens
taccaccgcgacttcgccccgcccggcgcgggcccagttgaagattcctgtctctggatccaaatcagagggcct

SEQ ID NO: 429322 - DNA, 82 bp, Homo sapiens
cggcggccttggcccccagcggcttcctcggcctcccggcgcccttcagcgaggaagattttgcaagaacgaggctcaagga

SEQ ID NO: 429323 - DNA, 83 bp, Homo sapiens
agggccacggctttagcggtgtcttttgcggtgtccctggccagtgtccttccacctgtccacaagcatggggaacatcttcg

SEQ ID NO: 429324 - DNA, 97 bp, Homo sapiens
tctggcggacgctcaagtacctgtggaccgtgtgctgccactgcgggggcaagacgaaggatttaaaaactggaacggtgaaggtgacagcagtcgg

SEQ ID NO: 429325 - DNA, 73 bp, Homo sapiens
ctgcctcagcctccagagtagctgggactacaggtgtgtgctcatattgtccaagctattcgcatggaagcta

SEQ ID NO: 429326 - DNA, 75 bp, Homo sapiens
cgcccaccttcaaagaccactccttctttgagttcatgatcaagtgttgcccacaccaaatgcttcatccagagt

SEQ ID NO: 429327 - DNA, 96 bp, Homo sapiens
gctgaatcagcgaggccttcgagatccaggggtccggcaggttcggctattccaggacgaggagatctacagcgacctgtacctgaccgtatgcga

SEQ ID NO: 429328 - DNA, 75 bp, Homo sapiens
ggtgtcctgttacttccaagtcatcaccagaaagaatggacagcaaattatggatgaacctatgggagaggagga

SEQ ID NO: 429329 - DNA, 99 bp, Homo sapiens
actatgtttaaacagatccacaaactgaacagagagttgatcaagaacttaatggaaaacaagatgaaccgaaaaatgaacagtaagtttggcatctag

SEQ ID NO: 429330 - DNA, 100 bp, Homo sapiens
tcgtcatggcctacccgggatacggaggagggcaacatggatacagctggaggccattatcctaagtgaattaacacagaaacagaaaaccaaatagtga

SEQ ID NO: 429331 - DNA, 100 bp, Homo sapiens
ggttggagagctcatctggaattttgccgatttcatgactaaccagtgcacctgcggaactcgagtcatgcaggagcttttgtgatcgtgacggaagaag

SEQ ID NO: 429332 - DNA, 80 bp, Homo sapiens
cccatgatggaacaggtcgcctggtgaggtggccggacatggtggctcacacctggaatcccagaacttcaggaggctga

SEQ ID NO: 429333 - DNA, 100 bp, Homo sapiens
cataatcttcatggagactctgaagtagaatcatttattctggcttcagaattcaagtccttcctctgatcgagttagtgcaataatctgggaggggaat

SEQ ID NO: 429334 - DNA, 75 bp, Homo sapiens
tcattaagaagcagatcctgaaacacctgtcccggtggttattaacttggtgatgcttttggctgaaatgaaaat

SEQ ID NO: 429335 - DNA, 100 bp, Homo sapiens
gaagttgcaggcgggaggactcttccccatccagtcacctgacagggtaaagcatgaatcatcctccagtgatgaggagcgcgcagctgccaagccatca

SEQ ID NO: 429336 - DNA, 87 bp, Homo sapiens
aagaggccgcggaggagaagccggaggaggacaacgactaccaccgcagcgacgagcagatcctgggtttgagcagtttaaaatgtc

SEQ ID NO: 429337 - DNA, 99 bp, Homo sapiens
tgaagctcaccgagacggcgatccgggcgctcgagacttaccagagccacaaggttttaaaatcaaagatgggaaaatcggagaaaattgcccttcccc

SEQ ID NO: 429338 - DNA, 100 bp, Homo sapiens
cttaacctctggtggagatgcccaaggcacttaagtattcatcgaagagtcaccccagtagcggtgatcacagacatgaaaagatgcgagacgccggaga

SEQ ID NO: 429339 - DNA, 74 bp, Homo sapiens
ctctcggtggagacgctggatgacacaggcagccatgccgcgcagcccaacatccagcgaggacgagatggccc

SEQ ID NO: 429340 - DNA, 75 bp, Homo sapiens
ccgctttgccaagaagatggacaagatggtgcagaagaagaacgcggacagcctcgggggtaacagcaagaccgc

SEQ ID NO: 429341 - DNA, 90 bp, Homo sapiens
cagcgaatgtggaggatagactacagtgccgctggttccacttccaaacatgagttccaggccgagacaaagaagcttttggacattgtt

SEQ ID NO: 429342 - DNA, 83 bp, Homo sapiens
gagatggaagttgagcaagagcagcggcgcagaaaggtggaggccgggaggacgaaggtgaaatgacaatggatgctctgttg

SEQ ID NO: 429343 - DNA, 75 bp, Homo sapiens
ttgacattgatccgatggtggttactggtatcactaccattaaagttaacattcgtaatgccaattccctgggag

SEQ ID NO: 429344 - DNA, 126 bp, Homo sapiens
gctgtgtcaatgccattgaattctccaacaatggaggccagtggctggtctcaggtgctggagaatctggtaaaagcaccattgtgaagcagatgaggatcctgcatgttaatgggtttaatggag

SEQ ID NO: 429345 - DNA, 90 bp, Homo sapiens
agcgggcacccaggcgtggcggtcttcacctcctcctcgtcctcttcgagccgtcagacccggcccatcctcaaggagcagagctcatcc

SEQ ID NO: 429346 - DNA, 80 bp, Homo sapiens
gtgatttctgcatttccatctgagtatacaattggaccgtggatgaggtggtacagtggctgatcacatatgtggagctg

SEQ ID NO: 429347 - DNA, 82 bp, Homo sapiens
ggaaggaacgaggcaaggagctaaagcagcgtgcgttcagccctgggacatgcaagaaagcacttcagccaagcagaaggga

SEQ ID NO: 429348 - DNA, 100 bp, Homo sapiens
ggcagctgccatggccagaaccaaagtggaaatagcaaattcaagagtggttaagaaagtagctcaatacatggctgatgtattggaagatagcaaagac

SEQ ID NO: 429349 - DNA, 76 bp, Homo sapiens
tactattacccccagtatctgcaagccaagcaccatcatccattgctttggtccaggctaaagaagtcacaagata

SEQ ID NO: 429350 - DNA, 75 bp, Homo sapiens
gaaggacccacggcgtctgttcgaaggtcacaccccaagggggcgcggggaccttaccgttgtcccaagcttcca

SEQ ID NO: 429351 - DNA, 74 bp, Homo sapiens
caaattcatcccagaaatctaagagagctccctctttgcccactagcagggcattagctggtgctgaagacagt

SEQ ID NO: 429352 - DNA, 80 bp, Homo sapiens
gaaaggaacggctgaaggccctacgggagaaaaccgggcgcaaggacagagcgggatgccaccagcttgtccaaagggaa

SEQ ID NO: 429353 - DNA, 96 bp, Homo sapiens
ccatgcgggaccagatcatccgcgtgaagcgacctgagaagatggctaagctcccagtgattttaggcaatctagacattacaattgataatgttt

SEQ ID NO: 429354 - DNA, 75 bp, Homo sapiens
ggtttttcggatcatgtctggtggctccgcggattataacagtgcaccaattccagctggacatcactgtgaaaa

SEQ ID NO: 429355 - DNA, 100 bp, Homo sapiens
cttcagagacctcattcatgaccaagatgaagatgaggaggaagaggaaggccagagttctttgacccaggccaggtactgtacacgtatgagtcgccgg

SEQ ID NO: 429356 - DNA, 100 bp, Homo sapiens
caaaaatagtgatagctttgataaaggtccaattacacatttggaatacaaaactagttttggccagcttgaagtatttcgagagaaaagcttattgatc

SEQ ID NO: 429357 - DNA, 90 bp, Homo sapiens
aacaaatcttgttatgaagatgggatttccacaagatcaaattcgattgtggcccatgcaagcaaggagtaatggaacaaaacgaccagc

SEQ ID NO: 429358 - DNA, 83 bp, Homo sapiens
caggccccagccggcagcatgctgaggacttcctgggagagcctgacatttaccccggtaactgctgggcatttaaaggctcc

SEQ ID NO: 429359 - DNA, 98 bp, Homo sapiens
agccggatcaggagccgccgccgccatatcagattcaagtcaatctgaaagtcccagccagccaagtgacgctgacattaaggaccagccagaaaatg

SEQ ID NO: 429360 - DNA, 51 bp, Homo sapiens
gcttttggcagcatgaaagttagcagttaatgttgaagaaggaaaatgcgg

SEQ ID NO: 429361 - DNA, 100 bp, Homo sapiens
tcactgaggagtccaaggctctcctggaggaatacaacaagactatctccatccagttcctggtgtacaggcgcagcaccgccgcctcggagcttgagcc

SEQ ID NO: 429362 - DNA, 100 bp, Homo sapiens
ccagagctgtgcctcccagcaccacagtccttctgcagtccctcgtccagccacccccaggctggttgaactcatggacctgatacttttctcttgagaa

SEQ ID NO: 429363 - DNA, 100 bp, Homo sapiens
cccgtggcgcccgcaggcggcaggaatcctcctccggcgataggcaggaatttgtggatgcttatgtgaattatgtcttccaaatctcagttcatgaatg

SEQ ID NO: 429364 - DNA, 98 bp, Homo sapiens
ctcagctacgaggaggcgctgaggagaggtgtggtggacacaggcctattcatcaacatggctgagagagtctactttgggatgcaggatggctcagt

SEQ ID NO: 429365 - DNA, 75 bp, Homo sapiens
gatatactattgtactatggacttcatcgctttatattcatgaagggaccttggtacacgctgtctcagtcctgg

SEQ ID NO: 429366 - DNA, 98 bp, Homo sapiens
tacgactccatggccctcggcaacccagaagctgccagtaactcagattctagccatgaaggtcaagaggaatcttcaaaggaaaatgtgtcatcaaa

SEQ ID NO: 429367 - DNA, 75 bp, Homo sapiens
aattacaagaaattctatgaggcattctctaaaaatctcaagctctggatcctggtattgggagctgtatttggt

SEQ ID NO: 429368 - DNA, 50 bp, Homo sapiens
ttcgtacccacagtgcttcatgagagataaaggttccttcgttctctgag

SEQ ID NO: 429369 - DNA, 90 bp, Homo sapiens
tgaagagaacccagggaagttcctttttgaagtagttccagggcgaacctttcctacacacccatacttctctgcccagcttggagcagg

SEQ ID NO: 429370 - DNA, 152 bp, Homo sapiens
tgagcttcattcagatgtggtggaatatgccaaggaaaaactggagagcttcatcaaaaatagtgatagctttgataagggcactatgaacgaagaggagcagtttgtaaacattgatttgaatgatgacaacatttgcagtgtttgtaaac

SEQ ID NO: 429371 - DNA, 75 bp, Homo sapiens
gatgaacattaacctgcgagaagtcatctgcacgtccaggtctagggacaggaagatggttggcgacgtgaccgg

SEQ ID NO: 429372 - DNA, 51 bp, Homo sapiens
agaaaaggaacgggagctgagaggaacttgtaatagctggcatcgttgaga

SEQ ID NO: 429373 - DNA, 76 bp, Homo sapiens
tggagccgtcccaggactgtgcaggggactctgtcacaaactcggttgcctttgaggatgtggctgtgaacttcac

SEQ ID NO: 429374 - DNA, 83 bp, Homo sapiens
aggagctgcagcagcatgtaaagtcagtgacagccccatgtcaaaatgcagatcttcgtgaaaacccttaccggcaagaccat

SEQ ID NO: 429375 - DNA, 100 bp, Homo sapiens
acactacgttctctagtccatgctggtgtcccagcctcctacctgctgattcctgcagcctcctatgtgctcccagaggagacacagcaggtccccacag

SEQ ID NO: 429376 - DNA, 87 bp, Homo sapiens
tgctggcgctctggctgtgctgcgcgacccccgcgcatggaggactggaatgaaattgaccccattaaaaagaaagaccttcatcac

SEQ ID NO: 429377 - DNA, 98 bp, Homo sapiens
ctaccttttgttgaacatctcgaatagcaagaggaggaacgacgtagaagagaggaagagatgatgattcgtcaacgtgagatggaagaacaaatgag

SEQ ID NO: 429378 - DNA, 98 bp, Homo sapiens
gagatcaattcttggagaacacaaagaagtgtgatggctacagatgcacatgttgaatggagctcttctggcattgctgtttcctgtggtaaacactc

SEQ ID NO: 429379 - DNA, 101 bp, Homo sapiens
aagcggagagatgctgggcgtggcggccgggatgacccacagccatgcctgatggagctctggacacagctgtctgcgctgacgaagtggggagcgaggag

SEQ ID NO: 429380 - DNA, 96 bp, Homo sapiens
ggagcggaagaatggcagtgctcaaactcaccgaccaggaagggatgagaccatgcagcctgcgaaaccatcctttcttgaatattttgaacaaaa

SEQ ID NO: 429381 - DNA, 100 bp, Homo sapiens
ctagcaccccgagaaccgtcagtttgagccagatgatgagacaccaattattgcggtgatggtggccctgtcctctctgctagtgatcgtgtttattatc

SEQ ID NO: 429382 - DNA, 100 bp, Homo sapiens
aaaaaacgccagccaagaagcatgtgcgactgcaggagagtgcaccaattccagctggacatcactgtgaaaatgggacgggataaagtccgagaaatgt

SEQ ID NO: 429383 - DNA, 83 bp, Homo sapiens
ctggtggctatgggggctctggtgatggactcatccccacaggttctgacttattctggagaggagtaggaagtaatatgagc

SEQ ID NO: 429384 - DNA, 100 bp, Homo sapiens
actggatgtgacgagcccagaaccactgcctacaaaccaccctctcctgaccctgaagaactgtgttaccaccaccctgtgaatctgcctgcacagtacc

SEQ ID NO: 429385 - DNA, 106 bp, Homo sapiens
acacgatgctgggaggcctggggaagctggctgccgaaggcctggcccaccgcaccgagaaggccaccgagggagccaggagacatgagacatcaatcaatatatg

SEQ ID NO: 429386 - DNA, 80 bp, Homo sapiens
gtccctcccgctggtcaccactccggcaccaggtgccaagtcctgccctgccaacttcttggcagctgccgacgacaaac

SEQ ID NO: 429387 - DNA, 90 bp, Homo sapiens
gcggcggcccagctctctctgacacagagggagaaccgaagattacaggaggccagcatgaggttggaacaagagaatgatgaccttgcc

SEQ ID NO: 429388 - DNA, 82 bp, Homo sapiens
cagctttgcatgtctgaaggagctgtatgacctccgccatgagaaagatcagtctaaagaaaaggagaagaaagtgaaaaaa

SEQ ID NO: 429389 - DNA, 51 bp, Homo sapiens
agtccattgaagctgtgcaagctatatatatttgtcaggatacgaatcagg

SEQ ID NO: 429390 - DNA, 95 bp, Homo sapiens
ccaatctcaatatggatgtgcataaaggttatcaatactctggctgaccatcatcatcgtgggactgactttggtggaagtccttggttacatgt

SEQ ID NO: 429391 - DNA, 96 bp, Homo sapiens
cacgaagctgcccctgatcttccacctgggacgggacccaggggagaggttccccctcagggtacattttcatcctggggtcttgctgtgggggct

SEQ ID NO: 429392 - DNA, 80 bp, Homo sapiens
gccaaactacaattcccgagagagtcttttattcaaaacttcagcgttctctatagtcccttgaaaaggcatctcattgg

SEQ ID NO: 429393 - DNA, 99 bp, Homo sapiens
cggcaggagccgcggagccggcgctgagaggggctgcggccggagcgggcggctgagacaaaggcgacgacattgatgagtgcagcatcattcctggga

SEQ ID NO: 429394 - DNA, 96 bp, Homo sapiens
ctgctttctagaagaaaaccggggagatctatttggaatgtatctaactccaaagaaaccatcagaggtaacagggctgtcttcatcggtggaata

SEQ ID NO: 429395 - DNA, 73 bp, Homo sapiens
ctaaaaacaagactggggctgctcccatcattgatgtggtgcgatcgaacaatgctaaagtagctgtgctagg

SEQ ID NO: 429396 - DNA, 83 bp, Homo sapiens
ccaggactgcctgagacaagccacaagctgggaacagaaagaacagcttcaaaagatgaaagacttcgggtctgagccacaga

SEQ ID NO: 429397 - DNA, 82 bp, Homo sapiens
cccaggtgtaagcgcagaaagcaggcgaacccgcggcgcaataacgattctgaaagtcaagaagacatcatccggaatattg

SEQ ID NO: 429398 - DNA, 75 bp, Homo sapiens
gtgccttttgcctcccaccgtgattctgaggcctccccaaccatgtgcaattgggtagaaatatttctgtcatgg

SEQ ID NO: 429399 - DNA, 101 bp, Homo sapiens
ctccaggccaagagggatccttcacccgtgtctggcaatggatcacttggagtcctttattgctgaatgtgatcggagaactgagctcgccaagaagcggc

SEQ ID NO: 429400 - DNA, 83 bp, Homo sapiens
ccgcggccgcaccttcccgccttctcagatacagatcacttggattcagtcgagtttgctttgctccgtgggaactgcaccag

SEQ ID NO: 429401 - DNA, 50 bp, Homo sapiens
tcggtgcgcccggccgcctgcacccccagagaaccatggagtctggcagt

SEQ ID NO: 429402 - DNA, 101 bp, Homo sapiens
gctggcttggtggatggtcacgatgtagttataggtaaggtactcaactgtgtggggtactacataaatcctgaaagactacaataaagtggtgatgtctc

SEQ ID NO: 429403 - DNA, 98 bp, Homo sapiens
accagcaccggctccagtgggctctgctctccaagagattctaactcagtcacagtttgaaccactactgaaccactgctgttaggaagctacaaccc

SEQ ID NO: 429404 - DNA, 75 bp, Homo sapiens
tgttggagccgtctgcaaagtgtccccggcaagaagcggcgtcttcgacatcttcggaacattgctgcccggaac

SEQ ID NO: 429405 - DNA, 98 bp, Homo sapiens
aagccaccttcactgtgcagctggatgtccttggtgggctcggtggtggccgtgggctggatccgctcccgcaaggctgtggactggcgcctctttcg

SEQ ID NO: 429406 - DNA, 100 bp, Homo sapiens
ctgctctttggtgtaataaacttgatatgtactggcttcctgcttatgtggtgcagttctactaatagtatagtgctgacgagtacagagctaaatggag

SEQ ID NO: 429407 - DNA, 100 bp, Homo sapiens
atcggggtgtctacggcaccagcctcctgcgccacgccaaggtcgtctgggagatgctcaagtttgaagtggcgctcagaaatgagccgtcagactgcta

SEQ ID NO: 429408 - DNA, 98 bp, Homo sapiens
gagccaccacgcctggcctcactcaaacagtaaacgagttatttctcaaactctgaggctgcggagttcacacattgaaatctgtcatctttttcaga

SEQ ID NO: 429409 - DNA, 100 bp, Homo sapiens
cacttggccaatcatgatgaactaatttccaagattcaaccctatgaaaagataaaggccaggggcttgcctgataatatatcttccgtgttgaacaaac

SEQ ID NO: 429410 - DNA, 98 bp, Homo sapiens
cgctcgtcatggcctacccgggatacggaggaggggattttctgccgtctcttggcaaaaatggcaaataatgatgctgttctgaagagactggagca

SEQ ID NO: 429411 - DNA, 75 bp, Homo sapiens
caaagacaaggctaaggacttcatgcccgccagcaaaggagcggtggtgccccccccgggcacggggccatgtac

SEQ ID NO: 429412 - DNA, 100 bp, Homo sapiens
tcacacggtgtgggctgaatgaagagctgccagatcccacaggtacagcagttgcaaggagtttacagtttacaggaacagcacttctggactttatgtt

SEQ ID NO: 429413 - DNA, 100 bp, Homo sapiens
acagttcctgggaaggtggagccaccagcctctccctggcttgcttccggcgtcatggctcaaagggccttcccgaatccttatgctgattataacaaat

SEQ ID NO: 429414 - DNA, 95 bp, Homo sapiens
ccattttgaggatctggactccgtttcctgccttgctctttggaccacattgtcaattcacaccggtacaggtgaacaaaggcagagtaaactgt

SEQ ID NO: 429415 - DNA, 100 bp, Homo sapiens
tgaggcgaaggagcggccgggagcccgccgcgctggtagcggatcacctgctgttaccagctaccacccataacaagaccacaagaccaaaaatgtcaat

SEQ ID NO: 429416 - DNA, 98 bp, Homo sapiens
agggccttgctgttccttgaacctgccagatggactcaccctgtcacccaggttggactgcactggcctcaacctcctgagttcaagtgatcgtccca

SEQ ID NO: 429417 - DNA, 82 bp, Homo sapiens
ggatattatcaaatctactactgttcatggcaggataatttccagcagtgttataagcgaggagggacatctggtggtccac

SEQ ID NO: 429418 - DNA, 82 bp, Homo sapiens
ctgttgtctcgagttgttgcacagtatgctcaacgaaatgcaaaggtggataatattaatgcagctgtgatggatttgaaaa

SEQ ID NO: 429419 - DNA, 90 bp, Homo sapiens
ttttcaggccacaaatgctttcacaggtctctaattaacagaagatggcaaagcccagccacagcagctatgtccttcagcagctaaaca

SEQ ID NO: 429420 - DNA, 100 bp, Homo sapiens
gcgcctggttgcctgcagcggcccggacccgagagatacatatgaaccagatggttacaacccagaagctcctagtattactagttctggtagatctcag

SEQ ID NO: 429421 - DNA, 100 bp, Homo sapiens
gccaagacttggttaaagtcattgaggactttccagcaaagtgcacagccagaggacaacacatcacacacaagaaacagttgtgctcatgtgatggggg

SEQ ID NO: 429422 - DNA, 75 bp, Homo sapiens
tgccttgctctttggaccacattgtcaattcacaccgaagtcacctgcaccggtgcccgtgacgtacgagctgcc

SEQ ID NO: 429423 - DNA, 100 bp, Homo sapiens
ctcacctgtgcgggatggaacaaaagcttttcgctgtggcctgcagtttttaggcaacattgcctcacggaatgaagattcccagtctattgtttgggtg

SEQ ID NO: 429424 - DNA, 97 bp, Homo sapiens
agaagatgaagtaccggacgatgagactctgaaccaaatgattgctcgacgagaagaagaatttgacctttttatgatggagtctccctctgtcacc

SEQ ID NO: 429425 - DNA, 98 bp, Homo sapiens
gccgcggagacctacctgcggcgtcggcagctgctgctccgagacacccaagctggcgaagtgaagaaactcaggaacgggaacggtcgaggacagga

SEQ ID NO: 429426 - DNA, 100 bp, Homo sapiens
cgggaggtcactttcctggaggcctcccgctttgcccaggagaatggtgcctactgcctctcagtgtctgacttcgacaacgccaagggcctcaacgtga

SEQ ID NO: 429427 - DNA, 75 bp, Homo sapiens
cttccccggccggtccctcgcctcccggccgagctgacggttcaacagagtttggaaaagatttctaaactggag

SEQ ID NO: 429428 - DNA, 90 bp, Homo sapiens
gcgagctggcgcctgtaacacggatgttttgagcagtgacattataattctgacaataacacgatgcatagccatcctgtatatttactt

SEQ ID NO: 429429 - DNA, 101 bp, Homo sapiens
taggtaatgtgtagttctcaatgcatcatgtcaggcagcttatgatgccaatttgtcccatgccccatctgctttgatatgattgaagaagcatacatgac

SEQ ID NO: 429430 - DNA, 90 bp, Homo sapiens
cccagccgcgttctcctccgccgctcctccgggcttgccctggagccctcaggtacagaactggaacagtgaaattcttgctaagcaaaa

SEQ ID NO: 429431 - DNA, 98 bp, Homo sapiens
ttcagctcttcacagggggtagaacaagtggtactaggattatacattgtaagaggtgacaacgtgtatcttatggtgagatggtgggatgtgataac

SEQ ID NO: 429432 - DNA, 100 bp, Homo sapiens
tgggcaagctgtggatgatttcatcgagaaattggccctggccaacgtcaacattgggagcctcatctgcaatgtaggggccggtggacctgctccagca

SEQ ID NO: 429433 - DNA, 75 bp, Homo sapiens
cgcttcgtgtggttcttttctggcatcgtaggaggtggcctgctgcaatggcagatgagtctggggaccagcgaa

SEQ ID NO: 429434 - DNA, 123 bp, Homo sapiens
cgagaatctagaggtggatgggattcccgggatgacttcaattctgatttggtgcttccagatgtgagttatcaggtggaatccagtgaggaggatcagtctcagactatggatcctcaagga

SEQ ID NO: 429435 - DNA, 83 bp, Homo sapiens
aataggatttaaccgctctctgcctcccagcaggaacgaatgcaggaatttgggaactgagctgtgcaagtgctgaagaagga

SEQ ID NO: 429436 - DNA, 100 bp, Homo sapiens
gccccgcctctgccttcggataggtctacttcaggaaaggaaaagtactctgcgatgctggttttttaggtgatgccttacaactctttcttcagtgctt

SEQ ID NO: 429437 - DNA, 100 bp, Homo sapiens
caggaaccagacagagaagtctcctgaggtgaccctgcagctctacaactcaggagccaccatgttggtgataccccccggactgagcgaggaagaggag

SEQ ID NO: 429438 - DNA, 100 bp, Homo sapiens
ggaaggtcttcattgttgggggagcaaatccaaacagaagcttctcagacgtgcacaccatggatctgggacaatctctatgggaagcagaaggcaagga

SEQ ID NO: 429439 - DNA, 82 bp, Homo sapiens
tccatgctaacctactatgagggtcgagcagagagtgaagacagcccaagttgaattttcccattctgtatcctatcctcag

SEQ ID NO: 429440 - DNA, 100 bp, Homo sapiens
tccttctcaaccttgtgggatgtgaaaactctgttactgaaggaactgccctcgttttcaagaacttgagagtgagactttgaaatcagaggaattccag

SEQ ID NO: 429441 - DNA, 82 bp, Homo sapiens
ccgccccccaccgccgccccctccggcgtgttcatgcccccggggatgaaacaggcgcctatttaatcgacagagaccccac

SEQ ID NO: 429442 - DNA, 80 bp, Homo sapiens
gaaacccggaaggggaagaggaaagcaaaggcgtcaggaatggttcttcctcagggtctactgacattcagggatgtggc

SEQ ID NO: 429443 - DNA, 82 bp, Homo sapiens
aatgaagattttaggcggtatcaaatggaaagtttttccaaatattcatctgtacagctgttgagtggaatgtcatggccag

SEQ ID NO: 429444 - DNA, 100 bp, Homo sapiens
ggattggagtgaaccggagaccccgaaaacggaagcgcagggagaaggaagaggtgtttgaaaagagaacactaaactctacatctcccttcccgagcaa

SEQ ID NO: 429445 - DNA, 100 bp, Homo sapiens
gaacaggtagagtacctgttgttgcagagttattttctgagtcagtttcagatgttcgaagaagaacaatttatgaataccaccgagtagagctacaaat

SEQ ID NO: 429446 - DNA, 111 bp, Homo sapiens
gaagtacaacgtgcgatccatgcccatccgaaaggatgatgaagttcaggtcgttccaggggtagaggaggcatgaaggatgaccgtcgggacagatactctgcgggcaaa

SEQ ID NO: 429447 - DNA, 98 bp, Homo sapiens
ggcaccgacgtcatcatgctgaccaccaatcagatccgtaaggaagccatcttcgacaagagcacagggaaggttgttttgaagacgttcagcctcta

SEQ ID NO: 429448 - DNA, 76 bp, Homo sapiens
gctttgcaacttatagtaacagcacgaactacacgaggcttcttcctgtgagacctacgagtacccacagcgtggt

SEQ ID NO: 429449 - DNA, 98 bp, Homo sapiens
ggatttatacacacatcactaaaaattatccctactacaggactgcggacaagggctggcagatggtgttgaaactctggattctggatggctgacat

SEQ ID NO: 429450 - DNA, 75 bp, Homo sapiens
tgccctgagtctcaatgaagaggctaaagtaaataatgccagcctgattggactgggttatactcagacccttcg

SEQ ID NO: 429451 - DNA, 82 bp, Homo sapiens
tctcaggacaacccagatgtgcaacaaagtgcgatggtttacccaaggtccagcctagcccctaggcaccatgtcggacagt

SEQ ID NO: 429452 - DNA, 50 bp, Homo sapiens
gcctctcaaagtgctgggattacagaattagacctttacgagaagcacag

SEQ ID NO: 429453 - DNA, 83 bp, Homo sapiens
ggagatcccaggcggtgacagagtggagccatggctagaggaaactttgagggaaattttgagtcactggaccttgcggaatt

SEQ ID NO: 429454 - DNA, 90 bp, Homo sapiens
ctatcgtctatcattggatgaagtggctccggagatggggaaatttgcagtggtgagaaaatgtataaagaaagattctgggaaagaatt

SEQ ID NO: 429455 - DNA, 51 bp, Homo sapiens
acaggaggcagtagccaaacacccagcgggacgaccctgggacagtctcca

SEQ ID NO: 429456 - DNA, 51 bp, Homo sapiens
cgagggactgggagtcgttagtgaggaatcagagatcattgatttcttcct

SEQ ID NO: 429457 - DNA, 100 bp, Homo sapiens
cggctgccctggaccctgctgactggccagatggttcttacccaacgtttgatggctcatcaaactgcaatgtcagaagacatgtcttcatctacatggc

SEQ ID NO: 429458 - DNA, 135 bp, Homo sapiens
aggagattggctttgagacgaccagaaatattggttcagcccctgaaagtttccaacaggaaatcatgagcaccggcagcaccagtgtgtgaggggagcaggcagcggtcctagccagttccttgatcctgccag

SEQ ID NO: 429459 - DNA, 75 bp, Homo sapiens
ccccgctccccgaaacgtgaccatgtggattcaacagcttttaggactcaggggcactgctgggcctctcgctct

SEQ ID NO: 429460 - DNA, 90 bp, Homo sapiens
ggatatctttcttcactcctcttcacttcttcagtctcctctgagcctccggcctccataagacccaaaacagatgacacctcttcccag

SEQ ID NO: 429461 - DNA, 127 bp, Homo sapiens
ttctgcctaagaagaccgagagtcaccacaaggccaagggcaagtgatttgacagtgtacggccccctcccgcaaagctttgacaaagagtgggtggccaagcagaccaagaggatgctggacatga

SEQ ID NO: 429462 - DNA, 85 bp, Homo sapiens
agatcctagaagacagtatgatattttctctggccagttgcataataactgcaaaattatctcttgctcctcctcctccctccat

SEQ ID NO: 429463 - DNA, 82 bp, Homo sapiens
tgcatacttggaatgaatccttctagagacgtccacggtgagaagccctaccactgcaactgggacggctgcggctggaagt

SEQ ID NO: 429464 - DNA, 75 bp, Homo sapiens
gaagatgtctcaggaattcttcagtgtactgctaatatactcggtcgtggttcaattccagaattctttcatatt

SEQ ID NO: 429465 - DNA, 108 bp, Homo sapiens
ggaaaaccgaagttggaagtgtctcttagcagcgcgcggagaagaacggggagccaggtctcggcgcggaagatggccggcggcgtggacggccccatcgggatcccg

SEQ ID NO: 429466 - DNA, 75 bp, Homo sapiens
aaggccagcttcgaagaaaagctgaaagggagacgtttgcaatcgatgccttccagcacatgcagcattttgtcc

SEQ ID NO: 429467 - DNA, 82 bp, Homo sapiens
tcctgaacgtctctccctgtcctagctctgtaactgtttacacacggcagcaatttgataggtatgtctgatctcaatgtgc

SEQ ID NO: 429468 - DNA, 100 bp, Homo sapiens
aggaagtaacttacgagaactgtctgcaggcactggcagatgtagaagtaaagtatataggagtcagtggatcggtggggaaaatgctgcttaccctggg

SEQ ID NO: 429469 - DNA, 50 bp, Homo sapiens
ccctcatcatctacctggacaaggacggacctgcaggctcctgggagcag

SEQ ID NO: 429470 - DNA, 100 bp, Homo sapiens
caaaggtgcttcggggacattccagatgaggtggaggaccatcctgctacagtattgctttctcttgattacatgtttacttactgctcttgaagctgtg

SEQ ID NO: 429471 - DNA, 75 bp, Homo sapiens
gcatcccacattaagtcaacggagccgggtgtgggctgagccctgcctgattgatgctgccaaggaggagtacaa

SEQ ID NO: 429472 - DNA, 83 bp, Homo sapiens
ggaaatcgtgcacatccaggctggtcagtgtggcaaccagatcggtgccaagggtacctgctcttccgagacttctgcctgaa

SEQ ID NO: 429473 - DNA, 82 bp, Homo sapiens
ccatgctctccatcctgctcttcttccacagatgatgaataaggtatttggaggtactgtgcacaaaaaaagtgtcagagaa

SEQ ID NO: 429474 - DNA, 82 bp, Homo sapiens
gaatgaatccttctagagacgtccacgccagagactgctgctactttgaaacgtacgatagaggccctgatggacagaggag

SEQ ID NO: 429475 - DNA, 101 bp, Homo sapiens
cacttcgtagcgcagaaagtgaagctgtttcgggccagcgacccgctgctcagcgtcctcatgtggggggtaaaccactcggttcaagcgattctcctgcc

SEQ ID NO: 429476 - DNA, 83 bp, Homo sapiens
gcctctacaggggcctcccgcgccccccgggacccccacgccgccgccaggtttggtgcacctcgatttggaggaagtagggc

SEQ ID NO: 429477 - DNA, 75 bp, Homo sapiens
gccttggagagagtgccaagcatggttctcttgctgcaaatggccctaccaccttggttgataaagtttcaaatc

SEQ ID NO: 429478 - DNA, 95 bp, Homo sapiens
aactggcatatttcaaaagggaaaaccaggagctaatgattcaaaatttgcagaaaaaacttcagcatgtgccaggaacacaacctcaccttgat

SEQ ID NO: 429479 - DNA, 100 bp, Homo sapiens
caagaggcagagctgtgggcggtggagtctagacttccccaaggcgtgtacccagaccagattatcaaaaattctcatgattaaaaaggaacatatcaag

SEQ ID NO: 429480 - DNA, 100 bp, Homo sapiens
atgaaggtgaagaagatgaagatgatgatgaaggggaggaaggagaggatgaaacaagtgaagatgctaactgtcttgctttgagtggacatgataaaac

SEQ ID NO: 429481 - DNA, 95 bp, Homo sapiens
ggattatacattgtaagaggtgacaacgtgatgaaacgaggaggaagagatagtgaccgtaattcatcagaagaaggaactgcagagaaatccaa

SEQ ID NO: 429482 - DNA, 74 bp, Homo sapiens
cttcaagccccaccgacacgaattggccttattaatgatatgttcttctcaccactaaatccaatacgagttca

SEQ ID NO: 429483 - DNA, 75 bp, Homo sapiens
tgactgcacttcttttttgagaaaggaaggaatatatcctgactgattcacttgcacctcctgcgccgccgcccc

SEQ ID NO: 429484 - DNA, 88 bp, Homo sapiens
tgctgctctacctccaccatgccaaggtgtcgtgaaaactacccctaaaagccaaaatgggaaaggaaaagactcatatcaacattgt

SEQ ID NO: 429485 - DNA, 50 bp, Homo sapiens
tcacaacattactacgaaggaggttaattcctgtaccaatggtgggtttt

SEQ ID NO: 429486 - DNA, 97 bp, Homo sapiens
gaagaatttattgcttttgagcatcctgaagaagttgattatatgacggtttattcttcagtccaaggaagcaattcacagtcagctgttagagaag

SEQ ID NO: 429487 - DNA, 100 bp, Homo sapiens
ggactctgctctatgagagagaatgaggcatatcaagcatcttgcaaagaaagattcttcagtgaggaggagaatggagacaccaactctacaacattac

SEQ ID NO: 429488 - DNA, 100 bp, Homo sapiens
tgcgtacgtagagtttgagaatccagatgaagccgagaaggcgctgaagcacatggatggaggagagaagatgactgaggaggaggtggagaccgttctg

SEQ ID NO: 429489 - DNA, 100 bp, Homo sapiens
atctagtcctgagcttcccaccgaagatgaacagggttcctggggcatcgacgatctccatatttcattgcaaggtttgtggaatcttgcttcccttttt

SEQ ID NO: 429490 - DNA, 98 bp, Homo sapiens
ctggcctcactcaaacagtaaacgaggacaccattggagaaactgggcattttaccaaggatttgactggaatggcatgcttcctttaaagatgaaag

SEQ ID NO: 429491 - DNA, 100 bp, Homo sapiens
ctgccgctatggatgatcgagaggatctggtgtaccaggcgaagctggccgagcaggctgagcgatacgacgagtgaagacatttccacctggacacctg

SEQ ID NO: 429492 - DNA, 144 bp, Homo sapiens
gtcctctcgcacgtggagagcggaagaagagtgtagttgagagctcggccccaggagccaataacctgcagtttgctaatccagactttacacaacctatctcagaagttgtagatgaagtaattcagaattgtcctattgatg

SEQ ID NO: 429493 - DNA, 101 bp, Homo sapiens
ctccgatcctgcagctgctgctgcggctctcactgtgcgggctgctgctccagagggcggagggcttctatttcgaccgcgatgatgtggctctggaaggc

SEQ ID NO: 429494 - DNA, 97 bp, Homo sapiens
tcaagaagcagctctataacatctacgccaagcacaccaaacagagcctgcaggtgatcgaccatgctcgacagctgaccaaggccatgatgcgaaa

SEQ ID NO: 429495 - DNA, 100 bp, Homo sapiens
gttttcttcatactgcattaaaggttttagaaatactacataggaaggcaattctcaagttcaactactcagtgcaggaggagagcgacacttgtctggg

SEQ ID NO: 429496 - DNA, 75 bp, Homo sapiens
aagcaggcgaacccgcggcgcaataacgtcctattttgtaacggattatgatccaaccattgaagattcttacac

SEQ ID NO: 429497 - DNA, 83 bp, Homo sapiens
ccactctttccgccctaatggaggtctccagtttcggcctctccttccgatgaaaagagaaaggaagaatggactacagccac

SEQ ID NO: 429498 - DNA, 100 bp, Homo sapiens
aattatccgagatgtggacctcaatggggatggacgagtggactttgaagcctcagactatggcatgaaactgccaatcctgcgttccaaccctgaggac

SEQ ID NO: 429499 - DNA, 100 bp, Homo sapiens
ggttgctaagacttggcgaagcgctgcgctcgcgcccggatccctcagtaccaaatatgccccaacagcggcaagaccagcatcatcagagtgccatgat

SEQ ID NO: 429500 - DNA, 90 bp, Homo sapiens
gcccgggcttacgccccgccgacaggatggatgtggagaaaggcaagattgaagacacaggaggcagtggcggctcctattccatcaaaa

SEQ ID NO: 429501 - DNA, 101 bp, Homo sapiens
ggatgcttccacagatgtacctgaaaagtcgtcactctttcaccaagatcaatgtccgagttaccaccatggatgcagagctggagtttgcaatccagcca

SEQ ID NO: 429502 - DNA, 98 bp, Homo sapiens
acagtctcagaaattctccagtgagcacaaaaatcttagccggacaccttcacagatcataaggatgtaatccctgttcattactacttaatacctcc

SEQ ID NO: 429503 - DNA, 51 bp, Homo sapiens
tatgtggagtgttctgcacttacacagctttgtgtccctggtgatgttgga

SEQ ID NO: 429504 - DNA, 75 bp, Homo sapiens
ctggacacctcaggtaaattctcctcaggtcatgtggactttaccttggaggttgagcggtgcctaagagtgttg

SEQ ID NO: 429505 - DNA, 101 bp, Homo sapiens
taattttcaaaagaataacccagtgcacacattaactgaagtggagcttctggcatttacatcagctaactatatgtcagaaagcatcagcttttctcgat

SEQ ID NO: 429506 - DNA, 100 bp, Homo sapiens
cctcggccgccttccctctcgcccacctctacccggcagcgggggcagtcagagcggagccaagatgcgaatgggacttaattcagtgcacaaatgagat

SEQ ID NO: 429507 - DNA, 100 bp, Homo sapiens
ctcaaagagctgcaccgcttcgagtctattgccattgcccaaggtctgctgagaacagacccagtccctgaggaaggagaagatgttgctgccacgatca

SEQ ID NO: 429508 - DNA, 98 bp, Homo sapiens
ggaggtggcggcggcggcggcggcggctgctgctgctgctgcccgcgtccgaggctcgcgggcggcgggcccggagtgcctggtgaagaatgtgatgg

SEQ ID NO: 429509 - DNA, 101 bp, Homo sapiens
aaacgaacccctcttcatgtggccgcatttctgggagatgcagagatcattgaactcctgattttgtcagggtggagagattcaaccagttagcgtgaaag

SEQ ID NO: 429510 - DNA, 95 bp, Homo sapiens
aaaaaaaaagaaagaaaactacaggcggggacggcttctcggctgaactcacgggaatcaaatggcgtaggtacaattttggagggcatggggac

SEQ ID NO: 429511 - DNA, 87 bp, Homo sapiens
tcggatggtggcctggaagagacaattgatcctgtttggtggcttccatgaaagtacacgttcaatcaaatgcctggtaggaattgc

SEQ ID NO: 429512 - DNA, 100 bp, Homo sapiens
cgccatggagaagatggaagagtttgtgtacaagccaatggagatcttcgtggatgatgagacgaagttgacgctgcatgggttgcagcagtactacgtg

SEQ ID NO: 429513 - DNA, 90 bp, Homo sapiens
ggagccatcagcttcagctccagctccgctctcttcggctgccccaatccccggcagctctctcagatcttgagccagatgattgtgcat

SEQ ID NO: 429514 - DNA, 142 bp, Homo sapiens
ttcgtgaaagctttctgcccagagctcctggaccaatgcatcttcccaccaccttaaaccactggtatccgttacagcactgatgtgagtgtagatgaagtaaaagctttggcttctctgatgacatacaagtgtgcagtgg

SEQ ID NO: 429515 - DNA, 75 bp, Homo sapiens
caaacatcttccaccacagcttagagatgggcggaagccatttccaattaaccatggtgaaactagtgatgaaac

SEQ ID NO: 429516 - DNA, 89 bp, Homo sapiens
gcaggtgcatctaactgtgcaagtgaatgctcaagataatgaagaccatgtcccactccatttctgttctcgatttggacaccatgata

SEQ ID NO: 429517 - DNA, 50 bp, Homo sapiens
ctcgctccggaaaggggacacctggggccggacatggtacattctttcac

SEQ ID NO: 429518 - DNA, 74 bp, Homo sapiens
agaccaccaccagaaccatcacctcggagacccagacaatcacagagttttgctcttgtctcccaggctggagt

SEQ ID NO: 429519 - DNA, 102 bp, Homo sapiens
agggtgacgccctagacccacctgcatcccccaaacctgctggcaagcagaacggaatccagaaccccatctcgctggaggccctcgggaccaaggatcacg

SEQ ID NO: 429520 - DNA, 50 bp, Homo sapiens
cccttcagtaaatttgggacaggttcagcctggagaaggaaataaagctg

SEQ ID NO: 429521 - DNA, 113 bp, Homo sapiens
ctcttcccgaacacgagcaccacaggcgcccgaaggccggaacaggtgctggagaatctggtaaaagcaccattgtgaagcagatgaggatcctgcatgttaatgggtttaat

SEQ ID NO: 429522 - DNA, 100 bp, Homo sapiens
gcatcttagaaaaacacttgaatttgtcttccaaaaagaaagaatctcagcttcaggaggttttgatgatgatggttcagaatttcatgaacatatattt

SEQ ID NO: 429523 - DNA, 75 bp, Homo sapiens
gtggatttcagcctgcacggatggtcttgaaacacaaatggtttttgaaaaccgtgaggacatactgaatgccgg

SEQ ID NO: 429524 - DNA, 83 bp, Homo sapiens
attttgttttgatggaacaaaggcggttaaacttgatatggtggaggacacagaagttaccttatcccatatcacacaactgg

SEQ ID NO: 429525 - DNA, 75 bp, Homo sapiens
tcctttgaagaattctgtgctggccgcgatgggcctcttggaacattggtgtgttcatctgcattcgatgtgctg

SEQ ID NO: 429526 - DNA, 100 bp, Homo sapiens
ctgttcctggcccgcagccgccacctacccagtgaccatgataggagaagaagtcctcaccagtgaacggagacctctctgaactaaggataccatggcc

SEQ ID NO: 429527 - DNA, 75 bp, Homo sapiens
gcccgggctacgctcctccatcacgtggttggttcatgtgatcctggttaatggaacataagtgagattttatgg

SEQ ID NO: 429528 - DNA, 101 bp, Homo sapiens
gggggctcagcaagaactgattaccgagccattcaactagccaaggaaaaaaagcagagaggagcggggagcaatgcagatgatgtgatgccagccactta

SEQ ID NO: 429529 - DNA, 90 bp, Homo sapiens
ctggagaggttttgagatttgttggtggcattggcctgttcttcagttttacagagatgctggactgcagccttatctggatcagatcaa

SEQ ID NO: 429530 - DNA, 75 bp, Homo sapiens
aaagtttcagctttgaccacccagctgacagcaaattattgcctaagtgtaatcttgaacatgggcggtgctgtg

SEQ ID NO: 429531 - DNA, 90 bp, Homo sapiens
caggcgttggttcccctctttgacctgggaccagttactctccacaagaaaattcacacaaccacagtgctcttcatagttcaaattcac

SEQ ID NO: 429532 - DNA, 90 bp, Homo sapiens
actgagcatcaacagtgctgctgaattaacttaccttaaaggtcacttcctcctaacccatctgctgctagagaaactaaaggaatcagc

SEQ ID NO: 429533 - DNA, 74 bp, Homo sapiens
atttgaaaagtgtaatgaaaacaaatgacattgttcgatacagggtgtatgagcattacttagagcctccagtg

SEQ ID NO: 429534 - DNA, 88 bp, Homo sapiens
ggctactccgaggagcgctgcagctggaggggcagattgagtttgtgacgggcaccaaaaaaggcaccacgaccaacgccacgtccac

SEQ ID NO: 429535 - DNA, 87 bp, Homo sapiens
ggcttggagcagaatcaccaagcatcgccagcaccagatttatcagcaagactgttgaacgcataactgcccaagatgcctgtccct

SEQ ID NO: 429536 - DNA, 100 bp, Homo sapiens
ctcggggtgactcttctcaaatgccttctcatccccacatagtttgtgttgctagttaagctagcttgtattgttgtggcttccttcgttctctgctggc

SEQ ID NO: 429537 - DNA, 100 bp, Homo sapiens
atcctgacactatgaatgctacttggatgcctcttaagtgaatggtagtgtctagaaagggtatgtcccttcaagagagaggtgccaatgtccaaccggc

SEQ ID NO: 429538 - DNA, 74 bp, Homo sapiens
gaaggatattggttgccaggagatgagattgaattgcgaaagcccagctacgcagagatttgtcagagaacgag

SEQ ID NO: 429539 - DNA, 90 bp, Homo sapiens
ctgagccaggtgaagggccccgtaaattggaaggatgcacaagttccaaggttacgtttcagatgacgtagctttgccaaagacttagaa

SEQ ID NO: 429540 - DNA, 91 bp, Homo sapiens
aggtgaaccttcgaccttggacttctcagcctccagaatgacaatgcagatcttcgtgaagactctgactggtaagaccatcaccctcgag

SEQ ID NO: 429541 - DNA, 75 bp, Homo sapiens
ttggcagaaggtgatacaggtggttcagtcagattatcccgaaggcaataattcaagtgattatcttgttcaaac

SEQ ID NO: 429542 - DNA, 100 bp, Homo sapiens
tgcttgaacacaaggagatcgacggccgtcttaaggagtttacctgtggcagattccattaactattgtggtaggaaatagaagccatgtgtcttcagaa

SEQ ID NO: 429543 - DNA, 83 bp, Homo sapiens
caactttctgggcgttcatgatcctggccagcctgctcatcgcctactgcaggaaccctactctggaaactgtcagtcccagg

SEQ ID NO: 429544 - DNA, 80 bp, Homo sapiens
ctggaagtccaactacttccttaagatcatcatccacacaacttaaagatctgctgccgagtgaatggggaagtggtcca

SEQ ID NO: 429545 - DNA, 90 bp, Homo sapiens
gcgatgcggacacggccacggccctcacgccagcctggatggagaacccctacatcaagatatgtgcagcgggggctacagcgagtgggg

SEQ ID NO: 429546 - DNA, 97 bp, Homo sapiens
acggtacgggtgactccagctatgccagaggcgggaggcagcaccgggctcttgatggacttggcagccaatgaaaaggccgttcatgcagactttt

SEQ ID NO: 429547 - DNA, 100 bp, Homo sapiens
gtgatcggcctgtccagtttgaaattctcagtgatcagtcagtcaactttggttttagtaacctggcgctggccaacaatagcaccctcaccattggcac

SEQ ID NO: 429548 - DNA, 75 bp, Homo sapiens
ggtgtacaaatacccctttgaattaattatggctctagagttgggaagacatcactgattatgtctctggtcagt

SEQ ID NO: 429549 - DNA, 100 bp, Homo sapiens
atttgcctgtgggacgctccgtggatgaggctctgcggctggtccaggccttccagtacacagacgagcatggggaagggaactgcacgggctgctcggc

SEQ ID NO: 429550 - DNA, 90 bp, Homo sapiens
ctcacaagcaagccaagcactgtaagcataactaatgatgccagagaagatgaaatggaagagaacctgactcaagtgggcagtatcctg

SEQ ID NO: 429551 - DNA, 75 bp, Homo sapiens
acgcccggggccaccctccccaagtccccatctcagtcaatgatgaatctggtcgagattctgaagtcagtgcca

SEQ ID NO: 429552 - DNA, 100 bp, Homo sapiens
gattctcattcgttgaccactaatataatggaaattttgagaggcgatttttcctcagccaatagctgcctgctgtttcccggggagatcatgaaacgag

SEQ ID NO: 429553 - DNA, 100 bp, Homo sapiens
agccagcagaggtcagagagagacagctcacgttccgggtactccaaagattcaggtttactcacgtcatccagcagagaatggaaagtcaaatttcctg

SEQ ID NO: 429554 - DNA, 75 bp, Homo sapiens
tgaccaatgagatcgtgaagctacatgagattcgagccacccctgagtgacgacctgcagccttcctcagctgtg

SEQ ID NO: 429555 - DNA, 51 bp, Homo sapiens
ggcagatggactcggagcgccccgccgaaatttcagcagatttcaaggagc

SEQ ID NO: 429556 - DNA, 76 bp, Homo sapiens
agagaagatccagaccaaggcaggtgaggcggactggacctacagagacatctgggattttctgcgtcagctgttt

SEQ ID NO: 429557 - DNA, 100 bp, Homo sapiens
gcctaccccaaactcatggaaattgatcagtctccagtgccagatagtccacagctgtcctctcttggaaaatcagattcatctttctctgaaatttccg

SEQ ID NO: 429558 - DNA, 74 bp, Homo sapiens
tgtctcctgacactgtgccaaaggctcctaaacatttaaaagcaggcttatccaaatcccttgggctcattgaa

SEQ ID NO: 429559 - DNA, 82 bp, Homo sapiens
tgcagctgctgtccttgtgtccaggttttaaaatcaaagatgggaaaatcggagaaaattgcccttccccatggccagcttg

SEQ ID NO: 429560 - DNA, 98 bp, Homo sapiens
cgacccgctgctcagcgtcctcatgtggggggtaaaccactcggtcagtgggacagcatggaagaatacacctgtatgatccctcgggacacccatga

SEQ ID NO: 429561 - DNA, 95 bp, Homo sapiens
caacatgatggagcaaaagaagagggtgtccatgattctgcaaagccctggaaaaagaccttgatgaagttctgcagacccactcagtgtttgta

SEQ ID NO: 429562 - DNA, 100 bp, Homo sapiens
ttccatcctggagatctacaggatttatcaaatcgagtcactgtcaacttaaagaaagtggttattgtacaggtcatgaaccagattccctggagttcag

SEQ ID NO: 429563 - DNA, 100 bp, Homo sapiens
gccaccttcgtgaacgcgctgcacctctacctgtggctctttctgctgggcctgcccttcaccctctacatggactatgatttaatctccaaagaaccaa

SEQ ID NO: 429564 - DNA, 135 bp, Homo sapiens
caagggatgcagatgatgctgtgtatgagcttgatggaaaagaactctgtagtgaaagggcagtgccaaggagctgtcccctgccgccttggagaaaaggcggcggagaaagcaggaacgggaccggaagaagag

SEQ ID NO: 429565 - DNA, 90 bp, Homo sapiens
ggggggagctgatgaagtccaagtactcagacatcaccatcatgtttgaggtggggaacgccaagcacaacgtgcatgtcatgaacatct

SEQ ID NO: 429566 - DNA, 51 bp, Homo sapiens
ggaagttgctgcccaatgtgtccaggtggagtattgctcctggaaaatcca

SEQ ID NO: 429567 - DNA, 100 bp, Homo sapiens
acagtgatttagcaaacactgcacagcaatcagaaacttttcagtttcttgcaggcgcctgtgtctggcagagctggtgtgagacgagacaatcctgccc

SEQ ID NO: 429568 - DNA, 90 bp, Homo sapiens
agcaggctaccaaggacagagtcagtgatttccataaattgaagcaaacaaagaatggccgagtggattctgaggaccggaggagccgcc

SEQ ID NO: 429569 - DNA, 96 bp, Homo sapiens
acctttgatctaagggttcagcctttcaatgtgacacaaggaaagtattctacaggggggacacagcgattgccacgcgccattggaatgtccctg

SEQ ID NO: 429570 - DNA, 97 bp, Homo sapiens
cttctcgctggccatgcactggcaactgcagcccgaggacaagcggctaatggactgctgaattatgaagtatttcagacccagtagtagaacatca

SEQ ID NO: 429571 - DNA, 102 bp, Homo sapiens
ccgcaaccaggaatgacttctagcttccagctggtctttttaccctttgctgatgataaaaggaagatgccctttactgaaaaaatcatggcaactccagag

SEQ ID NO: 429572 - DNA, 100 bp, Homo sapiens
gctgtgggggctacgaggaaaggtgtgctgggcatcaaggtgaagatcatgctgccctgggacccaactggtaagattggccctaagaagcccctgcctg

SEQ ID NO: 429573 - DNA, 83 bp, Homo sapiens
agatatataaagcatttgtgcattcagatgctgctaaacaagaactgtggctgcaccatctgtcttcatcttcccgccatctg

SEQ ID NO: 429574 - DNA, 100 bp, Homo sapiens
cacagagacgaggagaagatgtggagacttccaagaaatggatgatgtgcattgtgaaaccagatggacctccccagctctgcaaaacagatgaaattgg

SEQ ID NO: 429575 - DNA, 100 bp, Homo sapiens
gattcctgcgtattccaagaaccgggcctatgccatcttcttcatagtcttcactgtgatagtcagaaacagggtttctaacctacctggatgtgtcagt

SEQ ID NO: 429576 - DNA, 90 bp, Homo sapiens
ggcgagcgactccccggctcgaagcctggatgaaatagatctctcggctctgaggctgatatgcattcaagatggttacctttccctgct

SEQ ID NO: 429577 - DNA, 100 bp, Homo sapiens
caaaaaaatcaaagaggcatttgaagtctttgaccatgagtcgaataatacagtggatgtgaggagtccaatgtgctgattgctgctaacagtcagggta

SEQ ID NO: 429578 - DNA, 75 bp, Homo sapiens
cggaccccagcacacagaagccgagacggaaatttgcgagaatccccgatttatcattgatggagccaacagaac

SEQ ID NO: 429579 - DNA, 100 bp, Homo sapiens
cgcgaacgagcgacggcggaacccgtgggcctgtggactgcagcctcggcggtcagcaggtactccaaagattcaggtttactcacgtcatccagcagag

SEQ ID NO: 429580 - DNA, 80 bp, Homo sapiens
tctcgttttgaaaatcttggagtaagatgccctccaaatccttggttatggaatatttggctcatcccagtacactcggc

SEQ ID NO: 429581 - DNA, 130 bp, Homo sapiens
tggaggctgagtgctaaactgtgtggggcgcggatgggatccagctgttagtcgggtctgtttatgatggtgaagaacatggacgtttcatggagaagcttgaaactcgtatccgtaatcacgaccgaga

SEQ ID NO: 429582 - DNA, 83 bp, Homo sapiens
cagagatcttgattattccagacgagaaaatgtcattgaatataaacactgtttgattacaaaaaatgagaatgaagagtaca

SEQ ID NO: 429583 - DNA, 100 bp, Homo sapiens
gaggcattaacgagaccgggtaaggcttcagggatgacttcttagggggcaggggaggtagtcgcccaggcgaccggcgaacaggcccccccatgggcag

SEQ ID NO: 429584 - DNA, 83 bp, Homo sapiens
ggatgatttggctgggcattaatttgaagttcgatcctttggtacagaagacagaccgacagatcgtccaataccacctcgag

SEQ ID NO: 429585 - DNA, 88 bp, Homo sapiens
tcctctttgaagcagaaattgaaaagtactgcccagagaattttgtagacatcaagctgaactcgtttgagcagctgtgcatcaatta

SEQ ID NO: 429586 - DNA, 100 bp, Homo sapiens
tggacccgtaaaataaaatggcttctcacctggggcgggtgggttctgcaccaccctcccaccctccttcctccgtgtggacgatagagccacatccagc

SEQ ID NO: 429587 - DNA, 51 bp, Homo sapiens
gtgcaaaggtttgctataaataaagatgaggaaaatgaggcccaaagaagt

SEQ ID NO: 429588 - DNA, 80 bp, Homo sapiens
cgaagccttgaaaaagctgccctgagacggtgtcccgccgaaaggaagtttatctcgacaatgctagttgcagtctgtgt

SEQ ID NO: 429589 - DNA, 100 bp, Homo sapiens
ggatgtgtatggaccttcagttccaaagatgatgaatctgaaaggaaatccggaattatcacagagactatggcaaggagtctcaggccaaggatgtcat

SEQ ID NO: 429590 - DNA, 101 bp, Homo sapiens
ttcaggtgcttgattttgtgcaggatccgtgctttgcccaaggagatggtctcattaagctagccacagtgcagcctggccagaatttccacatgttcaca

SEQ ID NO: 429591 - DNA, 100 bp, Homo sapiens
agtcaggcgtggcggcgcgcgcctgcaatcgcaggcactcggcaggctgaggtaggagctattgtggaagtgaagaatcttgatggtgcatatcaggaag

SEQ ID NO: 429592 - DNA, 82 bp, Homo sapiens
tttacaacatccactattctttctccatcaccaggaatccggtcaataatgagcctcctcctagtcaaagccaagacaagga

SEQ ID NO: 429593 - DNA, 75 bp, Homo sapiens
ctgcgacaaggagggggagaacatctgctttgaggtaaaactcttgcctattgcatccctgtggtccagtccctt

SEQ ID NO: 429594 - DNA, 90 bp, Homo sapiens
gcggcagagccggtagcggacggtccttgcattggcctccggcaggcgccccccgggggcgggaagctgtcatccgtccttggctcagga

SEQ ID NO: 429595 - DNA, 83 bp, Homo sapiens
cgctggcgcggcttttggcggcctttctgctcctcgcggcccaggaagctcttcgtgggcggtcttgactggagcacgaccca

SEQ ID NO: 429596 - DNA, 100 bp, Homo sapiens
gatcgaaggggagtttccacagtgattgatgctgcctcagattcctcacctattcctacctcttggccttcaatgtgtggcttctgcttgcacccgtgac

SEQ ID NO: 429597 - DNA, 82 bp, Homo sapiens
tgaaatcagaggagatgtaactatcgttcccccagaagatcaatggaaggtggattccaaagagtgggcaagtgaggacccc

SEQ ID NO: 429598 - DNA, 83 bp, Homo sapiens
ccaggatctcgggctcggaacgagactgcacgatcaggatcctcatgaccagccaaagagaagaagaattaggaagcataaat

SEQ ID NO: 429599 - DNA, 84 bp, Homo sapiens
ctcctccctgcgacagaccttcagcttcctctcgggcatgaccggaaaggccaaggaaaatatatgcagatgatgaacattctt

SEQ ID NO: 429600 - DNA, 82 bp, Homo sapiens
gctttgccattggggtgcagcagctgcaccccaccttgatccagcggacttacggggagtgcatccgccccaacccttttcc

SEQ ID NO: 429601 - DNA, 98 bp, Homo sapiens
agcagccaataggacatgatccaggaagagcagtaagggactgagctgctgaatgtttctccatcccagagagatgaagtaattcaatggctggccaa

SEQ ID NO: 429602 - DNA, 101 bp, Homo sapiens
taagaagaaaaagaaggccctgagtcaaagaagatgcctcgaactaaacaaattcatcccagaaatctaagagatatttggagttcttacaacatggcaga

SEQ ID NO: 429603 - DNA, 128 bp, Homo sapiens
cctggggctagtggtcctctggtcttccctgaccccgcggccggacgacccaagcccgctgagcaggatgaggggggggccctcagcctcttggccttgaacgggctgttcatcttgattcacaaaca

SEQ ID NO: 429604 - DNA, 50 bp, Homo sapiens
cttctccagcggagatggccaatttgcttttgccaagagtaagttatttg

SEQ ID NO: 429605 - DNA, 88 bp, Homo sapiens
gcagtggtcgcttcttctccttggtgtttcagtcacctccagtaacacgggcgtgccagatatctcgggttctgtgtactccaaaacc

SEQ ID NO: 429606 - DNA, 75 bp, Homo sapiens
agattttgcagaacagagatgacatgccagcccagactttcatgctgaactagaagcttttgaaaacagactgaa

SEQ ID NO: 429607 - DNA, 75 bp, Homo sapiens
ctcacctttaactctccttatgctgggtgaaaacaaaggtgctcctgacctctgataaagctgcagccaatttct

SEQ ID NO: 429608 - DNA, 100 bp, Homo sapiens
gaatttgcaaaacttactgtaggcaaggaggacttcttgttaatttccatccttcaattctgacctgtctacttccccagttgaccagccctagacttgc

SEQ ID NO: 429609 - DNA, 75 bp, Homo sapiens
attccaagtaactcttatttgcgtctgaccaaacacaccaagttcgtgcgggacatgattcgggaggtgtgtggc

SEQ ID NO: 429610 - DNA, 51 bp, Homo sapiens
ctgggacttcccgtccgcggcgtggaggtgatgatgatgatgattttgatg

SEQ ID NO: 429611 - DNA, 89 bp, Homo sapiens
tttgaagtacaccgtggtgacattgtatcattggtttggtgttggtattaggagatctgcacatcccacaccggtgcaacagtttgcca

SEQ ID NO: 429612 - DNA, 73 bp, Homo sapiens
tgccaacattccagttttttaagaagggacaaaagaatttttccctagattggtgtaaacagccagacgtggg

SEQ ID NO: 429613 - DNA, 74 bp, Homo sapiens
gcggtcacctacccccagcaccacctccagcccctgcgcctcggaatatgaagccatctacctagcaaaattaa

SEQ ID NO: 429614 - DNA, 90 bp, Homo sapiens
gaagatctccattcctgaggaggagtgcaaacctgagtgactcctacttcaccaaccgccaggaccgctacgtgttcctgcaggactgtg

SEQ ID NO: 429615 - DNA, 75 bp, Homo sapiens
ctccatccagggccaccatgtctgcctcctggtgaaaaagcctgtgcaggagacatggcggacgcagcatctccg

SEQ ID NO: 429616 - DNA, 83 bp, Homo sapiens
tgcaattccaaaatgtgtaagacgggatattctcttctgtgctgtcaagggaaataatgaagatgtttcattttcaagaccag

SEQ ID NO: 429617 - DNA, 75 bp, Homo sapiens
acgtctacaatggagtcgagtctagaattcacacagagccacctagacactttttcaaaaatggcaatggtatca

SEQ ID NO: 429618 - DNA, 75 bp, Homo sapiens
gagtatgtcaagcgagccctgtgagaaggacgttgaagagtgggctcggagatgacctggtgcaggcactgggac

SEQ ID NO: 429619 - DNA, 116 bp, Homo sapiens
tgaaataaacagccatgttgctcacacaaagcctgtttggtggtctcttcccacggacgcgcgagacaatgaggaggttgcaaaagcttctcatttcagagagatgccaggatcct

SEQ ID NO: 429620 - DNA, 80 bp, Homo sapiens
ggtgtcggagtctgacagcagtggggagaccaagaaactggcgatggaatatgagaggagccctctggaaagaaaaggac

SEQ ID NO: 429621 - DNA, 98 bp, Homo sapiens
ggaaggcagtgacttaaattactatttcaattggataaaaactcagctgagttcacagaaccatttgcactgtgccgcttatagatgtcataaatggc

SEQ ID NO: 429622 - DNA, 82 bp, Homo sapiens
gggctgtttggaaagacccaggagaagccgcccaaagaactggaccaagaatcgccttcagccctgtctggtgcatccttgg

SEQ ID NO: 429623 - DNA, 71 bp, Homo sapiens
ttataccagatgcaaatgacagagctggagttctgctgtgcctggggatgtggagacgctggtagcggggc

SEQ ID NO: 429624 - DNA, 98 bp, Homo sapiens
gtccctgggcgcgtcagaacaggcgctgcggctgatcatctccatcttcctgggtggaaaacgaagctcattcccaacgtgcaaagccaaggcagcga

SEQ ID NO: 429625 - DNA, 141 bp, Homo sapiens
atccatcagggaccaaaacctgcattgataccaaggaaggcatcctgcagtattgccaagaagaacttgaaatgcaggctcgagctcatggactttcccttattccatccacgggtctctgctctccagatttggtgaatc

SEQ ID NO: 429626 - DNA, 139 bp, Homo sapiens
ttcaagaattcccagaagaggcagcatgcggaaggcattgctgggagcctgaaaactgtgaatggttttgacaagcttgcatcatgcgtgagtataagctagtcgttcttggctcaggaggcgttggaaagtctgcttt

SEQ ID NO: 429627 - DNA, 100 bp, Homo sapiens
ggagaccaaggagctggactggtctacaccgctgaagatgagcgggatcgtgtgcagaagaaaaccttcaccaagtgggtcaacaagcacctcatcaagg

SEQ ID NO: 429628 - DNA, 90 bp, Homo sapiens
ctgggagccatctgtgccatcatcgtggtagttattgtaaactctaaaatagagctcaagcttgagaagagagaaccactaaagggcaga

SEQ ID NO: 429629 - DNA, 75 bp, Homo sapiens
tcaggaaccaccagtgacagaacacctggatttcattagcatcatgacctacgattttcatggagcctggcgtgg

SEQ ID NO: 429630 - DNA, 83 bp, Homo sapiens
aggccatgctctggcaaaaacatatgtgctgattagaaggctcacttgtgcagtgtggaggataaccagtgccttacaaaatg

SEQ ID NO: 429631 - DNA, 50 bp, Homo sapiens
cttccagactcggtgctgtacccgcctttgcgtgtgaacttggacatggg

SEQ ID NO: 429632 - DNA, 98 bp, Homo sapiens
aatattccaaggaatttttcaccaaaaaaggcagcaattccatttccgtgagggcgtttctagatgaagatgacatgagcttggaagaaataaaaaat

SEQ ID NO: 429633 - DNA, 100 bp, Homo sapiens
ggccgggaaaagtggcactgaggctctggaacttctgcccagctctccttgagtgcttatgccttaccaaccatggctttttcatttctctgccatacct

SEQ ID NO: 429634 - DNA, 101 bp, Homo sapiens
ggcagctgcagtgacatgtccagcatgaatcccgaataatcaatgtccgagttaccaccatggatgcagagctggagtttgcaatccagccaaatacaact

SEQ ID NO: 429635 - DNA, 100 bp, Homo sapiens
cagcttcagtggcctgtcgttggaagagtacaagctgatcctgtccacaggggacggcaaaacagaacagaaaggcggagataaaaagaggggtgttaaa

SEQ ID NO: 429636 - DNA, 100 bp, Homo sapiens
gccattacgagggttcttgggaatagcagggtatgaaattgaaggctgtgaagtgatttgggccattaaagataaagctatagggaatactttcttcgat

SEQ ID NO: 429637 - DNA, 90 bp, Homo sapiens
ctggggaggtcctccatgcgcagtcatgagtcgcttcaagtttatcgagccagtcttggtgctctgtgttcacctggttcatctgaggag

SEQ ID NO: 429638 - DNA, 75 bp, Homo sapiens
aaactccctggtctctgttggtgtagaagccaaaatcaggactcctagaagtaccccaccccacccctgctcctt

SEQ ID NO: 429639 - DNA, 82 bp, Homo sapiens
gaaaaacttcttgccaaccaaaagcgtctctacagccaacttgagcgaaaccgcctgctttctaatgagctgaagctaacgc

SEQ ID NO: 429640 - DNA, 100 bp, Homo sapiens
ggatatccaggcatcccagctacgaaggatggaatcttcaatcaatcatatttcacaaatgaaatcgtggacactttgggtgaaggagcctttggcaaag

SEQ ID NO: 429641 - DNA, 75 bp, Homo sapiens
cgtaatgcgactcaaagctgcacggcagtctgtttatgagcttcgagacaccaagtccacagatcagaagatgac

SEQ ID NO: 429642 - DNA, 103 bp, Homo sapiens
cagaagccgacaaggcgttcaagcgaaaacatgaccgctgagcccatgagacaatgcagatcttcgtgaagactctgactggtaagaccatcaccctcgaggt

SEQ ID NO: 429643 - DNA, 90 bp, Homo sapiens
aatttcctgcgctgttccacctcattcaacttcagatatgaattgagaattcgttatttgccaaaaggatttctaaaccagtttactgaa

SEQ ID NO: 429644 - DNA, 82 bp, Homo sapiens
ctgtgtcctggtggagccataagggtttggaatcacttgctaggagtcttgtctctctgccacccaggacatcatggcagct

SEQ ID NO: 429645 - DNA, 50 bp, Homo sapiens
aagttgcaaagcaacagtaataattttgcccttatttcaagaagctgaag

SEQ ID NO: 429646 - DNA, 74 bp, Homo sapiens
ttctggagaaaaagttccatactgtcagtggaagcaagtctctggatggtcgtcagatccgtgtggatcatgca

SEQ ID NO: 429647 - DNA, 82 bp, Homo sapiens
gagcgcaaggacagcgcgaggtccgcgcagcccagcgcagccatggagtggggaaggccagggccagattctgcagcgcttc

SEQ ID NO: 429648 - DNA, 98 bp, Homo sapiens
aacccgactgagaagtggagcgacccccagggagggtcggacctgcctcaataccgccaaggtctcactcttctttgccccagatgtccagctccagg

SEQ ID NO: 429649 - DNA, 83 bp, Homo sapiens
accagaagtttacactggaactggacaggcactgccagtgaaagatgtagaagataaacctgaacaacaaaccagaacaagag

SEQ ID NO: 429650 - DNA, 82 bp, Homo sapiens
aggtcggcagagcaaggggcttacgcagaaggacctggccacggtgaacttcacggtagaccagatccgcgccatcatggac

SEQ ID NO: 429651 - DNA, 90 bp, Homo sapiens
aggacttcgtcgtcaaggtcatcgaccggctgagccgggacgagctggtcaagcctgagaagccaggccccggcagcaaggaccccaagg

SEQ ID NO: 429652 - DNA, 100 bp, Homo sapiens
tggctctggcctggccgagttccaggagcttctagatgccacccaacacacactgcagcagcagatccagaccctggtcaaggagtgagatggggccggg

SEQ ID NO: 429653 - DNA, 98 bp, Homo sapiens
gagggagtaacaccaactggaaaaccttgtatgaggtcaaatccgagaacctgggccaaggcgacaagggcatccgcttcgatcctgaaattccgcaa

SEQ ID NO: 429654 - DNA, 100 bp, Homo sapiens
gacacacgcaaaagcgactcccagctccgtttgatgtaaaatgtcggttccaggaccttaccaggcggccactgggccttcctcagcaccatccgcacct

SEQ ID NO: 429655 - DNA, 90 bp, Homo sapiens
gtggagtccgagctgagatccatctgcaccacggtgctggccggtcagaagtactggggccccgccagcccgacccacaagctaccccca

SEQ ID NO: 429656 - DNA, 90 bp, Homo sapiens
caccggcagcagcagcaccaccggacggcaagaagttatgaaatggaatggatggggatataatgattctaaattcatcttcaataagaa

SEQ ID NO: 429657 - DNA, 111 bp, Homo sapiens
gcggacacggccaccgcctcagcgggagaggagtctccaccaggactgaccgctgccgcccagcacgtccaggtcgttgaggacttccacatggagattggcacaggacca

SEQ ID NO: 429658 - DNA, 100 bp, Homo sapiens
aggtgatgcaagcaacagccactagtgggtttgccagtggaagtaactaaatgaccatggaatctggagccgagaaccagcagagtggagatgcagctgt

SEQ ID NO: 429659 - DNA, 75 bp, Homo sapiens
ctggtggtgaatcctccatagtctgtgtgtcccggcatggatatccggaacaacctcactaggttgcatgagctg

SEQ ID NO: 429660 - DNA, 101 bp, Homo sapiens
accctcgatgtggacggggagaccctgatcaagaacaggagcgcagagcttcgtgtcctatgtgctggagaatctggtaaaagcaccattgtgaagcagat

SEQ ID NO: 429661 - DNA, 82 bp, Homo sapiens
gacatcgtctcctgtgtggcgatggtcttcctgctggggctcatgtttgagggggggccctcagcctcttggccttgaacgg

SEQ ID NO: 429662 - DNA, 75 bp, Homo sapiens
cgggtagcagccgaggccccagaatgcaagagtgagccatggagctacgtgtggggaacaagtaccgcctgggac

SEQ ID NO: 429663 - DNA, 75 bp, Homo sapiens
aaatgtgctgcttgcatcagcagagccatttcctcagcaagattaccttatgctggctactttggatgagaatga

SEQ ID NO: 429664 - DNA, 100 bp, Homo sapiens
gggcccgctgcagtctgtgcaggtcttcggacgcaagagagcgcctgctcgctgtgcccccgggttatgacgacccccaataaaggaaacaaggccttga

SEQ ID NO: 429665 - DNA, 123 bp, Homo sapiens
cctccctccgccttgagagagacacaaggcagttgccactgctcaccagtgccctgcacggatgtttggctgtggctccgtggcccaggttgtgctcagccggggcacccacggtggtttcct

SEQ ID NO: 429666 - DNA, 90 bp, Homo sapiens
cgcttctctcctgcagtccgcctctgggccctgccgctcctgagaaccatgtctatgcccaaaggtagagttctggataaaaacctggat

SEQ ID NO: 429667 - DNA, 100 bp, Homo sapiens
tcccatctgttacagttctgtgcataagaaggatctcaagagagctccgagaggccttcagagaattcgacaaggacaaggatggctacatcaactgccg

SEQ ID NO: 429668 - DNA, 100 bp, Homo sapiens
tctgctttccctggaactgtgtcattcaggactctgcaaattccctaaagtaggaggaaaaatgaccatgtccaaggtggatccataaagaacccagcca

SEQ ID NO: 429669 - DNA, 75 bp, Homo sapiens
gaagcgaaattagtgcggaaagttgccggggaaaatgcctatggaaactggttcccaggcagcaagcctctcata

SEQ ID NO: 429670 - DNA, 96 bp, Homo sapiens
ccatatcaactcctatgatcatgcacacaagcagaattcagcaactgtttgaagaaatcctgagtaatagtaggcaactgaaatggctgtcctgtg

SEQ ID NO: 429671 - DNA, 96 bp, Homo sapiens
ggctcattatagcctcaaactcccaggctcaagcaatcctaccatgtcagccttcccagtagctggaactacagttatgaaatgctgcaagataat

SEQ ID NO: 429672 - DNA, 90 bp, Homo sapiens
cgggcgggggctggcccggggttccagtcgctgctgttcctggggctggtggccgccgtctgcctgggcctgaacctcatcttccttgtg

SEQ ID NO: 429673 - DNA, 75 bp, Homo sapiens
cgcaccatctgaaaacaacatcatgcagtggaatgcagttatatttggcagttggtagcaagaccttccagtata

SEQ ID NO: 429674 - DNA, 75 bp, Homo sapiens
caggcccgagcccaccgcgccgggccccggacgccgcgcggaaaaggaagatggatgttttgaaagctaccgcag

SEQ ID NO: 429675 - DNA, 95 bp, Homo sapiens
agacgcggagccatggccgaggtgttgcggacgctggccggtgtgagatgcacaatgcgaaacctaggccccagcttttacaccatgatgcgcag

SEQ ID NO: 429676 - DNA, 100 bp, Homo sapiens
ggccggtgctggctgggagttctggtctcaggcaaggtggggactgggcacatcatcaatacggtgtatcaaaccgaatgataaaaaagcagcacacatc

SEQ ID NO: 429677 - DNA, 98 bp, Homo sapiens
caagaccgaattcagaaggatatcgacgtcgtgatccagaagtccagagctgaggactgcctgtttgcaggggggctttctctgtggtccgacgctgt

SEQ ID NO: 429678 - DNA, 51 bp, Homo sapiens
agtatttggctgaggagttttcaatcccagatgatccactcacaaatctga

SEQ ID NO: 429679 - DNA, 100 bp, Homo sapiens
attcagagaggggaagtgatttgcctcagcttgtactgtaccattgttggatactggtgacatcatcattgacggaggaaattctgaatatagggacacc

SEQ ID NO: 429680 - DNA, 89 bp, Homo sapiens
atgcatgctgcttttgatgtctgacaacgtggatcgttgttttgaaacatactaatggaccatactaccaaggaccagtccacctgaac

SEQ ID NO: 429681 - DNA, 100 bp, Homo sapiens
gacaatgtgctctttgcccctattatggagaaaggtgttccctagcccatgcaccttataaatgggattactggcctcatgaagatgtccgtgctgaatg

SEQ ID NO: 429682 - DNA, 75 bp, Homo sapiens
tagtcgtggccggaggagtctcagagctgtcagaaagagtattgggaaagggtcgttgtggtgcatagacccaga

SEQ ID NO: 429683 - DNA, 100 bp, Homo sapiens
gagaagattctgagagattttttattcgttactatgtggatgttccacaggaagaagtgccattcagagtcaagggtccagagaaggaggagaagttgag

SEQ ID NO: 429684 - DNA, 100 bp, Homo sapiens
aggattccgccttgttggtctgaaattcatgcaacctattactatggaaagagaaagaagatctccaagccccccatcggggaaagcaaccccgacagcg

SEQ ID NO: 429685 - DNA, 101 bp, Homo sapiens
cctggtcgaccagagggagctgtacctgggcctgctctaccccacggaggactacaagtgggtaattccagaattgattggccataccattgtcactgtat

SEQ ID NO: 429686 - DNA, 100 bp, Homo sapiens
agcgtggccagtgacgtcagcaagcctgtgctcaccacaaaagtccttctggggcaggatgaggtacaacagaatagctcgggaatggactcagaagtat

SEQ ID NO: 429687 - DNA, 98 bp, Homo sapiens
ttgtctcttatttagttctggggagcgcctcgtcgacatgagtgatgtggaggaaaacaacttcgagggcagaatgcagaaactgaggcccagcagag

SEQ ID NO: 429688 - DNA, 76 bp, Homo sapiens
aacacgctgcattactgcgtggtgaagcatctggatggggaagaggatggcagcagtgatcagagtcaggcttctg

SEQ ID NO: 429689 - DNA, 82 bp, Homo sapiens
gtgtagaaccaaattcgttgtggtccttgatccagtatgcttatacagggcaattcatgatgttaaagccacagatctggga

SEQ ID NO: 429690 - DNA, 75 bp, Homo sapiens
ataccgcttcctggagttcacgactctgagtgctgttgacacttactttgacaaaggcaaatttggaagcaatta

SEQ ID NO: 429691 - DNA, 90 bp, Homo sapiens
cacagatttcagcagcacaatcaacgcaaccacagaaacaagtggtacagggactttcagttaccttgatgatgtcccatttaagacagg

SEQ ID NO: 429692 - DNA, 82 bp, Homo sapiens
cccgggggcgcagggaaggagggcgtccgagtcaacaaccgcttcgagctggaggaggcctcggtggtaccagaagaggagg

SEQ ID NO: 429693 - DNA, 100 bp, Homo sapiens
gtttcgataaatctattcgaatctttcctgtagacaaaagtcgaagcagactaagaaaaatggctttgtcagcccaacagatacccagatggtttaactc

SEQ ID NO: 429694 - DNA, 100 bp, Homo sapiens
tcttcactactgtgtcccagatcaccgccatcgaggcacagcacttgctcaagaggaaaccagggagtggttttcagagacatttcagaaagtgaaggag

SEQ ID NO: 429695 - DNA, 98 bp, Homo sapiens
tggaagaaccacaggccctggcctgccttgggccggggatttaacacagtcaccaggagactaaagtccatcaaaaacatccagaaaattaccaagtc

SEQ ID NO: 429696 - DNA, 75 bp, Homo sapiens
cctggcctcagcaacctgacaattctgtcgtgtcccgggggcaatggcggcttcctgtgttctactgcacactgg

SEQ ID NO: 429697 - DNA, 80 bp, Homo sapiens
ctttgtcagtgcacaaaatggcgccctacagcctactggtgactcggctgcaggtacattttgaccaatttaaagaagca

SEQ ID NO: 429698 - DNA, 99 bp, Homo sapiens
ctgatgggaagtgagacttgttaaacttgaaaggttttagatggagcaggattagatattgatttccatcttgcctctccagaaggcaaaaccttagtt

SEQ ID NO: 429699 - DNA, 100 bp, Homo sapiens
cgtggctctgggacgcctgccgcctgcggccgaggaacatcatcttcagcgggctatttcagcacagcaggtgtatggcgagaagagggataatatggtt

SEQ ID NO: 429700 - DNA, 98 bp, Homo sapiens
gcagtggtcgcttcttctccttggttcttgattattacagacctctttctgaaaagcccggaattggtacaagccatgtttcccaaactgaacaatca

SEQ ID NO: 429701 - DNA, 100 bp, Homo sapiens
cggcgcgaccaggccgggcacctccgagcgcaaggacagcgcgaggtccgcgcagcccagcgcagccatgcactgccgccctgcactgtagcagatgcct

SEQ ID NO: 429702 - DNA, 75 bp, Homo sapiens
tgctgggattcgcgctgctgggcacccacggagcctccggggctgattgatgaagaccctagccttgttccagag

SEQ ID NO: 429703 - DNA, 100 bp, Homo sapiens
cagttgcatcatcaaagaaggagacgtggggtcactggtgtatgtcatggaagatatgcctcttcatgttcgacgcagtagtgacccagctctaattggc

SEQ ID NO: 429704 - DNA, 98 bp, Homo sapiens
aaagagtcaacagcagtggcaacagggaatcatcgcagaagagaacaagaacctgcagccccagggagacgaggaccccgggaagttcaaggaggctg

SEQ ID NO: 429705 - DNA, 80 bp, Homo sapiens
gccagtgggggctttggatccacagctacctcaagatgaagtcattgctgtttccgaaaaggtgattgtgaagcttgaag

SEQ ID NO: 429706 - DNA, 83 bp, Homo sapiens
catggggaaaatctccccggtgactttcagaacaagttgaaatcatcgcagaaggataaagttcgtcagtttatgatcttcac

SEQ ID NO: 429707 - DNA, 100 bp, Homo sapiens
gggtggtgaacctcagcaccgagaacatctactctttcaactacaccagccagcccgaccagattggccaaaatgggaaggattggattccactctcttc

SEQ ID NO: 429708 - DNA, 83 bp, Homo sapiens
atttaaagaaaattttaaaaggaatcttggattataatcatgaggtcttatcgaatgttacttagcctccaacagtattcgag

SEQ ID NO: 429709 - DNA, 84 bp, Homo sapiens
agatggtcaggtctggagctcgaccgggccagaaagatccagattacctgaagctgtggttggacacttttgtttctagctatg

SEQ ID NO: 429710 - DNA, 75 bp, Homo sapiens
aaatggagttgccggagagacagcccagaataatccagaatggctactctgatctatgttgataaggaaaatgga

SEQ ID NO: 429711 - DNA, 100 bp, Homo sapiens
agctcatttcacacgacatgatttctttgaatctttgcatagaggtcaagatggaacttgctaaggaagaaaagtgtgaatttctgccattcctgtcccc

SEQ ID NO: 429712 - DNA, 83 bp, Homo sapiens
ccttgatgaaagaggctgcacacccctgcactatgcagctacatcagacacagatggcaagcctcgaaaaagcccaagacagc

SEQ ID NO: 429713 - DNA, 100 bp, Homo sapiens
atcaaaagcagacctcattttgattgtagtagcagtggaggccaaatttgagtttcatcatggtgactatgaaaaacagtttctgcatgtactgagccgc

SEQ ID NO: 429714 - DNA, 100 bp, Homo sapiens
gagacagacgactgggatggaccagatgctgaaattttcttctaaggagaaatatcccttatttacttttgtaaatggtcattccagagactatgatttt

SEQ ID NO: 429715 - DNA, 98 bp, Homo sapiens
caccttctggaggcaccggaaacaggcagatctggatctcgccagatgtcactactccatccagaagggagctgcgtttctgggacttggcaccgaca

SEQ ID NO: 429716 - DNA, 95 bp, Homo sapiens
gaggaccaggagcagaagaggaagaggacagagcgggatgccaccagcttgtccaaagggaagttccaggagctcctggtgggcatcgttgtgga

SEQ ID NO: 429717 - DNA, 96 bp, Homo sapiens
gagaacttacctgagatttcgtcacagtgttctggacttggtgcctctttctgttatatgctttcctatttagttgggagaccagttgtatacaaa

SEQ ID NO: 429718 - DNA, 90 bp, Homo sapiens
tgggcggtgggccccagccccacagaccagcccagcattcagagcctgccttctggtacaagatgcctgtggaatgttcggtgaagtgca

SEQ ID NO: 429719 - DNA, 101 bp, Homo sapiens
atgcggatgaactacgagctgttggcatccttgggaattcattgaagagttgctgtctcccccttttgggggtttagtggcatttgtgaaggaggctgagg

SEQ ID NO: 429720 - DNA, 83 bp, Homo sapiens
ctaaaccctattgaggatgaagcagtcatagcatctttactggaaaaaagtgaaggagtggagtcaacatatcaatggagcaa

SEQ ID NO: 429721 - DNA, 83 bp, Homo sapiens
gatgcttcagagagaggaagccgaaaacaccctgcaatctttcagacaggaagcagttcaggtacttttgaagcattctgcag

SEQ ID NO: 429722 - DNA, 98 bp, Homo sapiens
agaaagcagaagccactggagaaaaacggccaagaggcagacctaggaaatgggatctgatgcgccagtttctaagaggcctagatttccttcatgcc

SEQ ID NO: 429723 - DNA, 51 bp, Homo sapiens
caagcataatactcaccctactattgagcaggatgaagttaaaggaagtag

SEQ ID NO: 429724 - DNA, 100 bp, Homo sapiens
gagccctaacagattatatcactcggctagaggcactgcaaagacgacttggaactatacagtcaggtatttctggtggtcgcattcatatgtcagtttt

SEQ ID NO: 429725 - DNA, 95 bp, Homo sapiens
cccgcatcgttctgcagattgacaatgcccgtcttgctgctgatgactttagagtcaagtatgaggatgagatcaataagcgtacagagatggag

SEQ ID NO: 429726 - DNA, 98 bp, Homo sapiens
ctgtagagtgtatcgcagtgttgggcaacagcattattgagaaaagcccttacagaagagtgtggccgtaggtcagctattcacagtagtgaatcatc

SEQ ID NO: 429727 - DNA, 89 bp, Homo sapiens
tttctattgtattagtaactcaaaataaattatcacttcgaaaacttgctttcccacactaagattgttagactgctgttggaacgcgg

SEQ ID NO: 429728 - DNA, 83 bp, Homo sapiens
caacgacgttccatctgtggaaggacctaccaaccaggataaggaagcctgtgtgggtaccaacaatcaaagctacatctgtg

SEQ ID NO: 429729 - DNA, 90 bp, Homo sapiens
ctacggggctcggtttggctgactggggagtcggcaggcggcagatttcagaagaaagtggtagcttcctttccaagaacagttctgagc

SEQ ID NO: 429730 - DNA, 100 bp, Homo sapiens
gctttcagttctttggaattccattcttttccttattcttctgatgtggatccagtaagactttgaccccgacgcaggcttcagtgattgccgcggatca

SEQ ID NO: 429731 - DNA, 100 bp, Homo sapiens
ctggtgacttcacttttgagtgcaactgccttccagggagctgtgattggtatagacgatgaggacgacagcaccttcacaataactgttgatcagaaaa

SEQ ID NO: 429732 - DNA, 81 bp, Homo sapiens
ttgacgccatgtcgggttattcgagtgaccgagaccgcggccgggaccgaggattcttctgatgtagagcgactggaaaga

SEQ ID NO: 429733 - DNA, 100 bp, Homo sapiens
cagaggagtacttcgccacttactttaatgagaagatctccattcctgaggaggagtttttcagttatgggacaaaaatattatatcaaaacactgaagc

SEQ ID NO: 429734 - DNA, 76 bp, Homo sapiens
gcttttactgcaacttgtgcctctcattcctgccagaggtggcatctgtgaactaaaaatatgtcgtaactgcaag

SEQ ID NO: 429735 - DNA, 82 bp, Homo sapiens
cgtgcttttcgcaagaacaagactctcggctatggagtccccatgttgacaatgcagatcttcgtgaagactctgactggta

SEQ ID NO: 429736 - DNA, 97 bp, Homo sapiens
cgggttcgcacacccattcaagcggcaggacgcacttgtcttagcagttctcgctgaccgcgctagctgaatttatccagttggcgaaggactttga

SEQ ID NO: 429737 - DNA, 90 bp, Homo sapiens
cagcggctccggcagcggtagcacgagtgcgggcagcagcagccccggggcccggagagtagctccacgtttaaggacccagaaagagcc

SEQ ID NO: 429738 - DNA, 96 bp, Homo sapiens
accccacggacagcatcctggaggaccagtcagaccagcgcgtcatcatcaaggaagaagtccctcctggtgaataacatctttgtggtgtcagca

SEQ ID NO: 429739 - DNA, 98 bp, Homo sapiens
ggcttctgcttttgcaatagccacagctgcagcaggacatgggagtccaccagctattgtggacgatgaaaggctctctgcagaggagatggatgaga

SEQ ID NO: 429740 - DNA, 51 bp, Homo sapiens
ctaccccccaaagtcctggagctgtggtcgccactgggacactgtgaacca

SEQ ID NO: 429741 - DNA, 82 bp, Homo sapiens
aaatcatcaacctttctaatgaaggttacttcttgctgcagattctgcgcaggatcggagctgtgggccaggctgtgtccag

SEQ ID NO: 429742 - DNA, 90 bp, Homo sapiens
cctccggcgtcctctcccggccctctcgcgctgcactgtctctccgacgcaagactgtcccggcccgggattgccaaggatccaagattt

SEQ ID NO: 429743 - DNA, 111 bp, Homo sapiens
gaagagggtctggaggagccttctcaagaacagagaaaagaggcacagttagatgaagaaggacagtttcttgtcagaataatatatgatgactccaaaacttatgatttg

SEQ ID NO: 429744 - DNA, 80 bp, Homo sapiens
aggataccttgaggttggtgaaggtgaacaggtgaccataactctgccaaatatagaatacggactccagaattcctcag

SEQ ID NO: 429745 - DNA, 90 bp, Homo sapiens
gttttccgtggtatacgcaaaatgtgattccagtccagccgagggccctgtggtgacagcccagtacgactgcctcggctgtgtgcatcc

SEQ ID NO: 429746 - DNA, 75 bp, Homo sapiens
gctacaccccggagccaggaggggagtgcatccgccccaacccttttccccctcgtctcctgtgagaattccccg

SEQ ID NO: 429747 - DNA, 90 bp, Homo sapiens
acgcttcaagaggtctacattgagctgtttggctatgacttctgccaggtcctgcagtggtttgccgagagggtggacaggatcatcctg

SEQ ID NO: 429748 - DNA, 88 bp, Homo sapiens
ttggccaggctgtcccctgatctttaccttagtgtccccaggtgtcattgccaacccctttgcggcaggcatcggccaccggaacagc

SEQ ID NO: 429749 - DNA, 90 bp, Homo sapiens
taaggaaatttccctggacctcaagaaaactagagcatcttctaaagtactaaagagcatgtgtgagaatttctacaaatattcaaagcc

SEQ ID NO: 429750 - DNA, 75 bp, Homo sapiens
aaggatgctgaggtcaccatagcatttgattatgagtatagtaactgattcgtattttacatggagaagtgaaca

SEQ ID NO: 429751 - DNA, 90 bp, Homo sapiens
acctggagaagggatggaaatacttcaacaagatagaatgagtccatttaagtcccaggacggtggaaactagctagtagattgcagcca

SEQ ID NO: 429752 - DNA, 74 bp, Homo sapiens
ctcaaggcatatgacctgctctccaaggcctcggtgcagtttgtggaatgtggcccggccagataagatttcag

SEQ ID NO: 429753 - DNA, 75 bp, Homo sapiens
gccggccgctagcgtcagcgccagccagagatgtgctccggcatctattcgcctcatggacaacaagcagtttca

SEQ ID NO: 429754 - DNA, 82 bp, Homo sapiens
tggaaggtttcaatgacagcttaaggtgatgtccttgcaaatatcaatggtgtgagcacagaaggttttacctacaaacaag

SEQ ID NO: 429755 - DNA, 100 bp, Homo sapiens
gagcagaggccttctctagaccttgccaagatggcacagaggatgtactgagtaaagatgctggggaatgtgcaatatgccttgaagaattgcagcaggg

SEQ ID NO: 429756 - DNA, 101 bp, Homo sapiens
tctgcctgtccagccagcatggaaccaaagcggatcagagagggctaccttgtgaagaaggtatggcatttcaaatatagatacaaccattgaaggaacgt

SEQ ID NO: 429757 - DNA, 100 bp, Homo sapiens
ggaaagaagatatgacctatgcagttcgaaaactggataacactaagtttagatctcatgagattccaggagggcttcgtgtatggacctcaagcgttgg

SEQ ID NO: 429758 - DNA, 75 bp, Homo sapiens
gggttatcgcacttaagcctcggaacaactttaccagtttcagaaaccactaatgattcgataatacatgatgtg

SEQ ID NO: 429759 - DNA, 101 bp, Homo sapiens
aaatggcagtaaccctgagacaaccacttctggtggttgccactcacctgaggatgagaccagtatgatgtctgtgccatttgcctggatgaatatgagga

SEQ ID NO: 429760 - DNA, 51 bp, Homo sapiens
caacgccccggtggagaagctgaggggctggcaaggtttaattgcttatgg

SEQ ID NO: 429761 - DNA, 83 bp, Homo sapiens
cgaggcaaggagctaaagcagcgtgcgttcagccctgggaaacctctgtagaggagcaggatgcaaccgacaggctgtggccg

SEQ ID NO: 429762 - DNA, 95 bp, Homo sapiens
ggcaagccagacagctgggccggagcagccgcgggcgcccgaggggccgagcgagtctacaaataagaaacctcgaaaatctccaggtgagaaga

SEQ ID NO: 429763 - DNA, 82 bp, Homo sapiens
gttggcaacgcgacacagagccagggtccccagccccaccccagccccaaaggaggctgttcgagagggacgtcctccggag

SEQ ID NO: 429764 - DNA, 90 bp, Homo sapiens
ttattgaggaggcatgcaagagtcttcaatcatattacaaatgttttgtttcctaagtcgggagggactttgaacatgtcggggatcgcc

SEQ ID NO: 429765 - DNA, 80 bp, Homo sapiens
gaggacgcggctgtgatatacgaaggcctccccatggccacccatggaccagtcggcattcacttcctcccttctgcggc

SEQ ID NO: 429766 - DNA, 100 bp, Homo sapiens
caaggatcccagttttctctggatgacgtggccaggagtggtggctcacacctgtaatcccagctctgggaggccaaggccagtggattgcttgagccca

SEQ ID NO: 429767 - DNA, 58 bp, Homo sapiens
gagaaactggaaaagaccctcttcagacttgaacaagttcttccctgtggaacagtag

SEQ ID NO: 429768 - DNA, 78 bp, Homo sapiens
caaaccccagcacttaagcaaacgggaattctcgccaagaggtggaaacatacagaagaagcaaggaaattacagtta

SEQ ID NO: 429769 - DNA, 100 bp, Homo sapiens
cccgggcgtccgctcctcagcggatgtggcagccccgagccatggctctcgccgtccgagtcgtttattggatgctttggagtctgcaatgaagaatggc

SEQ ID NO: 429770 - DNA, 97 bp, Homo sapiens
gctgcgctgttcgtgctgctgggattcgcgctgctgggcacccacggagcctccggggctggtcgccgccctggagaggcaggtgtttgacttcctg

SEQ ID NO: 429771 - DNA, 88 bp, Homo sapiens
atgaggaccggagcggaaaaccttctgaactggattttgaagattgatccaagggactgtattaatttcaggaattgatttgaaagac

SEQ ID NO: 429772 - DNA, 98 bp, Homo sapiens
ctcagctcttccacatcccccgggttacctccctgaagctgtagggccttgtgggaagaaggtagataatgactataatgcccttcgagaaagactca

SEQ ID NO: 429773 - DNA, 50 bp, Homo sapiens
ttttcagcagagctgagtaaaacttcagggtatgagtattatagaacaat

SEQ ID NO: 429774 - DNA, 51 bp, Homo sapiens
tcctagtggaggacgcccctgtgatggagtcccactctgttgcccaggctg

SEQ ID NO: 429775 - DNA, 74 bp, Homo sapiens
tttctctccctggcttttggggcaagctacggaacaggagctgtggcgcggggccttccaggagtctgagctat

SEQ ID NO: 429776 - DNA, 100 bp, Homo sapiens
gcgcagccccgagctgggcagtgtccccagccgccatggatagcgacgacgagatggtggaggaggcggtggaagctctccagtgaagaagccaagtctt

SEQ ID NO: 429777 - DNA, 75 bp, Homo sapiens
cacccgcctgccaggcgctcgggggccgaactggccctggactacctctgcagccgaggcctgcctggagcccca

SEQ ID NO: 429778 - DNA, 98 bp, Homo sapiens
gccagcgcgtttggctgtgacctgacggagtatctggaaagctcgggacaggatgcttcaagcagtttatgtatggatgaaaaacagattacacagaa

SEQ ID NO: 429779 - DNA, 100 bp, Homo sapiens
cgccaccgtcatcaacgggcagtttgtcgaacgatgttggactcatagtcactgccagaaagcccccaaatacatcaagatgtttgtactggatgaagct

SEQ ID NO: 429780 - DNA, 100 bp, Homo sapiens
gaaggctgaggcccgtgcatttgaggaggaccaggtggcggggcgcctgaaggaggatgtgcatcccagccatcactcttccacctgctccttagagaag

SEQ ID NO: 429781 - DNA, 75 bp, Homo sapiens
gaaatctgttgcttcttgcatggggccctccagaatttccacagcatacacctggacctgttcccaacagtttca

SEQ ID NO: 429782 - DNA, 101 bp, Homo sapiens
agcctggggcggccggccaggaaccacccgttaagcaatcagaaacggagactgttcatctgtttatcccagctctatcagtcggtgccatcatcggcaag

SEQ ID NO: 429783 - DNA, 80 bp, Homo sapiens
gctgggcgtggaagtatgtatgacagaatgcgacgaggagatcattgcccctccggagcgcaaatactctgtctggatcg

SEQ ID NO: 429784 - DNA, 90 bp, Homo sapiens
ggtgcaggcaggcgctgagaaggacgcgcagtccatctctctcagagtcatcagaaattgggccttccctcgtgattcacaccactgtcc

SEQ ID NO: 429785 - DNA, 51 bp, Homo sapiens
acaggaggcagtagccaaacacccaggtcccatgatgtgaaaaatggaggt

SEQ ID NO: 429786 - DNA, 100 bp, Homo sapiens
ctttgtctgaagatcctctgggtgatcatggttcagcgctttagcctcaggaggcagctatccaagctggaaccctacatggatgagaacttcatctcca

SEQ ID NO: 429787 - DNA, 100 bp, Homo sapiens
agtggcttctgggcggaaggtacactataggctcggggaggtgcccacggtctgcagatgatgagcgaaagcatcctgtcctctgccttttctgtggggc

SEQ ID NO: 429788 - DNA, 82 bp, Homo sapiens
gatcttctcatgcacagaggcaacaaatggcaactttctgagtccaagggatgtccttcattgcagcagtactcattctcaa

SEQ ID NO: 429789 - DNA, 100 bp, Homo sapiens
gcggtggtatcggcggcagctgtgagggggttccgggaagatggtgctgatcaaggaattgttctttggcatggacacaagttcagtgggaggattagaa

SEQ ID NO: 429790 - DNA, 75 bp, Homo sapiens
gaccgcacactggatgaatggaagcgtgtgcctaccgcatgttgccgctgctgtttctgctgggacgtctgactc

SEQ ID NO: 429791 - DNA, 80 bp, Homo sapiens
agtccacccaccgccgccgcctcccaggtatctacgagaccccagcaggcaccatcctttaccatgctcatttagacatc

SEQ ID NO: 429792 - DNA, 100 bp, Homo sapiens
aaagatgagatttacctgtgagatgtttcatcccaacaggtcatgtggttatgggtaacaatgcagtctcaccctatcagcaagtgattgaaaagaccaa

SEQ ID NO: 429793 - DNA, 100 bp, Homo sapiens
gtcctctcccggccctctcgcgctgcactgtctctccgacgcaagactgtcccggcccggtttggtgccctggttgtcagatgttggaaagcagtaggac

SEQ ID NO: 429794 - DNA, 100 bp, Homo sapiens
cgccggcagagcggactgtacgacagccagaacccacccacagtcaacaactgcgcccaggaccgtgagaggttgactatagtcaatggggccaatggag

SEQ ID NO: 429795 - DNA, 100 bp, Homo sapiens
atgcagggggaaactgggccaaatgtaggccttatctccatccagctaggttgttatcgtcaggagctgtgcaaactgatgtgtgaacggctaaaactca

SEQ ID NO: 429796 - DNA, 97 bp, Homo sapiens
agcgacccagctataagttcttcttcaagtctatggacgacgatttcggtggacaacctggaccccaacttccagagcgaccagcagagcaagcgca

SEQ ID NO: 429797 - DNA, 83 bp, Homo sapiens
ctccaccgtgcctgacctgctgctgccactgatgccatggacaatattaccaggcagaaccaattctacgatacccaagtcat

SEQ ID NO: 429798 - DNA, 83 bp, Homo sapiens
gtggaattttaccttttggttcaatctttattgaaatatgggcaaaacatgtagctgagaaaaatggctacttgggccatgtc

SEQ ID NO: 429799 - DNA, 100 bp, Homo sapiens
ctggcctctgaaacactaccactgctggcgctgaccttcatcacagacaacagcctggtggcagcgatgaccacctaagaaaggaggaacagaaaagtac

SEQ ID NO: 429800 - DNA, 75 bp, Homo sapiens
gggaccctgcagaaatgggtgccggaatctgtctcctgatcatcattcaggatgtgtttcacatggtagttgaag

SEQ ID NO: 429801 - DNA, 99 bp, Homo sapiens
ggccctggcgcctgcccttccttggcaacttcttccttgtggacttcgagcagtcgcacctggaggttcagctggatgacgtagctttgccaaagactt

SEQ ID NO: 429802 - DNA, 82 bp, Homo sapiens
gagcgacaagccgctggcagccgcggatctcaccgccgctcaggcatcaagatggtgctcatgtggaccagtggtgacgcct

SEQ ID NO: 429803 - DNA, 83 bp, Homo sapiens
atcactgaggaaggggaagtgggcaaagcagaattgtggaaagcttacaaagggcttctgcttctgactacgatggagtgact

SEQ ID NO: 429804 - DNA, 95 bp, Homo sapiens
gataactttggaggaactacatcaacaggtgttgaagggaaggggcaagttcgcccaggatgtcagtcaacatccagctctgtcacccaagctgc

SEQ ID NO: 429805 - DNA, 100 bp, Homo sapiens
gctaggggaccaaggatggcaaaacgacgacagcgaccgtggcagccatgtattacagctactacatgctaccggacggcacttactgcctggcgccgcc

SEQ ID NO: 429806 - DNA, 101 bp, Homo sapiens
gccgctgcccgaatcggaaccgtcgggccgcagccgccggcaatgccgcgaaggaagggtcccagggctggtggttgctttgggtctacagctacgtctta

SEQ ID NO: 429807 - DNA, 75 bp, Homo sapiens
ggagctgagaggagctgctgctcggaccagcgcgggatgttatcaagtggctggtcaaagcagtaactgaagatg

SEQ ID NO: 429808 - DNA, 73 bp, Homo sapiens
gctcgcgtgctgatccgccagcgccatatcagcctaccacagccgctgcgtggacccctggctcactcagacc

SEQ ID NO: 429809 - DNA, 100 bp, Homo sapiens
agaactgttccttcagccaaagaaacaagccgtggaataggtgtatcaagtaatggtgcaaagcctgaaaaatatggctacacacacctttctgcaggag

SEQ ID NO: 429810 - DNA, 100 bp, Homo sapiens
atagaatcaaaaagattgaaaatatcagccatctaacagagctgcaagagttctggattgaaactcccatgatgaacatcatcccagggggagccgtggc

SEQ ID NO: 429811 - DNA, 75 bp, Homo sapiens
gccacctacagaaacaaaatgtcaacaaattgatggatgatggatggcccaggagagaatgatcctgatttgaaa

SEQ ID NO: 429812 - DNA, 97 bp, Homo sapiens
tggaagaacttaaagaaggcctgcggcaaagagatgagcttattgaggtgctgccatgcttactgagtcccttctctctccttctctatcatcttcc

SEQ ID NO: 429813 - DNA, 97 bp, Homo sapiens
agtgaaaatgcagttgatatctttgatgtgaactccatggaatggattcagactcttcctctcaaaaaggaaaggaaacagattcattgtctgtctg

SEQ ID NO: 429814 - DNA, 50 bp, Homo sapiens
ggattgtgttgtcaacaacgctggccaccagatggggttttgccgtgttg

SEQ ID NO: 429815 - DNA, 75 bp, Homo sapiens
acctgctctcccgcgtccctgagccaggccagcgccgacctggagctgcaagctttcttcctggtggcagatgac

SEQ ID NO: 429816 - DNA, 75 bp, Homo sapiens
gagcagctcctcactgtcaagcacgagctgcggactgagatcccaggcccacaaatcaacgcatcaataagcacg

SEQ ID NO: 429817 - DNA, 100 bp, Homo sapiens
cccgccgccccgcgggggagggcggagctggcgcggcccctagctttctccttctggtgtggggcccgagtactatactggcaattgctggagaagattt

SEQ ID NO: 429818 - DNA, 75 bp, Homo sapiens
ggcaaaggggaggttacgcagcaaaccatccagaagggacccagacatggagctgcgggaagaagcctggtctcc

SEQ ID NO: 429819 - DNA, 98 bp, Homo sapiens
aagaaagagccctggactgtgaagagtgaggagaccatagctgcacagccagatgcctgaaaacttcatgcctcctgttcccatcacatcaccaatca

SEQ ID NO: 429820 - DNA, 100 bp, Homo sapiens
agctaagactcccgaatacttcagaagtggggaaatggtaactgtgacatttgatgatgtggccttatatttttcggaacaagagtgggagatcctggag

SEQ ID NO: 429821 - DNA, 50 bp, Homo sapiens
aagagtcaacagcagtggcaacaggagctgtggccctcaagaatcttcaa

SEQ ID NO: 429822 - DNA, 83 bp, Homo sapiens
cagactccttctccagcatgggctcgcctgtcaacgcgcagggctcccactgcagcagctcgggggaccccgctgagtacaac

SEQ ID NO: 429823 - DNA, 75 bp, Homo sapiens
agtagctggaatgacataaaaaactctggatatatatcacggatgagaacaagttgagcagtgccaacggccatg

SEQ ID NO: 429824 - DNA, 97 bp, Homo sapiens
gactgcagcctcggcggtcagcagtggaccgtatcgtgggtctggatcaagtcactggtatgactgagacagcttttggctccgcatataaaaccaa

SEQ ID NO: 429825 - DNA, 117 bp, Homo sapiens
caatgatttggatggatgtcgaccatgtgactgtgaccttgggggagccttaaacaacaggtttccctaggacttctgcatgcccatgccacacatatcctgtggcccccagagcgc

SEQ ID NO: 429826 - DNA, 145 bp, Homo sapiens
ggccatggccaccaccagcaccacgggctccaccctgctgcagcccctcagcaacgccgtgcagctgcccatcgaccagatcgtcagtatttaaacagatcacatcatgcgtgagtacaagctagtggtccttggttcaggaggc

SEQ ID NO: 429827 - DNA, 75 bp, Homo sapiens
cttgaaggcgtatacaggaacaatattgatgatgtagtaaggttaacattcaagatggtacatgctgaagccttt

SEQ ID NO: 429828 - DNA, 74 bp, Homo sapiens
gcagattaccctgtgctgtggaagagcacccagtaggtaatagagcatatcactgcatacaaatccattcttac

SEQ ID NO: 429829 - DNA, 100 bp, Homo sapiens
tgcagtacctgcagaaggtctctggagacatcttcagcagacaccttcgacaacctggcattcatcccaagacccctaataaatttaagaagtatagtcg

SEQ ID NO: 429830 - DNA, 82 bp, Homo sapiens
ctgagtaagagtcagccagccgcggatggggagcgtgagtggcgagacaatgcagatcttcgtgaagactctgactggtaag

SEQ ID NO: 429831 - DNA, 99 bp, Homo sapiens
gggaggctgagatgggaggactgcttgaggccaagagtttgagaccagcctggtcaatatgagacgtctcagagaggctgtgcagctgctggaggacta

SEQ ID NO: 429832 - DNA, 51 bp, Homo sapiens
aaggcctaagaattttggcattgataatccatttcctaaggacaagagccc

SEQ ID NO: 429833 - DNA, 98 bp, Homo sapiens
ggggaggcagcgcgggatcccagcctcaggcgtgcgcggacggtgtgcgggatctgccactgtgaaggagatgatgagagccccctgatcaccccctg

SEQ ID NO: 429834 - DNA, 90 bp, Homo sapiens
atcgccatcacccgcaacccggtgttcccgcgctttatcaagattatcgaggccgtcacagtcaaagaagcactttccaccaaagcccgg

SEQ ID NO: 429835 - DNA, 89 bp, Homo sapiens
tggctggtctcctactcccagatgcatccgtgtcaaaactggcgatggaatatgagaggagccctctggaaagaaaaggacagaccctg

SEQ ID NO: 429836 - DNA, 74 bp, Homo sapiens
cagacgaagcccctcaccctggagcgcaccatcaacctgtttactcctggcttgggggcattaggaagcactgg

SEQ ID NO: 429837 - DNA, 80 bp, Homo sapiens
ccgagacatccgctccttgcccgagaacatccagtttgatgtttactacaagaagactggactttatgagtataaagtct

SEQ ID NO: 429838 - DNA, 96 bp, Homo sapiens
attatctggaccctaggatcacagtggcttggttggcccagcacatcacctatgtgcaccagcacagccggcagcccccctcccagtttgaacctc

SEQ ID NO: 429839 - DNA, 50 bp, Homo sapiens
aaagtgcgattgtggaagctgctcggaaacctgctcctccaaagccagag

SEQ ID NO: 429840 - DNA, 98 bp, Homo sapiens
ccggccaagcagttcatgagacaagctgcctaccaggttcaattcaactcagacttcataagaaagccaaagcctggttttatgattgcagccctcag

SEQ ID NO: 429841 - DNA, 96 bp, Homo sapiens
tcattgttccactggacgctcatcagagggaagatctttttcctcaattgaaatcctgccagaaacctgtagacaaatatatcgagtatgatcctg

SEQ ID NO: 429842 - DNA, 112 bp, Homo sapiens
aaatgctggagcatccatgtgcttggccatgttagcagtagtgtcctgtgagatacctcttccaaatgcatgatgaagatgttctcatcaacaggacaaggcaatacagaag

SEQ ID NO: 429843 - DNA, 100 bp, Homo sapiens
tgtatttatcactgccttcttgggaattgcttcgtttgccattttcttatggagaactgtccttgttgtgtctgcttttggggcagagttttcatcggag

SEQ ID NO: 429844 - DNA, 99 bp, Homo sapiens
aacgagacggtggagactctcatggctggggaagttagtgccatggttgggcttcgtgggacacatatgcaacatgcctatgatttttacaagcctgat

SEQ ID NO: 429845 - DNA, 100 bp, Homo sapiens
ccataagaaacaaggtgctggatttctccgttgtgttcatctttttccagtgccatcaaccacctcaaagacactggttcaacagcttgcacaactacag

SEQ ID NO: 429846 - DNA, 74 bp, Homo sapiens
ccacgtgcagacatctacaaccttcgatctcctgacgaagccagtggcagccccagctgcagcagctacgtgac

SEQ ID NO: 429847 - DNA, 113 bp, Homo sapiens
aaccattccgatgcaaactctgctccttcaagtcctcctataacagccggctgaaaacacatatactcaaagctcatgctgtgacttttttgaacgaaccattctgtgcaaca

SEQ ID NO: 429848 - DNA, 73 bp, Homo sapiens
cgacgccgccaaattacactgctccgacagtaagaatgattgatgttggctgatattggagtgctcattcaca

SEQ ID NO: 429849 - DNA, 75 bp, Homo sapiens
ttcctccaggactatactttattgatcaacatccttcatagccttcctaatgatggtgatgaaaaatatgagaag

SEQ ID NO: 429850 - DNA, 100 bp, Homo sapiens
tcaagaaatgtcaggagagggatttccaatatggatacaaccaaattctttcatggacggaacccccagaaacaggcccggacctcctcctctaccaccc

SEQ ID NO: 429851 - DNA, 82 bp, Homo sapiens
ccaagaaggaagtcatcatgggccggcctggaacaggccctcagtctccgaggaggatctcaaggtcctgttttccagcaat

SEQ ID NO: 429852 - DNA, 90 bp, Homo sapiens
gccactgtgagaatgacacaaccatttcctacacagtttgcaccccagtctttcccagggaactccgatgaagtgttccaacaaaatgag

SEQ ID NO: 429853 - DNA, 101 bp, Homo sapiens
tacaactcatgcccagcagcagcaagcagacattgatcgccctaaaggactggcattcactgatgtggatgtcgattccatcaaaattgcttgggaaagcc

SEQ ID NO: 429854 - DNA, 50 bp, Homo sapiens
ttcattgctccttcaggacatgggccacagacctccaccagcacgaagtg

SEQ ID NO: 429855 - DNA, 100 bp, Homo sapiens
tgttgtgaggactaagggtgcggcagtgcctggtacatggttgactatagtcaatggggccaatggagccaagtgtatggaaacccacaacagtatggac

SEQ ID NO: 429856 - DNA, 99 bp, Homo sapiens
gactcagatccaagtcaacagtacacagggaatatggaggttctgcacctgtatggaagtgaggaacagaagaaacagtggcttgagcctcttcttcaa

SEQ ID NO: 429857 - DNA, 82 bp, Homo sapiens
tcttcggtggactccttcggcagtccacccaccgccgccgcctcccaggtcttctctgttggttgaaatgtctatgatttta

SEQ ID NO: 429858 - DNA, 99 bp, Homo sapiens
ggtgaggtcacattcggttatctctaacgttggaaaacgattcttggtgccaccattgagaactccaggattgtcctgcagatcgacaatgcccgtctg

SEQ ID NO: 429859 - DNA, 75 bp, Homo sapiens
cgccgctgctcccggaccgggccgcgcacgccgcctcaggttttgagcaaaattttggactgtgaagcaaggcat

SEQ ID NO: 429860 - DNA, 82 bp, Homo sapiens
acctgggctgggaacccgcggtggagcgggacacgaacgtggatattagaaatggctactccccagtcaattttcatctttg

SEQ ID NO: 429861 - DNA, 86 bp, Homo sapiens
accctggagcctcagttggaagcagccgatccagcctgcggagcctgtggggcagttgcatccttaatgtccagtcaaggagtggt

SEQ ID NO: 429862 - DNA, 100 bp, Homo sapiens
ggggcagaggagcggagttgaggcagaagccagctattgacctgaaaagtggttctggaaaagtgtaccaaggccctgcaaaaggtgctgctgatacaac

SEQ ID NO: 429863 - DNA, 100 bp, Homo sapiens
ggcagggtcttgctggttctgatgttcatgaccctccttcactttgacgccagcttcttttctgcagtgaaaaagcagtctggctcccgaggtccacccc

SEQ ID NO: 429864 - DNA, 100 bp, Homo sapiens
gtttgatttagtggattacaaaaacttttcagttggttgaatctggcgatgtggaacccatggatatggagggctgactatatacaccatgttttttcct

SEQ ID NO: 429865 - DNA, 74 bp, Homo sapiens
gaccatttggtttggtcatcaatctgaactacaaagatttgaacccccctacagaagctaagcagcatggaccc

SEQ ID NO: 429866 - DNA, 100 bp, Homo sapiens
atctgatctcctgccttgagcaaataaaagagccctggaatgtgaagagacatgagacagtagtcaaatactcaggaaagaccacagcaagattctttca

SEQ ID NO: 429867 - DNA, 100 bp, Homo sapiens
tacaattagaagctgagaaaaaagcattctctgaaaaccttgatcctgagctgggctcaaaatgcagagaactcaaagatattcatttcggccagtgtta

SEQ ID NO: 429868 - DNA, 100 bp, Homo sapiens
aggactggggccacgtggagctgctggagggcaaggtgcccggcgacgactgcccgctggtgtggggccagtgctcccactgcttccacatgcattgcat

SEQ ID NO: 429869 - DNA, 75 bp, Homo sapiens
cgagcagcagcctacatgaagcgcaagtgccatccagtccaatggatcagatgggcaagatgagacctcagccat

SEQ ID NO: 429870 - DNA, 51 bp, Homo sapiens
gagcgcgaatatcgtcatcgttagaagtgtgtccccgagaaagtgtcagag

SEQ ID NO: 429871 - DNA, 93 bp, Homo sapiens
ctgttggcttcacccttggagcggcttttgtctacttggctgacctcctgatgcctcacttgagaaccatggagtctggcagtaccgccgcca

SEQ ID NO: 429872 - DNA, 74 bp, Homo sapiens
agtgtctccagcatcctgcaagtggaagataaggctttcaagcagaaacaaaaagaggagcagaagaaactcga

SEQ ID NO: 429873 - DNA, 73 bp, Homo sapiens
tgttacatgtaaagctgtcctcatttgtgactatggacctatggagttgggcgtcgattagcaaggtaaaagt

SEQ ID NO: 429874 - DNA, 83 bp, Homo sapiens
gtactcttcagggatgagtcatgtggcagtggaaaatgcgctcgggctggaccagcaggaatgtgggtgccggcaggacaggc

SEQ ID NO: 429875 - DNA, 87 bp, Homo sapiens
aagctctgcctctggagtttcgggttctctggaacccagcgggtgccgcttctccacccgaggcttccacctccaacgagccatgtt

SEQ ID NO: 429876 - DNA, 50 bp, Homo sapiens
catatccagagctgcaatttatattttcaactccaggccatccaaaaatg

SEQ ID NO: 429877 - DNA, 104 bp, Homo sapiens
agagtaaagcaaagagaaaggaagcaggcccgttggaagtggttgtagctgtaggtaaaacttgcctactgatcagttacacaaccaatgcatttcctggagaa

SEQ ID NO: 429878 - DNA, 100 bp, Homo sapiens
cgctcctagtggacgcagaggcgggccgaggacgctctgcttatgataatgtcaacaaagttcgagtagctatcaagaaaatcagcccctttgagcacca

SEQ ID NO: 429879 - DNA, 100 bp, Homo sapiens
ctccgctgggagccgcagatcagtccaagttgacggacaggaggcgaaatgtgcaaatgtttatgggtacatgtcccagagcaagcacacggaggcccgg

SEQ ID NO: 429880 - DNA, 84 bp, Homo sapiens
acaagtaccgcctgggacggaagatcgggagcgggtccttcggagatatctacctggattggcggcagtaagcacacaatgaat

SEQ ID NO: 429881 - DNA, 75 bp, Homo sapiens
caccatggcaatgggcagttcaccgagaagcgggtgtatctcaacagactctaaaatagagctcaagcttgagaa

SEQ ID NO: 429882 - DNA, 101 bp, Homo sapiens
caactacctgtgccacctgtgcttcaacaaaggacactacatcaaggactgcccccagatcgtagctggggtgaactacttcttggacgtggagctgggcc

SEQ ID NO: 429883 - DNA, 97 bp, Homo sapiens
aactttatggagccctgttatggcagctgcacggagagacagcatcattactacctcagttacattgaggaatgtacataccgagcatcaaatatta

SEQ ID NO: 429884 - DNA, 75 bp, Homo sapiens
agcatcgttaaagtctctcttcaccctgccgtcatgtctaagtcagaggtctggccgtgggcctgggcttcgggg

SEQ ID NO: 429885 - DNA, 98 bp, Homo sapiens
tggtggatgaagttgttcattgtttgtcaccacaaaaaggacaggttaatttggagtggcccctggagtcagtttcctacaccatccgaggccccacc

SEQ ID NO: 429886 - DNA, 75 bp, Homo sapiens
ggcggccaggtccctgctgaatcacacgccgccatccgggaggcccagggaagggctcattgtcatccccaagcc

SEQ ID NO: 429887 - DNA, 50 bp, Homo sapiens
cggcctgggagaagcagcagcgcaagtgacatgggctcgagggttggcta

SEQ ID NO: 429888 - DNA, 90 bp, Homo sapiens
gtaactggagcgatgattaccaatgcccagcctacagagtctgagaaggaaatttataatcaggtgaatgtagtattaaaagatgcagaa

SEQ ID NO: 429889 - DNA, 100 bp, Homo sapiens
agatgagcgaggagacggcgacttctgacaacgagttgctgctccaagatagccaaaatgtggaagcactgagaatgcaggcactctactatgtgtgtag

SEQ ID NO: 429890 - DNA, 98 bp, Homo sapiens
caaccctgtaaaaccagccttagactatttttcaaacagaactgcaagcacatgttgaccagataactgaaatggcagcagtaatgaggaaagccatt

SEQ ID NO: 429891 - DNA, 100 bp, Homo sapiens
ccccgaggctccacccgaggacggctgggagaacttcatgtgtgagaggctgggtgagctcattcagttcctgatctcactggtgcagtcaaaccggatc

SEQ ID NO: 429892 - DNA, 114 bp, Homo sapiens
ggtgctggtggcggcggcgctttcggcgcgggcccgggccccgagcgcccgaacagacgcaaacatgcagatctttgtgaagaccctcactggcaaaaccatcacccttgaggt

SEQ ID NO: 429893 - DNA, 103 bp, Homo sapiens
aagaaaaatctgaggttatcaatgacgagccaccaaccgctaaaatgcacgccatcatcgagcgcacggccagcttcgtgtgcaggcagggagcacagtttga

SEQ ID NO: 429894 - DNA, 95 bp, Homo sapiens
cacagataatgaagactttccatcaagtgaaagatgtcatgtatatctgcccatttatgggagcagtgagtggaaccctgacagtgacggacttt

SEQ ID NO: 429895 - DNA, 100 bp, Homo sapiens
gagacggcggcggccgaaagcggagagatgctgggcgtggcggccgggatgacccacaggcattaactgaacgtctggatgctcttcttctggaaaaagc

SEQ ID NO: 429896 - DNA, 83 bp, Homo sapiens
ctgactttcagctatggaatcgggtaacaagatgctcaactatagtgctcccagtgcagggggttgcctgctggacagaaagg

SEQ ID NO: 429897 - DNA, 73 bp, Homo sapiens
accaaccggccgcctctgtccctttcccggatgcgggtacagcaggccgcgttgcgggccgcccggctccggc

SEQ ID NO: 429898 - DNA, 99 bp, Homo sapiens
agactgattcagaccctgaacatcgccgagtttcggctcaacttgacgataatgctccagcaggagaagacagacacggtccgctgcatcaagtcctgc

SEQ ID NO: 429899 - DNA, 100 bp, Homo sapiens
gagccagatttcacctctgcaaatatgagagattctgcagaagctgacagccacagcaccaggtcggcagcaggtgcgggaccagggagcctacctgatc

SEQ ID NO: 429900 - DNA, 82 bp, Homo sapiens
gctggctgcacccgcctccgcgctcgtcaggcccatggacagaccttcacgttcccagatctgtttcccgagaaagacgaga

SEQ ID NO: 429901 - DNA, 100 bp, Homo sapiens
ggaacgagagcgcgaagctaaggtatctcagatgaagacatcatcaacattactcttcctactggagtccccattcttctggaattggatgaaaacctgc

SEQ ID NO: 429902 - DNA, 100 bp, Homo sapiens
gataagggcgacagcaacagctctgccggctggaagggtttcgaaaaaacgatgaaatgaaagctatggatgttttaccaattttgaaggaaaaagttgc

SEQ ID NO: 429903 - DNA, 114 bp, Homo sapiens
ggatttgtctgaattggcaaaagctgctaagaagaaacttcaatctattagtgtgagccttgccaaagatgagcctgacacaaatctcgtggccttaatgaaggaagaaggggt

SEQ ID NO: 429904 - DNA, 99 bp, Homo sapiens
cattcagtggtgtcgaatgctcaagtgcaatgtcaagagctttctgggcatgttatttgaaagcaattgagacgcaaccgaactttgcagtagcttgga

SEQ ID NO: 429905 - DNA, 101 bp, Homo sapiens
gaaacggccacacggatgccatggttacttttgccacgattgaaaatcttcaagagcagcttagagacaaggaaaagcagatgagcagcttgaaagaacgg

SEQ ID NO: 429906 - DNA, 74 bp, Homo sapiens
cctggacacgcagtacagcaaggcacgtgtggttctcaaatataggcattctgatgggaacttgtgtgttaaag

SEQ ID NO: 429907 - DNA, 135 bp, Homo sapiens
caatgcagccaacaccatcctgaggcaactggacatggagttgatctctctaaaacgtcaggtttttaaagacaattgttgcaaaagagaagtcctcaacttatatgtatattgcagcaatgctcctggatgtaa

SEQ ID NO: 429908 - DNA, 97 bp, Homo sapiens
ttggttgcagttgtgtagtagttaaggtgagagaacgccgagccgtcgccgcagcctccgccgccgagaagcccttgttcccgctgctgggaaggag

SEQ ID NO: 429909 - DNA, 75 bp, Homo sapiens
tttgtggaatgaaaaggaagtattagaaatgagctgaagaccattcacagcaactcttatctaaatgcccctgga

SEQ ID NO: 429910 - DNA, 98 bp, Homo sapiens
tgggtggtctggagaccatggagaccctcacggagctgggcgacgagctgaccctgggagacatcgacgaatgatctttgctgagtgttcccccaaca

SEQ ID NO: 429911 - DNA, 73 bp, Homo sapiens
agtggtcgcttcttctccttggaatatatatgtcccagatgtgaatcaggctttattgaagaagtgacagatg

SEQ ID NO: 429912 - DNA, 100 bp, Homo sapiens
tagtattaacaaaagatatacaagaaggagatacattaaatgcaatagcccttcagtactgttgtacggttggtcaaagaaaaagtgatgtatgaaaaag

SEQ ID NO: 429913 - DNA, 90 bp, Homo sapiens
agcagcgggagccaggactaaggacaagcaggagctgggagccccagctacctgaacgacctggagcgtattgcacagagtgactacatc

SEQ ID NO: 429914 - DNA, 74 bp, Homo sapiens
cgtagcctgccactccgtgcgctgcacgtgggaatttggagccatggtgaactacatcaagaagacatatcccc

SEQ ID NO: 429915 - DNA, 100 bp, Homo sapiens
ggctattggaaggaggagattctgaagataaggaggtttctaagcatgaattgaggaacagaagaagcagagcagatgatcggagcagcatttgtttctc

SEQ ID NO: 429916 - DNA, 87 bp, Homo sapiens
ccagccatggcttccctggggcagatcctcttctggagggaagaggaagaacgtctgagaaataaaattcgagctgatcatgagaag

SEQ ID NO: 429917 - DNA, 74 bp, Homo sapiens
gtttgatccaaagaccagagacgtcagccttataatcagttggctatcttagcttcttccaaaggagaccatct

SEQ ID NO: 429918 - DNA, 100 bp, Homo sapiens
cccaggtgtaagcgcagaaagcaggcgaacccgcggcgcaataacgctggtactcctggttaatcaacagcttcgtcaacggtgagtccatgtgcttccc

SEQ ID NO: 429919 - DNA, 98 bp, Homo sapiens
acggcgtggaccacatagacatttacgcggatgtcggcgaagagttcaaccaggtaacttacgacctatttctccgtggcgttggctgttttctgttg

SEQ ID NO: 429920 - DNA, 86 bp, Homo sapiens
acgttgtggagatggggagcgtcctggggctgtgctccatggcgagctggccgttggacataccagatggtcgaagagctccactt

SEQ ID NO: 429921 - DNA, 75 bp, Homo sapiens
catgagcactgcagcgattgcgagaatgaggaggacaacagctacaaccggggggggaacacacctgaaactaga

SEQ ID NO: 429922 - DNA, 75 bp, Homo sapiens
gtcggcctcaacatgaatggctactttcacgtggaggacttgaagtctcagctggtggcccaggatgactcccag

SEQ ID NO: 429923 - DNA, 100 bp, Homo sapiens
ttctgaagaagtggctgtagggagcatagctgctacactgaagatgaagcaaggcccaatgacccaggcggttagtggttacttggatgattgtacctgt

SEQ ID NO: 429924 - DNA, 101 bp, Homo sapiens
agagagagttccaacacacattgtagattactcaggtatgcccccacctgttccacgtcctggaattcctccaatgactcaagcacaggctgtttcagcgc

SEQ ID NO: 429925 - DNA, 74 bp, Homo sapiens
ctacctgacaatgaagttcactgggacagcattataattcaggcaagcacaataaagatcatacatggaagcga

SEQ ID NO: 429926 - DNA, 98 bp, Homo sapiens
cctctggaatcacccgggtcgctgttcctgagccgaggaggagctggtggaggctgacgaggcgggcagtgtgtatgcaggcatcctcagctacgggg

SEQ ID NO: 429927 - DNA, 83 bp, Homo sapiens
tggatgacaagactgcatctcccatcattttgcatgagaataatgaaaactctctgcagaggaattagagcgaaaacggcaag

SEQ ID NO: 429928 - DNA, 100 bp, Homo sapiens
aacaaccagatgacggctgaaaaattcctttaaaaagccagagagttctggaagagaatcaagaacattatcatatagttcaaaagtttcttatcctggg

SEQ ID NO: 429929 - DNA, 83 bp, Homo sapiens
ccgctgccgctgccgcacctccgtagctgactcgattgacgagatgcctgaggctgccgtgaaatcaacagccaacaaatacc

SEQ ID NO: 429930 - DNA, 82 bp, Homo sapiens
cttgaacattccgaaactgtcaagattggcaaggtggtgctgtcccggcagtacggctcggagggccgcttcacgttcacct

SEQ ID NO: 429931 - DNA, 99 bp, Homo sapiens
agctccggtggaatgccacctactttgactatgcggcctcactgcctgaggacgacgtggactacaccaaaatgaagtttaatccctttgtgacttccg

SEQ ID NO: 429932 - DNA, 75 bp, Homo sapiens
atcttccccattttctagtccagaaacttcaaggtactacgagatgtcctacggcttgaacatcgagatgcacaa

SEQ ID NO: 429933 - DNA, 100 bp, Homo sapiens
atgagcagcatgtcagaccagaccgtccgggtgaagagacttcagatggattttaaaattgaacacacttgggatggttttccagtgaagcatgagcccg

SEQ ID NO: 429934 - DNA, 73 bp, Homo sapiens
aggagaacctggagctcaacggcagcatcctgagtgatggcccactgcgtgaccttggttcagctgtccattt

SEQ ID NO: 429935 - DNA, 89 bp, Homo sapiens
gtcatacttctttaactataatcttcatagtagtgtatttatttggcgctgtgttacaggtgatctgtgaaaatggttcgctattcact

SEQ ID NO: 429936 - DNA, 75 bp, Homo sapiens
tccctgggctcttccgcgggcgcccgcgcgctgcccttcgcttgagagccctatgagtttgtctctctggaatgg

SEQ ID NO: 429937 - DNA, 100 bp, Homo sapiens
atctggatcaaggtgctggccatgtcccagctggtggaatgcgtccccaacttttcggaggggaagaaccaggaggtggccctcaggccagcctgagcac

SEQ ID NO: 429938 - DNA, 127 bp, Homo sapiens
atgtttttctgttttgcctgaatacatgatttaaacaagagatttccacagaagtgtgaagcctcagtttaggtcatctggtggttcagaacactcaacagagggctctgtatccttgggggatgga

SEQ ID NO: 429939 - DNA, 76 bp, Homo sapiens
gaacatgtaacaagaatccaaagaaaacaaaatggtggtatcatgacgaagttatacggaagcgtctcctcattga

SEQ ID NO: 429940 - DNA, 100 bp, Homo sapiens
ggccttcagccccagtttacctgactctagggacagagaagatcagctgcagacaactgaggaatcctttgcaaaggagttgaggagtgctgaaacaatt

SEQ ID NO: 429941 - DNA, 100 bp, Homo sapiens
tgtcaaaaaacaagggaccttccaaggcagcttctgatgatggcagcttaaagagttccagtgtgagccactgccccatgttgtgttgatgccaatctgc

SEQ ID NO: 429942 - DNA, 49 bp, Homo sapiens
taggcggccatggtccaaccttgaagttgtgtcagtctgtgatgcctgc

SEQ ID NO: 429943 - DNA, 82 bp, Homo sapiens
tcatgattctttggctcaaaggagttgtatttagtgtgacgactgttgacctgaaaaggttggaagcgagatagagaaaaaa

SEQ ID NO: 429944 - DNA, 100 bp, Homo sapiens
gggagcccgggacccccgggggcgcagagctgagctcaatgtgcagcaatggatgacgacagcctggatgagcttgtggcccggagcccagggccggatg

SEQ ID NO: 429945 - DNA, 103 bp, Homo sapiens
ctccaccacctgcccggcgcagagaacctgactgagctgcttcatatcctgaacgctgggatcccccaggacattccctggcccccaggccccaggtcccagg

SEQ ID NO: 429946 - DNA, 100 bp, Homo sapiens
agccgcggagcctccagacgggcatgagccatgagcccaagtccccttcgctagggatgctttccaccgcgaccaggaccaccgccaccgtcaaccccct

SEQ ID NO: 429947 - DNA, 97 bp, Homo sapiens
gttgtcaccaacgtgactgtgaaggcacgagtgtggaacagcaccttcatcgagggaaggaccccacgccctccatgctgggcctctgcggctccct

SEQ ID NO: 429948 - DNA, 100 bp, Homo sapiens
catgtttgtcctgggaaccggagatgagcctcctgcaaagcagagagcagaggttcttcagtccacgcaacggttcttctctgaacagcaacagagcaaa

SEQ ID NO: 429949 - DNA, 90 bp, Homo sapiens
gcacagtgagctcgtccatgtgcacgcggagctgctcagaaagaggcatttcatccttcatgaagccattcaggattttgaattgcatat

SEQ ID NO: 429950 - DNA, 82 bp, Homo sapiens
cggcgaacgcggagagcacgccatgaaggcctcgggcacggcagcggaggaggagaaagagatggacctcccggactcggcc

SEQ ID NO: 429951 - DNA, 83 bp, Homo sapiens
aaccccagcaggatctgcatcgtcatcgagccggcccagcttctgaagggagatgtcatggcataatcaccagcaacacccgg

SEQ ID NO: 429952 - DNA, 100 bp, Homo sapiens
catgagtgctataagatgcgactgctacagggaccatgggacactattacgcaacagggtggagagattcaaccagttagcgtgaaagttggagataaag

SEQ ID NO: 429953 - DNA, 51 bp, Homo sapiens
gttaaggattccaagtaactcttatttgctcttcagtaggttacctgcaac

SEQ ID NO: 429954 - DNA, 98 bp, Homo sapiens
gccaaggcgtccttctcctcgaggctgggcagccttgtccgcggcatcacagccctcacctccaagcactgaacagcagagctgaaatggaaattggc

SEQ ID NO: 429955 - DNA, 101 bp, Homo sapiens
tgaaggagtctatgtctgtgtagcaaggaattaccttggagaggctgtgagccacaatgcatcgctggaagtagccaactgctgatcttggacttgatatt

SEQ ID NO: 429956 - DNA, 83 bp, Homo sapiens
ggggaagtgactgggcggtgccggcgccggagacgatgccgttctcaccatggatgatgatatcgccgcgctcgtcgtcgaca

SEQ ID NO: 429957 - DNA, 80 bp, Homo sapiens
accgagacggcgatccgggcgctcgagacttaccagagccacaagccccaccattgctctctctgtcttcagttccccag

SEQ ID NO: 429958 - DNA, 75 bp, Homo sapiens
gcaagagggagttaaggacattccaggcagaggcaagctgggctcaaaatgcagagaactcaaagatattcattt

SEQ ID NO: 429959 - DNA, 87 bp, Homo sapiens
gagaagcgcagcgacggcgtcgggagagcgcgcctagccggctcgcgaacaatgcagatcttcgtgaagactctgactggtaagacc

SEQ ID NO: 429960 - DNA, 76 bp, Homo sapiens
gatccaagcaattttgccaacttcagtgctatagaagagtgatggatgtcatttctcgttcacagctttacttgga

SEQ ID NO: 429961 - DNA, 98 bp, Homo sapiens
ctcagcctcttgagtagctgggattacaggggctgctgggctggaggttgaggatcttcacgaaaaacatattaaaacaaacccagaagaactgagag

SEQ ID NO: 429962 - DNA, 75 bp, Homo sapiens
tggccctcttgatccccggcttgctgaagtcaaaggccgtgggcaagacctgccttctcatcagctacaccacca

SEQ ID NO: 429963 - DNA, 83 bp, Homo sapiens
cctcgctggtggcgctgctgggctcggctttccagctgtgccgcggtcttgaggaccggcccagctcaggctcctggggcagc

SEQ ID NO: 429964 - DNA, 73 bp, Homo sapiens
atgaatctctgttccaaatgctttgctggtgaggcggaaccaaccctcctggccatgggaggggccgtggtgg

SEQ ID NO: 429965 - DNA, 90 bp, Homo sapiens
aacttcccctattacaagaatgctggcattggttggaaggtggttggaggcaaagtaaagaagcccggtaaacgtggtcggaagccagcc

SEQ ID NO: 429966 - DNA, 51 bp, Homo sapiens
acgacgacgtgcggacgcagcggcgggggcatgagaccaagaataactggg

SEQ ID NO: 429967 - DNA, 90 bp, Homo sapiens
ctgaaaagtctaaatatatcaactaaagtagctttgtgtaaggcaaacattggtgggcaccgatcttcctgttcattctgcaagaaccca

SEQ ID NO: 429968 - DNA, 100 bp, Homo sapiens
tgctttttctaactatttcaagatgatatttattcaccaaacaaggaggcgattatgcagccccttgatcataagaatctggatatggatgtgccatact

SEQ ID NO: 429969 - DNA, 96 bp, Homo sapiens
ctcctgcgaggcctcccgggctccgggaaaactacactggccagccatgaaccagagaatcagtcagagtgctccagtgaaacagccaccacccct

SEQ ID NO: 429970 - DNA, 75 bp, Homo sapiens
tttcaaaatggccctatgcttagggtctcctttacagaaaggggcttggataaggaggaaagaccatcagaagaa

SEQ ID NO: 429971 - DNA, 83 bp, Homo sapiens
gtggaattttggagatattcaaagatgtcatgtggcctgtgttttggaccgtggttcgtacctatgctccttatgtcacattc

SEQ ID NO: 429972 - DNA, 75 bp, Homo sapiens
ggatcccggccaccagcaattgtccgaaagcgtggatacccatcaacgaagttttgatattggaattcagattgg

SEQ ID NO: 429973 - DNA, 96 bp, Homo sapiens
gcttcagaggcccaaattgaggcgcaatgatgagaggatgtggtggtctactctgatgtcaatcttgagggctagaggacaagtcgtacaatggtg

SEQ ID NO: 429974 - DNA, 75 bp, Homo sapiens
cgaaaaaccttgtcataaactgtgaagtcttcgaccctcagtggccttatggagacatttgcagcatcagccctg

SEQ ID NO: 429975 - DNA, 80 bp, Homo sapiens
aaccagaaatccgtctacagtctgaaataaatcttctcaccttggaaaagaaatggcaacatatcttcgttatgtaagaa

SEQ ID NO: 429976 - DNA, 73 bp, Homo sapiens
gagctcaagcccaagaagaaagtcttcgagaagttgcaggcaacaaggacctttcatacagggcagccacacc

SEQ ID NO: 429977 - DNA, 90 bp, Homo sapiens
ccacttgattacccgttaagtcccccaaagatgagatttacctgtgagatgtttcatcccaacactttgcagttcctgaccccttaatgc

SEQ ID NO: 429978 - DNA, 75 bp, Homo sapiens
gagctccgggagaacgggatcaataggctacggaaacaggccgagaagaacgtggagaagaaaattgacaaatac

SEQ ID NO: 429979 - DNA, 75 bp, Homo sapiens
gggaagcccaagcacctgggcgtccccaacgggcgcatgtggaccgcatcatcggcctggaccaggtggccggca

SEQ ID NO: 429980 - DNA, 83 bp, Homo sapiens
acacgccccgcgctgctgggtcccgccagacacgccgccgccgcagcaagagtgagccatggagctacgtgtggggaacaagt

SEQ ID NO: 429981 - DNA, 73 bp, Homo sapiens
gcggcgtgggcatgggcatgtacaacaccgacgagcatctgcaggaagccctaggactgcctgctgggagggg

SEQ ID NO: 429982 - DNA, 83 bp, Homo sapiens
gggaaccctggtcaccgtctcctcagcggtgcagaggggcaggatgccgccgacccagccgacccacgggcagttcgcgctga

SEQ ID NO: 429983 - DNA, 75 bp, Homo sapiens
gagtggcgggccgctgaataagcttccaaaatgatgacgtccttctatggccgcttcaggcacttcttggatatc

SEQ ID NO: 429984 - DNA, 101 bp, Homo sapiens
cagagcattcaagggatggtgaaatggatgatagtcgagatttggagtcaaaaacgtatgagaccaaaaaaatattttcagaaaatgatatttttgaaata

SEQ ID NO: 429985 - DNA, 75 bp, Homo sapiens
cccagtgaccccaggctttttatggctgtgagacacgttaaaatttcaggattagcctgaggcctgctcagtcgt

SEQ ID NO: 429986 - DNA, 100 bp, Homo sapiens
agttgttgccgaagagattggactgggagggcaacgagcacaacaggagctacgaggagttgtggtttgtcacctggagggcagtggccagtggccacag

SEQ ID NO: 429987 - DNA, 107 bp, Homo sapiens
gcagctatcgtggacgtcactggccctggtggggattgacagccacgggaagctcctgtccaaatatgacccccagaaggaggcagagctccgcacctggatcgagg

SEQ ID NO: 429988 - DNA, 75 bp, Homo sapiens
gcatggaagacgcagcctggccgcgctctcccagtgtggatgaggtcaccattgtcaacattttgaccaaccgca

SEQ ID NO: 429989 - DNA, 100 bp, Homo sapiens
ctgagcttgcacttaacgtaatcacattctccatctcctattgctgcaagaacactgatattagtggctaaatctgtgcagaacttagcaaatcttgtgg

SEQ ID NO: 429990 - DNA, 100 bp, Homo sapiens
caacttctatgtcgttgatcaaggggaagtggatgccaccagcccctcgggttccaagatgcagctactggagacagagttctcacacaccgtgggcgag

SEQ ID NO: 429991 - DNA, 100 bp, Homo sapiens
ttatcacaagacaaaaccagacttaaaaagtgtcatattgctgttggatctcctgcaaaccagtccagctacgggggcccagccagccagcagctgagtg

SEQ ID NO: 429992 - DNA, 82 bp, Homo sapiens
cagtgttctcgacttcgtcgctggcaacagagatgcttatttttggaaagaagttaacagcgggagaggcatgtgctcaagg

SEQ ID NO: 429993 - DNA, 99 bp, Homo sapiens
tcattcctgcagatgaaaaagtgtgacttggcagctggacgtgctgagaagcaacctggtgcaggtgaaggtggagaaagaggcttcctgtgatgagag

SEQ ID NO: 429994 - DNA, 90 bp, Homo sapiens
ctggaatttgccattcagcccaatacaactggcaaacaactttttgaccagcaagaagtggtggagaaatatgaaatctatggagactca

SEQ ID NO: 429995 - DNA, 82 bp, Homo sapiens
gggtcattatgaccagagtattgccgcggtggaaatggaggtaaaagagaacctgctttcatgcaagatgctgctgcactgc

SEQ ID NO: 429996 - DNA, 99 bp, Homo sapiens
cagagcttgtgtagcgtcagatccttgagtgataaaggagtagaggtgatgcaggttctgaatgctgatgccattgttgtgaagctgaactcaggcgat

SEQ ID NO: 429997 - DNA, 75 bp, Homo sapiens
aaaacatgagtcaatatgtattgtggcattcaaatcctagcactctgggagagatttaatccagagactgacttc

SEQ ID NO: 429998 - DNA, 100 bp, Homo sapiens
attgggagagatcgttggttcacagggaagtcgcctggaaaaaccaatagtaatcccctactttgaaactagtgctgccaatgggacaaacataagccaa

SEQ ID NO: 429999 - DNA, 82 bp, Homo sapiens
gacggcatcggcgcggtcagcggcggcgggaaaaggtatagtttggcagtggggcctccaaaaaaagacccaaaagttaaag

SEQ ID NO: 430000 - DNA, 50 bp, Homo sapiens
gcagcatattacctatcaggagaggagcttacgaggaaatatttcagtaa

SEQ ID NO: 430001 - DNA, 98 bp, Homo sapiens
ttaatttcagatcatctgttggcagtatttaaagcagagagaatagtgctgagcctgctgctgtaattgtggagaagccactgagtgtaccaccagcc

SEQ ID NO: 430002 - DNA, 75 bp, Homo sapiens
gcagccgatccagcctgcggagcctgtggggcaggtaattggtacgcctcagagaccggcagcgtcaaacaccct

SEQ ID NO: 430003 - DNA, 96 bp, Homo sapiens
ggggaaatggctgcgagaccctagaggcctgcggcctgcgatcttcagtgtctattggatttttccaagagaaagtttgtaaaattccttacactg

SEQ ID NO: 430004 - DNA, 99 bp, Homo sapiens
gtccgctacgctcgccggggctgcggccgcccgaggatgtacagttacccagcacgtgtacctcctcctcctcctattgctcgggctgtagtgccctcg

SEQ ID NO: 430005 - DNA, 87 bp, Homo sapiens
tggacgccatcaacaaagagatcagggactgttgacatttagggatgtggccatagaattctctctggaggagtggcaacacctgga

SEQ ID NO: 430006 - DNA, 102 bp, Homo sapiens
caaactttgaggacaggaatgcatttgtcacgggcattgcaaggtacattgagcaggctacagtccactccagcatgatatatagatcaaggtcgaaatccc

SEQ ID NO: 430007 - DNA, 75 bp, Homo sapiens
ctacactttctcaagcactgtgatcttcaaatgtgtgcccccgagagcctgaagacacgcaccttctcccatgcc

SEQ ID NO: 430008 - DNA, 87 bp, Homo sapiens
gcgctggccggatggaaatcctaatgacagtctccaaattcgcctccatctgtaccatgggcactttccctcatggtattgatattt

SEQ ID NO: 430009 - DNA, 74 bp, Homo sapiens
caccccggacgagagcaaggagaggctaggtctctgctggatgaaccgaatcctaacagtccagccaatagcca

SEQ ID NO: 430010 - DNA, 117 bp, Homo sapiens
gcaactaacatcggccgagtccgtgacacctgcctcaatggcctggtgcagctgctgtccaaccgtgatgacaccatccggaagatgaagaacgatttccggaagatggaggatgag

SEQ ID NO: 430011 - DNA, 75 bp, Homo sapiens
tatttgaagaataccagtttcaagcagtattaagagtaaatggtcatgcagaaggcttttgtatgatgtgtacaa

SEQ ID NO: 430012 - DNA, 89 bp, Homo sapiens
cttcaacagactcaagaactggttatacttgaaaccataatgctacaaactctagatcccataaaaactgcccaaggatctctctcact

SEQ ID NO: 430013 - DNA, 98 bp, Homo sapiens
aaatcagattacagtctaaataaagtgaatgcacctatcttaacaaatacaacattgaacgtcataagacttgttgaatgggagctgactgatatggt

SEQ ID NO: 430014 - DNA, 49 bp, Homo sapiens
caggccccggcagcgcctgggacaaggagaaaatgcagaagtctccatg

SEQ ID NO: 430015 - DNA, 75 bp, Homo sapiens
caccgaaagtggccactaccagcatgaagagcccaacaattcaaactggatgaccagtgtcccagtgaaggaacg

SEQ ID NO: 430016 - DNA, 99 bp, Homo sapiens
ggcctctttgcccagcctgcatgaaagctacacttcaaccagagatgcctgtgaggagccaccaacatttgaagctatggagctcattggtaaaccaaa

SEQ ID NO: 430017 - DNA, 100 bp, Homo sapiens
ctgggtacccggctctgcatcgcgtcgccatgatgggccatcgtccagtgctcgtgctcaatgacggagccctgcgaccaggaacctgactcttcagctc

SEQ ID NO: 430018 - DNA, 90 bp, Homo sapiens
gcagatcttaagcctcaagaaatcttggtctcagtgaacatcccctactcaaggaagtgctactatatcggggccacagatgatgcagcc

SEQ ID NO: 430019 - DNA, 97 bp, Homo sapiens
gaagaacaaagacacaggtcactcaaataggcaggttgaaatcacaaagattagacacctttttagataggtgttcttcagcaccactgacaacacg

SEQ ID NO: 430020 - DNA, 90 bp, Homo sapiens
ctcggatctctccaggaggacccagccacccaaggaaagaccacagcaagattctttcattcgtctcctcctagcctgggggaccaggct

SEQ ID NO: 430021 - DNA, 89 bp, Homo sapiens
gcccttggccgcattcccgcccgtcccgcagcggcgcgcggagccagatcaatgtccgagttaccaccatggatgcagagctggagttt

SEQ ID NO: 430022 - DNA, 50 bp, Homo sapiens
cactcctgcaagcagtatggcatcacgagttcctatcagactgagattgg

SEQ ID NO: 430023 - DNA, 101 bp, Homo sapiens
tgctcttcagagcttcgccagccctgggacaaggatgattttgcagttacctgggatccatggagtcctgctataaggtctcgatctagaagacggtcacg

SEQ ID NO: 430024 - DNA, 73 bp, Homo sapiens
atatcaagggctgcagcagcaaagatcacaaaatggctcttcttcagatggcaacagtggaagaagctattca

SEQ ID NO: 430025 - DNA, 75 bp, Homo sapiens
atcagggacagtggcggatgtgcactgctacaggactctactatggaggcttaacagcattgcgcagtgatgaag

SEQ ID NO: 430026 - DNA, 90 bp, Homo sapiens
aagacgatctgcacttcgcattttggcattgacatttaattttagggtcctttatatagaagggagaagaggtgagagacttcagaggct

SEQ ID NO: 430027 - DNA, 100 bp, Homo sapiens
cggccatgagcactgcagcgattgcgagaatgaggaggacaacagctacaaccggggctttggtgtcatccccagcactcctctggccatccatacacca

SEQ ID NO: 430028 - DNA, 82 bp, Homo sapiens
cctcctccaaggtcatccagtccgtcgctaaggggatatgagactttctactcggaatatcctgagtgttgcgtggatgtaa

SEQ ID NO: 430029 - DNA, 75 bp, Homo sapiens
ctcagaacagattggcacccattgggactgataccccaatgtccttctttgactttgtggttgatcctcattctt

SEQ ID NO: 430030 - DNA, 75 bp, Homo sapiens
ggagagtagcagtgccttggaccccaggatgagctcaggtttctacaaaaatgtggtgaagattcaaaagcatgt

SEQ ID NO: 430031 - DNA, 100 bp, Homo sapiens
tggatgtgcaccaggtgtacaagtaccccttcgagcaggtggtcgccagctttctccgaaaggtcgttgaggacttccacatggagattggcacaggacc

SEQ ID NO: 430032 - DNA, 90 bp, Homo sapiens
ccgggcccaacagcaacaggtctcaattgcagcactaacaccagaataacactgatgttgccatcagcagtcacacgactgaaacatgag

SEQ ID NO: 430033 - DNA, 90 bp, Homo sapiens
gaaacatctcaccaatttcaaatctggctcctgggtaaacagactggtctgactcctgatatgccgtacttggacccctgcctaccccta

SEQ ID NO: 430034 - DNA, 88 bp, Homo sapiens
gaggagaaaaagtcccagatcagcgcagacagtggtgtgagcctgacgtctagttcccaggcagcctggcatcctcgctacaacctca

SEQ ID NO: 430035 - DNA, 83 bp, Homo sapiens
acggattcatttagagctgcggaacaggacgccctctgatctgcctgtggaggaaccgattgtgtccacagatgaggtcatct

SEQ ID NO: 430036 - DNA, 82 bp, Homo sapiens
gaggacggaagtgtggtgaaggtggacacagaagccgcaggctcctgctccagcccagcccccagagagcagaccccaggtg

SEQ ID NO: 430037 - DNA, 100 bp, Homo sapiens
gaaaaagaagaaaatgaaggaaagcgaggctgacagcgaggatttaagcgagagcctcactggttcccaggacatcaacctgaactggatcctccccgat

SEQ ID NO: 430038 - DNA, 98 bp, Homo sapiens
cccctgttccgaggtcaggaggatgcaagtcctgacagattcagcaacactgaaagaccacagcaagattctttcattcgtctcctcctagcctgggg

SEQ ID NO: 430039 - DNA, 80 bp, Homo sapiens
gaggagaaggtccgcttcaaatgaaggatttgggggcagagcacttggcaggtcatgaaggggtccaacttctcgggttg

SEQ ID NO: 430040 - DNA, 100 bp, Homo sapiens
cccggtggactacttctaccgaccagagacccagcaccgggaacccgagcgtcatgttagggtgaagcagaggacctcagtgctgaacatgctaaggagg

SEQ ID NO: 430041 - DNA, 100 bp, Homo sapiens
tagccgagccggccgctgtgcccgctcggtcttcggcaacattaagaagtccaaggcttgcgagaaggtcatttccgtgggtcaaacggtcatcacgaag

SEQ ID NO: 430042 - DNA, 80 bp, Homo sapiens
cgtgtaactgtgaatctttcaaaggaaaaggggaagatagtgatgtactcagtataaatgcagatgcttatgacagcgac

SEQ ID NO: 430043 - DNA, 97 bp, Homo sapiens
catgttgcaaaggttaaattccaggagctggaatatcagaagtctcagcccccacagcccggagataagtttgtgtctgttgtcagccagttcatca

SEQ ID NO: 430044 - DNA, 51 bp, Homo sapiens
gcgggacaagaaaattcatgcgacccatcctcatgccaacaaactaccctt

SEQ ID NO: 430045 - DNA, 75 bp, Homo sapiens
aaggcggcagctgctcatgcagtactagagttgccctgaaagtaatccacctaactcccagcctgcttcatacca

SEQ ID NO: 430046 - DNA, 77 bp, Homo sapiens
tggaagcagccgatccagcctgcggagcctgtggggcagtttggatttaggtggcgagtagaaaaagaagtaatttc

SEQ ID NO: 430047 - DNA, 76 bp, Homo sapiens
tgtgcacactggtgacaactcaagagcaatcagtaccatctgactgcaaaattcaaaatggggctcaaggtattcg

SEQ ID NO: 430048 - DNA, 101 bp, Homo sapiens
atttacagaaagagtcaacagcagtggcaacagaatcttgcctcctggaatccttcaaatcctgaatgtctcttacttgtggtgaaggaacttgtgcaaca

SEQ ID NO: 430049 - DNA, 100 bp, Homo sapiens
tcggcatggcccgcatgttctaccacaggcccaagaggatgctgagaaacttcggtccgttgtgatgccaatggaaaaggaaattgcagctttgaaggat

SEQ ID NO: 430050 - DNA, 99 bp, Homo sapiens
tggaggaggggcggcgctgcggccacccggcagttaagtgggcagaccaacatccacctcagcaaaaacttcttcctgacgaatcgcgccagggagcgc

SEQ ID NO: 430051 - DNA, 95 bp, Homo sapiens
cccgcgggggctgcgccgcgcccgcacccgcgccgcgcgccgaggacctcagcctgggagtggccgccatggcatcagatgaaggcaaacttttt

SEQ ID NO: 430052 - DNA, 75 bp, Homo sapiens
ttcctccggcccgggccctggcccagctagccggccatggaaggatgggtcatcagttaaggaagttgaaaccta

SEQ ID NO: 430053 - DNA, 98 bp, Homo sapiens
ggaactcttactaatgtctataaagccagtatgatagcaatgatggcagcagggtattgtgaatacttacttcttttctaaaatcatcgcagaatggg

SEQ ID NO: 430054 - DNA, 98 bp, Homo sapiens
cgactcatagaagcatacgttattcaatgtcaggctgaagctcaagaaggagttcatgatcaagtgttgcccacaccaaatgcttcatccagagtcat

SEQ ID NO: 430055 - DNA, 82 bp, Homo sapiens
ccacgcaaccccagatccatttacactttacagctcacagaacatttcctgcctgttgctcacactctgttgtccacagcat

SEQ ID NO: 430056 - DNA, 100 bp, Homo sapiens
agctgttccgtaatctcacaccaagatggtgtttgcacttgtgacagcagtatgctgtcttgccgacggggcccttatttaccggaagcttctgttcaat

SEQ ID NO: 430057 - DNA, 87 bp, Homo sapiens
tcctttcattcctcttcaagtacctgatgcaccaggttatacattggctcttcaaagacgttcacctcatcagagaaatccctgact

SEQ ID NO: 430058 - DNA, 50 bp, Homo sapiens
ggatctgcagaagacgcagggctcaagattgatgtacagctatatatttt

SEQ ID NO: 430059 - DNA, 75 bp, Homo sapiens
gtcttgctcggccgatgaagtgcagaggtttttttctgaaaatttgaagccattacttccagctggtatacagga

SEQ ID NO: 430060 - DNA, 90 bp, Homo sapiens
aaccatattgggagtgtgattaagatttggagttaaatgggttggagtctgggaatggggatgaggaagcagtggatcgagaaccccgac

SEQ ID NO: 430061 - DNA, 97 bp, Homo sapiens
ggaagacgacgagtttgaagagttccctgccgaagatgatccagatcctgatgatggatttaactataaacagatgatggttagagatgagcggagg

SEQ ID NO: 430062 - DNA, 100 bp, Homo sapiens
gagcctggcctcatgttaaacttcagcgcaactgcccttaggagcaggatggtgttccccctcccctccctggggcagcagccaccatgttctcgtgtgt

SEQ ID NO: 430063 - DNA, 100 bp, Homo sapiens
ccggccggtgccagcacctttcggcttctgagacggcggcagcagcggcattcagttataaatgtcactctgcccgatgaaaagcaaaactacgtacatc

SEQ ID NO: 430064 - DNA, 83 bp, Homo sapiens
cgtctcttcgagttcttcgtgctgctcaaggtcttgaggaccggcccagctcaggctcctggggcagcggcgaccagagcagc

SEQ ID NO: 430065 - DNA, 114 bp, Homo sapiens
gcggatggccccaggtgtaagcgcagaaagcaggcgaacccgcggcgcaataacggaacatcatcttcagcgggctatttcagcacagcaggtgtatggcgagaagagggataa

SEQ ID NO: 430066 - DNA, 84 bp, Homo sapiens
ctaaccatgaagacttgaacttaatacagcaagaaagaccatcaagtttaccagctaactatatgtcagaaagcatcagctttt

SEQ ID NO: 430067 - DNA, 51 bp, Homo sapiens
agcgccccaggccacgcgccccacaattcctggagttctgtaaagaaaacg

SEQ ID NO: 430068 - DNA, 96 bp, Homo sapiens
cccagcgatgtgactgctcaatggagagaaggaaagtcaatcgtaggaagaacacagtacaggctgctgagcttcgtgcttatctgaaatctaaag

SEQ ID NO: 430069 - DNA, 75 bp, Homo sapiens
attcgaatatggaactactttatgaacaagacatatctgaagagatggattaagaatgctttggattaaggattg

SEQ ID NO: 430070 - DNA, 83 bp, Homo sapiens
ctgctcctgaacttcctgcgctcgcactggttttaaaatcaaagatgggaaaatcggagaaaattgcccttccccatggccag

SEQ ID NO: 430071 - DNA, 95 bp, Homo sapiens
aagcaaggaggagtggaatgaaatacggcaccagattggaaacacactgatccggattatatgcgtcaggcaggagaagtgacttatgcagatgc

SEQ ID NO: 430072 - DNA, 96 bp, Homo sapiens
ggggaggctggcaacagttttcttcagcgcccaggatgcagccggctaagtgtgaaaaaacagttgatgtgaagaaaagtaaattctgtgaagctg

SEQ ID NO: 430073 - DNA, 100 bp, Homo sapiens
agcaggcagcctcccggagcccctcctttggtgacccacagctatcccctgaggcccgacccaggctgcatgttaaatggccaagaggtgaggcttacta

SEQ ID NO: 430074 - DNA, 80 bp, Homo sapiens
cctctcctttccctttgagaccgtgaagagaaagatgcaggacaagacgatcagctccagtttggcagttgtggatttaa

SEQ ID NO: 430075 - DNA, 100 bp, Homo sapiens
ctgagtacgacagcctcaaacaggagctggagcagctcaaagaggatcccattgaagataccacgctgcatgtgtccttagtagtcatgtctccttaggc

SEQ ID NO: 430076 - DNA, 46 bp, Homo sapiens
gcaccaggagacgcaactcatcggggtggttctcttcccaaagtgg

SEQ ID NO: 430077 - DNA, 74 bp, Homo sapiens
cgtgtcctccgtgggagcccgaggtgctggagaatctggtaaaagcaccattgtgaagcagatgaggatcctgc

SEQ ID NO: 430078 - DNA, 80 bp, Homo sapiens
cggcggcgcgcagcgtgtcaggcggagagacccgccgccagaatgccagcagttactctgcagagatgacggagcccaag

SEQ ID NO: 430079 - DNA, 98 bp, Homo sapiens
ggggtcctccctgcaccgggggagcgctacgagtcccagcggagcgccgcagcacagcgccatggacaaactggtctgctgagaacagacccagtccc

SEQ ID NO: 430080 - DNA, 98 bp, Homo sapiens
gagcttaaaaagctgcacgcaagtgttaaacttctgattgctgacagaactggaatctcctgcttggtggccctttagctccaagctttggaagacac

SEQ ID NO: 430081 - DNA, 74 bp, Homo sapiens
aaaaacacgatcagctcttagacaggggttatggttttgtgaaattcacagatgaactggaacagaagcgagcc

SEQ ID NO: 430082 - DNA, 100 bp, Homo sapiens
tagcatgctttctccagctgccctatcacctgccagctcatcacaaagtgaccaagaatatggcccaggtgaccaaagccctggacaaggccctgagcac

SEQ ID NO: 430083 - DNA, 97 bp, Homo sapiens
cagcgtccgccgcgcctcggccaagaggtcattttcttctgaggaagtcattcttaaggactgttctgtccccaaccccagctggaacaaggaccta

SEQ ID NO: 430084 - DNA, 82 bp, Homo sapiens
atggctcggggacgtgggcctattcagcgccggatctgctgggctggtcagtgagaaggtcggaggggccgaggggaccaag

SEQ ID NO: 430085 - DNA, 100 bp, Homo sapiens
caaggctttgttgtaggagcaatgactgttggtgtggtatctgtgcgctttgaagaagatgaagacaggaacttgtgtctaatagcatatccattgaaag

SEQ ID NO: 430086 - DNA, 82 bp, Homo sapiens
cggatctcaccgccgctcagggatgaaacaggcgcctatttaatcgacagagaccccacctactttgggcctgtgctgaact

SEQ ID NO: 430087 - DNA, 80 bp, Homo sapiens
cctggagcctcagttggaagcagccgatccagcctgcggagcctgtggggcagcataagcagtactataatggatgtaga

SEQ ID NO: 430088 - DNA, 90 bp, Homo sapiens
ctgcagggcggtaaggatttcaacatgcctctgacaatctctagtgagctgaccagtgctttggtgcatctaaaactgcatctttttatt

SEQ ID NO: 430089 - DNA, 138 bp, Homo sapiens
aatgagtctatttgcttctcccacaagttctgaagagcaaaagcacagaaatggactatcaaatggtctggctctgggagaggagtggacagcagctggttgagatacatccccatctggagacaggactgccactga

SEQ ID NO: 430090 - DNA, 75 bp, Homo sapiens
cactggtgcaaggactcatgggtgcagcagtgacggtggctgaatccacagaggagcctgctggttctaatcggg

SEQ ID NO: 430091 - DNA, 83 bp, Homo sapiens
atacatttggcagaataaatgaaccaggtgattgcatactcggaacatcgttaccgtatctttggggaaaccatcgatattgc

SEQ ID NO: 430092 - DNA, 75 bp, Homo sapiens
cccaactcagccttcctgcataccctggaccagcagaaacctagagtggtactccaaagattcaggtttactcac

SEQ ID NO: 430093 - DNA, 75 bp, Homo sapiens
catcctgcgcgccggccagatggtcacggtgagaagccctaccactgcaactgggacggctgcggctggaagttt

SEQ ID NO: 430094 - DNA, 100 bp, Homo sapiens
cattttcatgaaacaaccccaaataaaggaagtggaaccacttcaggtcttattgaagttaaaacagatgagtttcctcgccatgggagcaacatagaag

SEQ ID NO: 430095 - DNA, 100 bp, Homo sapiens
gactgggaatgtatgacagagttgctattagaagaacctgttcaaggagaggaaggagccaaaaacctgtatatcatctccgtgaaggggatcaagggac

SEQ ID NO: 430096 - DNA, 100 bp, Homo sapiens
gggcatcgccttgctggcctacgtcgcctcctcctgacaaggtgatccgggcgggccccgcaggaattttatcccctcaccggcctcacactagtatcgc

SEQ ID NO: 430097 - DNA, 83 bp, Homo sapiens
gacccggcacgtagatatttttgagaaggattttatttttgtaccccttaatgaagcgcatgttatttgaaagcaattgagac

SEQ ID NO: 430098 - DNA, 75 bp, Homo sapiens
aaagctgaaggtggaggcgccgcaagcgctgaggaaaagtcttgcacgaggagcatgttgaactcttgatggagg

SEQ ID NO: 430099 - DNA, 50 bp, Homo sapiens
ctgcaggcagaagctgagacggctaagggaaatgaggcaagttatccttt

SEQ ID NO: 430100 - DNA, 75 bp, Homo sapiens
tggaaaaggaggcaagaatattaaggctctccgtacagacgtgaccaagaatatggcccaggtgaccaaagccct

SEQ ID NO: 430101 - DNA, 83 bp, Homo sapiens
atcctgcggcagaagccgagttcaacatcctcctggccaccgactcctacaagcgtctcccttctctcctggacagaaggccg

SEQ ID NO: 430102 - DNA, 90 bp, Homo sapiens
catcaggacagctgttccttggccatcccaaagctattctgggggcaacagagatgtacctgtgtggtctaagctggaatctggtcacct

SEQ ID NO: 430103 - DNA, 96 bp, Homo sapiens
cgtcacccctggaggcccgagtcagcgaaccactgctcagtgccacctctgcatcccccacccaggtctctaattaacagaagatggcaaagccca

SEQ ID NO: 430104 - DNA, 82 bp, Homo sapiens
gacctttaggtgcttttatattcatctcaaaaacaaaattctgaactcaggacttggcaatggattatcaaacagttttgcg

SEQ ID NO: 430105 - DNA, 78 bp, Homo sapiens
tggatttcttgactggccacagatatctcttccaaacgcatgatgaaggaggtcttgtcaacagggcaaggcaataca

SEQ ID NO: 430106 - DNA, 49 bp, Homo sapiens
ctaccagctcgtctacacctgcaagtgaagatagtgatccggggagaca

SEQ ID NO: 430107 - DNA, 75 bp, Homo sapiens
ggccggacctcgaccctgagctctatctcagtgtacacgccgcggcccatggagcccgccggcccggcccccggc

SEQ ID NO: 430108 - DNA, 74 bp, Homo sapiens
ccagcgcaggagaaaacgaaaccttcgtgatgagattgactgtagccgagggtaccatctacctgttcatgtaa

SEQ ID NO: 430109 - DNA, 87 bp, Homo sapiens
ccactgctgggccctgaggctgcaccaagtggcgaaggagccggctccaagctactctcggaaccgcacgtttgacacgtacattgg

SEQ ID NO: 430110 - DNA, 90 bp, Homo sapiens
ggagaagacttggaagctcatggacaaagtgatttctacctggacaaggactggtactatacccacagataggagacaaattggatatta

SEQ ID NO: 430111 - DNA, 99 bp, Homo sapiens
gggcaagctccagagcctgccggaaggctccctcggtcgcgagtatctccgtttcctggatgtgaacacaaggcgaccagccagctcctgttggagaca

SEQ ID NO: 430112 - DNA, 100 bp, Homo sapiens
cactcccagaagaggaaaaggagggcagcgacctgagaccagtggtcatcgatgggagcaacgtggccatgagctttgtgtccctggtgatgttggaaca

SEQ ID NO: 430113 - DNA, 102 bp, Homo sapiens
gctgaagattactcagcagggcacggacccgcttgttctcgccgtccagagcaaggaacaggccgagcagtggctgaagctgccaggcgatcggatggggag

SEQ ID NO: 430114 - DNA, 100 bp, Homo sapiens
ttcccgagaccgtcctggcgcgatgcgtcaagtacactgaaattcatcctgagatgagaaactggcgatggaatatgagaggagccctctggaaagaaaa

SEQ ID NO: 430115 - DNA, 90 bp, Homo sapiens
gtttacctaacacgtctttgcaaggatgctgaaaacgccattcaacagatgggtggccagtggcttggtggaagacaaatcagaactaac

SEQ ID NO: 430116 - DNA, 75 bp, Homo sapiens
agtggtgtgtgacggggctcctgatgggaaaggagacctgcagccccagctggacagtgccctgcaggacgtcaa

SEQ ID NO: 430117 - DNA, 75 bp, Homo sapiens
gaaaccacgcaggcaaacgagaattaaatgccgagaaggccagtacgatagggccagatttgagtgtgtgaattt

SEQ ID NO: 430118 - DNA, 74 bp, Homo sapiens
ggaggagaagagagagatcaagaggaggctaacccgaaaggtttcccaaaccactccttatgatccagtgaata

SEQ ID NO: 430119 - DNA, 100 bp, Homo sapiens
attgactaagtcccttgtttttcttcctgtgcagataagtcagctgaggattacaattcttctaatgccttgtacgctgggagcggactcttggagctat

SEQ ID NO: 430120 - DNA, 75 bp, Homo sapiens
gcggaaaatagcctttgccatcactgccattaaggtgggagctgaatgccatgaccaccaacagcaatatcagtc

SEQ ID NO: 430121 - DNA, 102 bp, Homo sapiens
ggaagagtgtatgtgatcatcgatctctcagggtcgtcgggtgaaggtttttgtcatccattggagggacactgtatgaggttggaaagcctgaaatgcaac

SEQ ID NO: 430122 - DNA, 83 bp, Homo sapiens
gcccggacggcgcctctcgaacgagtgtgggcgcgaggcagttttccaagagataacttcaccaagatgtccagtgataggca

SEQ ID NO: 430123 - DNA, 100 bp, Homo sapiens
cggcgctccgggcccgggcggctggcctcaccgcccactggacgatcattcccgagtgaggctgcagacaatagaaggagacacaaactcagactatatc

SEQ ID NO: 430124 - DNA, 100 bp, Homo sapiens
tgttagtggaacttctacccgacacttacatgccatggccttctacgttgtgaaaatgcggatctgaaaagaacaattgctgtccttctggatgacattt

SEQ ID NO: 430125 - DNA, 100 bp, Homo sapiens
caagcagctgtggggaaacgttgtctggaagatgctcttagtgatcttgcattacactttctgaataaaatgaagatcatggtgattaaggatattgaaa

SEQ ID NO: 430126 - DNA, 100 bp, Homo sapiens
aagttggtcagtctcgcactggagatggggacttgcttggggtcttgctgcccaggctggtcttgaactcgtggcgtcaagggatcctcctgtctcagcc

SEQ ID NO: 430127 - DNA, 75 bp, Homo sapiens
aaaactgtcctctaaggatctaaaactgacgttacatccaagaggaaataatccaggcaaggaagcacaagctga

SEQ ID NO: 430128 - DNA, 100 bp, Homo sapiens
aagaggcggcgagtgccacgggatggacgccgagcaggaaatgcgctgactccagagctggccccggtgcaggtcctggtgcttgatggtcgaggccatc

SEQ ID NO: 430129 - DNA, 101 bp, Homo sapiens
gttgagatccacagagctaaacgttttagagtaccaaccattgtgtgctgtgaggtaaagaactcttgatgtttcagtgagctttaatggaggaaaatctg

SEQ ID NO: 430130 - DNA, 97 bp, Homo sapiens
gatcttgttatcactaacacttgcctagacagagaacttattccaagcttatgtctacctgagtacctaaaacagatccaggacctgcccccaactg

SEQ ID NO: 430131 - DNA, 100 bp, Homo sapiens
ggaaatggagggcatcttcaaccacaaagatctatgatcgaattctgtcaatttcctctcaagagggtgagacgattgaattggataaacctgtcatggc

SEQ ID NO: 430132 - DNA, 50 bp, Homo sapiens
cgagcagcccagacagcggccacctcaagagttcctgagttggaggtaga

SEQ ID NO: 430133 - DNA, 98 bp, Homo sapiens
ccaagtcaaacgcagaaggactgcctcactgagcaaccaagagaaggtaaatactacagtgaggaggccgaggtggatctgcgggaccctggcagaga

SEQ ID NO: 430134 - DNA, 100 bp, Homo sapiens
tggccaagtccagatatatggagctctacacgtatcctcctgcctagcgcagctctaagcgaaagacatgaggcctcagcctgaaatgaggttgttttga

SEQ ID NO: 430135 - DNA, 100 bp, Homo sapiens
caacaacggaatcctagacgtggtccggtatctctgtctgatgggagccagcgttgaggcgctgaccacggaactgggaagtaacagccctccacagaga

SEQ ID NO: 430136 - DNA, 82 bp, Homo sapiens
ctgaagtcggtgtctgctgcgttcacggcaggattcggttagccatcatcgtctacagactgccgtggacctggaaatgcag

SEQ ID NO: 430137 - DNA, 83 bp, Homo sapiens
aagtactctgaaaattccacatgtggagaggaagatcttggacttatttcagcttaataaggactcagaattcatgattgaag

SEQ ID NO: 430138 - DNA, 82 bp, Homo sapiens
gacggcgttctggatctcaaagcgggctgaagaagatgcagagcagcctgaagctggtggactgtatcatcgaggtccacga

SEQ ID NO: 430139 - DNA, 99 bp, Homo sapiens
tgcccgaactggccagactcctggagatcgacccgtacttgaagccctacgccgtggacttccagcgcagacttatctcagacagaggagaaacttcgt

SEQ ID NO: 430140 - DNA, 104 bp, Homo sapiens
gattgaagccgcctctgtattacttaccagacggccgaagccctgcagcccacgctacagccggagatgcagctcgagcacggggccatccagattcagtgagc

SEQ ID NO: 430141 - DNA, 97 bp, Homo sapiens
gaggtcgataagctggaactgatggttgaaatcacaaagattagacacctttttagataggtgttcttcagcaccactgacaacacggttctgacag

SEQ ID NO: 430142 - DNA, 74 bp, Homo sapiens
tgtggagagcccgtccgacagcgctgagacatctgttaaagacatggctgaccttcctgtccctaaccaggatg

SEQ ID NO: 430143 - DNA, 82 bp, Homo sapiens
atatctttgaaaatgtggactatgttcagatccatgaccagaactgtcctttggcaaatgtcatctgtgaatactgcaatac

SEQ ID NO: 430144 - DNA, 49 bp, Homo sapiens
caatgaatgggttgcagttaacaggcttcctgaagaatgagaaggacaa

SEQ ID NO: 430145 - DNA, 100 bp, Homo sapiens
acggggctcccaggacctccactaatcaccagaacaaaatgtgcagacaagttggatggcttgaggactggtactaaaaggaaacgtgactgggaggcca

SEQ ID NO: 430146 - DNA, 100 bp, Homo sapiens
aaacagagactgcgaaacgatcctctcaatcaaaataaggatcaaaaccattcaagtgcaagatatgccattttgcaacagctcagcttggagatgccag

SEQ ID NO: 430147 - DNA, 100 bp, Homo sapiens
aaatactgcttaagagagtcatccagagctggctacagatcagccatgcagaagctggggacagaagtatttgaagaggtctataattacctcaagagag

SEQ ID NO: 430148 - DNA, 75 bp, Homo sapiens
cgacaagccgctggcagccgcggatctcaccgccgctcagggaagatcatggactccggggaactggacttctac

SEQ ID NO: 430149 - DNA, 82 bp, Homo sapiens
cggctccggcttctgctgttgctcttctccgccgcggcactgatccccacaggtgtggacactgccagcggctgcagccgac

SEQ ID NO: 430150 - DNA, 101 bp, Homo sapiens
caaaaaagggactgctaagaagataccaccagatccagacatttaatgtggatgcaccatgccagaccgtggaagatttaacgaatggggttgtgatggcc

SEQ ID NO: 430151 - DNA, 87 bp, Homo sapiens
ggaacggccatgagcactgcagcgattgcgagaatgaggaggacaacagctacaaccggggtgatgatgatgatgattttgatgatg

SEQ ID NO: 430152 - DNA, 82 bp, Homo sapiens
acaacatgaataaatatgactacgtgctcacagcccccaaatacatcaagatgtttgtactggatgaagctgacgaaatgtt

SEQ ID NO: 430153 - DNA, 51 bp, Homo sapiens
gtaggagagcctacatattcttgcaggaggtatatcgaattccaaagaaaa

SEQ ID NO: 430154 - DNA, 96 bp, Homo sapiens
cgggagctcctggtcatcgagctgtccgacaaccctggcgtccatgagcctgtggcctggtttgctttcgaccctggctcggcgcactcggacatc

SEQ ID NO: 430155 - DNA, 80 bp, Homo sapiens
ggtgtaccaggcgaagctggccgagcaggctgagcgatacgacggagtgtggccatctggggccgtgtggtatttgccac

SEQ ID NO: 430156 - DNA, 82 bp, Homo sapiens
ccctgtgggcctgggagctgcctctgaggaacacgccgcagcaattctgtggtgttcttggtcacacatttatggagtttct

SEQ ID NO: 430157 - DNA, 100 bp, Homo sapiens
aggtcccccttctgggaaagaccgagtgaagaaaggtggatcctacatgtgccataggattgttgtgtccactgtatcctggcttgcttgttctgcgaat

SEQ ID NO: 430158 - DNA, 89 bp, Homo sapiens
gagaacgtctccgagtccctcaactctctacgctttgcctccaaggccatcatgcagaagggggatacaaacataaagcccatcctcca

SEQ ID NO: 430159 - DNA, 98 bp, Homo sapiens
gggagtaacaacacccgttttggcattgctgctaagtacatgctggattgtagaacttctctctctgtacagctggataacttgccaggaatgagtct

SEQ ID NO: 430160 - DNA, 98 bp, Homo sapiens
aaaagattcctttcttggcaactggaggtcaaggcgaatatttaacttatatctgcctgtcaggtggacacctgcgcaggtgtgtgccctccggcccc

SEQ ID NO: 430161 - DNA, 100 bp, Homo sapiens
aggaagctggacgctgcagctggaactagcgtgccaagccaactcagacagtaatgccaggacaagtcatgcgggttacaacaggtgctccaataccctg

SEQ ID NO: 430162 - DNA, 100 bp, Homo sapiens
agagcccacccgcgccaggaggccgaacgcggactcgccacccggaattcagcttagagaactatcaacacaggacaatgcaagcccatgagctgttccg

SEQ ID NO: 430163 - DNA, 100 bp, Homo sapiens
ctgcaaacctggagccagaaacattaccgtcatattccacccattactaagttacgccccatggtgtccatcctgccagcagactgattcagaatgggag

SEQ ID NO: 430164 - DNA, 88 bp, Homo sapiens
caccattgcagacccagatgatagaggcatgttggatatgtgcggctttgatactggagctctggataactgataaatttcaaacgga

SEQ ID NO: 430165 - DNA, 75 bp, Homo sapiens
gtggcactttccatagctgtaggactgctggaggacaatcatatcctgattcagcccttcctccacaaaggcaag

SEQ ID NO: 430166 - DNA, 74 bp, Homo sapiens
gtatgcctacagcgacaacagcctggaccccggttggatggcaagcatgtggtgtttggcaaagtgaaagaagg

SEQ ID NO: 430167 - DNA, 50 bp, Homo sapiens
gtgttgactgcagctcactgtaacttgtagatgacattaatgctgataag

SEQ ID NO: 430168 - DNA, 80 bp, Homo sapiens
ccctggaggaagaagaggatggagaggagctcattggagatggcatggaaagttgcaggaagaggcagaggaagaggaag

SEQ ID NO: 430169 - DNA, 50 bp, Homo sapiens
ggacgccgaccgtccgggacgaggtagacgttacatccaagaggaaataa

SEQ ID NO: 430170 - DNA, 134 bp, Homo sapiens
cacagagccacttgagaaagctgtgcagtccagactcacgggagaggaagtcaacagctgtgtggagaaggaacccagccagccggcggaatgcaagcagcagtaggaagcggaggcgggtgcctggcagaccg

SEQ ID NO: 430171 - DNA, 75 bp, Homo sapiens
ggggatcgcccccgagcgctgcgtcctgcgggtgggtgctggagaatctggtaaaagcaccattgtgaagcagat

SEQ ID NO: 430172 - DNA, 98 bp, Homo sapiens
tctaaaggagctgtcagatggagaaataaaagtggccattagtactgtgagcatgaaccttgagatcagcttgaacgggtctttttacgacttggcca

SEQ ID NO: 430173 - DNA, 100 bp, Homo sapiens
gattattttgtggattttcctgttccattttgtgcctcctggacacctcagactcagattgatggacaacttttcttaattaagcaccttttgatacttc

SEQ ID NO: 430174 - DNA, 80 bp, Homo sapiens
cctcaccagacagatcgctgtcaaaaccctagttactccacaggatccgctgaacataggatgttgccacaaaatctacc

SEQ ID NO: 430175 - DNA, 82 bp, Homo sapiens
tgcaggcagaagctgagacggctaaggaacgggaggatgaaattgctactatggagtgcatcaacaatggcaagtccatctt

SEQ ID NO: 430176 - DNA, 74 bp, Homo sapiens
catggcatttcagtcactggtttgcagagtccaggtttacaaaggaggaaaacgacttcttctagatttttttt

SEQ ID NO: 430177 - DNA, 100 bp, Homo sapiens
gaagaatgtatttgcagaacctcaggactatgctgagaaggaaaataccatagcaaaagctctggaagatctgaaggcaaatttttactgtgaactctgt

SEQ ID NO: 430178 - DNA, 75 bp, Homo sapiens
gtacctcctaggactctatgacacggccggacagcttgttcagattattatcaatacaacacatttggagaaatc

SEQ ID NO: 430179 - DNA, 98 bp, Homo sapiens
agacatcctctgcagccagaagaacaagaagtaggcattgaccccttgtccagttactctaacaagtctggagctatccatgggaacttcttgcttac

SEQ ID NO: 430180 - DNA, 100 bp, Homo sapiens
gggagcggacgcggcctcagtcctgcgcggtgatggaatggggagaagatattaaagcagtttcaaaagatgaagcagtgatgttggtgaatcatcaggc

SEQ ID NO: 430181 - DNA, 73 bp, Homo sapiens
gtagaggacgtggtagtttattactgaggcgtgctgcaggaggaggaggacgtgctggtgaacgtgaacctgg

SEQ ID NO: 430182 - DNA, 75 bp, Homo sapiens
aagagataaaagaagagaaaaaaaggaaagaaatggctaagcaggtgatggctcagtgttccgagacttggttat

SEQ ID NO: 430183 - DNA, 76 bp, Homo sapiens
cttggattctgcctatctctgttggcgtcatcaatttgttaatagtggaggtctatgttaacaatgaatgggcaac

SEQ ID NO: 430184 - DNA, 100 bp, Homo sapiens
cggccatcacggcggccgcagtggcgtcctggagccctcctcaggtgagctggagctgcccggctcggcagcgggaagccatgaagctcatgactgctct

SEQ ID NO: 430185 - DNA, 100 bp, Homo sapiens
ccagtcttcaccgcggaaagcatgttgtggctgttccaatcgctcctgtttgtcttctgctttggcccagcattgcagtgtcgagatggctatgaaccct

SEQ ID NO: 430186 - DNA, 100 bp, Homo sapiens
gtgtgccaggccgggtgctgggcacggtcccgcgaggttcctcagtggtgtgctgaatattgtctttccatccactaccagcacgggggcgtgatatgca

SEQ ID NO: 430187 - DNA, 101 bp, Homo sapiens
cgcgagccccgcactctctcgatgagtcggagaagtccccttagaccatgctcagcctccaagcagccttgtcatcgacaaagaatctgaagtttacaaga

SEQ ID NO: 430188 - DNA, 82 bp, Homo sapiens
aacaccatggaaatatttgacattgagcctagtgtgttaattgtaacctacaaggagcctgcaaaatcatctactcagtttg

SEQ ID NO: 430189 - DNA, 90 bp, Homo sapiens
gcgctgctgatcatcggtggattcgagaggcaagaatctgcatcaaagagccctggaagcaatcatggctcaactgtgatgcctttagaa

SEQ ID NO: 430190 - DNA, 80 bp, Homo sapiens
caaacctggaagaaggaggaacatggagaggagagcagcgggcccaggctgggcagcctaagccagctgaagatgagtgg

SEQ ID NO: 430191 - DNA, 100 bp, Homo sapiens
ggaactgttctgccggaatttgaaaagtgcctgcagagtggcatgattccgactggatactctcagtgccagccaaattacctgaaattgaagaatatta

SEQ ID NO: 430192 - DNA, 100 bp, Homo sapiens
gattggcaatccagtgccctataatgaaggtattgaaaaccttccctttgaattacagagaaactttcagctcatgagggacctagaccaaagaacagag

SEQ ID NO: 430193 - DNA, 101 bp, Homo sapiens
tgggaacagaggtgtttaccatgacgataagcaaccagcatttagagctgtttatgaagcactgagaaatgatgaatctggttatagatggacaagagacg

SEQ ID NO: 430194 - DNA, 100 bp, Homo sapiens
gccctctctatgatatgctaagaaagaatcttgtcactttagccactgctactacaggccagatcagaaaagggagctcaggtaccttccagagagtgag

SEQ ID NO: 430195 - DNA, 100 bp, Homo sapiens
ggagcagcgggagcagccggaacgatgccggccgtgagcctcccgcccaaggagaatgcgctcttcaagcggatcttgtgcttatcagattgttgtggaa

SEQ ID NO: 430196 - DNA, 75 bp, Homo sapiens
gtccgctcgagcctgaaggaccctgagaaagggaagaaggagaaagggccaacccctgaagaagcaatacagaaa

SEQ ID NO: 430197 - DNA, 83 bp, Homo sapiens
ccatgaggcgccagcctgcgaaggtggcggcgctgctgctcgggctgctcttggaggctatgactttgcagccgtcctggagt

SEQ ID NO: 430198 - DNA, 75 bp, Homo sapiens
gaagtcgccaacagcactgccaacctggtgaagaccatcaaggttttcaagcctatggctgatgctgctgtgaag

SEQ ID NO: 430199 - DNA, 98 bp, Homo sapiens
ctggagcactctctgccttggccagagaagagaacagctgggagtgtccactcgccttccaccagcatggcaacgtcttcacagtaccgccagctgct

SEQ ID NO: 430200 - DNA, 88 bp, Homo sapiens
ccttattgtggattttagcaaccctgaggtttatgtagaagtttctaaaatgaaaatcaatgttactgaaattcctgacacattgcgt

SEQ ID NO: 430201 - DNA, 100 bp, Homo sapiens
ggattagccttcgcggggcaaaatgtcttactactttgaccgcgatgatgtggctttgaagaactttgccaaatactttcttcaccaatctcatgaggag

SEQ ID NO: 430202 - DNA, 98 bp, Homo sapiens
tcagcctcccgggtagctgggactacagatgtggcaaaatctggcaaaggcagagaccaaacttcatacctcaaactctggggggcggcgggagctga

SEQ ID NO: 430203 - DNA, 80 bp, Homo sapiens
gcaaggagctaaagcagcgtgcgttcagccctgggggcaacaggtttgtctatgctggctctaactcgggcgtggtccag

SEQ ID NO: 430204 - DNA, 98 bp, Homo sapiens
gcaacttgcaagggaactggagacaatgaaaatcttgtcagatgggacgcctatgcctgacagctacccaacaaccccatcttcaactgatgcagcta

SEQ ID NO: 430205 - DNA, 82 bp, Homo sapiens
gccgagagcctcaagggcaagctggaggaggagcgagccaagctgcacgatgtggagcaattgccaatgctactcccatccc

SEQ ID NO: 430206 - DNA, 82 bp, Homo sapiens
cacgggagcaacaccttcacggtcaaggcccagcccagccccatggctgggggttatggagtgatgggtgacgatggttcta

SEQ ID NO: 430207 - DNA, 50 bp, Homo sapiens
tgacttgcatatagtaggtgcttggcagcttcgaaccagtgcaatgacga

SEQ ID NO: 430208 - DNA, 100 bp, Homo sapiens
tccgggagagccagaccaggagagatctgagtgggacatacttttgaaggatgtgcaatgttcaatcataagtgtgacaaaaactgacaagcaggaagct

SEQ ID NO: 430209 - DNA, 75 bp, Homo sapiens
aaagaaaaaacatctgccagtttctcttggagatgttgatcttgtctcagaatattgcccaactggaggcccagg

SEQ ID NO: 430210 - DNA, 75 bp, Homo sapiens
tccactccacctccaagggctacatgggcgagagaacctggagatgtagctactccaccacggaagagaaagaag

SEQ ID NO: 430211 - DNA, 100 bp, Homo sapiens
cctggctgagctgatcggatcacctagagactggaaatgctttctgggtgtcttctctttagggatggtgaggttggaaaaaggctcctgtaaccctcct

SEQ ID NO: 430212 - DNA, 103 bp, Homo sapiens
cggcggcctgcctccgggcacacccggctccccggacgcctcgcaaattgtggctactaatttgccccctgaagatcaagatggctctggggatgactctgac

SEQ ID NO: 430213 - DNA, 88 bp, Homo sapiens
agaaaggagaaagagagctcaaaatcggagacagagtattgctcatgatggagcagtccaagaagtcctccctcatggtggcccgcag

SEQ ID NO: 430214 - DNA, 83 bp, Homo sapiens
ccagtttgatgtttactacaagcccttgccagcatccagccatgggggatatgaaaaccccagattttgatgaccttctggct

SEQ ID NO: 430215 - DNA, 75 bp, Homo sapiens
acctagccgggacgtcgtgggatccggaacagggggacctggacgatctaccatgccaaccccaggaaatactgc

SEQ ID NO: 430216 - DNA, 75 bp, Homo sapiens
ggagccctgggcctgttgacccaccagcttaggagcacccaccaagctctggggggggccctcagcctcttggcc

SEQ ID NO: 430217 - DNA, 101 bp, Homo sapiens
ccccaggtccgcccagcagccgcgcttcagccaggtcgacatttataactcagaccccctgatctgccgggcagggctgaaggtgtgcttcggcatccaac

SEQ ID NO: 430218 - DNA, 98 bp, Homo sapiens
atggaggctgagcatttattcagaacatgggcctggaattgatatattcacacctggtaaacctggagaatatgacttggaaggtggtatatgggaag

SEQ ID NO: 430219 - DNA, 100 bp, Homo sapiens
gtcatcacagagaatcctgtctggataatcatggagctgtgcacacttggagagtgccttgctttccatgacatttcccctcaagcaccaacacattttc

SEQ ID NO: 430220 - DNA, 103 bp, Homo sapiens
caaaagatatacaagaaggagatacattaaatgcaatagcccttcagtactgttgtacgttacggctagatgaggctcaagaagcagaatgccaggccttgag

SEQ ID NO: 430221 - DNA, 75 bp, Homo sapiens
gtggattactgccagatcctgaaagacatcacggtggaggacatcctacagacctggtacctggatttttgcccg

SEQ ID NO: 430222 - DNA, 100 bp, Homo sapiens
aagctagtaatcatgcccaggattgcactgctccgtgtggagatggcgccctctttgacaagtcctgcagcgaccgtgctatggaaagcacagaatcccg

SEQ ID NO: 430223 - DNA, 87 bp, Homo sapiens
ggagcgcccacggagctggacccccagagccgcgcggcgccgcagcagagtgttcgacctacaccacaaaatgatgctataacggta

SEQ ID NO: 430224 - DNA, 90 bp, Homo sapiens
ggatttccttgcggaaaggatgttggcggtccctgtgacctgtggagacacggccagatctgccctccaatggagtctccttctgtcgcc

SEQ ID NO: 430225 - DNA, 100 bp, Homo sapiens
ttgatgaagtaaaggtgtggcctcaggtaatagcctgcagctggtgttttgagaagccctactgctgaaaacttaacaattttgtgtaataaaaatggag

SEQ ID NO: 430226 - DNA, 96 bp, Homo sapiens
caggggtgcagtgtgtctggtcttatgagtattgacttgaagctgaaagaaaagccttagttggccatgctggaagaagaggatgcttttctggtt

SEQ ID NO: 430227 - DNA, 83 bp, Homo sapiens
atggcgtggagatatggcgcaactgcggcgcggtgtcctgttcccaaagctgagctgatctgccacctagagcatgggcagga

SEQ ID NO: 430228 - DNA, 100 bp, Homo sapiens
tgggaagccctgctactgctggattagcgccagaatcctcactatggatgggctcattgaggacattaagcatcggcggtattatgagaagccatgccgc

SEQ ID NO: 430229 - DNA, 75 bp, Homo sapiens
tggccatcaccgaccagagcctggacgaggcacaggccagccaacacaagccatcagccccatgctcagctccca

SEQ ID NO: 430230 - DNA, 80 bp, Homo sapiens
gtgctcgctgccatggatgccaccaagctggttctgcggggagtgtctccagccctgcctgcaggtgccatccccgctgt

SEQ ID NO: 430231 - DNA, 75 bp, Homo sapiens
cttatacttcctggcgctgaccttctttgtcgcagcgttccatgctaaagaattacctccaaagccattgtcaag

SEQ ID NO: 430232 - DNA, 83 bp, Homo sapiens
gcccggtccgcccgcggtgagaggccgagacgcatccagagctttcgtgaccggggactgttctgaagcaggcctcgtggatg

SEQ ID NO: 430233 - DNA, 50 bp, Homo sapiens
tttgcccttatcagtaacacctgagtggttctatagatggtaataaccaa

SEQ ID NO: 430234 - DNA, 82 bp, Homo sapiens
gccattttcctgagttccctgatccccacacctacatcaaaactccgcaaacggggattcagcgtccgatcctttggaacag

SEQ ID NO: 430235 - DNA, 98 bp, Homo sapiens
cgggcgctccgcttcctggagaaggcacagcggctgtatccgacgccgcgagttcgcgcaggatgaagttaaaggaagtagatcgtacagccatgcag

SEQ ID NO: 430236 - DNA, 74 bp, Homo sapiens
tgacatcatcaagcaccccatggacatgagcacaatcaagtttggcaatgaggagcagcagctggcgtgggcca

SEQ ID NO: 430237 - DNA, 75 bp, Homo sapiens
aatgccctcaagtcgacaggggatgggaccctaggccgtgcataaggctgtgctgaccatcgacgagaaagggac

SEQ ID NO: 430238 - DNA, 83 bp, Homo sapiens
ctctctttctggcctggaggctatccagccggccctccaggcactgaagcgtaagaagaggtatgagaagcagctggcgcaga

SEQ ID NO: 430239 - DNA, 100 bp, Homo sapiens
tgaccacccctaaaagcacctggccccgctacagcaaaccaggtgatgtgtccaatctagatcccaacttctcatttgaaggcaccaaactggatgtggg

SEQ ID NO: 430240 - DNA, 75 bp, Homo sapiens
taacaaccgagcccctcctcgcagcgtaagtaaggaggtctctgtaccatggctcgtacaaagcagactgcccgc

SEQ ID NO: 430241 - DNA, 51 bp, Homo sapiens
gaggacgacatgttgcttttcgtggagctgtgagaccaaagacctggttgt

SEQ ID NO: 430242 - DNA, 96 bp, Homo sapiens
tttggaaagcagtttttaagacaagtatgcagtgccattcagaatcaggatttcactgtgatcgaagactactgcactggcctcaaagccctgctt

SEQ ID NO: 430243 - DNA, 100 bp, Homo sapiens
ctgagtctcacagcttgtaaaggtcataactccatgcaggaagctcatcttgtgtgctgataacagaaaagaaatggaagattggattgcagcattaaag

SEQ ID NO: 430244 - DNA, 51 bp, Homo sapiens
cgatgcagtctccattgttctgaccaaggagtacgagagcctgtacacgag

SEQ ID NO: 430245 - DNA, 106 bp, Homo sapiens
catgccgctcctaagcctgcacagccgcggcggcagcagcagtgagagggggggccctcagcctcttggccttgaacgggctgttcatcttgattcacaaacacaa

SEQ ID NO: 430246 - DNA, 75 bp, Homo sapiens
cactccaggcaagccgtccagtaaatcacagaacaaatgtaaaccctctcaaggctcgcgggattgatgtgcaac

SEQ ID NO: 430247 - DNA, 100 bp, Homo sapiens
gagcctgaaggaccctgagaaaggtggtgaaggcatttgtggtcctggcctcgcagttcctgtcccatgacccagaacagctcaccaaggagctgcagca

SEQ ID NO: 430248 - DNA, 101 bp, Homo sapiens
ccacctgtaagaacagaaaatcgtcttatagttgagaatttatcctcaagagtcagctggcagtttggatttaggtggcgagtagaaaaagaagtaatttc

SEQ ID NO: 430249 - DNA, 100 bp, Homo sapiens
aagtggccaggctgtgaagcagtgtgcgaagatttccaatcatttctaaaaaatcgacttaaagcctccagagaagtagaatctgtagaccttccacact

SEQ ID NO: 430250 - DNA, 100 bp, Homo sapiens
cttcttcgcagaccagcccatccagatctatgagaagatcgtctctgggaaggtggagctggccctgctacagcgctcctaccaggacctggcctcgcag

SEQ ID NO: 430251 - DNA, 100 bp, Homo sapiens
attccatccaagagatccaaatcttctcctgtcagtaagtaaagctatgaaggaggagattttgaaaaagctgctgaattatacaaaagggcaatggaaa

SEQ ID NO: 430252 - DNA, 90 bp, Homo sapiens
gagcagtccagaaagcggcttatcgaacagagccgggagttcaagaagaacactccagagttacagaatgtctgaaggggacagtgtggg

SEQ ID NO: 430253 - DNA, 75 bp, Homo sapiens
caggttccagacgacgccggtcctactccagaagccggagtcattcaagggcaagtgtccagagaatggctggga

SEQ ID NO: 430254 - DNA, 90 bp, Homo sapiens
cttgcactctagaagggacaatggacttctggctttggccactttacttcctgccaggtgtcagttgtacccgaggcgttctcagcagca

SEQ ID NO: 430255 - DNA, 75 bp, Homo sapiens
gagccgagccaggactatgtgccagccagccaggtcaaagttggaaattgtaatactcctaaaccaagcttcttt

SEQ ID NO: 430256 - DNA, 82 bp, Homo sapiens
gatccccaacggggaggccaacgtgaagaagtacatgtcccagagcaagcacacggaggcccgggagctcatgtactcggga

SEQ ID NO: 430257 - DNA, 76 bp, Homo sapiens
gcagtttgtccgtgcagctggacttcactgatcctttgctgggaggaggcaaaacagattcagaatctgcagaaag

SEQ ID NO: 430258 - DNA, 100 bp, Homo sapiens
gttccgttgcgagctgcagctgcgatctctgtggtaggcccaggatcatgcggccagatgatgccaacgtggccggcaatgtccacggggggaccatcct

SEQ ID NO: 430259 - DNA, 100 bp, Homo sapiens
acgcaataaaccaagcactctagatgccctcaactatgctctccgctgtgtccacagcgttcaagaaaataatgttgagtttccatgaagaacaggaagt

SEQ ID NO: 430260 - DNA, 100 bp, Homo sapiens
tcccagccttcagaaattgccggtctgggagttgggggcaaggagaagatcctggcaggatgacgcaaaacacggtgattgtgaatggagttgctatggc

SEQ ID NO: 430261 - DNA, 100 bp, Homo sapiens
ccgcagcccgggcccaggccccggcagcgcctgggacaaggttgggataattcttcactattccacccttgccacagtactatgggtaggagtgacagct

SEQ ID NO: 430262 - DNA, 101 bp, Homo sapiens
gggaggggacggccgccggagccgcgaggccaagagcaggccgggctctcgccatgggtcactgtcgcctctgccacgggaagttttcctcgagaagcctg

SEQ ID NO: 430263 - DNA, 82 bp, Homo sapiens
ttctgacctccgcgcgacgtacccgccgccgccgttggctggagtgttatagttttgccgctggactcttccctcccttccc

SEQ ID NO: 430264 - DNA, 100 bp, Homo sapiens
gccacacagtcgtcctaactatgctgaatttctttgtcaccgaatatgctcagtgacctccaggagtctgtggccagctctcgcccccaggaggtgtcag

SEQ ID NO: 430265 - DNA, 90 bp, Homo sapiens
agccggcagagccgtgtctgcagagattgtttcctgacacagccagtggcccctgagagcacagaggtgagatcggactggaactgttcg

SEQ ID NO: 430266 - DNA, 100 bp, Homo sapiens
ataattaccgtatgcagtcccccaggatacagggtcaaaggagagcacaaccatcgcagttggaagcccatggggcaggaaaaccaattctgtgtcctcg

SEQ ID NO: 430267 - DNA, 83 bp, Homo sapiens
ctccagcgccctggcctccctcaccttggacacctcgcttggatgatcacagtcgtgttaaactgcaaaatgctgagaatgat

SEQ ID NO: 430268 - DNA, 83 bp, Homo sapiens
gtgccctggggctgagccctcagcaagagtgagccatggagctacgtgtggggaacaagtaccgcctgggacggaagatcggg

SEQ ID NO: 430269 - DNA, 88 bp, Homo sapiens
ttactgatacagagacgatggtcggaatcagatttgaaaatgaaagttttcagaaagtgctttctctctgtggacatgaggattggat

SEQ ID NO: 430270 - DNA, 82 bp, Homo sapiens
gttggcaacgcgacacagagccagttgataagcaatacaaatcggtaacaaaaccaaagccactaagtcaagctgaaatgag

SEQ ID NO: 430271 - DNA, 90 bp, Homo sapiens
caggccggagagagccgtaggcaggaccccgggacaccctggaagccaggaaatgaacgtgatgcctttgacaccttgttcgaccatgcc

SEQ ID NO: 430272 - DNA, 98 bp, Homo sapiens
tacagatggacctgtacgcgctgctaggcattgaggagaaggcagcggacaaagagacggagccggtgggagaggagagcatctccgacgcagagaag

SEQ ID NO: 430273 - DNA, 100 bp, Homo sapiens
ttttttctcatggatgttcttcttcgagtatttgtagaaggccacaccggtgagaagcccttccagtgcattgcatgtggccgtgcctttgcccagaagt

SEQ ID NO: 430274 - DNA, 100 bp, Homo sapiens
gatgaacccaacctagtgggtgtaatacatcatgaactgcaggctatgctaagaaggaatctgatcttaatggcgcccagatcaagcttcgagaatatga

SEQ ID NO: 430275 - DNA, 50 bp, Homo sapiens
tgggagatctcctttgggcaaaggtaagaatgattgatgttggctgatat

SEQ ID NO: 430276 - DNA, 82 bp, Homo sapiens
ggaaggcaaatgattgtggcagtaaagaagtgtatgtggccgcaaaagataagtaccgtgaattggctgtggaagggatgca

SEQ ID NO: 430277 - DNA, 100 bp, Homo sapiens
caggagctgcgtccggcaggagacgaagagcccgggcggcgctcgtacttctggccactgggcgagcgtctggcagaaacttactcaagtttatagaact

SEQ ID NO: 430278 - DNA, 100 bp, Homo sapiens
ttggagtccggacatctgaaacttggggccagtgtcattcaaagatgtggctgtggatttcacccaggaggagtggcggcaactggaccctgatgagaag

SEQ ID NO: 430279 - DNA, 100 bp, Homo sapiens
aaaacggcgagagtgggcgagaacgtccactgcgggccggcgaaagctggtgctggagaatctggtaaaagcaccattgtgaagcagatgaggatcctgc

SEQ ID NO: 430280 - DNA, 75 bp, Homo sapiens
cgccgccacctcctctgatctacgaaagtcatgttacccaacaccgggtgaaagaacttgtcctggacaacagtc

SEQ ID NO: 430281 - DNA, 83 bp, Homo sapiens
agagaactggccgctgcatggttaccacagaccacaaagacggggaggtttactgcatcgacgcgcggttctacgggaacgtc

SEQ ID NO: 430282 - DNA, 100 bp, Homo sapiens
gacccaccctggatgacagcagcgaagaggaacatgccattgagataactacccaagagatcactcaggaagctactctttgtccgtgcgagactacgac

SEQ ID NO: 430283 - DNA, 98 bp, Homo sapiens
aggcggacagggcgcagcagtactttgagaaaatggacgctgacatcaatgtcacaaaagcggatgttgaaaagaagttttcatgggctgagctgctg

SEQ ID NO: 430284 - DNA, 88 bp, Homo sapiens
cctgctgctgcttggagagccccagacagtcgcttgaagaggttgctgcagcaactggtcacacagtagtgttggtagaccagacaga

SEQ ID NO: 430285 - DNA, 83 bp, Homo sapiens
tggaattctaatttgaaccatgtttggattgaagccgcctctgtattacttaccaggttcgggtctggcggtacttgaagggc

SEQ ID NO: 430286 - DNA, 89 bp, Homo sapiens
ccataagggcttaactcatatatttaacccccctccaaaaagtatggatcctggcgggagccagtcaacccctattatgtcaatgccgg

SEQ ID NO: 430287 - DNA, 75 bp, Homo sapiens
tgttaaggattccaagtaactcttatttggtgggatggatagcagggtctcaggcacaaccagtaatggagagac

SEQ ID NO: 430288 - DNA, 100 bp, Homo sapiens
caaatcatggagccgctggggtcccttttgcctcagatactattttgaagttccctgaatgtggtttctacggaatgtatgataagatcctgctttttcg

SEQ ID NO: 430289 - DNA, 50 bp, Homo sapiens
ctatgaccggcgtcgagaatttcaactgtgctgggagaaggactggccaa

SEQ ID NO: 430290 - DNA, 75 bp, Homo sapiens
aagaaacatatatcccagatttctgtggcagaagatgatgatgaaagtgcatcctctggtatcacgattccaaaa

SEQ ID NO: 430291 - DNA, 99 bp, Homo sapiens
gagaaaactaaagtttaagctggaactccaagagaaagaaacagaagctaaaattgctgaaaagacagcagtacaatggtcagttccgttcaaggaaac

SEQ ID NO: 430292 - DNA, 100 bp, Homo sapiens
ttttgtcagttttgacagtcgctcagaagcagaggctgcaaagaatgctttgaatggtccccagccccaccccagccccaaaggaggctgttcgagaggg

SEQ ID NO: 430293 - DNA, 100 bp, Homo sapiens
gaagtgtcagagcatgagcgccaagtccagaaccatagggattattggagctcctttctcaaagggacagatttcagatgcagaactccaggaagttgta

SEQ ID NO: 430294 - DNA, 90 bp, Homo sapiens
taaaattcttaaaaaggctcagaaagatggatttttgcatgagacgcttctggacagattccagaggggtgactaccatattgatgtctg

SEQ ID NO: 430295 - DNA, 75 bp, Homo sapiens
cggccgccatggagcagccgccggcgcctaagagacatgtcatgctgcccaaggacatagccaagctggtcccta

SEQ ID NO: 430296 - DNA, 100 bp, Homo sapiens
tatagcctcaatactgaggctgattgaacacatacaccaatgcggataaattactggaagcagcagaacagctggctcagactggggaatgtgaccccga

SEQ ID NO: 430297 - DNA, 50 bp, Homo sapiens
cgtcatcctaaggaacatcgaccatcaagatggtgctcatgtggaccagt

SEQ ID NO: 430298 - DNA, 100 bp, Homo sapiens
ctgcctctccagagccaggcacacagcaggcgctccataaatgttcgttggtgctgggctttgacaaacttcctctgtggggtaccatcctcatctcggt

SEQ ID NO: 430299 - DNA, 97 bp, Homo sapiens
ttcctcggtgggggcttagcgcactggaggagcggcgggcttcagacagtagtttatgccaacgtgacttcattcatacagatgaaccaaggatcgg

SEQ ID NO: 430300 - DNA, 100 bp, Homo sapiens
tgattacacccgtgcccaggagcttgacgccttagataacagccatcctattgaattttcagcattgcaaataacaatctcagctactgggatgcccccc

SEQ ID NO: 430301 - DNA, 50 bp, Homo sapiens
attcgcagtggtcgcttcttctccttgatcgccacctgcaacagccggaa

SEQ ID NO: 430302 - DNA, 75 bp, Homo sapiens
ttttctggtccaggaattaatcaagagcaagactcccaagcagctatagggatgaggaagaaatgaccaaacgag

SEQ ID NO: 430303 - DNA, 148 bp, Homo sapiens
aagggcaagaagaggcacgagatgccccctcacatctatgccatcacagacaccgcctacaggagtatgatgcaagggtctccctcttttgtccaaggctggagtgtggtagtgctatcacagctgactgcagcctcaaccttccagg

SEQ ID NO: 430304 - DNA, 100 bp, Homo sapiens
atcacattggaccctcctcccaactgtaggtgaattatgtaacctcattacgctggatgtagctcacaatcaacttgaacaccttccaaaggagattgga

SEQ ID NO: 430305 - DNA, 82 bp, Homo sapiens
ggcgagacgcgcagcgccggcgcccgggagacccaggaggagcccgcaggacgcccctttcgccccaacggtctcttggaca

SEQ ID NO: 430306 - DNA, 83 bp, Homo sapiens
agtcccaggagtcctgaccagagagcagctctggattaatcgaattacagctgctagccaggaacatggactgaagtatccag

SEQ ID NO: 430307 - DNA, 83 bp, Homo sapiens
cgcacctcggggacattattgcgcgtggaacggctgcttttggaagggactggtgattgcagctggaagtgcccatgaccgag

SEQ ID NO: 430308 - DNA, 50 bp, Homo sapiens
tttcctagtgtgcctgtgtgtggggatagctgggagtatggccaccctgc

SEQ ID NO: 430309 - DNA, 100 bp, Homo sapiens
ctacttcaaggataagggcgacagcaacagctctgccggctggaagtctcacagaaagttctccgctcccagacatgggtccctcggcttcctgcctcgg

SEQ ID NO: 430310 - DNA, 100 bp, Homo sapiens
cagagaccagggctcctgtggctcctgctggcaacccaaggagatctgtgcgctggttgggttctgtgatgaggtgaaagagatgcccatgcagactctg

SEQ ID NO: 430311 - DNA, 100 bp, Homo sapiens
ggagtccccccaactgggtacagacctccaccgccacccccgacacaagagacttatggagaatatcatgaatacaactttgtctgagagccccttcaag

SEQ ID NO: 430312 - DNA, 100 bp, Homo sapiens
agctcgccgtcctgccccccttggagagaaactgaaaggaaaaagcaatttcggtatctactagaatccaaaggaaaaaaacctggtattatcaacgaag

SEQ ID NO: 430313 - DNA, 100 bp, Homo sapiens
accgcggggcccccgtcaacatctcctcgtccgacctcacaggccgacaagatacctctcgcatgtccacctcacagcccaggatccggttgtggccgtg

SEQ ID NO: 430314 - DNA, 83 bp, Homo sapiens
ataagaagttcttcgatgtatctaaacttggcaccaagtatggctatgaccagggccagagcactcagatctcagtcagagga

SEQ ID NO: 430315 - DNA, 98 bp, Homo sapiens
aaggcagactgagcgccagagaggacgtttccaactcaaagtgtgatgaatgcagactctgctaccattttggctgtttggatcctcctttgaaaaag

SEQ ID NO: 430316 - DNA, 82 bp, Homo sapiens
gcttgtggcgcgcccgcggagaggccggggcaatagccctctggaacaagacaattcatgtgagataagaaagaagagccca

SEQ ID NO: 430317 - DNA, 100 bp, Homo sapiens
tgtgtgtggagttttccatgaagtgcagtcccaactaaaaggctgcgttaaagtttgcctgagaatacagatcaacccacagaacaaagcggatttccaa

SEQ ID NO: 430318 - DNA, 116 bp, Homo sapiens
caaaaattctacagagtgggaaaaagtgaagtccctatttgaagaacttggaagtagtcgttttgaacgaagaatgtgatcagaactggtacaaggcagagcttaatggaaaagac

SEQ ID NO: 430319 - DNA, 98 bp, Homo sapiens
tcccgggcatgggcggcaactctttgatgtactactataatgggaaagcgcatttaaatcaaacggtattgagatggattgggttatgaaacataatg

SEQ ID NO: 430320 - DNA, 101 bp, Homo sapiens
tggatcttgctcctttgcctgcaaacctatggactagaggcttttaccagatttcttaaaactgaattcagtgaagaaaatattgaattttggatagcctg

SEQ ID NO: 430321 - DNA, 99 bp, Homo sapiens
ctggtctctttccttcaaactacgttaagatgacgacagactcagatccaagtcaacagttgtatcaaattctgggcccagaccaacacaaatgacact

SEQ ID NO: 430322 - DNA, 75 bp, Homo sapiens
gggaggctggcaacagttttcttcagcgcccaggatgcagccggctaagaaccgcatgcacgagtctctcatgct

SEQ ID NO: 430323 - DNA, 100 bp, Homo sapiens
accattaatggacaaaaacatgagtcaatatgtattgtggcattcaaatcctagcactctgggagagattactcagaagtatcaacttcatgaagtcacc

SEQ ID NO: 430324 - DNA, 75 bp, Homo sapiens
agcattttactactgagctgcaaaggaagcagacagtatgagcatgaccagtggagaaggtactagtcaacctcc

SEQ ID NO: 430325 - DNA, 87 bp, Homo sapiens
gttgcccaccacgctgggcgcactcgagcggctgcggcacccgcgggagcgcacggcgctatgtaccgctgggtggagcagcacctg

SEQ ID NO: 430326 - DNA, 75 bp, Homo sapiens
cgggaacgattgggctgagcagaggacgacatgttgcttttcgtggaggcattgggatcccgtggcagttgcagc

SEQ ID NO: 430327 - DNA, 100 bp, Homo sapiens
tgacctgcgcgcccgcctcggcccgcacgccaagcacgtggtgggctatggccaccttggccgccggtgttccagcagcccgtcatctttctgggagcag

SEQ ID NO: 430328 - DNA, 83 bp, Homo sapiens
tctctcttcaccctgccgtcatgtctaagtcagagggatttggacatttggtgccatcttcagaagatccaggagtcctggga

SEQ ID NO: 430329 - DNA, 74 bp, Homo sapiens
agaacatctcgctgtcggtgaagaagatgaggaaaatgaggcccaaagaagtgatgccacttggttaaggtccc

SEQ ID NO: 430330 - DNA, 100 bp, Homo sapiens
aacttacgcacttaaaataattgggcagaagagaagcagtgaaggagtgcagaggcatcacctgaaaggccaagaagcttgagagaagaaaaatttcaga

SEQ ID NO: 430331 - DNA, 100 bp, Homo sapiens
agtaatcaaaaatcttgtacctgatgccgatattcaacgctttcgactgactggagctctcccgtgtcagctcgtagcacagaaggtgaagagcctgctg

SEQ ID NO: 430332 - DNA, 100 bp, Homo sapiens
cccgactccataaggagattcctgagacaacaaggacctcccagatgcaagagctgcacaagtctctccggttttttgctccactcaagcctgttagaat

SEQ ID NO: 430333 - DNA, 75 bp, Homo sapiens
tgaagacttgaacttaatacagcaagaaagaccatcaagtttaccagagtctgcactatggaaacaacctgtcaa

SEQ ID NO: 430334 - DNA, 100 bp, Homo sapiens
gagagatgttatcatgagggaattccggtcagggtcaagtcgtgttctgatcactactgacttgttggcctggcaaaaagcacgaagtgatgggtgggag

SEQ ID NO: 430335 - DNA, 83 bp, Homo sapiens
cagaaagctgggatcagggcctatccaactgttaaattttatttctacgaaagagcaaagcgtttagtgggctacagatggca

SEQ ID NO: 430336 - DNA, 100 bp, Homo sapiens
ctaactcaagccattggcacacaggaactagcttctaaaaaatccctgcctatgaattattacacagtattctaccatgttcaagaacaactacctagag

SEQ ID NO: 430337 - DNA, 83 bp, Homo sapiens
ggccgaggagccggagccgcagatgagagaattgggccagattatctacctgattgatgattataaaaataccttctttgggg

SEQ ID NO: 430338 - DNA, 129 bp, Homo sapiens
gcttaagttttgaagggaggtagcatccgttggatatccacaccatccttctcgctgcagggttcggagtgttcagtggacacacgcttggcagtgtaatttccacagatcctctgaagaggttcttca

SEQ ID NO: 430339 - DNA, 100 bp, Homo sapiens
acttccagtgagagtgacacaggtcaggaagcagaatattccttatatgctggaaggggtctgtgtacatcagcaactttcaaacccattttatttggag

SEQ ID NO: 430340 - DNA, 82 bp, Homo sapiens
gaacgagatcagctccctcaaaggtgatcttgatcctgacgaagtactaccacgcagacatggggaaggttctggaaagttc

SEQ ID NO: 430341 - DNA, 75 bp, Homo sapiens
agagagaaaattgagacggagctaagagatatctgcaatgatgtactggctatcaagcggacttatgacaagaag

SEQ ID NO: 430342 - DNA, 120 bp, Homo sapiens
ctttgttattggagaaacatgcagattatatcgcatcctatggctcaaagaaagatgattattattggtaaaggttttcaaggtgtcatgaaaagatggggatttaaaggccagcctgct

SEQ ID NO: 430343 - DNA, 75 bp, Homo sapiens
catgtttatgttctatgctccctaatgaagatgctattaaggagttgaaaatgctatggattgtctattagaatt

SEQ ID NO: 430344 - DNA, 90 bp, Homo sapiens
agctgccaagcaaggccacgtcaatctcacggtgcggcgtaaagtggtttttgcggggagagtcccgtattctcagagtaaaagttgttt

SEQ ID NO: 430345 - DNA, 99 bp, Homo sapiens
ttacagaattcagtgtgcacctcaacactctgggggtgtattttataggagaactgtggcacaaagaggtgacagtgatgaaaagcctctcaaaggaag

SEQ ID NO: 430346 - DNA, 90 bp, Homo sapiens
cttacttccccttcaccttccttcatgatggttgcacgatgggaacacaagacccgcaagctgagcagggccttcggatccccctacctg

SEQ ID NO: 430347 - DNA, 80 bp, Homo sapiens
tgctcttcggcctagtgcgccagggcctcaagtgcgatggacacattcagctaacgtattttagcaggtggagtgaggtt

SEQ ID NO: 430348 - DNA, 83 bp, Homo sapiens
agatccagtgggaagagccggcggctgcccgggcaagcctccccagctttctgaggatgatatctggctaaaaagcgagggag

SEQ ID NO: 430349 - DNA, 75 bp, Homo sapiens
ggtgatcatgctaagggtcttcatataccacgattaacagagaacatgaatttgctttcggatgctcgctctgcc

SEQ ID NO: 430350 - DNA, 98 bp, Homo sapiens
ggaccctggatgtgttttctggctgcggggggttgtcggagggattccaccaagcagcccagctgcagctccagcaggtggcgctgcagcagcagcag

SEQ ID NO: 430351 - DNA, 75 bp, Homo sapiens
ccatgaagatggtggtcaccgacccccgttacagcacttgacccctgacaagatctaccacgtcacagtgatgcc

SEQ ID NO: 430352 - DNA, 97 bp, Homo sapiens
tctgtttggagttaaaacaaagcggtacagtggaatcttttccgtggtgtatttaagtgggcagaccaacatccacctcagcaaaaacttcttcctg

SEQ ID NO: 430353 - DNA, 103 bp, Homo sapiens
gcgggtacggcggccccgcgcagcccccggccgcagcgcaggcagcccagcaggtgagaagccctaccactgcaactgggacggctgcggctggaagtttgcg

SEQ ID NO: 430354 - DNA, 83 bp, Homo sapiens
ccaaaaatcaccaagtcctggacaggggcaagtgtccgagtggtgaatcagctacttacagagatggatggtctggaagcacg

SEQ ID NO: 430355 - DNA, 100 bp, Homo sapiens
tgtggtggatgtggatgcaaacaaggttattcttaatcctgtaaatacgaatctttccaaaggagatgcccgggcatccgcttcgatcctgaaattccgc

SEQ ID NO: 430356 - DNA, 100 bp, Homo sapiens
tgaggacatggcaggagtgtttgacatagacctggaccagccagaggacgcgggctctgaggatgagctggaggaggggagtgtgaacatggctacgcct

SEQ ID NO: 430357 - DNA, 98 bp, Homo sapiens
atttattcaagtcaattaccatcctttaccagggaatgtcgttgtctgctgggtcttcccctcttcattcccccaagattactccacatacttctcct

SEQ ID NO: 430358 - DNA, 100 bp, Homo sapiens
tggactgcatggaagagaagaaccaggccgtgtgccatgactacgacatccacttctaccccaccttccggacctgcgaccgcatcaagcagtccgccag

SEQ ID NO: 430359 - DNA, 118 bp, Homo sapiens
cggagcgcaatggcgtccaaccccgaacggggggagattctgctcacggaactgcaggagctgttcacccgctcactggctgagagcgagctccgtagtgccccgtatgagttccccg

SEQ ID NO: 430360 - DNA, 98 bp, Homo sapiens
ccacaaacaaactacccattttcttttttggaactcatgagactgtcccttttgatgagaagaataagcctcattctgattcaacagcagagatcaaa

SEQ ID NO: 430361 - DNA, 51 bp, Homo sapiens
aaaccaagtcttgtagtggagtggacggcggacccagccgagaagacgccg

SEQ ID NO: 430362 - DNA, 90 bp, Homo sapiens
cgcgaccgcgggtgcatccagtttctgcgcccagtacagagcaactgattttgttgttcctgggcctggaaaagtagagataacctacac

SEQ ID NO: 430363 - DNA, 99 bp, Homo sapiens
ggaaccctcgcaagggcagaaggttgaagaacaggagatatttgttcagtcgaatcaaggtgaagaggaaacaacaagaatttcatattttacttttat

SEQ ID NO: 430364 - DNA, 100 bp, Homo sapiens
caagttttgggagagcccggagacggtgtcccagctggattcggtgcgggtctggctgggcaagcactacaagaagattggagctggagtgagccttcca

SEQ ID NO: 430365 - DNA, 75 bp, Homo sapiens
ccaggaggttgtattggaaagcagtagtgtggacgaattgcgagagaagatggaaagaactccagtggatccaag

SEQ ID NO: 430366 - DNA, 75 bp, Homo sapiens
ggggaagaatggagaggcttcattcttacagtaacagaggtctatgttaacaatgaatgggcaaccagtgttggg

SEQ ID NO: 430367 - DNA, 97 bp, Homo sapiens
tggagcatatattatggaacacaaatgatttaaggctacagatggaagcccaacgcatttgcctctctctggtttattcaactcatgtggatcaggt

SEQ ID NO: 430368 - DNA, 80 bp, Homo sapiens
gagtccttggggacggagcagcgcgtcgtggggcgagcggcagcaaattgtggctactaatttgccccctgaagatcaag

SEQ ID NO: 430369 - DNA, 100 bp, Homo sapiens
tgtgcatactcacagagttagagagagggatggtggagaacttgcgcctgtcaggggctggatccagaaacctgtggtgcctccttctcttttggttgtt

SEQ ID NO: 430370 - DNA, 82 bp, Homo sapiens
gctctatcgtccgcatctcgatggagaacttcctctcaaagcttggattctgccgtgccactcacgaatggcgacacagaag

SEQ ID NO: 430371 - DNA, 90 bp, Homo sapiens
gtggagttgctgcccttccggagtccgccccgtgaggagaatgatgttctcagtgcagctgagtcttggtgagcagacatgggaatccga

SEQ ID NO: 430372 - DNA, 80 bp, Homo sapiens
ggcgtggagagccgccagggctctatcaaggggctggtgtactccagcaacttccaggagtggttaatgtgttgctaaca

SEQ ID NO: 430373 - DNA, 82 bp, Homo sapiens
tcagtgacgcgatggagcgggcaagatgatatcatcaagttgaatcgaaaggaagggaagaagcagaattttccaagactaa

SEQ ID NO: 430374 - DNA, 97 bp, Homo sapiens
acttctgcaaatacagagactcggattaaagactggacttgaacactaagtcttcaatagctgagattctccatcttaatctacttggaggcaagag

SEQ ID NO: 430375 - DNA, 90 bp, Homo sapiens
cactcggcgagtccgggactgcgctggaacaatggataacttcttcaccgagaacaaaacagtaagttggtggacttgaagctgaagaag

SEQ ID NO: 430376 - DNA, 100 bp, Homo sapiens
gtcaaaactgatttcagaaatgcatagttttatccaggtctggaacaaaaagaatgcaaatgaaaaaggaagaagccagacttctaagcttcctccaaga

SEQ ID NO: 430377 - DNA, 82 bp, Homo sapiens
gtataggctgaggctacctgtgaacagtacgcagtgaatgttgttgacctgacagttcaagaaaaggagaaatatcttaatg

SEQ ID NO: 430378 - DNA, 83 bp, Homo sapiens
cgtggagcgagcgggtggaaaccaggcggccagccagctggaggtaagactttgaccccgacgcaggcttcagtgattgccgc

SEQ ID NO: 430379 - DNA, 74 bp, Homo sapiens
ggatgttaatgtaaattttgaaaaatccaaacttacattcagaggtctgcggggtttccgagaggctcgccggg

SEQ ID NO: 430380 - DNA, 100 bp, Homo sapiens
gtctccactgtgtctgacttggagttgctgaagggactccgagcacttggtctgcctcagccacctccctgacgctgtcccactgtgtggatgtggtgaa

SEQ ID NO: 430381 - DNA, 75 bp, Homo sapiens
ctgccacccattgtgtcttctcaagaagccaaacatcatgtcaatggcaacagaacagtcgaacctttcccagag

SEQ ID NO: 430382 - DNA, 90 bp, Homo sapiens
cgaccctcggagacaccgatatgaccatcaccagagactctgaacaggaagtgcctcctggaaccacagagtcggttcagtctgtggatt

SEQ ID NO: 430383 - DNA, 51 bp, Homo sapiens
gcatgcagcttactgcttgaaaggacagagcgggatgccaccagcttgtcc

SEQ ID NO: 430384 - DNA, 98 bp, Homo sapiens
cggctgctgattctggggctggtcaggaaaccaaggttcgatacaagaggctgttttcctagcgtggcttgctgcctttggtaagaacatgtcgtcca

SEQ ID NO: 430385 - DNA, 101 bp, Homo sapiens
tcgctggagatcgagtaccaaaaataagcgggttttgaaaacaaaaaaaagaaggagtggaagagggggccaggatccaggcctccatccccacagaagtg

SEQ ID NO: 430386 - DNA, 100 bp, Homo sapiens
ggaaacacctcaggacacggcctacaacaccaagaggccgggaccccctcctgctcctgcaggccctgcagaccctgtggtccacgcgggagcggaagca

SEQ ID NO: 430387 - DNA, 83 bp, Homo sapiens
gttttacaaagagatctccgtataggctttatcctgtggataaacgcagagtgaacgagtttggggagtcctacgaggagaag

SEQ ID NO: 430388 - DNA, 101 bp, Homo sapiens
tggatagagtactgctcttcccgaagagcaaaggttggagtcagttagctgctatgcactgtgttatgctgccagacctactgggattggataaatttagg

SEQ ID NO: 430389 - DNA, 90 bp, Homo sapiens
tggaaacctatggttatctgcagagggagtcatgctttcaaggacctcatggtgaagcccttctgtggagctgaccagggtgctgaccca

SEQ ID NO: 430390 - DNA, 75 bp, Homo sapiens
actgcctttcttctgtgggctgtgattttcagaggggaatgctaagagcttgccagcaaagcacggacagagaag

SEQ ID NO: 430391 - DNA, 100 bp, Homo sapiens
ccacgctcagcctcagaagaaagacgttcaacgacttactggggagagaaagaaaaggaacgggagctgagagggatgacctgactgatgattctgtctt

SEQ ID NO: 430392 - DNA, 75 bp, Homo sapiens
gtgttcgcgggtgtgtgctgcgttcacaggtgtttctgcggcagacctgcctagagctggaacgttacctccaga

SEQ ID NO: 430393 - DNA, 75 bp, Homo sapiens
gtcacggatttgattgtgcaggacggacaggaggcacccagacctgcctagagctggaacgttacctccagagcg

SEQ ID NO: 430394 - DNA, 100 bp, Homo sapiens
gccggaagacgcgccacgacgtgggactgcccggggtgtctcgcgcacgggccctcaggaagggtacagccaaagaccggagctttggagagatgaagtt

SEQ ID NO: 430395 - DNA, 82 bp, Homo sapiens
caaaagtggcatgatcctttgcagaaatgactacattaggatattagaaatggctactccccagtcaattttcatctttgca

SEQ ID NO: 430396 - DNA, 91 bp, Homo sapiens
ggagctgggcgcggattcgccgaggcaccgaggcactcagaggagatgagcgggatcgtgtgcagaagaaaaccttcaccaagtgggtcaa

SEQ ID NO: 430397 - DNA, 98 bp, Homo sapiens
gcctcgcctcctcgcagcagcgccatggtcaccttccgcaaccctgtcattgagaggattcctcggctccgacggcagaagaaaattttctccaagca

SEQ ID NO: 430398 - DNA, 87 bp, Homo sapiens
tggaaagacccaggagaagccgcccaaagaactggctcttgtcaggatggtgaagctgttcatcggaaacctgccccgggaggctac

SEQ ID NO: 430399 - DNA, 129 bp, Homo sapiens
cctgctatccccaacaagaggaaagacacacctaccaagaagccagtcaagcggccaggtgctggagaatctggtaaaagcaccattgtgaagcagatgaggatcctgcatgttaatgggtttaatgga

SEQ ID NO: 430400 - DNA, 100 bp, Homo sapiens
aaactactacacacagaagctgcatctgctcaaggagttcccgtgcctgggtcaggagggcctggacaagatcctagagagcttggggcttccttggtcg

SEQ ID NO: 430401 - DNA, 88 bp, Homo sapiens
caaacctcagcctggaggcacttttccaggggtatagaacaggctatgcttacaggcatcctctcattcgagagaagcctaggcacaa

SEQ ID NO: 430402 - DNA, 75 bp, Homo sapiens
attagccagcagacccagctacgtggactagaggacttgaatgctgttgcttttaggtttaaagacaaagagagg

SEQ ID NO: 430403 - DNA, 96 bp, Homo sapiens
cccgactatgttcttgtcgcctccgaccgggtggccgccagcaatattgtccagatgaaggacggagaaacctacacctacgactggcagctgatt

SEQ ID NO: 430404 - DNA, 51 bp, Homo sapiens
agatggcagccagtcagtggtggaggcttctccagggaaagtgaccgaggc

SEQ ID NO: 430405 - DNA, 83 bp, Homo sapiens
ctggccgccccgagcggagcctggagatctgaagaagacacttgaatcatgggtgacgttaaaaattttctgtatgcctggtg

SEQ ID NO: 430406 - DNA, 100 bp, Homo sapiens
ccaaccccagccgaccttgagctccaggagttcgtctcttacgtctgcggaagtgcagctgcctcagttcttagcgcagtctcacaccattttgctggta

SEQ ID NO: 430407 - DNA, 100 bp, Homo sapiens
gcttaatgatataccacagtcaacagaacaggtgaagatcccggatctgttttgtggcctagagattgtccccgcgttgctccacggggatctctggtcg

SEQ ID NO: 430408 - DNA, 82 bp, Homo sapiens
ggagttgggtgtgctgggccccaccatcaaagatggcttcgtgcccctgggcaccctcctgcagttgccccagttccgcggc

SEQ ID NO: 430409 - DNA, 74 bp, Homo sapiens
caaagccaaggagctggaccccactaacatgacttacattaccaatcaagcagttaatgctgcggacaacaaac

SEQ ID NO: 430410 - DNA, 50 bp, Homo sapiens
attataggaacctggtctccctggattgctgctctctgaacactatagtc

SEQ ID NO: 430411 - DNA, 100 bp, Homo sapiens
atggattcagtttgcatctctccctcctttaaacagcttctccgggtctcagcatggaacttggcattagaattcctcgaccactaggacagggaccaag

SEQ ID NO: 430412 - DNA, 75 bp, Homo sapiens
tggaaaacaactttgtggatttgacagaagttgtggaagatatcaataagcgcagagagccgctccccagcctgg

SEQ ID NO: 430413 - DNA, 98 bp, Homo sapiens
agaggcttctataggcagctcacaagtgatgggcagctcagatgggtggtggctaatgccgtagcggcattatctgaaatcagtgagtctcacccaaa

SEQ ID NO: 430414 - DNA, 100 bp, Homo sapiens
aggagctgtgcctggccaggcagtacaggctgatcgtccacaacgactctatgtttgggaatgggaaaggataccggggcaagaaggcaaccactgttac

SEQ ID NO: 430415 - DNA, 100 bp, Homo sapiens
agatatcttgaaaagctgccagaaagttgaagatgagcagccgtcaacactatcaccaaaaaaaaagcaacggaatggaggcatgcggaactcacccaac

SEQ ID NO: 430416 - DNA, 100 bp, Homo sapiens
ccccatttctatggtcctcctcacctatggccgctggcagaatcccaaggactgcagcaaagccaaaaagctggtgtgtaatatcaacaaaggctgtggc

SEQ ID NO: 430417 - DNA, 74 bp, Homo sapiens
cggcgaccggcggcgtccgaggaggaggttctgggggaagagaagctgaaggagatactgaaggagcgggaact

SEQ ID NO: 430418 - DNA, 100 bp, Homo sapiens
tccattgatagcattcagaaagatcccagacatatgtagagtgtgtcggtcagaaggaacacctgagaaaccgctttatcatccttgtgtatgtactggc

SEQ ID NO: 430419 - DNA, 51 bp, Homo sapiens
cctacgtgcacaacatcacccgcaaggttaacgtccctaaaacccgccgga

SEQ ID NO: 430420 - DNA, 80 bp, Homo sapiens
taaagcagcgtgcgttcagccctgggtgccctcggctagcatgacccgcctgatgcggtcccgcacagcctctggttcca

SEQ ID NO: 430421 - DNA, 100 bp, Homo sapiens
aggacctgagagtactcatggaaaaggagttccctggatttttggaagagctcgaggccatgagcagatataccagcccagtgaacccagctgtcttccc

SEQ ID NO: 430422 - DNA, 83 bp, Homo sapiens
ccggctgctggatggaggggattttgtcagcttgtcgtcaaggtcagctggccgccggcacctgtgagattgtgaccttggac

SEQ ID NO: 430423 - DNA, 74 bp, Homo sapiens
ttggcaacctcactgagttagaatcagagagaatggatcttggagaatgtctgaaagtccatgacctggcttta

SEQ ID NO: 430424 - DNA, 100 bp, Homo sapiens
gctgcgcgggacggctctgtaggaaggaacttggttccccctccctcagcttccgccccaaaaggagaacatttcaggataggaataggccaagtgctga

SEQ ID NO: 430425 - DNA, 99 bp, Homo sapiens
cattgctgtccttgaggacttaccagagtgaagggccatgtttatgagtggactaagtgaaagcaaacaaacccatgtacacctgaggaatgtcgatgc

SEQ ID NO: 430426 - DNA, 100 bp, Homo sapiens
gagaagccccagctgcactacgcgggaggttcccctgaaggatgctaaggaatacgctgaatccataggtgccatcgtggttgagacaagtgcaaaaaat

SEQ ID NO: 430427 - DNA, 100 bp, Homo sapiens
tcaaggtggccatagaatggccgggcgcctaccccaaactcatggaaattgatcagggagtcgtcgcatggtggatgtcatggacgtgaacacacagaaa

SEQ ID NO: 430428 - DNA, 103 bp, Homo sapiens
attttcttaatcccaatgttgccctgaaatttatgtccaggattcaaaaagtttaggactgctaagctgagtcagtgctgattctctcaaatagagcttgaag

SEQ ID NO: 430429 - DNA, 100 bp, Homo sapiens
tgtcaaaactttacaagttaattgaagagtcttgtccacagctggcaaattcagtgcagatcaggtcctggatgaccccaatgaggaccatctgtacatg

SEQ ID NO: 430430 - DNA, 83 bp, Homo sapiens
ggctatggccgtgccctggggctgagccctcagcatcctgaggttagcattacacttctcccagtggagcccatgacttctga

SEQ ID NO: 430431 - DNA, 50 bp, Homo sapiens
ggacagaggagcgggcagcaagcggaaactctattatcctcccagtccac

SEQ ID NO: 430432 - DNA, 50 bp, Homo sapiens
ccagcacactcctcgcgagcaagggtgtttctgtggcctgggactggtta

SEQ ID NO: 430433 - DNA, 133 bp, Homo sapiens
tcaggcgattacaagacgattcacctgtccagcatccgaccaccgaggctggagggggagaacacccagaaaacacttggtagacgggactcgagtgatgattgggagattcctgatgggcagattacagtgg

SEQ ID NO: 430434 - DNA, 100 bp, Homo sapiens
gaaggagtcgatgctgaggatgggcacggcccaggggaaccaacggaagccgaagccagagctagagcatctaatgaagatggtgacattaaacgtattt

SEQ ID NO: 430435 - DNA, 75 bp, Homo sapiens
cagggacagcacctcatcccctggatgggggaccacaagatcctcatcgacagcacacttccaccctgggcagcg

SEQ ID NO: 430436 - DNA, 75 bp, Homo sapiens
gtgggcagccagggtcggtgaagatccgggtgctgtggacttggagaaagtggccaatgtgattgtggaccattc

SEQ ID NO: 430437 - DNA, 75 bp, Homo sapiens
cagcggtattctggtgcttatggtgcctcagccctttctaaggcacaaaatgatgtgatggaaatgaagatgcag

SEQ ID NO: 430438 - DNA, 141 bp, Homo sapiens
tgtagcctggaggctccgggcgcggggaagtcatgctcgcttcacggaggcaatagctagccggtactccaaagattcaggtttactcacgtcatccagcagagaatggaaagtcaaatttcctgaattgctatgtgtctg

SEQ ID NO: 430439 - DNA, 82 bp, Homo sapiens
aagctggagaatgacaagagcttccgcggtgtcattctgacctcgacaatgcagatcttcgtgaagactctgactggtaaga

SEQ ID NO: 430440 - DNA, 76 bp, Homo sapiens
tttgactctcctggggagctgtttgatgagcccatctttatcacggataacgtcattagcagaatctcaacttcag

SEQ ID NO: 430441 - DNA, 89 bp, Homo sapiens
ctgctcatcatgctcaagtcagagggcttttactcctacctgtgtaccgagccagccttgaaaagatcttttgaggtcgaggaggtcga

SEQ ID NO: 430442 - DNA, 100 bp, Homo sapiens
gtggccaatgggtattcagaacattttgtggaattcgtgaaacttgtccgtgccaaatttcctgaacacaccattatgaacctcaagaaggcatgaagcc

SEQ ID NO: 430443 - DNA, 82 bp, Homo sapiens
tccaggcgaactcggcctatcgctaccctccgaagtccggcctccggtgtggctgtctctgatggtgtcatcaaggtgttca

SEQ ID NO: 430444 - DNA, 103 bp, Homo sapiens
cccgggaggaaggaacgaggcaaggagctaaagcagcgtgcgttcagccctgggatatggctcgtggacagcagaaaattcagtctcagcagaaaaatgccaa

SEQ ID NO: 430445 - DNA, 100 bp, Homo sapiens
cttccgaaatgttgacttcaactatgctactaaagcaacacagtcactcctggcggcaaaccaaacaaaaccagagtcatctggggaaaagtaactcggg

SEQ ID NO: 430446 - DNA, 100 bp, Homo sapiens
cacgctgcgggcccgggccatggccgccgccgatgccgaggaatttgagagcgtattttgcggtaaaactggccgaaggctaaagctgaccagaccggac

SEQ ID NO: 430447 - DNA, 82 bp, Homo sapiens
ggacgcacgccactttttctctgctgatccaggtctacttccccagcaggacagcatcattctcctatatcttctagacatc

SEQ ID NO: 430448 - DNA, 83 bp, Homo sapiens
tgacctagatggaacacatgctctgatggctttgccattggggtgcagcagctgcaccccaccttgatccagcggacttacgg

SEQ ID NO: 430449 - DNA, 50 bp, Homo sapiens
ctcaacatctctcagagacgaaaggaacttagtgatttggcccgtgaccc

SEQ ID NO: 430450 - DNA, 100 bp, Homo sapiens
aaattgaaaggcttcaaagctagcaggtccaatagaaaaagttggtgtgctggagctacctcacctcagcttgagagagccagttgtgtgcatctctttc

SEQ ID NO: 430451 - DNA, 98 bp, Homo sapiens
ttacaagttggcttatgagtggaacatggctagcaggaatgcttactgttgcgtggttcgttattaacagaccctacagcttggggcctgggctcctc

SEQ ID NO: 430452 - DNA, 90 bp, Homo sapiens
cacgcggggagagcactggggaccgagacccggcaccacctcccggtccgccctccaggcgcaacgtgctgagcttgtcccctggaatcg

SEQ ID NO: 430453 - DNA, 89 bp, Homo sapiens
cggtcatgagcttttgattaacaccttaataaccagcggagctgacacagccaagattatcgagattgcagcctgtcactccacacaca

SEQ ID NO: 430454 - DNA, 75 bp, Homo sapiens
gagacgtttcgggagccggagtctctccaccgcagacatgacgaaggcttgctttgcatctctggtgagtcagga

SEQ ID NO: 430455 - DNA, 90 bp, Homo sapiens
gtgatattaaaattgaagtcttctgtgagaggacacccaaaacatgtgaggtggaagcagggaaaggcctggagatgaggaagctggttc

SEQ ID NO: 430456 - DNA, 87 bp, Homo sapiens
tgcacagattgttggcctaaactgtttaagacttatgaatgacatgacagctgggcactccacagaaggatgttattatcaagtcag

SEQ ID NO: 430457 - DNA, 98 bp, Homo sapiens
ggagaccctctccttctccaagagtcctgagtggcagagtggtgaaggaggagatctcggatgacaatgccaagctaccatgcttcaatggccgggtg

SEQ ID NO: 430458 - DNA, 101 bp, Homo sapiens
gtgttgctaacaatgatcgcccgagtggcggacgggctcccgctggccgcctcgatgcaggaggacgaacaggatttgaatttgttgaaatgagcagtcgt

SEQ ID NO: 430459 - DNA, 83 bp, Homo sapiens
atgcctgcaaagcgaggctgaagaaggccaaggctgcagaagccaaagccacgccggtggctgctggcagcggaatcccccag

SEQ ID NO: 430460 - DNA, 75 bp, Homo sapiens
ccgggttgcgtggatctccagtggaaagtttagaaatcagtccccagaatgtggatgttaatgtgcaccccacaa

SEQ ID NO: 430461 - DNA, 75 bp, Homo sapiens
tataagattcttcaaggtggggttggcatcccccacatacgactccactccacttggctgtgatcaccaaccagc

SEQ ID NO: 430462 - DNA, 76 bp, Homo sapiens
gctgaaggcaactatggatgctgggaaactgatcgtcaatgtatggtactctgtgaatggtgagaggctgggcacc

SEQ ID NO: 430463 - DNA, 96 bp, Homo sapiens
cacccagtcggctggagtcggaggcgatatttctaggggtgtacttgttggggtcaggataagccaatggacacgtcagtgttatctgaagaagga

SEQ ID NO: 430464 - DNA, 89 bp, Homo sapiens
cgcagatgttgtcaaggtggcctaccaggaggccaggggtgtcgccatgggggtggcccgattctacaggtcacggaaaaagcacttga

SEQ ID NO: 430465 - DNA, 80 bp, Homo sapiens
tattcagatcatccaagtggaggttcctacagagattcatatgagagttatggagaacatattgtgatgttcgtgcctca

SEQ ID NO: 430466 - DNA, 100 bp, Homo sapiens
ctgggagccagtgtatcctggagaaatccagtaacctggtgttgcaagtcagctccttaatcacagaagagtcatcagaatttgatgtgagggctttctg

SEQ ID NO: 430467 - DNA, 100 bp, Homo sapiens
tcgggaagagatgcgaggatgacaaggttgctgaaaagccaggagtcaaaatgactgagcgctttgactgccaccattgcaacgaatctctctttggcaa

SEQ ID NO: 430468 - DNA, 98 bp, Homo sapiens
tctggatcaaaaactcagaaaatacgtggttggagagctcatctggaattttgccgatttcatgactaaccagtgacgcagagggctctacgtgtttg

SEQ ID NO: 430469 - DNA, 90 bp, Homo sapiens
cttcgatcccttctctgatttgctgtcagccatgaacggatggatgtgatgcctgctagccaaaaggatgaacacaatgacgtacagaag

SEQ ID NO: 430470 - DNA, 83 bp, Homo sapiens
cgcagcaacaacagagagcacgtgacggactacttccaccttttcatctgcgtggccatcgtggccatctacggggatgacgt

SEQ ID NO: 430471 - DNA, 100 bp, Homo sapiens
tcatgaaaagcatgcccatacgattaaacctgcgacaggcgacactaacaggtgaagatctcgggagaccatgactaagaaaagaattgctgtgattggg

SEQ ID NO: 430472 - DNA, 75 bp, Homo sapiens
tacattatgctgccgcctatgggcacaggcagtgtctggaattgttcctgagggaagacctcaattaccatgacc

SEQ ID NO: 430473 - DNA, 83 bp, Homo sapiens
ctgcgccgcaacgccgagcgcaccgacatctgcctgctcaaaggtttttagaacttcagccataaaaatgggcagaattttcc

SEQ ID NO: 430474 - DNA, 75 bp, Homo sapiens
gtttagcaaaagttcatctccttctgcatccttaactgagaatgagtgaaactggaacgccaagctgaagaagaa

SEQ ID NO: 430475 - DNA, 75 bp, Homo sapiens
caggcgtgcgcggacggtgtgcggttggttagtctgctgctaattggaattgctgcgtggggcattggcttcggg

SEQ ID NO: 430476 - DNA, 88 bp, Homo sapiens
gagagcgcgaatatcgtcatcgttagaaggctcatatctggtgttagtcggccagatgaggtgctcgagtgtattgaaagaggagtgg

SEQ ID NO: 430477 - DNA, 74 bp, Homo sapiens
ttcattctggacgtgcttctgcccgagatgggaaagggctccttcaagtatgcctgggtcttggataaactgaa

SEQ ID NO: 430478 - DNA, 123 bp, Homo sapiens
aaacaaccaaccctgatttcctgcttctccttttcatgagtgttcctgtggtctctgcacctcctttctgatctagtgaaaagccatttgatgtatgcggtcagagaagaagtggaggtcctc

SEQ ID NO: 430479 - DNA, 74 bp, Homo sapiens
tttgattccagtgtgaactgtcaatcataaggctttcatgagaaggacaagaagccatattgccgaaaggattt

SEQ ID NO: 430480 - DNA, 98 bp, Homo sapiens
agttgagcctgttgatgcccgccctgctgccgaccgaggactgaccactcgaccaggaaaatatatgcagatgatgaacattcttaagccaattgcct

SEQ ID NO: 430481 - DNA, 75 bp, Homo sapiens
aatgttcaacaaaattcataagatgcctactttgagtggatgacgtagtagatgaaagtgatgacaacgatgata

SEQ ID NO: 430482 - DNA, 82 bp, Homo sapiens
ctgcgcgaagctggccaaagcctgcccagacggctcacctgtgcgggatggaacaaaagcaaacggggattcagcgtccgat

SEQ ID NO: 430483 - DNA, 100 bp, Homo sapiens
aagagcacgcagagccgcaagctggtggaagcgctgtgcgccgcgggccaccgcgccgaactgctccggttcccggtctgatgatttgaagaagagaaga

SEQ ID NO: 430484 - DNA, 98 bp, Homo sapiens
gctccttctcctggagacgcaactcaagggatatagctagtgcaataaaagaacttcttgatacagtgaataatgtcttcaagaaatatcaataccag

SEQ ID NO: 430485 - DNA, 50 bp, Homo sapiens
cggcaacagtaacgaaaaacagggcttggaagtatgcgagacttaagagc

SEQ ID NO: 430486 - DNA, 98 bp, Homo sapiens
ggaccttctaataatgcgagctgcttccgaaggctgaccgagtgcttcctgagccccaagcggttctggtgaggttggaaggatgcagccacccggtt

SEQ ID NO: 430487 - DNA, 75 bp, Homo sapiens
aacatgcctctgacaatctctagtatgaagactggcccatttgcagagcactccaaccagctgtggaacatcagc

SEQ ID NO: 430488 - DNA, 50 bp, Homo sapiens
gggcagttgcagtgttggagctaaaatgttgctaaatttgcataagaaga

SEQ ID NO: 430489 - DNA, 96 bp, Homo sapiens
cgtgctacagaagaagggcatcgtgcgtgccaagcggcgaggctctcccggctgtgatagaccttcagttacagagagagggagcagagtgggacc

SEQ ID NO: 430490 - DNA, 100 bp, Homo sapiens
gttggacttcgcgatcttcgccgttaccttcttgctggcgttggtgggagccgtgctctacctctatccgagtctcattctgttaccaggctggaatgca

SEQ ID NO: 430491 - DNA, 100 bp, Homo sapiens
cttgatatcataaagaaggtctttgaccgacacctccaccctacaagtactgaaaaggcacagtctgcagatgcctccaaggagtccgaaaccaagtccg

SEQ ID NO: 430492 - DNA, 97 bp, Homo sapiens
cccatctcgctgcagtctataagaagtagcctactgctaggcttcaggagagattatggagaagtctggcgaggaaggaatgcctgatcttgcccat

SEQ ID NO: 430493 - DNA, 100 bp, Homo sapiens
ggaaagattgcaaggtgaataaagaagtggagcgtgtcctgaaggagttccaccaggccgggaagcccatcggacggccgaagccctgcagcccacgcta

SEQ ID NO: 430494 - DNA, 80 bp, Homo sapiens
gaggaatccaaaaagcagctagtgaaaccagagcaggtggaacctaacttcttgtggaacaagtgttgccagctcagaag

SEQ ID NO: 430495 - DNA, 100 bp, Homo sapiens
gcctgcgcagctccggccgcctggctccccatactagtcgccggttcgagaacttgtcttggacaattgcaaatcaaatgatggaaaaattgagggctta

SEQ ID NO: 430496 - DNA, 75 bp, Homo sapiens
gccagatggacaaggagaccaaagagaacaacctctctgaagaagttattgccttgtctgtcaagatccgcagtt

SEQ ID NO: 430497 - DNA, 51 bp, Homo sapiens
ctcccactgattctacattacgctgtctgcttttctgtggagactgcgggt

SEQ ID NO: 430498 - DNA, 90 bp, Homo sapiens
ctatgcacttgtggaatgagagaaccgaggaacgaagaaacagacattcaacatgattgcatttgaaggtaccgtgagggttttctctgg

SEQ ID NO: 430499 - DNA, 51 bp, Homo sapiens
actttttgctccccttcctggaagaggatattttaattaactgtcgacgtg

SEQ ID NO: 430500 - DNA, 83 bp, Homo sapiens
ccgggcacctccgagcgcaaggacagcgcgaggtccgcgcagcccagcgcagccatcagcccctgtcaaagggaacaggaagc

SEQ ID NO: 430501 - DNA, 75 bp, Homo sapiens
tactcgttgctgaacgtgcgcagggagagtgcctggtgaagaatgtgatgggatcactagcatgtctgcggagag

SEQ ID NO: 430502 - DNA, 100 bp, Homo sapiens
gaccatgttgcaggcccacagctgcctacagaaccgtcccaaaatatggcaaagaaacctattctgagtccagatgccggtcatccacccactgtccagc

SEQ ID NO: 430503 - DNA, 74 bp, Homo sapiens
ttaattttagggtcctttatatagaagggagagtaggaagctgtgctgaatggtttggtggccactgaggtgtt

SEQ ID NO: 430504 - DNA, 95 bp, Homo sapiens
cgtggcattatccttcagtggggctattggactgacttttcttatgctgggatgtgccttagaggattatggcataagctgtggccatgactact

SEQ ID NO: 430505 - DNA, 98 bp, Homo sapiens
aaactaatggctttactgactcctctaaatgtgaattgccatgcaagtgatgggcgaaagagcctggcccaactagagaatctgtgcaaacagctgta

SEQ ID NO: 430506 - DNA, 74 bp, Homo sapiens
agcttccacgtgtgagtgagaacatcacagaaccgggtgaacatgacctacgagaagatgtctcgtgccctgcg

SEQ ID NO: 430507 - DNA, 100 bp, Homo sapiens
gcccaggcgcgggggcgacgacaggcattgaagttgatatcgatgtggagcacggagggaaaagaagccgcctgacccccgtctctccagagagttccag

SEQ ID NO: 430508 - DNA, 101 bp, Homo sapiens
ccctggtccggcagccgcacaccatcctgcgcgtcgtgtcttgggtgacagagctgaatgaacctctctccaatgaagatcgaaatctcctctctgtggcc

SEQ ID NO: 430509 - DNA, 118 bp, Homo sapiens
gttagtgtctggagccatgaaggccttgtgctgaccaagctgctcacctcgatgtgggcgctatctccaactgtctttgcacttctgagtaagaatctgatgattgtgcacagtgacc

SEQ ID NO: 430510 - DNA, 90 bp, Homo sapiens
ttgccgacgccatggccgagtcacctagccgggacgtcgtgggatccggaacaggtcaaaatgcagatcttcgtgaaaacccttaccggc

SEQ ID NO: 430511 - DNA, 117 bp, Homo sapiens
acttcattggccacctacagaaacaaaatgtcaacaaattgatgggcatttgcaagtaaaatcactggcatgttgttggaattatccccagctcagctgcttctccttctagcaagt

SEQ ID NO: 430512 - DNA, 110 bp, Homo sapiens
gattgtcctctagtttctccatctcctgaggcatgcttcacaccactgccagaagagctgccagacatggagattaagtagcttgcccaagatcacccagccagtaaagt

SEQ ID NO: 430513 - DNA, 85 bp, Homo sapiens
ggcggctttgcatcggaaatcagctctacagttcagatcattgtcacagtcgtactgggactggttataggtgccatttactttg

SEQ ID NO: 430514 - DNA, 90 bp, Homo sapiens
ctccgtaggagcgcgggggcggctcctgctcttcctggactcctgagcagaggtgatcgaggagttctacaaccagacatgggtccaccg

SEQ ID NO: 430515 - DNA, 100 bp, Homo sapiens
tcagtaccaacaaccccacgaggctttgatttgttggagaaactgttaccagaaaaacaggtcccgatcccgaccccaaaagagtattcttggatcttgc

SEQ ID NO: 430516 - DNA, 75 bp, Homo sapiens
aagagctatggtgaaacaccactgaagcattgccaagcccctgcagatcaagtcagtagtggcaccagagcatgt

SEQ ID NO: 430517 - DNA, 89 bp, Homo sapiens
ggatcttacacttgaaatacagactgttggggaacaagagtatcttgcacctgaagtaattagaaaacagccctatgacaatactgtag

SEQ ID NO: 430518 - DNA, 90 bp, Homo sapiens
cgacggcggaacccgtgggcctgtggactgcagcctcggcggtcagcagttggaaaatggatataccttatttgattatgatgttggact

SEQ ID NO: 430519 - DNA, 74 bp, Homo sapiens
cccgctcacctgcgctgtgatgcctgcagagctgtggcttaccaggagaaggaccgtccccacgaggggacccg

SEQ ID NO: 430520 - DNA, 90 bp, Homo sapiens
acggccctccgggtctggggagtggggaatgaggcgggggtcggcccggggctcggagaatgggcaggagttcatgatcaagtgttgccc

SEQ ID NO: 430521 - DNA, 100 bp, Homo sapiens
gaaaactttcacagactgttttaactgtttaccgatagcagccatcgtggatgagaagatattctgctgtcatggagggaagaaggagaaagggccaacc

SEQ ID NO: 430522 - DNA, 100 bp, Homo sapiens
gaactccaagccaaaatcacagctttgagtgagaaacagattgagaggatccagaatccagatctctggaatagctaccaggcaaagaaaaaaactatgg

SEQ ID NO: 430523 - DNA, 75 bp, Homo sapiens
ccgacatcgacgccgcctggcaggccctgcgcaccaggttgagaacttgttgcttagtaaccaagggaccattaa

SEQ ID NO: 430524 - DNA, 90 bp, Homo sapiens
ccgagcgcaaggacagcgcgaggtccgcgcagcccagcgcagccatgccgccatggcatcagatgaaggcaaactttttgttggagggct

SEQ ID NO: 430525 - DNA, 75 bp, Homo sapiens
agccacggccacggccgcatagtttaagtgctgtggggctgctaactacacagattgggagaaaatcccttccat

SEQ ID NO: 430526 - DNA, 90 bp, Homo sapiens
ggtttttctctgtcagtgcagttgctatgttgcagaagatcaacagtatcagtggctggaaaagatatacgagaacgccatgattgctgc

SEQ ID NO: 430527 - DNA, 83 bp, Homo sapiens
taccttctggaagctactactacgtggtgcttggaaagatatgtgtcacaaagatgtctacacggaactgccagggaatggac

SEQ ID NO: 430528 - DNA, 98 bp, Homo sapiens
gaaggcgacttcaagacgcggcccaaggtgtcccttggcggcgcgagcaggaagggaatccgagcccgcattttagagactttggtcatgcttcttct

SEQ ID NO: 430529 - DNA, 82 bp, Homo sapiens
cacgtctctaccgagcacaaactccacgaagccaacgcccagaacccagcttagactagaaagtctagaagacacacacata

SEQ ID NO: 430530 - DNA, 74 bp, Homo sapiens
gctgacgtctccttgcgatggagcatatccggacgaccaaggtaacagagattcaaaggtaccttcagaaggaa

SEQ ID NO: 430531 - DNA, 50 bp, Homo sapiens
gtgaggagttgctaaatgctcagagttcttggagtctctgcggagtccct

SEQ ID NO: 430532 - DNA, 98 bp, Homo sapiens
ctaggatcagaaacctggctcctggctcctggctccctactcttctaaggatcgctgtcctgacagaagaggagctgtaaaattgacaagcttggcat

SEQ ID NO: 430533 - DNA, 50 bp, Homo sapiens
aatgaacaaacattgagagcaggtgctggagaatctggtaaaagcaccat

SEQ ID NO: 430534 - DNA, 76 bp, Homo sapiens
ctaatactgaagaaaaaaatactcttccctcaaaggaaaaatttatccagttggcgaaggactttgaggatttccg

SEQ ID NO: 430535 - DNA, 100 bp, Homo sapiens
gtcctgtaatcgctattgacagctttaggcatatgtatgtgtttggagacttcaaagatgtattgcagcttgaaatccactctccagatgctaagcacac

SEQ ID NO: 430536 - DNA, 152 bp, Homo sapiens
gcgtcgtcctgagaggagtgaaggcggcaaaatggcggaccgcttctcccgcttcaacgaagaccgagactttcagtggaggtgaagccggtgctgccaagagccatgcccagttccatggggggtgggggtggaggcagccccagccctgt

SEQ ID NO: 430537 - DNA, 83 bp, Homo sapiens
ctcactcccgtttccgagccataaaaggtctaggaccgcttcccccgagccagcaggttgtgaccgagattcccgacgagaga

SEQ ID NO: 430538 - DNA, 74 bp, Homo sapiens
tgcaaatctgagcgttctcaacttggttattgtaaaaaaagccgaaggagtaaaggtgctgcaatgatgttagc

SEQ ID NO: 430539 - DNA, 87 bp, Homo sapiens
agatttctatgcaggaccccaaaatgcagggatcatagacggtatttctatgtaaacgaacagtcgggcgagtctcagtgggagttt

SEQ ID NO: 430540 - DNA, 100 bp, Homo sapiens
caagaaatttatcccttcactatggagcattttacaagggaagctgagttttggagcaaactaatgcactctacacccccaagtgcatatgggtctgtca

SEQ ID NO: 430541 - DNA, 82 bp, Homo sapiens
gggcttttgctgatatgcatgcatgtaccgaccttctgaacaaggccaacacctatgcagaattggcagagggggtcgattt

SEQ ID NO: 430542 - DNA, 100 bp, Homo sapiens
tgccccccgcccccaagccgcggccatggacctggcggatccggcctgccctggcccagctcaacacctgatttcggtcaaaatgcagatcttcgtgaaa

SEQ ID NO: 430543 - DNA, 100 bp, Homo sapiens
ccggcgtgcgctggtcactgaggcccaggtcgccgccgcggcgcggagagaagatgactgaggaggaggtggagaccgttctggcaggacacgaggacag

SEQ ID NO: 430544 - DNA, 97 bp, Homo sapiens
acatcaaccagagcagattccagcctccacatgtacatatgtatggcctcacaagtcttggtctacccaccatatgtttatcaaactcagtcaagtg

SEQ ID NO: 430545 - DNA, 73 bp, Homo sapiens
ctggccccagtgctgcgtccttatcagccgagccgctactacccacagatggcatgatccgaaaacactctca

SEQ ID NO: 430546 - DNA, 90 bp, Homo sapiens
agccatgttttggaaaagagaactcaaggtctggcagggagaaaggagcaagaaacccgcgctgaccgcagcaagaagcttttcaggcac

SEQ ID NO: 430547 - DNA, 75 bp, Homo sapiens
gtcattgattctgaaaaggacatggctgttctgagatgttgatggctcatgctgtgacacagcttgccaatagaa

SEQ ID NO: 430548 - DNA, 75 bp, Homo sapiens
gtttgcggattttgaatatagggttattcagcttctcaaggctggaaaagcgaaggaagtttcctacaatgcact

SEQ ID NO: 430549 - DNA, 101 bp, Homo sapiens
gcggcggaccgtcccgcgcggggcacgatgttgaacatgtggaaggtgcgcgagctggtggacaaagcgctgttgaagctcaaatccgaagttttggacag

SEQ ID NO: 430550 - DNA, 100 bp, Homo sapiens
agaacttgtacagagatgtgatgttggagaactatagcaatctggttttcttgggtttctgaaggattgtcattcttgcatagcagtgtgaaaatggtgc

SEQ ID NO: 430551 - DNA, 95 bp, Homo sapiens
tctttgtcagtgcacaaaatggcgccctacagcctactggtgactcggctgcaggtgctaagtgtggtggctcacacctgtaatctcagctactt

SEQ ID NO: 430552 - DNA, 98 bp, Homo sapiens
aatctttgtgtttggctgcccaggctcgcctcgactccaaatggttgaaaacagatatacaggtacaggtttgcagattccgccagcagcacagcaag

SEQ ID NO: 430553 - DNA, 101 bp, Homo sapiens
gccgagctcgtcagtgcaattgaggaactcgtgaaaagcaagatggtttaccgacaagactgtgaaactttcgggatggtggtgaaaatgctgattgaaaa

SEQ ID NO: 430554 - DNA, 90 bp, Homo sapiens
gcggccatcgtcatcctgctgctgaagatctggaagacgcgctcctgcgccgtgatcagggccaaagcggtcagtgagaaggaagtggac

SEQ ID NO: 430555 - DNA, 50 bp, Homo sapiens
gaaagagtcaacagcagtggcaacagtgcaaggaggaagtggtgagcacc

SEQ ID NO: 430556 - DNA, 90 bp, Homo sapiens
ggaacacctcgccaaagcagagaaatagtatgatctcgtgaaatcttgagagaaactgaatgacgaatgaaactattgttcctgtttcac

SEQ ID NO: 430557 - DNA, 100 bp, Homo sapiens
tctatgtggaccctgcggaatccaccggcgcagtttcatctagcgactggagcgaatgtgaatagaaccacagctaataatgaccatactgtactgtccc

SEQ ID NO: 430558 - DNA, 100 bp, Homo sapiens
tctgaccgcaaacaaggagagcctactgagcagcctgagtggcaggaggatgcattagcacaacaggcctttgaagaggctcggagaaggacacgcgaat

SEQ ID NO: 430559 - DNA, 80 bp, Homo sapiens
gccaggtctttgagcaggatgcttctggagacgagaggtccggccctgaggactcggccatccgggatggtgtcattgag

SEQ ID NO: 430560 - DNA, 88 bp, Homo sapiens
ttcctcgtcctagtgatccacgcgcagttcctcaaagaaggcgtccgacctccgatcatgaacgggcccctgcacccgcggcccctgg

SEQ ID NO: 430561 - DNA, 75 bp, Homo sapiens
gttaacagcctatgggtgaaatttggctttcattcatgaatgagatcattcctttctgacaaacgatgagctcgc

SEQ ID NO: 430562 - DNA, 75 bp, Homo sapiens
aagctggtaggcacgggcggctccgcagtgaccggactcgggggaggtttgatctgtggatgaaatgaatcatga

SEQ ID NO: 430563 - DNA, 75 bp, Homo sapiens
ttgatcgtcaagtccttcaagcagttcgcactacagcgggagcaggagctggagtaagactttgaccccgacgca

SEQ ID NO: 430564 - DNA, 75 bp, Homo sapiens
gatctttccggatcaatccagatggcagccagtcagtggtggaggcctgtagtggtggagacacgcccagtggat

SEQ ID NO: 430565 - DNA, 100 bp, Homo sapiens
tctgtgggagaccggagcgggagacagcggtgacaggagcagcggccgggagcccttagggaggcagtgtggacaacagtgagtatatgcggaatggaga

SEQ ID NO: 430566 - DNA, 82 bp, Homo sapiens
cgaggagggctgtcagagcctcatggagtacgggttatgtaccgaaggactctaccgtgtcagcgggaataaaactgaccaa

SEQ ID NO: 430567 - DNA, 90 bp, Homo sapiens
ggcccctgtcaagaaggtgccggtggtgcgagtcttcggagcgaccccggcaggttccattacagcttatagaaagtgttgaatgccgag

SEQ ID NO: 430568 - DNA, 75 bp, Homo sapiens
cgccgtgcgaaggaggaggagatgaagaggttctgcaaggcccagcttccttcaaaatgtctactgttcacgaaa

SEQ ID NO: 430569 - DNA, 98 bp, Homo sapiens
tcctggcggcccccagccgccgcccacgcagcagggacagcagcaggactccatccccgtgtctacctccctccttggagacacttccgacacgacct

SEQ ID NO: 430570 - DNA, 98 bp, Homo sapiens
tgaaaaaaccaaaattatcgccaagattcagcaaacgatcatccctcgttctgacctgaatggcctgccgtcgcctgtagaggaacgctgtggagaca

SEQ ID NO: 430571 - DNA, 100 bp, Homo sapiens
gcagcaacgtgactctggtctgcatggccaatggccgtcctgaacctgttatcacctggagacaccttacaccaactgggccgagatctggacgataaaa

SEQ ID NO: 430572 - DNA, 74 bp, Homo sapiens
tcgagtcgccatgtttctcacggactccaacaacatcaaggaagtactagccggacatcatgagtggctgtcgg

SEQ ID NO: 430573 - DNA, 90 bp, Homo sapiens
cccgggccggctgcatgccgcctcctatctgcccgccgctcgcgccgggcccgtggccggggaaaaagacctcgatgaagttctgcagac

SEQ ID NO: 430574 - DNA, 115 bp, Homo sapiens
ggcttgggccgccgagctggacccggaccggttttgggtaagaacaagagagttggaaagcagttagcctcacagaagatccttcagctgctgcacccacatgtcaagaactggg

SEQ ID NO: 430575 - DNA, 82 bp, Homo sapiens
ccgcctgaagcgcctgagcaatacggatgggctgcccagactttcgcagctccatcattcgatgacaagattctggaggtgg

SEQ ID NO: 430576 - DNA, 74 bp, Homo sapiens
tctgctcttcctcccttcgctcgcaccatggctgacaaacgggctcatcataatgcactggaacgaaaacgtag

SEQ ID NO: 430577 - DNA, 98 bp, Homo sapiens
ttctgcttcagtgtgaaaggccacgtgaagatgctgcggctgagcgaaaagctgttgctatatgatacagtccagagtgaactagaggagaagataag

SEQ ID NO: 430578 - DNA, 74 bp, Homo sapiens
cttgccccccaggttaccactaaaaatgccaggatgccattgaaaagttatttcctgatgccattagactgaga

SEQ ID NO: 430579 - DNA, 75 bp, Homo sapiens
ttgccctgagttacataaataggtgggaatggaagtggccccacatctcaaagaaaccctaaataagaacttttt

SEQ ID NO: 430580 - DNA, 85 bp, Homo sapiens
gtcttgaattgtcctgcctgcatgaccacactttgccttgattgccaaaggtgcccaaggaccaagtccttgacactgtctacct

SEQ ID NO: 430581 - DNA, 114 bp, Homo sapiens
agaaatgaggagctcgcccagacatggaagaggtctgagcagtgggccaccatcgagcagctgtgcagtctgaatttcctgctgctgttcacaaagatgctttttatctttaac

SEQ ID NO: 430582 - DNA, 90 bp, Homo sapiens
ggtgaggtcagcttcacattctcaggaactctccttctttgggttgggggccgtcccgctcctaaggcaggaagatggtggccgcaaaga

SEQ ID NO: 430583 - DNA, 100 bp, Homo sapiens
acttacctaggaatgagagggacaggagtatctgaggatggagaactcagcacaacatctgaatgaattgatgacgaagaagtggctattagggtcaaac

SEQ ID NO: 430584 - DNA, 75 bp, Homo sapiens
gcccggtgacggcggagaggcgccccccgcagcaggcgtggtgtccctcgtggccgttcacccctccaccgtcaa

SEQ ID NO: 430585 - DNA, 100 bp, Homo sapiens
tctggaacagaaccaggagggagacgcggcctacaggaaggccttggacctggcgagagagtttttacctcaggtgatccacccaccttggcctcccaaa

SEQ ID NO: 430586 - DNA, 76 bp, Homo sapiens
gtttagagaagggcacaagattattccaagcaacagaattacctggagtagaacagaaaaattattatgtctgtgt

SEQ ID NO: 430587 - DNA, 100 bp, Homo sapiens
gaggagaacgtcccgctggatctgacccgagtctcaaaccatgaattatgtgggacagctggctgggcaggtgattgtcactgtgaaggaactctacaag

SEQ ID NO: 430588 - DNA, 50 bp, Homo sapiens
gctattgctgggattttgaggagctgcagatctgggacacggccggccag

SEQ ID NO: 430589 - DNA, 100 bp, Homo sapiens
atcggacactacgtgctgggcgacacgctgggcgtcggcaccttcggcaaagtgaagagagcatcgtgcatcaagtcaccagggtggtccattcaagctg

SEQ ID NO: 430590 - DNA, 100 bp, Homo sapiens
gctgtctcctgcaagaactggctcaagaaatttgcctcgaaaaccaatgccggtggtggtgtgcacattgagccccggtatagacagttcccccagctga

SEQ ID NO: 430591 - DNA, 75 bp, Homo sapiens
gcggatctcaccgccgctcaggggattaaagcctgtggtttccacagaagcaccacctatcatatttgccacacc

SEQ ID NO: 430592 - DNA, 100 bp, Homo sapiens
acagatgtgttgtcttcctggctgatggatttacaactgagtgacagtaactttcgtcgacacatcctgttgcagtatctcattttattccaatatctca

SEQ ID NO: 430593 - DNA, 75 bp, Homo sapiens
acagagcagcagctacgggcagcagagtacaccaggggttggaaaaaccacactaggcaaagaacttgcgtcaaa

SEQ ID NO: 430594 - DNA, 75 bp, Homo sapiens
ccgggtaccggccgtggaagcggccaccgactactgtcagcagctgtgccagatcgataaagaattggctagtgg

SEQ ID NO: 430595 - DNA, 73 bp, Homo sapiens
aggggccaaggcagaagaaatcttggagaagggtctaaagtaacaacatgctgtaccccaaggaagacaagga

SEQ ID NO: 430596 - DNA, 83 bp, Homo sapiens
cttcatcaccccctacctcctggggcccgacaagaacttcacgcgggagcagcaaattgtggctactaatttgccccctgaag

SEQ ID NO: 430597 - DNA, 120 bp, Homo sapiens
cggaagggcggacacctccacatcgccttttgccacctttccctttatttccggagacaatgcagatcttcgtgaagactctgactggtaagaccatcaccctcgaggttgagcccagtg

SEQ ID NO: 430598 - DNA, 100 bp, Homo sapiens
ggggaccctccggccgggcccccagaggcgggagcgcgggaactaagcgtcttgtagaaggaactattaatccaggagaaacctgtttaatcattgaaga

SEQ ID NO: 430599 - DNA, 134 bp, Homo sapiens
tcccatgccatcagtatgagcgcctatctgcgagaacagagaagggagctctatagtcggagtggagaactgcaagtacaaaattggacagctgtacatgatcagcaaacacagccatgaacagagtgaccggg

SEQ ID NO: 430600 - DNA, 100 bp, Homo sapiens
cggggtcatctttaactgcttggccgtgcttgccctgtcatcccacctgagaaccatgctcaccgaccctgatttttgccgtcctctcggccatcctgta

SEQ ID NO: 430601 - DNA, 108 bp, Homo sapiens
cctggctggggaaaagggaagtgaaaagagatctgttttcagcgaccgtggcagccatgtattacagctactacatgctaccggacggcacttactgcctggcgccgc

SEQ ID NO: 430602 - DNA, 82 bp, Homo sapiens
ctccatgcgaccgctgcacatccagccgccaccggcacggccaggccagcatggtggaccacttacttccagtggacgagaa

SEQ ID NO: 430603 - DNA, 100 bp, Homo sapiens
ggacaccgggagtgggagagattggactgggagactcagcaggttctgcacttttaaaagaaaagcaaaggcatcgattacataagttcttgtgtctcag

SEQ ID NO: 430604 - DNA, 75 bp, Homo sapiens
cgcaaacccggaagcggatcgggtggagtgtaggtcatatcgccgcggttcatctgcagaagccagcggacgcct

SEQ ID NO: 430605 - DNA, 100 bp, Homo sapiens
attacaacatgcccctcacctccacctacctgaagcagatgaagcttcgagtgatgaattcccaggagcagtattctcgccgcccagcagtcaagattct

SEQ ID NO: 430606 - DNA, 100 bp, Homo sapiens
cctgcacacagccaaagtctgcaaagccccaggagatgggcactgagaaagtgattgaccgaaaagtggagcttgaaaaggaggatggtcttgtacttca

SEQ ID NO: 430607 - DNA, 50 bp, Homo sapiens
tgaaagggaagcagaaccatactatatttgtaccctgttgaaatgtaaaa

SEQ ID NO: 430608 - DNA, 100 bp, Homo sapiens
tgattcccgaagaatcaaggctgggccggacccggtggcctggcaacagggttgctgaataaccatcatgatgatgcctctaaattcatctgtcttctag

SEQ ID NO: 430609 - DNA, 110 bp, Homo sapiens
tgaacttaaaaagcagtctaaacctgtgaccacccctgaagaaattgcacagatcctgtttgaccaaactcagagatcaattaaggcacagcttcagaactttgttaaag

SEQ ID NO: 430610 - DNA, 82 bp, Homo sapiens
cccgcgctggtgcagccaccctcgctccctctgctcttcctcccttcgctcgcaccatggagtacgaccccagcaaagcgac

SEQ ID NO: 430611 - DNA, 138 bp, Homo sapiens
ccgagtgggtgtctggtgccggcgtttgggctacggttgttgttggcgactgtgcttcaagcgatcgtcagtatttaaacagatcacatcatgcgtgagtacaagctagtggtccttggttcaggaggcgttgggaag

SEQ ID NO: 430612 - DNA, 100 bp, Homo sapiens
ttttcagagactgggacttggagcagcagtgggccctccagaatttccacagcatacacctggacctgttcccaacagtttcagccagcccccacgactc

SEQ ID NO: 430613 - DNA, 100 bp, Homo sapiens
ggacttccctttggatgtagcaaggaagaaattgttcagttcttctcagacccagcgcgtgtcctcaacatgccccctgtgatttacgtgcccgtgggga

SEQ ID NO: 430614 - DNA, 115 bp, Homo sapiens
ctaagaaagatcctgtcaaaatagtccgatgccacgaacatacagaaatccttaccggcaaacttgaagataaatcttttgactccagctctttagaggatctaaagtgaccttg

SEQ ID NO: 430615 - DNA, 79 bp, Homo sapiens
atgggggtccgcgggtttgggaggagtatgccaaccagcatggccctggacagattggacgactgattattggacagaa

SEQ ID NO: 430616 - DNA, 73 bp, Homo sapiens
acaaggtggccgacaacctggccatccagcttgctgatcgaacagaggctgcaaatagaataatatgtactat

SEQ ID NO: 430617 - DNA, 90 bp, Homo sapiens
gagctgagtggttgtgtggtcgcgtctcggaaaccggtagcgcttgcagcatggtatatgactgatgggatgttacttcgtgaagctatg

SEQ ID NO: 430618 - DNA, 50 bp, Homo sapiens
aaaaagccatcttacactactcaaaggatttttaaagagcgagaagaaga

SEQ ID NO: 430619 - DNA, 89 bp, Homo sapiens
atctggaattactacccaatcaaggaatgctgatcaaaggagaggagacgccgtgagcgggacgaccagatgtaccgagagcggctgcg

SEQ ID NO: 430620 - DNA, 90 bp, Homo sapiens
gtccttggaacaagcaactggctattgaaaagcagcctcgtcttacagcgtgactgcaaagaaaaagacttttgttttgcaaaagaaaag

SEQ ID NO: 430621 - DNA, 75 bp, Homo sapiens
ttccatcagtctcaacatagaagtgcactttacaggtccccgatgaaccaagagaaccctccaccatatccaggc

SEQ ID NO: 430622 - DNA, 100 bp, Homo sapiens
gaggagctgtgcagccgcgaggaggcgcgggaggtgttcgagaacgaccccgagacggttctgggccggagaaggggcgacgttcgggcaccccccgaat

SEQ ID NO: 430623 - DNA, 50 bp, Homo sapiens
ctgccccaatccccggcagctctctcagttagagatgtttatgattactt

SEQ ID NO: 430624 - DNA, 76 bp, Homo sapiens
ctcggcactaggcagcggaggagcccgaccgacccgatgaaggatttgggggcagagcacttggcaggtcatgaag

SEQ ID NO: 430625 - DNA, 83 bp, Homo sapiens
aaagatttagttggaaaagtaggtgtggatgaagcaaccatcattgacattctaactaagcgaaacaatgcacagcgtcaaca

SEQ ID NO: 430626 - DNA, 74 bp, Homo sapiens
agcagcgtgcgttcagccctgggacaattgcagcatgactttcccagggccctgattttcagcacggatgattt

SEQ ID NO: 430627 - DNA, 96 bp, Homo sapiens
agatgtggaaaaatgtttacttcagagaaaggggttgtggaggaatggttgtcagagtttaaggagtacaagatcctcagcatgagagaattatta

SEQ ID NO: 430628 - DNA, 82 bp, Homo sapiens
ccagagcggggagctgccctcagagaggtggaaccccacgcagaacgtcagtaatctcaggggcgatataatcaatgaggtg

SEQ ID NO: 430629 - DNA, 75 bp, Homo sapiens
ctcgtagtcctgggagcacagcagaagtgggttgcagatggtgtaggaggctggagagactatggagttgatcca

SEQ ID NO: 430630 - DNA, 100 bp, Homo sapiens
ctctatagtcggagtggagaactgcaagttggagtcattcgttgcccagtttgcagccaagaatgtgcagagagacacatcatagataacttttttgtga

SEQ ID NO: 430631 - DNA, 82 bp, Homo sapiens
tgcagtccatgaaccaggcgttgcagaggcgcttcgccaagggggtgcagtacaacagccgctacctgtctgaggaacccga

SEQ ID NO: 430632 - DNA, 100 bp, Homo sapiens
gagacggagttctacgtgtcccccgaggatctggaggcacagctgcagtctgacgagaggggaatggtcctcgtccgaagtgagaatgggcagttgttaa

SEQ ID NO: 430633 - DNA, 75 bp, Homo sapiens
aaggagtttgacaatgggcaccttctcttaggacatttgaaaagggggattcccgaagtcttccgttttctgaga

SEQ ID NO: 430634 - DNA, 83 bp, Homo sapiens
gagaggaccccgggacatctgaaagccaggaaatggatccagtgctgcctccttgtaccctgtgctcaactttctactctacg

SEQ ID NO: 430635 - DNA, 100 bp, Homo sapiens
cctgaaaggtctcctaaccgctgcagagagtgctttcttccagagctgtcacgggaagtctttttaggataaacgtaggcctgcgtggcctggtggctgg

SEQ ID NO: 430636 - DNA, 83 bp, Homo sapiens
gccaaaggcgctgtggagttattcttgaagtgcctccggagccagcgtggtggccatagacaacaagatcgaacaggccatgg

SEQ ID NO: 430637 - DNA, 100 bp, Homo sapiens
ctcagcgacagcctgcgccgagtgtgcgcacctgtcggagacccgccagtccgccggccgcgtgaatggtagtgtctagaaagggtatgtcccttcaaga

SEQ ID NO: 430638 - DNA, 100 bp, Homo sapiens
cagagagctgcgcctgaataaagcctgtggaaccgttgccgactgcacatttgaagagctgtgtgagagaggtctaaaattcccaggactccacagcttt

SEQ ID NO: 430639 - DNA, 129 bp, Homo sapiens
ggaagtcctaggactgatctccaggaccagcactcttctcccagcccttagggtcctgctcggccaaggagaccagtatgatgtctgtgccatttgcctggatgaatatgaggatggggacaagctgcg

SEQ ID NO: 430640 - DNA, 75 bp, Homo sapiens
aagatattgacgacctcaagcggcagaatgctcttctggagcagcaagatacttgtttgccttgcaacttaagag

SEQ ID NO: 430641 - DNA, 83 bp, Homo sapiens
atttcgtcccagcctgacaaccttggaacagaacaagaggacaggaggtgtcgttccagcaattctgtggtgttcttggtcac

SEQ ID NO: 430642 - DNA, 100 bp, Homo sapiens
cagagaacctaagtctgtttgcaaagcacctgaactgccttatgtttgatcatcggccaaggtcctggcgagaactgcctctgcggctagctgattttgg

SEQ ID NO: 430643 - DNA, 50 bp, Homo sapiens
agaatacagagatatggaatcaggatcccggctactcaacagaaatgaag

SEQ ID NO: 430644 - DNA, 75 bp, Homo sapiens
ggggcggaggcggaggcagaggtggaggcgctttgaaaggtgctgctgctgcctccactgtactcagacccaggt

SEQ ID NO: 430645 - DNA, 75 bp, Homo sapiens
aacaacctgtcttggagcgcttgcagtggcgtctaagccaggcacgtgtgtgaaggtgctgaccatcgagccccc

SEQ ID NO: 430646 - DNA, 98 bp, Homo sapiens
tggtgactgagcggagcccggtgacaggatgattgatgactacagcatggttcgatttttaccttacgatcagtcagatgaagaaagcatgaacattg

SEQ ID NO: 430647 - DNA, 75 bp, Homo sapiens
gggacattctgtcttcatggacatttttgaacttgtgcctagatattatcctactgaagatgtgcctcgaaagct

SEQ ID NO: 430648 - DNA, 127 bp, Homo sapiens
atcagcatcgacagcagtggcagaaacgtcaggccgtagccgaagcctcggaaggagcggcccacggcaaaggtgtcatggagaaactccagctgggcccagagattctgcagcgggaaaatccaag

SEQ ID NO: 430649 - DNA, 100 bp, Homo sapiens
caatacagacgacaaaaccagcagtcttcatctggacgaaaaggaggttgtgctaaagggaaaggaggatcgatgcacatgtatgccaagaacttctacg

SEQ ID NO: 430650 - DNA, 51 bp, Homo sapiens
gggcacccacggagcctccggggctggagaagaaactgaggcctggaattt

SEQ ID NO: 430651 - DNA, 98 bp, Homo sapiens
gtcctccgtttagtctcctcctcggcgggagccctcgcgacgcgcccggcccggagcccccagcgcagcggccgcgggggtcctgatgacaacttaat

SEQ ID NO: 430652 - DNA, 83 bp, Homo sapiens
ctatgatcgcattatcgaaggtcactacaatggtgaacaactgagttgctttaatgtgaagtattttcctggagtcacttcct

SEQ ID NO: 430653 - DNA, 78 bp, Homo sapiens
cccggctctctggaccttgtctcgctcgggagcggaaacagcggcagccagagcttcgagagctgtgcccaggagtga

SEQ ID NO: 430654 - DNA, 50 bp, Homo sapiens
cctagcaaaagttgatgatcttccccctgttgctgatagtccaactccac

SEQ ID NO: 430655 - DNA, 75 bp, Homo sapiens
gacggtcggactcccgcggcgggaggagcctgttcccctgaggagtcattgcagttttcagtagaggtgtacttc

SEQ ID NO: 430656 - DNA, 101 bp, Homo sapiens
tgacttctgaacatcctttgttaggagacagtgtttcacaaaatgattttccttctgaagctcccatctccttgaatctttctcataacatctgcaatccc

SEQ ID NO: 430657 - DNA, 100 bp, Homo sapiens
catgattctgcagattgctgctcggccagtgcggctgatggtgggtgcatcatggcagctgccactggcaatacgaggattctctccaccacatagaatc

SEQ ID NO: 430658 - DNA, 80 bp, Homo sapiens
ggagtatctggcctccatcttcggcaccgagaaagacaagccgctacctgtctgaggaacccgagccctacctggcagtc

SEQ ID NO: 430659 - DNA, 100 bp, Homo sapiens
gcggcaaggtctccaagtcccagctcaaggtctagatccagaagaagctcccgaaggcattatacccggtcacggtctcgctcccgctcccatagacgat

SEQ ID NO: 430660 - DNA, 100 bp, Homo sapiens
tcaggaatgcctacagttagcagatatggtatcctctgagcgccacaaactgtacctgaatgagtccctggaacgccagatgcgtgaaatggaagagaac

SEQ ID NO: 430661 - DNA, 100 bp, Homo sapiens
gtgggctgtccctcagtgcagcccggtttgctttgcttcgattggaggaaggacctccacacactaaaaactggagtcggggtctaatggaggaagatgc

SEQ ID NO: 430662 - DNA, 98 bp, Homo sapiens
acgggaccgagcgagcgaccgacgcgccacccgccgacgcctcagccgcttggggcccgcacggaccctctacttcaaactggtcatgctgctggagt

SEQ ID NO: 430663 - DNA, 100 bp, Homo sapiens
agctgacctgaataatgtcagattctcagcttataggactgccatgaaactccgaagactgcagaaggccctttgctatttgtaccctgttgaaatgtaa

SEQ ID NO: 430664 - DNA, 100 bp, Homo sapiens
ccgcaccatggaggaggacgacagctacggccttctccacagtaggcactcctgactacattgctcctgaggtgttcatgcagaccgggtacaacaagct

SEQ ID NO: 430665 - DNA, 83 bp, Homo sapiens
ctggatgaactgataaaacccaccagtctaggaatgggtaccacagaccatgtcatcgtcctggcgtccacgaaccgagctga

SEQ ID NO: 430666 - DNA, 100 bp, Homo sapiens
ttcgcaggagctgatggaggaccagggcccaggggcttgccaggagacgcaggtcgtgaagggttcccaggacccccagcttcacttaaaggacaagaag

SEQ ID NO: 430667 - DNA, 49 bp, Homo sapiens
gcttggagtgcagaactgaaagagggatctatttgtgatgactatatgg

SEQ ID NO: 430668 - DNA, 100 bp, Homo sapiens
accatccagttcagtgcatgaagatgaaggcgatgatacctctaagattactgatctctcattacccaactatctgatggcatcttcggttggactgctt

SEQ ID NO: 430669 - DNA, 117 bp, Homo sapiens
gaagagattgcctgattaatgctgctaagacatccatgtcttccaaaatcattggaataggcttgctgtttgggctctctgaaagtgacgccaaggctgcggtgtccaccaactgcc

SEQ ID NO: 430670 - DNA, 100 bp, Homo sapiens
ccctgatctggcatggacatagttgtctgctggttctcagcttgaagaagattctgcagtccttattgatcctttttcttggcgttaccatttttgaagc

SEQ ID NO: 430671 - DNA, 100 bp, Homo sapiens
tgtgtcagaacaatcttgaatcatgaagctactaaccagagccggctctttctcggtgggaatggaagtggccccacatctcaaagaaaccctaaataag

SEQ ID NO: 430672 - DNA, 80 bp, Homo sapiens
ttccagactgtgcacctgccacccatgccacccccggagccccagcagacaccccaggtgagaagccctaccactgcaac

SEQ ID NO: 430673 - DNA, 50 bp, Homo sapiens
ccacttaaaccacatcaacagagaatggttctattgtttccaccctgcta

SEQ ID NO: 430674 - DNA, 74 bp, Homo sapiens
gcatgcggaaaatactacagagtgtgcacactggctatcattgatccagagcccagcattacatcaacatgccc

SEQ ID NO: 430675 - DNA, 75 bp, Homo sapiens
gtggaacggctgcttttggaaggtttattacccagaactctttgtctgggtcagtcaagaaccatttccaaacaa

SEQ ID NO: 430676 - DNA, 100 bp, Homo sapiens
tgcaacaaagagatactttctcagctcactccatcactcgatgagataatatgagatttctacttcggagaggccaagtctaatgaagagaaaaaaagga

SEQ ID NO: 430677 - DNA, 96 bp, Homo sapiens
ccctgcagtacctgcagaaggtctctggagacatcttcagcaggaggatacgaagcgttttcggcttcctgcccggagctgtgcagcaaacagtcg

SEQ ID NO: 430678 - DNA, 82 bp, Homo sapiens
gtcaatggcaaggctaaagaaattaatgacaataatggatagtatgaatgatcaaggctgcttctgatgcttggaagatatc

SEQ ID NO: 430679 - DNA, 100 bp, Homo sapiens
ctatggcgcactggagtaccctgttcctggcagtctccaactggtttggcaacaagaggattcgctataagaaaaacatcggaaagttccaagaggaggc

SEQ ID NO: 430680 - DNA, 75 bp, Homo sapiens
aaggattccaagtaactcttatttgggagagtcccgtattctcagagtaaaagttgtttctggaattgatctcgc

SEQ ID NO: 430681 - DNA, 75 bp, Homo sapiens
cgatccgcctgcctgcgcacctgcgattgtctcaaagcttgccaggagcagattgaggcggtgctcctcaatagc

SEQ ID NO: 430682 - DNA, 100 bp, Homo sapiens
ggcggagctgacggtggaggttcgcggctctaacggggctttctacaagggctccacgtgttccccacgtttgtggcgtacgagctcacggtgctggtgt

SEQ ID NO: 430683 - DNA, 75 bp, Homo sapiens
cactccctttcctctgctgccgctcggtcacgcttggagaaactggctcttcgacagcagttgaatgaagcgaag

SEQ ID NO: 430684 - DNA, 75 bp, Homo sapiens
ctcagatgctgaacgtcattttcacccgcatggaaaaccaagtgatgcggaaaacgccatgcggtacataaatgg

SEQ ID NO: 430685 - DNA, 82 bp, Homo sapiens
ccacctggcggccatcgtcatcctgctgctgaagatctggaagacgcgctcctgcgccggcgggcaaaactgttccgatttg

SEQ ID NO: 430686 - DNA, 100 bp, Homo sapiens
atatctgtaaagtgaccaattcccttggtcaaagaagtgaccaaaaagtcatctacatttcaggcatcaagcatgatggaaccatgtgtgatacctgccg

SEQ ID NO: 430687 - DNA, 101 bp, Homo sapiens
cgctggactggagcagaaccccaggactgcgcccccgggagcgggcgcccagagctacaaggctttggcccaccaagtgtgtaccatgctgctattgtcat

SEQ ID NO: 430688 - DNA, 83 bp, Homo sapiens
cccaccttcagtcctggctctgacaagccctccaggaagcttgctgtcttcgatacgtggagctccttggcggtccacattgc

SEQ ID NO: 430689 - DNA, 83 bp, Homo sapiens
ctcaaaaggtgatctggacaaaggaacaggtatctcagtttgcatttatgtcggatcctcagtgaaaataaaagccatgatag

SEQ ID NO: 430690 - DNA, 83 bp, Homo sapiens
gcctgcacggacggtgttggttggggctccataaaaatacagactcaccagttcctgctttgatgtgacatgtgactccccag

SEQ ID NO: 430691 - DNA, 100 bp, Homo sapiens
agaaaatgcagttaatgctgaagcttcattaaggaggctcttgaatgtcgtctctcaactagccaaacggaatctgcgactgctggtcctaggccggaag

SEQ ID NO: 430692 - DNA, 97 bp, Homo sapiens
aagaggtacttggccacgacttattttcacctccgacctttccttccaggcggtgagactctggacgctggtcagaaacattttggggctactgtgt

SEQ ID NO: 430693 - DNA, 51 bp, Homo sapiens
aagcagcacgtgctcatccacactcattcaaacgatatgtcaataaacttc

SEQ ID NO: 430694 - DNA, 50 bp, Homo sapiens
gcctctccctttcagtttggaaaagagatcacaaaatggctcttcttcag

SEQ ID NO: 430695 - DNA, 75 bp, Homo sapiens
ggatcaccctgcggaacctggaggaggtggagttctgtgtggaagggcagagcggcttgggtaaatccaccttaa

SEQ ID NO: 430696 - DNA, 74 bp, Homo sapiens
gcttctaagaagttgggtgcagattttcatgtactatactggcaattgctggagaagattttgcaattgttgct

SEQ ID NO: 430697 - DNA, 90 bp, Homo sapiens
aaaataaggaaaccagtgttgccattgagctggacagtgccacatcgcttatccaggcagctaaaaacctgatgaatgctgttgtcctca

SEQ ID NO: 430698 - DNA, 100 bp, Homo sapiens
tgtacaacagcatcttcagcctgctcagcttcgagaagattggctacacagggagagatgacatgctggacgtggagaccgatgcctacatccactgcgt

SEQ ID NO: 430699 - DNA, 100 bp, Homo sapiens
aaagcctggaggctccgacttcctcatgaagagactccagaaagggacttggagctgatgtctgtgctgtcctccggctctctggtccactcaaggaaca

SEQ ID NO: 430700 - DNA, 97 bp, Homo sapiens
tgctcctcgtcatctcttctgatggacataatgggcttggaaaggggtttggattcaggatttgttcctagtgtccaagattttgataagaaactta

SEQ ID NO: 430701 - DNA, 101 bp, Homo sapiens
aacgtgcaaaacgtgaggagctagagcgaatactggaagagaataaccgaaaaattgcagaagcacaagccaaactgtgagtgttgaaaagatagacctga

SEQ ID NO: 430702 - DNA, 75 bp, Homo sapiens
ctcctgagtagctgggactgcagtttcaagtgtcgtcagatgtatcacgcacccacagactgtgccacaatccgg

SEQ ID NO: 430703 - DNA, 75 bp, Homo sapiens
gcatggactgttaaatcttgcacttcttctgagtgagtgattcgcctttgccagtctcatctcgtgtctgctttg

SEQ ID NO: 430704 - DNA, 83 bp, Homo sapiens
gggggcgccatggcgaccggagcgaacgccacgccgttggcggggatctgacgagcttttctctacttgtgtcactaacggac

SEQ ID NO: 430705 - DNA, 100 bp, Homo sapiens
ctgacacttcaggtgcttgattttgtgcaggatccgtgctttgcccaaggagatggtctcattaaggttgcccccaagtttcctggcagtgtgtgatact

SEQ ID NO: 430706 - DNA, 100 bp, Homo sapiens
ctacttcattcagaagatcaggtacacaaatgcacgcgacaggaaccagcgtgaagcctctgcgggccttcttttcgtcttatttgaagtcattgccgga

SEQ ID NO: 430707 - DNA, 91 bp, Homo sapiens
gcggccatcgtcatcctgctgctgaagatctggaagacgcgctcctgcgccgctcttttgaaacagatggtcaccatgtttagatattagc

SEQ ID NO: 430708 - DNA, 75 bp, Homo sapiens
cggcggcgcgcagcgtgtcaggcggagagacccgccgccaggaattgcattttgtgaaaaaagaacaagaatttt

SEQ ID NO: 430709 - DNA, 100 bp, Homo sapiens
cttggcaccttcctgaaggaccttgtgatgctggatgcagcctccaaggatgagttggaggttgttccaggctatggccatgcagtactaaggaagactg

SEQ ID NO: 430710 - DNA, 74 bp, Homo sapiens
tcccacttccgaaaccacaagtttgccgatggttcttcgagatgaagatgaagtatgacgaaagcgacaacgcg

SEQ ID NO: 430711 - DNA, 101 bp, Homo sapiens
tggctcctggtttgcttggtctcaaggacactgcatcgtcaaactgatcccctggccgttggaggagcagttgtttttgattggtcaaggagcacatgtag

SEQ ID NO: 430712 - DNA, 75 bp, Homo sapiens
gttggaccttccggagcttctcagaagacagagggttttcttttgaggagctgggaatcccaagtgcaaaattgc

SEQ ID NO: 430713 - DNA, 90 bp, Homo sapiens
aaggattgtgacatatcgttggacccagaattgagcccctcgctcctgcatcatcgacaaggatgagctgaaggacggcctgcgtgtgct

SEQ ID NO: 430714 - DNA, 50 bp, Homo sapiens
agagcgcgaatatcgtcatcgttagaaggcctggtactgtggcgctccgt

SEQ ID NO: 430715 - DNA, 100 bp, Homo sapiens
aatgaggaagtcaaagaggaaacacttgttgaagcatcagtccacatttgaggatgttcgtgatgctgaagacgctttacataatttggacagaaagtgg

SEQ ID NO: 430716 - DNA, 75 bp, Homo sapiens
aaagatacaggtctaaacctctttggaatgggagggttacaaggtagtaagcattaataatgtctttcatctttg

SEQ ID NO: 430717 - DNA, 90 bp, Homo sapiens
catcgaggggaccaaactctccatcacccaggaactcccccactggaaaggattctgaaagaaatgaagtcagccctcagaaatgaagtt

SEQ ID NO: 430718 - DNA, 100 bp, Homo sapiens
gttgacagagctttgatagtcgtaccatatgcagaagatacctcggatctgcattttcaagtgagcaaagaccgctatggagggcagccacttttctcag

SEQ ID NO: 430719 - DNA, 75 bp, Homo sapiens
cctggcttttgcagaaagaggagcgttagttgttgggttctccaaaaaatgtggaatcctttgcatctatgctga

SEQ ID NO: 430720 - DNA, 75 bp, Homo sapiens
gaggacctgtgcagggcagagcaggaggccccccgagatgcgtttagcccagcccctgctggtaaccaaggtcct

SEQ ID NO: 430721 - DNA, 97 bp, Homo sapiens
tgatctacgtgtgctttttcaagggagctgataaagaacttcttcccaaaatgggccataggaaaaggatacagagtagagtttcatgaacctgaaa

SEQ ID NO: 430722 - DNA, 98 bp, Homo sapiens
tgggcgcgacgaccctagtgctcgtcgccgtggcgccatgggtgttgtccgcagccgcagggtgagaaggactggcagaaatacgagactgctcggcg

SEQ ID NO: 430723 - DNA, 100 bp, Homo sapiens
gaaccctggcgaccactgcttctccgtgggcagcattggcgaccagcgcttcacgcaagtttatttctgatcgtgaaagtagaagaagtctcacaaacag

SEQ ID NO: 430724 - DNA, 98 bp, Homo sapiens
ctaagtgttcgctacgcggggctaccggatcggtcggaaatggcagaagatagtttacgaagagaaaagaacctggaagaagcaaagaagattaccat

SEQ ID NO: 430725 - DNA, 75 bp, Homo sapiens
cgtaccggcatctcgtgctgctccacggcgtgtgcatggctggagacacatattgtttgcagacagtgactgagg

SEQ ID NO: 430726 - DNA, 51 bp, Homo sapiens
tcacagcagtgttccaagttctaaagaggaagctgccacttttgctagaga

SEQ ID NO: 430727 - DNA, 101 bp, Homo sapiens
tcttcaggaagagaatgtgcgggacacacagcaggtgaccaccctccagctacccccggaaactgtgggaaccatgatggggaagatactgactgtcagag

SEQ ID NO: 430728 - DNA, 90 bp, Homo sapiens
tcttattggtggatggatcaacatgacattctcaggctttgtcacaagtgatggctcagtgttccgagacttggttattaagtacggtgc

SEQ ID NO: 430729 - DNA, 96 bp, Homo sapiens
cagcaaggcgctgatcaccaagcagaatgtccagcgggtcctggaggctgctaacctcttccagagagtagcagatcgactctatggtgtatataa

SEQ ID NO: 430730 - DNA, 100 bp, Homo sapiens
tcaagcatgttgatgatcaaggtagacaatattactacagtgcagacggatctcggtcagaatgggaattgccaaagtccaagccttatgcatttgatcg

SEQ ID NO: 430731 - DNA, 90 bp, Homo sapiens
ctcggtgctgctgccccgcgggtgctgaaaactgtcaaggctggatgagaatgaggatatgcacagtctcctactgactgacagcagcac

SEQ ID NO: 430732 - DNA, 75 bp, Homo sapiens
acgccttctacagactgcagccactgcggcccagggattaatgaaaatcaagttccatcctcagacaagaggtaa

SEQ ID NO: 430733 - DNA, 100 bp, Homo sapiens
gtaaccattttaaagcccaggccctgaagaatgctgaaaatgcttaccatattcaccaagctcggattgtatctgaggaaaggaagaggggaaaccagaa

SEQ ID NO: 430734 - DNA, 100 bp, Homo sapiens
ggagtctcccgtcactcaggacatcatctgcgacgtggggatgtcagaatggcggcagtggagcatcgtcattcttcaggattgccctactggccctacc

SEQ ID NO: 430735 - DNA, 93 bp, Homo sapiens
cagagcgccgcgcacttcgtcatgttcttcgcgccctgaacccagcgggtgccgcttctccacccgaggcttccacctccaacgagccatgtt

SEQ ID NO: 430736 - DNA, 83 bp, Homo sapiens
cctcgctcccccatcaacgtggagagcttgctggttgacatcatggacatatgtgagtccatcctggagaggaagcggcatga

SEQ ID NO: 430737 - DNA, 106 bp, Homo sapiens
caaataagctatatactttggttacctatgtacctgttaccactttcaaaatgaagctgtggtctaccaatctagacaactcagtggcaagcattgaggcaaaggc

SEQ ID NO: 430738 - DNA, 75 bp, Homo sapiens
ttcgcttcccgccagccctactctcgattcctgctcagggctgacagtgagtgacgtggacatcttcgagatcaa

SEQ ID NO: 430739 - DNA, 75 bp, Homo sapiens
aaggagcccaagagccaggatatctacctgaggctgttggtcaaggtggacgccacggaggagtctgacctggcc

SEQ ID NO: 430740 - DNA, 100 bp, Homo sapiens
cgacgagcgctgcactaacgcaggatccggctgccgaaggtcctcgccaggaaagtatgcctcagactcctcccttttcagcaatgtttgacagcagtgg

SEQ ID NO: 430741 - DNA, 105 bp, Homo sapiens
accattgtactcagtagaggagtatcagttcagtatcgctacttcaaagggtactttttagaaccaaaggtatggcccatctcctgtacgcttggagcgaccttt

SEQ ID NO: 430742 - DNA, 75 bp, Homo sapiens
cagctgcggagcagtgcgtcagagtttcaggaggtggtccaggccacgctggtggtcctggccttggccatggtg

SEQ ID NO: 430743 - DNA, 51 bp, Homo sapiens
agtacctttatgaaccagtgtatcccaaattttcagctgaactctcatctc

SEQ ID NO: 430744 - DNA, 51 bp, Homo sapiens
gtctgagtggatggggacctgcctgctgaatgccagaggattcaacatgag

SEQ ID NO: 430745 - DNA, 100 bp, Homo sapiens
ctgaaatccatcttcatcctaccgctccgccctgtcgatacaccctgcaatacacctacccatatgcatattacatggagtccggacccaggaagaagct

SEQ ID NO: 430746 - DNA, 98 bp, Homo sapiens
tcaaagaggaggtggtcaaggagcccaaggatgaggcacagaatgagggcccggctacagagtcagaggccccgctgtagctttccacagccccacca

SEQ ID NO: 430747 - DNA, 96 bp, Homo sapiens
gcgaattgtccaagccctgaatgccaatgtgtggtccaatgtagtgatgaagaatgcctatatatgcaaacagatttgcagtaccaacctatgcag

SEQ ID NO: 430748 - DNA, 98 bp, Homo sapiens
tcattgatggtctcaatgttgccaaaatgtttcctaaagttcgtgaatctcaacttatccctgcagtgaagttgaacgagctgctcgagaacttttat

SEQ ID NO: 430749 - DNA, 90 bp, Homo sapiens
gtgaccatctcctacccaggcgccatgttgaacatcatggtcaaggggaaagacgcctcagccttcgccgccaagatgagggggggcttc

SEQ ID NO: 430750 - DNA, 87 bp, Homo sapiens
agctcatctggaattttgccgatttcatgactaaccagtggactgctgagatgtcctctattcttgaagagcgtattcttggagctg

SEQ ID NO: 430751 - DNA, 72 bp, Homo sapiens
gccggaggtgggatacacggtagcatcatggtcgaggagctatctcaagattcatttgggtctcaggcatcc

SEQ ID NO: 430752 - DNA, 100 bp, Homo sapiens
cagggggccggggactactgagaaggaggcccccacagcgtgcccccgctggcaaggccccggatgccatggacaatattaccaggcagaaccaattcta

SEQ ID NO: 430753 - DNA, 88 bp, Homo sapiens
agaaacagaaagacctccaggagaagatcagtgggaagatcctctggaccttctccatctacctggagtcagtggccatcttgccgca

SEQ ID NO: 430754 - DNA, 50 bp, Homo sapiens
gcatttgaaactgtccattcaatggatgaaacgaaatcctgaagttcgac

SEQ ID NO: 430755 - DNA, 75 bp, Homo sapiens
agattgttagaagatacagtgactttgatttgcttaacaacagcttacagggtttttaatgaccacaacaagcaa

SEQ ID NO: 430756 - DNA, 90 bp, Homo sapiens
atcaacaacaccctcattgctttcttcattttgactacgataaaaggcattcccatcaagagcaccatggacaaccccaccaccacccag

SEQ ID NO: 430757 - DNA, 100 bp, Homo sapiens
aaaacacaaatgagatgtttgctataaaagccttaaagaaaggagatattgtggctcgagatgaagtagacaggaggaagaacgtgcaaaacgtgaggag

SEQ ID NO: 430758 - DNA, 100 bp, Homo sapiens
ccgaaggaggaagggaaccaacccactttctcggcgccgcggctcttttctaaaagttgccggtggtggtgtgcacattgagccccggtatagacagttc

SEQ ID NO: 430759 - DNA, 82 bp, Homo sapiens
ctaaactttctgagcttcatgacaatcaggacggtcttgtggtggatgaaaatactaggaaaagtttatttaagttacgttc

SEQ ID NO: 430760 - DNA, 89 bp, Homo sapiens
ggcgtgtcacactgccccggcggggaggacgagaatcggtgtgattctgaaaaagagttccacgtcctcccttatcgagtctttgttcc

SEQ ID NO: 430761 - DNA, 101 bp, Homo sapiens
gcctcctgagtagctgggattacagttacaataaagaccttttagacaaggtgatggaaatggccgatgggattgaagtggaagacctgccacaatttact

SEQ ID NO: 430762 - DNA, 90 bp, Homo sapiens
cagaaatacccaccagtaaagtttttatcagaaaaggatcggaaaagaattttggattggattcagcatcaaaatacatctactcatatt

SEQ ID NO: 430763 - DNA, 75 bp, Homo sapiens
cggaaatgtgtcatcgaaagccaggaaggcaacagcccccaggggagcaaccagggagtcaaaatcacaccggac

SEQ ID NO: 430764 - DNA, 100 bp, Homo sapiens
ggagagggagtgatgtcttccagactcggtgctgtacccgccttgttagagttggaagcttggcagttggcctcccttcttcccatggaggacgggggct

SEQ ID NO: 430765 - DNA, 88 bp, Homo sapiens
ggcaagtaacatgactaaaaagaagcgggagaatctgggcgtcgctctagaggtgaaaggtgtagcagtcactcggcctacacccaca

SEQ ID NO: 430766 - DNA, 75 bp, Homo sapiens
atttttcccagcatttcaggcatttactaatgatctacttgaaatcttaggatcagctcagctactatttaataa

SEQ ID NO: 430767 - DNA, 90 bp, Homo sapiens
aagacatcaagaagatcttcgagttcaaagagaccctcggaacgacctcagcagccatgtcgaagccccatagtgaagccgggactgcct

SEQ ID NO: 430768 - DNA, 87 bp, Homo sapiens
ggtttagcggcagcctcttcgacttgtcagcttgtgggaaagtgacatcagcgtccacccgctaaccctgccctctgcaacctgctt

SEQ ID NO: 430769 - DNA, 50 bp, Homo sapiens
ccagagcctgcagtcccacacgctggagaatgctggaggagaccttaagg

SEQ ID NO: 430770 - DNA, 74 bp, Homo sapiens
gatttaaacctttgtcaggcaatgagctggattttcgtacacccccaggttttgaccgaacacgtaatgctgag

SEQ ID NO: 430771 - DNA, 99 bp, Homo sapiens
cagcagcagcactcggagatgctggccaagctccatgaggagatcgagcatctgaagcgggaaaacaaggagagcccggtgcacatcctgagcccccag

SEQ ID NO: 430772 - DNA, 113 bp, Homo sapiens
gggcagcgccggttccttgcggtcaagatgctgcaaaacgtgactccccacaataaacaatgcagatcttcgtgaagactctgactggtaagaccatcaccctcgaggttgag

SEQ ID NO: 430773 - DNA, 75 bp, Homo sapiens
attttaggcggtatcaaatggaaagtttttccaaatattcatctgtacaggcaacaattggcattgactttttat

SEQ ID NO: 430774 - DNA, 90 bp, Homo sapiens
aaacatctgaacttgatatgtctgaaagcaaaacaagaagtggaaaagtctttcagaataaaatggaactgctgttgtaagcggctcatc

SEQ ID NO: 430775 - DNA, 100 bp, Homo sapiens
acagtgacttactttgattcttttgaaccaggaatgtttcctcctactcctctttcacctgccaggttcaagtgatgatgaacagtctacacagatggct

SEQ ID NO: 430776 - DNA, 90 bp, Homo sapiens
aaataacccttgatcctcctcctaattgcaggttcagccgtctgtatatctccccagatacctgaaactgaccacctgagtacgttttcc

SEQ ID NO: 430777 - DNA, 90 bp, Homo sapiens
gcacgataaaggaactcaggcgcctcttcttagttgatgatttagttgattctctgaaggtaaagaagcagctttgaatctgagcttcat

SEQ ID NO: 430778 - DNA, 75 bp, Homo sapiens
agacgcccctggagcacatctttagagccatcctgatcaagaaaaccgacaggatcagtttgtgtgtggagaaac

SEQ ID NO: 430779 - DNA, 74 bp, Homo sapiens
ccatagagctgaaggaagagtgcaaagactttgtggacaggggctgttgtggttccgactataaacagtacgtg

SEQ ID NO: 430780 - DNA, 90 bp, Homo sapiens
acataaaaattatttatccaacagctcctcccagattcgtccagtccagccagttggccaatcatattcgccaccacgacaacatccgcc

SEQ ID NO: 430781 - DNA, 101 bp, Homo sapiens
agaacaaagctgaggtccagatgaaagagaagtttctggtcactccccaggattatgcgcgctgagctgcccctcctggacctgatgaagctgtacgaagg

SEQ ID NO: 430782 - DNA, 102 bp, Homo sapiens
gttcgtcgcctccttgcccgtgaccgtcgctagaactcagttgtgcgttgcggccagtcgccactgctcctccacctcagatatatgacaagcagttggatg

SEQ ID NO: 430783 - DNA, 100 bp, Homo sapiens
gatcagacagcccaggtgtttgaagggtggagcagctcttcgggctgggtctgcggcccagaggggagtgccacaaagtgctggagatgttcgactggaa

SEQ ID NO: 430784 - DNA, 75 bp, Homo sapiens
tactctcagcagctatacggaggctgtctcctctcagggactactggcattcagtgatgtggtcatagaattctc

SEQ ID NO: 430785 - DNA, 83 bp, Homo sapiens
ggaagcggcgcggcggtcggagaagtggcctaaaacttcggcgttgggcaggttggcgggaccaggagctctgcggtttgtgc

SEQ ID NO: 430786 - DNA, 100 bp, Homo sapiens
tgaccatggaactttaccagcacctggaatctaaggagtggtttgtgcagctctattaccacgggaagggaactctaatgatccaggacaaagaagttac

SEQ ID NO: 430787 - DNA, 75 bp, Homo sapiens
acacattcattgctgacctggtggtggggctgtgcacaggccagatctacatgcacctgcgctgctacagctgcc

SEQ ID NO: 430788 - DNA, 100 bp, Homo sapiens
acgcagaaggggtgaaagagactcggtgacagatacagtgtgcctgacgaggaggccaagacaaccaccacaaacactcaagtggaaggggatgatgagg

SEQ ID NO: 430789 - DNA, 82 bp, Homo sapiens
gtcgccctcaaggccatgatcaaaacaatccacattcatctcaatggaaggatcctgccttaagtcaacttatttgtttttg

SEQ ID NO: 430790 - DNA, 100 bp, Homo sapiens
accttccatccagtaacagaggcaggaggatcccttgatgccaagagttcgagaccagctggggcaacaaatcaccaggagactaaagtccatcaaaaac

SEQ ID NO: 430791 - DNA, 100 bp, Homo sapiens
catgtccctgtgggacacaatgcccccaagctcaaagttatgaagtttcaggatgaattggaatctgggaaaagacctaaaaaaccaggccagagttttc

SEQ ID NO: 430792 - DNA, 75 bp, Homo sapiens
ctcgcttgcagttcagcgaccacgattttgcaagaacgaggctcaaggatgtgagggacacagtattgacagctg

SEQ ID NO: 430793 - DNA, 100 bp, Homo sapiens
cccggccaagaggcaaaggggaggttacgcagcaaaccatccagaagggcgtctctggccgagcctctttttgtggaaaacgacagcagcagcagtggcc

SEQ ID NO: 430794 - DNA, 78 bp, Homo sapiens
tgtctacaaaaatctcaatcctgagtggaataaagtcttcacgttagtaagttgtttaagaaaggcctgaatatatca

SEQ ID NO: 430795 - DNA, 75 bp, Homo sapiens
gtcggcctcaccttttgtacctgctacctggcttcttacctcacgaacaagggagctcaaccctgttcagtgctc

SEQ ID NO: 430796 - DNA, 89 bp, Homo sapiens
aaaatcttttgtgaaagtgtataactacaatcacctaatgcccacaagttgtacacagaagaaagcccatatgaggacacagcaagaag

SEQ ID NO: 430797 - DNA, 51 bp, Homo sapiens
aggagttcaggaccagctcattgaaaagaagaattttctctacatgtgcac

SEQ ID NO: 430798 - DNA, 75 bp, Homo sapiens
aggggaaaaccacgctcctcggaccaagcctcgggagctaaggattggagaatccatgttgaccaaatgcaccag

SEQ ID NO: 430799 - DNA, 100 bp, Homo sapiens
aatcccttagggtctctttgcagaggaatattggacctcaatacctataacgtcgccttcacagttgttgatcacatagcatggtcatccactcacagct

SEQ ID NO: 430800 - DNA, 82 bp, Homo sapiens
gagcgattggccgggctgcaggcgaggttcatctgcagaagccagcggacgcctctgttcaacttgtgggttacctggctca

SEQ ID NO: 430801 - DNA, 82 bp, Homo sapiens
ttcgcgtctctctgctgcggcgcggggaccgctgtgctctcggttttgggatttgagattgacgcggtgaactctgtccagt

SEQ ID NO: 430802 - DNA, 100 bp, Homo sapiens
gccagcgccgcgcccggggccgtgcgctctcgggccactcggccgcagcaagaagatccttataggaagaaaaagcttcaggagaaaagagaaggaaatt

SEQ ID NO: 430803 - DNA, 76 bp, Homo sapiens
tcaccaagtgggtcaacaagcacttaatgaagattgagaggatccagaatccagatctctggaatagctaccaggc

SEQ ID NO: 430804 - DNA, 98 bp, Homo sapiens
gataaaggagcgatcccctcctttaagccctgaggaaaaaactaaaatagaaaaatctccagctcctcaaaagcgatgaagaacgatacagatacagg

SEQ ID NO: 430805 - DNA, 100 bp, Homo sapiens
gaatggctgctagttgatcattgaatctggatggaggaagagctgcgcaaaggtggagaccccaaatatgcccacttgaatatggatctgcatgtcttca

SEQ ID NO: 430806 - DNA, 101 bp, Homo sapiens
ccggatgctgggaagcctgctggtccacaggtccatacatgaagtcaccataaggaaacttggatttaactggccagaagcaggtattcaaagcagagaac

SEQ ID NO: 430807 - DNA, 82 bp, Homo sapiens
ccaacagcggcctctagtgtctggaggaggaagtgtcagcgctactgccgcagggcgtctctggccgagcctctttttgtgg

SEQ ID NO: 430808 - DNA, 74 bp, Homo sapiens
attcaagggaaccttccctgatgcgatccagtggttctggagagcattgcgttctttcgatcaagctgaccgtg

SEQ ID NO: 430809 - DNA, 83 bp, Homo sapiens
acctgggttttcttagccctctacttttcaagacaccaagtgagaggccaaccagtgtaaacaggaacatcgataagtagtgt

SEQ ID NO: 430810 - DNA, 75 bp, Homo sapiens
agtgcctggaagagttctatgcactctgtgaccagctggagctgtgcctgatgatcatcgagcccaccagccctt

SEQ ID NO: 430811 - DNA, 82 bp, Homo sapiens
gttcttctttctcagagctacgttaaaatgtataacaaagctgtcaagctggcaagacatctgtatagattctgcttcatcc

SEQ ID NO: 430812 - DNA, 98 bp, Homo sapiens
agcagttctacaaggcgagccagcattcttgttatttaacacgggaaggaggtgacttcgcctgtgatggacttccagtgtgagcactggccagagtg

SEQ ID NO: 430813 - DNA, 83 bp, Homo sapiens
gatttggatgtgggatccggttccttggtgtcatccagccttagcaaaccagaggtatccaaaccttgaaacctttgctctag

SEQ ID NO: 430814 - DNA, 88 bp, Homo sapiens
ctagaaagggtgtggccgttttacattggctgttttcctcacattcctcaagcaggtctcggtccagctcgacttccagctcaggctc

SEQ ID NO: 430815 - DNA, 50 bp, Homo sapiens
cactcaaaagtggggggcaggaaagttttcggctttgtgagaaaccttac

SEQ ID NO: 430816 - DNA, 75 bp, Homo sapiens
atacacaggaatgttgtcttctagatatgccactgatacatgcattagtgaccagaaggatcccaaggatcgaat

SEQ ID NO: 430817 - DNA, 100 bp, Homo sapiens
gccgcggctcctgttgacccggtccgcccgtcggtctgcagcgcggctgagggcggcaccttcctacttctgcccagccacagccctcccctcacagttg

SEQ ID NO: 430818 - DNA, 82 bp, Homo sapiens
ctggacggcgagcgcgagcggcgcgagaaaaggacgggaggggcaagctgcggccaaccaaggccaagagcgagcggaagaa

SEQ ID NO: 430819 - DNA, 100 bp, Homo sapiens
tggagggcgtttctcgggagcagttcatgcagcacctctacccacaggtctccaccagctcctggccgggttcgaggacaagtcagcctatgcgctctgc

SEQ ID NO: 430820 - DNA, 80 bp, Homo sapiens
cagatagccgtcttcagcttgagccccatcactagtgaacacctacctcttcatgatgcaagcccaaggcattctgatcc

SEQ ID NO: 430821 - DNA, 98 bp, Homo sapiens
gccgccatcctcggcgcgactcgcttctttcggttctacctgggagaatccaccgccatccgccaccatggtttgttgataagccggggcccttcgtg

SEQ ID NO: 430822 - DNA, 100 bp, Homo sapiens
cacagtaacatacagcactttgtggagaaagtcgtcttccacttgcacgaaagctttcctaggccaaaaagagttgagaaaccaaggcagtatcatgagc

SEQ ID NO: 430823 - DNA, 90 bp, Homo sapiens
ctgaaggccgtcttaaagttacgttgttagaatgtagcagaggcatttcatccttcatgaagccattcaggattttgaattgcatatgag

SEQ ID NO: 430824 - DNA, 100 bp, Homo sapiens
cccggggtgtaataatgttaactgagggttacacatcattttggaatgactgtatatcatctggattacgtggctgtatgttaattgaattagcattgag

SEQ ID NO: 430825 - DNA, 82 bp, Homo sapiens
cgactggaggcacaaggaggacgccggcgtcttctgctcagcgccatcatgaccgggtcctataacaacttcttcaggatgt

SEQ ID NO: 430826 - DNA, 88 bp, Homo sapiens
aactcattaatgctgcaaactagcaaggagaatcatgctttagaccatgggggatgtgaagctggttgcctcgtcacacatttccaaa

SEQ ID NO: 430827 - DNA, 51 bp, Homo sapiens
tcggaagagcgctcccaggagaaacaagctggaggcaaagctggaaaggac

SEQ ID NO: 430828 - DNA, 74 bp, Homo sapiens
agattcgcagtggtcgcttcttctccttgagataattgacgaccttgccaacctagtggagaacacagatgaaa

SEQ ID NO: 430829 - DNA, 74 bp, Homo sapiens
ggcgggaccagcacaggcggcgttttctccttcggaacgggagcgtctagatggatagtggctataatacgcag

SEQ ID NO: 430830 - DNA, 127 bp, Homo sapiens
tttatgatgtctttgtctttcacaggctgaaaataaaacagatattacctaccatttacaaaggatcgcttacacctgagacgaactacagaacagcacgtaccagaggtggaagtccaagtcaaac

SEQ ID NO: 430831 - DNA, 83 bp, Homo sapiens
cctgtacagcctgcagaactaattaacacagaagacttctgcagccaaatgtgtggagattttcccctaccaacaagcaagta

SEQ ID NO: 430832 - DNA, 100 bp, Homo sapiens
caggatctgaagagctatggtgaaacaccactgaagcattgccaagttggaatcgaagcctcttaaaatggcagatgacttggacttcgagacaggagat

SEQ ID NO: 430833 - DNA, 74 bp, Homo sapiens
ggagggcaaggactacccctttgccaggttcaataaggtctacatgttcaagtgcgtgtggcggtgctacagat

SEQ ID NO: 430834 - DNA, 76 bp, Homo sapiens
ttctaccccatgagaaagaccagatggctctgagagattcctctgcgaatctgtttttagctatcaagtggcatcc

SEQ ID NO: 430835 - DNA, 100 bp, Homo sapiens
gtttggacggctcaggatactgtgtgagttttgcggcctccaggtggtggatccaatttttcattaggttttgatgaaccaacagaacaacctgtgagga

SEQ ID NO: 430836 - DNA, 82 bp, Homo sapiens
ttcccaagggtttcatggacgggaagcaggcgtgcgtgctcatgtgcctccggagccagcgtggtggccatagacaacaaga

SEQ ID NO: 430837 - DNA, 82 bp, Homo sapiens
ccgccaccgcggccgagaccgcgcagccggcgggtttggttgggatgttccagtaattctgagaaattcagaagagacccag

SEQ ID NO: 430838 - DNA, 84 bp, Homo sapiens
gctacaaacatggagtttgcagtgaagggatgatcagaattccagtttttcaaaggtaaagaatgttcatactgatggattcca

SEQ ID NO: 430839 - DNA, 75 bp, Homo sapiens
agtactgccctgacccttacatccagcgaacattctagtatgccagtagaaaaaaatatcactttagaaaggcct

SEQ ID NO: 430840 - DNA, 50 bp, Homo sapiens
ctacaaccttcgatctcctgacgagctgttcacggaagaccaggatgtag

SEQ ID NO: 430841 - DNA, 75 bp, Homo sapiens
cttgcctcaagtatcagctggaaaacaggaagtaccaccaagaacagggaaggacaagccagaggctggaggaag

SEQ ID NO: 430842 - DNA, 100 bp, Homo sapiens
ctggcttactgaaggacatgattcagactgtcccggacccagcagctcatatcaaggagtttgacttacaaggaatctggagtagatatcgcagctggaa

SEQ ID NO: 430843 - DNA, 95 bp, Homo sapiens
ggcgcgcggacccaggcgcggatggcgaggccagcagataaacattgacgatcttgaggatgaccctgtggtgaacggggagaggtctggctgtg

SEQ ID NO: 430844 - DNA, 100 bp, Homo sapiens
agcctgagaggaatggagttacaggggtgcgccaggagcatttcctccctctgctatttatacacggaaagacttactacagcgatctacccatattgcc

SEQ ID NO: 430845 - DNA, 50 bp, Homo sapiens
aagttcttcgtcaccagctctttggtcaaaatgcagatcttcgtgaaaac

SEQ ID NO: 430846 - DNA, 82 bp, Homo sapiens
gggccgaattctgctggaggcagcgccatatcctggaggtgaagagacaagaggagcagcagcggcaccgcccctcaccctg

SEQ ID NO: 430847 - DNA, 100 bp, Homo sapiens
ccagctagtcccattctccaccaagtctggggataccttactgctcctgcaccacggggacttctcagcagagccagctgaggtgggtgtcctggttggc

SEQ ID NO: 430848 - DNA, 90 bp, Homo sapiens
taacgagtattccaaatttgatggcaaggctactgcagcactggggtgtcagttgttggtccgacccagaacgcttcagttctgctctgc

SEQ ID NO: 430849 - DNA, 89 bp, Homo sapiens
agaaagatgatggactacaatatcgaccagatgtgaaaggtttttctatatgagtggagaagacagctgttaccagggaggtcatacaa

SEQ ID NO: 430850 - DNA, 75 bp, Homo sapiens
gcgcaagtgcctccccagtttatttccccccagggagaaacacatctcatctttcctaaaaaagcttcagtggag

SEQ ID NO: 430851 - DNA, 87 bp, Homo sapiens
ttagtgctgcacagctaacagctgaatgtgcaatagtaactttggcagctgaaaaagttggatgaagatagtttaaccaaacaacca

SEQ ID NO: 430852 - DNA, 75 bp, Homo sapiens
gaggggagtggaaaggctctcagtgaaaaaggtccaggtgaaggccgtgctgggccacctcctggcaatgtccag

SEQ ID NO: 430853 - DNA, 51 bp, Homo sapiens
catgcacaaatttttatgtggaggtccccaggtgcatccaatttttcaact

SEQ ID NO: 430854 - DNA, 101 bp, Homo sapiens
ggggacggagagaacacgagcccatcaggtacccactgatggtaatgctggcctgctggctgaaccccagattgccatgttctgtggcagactgaacatgc

SEQ ID NO: 430855 - DNA, 100 bp, Homo sapiens
cccagtacgtgttggaggtacagaagtggctctgtttctcagtactttgaagttataactaatctgcctgaagacttctcatgatggaaaatcagccaag

SEQ ID NO: 430856 - DNA, 74 bp, Homo sapiens
tgtcaccgagccgctgcggccagcaccctggaggagaagaggttctgctggaacaagctggtgtagatgcaagt

SEQ ID NO: 430857 - DNA, 100 bp, Homo sapiens
atcgttctatttctctagctattgccttattttttctcatggatgttcttcttcgagtatttgtagaaggaccacggtgtgaacacatgaacagaagacg

SEQ ID NO: 430858 - DNA, 75 bp, Homo sapiens
acagaagatccactcgattacagaactgataaatttcaaacggaagagagtggcagcatttagaaagaatctaat

SEQ ID NO: 430859 - DNA, 75 bp, Homo sapiens
agcatgaacgcccctccagccttcgagtcgttcttgctcttcgagggcgagaaacgaagggaacgtcatcgtttg

SEQ ID NO: 430860 - DNA, 90 bp, Homo sapiens
aaaaagctttgtatacctgaaaaaacagaaatattagcagtgaatgtagattccaaagcagctgcagctactggaggttctgttctcaat

SEQ ID NO: 430861 - DNA, 82 bp, Homo sapiens
gggacaggtggcggcgaccggcggcgtccgaggagggtctgcaagtggatgatgagattgtggagttcggctctgtgaacac

SEQ ID NO: 430862 - DNA, 78 bp, Homo sapiens
ggtacagtcacacagagacctgcccatcaagctcaatcagtggtgcaatgtggtgggtgtccgcaatgttgccagtgt

SEQ ID NO: 430863 - DNA, 100 bp, Homo sapiens
aaaatattgggctatcaaactcgctactaatgctgcagtcactgtacttagagtggatcaggtaaaatgttgggacatagccaccttggagtgcagctgg

SEQ ID NO: 430864 - DNA, 120 bp, Homo sapiens
tcatcgtgcctgaaggagtacatgccctttatgaagatattcttgagggtttttcatcatcaaagagagctttctgctttactactctgagagcgaaaaaaagagctttgaaaccaataa

SEQ ID NO: 430865 - DNA, 75 bp, Homo sapiens
tggtggtaatgcagaagagaatgctgcagaatttttgaagcaacataattcactccgctctgcattggataaaac

SEQ ID NO: 430866 - DNA, 100 bp, Homo sapiens
ctggacatcaagattaaaagagcgaataaagtttatcacgccgggggcagcccaatggatccaatggtgatgaagagacctcagttgtatggcatgggca

SEQ ID NO: 430867 - DNA, 90 bp, Homo sapiens
aacggctgcacctggagattgacgcagagtgggcggcggtggtggccctggagagtgaatttgtttcctgccagcttcaccaatggattg

SEQ ID NO: 430868 - DNA, 90 bp, Homo sapiens
cgctggagcggagccggccgtacgcggtgctgcgagggcagaacctggcattccaggatgccttgaagattttctgtaggataaaaggtg

SEQ ID NO: 430869 - DNA, 134 bp, Homo sapiens
cctcgtggtgtggtgtatggccgtgggcatctcctacattagcgtctacgaccaccaagcctcgtgtgcaagctgaacacaaggaccaccatcctggcagcaacgaaccccaaaggccagtacgacccccagga

SEQ ID NO: 430870 - DNA, 75 bp, Homo sapiens
cccccgctgcgctttgactaccacccccatgatggggatgaggttgacatcatggacatatgtgagtccatcctg

SEQ ID NO: 430871 - DNA, 100 bp, Homo sapiens
acgacatccacttctaccccaccttccggctttatcttcaagccaggatgaagggagactgggcaagactcttacgccccacactgcaatttggtcttgt

SEQ ID NO: 430872 - DNA, 83 bp, Homo sapiens
ttgatgaaggtggaggcagcgcggctctcagcagcctcccgcgacgatgcccctcaacgttagcttcaccaacaggaactatg

SEQ ID NO: 430873 - DNA, 74 bp, Homo sapiens
ggtggaacagattcagaaggagcaggattaccaaagggatatctttgaccagctggccaagtcattggccccaa

SEQ ID NO: 430874 - DNA, 49 bp, Homo sapiens
tgcaaacttaattaaagaactggccaggatctcgctctgttgcccaggc

SEQ ID NO: 430875 - DNA, 100 bp, Homo sapiens
cggcggcggcggccgggaaggaggaaagaccacagcaagattctttcattcgtctcctcctagcctgggggaccaggctcgaactgaccctggacatcaa

SEQ ID NO: 430876 - DNA, 135 bp, Homo sapiens
cttcgccgggccggtactccaggtccgacccgcgaacccctctgggatccccgccgctctgtctacaacccgaggtgctggagaatctggtaaaagcaccattgtgaagcagatgaggatcctgcatgttaatgg

SEQ ID NO: 430877 - DNA, 50 bp, Homo sapiens
tcaagaatgaagctgcggaccctcgcgagtatgtttagttccaatcgtca

SEQ ID NO: 430878 - DNA, 100 bp, Homo sapiens
gccagtcttctatgtttccacatcggtcagaaaaagatgacactgcccatctctaagataagaacctggaaaggggactctgttggccattggaaattgc

SEQ ID NO: 430879 - DNA, 100 bp, Homo sapiens
tccaggggctgactgtgggcagagaagttgcaaaccgagtttccaagtcaagagaatccatcccattaaatgacctgaagtcagaagtatcaccacggat

SEQ ID NO: 430880 - DNA, 96 bp, Homo sapiens
ggaggtgtctttaccaaacttattaataggaataccactattccaaccaagaagagccaggcaaatcattaatcttttggaagatctgaagaaaat

SEQ ID NO: 430881 - DNA, 83 bp, Homo sapiens
cggcagccgctgtacagattcatcaccacgataacgaaggaggcccaacttcattcaataaggagcctgacggatttatccca

SEQ ID NO: 430882 - DNA, 80 bp, Homo sapiens
ccgatttcatgactaaccagtggtaaatgttgtccagactcagagtttaagaaacactttcctgttggaaatccagaaat

SEQ ID NO: 430883 - DNA, 133 bp, Homo sapiens
ttcaaaaacactatcccagggagtgcaagcttagagcgtctggccaagaatcagaggaagtgggaaccctaaggactctgcaatatgaataattccctagagaacaccatctcctttgaagagtacatccgag

SEQ ID NO: 430884 - DNA, 100 bp, Homo sapiens
ccggatgtggcgcggctgcgcgaggagcaggaaaaggttttagctaaagaagatactgaggcagctattcaatcaatattatacaaagaaaattctgtaa

SEQ ID NO: 430885 - DNA, 100 bp, Homo sapiens
cagccaatgatcttttcaatgctgcgaaagctgccaaaagtgacatgcagggaaatcctcattgacgattcaatttgttgaaggccaatttgtggactcc

SEQ ID NO: 430886 - DNA, 98 bp, Homo sapiens
ccggagcttctcagaagacagagggttttcttttgagggttctccaaaaaatgtggaatcctttgcatctatgctgagacattctcctcttacacaga

SEQ ID NO: 430887 - DNA, 95 bp, Homo sapiens
agaggatgtggatgccctcaagtcctggctggccaagttactggagccgatgtgaaatgacaatggatgctctgttggctcgattgaaacttctg

SEQ ID NO: 430888 - DNA, 100 bp, Homo sapiens
cacttgcctcccgggagtcgctgtggcaaaagggtttagatgtagattctctggtcattgagcatatccaagtgaacaaagcacctaagatgcgccgccg

SEQ ID NO: 430889 - DNA, 100 bp, Homo sapiens
tagtatgggatgtggtatgataccagcaactggtctattatatcatttaaaccacatggctatctaaagaggaaagtggagaatgaggacatgaataaag

SEQ ID NO: 430890 - DNA, 75 bp, Homo sapiens
gcgaaaatgaggccctgcagcagttctttgaagtatttgattttcatcaagcagctgatggtatccaggaacaac

SEQ ID NO: 430891 - DNA, 90 bp, Homo sapiens
caagatgttcagaagttcatggatgctgtcaacaagaagagcagttcccaggatctgcataaagcatggcggacaccgacctgttcatgg

SEQ ID NO: 430892 - DNA, 107 bp, Homo sapiens
ctcatctcgctcggctgcgggaaatcgggctgaagcgactgagtccgcgatggagccttatgtttgatcatcggccaaggtcctggcgagaactgcctctgcggcta

SEQ ID NO: 430893 - DNA, 100 bp, Homo sapiens
cgcgcaggtgctagcggccccttcgccctgcaggtttccgagacactaaagcgttttgcagggaaggtgacaacagccagtgtaaaggaacggagagaaa

SEQ ID NO: 430894 - DNA, 82 bp, Homo sapiens
gtgaagctgccatgaaagagattgaatccattgtcaaagattcttctaacagagaaaatgccattgaggatgaagaggagga

SEQ ID NO: 430895 - DNA, 100 bp, Homo sapiens
ccagaacggatagctccctcctggaaaagggacttcagtactagtgctaataacatccagattgataaaaccaagcctttgtggcacaactatttcttat

SEQ ID NO: 430896 - DNA, 75 bp, Homo sapiens
aaattgaggaatcccaattgaagtttttgaggtgtctcaatgcttgtacctactgcaaaactaaacacgccagag

SEQ ID NO: 430897 - DNA, 97 bp, Homo sapiens
cgcccggacccaacggggcaacagaagaagatggggttccttccaaagtgcagcgctgtgcagtgtcatctggggacctggagaatgatgagcaggc

SEQ ID NO: 430898 - DNA, 100 bp, Homo sapiens
tccaaccagactgccccctccctcaagatgttggagctggtggcccagaagcagcgggagcgtgaagaaagagaggaacgggaggcattggaacgggaac

SEQ ID NO: 430899 - DNA, 76 bp, Homo sapiens
gggggatggttccatcatggcgtcaatgcagcattcgttcagtcagagagcataatagaagtactgcgttttgatg

SEQ ID NO: 430900 - DNA, 97 bp, Homo sapiens
gcttggttaaaacctgacacttttaacaggactttgtattcagccttctgcatggagctggcctcacgtggctttgtggttgctgtgccagagcaca

SEQ ID NO: 430901 - DNA, 74 bp, Homo sapiens
gtagagggtgctctttctctagaggagaaacttaacctaatccaccaatagatcaagttatacagaaaccagga

SEQ ID NO: 430902 - DNA, 100 bp, Homo sapiens
gtggtggaggtggaggttggaggtggtgctgctggggaacgggagctggatgagtactatactggcaattgctggagaagattttgcaattgttgcttct

SEQ ID NO: 430903 - DNA, 104 bp, Homo sapiens
agtacctgcagaaggtctctggagacatcttcagcaggcttgggcactgtttaaaggaaagttccgagaaggcatcgacaagccggaccctcccacctggaaga

SEQ ID NO: 430904 - DNA, 83 bp, Homo sapiens
gccaacttcggcaagatccagatcgggatttacgtggagatcaagcgcagcgatgggggatatgagactttctactcggaata

SEQ ID NO: 430905 - DNA, 123 bp, Homo sapiens
ttagttcagtctactaaagaaggaaaaaggaacgaacttcaaccaggttcactaagaatctttccccagacaaaatcaacctgagcaccctgaaaggggagggtcagctgaccaacctggagc

SEQ ID NO: 430906 - DNA, 83 bp, Homo sapiens
caaggctgcgccggcgaggggaagccgcgcggccggccggccgactaggagtgttgcggagataggaacatgggagagaaaca

SEQ ID NO: 430907 - DNA, 75 bp, Homo sapiens
tctggcctggaggctatccagctttcatcgcaaaccagaaaaggttagaaatcatcaacgaagatgatgttgaag

SEQ ID NO: 430908 - DNA, 101 bp, Homo sapiens
ctcctcaatggcctgagcaagtaccagccagcgccagctgcagccctggccgcgcactcgcctcagctgagcctggactggatacacgtctgtttaactac

SEQ ID NO: 430909 - DNA, 73 bp, Homo sapiens
tggagtactcttattttgaaaagatggagtctcattctgtcgctcaagctgaagggcagtgccgtgatcttga

SEQ ID NO: 430910 - DNA, 80 bp, Homo sapiens
cccagacctcgggatgaccctgggaagagaactggaccccatcctgactgaggtcaccctgatgaatgcccgcagtgagc

SEQ ID NO: 430911 - DNA, 49 bp, Homo sapiens
cctggctccccatactagtcgccggcattcccatcaagagcaccatgga

SEQ ID NO: 430912 - DNA, 76 bp, Homo sapiens
tgaggcctccccagccatgcagaactgtgattttacaacgagatgctgctctccatagggatgctcatgctgtcag

SEQ ID NO: 430913 - DNA, 83 bp, Homo sapiens
cgagaatagctccgtccagcagcatcagacaacagtcagcgctttcgagaaacctgttttgcatttgccttgacaccacaaca

SEQ ID NO: 430914 - DNA, 100 bp, Homo sapiens
agcaaagcaacagaagtttatcaaggctgtcacacatcaagttaaatttggtcaacaaaatccacgtcaggaggaatgccagctcctgagcaggcctcat

SEQ ID NO: 430915 - DNA, 100 bp, Homo sapiens
gcctgctggcggattgtctgaaagctgctcagtcccgagacttcacagtgaaagacattatctacctccatccttcaaacgtgccaaatactggtgtaag

SEQ ID NO: 430916 - DNA, 100 bp, Homo sapiens
ggtgtgtctggtgtcctagagcggacgaaagcaggtgactctctagtcaacttccgacttggactccgaagatcggattgaaagaaggtggcaagaggaa

SEQ ID NO: 430917 - DNA, 90 bp, Homo sapiens
agaactctccacagccatcactcatgtccataaggaggatttaaatgtggatgaatttgaggaaatattcaagacaaaagcccaaggacc

SEQ ID NO: 430918 - DNA, 100 bp, Homo sapiens
atgttgtcaaggtggcctaccaggaggccaggggtgtcgccatggttgccaaggaaagtgtactgcagttttacccgaaagctaatatcgttgcctacca

SEQ ID NO: 430919 - DNA, 98 bp, Homo sapiens
gaatttccatgtcaacatagtcctgttgcagaggaaagtggtcgcttatggtcagaggagcagcctgctcaccctctccaggtgggggctgtgtacct

SEQ ID NO: 430920 - DNA, 100 bp, Homo sapiens
ctggtgtaccctggtggacgtgcacccagaggaccaggcggcggagatctattgggaaactgattataaccactcgggcaccatcgatgcccacgagatg

SEQ ID NO: 430921 - DNA, 98 bp, Homo sapiens
gaggagatggagtggtgtctcaagtcaaaatttcaggaaatgctgtctatgatttcttcattggccgtgaattaaaccctcgaattggtacttttgat

SEQ ID NO: 430922 - DNA, 50 bp, Homo sapiens
aaaatgtaaacaagtatcagcaagtggccttggacaagattcgctatgag

SEQ ID NO: 430923 - DNA, 98 bp, Homo sapiens
gaatactcctaaccaagaagttgcccagatgctgcagttggagaagaaacttgaacgtgaacttgaggatgatgcacgagttattgcttgccggttcc

SEQ ID NO: 430924 - DNA, 97 bp, Homo sapiens
tggatttcagcctgcacggatggtcttgaaacacaaatggtttttgggaaaggcgtaggaggaggagcaggagttcttccagatcgccaagaacatc

SEQ ID NO: 430925 - DNA, 100 bp, Homo sapiens
gatcgtagccagccagctggagcgatgcaagctcggatccgagactggcagcatgagcagcatgagatgccttcaattaagttgcagagttctgatggag

SEQ ID NO: 430926 - DNA, 50 bp, Homo sapiens
cattcattcatttgagcatagcaagtacatctccgttcatggatgcatta

SEQ ID NO: 430927 - DNA, 46 bp, Homo sapiens
cagagacatgctgaaacatcgaagccgagcctcttgaagccattct

SEQ ID NO: 430928 - DNA, 74 bp, Homo sapiens
ggcgggagaggcgagctcgcgatgagtggtctcggcaggctcttcgggaaggaccacagcaccgggaagtccag

SEQ ID NO: 430929 - DNA, 100 bp, Homo sapiens
cgagacggagccgacgctggggcatttgcgctcgcacctgaggcagtccctgctgtgcacctgggggtacagactgtgtacagtgccctgggcctgaggg

SEQ ID NO: 430930 - DNA, 76 bp, Homo sapiens
agcaccccgagaaccgtcagtttgagccagatggtttaagtttttgaaactgaagtaggcctacacagtaggaact

SEQ ID NO: 430931 - DNA, 82 bp, Homo sapiens
gaaattaactatctgtacttataaggaaaatgcttcagtctctgggcagaccagaagtccacatggccctggacgtggttct

SEQ ID NO: 430932 - DNA, 74 bp, Homo sapiens
ggaaaacctccttatgctgatatacatccaatgaggggatccagattagatgatcaaagatgtgctccaccacc

SEQ ID NO: 430933 - DNA, 98 bp, Homo sapiens
ttcagaactgttctcaggactcattattttaacatttgggagaaacacagccagaaggcctgtttaaagaagaaaacccgtatgctagatttgaaaac

SEQ ID NO: 430934 - DNA, 99 bp, Homo sapiens
gcgggggtggcgctgggagcaacgggagtgtcctggacccagctgagcgggcggtcattcgcatcgcaggtctcctctgagcctccggcctccataaga

SEQ ID NO: 430935 - DNA, 76 bp, Homo sapiens
ccgctgcccacagcctagcagtcgggaccgtactgaggtttctgggtgtctctggggagcccctgggccagatttt

SEQ ID NO: 430936 - DNA, 75 bp, Homo sapiens
caggacacgaagctgcatgtgtttgacgcaagtgagtgtggctgtgaagtgcctgaagcccgatgtcctgagcca

SEQ ID NO: 430937 - DNA, 100 bp, Homo sapiens
aaatggggttttgctttccgaagatgatactatctatgaaggagaattttcagatgactggactcttagtggaaagctgctctgttaaaagcgaaaatga

SEQ ID NO: 430938 - DNA, 100 bp, Homo sapiens
ggaacagcgcttttacgagtccctccctcccgaaatgaaggagttcacccctgaatacaaaggaattgattcggaaggccatgcagctaactttgtagaa

SEQ ID NO: 430939 - DNA, 100 bp, Homo sapiens
gctgaagcaggaggatcacttgaggatcagggagcttccaaggcatttgatacctttttgatgggaagaagggctctgaggagctccaagataccccaac

SEQ ID NO: 430940 - DNA, 80 bp, Homo sapiens
cgcaaggaaataccagccaaaatcatttttgaggatgaccgggtttacccaaggtccagcctagcccctaggcaccatgt

SEQ ID NO: 430941 - DNA, 95 bp, Homo sapiens
gaagacctcactgaccccagagtggcagaaaggctgatgcagcaggtttattttcttgaaaaggctccaggcttcggcttggaaaatcccaccgc

SEQ ID NO: 430942 - DNA, 75 bp, Homo sapiens
cggcctcttgcgctacgccctggatgagatggagtacaagcgcaagctagccagagtttccctggtgcgcaaaga

SEQ ID NO: 430943 - DNA, 100 bp, Homo sapiens
aagacagtcctcgtcagcactgactttcagctatggaatcggttgattcttcaccacactgaaaccattaggaaaaatccttgtggttaacagcagaggc

SEQ ID NO: 430944 - DNA, 100 bp, Homo sapiens
gctgaaggccgggccccgcgagtgccatggcggccgccctgggagcgagcggaggagcaggcgccggaggttcattttccagacactgaaagagcagaat

SEQ ID NO: 430945 - DNA, 75 bp, Homo sapiens
aaaaggctgggtgccgccgtcccccagctgcgcaaccctaggaactctcgggagaagctaaaacttacttatgag

SEQ ID NO: 430946 - DNA, 97 bp, Homo sapiens
gcctgaggtgtcggccggatccctccttctcccggcgcctcaagcggaaggtaaaaagatggcctatcagaaggtccatgcagatcaaagagctcca

SEQ ID NO: 430947 - DNA, 101 bp, Homo sapiens
ctgcgcacaacatgggcaaccacctgccgctcctgcctgataagaccatcatcatgtggaaactgaccagggatgagaccaactatggaattccacagcgt

SEQ ID NO: 430948 - DNA, 50 bp, Homo sapiens
cctgggtagaaccttgtttctgctccagatgcttgctctgtcaaggcaca

SEQ ID NO: 430949 - DNA, 97 bp, Homo sapiens
gctgcagcaggcctcaggcctgagctccccagggaacaatgacagcaaacagtctgcctctgctgtgcaggaccagtccaccatgcctgaagtcaaa

SEQ ID NO: 430950 - DNA, 75 bp, Homo sapiens
tatttactcgatgatggaactctggtggtttcaggaagatccatatgctcatatctgtttcctccatcggagcaa

SEQ ID NO: 430951 - DNA, 90 bp, Homo sapiens
atggaccttgcactctagaagggacaatggacttctggctttggccactttacttcctgccaggtcctggacccaagccagaagcctctg

SEQ ID NO: 430952 - DNA, 100 bp, Homo sapiens
agctcctggaggaggaggagaagagggtgcagaaggagcgggaggacgaggagctgaacaaccccatgaaggtaactaggatttctacctcaaccgcgag

SEQ ID NO: 430953 - DNA, 100 bp, Homo sapiens
tcgaatcccagacctgtgcttctgactatcttctcttcaccagctcttcagatcaatatgaacctaatccaccaatagatcaagttatacagaaaccagg

SEQ ID NO: 430954 - DNA, 74 bp, Homo sapiens
gaaaagctggatgtgctctccttgtcctcatcaccgggggcatcgtggccacagctgggcgcttcacccagtgg

SEQ ID NO: 430955 - DNA, 80 bp, Homo sapiens
agataaaaatagtatctatagtggcctggaagcctttggcttgaccaagaatgttccaatatttgtttgcactatggcct

SEQ ID NO: 430956 - DNA, 100 bp, Homo sapiens
cagtcggtgctccggggaggtcacctgacgaggagaggcatgccaggtggaagtgaggctgctgctggcctacaactccagtgctcgcattccaaaatgc

SEQ ID NO: 430957 - DNA, 100 bp, Homo sapiens
aatatgccaaggaaaaactggagagcttcatcaaaaatagtgatagctttgataagtgcactttacaggtccccgatgaaccaagagaaccctccaccat

SEQ ID NO: 430958 - DNA, 100 bp, Homo sapiens
caacgctgcccgggtagcttcccgacttatcgacatgagcaggcaccaaggtacaaatctattgtcaagtacaagacagctttctactccttctaccttc

SEQ ID NO: 430959 - DNA, 100 bp, Homo sapiens
cgtgggcagttcaggggctgggcggctgaggcaatgaatcgctccctggctaatgtgattcttggaggctatggcaccacttcaacagctggtggaaaac

SEQ ID NO: 430960 - DNA, 80 bp, Homo sapiens
ggttaagggaaagcgccgagatgacgggctttctgctgccgcccgcaagcagaggatttttagactctgaggagcagttg

SEQ ID NO: 430961 - DNA, 100 bp, Homo sapiens
ccacctctttctttgtgggccggatgggtccttgagtatgtgtcgtggaggccgaatgtttgcaccaaccaaaacctggcgccgttggcatcgtagagtg

SEQ ID NO: 430962 - DNA, 100 bp, Homo sapiens
gacgacgtgtacctggacatcaccgggatgattaccacgaggatgggttctgccagccttaccggggaattgcctgtgcacgcttcattggcaaccggac

SEQ ID NO: 430963 - DNA, 96 bp, Homo sapiens
tggacatgctggacatatgcttagttggttcaggatccaaggagctggttctgctggttggaccaaacctcgtgagccagccacccctgacccaaa

SEQ ID NO: 430964 - DNA, 50 bp, Homo sapiens
ttattcttctgatgtggatccaggttacgagaagtttctgagaagctgaa

SEQ ID NO: 430965 - DNA, 100 bp, Homo sapiens
tggaatttctcacgttaaatttgatgatctcaatccagaagctgttgaagtcttgttgaattatgcctacactgctcacacaagtggaagtgctgtccgc

SEQ ID NO: 430966 - DNA, 100 bp, Homo sapiens
ggaggaattggcatcatggggtcatgagtatgtcaggtctgtgcagacttttgcagacaaatcaaaacaagaagctctgaagaatgacctggtggaggct

SEQ ID NO: 430967 - DNA, 88 bp, Homo sapiens
atgtttctggacgcggatttttggcctcatactctgttatagataaacaaggtgctttttgaccacgtaggctgtttaaagaaatatg

SEQ ID NO: 430968 - DNA, 96 bp, Homo sapiens
gggccggagcagccgcgggcgcccgaggggccgagcgaggtgtcatggagaaactccagctgggcccagagattctgcagcgggaaaatccaaggc

SEQ ID NO: 430969 - DNA, 50 bp, Homo sapiens
atttaaacctgagccactatctgaaggtccaggtgcaggtacagcagtct

SEQ ID NO: 430970 - DNA, 100 bp, Homo sapiens
tgcggggcacaggtgagccctggctgcgcgcgcggcccctcctccccggcgcctcccagggcaaacctggtggacctgcagaagaagctggaggagctgg

SEQ ID NO: 430971 - DNA, 95 bp, Homo sapiens
cgagcaacggccgcatcaagcagctgcgttcagtgggggcttatttggcctccccaggatggactggagcatcagtagtgcccgggtttatcaca

SEQ ID NO: 430972 - DNA, 100 bp, Homo sapiens
catggcaacagcctccggggcattgtcaagcatctggagggtaactatggtggtggtgggaactataatgattttggaaattatagtggacaacagcaat

SEQ ID NO: 430973 - DNA, 98 bp, Homo sapiens
atatgcctgatgttgctaaatgtagacaatggttagagaagaattttccaaatgaatttgcaaaacttactgtaggttccctacttcagcaaagcgtg

SEQ ID NO: 430974 - DNA, 97 bp, Homo sapiens
gaaaagcctctgggagcagaagggaggctccaagacctcatcaacaattaagggtttggaaatcccttgtctccaggttgctgggattgacttcttg

SEQ ID NO: 430975 - DNA, 75 bp, Homo sapiens
agcaccagtaaaatatggtgaactcattgtcttagggaaatctgaaatagagtactatgctatgttggctaaaac

SEQ ID NO: 430976 - DNA, 50 bp, Homo sapiens
aggagattctgaagataaggagatctcgaatacctgatgcatgcaaaaca

SEQ ID NO: 430977 - DNA, 100 bp, Homo sapiens
gggaactgatggcgttcctgttacctctcatcattgtgttaatggtgaagcacagcgattcccaggaggaacccgttttcactagacaagacagcaatcg

SEQ ID NO: 430978 - DNA, 82 bp, Homo sapiens
cggatctcaccgccgctcaggggtctgatgctgagtcggctgggccacaagagcttggcccagaaggtgcttcgtgatgccg

SEQ ID NO: 430979 - DNA, 100 bp, Homo sapiens
gtggagagcgcggggacgctgccgtgcgcgccagagatcccagactgcgtggagcagatcttaatatgtgtatccacaattatggtatcaactcaatatg

SEQ ID NO: 430980 - DNA, 50 bp, Homo sapiens
aaggagacccccctgacaacatgaagggcccagtcatatatgcacagtta

SEQ ID NO: 430981 - DNA, 48 bp, Homo sapiens
cctggctgtggactggctagtgctttctctgctcagagctccaagcca

SEQ ID NO: 430982 - DNA, 82 bp, Homo sapiens
gcaagagtcgtgtctctggcaagaagcgggctgctaatgccagcagcaagtggacatcctcatcatggatgatgacgacgtc

SEQ ID NO: 430983 - DNA, 100 bp, Homo sapiens
tgatggaagtcattcttgtgccagaggagtgtgccatattccaatggctgagccgttttgccccaaaacgagagagggatcattgacatttagggatgtg

SEQ ID NO: 430984 - DNA, 83 bp, Homo sapiens
ttcgactgctagagccgagcgaagccttgcattgaaaggctctagttacagtggacttcttgaacgacatcatattcacacca

SEQ ID NO: 430985 - DNA, 90 bp, Homo sapiens
agagtactgtgtcattcaatccgtatgagccagaacttgcaccctgggctgcagacaaagcttcttggacacttaatgattgttggcaag

SEQ ID NO: 430986 - DNA, 82 bp, Homo sapiens
ccaccatgtcagacgcagccgtagacaccagctccgaaatcaccaccaaggacatggatttgattgacatactttggaggca

SEQ ID NO: 430987 - DNA, 114 bp, Homo sapiens
tctccgcggcagccctcgctgtcatcctcattgctactgccctctgcgctcctgcatctgcctccccatctatcagttgagggatttgcagttgataaaatggctggagaggtt

SEQ ID NO: 430988 - DNA, 100 bp, Homo sapiens
ctttcaatggcttcaagacaaccagaagtgcctgatttggagcaagaggtggtggtggccttcccccgaagaaatttggtaatcctggggagcgtttgcg

SEQ ID NO: 430989 - DNA, 87 bp, Homo sapiens
gtcgcagtttcgcagccagggcagccaggcagagctgcacccgctgccccagctcaaagatcggacagctggcttttaaaggaatga

SEQ ID NO: 430990 - DNA, 75 bp, Homo sapiens
ccgagatgccccatcgcaccaacgaagcaactgctgagcaggttccagcaacagatagaaatgctttaagttcac

SEQ ID NO: 430991 - DNA, 90 bp, Homo sapiens
tgcccacccctcctgtaacccagcctgtttcacttcttggcctggtgatcctcagtcagctcaggataaagcacggatggataaagaata

SEQ ID NO: 430992 - DNA, 90 bp, Homo sapiens
caacgcgaagacggtaacccgtgtgactttgactgggttatgatggagggtggtcgcagcaaagggtttggttttgtatgtttctcctcc

SEQ ID NO: 430993 - DNA, 90 bp, Homo sapiens
cgggagccgcacgcggcgatatggaagaggagggcaagaagggcaagaagatgctgggctcttgcactgtttggtggaaatggtgagaca

SEQ ID NO: 430994 - DNA, 101 bp, Homo sapiens
aagccacaatttccatcaaaaagtgattaagcagagaatggagaagaaggttgattccagcctctacggcagacacatgcaggccaacccagaaccaccga

SEQ ID NO: 430995 - DNA, 100 bp, Homo sapiens
ctggagtttatctggagtgaggtggccggttcttggtgggatctgagcaggctgaggccaccatggagcagtgtgcgtgcgtggagagagagctggacaa

SEQ ID NO: 430996 - DNA, 97 bp, Homo sapiens
tggaccctctgctgaaagatgctcccaagcaccttcccagttgccctgacaagggcttcacagaggagaaggcagagcccccccaggctatgaatgc

SEQ ID NO: 430997 - DNA, 100 bp, Homo sapiens
ggaggacaccgtgacttcccggacgctgggaaatgggagaagatgtcaaccggacactagaaggtggaaggaaacctcttcattatgcagcagattgtgg

SEQ ID NO: 430998 - DNA, 74 bp, Homo sapiens
cgtggagatatggcgcaactgcggcgcgaatagccaggccagaagaaggaaggcctgtggtgagtgggacagga

SEQ ID NO: 430999 - DNA, 83 bp, Homo sapiens
gagagaggaagccgaaaacaccctgcaatctttcagacagatcctggtggctttgagacaccttcacttcaagaacattgtcc

SEQ ID NO: 431000 - DNA, 105 bp, Homo sapiens
cgcggaccggcgtccccggcgcgaagaggctggactcggattcgttgcctgagggcgtctctggccgagcctctttttgtggaaaacgacagcagcagcagtggc

SEQ ID NO: 431001 - DNA, 90 bp, Homo sapiens
atcctgctggggctgcgacagaagaagcccaccatctccgtgaaggaagggtcctccggcgcccagggcagtggtggtggcagcacgagt

SEQ ID NO: 431002 - DNA, 100 bp, Homo sapiens
ctttcccagagggaacacagatggctgtatttgggattcacctacgctcttaccagctggagggagtaaactggctcgcccagcgcttccattgtcagaa

SEQ ID NO: 431003 - DNA, 93 bp, Homo sapiens
actggctgaggcaggggtctgccagtgagattgaggaatagccaggccagaagaaggaaggcctgtggtgagtgggacaggaaatgacatcac

SEQ ID NO: 431004 - DNA, 101 bp, Homo sapiens
gccctcttcttgcagcatggcctggccacccagagggcccttgtgtccaaggctgaaggtgatgtggccgccctcaaccgacgcatccagctcgttgagga

SEQ ID NO: 431005 - DNA, 98 bp, Homo sapiens
cagataccgtttattaaaagagctgtggctagttaccttcctaatgacactgtagaatctggcatccatccagtatatttttgcagcacccattatat

SEQ ID NO: 431006 - DNA, 51 bp, Homo sapiens
ccacactgcgccaacacagaaattatggctgctgtcccgaggttcgtccag

SEQ ID NO: 431007 - DNA, 101 bp, Homo sapiens
cctattcccagaggcaggtggtgctgaccctgtaacccaaaggaggaaacagctggctaagctcatcattgttactgctcagagtcaagatctccactgaa

SEQ ID NO: 431008 - DNA, 75 bp, Homo sapiens
gtcttcctgtctcaacgatacctattttctagtgctgagatcctgagacaatggcttcccagctggcgtgtatgt

SEQ ID NO: 431009 - DNA, 90 bp, Homo sapiens
agctattcctgtcaatatccattccatgaattttacctggcaagctgcagggcaggttgaatttttaggagaagaaggaactggcttggg

SEQ ID NO: 431010 - DNA, 75 bp, Homo sapiens
cttgctgcaggctctggggagtcgccatgcaccggaagcagtactcagaacaagtcatacctaatgctgcaggaa

SEQ ID NO: 431011 - DNA, 82 bp, Homo sapiens
tggataccaaggaagagaagaaggaacggaaacaaagttattttgctcggtccacaaaaggtggctccgattcctccctttc

SEQ ID NO: 431012 - DNA, 80 bp, Homo sapiens
tctgctgggcctgcccttcaccctctacatgtatacctgaggtgcaccggaggtgaagtcggtgccacttctgccctggc

SEQ ID NO: 431013 - DNA, 100 bp, Homo sapiens
ctgttaccatgaaatcatcacattagaacaatatcagctatgtgcattagctatcaacattgagaggatccagaatccagatctctggaatagctaccag

SEQ ID NO: 431014 - DNA, 100 bp, Homo sapiens
tgcctttgaaggagaatacacacatcacaaagatcctggaatatataaatgtgttgtttgtggaactccattgtttaagaattactctgcttaatgtaag

SEQ ID NO: 431015 - DNA, 101 bp, Homo sapiens
gttctgcatggcctgcagctcaagatgagcatcttgcatgctctggtgctactgattgctcaagagaaggaaagaaacatatttgaccagcgtgccataga

SEQ ID NO: 431016 - DNA, 100 bp, Homo sapiens
ggcggaggcttcgagtgacccgggtgccgaggagcgggaagagttgctgggagccctgagaccagtgcaccgctgctgcctgaggcccaagggaatgctg

SEQ ID NO: 431017 - DNA, 101 bp, Homo sapiens
atggtacagctgtgtggtgcttctgtggtgaaggagctttcatcattcacccttggcacaagatggagtctcactctgtagacaaggctggtctcaaactc

SEQ ID NO: 431018 - DNA, 75 bp, Homo sapiens
aggagacgctcctggcactgcagatatctccacaggaccttcttggttaaatcagggactacttctgaactctac

SEQ ID NO: 431019 - DNA, 50 bp, Homo sapiens
aagcagtgaaacgctccatgaattgaaagctgtatgtgatggcttctgtg

SEQ ID NO: 431020 - DNA, 50 bp, Homo sapiens
ctgcggccccagcagaatccagtcctggagatgcccaaagatgagctgcc

SEQ ID NO: 431021 - DNA, 80 bp, Homo sapiens
tcccttccccgcgcagccccgcacggcccgggcccacgtgaaagaaaatggcccgaaccaagcagactgctcgtaagtcc

SEQ ID NO: 431022 - DNA, 89 bp, Homo sapiens
cctaattcacagggtgaagccagatttggctatggatcgaagttgtaatcgtatgtcttcgcacacagagacgtcaagtttcttacaaa

SEQ ID NO: 431023 - DNA, 74 bp, Homo sapiens
tcacttcatgcagtaattacattcaagacaagagcagaagctgaagcatccatcaataaagccatggagaaaga

SEQ ID NO: 431024 - DNA, 123 bp, Homo sapiens
cgacactgtccacctttaatttcctcgaaaacgcctgtaactcggctgaagaaactaatctggattcactccctctggttgatacccactcaaaaaggacacttctgattaagacggttgaaa

SEQ ID NO: 431025 - DNA, 90 bp, Homo sapiens
aaagctgtgaaataccagagtcaggcccggaagatccatcttcggttgtgaatccggcccggaatgcagccaccccttagagcaaccccc

SEQ ID NO: 431026 - DNA, 75 bp, Homo sapiens
ttggcctcaactgaagatgaaaccaggtattcatcaaagtaatagacacaaatgaccatcgtcctcagttttcta

SEQ ID NO: 431027 - DNA, 98 bp, Homo sapiens
tttttactgcttctaagaaggtgtatgcagacaagttactgaacatactagaccctaaaaagcaactggtcaggaagatgagaatgtgcctactgctc

SEQ ID NO: 431028 - DNA, 100 bp, Homo sapiens
cccagacaatgccggtggaggaatttgtggctggctggatctctggaccctgaggctcagaggggcagcttcaggggaggacaccccactggccaggacg

SEQ ID NO: 431029 - DNA, 100 bp, Homo sapiens
aagcggaaccatctgggagccttcctgatccgggagagtgagagctccccaggggagttctctgtgtctgtgaaccaggaagaaagctcaggcccattag

SEQ ID NO: 431030 - DNA, 96 bp, Homo sapiens
ctttctattttaaagagccaagcctcagagagcagaatccagagaccacatttgaagtatatgttgaagtggcctatcccaggacaggtggcactc

SEQ ID NO: 431031 - DNA, 96 bp, Homo sapiens
cgctgatgaaataattcagtgtgacaattgtggcattacagtccatgaagtgttctaagaacggaagcatctgggctggatggaatttagcatcaa

SEQ ID NO: 431032 - DNA, 98 bp, Homo sapiens
ctacacaatgattaatccagtgccgcctggaggcagccggtccaacatatggctcgtggacagcagaaaattcagtctcagcagaaaaatgccaaaaa

SEQ ID NO: 431033 - DNA, 75 bp, Homo sapiens
cgcttggcgctggcgctggccaaggcgcagaagatggctgtgccacccacgtatgccgatcttggcaaatctgcc

SEQ ID NO: 431034 - DNA, 110 bp, Homo sapiens
tttgggttgtactcatagattgtgtaggcgttggtcttctgatagcaactttaatgtgattgcaggacaaacaacgagtaaatgtatcgagtggatggggggagtaggct

SEQ ID NO: 431035 - DNA, 78 bp, Homo sapiens
aacaccacaataatccacagccaagattagtgatgatgaaccaggttatgaccttgatttattttgcatacctaatca

SEQ ID NO: 431036 - DNA, 100 bp, Homo sapiens
atcttcatcctaccgctccgcccgtgcctcatctccagacatggagcccagctatgggggaggtctctttgacatggtaaaaggaggtgcagggaggctc

SEQ ID NO: 431037 - DNA, 82 bp, Homo sapiens
cggaacacaagctgtgaaacactagacaatgcagatcttcgtgaagactctgactggtaagaccatcaccctcgaggttgag

SEQ ID NO: 431038 - DNA, 100 bp, Homo sapiens
ggagctgcccggctcggcagcgggaagtccgtggtggatgactggattgaatcatataaacaagacagggacatcgcacttctggatttaatcaactttt

SEQ ID NO: 431039 - DNA, 51 bp, Homo sapiens
cgatgtgctctgcgtgttgctgggagtgctaacaggaatgaatgaaacttc

SEQ ID NO: 431040 - DNA, 100 bp, Homo sapiens
taatgacgaacaaactctcggaaacctttctacagatctaccaatttcctgctcattttccacaaggccgcggcaggggagctgcaggaggacagtgggc

SEQ ID NO: 431041 - DNA, 75 bp, Homo sapiens
aaaaactggagagcttcatcaaaaatagtgatagctttgataaggcagctgcaatgactctccgcacggtattat

SEQ ID NO: 431042 - DNA, 100 bp, Homo sapiens
gaatagacacggcagcgcagtgcagatccgcaggcgcaaggcttcaggcgacccgtactgggcctactctgccatcagaaaaaattcggattgagatcat

SEQ ID NO: 431043 - DNA, 100 bp, Homo sapiens
tgcctgggcatagacttccttaaggtgacagcctctgatgcagattcaggactctatggctttattgaatattctctttatgatggattcctgagctatg

SEQ ID NO: 431044 - DNA, 100 bp, Homo sapiens
tgtgattcccttcagccggctcctgaatgtcaaagacgtgaagccctccaatatgctagtaaacacaagaggacaggttaagctgtgtgattttggagtt

SEQ ID NO: 431045 - DNA, 100 bp, Homo sapiens
ttaatttcaaagcttttcccatggagactttgagaatcactacaagaaaaactccttgtggtgaaggttctaagacgtgggatcgtttccagatgagaat

SEQ ID NO: 431046 - DNA, 82 bp, Homo sapiens
ggcgtcgggggtcgcggggaccatgcagcggaggtgacaccggaaactggtactcaagtgatgaggatgagggtggaagcag

SEQ ID NO: 431047 - DNA, 50 bp, Homo sapiens
tacccgcttcactggcaccatgtgaggatgaggctggcccatggatcctg

SEQ ID NO: 431048 - DNA, 75 bp, Homo sapiens
aatctgctgtgacctggatgtcttggccagcaagaaggatgaccggaaagaagggatgaccgcgtttgtggaaaa

SEQ ID NO: 431049 - DNA, 100 bp, Homo sapiens
cttttaagaatgcgcttgctgctcaggagaaaaaatatggacctcttaaaattgtggtgctgctgttttttcaaacgaaggaaaaggaaaaccatacagc

SEQ ID NO: 431050 - DNA, 87 bp, Homo sapiens
tggactaattggagcagaggtatctattgcatctctcagaccagaaactgtaggtgaccaagaatatggcccaggtgaccaaagccc

SEQ ID NO: 431051 - DNA, 100 bp, Homo sapiens
ggaggctcctgggggccggggctccgagggatttgaaactggacaacatccttctggatgcagaaggtcactgcaagctggctgacttcgggatgtgcaa

SEQ ID NO: 431052 - DNA, 96 bp, Homo sapiens
gcgaagatggccgctgcgtcctcatcggattccgacgcctgcggagctgagaggctcacaggcagaaggaattttccttgtcttggatgagacttt

SEQ ID NO: 431053 - DNA, 75 bp, Homo sapiens
tatcaaggaaccacgctctcgtctggtttgatcacaagacgggcaagcttattgcaggagtgaccaggacactac

SEQ ID NO: 431054 - DNA, 97 bp, Homo sapiens
ggctccttgcggaaggggattccacggaccaagtctgtagatggggaagggatccttcaagtatgcctgggtgctggacaagctgaaggcggagcgt

SEQ ID NO: 431055 - DNA, 50 bp, Homo sapiens
gaccgctgcagccgctggctgaggctgtcacatggtgactgaagaacttc

SEQ ID NO: 431056 - DNA, 87 bp, Homo sapiens
gccgacccgcgccctgctccctctcagcacctgggcggacgatcgataaagaattggctagtggtgaatactttttgaaggcaaatc

SEQ ID NO: 431057 - DNA, 102 bp, Homo sapiens
gtttttcctgtcgtacgtgggacaggccacgctgtccgtccgcagtaccgacgcctgcagacaatgcagatcttcgtgaagactctgactggtaagaccatc

SEQ ID NO: 431058 - DNA, 76 bp, Homo sapiens
aggagacttccttgcttctttggagaatgatatcaaaccatggacatttgggagcaataaaaataagaagaaagga

SEQ ID NO: 431059 - DNA, 100 bp, Homo sapiens
ggggaatttctcctggggctcagagtgttgactatagtcaatggggccaatggagccaagtgtatggaaacccacaacagtatggacagtatatggcaaa

SEQ ID NO: 431060 - DNA, 98 bp, Homo sapiens
aggtgacgcccaagtgtgaagactgtcagagcctggtgaagcctggaatcactcccgccacctcgggccgccgggtccccccgctgggctccagtctt

SEQ ID NO: 431061 - DNA, 100 bp, Homo sapiens
taggaccgaattcctgtgccgaagaggcctgcagtgggagagcagggagtgtggccatctggggccgtgtggtatttgccactcaggagacatgtcccta

SEQ ID NO: 431062 - DNA, 80 bp, Homo sapiens
agggaaccctggtcaccgtctcctcaggtttgggcaaaactacccctgatccttcagctaacattagtctggatggtgta

SEQ ID NO: 431063 - DNA, 87 bp, Homo sapiens
gcagaggaggagcttgctgcagagtgtactctctgaagatggcagaagctcaccaagctgtggcctttcagttcacggtcactccgg

SEQ ID NO: 431064 - DNA, 76 bp, Homo sapiens
cgccagtgtgggagcctcgtctcactggagagtccgttcagaacaccttccaccatgaccacctcagcaagttccc

SEQ ID NO: 431065 - DNA, 98 bp, Homo sapiens
ccatgacgctctgaacatcatcgacatggccctgagtgaatacccagaaaatttcatgcttctccagggaaagtgaccgaggcagtgaaagaggccat

SEQ ID NO: 431066 - DNA, 50 bp, Homo sapiens
caggcccagatgtatctacgggtaacctggatggagaggaccatgccgca

SEQ ID NO: 431067 - DNA, 100 bp, Homo sapiens
gaaatctaaagcatgaacaggcatctaatgttcttagtgacattagtagtaagttgtttaagaaaggcctgaatatatcagaacatctgagcaccatttt

SEQ ID NO: 431068 - DNA, 99 bp, Homo sapiens
ggaaggtgcaaggggtgtttttccgtaagcatactcagagctgctgcccaaagggagcaaggaggaacagcgggattacgtcttctacctggccgtggg

SEQ ID NO: 431069 - DNA, 100 bp, Homo sapiens
gcaagcggaggtgctgggagcgagttggctgctggtggaagttaaaggccccaatgatcgtctttcacataagcagatgatctggctggctgaactgcag

SEQ ID NO: 431070 - DNA, 75 bp, Homo sapiens
gaatatccagtttgagccatcggatctaagatccaaaagcctcttctgaaacagtctccctggagcaaccatcag

SEQ ID NO: 431071 - DNA, 100 bp, Homo sapiens
accttgagctccaggagttcgtctcttacgtctgcggaagtgcagctgcctcagttcttagcgcaggtacagtgaaggtgaaattcgatttaatttaatg

SEQ ID NO: 431072 - DNA, 50 bp, Homo sapiens
aacaatgtcaaaggaacgacacttcccagaatcgcatgtgtgagtgcccc

SEQ ID NO: 431073 - DNA, 90 bp, Homo sapiens
gaggaatcttggcgttcagcagagtcagggatgggtccattatatgatccatgaaccaggagaagatggggagccccgaggatgacctga

SEQ ID NO: 431074 - DNA, 96 bp, Homo sapiens
ctgagctggttggccctgtgatccctcaagactggtccacggagtgtatgaccacaaacagccatcaagaaagacctgagctgtcttccttggcac

SEQ ID NO: 431075 - DNA, 50 bp, Homo sapiens
gatttaaccgctctctgcctcccagcaaccaaccagtggttcatcccagc

SEQ ID NO: 431076 - DNA, 76 bp, Homo sapiens
aaattttgtaacagtgtagtcgatctgtattcaaatcttagtaaggcccaacacagagatactttcattgaagaac

SEQ ID NO: 431077 - DNA, 100 bp, Homo sapiens
caggaacagaggtggactggaatgtcacacgacggggcagctggaagaatggagatttacagacagtcatctgggtggaggacacccttttgggatcagc

SEQ ID NO: 431078 - DNA, 83 bp, Homo sapiens
tttgaaatcgacacacaaagaatagagttgagcctgtgggacacttcgggcaagagcggtgagcggggcgcctatgcctcctt

SEQ ID NO: 431079 - DNA, 100 bp, Homo sapiens
gcactttggggagcctaagtcctgtgtcaacagcatctccaccctggagcctgtgagccggtgccagcgcctgagtgagctgtacctgcggaggaaccgc

SEQ ID NO: 431080 - DNA, 133 bp, Homo sapiens
gacagctacacaaatctggaacgggtggccgattactgcgagaacaactacatacagcccgacggccatggaggctgaagagacgatggaatgccttcaggagttccctgaacatcataaaatgatcctcgac

SEQ ID NO: 431081 - DNA, 50 bp, Homo sapiens
gggacatattggggtatattacaggctttgatttgttggagaaactgtta

SEQ ID NO: 431082 - DNA, 100 bp, Homo sapiens
ccctccgccacgatgccggggatcgacaagctgcccatcgaggagacgctggaggacagcccgcagtgttccttgcctgtatctccccttggttcaatag

SEQ ID NO: 431083 - DNA, 82 bp, Homo sapiens
gccactgagatgaggaggcgtcgcgcgcgcctgtagctcgcgggcctcgcagtccaaggacaaaatgatgagaggctctcgc

SEQ ID NO: 431084 - DNA, 100 bp, Homo sapiens
ggcggcggaagatggtgccgggggtcgctggctctgctgctgccgccggcgaaggaggaggcgttgccgggaatgctttgtgtggaaagcttcagtgtga

SEQ ID NO: 431085 - DNA, 87 bp, Homo sapiens
caagtatccgccagtcaataggaagtacgagtgtgagaaggtgggagtcaatcattttgacaagtctcctgaaaggaacagctagca

SEQ ID NO: 431086 - DNA, 75 bp, Homo sapiens
atccccctgtactttgtggacttgcaggatgacttagacgactctgtcaaagctcgaaaaacagcagcagaggaa

SEQ ID NO: 431087 - DNA, 99 bp, Homo sapiens
tcagtggcagaaaaaaatgggtccattccttaccagtcaagaaaaagagaagattgataagtgcaaaaagcagacggagtttcactcttgtcgcccagg

SEQ ID NO: 431088 - DNA, 50 bp, Homo sapiens
ctaatgttatcgcggaatgatgatgggaaataaggccaagattgcaaaat

SEQ ID NO: 431089 - DNA, 74 bp, Homo sapiens
cccagctccagtgattactcggacctacagagggtgaaacagccaagacaatgcaaactccagtgaacattccc

SEQ ID NO: 431090 - DNA, 102 bp, Homo sapiens
gcgccagcctgcgaaggtggcggcgctgctgctcgggctgctcttggagggggatatgagactttctactcggaatatcctgagtgttgcgtggatgtaaaa

SEQ ID NO: 431091 - DNA, 82 bp, Homo sapiens
tctgcaaggaatacgtagaggatctggccaaaatccccaggagtttcttacaagcatcctgtacacgtcaaagaagagcccc

SEQ ID NO: 431092 - DNA, 75 bp, Homo sapiens
agaactaccgctcccatgaagctatcatcaataacacttacacagtggcagtgaagtcggtcattttgccatcgg

SEQ ID NO: 431093 - DNA, 117 bp, Homo sapiens
tgccggcctattttcagaggccggaaaatgccctcaaacgcgccaacggctgttagagaaacgctagcatccagaatagtgctgtttgggacctcagctctgattcctgaagtcttc

SEQ ID NO: 431094 - DNA, 100 bp, Homo sapiens
agcggggtccgggtccggagcgccacagtgatgttcgaaatgatatctatgtaacattagttcaaggagattttgataaaggaagcaaaacaacagcgaa

SEQ ID NO: 431095 - DNA, 98 bp, Homo sapiens
gaggaggggaggagggccactgggctcccagcagcccaggttcagatgaggctgccagccttgagagcaccaccgttacctggttgaagaggggaggg

SEQ ID NO: 431096 - DNA, 100 bp, Homo sapiens
ccgcagccacagcgcccacttctttgagtttctcaccaaggagctagccctgggccaggaccggcaagttgctccctgagctgctccaaccttatacaga

SEQ ID NO: 431097 - DNA, 50 bp, Homo sapiens
gtggaggcagaggtggcatggggtactccaaagattcaggtttactcacg

SEQ ID NO: 431098 - DNA, 100 bp, Homo sapiens
gttggaaatgcaactgcatcccaggaacttggttatggttgtctcaagctcaccagtatccagttctcttataatactgatataactcagtttcgacagc

SEQ ID NO: 431099 - DNA, 98 bp, Homo sapiens
tttctccggggccacatccagcgcaggcatgcaggcgtggcagaaggtggaatacatgcccctccctccagaagaggcagaaaatggagagaatgctg

SEQ ID NO: 431100 - DNA, 82 bp, Homo sapiens
cgctccctctgctcttcctcccttcgctcgcaccatggctgtaccagtgcaggtcctcactttaatcctctatccagaaaac

SEQ ID NO: 431101 - DNA, 82 bp, Homo sapiens
ttatgtggctgcaactttcgacatctggaagttcagaaaaacatgccttgaattggaacgctacctacagacggagccccgg

SEQ ID NO: 431102 - DNA, 98 bp, Homo sapiens
gacagcccaaatatcctcggaagagcgctcccaggagaaacaatattgaatttgaccgggattgtgactattttgcgattgctggagttacaaagaag

SEQ ID NO: 431103 - DNA, 88 bp, Homo sapiens
gaagtgcaccaatactggacaattataagcgccatggctatggctagtgttaaattgcttgccggtgttttaagaaagccagatgcct

SEQ ID NO: 431104 - DNA, 96 bp, Homo sapiens
tgcagagctcacttggccaatcatgatgaactaatttccaagacctgtggatgaagagccagagtcctctgaggtcgatgctgctggtcggtggcc

SEQ ID NO: 431105 - DNA, 100 bp, Homo sapiens
gctccctctcagcacctgggcggacggcattgcttctatgacagtgccagtgtacattgcggaggtctcaccacccaatttaagaggccgattagtcacc

SEQ ID NO: 431106 - DNA, 74 bp, Homo sapiens
attcaatcccaacttccagtattcaccaggaaacctcgacctgtctcccagttggttgcacagcaggttactca

SEQ ID NO: 431107 - DNA, 98 bp, Homo sapiens
tatgttcaaactatactaaaacacctacagaatctttttgtaccaagtgcaactgcagatagaagacctgactcgtaaactgcgcacaggagacctgg

SEQ ID NO: 431108 - DNA, 100 bp, Homo sapiens
ccagttgcttgatcaggtggaacagattcagaaggagcaggattaccaaaggttttccttacaggacgtgataggctgcatgcaagaggcatacagaaaa

SEQ ID NO: 431109 - DNA, 130 bp, Homo sapiens
gatgaaccaatcttgaaacacctgcaggatattaaagtgaaattttctgaccctggacagcctatggaaagtaatggtccaacagacagttatgcagctatttcacaagtggatcgattgcagtcagagc

SEQ ID NO: 431110 - DNA, 100 bp, Homo sapiens
gtgtgctgaatgactcaaggattttttggcagcgtgcagggtcaaagacagccggccccccatgtcagtggtctaggatggccagtgaaggcaccaacat

SEQ ID NO: 431111 - DNA, 97 bp, Homo sapiens
gaaatctatcacaacatcaatgcgggtcctagcagaagatgtgactcagactgcctctgggtggggctggctggcccacagatcctgccaccatgcc

SEQ ID NO: 431112 - DNA, 125 bp, Homo sapiens
ctgacgtggcttgaattgggaggggggcagctggagcctcaggcggcagcgcttctagaactgaaggcagaagctagtctaatggaccagatgagtagttgtgatagttcatcagattccaaaag

SEQ ID NO: 431113 - DNA, 50 bp, Homo sapiens
tggagagcaacgtgaaagtgcagagtgagaaagatcagtctaaagaaaag

SEQ ID NO: 431114 - DNA, 98 bp, Homo sapiens
gactgtcccagaagtgaatcgcagctttggcagcatgtaagcagctgtttgccaagaacccaggtcactgctaagaaagggtgccttcgggagaagag

SEQ ID NO: 431115 - DNA, 82 bp, Homo sapiens
ggtcaccgtccagagccaaggtccagggggcaaggtcgtgcaacaagtggcccccacggatgatgagactgggaaggagctg

SEQ ID NO: 431116 - DNA, 83 bp, Homo sapiens
cgtcgccgccgccaccatgcccaagagaaagaactaaagatgactcagagccatctggagaagaaacagtagaaaggacaagg

SEQ ID NO: 431117 - DNA, 74 bp, Homo sapiens
tgacgccagcagtgccactttcattttcggagggacttatgaaggcatgttggagacttgggcaatgtgactgc

SEQ ID NO: 431118 - DNA, 101 bp, Homo sapiens
gtctgtagaggatgattattgtatttcgccgtcaacagaatgacagcccatatcaaggcggtgtattctttttgacaattcattttcctacagactacccc

SEQ ID NO: 431119 - DNA, 75 bp, Homo sapiens
acactaacgagattcaagattatttgcaacagctcacgggagcaagaacggcggtctatgcttgcttggtgctta

SEQ ID NO: 431120 - DNA, 117 bp, Homo sapiens
ggtttgtactatcctcggtgctgtggtgcagagctagttcctctccagctcagccgcgtagcctctcaacattgcctacagccacatctacagctcctacaggaatttcgtggggcc

SEQ ID NO: 431121 - DNA, 75 bp, Homo sapiens
tcctttgttgacctgtcaggccacaacctggccaacccccacccgttcgcaggcatggaaaagaccttgccagag

SEQ ID NO: 431122 - DNA, 100 bp, Homo sapiens
ctggaacaagtgaactaggaaagagggaacgccaatccaaggtctttcaacactttgcacatgatgtatcacgaagctacagcttgccatgtgactggag

SEQ ID NO: 431123 - DNA, 100 bp, Homo sapiens
caaaagtgccggtcaaaatggaagtgaatccccctaaacaggagcacctgctggcgctaaaaggtactaatttggtcgaagcagataaccaagcggagtg

SEQ ID NO: 431124 - DNA, 89 bp, Homo sapiens
aaccaccctctcctgaccctgaagaactgtgatgctcccataatactctcagatagtgaagaagaagaaatgatcattttggaaccaga

SEQ ID NO: 431125 - DNA, 90 bp, Homo sapiens
tatttaggcctgtaagtgagacatgcacagacagatctggcatctccactggacactggtcagaaaatatttacaccagcagctccagtt

SEQ ID NO: 431126 - DNA, 83 bp, Homo sapiens
cctgggggacttggcagatctcaccgtcaccaacgacaacgacctcagctgcgatggagccagcgccggcagccaccatggcg

SEQ ID NO: 431127 - DNA, 82 bp, Homo sapiens
tcttgtggaactgaacttagctcgacggggctgaccgctctggcccagggtggttgttgatcattatgaaaatcctagaaac

SEQ ID NO: 431128 - DNA, 75 bp, Homo sapiens
ccgcagacagaagtggggagaagcggagacctggagtggaagatcatttatgttggctcggctgagagtgaggaa

SEQ ID NO: 431129 - DNA, 85 bp, Homo sapiens
cagaccctcatgacggtcaacgagttcatcagcaaatacatcgtgaatgagattgctgatggtatggcatatattgaaagaatga

SEQ ID NO: 431130 - DNA, 100 bp, Homo sapiens
agcggcatacagaatgcctatgaccggcgtcgagaatttcaactgcaacagctgcgaatgcggatcaagcttacatataatcacaagggctcagcaatgc

SEQ ID NO: 431131 - DNA, 98 bp, Homo sapiens
gggcgccgcgccgcacgagcaccagcctagagccagaggcttcaggtacaactggccacagagatagtcctggaagacacgtggcgcctgtggaccgg

SEQ ID NO: 431132 - DNA, 100 bp, Homo sapiens
cctgaccactatcatcaccatggaaaaagtgacttgagcagattctcctgagaatgatattcctatggagatcaccacggcagaaccacaggtttccgag

SEQ ID NO: 431133 - DNA, 98 bp, Homo sapiens
ctaccgctgcggctactgcaagaacgagtcgggcagccgctccaatggtctacttccccagcaggacagcatcattctcctatatcttctagacatca

SEQ ID NO: 431134 - DNA, 100 bp, Homo sapiens
caagagccccctgccgctgggcttctcccccgtctgcgaccccatggattccagatcccatgacagattctgttgtcacgtctccttacagagtttgagc

SEQ ID NO: 431135 - DNA, 78 bp, Homo sapiens
cagaatcagatgaagatgaagattttaaagagcagactagacttctcaaggtggggagaagaattttcattgtccaag

SEQ ID NO: 431136 - DNA, 96 bp, Homo sapiens
tcatggtatatttgcagccagtactctatatgaacaatccgtctggatcacggatgtaggaagtgatactgtggatggtagggaagaaaagtctgc

SEQ ID NO: 431137 - DNA, 82 bp, Homo sapiens
ctggtgcagaacattgcgcggcagaaatttaaaagcctgttgattcaagaactttctaaagtatttccggaagacatggcta

SEQ ID NO: 431138 - DNA, 100 bp, Homo sapiens
caccttctcaactgttgtcctcatgatgtcctttctggaactggtgggaaaccccgtaaacaccggaaggatcggctacaagatttaattgatataggct

SEQ ID NO: 431139 - DNA, 50 bp, Homo sapiens
agctcattgacttttctgctcaggaacgtcaaggtcgtgggaaataaaag

SEQ ID NO: 431140 - DNA, 51 bp, Homo sapiens
gtttgttcatcagactcttcaccagctctggcaggctgccctgagcacgct

SEQ ID NO: 431141 - DNA, 75 bp, Homo sapiens
agtgagggtgtacaaatacccctttgaattaattatggctgtgacttaagagattaaaattaatttggttgctgt

SEQ ID NO: 431142 - DNA, 82 bp, Homo sapiens
tctccgcgccccgaggtctccgcggcccgaggtctccgcccgcaccatgcggctgggcagacaaatttacatgtattggaga

SEQ ID NO: 431143 - DNA, 75 bp, Homo sapiens
gaagtgcagaggtttttttctggtctataatacgctgcgccacgccgtggggaccatgtataggagcgaaggccc

SEQ ID NO: 431144 - DNA, 75 bp, Homo sapiens
caagcaatcctaccatgtcagccttcccagtagctggaactacagggccatgaagcccccaggaggagaatcgag

SEQ ID NO: 431145 - DNA, 75 bp, Homo sapiens
ggagctgcctgcgggaaggtgcggggagcggagccatggcctccgggaatgacagaggaagaggaagacaaactt

SEQ ID NO: 431146 - DNA, 97 bp, Homo sapiens
tcacaagatgatcgacttgtccgggaatccggtgcttcggatctactacacctcgaggaatgagctgaaagccagtggtggcgaaatcaaaattcat

SEQ ID NO: 431147 - DNA, 100 bp, Homo sapiens
gtcattcgtaatcagcaggccaaagactcagagggagttggtctctcagtccatgggcaatttcgagtggctacagaaaagtgtctttttgctatgccag

SEQ ID NO: 431148 - DNA, 101 bp, Homo sapiens
ctgagcgtcgtgggctccgagagggacgcgggcggagggcaaagtgggtttggaggatttgggacaacatctacaactgcaggttctgcattcagcttttc

SEQ ID NO: 431149 - DNA, 82 bp, Homo sapiens
ctacattttcgatagagacgttttccggagggattccatcatagatgccatggacaatattaccaggcagaaccaattctac

SEQ ID NO: 431150 - DNA, 74 bp, Homo sapiens
aagtgattttttgcctttgttgattaactggacaaattcaggtatgtcgagagtaccaacgtggcaattgcaac

SEQ ID NO: 431151 - DNA, 90 bp, Homo sapiens
ccacaggccatcacagtcccctgttccgaggtcaggaggatgcaagtcctgacagattcagcaacactattgaccctcttgctggaatga

SEQ ID NO: 431152 - DNA, 100 bp, Homo sapiens
aagcggaggagcctggcggccaccccctcttcctcacttccctgtactctcatcgctctcggcctccgacacggttacaagcctgatgaagggaaacgag

SEQ ID NO: 431153 - DNA, 100 bp, Homo sapiens
ggagatcgaggagctgaagtcagagagagacacgcctgccgctgcgcttctgggtgaatgtgatcaagaacccgcagttcgtgttcgacatccacaagaa

SEQ ID NO: 431154 - DNA, 80 bp, Homo sapiens
ccgagaccgcggccgggaccgagggatcctgttcccagtgggttttctgcaggggaagttctgattcccttagctgacga

SEQ ID NO: 431155 - DNA, 75 bp, Homo sapiens
atcaccttgcccatgtctcacgcgggggttggtgccatctacatccgtcgccggccccgtgtgcgtgtggaggcc

SEQ ID NO: 431156 - DNA, 88 bp, Homo sapiens
gatttttggaaggatatagttgctgctatacaacacaattataaaatgtcagcttttaagggaactttgtgagaattttaatgcatgg

SEQ ID NO: 431157 - DNA, 100 bp, Homo sapiens
agaaattataaagagctctgatgggctatttgggtgatacccagtgcagtgaactgcagcgatacagtgtggaaatgtccatcagacacctgaaaaagac

SEQ ID NO: 431158 - DNA, 76 bp, Homo sapiens
cgagatggttttagggctcttcgagaggataatgcctactgtgaagcgtggagattggtgaaagcgtgagagggga

SEQ ID NO: 431159 - DNA, 60 bp, Homo sapiens
tggagtcttccatcaatcatatctcacaggctgtggaaaatctctgttctcacaaagtct

SEQ ID NO: 431160 - DNA, 50 bp, Homo sapiens
ttcaggagagaagcccatctattctgtagtaccttctgtctgacttcaac

SEQ ID NO: 431161 - DNA, 101 bp, Homo sapiens
gccgtgaacgaaagcagtgacggaggagcttgtaccaccgagactctacaggggcaggtaattcactggtccacaagcggtctcctttacgtcgaaaccaa

SEQ ID NO: 431162 - DNA, 100 bp, Homo sapiens
tcgggatttacgtggagatcaagcgcagcgatggagaagacagactgctgctttggacctgttggtaatgatggcctgagctaaacatctaactagaagg

SEQ ID NO: 431163 - DNA, 80 bp, Homo sapiens
gcagcagaggtgattctgcgtgtggacaacatcatcaaagcggcacccagcttttcatgcaacacccaacacttataagc

SEQ ID NO: 431164 - DNA, 75 bp, Homo sapiens
cttacactgaaactgtcaaccatcactacttgctctttcaagacacagatttgatggtggatgcttccaaaagca

SEQ ID NO: 431165 - DNA, 82 bp, Homo sapiens
gagcatcgactggaccaagatcgagcccagcgtcaacttcctcaagtcgcccaaaggctaaaaccagaaaagcttgaaaaag

SEQ ID NO: 431166 - DNA, 100 bp, Homo sapiens
ccgggaggtctgggccgcagcgggaccccagttcctccgccaagcgcggccgccgcccccgcctcagatgtgtatatctcatgattgatatggagaaact

SEQ ID NO: 431167 - DNA, 100 bp, Homo sapiens
gtgcttcgtggcccggcaccgttccgcggacgtgctcggtgcactacatcctccaggaggtggtgatgggtgggatggtgttggaaacaaacatgaatga

SEQ ID NO: 431168 - DNA, 82 bp, Homo sapiens
agcccggccggggcctgcgggcgcccagagccgcgccgtccgcgccgcccgttctgatattgaaatggattccaggcgtgtg

SEQ ID NO: 431169 - DNA, 75 bp, Homo sapiens
ggcattttgctcactccttgtaccccttagggtgtccgcaatgttgccagtgtctgtctgcagattggctaccca

SEQ ID NO: 431170 - DNA, 101 bp, Homo sapiens
attgtgatattgaaggtaaagatggcaaacaatatgagagtgttctaatggtcagcatcgatcaattattgcctccttttagaggactcagaagaagaaga

SEQ ID NO: 431171 - DNA, 100 bp, Homo sapiens
ggatagtcagtggggcctatgatgggtagcctttccagtaaatatatgactcagggaaaagcctcagcgaagaggacccagcaggaatcatgagggaagg

SEQ ID NO: 431172 - DNA, 83 bp, Homo sapiens
gagacacggcttcccccaaggaatatacagtggaatcccccaaagaaggtaaagggagcaagccttccccactgtctgtgaag

SEQ ID NO: 431173 - DNA, 100 bp, Homo sapiens
tgttttggctgatattgcaccttccacagatgacttggaccaagatcactccatggatgaaatgacagctgtggtgaaaattgaaaaaggagttggtggc

SEQ ID NO: 431174 - DNA, 97 bp, Homo sapiens
ctcattgtactcagagcactagaaggactaggagaggaacagcatatgccatatatgagctggctgtggcttcatttcccaagaagcaggagtgact

SEQ ID NO: 431175 - DNA, 100 bp, Homo sapiens
aaagccctcgcgtcggacccttgccagaactgtggaatgcaagctttaggacttcacctgacagatccaagtcaacgtcttgttcagaactgtctttgga

SEQ ID NO: 431176 - DNA, 98 bp, Homo sapiens
cagactcggtcctcctgcaggagatgcaggcattgacacagaccttcaacaacaactggtcctatgaaggtaccattactatggcattgcagtgaaag

SEQ ID NO: 431177 - DNA, 75 bp, Homo sapiens
caggcttgtccatctgtaacttcattaaggtaagaatgattgatgttggctgatattggagtgctcattcacatg

SEQ ID NO: 431178 - DNA, 82 bp, Homo sapiens
tcaggggaacagcgagcagatcaaagtgcagagcagagcgggcggaggaccccgggcgcgggcgcggacggcacgcggggca

SEQ ID NO: 431179 - DNA, 88 bp, Homo sapiens
cgatctgaaggaggggcttctggttagcccagaccctacagcttggggcctgggctcctctgaccatcctcattgagaaaggaaagtg

SEQ ID NO: 431180 - DNA, 74 bp, Homo sapiens
gggccaggaacagctcttagacttatccactggcttgatggcctctcagagcgctgtgctcagtacaagaaaga

SEQ ID NO: 431181 - DNA, 100 bp, Homo sapiens
caaacgagggttcccgggattggaccgacgcagccatggttgaaccagccaaattttcgagacagctcacggcttagaggaaggttcatctaaataaagg

SEQ ID NO: 431182 - DNA, 75 bp, Homo sapiens
ggaaacaccatggctgcggcggcccagctctctctgacacagttgattatggaagattcccacaagagtaccacg

SEQ ID NO: 431183 - DNA, 82 bp, Homo sapiens
tagggctactgttgattttgactatcttcttagtggccgcttctagaattcctctccagagctactctcaagttatatccag

SEQ ID NO: 431184 - DNA, 75 bp, Homo sapiens
acagacgatcaccctagataacaatccactacaatcacctcctgcacagacaggggaaaaacttttagaactgaa

SEQ ID NO: 431185 - DNA, 90 bp, Homo sapiens
gccagagagtctcacccgcatggggtgaagcgttcagcctccccagacgacgatgaccagaggagcgagagcagcaagaaccacacccag

SEQ ID NO: 431186 - DNA, 90 bp, Homo sapiens
cggcggaaaaccgaagttggaagtgtctcttagcagcgcgcggagaagaacggggagccagggtgcggggggcaatggcactgcagctct

SEQ ID NO: 431187 - DNA, 97 bp, Homo sapiens
tctcttcggctgccccaatccccggcagctctctcagacacgaatgcagagtttgagtccagatcccaaagcccagtacacaagtatctacggagcc

SEQ ID NO: 431188 - DNA, 90 bp, Homo sapiens
gccgagttctcacgtgcccatcagtgacagcaagtccattcagaacttttattccgcctgcgtggtgctgggcctacagtttcttcacga

SEQ ID NO: 431189 - DNA, 100 bp, Homo sapiens
actgcccggctgccttccacctccagtgctgaccctggctgggcatccatcagcaggggtgtgctggtgtgtgacgagtgctgcagcgtgcaccggagcc

SEQ ID NO: 431190 - DNA, 101 bp, Homo sapiens
gtctttgtgtcctgagatcaaatggcacttcattggccacctacagaaacaaaatgtcaacaaattgatggagtttccaacatatggttttaactgtgaat

SEQ ID NO: 431191 - DNA, 100 bp, Homo sapiens
gtgcatgactccaacatctacattaaaccattcctgtcttcagctccagaggctctgaaccaagttgtcctatgggacaagattgttttgagaggtgata

SEQ ID NO: 431192 - DNA, 75 bp, Homo sapiens
ataactcctcaggtccctgcctgcacagggtggcacaagaatggctcaactctccaaatagagagaatttctatc

SEQ ID NO: 431193 - DNA, 100 bp, Homo sapiens
gtgagttcaactgcaacatccgggcacctccaaagcagatggtctggaactactataatgtctccagggatcctgtggtcatcaacaaagtcttcaagga

SEQ ID NO: 431194 - DNA, 75 bp, Homo sapiens
agagcagacaccgcagccaccgcggatgcaaaaaatgagccgtcagactgctacagcattacctaccggtacctc

SEQ ID NO: 431195 - DNA, 98 bp, Homo sapiens
gcctccccaactcgggtaaagctcctcggcctcggcgtgctgcgcctccgcggctgccctgcgccaggcgttgacccggacgacacctataatgagac

SEQ ID NO: 431196 - DNA, 100 bp, Homo sapiens
gtaaagaagctggcaaagaacatggaagagatgtttcacaagaagtctgaggccgtcaggattacaccaggaagcaaggcggcagctgccaacctgtgtc

SEQ ID NO: 431197 - DNA, 98 bp, Homo sapiens
tgcagccccctctcagctccatgagctccatgaaacccactctgtcgcacagcttcctgcctgacacagctcacttcaagaagtgcacaatgtcagaa

SEQ ID NO: 431198 - DNA, 51 bp, Homo sapiens
cagcgagttgcagatctacacttgcttaccctcttctccacctgctccccg

SEQ ID NO: 431199 - DNA, 100 bp, Homo sapiens
agcgacttccaggatatagccctggagtggagacctttggcgacttggcctttggcgacatcttcctccacctgctcacgggcaaccttgcgctgctggc

SEQ ID NO: 431200 - DNA, 75 bp, Homo sapiens
ttccctgcaggatttggatgggcggcagccactgcagcttatcaagtagaaggttcattttccagacactgaaag

SEQ ID NO: 431201 - DNA, 75 bp, Homo sapiens
accacctgatataaaaaaagaaattagtgaaggagatgaagtagagatttgaagaccttgcttctcatcacccac

SEQ ID NO: 431202 - DNA, 74 bp, Homo sapiens
aggactgcgcccccgggagcgggcgcccagaggaatgtatcctgtcaggtataatgtcagtgaatggcaagaaa

SEQ ID NO: 431203 - DNA, 74 bp, Homo sapiens
acacaacaagccggaagtggaagtcaggtatgcatcttctattgatgatattttggaagatgaagaacattatg

SEQ ID NO: 431204 - DNA, 75 bp, Homo sapiens
acaattgatttgctcttacgtatttgtgtgacttgactcttcaaacacaaagcttatgtccctgatgccaaaaat

SEQ ID NO: 431205 - DNA, 104 bp, Homo sapiens
ccctaaccacactatttatatcaacaacctcaatgagaagatcaagaaggatgacggggcgggcaccatgaacaagttacggcagagcctgcggcggaggaagc

SEQ ID NO: 431206 - DNA, 75 bp, Homo sapiens
tcgggccagagacgacaacccgggcctccgaggtgctggagaatctggtaaaagcaccattgtgaagcagatgag

SEQ ID NO: 431207 - DNA, 75 bp, Homo sapiens
atccgctcgacctcgtgaagatccgcttcgccgattacagtagaatgcacattccttgactatataatgggagga

SEQ ID NO: 431208 - DNA, 88 bp, Homo sapiens
tggaggagctgctgctcgacgccaaccagctgcgcgagctgcccaagatgagcgggatcgtgtgcagaagaaaaccttcaccaagtgg

SEQ ID NO: 431209 - DNA, 88 bp, Homo sapiens
aaccattgacgccatgtcgggttattcgagtgaccgagaccgcggccgggaccgaggaagaccgtgatgataatcgtagcaatcagcc

SEQ ID NO: 431210 - DNA, 75 bp, Homo sapiens
tgaacccaggggccgaagcccacccagggagttgatgtctgaattggagaagcctagaggcaggaaaaaaacgcc

SEQ ID NO: 431211 - DNA, 74 bp, Homo sapiens
tcccattttgtgggctccagaaaggggacccagatgatgtggtaccagttggccaaagaagagcctggtgttgg

SEQ ID NO: 431212 - DNA, 99 bp, Homo sapiens
acttgggcaagcgggacttcgtagatcacctggacaaagtggaccctgtaggctgccatgatggctgaggagctaaagaaggaacaggacaccagcgcc

SEQ ID NO: 431213 - DNA, 75 bp, Homo sapiens
cgggcggcgcgagtgggcgcgggcccggtgggccaggtcagatgggcagacctggaagagaagaaggatgcagat

SEQ ID NO: 431214 - DNA, 96 bp, Homo sapiens
gccagcgatgtccccatccgccgccgagaggaggcctatgagaatcaggtgttggagcgggccggagagaagtagagtgggctgcgaggagaagga

SEQ ID NO: 431215 - DNA, 100 bp, Homo sapiens
caggaaaggaaacagtttggacatcccagtagcagttacaattttctttggggccaatgacagtgcactaaaagcctaaaagtggtgatgccaaatcttc

SEQ ID NO: 431216 - DNA, 116 bp, Homo sapiens
gagctgtgcagccgcgaggaggcgcgggaggtgttcgagaacgaccccgagacggtgagaagccctaccactgcaactgggacggctgcggctggaagtttgcgcgctcagacgag

SEQ ID NO: 431217 - DNA, 90 bp, Homo sapiens
ccagctggtgaaggcagacagcgagtggcgacgatgtatgtgacgcattcccagactcttcagccaactgagcatcagcttcttcacagc

SEQ ID NO: 431218 - DNA, 100 bp, Homo sapiens
gcgtctgggagcccgcggccggagaagggctgcgggttagggggccggcgcccgcggttcagtctatgataagcgtgaaaatcccctcctccccgaggag

SEQ ID NO: 431219 - DNA, 100 bp, Homo sapiens
caccgtcatcgacaatttctacatctgcccgaccaacaagaggaaggtcagccatgtcatctgagcctcccccaccaccacagccccccacccatcaagc

SEQ ID NO: 431220 - DNA, 90 bp, Homo sapiens
caggcgagagaaaacgaatgaagagttgcaagtgaagtaagaactctgctagagaggaaatggctgcttcatcatcatcctcctcagctg

SEQ ID NO: 431221 - DNA, 80 bp, Homo sapiens
ggagaagttagcttcagagttctttgtggatggacttgattctgatgagagttgcatccttaatgtccagtcaaggagtg

SEQ ID NO: 431222 - DNA, 100 bp, Homo sapiens
tttgctcgtgattgcatttgattgcaaggagacaggacccaacatgagtgaagtttcctgcaagaaacgggacgactatttggaatggccagagtatttt

SEQ ID NO: 431223 - DNA, 95 bp, Homo sapiens
gtccttcacctgatatctgtgccagagaatggacacagcattgttggttttgccatgtactattttacctatgacccgtggattggcaagttatt

SEQ ID NO: 431224 - DNA, 100 bp, Homo sapiens
atctatccaggattcatcccgtgtcaacaatggtaaagcctcacctgagtcaccttccaagttgttccatgggctcctggctctggactgtggccaacct

SEQ ID NO: 431225 - DNA, 101 bp, Homo sapiens
cctgcatcctaagactcgaaggcagcacaggacctggaaaaattacatgtacccccagccttgccgcaggaagggaatgggctcagtgcccgcgtggacga

SEQ ID NO: 431226 - DNA, 74 bp, Homo sapiens
gcctgtcagttatcgggtgtgaccgccgccgcccaggcgccaagcccatctttgtgtgcttgcatccaactgtg

SEQ ID NO: 431227 - DNA, 101 bp, Homo sapiens
tttgtaactacctggcattgccttttgttgaggcagtatttggcagtcgtattcagagataaacccctggagctatgggatgttaggacttgtacccttct

SEQ ID NO: 431228 - DNA, 78 bp, Homo sapiens
gccgtccacgtgaaggggcccttctcggtggaggccgacccatccagaggccctgatgaggacggggaggaggaggcc

SEQ ID NO: 431229 - DNA, 75 bp, Homo sapiens
ccacaataacaggcggagggtcggcgtagggttcccagcaccatgagggcctggatcttctttctcctttgcctg

SEQ ID NO: 431230 - DNA, 83 bp, Homo sapiens
agggaaccaacccactttctcggcgccgcggctcttttctaaaagtgtgaaaaattagacgatttcaagaattggagctgaat

SEQ ID NO: 431231 - DNA, 102 bp, Homo sapiens
ccatcaccccctcctcttcattccgcagcagcactccgacaggtttgtaaaagaatggacttggtctgccagagaatgttgaatcagggatttctgaaagtg

SEQ ID NO: 431232 - DNA, 100 bp, Homo sapiens
ggaagctgctaacccgacccggattggcgctgaggtggcccgtggggcagatctttctcctggcctgccctccatgtcggggagctatcgtcgtcttcaa

SEQ ID NO: 431233 - DNA, 98 bp, Homo sapiens
actgatgaggatcagcccatgggctccggtacaagtcatccacagatcaggagcaccagttctatccctgctaagtgtcagagatggattcattgcta

SEQ ID NO: 431234 - DNA, 99 bp, Homo sapiens
ccgggatggctctgactatgagggctggtgctggccaggctgaggcccgcaggtctaagaccaaggaagcacgcaagcgccgtgaagagcgcctccagg

SEQ ID NO: 431235 - DNA, 99 bp, Homo sapiens
cacgaaataaagctcctgggcaaggggacgtctgcagctgaattctggaacttttcaaagcctgactctcttcttgaaacagtggagcatcatacagag

SEQ ID NO: 431236 - DNA, 99 bp, Homo sapiens
gtcattttggctgtgacgaagaacaagaagctccggaattctggtcaaaatgcagatcttcgtgaaaacccttaccggcaagaccatcacccttgaggt

SEQ ID NO: 431237 - DNA, 100 bp, Homo sapiens
ctgtccttggagaacgtgctctattacagcccaggaggggccggcagtgacaccttggtgagggatggtgaccactatgatgccctgagggactgcctca

SEQ ID NO: 431238 - DNA, 100 bp, Homo sapiens
gttttttcctgtatgaagcggttggcaccactgaagtgaccgaatgagggctcaagatgacaggagtggactgtgtggaggggatggcctcgggcctgta

SEQ ID NO: 431239 - DNA, 100 bp, Homo sapiens
ccgagacgacgggaagttttatttgcagctcggagcctgtggcggatggtgggactctccggccctgtgcagtgctgaccggttccctgatgtgttacct

SEQ ID NO: 431240 - DNA, 76 bp, Homo sapiens
gctacctcgcccgggggcatcaggtttttctcccgctccagaaaaaaaaaatggctacaaacttcctagcacatga

SEQ ID NO: 431241 - DNA, 90 bp, Homo sapiens
ctttcaaagatggaatcacaaacggcgcacattggtatgatgtggaagggcagagcggcttgggtaaatccaccttaatcaacaccctct

SEQ ID NO: 431242 - DNA, 71 bp, Homo sapiens
aaggagctggacctctacctggcctacttcgtgcgtgagcgaggataatgaagagttgacaattagttgcc

SEQ ID NO: 431243 - DNA, 75 bp, Homo sapiens
ttttggcttggctcgacaatttaccaattcctgtggtgacgtcagaccagaagatgagaatgtgcctactgctcc

SEQ ID NO: 431244 - DNA, 50 bp, Homo sapiens
tgttattcttgctcgtgtggctgtggtttatcaacttatgaggaaatgct

SEQ ID NO: 431245 - DNA, 100 bp, Homo sapiens
gccgacttcaaggatcttgagactcaaccccatatgctgaagaaatcaggggagaaacccctgcttggtggaagcctgatggaatatgcaatcttgtctg

SEQ ID NO: 431246 - DNA, 90 bp, Homo sapiens
cagttccctgtcttgggaaaaggagaactcctgactgattagcattcacaccaggacatggatttgattgacatactttggaggcaagat

SEQ ID NO: 431247 - DNA, 50 bp, Homo sapiens
gtaacgtgagcatgaggttttccaatcagtgccgcagaatggaattcggc

SEQ ID NO: 431248 - DNA, 98 bp, Homo sapiens
aacattcgtctcggaaaccccgcctcttacagtcacgaggtagatgatgagctggagatcaaggcctactatgcaggccacgtgctgggggcagccat

SEQ ID NO: 431249 - DNA, 99 bp, Homo sapiens
ctgtcgccaactccatggctttccagcatgtgcagtctttgccaacaaaaaaaattaccaagaaacctattccagatgagcacctcattctaaagacca

SEQ ID NO: 431250 - DNA, 75 bp, Homo sapiens
tgccggcccggcggctgctgctgctgctgacgctgctgctgcccggcctcgggcagtcccagctatctgacttca

SEQ ID NO: 431251 - DNA, 50 bp, Homo sapiens
gatgattggcagagacccactgtctgtctggccgggaccttcaacagtat

SEQ ID NO: 431252 - DNA, 82 bp, Homo sapiens
gcagaagtcgcgtgtctaggtgagtcgcggtgggtcctcgcttgcagttcagcgaccacggaatcccgttctgcttccagaa

SEQ ID NO: 431253 - DNA, 82 bp, Homo sapiens
tcaaacatccatatcataagtggaattttggagatattcaaagacaaaacttgccaatggcacttccagtatgattgtgccc

SEQ ID NO: 431254 - DNA, 75 bp, Homo sapiens
aaattggaaggatgcacaagttccaaggttacgtttcacaacttgagttggtggaaccaagtggctggattcatg

SEQ ID NO: 431255 - DNA, 90 bp, Homo sapiens
attacaactttcggggcatgtacaatcagaggtacaaacccgtagtgctgatgaaccaatgacaacatttgttgtctgtaatgaatgtgg

SEQ ID NO: 431256 - DNA, 106 bp, Homo sapiens
cccggcatgggttaccgctgctgcccctgctgtcgctcctggtcggcgcgtggctcaagctaggaggaaaattcttccagcgatggtctcccactcagagctgagg

SEQ ID NO: 431257 - DNA, 96 bp, Homo sapiens
ctcggcctcccagggggctcaagctatcctcccgcctcagtctcccaagtagttgggaccacagatggcagttaaacagggaaaccaactgcagat

SEQ ID NO: 431258 - DNA, 50 bp, Homo sapiens
cggagtgggcgatgccagcgtgccagatgtctactgttgtggagctgaac

SEQ ID NO: 431259 - DNA, 50 bp, Homo sapiens
tcccaagagtacgttactcttcaagggtcatcatcaagaatatgggctgg

SEQ ID NO: 431260 - DNA, 50 bp, Homo sapiens
gacgccgcctggcaggccctgcgcaccagatcatgtttgagaccttcaac

SEQ ID NO: 431261 - DNA, 98 bp, Homo sapiens
aaagccgggctcggcccgaggcccccaggacctccatctcccaatgttggaggtaccccaagaagctagtgcagacttattcagtgtttccctaccag

SEQ ID NO: 431262 - DNA, 96 bp, Homo sapiens
tttttcttgtccgggtgcggataagggacccgacactgatggatctataaagggcactgcttccggatcaatcacttcccagaggacaatgactac

SEQ ID NO: 431263 - DNA, 74 bp, Homo sapiens
attggtaaagaacgatcgtccagtggaggtgactctgttttgagaagtgcaaccagatctctcctggaattcaa

SEQ ID NO: 431264 - DNA, 82 bp, Homo sapiens
ggatatcgacgtcgtgatccagaagtccagagctgaggactgcctgtttgcagaatattgaaggatgtttgttccaagatct

SEQ ID NO: 431265 - DNA, 100 bp, Homo sapiens
gaacgacaaactcaaagtccagtgaatggtagtgtctagaaagggtatgtcccttcaagagagaggtgccaatgtccaaccggcctaataacaatccagg

SEQ ID NO: 431266 - DNA, 98 bp, Homo sapiens
ggacatcctggaagctgggaaatgattctggatgaaattgaagaacataacatcaaaatctatcacttacctgatgcagaatcagatgaagatgaaga

SEQ ID NO: 431267 - DNA, 98 bp, Homo sapiens
ttgaaaggagaagacttggattctcagtagatattcagactgacaatgatttgacaaaggaaatgtatgaaggaaaagagaatgtatcatttgaactt

SEQ ID NO: 431268 - DNA, 100 bp, Homo sapiens
agcggcccggtcgcgggcgccgccaccgccgccgctgccagtaaccaaaatatccactgaggatgatggattggtgcggaacattgatggaataggtgat

SEQ ID NO: 431269 - DNA, 75 bp, Homo sapiens
ggaaatagccagcatggaaagacaacggcaaatggatacatcttgttttttcatattacatctacaagaggggac

SEQ ID NO: 431270 - DNA, 100 bp, Homo sapiens
ggtaaagttcaccttgaattaaaactgaatgaactgataacggagaatggaactgtatgccagcagcttgttgtacagaagaggcagaaatccaggcaga

SEQ ID NO: 431271 - DNA, 82 bp, Homo sapiens
caacaaggttctggacaagatgaagtctttctgccagcatggtggctgtatggacagtctgacagaacagagactgacatct

SEQ ID NO: 431272 - DNA, 100 bp, Homo sapiens
agcatggcatggccccgcaggtcttcacccaggccctggagtgcatgcgcagtatgaacggtgccttagcgtttgtggacacttcggactgcacggtcat

SEQ ID NO: 431273 - DNA, 100 bp, Homo sapiens
aaatattacaactgtagtagaaaaattgcagttatgccttcctgcttcccatcgacggtcagtgcgcacgttgtaatcagctgaggccatgtcaggagac

SEQ ID NO: 431274 - DNA, 100 bp, Homo sapiens
ctgttggctgtatattagcagagttacttctaagggaaccagtgaccttccgggatgtggctgtggactttacccaggaggaatgggggcagctggaccc

SEQ ID NO: 431275 - DNA, 90 bp, Homo sapiens
caaggatgagtgctgccagagagtctcacccgcatggggtgaagcgttcagcctccccagacgacgatgggaagatggtgaaaggaatgg

SEQ ID NO: 431276 - DNA, 100 bp, Homo sapiens
tgcatctgtatccagctcctgaacaagacatggaaggaaatgagggcaacttctgaagacttcaacaagtgatttaaagggagtgatagtcactctgagt

SEQ ID NO: 431277 - DNA, 75 bp, Homo sapiens
gataatcaccagcagcatcaagaaaatcgcagactttctcaactcgttcggcatcatgtgcatggaccacctgga

SEQ ID NO: 431278 - DNA, 100 bp, Homo sapiens
cgcccggccaccccgcacctcctccaccaccgcctcccgctccctgacgacagcggcttctgcggatggacctgcccgtcgcagatgacaacaccgtcca

SEQ ID NO: 431279 - DNA, 76 bp, Homo sapiens
gggagactcagcagtgcggttcctgccttagacatatctgaagagatggattaagaatgctttggattaaggattg

SEQ ID NO: 431280 - DNA, 75 bp, Homo sapiens
aaggcgagcagggtgcgggagagccccttgcagaagacgccgtacgaggatgtggctttgtttgagatgaatcag

SEQ ID NO: 431281 - DNA, 96 bp, Homo sapiens
gctcctcaatggccagcgccagctgcagccccggctgcccactcgcctcacctgagcctggattgactttgaagatgtgattgcagaaccagaagg

SEQ ID NO: 431282 - DNA, 75 bp, Homo sapiens
ttaaaaccagggctccacagttaggaggaaaagaattccatggcaacatcattaaagtgtcctttgccactagaa

SEQ ID NO: 431283 - DNA, 83 bp, Homo sapiens
ggggccgaattctgctggaggcagcgccatatcctggaggtgaagacaatgcagatcttcgtgaagactctgactggtaagac

SEQ ID NO: 431284 - DNA, 100 bp, Homo sapiens
atgagtctgtatataaggcttcattaagcttaactgagaagtatttctctgtagaggtttactgctagaccactagtggaaactatatttgaaaggggaa

SEQ ID NO: 431285 - DNA, 75 bp, Homo sapiens
gataaagctgtgtactgccgttgttggaggtccaaaaagttggttgaatctggcgatgtggaacccatggatatg

SEQ ID NO: 431286 - DNA, 100 bp, Homo sapiens
cagcccggcgggacagcggggcggctggcgccgggggccggggagcgccagctctttcagtctcacatggcaacgaaaacaacttgtatgtcttcacaag

SEQ ID NO: 431287 - DNA, 100 bp, Homo sapiens
acgttacgctattcgttgtggtccaaaacagtttacctcttatctaacaggttgaaatcacaaagattagacacctttttagataggtgttcttcagcac

SEQ ID NO: 431288 - DNA, 90 bp, Homo sapiens
agagctgactgccaggccccagaggagcgtaagcaaggaccagagcaaaatatgctgtgaattccatcaagaagaaagtcaacgacaaga

SEQ ID NO: 431289 - DNA, 98 bp, Homo sapiens
acaggcagctcgcggtcatgggcggctcagcctccagccagctggacgagggcaagtgcgcttacatccgagtgatggaatggggagaagatattaaa

SEQ ID NO: 431290 - DNA, 73 bp, Homo sapiens
atttctactggacttcatgcttagatacatgtataacaaggagctcgaggccatgagcagatataccagccca

SEQ ID NO: 431291 - DNA, 90 bp, Homo sapiens
cggctgaggcagcgcggccgcagcagccctgtgctggagaatctggtaaaagcaccattgtgaagcagatgaggatcctgcatgttaatg

SEQ ID NO: 431292 - DNA, 101 bp, Homo sapiens
atgtgaagtagatgataaagatgatgatatccttctcaaccttgtgggatgtgaaaactctgttactgaaggccgtgacttggcgagcacgaccctccccg

SEQ ID NO: 431293 - DNA, 100 bp, Homo sapiens
agagaatgaaatcactttgtgtcaaaaagaaataactcagctgaagcatcaggtaattcagaggtccgtggggccagccagcctgagcttgctcaccttc

SEQ ID NO: 431294 - DNA, 82 bp, Homo sapiens
tcctgtcacaggccatgctctggcaaaaacgcctctccttccgatgaaaagagaaaggaagaatggactacagccaccaaac

SEQ ID NO: 431295 - DNA, 74 bp, Homo sapiens
cttcggtggactccttcggcagtccacccaccgccgccgcctcccaggaacgtcaaggtcgtgggaaataaaag

SEQ ID NO: 431296 - DNA, 75 bp, Homo sapiens
tttgcatgagacgcttctggacaggtgttggagcgggccggagagaagtagagtgggctgcgaggagaaggaaac

SEQ ID NO: 431297 - DNA, 75 bp, Homo sapiens
attctatgtcaaacattccaagtactctttgaggaaagtcttaatagacatcgatacttgaattctttatttccc

SEQ ID NO: 431298 - DNA, 90 bp, Homo sapiens
ggagaatggaaaagaaccattgaagcttgagagaaaagcccccaaaagcagctattcagggctcaatcaagacatcacagatgtgtgttt

SEQ ID NO: 431299 - DNA, 83 bp, Homo sapiens
gtcacaggagctgtagagaggaccccggtacatctgaaagccgggaaatggcgtccgagctgggccacagcctgaacgagaac

SEQ ID NO: 431300 - DNA, 75 bp, Homo sapiens
ctgggctgggcgtcagccgccaccggcagcagcagcaccaccggacgttagaacctggcccattagatgaaaccc

SEQ ID NO: 431301 - DNA, 95 bp, Homo sapiens
gccggagggccagggtctcccggagggttaccttcccgccaatgtagaccggagaccagccactctccagagaaaacaaaaagaatattttgcat

SEQ ID NO: 431302 - DNA, 100 bp, Homo sapiens
ggcgagtggcgatgggcgagccggacttgcacgtggagaaagcatagactgaagaggagcaagaacagaaacagggagccagttacagatctatcccaag

SEQ ID NO: 431303 - DNA, 50 bp, Homo sapiens
ccagcagctgctgtctctccaatgcagtgtcctgtttcccagaggaacag

SEQ ID NO: 431304 - DNA, 100 bp, Homo sapiens
attgttgagttgggctccatctttcagcagttggcacacatggttaaggaacaggaggaaaccattcagagctattgtacagggggatacgctggaagac

SEQ ID NO: 431305 - DNA, 104 bp, Homo sapiens
atggaaaccaccccgagcttggcgtgtgctaataaatgtgtcttctgttggcggcctccccatggccacccatggaccagtcggcattcacttcctcccttctg

SEQ ID NO: 431306 - DNA, 87 bp, Homo sapiens
aatcaatggctttcctaatgctttctggggttggggtggagaagatgacgacctctggaacaggaccgtggcaaggaggtgtacagc

SEQ ID NO: 431307 - DNA, 82 bp, Homo sapiens
tctctcatctcgctcggctgcgggaaatcgggctgaagcgactgagtccgcgatggaggatcagttcgacagcttagacaag

SEQ ID NO: 431308 - DNA, 78 bp, Homo sapiens
aagagtcctgcatggtttcaagggacgtaccaggaggatggtgcccaggttgtacatcctggagacctgaagaattct

SEQ ID NO: 431309 - DNA, 100 bp, Homo sapiens
ccatcgaggcgagccagagcctgcagtcccacacgactgtggatattcataaggagaaagtggcacgaagagagattggtattttgacaacaaataagaa

SEQ ID NO: 431310 - DNA, 74 bp, Homo sapiens
gacgccagccatgttccagaccgcttggcgccagttctgggttttcagccccctgaactacgcatgttaagaaa

SEQ ID NO: 431311 - DNA, 75 bp, Homo sapiens
cgcagccctcagcccacttaggataatggcgacagctgagggaagcatgagtgggaaaagcatgggacctgcgcc

SEQ ID NO: 431312 - DNA, 50 bp, Homo sapiens
atgggaagccagtgaggtagtcagatcatggaagggaagtggttgctgtg

SEQ ID NO: 431313 - DNA, 75 bp, Homo sapiens
ctcactgcaacctctacctcccagatgatctcaatgccacccaccaacactgtgttttggccggttcacaacctc

SEQ ID NO: 431314 - DNA, 96 bp, Homo sapiens
caggctgccccgcagtaccagggagcgactgaagtgcccatgccgcttgctccggagaaggagcatccccccggtccttcagaatccaaacacgct

SEQ ID NO: 431315 - DNA, 100 bp, Homo sapiens
ggagcagttgtctgatgaagagaagtgaagcggaatgactacgtgcacgccctggtggcctacttcaacatcgagttcacacgctgccacaagaggaccg

SEQ ID NO: 431316 - DNA, 83 bp, Homo sapiens
cgatccgggcgctcgagacttaccagagccacaagaaaccaaggtgtatgttggtaacctgggaactggcgctggcaaaggag

SEQ ID NO: 431317 - DNA, 82 bp, Homo sapiens
ggatatcagggcagccctggaggcttactgcaagaagtatgagcagctcaagggtttccaggcctgaggtgcccgccctggc

SEQ ID NO: 431318 - DNA, 95 bp, Homo sapiens
tagaagcatttatatctgctagtggaagagctatccaggatcggaatgcggggtcgagagctgatgggcggcattgggaaaaccatgatgcagag

SEQ ID NO: 431319 - DNA, 83 bp, Homo sapiens
agaactttcaggctcctccacaaatctcgctgaccattcgtcattgaattttgagaagcattctgaaaactttgcatggacag

SEQ ID NO: 431320 - DNA, 100 bp, Homo sapiens
acagacagaacctgagccaaagcacattcccacagagaaagtcaaggctgtggataccacgtatttgactacagtcattccttatgagaaaaaaaacgga

SEQ ID NO: 431321 - DNA, 90 bp, Homo sapiens
aaatctaaccatggaggcagtgatgcagccaagatgcagattcacctggaagttctggggcccctgaaaacttgacattcaaggaacgcc

SEQ ID NO: 431322 - DNA, 100 bp, Homo sapiens
ccatcctgcaccgccaccggcccgacctcatgtcaccatcagaaaagctaagtttgctgtatagtgaggatcaggagatctgatcctgattgcagaacct

SEQ ID NO: 431323 - DNA, 140 bp, Homo sapiens
aaaaaaaccacaaatgtttttctgttttgcctgaatacatgatttaaacaagagatttccacagaagactctcttgagcctgagggatccattacagtttcaatgggtattgacttttgtgattctactcagactgccag

SEQ ID NO: 431324 - DNA, 83 bp, Homo sapiens
cgggacgacgagtacgactacctattcaaagcgtccgtctccaagagagtatgaagagagtgcgtctgtagggcagggaagat

SEQ ID NO: 431325 - DNA, 100 bp, Homo sapiens
caccatccggctgctggacgactcggagatctcctgccacatccagattgaggaacttcagcaggctttaatagtaaagcaaaatgaagagcttgaccga

SEQ ID NO: 431326 - DNA, 75 bp, Homo sapiens
agccagaacgtggacgggctccatgtgcgctcaggcttccccaggacagtcattttgtttactcattcagccctg

SEQ ID NO: 431327 - DNA, 51 bp, Homo sapiens
ctgctctgagggctgcatagacattgagaaagatcagtctaaagaaaagga

SEQ ID NO: 431328 - DNA, 100 bp, Homo sapiens
agtcccccgagagcgttgctttgatctgggagcgcgatgagcctggaacggaagtgaggatcacctacaggttgggggccgtcccgctcctaaggcagga

SEQ ID NO: 431329 - DNA, 98 bp, Homo sapiens
caggaacatcgcctctttccatcgaacattccgagaatgcgagagaaagagcctccgtcaccacatactgtttgagctcttctctggcttcttgaaat

SEQ ID NO: 431330 - DNA, 90 bp, Homo sapiens
cagaagaggactgggaccgggacctgctcctggacccggcctgggagaagcagcagagaaaggaatccgagcggctggaactcatgaacg

SEQ ID NO: 431331 - DNA, 101 bp, Homo sapiens
ctggaaacctcccactgtggctgcataaggctgaagccgacgtagcttctctgaacagacgcatccagctggttgaggaagagttggatcgtgcccaggag

SEQ ID NO: 431332 - DNA, 75 bp, Homo sapiens
ctacctcttcctctggcccgaagccttcctttatcgctttcagccagaagatcagctgccatgttacttgactca

SEQ ID NO: 431333 - DNA, 100 bp, Homo sapiens
ggaacagtaccttggcttggctcttgacgtggacagaacgatggcactgaatttggaggttctatctaccagaaggtgaatgagaagattgaaacatcca

SEQ ID NO: 431334 - DNA, 100 bp, Homo sapiens
cacagcaccccgggctggcgtgagggccgttgctccagggagaactgcaaatatcttcatccacccccacatttaaaaacgcagttggagataaatggac

SEQ ID NO: 431335 - DNA, 98 bp, Homo sapiens
tgtcttcggtggactccttcggcagtccacccaccgccgccgcctcccagtgcacgtgccggaaggacatggtcaagatctccatggacgtgttcgtg

SEQ ID NO: 431336 - DNA, 88 bp, Homo sapiens
ttcttcccaggcagcaagtgcaattaacagtgatgaatcaccaacaccagcagcagatggcccccagtaccctgagccagcagaacca

SEQ ID NO: 431337 - DNA, 89 bp, Homo sapiens
ggggctacaggcgtgtgtcactgcgcccaggcctccatgaagaagtggactattctgagaaactgaagttcagtgatgatgaagaggag

SEQ ID NO: 431338 - DNA, 100 bp, Homo sapiens
aaaactcccaagatcagtcaactttacaagcaagcatctggaacaatggtgtatgggttgtttatgttacaaaagaccatggaggagaagaaagcattca

SEQ ID NO: 431339 - DNA, 83 bp, Homo sapiens
aacccaactcctcataaaattttgcttgatacaagatttgagttgccttttgcttcctgcctgacacagctcacttcaagaag

SEQ ID NO: 431340 - DNA, 87 bp, Homo sapiens
gcattttcccagcggcgctgctgcccctgttgctgaccatggtccccttcccctgagcccatctacaatagcgaggggaagcggctt

SEQ ID NO: 431341 - DNA, 75 bp, Homo sapiens
ccctgtctctgccctcctggcgggcccggcggctctcactatccaggaaagaccacagcaagattctttcattcg

SEQ ID NO: 431342 - DNA, 75 bp, Homo sapiens
tcagagaaagcaaaccaggaggaggacatccctgtgaagttggggaatggcggtcaatgtgtattctacctcgat

SEQ ID NO: 431343 - DNA, 74 bp, Homo sapiens
caagattaatcaatgtcaactgacagatggactagaggcttttaccagatttcttaaaactgaattcagtgaag

SEQ ID NO: 431344 - DNA, 50 bp, Homo sapiens
ccgctgcgctaggggaagcgggcagtgtttgatgatggtgatgagcgaac

SEQ ID NO: 431345 - DNA, 97 bp, Homo sapiens
aaccatgcaacagtcaaccttctgagctttcttcagagacctcaggtgtcatggagaaactccagctgggcccagagattctgcagcgggaaaatcc

SEQ ID NO: 431346 - DNA, 83 bp, Homo sapiens
gcggaaaggagaagtcgtagacagcccaaacaaattcgaatatcttctaaaacaggaatacctctcaatgtcttaccaaagaa

SEQ ID NO: 431347 - DNA, 75 bp, Homo sapiens
ggtgctgcagaaccagatccgggagcacgtcatcgccatcgaaggggctatacaaagcggaccagcggtttgggc

SEQ ID NO: 431348 - DNA, 98 bp, Homo sapiens
ggggctgctggcggagggtctgaggcggcgcggccatggctcacctccggggatttgccaaccaggtacaccaggggttggaaaaaccacactaggca

SEQ ID NO: 431349 - DNA, 97 bp, Homo sapiens
cgagctgcggttcaaggagcccttaccggaatacgtgcggctgggaaaatgtttcaacgtgcgcaagagttgcggtggcgggcagaggactaccaca

SEQ ID NO: 431350 - DNA, 75 bp, Homo sapiens
ttggaagcaaaaaaagcccagtggaggaaagagctagttcatgaggacaaggaaggaatttactgaagaagtaag

SEQ ID NO: 431351 - DNA, 100 bp, Homo sapiens
gccgggacccggttccccggcccacagtgggggtgtgcaaacccgagagaactggggcatatcgatgcatttacttcaaaactttttctactggaagaaa

SEQ ID NO: 431352 - DNA, 100 bp, Homo sapiens
cgcgccgccgctgccgccgccgcgcgcgggaccttaaaggctttgatccaggagagaaatactttcataacacatcatggggtgatgtttctctctggga

SEQ ID NO: 431353 - DNA, 82 bp, Homo sapiens
tcattcatttttgatcaggagaaagaagacagccatcatttgaaaggacttaaccaccaccatgtcgagcaaaagaacaaag

SEQ ID NO: 431354 - DNA, 58 bp, Homo sapiens
ttctgtggccttcagcactgataagaatctattattgagtgacagaaggaagtcaagg

SEQ ID NO: 431355 - DNA, 75 bp, Homo sapiens
ctcgcgtcctgctcctgtaacaaaggtctcctctgagcctccggcctccataagacccaaaacagatgacacctc

SEQ ID NO: 431356 - DNA, 80 bp, Homo sapiens
ctgccgtccatgcggaagatcgtcgccacctggatgctggaggctctgacgcccgctctgcggcttcggtgtttgaacag

SEQ ID NO: 431357 - DNA, 83 bp, Homo sapiens
ctgcggcagaagccgagttcaacatcctcctggccaccgactcctacaagtgttatagttttgccgctggactcttccctccc

SEQ ID NO: 431358 - DNA, 100 bp, Homo sapiens
ctcaagactacctcattctcactggctcggagactcctgcctgctgagttgatcacagccgagttaaattgacattaaagactccttcacaagattcaga

SEQ ID NO: 431359 - DNA, 112 bp, Homo sapiens
gacatgttcacgcacgggatccagagcgccgcgcacttcgtcatgttcttcgcgccctgcccgcggcgccatggctcacgtcggctcccgcaagcgctcgaggagtcgcagc

SEQ ID NO: 431360 - DNA, 75 bp, Homo sapiens
cggagccaagggcttcagcctgagcgacgtgccccaggcggagatctcgggcgggaggcagcaccgggctcttga

SEQ ID NO: 431361 - DNA, 96 bp, Homo sapiens
aggccttctccaggccctggttactgcagggccatgtccgcacccacacaggtgttggagcgggccggagagaagtagagtgggctgcgaggagaa

SEQ ID NO: 431362 - DNA, 98 bp, Homo sapiens
actgagtccctagtcgaattcccggaaggagtggagcctgtcatattgatcttctggtgaccccacttctcgctgctcatgccgctgggactggggcg

SEQ ID NO: 431363 - DNA, 90 bp, Homo sapiens
gatgcatatactgagcaactgcacaatgaggaggagaatgaggagaagctggagtatttcttcctcattgtcttctcgattgaagccgcc

SEQ ID NO: 431364 - DNA, 100 bp, Homo sapiens
aagactgcgttccagccccagttccccggcagcgggacccggcgaagacgcgaccgcggcgcgagtcaccatggcagctatcaatggtgtaataccacag

SEQ ID NO: 431365 - DNA, 98 bp, Homo sapiens
gtgtctgaggtgaccgtgggtgtgtcggtgctggccgagcgctgcaagaagaacaatggcaaggctgagttctggacctgtgcacaccgatatgaggc

SEQ ID NO: 431366 - DNA, 80 bp, Homo sapiens
ccagacaaccttcttttggacagcaagtcttcccaagggattgttgaagaaacttctgaagagggaaactctgtacctgc

SEQ ID NO: 431367 - DNA, 50 bp, Homo sapiens
aagcagtggaaacaatgcccagatgctccagaccttgtatgattacttct

SEQ ID NO: 431368 - DNA, 75 bp, Homo sapiens
gacctccaaggaagccacgtgcagacatctacaaccttcgatctcctgacgaggtgtattatctcatatactttc

SEQ ID NO: 431369 - DNA, 82 bp, Homo sapiens
ggatcaaggacggatgatgaagtagtacagaggatgtacatttttggtggatgggtcccacataagggggaaaatactgaga

SEQ ID NO: 431370 - DNA, 96 bp, Homo sapiens
gccccaaaagatgactacaaacataggatgttttggcgagagatgtattcagtggaggaagctggttatggaggttttgatgactatggtggctat

SEQ ID NO: 431371 - DNA, 102 bp, Homo sapiens
ctcgggggccgctctgggatcccggccaccagcaattgtccgacaagttggatggcttgaggactggtactaaaaggaaacgtgactgggaggccattgcca

SEQ ID NO: 431372 - DNA, 83 bp, Homo sapiens
cttccccacgcaaccccagatccatttacactttacaaagatggctgtgccacccacgtatgccgatcttggcaaatctgcca

SEQ ID NO: 431373 - DNA, 97 bp, Homo sapiens
tcaagcttaggaccacccaccatgcctatccaggaatctcttcacaccttctctttggagcccttaatgatacgacgaaccccaagtgtttcagaac

SEQ ID NO: 431374 - DNA, 100 bp, Homo sapiens
aagagtctccgcggtggaggtctgcgttgctcttgcttttcctcgctggggtgtacgtgctgggcctaaaggagataacatttatgaatggagatcaact

SEQ ID NO: 431375 - DNA, 100 bp, Homo sapiens
ctgggcatggagcaccaggcggtggtgggcgccgtgaagagccttcaggcgctgggcgaggaatgggtaccacagaccatgtcatcgtcctggcgtccac

SEQ ID NO: 431376 - DNA, 83 bp, Homo sapiens
ctaacttcagcggtggcaccgggatcggttgccttgagcctggccagaagcggactcctagaagaggggagcagcaaggatgg

SEQ ID NO: 431377 - DNA, 78 bp, Homo sapiens
aagatcaaaattgataagtgtgcttaagggttatgtggtccgaatcagtggtgggaacgacaaacaaggtttccccat

SEQ ID NO: 431378 - DNA, 72 bp, Homo sapiens
tgaggatgctggagtgatttgctcaagtgaccattgtgaggtagatattttgttctaattttccagatgagg

SEQ ID NO: 431379 - DNA, 100 bp, Homo sapiens
caatcaagtcacctgacacatttgtgagaactatttatgcagatgacgaagatgatcctgcagaagctgaaaaggagggaaatgaaatggagggtgagga

SEQ ID NO: 431380 - DNA, 154 bp, Homo sapiens
agaaattaccatttcatacttcacagaatggaggtttcagcagccaaagccccaagtgccgcagacttgtctgagattttgtgttggtgttgaagaggagaaggctgctgacattgacctctaccactgccccaactgtgaagtcttgcatggg

SEQ ID NO: 431381 - DNA, 90 bp, Homo sapiens
ccgacacgctgcctgctgttgccacactcctcatggatgtcatgtcctacttcaatgggcaaatactgtggtctggggttgcaaatgaac

SEQ ID NO: 431382 - DNA, 100 bp, Homo sapiens
agaacattgggaaggacctgccaaaatcctgccttgctaaagtccagggatcgcttacacctgagacgaactacagaacagcacgtaccagaggtggaag

SEQ ID NO: 431383 - DNA, 87 bp, Homo sapiens
aggctggagggcattttcccagcggcgctgctgcccctgttgctgaccatgatacttcgttgaaagttgccaccctgatgtaatcca

SEQ ID NO: 431384 - DNA, 74 bp, Homo sapiens
gagcaccaggatctcgggctcggaacgagactgcacgacctagaggatcaagacataatgggagcatttttaga

SEQ ID NO: 431385 - DNA, 100 bp, Homo sapiens
ctgctcgcggttagcccgtcagtccctgctctgtgcgcgcctccatctgggccatggatgggtacatgtcccagagcaagcacacggaggcccgggagct

SEQ ID NO: 431386 - DNA, 80 bp, Homo sapiens
gtaaccaaatattatggatcctatctgaagcttcttaatgaagaggataactcagaatcatcggctatagagcagccacc

SEQ ID NO: 431387 - DNA, 50 bp, Homo sapiens
cctccccaggccgcctccgcccgtgaagtccagcctagggtgaatgtttc

SEQ ID NO: 431388 - DNA, 90 bp, Homo sapiens
tgggttcttggtctcactgagttctagaatgaagctgcagaccctcgcagtattgttgcagcatctggcagtgagactgaggatgaggac

SEQ ID NO: 431389 - DNA, 82 bp, Homo sapiens
tgagccgactgcggtggtcaagagacctgcctagagctggaacgttacctccagagcgagccctgctatgtttcagcctcag

SEQ ID NO: 431390 - DNA, 100 bp, Homo sapiens
cagacttcgctcgtactcgtgcgcctcgcttcggtctcctctgagcctccggcctccataagacccaaaacagatgacacctcttcccagtcccccgcgc

SEQ ID NO: 431391 - DNA, 98 bp, Homo sapiens
accaagatgaaacgcatgagggagacccgggccctgcaaagccacagctccccagagggcaaggaggaacctgaacccctatccccggagctggaata

SEQ ID NO: 431392 - DNA, 121 bp, Homo sapiens
ctgggagccttttccttcggagcagcagccctgtccggcatctgtcttgagctcccagcaagtgtaaacaggaacatcgataagtagtgtaaaaacttgcacaatgaaatccgaagccaag

SEQ ID NO: 431393 - DNA, 50 bp, Homo sapiens
ctctttgccgaaatgctagagaaatggaagaggagcaggacttggatggt

SEQ ID NO: 431394 - DNA, 98 bp, Homo sapiens
gtgaacttcgaccacttccagatccttcgggccattgggaagggcagctttggcaagattcagcgccctataaagaccagctgtcctcgaaggaacaa

SEQ ID NO: 431395 - DNA, 100 bp, Homo sapiens
tgagagatggaacccgaagaagaaaggattcgttacagccagagattggaatcaccccaatgctacagctgatccgggccatcctgaaagtccctgaaga

SEQ ID NO: 431396 - DNA, 100 bp, Homo sapiens
ctgccaccattgctgaacggagaggtagccatgatgccccacttggtgaatggagatgcagctcagcaggagtacttgattcttcagaaaacctccaaag

SEQ ID NO: 431397 - DNA, 78 bp, Homo sapiens
taaaagccacccaggccttggtcctagcacccactcgagaattggctcagcagagcttggcagagctgagagatcagc

SEQ ID NO: 431398 - DNA, 90 bp, Homo sapiens
ctggagtctctgtgtctgagcatgacagaacacgccttgggtgtcttctcaagtcttaggattgcagcaacacgctcggctgcccaaacc

SEQ ID NO: 431399 - DNA, 96 bp, Homo sapiens
cttggtgtccaacagagtctaggctgggttcattacatgattcatgagccaggtacagagtgaagacagtgtcctcctgtttgttattgcatggac

SEQ ID NO: 431400 - DNA, 75 bp, Homo sapiens
tgcctctgaccagcatcgtctgtaaagcttcttccagaccagctggtcttgcttctggagcatctcttggagcag

SEQ ID NO: 431401 - DNA, 75 bp, Homo sapiens
gctacgccagcggcgtcgagaggaccatcctgggtgctggccctgtgctggaggaaatttccagaactctttgca

SEQ ID NO: 431402 - DNA, 100 bp, Homo sapiens
tctcagaactgttccttcagccaaagaaacaagccgtggaataggtgtatcaagtaatggtgcaaagcctgaaaataatgcatatactgccatgtcagat

SEQ ID NO: 431403 - DNA, 100 bp, Homo sapiens
tggctggcttcagtggaccaatccatcttcggttgtgaatccggcccggaatgcagccaccccttagagcaaccccccttgctgctcgtgccctgctgtg

SEQ ID NO: 431404 - DNA, 82 bp, Homo sapiens
attcgagtgaccgagaccgcggccgggaccgagggtctgcgaggaacagaagtgcgaggaggaggtcttcccgctggccatg

SEQ ID NO: 431405 - DNA, 82 bp, Homo sapiens
tccccctcccccaccatcagcacccccgaaaccgatctgctcctccgtataaaggacatcagtcatttcttaatgcaagaca

SEQ ID NO: 431406 - DNA, 76 bp, Homo sapiens
aaaatcttagctctctcaatctctgtctgaactggatcataaatgacagtgatgatgatgatgattttgatgatga

SEQ ID NO: 431407 - DNA, 124 bp, Homo sapiens
agaattacaaggtgagatcagccgcccggccaagctatcttctcgctagcaggtgaaaggtgtagcagtcactcggcctacacccacagcatcgaccttgtgaacccagcgacctgactgcctt

SEQ ID NO: 431408 - DNA, 95 bp, Homo sapiens
gacatgcccatgcgagtacctgaggaaggatgcttggatattaattcatctgtgaaaggggctcgttttgtcagattctgtgatgcattcaatat

SEQ ID NO: 431409 - DNA, 100 bp, Homo sapiens
agctttgataaatgaaatcttcctaagtatagtattggatgaacgaatatacctcatccattggaattggagtttttcattcaggaattgaagtctatgg

SEQ ID NO: 431410 - DNA, 98 bp, Homo sapiens
tatccctcctgatgatgaagactgaaggtgtagactcagcctcactctgtacaaaatttctctgcaaagaatgtccaaaaattcatattcacattgat

SEQ ID NO: 431411 - DNA, 75 bp, Homo sapiens
tgagccaggaatgcaggatggcggcggtgaagaaggaagggggtgctctgagggtctcctatggacagaagtgcg

SEQ ID NO: 431412 - DNA, 98 bp, Homo sapiens
accatttacaactcggactcttgacaaggcaacagttctgggtgaatatgctttacccaaaggagatgcttctggctggcacacctggcttcccctcc

SEQ ID NO: 431413 - DNA, 100 bp, Homo sapiens
cttttgcggctctgcatagaggcagacctccagaactacctgtaaattatgtgaaacctccaaatgtggagccctatgagtttgtctctctggaatggct

SEQ ID NO: 431414 - DNA, 98 bp, Homo sapiens
ggcgctgctgctcgggctgctcttggaggattcaggagcagttccagaaaaatcccgacagttacaatggtgctgtccgagagaactacacctggtca

SEQ ID NO: 431415 - DNA, 90 bp, Homo sapiens
cttatttatccagaagattgatcatcatatgggtttatctctcagaagatagaagtgtgcaagaagtactacagaagcatttcaatatca

SEQ ID NO: 431416 - DNA, 73 bp, Homo sapiens
gccaaggaactgggatttcaacctgaaagtggaggctgcgaaaatagctgggatctagcaattgggaggcagc

SEQ ID NO: 431417 - DNA, 98 bp, Homo sapiens
tgcggagagactccttgggggtcgagcacataacggggttcgggtgtctcgtgtgtgaacatcacaggtcctctcagggtgcgccatcattgtccgag

SEQ ID NO: 431418 - DNA, 132 bp, Homo sapiens
gcaaactctgcctgtgtgagcagtctctggacaagatgaccacactccaggaatgccagtgcatcttttgcacagctactgggaagaagagcaggtcagcagtccaaatattctacgacttatttatcaagg

SEQ ID NO: 431419 - DNA, 101 bp, Homo sapiens
tatcgctaccctccgaagtccgatgacgtccggttgtttgccttcgtgcgcttcaccaccggggatgccatgagcaagaggtccaagtttgccctcatcac

SEQ ID NO: 431420 - DNA, 74 bp, Homo sapiens
aagcgggcgagggcagcgccctaagcagatcaccaaggggaagctccatggctccatcgatgtccggctgtcgg

SEQ ID NO: 431421 - DNA, 50 bp, Homo sapiens
ccgcctacaggagtatgatgcaagttcagccaggccctggccatccggag

SEQ ID NO: 431422 - DNA, 75 bp, Homo sapiens
cacaaagggaggagctggactccatcctcttcctttttgaagcctcaggagtgcaagtagctgatgaagtatgtc

SEQ ID NO: 431423 - DNA, 75 bp, Homo sapiens
atcagtgtttccatcgcttgtggcatcctgctagctgccctgcagcttggaggtattatagcagaagtgaatttg

SEQ ID NO: 431424 - DNA, 101 bp, Homo sapiens
cccagatattacactgtcaaaactttacaagttaattgaagagtcttgtccacagctggcaaattcagtgcagatcaggaaagtggagaatgaggacatga

SEQ ID NO: 431425 - DNA, 100 bp, Homo sapiens
gttacagatccaagaggaggaggagacccttcaggacgaggagctccaggaggccagagctctactgaagcggcggcggccccgggggccagggggccgg

SEQ ID NO: 431426 - DNA, 96 bp, Homo sapiens
ggaaaactgggccaaagcagtgaaacgctccatgaattggatctggctttgctgcccacgctggagtgtggtggtgtgatcacagctcactgcaac

SEQ ID NO: 431427 - DNA, 83 bp, Homo sapiens
cgatcttcttccacatctccagcaagttctcaagctcagagacgatggatgatgctgaccctgaggaaagaaactatgacaac

SEQ ID NO: 431428 - DNA, 75 bp, Homo sapiens
ggctgcaagactgtcgacctaaagcctgactggggcaagggaaatgtttcaacgtgcgcaagcgttgcggcggcg

SEQ ID NO: 431429 - DNA, 100 bp, Homo sapiens
cttacatgggagcagcttaagcagtttcatgccactcactatcacccaagcaatgctagcgttctcccggggaagtacttggaagagatcgccacacaga

SEQ ID NO: 431430 - DNA, 100 bp, Homo sapiens
ctgagccgcgccctaatgaatgggaaaaacgacgtatcacacctctgtccctacagacacaagggatactgcttctaaactaggacccatagaagctatc

SEQ ID NO: 431431 - DNA, 100 bp, Homo sapiens
cagctgcgctgtcctaaatgtggcgacttgtgcacacatgtagagacctttgtatagatttaccgcattgtttctcagaagcaaatgtcagacagacgcg

SEQ ID NO: 431432 - DNA, 100 bp, Homo sapiens
gaagtggctgtagggagcatagctgctacactgaagatgaagcaaggcccaatgacccaggcggaaagatactattcaagtccagtacatcataatgcag

SEQ ID NO: 431433 - DNA, 100 bp, Homo sapiens
ccggacatcaagtacccgctgcggctcatcgaccgggaggtcatcatccaccggctcctgagcatgttccaccctcggccctttgtgaagacccgctttg

SEQ ID NO: 431434 - DNA, 98 bp, Homo sapiens
ggaaccgccgggccgaacagcatgacgtccgctttggagaactacatcaaccagatgaattacttactgagccaaagcaactcccagaaaaatactct

SEQ ID NO: 431435 - DNA, 99 bp, Homo sapiens
tgaagacggaggtgcccaaggtcagaaggaagcaccacacagagacaatgcagatcttcgtgaagactctgactggtaagaccatcaccctcgaggttg

SEQ ID NO: 431436 - DNA, 75 bp, Homo sapiens
cttgggcgaggccgggcggcgcttctgtcctcctactcggacccgcaggtcctgggaactccaacaagggagcaa

SEQ ID NO: 431437 - DNA, 100 bp, Homo sapiens
cggccagacgccgacgtcgaccagcagagactggttcaacttgcctcgaaccctgtgctggatgcctggtacggtgctcgtgactgggccttgaaccacc

SEQ ID NO: 431438 - DNA, 100 bp, Homo sapiens
tatcagtatgaacaacattactcagttgccagaagatgcatttaagaactttccttttctagaagagctttgtcacaggtagtactgatggaattggaaa

SEQ ID NO: 431439 - DNA, 83 bp, Homo sapiens
attcaaggagatgaccgatggatgtctcagtggttataaactgttttcaccttcaagattcttgagagataactacacatacc

SEQ ID NO: 431440 - DNA, 100 bp, Homo sapiens
cgagaccgcggcgtctccagcctcggtaccatggccgggatcatcaagaaacaaatcttgaagcacctctccaggggttacctgtatggcgggctggagt

SEQ ID NO: 431441 - DNA, 82 bp, Homo sapiens
ggcggccgcagcgagtggcgagtagtggaaacgttgcttctgaggggagcccaagggtacccagtgtgttgaacaaattcaa

SEQ ID NO: 431442 - DNA, 90 bp, Homo sapiens
gagaactgggtccttagcactattttacagaaagccctctgattctgttcacattacaaatgatgatgaaagatttctacatcatcttat

SEQ ID NO: 431443 - DNA, 96 bp, Homo sapiens
gtttttctggtctgaccgtcgcaaccctcatgaagtacaaccagcatatgctacaagaaacacccgccgggcagcagaggtctggatggatgaata

SEQ ID NO: 431444 - DNA, 75 bp, Homo sapiens
gtggacattctgggtattgtgtgccaactgcggctagacagtgtggacaacagtgagtatatgcggaatggagac

SEQ ID NO: 431445 - DNA, 97 bp, Homo sapiens
aactcagcaacagccacaacagagggttggcaacaatgagtaaaccagaattaaaggaagacaagatgctggaggttcactttgtgggagatgatga

SEQ ID NO: 431446 - DNA, 82 bp, Homo sapiens
gaagcagccgatccagcctgcggagcctgtggggcagatatggctcgtggacagcagaaaattcagtctcagcagaaaaatg

SEQ ID NO: 431447 - DNA, 75 bp, Homo sapiens
tcagcacccggggagctgactccattgcatgtgggaccttcagccgtgaactggctttatcctgtggataaacgc

SEQ ID NO: 431448 - DNA, 76 bp, Homo sapiens
cagtgaagagctgctgaagtacatgcttcatagtccttgcgtctctctattttcagctgaactctcatctctcaac

SEQ ID NO: 431449 - DNA, 93 bp, Homo sapiens
ccaggatgcgctgagccctacaacacccccagcggccgccggctcccccacgagacaatgcagatcttcgtgaagactctgactggtaagacc

SEQ ID NO: 431450 - DNA, 90 bp, Homo sapiens
gcgagaaagagcgcgagcgagcgaggcctgggccttgcctgagacatgtcatgctgcccaaggacatagccaagctggtccctaaaaccc

SEQ ID NO: 431451 - DNA, 90 bp, Homo sapiens
gctcacaagataatagccagctccccagaaatgaacctgcccacggtgtccgcgctcagggtctcattcaggaacgtcgcctgataacac

SEQ ID NO: 431452 - DNA, 90 bp, Homo sapiens
gcacgtttgcagcggaaattcaggaaaccatcacagcactcagagagcaggtgatgggcagaggcttcagtgtccccttcgcctccgcag

SEQ ID NO: 431453 - DNA, 137 bp, Homo sapiens
gctcaggttccaatgatgtccccaaatggttctgtgcctcctatctatgtgcctcctggatatgccccacaggacccagatgatgtggtaccagttggccaaagaagagcctggtgttggtgcatgtgctttggact

SEQ ID NO: 431454 - DNA, 75 bp, Homo sapiens
gaaacgaagtcatctgtacccctggaaacaaggtggagtattgctcctggaaaatccaaaaggtgacaataggtt

SEQ ID NO: 431455 - DNA, 100 bp, Homo sapiens
tgtcagtagcagaagctactctccagaaaggagcaaatcatactctttccatcagtctcaacatagaatgcttagatgagtacgaagatgatgaagcagg

SEQ ID NO: 431456 - DNA, 100 bp, Homo sapiens
caggcctcgtgccgttacggccatcacggcggccgcagtggcgtcctggagccctcctcagggagtaccctgacttctaccggaagctctacggcctctt

SEQ ID NO: 431457 - DNA, 100 bp, Homo sapiens
ccctgacatccctaccccagtgctcagcctttccatgctctccatcacctatcacagcagcatccgctctctggagatgtggacgagtgctcactagcag

SEQ ID NO: 431458 - DNA, 74 bp, Homo sapiens
gacaggcagagtgctgatgtgaaaaataccacgacaaaaccaccctatctgaacagcagaagaagcaacaggag

SEQ ID NO: 431459 - DNA, 117 bp, Homo sapiens
acatcatttaaggaagttgttcaaagagccttaggacttgcacatggaagaagcattgcatgcatttattcagccagagattctggatggcccaaatcagtatttttgtgaacgttg

SEQ ID NO: 431460 - DNA, 73 bp, Homo sapiens
atcctagagcatctgaaaaccctggccaaggacgaggaaacagacacggacttagaggtggtgttggaaaaaa

SEQ ID NO: 431461 - DNA, 100 bp, Homo sapiens
tgaagtgcttgatatcacagaggaaactctgcattctcgcttcctggagaatgaagatgagctttgcgttgactttcaggtcagcaaaaggccgttggat

SEQ ID NO: 431462 - DNA, 51 bp, Homo sapiens
actcatccccgggagtgttgaatcccccggaccgtccaaagctgtcagccc

SEQ ID NO: 431463 - DNA, 82 bp, Homo sapiens
aaactgaggcctggagaggttaaagagacccgttcagagtcctacagtggcagaacaaaatccagtctcatagcagaggaga

SEQ ID NO: 431464 - DNA, 75 bp, Homo sapiens
ctttatgtcagaaacacaaagcagcccaaccaaaggggattaatgaaaatcaagttccatcctcagacaagaggt

SEQ ID NO: 431465 - DNA, 101 bp, Homo sapiens
agcaccatggggaagcgggacaatcgggtggcaatgaatcgctccctggctaatgtgattcttggaggctatggcaccacttcaacagctggtggaaaacc

SEQ ID NO: 431466 - DNA, 100 bp, Homo sapiens
ccagctttcccccgagggtcaacgagaaagagatcgcgggtccatatggaatatttgctggtagggatgcctccagaggactggccacattttgcctaga

SEQ ID NO: 431467 - DNA, 99 bp, Homo sapiens
ggaagctgctagagggcgaggagaaccggcggaaggtgctctaccagcgtgcacccaggaatatccaccgccatgtgatcctctctgagatcaaggaag

SEQ ID NO: 431468 - DNA, 49 bp, Homo sapiens
ctaatgttatcgcggaatgatggtggaaaaggagggagctgctctcagg

SEQ ID NO: 431469 - DNA, 80 bp, Homo sapiens
ttgggacccaccgctgccctcagctccgagtccagggcgaggtatctcttccaaatgcacaatgaaggagttctcatcaa

SEQ ID NO: 431470 - DNA, 100 bp, Homo sapiens
aaggaaggcccggtgcgattgcatgaggatgctgaggctgtcctgtcctcgtccgtctcatcaaaggctcttgcagccaatgccggaacaggatttgctg

SEQ ID NO: 431471 - DNA, 98 bp, Homo sapiens
agagctggcctggagtccgcggctggccgcgtgagtaggcaaaatttggtttctctaatattactggaattgattactctccttctgcaattcagctt

SEQ ID NO: 431472 - DNA, 90 bp, Homo sapiens
caagttcatcatatgcagcactcaaaatggcagcatccttcggacctcaccacgcggagctcaggtgcccctgtgatccaggtcttctac

SEQ ID NO: 431473 - DNA, 73 bp, Homo sapiens
accaatcacagctcatgccgaggtggaggtagtggaggaagctaaatatggggagattgttaacattaatctc

SEQ ID NO: 431474 - DNA, 83 bp, Homo sapiens
atttcgtggttcacccgctgccgggcaccgaggaccagctcaatgacaggagctggtcaggctcaccatcgagaagcagggac

SEQ ID NO: 431475 - DNA, 74 bp, Homo sapiens
gggttgtgatggcccaggttcttcaaaagatcccccaaatacatcaagatgtttgtactggatgaagctgacga

SEQ ID NO: 431476 - DNA, 75 bp, Homo sapiens
ctcagctctagggccctctgcacactggcccccccagctgacaatggcaccatgcatctttgggactggagaact

SEQ ID NO: 431477 - DNA, 82 bp, Homo sapiens
ctcgcgcgcgaccgccgaatcgctcctgcagcagagtgccctctggtggtcagaagatgctgtgctgtctcgttaggatgaa

SEQ ID NO: 431478 - DNA, 98 bp, Homo sapiens
agagatatctgcaatgatgtactggaatctataacattgaaggatgtagctgtgaacttttcaagaggagagtggaagaagctggagccttttcaaaa

SEQ ID NO: 431479 - DNA, 97 bp, Homo sapiens
ctgcaggcccgctatcccaatcgctttaagctctggttcactctggatcatcccccaaaaggcgttgacccggacgacacctataatgagaccccct

SEQ ID NO: 431480 - DNA, 83 bp, Homo sapiens
agagattgatcaattcaatgatgatacatttgggtcaggtgcagttgcacacacacatccctaggttaatacctgtcataaca

SEQ ID NO: 431481 - DNA, 98 bp, Homo sapiens
gtgcctggcggcgtgggcccgggcgagcagccctgcctccggacggtgccgtggccagcacagaagtgaagatgaagttacaagaatttgtcctcaat

SEQ ID NO: 431482 - DNA, 75 bp, Homo sapiens
tccactggcatcaccgacacactatgctccctccaaagccataacaacgaacttgatgcaagtgataggtttgcc

SEQ ID NO: 431483 - DNA, 80 bp, Homo sapiens
caatgattaatccagtgccgcctggaggcagccggtccaacgttttaaaatcaaagatgggaaaatcggagaaaattgcc

SEQ ID NO: 431484 - DNA, 100 bp, Homo sapiens
actgtgattgcggccgaggctgagaatcaccgcttagaagcctcagctgtgattggctaccttctcccatcaccccagctgtctttagccaaagcctgtg

SEQ ID NO: 431485 - DNA, 101 bp, Homo sapiens
gcacaggaagagccagtggcagcgccagagccgaagaaggtatggaacctggctaactgcaagctgaagaccaaccacattggccacacaggctatctgaa

SEQ ID NO: 431486 - DNA, 100 bp, Homo sapiens
acacatactgcatggacacagaaatctggtgactggaatccagcttaaccccaacaaccatctacagctgctctgttaaaagcgaaaatgaaacaattgc

SEQ ID NO: 431487 - DNA, 50 bp, Homo sapiens
ctttctggtgggaggcttgattggtgatgagacaaaccatgcttctgcca

SEQ ID NO: 431488 - DNA, 100 bp, Homo sapiens
tgatgaggttgatgccaactccttcttcccacgctgctactgcctgggggctgaggatgacaaaaaagccttcataggagccatgtggctagaaatcctc

SEQ ID NO: 431489 - DNA, 80 bp, Homo sapiens
tgaacccaaacatagacttgcaagagtccgaataaatactggaaagaataccactttaaaattcagtgaaaagaaagaag

SEQ ID NO: 431490 - DNA, 110 bp, Homo sapiens
ggcgacggcgtcctcaggagctgtggggtcccctgctagaagtgggggactcggcgggactattgggaagaagttacctgcaactacagcaactccagactcatcaaaaa

SEQ ID NO: 431491 - DNA, 75 bp, Homo sapiens
ttccataaatgatgctcctgttctcattagtcaaaaagcaccaagtatagatgagaaagtagatcttcattttat

SEQ ID NO: 431492 - DNA, 75 bp, Homo sapiens
ccaggatctcgggctcggaacgagactgcacgaaccttctgaggaaaggaggccatacagaaattgaacctcagc

SEQ ID NO: 431493 - DNA, 97 bp, Homo sapiens
gtggtatctcagttagaggaggcagaagatttctggccagtggagagaggaattcctcaagacaccattccaggcatccgtgtcattctggacctta

SEQ ID NO: 431494 - DNA, 82 bp, Homo sapiens
tcctctccgaaatcgacagcctcaaccttcataaacagccacccgtgggaaactgttacaacagctgcaatgcagaaatacc

SEQ ID NO: 431495 - DNA, 100 bp, Homo sapiens
ctaccaaatgttgaagttcttcaagaatcagtcctttggagatcatgtttcaggcatatggagacaaacagggaccactgcatggaatgttaatcaatac

SEQ ID NO: 431496 - DNA, 100 bp, Homo sapiens
gcggcgattactacacttcgcccagctcgcccacgagtagcagccgcaactggacggaggacatggaaggaggccaagactaaggggctgcagagcgggg

SEQ ID NO: 431497 - DNA, 83 bp, Homo sapiens
gtcctcctgtcatctctctggataagatggagcaagagagatctcaggaaacaggctcgacagctggaaaatgaacttgacct

SEQ ID NO: 431498 - DNA, 101 bp, Homo sapiens
tgctgtcctgtcctcctggggccaccacttttagggccatcattgtccggaatggtgaaatcattccaatgtcccgggagtttaccccggagactgagcgc

SEQ ID NO: 431499 - DNA, 74 bp, Homo sapiens
gctgtctggaattggcaacatctctgagagaaagtttcctacactactgaggtttaggggcactgtgaagcaaa

SEQ ID NO: 431500 - DNA, 101 bp, Homo sapiens
gtaaaacttgctgctgatgaagatgatgacgatgatgatgaagaggatgatgatgaagatgtgaacgagctctatgtcgatgacccagacaaggacagcgg

SEQ ID NO: 431501 - DNA, 51 bp, Homo sapiens
catcagaagacctacgccttcagtaccaaaccctgctgcagctgcaattcc

SEQ ID NO: 431502 - DNA, 50 bp, Homo sapiens
tgattattgtatttcgccgtcaacagatgtggaattagaagaagctatta

SEQ ID NO: 431503 - DNA, 100 bp, Homo sapiens
tgcatttgtgtatgaagctcaagatgtggggagtggcagagagtatgcattaaagatgaagggcgccctaatggagatcatccagctcgccagcctcgac

SEQ ID NO: 431504 - DNA, 100 bp, Homo sapiens
ctcaaacagcagcttaaagatcagtatttcatgcaaagacatcagctacttaagcgccacgagaagactatcaagaaatccaagtggtaatgggcgaagt

SEQ ID NO: 431505 - DNA, 75 bp, Homo sapiens
cggagcggtccgcgagccaccgaggcccagagtctcactgtcgcccaggctgcagtgcagtggtgccatcacgcg

SEQ ID NO: 431506 - DNA, 97 bp, Homo sapiens
gcaggagaactcggagctgagcctccaggccggggaggtggtggatgtcatcgagaagaacgagagcggccctcgggaccaaggatcacgtcatgac

SEQ ID NO: 431507 - DNA, 100 bp, Homo sapiens
caagaggaggacagttcgctacacagcaatgcatcgagggaaggggaagactggcagcgggtccggagtgcctttcaaaagaaactaatgaaaccagggg

SEQ ID NO: 431508 - DNA, 100 bp, Homo sapiens
taatacagcaagaaagaccatcaagtttaccagaaccgcttagaaaatgtgcctgagtgggtatgtgaaagccgaaagctagaagttttggatattggcc

SEQ ID NO: 431509 - DNA, 100 bp, Homo sapiens
gggagacgacgctgctgggtccgctgagcggggcgacccgagatcactgtgtccactactatgatcttcgtaacactaaacagccaatcatggtattcaa

SEQ ID NO: 431510 - DNA, 50 bp, Homo sapiens
gtggattccagaggggtgacagcgaaatggcactccacagaaggatgtta

SEQ ID NO: 431511 - DNA, 82 bp, Homo sapiens
ggaatatgccaaggaaaaactggagagcttcatcaaaaatagtgatagctttgataattactggctgaccaacaaagttcct

SEQ ID NO: 431512 - DNA, 96 bp, Homo sapiens
tgctggtgggccgcgtcgaagacatggaccagggctacggagggtggcccagttgaaatccttcccttcctctaccttggaagtgcctaccatgca

SEQ ID NO: 431513 - DNA, 74 bp, Homo sapiens
gaatgaagactgtaaaagaaaagaaggaatgccagagattgagaaaaacctatacctgctgaacgccaccgagg

SEQ ID NO: 431514 - DNA, 74 bp, Homo sapiens
tattttccctcctcaaactgactttgcagccacggagaggttctaagctggtctatgtccatcaccttcttgga

SEQ ID NO: 431515 - DNA, 83 bp, Homo sapiens
cagttggatggcggtgactgcgtggtgtggttcccaacaaaggtcagtttcccttggctgtgggagcccaggagttgtttctg

SEQ ID NO: 431516 - DNA, 51 bp, Homo sapiens
cggaagaccaagatcatcgagatgtgcaccaattccagctggacatcactg

SEQ ID NO: 431517 - DNA, 75 bp, Homo sapiens
aagattttgaggctccttttttggaaatgtctgcagaattttttcaggacactttgccaccatcaccttgacctt

SEQ ID NO: 431518 - DNA, 51 bp, Homo sapiens
gaaaaaagagtcaagacctggcctagggtcttgctctgtcacccaggctgg

SEQ ID NO: 431519 - DNA, 103 bp, Homo sapiens
tgtgattgaaccagacactgatgctcctcaagaaatgggagatgaaaatgcggaggaccctgatgctcccataagacagaaaatgccccttgatgatctggat

SEQ ID NO: 431520 - DNA, 83 bp, Homo sapiens
aggtgaccaaggaggagtacaaggacatcctgcgcaaggccgtgcagaagatttggtcgtattgggcgcctggtcaccagggc

SEQ ID NO: 431521 - DNA, 98 bp, Homo sapiens
cagaaacagccttcttgcatcatatattcattatgttttccgcctaccaaatacttaccctaattcatcatcaccagtttctccagagccaaaaacag

SEQ ID NO: 431522 - DNA, 75 bp, Homo sapiens
ggaagggtggaccactgtgctgtacaataaggaacccagccagccggcggaatgcaagcagcagtaggaagcgga

SEQ ID NO: 431523 - DNA, 74 bp, Homo sapiens
tttcaatgctgcgaaagctgccaaaagtgacatgcagtggcagtatgatcacctcacggctacctatcttctgc

SEQ ID NO: 431524 - DNA, 75 bp, Homo sapiens
acactcagtccctctgtgctccaggactccctcaataatgcctgtagtggtggagacacgcccagtggatgatcc

SEQ ID NO: 431525 - DNA, 90 bp, Homo sapiens
gccgggtcagaaacagctgtgagacactaaagtccccactggacctgagggcactcgctttgctcctgtcagtacacactcccaaacagt

SEQ ID NO: 431526 - DNA, 50 bp, Homo sapiens
ctgcttcaagccctggctcaaaatagtgctggagaatctggtaaaagcac

SEQ ID NO: 431527 - DNA, 96 bp, Homo sapiens
agcttttcacatgtctggttttgcaccatcacagtcaccattttggattcttagcattccctctgaagatattgcaagaaatttgatgaaacggac

SEQ ID NO: 431528 - DNA, 82 bp, Homo sapiens
gttaacttctgtttacatggaactcagacatctgcaaatcatggagggccctcctggacccgggagcggaccctggtggcgg

SEQ ID NO: 431529 - DNA, 82 bp, Homo sapiens
ctgaggctgtcctgtcctcgtccgtctcatcaaaggattccccagctttccgttgcacaaacagtgaagtgacagtccagcc

SEQ ID NO: 431530 - DNA, 100 bp, Homo sapiens
ccctatccagagtttttggagctgtacaggcgcagttgtgtagcagttgagtaatgctggttagctgttaaggtggcgtgttgcagtgcagagtgcttgg

SEQ ID NO: 431531 - DNA, 75 bp, Homo sapiens
attatcggcgctgtgtcagcaggtactgcttaggatgaatatgatttggagaaattccatttcttgtctaaggct

SEQ ID NO: 431532 - DNA, 90 bp, Homo sapiens
acaaactcttgttcccctttaggggagctctttgaccatggctgtgactctctttccacagaatcttgtggaagaagaatgaagttgctg

SEQ ID NO: 431533 - DNA, 100 bp, Homo sapiens
ggcggggcgatgtgtgattaccatggcgaggagtctctgtccgggggcctggctaaggaaaccctattacctccaggtgaaagaaaagatgttgtcccgg

SEQ ID NO: 431534 - DNA, 74 bp, Homo sapiens
agcatgccgaaatggagaggacatctgtcttagagaaacaagctatgaccagggccagagcactcagatctcag

SEQ ID NO: 431535 - DNA, 101 bp, Homo sapiens
ttcttctcagagcaagaaacctaccatactggtgaacacacagtgttcatcccctcaggaggacacagcttttgaggtaccatcttggaagcagagaccag

SEQ ID NO: 431536 - DNA, 75 bp, Homo sapiens
caggcagagttcccgctctcttgtttgcgaggagcgatcgcatttgccttagctattcggaacacagaatctcag

SEQ ID NO: 431537 - DNA, 82 bp, Homo sapiens
gctgaaggccctacgggagaaaaccgggcgcaagaagtccattggaatattaagcccaggagttgctttggggatggctgga

SEQ ID NO: 431538 - DNA, 74 bp, Homo sapiens
aatagatacatggagcccatcagaatggcagatggcttatgaaccacaggctggagtgaagtggcacgatctcg

SEQ ID NO: 431539 - DNA, 75 bp, Homo sapiens
gacaccaatggagatctgcctcaatggaacccctgctctggcctacctggcgcaagccctggatgaaaacatgga

SEQ ID NO: 431540 - DNA, 98 bp, Homo sapiens
agcagctggaggaggatcgcactgctcatcttggccatcactatacacaacgttccagaaacagatgattatgctgagattatagatgaagaagatac

SEQ ID NO: 431541 - DNA, 100 bp, Homo sapiens
tttcatccctcgtcgaaaggattggattggcatctttagagctggaagattatatctggatcaccaccagagcaagccctttctgaagcttcattccaag

SEQ ID NO: 431542 - DNA, 75 bp, Homo sapiens
gaagaaaaggtgtacttgcaagaaacctcaggacttgagtaacagcaacatgttgtcgagatgtccacagaagga

SEQ ID NO: 431543 - DNA, 85 bp, Homo sapiens
gatggatatgtcaggaatgtgattcttcatcttccaagggatttagtgcaagaagaagaacagttgatggaagaaaagaaaaaga
